United States Patent Application Publication US 2018/0305689 A1 - sequence listing, part 36

SEQ ID NO: 502996 - RNA, 19 nt, Artificial Sequence
  Description of Artificial Sequence: Synthetic oligonucleotide
  Antisense strand to SEQ ID NO: 502995
agacacaguguauucuguc

SEQ ID NO: 502997 - RNA, 19 nt, Artificial Sequence
  Description of Artificial Sequence: Synthetic oligonucleotide
  Sense strand starting at position 2061 of SEQ ID NO: 317672
guaccauuuccgggugguu

SEQ ID NO: 502998 - RNA, 19 nt, Artificial Sequence
  Description of Artificial Sequence: Synthetic oligonucleotide
  Antisense strand to SEQ ID NO: 502997
aaccacccggaaaugguac

SEQ ID NO: 502999 - RNA, 19 nt, Artificial Sequence
  Description of Artificial Sequence: Synthetic oligonucleotide
  Sense strand starting at position 2488 of SEQ ID NO: 317672
accaaugaucaacgaguuu

SEQ ID NO: 503000 - RNA, 19 nt, Artificial Sequence
  Description of Artificial Sequence: Synthetic oligonucleotide
  Antisense strand to SEQ ID NO: 502999
aaacucguugaucauuggu

SEQ ID NO: 503001 - RNA, 19 nt, Artificial Sequence
  Description of Artificial Sequence: Synthetic oligonucleotide
  Sense strand starting at position 2524 of SEQ ID NO: 317672
gcguuuggccacucuugau

SEQ ID NO: 503002 - RNA, 19 nt, Artificial Sequence
  Description of Artificial Sequence: Synthetic oligonucleotide
  Antisense strand to SEQ ID NO: 503001
aucaagaguggccaaacgc

SEQ ID NO: 503003 - RNA, 19 nt, Artificial Sequence
  Description of Artificial Sequence: Synthetic oligonucleotide
  Sense strand starting at position 2538 of SEQ ID NO: 317672
uugauuccugaguacuguu

SEQ ID NO: 503004 - RNA, 19 nt, Artificial Sequence
  Description of Artificial Sequence: Synthetic oligonucleotide
  Antisense strand to SEQ ID NO: 503003
aacaguacucaggaaucaa

SEQ ID NO: 503005 - RNA, 19 nt, Artificial Sequence
  Description of Artificial Sequence: Synthetic oligonucleotide
  Sense strand starting at position 2684 of SEQ ID NO: 317672
ccauuugaauuggaugaga

SEQ ID NO: 503006 - RNA, 19 nt, Artificial Sequence
  Description of Artificial Sequence: Synthetic oligonucleotide
  Antisense strand to SEQ ID NO: 503005
ucucauccaauucaaaugg

SEQ ID NO: 503007 - RNA, 19 nt, Artificial Sequence
  Description of Artificial Sequence: Synthetic oligonucleotide
  Sense strand starting at position 2735 of SEQ ID NO: 317672
agagaacaagcuuguaauu

SEQ ID NO: 503008 - RNA, 19 nt, Artificial Sequence
  Description of Artificial Sequence: Synthetic oligonucleotide
  Antisense strand to SEQ ID NO: 503007
aauuacaagcuuguucucu

SEQ ID NO: 503009 - RNA, 19 nt, Artificial Sequence
  Description of Artificial Sequence: Synthetic oligonucleotide
  Sense strand starting at position 2737 of SEQ ID NO: 317672
agaacaagcuuguaauuuc

SEQ ID NO: 503010 - RNA, 19 nt, Artificial Sequence
  Description of Artificial Sequence: Synthetic oligonucleotide
  Antisense strand to SEQ ID NO: 503009
gaaauuacaagcuuguucu

SEQ ID NO: 503011 - RNA, 19 nt, Artificial Sequence
  Description of Artificial Sequence: Synthetic oligonucleotide
  Sense strand starting at position 2779 of SEQ ID NO: 317672
uuggaaagcagugaucagu

SEQ ID NO: 503012 - RNA, 19 nt, Artificial Sequence
  Description of Artificial Sequence: Synthetic oligonucleotide
  Antisense strand to SEQ ID NO: 503011
acugaucacugcuuuccaa

SEQ ID NO: 503013 - RNA, 19 nt, Artificial Sequence
  Description of Artificial Sequence: Synthetic oligonucleotide
  Sense strand starting at position 2785 of SEQ ID NO: 317672
agcagugaucaguaaguau

SEQ ID NO: 503014 - RNA, 19 nt, Artificial Sequence
  Description of Artificial Sequence: Synthetic oligonucleotide
  Antisense strand to SEQ ID NO: 503013
auacuuacugaucacugcu

SEQ ID NO: 503015 - RNA, 19 nt, Artificial Sequence
  Description of Artificial Sequence: Synthetic oligonucleotide
  Sense strand starting at position 2838 of SEQ ID NO: 317672
ccaggcuuugucgauaaug

SEQ ID NO: 503016 - RNA, 19 nt, Artificial Sequence
  Description of Artificial Sequence: Synthetic oligonucleotide
  Antisense strand to SEQ ID NO: 503015
cauuaucgacaaagccugg

SEQ ID NO: 503017 - RNA, 19 nt, Artificial Sequence
  Description of Artificial Sequence: Synthetic oligonucleotide
  Sense strand starting at position 2840 of SEQ ID NO: 317672
aggcuuugucgauaaugaa

SEQ ID NO: 503018 - RNA, 19 nt, Artificial Sequence
  Description of Artificial Sequence: Synthetic oligonucleotide
  Antisense strand to SEQ ID NO: 503017
uucauuaucgacaaagccu

SEQ ID NO: 503019 - RNA, 19 nt, Artificial Sequence
  Description of Artificial Sequence: Synthetic oligonucleotide
  Sense strand starting at position 2884 of SEQ ID NO: 317672
gucugagguagccagaaua

SEQ ID NO: 503020 - RNA, 19 nt, Artificial Sequence
  Description of Artificial Sequence: Synthetic oligonucleotide
  Antisense strand to SEQ ID NO: 503019
uauucuggcuaccucagac

SEQ ID NO: 503021 - RNA, 19 nt, Artificial Sequence
  Description of Artificial Sequence: Synthetic oligonucleotide
  Sense strand starting at position 2892 of SEQ ID NO: 317672
uagccagaauaguuguaaa

SEQ ID NO: 503022 - RNA, 19 nt, Artificial Sequence
  Description of Artificial Sequence: Synthetic oligonucleotide
  Antisense strand to SEQ ID NO: 503021
uuuacaacuauucuggcua

SEQ ID NO: 503023 - RNA, 19 nt, Artificial Sequence
  Description of Artificial Sequence: Synthetic oligonucleotide
  Sense strand starting at position 2929 of SEQ ID NO: 317672
aagggauaaugugaggaaa

SEQ ID NO: 503024 - RNA, 19 nt, Artificial Sequence
  Description of Artificial Sequence: Synthetic oligonucleotide
  Antisense strand to SEQ ID NO: 503023
uuuccucacauuaucccuu

SEQ ID NO: 503025 - RNA, 19 nt, Artificial Sequence
  Description of Artificial Sequence: Synthetic oligonucleotide
  Sense strand starting at position 2949 of SEQ ID NO: 317672
gugcucauuuaagauuuga

SEQ ID NO: 503026 - RNA, 19 nt, Artificial Sequence
  Description of Artificial Sequence: Synthetic oligonucleotide
  Antisense strand to SEQ ID NO: 503025
ucaaaucuuaaaugagcac

SEQ ID NO: 503027 - RNA, 19 nt, Artificial Sequence
  Description of Artificial Sequence: Synthetic oligonucleotide
  Sense strand starting at position 2971 of SEQ ID NO: 317672
augugauguagugaaccuu

SEQ ID NO: 503028 - RNA, 19 nt, Artificial Sequence
  Description of Artificial Sequence: Synthetic oligonucleotide
  Antisense strand to SEQ ID NO: 503027
aagguucacuacaucacau

SEQ ID NO: 503029 - RNA, 19 nt, Artificial Sequence
  Description of Artificial Sequence: Synthetic oligonucleotide
  Sense strand starting at position 3111 of SEQ ID NO: 317672
cagucaguucccgaaagag

SEQ ID NO: 503030 - RNA, 19 nt, Artificial Sequence
  Description of Artificial Sequence: Synthetic oligonucleotide
  Antisense strand to SEQ ID NO: 503029
cucuuucgggaacugacug

SEQ ID NO: 503031 - RNA, 19 nt, Artificial Sequence
  Description of Artificial Sequence: Synthetic oligonucleotide
  Sense strand starting at position 3123 of SEQ ID NO: 317672
gaaagaguuguagguacua

SEQ ID NO: 503032 - RNA, 19 nt, Artificial Sequence
  Description of Artificial Sequence: Synthetic oligonucleotide
  Antisense strand to SEQ ID NO: 503031
uaguaccuacaacucuuuc

SEQ ID NO: 503033 - RNA, 19 nt, Artificial Sequence
  Description of Artificial Sequence: Synthetic oligonucleotide
  Sense strand starting at position 3323 of SEQ ID NO: 317672
ggccuuguugguuaauaau

SEQ ID NO: 503034 - RNA, 19 nt, Artificial Sequence
  Description of Artificial Sequence: Synthetic oligonucleotide
  Antisense strand to SEQ ID NO: 503033
auuauuaaccaacaaggcc

SEQ ID NO: 503035 - RNA, 19 nt, Artificial Sequence
  Description of Artificial Sequence: Synthetic oligonucleotide
  Sense strand starting at position 3442 of SEQ ID NO: 317672
cagggauauuauguauuau

SEQ ID NO: 503036 - RNA, 19 nt, Artificial Sequence
  Description of Artificial Sequence: Synthetic oligonucleotide
  Antisense strand to SEQ ID NO: 503035
auaauacauaauaucccug

SEQ ID NO: 503037 - RNA, 19 nt, Artificial Sequence
  Description of Artificial Sequence: Synthetic oligonucleotide
  Sense strand starting at position 3454 of SEQ ID NO: 317672
guauuauaucuguacagca

SEQ ID NO: 503038 - RNA, 19 nt, Artificial Sequence
  Description of Artificial Sequence: Synthetic oligonucleotide
  Antisense strand to SEQ ID NO: 503037
ugcuguacagauauaauac

SEQ ID NO: 503039 - RNA, 19 nt, Artificial Sequence
  Description of Artificial Sequence: Synthetic oligonucleotide
  Sense strand starting at position 3486 of SEQ ID NO: 317672
ggcagugauuucucucuuu

SEQ ID NO: 503040 - RNA, 19 nt, Artificial Sequence
  Description of Artificial Sequence: Synthetic oligonucleotide
  Antisense strand to SEQ ID NO: 503039
aaagagagaaaucacugcc

SEQ ID NO: 503041 - RNA, 19 nt, Artificial Sequence
  Description of Artificial Sequence: Synthetic oligonucleotide
  Sense strand starting at position 3504 of SEQ ID NO: 317672
ugaauugcucuugaaugua

SEQ ID NO: 503042 - RNA, 19 nt, Artificial Sequence
  Description of Artificial Sequence: Synthetic oligonucleotide
  Antisense strand to SEQ ID NO: 503041
uacauucaagagcaauuca

SEQ ID NO: 503043 - RNA, 19 nt, Artificial Sequence
  Description of Artificial Sequence: Synthetic oligonucleotide
  Sense strand starting at position 3512 of SEQ ID NO: 317672
ucuugaauguagccaauca

SEQ ID NO: 503044 - RNA, 19 nt, Artificial Sequence
  Description of Artificial Sequence: Synthetic oligonucleotide
  Antisense strand to SEQ ID NO: 503043
ugauuggcuacauucaaga

SEQ ID NO: 503045 - RNA, 19 nt, Artificial Sequence
  Description of Artificial Sequence: Synthetic oligonucleotide
  Sense strand starting at position 3659 of SEQ ID NO: 317672
acccaaagagguugugauu

SEQ ID NO: 503046 - RNA, 19 nt, Artificial Sequence
  Description of Artificial Sequence: Synthetic oligonucleotide
  Antisense strand to SEQ ID NO: 503045
aaucacaaccucuuugggu

SEQ ID NO: 503047 - RNA, 19 nt, Artificial Sequence
  Description of Artificial Sequence: Synthetic oligonucleotide
  Sense strand starting at position 3819 of SEQ ID NO: 317672
gauagauaguaugucacau

SEQ ID NO: 503048 - RNA, 19 nt, Artificial Sequence
  Description of Artificial Sequence: Synthetic oligonucleotide
  Antisense strand to SEQ ID NO: 503047
augugacauacuaucuauc

SEQ ID NO: 503049 - RNA, 19 nt, Artificial Sequence
  Description of Artificial Sequence: Synthetic oligonucleotide
  Sense strand starting at position 3823 of SEQ ID NO: 317672
gauaguaugucacauuuag

SEQ ID NO: 503050 - RNA, 19 nt, Artificial Sequence
  Description of Artificial Sequence: Synthetic oligonucleotide
  Antisense strand to SEQ ID NO: 503049
cuaaaugugacauacuauc

SEQ ID NO: 503051 - RNA, 19 nt, Artificial Sequence
  Description of Artificial Sequence: Synthetic oligonucleotide
  Sense strand starting at position 3876 of SEQ ID NO: 317672
ggacuuaagggauguguuc

SEQ ID NO: 503052 - RNA, 19 nt, Artificial Sequence
  Description of Artificial Sequence: Synthetic oligonucleotide
  Antisense strand to SEQ ID NO: 503051
gaacacaucccuuaagucc

SEQ ID NO: 503053 - RNA, 19 nt, Artificial Sequence
  Description of Artificial Sequence: Synthetic oligonucleotide
  Sense strand starting at position 3983 of SEQ ID NO: 317672
augccuauacuguacauua

SEQ ID NO: 503054 - RNA, 19 nt, Artificial Sequence
  Description of Artificial Sequence: Synthetic oligonucleotide
  Antisense strand to SEQ ID NO: 503053
uaauguacaguauaggcau

SEQ ID NO: 503055 - RNA, 19 nt, Artificial Sequence
  Description of Artificial Sequence: Synthetic oligonucleotide
  Sense strand starting at position 125 of SEQ ID NO: 317673
ggucucacugccuaacaua

SEQ ID NO: 503056 - RNA, 19 nt, Artificial Sequence
  Description of Artificial Sequence: Synthetic oligonucleotide
  Antisense strand to SEQ ID NO: 503055
uauguuaggcagugagacc

SEQ ID NO: 503057 - RNA, 19 nt, Artificial Sequence
  Description of Artificial Sequence: Synthetic oligonucleotide
  Sense strand starting at position 169 of SEQ ID NO: 317673
guucaaauguugugugaua

SEQ ID NO: 503058 - RNA, 19 nt, Artificial Sequence
  Description of Artificial Sequence: Synthetic oligonucleotide
  Antisense strand to SEQ ID NO: 503057
uaucacacaacauuugaac

SEQ ID NO: 503059 - RNA, 19 nt, Artificial Sequence
  Description of Artificial Sequence: Synthetic oligonucleotide
  Sense strand starting at position 171 of SEQ ID NO: 317673
ucaaauguugugugauaug

SEQ ID NO: 503060 - RNA, 19 nt, Artificial Sequence
  Description of Artificial Sequence: Synthetic oligonucleotide
  Antisense strand to SEQ ID NO: 503059
cauaucacacaacauuuga

SEQ ID NO: 503061 - RNA, 19 nt, Artificial Sequence
  Description of Artificial Sequence: Synthetic oligonucleotide
  Sense strand starting at position 174 of SEQ ID NO: 317673
aauguugugugauaugguu

SEQ ID NO: 503062 - RNA, 19 nt, Artificial Sequence
  Description of Artificial Sequence: Synthetic oligonucleotide
  Antisense strand to SEQ ID NO: 503061
aaccauaucacacaacauu

SEQ ID NO: 503063 - RNA, 19 nt, Artificial Sequence
  Description of Artificial Sequence: Synthetic oligonucleotide
  Sense strand starting at position 519 of SEQ ID NO: 317673
aggugagaacgcugccauu

SEQ ID NO: 503064 - RNA, 19 nt, Artificial Sequence
  Description of Artificial Sequence: Synthetic oligonucleotide
  Antisense strand to SEQ ID NO: 503063
aauggcagcguucucaccu

SEQ ID NO: 503065 - RNA, 19 nt, Artificial Sequence
  Description of Artificial Sequence: Synthetic oligonucleotide
  Sense strand starting at position 601 of SEQ ID NO: 317673
agugcuuugcuugguggaa

SEQ ID NO: 503066 - RNA, 19 nt, Artificial Sequence
  Description of Artificial Sequence: Synthetic oligonucleotide
  Antisense strand to SEQ ID NO: 503065
uuccaccaagcaaagcacu

SEQ ID NO: 503067 - RNA, 19 nt, Artificial Sequence
  Description of Artificial Sequence: Synthetic oligonucleotide
  Sense strand starting at position 709 of SEQ ID NO: 317673
uucucugaaucuggucaua

SEQ ID NO: 503068 - RNA, 19 nt, Artificial Sequence
  Description of Artificial Sequence: Synthetic oligonucleotide
  Antisense strand to SEQ ID NO: 503067
uaugaccagauucagagaa

SEQ ID NO: 503069 - RNA, 19 nt, Artificial Sequence
  Description of Artificial Sequence: Synthetic oligonucleotide
  Sense strand starting at position 711 of SEQ ID NO: 317673
cucugaaucuggucauaac

SEQ ID NO: 503070 - RNA, 19 nt, Artificial Sequence
  Description of Artificial Sequence: Synthetic oligonucleotide
  Antisense strand to SEQ ID NO: 503069
guuaugaccagauucagag

SEQ ID NO: 503071 - RNA, 19 nt, Artificial Sequence
  Description of Artificial Sequence: Synthetic oligonucleotide
  Sense strand starting at position 714 of SEQ ID NO: 317673
ugaaucuggucauaacgaa

SEQ ID NO: 503072 - RNA, 19 nt, Artificial Sequence
  Description of Artificial Sequence: Synthetic oligonucleotide
  Antisense strand to SEQ ID NO: 503071
uucguuaugaccagauuca

SEQ ID NO: 503073 - RNA, 19 nt, Artificial Sequence
  Description of Artificial Sequence: Synthetic oligonucleotide
  Sense strand starting at position 832 of SEQ ID NO: 317673
ggcauuggcucgcgaaggu

SEQ ID NO: 503074 - RNA, 19 nt, Artificial Sequence
  Description of Artificial Sequence: Synthetic oligonucleotide
  Antisense strand to SEQ ID NO: 503073
accuucgcgagccaaugcc

SEQ ID NO: 503075 - RNA, 19 nt, Artificial Sequence
  Description of Artificial Sequence: Synthetic oligonucleotide
  Sense strand starting at position 953 of SEQ ID NO: 317673
agaaacuguugcuuccaaa

SEQ ID NO: 503076 - RNA, 19 nt, Artificial Sequence
  Description of Artificial Sequence: Synthetic oligonucleotide
  Antisense strand to SEQ ID NO: 503075
uuuggaagcaacaguuucu

SEQ ID NO: 503077 - RNA, 19 nt, Artificial Sequence
  Description of Artificial Sequence: Synthetic oligonucleotide
  Sense strand starting at position 2736 of SEQ ID NO: 317673
ggcuugaggguuggucaga

SEQ ID NO: 503078 - RNA, 19 nt, Artificial Sequence
  Description of Artificial Sequence: Synthetic oligonucleotide
  Antisense strand to SEQ ID NO: 503077
ucugaccaacccucaagcc

SEQ ID NO: 503079 - RNA, 19 nt, Artificial Sequence
  Description of Artificial Sequence: Synthetic oligonucleotide
  Sense strand starting at position 2737 of SEQ ID NO: 317673
gcuugaggguuggucagau

SEQ ID NO: 503080 - RNA, 19 nt, Artificial Sequence
  Description of Artificial Sequence: Synthetic oligonucleotide
  Antisense strand to SEQ ID NO: 503079
aucugaccaacccucaagc

SEQ ID NO: 503081 - RNA, 19 nt, Artificial Sequence
  Description of Artificial Sequence: Synthetic oligonucleotide
  Sense strand starting at position 3072 of SEQ ID NO: 317673
ggaggcgucgugagccaau

SEQ ID NO: 503082 - RNA, 19 nt, Artificial Sequence
  Description of Artificial Sequence: Synthetic oligonucleotide
  Antisense strand to SEQ ID NO: 503081
auuggcucacgacgccucc

SEQ ID NO: 503083 - RNA, 19 nt, Artificial Sequence
  Description of Artificial Sequence: Synthetic oligonucleotide
  Sense strand starting at position 3552 of SEQ ID NO: 317673
agcaccgauuucuggugaa

SEQ ID NO: 503084 - RNA, 19 nt, Artificial Sequence
  Description of Artificial Sequence: Synthetic oligonucleotide
  Antisense strand to SEQ ID NO: 503083
uucaccagaaaucggugcu

SEQ ID NO: 503085 - RNA, 19 nt, Artificial Sequence
  Description of Artificial Sequence: Synthetic oligonucleotide
  Sense strand starting at position 3555 of SEQ ID NO: 317673
accgauuucuggugaagac

SEQ ID NO: 503086 - RNA, 19 nt, Artificial Sequence
  Description of Artificial Sequence: Synthetic oligonucleotide
  Antisense strand to SEQ ID NO: 503085
gucuucaccagaaaucggu

SEQ ID NO: 503087 - RNA, 19 nt, Artificial Sequence
  Description of Artificial Sequence: Synthetic oligonucleotide
  Sense strand starting at position 3641 of SEQ ID NO: 317673
gggauucuuucugcaacca

SEQ ID NO: 503088 - RNA, 19 nt, Artificial Sequence
  Description of Artificial Sequence: Synthetic oligonucleotide
  Antisense strand to SEQ ID NO: 503087
ugguugcagaaagaauccc

SEQ ID NO: 503089 - RNA, 19 nt, Artificial Sequence
  Description of Artificial Sequence: Synthetic oligonucleotide
  Sense strand starting at position 3642 of SEQ ID NO: 317673
ggauucuuucugcaaccaa

SEQ ID NO: 503090 - RNA, 19 nt, Artificial Sequence
  Description of Artificial Sequence: Synthetic oligonucleotide
  Antisense strand to SEQ ID NO: 503089
uugguugcagaaagaaucc

SEQ ID NO: 503091 - RNA, 19 nt, Artificial Sequence
  Description of Artificial Sequence: Synthetic oligonucleotide
  Sense strand starting at position 3696 of SEQ ID NO: 317673
uguguaacugaccacaguu

SEQ ID NO: 503092 - RNA, 19 nt, Artificial Sequence
  Description of Artificial Sequence: Synthetic oligonucleotide
  Antisense strand to SEQ ID NO: 503091
aacuguggucaguuacaca

SEQ ID NO: 503093 - RNA, 19 nt, Artificial Sequence
  Description of Artificial Sequence: Synthetic oligonucleotide
  Sense strand starting at position 3718 of SEQ ID NO: 317673
aucaauucccacugggaau

SEQ ID NO: 503094 - RNA, 19 nt, Artificial Sequence
  Description of Artificial Sequence: Synthetic oligonucleotide
  Antisense strand to SEQ ID NO: 503093
auucccagugggaauugau

SEQ ID NO: 503095 - RNA, 19 nt, Artificial Sequence
  Description of Artificial Sequence: Synthetic oligonucleotide
  Sense strand starting at position 3749 of SEQ ID NO: 317673
gguugaggguuguuuccaa

SEQ ID NO: 503096 - RNA, 19 nt, Artificial Sequence
  Description of Artificial Sequence: Synthetic oligonucleotide
  Antisense strand to SEQ ID NO: 503095
uuggaaacaacccucaacc

SEQ ID NO: 503097 - RNA, 19 nt, Artificial Sequence
  Description of Artificial Sequence: Synthetic oligonucleotide
  Sense strand starting at position 3844 of SEQ ID NO: 317673
agagcacugcgucacuuua

SEQ ID NO: 503098 - RNA, 19 nt, Artificial Sequence
  Description of Artificial Sequence: Synthetic oligonucleotide
  Antisense strand to SEQ ID NO: 503097
uaaagugacgcagugcucu

SEQ ID NO: 503099 - RNA, 19 nt, Artificial Sequence
  Description of Artificial Sequence: Synthetic oligonucleotide
  Sense strand starting at position 3854 of SEQ ID NO: 317673
gucacuuuacagcaagagu

SEQ ID NO: 503100 - RNA, 19 nt, Artificial Sequence
  Description of Artificial Sequence: Synthetic oligonucleotide
  Antisense strand to SEQ ID NO: 503099
acucuugcuguaaagugac

SEQ ID NO: 503101 - RNA, 19 nt, Artificial Sequence
  Description of Artificial Sequence: Synthetic oligonucleotide
  Sense strand starting at position 3957 of SEQ ID NO: 317673
ggcgauuggugcucauuga

SEQ ID NO: 503102 - RNA, 19 nt, Artificial Sequence
  Description of Artificial Sequence: Synthetic oligonucleotide
  Antisense strand to SEQ ID NO: 503101
ucaaugagcaccaaucgcc

SEQ ID NO: 503103 - RNA, 19 nt, Artificial Sequence
  Description of Artificial Sequence: Synthetic oligonucleotide
  Sense strand starting at position 3958 of SEQ ID NO: 317673
gcgauuggugcucauugac

SEQ ID NO: 503104 - RNA, 19 nt, Artificial Sequence
  Description of Artificial Sequence: Synthetic oligonucleotide
  Antisense strand to SEQ ID NO: 503103
gucaaugagcaccaaucgc

SEQ ID NO: 503105 - RNA, 19 nt, Artificial Sequence
  Description of Artificial Sequence: Synthetic oligonucleotide
  Sense strand starting at position 3980 of SEQ ID NO: 317673
gucacucagcaagggaauu

SEQ ID NO: 503106 - RNA, 19 nt, Artificial Sequence
  Description of Artificial Sequence: Synthetic oligonucleotide
  Antisense strand to SEQ ID NO: 503105
aauucccuugcugagugac

SEQ ID NO: 503107 - RNA, 19 nt, Artificial Sequence
  Description of Artificial Sequence: Synthetic oligonucleotide
  Sense strand starting at position 212 of SEQ ID NO: 317674
agauucuucccugguauug

SEQ ID NO: 503108 - RNA, 19 nt, Artificial Sequence
  Description of Artificial Sequence: Synthetic oligonucleotide
  Antisense strand to SEQ ID NO: 503107
caauaccagggaagaaucu

SEQ ID NO: 503109 - RNA, 19 nt, Artificial Sequence
  Description of Artificial Sequence: Synthetic oligonucleotide
  Sense strand starting at position 222 of SEQ ID NO: 317674
cugguauugacuugcaaga

SEQ ID NO: 503110 - RNA, 19 nt, Artificial Sequence
  Description of Artificial Sequence: Synthetic oligonucleotide
  Antisense strand to SEQ ID NO: 503109
ucuugcaagucaauaccag

SEQ ID NO: 503111 - RNA, 19 nt, Artificial Sequence
  Description of Artificial Sequence: Synthetic oligonucleotide
  Sense strand starting at position 224 of SEQ ID NO: 317674
gguauugacuugcaagaaa

SEQ ID NO: 503112 - RNA, 19 nt, Artificial Sequence
  Description of Artificial Sequence: Synthetic oligonucleotide
  Antisense strand to SEQ ID NO: 503111
uuucuugcaagucaauacc

SEQ ID NO: 503113 - RNA, 19 nt, Artificial Sequence
  Description of Artificial Sequence: Synthetic oligonucleotide
  Sense strand starting at position 245 of SEQ ID NO: 317674
uuuagaaacuguccaagga

SEQ ID NO: 503114 - RNA, 19 nt, Artificial Sequence
  Description of Artificial Sequence: Synthetic oligonucleotide
  Antisense strand to SEQ ID NO: 503113
uccuuggacaguuucuaaa

SEQ ID NO: 503115 - RNA, 19 nt, Artificial Sequence
  Description of Artificial Sequence: Synthetic oligonucleotide
  Sense strand starting at position 281 of SEQ ID NO: 317674
guuugcuguguuucccaca

SEQ ID NO: 503116 - RNA, 19 nt, Artificial Sequence
  Description of Artificial Sequence: Synthetic oligonucleotide
  Antisense strand to SEQ ID NO: 503115
ugugggaaacacagcaaac

SEQ ID NO: 503117 - RNA, 19 nt, Artificial Sequence
  Description of Artificial Sequence: Synthetic oligonucleotide
  Sense strand starting at position 286 of SEQ ID NO: 317674
cuguguuucccacacauac

SEQ ID NO: 503118 - RNA, 19 nt, Artificial Sequence
  Description of Artificial Sequence: Synthetic oligonucleotide
  Antisense strand to SEQ ID NO: 503117
guaugugugggaaacacag

SEQ ID NO: 503119 - RNA, 19 nt, Artificial Sequence
  Description of Artificial Sequence: Synthetic oligonucleotide
  Sense strand starting at position 316 of SEQ ID NO: 317674
ugccguguucuccuaguua

SEQ ID NO: 503120 - RNA, 19 nt, Artificial Sequence
  Description of Artificial Sequence: Synthetic oligonucleotide
  Antisense strand to SEQ ID NO: 503119
uaacuaggagaacacggca

SEQ ID NO: 503121 - RNA, 19 nt, Artificial Sequence
  Description of Artificial Sequence: Synthetic oligonucleotide
  Sense strand starting at position 319 of SEQ ID NO: 317674
cguguucuccuaguuacuu

SEQ ID NO: 503122 - RNA, 19 nt, Artificial Sequence
  Description of Artificial Sequence: Synthetic oligonucleotide
  Antisense strand to SEQ ID NO: 503121
aaguaacuaggagaacacg

SEQ ID NO: 503123 - RNA, 19 nt, Artificial Sequence
  Description of Artificial Sequence: Synthetic oligonucleotide
  Sense strand starting at position 495 of SEQ ID NO: 317674
gaaccaaggugaugggauu

SEQ ID NO: 503124 - RNA, 19 nt, Artificial Sequence
  Description of Artificial Sequence: Synthetic oligonucleotide
  Antisense strand to SEQ ID NO: 503123
aaucccaucaccuugguuc

SEQ ID NO: 503125 - RNA, 19 nt, Artificial Sequence
  Description of Artificial Sequence: Synthetic oligonucleotide
  Sense strand starting at position 688 of SEQ ID NO: 317674
gcgcguuucgucgccucau

SEQ ID NO: 503126 - RNA, 19 nt, Artificial Sequence
  Description of Artificial Sequence: Synthetic oligonucleotide
  Antisense strand to SEQ ID NO: 503125
augaggcgacgaaacgcgc

SEQ ID NO: 503127 - RNA, 19 nt, Artificial Sequence
  Description of Artificial Sequence: Synthetic oligonucleotide
  Sense strand starting at position 820 of SEQ ID NO: 317674
cggcccucccuugggaaau

SEQ ID NO: 503128 - RNA, 19 nt, Artificial Sequence
  Description of Artificial Sequence: Synthetic oligonucleotide
  Antisense strand to SEQ ID NO: 503127
auuucccaagggagggccg

SEQ ID NO: 503129 - RNA, 19 nt, Artificial Sequence
  Description of Artificial Sequence: Synthetic oligonucleotide
  Sense strand starting at position 831 of SEQ ID NO: 317674
ugggaaauggugcgucuga

SEQ ID NO: 503130 - RNA, 19 nt, Artificial Sequence
  Description of Artificial Sequence: Synthetic oligonucleotide
  Antisense strand to SEQ ID NO: 503129
ucagacgcaccauuuccca

SEQ ID NO: 503131 - RNA, 19 nt, Artificial Sequence
  Description of Artificial Sequence: Synthetic oligonucleotide
  Sense strand starting at position 1793 of SEQ ID NO: 317674
aucgcagaucucgguagau

SEQ ID NO: 503132 - RNA, 19 nt, Artificial Sequence
  Description of Artificial Sequence: Synthetic oligonucleotide
  Antisense strand to SEQ ID NO: 503131
aucuaccgagaucugcgau

SEQ ID NO: 503133 - RNA, 19 nt, Artificial Sequence
  Description of Artificial Sequence: Synthetic oligonucleotide
  Sense strand starting at position 2307 of SEQ ID NO: 317674
guucuuauuuacgucuuua

SEQ ID NO: 503134 - RNA, 19 nt, Artificial Sequence
  Description of Artificial Sequence: Synthetic oligonucleotide
  Antisense strand to SEQ ID NO: 503133
uaaagacguaaauaagaac

SEQ ID NO: 503135 - RNA, 19 nt, Artificial Sequence
  Description of Artificial Sequence: Synthetic oligonucleotide
  Sense strand starting at position 2315 of SEQ ID NO: 317674
uuacgucuuuaggaauuua

SEQ ID NO: 503136 - RNA, 19 nt, Artificial Sequence
  Description of Artificial Sequence: Synthetic oligonucleotide
  Antisense strand to SEQ ID NO: 503135
uaaauuccuaaagacguaa

SEQ ID NO: 503137 - RNA, 19 nt, Artificial Sequence
  Description of Artificial Sequence: Synthetic oligonucleotide
  Sense strand starting at position 2404 of SEQ ID NO: 317674
guuaaacucuacugagaga

SEQ ID NO: 503138 - RNA, 19 nt, Artificial Sequence
  Description of Artificial Sequence: Synthetic oligonucleotide
  Antisense strand to SEQ ID NO: 503137
ucucucaguagaguuuaac

SEQ ID NO: 503139 - RNA, 19 nt, Artificial Sequence
  Description of Artificial Sequence: Synthetic oligonucleotide
  Sense strand starting at position 2795 of SEQ ID NO: 317674
ggagggucugguggagaaa

SEQ ID NO: 503140 - RNA, 19 nt, Artificial Sequence
  Description of Artificial Sequence: Synthetic oligonucleotide
  Antisense strand to SEQ ID NO: 503139
uuucuccaccagacccucc

SEQ ID NO: 503141 - RNA, 19 nt, Artificial Sequence
  Description of Artificial Sequence: Synthetic oligonucleotide
  Sense strand starting at position 2887 of SEQ ID NO: 317674
agauuuaucucuggucagg

SEQ ID NO: 503142 - RNA, 19 nt, Artificial Sequence
  Description of Artificial Sequence: Synthetic oligonucleotide
  Antisense strand to SEQ ID NO: 503141
ccugaccagagauaaaucu

SEQ ID NO: 503143 - RNA, 19 nt, Artificial Sequence
  Description of Artificial Sequence: Synthetic oligonucleotide
  Sense strand starting at position 2898 of SEQ ID NO: 317674
uggucaggcuuccuuuauu

SEQ ID NO: 503144 - RNA, 19 nt, Artificial Sequence
  Description of Artificial Sequence: Synthetic oligonucleotide
  Antisense strand to SEQ ID NO: 503143
aauaaaggaagccugacca

SEQ ID NO: 503145 - RNA, 19 nt, Artificial Sequence
  Description of Artificial Sequence: Synthetic oligonucleotide
  Sense strand starting at position 2903 of SEQ ID NO: 317674
aggcuuccuuuauuaaaga

SEQ ID NO: 503146 - RNA, 19 nt, Artificial Sequence
  Description of Artificial Sequence: Synthetic oligonucleotide
  Antisense strand to SEQ ID NO: 503145
ucuuuaauaaaggaagccu

SEQ ID NO: 503147 - RNA, 19 nt, Artificial Sequence
  Description of Artificial Sequence: Synthetic oligonucleotide
  Sense strand starting at position 2904 of SEQ ID NO: 317674
ggcuuccuuuauuaaagaa

SEQ ID NO: 503148 - RNA, 19 nt, Artificial Sequence
  Description of Artificial Sequence: Synthetic oligonucleotide
  Antisense strand to SEQ ID NO: 503147
uucuuuaauaaaggaagcc

SEQ ID NO: 503149 - RNA, 19 nt, Artificial Sequence
  Description of Artificial Sequence: Synthetic oligonucleotide
  Sense strand starting at position 2952 of SEQ ID NO: 317674
guccucauuuaguaaacau

SEQ ID NO: 503150 - RNA, 19 nt, Artificial Sequence
  Description of Artificial Sequence: Synthetic oligonucleotide
  Antisense strand to SEQ ID NO: 503149
auguuuacuaaaugaggac

SEQ ID NO: 503151 - RNA, 19 nt, Artificial Sequence
  Description of Artificial Sequence: Synthetic oligonucleotide
  Sense strand starting at position 3077 of SEQ ID NO: 317674
caggaagacugagccaauu

SEQ ID NO: 503152 - RNA, 19 nt, Artificial Sequence
  Description of Artificial Sequence: Synthetic oligonucleotide
  Antisense strand to SEQ ID NO: 503151
aauuggcucagucuuccug

SEQ ID NO: 503153 - RNA, 19 nt, Artificial Sequence
  Description of Artificial Sequence: Synthetic oligonucleotide
  Sense strand starting at position 3130 of SEQ ID NO: 317674
cuccgacuguucucuuaaa

SEQ ID NO: 503154 - RNA, 19 nt, Artificial Sequence
  Description of Artificial Sequence: Synthetic oligonucleotide
  Antisense strand to SEQ ID NO: 503153
uuuaagagaacagucggag

SEQ ID NO: 503155 - RNA, 19 nt, Artificial Sequence
  Description of Artificial Sequence: Synthetic oligonucleotide
  Sense strand starting at position 3162 of SEQ ID NO: 317674
ugugcaguguaccuauuaa

SEQ ID NO: 503156 - RNA, 19 nt, Artificial Sequence
  Description of Artificial Sequence: Synthetic oligonucleotide
  Antisense strand to SEQ ID NO: 503155
uuaauagguacacugcaca

SEQ ID NO: 503157 - RNA, 19 nt, Artificial Sequence
  Description of Artificial Sequence: Synthetic oligonucleotide
  Sense strand starting at position 3250 of SEQ ID NO: 317674
gugaaucacuuccagguca

SEQ ID NO: 503158 - RNA, 19 nt, Artificial Sequence
  Description of Artificial Sequence: Synthetic oligonucleotide
  Antisense strand to SEQ ID NO: 503157
ugaccuggaagugauucac

SEQ ID NO: 503159 - RNA, 19 nt, Artificial Sequence
  Description of Artificial Sequence: Synthetic oligonucleotide
  Sense strand starting at position 3645 of SEQ ID NO: 317674
acuuuauagugauugaauc

SEQ ID NO: 503160 - RNA, 19 nt, Artificial Sequence
  Description of Artificial Sequence: Synthetic oligonucleotide
  Antisense strand to SEQ ID NO: 503159
gauucaaucacuauaaagu

SEQ ID NO: 503161 - RNA, 19 nt, Artificial Sequence
  Description of Artificial Sequence: Synthetic oligonucleotide
  Sense strand starting at position 3646 of SEQ ID NO: 317674
cuuuauagugauugaauca

SEQ ID NO: 503162 - RNA, 19 nt, Artificial Sequence
  Description of Artificial Sequence: Synthetic oligonucleotide
  Antisense strand to SEQ ID NO: 503161
ugauucaaucacuauaaag

SEQ ID NO: 503163 - RNA, 19 nt, Artificial Sequence
  Description of Artificial Sequence: Synthetic oligonucleotide
  Sense strand starting at position 3653 of SEQ ID NO: 317674
gugauugaaucacucuguu

SEQ ID NO: 503164 - RNA, 19 nt, Artificial Sequence
  Description of Artificial Sequence: Synthetic oligonucleotide
  Antisense strand to SEQ ID NO: 503163
aacagagugauucaaucac

SEQ ID NO: 503165 - RNA, 19 nt, Artificial Sequence
  Description of Artificial Sequence: Synthetic oligonucleotide
  Sense strand starting at position 3657 of SEQ ID NO: 317674
uugaaucacucuguugacu

SEQ ID NO: 503166 - RNA, 19 nt, Artificial Sequence
  Description of Artificial Sequence: Synthetic oligonucleotide
  Antisense strand to SEQ ID NO: 503165
agucaacagagugauucaa

SEQ ID NO: 503167 - RNA, 19 nt, Artificial Sequence
  Description of Artificial Sequence: Synthetic oligonucleotide
  Sense strand starting at position 3719 of SEQ ID NO: 317674
guggcuguagucuguuuau

SEQ ID NO: 503168 - RNA, 19 nt, Artificial Sequence
  Description of Artificial Sequence: Synthetic oligonucleotide
  Antisense strand to SEQ ID NO: 503167
auaaacagacuacagccac

SEQ ID NO: 503169 - RNA, 19 nt, Artificial Sequence
  Description of Artificial Sequence: Synthetic oligonucleotide
  Sense strand starting at position 3722 of SEQ ID NO: 317674
gcuguagucuguuuauucu

SEQ ID NO: 503170 - RNA, 19 nt, Artificial Sequence
  Description of Artificial Sequence: Synthetic oligonucleotide
  Antisense strand to SEQ ID NO: 503169
agaauaaacagacuacagc

SEQ ID NO: 503171 - RNA, 19 nt, Artificial Sequence
  Description of Artificial Sequence: Synthetic oligonucleotide
  Sense strand starting at position 3745 of SEQ ID NO: 317674
gcuguauaguauuccguuu

SEQ ID NO: 503172 - RNA, 19 nt, Artificial Sequence
  Description of Artificial Sequence: Synthetic oligonucleotide
  Antisense strand to SEQ ID NO: 503171
aaacggaauacuauacagc

SEQ ID NO: 503173 - RNA, 19 nt, Artificial Sequence
  Description of Artificial Sequence: Synthetic oligonucleotide
  Sense strand starting at position 3763 of SEQ ID NO: 317674
uugugauugugccucaauu

SEQ ID NO: 503174 - RNA, 19 nt, Artificial Sequence
  Description of Artificial Sequence: Synthetic oligonucleotide
  Antisense strand to SEQ ID NO: 503173
aauugaggcacaaucacaa

SEQ ID NO: 503175 - RNA, 19 nt, Artificial Sequence
  Description of Artificial Sequence: Synthetic oligonucleotide
  Sense strand starting at position 3801 of SEQ ID NO: 317674
gauagacauuuggguaauu

SEQ ID NO: 503176 - RNA, 19 nt, Artificial Sequence
  Description of Artificial Sequence: Synthetic oligonucleotide
  Antisense strand to SEQ ID NO: 503175
aauuacccaaaugucuauc

SEQ ID NO: 503177 - RNA, 19 nt, Artificial Sequence
  Description of Artificial Sequence: Synthetic oligonucleotide
  Sense strand starting at position 3892 of SEQ ID NO: 317674
uuauuucuguuggguacau

SEQ ID NO: 503178 - RNA, 19 nt, Artificial Sequence
  Description of Artificial Sequence: Synthetic oligonucleotide
  Antisense strand to SEQ ID NO: 503177
auguacccaacagaaauaa

SEQ ID NO: 503179 - RNA, 19 nt, Artificial Sequence
  Description of Artificial Sequence: Synthetic oligonucleotide
  Sense strand starting at position 3919 of SEQ ID NO: 317674
guggaauugugagucauga

SEQ ID NO: 503180 - RNA, 19 nt, Artificial Sequence
  Description of Artificial Sequence: Synthetic oligonucleotide
  Antisense strand to SEQ ID NO: 503179
ucaugacucacaauuccac

SEQ ID NO: 503181 - RNA, 19 nt, Artificial Sequence
  Description of Artificial Sequence: Synthetic oligonucleotide
  Sense strand starting at position 3928 of SEQ ID NO: 317674
ugagucaugauguaggcau

SEQ ID NO: 503182 - RNA, 19 nt, Artificial Sequence
  Description of Artificial Sequence: Synthetic oligonucleotide
  Antisense strand to SEQ ID NO: 503181
augccuacaucaugacuca

SEQ ID NO: 503183 - RNA, 19 nt, Artificial Sequence
  Description of Artificial Sequence: Synthetic oligonucleotide
  Sense strand starting at position 3930 of SEQ ID NO: 317674
agucaugauguaggcauau

SEQ ID NO: 503184 - RNA, 19 nt, Artificial Sequence
  Description of Artificial Sequence: Synthetic oligonucleotide
  Antisense strand to SEQ ID NO: 503183
auaugccuacaucaugacu

SEQ ID NO: 503185 - RNA, 19 nt, Artificial Sequence
  Description of Artificial Sequence: Synthetic oligonucleotide
  Sense strand starting at position 3932 of SEQ ID NO: 317674
ucaugauguaggcauaugu

SEQ ID NO: 503186 - RNA, 19 nt, Artificial Sequence
  Description of Artificial Sequence: Synthetic oligonucleotide
  Antisense strand to SEQ ID NO: 503185
acauaugccuacaucauga

SEQ ID NO: 503187 - RNA, 19 nt, Artificial Sequence
  Description of Artificial Sequence: Synthetic oligonucleotide
  Sense strand starting at position 95 of SEQ ID NO: 317675
auguuucguggcuuagcaa

SEQ ID NO: 503188 - RNA, 19 nt, Artificial Sequence
  Description of Artificial Sequence: Synthetic oligonucleotide
  Antisense strand to SEQ ID NO: 503187
uugcuaagccacgaaacau

SEQ ID NO: 503189 - RNA, 19 nt, Artificial Sequence
  Description of Artificial Sequence: Synthetic oligonucleotide
  Sense strand starting at position 167 of SEQ ID NO: 317675
acugacugccaucagugau

SEQ ID NO: 503190 - RNA, 19 nt, Artificial Sequence
  Description of Artificial Sequence: Synthetic oligonucleotide
  Antisense strand to SEQ ID NO: 503189
aucacugauggcagucagu

SEQ ID NO: 503191 - RNA, 19 nt, Artificial Sequence
  Description of Artificial Sequence: Synthetic oligonucleotide
  Sense strand starting at position 496 of SEQ ID NO: 317675
ggguaauaaacaugcuaug

SEQ ID NO: 503192 - RNA, 19 nt, Artificial Sequence
  Description of Artificial Sequence: Synthetic oligonucleotide
  Antisense strand to SEQ ID NO: 503191
cauagcauguuuauuaccc

SEQ ID NO: 503193 - RNA, 19 nt, Artificial Sequence
  Description of Artificial Sequence: Synthetic oligonucleotide
  Sense strand starting at position 650 of SEQ ID NO: 317675
gacuguagaaagugguuua

SEQ ID NO: 503194 - RNA, 19 nt, Artificial Sequence
  Description of Artificial Sequence: Synthetic oligonucleotide
  Antisense strand to SEQ ID NO: 503193
uaaaccacuuucuacaguc

SEQ ID NO: 503195 - RNA, 19 nt, Artificial Sequence
  Description of Artificial Sequence: Synthetic oligonucleotide
  Sense strand starting at position 651 of SEQ ID NO: 317675
acuguagaaagugguuuaa

SEQ ID NO: 503196 - RNA, 19 nt, Artificial Sequence
  Description of Artificial Sequence: Synthetic oligonucleotide
  Antisense strand to SEQ ID NO: 503195
uuaaaccacuuucuacagu

SEQ ID NO: 503197 - RNA, 19 nt, Artificial Sequence
  Description of Artificial Sequence: Synthetic oligonucleotide
  Sense strand starting at position 653 of SEQ ID NO: 317675
uguagaaagugguuuaaau

SEQ ID NO: 503198 - RNA, 19 nt, Artificial Sequence
  Description of Artificial Sequence: Synthetic oligonucleotide
  Antisense strand to SEQ ID NO: 503197
auuuaaaccacuuucuaca

SEQ ID NO: 503199 - RNA, 19 nt, Artificial Sequence
  Description of Artificial Sequence: Synthetic oligonucleotide
  Sense strand starting at position 769 of SEQ ID NO: 317675
guauuacacgaagauguau

SEQ ID NO: 503200 - RNA, 19 nt, Artificial Sequence
  Description of Artificial Sequence: Synthetic oligonucleotide
  Antisense strand to SEQ ID NO: 503199
auacaucuucguguaauac

SEQ ID NO: 503201 - RNA, 19 nt, Artificial Sequence
  Description of Artificial Sequence: Synthetic oligonucleotide
  Sense strand starting at position 852 of SEQ ID NO: 317675
aggauaaguugaucucaca

SEQ ID NO: 503202 - RNA, 19 nt, Artificial Sequence
  Description of Artificial Sequence: Synthetic oligonucleotide
  Antisense strand to SEQ ID NO: 503201
ugugagaucaacuuauccu

SEQ ID NO: 503203 - RNA, 19 nt, Artificial Sequence
  Description of Artificial Sequence: Synthetic oligonucleotide
  Sense strand starting at position 949 of SEQ ID NO: 317675
agcauagggauaugucauu

SEQ ID NO: 503204 - RNA, 19 nt, Artificial Sequence
  Description of Artificial Sequence: Synthetic oligonucleotide
  Antisense strand to SEQ ID NO: 503203
aaugacauaucccuaugcu

SEQ ID NO: 503205 - RNA, 19 nt, Artificial Sequence
  Description of Artificial Sequence: Synthetic oligonucleotide
  Sense strand starting at position 954 of SEQ ID NO: 317675
agggauaugucauuacaca

SEQ ID NO: 503206 - RNA, 19 nt, Artificial Sequence
  Description of Artificial Sequence: Synthetic oligonucleotide
  Antisense strand to SEQ ID NO: 503205
uguguaaugacauaucccu

SEQ ID NO: 503207 - RNA, 19 nt, Artificial Sequence
  Description of Artificial Sequence: Synthetic oligonucleotide
  Sense strand starting at position 1012 of SEQ ID NO: 317675
ggcaacaucuauuccugaa

SEQ ID NO: 503208 - RNA, 19 nt, Artificial Sequence
  Description of Artificial Sequence: Synthetic oligonucleotide
  Antisense strand to SEQ ID NO: 503207
uucaggaauagauguugcc

SEQ ID NO: 503209 - RNA, 19 nt, Artificial Sequence
  Description of Artificial Sequence: Synthetic oligonucleotide
  Sense strand starting at position 1063 of SEQ ID NO: 317675
augagauacugggcuaauc

SEQ ID NO: 503210 - RNA, 19 nt, Artificial Sequence
  Description of Artificial Sequence: Synthetic oligonucleotide
  Antisense strand to SEQ ID NO: 503209
gauuagcccaguaucucau

SEQ ID NO: 503211 - RNA, 19 nt, Artificial Sequence
  Description of Artificial Sequence: Synthetic oligonucleotide
  Sense strand starting at position 1073 of SEQ ID NO: 317675
gggcuaaucgaaugacaaa

SEQ ID NO: 503212 - RNA, 19 nt, Artificial Sequence
  Description of Artificial Sequence: Synthetic oligonucleotide
  Antisense strand to SEQ ID NO: 503211
uuugucauucgauuagccc

SEQ ID NO: 503213 - RNA, 19 nt, Artificial Sequence
  Description of Artificial Sequence: Synthetic oligonucleotide
  Sense strand starting at position 1522 of SEQ ID NO: 317675
ggugcugaaauccauggua

SEQ ID NO: 503214 - RNA, 19 nt, Artificial Sequence
  Description of Artificial Sequence: Synthetic oligonucleotide
  Antisense strand to SEQ ID NO: 503213
uaccauggauuucagcacc

SEQ ID NO: 503215 - RNA, 19 nt, Artificial Sequence
  Description of Artificial Sequence: Synthetic oligonucleotide
  Sense strand starting at position 1555 of SEQ ID NO: 317675
uuaccaucagaauggcaaa

SEQ ID NO: 503216 - RNA, 19 nt, Artificial Sequence
  Description of Artificial Sequence: Synthetic oligonucleotide
  Antisense strand to SEQ ID NO: 503215
uuugccauucugaugguaa

SEQ ID NO: 503217 - RNA, 19 nt, Artificial Sequence
  Description of Artificial Sequence: Synthetic oligonucleotide
  Sense strand starting at position 1788 of SEQ ID NO: 317675
gcuguacaugggcauaaua

SEQ ID NO: 503218 - RNA, 19 nt, Artificial Sequence
  Description of Artificial Sequence: Synthetic oligonucleotide
  Antisense strand to SEQ ID NO: 503217
uauuaugcccauguacagc

SEQ ID NO: 503219 - RNA, 19 nt, Artificial Sequence
  Description of Artificial Sequence: Synthetic oligonucleotide
  Sense strand starting at position 1790 of SEQ ID NO: 317675
uguacaugggcauaauaca

SEQ ID NO: 503220 - RNA, 19 nt, Artificial Sequence
  Description of Artificial Sequence: Synthetic oligonucleotide
  Antisense strand to SEQ ID NO: 503219
uguauuaugcccauguaca

SEQ ID NO: 503221 - RNA, 19 nt, Artificial Sequence
  Description of Artificial Sequence: Synthetic oligonucleotide
  Sense strand starting at position 1936 of SEQ ID NO: 317675
gucgcuuuacaccaacaga

SEQ ID NO: 503222 - RNA, 19 nt, Artificial Sequence
  Description of Artificial Sequence: Synthetic oligonucleotide
  Antisense strand to SEQ ID NO: 503221
ucuguugguguaaagcgac

SEQ ID NO: 503223 - RNA, 19 nt, Artificial Sequence
  Description of Artificial Sequence: Synthetic oligonucleotide
  Sense strand starting at position 1953 of SEQ ID NO: 317675
gaaaucugaaugggugagu

SEQ ID NO: 503224 - RNA, 19 nt, Artificial Sequence
  Description of Artificial Sequence: Synthetic oligonucleotide
  Antisense strand to SEQ ID NO: 503223
acucacccauucagauuuc

SEQ ID NO: 503225 - RNA, 19 nt, Artificial Sequence
  Description of Artificial Sequence: Synthetic oligonucleotide
  Sense strand starting at position 2142 of SEQ ID NO: 317675
ggaguaauuauccauguug

SEQ ID NO: 503226 - RNA, 19 nt, Artificial Sequence
  Description of Artificial Sequence: Synthetic oligonucleotide
  Antisense strand to SEQ ID NO: 503225
caacauggauaauuacucc

SEQ ID NO: 503227 - RNA, 19 nt, Artificial Sequence
  Description of Artificial Sequence: Synthetic oligonucleotide
  Sense strand starting at position 2220 of SEQ ID NO: 317675
ggcgucauuugaaagguga

SEQ ID NO: 503228 - RNA, 19 nt, Artificial Sequence
  Description of Artificial Sequence: Synthetic oligonucleotide
  Antisense strand to SEQ ID NO: 503227
ucaccuuucaaaugacgcc

SEQ ID NO: 503229 - RNA, 19 nt, Artificial Sequence
  Description of Artificial Sequence: Synthetic oligonucleotide
  Sense strand starting at position 2421 of SEQ ID NO: 317675
cuguguauuuaucugguga

SEQ ID NO: 503230 - RNA, 19 nt, Artificial Sequence
  Description of Artificial Sequence: Synthetic oligonucleotide
  Antisense strand to SEQ ID NO: 503229
ucaccagauaaauacacag

SEQ ID NO: 503231 - RNA, 19 nt, Artificial Sequence
  Description of Artificial Sequence: Synthetic oligonucleotide
  Sense strand starting at position 2422 of SEQ ID NO: 317675
uguguauuuaucuggugac

SEQ ID NO: 503232 - RNA, 19 nt, Artificial Sequence
  Description of Artificial Sequence: Synthetic oligonucleotide
  Antisense strand to SEQ ID NO: 503231
gucaccagauaaauacaca

SEQ ID NO: 503233 - RNA, 19 nt, Artificial Sequence
  Description of Artificial Sequence: Synthetic oligonucleotide
  Sense strand starting at position 2436 of SEQ ID NO: 317675
gugacaugucacuaaucua

SEQ ID NO: 503234 - RNA, 19 nt, Artificial Sequence
  Description of Artificial Sequence: Synthetic oligonucleotide
  Antisense strand to SEQ ID NO: 503233
uagauuagugacaugucac

SEQ ID NO: 503235 - RNA, 19 nt, Artificial Sequence
  Description of Artificial Sequence: Synthetic oligonucleotide
  Sense strand starting at position 2511 of SEQ ID NO: 317675
ggaaaccacucacuguaua

SEQ ID NO: 503236 - RNA, 19 nt, Artificial Sequence
  Description of Artificial Sequence: Synthetic oligonucleotide
  Antisense strand to SEQ ID NO: 503235
uauacagugagugguuucc

SEQ ID NO: 503237 - RNA, 19 nt, Artificial Sequence
  Description of Artificial Sequence: Synthetic oligonucleotide
  Sense strand starting at position 2567 of SEQ ID NO: 317675
uguagaaagauacguacua

SEQ ID NO: 503238 - RNA, 19 nt, Artificial Sequence
  Description of Artificial Sequence: Synthetic oligonucleotide
  Antisense strand to SEQ ID NO: 503237
uaguacguaucuuucuaca

SEQ ID NO: 503239 - RNA, 19 nt, Artificial Sequence
  Description of Artificial Sequence: Synthetic oligonucleotide
  Sense strand starting at position 2568 of SEQ ID NO: 317675
guagaaagauacguacuaa

SEQ ID NO: 503240 - RNA, 19 nt, Artificial Sequence
  Description of Artificial Sequence: Synthetic oligonucleotide
  Antisense strand to SEQ ID NO: 503239
uuaguacguaucuuucuac

SEQ ID NO: 503241 - RNA, 19 nt, Artificial Sequence
  Description of Artificial Sequence: Synthetic oligonucleotide
  Sense strand starting at position 2609 of SEQ ID NO: 317675
ggccacugugauuagagua

SEQ ID NO: 503242 - RNA, 19 nt, Artificial Sequence
  Description of Artificial Sequence: Synthetic oligonucleotide
  Antisense strand to SEQ ID NO: 503241
uacucuaaucacaguggcc

SEQ ID NO: 503243 - RNA, 19 nt, Artificial Sequence
  Description of Artificial Sequence: Synthetic oligonucleotide
  Sense strand starting at position 2616 of SEQ ID NO: 317675
gugauuagaguaggagauu

SEQ ID NO: 503244 - RNA, 19 nt, Artificial Sequence
  Description of Artificial Sequence: Synthetic oligonucleotide
  Antisense strand to SEQ ID NO: 503243
aaucuccuacucuaaucac

SEQ ID NO: 503245 - RNA, 19 nt, Artificial Sequence
  Description of Artificial Sequence: Synthetic oligonucleotide
  Sense strand starting at position 2617 of SEQ ID NO: 317675
ugauuagaguaggagauuu

SEQ ID NO: 503246 - RNA, 19 nt, Artificial Sequence
  Description of Artificial Sequence: Synthetic oligonucleotide
  Antisense strand to SEQ ID NO: 503245
aaaucuccuacucuaauca

SEQ ID NO: 503247 - RNA, 19 nt, Artificial Sequence
  Description of Artificial Sequence: Synthetic oligonucleotide
  Sense strand starting at position 2625 of SEQ ID NO: 317675
guaggagauuucuaacuug

SEQ ID NO: 503248 - RNA, 19 nt, Artificial Sequence
  Description of Artificial Sequence: Synthetic oligonucleotide
  Antisense strand to SEQ ID NO: 503247
caaguuagaaaucuccuac

SEQ ID NO: 503249 - RNA, 19 nt, Artificial Sequence
  Description of Artificial Sequence: Synthetic oligonucleotide
  Sense strand starting at position 2647 of SEQ ID NO: 317675
uguaucaaucucuguauuu

SEQ ID NO: 503250 - RNA, 19 nt, Artificial Sequence
  Description of Artificial Sequence: Synthetic oligonucleotide
  Antisense strand to SEQ ID NO: 503249
aaauacagagauugauaca

SEQ ID NO: 503251 - RNA, 19 nt, Artificial Sequence
  Description of Artificial Sequence: Synthetic oligonucleotide
  Sense strand starting at position 2673 of SEQ ID NO: 317675
guuaauaaccaguaucuau

SEQ ID NO: 503252 - RNA, 19 nt, Artificial Sequence
  Description of Artificial Sequence: Synthetic oligonucleotide
  Antisense strand to SEQ ID NO: 503251
auagauacugguuauuaac

SEQ ID NO: 503253 - RNA, 19 nt, Artificial Sequence
  Description of Artificial Sequence: Synthetic oligonucleotide
  Sense strand starting at position 2774 of SEQ ID NO: 317675
gucaaauagccauauagua

SEQ ID NO: 503254 - RNA, 19 nt, Artificial Sequence
  Description of Artificial Sequence: Synthetic oligonucleotide
  Antisense strand to SEQ ID NO: 503253
uacuauauggcuauuugac

SEQ ID NO: 503255 - RNA, 19 nt, Artificial Sequence
  Description of Artificial Sequence: Synthetic oligonucleotide
  Sense strand starting at position 2928 of SEQ ID NO: 317675
cugugagaauaggucuaau

SEQ ID NO: 503256 - RNA, 19 nt, Artificial Sequence
  Description of Artificial Sequence: Synthetic oligonucleotide
  Antisense strand to SEQ ID NO: 503255
auuagaccuauucucacag

SEQ ID NO: 503257 - RNA, 19 nt, Artificial Sequence
  Description of Artificial Sequence: Synthetic oligonucleotide
  Sense strand starting at position 3441 of SEQ ID NO: 317675
ggauucuaauagcuuuauu

SEQ ID NO: 503258 - RNA, 19 nt, Artificial Sequence
  Description of Artificial Sequence: Synthetic oligonucleotide
  Antisense strand to SEQ ID NO: 503257
aauaaagcuauuagaaucc

SEQ ID NO: 503259 - RNA, 19 nt, Artificial Sequence
  Description of Artificial Sequence: Synthetic oligonucleotide
  Sense strand starting at position 3573 of SEQ ID NO: 317675
ggugacuguguagaugaua

SEQ ID NO: 503260 - RNA, 19 nt, Artificial Sequence
  Description of Artificial Sequence: Synthetic oligonucleotide
  Antisense strand to SEQ ID NO: 503259
uaucaucuacacagucacc

SEQ ID NO: 503261 - RNA, 19 nt, Artificial Sequence
  Description of Artificial Sequence: Synthetic oligonucleotide
  Sense strand starting at position 3581 of SEQ ID NO: 317675
uguagaugauacccucaaa

SEQ ID NO: 503262 - RNA, 19 nt, Artificial Sequence
  Description of Artificial Sequence: Synthetic oligonucleotide
  Antisense strand to SEQ ID NO: 503261
uuugaggguaucaucuaca

SEQ ID NO: 503263 - RNA, 19 nt, Artificial Sequence
  Description of Artificial Sequence: Synthetic oligonucleotide
  Sense strand starting at position 3697 of SEQ ID NO: 317675
ucaggugccauauagauga

SEQ ID NO: 503264 - RNA, 19 nt, Artificial Sequence
  Description of Artificial Sequence: Synthetic oligonucleotide
  Antisense strand to SEQ ID NO: 503263
ucaucuauauggcaccuga

SEQ ID NO: 503265 - RNA, 19 nt, Artificial Sequence
  Description of Artificial Sequence: Synthetic oligonucleotide
  Sense strand starting at position 3884 of SEQ ID NO: 317675
ugcuguuaaagugaggaca

SEQ ID NO: 503266 - RNA, 19 nt, Artificial Sequence
  Description of Artificial Sequence: Synthetic oligonucleotide
  Antisense strand to SEQ ID NO: 503265
uguccucacuuuaacagca

SEQ ID NO: 503267 - RNA, 19 nt, Artificial Sequence
  Description of Artificial Sequence: Synthetic oligonucleotide
  Sense strand starting at position 116 of SEQ ID NO: 317676
acugguaguucucuuauaa

SEQ ID NO: 503268 - RNA, 19 nt, Artificial Sequence
  Description of Artificial Sequence: Synthetic oligonucleotide
  Antisense strand to SEQ ID NO: 503267
uuauaagagaacuaccagu

SEQ ID NO: 503269 - RNA, 19 nt, Artificial Sequence
  Description of Artificial Sequence: Synthetic oligonucleotide
  Sense strand starting at position 513 of SEQ ID NO: 317676
uuaagaacuggucaucugu

SEQ ID NO: 503270 - RNA, 19 nt, Artificial Sequence
  Description of Artificial Sequence: Synthetic oligonucleotide
  Antisense strand to SEQ ID NO: 503269
acagaugaccaguucuuaa

SEQ ID NO: 503271 - RNA, 19 nt, Artificial Sequence
  Description of Artificial Sequence: Synthetic oligonucleotide
  Sense strand starting at position 515 of SEQ ID NO: 317676
aagaacuggucaucuguga

SEQ ID NO: 503272 - RNA, 19 nt, Artificial Sequence
  Description of Artificial Sequence: Synthetic oligonucleotide
  Antisense strand to SEQ ID NO: 503271
ucacagaugaccaguucuu

SEQ ID NO: 503273 - RNA, 19 nt, Artificial Sequence
  Description of Artificial Sequence: Synthetic oligonucleotide
  Sense strand starting at position 558 of SEQ ID NO: 317676
gugguccuuccacgagaaa

SEQ ID NO: 503274 - RNA, 19 nt, Artificial Sequence
  Description of Artificial Sequence: Synthetic oligonucleotide
  Antisense strand to SEQ ID NO: 503273
uuucucguggaaggaccac

SEQ ID NO: 503275 - RNA, 19 nt, Artificial Sequence
  Description of Artificial Sequence: Synthetic oligonucleotide
  Sense strand starting at position 559 of SEQ ID NO: 317676
ugguccuuccacgagaaau

SEQ ID NO: 503276 - RNA, 19 nt, Artificial Sequence
  Description of Artificial Sequence: Synthetic oligonucleotide
  Antisense strand to SEQ ID NO: 503275
auuucucguggaaggacca

SEQ ID NO: 503277 - RNA, 19 nt, Artificial Sequence
  Description of Artificial Sequence: Synthetic oligonucleotide
  Sense strand starting at position 561 of SEQ ID NO: 317676
guccuuccacgagaaauag

SEQ ID NO: 503278 - RNA, 19 nt, Artificial Sequence
  Description of Artificial Sequence: Synthetic oligonucleotide
  Antisense strand to SEQ ID NO: 503277
cuauuucucguggaaggac

SEQ ID NO: 503279 - RNA, 19 nt, Artificial Sequence
  Description of Artificial Sequence: Synthetic oligonucleotide
  Sense strand starting at position 598 of SEQ ID NO: 317676
ucagucuuaugaucgugaa

SEQ ID NO: 503280 - RNA, 19 nt, Artificial Sequence
  Description of Artificial Sequence: Synthetic oligonucleotide
  Antisense strand to SEQ ID NO: 503279
uucacgaucauaagacuga

SEQ ID NO: 503281 - RNA, 19 nt, Artificial Sequence
  Description of Artificial Sequence: Synthetic oligonucleotide
  Sense strand starting at position 602 of SEQ ID NO: 317676
ucuuaugaucgugaauaaa

SEQ ID NO: 503282 - RNA, 19 nt, Artificial Sequence
  Description of Artificial Sequence: Synthetic oligonucleotide
  Antisense strand to SEQ ID NO: 503281
uuuauucacgaucauaaga

SEQ ID NO: 503283 - RNA, 19 nt, Artificial Sequence
  Description of Artificial Sequence: Synthetic oligonucleotide
  Sense strand starting at position 660 of SEQ ID NO: 317676
aagaaagaccgcuguuaaa

SEQ ID NO: 503284 - RNA, 19 nt, Artificial Sequence
  Description of Artificial Sequence: Synthetic oligonucleotide
  Antisense strand to SEQ ID NO: 503283
uuuaacagcggucuuucuu

SEQ ID NO: 503285 - RNA, 19 nt, Artificial Sequence
  Description of Artificial Sequence: Synthetic oligonucleotide
  Sense strand starting at position 847 of SEQ ID NO: 317676
cuaagaauucuacaaucgu

SEQ ID NO: 503286 - RNA, 19 nt, Artificial Sequence
  Description of Artificial Sequence: Synthetic oligonucleotide
  Antisense strand to SEQ ID NO: 503285
acgauuguagaauucuuag

SEQ ID NO: 503287 - RNA, 19 nt, Artificial Sequence
  Description of Artificial Sequence: Synthetic oligonucleotide
  Sense strand starting at position 1060 of SEQ ID NO: 317676
gacguuugguaacugagaa

SEQ ID NO: 503288 - RNA, 19 nt, Artificial Sequence
  Description of Artificial Sequence: Synthetic oligonucleotide
  Antisense strand to SEQ ID NO: 503287
uucucaguuaccaaacguc

SEQ ID NO: 503289 - RNA, 19 nt, Artificial Sequence
  Description of Artificial Sequence: Synthetic oligonucleotide
  Sense strand starting at position 1061 of SEQ ID NO: 317676
acguuugguaacugagaau

SEQ ID NO: 503290 - RNA, 19 nt, Artificial Sequence
  Description of Artificial Sequence: Synthetic oligonucleotide
  Antisense strand to SEQ ID NO: 503289
auucucaguuaccaaacgu

SEQ ID NO: 503291 - RNA, 19 nt, Artificial Sequence
  Description of Artificial Sequence: Synthetic oligonucleotide
  Sense strand starting at position 1135 of SEQ ID NO: 317676
uccacagauccgugaacag

SEQ ID NO: 503292 - RNA, 19 nt, Artificial Sequence
  Description of Artificial Sequence: Synthetic oligonucleotide
  Antisense strand to SEQ ID NO: 503291
cuguucacggaucugugga

SEQ ID NO: 503293 - RNA, 19 nt, Artificial Sequence
  Description of Artificial Sequence: Synthetic oligonucleotide
  Sense strand starting at position 1553 of SEQ ID NO: 317676
uccagugaguacucuccua

SEQ ID NO: 503294 - RNA, 19 nt, Artificial Sequence
  Description of Artificial Sequence: Synthetic oligonucleotide
  Antisense strand to SEQ ID NO: 503293
uaggagaguacucacugga

SEQ ID NO: 503295 - RNA, 19 nt, Artificial Sequence
  Description of Artificial Sequence: Synthetic oligonucleotide
  Sense strand starting at position 1740 of SEQ ID NO: 317676
gggagagucucugcacuac

SEQ ID NO: 503296 - RNA, 19 nt, Artificial Sequence
  Description of Artificial Sequence: Synthetic oligonucleotide
  Antisense strand to SEQ ID NO: 503295
guagugcagagacucuccc

SEQ ID NO: 503297 - RNA, 19 nt, Artificial Sequence
  Description of Artificial Sequence: Synthetic oligonucleotide
  Sense strand starting at position 1755 of SEQ ID NO: 317676
cuaccaucagccugaguau

SEQ ID NO: 503298 - RNA, 19 nt, Artificial Sequence
  Description of Artificial Sequence: Synthetic oligonucleotide
  Antisense strand to SEQ ID NO: 503297
auacucaggcugaugguag

SEQ ID NO: 503299 - RNA, 19 nt, Artificial Sequence
  Description of Artificial Sequence: Synthetic oligonucleotide
  Sense strand starting at position 1768 of SEQ ID NO: 317676
gaguauuuaugcucugcag

SEQ ID NO: 503300 - RNA, 19 nt, Artificial Sequence
  Description of Artificial Sequence: Synthetic oligonucleotide
  Antisense strand to SEQ ID NO: 503299
cugcagagcauaaauacuc

SEQ ID NO: 503301 - RNA, 19 nt, Artificial Sequence
  Description of Artificial Sequence: Synthetic oligonucleotide
  Sense strand starting at position 1770 of SEQ ID NO: 317676
guauuuaugcucugcagag

SEQ ID NO: 503302 - RNA, 19 nt, Artificial Sequence
  Description of Artificial Sequence: Synthetic oligonucleotide
  Antisense strand to SEQ ID NO: 503301
cucugcagagcauaaauac

SEQ ID NO: 503303 - RNA, 19 nt, Artificial Sequence
  Description of Artificial Sequence: Synthetic oligonucleotide
  Sense strand starting at position 1814 of SEQ ID NO: 317676
uuaagaaacucaguaguaa

SEQ ID NO: 503304 - RNA, 19 nt, Artificial Sequence
  Description of Artificial Sequence: Synthetic oligonucleotide
  Antisense strand to SEQ ID NO: 503303
uuacuacugaguuucuuaa

SEQ ID NO: 503305 - RNA, 19 nt, Artificial Sequence
  Description of Artificial Sequence: Synthetic oligonucleotide
  Sense strand starting at position 1972 of SEQ ID NO: 317676
gagaacuagcgcuacagaa

SEQ ID NO: 503306 - RNA, 19 nt, Artificial Sequence
  Description of Artificial Sequence: Synthetic oligonucleotide
  Antisense strand to SEQ ID NO: 503305
uucuguagcgcuaguucuc

SEQ ID NO: 503307 - RNA, 19 nt, Artificial Sequence
  Description of Artificial Sequence: Synthetic oligonucleotide
  Sense strand starting at position 2026 of SEQ ID NO: 317676
acccguuuccgggaaauga

SEQ ID NO: 503308 - RNA, 19 nt, Artificial Sequence
  Description of Artificial Sequence: Synthetic oligonucleotide
  Antisense strand to SEQ ID NO: 503307
ucauuucccggaaacgggu

SEQ ID NO: 503309 - RNA, 19 nt, Artificial Sequence
  Description of Artificial Sequence: Synthetic oligonucleotide
  Sense strand starting at position 2336 of SEQ ID NO: 317676
guucaauguguuugauagg

SEQ ID NO: 503310 - RNA, 19 nt, Artificial Sequence
  Description of Artificial Sequence: Synthetic oligonucleotide
  Antisense strand to SEQ ID NO: 503309
ccuaucaaacacauugaac

SEQ ID NO: 503311 - RNA, 19 nt, Artificial Sequence
  Description of Artificial Sequence: Synthetic oligonucleotide
  Sense strand starting at position 2341 of SEQ ID NO: 317676
auguguuugauagguuuaa

SEQ ID NO: 503312 - RNA, 19 nt, Artificial Sequence
  Description of Artificial Sequence: Synthetic oligonucleotide
  Antisense strand to SEQ ID NO: 503311
uuaaaccuaucaaacacau

SEQ ID NO: 503313 - RNA, 19 nt, Artificial Sequence
  Description of Artificial Sequence: Synthetic oligonucleotide
  Sense strand starting at position 2345 of SEQ ID NO: 317676
guuugauagguuuaauaug

SEQ ID NO: 503314 - RNA, 19 nt, Artificial Sequence
  Description of Artificial Sequence: Synthetic oligonucleotide
  Antisense strand to SEQ ID NO: 503313
cauauuaaaccuaucaaac

SEQ ID NO: 503315 - RNA, 19 nt, Artificial Sequence
  Description of Artificial Sequence: Synthetic oligonucleotide
  Sense strand starting at position 2445 of SEQ ID NO: 317676
gugcaaucaccguucugca

SEQ ID NO: 503316 - RNA, 19 nt, Artificial Sequence
  Description of Artificial Sequence: Synthetic oligonucleotide
  Antisense strand to SEQ ID NO: 503315
ugcagaacggugauugcac

SEQ ID NO: 503317 - RNA, 19 nt, Artificial Sequence
  Description of Artificial Sequence: Synthetic oligonucleotide
  Sense strand starting at position 2501 of SEQ ID NO: 317676
agcgguuguaggagcgaaa

SEQ ID NO: 503318 - RNA, 19 nt, Artificial Sequence
  Description of Artificial Sequence: Synthetic oligonucleotide
  Antisense strand to SEQ ID NO: 503317
uuucgcuccuacaaccgcu

SEQ ID NO: 503319 - RNA, 19 nt, Artificial Sequence
  Description of Artificial Sequence: Synthetic oligonucleotide
  Sense strand starting at position 2609 of SEQ ID NO: 317676
ggcaaacgugcugauacaa

SEQ ID NO: 503320 - RNA, 19 nt, Artificial Sequence
  Description of Artificial Sequence: Synthetic oligonucleotide
  Antisense strand to SEQ ID NO: 503319
uuguaucagcacguuugcc

SEQ ID NO: 503321 - RNA, 19 nt, Artificial Sequence
  Description of Artificial Sequence: Synthetic oligonucleotide
  Sense strand starting at position 2936 of SEQ ID NO: 317676
cgaugcaaugccuaccauu

SEQ ID NO: 503322 - RNA, 19 nt, Artificial Sequence
  Description of Artificial Sequence: Synthetic oligonucleotide
  Antisense strand to SEQ ID NO: 503321
aaugguaggcauugcaucg

SEQ ID NO: 503323 - RNA, 19 nt, Artificial Sequence
  Description of Artificial Sequence: Synthetic oligonucleotide
  Sense strand starting at position 3034 of SEQ ID NO: 317676
cgguuaaacguguuuagcu

SEQ ID NO: 503324 - RNA, 19 nt, Artificial Sequence
  Description of Artificial Sequence: Synthetic oligonucleotide
  Antisense strand to SEQ ID NO: 503323
agcuaaacacguuuaaccg

SEQ ID NO: 503325 - RNA, 19 nt, Artificial Sequence
  Description of Artificial Sequence: Synthetic oligonucleotide
  Sense strand starting at position 3180 of SEQ ID NO: 317676
uccugacuuccacgggagu

SEQ ID NO: 503326 - RNA, 19 nt, Artificial Sequence
  Description of Artificial Sequence: Synthetic oligonucleotide
  Antisense strand to SEQ ID NO: 503325
acucccguggaagucagga

SEQ ID NO: 503327 - RNA, 19 nt, Artificial Sequence
  Description of Artificial Sequence: Synthetic oligonucleotide
  Sense strand starting at position 3182 of SEQ ID NO: 317676
cugacuuccacgggaguuu

SEQ ID NO: 503328 - RNA, 19 nt, Artificial Sequence
  Description of Artificial Sequence: Synthetic oligonucleotide
  Antisense strand to SEQ ID NO: 503327
aaacucccguggaagucag

SEQ ID NO: 503329 - RNA, 19 nt, Artificial Sequence
  Description of Artificial Sequence: Synthetic oligonucleotide
  Sense strand starting at position 3277 of SEQ ID NO: 317676
uaaacuggucaucgcuaaa

SEQ ID NO: 503330 - RNA, 19 nt, Artificial Sequence
  Description of Artificial Sequence: Synthetic oligonucleotide
  Antisense strand to SEQ ID NO: 503329
uuuagcgaugaccaguuua

SEQ ID NO: 503331 - RNA, 19 nt, Artificial Sequence
  Description of Artificial Sequence: Synthetic oligonucleotide
  Sense strand starting at position 3280 of SEQ ID NO: 317676
acuggucaucgcuaaaccu

SEQ ID NO: 503332 - RNA, 19 nt, Artificial Sequence
  Description of Artificial Sequence: Synthetic oligonucleotide
  Antisense strand to SEQ ID NO: 503331
agguuuagcgaugaccagu

SEQ ID NO: 503333 - RNA, 19 nt, Artificial Sequence
  Description of Artificial Sequence: Synthetic oligonucleotide
  Sense strand starting at position 3393 of SEQ ID NO: 317676
cggaacuugcuaggacuaa

SEQ ID NO: 503334 - RNA, 19 nt, Artificial Sequence
  Description of Artificial Sequence: Synthetic oligonucleotide
  Antisense strand to SEQ ID NO: 503333
uuaguccuagcaaguuccg

SEQ ID NO: 503335 - RNA, 19 nt, Artificial Sequence
  Description of Artificial Sequence: Synthetic oligonucleotide
  Sense strand starting at position 3449 of SEQ ID NO: 317676
uuagaaauccgaggccacu

SEQ ID NO: 503336 - RNA, 19 nt, Artificial Sequence
  Description of Artificial Sequence: Synthetic oligonucleotide
  Antisense strand to SEQ ID NO: 503335
aguggccucggauuucuaa

SEQ ID NO: 503337 - RNA, 19 nt, Artificial Sequence
  Description of Artificial Sequence: Synthetic oligonucleotide
  Sense strand starting at position 3500 of SEQ ID NO: 317676
ggguaacuucgccuucgca

SEQ ID NO: 503338 - RNA, 19 nt, Artificial Sequence
  Description of Artificial Sequence: Synthetic oligonucleotide
  Antisense strand to SEQ ID NO: 503337
ugcgaaggcgaaguuaccc

SEQ ID NO: 503339 - RNA, 19 nt, Artificial Sequence
  Description of Artificial Sequence: Synthetic oligonucleotide
  Sense strand starting at position 3501 of SEQ ID NO: 317676
gguaacuucgccuucgcau

SEQ ID NO: 503340 - RNA, 19 nt, Artificial Sequence
  Description of Artificial Sequence: Synthetic oligonucleotide
  Antisense strand to SEQ ID NO: 503339
augcgaaggcgaaguuacc

SEQ ID NO: 503341 - RNA, 19 nt, Artificial Sequence
  Description of Artificial Sequence: Synthetic oligonucleotide
  Sense strand starting at position 3534 of SEQ ID NO: 317676
guuccuacggccuagauau

SEQ ID NO: 503342 - RNA, 19 nt, Artificial Sequence
  Description of Artificial Sequence: Synthetic oligonucleotide
  Antisense strand to SEQ ID NO: 503341
auaucuaggccguaggaac

SEQ ID NO: 503343 - RNA, 19 nt, Artificial Sequence
  Description of Artificial Sequence: Synthetic oligonucleotide
  Sense strand starting at position 3589 of SEQ ID NO: 317676
ggacuugcuugggcugaga

SEQ ID NO: 503344 - RNA, 19 nt, Artificial Sequence
  Description of Artificial Sequence: Synthetic oligonucleotide
  Antisense strand to SEQ ID NO: 503343
ucucagcccaagcaagucc

SEQ ID NO: 503345 - RNA, 19 nt, Artificial Sequence
  Description of Artificial Sequence: Synthetic oligonucleotide
  Sense strand starting at position 3669 of SEQ ID NO: 317676
cgaaacuugcuaggacuaa

SEQ ID NO: 503346 - RNA, 19 nt, Artificial Sequence
  Description of Artificial Sequence: Synthetic oligonucleotide
  Antisense strand to SEQ ID NO: 503345
uuaguccuagcaaguuucg

SEQ ID NO: 503347 - RNA, 19 nt, Artificial Sequence
  Description of Artificial Sequence: Synthetic oligonucleotide
  Sense strand starting at position 179 of SEQ ID NO: 317677
ggcccuuauccagaaacug

SEQ ID NO: 503348 - RNA, 19 nt, Artificial Sequence
  Description of Artificial Sequence: Synthetic oligonucleotide
  Antisense strand to SEQ ID NO: 503347
caguuucuggauaagggcc

SEQ ID NO: 503349 - RNA, 19 nt, Artificial Sequence
  Description of Artificial Sequence: Synthetic oligonucleotide
  Sense strand starting at position 206 of SEQ ID NO: 317677
uucuguaucucagcagaug

SEQ ID NO: 503350 - RNA, 19 nt, Artificial Sequence
  Description of Artificial Sequence: Synthetic oligonucleotide
  Antisense strand to SEQ ID NO: 503349
caucugcugagauacagaa

SEQ ID NO: 503351 - RNA, 19 nt, Artificial Sequence
  Description of Artificial Sequence: Synthetic oligonucleotide
  Sense strand starting at position 360 of SEQ ID NO: 317677
aguugaauccuagaauguc

SEQ ID NO: 503352 - RNA, 19 nt, Artificial Sequence
  Description of Artificial Sequence: Synthetic oligonucleotide
  Antisense strand to SEQ ID NO: 503351
gacauucuaggauucaacu

SEQ ID NO: 503353 - RNA, 19 nt, Artificial Sequence
  Description of Artificial Sequence: Synthetic oligonucleotide
  Sense strand starting at position 403 of SEQ ID NO: 317677
agcagacuuugcuccagau

SEQ ID NO: 503354 - RNA, 19 nt, Artificial Sequence
  Description of Artificial Sequence: Synthetic oligonucleotide
  Antisense strand to SEQ ID NO: 503353
aucuggagcaaagucugcu

SEQ ID NO: 503355 - RNA, 19 nt, Artificial Sequence
  Description of Artificial Sequence: Synthetic oligonucleotide
  Sense strand starting at position 437 of SEQ ID NO: 317677
agagaaagggcuugcucaa

SEQ ID NO: 503356 - RNA, 19 nt, Artificial Sequence
  Description of Artificial Sequence: Synthetic oligonucleotide
  Antisense strand to SEQ ID NO: 503355
uugagcaagcccuuucucu

SEQ ID NO: 503357 - RNA, 19 nt, Artificial Sequence
  Description of Artificial Sequence: Synthetic oligonucleotide
  Sense strand starting at position 611 of SEQ ID NO: 317677
ggauaugccaucuggguca

SEQ ID NO: 503358 - RNA, 19 nt, Artificial Sequence
  Description of Artificial Sequence: Synthetic oligonucleotide
  Antisense strand to SEQ ID NO: 503357
ugacccagauggcauaucc

SEQ ID NO: 503359 - RNA, 19 nt, Artificial Sequence
  Description of Artificial Sequence: Synthetic oligonucleotide
  Sense strand starting at position 726 of SEQ ID NO: 317677
ccgggagccauauguccaa

SEQ ID NO: 503360 - RNA, 19 nt, Artificial Sequence
  Description of Artificial Sequence: Synthetic oligonucleotide
  Antisense strand to SEQ ID NO: 503359
uuggacauauggcucccgg

SEQ ID NO: 503361 - RNA, 19 nt, Artificial Sequence
  Description of Artificial Sequence: Synthetic oligonucleotide
  Sense strand starting at position 729 of SEQ ID NO: 317677
ggagccauauguccaaauu

SEQ ID NO: 503362 - RNA, 19 nt, Artificial Sequence
  Description of Artificial Sequence: Synthetic oligonucleotide
  Antisense strand to SEQ ID NO: 503361
aauuuggacauauggcucc

SEQ ID NO: 503363 - RNA, 19 nt, Artificial Sequence
  Description of Artificial Sequence: Synthetic oligonucleotide
  Sense strand starting at position 811 of SEQ ID NO: 317677
ccagauuaguugucccaaa

SEQ ID NO: 503364 - RNA, 19 nt, Artificial Sequence
  Description of Artificial Sequence: Synthetic oligonucleotide
  Antisense strand to SEQ ID NO: 503363
uuugggacaacuaaucugg

SEQ ID NO: 503365 - RNA, 19 nt, Artificial Sequence
  Description of Artificial Sequence: Synthetic oligonucleotide
  Sense strand starting at position 812 of SEQ ID NO: 317677
cagauuaguugucccaaag

SEQ ID NO: 503366 - RNA, 19 nt, Artificial Sequence
  Description of Artificial Sequence: Synthetic oligonucleotide
  Antisense strand to SEQ ID NO: 503365
cuuugggacaacuaaucug

SEQ ID NO: 503367 - RNA, 19 nt, Artificial Sequence
  Description of Artificial Sequence: Synthetic oligonucleotide
  Sense strand starting at position 951 of SEQ ID NO: 317677
agccauuguuuccuuugaa

SEQ ID NO: 503368 - RNA, 19 nt, Artificial Sequence
  Description of Artificial Sequence: Synthetic oligonucleotide
  Antisense strand to SEQ ID NO: 503367
uucaaaggaaacaauggcu

SEQ ID NO: 503369 - RNA, 19 nt, Artificial Sequence
  Description of Artificial Sequence: Synthetic oligonucleotide
  Sense strand starting at position 952 of SEQ ID NO: 317677
gccauuguuuccuuugaaa

SEQ ID NO: 503370 - RNA, 19 nt, Artificial Sequence
  Description of Artificial Sequence: Synthetic oligonucleotide
  Antisense strand to SEQ ID NO: 503369
uuucaaaggaaacaauggc

SEQ ID NO: 503371 - RNA, 19 nt, Artificial Sequence
  Description of Artificial Sequence: Synthetic oligonucleotide
  Sense strand starting at position 979 of SEQ ID NO: 317677
guuucucaacuauggacuu

SEQ ID NO: 503372 - RNA, 19 nt, Artificial Sequence
  Description of Artificial Sequence: Synthetic oligonucleotide
  Antisense strand to SEQ ID NO: 503371
aaguccauaguugagaaac

SEQ ID NO: 503373 - RNA, 19 nt, Artificial Sequence
  Description of Artificial Sequence: Synthetic oligonucleotide
  Sense strand starting at position 1258 of SEQ ID NO: 317677
caaugaggcccugagguau

SEQ ID NO: 503374 - RNA, 19 nt, Artificial Sequence
  Description of Artificial Sequence: Synthetic oligonucleotide
  Antisense strand to SEQ ID NO: 503373
auaccucagggccucauug

SEQ ID NO: 503375 - RNA, 19 nt, Artificial Sequence
  Description of Artificial Sequence: Synthetic oligonucleotide
  Sense strand starting at position 2004 of SEQ ID NO: 317677
uccuuagcucuuggaaucu

SEQ ID NO: 503376 - RNA, 19 nt, Artificial Sequence
  Description of Artificial Sequence: Synthetic oligonucleotide
  Antisense strand to SEQ ID NO: 503375
agauuccaagagcuaagga

SEQ ID NO: 503377 - RNA, 19 nt, Artificial Sequence
  Description of Artificial Sequence: Synthetic oligonucleotide
  Sense strand starting at position 2016 of SEQ ID NO: 317677
ggaaucuuagaaugucacu

SEQ ID NO: 503378 - RNA, 19 nt, Artificial Sequence
  Description of Artificial Sequence: Synthetic oligonucleotide
  Antisense strand to SEQ ID NO: 503377
agugacauucuaagauucc

SEQ ID NO: 503379 - RNA, 19 nt, Artificial Sequence
  Description of Artificial Sequence: Synthetic oligonucleotide
  Sense strand starting at position 2052 of SEQ ID NO: 317677
gggagaaccuccucaguuu

SEQ ID NO: 503380 - RNA, 19 nt, Artificial Sequence
  Description of Artificial Sequence: Synthetic oligonucleotide
  Antisense strand to SEQ ID NO: 503379
aaacugaggagguucuccc

SEQ ID NO: 503381 - RNA, 19 nt, Artificial Sequence
  Description of Artificial Sequence: Synthetic oligonucleotide
  Sense strand starting at position 2082 of SEQ ID NO: 317677
aucugagacugagaaggau

SEQ ID NO: 503382 - RNA, 19 nt, Artificial Sequence
  Description of Artificial Sequence: Synthetic oligonucleotide
  Antisense strand to SEQ ID NO: 503381
auccuucucagucucagau

SEQ ID NO: 503383 - RNA, 19 nt, Artificial Sequence
  Description of Artificial Sequence: Synthetic oligonucleotide
  Sense strand starting at position 2126 of SEQ ID NO: 317677
gcccuucagggcuagaagu

SEQ ID NO: 503384 - RNA, 19 nt, Artificial Sequence
  Description of Artificial Sequence: Synthetic oligonucleotide
  Antisense strand to SEQ ID NO: 503383
acuucuagcccugaagggc

SEQ ID NO: 503385 - RNA, 19 nt, Artificial Sequence
  Description of Artificial Sequence: Synthetic oligonucleotide
  Sense strand starting at position 2197 of SEQ ID NO: 317677
gccaaagcuuuguugagaa

SEQ ID NO: 503386 - RNA, 19 nt, Artificial Sequence
  Description of Artificial Sequence: Synthetic oligonucleotide
  Antisense strand to SEQ ID NO: 503385
uucucaacaaagcuuuggc

SEQ ID NO: 503387 - RNA, 19 nt, Artificial Sequence
  Description of Artificial Sequence: Synthetic oligonucleotide
  Sense strand starting at position 2242 of SEQ ID NO: 317677
acuuuaucugccugaucag

SEQ ID NO: 503388 - RNA, 19 nt, Artificial Sequence
  Description of Artificial Sequence: Synthetic oligonucleotide
  Antisense strand to SEQ ID NO: 503387
cugaucaggcagauaaagu

SEQ ID NO: 503389 - RNA, 19 nt, Artificial Sequence
  Description of Artificial Sequence: Synthetic oligonucleotide
  Sense strand starting at position 2243 of SEQ ID NO: 317677
cuuuaucugccugaucaga

SEQ ID NO: 503390 - RNA, 19 nt, Artificial Sequence
  Description of Artificial Sequence: Synthetic oligonucleotide
  Antisense strand to SEQ ID NO: 503389
ucugaucaggcagauaaag

SEQ ID NO: 503391 - RNA, 19 nt, Artificial Sequence
  Description of Artificial Sequence: Synthetic oligonucleotide
  Sense strand starting at position 2245 of SEQ ID NO: 317677
uuaucugccugaucagauu

SEQ ID NO: 503392 - RNA, 19 nt, Artificial Sequence
  Description of Artificial Sequence: Synthetic oligonucleotide
  Antisense strand to SEQ ID NO: 503391
aaucugaucaggcagauaa

SEQ ID NO: 503393 - RNA, 19 nt, Artificial Sequence
  Description of Artificial Sequence: Synthetic oligonucleotide
  Sense strand starting at position 2279 of SEQ ID NO: 317677
cucauuaggucggugacau

SEQ ID NO: 503394 - RNA, 19 nt, Artificial Sequence
  Description of Artificial Sequence: Synthetic oligonucleotide
  Antisense strand to SEQ ID NO: 503393
augucaccgaccuaaugag

SEQ ID NO: 503395 - RNA, 19 nt, Artificial Sequence
  Description of Artificial Sequence: Synthetic oligonucleotide
  Sense strand starting at position 2426 of SEQ ID NO: 317677
guaauccagcgcuagaaca

SEQ ID NO: 503396 - RNA, 19 nt, Artificial Sequence
  Description of Artificial Sequence: Synthetic oligonucleotide
  Antisense strand to SEQ ID NO: 503395
uguucuagcgcuggauuac

SEQ ID NO: 503397 - RNA, 19 nt, Artificial Sequence
  Description of Artificial Sequence: Synthetic oligonucleotide
  Sense strand starting at position 2452 of SEQ ID NO: 317677
uugauaaacugagaauaca

SEQ ID NO: 503398 - RNA, 19 nt, Artificial Sequence
  Description of Artificial Sequence: Synthetic oligonucleotide
  Antisense strand to SEQ ID NO: 503397
uguauucucaguuuaucaa

SEQ ID NO: 503399 - RNA, 19 nt, Artificial Sequence
  Description of Artificial Sequence: Synthetic oligonucleotide
  Sense strand starting at position 2470 of SEQ ID NO: 317677
agaggaaacugagaauuau

SEQ ID NO: 503400 - RNA, 19 nt, Artificial Sequence
  Description of Artificial Sequence: Synthetic oligonucleotide
  Antisense strand to SEQ ID NO: 503399
auaauucucaguuuccucu

SEQ ID NO: 503401 - RNA, 19 nt, Artificial Sequence
  Description of Artificial Sequence: Synthetic oligonucleotide
  Sense strand starting at position 2525 of SEQ ID NO: 317677
uuagaagaauuggacagau

SEQ ID NO: 503402 - RNA, 19 nt, Artificial Sequence
  Description of Artificial Sequence: Synthetic oligonucleotide
  Antisense strand to SEQ ID NO: 503401
aucuguccaauucuucuaa

SEQ ID NO: 503403 - RNA, 19 nt, Artificial Sequence
  Description of Artificial Sequence: Synthetic oligonucleotide
  Sense strand starting at position 2535 of SEQ ID NO: 317677
uggacagauaccugcggaa

SEQ ID NO: 503404 - RNA, 19 nt, Artificial Sequence
  Description of Artificial Sequence: Synthetic oligonucleotide
  Antisense strand to SEQ ID NO: 503403
uuccgcagguaucugucca

SEQ ID NO: 503405 - RNA, 19 nt, Artificial Sequence
  Description of Artificial Sequence: Synthetic oligonucleotide
  Sense strand starting at position 2537 of SEQ ID NO: 317677
gacagauaccugcggaaag

SEQ ID NO: 503406 - RNA, 19 nt, Artificial Sequence
  Description of Artificial Sequence: Synthetic oligonucleotide
  Antisense strand to SEQ ID NO: 503405
cuuuccgcagguaucuguc

SEQ ID NO: 503407 - RNA, 19 nt, Artificial Sequence
  Description of Artificial Sequence: Synthetic oligonucleotide
  Sense strand starting at position 2749 of SEQ ID NO: 317677
ggauccauugcaggauauu

SEQ ID NO: 503408 - RNA, 19 nt, Artificial Sequence
  Description of Artificial Sequence: Synthetic oligonucleotide
  Antisense strand to SEQ ID NO: 503407
aauauccugcaauggaucc

SEQ ID NO: 503409 - RNA, 19 nt, Artificial Sequence
  Description of Artificial Sequence: Synthetic oligonucleotide
  Sense strand starting at position 2758 of SEQ ID NO: 317677
gcaggauauugagcaaaga

SEQ ID NO: 503410 - RNA, 19 nt, Artificial Sequence
  Description of Artificial Sequence: Synthetic oligonucleotide
  Antisense strand to SEQ ID NO: 503409
ucuuugcucaauauccugc

SEQ ID NO: 503411 - RNA, 19 nt, Artificial Sequence
  Description of Artificial Sequence: Synthetic oligonucleotide
  Sense strand starting at position 2862 of SEQ ID NO: 317677
acacaauguuguguaucca

SEQ ID NO: 503412 - RNA, 19 nt, Artificial Sequence
  Description of Artificial Sequence: Synthetic oligonucleotide
  Antisense strand to SEQ ID NO: 503411
uggauacacaacauugugu

SEQ ID NO: 503413 - RNA, 19 nt, Artificial Sequence
  Description of Artificial Sequence: Synthetic oligonucleotide
  Sense strand starting at position 3008 of SEQ ID NO: 317677
ggaugugccuauucuggau

SEQ ID NO: 503414 - RNA, 19 nt, Artificial Sequence
  Description of Artificial Sequence: Synthetic oligonucleotide
  Antisense strand to SEQ ID NO: 503413
auccagaauaggcacaucc

SEQ ID NO: 503415 - RNA, 19 nt, Artificial Sequence
  Description of Artificial Sequence: Synthetic oligonucleotide
  Sense strand starting at position 3786 of SEQ ID NO: 317677
guuguauaaguacacuaua

SEQ ID NO: 503416 - RNA, 19 nt, Artificial Sequence
  Description of Artificial Sequence: Synthetic oligonucleotide
  Antisense strand to SEQ ID NO: 503415
uauaguguacuuauacaac

SEQ ID NO: 503417 - RNA, 19 nt, Artificial Sequence
  Description of Artificial Sequence: Synthetic oligonucleotide
  Sense strand starting at position 3819 of SEQ ID NO: 317677
ccaucuguugauggauagu

SEQ ID NO: 503418 - RNA, 19 nt, Artificial Sequence
  Description of Artificial Sequence: Synthetic oligonucleotide
  Antisense strand to SEQ ID NO: 503417
acuauccaucaacagaugg

SEQ ID NO: 503419 - RNA, 19 nt, Artificial Sequence
  Description of Artificial Sequence: Synthetic oligonucleotide
  Sense strand starting at position 3919 of SEQ ID NO: 317677
ucaauugucguuguguauu

SEQ ID NO: 503420 - RNA, 19 nt, Artificial Sequence
  Description of Artificial Sequence: Synthetic oligonucleotide
  Antisense strand to SEQ ID NO: 503419
aauacacaacgacaauuga

SEQ ID NO: 503421 - RNA, 19 nt, Artificial Sequence
  Description of Artificial Sequence: Synthetic oligonucleotide
  Sense strand starting at position 3925 of SEQ ID NO: 317677
gucguuguguauuuaccua

SEQ ID NO: 503422 - RNA, 19 nt, Artificial Sequence
  Description of Artificial Sequence: Synthetic oligonucleotide
  Antisense strand to SEQ ID NO: 503421
uagguaaauacacaacgac

SEQ ID NO: 503423 - RNA, 19 nt, Artificial Sequence
  Description of Artificial Sequence: Synthetic oligonucleotide
  Sense strand starting at position 3933 of SEQ ID NO: 317677
guauuuaccuaggaaugaa

SEQ ID NO: 503424 - RNA, 19 nt, Artificial Sequence
  Description of Artificial Sequence: Synthetic oligonucleotide
  Antisense strand to SEQ ID NO: 503423
uucauuccuagguaaauac

SEQ ID NO: 503425 - RNA, 19 nt, Artificial Sequence
  Description of Artificial Sequence: Synthetic oligonucleotide
  Sense strand starting at position 3960 of SEQ ID NO: 317677
gucauauaguaauucuaca

SEQ ID NO: 503426 - RNA, 19 nt, Artificial Sequence
  Description of Artificial Sequence: Synthetic oligonucleotide
  Antisense strand to SEQ ID NO: 503425
uguagaauuacuauaugac

SEQ ID NO: 503427 - RNA, 19 nt, Artificial Sequence
  Description of Artificial Sequence: Synthetic oligonucleotide
  Sense strand starting at position 63 of SEQ ID NO: 317678
gcaagaacuuguccaaggu

SEQ ID NO: 503428 - RNA, 19 nt, Artificial Sequence
  Description of Artificial Sequence: Synthetic oligonucleotide
  Antisense strand to SEQ ID NO: 503427
accuuggacaaguucuugc

SEQ ID NO: 503429 - RNA, 19 nt, Artificial Sequence
  Description of Artificial Sequence: Synthetic oligonucleotide
  Sense strand starting at position 271 of SEQ ID NO: 317678
ucuuaaauuuggugguaaa

SEQ ID NO: 503430 - RNA, 19 nt, Artificial Sequence
  Description of Artificial Sequence: Synthetic oligonucleotide
  Antisense strand to SEQ ID NO: 503429
uuuaccaccaaauuuaaga

SEQ ID NO: 503431 - RNA, 19 nt, Artificial Sequence
  Description of Artificial Sequence: Synthetic oligonucleotide
  Sense strand starting at position 274 of SEQ ID NO: 317678
uaaauuuggugguaaaucu

SEQ ID NO: 503432 - RNA, 19 nt, Artificial Sequence
  Description of Artificial Sequence: Synthetic oligonucleotide
  Antisense strand to SEQ ID NO: 503431
agauuuaccaccaaauuua

SEQ ID NO: 503433 - RNA, 19 nt, Artificial Sequence
  Description of Artificial Sequence: Synthetic oligonucleotide
  Sense strand starting at position 282 of SEQ ID NO: 317678
gugguaaaucuauggguga

SEQ ID NO: 503434 - RNA, 19 nt, Artificial Sequence
  Description of Artificial Sequence: Synthetic oligonucleotide
  Antisense strand to SEQ ID NO: 503433
ucacccauagauuuaccac

SEQ ID NO: 503435 - RNA, 19 nt, Artificial Sequence
  Description of Artificial Sequence: Synthetic oligonucleotide
  Sense strand starting at position 284 of SEQ ID NO: 317678
gguaaaucuaugggugaaa

SEQ ID NO: 503436 - RNA, 19 nt, Artificial Sequence
  Description of Artificial Sequence: Synthetic oligonucleotide
  Antisense strand to SEQ ID NO: 503435
uuucacccauagauuuacc

SEQ ID NO: 503437 - RNA, 19 nt, Artificial Sequence
  Description of Artificial Sequence: Synthetic oligonucleotide
  Sense strand starting at position 285 of SEQ ID NO: 317678
guaaaucuaugggugaaau

SEQ ID NO: 503438 - RNA, 19 nt, Artificial Sequence
  Description of Artificial Sequence: Synthetic oligonucleotide
  Antisense strand to SEQ ID NO: 503437
auuucacccauagauuuac

SEQ ID NO: 503439 - RNA, 19 nt, Artificial Sequence
  Description of Artificial Sequence: Synthetic oligonucleotide
  Sense strand starting at position 286 of SEQ ID NO: 317678
uaaaucuaugggugaaauu

SEQ ID NO: 503440 - RNA, 19 nt, Artificial Sequence
  Description of Artificial Sequence: Synthetic oligonucleotide
  Antisense strand to SEQ ID NO: 503439
aauuucacccauagauuua

SEQ ID NO: 503441 - RNA, 19 nt, Artificial Sequence
  Description of Artificial Sequence: Synthetic oligonucleotide
  Sense strand starting at position 542 of SEQ ID NO: 317678
gggucaaagccugggaagu

SEQ ID NO: 503442 - RNA, 19 nt, Artificial Sequence
  Description of Artificial Sequence: Synthetic oligonucleotide
  Antisense strand to SEQ ID NO: 503441
acuucccaggcuuugaccc

SEQ ID NO: 503443 - RNA, 19 nt, Artificial Sequence
  Description of Artificial Sequence: Synthetic oligonucleotide
  Sense strand starting at position 1116 of SEQ ID NO: 317678
cugugaaugucauuagugu

SEQ ID NO: 503444 - RNA, 19 nt, Artificial Sequence
  Description of Artificial Sequence: Synthetic oligonucleotide
  Antisense strand to SEQ ID NO: 503443
acacuaaugacauucacag

SEQ ID NO: 503445 - RNA, 19 nt, Artificial Sequence
  Description of Artificial Sequence: Synthetic oligonucleotide
  Sense strand starting at position 1117 of SEQ ID NO: 317678
ugugaaugucauuagugua

SEQ ID NO: 503446 - RNA, 19 nt, Artificial Sequence
  Description of Artificial Sequence: Synthetic oligonucleotide
  Antisense strand to SEQ ID NO: 503445
uacacuaaugacauucaca

SEQ ID NO: 503447 - RNA, 19 nt, Artificial Sequence
  Description of Artificial Sequence: Synthetic oligonucleotide
  Sense strand starting at position 1122 of SEQ ID NO: 317678
augucauuaguguagccau

SEQ ID NO: 503448 - RNA, 19 nt, Artificial Sequence
  Description of Artificial Sequence: Synthetic oligonucleotide
  Antisense strand to SEQ ID NO: 503447
auggcuacacuaaugacau

SEQ ID NO: 503449 - RNA, 19 nt, Artificial Sequence
  Description of Artificial Sequence: Synthetic oligonucleotide
  Sense strand starting at position 1130 of SEQ ID NO: 317678
aguguagccauuuguagac

SEQ ID NO: 503450 - RNA, 19 nt, Artificial Sequence
  Description of Artificial Sequence: Synthetic oligonucleotide
  Antisense strand to SEQ ID NO: 503449
gucuacaaauggcuacacu

SEQ ID NO: 503451 - RNA, 19 nt, Artificial Sequence
  Description of Artificial Sequence: Synthetic oligonucleotide
  Sense strand starting at position 1483 of SEQ ID NO: 317678
gcacaaugggacugguuca

SEQ ID NO: 503452 - RNA, 19 nt, Artificial Sequence
  Description of Artificial Sequence: Synthetic oligonucleotide
  Antisense strand to SEQ ID NO: 503451
ugaaccagucccauugugc

SEQ ID NO: 503453 - RNA, 19 nt, Artificial Sequence
  Description of Artificial Sequence: Synthetic oligonucleotide
  Sense strand starting at position 1490 of SEQ ID NO: 317678
gggacugguucacagagaa

SEQ ID NO: 503454 - RNA, 19 nt, Artificial Sequence
  Description of Artificial Sequence: Synthetic oligonucleotide
  Antisense strand to SEQ ID NO: 503453
uucucugugaaccaguccc

SEQ ID NO: 503455 - RNA, 19 nt, Artificial Sequence
  Description of Artificial Sequence: Synthetic oligonucleotide
  Sense strand starting at position 1503 of SEQ ID NO: 317678
agagaagucagaugugggu

SEQ ID NO: 503456 - RNA, 19 nt, Artificial Sequence
  Description of Artificial Sequence: Synthetic oligonucleotide
  Antisense strand to SEQ ID NO: 503455
acccacaucugacuucucu

SEQ ID NO: 503457 - RNA, 19 nt, Artificial Sequence
  Description of Artificial Sequence: Synthetic oligonucleotide
  Sense strand starting at position 1512 of SEQ ID NO: 317678
agaugugggucaguuacau

SEQ ID NO: 503458 - RNA, 19 nt, Artificial Sequence
  Description of Artificial Sequence: Synthetic oligonucleotide
  Antisense strand to SEQ ID NO: 503457
auguaacugacccacaucu

SEQ ID NO: 503459 - RNA, 19 nt, Artificial Sequence
  Description of Artificial Sequence: Synthetic oligonucleotide
  Sense strand starting at position 1518 of SEQ ID NO: 317678
gggucaguuacauggcacu

SEQ ID NO: 503460 - RNA, 19 nt, Artificial Sequence
  Description of Artificial Sequence: Synthetic oligonucleotide
  Antisense strand to SEQ ID NO: 503459
agugccauguaacugaccc

SEQ ID NO: 503461 - RNA, 19 nt, Artificial Sequence
  Description of Artificial Sequence: Synthetic oligonucleotide
  Sense strand starting at position 1647 of SEQ ID NO: 317678
uacacuaauggcugaggaa

SEQ ID NO: 503462 - RNA, 19 nt, Artificial Sequence
  Description of Artificial Sequence: Synthetic oligonucleotide
  Antisense strand to SEQ ID NO: 503461
uuccucagccauuagugua

SEQ ID NO: 503463 - RNA, 19 nt, Artificial Sequence
  Description of Artificial Sequence: Synthetic oligonucleotide
  Sense strand starting at position 2015 of SEQ ID NO: 317678
gcuccucugagguaugcau

SEQ ID NO: 503464 - RNA, 19 nt, Artificial Sequence
  Description of Artificial Sequence: Synthetic oligonucleotide
  Antisense strand to SEQ ID NO: 503463
augcauaccucagaggagc

SEQ ID NO: 503465 - RNA, 19 nt, Artificial Sequence
  Description of Artificial Sequence: Synthetic oligonucleotide
  Sense strand starting at position 2053 of SEQ ID NO: 317678
auuuaaaguucugaccaga

SEQ ID NO: 503466 - RNA, 19 nt, Artificial Sequence
  Description of Artificial Sequence: Synthetic oligonucleotide
  Antisense strand to SEQ ID NO: 503465
ucuggucagaacuuuaaau

SEQ ID NO: 503467 - RNA, 19 nt, Artificial Sequence
  Description of Artificial Sequence: Synthetic oligonucleotide
  Sense strand starting at position 2295 of SEQ ID NO: 317678
ugggcaguuugauccagaa

SEQ ID NO: 503468 - RNA, 19 nt, Artificial Sequence
  Description of Artificial Sequence: Synthetic oligonucleotide
  Antisense strand to SEQ ID NO: 503467
uucuggaucaaacugccca

SEQ ID NO: 503469 - RNA, 19 nt, Artificial Sequence
  Description of Artificial Sequence: Synthetic oligonucleotide
  Sense strand starting at position 2297 of SEQ ID NO: 317678
ggcaguuugauccagaaac

SEQ ID NO: 503470 - RNA, 19 nt, Artificial Sequence
  Description of Artificial Sequence: Synthetic oligonucleotide
  Antisense strand to SEQ ID NO: 503469
guuucuggaucaaacugcc

SEQ ID NO: 503471 - RNA, 19 nt, Artificial Sequence
  Description of Artificial Sequence: Synthetic oligonucleotide
  Sense strand starting at position 2371 of SEQ ID NO: 317678
ucaaguauuugccacauga

SEQ ID NO: 503472 - RNA, 19 nt, Artificial Sequence
  Description of Artificial Sequence: Synthetic oligonucleotide
  Antisense strand to SEQ ID NO: 503471
ucauguggcaaauacuuga

SEQ ID NO: 503473 - RNA, 19 nt, Artificial Sequence
  Description of Artificial Sequence: Synthetic oligonucleotide
  Sense strand starting at position 2473 of SEQ ID NO: 317678
ccaguccagcgauaucaaa

SEQ ID NO: 503474 - RNA, 19 nt, Artificial Sequence
  Description of Artificial Sequence: Synthetic oligonucleotide
  Antisense strand to SEQ ID NO: 503473
uuugauaucgcuggacugg

SEQ ID NO: 503475 - RNA, 19 nt, Artificial Sequence
  Description of Artificial Sequence: Synthetic oligonucleotide
  Sense strand starting at position 2867 of SEQ ID NO: 317678
auuauuucuuugcaacgau

SEQ ID NO: 503476 - RNA, 19 nt, Artificial Sequence
  Description of Artificial Sequence: Synthetic oligonucleotide
  Antisense strand to SEQ ID NO: 503475
aucguugcaaagaaauaau

SEQ ID NO: 503477 - RNA, 19 nt, Artificial Sequence
  Description of Artificial Sequence: Synthetic oligonucleotide
  Sense strand starting at position 2876 of SEQ ID NO: 317678
uugcaacgauccuuaaaga

SEQ ID NO: 503478 - RNA, 19 nt, Artificial Sequence
  Description of Artificial Sequence: Synthetic oligonucleotide
  Antisense strand to SEQ ID NO: 503477
ucuuuaaggaucguugcaa

SEQ ID NO: 503479 - RNA, 19 nt, Artificial Sequence
  Description of Artificial Sequence: Synthetic oligonucleotide
  Sense strand starting at position 2921 of SEQ ID NO: 317678
uauugaguccauggagaau

SEQ ID NO: 503480 - RNA, 19 nt, Artificial Sequence
  Description of Artificial Sequence: Synthetic oligonucleotide
  Antisense strand to SEQ ID NO: 503479
auucuccauggacucaaua

SEQ ID NO: 503481 - RNA, 19 nt, Artificial Sequence
  Description of Artificial Sequence: Synthetic oligonucleotide
  Sense strand starting at position 2940 of SEQ ID NO: 317678
ggagacugucgugaauaag

SEQ ID NO: 503482 - RNA, 19 nt, Artificial Sequence
  Description of Artificial Sequence: Synthetic oligonucleotide
  Antisense strand to SEQ ID NO: 503481
cuuauucacgacagucucc

SEQ ID NO: 503483 - RNA, 19 nt, Artificial Sequence
  Description of Artificial Sequence: Synthetic oligonucleotide
  Sense strand starting at position 2943 of SEQ ID NO: 317678
gacugucgugaauaagaca

SEQ ID NO: 503484 - RNA, 19 nt, Artificial Sequence
  Description of Artificial Sequence: Synthetic oligonucleotide
  Antisense strand to SEQ ID NO: 503483
ugucuuauucacgacaguc

SEQ ID NO: 503485 - RNA, 19 nt, Artificial Sequence
  Description of Artificial Sequence: Synthetic oligonucleotide
  Sense strand starting at position 3021 of SEQ ID NO: 317678
gcuggaaguaacugugacu

SEQ ID NO: 503486 - RNA, 19 nt, Artificial Sequence
  Description of Artificial Sequence: Synthetic oligonucleotide
  Antisense strand to SEQ ID NO: 503485
agucacaguuacuuccagc

SEQ ID NO: 503487 - RNA, 19 nt, Artificial Sequence
  Description of Artificial Sequence: Synthetic oligonucleotide
  Sense strand starting at position 3028 of SEQ ID NO: 317678
guaacugugacugggcuaa

SEQ ID NO: 503488 - RNA, 19 nt, Artificial Sequence
  Description of Artificial Sequence: Synthetic oligonucleotide
  Antisense strand to SEQ ID NO: 503487
uuagcccagucacaguuac

SEQ ID NO: 503489 - RNA, 19 nt, Artificial Sequence
  Description of Artificial Sequence: Synthetic oligonucleotide
  Sense strand starting at position 3030 of SEQ ID NO: 317678
aacugugacugggcuaaau

SEQ ID NO: 503490 - RNA, 19 nt, Artificial Sequence
  Description of Artificial Sequence: Synthetic oligonucleotide
  Antisense strand to SEQ ID NO: 503489
auuuagcccagucacaguu

SEQ ID NO: 503491 - RNA, 19 nt, Artificial Sequence
  Description of Artificial Sequence: Synthetic oligonucleotide
  Sense strand starting at position 3032 of SEQ ID NO: 317678
cugugacugggcuaaauga

SEQ ID NO: 503492 - RNA, 19 nt, Artificial Sequence
  Description of Artificial Sequence: Synthetic oligonucleotide
  Antisense strand to SEQ ID NO: 503491
ucauuuagcccagucacag

SEQ ID NO: 503493 - RNA, 19 nt, Artificial Sequence
  Description of Artificial Sequence: Synthetic oligonucleotide
  Sense strand starting at position 3173 of SEQ ID NO: 317678
cugggaccaguguggaaau

SEQ ID NO: 503494 - RNA, 19 nt, Artificial Sequence
  Description of Artificial Sequence: Synthetic oligonucleotide
  Antisense strand to SEQ ID NO: 503493
auuuccacacuggucccag

SEQ ID NO: 503495 - RNA, 19 nt, Artificial Sequence
  Description of Artificial Sequence: Synthetic oligonucleotide
  Sense strand starting at position 3185 of SEQ ID NO: 317678
uggaaauauuaagcuuuga

SEQ ID NO: 503496 - RNA, 19 nt, Artificial Sequence
  Description of Artificial Sequence: Synthetic oligonucleotide
  Antisense strand to SEQ ID NO: 503495
ucaaagcuuaauauuucca

SEQ ID NO: 503497 - RNA, 19 nt, Artificial Sequence
  Description of Artificial Sequence: Synthetic oligonucleotide
  Sense strand starting at position 3367 of SEQ ID NO: 317678
cacggcucacuuggaauaa

SEQ ID NO: 503498 - RNA, 19 nt, Artificial Sequence
  Description of Artificial Sequence: Synthetic oligonucleotide
  Antisense strand to SEQ ID NO: 503497
uuauuccaagugagccgug

SEQ ID NO: 503499 - RNA, 19 nt, Artificial Sequence
  Description of Artificial Sequence: Synthetic oligonucleotide
  Sense strand starting at position 3427 of SEQ ID NO: 317678
ugaggaagguaggucuauu

SEQ ID NO: 503500 - RNA, 19 nt, Artificial Sequence
  Description of Artificial Sequence: Synthetic oligonucleotide
  Antisense strand to SEQ ID NO: 503499
aauagaccuaccuuccuca

SEQ ID NO: 503501 - RNA, 19 nt, Artificial Sequence
  Description of Artificial Sequence: Synthetic oligonucleotide
  Sense strand starting at position 3676 of SEQ ID NO: 317678
acugaagcauuugaguuau

SEQ ID NO: 503502 - RNA, 19 nt, Artificial Sequence
  Description of Artificial Sequence: Synthetic oligonucleotide
  Antisense strand to SEQ ID NO: 503501
auaacucaaaugcuucagu

SEQ ID NO: 503503 - RNA, 19 nt, Artificial Sequence
  Description of Artificial Sequence: Synthetic oligonucleotide
  Sense strand starting at position 3687 of SEQ ID NO: 317678
ugaguuauugcccugugcu

SEQ ID NO: 503504 - RNA, 19 nt, Artificial Sequence
  Description of Artificial Sequence: Synthetic oligonucleotide
  Antisense strand to SEQ ID NO: 503503
agcacagggcaauaacuca

SEQ ID NO: 503505 - RNA, 19 nt, Artificial Sequence
  Description of Artificial Sequence: Synthetic oligonucleotide
  Sense strand starting at position 3863 of SEQ ID NO: 317678
agcaacauuuacugagagu

SEQ ID NO: 503506 - RNA, 19 nt, Artificial Sequence
  Description of Artificial Sequence: Synthetic oligonucleotide
  Antisense strand to SEQ ID NO: 503505
acucucaguaaauguugcu

SEQ ID NO: 503507 - RNA, 19 nt, Artificial Sequence
  Description of Artificial Sequence: Synthetic oligonucleotide
  Sense strand starting at position 497 of SEQ ID NO: 317679
cagauugaugccgauauac

SEQ ID NO: 503508 - RNA, 19 nt, Artificial Sequence
  Description of Artificial Sequence: Synthetic oligonucleotide
  Antisense strand to SEQ ID NO: 503507
guauaucggcaucaaucug

SEQ ID NO: 503509 - RNA, 19 nt, Artificial Sequence
  Description of Artificial Sequence: Synthetic oligonucleotide
  Sense strand starting at position 499 of SEQ ID NO: 317679
gauugaugccgauauacag

SEQ ID NO: 503510 - RNA, 19 nt, Artificial Sequence
  Description of Artificial Sequence: Synthetic oligonucleotide
  Antisense strand to SEQ ID NO: 503509
cuguauaucggcaucaauc

SEQ ID NO: 503511 - RNA, 19 nt, Artificial Sequence
  Description of Artificial Sequence: Synthetic oligonucleotide
  Sense strand starting at position 505 of SEQ ID NO: 317679
ugccgauauacagguuaau

SEQ ID NO: 503512 - RNA, 19 nt, Artificial Sequence
  Description of Artificial Sequence: Synthetic oligonucleotide
  Antisense strand to SEQ ID NO: 503511
auuaaccuguauaucggca

SEQ ID NO: 503513 - RNA, 19 nt, Artificial Sequence
  Description of Artificial Sequence: Synthetic oligonucleotide
  Sense strand starting at position 565 of SEQ ID NO: 317679
guacuuguucuagaacaau

SEQ ID NO: 503514 - RNA, 19 nt, Artificial Sequence
  Description of Artificial Sequence: Synthetic oligonucleotide
  Antisense strand to SEQ ID NO: 503513
auuguucuagaacaaguac

SEQ ID NO: 503515 - RNA, 19 nt, Artificial Sequence
  Description of Artificial Sequence: Synthetic oligonucleotide
  Sense strand starting at position 571 of SEQ ID NO: 317679
guucuagaacaauggauca

SEQ ID NO: 503516 - RNA, 19 nt, Artificial Sequence
  Description of Artificial Sequence: Synthetic oligonucleotide
  Antisense strand to SEQ ID NO: 503515
ugauccauuguucuagaac

SEQ ID NO: 503517 - RNA, 19 nt, Artificial Sequence
  Description of Artificial Sequence: Synthetic oligonucleotide
  Sense strand starting at position 798 of SEQ ID NO: 317679
cuaacagaucugcaaagcu

SEQ ID NO: 503518 - RNA, 19 nt, Artificial Sequence
  Description of Artificial Sequence: Synthetic oligonucleotide
  Antisense strand to SEQ ID NO: 503517
agcuuugcagaucuguuag

SEQ ID NO: 503519 - RNA, 19 nt, Artificial Sequence
  Description of Artificial Sequence: Synthetic oligonucleotide
  Sense strand starting at position 863 of SEQ ID NO: 317679
acuauuaugugacccuauu

SEQ ID NO: 503520 - RNA, 19 nt, Artificial Sequence
  Description of Artificial Sequence: Synthetic oligonucleotide
  Antisense strand to SEQ ID NO: 503519
aauagggucacauaauagu

SEQ ID NO: 503521 - RNA, 19 nt, Artificial Sequence
  Description of Artificial Sequence: Synthetic oligonucleotide
  Sense strand starting at position 872 of SEQ ID NO: 317679
ugacccuauugcuuaguaa

SEQ ID NO: 503522 - RNA, 19 nt, Artificial Sequence
  Description of Artificial Sequence: Synthetic oligonucleotide
  Antisense strand to SEQ ID NO: 503521
uuacuaagcaauaggguca

SEQ ID NO: 503523 - RNA, 19 nt, Artificial Sequence
  Description of Artificial Sequence: Synthetic oligonucleotide
  Sense strand starting at position 875 of SEQ ID NO: 317679
cccuauugcuuaguaauga

SEQ ID NO: 503524 - RNA, 19 nt, Artificial Sequence
  Description of Artificial Sequence: Synthetic oligonucleotide
  Antisense strand to SEQ ID NO: 503523
ucauuacuaagcaauaggg

SEQ ID NO: 503525 - RNA, 19 nt, Artificial Sequence
  Description of Artificial Sequence: Synthetic oligonucleotide
  Sense strand starting at position 988 of SEQ ID NO: 317679
uuuccauuucucggugaua

SEQ ID NO: 503526 - RNA, 19 nt, Artificial Sequence
  Description of Artificial Sequence: Synthetic oligonucleotide
  Antisense strand to SEQ ID NO: 503525
uaucaccgagaaauggaaa

SEQ ID NO: 503527 - RNA, 19 nt, Artificial Sequence
  Description of Artificial Sequence: Synthetic oligonucleotide
  Sense strand starting at position 989 of SEQ ID NO: 317679
uuccauuucucggugauac

SEQ ID NO: 503528 - RNA, 19 nt, Artificial Sequence
  Description of Artificial Sequence: Synthetic oligonucleotide
  Antisense strand to SEQ ID NO: 503527
guaucaccgagaaauggaa

SEQ ID NO: 503529 - RNA, 19 nt, Artificial Sequence
  Description of Artificial Sequence: Synthetic oligonucleotide
  Sense strand starting at position 990 of SEQ ID NO: 317679
uccauuucucggugauacu

SEQ ID NO: 503530 - RNA, 19 nt, Artificial Sequence
  Description of Artificial Sequence: Synthetic oligonucleotide
  Antisense strand to SEQ ID NO: 503529
aguaucaccgagaaaugga

SEQ ID NO: 503531 - RNA, 19 nt, Artificial Sequence
  Description of Artificial Sequence: Synthetic oligonucleotide
  Sense strand starting at position 1023 of SEQ ID NO: 317679
guguaccuuguuuaacauu

SEQ ID NO: 503532 - RNA, 19 nt, Artificial Sequence
  Description of Artificial Sequence: Synthetic oligonucleotide
  Antisense strand to SEQ ID NO: 503531
aauguuaaacaagguacac

SEQ ID NO: 503533 - RNA, 19 nt, Artificial Sequence
  Description of Artificial Sequence: Synthetic oligonucleotide
  Sense strand starting at position 1181 of SEQ ID NO: 317679
uuaauacugguguaaacca

SEQ ID NO: 503534 - RNA, 19 nt, Artificial Sequence
  Description of Artificial Sequence: Synthetic oligonucleotide
  Antisense strand to SEQ ID NO: 503533
ugguuuacaccaguauuaa

SEQ ID NO: 503535 - RNA, 19 nt, Artificial Sequence
  Description of Artificial Sequence: Synthetic oligonucleotide
  Sense strand starting at position 1312 of SEQ ID NO: 317679
cacccuaaucagggaaugu

SEQ ID NO: 503536 - RNA, 19 nt, Artificial Sequence
  Description of Artificial Sequence: Synthetic oligonucleotide
  Antisense strand to SEQ ID NO: 503535
acauucccugauuagggug

SEQ ID NO: 503537 - RNA, 19 nt, Artificial Sequence
  Description of Artificial Sequence: Synthetic oligonucleotide
  Sense strand starting at position 1316 of SEQ ID NO: 317679
cuaaucagggaauguauua

SEQ ID NO: 503538 - RNA, 19 nt, Artificial Sequence
  Description of Artificial Sequence: Synthetic oligonucleotide
  Antisense strand to SEQ ID NO: 503537
uaauacauucccugauuag

SEQ ID NO: 503539 - RNA, 19 nt, Artificial Sequence
  Description of Artificial Sequence: Synthetic oligonucleotide
  Sense strand starting at position 2060 of SEQ ID NO: 317679
gggcuuuagagguagcuga

SEQ ID NO: 503540 - RNA, 19 nt, Artificial Sequence
  Description of Artificial Sequence: Synthetic oligonucleotide
  Antisense strand to SEQ ID NO: 503539
ucagcuaccucuaaagccc

SEQ ID NO: 503541 - RNA, 19 nt, Artificial Sequence
  Description of Artificial Sequence: Synthetic oligonucleotide
  Sense strand starting at position 2145 of SEQ ID NO: 317679
ugaggugugucuuuggaga

SEQ ID NO: 503542 - RNA, 19 nt, Artificial Sequence
  Description of Artificial Sequence: Synthetic oligonucleotide
  Antisense strand to SEQ ID NO: 503541
ucuccaaagacacaccuca

SEQ ID NO: 503543 - RNA, 19 nt, Artificial Sequence
  Description of Artificial Sequence: Synthetic oligonucleotide
  Sense strand starting at position 2150 of SEQ ID NO: 317679
ugugucuuuggagaaggau

SEQ ID NO: 503544 - RNA, 19 nt, Artificial Sequence
  Description of Artificial Sequence: Synthetic oligonucleotide
  Antisense strand to SEQ ID NO: 503543
auccuucuccaaagacaca

SEQ ID NO: 503545 - RNA, 19 nt, Artificial Sequence
  Description of Artificial Sequence: Synthetic oligonucleotide
  Sense strand starting at position 2268 of SEQ ID NO: 317679
ugccauuuagcacgccaga

SEQ ID NO: 503546 - RNA, 19 nt, Artificial Sequence
  Description of Artificial Sequence: Synthetic oligonucleotide
  Antisense strand to SEQ ID NO: 503545
ucuggcgugcuaaauggca

SEQ ID NO: 503547 - RNA, 19 nt, Artificial Sequence
  Description of Artificial Sequence: Synthetic oligonucleotide
  Sense strand starting at position 2702 of SEQ ID NO: 317679
uagcgaugaguugagaucu

SEQ ID NO: 503548 - RNA, 19 nt, Artificial Sequence
  Description of Artificial Sequence: Synthetic oligonucleotide
  Antisense strand to SEQ ID NO: 503547
agaucucaacucaucgcua

SEQ ID NO: 503549 - RNA, 19 nt, Artificial Sequence
  Description of Artificial Sequence: Synthetic oligonucleotide
  Sense strand starting at position 2831 of SEQ ID NO: 317679
guccuauuggcgucuagcu

SEQ ID NO: 503550 - RNA, 19 nt, Artificial Sequence
  Description of Artificial Sequence: Synthetic oligonucleotide
  Antisense strand to SEQ ID NO: 503549
agcuagacgccaauaggac

SEQ ID NO: 503551 - RNA, 19 nt, Artificial Sequence
  Description of Artificial Sequence: Synthetic oligonucleotide
  Sense strand starting at position 2832 of SEQ ID NO: 317679
uccuauuggcgucuagcua

SEQ ID NO: 503552 - RNA, 19 nt, Artificial Sequence
  Description of Artificial Sequence: Synthetic oligonucleotide
  Antisense strand to SEQ ID NO: 503551
uagcuagacgccaauagga

SEQ ID NO: 503553 - RNA, 19 nt, Artificial Sequence
  Description of Artificial Sequence: Synthetic oligonucleotide
  Sense strand starting at position 2876 of SEQ ID NO: 317679
gcgccagucguguuacuca

SEQ ID NO: 503554 - RNA, 19 nt, Artificial Sequence
  Description of Artificial Sequence: Synthetic oligonucleotide
  Antisense strand to SEQ ID NO: 503553
ugaguaacacgacuggcgc

SEQ ID NO: 503555 - RNA, 19 nt, Artificial Sequence
  Description of Artificial Sequence: Synthetic oligonucleotide
  Sense strand starting at position 2884 of SEQ ID NO: 317679
cguguuacucacuaauaug

SEQ ID NO: 503556 - RNA, 19 nt, Artificial Sequence
  Description of Artificial Sequence: Synthetic oligonucleotide
  Antisense strand to SEQ ID NO: 503555
cauauuagugaguaacacg

SEQ ID NO: 503557 - RNA, 19 nt, Artificial Sequence
  Description of Artificial Sequence: Synthetic oligonucleotide
  Sense strand starting at position 3184 of SEQ ID NO: 317679
augagaguaugaucuccaa

SEQ ID NO: 503558 - RNA, 19 nt, Artificial Sequence
  Description of Artificial Sequence: Synthetic oligonucleotide
  Antisense strand to SEQ ID NO: 503557
uuggagaucauacucucau

SEQ ID NO: 503559 - RNA, 19 nt, Artificial Sequence
  Description of Artificial Sequence: Synthetic oligonucleotide
  Sense strand starting at position 3187 of SEQ ID NO: 317679
agaguaugaucuccaaauu

SEQ ID NO: 503560 - RNA, 19 nt, Artificial Sequence
  Description of Artificial Sequence: Synthetic oligonucleotide
  Antisense strand to SEQ ID NO: 503559
aauuuggagaucauacucu

SEQ ID NO: 503561 - RNA, 19 nt, Artificial Sequence
  Description of Artificial Sequence: Synthetic oligonucleotide
  Sense strand starting at position 3266 of SEQ ID NO: 317679
agggacguccuccaaacuu

SEQ ID NO: 503562 - RNA, 19 nt, Artificial Sequence
  Description of Artificial Sequence: Synthetic oligonucleotide
  Antisense strand to SEQ ID NO: 503561
aaguuuggaggacgucccu

SEQ ID NO: 503563 - RNA, 19 nt, Artificial Sequence
  Description of Artificial Sequence: Synthetic oligonucleotide
  Sense strand starting at position 3283 of SEQ ID NO: 317679
uugaucgucuggucaaaua

SEQ ID NO: 503564 - RNA, 19 nt, Artificial Sequence
  Description of Artificial Sequence: Synthetic oligonucleotide
  Antisense strand to SEQ ID NO: 503563
uauuugaccagacgaucaa

SEQ ID NO: 503565 - RNA, 19 nt, Artificial Sequence
  Description of Artificial Sequence: Synthetic oligonucleotide
  Sense strand starting at position 3293 of SEQ ID NO: 317679
ggucaaauauuggcagguu

SEQ ID NO: 503566 - RNA, 19 nt, Artificial Sequence
  Description of Artificial Sequence: Synthetic oligonucleotide
  Antisense strand to SEQ ID NO: 503565
aaccugccaauauuugacc

SEQ ID NO: 503567 - RNA, 19 nt, Artificial Sequence
  Description of Artificial Sequence: Synthetic oligonucleotide
  Sense strand starting at position 3327 of SEQ ID NO: 317679
agaauacuccuccggagag

SEQ ID NO: 503568 - RNA, 19 nt, Artificial Sequence
  Description of Artificial Sequence: Synthetic oligonucleotide
  Antisense strand to SEQ ID NO: 503567
cucuccggaggaguauucu

SEQ ID NO: 503569 - RNA, 19 nt, Artificial Sequence
  Description of Artificial Sequence: Synthetic oligonucleotide
  Sense strand starting at position 3365 of SEQ ID NO: 317679
auguguuauuugucaguau

SEQ ID NO: 503570 - RNA, 19 nt, Artificial Sequence
  Description of Artificial Sequence: Synthetic oligonucleotide
  Antisense strand to SEQ ID NO: 503569
auacugacaaauaacacau

SEQ ID NO: 503571 - RNA, 19 nt, Artificial Sequence
  Description of Artificial Sequence: Synthetic oligonucleotide
  Sense strand starting at position 3428 of SEQ ID NO: 317679
ugaggaugaucauagauaa

SEQ ID NO: 503572 - RNA, 19 nt, Artificial Sequence
  Description of Artificial Sequence: Synthetic oligonucleotide
  Antisense strand to SEQ ID NO: 503571
uuaucuaugaucauccuca

SEQ ID NO: 503573 - RNA, 19 nt, Artificial Sequence
  Description of Artificial Sequence: Synthetic oligonucleotide
  Sense strand starting at position 3666 of SEQ ID NO: 317679
agagcuaggcuuugauuac

SEQ ID NO: 503574 - RNA, 19 nt, Artificial Sequence
  Description of Artificial Sequence: Synthetic oligonucleotide
  Antisense strand to SEQ ID NO: 503573
guaaucaaagccuagcucu

SEQ ID NO: 503575 - RNA, 19 nt, Artificial Sequence
  Description of Artificial Sequence: Synthetic oligonucleotide
  Sense strand starting at position 3670 of SEQ ID NO: 317679
cuaggcuuugauuacuuua

SEQ ID NO: 503576 - RNA, 19 nt, Artificial Sequence
  Description of Artificial Sequence: Synthetic oligonucleotide
  Antisense strand to SEQ ID NO: 503575
uaaaguaaucaaagccuag

SEQ ID NO: 503577 - RNA, 19 nt, Artificial Sequence
  Description of Artificial Sequence: Synthetic oligonucleotide
  Sense strand starting at position 3672 of SEQ ID NO: 317679
aggcuuugauuacuuuauu

SEQ ID NO: 503578 - RNA, 19 nt, Artificial Sequence
  Description of Artificial Sequence: Synthetic oligonucleotide
  Antisense strand to SEQ ID NO: 503577
aauaaaguaaucaaagccu

SEQ ID NO: 503579 - RNA, 19 nt, Artificial Sequence
  Description of Artificial Sequence: Synthetic oligonucleotide
  Sense strand starting at position 3823 of SEQ ID NO: 317679
aguggauaaucuucuuucu

SEQ ID NO: 503580 - RNA, 19 nt, Artificial Sequence
  Description of Artificial Sequence: Synthetic oligonucleotide
  Antisense strand to SEQ ID NO: 503579
agaaagaagauuauccacu

SEQ ID NO: 503581 - RNA, 19 nt, Artificial Sequence
  Description of Artificial Sequence: Synthetic oligonucleotide
  Sense strand starting at position 3934 of SEQ ID NO: 317679
uucucauggccauaaugaa

SEQ ID NO: 503582 - RNA, 19 nt, Artificial Sequence
  Description of Artificial Sequence: Synthetic oligonucleotide
  Antisense strand to SEQ ID NO: 503581
uucauuauggccaugagaa

SEQ ID NO: 503583 - RNA, 19 nt, Artificial Sequence
  Description of Artificial Sequence: Synthetic oligonucleotide
  Sense strand starting at position 3967 of SEQ ID NO: 317679
augugauuguuacuccauu

SEQ ID NO: 503584 - RNA, 19 nt, Artificial Sequence
  Description of Artificial Sequence: Synthetic oligonucleotide
  Antisense strand to SEQ ID NO: 503583
aauggaguaacaaucacau

SEQ ID NO: 503585 - RNA, 19 nt, Artificial Sequence
  Description of Artificial Sequence: Synthetic oligonucleotide
  Sense strand starting at position 3968 of SEQ ID NO: 317679
ugugauuguuacuccauuu

SEQ ID NO: 503586 - RNA, 19 nt, Artificial Sequence
  Description of Artificial Sequence: Synthetic oligonucleotide
  Antisense strand to SEQ ID NO: 503585
aaauggaguaacaaucaca

SEQ ID NO: 503587 - RNA, 19 nt, Artificial Sequence
  Description of Artificial Sequence: Synthetic oligonucleotide
  Sense strand starting at position 44 of SEQ ID NO: 317680
cuaguaagugaugguaaac

SEQ ID NO: 503588 - RNA, 19 nt, Artificial Sequence
  Description of Artificial Sequence: Synthetic oligonucleotide
  Antisense strand to SEQ ID NO: 503587
guuuaccaucacuuacuag

SEQ ID NO: 503589 - RNA, 19 nt, Artificial Sequence
  Description of Artificial Sequence: Synthetic oligonucleotide
  Sense strand starting at position 151 of SEQ ID NO: 317680
acacuauacgaguaguaua

SEQ ID NO: 503590 - RNA, 19 nt, Artificial Sequence
  Description of Artificial Sequence: Synthetic oligonucleotide
  Antisense strand to SEQ ID NO: 503589
uauacuacucguauagugu

SEQ ID NO: 503591 - RNA, 19 nt, Artificial Sequence
  Description of Artificial Sequence: Synthetic oligonucleotide
  Sense strand starting at position 158 of SEQ ID NO: 317680
acgaguaguauacaccgau

SEQ ID NO: 503592 - RNA, 19 nt, Artificial Sequence
  Description of Artificial Sequence: Synthetic oligonucleotide
  Antisense strand to SEQ ID NO: 503591
aucgguguauacuacucgu

SEQ ID NO: 503593 - RNA, 19 nt, Artificial Sequence
  Description of Artificial Sequence: Synthetic oligonucleotide
  Sense strand starting at position 327 of SEQ ID NO: 317680
ucaauaaaggcugguacua

SEQ ID NO: 503594 - RNA, 19 nt, Artificial Sequence
  Description of Artificial Sequence: Synthetic oligonucleotide
  Antisense strand to SEQ ID NO: 503593
uaguaccagccuuuauuga

SEQ ID NO: 503595 - RNA, 19 nt, Artificial Sequence
  Description of Artificial Sequence: Synthetic oligonucleotide
  Sense strand starting at position 626 of SEQ ID NO: 317680
uuguaauggcaagauugau

SEQ ID NO: 503596 - RNA, 19 nt, Artificial Sequence
  Description of Artificial Sequence: Synthetic oligonucleotide
  Antisense strand to SEQ ID NO: 503595
aucaaucuugccauuacaa

SEQ ID NO: 503597 - RNA, 19 nt, Artificial Sequence
  Description of Artificial Sequence: Synthetic oligonucleotide
  Sense strand starting at position 643 of SEQ ID NO: 317680
auuuccaucugggacuuau

SEQ ID NO: 503598 - RNA, 19 nt, Artificial Sequence
  Description of Artificial Sequence: Synthetic oligonucleotide
  Antisense strand to SEQ ID NO: 503597
auaagucccagauggaaau

SEQ ID NO: 503599 - RNA, 19 nt, Artificial Sequence
  Description of Artificial Sequence: Synthetic oligonucleotide
  Sense strand starting at position 652 of SEQ ID NO: 317680
ugggacuuaucugcauaaa

SEQ ID NO: 503600 - RNA, 19 nt, Artificial Sequence
  Description of Artificial Sequence: Synthetic oligonucleotide
  Antisense strand to SEQ ID NO: 503599
uuuaugcagauaaguccca

SEQ ID NO: 503601 - RNA, 19 nt, Artificial Sequence
  Description of Artificial Sequence: Synthetic oligonucleotide
  Sense strand starting at position 709 of SEQ ID NO: 317680
gcucauuucuugcuauaag

SEQ ID NO: 503602 - RNA, 19 nt, Artificial Sequence
  Description of Artificial Sequence: Synthetic oligonucleotide
  Antisense strand to SEQ ID NO: 503601
cuuauagcaagaaaugagc

SEQ ID NO: 503603 - RNA, 19 nt, Artificial Sequence
  Description of Artificial Sequence: Synthetic oligonucleotide
  Sense strand starting at position 796 of SEQ ID NO: 317680
guguuucagcuagcgaauu

SEQ ID NO: 503604 - RNA, 19 nt, Artificial Sequence
  Description of Artificial Sequence: Synthetic oligonucleotide
  Antisense strand to SEQ ID NO: 503603
aauucgcuagcugaaacac

SEQ ID NO: 503605 - RNA, 19 nt, Artificial Sequence
  Description of Artificial Sequence: Synthetic oligonucleotide
  Sense strand starting at position 810 of SEQ ID NO: 317680
gaauucugcccucagguaa

SEQ ID NO: 503606 - RNA, 19 nt, Artificial Sequence
  Description of Artificial Sequence: Synthetic oligonucleotide
  Antisense strand to SEQ ID NO: 503605
uuaccugagggcagaauuc

SEQ ID NO: 503607 - RNA, 19 nt, Artificial Sequence
  Description of Artificial Sequence: Synthetic oligonucleotide
  Sense strand starting at position 896 of SEQ ID NO: 317680
ccugcacuuguccauacua

SEQ ID NO: 503608 - RNA, 19 nt, Artificial Sequence
  Description of Artificial Sequence: Synthetic oligonucleotide
  Antisense strand to SEQ ID NO: 503607
uaguauggacaagugcagg

SEQ ID NO: 503609 - RNA, 19 nt, Artificial Sequence
  Description of Artificial Sequence: Synthetic oligonucleotide
  Sense strand starting at position 1090 of SEQ ID NO: 317680
gguuacuucgaggguaaau

SEQ ID NO: 503610 - RNA, 19 nt, Artificial Sequence
  Description of Artificial Sequence: Synthetic oligonucleotide
  Antisense strand to SEQ ID NO: 503609
auuuacccucgaaguaacc

SEQ ID NO: 503611 - RNA, 19 nt, Artificial Sequence
  Description of Artificial Sequence: Synthetic oligonucleotide
  Sense strand starting at position 1201 of SEQ ID NO: 317680
gcagucugucacguaucga

SEQ ID NO: 503612 - RNA, 19 nt, Artificial Sequence
  Description of Artificial Sequence: Synthetic oligonucleotide
  Antisense strand to SEQ ID NO: 503611
ucgauacgugacagacugc

SEQ ID NO: 503613 - RNA, 19 nt, Artificial Sequence
  Description of Artificial Sequence: Synthetic oligonucleotide
  Sense strand starting at position 1206 of SEQ ID NO: 317680
cugucacguaucgaaacau

SEQ ID NO: 503614 - RNA, 19 nt, Artificial Sequence
  Description of Artificial Sequence: Synthetic oligonucleotide
  Antisense strand to SEQ ID NO: 503613
auguuucgauacgugacag

SEQ ID NO: 503615 - RNA, 19 nt, Artificial Sequence
  Description of Artificial Sequence: Synthetic oligonucleotide
  Sense strand starting at position 1313 of SEQ ID NO: 317680
agcccaucuguccaaagaa

SEQ ID NO: 503616 - RNA, 19 nt, Artificial Sequence
  Description of Artificial Sequence: Synthetic oligonucleotide
  Antisense strand to SEQ ID NO: 503615
uucuuuggacagaugggcu

SEQ ID NO: 503617 - RNA, 19 nt, Artificial Sequence
  Description of Artificial Sequence: Synthetic oligonucleotide
  Sense strand starting at position 2191 of SEQ ID NO: 317680
guuacuaacguucagaggu

SEQ ID NO: 503618 - RNA, 19 nt, Artificial Sequence
  Description of Artificial Sequence: Synthetic oligonucleotide
  Antisense strand to SEQ ID NO: 503617
accucugaacguuaguaac

SEQ ID NO: 503619 - RNA, 19 nt, Artificial Sequence
  Description of Artificial Sequence: Synthetic oligonucleotide
  Sense strand starting at position 2540 of SEQ ID NO: 317680
gaauuuauuuccgggcaga

SEQ ID NO: 503620 - RNA, 19 nt, Artificial Sequence
  Description of Artificial Sequence: Synthetic oligonucleotide
  Antisense strand to SEQ ID NO: 503619
ucugcccggaaauaaauuc

SEQ ID NO: 503621 - RNA, 19 nt, Artificial Sequence
  Description of Artificial Sequence: Synthetic oligonucleotide
  Sense strand starting at position 2732 of SEQ ID NO: 317680
gguguagggccugauacuu

SEQ ID NO: 503622 - RNA, 19 nt, Artificial Sequence
  Description of Artificial Sequence: Synthetic oligonucleotide
  Antisense strand to SEQ ID NO: 503621
aaguaucaggcccuacacc

SEQ ID NO: 503623 - RNA, 19 nt, Artificial Sequence
  Description of Artificial Sequence: Synthetic oligonucleotide
  Sense strand starting at position 2920 of SEQ ID NO: 317680
auuggcaaagccuggauua

SEQ ID NO: 503624 - RNA, 19 nt, Artificial Sequence
  Description of Artificial Sequence: Synthetic oligonucleotide
  Antisense strand to SEQ ID NO: 503623
uaauccaggcuuugccaau

SEQ ID NO: 503625 - RNA, 19 nt, Artificial Sequence
  Description of Artificial Sequence: Synthetic oligonucleotide
  Sense strand starting at position 2922 of SEQ ID NO: 317680
uggcaaagccuggauuaga

SEQ ID NO: 503626 - RNA, 19 nt, Artificial Sequence
  Description of Artificial Sequence: Synthetic oligonucleotide
  Antisense strand to SEQ ID NO: 503625
ucuaauccaggcuuugcca

SEQ ID NO: 503627 - RNA, 19 nt, Artificial Sequence
  Description of Artificial Sequence: Synthetic oligonucleotide
  Sense strand starting at position 3057 of SEQ ID NO: 317680
gcuaaaggcauagauguua

SEQ ID NO: 503628 - RNA, 19 nt, Artificial Sequence
  Description of Artificial Sequence: Synthetic oligonucleotide
  Antisense strand to SEQ ID NO: 503627
uaacaucuaugccuuuagc

SEQ ID NO: 503629 - RNA, 19 nt, Artificial Sequence
  Description of Artificial Sequence: Synthetic oligonucleotide
  Sense strand starting at position 3141 of SEQ ID NO: 317680
acccuuuauugcuugagaa

SEQ ID NO: 503630 - RNA, 19 nt, Artificial Sequence
  Description of Artificial Sequence: Synthetic oligonucleotide
  Antisense strand to SEQ ID NO: 503629
uucucaagcaauaaagggu

SEQ ID NO: 503631 - RNA, 19 nt, Artificial Sequence
  Description of Artificial Sequence: Synthetic oligonucleotide
  Sense strand starting at position 3142 of SEQ ID NO: 317680
cccuuuauugcuugagaau

SEQ ID NO: 503632 - RNA, 19 nt, Artificial Sequence
  Description of Artificial Sequence: Synthetic oligonucleotide
  Antisense strand to SEQ ID NO: 503631
auucucaagcaauaaaggg

SEQ ID NO: 503633 - RNA, 19 nt, Artificial Sequence
  Description of Artificial Sequence: Synthetic oligonucleotide
  Sense strand starting at position 3143 of SEQ ID NO: 317680
ccuuuauugcuugagaaug

SEQ ID NO: 503634 - RNA, 19 nt, Artificial Sequence
  Description of Artificial Sequence: Synthetic oligonucleotide
  Antisense strand to SEQ ID NO: 503633
cauucucaagcaauaaagg

SEQ ID NO: 503635 - RNA, 19 nt, Artificial Sequence
  Description of Artificial Sequence: Synthetic oligonucleotide
  Sense strand starting at position 3155 of SEQ ID NO: 317680
gagaauguuucccuuugua

SEQ ID NO: 503636 - RNA, 19 nt, Artificial Sequence
  Description of Artificial Sequence: Synthetic oligonucleotide
  Antisense strand to SEQ ID NO: 503635
uacaaagggaaacauucuc

SEQ ID NO: 503637 - RNA, 19 nt, Artificial Sequence
  Description of Artificial Sequence: Synthetic oligonucleotide
  Sense strand starting at position 3202 of SEQ ID NO: 317680
aagcacucuguuuagaguu

SEQ ID NO: 503638 - RNA, 19 nt, Artificial Sequence
  Description of Artificial Sequence: Synthetic oligonucleotide
  Antisense strand to SEQ ID NO: 503637
aacucuaaacagagugcuu

SEQ ID NO: 503639 - RNA, 19 nt, Artificial Sequence
  Description of Artificial Sequence: Synthetic oligonucleotide
  Sense strand starting at position 3208 of SEQ ID NO: 317680
ucuguuuagaguuagaguu

SEQ ID NO: 503640 - RNA, 19 nt, Artificial Sequence
  Description of Artificial Sequence: Synthetic oligonucleotide
  Antisense strand to SEQ ID NO: 503639
aacucuaacucuaaacaga

SEQ ID NO: 503641 - RNA, 19 nt, Artificial Sequence
  Description of Artificial Sequence: Synthetic oligonucleotide
  Sense strand starting at position 3218 of SEQ ID NO: 317680
guuagaguugccuauggga

SEQ ID NO: 503642 - RNA, 19 nt, Artificial Sequence
  Description of Artificial Sequence: Synthetic oligonucleotide
  Antisense strand to SEQ ID NO: 503641
ucccauaggcaacucuaac

SEQ ID NO: 503643 - RNA, 19 nt, Artificial Sequence
  Description of Artificial Sequence: Synthetic oligonucleotide
  Sense strand starting at position 3220 of SEQ ID NO: 317680
uagaguugccuaugggaaa

SEQ ID NO: 503644 - RNA, 19 nt, Artificial Sequence
  Description of Artificial Sequence: Synthetic oligonucleotide
  Antisense strand to SEQ ID NO: 503643
uuucccauaggcaacucua

SEQ ID NO: 503645 - RNA, 19 nt, Artificial Sequence
  Description of Artificial Sequence: Synthetic oligonucleotide
  Sense strand starting at position 3267 of SEQ ID NO: 317680
gaggcugauuucguccuua

SEQ ID NO: 503646 - RNA, 19 nt, Artificial Sequence
  Description of Artificial Sequence: Synthetic oligonucleotide
  Antisense strand to SEQ ID NO: 503645
uaaggacgaaaucagccuc

SEQ ID NO: 503647 - RNA, 19 nt, Artificial Sequence
  Description of Artificial Sequence: Synthetic oligonucleotide
  Sense strand starting at position 3271 of SEQ ID NO: 317680
cugauuucguccuuagacg

SEQ ID NO: 503648 - RNA, 19 nt, Artificial Sequence
  Description of Artificial Sequence: Synthetic oligonucleotide
  Antisense strand to SEQ ID NO: 503647
cgucuaaggacgaaaucag

SEQ ID NO: 503649 - RNA, 19 nt, Artificial Sequence
  Description of Artificial Sequence: Synthetic oligonucleotide
  Sense strand starting at position 3272 of SEQ ID NO: 317680
ugauuucguccuuagacgu

SEQ ID NO: 503650 - RNA, 19 nt, Artificial Sequence
  Description of Artificial Sequence: Synthetic oligonucleotide
  Antisense strand to SEQ ID NO: 503649
acgucuaaggacgaaauca

SEQ ID NO: 503651 - RNA, 19 nt, Artificial Sequence
  Description of Artificial Sequence: Synthetic oligonucleotide
  Sense strand starting at position 3659 of SEQ ID NO: 317680
ugcuacuguggaggauaau

SEQ ID NO: 503652 - RNA, 19 nt, Artificial Sequence
  Description of Artificial Sequence: Synthetic oligonucleotide
  Antisense strand to SEQ ID NO: 503651
auuauccuccacaguagca

SEQ ID NO: 503653 - RNA, 19 nt, Artificial Sequence
  Description of Artificial Sequence: Synthetic oligonucleotide
  Sense strand starting at position 3660 of SEQ ID NO: 317680
gcuacuguggaggauaauu

SEQ ID NO: 503654 - RNA, 19 nt, Artificial Sequence
  Description of Artificial Sequence: Synthetic oligonucleotide
  Antisense strand to SEQ ID NO: 503653
aauuauccuccacaguagc

SEQ ID NO: 503655 - RNA, 19 nt, Artificial Sequence
  Description of Artificial Sequence: Synthetic oligonucleotide
  Sense strand starting at position 3668 of SEQ ID NO: 317680
ggaggauaauucucuccca

SEQ ID NO: 503656 - RNA, 19 nt, Artificial Sequence
  Description of Artificial Sequence: Synthetic oligonucleotide
  Antisense strand to SEQ ID NO: 503655
ugggagagaauuauccucc

SEQ ID NO: 503657 - RNA, 19 nt, Artificial Sequence
  Description of Artificial Sequence: Synthetic oligonucleotide
  Sense strand starting at position 3729 of SEQ ID NO: 317680
ccugaugcacuauaaguau

SEQ ID NO: 503658 - RNA, 19 nt, Artificial Sequence
  Description of Artificial Sequence: Synthetic oligonucleotide
  Antisense strand to SEQ ID NO: 503657
auacuuauagugcaucagg

SEQ ID NO: 503659 - RNA, 19 nt, Artificial Sequence
  Description of Artificial Sequence: Synthetic oligonucleotide
  Sense strand starting at position 3890 of SEQ ID NO: 317680
cuuguuacuugacucugau

SEQ ID NO: 503660 - RNA, 19 nt, Artificial Sequence
  Description of Artificial Sequence: Synthetic oligonucleotide
  Antisense strand to SEQ ID NO: 503659
aucagagucaaguaacaag

SEQ ID NO: 503661 - RNA, 19 nt, Artificial Sequence
  Description of Artificial Sequence: Synthetic oligonucleotide
  Sense strand starting at position 3893 of SEQ ID NO: 317680
guuacuugacucugaugau

SEQ ID NO: 503662 - RNA, 19 nt, Artificial Sequence
  Description of Artificial Sequence: Synthetic oligonucleotide
  Antisense strand to SEQ ID NO: 503661
aucaucagagucaaguaac

SEQ ID NO: 503663 - RNA, 19 nt, Artificial Sequence
  Description of Artificial Sequence: Synthetic oligonucleotide
  Sense strand starting at position 3952 of SEQ ID NO: 317680
uaaauauugcccgagggca

SEQ ID NO: 503664 - RNA, 19 nt, Artificial Sequence
  Description of Artificial Sequence: Synthetic oligonucleotide
  Antisense strand to SEQ ID NO: 503663
ugcccucgggcaauauuua

SEQ ID NO: 503665 - RNA, 19 nt, Artificial Sequence
  Description of Artificial Sequence: Synthetic oligonucleotide
  Sense strand starting at position 3974 of SEQ ID NO: 317680
uuucuuggucuggacagua

SEQ ID NO: 503666 - RNA, 19 nt, Artificial Sequence
  Description of Artificial Sequence: Synthetic oligonucleotide
  Antisense strand to SEQ ID NO: 503665
uacuguccagaccaagaaa

SEQ ID NO: 503667 - RNA, 19 nt, Artificial Sequence
  Description of Artificial Sequence: Synthetic oligonucleotide
  Sense strand starting at position 44 of SEQ ID NO: 317681
ggcccaagucacuaccuua

SEQ ID NO: 503668 - RNA, 19 nt, Artificial Sequence
  Description of Artificial Sequence: Synthetic oligonucleotide
  Antisense strand to SEQ ID NO: 503667
uaagguagugacuugggcc

SEQ ID NO: 503669 - RNA, 19 nt, Artificial Sequence
  Description of Artificial Sequence: Synthetic oligonucleotide
  Sense strand starting at position 281 of SEQ ID NO: 317681
cauaaagugugacucagaa

SEQ ID NO: 503670 - RNA, 19 nt, Artificial Sequence
  Description of Artificial Sequence: Synthetic oligonucleotide
  Antisense strand to SEQ ID NO: 503669
uucugagucacacuuuaug

SEQ ID NO: 503671 - RNA, 19 nt, Artificial Sequence
  Description of Artificial Sequence: Synthetic oligonucleotide
  Sense strand starting at position 285 of SEQ ID NO: 317681
aagugugacucagaauuug

SEQ ID NO: 503672 - RNA, 19 nt, Artificial Sequence
  Description of Artificial Sequence: Synthetic oligonucleotide
  Antisense strand to SEQ ID NO: 503671
caaauucugagucacacuu

SEQ ID NO: 503673 - RNA, 19 nt, Artificial Sequence
  Description of Artificial Sequence: Synthetic oligonucleotide
  Sense strand starting at position 1074 of SEQ ID NO: 317681
gugggaguuagucaguuua

SEQ ID NO: 503674 - RNA, 19 nt, Artificial Sequence
  Description of Artificial Sequence: Synthetic oligonucleotide
  Antisense strand to SEQ ID NO: 503673
uaaacugacuaacucccac

SEQ ID NO: 503675 - RNA, 19 nt, Artificial Sequence
  Description of Artificial Sequence: Synthetic oligonucleotide
  Sense strand starting at position 1076 of SEQ ID NO: 317681
gggaguuagucaguuuaac

SEQ ID NO: 503676 - RNA, 19 nt, Artificial Sequence
  Description of Artificial Sequence: Synthetic oligonucleotide
  Antisense strand to SEQ ID NO: 503675
guuaaacugacuaacuccc

SEQ ID NO: 503677 - RNA, 19 nt, Artificial Sequence
  Description of Artificial Sequence: Synthetic oligonucleotide
  Sense strand starting at position 1212 of SEQ ID NO: 317681
gguacaugccaguaguaag

SEQ ID NO: 503678 - RNA, 19 nt, Artificial Sequence
  Description of Artificial Sequence: Synthetic oligonucleotide
  Antisense strand to SEQ ID NO: 503677
cuuacuacuggcauguacc

SEQ ID NO: 503679 - RNA, 19 nt, Artificial Sequence
  Description of Artificial Sequence: Synthetic oligonucleotide
  Sense strand starting at position 1406 of SEQ ID NO: 317681
caguucuuaggcugaagau

SEQ ID NO: 503680 - RNA, 19 nt, Artificial Sequence
  Description of Artificial Sequence: Synthetic oligonucleotide
  Antisense strand to SEQ ID NO: 503679
aucuucagccuaagaacug

SEQ ID NO: 503681 - RNA, 19 nt, Artificial Sequence
  Description of Artificial Sequence: Synthetic oligonucleotide
  Sense strand starting at position 1407 of SEQ ID NO: 317681
aguucuuaggcugaagauc

SEQ ID NO: 503682 - RNA, 19 nt, Artificial Sequence
  Description of Artificial Sequence: Synthetic oligonucleotide
  Antisense strand to SEQ ID NO: 503681
gaucuucagccuaagaacu

SEQ ID NO: 503683 - RNA, 19 nt, Artificial Sequence
  Description of Artificial Sequence: Synthetic oligonucleotide
  Sense strand starting at position 1453 of SEQ ID NO: 317681
auguaaagaccggguucau

SEQ ID NO: 503684 - RNA, 19 nt, Artificial Sequence
  Description of Artificial Sequence: Synthetic oligonucleotide
  Antisense strand to SEQ ID NO: 503683
augaacccggucuuuacau

SEQ ID NO: 503685 - RNA, 19 nt, Artificial Sequence
  Description of Artificial Sequence: Synthetic oligonucleotide
  Sense strand starting at position 1596 of SEQ ID NO: 317681
cgcaguugaccagaaugau

SEQ ID NO: 503686 - RNA, 19 nt, Artificial Sequence
  Description of Artificial Sequence: Synthetic oligonucleotide
  Antisense strand to SEQ ID NO: 503685
aucauucuggucaacugcg

SEQ ID NO: 503687 - RNA, 19 nt, Artificial Sequence
  Description of Artificial Sequence: Synthetic oligonucleotide
  Sense strand starting at position 1605 of SEQ ID NO: 317681
ccagaaugauggccagcau

SEQ ID NO: 503688 - RNA, 19 nt, Artificial Sequence
  Description of Artificial Sequence: Synthetic oligonucleotide
  Antisense strand to SEQ ID NO: 503687
augcuggccaucauucugg

SEQ ID NO: 503689 - RNA, 19 nt, Artificial Sequence
  Description of Artificial Sequence: Synthetic oligonucleotide
  Sense strand starting at position 1609 of SEQ ID NO: 317681
aaugauggccagcauguaa

SEQ ID NO: 503690 - RNA, 19 nt, Artificial Sequence
  Description of Artificial Sequence: Synthetic oligonucleotide
  Antisense strand to SEQ ID NO: 503689
uuacaugcuggccaucauu

SEQ ID NO: 503691 - RNA, 19 nt, Artificial Sequence
  Description of Artificial Sequence: Synthetic oligonucleotide
  Sense strand starting at position 1624 of SEQ ID NO: 317681
guaauccuugcccagcaua

SEQ ID NO: 503692 - RNA, 19 nt, Artificial Sequence
  Description of Artificial Sequence: Synthetic oligonucleotide
  Antisense strand to SEQ ID NO: 503691
uaugcugggcaaggauuac

SEQ ID NO: 503693 - RNA, 19 nt, Artificial Sequence
  Description of Artificial Sequence: Synthetic oligonucleotide
  Sense strand starting at position 2083 of SEQ ID NO: 317681
cguggaaguaucugagaga

SEQ ID NO: 503694 - RNA, 19 nt, Artificial Sequence
  Description of Artificial Sequence: Synthetic oligonucleotide
  Antisense strand to SEQ ID NO: 503693
ucucucagauacuuccacg

SEQ ID NO: 503695 - RNA, 19 nt, Artificial Sequence
  Description of Artificial Sequence: Synthetic oligonucleotide
  Sense strand starting at position 2105 of SEQ ID NO: 317681
guacuuggccacuaggaaa

SEQ ID NO: 503696 - RNA, 19 nt, Artificial Sequence
  Description of Artificial Sequence: Synthetic oligonucleotide
  Antisense strand to SEQ ID NO: 503695
uuuccuaguggccaaguac

SEQ ID NO: 503697 - RNA, 19 nt, Artificial Sequence
  Description of Artificial Sequence: Synthetic oligonucleotide
  Sense strand starting at position 2155 of SEQ ID NO: 317681
gugccuucgcccuccguaa

SEQ ID NO: 503698 - RNA, 19 nt, Artificial Sequence
  Description of Artificial Sequence: Synthetic oligonucleotide
  Antisense strand to SEQ ID NO: 503697
uuacggagggcgaaggcac

SEQ ID NO: 503699 - RNA, 19 nt, Artificial Sequence
  Description of Artificial Sequence: Synthetic oligonucleotide
  Sense strand starting at position 2156 of SEQ ID NO: 317681
ugccuucgcccuccguaaa

SEQ ID NO: 503700 - RNA, 19 nt, Artificial Sequence
  Description of Artificial Sequence: Synthetic oligonucleotide
  Antisense strand to SEQ ID NO: 503699
uuuacggagggcgaaggca

SEQ ID NO: 503701 - RNA, 19 nt, Artificial Sequence
  Description of Artificial Sequence: Synthetic oligonucleotide
  Sense strand starting at position 2571 of SEQ ID NO: 317681
gugacacgauguuuccaau

SEQ ID NO: 503702 - RNA, 19 nt, Artificial Sequence
  Description of Artificial Sequence: Synthetic oligonucleotide
  Antisense strand to SEQ ID NO: 503701
auuggaaacaucgugucac

SEQ ID NO: 503703 - RNA, 19 nt, Artificial Sequence
  Description of Artificial Sequence: Synthetic oligonucleotide
  Sense strand starting at position 2747 of SEQ ID NO: 317681
uugggauguccuugggaag

SEQ ID NO: 503704 - RNA, 19 nt, Artificial Sequence
  Description of Artificial Sequence: Synthetic oligonucleotide
  Antisense strand to SEQ ID NO: 503703
cuucccaaggacaucccaa

SEQ ID NO: 503705 - RNA, 19 nt, Artificial Sequence
  Description of Artificial Sequence: Synthetic oligonucleotide
  Sense strand starting at position 2748 of SEQ ID NO: 317681
ugggauguccuugggaaga

SEQ ID NO: 503706 - RNA, 19 nt, Artificial Sequence
  Description of Artificial Sequence: Synthetic oligonucleotide
  Antisense strand to SEQ ID NO: 503705
ucuucccaaggacauccca

SEQ ID NO: 503707 - RNA, 19 nt, Artificial Sequence
  Description of Artificial Sequence: Synthetic oligonucleotide
  Sense strand starting at position 2828 of SEQ ID NO: 317681
auuacucaccauuggucua

SEQ ID NO: 503708 - RNA, 19 nt, Artificial Sequence
  Description of Artificial Sequence: Synthetic oligonucleotide
  Antisense strand to SEQ ID NO: 503707
uagaccaauggugaguaau

SEQ ID NO: 503709 - RNA, 19 nt, Artificial Sequence
  Description of Artificial Sequence: Synthetic oligonucleotide
  Sense strand starting at position 2831 of SEQ ID NO: 317681
acucaccauuggucuagaa

SEQ ID NO: 503710 - RNA, 19 nt, Artificial Sequence
  Description of Artificial Sequence: Synthetic oligonucleotide
  Antisense strand to SEQ ID NO: 503709
uucuagaccaauggugagu

SEQ ID NO: 503711 - RNA, 19 nt, Artificial Sequence
  Description of Artificial Sequence: Synthetic oligonucleotide
  Sense strand starting at position 2841 of SEQ ID NO: 317681
ggucuagaagcucagcauu

SEQ ID NO: 503712 - RNA, 19 nt, Artificial Sequence
  Description of Artificial Sequence: Synthetic oligonucleotide
  Antisense strand to SEQ ID NO: 503711
aaugcugagcuucuagacc

SEQ ID NO: 503713 - RNA, 19 nt, Artificial Sequence
  Description of Artificial Sequence: Synthetic oligonucleotide
  Sense strand starting at position 2933 of SEQ ID NO: 317681
ucauaauggagucaguagu

SEQ ID NO: 503714 - RNA, 19 nt, Artificial Sequence
  Description of Artificial Sequence: Synthetic oligonucleotide
  Antisense strand to SEQ ID NO: 503713
acuacugacuccauuauga

SEQ ID NO: 503715 - RNA, 19 nt, Artificial Sequence
  Description of Artificial Sequence: Synthetic oligonucleotide
  Sense strand starting at position 2951 of SEQ ID NO: 317681
ugguuuccugauggaccua

SEQ ID NO: 503716 - RNA, 19 nt, Artificial Sequence
  Description of Artificial Sequence: Synthetic oligonucleotide
  Antisense strand to SEQ ID NO: 503715
uagguccaucaggaaacca

SEQ ID NO: 503717 - RNA, 19 nt, Artificial Sequence
  Description of Artificial Sequence: Synthetic oligonucleotide
  Sense strand starting at position 3025 of SEQ ID NO: 317681
aauucuugucaagguugau

SEQ ID NO: 503718 - RNA, 19 nt, Artificial Sequence
  Description of Artificial Sequence: Synthetic oligonucleotide
  Antisense strand to SEQ ID NO: 503717
aucaaccuugacaagaauu

SEQ ID NO: 503719 - RNA, 19 nt, Artificial Sequence
  Description of Artificial Sequence: Synthetic oligonucleotide
  Sense strand starting at position 3029 of SEQ ID NO: 317681
cuugucaagguugauguaa

SEQ ID NO: 503720 - RNA, 19 nt, Artificial Sequence
  Description of Artificial Sequence: Synthetic oligonucleotide
  Antisense strand to SEQ ID NO: 503719
uuacaucaaccuugacaag

SEQ ID NO: 503721 - RNA, 19 nt, Artificial Sequence
  Description of Artificial Sequence: Synthetic oligonucleotide
  Sense strand starting at position 3132 of SEQ ID NO: 317681
cugccaucucaggaagcuu

SEQ ID NO: 503722 - RNA, 19 nt, Artificial Sequence
  Description of Artificial Sequence: Synthetic oligonucleotide
  Antisense strand to SEQ ID NO: 503721
aagcuuccugagauggcag

SEQ ID NO: 503723 - RNA, 19 nt, Artificial Sequence
  Description of Artificial Sequence: Synthetic oligonucleotide
  Sense strand starting at position 3398 of SEQ ID NO: 317681
aggcuuuauugcccaacau

SEQ ID NO: 503724 - RNA, 19 nt, Artificial Sequence
  Description of Artificial Sequence: Synthetic oligonucleotide
  Antisense strand to SEQ ID NO: 503723
auguugggcaauaaagccu

SEQ ID NO: 503725 - RNA, 19 nt, Artificial Sequence
  Description of Artificial Sequence: Synthetic oligonucleotide
  Sense strand starting at position 3399 of SEQ ID NO: 317681
ggcuuuauugcccaacaug

SEQ ID NO: 503726 - RNA, 19 nt, Artificial Sequence
  Description of Artificial Sequence: Synthetic oligonucleotide
  Antisense strand to SEQ ID NO: 503725
cauguugggcaauaaagcc

SEQ ID NO: 503727 - RNA, 19 nt, Artificial Sequence
  Description of Artificial Sequence: Synthetic oligonucleotide
  Sense strand starting at position 3416 of SEQ ID NO: 317681
ugcucuugagaguguuaaa

SEQ ID NO: 503728 - RNA, 19 nt, Artificial Sequence
  Description of Artificial Sequence: Synthetic oligonucleotide
  Antisense strand to SEQ ID NO: 503727
uuuaacacucucaagagca

SEQ ID NO: 503729 - RNA, 19 nt, Artificial Sequence
  Description of Artificial Sequence: Synthetic oligonucleotide
  Sense strand starting at position 3425 of SEQ ID NO: 317681
gaguguuaaauggauggua

SEQ ID NO: 503730 - RNA, 19 nt, Artificial Sequence
  Description of Artificial Sequence: Synthetic oligonucleotide
  Antisense strand to SEQ ID NO: 503729
uaccauccauuuaacacuc

SEQ ID NO: 503731 - RNA, 19 nt, Artificial Sequence
  Description of Artificial Sequence: Synthetic oligonucleotide
  Sense strand starting at position 3427 of SEQ ID NO: 317681
guguuaaauggaugguaga

SEQ ID NO: 503732 - RNA, 19 nt, Artificial Sequence
  Description of Artificial Sequence: Synthetic oligonucleotide
  Antisense strand to SEQ ID NO: 503731
ucuaccauccauuuaacac

SEQ ID NO: 503733 - RNA, 19 nt, Artificial Sequence
  Description of Artificial Sequence: Synthetic oligonucleotide
  Sense strand starting at position 3460 of SEQ ID NO: 317681
gugauuauugagggccuau

SEQ ID NO: 503734 - RNA, 19 nt, Artificial Sequence
  Description of Artificial Sequence: Synthetic oligonucleotide
  Antisense strand to SEQ ID NO: 503733
auaggcccucaauaaucac

SEQ ID NO: 503735 - RNA, 19 nt, Artificial Sequence
  Description of Artificial Sequence: Synthetic oligonucleotide
  Sense strand starting at position 3536 of SEQ ID NO: 317681
gugguuaaguaggugaaga

SEQ ID NO: 503736 - RNA, 19 nt, Artificial Sequence
  Description of Artificial Sequence: Synthetic oligonucleotide
  Antisense strand to SEQ ID NO: 503735
ucuucaccuacuuaaccac

SEQ ID NO: 503737 - RNA, 19 nt, Artificial Sequence
  Description of Artificial Sequence: Synthetic oligonucleotide
  Sense strand starting at position 3575 of SEQ ID NO: 317681
ggcagaacagcauauguaa

SEQ ID NO: 503738 - RNA, 19 nt, Artificial Sequence
  Description of Artificial Sequence: Synthetic oligonucleotide
  Antisense strand to SEQ ID NO: 503737
uuacauaugcuguucugcc

SEQ ID NO: 503739 - RNA, 19 nt, Artificial Sequence
  Description of Artificial Sequence: Synthetic oligonucleotide
  Sense strand starting at position 3765 of SEQ ID NO: 317681
ggguucugagauuguguga

SEQ ID NO: 503740 - RNA, 19 nt, Artificial Sequence
  Description of Artificial Sequence: Synthetic oligonucleotide
  Antisense strand to SEQ ID NO: 503739
ucacacaaucucagaaccc

SEQ ID NO: 503741 - RNA, 19 nt, Artificial Sequence
  Description of Artificial Sequence: Synthetic oligonucleotide
  Sense strand starting at position 3768 of SEQ ID NO: 317681
uucugagauugugugauca

SEQ ID NO: 503742 - RNA, 19 nt, Artificial Sequence
  Description of Artificial Sequence: Synthetic oligonucleotide
  Antisense strand to SEQ ID NO: 503741
ugaucacacaaucucagaa

SEQ ID NO: 503743 - RNA, 19 nt, Artificial Sequence
  Description of Artificial Sequence: Synthetic oligonucleotide
  Sense strand starting at position 3772 of SEQ ID NO: 317681
gagauugugugaucagaac

SEQ ID NO: 503744 - RNA, 19 nt, Artificial Sequence
  Description of Artificial Sequence: Synthetic oligonucleotide
  Antisense strand to SEQ ID NO: 503743
guucugaucacacaaucuc

SEQ ID NO: 503745 - RNA, 19 nt, Artificial Sequence
  Description of Artificial Sequence: Synthetic oligonucleotide
  Sense strand starting at position 3919 of SEQ ID NO: 317681
gaaggagccuagcuaaguu

SEQ ID NO: 503746 - RNA, 19 nt, Artificial Sequence
  Description of Artificial Sequence: Synthetic oligonucleotide
  Antisense strand to SEQ ID NO: 503745
aacuuagcuaggcuccuuc

SEQ ID NO: 503747 - RNA, 19 nt, Artificial Sequence
  Description of Artificial Sequence: Synthetic oligonucleotide
  Sense strand starting at position 51 of SEQ ID NO: 317682
gaguaauauuagcuguuaa

SEQ ID NO: 503748 - RNA, 19 nt, Artificial Sequence
  Description of Artificial Sequence: Synthetic oligonucleotide
  Antisense strand to SEQ ID NO: 503747
uuaacagcuaauauuacuc

SEQ ID NO: 503749 - RNA, 19 nt, Artificial Sequence
  Description of Artificial Sequence: Synthetic oligonucleotide
  Sense strand starting at position 88 of SEQ ID NO: 317682
augugacaucuuuaguucu

SEQ ID NO: 503750 - RNA, 19 nt, Artificial Sequence
  Description of Artificial Sequence: Synthetic oligonucleotide
  Antisense strand to SEQ ID NO: 503749
agaacuaaagaugucacau

SEQ ID NO: 503751 - RNA, 19 nt, Artificial Sequence
  Description of Artificial Sequence: Synthetic oligonucleotide
  Sense strand starting at position 90 of SEQ ID NO: 317682
gugacaucuuuaguucuag

SEQ ID NO: 503752 - RNA, 19 nt, Artificial Sequence
  Description of Artificial Sequence: Synthetic oligonucleotide
  Antisense strand to SEQ ID NO: 503751
cuagaacuaaagaugucac

SEQ ID NO: 503753 - RNA, 19 nt, Artificial Sequence
  Description of Artificial Sequence: Synthetic oligonucleotide
  Sense strand starting at position 302 of SEQ ID NO: 317682
ugauauccaugaucaagua

SEQ ID NO: 503754 - RNA, 19 nt, Artificial Sequence
  Description of Artificial Sequence: Synthetic oligonucleotide
  Antisense strand to SEQ ID NO: 503753
uacuugaucauggauauca

SEQ ID NO: 503755 - RNA, 19 nt, Artificial Sequence
  Description of Artificial Sequence: Synthetic oligonucleotide
  Sense strand starting at position 645 of SEQ ID NO: 317682
ucaagaguauaucucauga

SEQ ID NO: 503756 - RNA, 19 nt, Artificial Sequence
  Description of Artificial Sequence: Synthetic oligonucleotide
  Antisense strand to SEQ ID NO: 503755
ucaugagauauacucuuga

SEQ ID NO: 503757 - RNA, 19 nt, Artificial Sequence
  Description of Artificial Sequence: Synthetic oligonucleotide
  Sense strand starting at position 650 of SEQ ID NO: 317682
aguauaucucaugaguacu

SEQ ID NO: 503758 - RNA, 19 nt, Artificial Sequence
  Description of Artificial Sequence: Synthetic oligonucleotide
  Antisense strand to SEQ ID NO: 503757
aguacucaugagauauacu

SEQ ID NO: 503759 - RNA, 19 nt, Artificial Sequence
  Description of Artificial Sequence: Synthetic oligonucleotide
  Sense strand starting at position 875 of SEQ ID NO: 317682
ugguuugcucuugaaugac

SEQ ID NO: 503760 - RNA, 19 nt, Artificial Sequence
  Description of Artificial Sequence: Synthetic oligonucleotide
  Antisense strand to SEQ ID NO: 503759
gucauucaagagcaaacca

SEQ ID NO: 503761 - RNA, 19 nt, Artificial Sequence
  Description of Artificial Sequence: Synthetic oligonucleotide
  Sense strand starting at position 881 of SEQ ID NO: 317682
gcucuugaaugaccuaauu

SEQ ID NO: 503762 - RNA, 19 nt, Artificial Sequence
  Description of Artificial Sequence: Synthetic oligonucleotide
  Antisense strand to SEQ ID NO: 503761
aauuaggucauucaagagc

SEQ ID NO: 503763 - RNA, 19 nt, Artificial Sequence
  Description of Artificial Sequence: Synthetic oligonucleotide
  Sense strand starting at position 961 of SEQ ID NO: 317682
gauuucguauaggauuuau

SEQ ID NO: 503764 - RNA, 19 nt, Artificial Sequence
  Description of Artificial Sequence: Synthetic oligonucleotide
  Antisense strand to SEQ ID NO: 503763
auaaauccuauacgaaauc

SEQ ID NO: 503765 - RNA, 19 nt, Artificial Sequence
  Description of Artificial Sequence: Synthetic oligonucleotide
  Sense strand starting at position 1000 of SEQ ID NO: 317682
caucacuuucgugauguag

SEQ ID NO: 503766 - RNA, 19 nt, Artificial Sequence
  Description of Artificial Sequence: Synthetic oligonucleotide
  Antisense strand to SEQ ID NO: 503765
cuacaucacgaaagugaug

SEQ ID NO: 503767 - RNA, 19 nt, Artificial Sequence
  Description of Artificial Sequence: Synthetic oligonucleotide
  Sense strand starting at position 1004 of SEQ ID NO: 317682
acuuucgugauguagaauc

SEQ ID NO: 503768 - RNA, 19 nt, Artificial Sequence
  Description of Artificial Sequence: Synthetic oligonucleotide
  Antisense strand to SEQ ID NO: 503767
gauucuacaucacgaaagu

SEQ ID NO: 503769 - RNA, 19 nt, Artificial Sequence
  Description of Artificial Sequence: Synthetic oligonucleotide
  Sense strand starting at position 1006 of SEQ ID NO: 317682
uuucgugauguagaaucaa

SEQ ID NO: 503770 - RNA, 19 nt, Artificial Sequence
  Description of Artificial Sequence: Synthetic oligonucleotide
  Antisense strand to SEQ ID NO: 503769
uugauucuacaucacgaaa

SEQ ID NO: 503771 - RNA, 19 nt, Artificial Sequence
  Description of Artificial Sequence: Synthetic oligonucleotide
  Sense strand starting at position 1156 of SEQ ID NO: 317682
cagcauuugcugcaagguu

SEQ ID NO: 503772 - RNA, 19 nt, Artificial Sequence
  Description of Artificial Sequence: Synthetic oligonucleotide
  Antisense strand to SEQ ID NO: 503771
aaccuugcagcaaaugcug

SEQ ID NO: 503773 - RNA, 19 nt, Artificial Sequence
  Description of Artificial Sequence: Synthetic oligonucleotide
  Sense strand starting at position 1308 of SEQ ID NO: 317682
cagggaguuuacuuagaug

SEQ ID NO: 503774 - RNA, 19 nt, Artificial Sequence
  Description of Artificial Sequence: Synthetic oligonucleotide
  Antisense strand to SEQ ID NO: 503773
caucuaaguaaacucccug

SEQ ID NO: 503775 - RNA, 19 nt, Artificial Sequence
  Description of Artificial Sequence: Synthetic oligonucleotide
  Sense strand starting at position 1499 of SEQ ID NO: 317682
gcauguguccuugucgcca

SEQ ID NO: 503776 - RNA, 19 nt, Artificial Sequence
  Description of Artificial Sequence: Synthetic oligonucleotide
  Antisense strand to SEQ ID NO: 503775
uggcgacaaggacacaugc

SEQ ID NO: 503777 - RNA, 19 nt, Artificial Sequence
  Description of Artificial Sequence: Synthetic oligonucleotide
  Sense strand starting at position 1843 of SEQ ID NO: 317682
aggaaaggccaucgguuua

SEQ ID NO: 503778 - RNA, 19 nt, Artificial Sequence
  Description of Artificial Sequence: Synthetic oligonucleotide
  Antisense strand to SEQ ID NO: 503777
uaaaccgauggccuuuccu

SEQ ID NO: 503779 - RNA, 19 nt, Artificial Sequence
  Description of Artificial Sequence: Synthetic oligonucleotide
  Sense strand starting at position 1848 of SEQ ID NO: 317682
aggccaucgguuuaagaca

SEQ ID NO: 503780 - RNA, 19 nt, Artificial Sequence
  Description of Artificial Sequence: Synthetic oligonucleotide
  Antisense strand to SEQ ID NO: 503779
ugucuuaaaccgauggccu

SEQ ID NO: 503781 - RNA, 19 nt, Artificial Sequence
  Description of Artificial Sequence: Synthetic oligonucleotide
  Sense strand starting at position 2244 of SEQ ID NO: 317682
aguugacacgcauaguaaa

SEQ ID NO: 503782 - RNA, 19 nt, Artificial Sequence
  Description of Artificial Sequence: Synthetic oligonucleotide
  Antisense strand to SEQ ID NO: 503781
uuuacuaugcgugucaacu

SEQ ID NO: 503783 - RNA, 19 nt, Artificial Sequence
  Description of Artificial Sequence: Synthetic oligonucleotide
  Sense strand starting at position 2316 of SEQ ID NO: 317682
gagggagaguaauaaauua

SEQ ID NO: 503784 - RNA, 19 nt, Artificial Sequence
  Description of Artificial Sequence: Synthetic oligonucleotide
  Antisense strand to SEQ ID NO: 503783
uaauuuauuacucucccuc

SEQ ID NO: 503785 - RNA, 19 nt, Artificial Sequence
  Description of Artificial Sequence: Synthetic oligonucleotide
  Sense strand starting at position 2334 of SEQ ID NO: 317682
acaucucgauugcuaugau

SEQ ID NO: 503786 - RNA, 19 nt, Artificial Sequence
  Description of Artificial Sequence: Synthetic oligonucleotide
  Antisense strand to SEQ ID NO: 503785
aucauagcaaucgagaugu

SEQ ID NO: 503787 - RNA, 19 nt, Artificial Sequence
  Description of Artificial Sequence: Synthetic oligonucleotide
  Sense strand starting at position 2408 of SEQ ID NO: 317682
uuacaagucacugaguugu

SEQ ID NO: 503788 - RNA, 19 nt, Artificial Sequence
  Description of Artificial Sequence: Synthetic oligonucleotide
  Antisense strand to SEQ ID NO: 503787
acaacucagugacuuguaa

SEQ ID NO: 503789 - RNA, 19 nt, Artificial Sequence
  Description of Artificial Sequence: Synthetic oligonucleotide
  Sense strand starting at position 2410 of SEQ ID NO: 317682
acaagucacugaguuguca

SEQ ID NO: 503790 - RNA, 19 nt, Artificial Sequence
  Description of Artificial Sequence: Synthetic oligonucleotide
  Antisense strand to SEQ ID NO: 503789
ugacaacucagugacuugu

SEQ ID NO: 503791 - RNA, 19 nt, Artificial Sequence
  Description of Artificial Sequence: Synthetic oligonucleotide
  Sense strand starting at position 2421 of SEQ ID NO: 317682
aguugucagagugaugacu

SEQ ID NO: 503792 - RNA, 19 nt, Artificial Sequence
  Description of Artificial Sequence: Synthetic oligonucleotide
  Antisense strand to SEQ ID NO: 503791
agucaucacucugacaacu

SEQ ID NO: 503793 - RNA, 19 nt, Artificial Sequence
  Description of Artificial Sequence: Synthetic oligonucleotide
  Sense strand starting at position 2430 of SEQ ID NO: 317682
agugaugacuuguuagaua

SEQ ID NO: 503794 - RNA, 19 nt, Artificial Sequence
  Description of Artificial Sequence: Synthetic oligonucleotide
  Antisense strand to SEQ ID NO: 503793
uaucuaacaagucaucacu

SEQ ID NO: 503795 - RNA, 19 nt, Artificial Sequence
  Description of Artificial Sequence: Synthetic oligonucleotide
  Sense strand starting at position 2442 of SEQ ID NO: 317682
uuagauagaucacucgaau

SEQ ID NO: 503796 - RNA, 19 nt, Artificial Sequence
  Description of Artificial Sequence: Synthetic oligonucleotide
  Antisense strand to SEQ ID NO: 503795
auucgagugaucuaucuaa

SEQ ID NO: 503797 - RNA, 19 nt, Artificial Sequence
  Description of Artificial Sequence: Synthetic oligonucleotide
  Sense strand starting at position 2451 of SEQ ID NO: 317682
ucacucgaauuauauuuga

SEQ ID NO: 503798 - RNA, 19 nt, Artificial Sequence
  Description of Artificial Sequence: Synthetic oligonucleotide
  Antisense strand to SEQ ID NO: 503797
ucaaauauaauucgaguga

SEQ ID NO: 503799 - RNA, 19 nt, Artificial Sequence
  Description of Artificial Sequence: Synthetic oligonucleotide
  Sense strand starting at position 2503 of SEQ ID NO: 317682
agcuuaguaguggagauca

SEQ ID NO: 503800 - RNA, 19 nt, Artificial Sequence
  Description of Artificial Sequence: Synthetic oligonucleotide
  Antisense strand to SEQ ID NO: 503799
ugaucuccacuacuaagcu

SEQ ID NO: 503801 - RNA, 19 nt, Artificial Sequence
  Description of Artificial Sequence: Synthetic oligonucleotide
  Sense strand starting at position 2577 of SEQ ID NO: 317682
cuguaacuuuaguuacuua

SEQ ID NO: 503802 - RNA, 19 nt, Artificial Sequence
  Description of Artificial Sequence: Synthetic oligonucleotide
  Antisense strand to SEQ ID NO: 503801
uaaguaacuaaaguuacag

SEQ ID NO: 503803 - RNA, 19 nt, Artificial Sequence
  Description of Artificial Sequence: Synthetic oligonucleotide
  Sense strand starting at position 2676 of SEQ ID NO: 317682
uagagcagucccugacaca

SEQ ID NO: 503804 - RNA, 19 nt, Artificial Sequence
  Description of Artificial Sequence: Synthetic oligonucleotide
  Antisense strand to SEQ ID NO: 503803
ugugucagggacugcucua

SEQ ID NO: 503805 - RNA, 19 nt, Artificial Sequence
  Description of Artificial Sequence: Synthetic oligonucleotide
  Sense strand starting at position 2677 of SEQ ID NO: 317682
agagcagucccugacacau

SEQ ID NO: 503806 - RNA, 19 nt, Artificial Sequence
  Description of Artificial Sequence: Synthetic oligonucleotide
  Antisense strand to SEQ ID NO: 503805
augugucagggacugcucu

SEQ ID NO: 503807 - RNA, 19 nt, Artificial Sequence
  Description of Artificial Sequence: Synthetic oligonucleotide
  Sense strand starting at position 2779 of SEQ ID NO: 317682
ccaggugaugcuuaaauuc

SEQ ID NO: 503808 - RNA, 19 nt, Artificial Sequence
  Description of Artificial Sequence: Synthetic oligonucleotide
  Antisense strand to SEQ ID NO: 503807
gaauuuaagcaucaccugg

SEQ ID NO: 503809 - RNA, 19 nt, Artificial Sequence
  Description of Artificial Sequence: Synthetic oligonucleotide
  Sense strand starting at position 2878 of SEQ ID NO: 317682
ggaaaccaguuucuauuau

SEQ ID NO: 503810 - RNA, 19 nt, Artificial Sequence
  Description of Artificial Sequence: Synthetic oligonucleotide
  Antisense strand to SEQ ID NO: 503809
auaauagaaacugguuucc

SEQ ID NO: 503811 - RNA, 19 nt, Artificial Sequence
  Description of Artificial Sequence: Synthetic oligonucleotide
  Sense strand starting at position 3386 of SEQ ID NO: 317682
gagguuauuccuggaaagu

SEQ ID NO: 503812 - RNA, 19 nt, Artificial Sequence
  Description of Artificial Sequence: Synthetic oligonucleotide
  Antisense strand to SEQ ID NO: 503811
acuuuccaggaauaaccuc

SEQ ID NO: 503813 - RNA, 19 nt, Artificial Sequence
  Description of Artificial Sequence: Synthetic oligonucleotide
  Sense strand starting at position 3387 of SEQ ID NO: 317682
agguuauuccuggaaagug

SEQ ID NO: 503814 - RNA, 19 nt, Artificial Sequence
  Description of Artificial Sequence: Synthetic oligonucleotide
  Antisense strand to SEQ ID NO: 503813
cacuuuccaggaauaaccu

SEQ ID NO: 503815 - RNA, 19 nt, Artificial Sequence
  Description of Artificial Sequence: Synthetic oligonucleotide
  Sense strand starting at position 3392 of SEQ ID NO: 317682
auuccuggaaagugagauu

SEQ ID NO: 503816 - RNA, 19 nt, Artificial Sequence
  Description of Artificial Sequence: Synthetic oligonucleotide
  Antisense strand to SEQ ID NO: 503815
aaucucacuuuccaggaau

SEQ ID NO: 503817 - RNA, 19 nt, Artificial Sequence
  Description of Artificial Sequence: Synthetic oligonucleotide
  Sense strand starting at position 3470 of SEQ ID NO: 317682
uguuacaaugccugauaua

SEQ ID NO: 503818 - RNA, 19 nt, Artificial Sequence
  Description of Artificial Sequence: Synthetic oligonucleotide
  Antisense strand to SEQ ID NO: 503817
uauaucaggcauuguaaca

SEQ ID NO: 503819 - RNA, 19 nt, Artificial Sequence
  Description of Artificial Sequence: Synthetic oligonucleotide
  Sense strand starting at position 3471 of SEQ ID NO: 317682
guuacaaugccugauauac

SEQ ID NO: 503820 - RNA, 19 nt, Artificial Sequence
  Description of Artificial Sequence: Synthetic oligonucleotide
  Antisense strand to SEQ ID NO: 503819
guauaucaggcauuguaac

SEQ ID NO: 503821 - RNA, 19 nt, Artificial Sequence
  Description of Artificial Sequence: Synthetic oligonucleotide
  Sense strand starting at position 3723 of SEQ ID NO: 317682
aggacuuauuuacaaguca

SEQ ID NO: 503822 - RNA, 19 nt, Artificial Sequence
  Description of Artificial Sequence: Synthetic oligonucleotide
  Antisense strand to SEQ ID NO: 503821
ugacuuguaaauaaguccu

SEQ ID NO: 503823 - RNA, 19 nt, Artificial Sequence
  Description of Artificial Sequence: Synthetic oligonucleotide
  Sense strand starting at position 3763 of SEQ ID NO: 317682
uagguaauuucucauaagg

SEQ ID NO: 503824 - RNA, 19 nt, Artificial Sequence
  Description of Artificial Sequence: Synthetic oligonucleotide
  Antisense strand to SEQ ID NO: 503823
ccuuaugagaaauuaccua

SEQ ID NO: 503825 - RNA, 19 nt, Artificial Sequence
  Description of Artificial Sequence: Synthetic oligonucleotide
  Sense strand starting at position 3772 of SEQ ID NO: 317682
ucucauaaggccuagaacu

SEQ ID NO: 503826 - RNA, 19 nt, Artificial Sequence
  Description of Artificial Sequence: Synthetic oligonucleotide
  Antisense strand to SEQ ID NO: 503825
aguucuaggccuuaugaga

SEQ ID NO: 503827 - RNA, 19 nt, Artificial Sequence
  Description of Artificial Sequence: Synthetic oligonucleotide
  Sense strand starting at position 319 of SEQ ID NO: 317683
auaguuugugcuuaacaac

SEQ ID NO: 503828 - RNA, 19 nt, Artificial Sequence
  Description of Artificial Sequence: Synthetic oligonucleotide
  Antisense strand to SEQ ID NO: 503827
guuguuaagcacaaacuau

SEQ ID NO: 503829 - RNA, 19 nt, Artificial Sequence
  Description of Artificial Sequence: Synthetic oligonucleotide
  Sense strand starting at position 328 of SEQ ID NO: 317683
gcuuaacaacuuuggagaa

SEQ ID NO: 503830 - RNA, 19 nt, Artificial Sequence
  Description of Artificial Sequence: Synthetic oligonucleotide
  Antisense strand to SEQ ID NO: 503829
uucuccaaaguuguuaagc

SEQ ID NO: 503831 - RNA, 19 nt, Artificial Sequence
  Description of Artificial Sequence: Synthetic oligonucleotide
  Sense strand starting at position 825 of SEQ ID NO: 317683
ggaauucuaagacgucagu

SEQ ID NO: 503832 - RNA, 19 nt, Artificial Sequence
  Description of Artificial Sequence: Synthetic oligonucleotide
  Antisense strand to SEQ ID NO: 503831
acugacgucuuagaauucc

SEQ ID NO: 503833 - RNA, 19 nt, Artificial Sequence
  Description of Artificial Sequence: Synthetic oligonucleotide
  Sense strand starting at position 831 of SEQ ID NO: 317683
cuaagacgucaguaggcaa

SEQ ID NO: 503834 - RNA, 19 nt, Artificial Sequence
  Description of Artificial Sequence: Synthetic oligonucleotide
  Antisense strand to SEQ ID NO: 503833
uugccuacugacgucuuag

SEQ ID NO: 503835 - RNA, 19 nt, Artificial Sequence
  Description of Artificial Sequence: Synthetic oligonucleotide
  Sense strand starting at position 895 of SEQ ID NO: 317683
guaccauuaagugaugucu

SEQ ID NO: 503836 - RNA, 19 nt, Artificial Sequence
  Description of Artificial Sequence: Synthetic oligonucleotide
  Antisense strand to SEQ ID NO: 503835
agacaucacuuaaugguac

SEQ ID NO: 503837 - RNA, 19 nt, Artificial Sequence
  Description of Artificial Sequence: Synthetic oligonucleotide
  Sense strand starting at position 1107 of SEQ ID NO: 317683
ggagucagacucugaccua

SEQ ID NO: 503838 - RNA, 19 nt, Artificial Sequence
  Description of Artificial Sequence: Synthetic oligonucleotide
  Antisense strand to SEQ ID NO: 503837
uaggucagagucugacucc

SEQ ID NO: 503839 - RNA, 19 nt, Artificial Sequence
  Description of Artificial Sequence: Synthetic oligonucleotide
  Sense strand starting at position 1144 of SEQ ID NO: 317683
ggacuugauucucccauca

SEQ ID NO: 503840 - RNA, 19 nt, Artificial Sequence
  Description of Artificial Sequence: Synthetic oligonucleotide
  Antisense strand to SEQ ID NO: 503839
ugaugggagaaucaagucc

SEQ ID NO: 503841 - RNA, 19 nt, Artificial Sequence
  Description of Artificial Sequence: Synthetic oligonucleotide
  Sense strand starting at position 1578 of SEQ ID NO: 317683
ggaagcuuugccgggagga

SEQ ID NO: 503842 - RNA, 19 nt, Artificial Sequence
  Description of Artificial Sequence: Synthetic oligonucleotide
  Antisense strand to SEQ ID NO: 503841
uccucccggcaaagcuucc

SEQ ID NO: 503843 - RNA, 19 nt, Artificial Sequence
  Description of Artificial Sequence: Synthetic oligonucleotide
  Sense strand starting at position 1580 of SEQ ID NO: 317683
aagcuuugccgggaggaga

SEQ ID NO: 503844 - RNA, 19 nt, Artificial Sequence
  Description of Artificial Sequence: Synthetic oligonucleotide
  Antisense strand to SEQ ID NO: 503843
ucuccucccggcaaagcuu

SEQ ID NO: 503845 - RNA, 19 nt, Artificial Sequence
  Description of Artificial Sequence: Synthetic oligonucleotide
  Sense strand starting at position 2046 of SEQ ID NO: 317683
gagacuagagccuguuaug

SEQ ID NO: 503846 - RNA, 19 nt, Artificial Sequence
  Description of Artificial Sequence: Synthetic oligonucleotide
  Antisense strand to SEQ ID NO: 503845
cauaacaggcucuagucuc

SEQ ID NO: 503847 - RNA, 19 nt, Artificial Sequence
  Description of Artificial Sequence: Synthetic oligonucleotide
  Sense strand starting at position 2275 of SEQ ID NO: 317683
guacuagacgcugaugaua

SEQ ID NO: 503848 - RNA, 19 nt, Artificial Sequence
  Description of Artificial Sequence: Synthetic oligonucleotide
  Antisense strand to SEQ ID NO: 503847
uaucaucagcgucuaguac

SEQ ID NO: 503849 - RNA, 19 nt, Artificial Sequence
  Description of Artificial Sequence: Synthetic oligonucleotide
  Sense strand starting at position 2332 of SEQ ID NO: 317683
ucauaagauagcggagaaa

SEQ ID NO: 503850 - RNA, 19 nt, Artificial Sequence
  Description of Artificial Sequence: Synthetic oligonucleotide
  Antisense strand to SEQ ID NO: 503849
uuucuccgcuaucuuauga

SEQ ID NO: 503851 - RNA, 19 nt, Artificial Sequence
  Description of Artificial Sequence: Synthetic oligonucleotide
  Sense strand starting at position 2436 of SEQ ID NO: 317683
acaccucuuccgggaaauc

SEQ ID NO: 503852 - RNA, 19 nt, Artificial Sequence
  Description of Artificial Sequence: Synthetic oligonucleotide
  Antisense strand to SEQ ID NO: 503851
gauuucccggaagaggugu

SEQ ID NO: 503853 - RNA, 19 nt, Artificial Sequence
  Description of Artificial Sequence: Synthetic oligonucleotide
  Sense strand starting at position 2447 of SEQ ID NO: 317683
gggaaauccuuguuugucu

SEQ ID NO: 503854 - RNA, 19 nt, Artificial Sequence
  Description of Artificial Sequence: Synthetic oligonucleotide
  Antisense strand to SEQ ID NO: 503853
agacaaacaaggauuuccc

SEQ ID NO: 503855 - RNA, 19 nt, Artificial Sequence
  Description of Artificial Sequence: Synthetic oligonucleotide
  Sense strand starting at position 2469 of SEQ ID NO: 317683
acaguuugauaaguucuuu

SEQ ID NO: 503856 - RNA, 19 nt, Artificial Sequence
  Description of Artificial Sequence: Synthetic oligonucleotide
  Antisense strand to SEQ ID NO: 503855
aaagaacuuaucaaacugu

SEQ ID NO: 503857 - RNA, 19 nt, Artificial Sequence
  Description of Artificial Sequence: Synthetic oligonucleotide
  Sense strand starting at position 2475 of SEQ ID NO: 317683
ugauaaguucuuuaccuug

SEQ ID NO: 503858 - RNA, 19 nt, Artificial Sequence
  Description of Artificial Sequence: Synthetic oligonucleotide
  Antisense strand to SEQ ID NO: 503857
caagguaaagaacuuauca

SEQ ID NO: 503859 - RNA, 19 nt, Artificial Sequence
  Description of Artificial Sequence: Synthetic oligonucleotide
  Sense strand starting at position 2480 of SEQ ID NO: 317683
aguucuuuaccuuggauua

SEQ ID NO: 503860 - RNA, 19 nt, Artificial Sequence
  Description of Artificial Sequence: Synthetic oligonucleotide
  Antisense strand to SEQ ID NO: 503859
uaauccaagguaaagaacu

SEQ ID NO: 503861 - RNA, 19 nt, Artificial Sequence
  Description of Artificial Sequence: Synthetic oligonucleotide
  Sense strand starting at position 2481 of SEQ ID NO: 317683
guucuuuaccuuggauuac

SEQ ID NO: 503862 - RNA, 19 nt, Artificial Sequence
  Description of Artificial Sequence: Synthetic oligonucleotide
  Antisense strand to SEQ ID NO: 503861
guaauccaagguaaagaac

SEQ ID NO: 503863 - RNA, 19 nt, Artificial Sequence
  Description of Artificial Sequence: Synthetic oligonucleotide
  Sense strand starting at position 2543 of SEQ ID NO: 317683
uuggguuuccgauauauac

SEQ ID NO: 503864 - RNA, 19 nt, Artificial Sequence
  Description of Artificial Sequence: Synthetic oligonucleotide
  Antisense strand to SEQ ID NO: 503863
guauauaucggaaacccaa

SEQ ID NO: 503865 - RNA, 19 nt, Artificial Sequence
  Description of Artificial Sequence: Synthetic oligonucleotide
  Sense strand starting at position 2545 of SEQ ID NO: 317683
ggguuuccgauauauacua

SEQ ID NO: 503866 - RNA, 19 nt, Artificial Sequence
  Description of Artificial Sequence: Synthetic oligonucleotide
  Antisense strand to SEQ ID NO: 503865
uaguauauaucggaaaccc

SEQ ID NO: 503867 - RNA, 19 nt, Artificial Sequence
  Description of Artificial Sequence: Synthetic oligonucleotide
  Sense strand starting at position 2622 of SEQ ID NO: 317683
uacauucuagugugaaaga

SEQ ID NO: 503868 - RNA, 19 nt, Artificial Sequence
  Description of Artificial Sequence: Synthetic oligonucleotide
  Antisense strand to SEQ ID NO: 503867
ucuuucacacuagaaugua

SEQ ID NO: 503869 - RNA, 19 nt, Artificial Sequence
  Description of Artificial Sequence: Synthetic oligonucleotide
  Sense strand starting at position 2728 of SEQ ID NO: 317683
gugagagguggugauuagu

SEQ ID NO: 503870 - RNA, 19 nt, Artificial Sequence
  Description of Artificial Sequence: Synthetic oligonucleotide
  Antisense strand to SEQ ID NO: 503869
acuaaucaccaccucucac

SEQ ID NO: 503871 - RNA, 19 nt, Artificial Sequence
  Description of Artificial Sequence: Synthetic oligonucleotide
  Sense strand starting at position 2731 of SEQ ID NO: 317683
agagguggugauuagugau

SEQ ID NO: 503872 - RNA, 19 nt, Artificial Sequence
  Description of Artificial Sequence: Synthetic oligonucleotide
  Antisense strand to SEQ ID NO: 503871
aucacuaaucaccaccucu

SEQ ID NO: 503873 - RNA, 19 nt, Artificial Sequence
  Description of Artificial Sequence: Synthetic oligonucleotide
  Sense strand starting at position 2737 of SEQ ID NO: 317683
ggugauuagugaucuuucu

SEQ ID NO: 503874 - RNA, 19 nt, Artificial Sequence
  Description of Artificial Sequence: Synthetic oligonucleotide
  Antisense strand to SEQ ID NO: 503873
agaaagaucacuaaucacc

SEQ ID NO: 503875 - RNA, 19 nt, Artificial Sequence
  Description of Artificial Sequence: Synthetic oligonucleotide
  Sense strand starting at position 2743 of SEQ ID NO: 317683
uagugaucuuucuccagag

SEQ ID NO: 503876 - RNA, 19 nt, Artificial Sequence
  Description of Artificial Sequence: Synthetic oligonucleotide
  Antisense strand to SEQ ID NO: 503875
cucuggagaaagaucacua

SEQ ID NO: 503877 - RNA, 19 nt, Artificial Sequence
  Description of Artificial Sequence: Synthetic oligonucleotide
  Sense strand starting at position 2744 of SEQ ID NO: 317683
agugaucuuucuccagagu

SEQ ID NO: 503878 - RNA, 19 nt, Artificial Sequence
  Description of Artificial Sequence: Synthetic oligonucleotide
  Antisense strand to SEQ ID NO: 503877
acucuggagaaagaucacu

SEQ ID NO: 503879 - RNA, 19 nt, Artificial Sequence
  Description of Artificial Sequence: Synthetic oligonucleotide
  Sense strand starting at position 2745 of SEQ ID NO: 317683
gugaucuuucuccagaguu

SEQ ID NO: 503880 - RNA, 19 nt, Artificial Sequence
  Description of Artificial Sequence: Synthetic oligonucleotide
  Antisense strand to SEQ ID NO: 503879
aacucuggagaaagaucac

SEQ ID NO: 503881 - RNA, 19 nt, Artificial Sequence
  Description of Artificial Sequence: Synthetic oligonucleotide
  Sense strand starting at position 2747 of SEQ ID NO: 317683
gaucuuucuccagaguuga

SEQ ID NO: 503882 - RNA, 19 nt, Artificial Sequence
  Description of Artificial Sequence: Synthetic oligonucleotide
  Antisense strand to SEQ ID NO: 503881
ucaacucuggagaaagauc

SEQ ID NO: 503883 - RNA, 19 nt, Artificial Sequence
  Description of Artificial Sequence: Synthetic oligonucleotide
  Sense strand starting at position 2872 of SEQ ID NO: 317683
gcaagucugacaugaaaga

SEQ ID NO: 503884 - RNA, 19 nt, Artificial Sequence
  Description of Artificial Sequence: Synthetic oligonucleotide
  Antisense strand to SEQ ID NO: 503883
ucuuucaugucagacuugc

SEQ ID NO: 503885 - RNA, 19 nt, Artificial Sequence
  Description of Artificial Sequence: Synthetic oligonucleotide
  Sense strand starting at position 2967 of SEQ ID NO: 317683
ccuccaggucaugguaaga

SEQ ID NO: 503886 - RNA, 19 nt, Artificial Sequence
  Description of Artificial Sequence: Synthetic oligonucleotide
  Antisense strand to SEQ ID NO: 503885
ucuuaccaugaccuggagg

SEQ ID NO: 503887 - RNA, 19 nt, Artificial Sequence
  Description of Artificial Sequence: Synthetic oligonucleotide
  Sense strand starting at position 3186 of SEQ ID NO: 317683
gaaagaccguccuuccuaa

SEQ ID NO: 503888 - RNA, 19 nt, Artificial Sequence
  Description of Artificial Sequence: Synthetic oligonucleotide
  Antisense strand to SEQ ID NO: 503887
uuaggaaggacggucuuuc

SEQ ID NO: 503889 - RNA, 19 nt, Artificial Sequence
  Description of Artificial Sequence: Synthetic oligonucleotide
  Sense strand starting at position 3432 of SEQ ID NO: 317683
uuaauaaguguggaaguuu

SEQ ID NO: 503890 - RNA, 19 nt, Artificial Sequence
  Description of Artificial Sequence: Synthetic oligonucleotide
  Antisense strand to SEQ ID NO: 503889
aaacuuccacacuuauuaa

SEQ ID NO: 503891 - RNA, 19 nt, Artificial Sequence
  Description of Artificial Sequence: Synthetic oligonucleotide
  Sense strand starting at position 3444 of SEQ ID NO: 317683
gaaguuugucagcaucuaa

SEQ ID NO: 503892 - RNA, 19 nt, Artificial Sequence
  Description of Artificial Sequence: Synthetic oligonucleotide
  Antisense strand to SEQ ID NO: 503891
uuagaugcugacaaacuuc

SEQ ID NO: 503893 - RNA, 19 nt, Artificial Sequence
  Description of Artificial Sequence: Synthetic oligonucleotide
  Sense strand starting at position 3543 of SEQ ID NO: 317683
gcuagaauauaaguaggaa

SEQ ID NO: 503894 - RNA, 19 nt, Artificial Sequence
  Description of Artificial Sequence: Synthetic oligonucleotide
  Antisense strand to SEQ ID NO: 503893
uuccuacuuauauucuagc

SEQ ID NO: 503895 - RNA, 19 nt, Artificial Sequence
  Description of Artificial Sequence: Synthetic oligonucleotide
  Sense strand starting at position 3585 of SEQ ID NO: 317683
uggagaagggugggugauu

SEQ ID NO: 503896 - RNA, 19 nt, Artificial Sequence
  Description of Artificial Sequence: Synthetic oligonucleotide
  Antisense strand to SEQ ID NO: 503895
aaucacccacccuucucca

SEQ ID NO: 503897 - RNA, 19 nt, Artificial Sequence
  Description of Artificial Sequence: Synthetic oligonucleotide
  Sense strand starting at position 3612 of SEQ ID NO: 317683
gugggcaggguuuauauua

SEQ ID NO: 503898 - RNA, 19 nt, Artificial Sequence
  Description of Artificial Sequence: Synthetic oligonucleotide
  Antisense strand to SEQ ID NO: 503897
uaauauaaacccugcccac

SEQ ID NO: 503899 - RNA, 19 nt, Artificial Sequence
  Description of Artificial Sequence: Synthetic oligonucleotide
  Sense strand starting at position 3635 of SEQ ID NO: 317683
uguuguaguauggagagaa

SEQ ID NO: 503900 - RNA, 19 nt, Artificial Sequence
  Description of Artificial Sequence: Synthetic oligonucleotide
  Antisense strand to SEQ ID NO: 503899
uucucuccauacuacaaca

SEQ ID NO: 503901 - RNA, 19 nt, Artificial Sequence
  Description of Artificial Sequence: Synthetic oligonucleotide
  Sense strand starting at position 3723 of SEQ ID NO: 317683
acagcccugcuagauaauu

SEQ ID NO: 503902 - RNA, 19 nt, Artificial Sequence
  Description of Artificial Sequence: Synthetic oligonucleotide
  Antisense strand to SEQ ID NO: 503901
aauuaucuagcagggcugu

SEQ ID NO: 503903 - RNA, 19 nt, Artificial Sequence
  Description of Artificial Sequence: Synthetic oligonucleotide
  Sense strand starting at position 3849 of SEQ ID NO: 317683
gaaauuggauuuggagaca

SEQ ID NO: 503904 - RNA, 19 nt, Artificial Sequence
  Description of Artificial Sequence: Synthetic oligonucleotide
  Antisense strand to SEQ ID NO: 503903
ugucuccaaauccaauuuc

SEQ ID NO: 503905 - RNA, 19 nt, Artificial Sequence
  Description of Artificial Sequence: Synthetic oligonucleotide
  Sense strand starting at position 3956 of SEQ ID NO: 317683
uuacuaucccuguguagga

SEQ ID NO: 503906 - RNA, 19 nt, Artificial Sequence
  Description of Artificial Sequence: Synthetic oligonucleotide
  Antisense strand to SEQ ID NO: 503905
uccuacacagggauaguaa

SEQ ID NO: 503907 - RNA, 19 nt, Artificial Sequence
  Description of Artificial Sequence: Synthetic oligonucleotide
  Sense strand starting at position 147 of SEQ ID NO: 317684
gugggauucuuucccucag

SEQ ID NO: 503908 - RNA, 19 nt, Artificial Sequence
  Description of Artificial Sequence: Synthetic oligonucleotide
  Antisense strand to SEQ ID NO: 503907
cugagggaaagaaucccac

SEQ ID NO: 503909 - RNA, 19 nt, Artificial Sequence
  Description of Artificial Sequence: Synthetic oligonucleotide
  Sense strand starting at position 148 of SEQ ID NO: 317684
ugggauucuuucccucaga

SEQ ID NO: 503910 - RNA, 19 nt, Artificial Sequence
  Description of Artificial Sequence: Synthetic oligonucleotide
  Antisense strand to SEQ ID NO: 503909
ucugagggaaagaauccca

SEQ ID NO: 503911 - RNA, 19 nt, Artificial Sequence
  Description of Artificial Sequence: Synthetic oligonucleotide
  Sense strand starting at position 149 of SEQ ID NO: 317684
gggauucuuucccucagag

SEQ ID NO: 503912 - RNA, 19 nt, Artificial Sequence
  Description of Artificial Sequence: Synthetic oligonucleotide
  Antisense strand to SEQ ID NO: 503911
cucugagggaaagaauccc

SEQ ID NO: 503913 - RNA, 19 nt, Artificial Sequence
  Description of Artificial Sequence: Synthetic oligonucleotide
  Sense strand starting at position 240 of SEQ ID NO: 317684
cagugugugaguggacaaa

SEQ ID NO: 503914 - RNA, 19 nt, Artificial Sequence
  Description of Artificial Sequence: Synthetic oligonucleotide
  Antisense strand to SEQ ID NO: 503913
uuuguccacucacacacug

SEQ ID NO: 503915 - RNA, 19 nt, Artificial Sequence
  Description of Artificial Sequence: Synthetic oligonucleotide
  Sense strand starting at position 305 of SEQ ID NO: 317684
agcuauuucccuggaguuc

SEQ ID NO: 503916 - RNA, 19 nt, Artificial Sequence
  Description of Artificial Sequence: Synthetic oligonucleotide
  Antisense strand to SEQ ID NO: 503915
gaacuccagggaaauagcu

SEQ ID NO: 503917 - RNA, 19 nt, Artificial Sequence
  Description of Artificial Sequence: Synthetic oligonucleotide
  Sense strand starting at position 316 of SEQ ID NO: 317684
uggaguucgccggaggaca

SEQ ID NO: 503918 - RNA, 19 nt, Artificial Sequence
  Description of Artificial Sequence: Synthetic oligonucleotide
  Antisense strand to SEQ ID NO: 503917
uguccuccggcgaacucca

SEQ ID NO: 503919 - RNA, 19 nt, Artificial Sequence
  Description of Artificial Sequence: Synthetic oligonucleotide
  Sense strand starting at position 332 of SEQ ID NO: 317684
acaguauuguggucucaga

SEQ ID NO: 503920 - RNA, 19 nt, Artificial Sequence
  Description of Artificial Sequence: Synthetic oligonucleotide
  Antisense strand to SEQ ID NO: 503919
ucugagaccacaauacugu

SEQ ID NO: 503921 - RNA, 19 nt, Artificial Sequence
  Description of Artificial Sequence: Synthetic oligonucleotide
  Sense strand starting at position 383 of SEQ ID NO: 317684
ggaaacauuccguguagga

SEQ ID NO: 503922 - RNA, 19 nt, Artificial Sequence
  Description of Artificial Sequence: Synthetic oligonucleotide
  Antisense strand to SEQ ID NO: 503921
uccuacacggaauguuucc

SEQ ID NO: 503923 - RNA, 19 nt, Artificial Sequence
  Description of Artificial Sequence: Synthetic oligonucleotide
  Sense strand starting at position 385 of SEQ ID NO: 317684
aaacauuccguguaggaga

SEQ ID NO: 503924 - RNA, 19 nt, Artificial Sequence
  Description of Artificial Sequence: Synthetic oligonucleotide
  Antisense strand to SEQ ID NO: 503923
ucuccuacacggaauguuu

SEQ ID NO: 503925 - RNA, 19 nt, Artificial Sequence
  Description of Artificial Sequence: Synthetic oligonucleotide
  Sense strand starting at position 387 of SEQ ID NO: 317684
acauuccguguaggagaua

SEQ ID NO: 503926 - RNA, 19 nt, Artificial Sequence
  Description of Artificial Sequence: Synthetic oligonucleotide
  Antisense strand to SEQ ID NO: 503925
uaucuccuacacggaaugu

SEQ ID NO: 503927 - RNA, 19 nt, Artificial Sequence
  Description of Artificial Sequence: Synthetic oligonucleotide
  Sense strand starting at position 390 of SEQ ID NO: 317684
uuccguguaggagauauua

SEQ ID NO: 503928 - RNA, 19 nt, Artificial Sequence
  Description of Artificial Sequence: Synthetic oligonucleotide
  Antisense strand to SEQ ID NO: 503927
uaauaucuccuacacggaa

SEQ ID NO: 503929 - RNA, 19 nt, Artificial Sequence
  Description of Artificial Sequence: Synthetic oligonucleotide
  Sense strand starting at position 392 of SEQ ID NO: 317684
ccguguaggagauauuauc

SEQ ID NO: 503930 - RNA, 19 nt, Artificial Sequence
  Description of Artificial Sequence: Synthetic oligonucleotide
  Antisense strand to SEQ ID NO: 503929
gauaauaucuccuacacgg

SEQ ID NO: 503931 - RNA, 19 nt, Artificial Sequence
  Description of Artificial Sequence: Synthetic oligonucleotide
  Sense strand starting at position 542 of SEQ ID NO: 317684
gaggaaaggugcuuucuga

SEQ ID NO: 503932 - RNA, 19 nt, Artificial Sequence
  Description of Artificial Sequence: Synthetic oligonucleotide
  Antisense strand to SEQ ID NO: 503931
ucagaaagcaccuuuccuc

SEQ ID NO: 503933 - RNA, 19 nt, Artificial Sequence
  Description of Artificial Sequence: Synthetic oligonucleotide
  Sense strand starting at position 552 of SEQ ID NO: 317684
gcuuucugaagagaacgau

SEQ ID NO: 503934 - RNA, 19 nt, Artificial Sequence
  Description of Artificial Sequence: Synthetic oligonucleotide
  Antisense strand to SEQ ID NO: 503933
aucguucucuucagaaagc

SEQ ID NO: 503935 - RNA, 19 nt, Artificial Sequence
  Description of Artificial Sequence: Synthetic oligonucleotide
  Sense strand starting at position 681 of SEQ ID NO: 317684
cuuuauucggagcaagguu

SEQ ID NO: 503936 - RNA, 19 nt, Artificial Sequence
  Description of Artificial Sequence: Synthetic oligonucleotide
  Antisense strand to SEQ ID NO: 503935
aaccuugcuccgaauaaag

SEQ ID NO: 503937 - RNA, 19 nt, Artificial Sequence
  Description of Artificial Sequence: Synthetic oligonucleotide
  Sense strand starting at position 731 of SEQ ID NO: 317684
ucugucuggcuuugaaaga

SEQ ID NO: 503938 - RNA, 19 nt, Artificial Sequence
  Description of Artificial Sequence: Synthetic oligonucleotide
  Antisense strand to SEQ ID NO: 503937
ucuuucaaagccagacaga

SEQ ID NO: 503939 - RNA, 19 nt, Artificial Sequence
  Description of Artificial Sequence: Synthetic oligonucleotide
  Sense strand starting at position 852 of SEQ ID NO: 317684
gcgauaguuugcauuggga

SEQ ID NO: 503940 - RNA, 19 nt, Artificial Sequence
  Description of Artificial Sequence: Synthetic oligonucleotide
  Antisense strand to SEQ ID NO: 503939
ucccaaugcaaacuaucgc

SEQ ID NO: 503941 - RNA, 19 nt, Artificial Sequence
  Description of Artificial Sequence: Synthetic oligonucleotide
  Sense strand starting at position 854 of SEQ ID NO: 317684
gauaguuugcauugggaga

SEQ ID NO: 503942 - RNA, 19 nt, Artificial Sequence
  Description of Artificial Sequence: Synthetic oligonucleotide
  Antisense strand to SEQ ID NO: 503941
ucucccaaugcaaacuauc

SEQ ID NO: 503943 - RNA, 19 nt, Artificial Sequence
  Description of Artificial Sequence: Synthetic oligonucleotide
  Sense strand starting at position 855 of SEQ ID NO: 317684
auaguuugcauugggagau

SEQ ID NO: 503944 - RNA, 19 nt, Artificial Sequence
  Description of Artificial Sequence: Synthetic oligonucleotide
  Antisense strand to SEQ ID NO: 503943
aucucccaaugcaaacuau

SEQ ID NO: 503945 - RNA, 19 nt, Artificial Sequence
  Description of Artificial Sequence: Synthetic oligonucleotide
  Sense strand starting at position 2141 of SEQ ID NO: 317684
ggaagaugccuccaggguu

SEQ ID NO: 503946 - RNA, 19 nt, Artificial Sequence
  Description of Artificial Sequence: Synthetic oligonucleotide
  Antisense strand to SEQ ID NO: 503945
aacccuggaggcaucuucc

SEQ ID NO: 503947 - RNA, 19 nt, Artificial Sequence
  Description of Artificial Sequence: Synthetic oligonucleotide
  Sense strand starting at position 2198 of SEQ ID NO: 317684
caccuuaaacguggauauu

SEQ ID NO: 503948 - RNA, 19 nt, Artificial Sequence
  Description of Artificial Sequence: Synthetic oligonucleotide
  Antisense strand to SEQ ID NO: 503947
aauauccacguuuaaggug

SEQ ID NO: 503949 - RNA, 19 nt, Artificial Sequence
  Description of Artificial Sequence: Synthetic oligonucleotide
  Sense strand starting at position 2366 of SEQ ID NO: 317684
gcuugaggaccaggauauu

SEQ ID NO: 503950 - RNA, 19 nt, Artificial Sequence
  Description of Artificial Sequence: Synthetic oligonucleotide
  Antisense strand to SEQ ID NO: 503949
aauauccugguccucaagc

SEQ ID NO: 503951 - RNA, 19 nt, Artificial Sequence
  Description of Artificial Sequence: Synthetic oligonucleotide
  Sense strand starting at position 2385 of SEQ ID NO: 317684
ugggaaugcguucagaaau

SEQ ID NO: 503952 - RNA, 19 nt, Artificial Sequence
  Description of Artificial Sequence: Synthetic oligonucleotide
  Antisense strand to SEQ ID NO: 503951
auuucugaacgcauuccca

SEQ ID NO: 503953 - RNA, 19 nt, Artificial Sequence
  Description of Artificial Sequence: Synthetic oligonucleotide
  Sense strand starting at position 2448 of SEQ ID NO: 317684
gccaaauguguggcgcuaa

SEQ ID NO: 503954 - RNA, 19 nt, Artificial Sequence
  Description of Artificial Sequence: Synthetic oligonucleotide
  Antisense strand to SEQ ID NO: 503953
uuagcgccacacauuuggc

SEQ ID NO: 503955 - RNA, 19 nt, Artificial Sequence
  Description of Artificial Sequence: Synthetic oligonucleotide
  Sense strand starting at position 2461 of SEQ ID NO: 317684
cgcuaacuucgcuuccuaa

SEQ ID NO: 503956 - RNA, 19 nt, Artificial Sequence
  Description of Artificial Sequence: Synthetic oligonucleotide
  Antisense strand to SEQ ID NO: 503955
uuaggaagcgaaguuagcg

SEQ ID NO: 503957 - RNA, 19 nt, Artificial Sequence
  Description of Artificial Sequence: Synthetic oligonucleotide
  Sense strand starting at position 2828 of SEQ ID NO: 317684
agaaauuccugggcuggaa

SEQ ID NO: 503958 - RNA, 19 nt, Artificial Sequence
  Description of Artificial Sequence: Synthetic oligonucleotide
  Antisense strand to SEQ ID NO: 503957
uuccagcccaggaauuucu

SEQ ID NO: 503959 - RNA, 19 nt, Artificial Sequence
  Description of Artificial Sequence: Synthetic oligonucleotide
  Sense strand starting at position 2898 of SEQ ID NO: 317684
ggcaucuguuugcuauuua

SEQ ID NO: 503960 - RNA, 19 nt, Artificial Sequence
  Description of Artificial Sequence: Synthetic oligonucleotide
  Antisense strand to SEQ ID NO: 503959
uaaauagcaaacagaugcc

SEQ ID NO: 503961 - RNA, 19 nt, Artificial Sequence
  Description of Artificial Sequence: Synthetic oligonucleotide
  Sense strand starting at position 3171 of SEQ ID NO: 317684
aacgguguucgcuuuacua

SEQ ID NO: 503962 - RNA, 19 nt, Artificial Sequence
  Description of Artificial Sequence: Synthetic oligonucleotide
  Antisense strand to SEQ ID NO: 503961
uaguaaagcgaacaccguu

SEQ ID NO: 503963 - RNA, 19 nt, Artificial Sequence
  Description of Artificial Sequence: Synthetic oligonucleotide
  Sense strand starting at position 3204 of SEQ ID NO: 317684
ucucacuugcaaugaggaa

SEQ ID NO: 503964 - RNA, 19 nt, Artificial Sequence
  Description of Artificial Sequence: Synthetic oligonucleotide
  Antisense strand to SEQ ID NO: 503963
uuccucauugcaagugaga

SEQ ID NO: 503965 - RNA, 19 nt, Artificial Sequence
  Description of Artificial Sequence: Synthetic oligonucleotide
  Sense strand starting at position 3259 of SEQ ID NO: 317684
ggugauucuccugggaaau

SEQ ID NO: 503966 - RNA, 19 nt, Artificial Sequence
  Description of Artificial Sequence: Synthetic oligonucleotide
  Antisense strand to SEQ ID NO: 503965
auuucccaggagaaucacc

SEQ ID NO: 503967 - RNA, 19 nt, Artificial Sequence
  Description of Artificial Sequence: Synthetic oligonucleotide
  Sense strand starting at position 3260 of SEQ ID NO: 317684
gugauucuccugggaaaug

SEQ ID NO: 503968 - RNA, 19 nt, Artificial Sequence
  Description of Artificial Sequence: Synthetic oligonucleotide
  Antisense strand to SEQ ID NO: 503967
cauuucccaggagaaucac

SEQ ID NO: 503969 - RNA, 19 nt, Artificial Sequence
  Description of Artificial Sequence: Synthetic oligonucleotide
  Sense strand starting at position 3290 of SEQ ID NO: 317684
guuccuugaacugaaguga

SEQ ID NO: 503970 - RNA, 19 nt, Artificial Sequence
  Description of Artificial Sequence: Synthetic oligonucleotide
  Antisense strand to SEQ ID NO: 503969
ucacuucaguucaaggaac

SEQ ID NO: 503971 - RNA, 19 nt, Artificial Sequence
  Description of Artificial Sequence: Synthetic oligonucleotide
  Sense strand starting at position 3384 of SEQ ID NO: 317684
auaguugugcuauaaucug

SEQ ID NO: 503972 - RNA, 19 nt, Artificial Sequence
  Description of Artificial Sequence: Synthetic oligonucleotide
  Antisense strand to SEQ ID NO: 503971
cagauuauagcacaacuau

SEQ ID NO: 503973 - RNA, 19 nt, Artificial Sequence
  Description of Artificial Sequence: Synthetic oligonucleotide
  Sense strand starting at position 3391 of SEQ ID NO: 317684
ugcuauaaucugugaacca

SEQ ID NO: 503974 - RNA, 19 nt, Artificial Sequence
  Description of Artificial Sequence: Synthetic oligonucleotide
  Antisense strand to SEQ ID NO: 503973
ugguucacagauuauagca

SEQ ID NO: 503975 - RNA, 19 nt, Artificial Sequence
  Description of Artificial Sequence: Synthetic oligonucleotide
  Sense strand starting at position 3401 of SEQ ID NO: 317684
ugugaaccaguccacauua

SEQ ID NO: 503976 - RNA, 19 nt, Artificial Sequence
  Description of Artificial Sequence: Synthetic oligonucleotide
  Antisense strand to SEQ ID NO: 503975
uaauguggacugguucaca

SEQ ID NO: 503977 - RNA, 19 nt, Artificial Sequence
  Description of Artificial Sequence: Synthetic oligonucleotide
  Sense strand starting at position 3531 of SEQ ID NO: 317684
gggagaagcucugucuauu

SEQ ID NO: 503978 - RNA, 19 nt, Artificial Sequence
  Description of Artificial Sequence: Synthetic oligonucleotide
  Antisense strand to SEQ ID NO: 503977
aauagacagagcuucuccc

SEQ ID NO: 503979 - RNA, 19 nt, Artificial Sequence
  Description of Artificial Sequence: Synthetic oligonucleotide
  Sense strand starting at position 3537 of SEQ ID NO: 317684
agcucugucuauuuccaua

SEQ ID NO: 503980 - RNA, 19 nt, Artificial Sequence
  Description of Artificial Sequence: Synthetic oligonucleotide
  Antisense strand to SEQ ID NO: 503979
uauggaaauagacagagcu

SEQ ID NO: 503981 - RNA, 19 nt, Artificial Sequence
  Description of Artificial Sequence: Synthetic oligonucleotide
  Sense strand starting at position 3573 of SEQ ID NO: 317684
gcugucagaauuugagcua

SEQ ID NO: 503982 - RNA, 19 nt, Artificial Sequence
  Description of Artificial Sequence: Synthetic oligonucleotide
  Antisense strand to SEQ ID NO: 503981
uagcucaaauucugacagc

SEQ ID NO: 503983 - RNA, 19 nt, Artificial Sequence
  Description of Artificial Sequence: Synthetic oligonucleotide
  Sense strand starting at position 3608 of SEQ ID NO: 317684
aucucaguuuaggucauau

SEQ ID NO: 503984 - RNA, 19 nt, Artificial Sequence
  Description of Artificial Sequence: Synthetic oligonucleotide
  Antisense strand to SEQ ID NO: 503983
auaugaccuaaacugagau

SEQ ID NO: 503985 - RNA, 19 nt, Artificial Sequence
  Description of Artificial Sequence: Synthetic oligonucleotide
  Sense strand starting at position 3797 of SEQ ID NO: 317684
cucaguuaaguacauauau

SEQ ID NO: 503986 - RNA, 19 nt, Artificial Sequence
  Description of Artificial Sequence: Synthetic oligonucleotide
  Antisense strand to SEQ ID NO: 503985
auauauguacuuaacugag

SEQ ID NO: 503987 - RNA, 19 nt, Artificial Sequence
  Description of Artificial Sequence: Synthetic oligonucleotide
  Sense strand starting at position 24 of SEQ ID NO: 317685
cuaucugauuugggaucca

SEQ ID NO: 503988 - RNA, 19 nt, Artificial Sequence
  Description of Artificial Sequence: Synthetic oligonucleotide
  Antisense strand to SEQ ID NO: 503987
uggaucccaaaucagauag

SEQ ID NO: 503989 - RNA, 19 nt, Artificial Sequence
  Description of Artificial Sequence: Synthetic oligonucleotide
  Sense strand starting at position 75 of SEQ ID NO: 317685
cguagaaugcguuuccggu

SEQ ID NO: 503990 - RNA, 19 nt, Artificial Sequence
  Description of Artificial Sequence: Synthetic oligonucleotide
  Antisense strand to SEQ ID NO: 503989
accggaaacgcauucuacg

SEQ ID NO: 503991 - RNA, 19 nt, Artificial Sequence
  Description of Artificial Sequence: Synthetic oligonucleotide
  Sense strand starting at position 295 of SEQ ID NO: 317685
gagggcucaggcugagaau

SEQ ID NO: 503992 - RNA, 19 nt, Artificial Sequence
  Description of Artificial Sequence: Synthetic oligonucleotide
  Antisense strand to SEQ ID NO: 503991
auucucagccugagcccuc

SEQ ID NO: 503993 - RNA, 19 nt, Artificial Sequence
  Description of Artificial Sequence: Synthetic oligonucleotide
  Sense strand starting at position 429 of SEQ ID NO: 317685
agcaauggcucucuacuua

SEQ ID NO: 503994 - RNA, 19 nt, Artificial Sequence
  Description of Artificial Sequence: Synthetic oligonucleotide
  Antisense strand to SEQ ID NO: 503993
uaaguagagagccauugcu

SEQ ID NO: 503995 - RNA, 19 nt, Artificial Sequence
  Description of Artificial Sequence: Synthetic oligonucleotide
  Sense strand starting at position 434 of SEQ ID NO: 317685
uggcucucuacuuagggaa

SEQ ID NO: 503996 - RNA, 19 nt, Artificial Sequence
  Description of Artificial Sequence: Synthetic oligonucleotide
  Antisense strand to SEQ ID NO: 503995
uucccuaaguagagagcca

SEQ ID NO: 503997 - RNA, 19 nt, Artificial Sequence
  Description of Artificial Sequence: Synthetic oligonucleotide
  Sense strand starting at position 461 of SEQ ID NO: 317685
auuugaaguuaaggaaacu

SEQ ID NO: 503998 - RNA, 19 nt, Artificial Sequence
  Description of Artificial Sequence: Synthetic oligonucleotide
  Antisense strand to SEQ ID NO: 503997
aguuuccuuaacuucaaau

SEQ ID NO: 503999 - RNA, 19 nt, Artificial Sequence
  Description of Artificial Sequence: Synthetic oligonucleotide
  Sense strand starting at position 516 of SEQ ID NO: 317685
acaguaagucagugcuaga

SEQ ID NO: 504000 - RNA, 19 nt, Artificial Sequence
  Description of Artificial Sequence: Synthetic oligonucleotide
  Antisense strand to SEQ ID NO: 503999
ucuagcacugacuuacugu

SEQ ID NO: 504001 - RNA, 19 nt, Artificial Sequence
  Description of Artificial Sequence: Synthetic oligonucleotide
  Sense strand starting at position 605 of SEQ ID NO: 317685
cugaguaagcaugggacaa

SEQ ID NO: 504002 - RNA, 19 nt, Artificial Sequence
  Description of Artificial Sequence: Synthetic oligonucleotide
  Antisense strand to SEQ ID NO: 504001
uugucccaugcuuacucag

SEQ ID NO: 504003 - RNA, 19 nt, Artificial Sequence
  Description of Artificial Sequence: Synthetic oligonucleotide
  Sense strand starting at position 629 of SEQ ID NO: 317685
uagaaugcugugggucaga

SEQ ID NO: 504004 - RNA, 19 nt, Artificial Sequence
  Description of Artificial Sequence: Synthetic oligonucleotide
  Antisense strand to SEQ ID NO: 504003
ucugacccacagcauucua

SEQ ID NO: 504005 - RNA, 19 nt, Artificial Sequence
  Description of Artificial Sequence: Synthetic oligonucleotide
  Sense strand starting at position 686 of SEQ ID NO: 317685
gccaaucagcucuggagua

SEQ ID NO: 504006 - RNA, 19 nt, Artificial Sequence
  Description of Artificial Sequence: Synthetic oligonucleotide
  Antisense strand to SEQ ID NO: 504005
uacuccagagcugauuggc

SEQ ID NO: 504007 - RNA, 19 nt, Artificial Sequence
  Description of Artificial Sequence: Synthetic oligonucleotide
  Sense strand starting at position 688 of SEQ ID NO: 317685
caaucagcucuggaguaag

SEQ ID NO: 504008 - RNA, 19 nt, Artificial Sequence
  Description of Artificial Sequence: Synthetic oligonucleotide
  Antisense strand to SEQ ID NO: 504007
cuuacuccagagcugauug

SEQ ID NO: 504009 - RNA, 19 nt, Artificial Sequence
  Description of Artificial Sequence: Synthetic oligonucleotide
  Sense strand starting at position 691 of SEQ ID NO: 317685
ucagcucuggaguaaggua

SEQ ID NO: 504010 - RNA, 19 nt, Artificial Sequence
  Description of Artificial Sequence: Synthetic oligonucleotide
  Antisense strand to SEQ ID NO: 504009
uaccuuacuccagagcuga

SEQ ID NO: 504011 - RNA, 19 nt, Artificial Sequence
  Description of Artificial Sequence: Synthetic oligonucleotide
  Sense strand starting at position 834 of SEQ ID NO: 317685
ccuauugucucugcucaga

SEQ ID NO: 504012 - RNA, 19 nt, Artificial Sequence
  Description of Artificial Sequence: Synthetic oligonucleotide
  Antisense strand to SEQ ID NO: 504011
ucugagcagagacaauagg

SEQ ID NO: 504013 - RNA, 19 nt, Artificial Sequence
  Description of Artificial Sequence: Synthetic oligonucleotide
  Sense strand starting at position 958 of SEQ ID NO: 317685
gguggaggcuaauugaaga

SEQ ID NO: 504014 - RNA, 19 nt, Artificial Sequence
  Description of Artificial Sequence: Synthetic oligonucleotide
  Antisense strand to SEQ ID NO: 504013
ucuucaauuagccuccacc

SEQ ID NO: 504015 - RNA, 19 nt, Artificial Sequence
  Description of Artificial Sequence: Synthetic oligonucleotide
  Sense strand starting at position 1104 of SEQ ID NO: 317685
gcgauuuggcagugugaaa

SEQ ID NO: 504016 - RNA, 19 nt, Artificial Sequence
  Description of Artificial Sequence: Synthetic oligonucleotide
  Antisense strand to SEQ ID NO: 504015
uuucacacugccaaaucgc

SEQ ID NO: 504017 - RNA, 19 nt, Artificial Sequence
  Description of Artificial Sequence: Synthetic oligonucleotide
  Sense strand starting at position 1390 of SEQ ID NO: 317685
uuauuaagcuuguccuuga

SEQ ID NO: 504018 - RNA, 19 nt, Artificial Sequence
  Description of Artificial Sequence: Synthetic oligonucleotide
  Antisense strand to SEQ ID NO: 504017
ucaaggacaagcuuaauaa

SEQ ID NO: 504019 - RNA, 19 nt, Artificial Sequence
  Description of Artificial Sequence: Synthetic oligonucleotide
  Sense strand starting at position 1401 of SEQ ID NO: 317685
guccuugacucagucuaca

SEQ ID NO: 504020 - RNA, 19 nt, Artificial Sequence
  Description of Artificial Sequence: Synthetic oligonucleotide
  Antisense strand to SEQ ID NO: 504019
uguagacugagucaaggac

SEQ ID NO: 504021 - RNA, 19 nt, Artificial Sequence
  Description of Artificial Sequence: Synthetic oligonucleotide
  Sense strand starting at position 1424 of SEQ ID NO: 317685
uaaccagaucuugaguugu

SEQ ID NO: 504022 - RNA, 19 nt, Artificial Sequence
  Description of Artificial Sequence: Synthetic oligonucleotide
  Antisense strand to SEQ ID NO: 504021
acaacucaagaucugguua

SEQ ID NO: 504023 - RNA, 19 nt, Artificial Sequence
  Description of Artificial Sequence: Synthetic oligonucleotide
  Sense strand starting at position 1426 of SEQ ID NO: 317685
accagaucuugaguuguau

SEQ ID NO: 504024 - RNA, 19 nt, Artificial Sequence
  Description of Artificial Sequence: Synthetic oligonucleotide
  Antisense strand to SEQ ID NO: 504023
auacaacucaagaucuggu

SEQ ID NO: 504025 - RNA, 19 nt, Artificial Sequence
  Description of Artificial Sequence: Synthetic oligonucleotide
  Sense strand starting at position 2553 of SEQ ID NO: 317685
agguuccuucgagggauga

SEQ ID NO: 504026 - RNA, 19 nt, Artificial Sequence
  Description of Artificial Sequence: Synthetic oligonucleotide
  Antisense strand to SEQ ID NO: 504025
ucaucccucgaaggaaccu

SEQ ID NO: 504027 - RNA, 19 nt, Artificial Sequence
  Description of Artificial Sequence: Synthetic oligonucleotide
  Sense strand starting at position 2554 of SEQ ID NO: 317685
gguuccuucgagggaugaa

SEQ ID NO: 504028 - RNA, 19 nt, Artificial Sequence
  Description of Artificial Sequence: Synthetic oligonucleotide
  Antisense strand to SEQ ID NO: 504027
uucaucccucgaaggaacc

SEQ ID NO: 504029 - RNA, 19 nt, Artificial Sequence
  Description of Artificial Sequence: Synthetic oligonucleotide
  Sense strand starting at position 2555 of SEQ ID NO: 317685
guuccuucgagggaugaag

SEQ ID NO: 504030 - RNA, 19 nt, Artificial Sequence
  Description of Artificial Sequence: Synthetic oligonucleotide
  Antisense strand to SEQ ID NO: 504029
cuucaucccucgaaggaac

SEQ ID NO: 504031 - RNA, 19 nt, Artificial Sequence
  Description of Artificial Sequence: Synthetic oligonucleotide
  Sense strand starting at position 2969 of SEQ ID NO: 317685
guuuguaugagaggaaguu

SEQ ID NO: 504032 - RNA, 19 nt, Artificial Sequence
  Description of Artificial Sequence: Synthetic oligonucleotide
  Antisense strand to SEQ ID NO: 504031
aacuuccucucauacaaac

SEQ ID NO: 504033 - RNA, 19 nt, Artificial Sequence
  Description of Artificial Sequence: Synthetic oligonucleotide
  Sense strand starting at position 2979 of SEQ ID NO: 317685
gaggaaguuggcugugagu

SEQ ID NO: 504034 - RNA, 19 nt, Artificial Sequence
  Description of Artificial Sequence: Synthetic oligonucleotide
  Antisense strand to SEQ ID NO: 504033
acucacagccaacuuccuc

SEQ ID NO: 504035 - RNA, 19 nt, Artificial Sequence
  Description of Artificial Sequence: Synthetic oligonucleotide
  Sense strand starting at position 2981 of SEQ ID NO: 317685
ggaaguuggcugugaguca

SEQ ID NO: 504036 - RNA, 19 nt, Artificial Sequence
  Description of Artificial Sequence: Synthetic oligonucleotide
  Antisense strand to SEQ ID NO: 504035
ugacucacagccaacuucc

SEQ ID NO: 504037 - RNA, 19 nt, Artificial Sequence
  Description of Artificial Sequence: Synthetic oligonucleotide
  Sense strand starting at position 2988 of SEQ ID NO: 317685
ggcugugagucagcagaca

SEQ ID NO: 504038 - RNA, 19 nt, Artificial Sequence
  Description of Artificial Sequence: Synthetic oligonucleotide
  Antisense strand to SEQ ID NO: 504037
ugucugcugacucacagcc

SEQ ID NO: 504039 - RNA, 19 nt, Artificial Sequence
  Description of Artificial Sequence: Synthetic oligonucleotide
  Sense strand starting at position 3007 of SEQ ID NO: 317685
caggaacugucaguagcua

SEQ ID NO: 504040 - RNA, 19 nt, Artificial Sequence
  Description of Artificial Sequence: Synthetic oligonucleotide
  Antisense strand to SEQ ID NO: 504039
uagcuacugacaguuccug

SEQ ID NO: 504041 - RNA, 19 nt, Artificial Sequence
  Description of Artificial Sequence: Synthetic oligonucleotide
  Sense strand starting at position 3146 of SEQ ID NO: 317685
cggccuucccuuugagaaa

SEQ ID NO: 504042 - RNA, 19 nt, Artificial Sequence
  Description of Artificial Sequence: Synthetic oligonucleotide
  Antisense strand to SEQ ID NO: 504041
uuucucaaagggaaggccg

SEQ ID NO: 504043 - RNA, 19 nt, Artificial Sequence
  Description of Artificial Sequence: Synthetic oligonucleotide
  Sense strand starting at position 3190 of SEQ ID NO: 317685
uugcaauagccauaauaag

SEQ ID NO: 504044 - RNA, 19 nt, Artificial Sequence
  Description of Artificial Sequence: Synthetic oligonucleotide
  Antisense strand to SEQ ID NO: 504043
cuuauuauggcuauugcaa

SEQ ID NO: 504045 - RNA, 19 nt, Artificial Sequence
  Description of Artificial Sequence: Synthetic oligonucleotide
  Sense strand starting at position 3230 of SEQ ID NO: 317685
gaccgugcuccaggaucua

SEQ ID NO: 504046 - RNA, 19 nt, Artificial Sequence
  Description of Artificial Sequence: Synthetic oligonucleotide
  Antisense strand to SEQ ID NO: 504045
uagauccuggagcacgguc

SEQ ID NO: 504047 - RNA, 19 nt, Artificial Sequence
  Description of Artificial Sequence: Synthetic oligonucleotide
  Sense strand starting at position 3249 of SEQ ID NO: 317685
uguaaacauugcuuugcaa

SEQ ID NO: 504048 - RNA, 19 nt, Artificial Sequence
  Description of Artificial Sequence: Synthetic oligonucleotide
  Antisense strand to SEQ ID NO: 504047
uugcaaagcaauguuuaca

SEQ ID NO: 504049 - RNA, 19 nt, Artificial Sequence
  Description of Artificial Sequence: Synthetic oligonucleotide
  Sense strand starting at position 3355 of SEQ ID NO: 317685
gcucaagacucugcagcua

SEQ ID NO: 504050 - RNA, 19 nt, Artificial Sequence
  Description of Artificial Sequence: Synthetic oligonucleotide
  Antisense strand to SEQ ID NO: 504049
uagcugcagagucuugagc

SEQ ID NO: 504051 - RNA, 19 nt, Artificial Sequence
  Description of Artificial Sequence: Synthetic oligonucleotide
  Sense strand starting at position 3502 of SEQ ID NO: 317685
gaucuuacacugugaggag

SEQ ID NO: 504052 - RNA, 19 nt, Artificial Sequence
  Description of Artificial Sequence: Synthetic oligonucleotide
  Antisense strand to SEQ ID NO: 504051
cuccucacaguguaagauc

SEQ ID NO: 504053 - RNA, 19 nt, Artificial Sequence
  Description of Artificial Sequence: Synthetic oligonucleotide
  Sense strand starting at position 3509 of SEQ ID NO: 317685
cacugugaggagugaaauu

SEQ ID NO: 504054 - RNA, 19 nt, Artificial Sequence
  Description of Artificial Sequence: Synthetic oligonucleotide
  Antisense strand to SEQ ID NO: 504053
aauuucacuccucacagug

SEQ ID NO: 504055 - RNA, 19 nt, Artificial Sequence
  Description of Artificial Sequence: Synthetic oligonucleotide
  Sense strand starting at position 3541 of SEQ ID NO: 317685
agcugcuucucucugaaau

SEQ ID NO: 504056 - RNA, 19 nt, Artificial Sequence
  Description of Artificial Sequence: Synthetic oligonucleotide
  Antisense strand to SEQ ID NO: 504055
auuucagagagaagcagcu

SEQ ID NO: 504057 - RNA, 19 nt, Artificial Sequence
  Description of Artificial Sequence: Synthetic oligonucleotide
  Sense strand starting at position 3679 of SEQ ID NO: 317685
ucccaauggcuuugcugaa

SEQ ID NO: 504058 - RNA, 19 nt, Artificial Sequence
  Description of Artificial Sequence: Synthetic oligonucleotide
  Antisense strand to SEQ ID NO: 504057
uucagcaaagccauuggga

SEQ ID NO: 504059 - RNA, 19 nt, Artificial Sequence
  Description of Artificial Sequence: Synthetic oligonucleotide
  Sense strand starting at position 3692 of SEQ ID NO: 317685
gcugaacuuuccuuugacu

SEQ ID NO: 504060 - RNA, 19 nt, Artificial Sequence
  Description of Artificial Sequence: Synthetic oligonucleotide
  Antisense strand to SEQ ID NO: 504059
agucaaaggaaaguucagc

SEQ ID NO: 504061 - RNA, 19 nt, Artificial Sequence
  Description of Artificial Sequence: Synthetic oligonucleotide
  Sense strand starting at position 3717 of SEQ ID NO: 317685
uuaggaugcuccucucaac

SEQ ID NO: 504062 - RNA, 19 nt, Artificial Sequence
  Description of Artificial Sequence: Synthetic oligonucleotide
  Antisense strand to SEQ ID NO: 504061
guugagaggagcauccuaa

SEQ ID NO: 504063 - RNA, 19 nt, Artificial Sequence
  Description of Artificial Sequence: Synthetic oligonucleotide
  Sense strand starting at position 3832 of SEQ ID NO: 317685
uuggcagcuucuucuuuaa

SEQ ID NO: 504064 - RNA, 19 nt, Artificial Sequence
  Description of Artificial Sequence: Synthetic oligonucleotide
  Antisense strand to SEQ ID NO: 504063
uuaaagaagaagcugccaa

SEQ ID NO: 504065 - RNA, 19 nt, Artificial Sequence
  Description of Artificial Sequence: Synthetic oligonucleotide
  Sense strand starting at position 3835 of SEQ ID NO: 317685
gcagcuucuucuuuaagga

SEQ ID NO: 504066 - RNA, 19 nt, Artificial Sequence
  Description of Artificial Sequence: Synthetic oligonucleotide
  Antisense strand to SEQ ID NO: 504065
uccuuaaagaagaagcugc

SEQ ID NO: 504067 - RNA, 19 nt, Artificial Sequence
  Description of Artificial Sequence: Synthetic oligonucleotide
  Sense strand starting at position 55 of SEQ ID NO: 317686
gugugacucagagguaaug

SEQ ID NO: 504068 - RNA, 19 nt, Artificial Sequence
  Description of Artificial Sequence: Synthetic oligonucleotide
  Antisense strand to SEQ ID NO: 504067
cauuaccucugagucacac

SEQ ID NO: 504069 - RNA, 19 nt, Artificial Sequence
  Description of Artificial Sequence: Synthetic oligonucleotide
  Sense strand starting at position 430 of SEQ ID NO: 317686
gccuaagaaucugccucua

SEQ ID NO: 504070 - RNA, 19 nt, Artificial Sequence
  Description of Artificial Sequence: Synthetic oligonucleotide
  Antisense strand to SEQ ID NO: 504069
uagaggcagauucuuaggc

SEQ ID NO: 504071 - RNA, 19 nt, Artificial Sequence
  Description of Artificial Sequence: Synthetic oligonucleotide
  Sense strand starting at position 432 of SEQ ID NO: 317686
cuaagaaucugccucuaag

SEQ ID NO: 504072 - RNA, 19 nt, Artificial Sequence
  Description of Artificial Sequence: Synthetic oligonucleotide
  Antisense strand to SEQ ID NO: 504071
cuuagaggcagauucuuag

SEQ ID NO: 504073 - RNA, 19 nt, Artificial Sequence
  Description of Artificial Sequence: Synthetic oligonucleotide
  Sense strand starting at position 590 of SEQ ID NO: 317686
guaagugcccuuuaaagag

SEQ ID NO: 504074 - RNA, 19 nt, Artificial Sequence
  Description of Artificial Sequence: Synthetic oligonucleotide
  Antisense strand to SEQ ID NO: 504073
cucuuuaaagggcacuuac

SEQ ID NO: 504075 - RNA, 19 nt, Artificial Sequence
  Description of Artificial Sequence: Synthetic oligonucleotide
  Sense strand starting at position 748 of SEQ ID NO: 317686
ugugguuccugauucuuaa

SEQ ID NO: 504076 - RNA, 19 nt, Artificial Sequence
  Description of Artificial Sequence: Synthetic oligonucleotide
  Antisense strand to SEQ ID NO: 504075
uuaagaaucaggaaccaca

SEQ ID NO: 504077 - RNA, 19 nt, Artificial Sequence
  Description of Artificial Sequence: Synthetic oligonucleotide
  Sense strand starting at position 839 of SEQ ID NO: 317686
agcacucaucccuagagca

SEQ ID NO: 504078 - RNA, 19 nt, Artificial Sequence
  Description of Artificial Sequence: Synthetic oligonucleotide
  Antisense strand to SEQ ID NO: 504077
ugcucuagggaugagugcu

SEQ ID NO: 504079 - RNA, 19 nt, Artificial Sequence
  Description of Artificial Sequence: Synthetic oligonucleotide
  Sense strand starting at position 856 of SEQ ID NO: 317686
cacgcuuauuuggccagaa

SEQ ID NO: 504080 - RNA, 19 nt, Artificial Sequence
  Description of Artificial Sequence: Synthetic oligonucleotide
  Antisense strand to SEQ ID NO: 504079
uucuggccaaauaagcgug

SEQ ID NO: 504081 - RNA, 19 nt, Artificial Sequence
  Description of Artificial Sequence: Synthetic oligonucleotide
  Sense strand starting at position 857 of SEQ ID NO: 317686
acgcuuauuuggccagaaa

SEQ ID NO: 504082 - RNA, 19 nt, Artificial Sequence
  Description of Artificial Sequence: Synthetic oligonucleotide
  Antisense strand to SEQ ID NO: 504081
uuucuggccaaauaagcgu

SEQ ID NO: 504083 - RNA, 19 nt, Artificial Sequence
  Description of Artificial Sequence: Synthetic oligonucleotide
  Sense strand starting at position 973 of SEQ ID NO: 317686
guccaagaaucuuugaaau

SEQ ID NO: 504084 - RNA, 19 nt, Artificial Sequence
  Description of Artificial Sequence: Synthetic oligonucleotide
  Antisense strand to SEQ ID NO: 504083
auuucaaagauucuuggac

SEQ ID NO: 504085 - RNA, 19 nt, Artificial Sequence
  Description of Artificial Sequence: Synthetic oligonucleotide
  Sense strand starting at position 994 of SEQ ID NO: 317686
guuugaacuucuuucugag

SEQ ID NO: 504086 - RNA, 19 nt, Artificial Sequence
  Description of Artificial Sequence: Synthetic oligonucleotide
  Antisense strand to SEQ ID NO: 504085
cucagaaagaaguucaaac

SEQ ID NO: 504087 - RNA, 19 nt, Artificial Sequence
  Description of Artificial Sequence: Synthetic oligonucleotide
  Sense strand starting at position 996 of SEQ ID NO: 317686
uugaacuucuuucugagaa

SEQ ID NO: 504088 - RNA, 19 nt, Artificial Sequence
  Description of Artificial Sequence: Synthetic oligonucleotide
  Antisense strand to SEQ ID NO: 504087
uucucagaaagaaguucaa

SEQ ID NO: 504089 - RNA, 19 nt, Artificial Sequence
  Description of Artificial Sequence: Synthetic oligonucleotide
  Sense strand starting at position 1019 of SEQ ID NO: 317686
ggauauuccuucucagacc

SEQ ID NO: 504090 - RNA, 19 nt, Artificial Sequence
  Description of Artificial Sequence: Synthetic oligonucleotide
  Antisense strand to SEQ ID NO: 504089
ggucugagaaggaauaucc

SEQ ID NO: 504091 - RNA, 19 nt, Artificial Sequence
  Description of Artificial Sequence: Synthetic oligonucleotide
  Sense strand starting at position 1092 of SEQ ID NO: 317686
agaguugggauauguacau

SEQ ID NO: 504092 - RNA, 19 nt, Artificial Sequence
  Description of Artificial Sequence: Synthetic oligonucleotide
  Antisense strand to SEQ ID NO: 504091
auguacauaucccaacucu

SEQ ID NO: 504093 - RNA, 19 nt, Artificial Sequence
  Description of Artificial Sequence: Synthetic oligonucleotide
  Sense strand starting at position 1147 of SEQ ID NO: 317686
ggaacacucugauucucua

SEQ ID NO: 504094 - RNA, 19 nt, Artificial Sequence
  Description of Artificial Sequence: Synthetic oligonucleotide
  Antisense strand to SEQ ID NO: 504093
uagagaaucagaguguucc

SEQ ID NO: 504095 - RNA, 19 nt, Artificial Sequence
  Description of Artificial Sequence: Synthetic oligonucleotide
  Sense strand starting at position 1222 of SEQ ID NO: 317686
auuccagauuuagagauua

SEQ ID NO: 504096 - RNA, 19 nt, Artificial Sequence
  Description of Artificial Sequence: Synthetic oligonucleotide
  Antisense strand to SEQ ID NO: 504095
uaaucucuaaaucuggaau

SEQ ID NO: 504097 - RNA, 19 nt, Artificial Sequence
  Description of Artificial Sequence: Synthetic oligonucleotide
  Sense strand starting at position 1233 of SEQ ID NO: 317686
agagauuacuggcugccaa

SEQ ID NO: 504098 - RNA, 19 nt, Artificial Sequence
  Description of Artificial Sequence: Synthetic oligonucleotide
  Antisense strand to SEQ ID NO: 504097
uuggcagccaguaaucucu

SEQ ID NO: 504099 - RNA, 19 nt, Artificial Sequence
  Description of Artificial Sequence: Synthetic oligonucleotide
  Sense strand starting at position 1234 of SEQ ID NO: 317686
gagauuacuggcugccaau

SEQ ID NO: 504100 - RNA, 19 nt, Artificial Sequence
  Description of Artificial Sequence: Synthetic oligonucleotide
  Antisense strand to SEQ ID NO: 504099
auuggcagccaguaaucuc

SEQ ID NO: 504101 - RNA, 19 nt, Artificial Sequence
  Description of Artificial Sequence: Synthetic oligonucleotide
  Sense strand starting at position 2364 of SEQ ID NO: 317686
ccugcuagcgaugacuuaa

SEQ ID NO: 504102 - RNA, 19 nt, Artificial Sequence
  Description of Artificial Sequence: Synthetic oligonucleotide
  Antisense strand to SEQ ID NO: 504101
uuaagucaucgcuagcagg

SEQ ID NO: 504103 - RNA, 19 nt, Artificial Sequence
  Description of Artificial Sequence: Synthetic oligonucleotide
  Sense strand starting at position 2454 of SEQ ID NO: 317686
gcggucuugauccaaucaa

SEQ ID NO: 504104 - RNA, 19 nt, Artificial Sequence
  Description of Artificial Sequence: Synthetic oligonucleotide
  Antisense strand to SEQ ID NO: 504103
uugauuggaucaagaccgc

SEQ ID NO: 504105 - RNA, 19 nt, Artificial Sequence
  Description of Artificial Sequence: Synthetic oligonucleotide
  Sense strand starting at position 2692 of SEQ ID NO: 317686
cgaugugccaagcaugaaa

SEQ ID NO: 504106 - RNA, 19 nt, Artificial Sequence
  Description of Artificial Sequence: Synthetic oligonucleotide
  Antisense strand to SEQ ID NO: 504105
uuucaugcuuggcacaucg

SEQ ID NO: 504107 - RNA, 19 nt, Artificial Sequence
  Description of Artificial Sequence: Synthetic oligonucleotide
  Sense strand starting at position 3146 of SEQ ID NO: 317686
gcuggcauuuaauaacaga

SEQ ID NO: 504108 - RNA, 19 nt, Artificial Sequence
  Description of Artificial Sequence: Synthetic oligonucleotide
  Antisense strand to SEQ ID NO: 504107
ucuguuauuaaaugccagc

SEQ ID NO: 504109 - RNA, 19 nt, Artificial Sequence
  Description of Artificial Sequence: Synthetic oligonucleotide
  Sense strand starting at position 3149 of SEQ ID NO: 317686
ggcauuuaauaacagauau

SEQ ID NO: 504110 - RNA, 19 nt, Artificial Sequence
  Description of Artificial Sequence: Synthetic oligonucleotide
  Antisense strand to SEQ ID NO: 504109
auaucuguuauuaaaugcc

SEQ ID NO: 504111 - RNA, 19 nt, Artificial Sequence
  Description of Artificial Sequence: Synthetic oligonucleotide
  Sense strand starting at position 3192 of SEQ ID NO: 317686
ugcuacggugauugauaaa

SEQ ID NO: 504112 - RNA, 19 nt, Artificial Sequence
  Description of Artificial Sequence: Synthetic oligonucleotide
  Antisense strand to SEQ ID NO: 504111
uuuaucaaucaccguagca

SEQ ID NO: 504113 - RNA, 19 nt, Artificial Sequence
  Description of Artificial Sequence: Synthetic oligonucleotide
  Sense strand starting at position 3199 of SEQ ID NO: 317686
gugauugauaaauguagaa

SEQ ID NO: 504114 - RNA, 19 nt, Artificial Sequence
  Description of Artificial Sequence: Synthetic oligonucleotide
  Antisense strand to SEQ ID NO: 504113
uucuacauuuaucaaucac

SEQ ID NO: 504115 - RNA, 19 nt, Artificial Sequence
  Description of Artificial Sequence: Synthetic oligonucleotide
  Sense strand starting at position 3367 of SEQ ID NO: 317686
uuguuaacuccuggaggau

SEQ ID NO: 504116 - RNA, 19 nt, Artificial Sequence
  Description of Artificial Sequence: Synthetic oligonucleotide
  Antisense strand to SEQ ID NO: 504115
auccuccaggaguuaacaa

SEQ ID NO: 504117 - RNA, 19 nt, Artificial Sequence
  Description of Artificial Sequence: Synthetic oligonucleotide
  Sense strand starting at position 3385 of SEQ ID NO: 317686
uagggacuguccuugaaua

SEQ ID NO: 504118 - RNA, 19 nt, Artificial Sequence
  Description of Artificial Sequence: Synthetic oligonucleotide
  Antisense strand to SEQ ID NO: 504117
uauucaaggacagucccua

SEQ ID NO: 504119 - RNA, 19 nt, Artificial Sequence
  Description of Artificial Sequence: Synthetic oligonucleotide
  Sense strand starting at position 3386 of SEQ ID NO: 317686
agggacuguccuugaauaa

SEQ ID NO: 504120 - RNA, 19 nt, Artificial Sequence
  Description of Artificial Sequence: Synthetic oligonucleotide
  Antisense strand to SEQ ID NO: 504119
uuauucaaggacagucccu

SEQ ID NO: 504121 - RNA, 19 nt, Artificial Sequence
  Description of Artificial Sequence: Synthetic oligonucleotide
  Sense strand starting at position 3406 of SEQ ID NO: 317686
uuaucucuaugucuaggaa

SEQ ID NO: 504122 - RNA, 19 nt, Artificial Sequence
  Description of Artificial Sequence: Synthetic oligonucleotide
  Antisense strand to SEQ ID NO: 504121
uuccuagacauagagauaa

SEQ ID NO: 504123 - RNA, 19 nt, Artificial Sequence
  Description of Artificial Sequence: Synthetic oligonucleotide
  Sense strand starting at position 3409 of SEQ ID NO: 317686
ucucuaugucuaggaacca

SEQ ID NO: 504124 - RNA, 19 nt, Artificial Sequence
  Description of Artificial Sequence: Synthetic oligonucleotide
  Antisense strand to SEQ ID NO: 504123
ugguuccuagacauagaga

SEQ ID NO: 504125 - RNA, 19 nt, Artificial Sequence
  Description of Artificial Sequence: Synthetic oligonucleotide
  Sense strand starting at position 3482 of SEQ ID NO: 317686
uuuaaauaggucugcuaug

SEQ ID NO: 504126 - RNA, 19 nt, Artificial Sequence
  Description of Artificial Sequence: Synthetic oligonucleotide
  Antisense strand to SEQ ID NO: 504125
cauagcagaccuauuuaaa

SEQ ID NO: 504127 - RNA, 19 nt, Artificial Sequence
  Description of Artificial Sequence: Synthetic oligonucleotide
  Sense strand starting at position 3483 of SEQ ID NO: 317686
uuaaauaggucugcuaugu

SEQ ID NO: 504128 - RNA, 19 nt, Artificial Sequence
  Description of Artificial Sequence: Synthetic oligonucleotide
  Antisense strand to SEQ ID NO: 504127
acauagcagaccuauuuaa

SEQ ID NO: 504129 - RNA, 19 nt, Artificial Sequence
  Description of Artificial Sequence: Synthetic oligonucleotide
  Sense strand starting at position 3505 of SEQ ID NO: 317686
ggcacuagccuagauggua

SEQ ID NO: 504130 - RNA, 19 nt, Artificial Sequence
  Description of Artificial Sequence: Synthetic oligonucleotide
  Antisense strand to SEQ ID NO: 504129
uaccaucuaggcuagugcc

SEQ ID NO: 504131 - RNA, 19 nt, Artificial Sequence
  Description of Artificial Sequence: Synthetic oligonucleotide
  Sense strand starting at position 3562 of SEQ ID NO: 317686
ggugguauuaggugagaug

SEQ ID NO: 504132 - RNA, 19 nt, Artificial Sequence
  Description of Artificial Sequence: Synthetic oligonucleotide
  Antisense strand to SEQ ID NO: 504131
caucucaccuaauaccacc

SEQ ID NO: 504133 - RNA, 19 nt, Artificial Sequence
  Description of Artificial Sequence: Synthetic oligonucleotide
  Sense strand starting at position 3595 of SEQ ID NO: 317686
auaaccaugccuugugaua

SEQ ID NO: 504134 - RNA, 19 nt, Artificial Sequence
  Description of Artificial Sequence: Synthetic oligonucleotide
  Antisense strand to SEQ ID NO: 504133
uaucacaaggcaugguuau

SEQ ID NO: 504135 - RNA, 19 nt, Artificial Sequence
  Description of Artificial Sequence: Synthetic oligonucleotide
  Sense strand starting at position 3602 of SEQ ID NO: 317686
ugccuugugauaggauaga

SEQ ID NO: 504136 - RNA, 19 nt, Artificial Sequence
  Description of Artificial Sequence: Synthetic oligonucleotide
  Antisense strand to SEQ ID NO: 504135
ucuauccuaucacaaggca

SEQ ID NO: 504137 - RNA, 19 nt, Artificial Sequence
  Description of Artificial Sequence: Synthetic oligonucleotide
  Sense strand starting at position 3866 of SEQ ID NO: 317686
uaaauaagugaaugugauc

SEQ ID NO: 504138 - RNA, 19 nt, Artificial Sequence
  Description of Artificial Sequence: Synthetic oligonucleotide
  Antisense strand to SEQ ID NO: 504137
gaucacauucacuuauuua

SEQ ID NO: 504139 - RNA, 19 nt, Artificial Sequence
  Description of Artificial Sequence: Synthetic oligonucleotide
  Sense strand starting at position 3871 of SEQ ID NO: 317686
aagugaaugugaucucuuu

SEQ ID NO: 504140 - RNA, 19 nt, Artificial Sequence
  Description of Artificial Sequence: Synthetic oligonucleotide
  Antisense strand to SEQ ID NO: 504139
aaagagaucacauucacuu

SEQ ID NO: 504141 - RNA, 19 nt, Artificial Sequence
  Description of Artificial Sequence: Synthetic oligonucleotide
  Sense strand starting at position 3877 of SEQ ID NO: 317686
augugaucucuuugauagg

SEQ ID NO: 504142 - RNA, 19 nt, Artificial Sequence
  Description of Artificial Sequence: Synthetic oligonucleotide
  Antisense strand to SEQ ID NO: 504141
ccuaucaaagagaucacau

SEQ ID NO: 504143 - RNA, 19 nt, Artificial Sequence
  Description of Artificial Sequence: Synthetic oligonucleotide
  Sense strand starting at position 3886 of SEQ ID NO: 317686
cuuugauagguguaucuac

SEQ ID NO: 504144 - RNA, 19 nt, Artificial Sequence
  Description of Artificial Sequence: Synthetic oligonucleotide
  Antisense strand to SEQ ID NO: 504143
guagauacaccuaucaaag

SEQ ID NO: 504145 - RNA, 19 nt, Artificial Sequence
  Description of Artificial Sequence: Synthetic oligonucleotide
  Sense strand starting at position 3924 of SEQ ID NO: 317686
gguccagacagcuaucuga

SEQ ID NO: 504146 - RNA, 19 nt, Artificial Sequence
  Description of Artificial Sequence: Synthetic oligonucleotide
  Antisense strand to SEQ ID NO: 504145
ucagauagcugucuggacc

SEQ ID NO: 504147 - RNA, 19 nt, Artificial Sequence
  Description of Artificial Sequence: Synthetic oligonucleotide
  Sense strand starting at position 86 of SEQ ID NO: 317687
ugaggcuucugagacauuu

SEQ ID NO: 504148 - RNA, 19 nt, Artificial Sequence
  Description of Artificial Sequence: Synthetic oligonucleotide
  Antisense strand to SEQ ID NO: 504147
aaaugucucagaagccuca

SEQ ID NO: 504149 - RNA, 19 nt, Artificial Sequence
  Description of Artificial Sequence: Synthetic oligonucleotide
  Sense strand starting at position 136 of SEQ ID NO: 317687
cuucuuuaccuuuaagugu

SEQ ID NO: 504150 - RNA, 19 nt, Artificial Sequence
  Description of Artificial Sequence: Synthetic oligonucleotide
  Antisense strand to SEQ ID NO: 504149
acacuuaaagguaaagaag

SEQ ID NO: 504151 - RNA, 19 nt, Artificial Sequence
  Description of Artificial Sequence: Synthetic oligonucleotide
  Sense strand starting at position 144 of SEQ ID NO: 317687
ccuuuaaguguuuauaaac

SEQ ID NO: 504152 - RNA, 19 nt, Artificial Sequence
  Description of Artificial Sequence: Synthetic oligonucleotide
  Antisense strand to SEQ ID NO: 504151
guuuauaaacacuuaaagg

SEQ ID NO: 504153 - RNA, 19 nt, Artificial Sequence
  Description of Artificial Sequence: Synthetic oligonucleotide
  Sense strand starting at position 177 of SEQ ID NO: 317687
uuggguacuucagaggaaa

SEQ ID NO: 504154 - RNA, 19 nt, Artificial Sequence
  Description of Artificial Sequence: Synthetic oligonucleotide
  Antisense strand to SEQ ID NO: 504153
uuuccucugaaguacccaa

SEQ ID NO: 504155 - RNA, 19 nt, Artificial Sequence
  Description of Artificial Sequence: Synthetic oligonucleotide
  Sense strand starting at position 223 of SEQ ID NO: 317687
uguucuuaguuggccagau

SEQ ID NO: 504156 - RNA, 19 nt, Artificial Sequence
  Description of Artificial Sequence: Synthetic oligonucleotide
  Antisense strand to SEQ ID NO: 504155
aucuggccaacuaagaaca

SEQ ID NO: 504157 - RNA, 19 nt, Artificial Sequence
  Description of Artificial Sequence: Synthetic oligonucleotide
  Sense strand starting at position 224 of SEQ ID NO: 317687
guucuuaguuggccagauu

SEQ ID NO: 504158 - RNA, 19 nt, Artificial Sequence
  Description of Artificial Sequence: Synthetic oligonucleotide
  Antisense strand to SEQ ID NO: 504157
aaucuggccaacuaagaac

SEQ ID NO: 504159 - RNA, 19 nt, Artificial Sequence
  Description of Artificial Sequence: Synthetic oligonucleotide
  Sense strand starting at position 393 of SEQ ID NO: 317687
aucugaugcuagccaaauu

SEQ ID NO: 504160 - RNA, 19 nt, Artificial Sequence
  Description of Artificial Sequence: Synthetic oligonucleotide
  Antisense strand to SEQ ID NO: 504159
aauuuggcuagcaucagau

SEQ ID NO: 504161 - RNA, 19 nt, Artificial Sequence
  Description of Artificial Sequence: Synthetic oligonucleotide
  Sense strand starting at position 548 of SEQ ID NO: 317687
ggguuacuuuggcuauuaa

SEQ ID NO: 504162 - RNA, 19 nt, Artificial Sequence
  Description of Artificial Sequence: Synthetic oligonucleotide
  Antisense strand to SEQ ID NO: 504161
uuaauagccaaaguaaccc

SEQ ID NO: 504163 - RNA, 19 nt, Artificial Sequence
  Description of Artificial Sequence: Synthetic oligonucleotide
  Sense strand starting at position 549 of SEQ ID NO: 317687
gguuacuuuggcuauuaau

SEQ ID NO: 504164 - RNA, 19 nt, Artificial Sequence
  Description of Artificial Sequence: Synthetic oligonucleotide
  Antisense strand to SEQ ID NO: 504163
auuaauagccaaaguaacc

SEQ ID NO: 504165 - RNA, 19 nt, Artificial Sequence
  Description of Artificial Sequence: Synthetic oligonucleotide
  Sense strand starting at position 555 of SEQ ID NO: 317687
uuuggcuauuaaucaagau

SEQ ID NO: 504166 - RNA, 19 nt, Artificial Sequence
  Description of Artificial Sequence: Synthetic oligonucleotide
  Antisense strand to SEQ ID NO: 504165
aucuugauuaauagccaaa

SEQ ID NO: 504167 - RNA, 19 nt, Artificial Sequence
  Description of Artificial Sequence: Synthetic oligonucleotide
  Sense strand starting at position 576 of SEQ ID NO: 317687
ggcaaauacccaugugcuu

SEQ ID NO: 504168 - RNA, 19 nt, Artificial Sequence
  Description of Artificial Sequence: Synthetic oligonucleotide
  Antisense strand to SEQ ID NO: 504167
aagcacauggguauuugcc

SEQ ID NO: 504169 - RNA, 19 nt, Artificial Sequence
  Description of Artificial Sequence: Synthetic oligonucleotide
  Sense strand starting at position 583 of SEQ ID NO: 317687
acccaugugcuuuaggaau

SEQ ID NO: 504170 - RNA, 19 nt, Artificial Sequence
  Description of Artificial Sequence: Synthetic oligonucleotide
  Antisense strand to SEQ ID NO: 504169
auuccuaaagcacaugggu

SEQ ID NO: 504171 - RNA, 19 nt, Artificial Sequence
  Description of Artificial Sequence: Synthetic oligonucleotide
  Sense strand starting at position 589 of SEQ ID NO: 317687
gugcuuuaggaauguguaa

SEQ ID NO: 504172 - RNA, 19 nt, Artificial Sequence
  Description of Artificial Sequence: Synthetic oligonucleotide
  Antisense strand to SEQ ID NO: 504171
uuacacauuccuaaagcac

SEQ ID NO: 504173 - RNA, 19 nt, Artificial Sequence
  Description of Artificial Sequence: Synthetic oligonucleotide
  Sense strand starting at position 591 of SEQ ID NO: 317687
gcuuuaggaauguguaacu

SEQ ID NO: 504174 - RNA, 19 nt, Artificial Sequence
  Description of Artificial Sequence: Synthetic oligonucleotide
  Antisense strand to SEQ ID NO: 504173
aguuacacauuccuaaagc

SEQ ID NO: 504175 - RNA, 19 nt, Artificial Sequence
  Description of Artificial Sequence: Synthetic oligonucleotide
  Sense strand starting at position 629 of SEQ ID NO: 317687
agagaaaccuucccagguu

SEQ ID NO: 504176 - RNA, 19 nt, Artificial Sequence
  Description of Artificial Sequence: Synthetic oligonucleotide
  Antisense strand to SEQ ID NO: 504175
aaccugggaagguuucucu

SEQ ID NO: 504177 - RNA, 19 nt, Artificial Sequence
  Description of Artificial Sequence: Synthetic oligonucleotide
  Sense strand starting at position 641 of SEQ ID NO: 317687
ccagguuucccagaaguca

SEQ ID NO: 504178 - RNA, 19 nt, Artificial Sequence
  Description of Artificial Sequence: Synthetic oligonucleotide
  Antisense strand to SEQ ID NO: 504177
ugacuucugggaaaccugg

SEQ ID NO: 504179 - RNA, 19 nt, Artificial Sequence
  Description of Artificial Sequence: Synthetic oligonucleotide
  Sense strand starting at position 652 of SEQ ID NO: 317687
agaagucaucacuacgcuu

SEQ ID NO: 504180 - RNA, 19 nt, Artificial Sequence
  Description of Artificial Sequence: Synthetic oligonucleotide
  Antisense strand to SEQ ID NO: 504179
aagcguagugaugacuucu

SEQ ID NO: 504181 - RNA, 19 nt, Artificial Sequence
  Description of Artificial Sequence: Synthetic oligonucleotide
  Sense strand starting at position 672 of SEQ ID NO: 317687
gauugucauguacaaagua

SEQ ID NO: 504182 - RNA, 19 nt, Artificial Sequence
  Description of Artificial Sequence: Synthetic oligonucleotide
  Antisense strand to SEQ ID NO: 504181
uacuuuguacaugacaauc

SEQ ID NO: 504183 - RNA, 19 nt, Artificial Sequence
  Description of Artificial Sequence: Synthetic oligonucleotide
  Sense strand starting at position 713 of SEQ ID NO: 317687
guagguccuugauuuguuu

SEQ ID NO: 504184 - RNA, 19 nt, Artificial Sequence
  Description of Artificial Sequence: Synthetic oligonucleotide
  Antisense strand to SEQ ID NO: 504183
aaacaaaucaaggaccuac

SEQ ID NO: 504185 - RNA, 19 nt, Artificial Sequence
  Description of Artificial Sequence: Synthetic oligonucleotide
  Sense strand starting at position 861 of SEQ ID NO: 317687
agaucuuacuuucuuugga

SEQ ID NO: 504186 - RNA, 19 nt, Artificial Sequence
  Description of Artificial Sequence: Synthetic oligonucleotide
  Antisense strand to SEQ ID NO: 504185
uccaaagaaaguaagaucu

SEQ ID NO: 504187 - RNA, 19 nt, Artificial Sequence
  Description of Artificial Sequence: Synthetic oligonucleotide
  Sense strand starting at position 912 of SEQ ID NO: 317687
ucuauaacuccugguguga

SEQ ID NO: 504188 - RNA, 19 nt, Artificial Sequence
  Description of Artificial Sequence: Synthetic oligonucleotide
  Antisense strand to SEQ ID NO: 504187
ucacaccaggaguuauaga

SEQ ID NO: 504189 - RNA, 19 nt, Artificial Sequence
  Description of Artificial Sequence: Synthetic oligonucleotide
  Sense strand starting at position 927 of SEQ ID NO: 317687
gugaggagauguguggaua

SEQ ID NO: 504190 - RNA, 19 nt, Artificial Sequence
  Description of Artificial Sequence: Synthetic oligonucleotide
  Antisense strand to SEQ ID NO: 504189
uauccacacaucuccucac

SEQ ID NO: 504191 - RNA, 19 nt, Artificial Sequence
  Description of Artificial Sequence: Synthetic oligonucleotide
  Sense strand starting at position 1039 of SEQ ID NO: 317687
ggccuauagagauggauuc

SEQ ID NO: 504192 - RNA, 19 nt, Artificial Sequence
  Description of Artificial Sequence: Synthetic oligonucleotide
  Antisense strand to SEQ ID NO: 504191
gaauccaucucuauaggcc

SEQ ID NO: 504193 - RNA, 19 nt, Artificial Sequence
  Description of Artificial Sequence: Synthetic oligonucleotide
  Sense strand starting at position 1046 of SEQ ID NO: 317687
agagauggauucuuucuua

SEQ ID NO: 504194 - RNA, 19 nt, Artificial Sequence
  Description of Artificial Sequence: Synthetic oligonucleotide
  Antisense strand to SEQ ID NO: 504193
uaagaaagaauccaucucu

SEQ ID NO: 504195 - RNA, 19 nt, Artificial Sequence
  Description of Artificial Sequence: Synthetic oligonucleotide
  Sense strand starting at position 1062 of SEQ ID NO: 317687
uuagaaaucuaacuggucu

SEQ ID NO: 504196 - RNA, 19 nt, Artificial Sequence
  Description of Artificial Sequence: Synthetic oligonucleotide
  Antisense strand to SEQ ID NO: 504195
agaccaguuagauuucuaa

SEQ ID NO: 504197 - RNA, 19 nt, Artificial Sequence
  Description of Artificial Sequence: Synthetic oligonucleotide
  Sense strand starting at position 1069 of SEQ ID NO: 317687
ucuaacuggucucugggaa

SEQ ID NO: 504198 - RNA, 19 nt, Artificial Sequence
  Description of Artificial Sequence: Synthetic oligonucleotide
  Antisense strand to SEQ ID NO: 504197
uucccagagaccaguuaga

SEQ ID NO: 504199 - RNA, 19 nt, Artificial Sequence
  Description of Artificial Sequence: Synthetic oligonucleotide
  Sense strand starting at position 1070 of SEQ ID NO: 317687
cuaacuggucucugggaaa

SEQ ID NO: 504200 - RNA, 19 nt, Artificial Sequence
  Description of Artificial Sequence: Synthetic oligonucleotide
  Antisense strand to SEQ ID NO: 504199
uuucccagagaccaguuag

SEQ ID NO: 504201 - RNA, 19 nt, Artificial Sequence
  Description of Artificial Sequence: Synthetic oligonucleotide
  Sense strand starting at position 1151 of SEQ ID NO: 317687
gugcuuucuuggccaaaca

SEQ ID NO: 504202 - RNA, 19 nt, Artificial Sequence
  Description of Artificial Sequence: Synthetic oligonucleotide
  Antisense strand to SEQ ID NO: 504201
uguuuggccaagaaagcac

SEQ ID NO: 504203 - RNA, 19 nt, Artificial Sequence
  Description of Artificial Sequence: Synthetic oligonucleotide
  Sense strand starting at position 2442 of SEQ ID NO: 317687
ccaccacacccgugacaua

SEQ ID NO: 504204 - RNA, 19 nt, Artificial Sequence
  Description of Artificial Sequence: Synthetic oligonucleotide
  Antisense strand to SEQ ID NO: 504203
uaugucacggguguggugg

SEQ ID NO: 504205 - RNA, 19 nt, Artificial Sequence
  Description of Artificial Sequence: Synthetic oligonucleotide
  Sense strand starting at position 2833 of SEQ ID NO: 317687
gacuauuuguaaggaaauu

SEQ ID NO: 504206 - RNA, 19 nt, Artificial Sequence
  Description of Artificial Sequence: Synthetic oligonucleotide
  Antisense strand to SEQ ID NO: 504205
aauuuccuuacaaauaguc

SEQ ID NO: 504207 - RNA, 19 nt, Artificial Sequence
  Description of Artificial Sequence: Synthetic oligonucleotide
  Sense strand starting at position 2949 of SEQ ID NO: 317687
aaagguguggcccgaggaa

SEQ ID NO: 504208 - RNA, 19 nt, Artificial Sequence
  Description of Artificial Sequence: Synthetic oligonucleotide
  Antisense strand to SEQ ID NO: 504207
uuccucgggccacaccuuu

SEQ ID NO: 504209 - RNA, 19 nt, Artificial Sequence
  Description of Artificial Sequence: Synthetic oligonucleotide
  Sense strand starting at position 3123 of SEQ ID NO: 317687
gagaaagaccaucgugugu

SEQ ID NO: 504210 - RNA, 19 nt, Artificial Sequence
  Description of Artificial Sequence: Synthetic oligonucleotide
  Antisense strand to SEQ ID NO: 504209
acacacgauggucuuucuc

SEQ ID NO: 504211 - RNA, 19 nt, Artificial Sequence
  Description of Artificial Sequence: Synthetic oligonucleotide
  Sense strand starting at position 3128 of SEQ ID NO: 317687
agaccaucgugugucugaa

SEQ ID NO: 504212 - RNA, 19 nt, Artificial Sequence
  Description of Artificial Sequence: Synthetic oligonucleotide
  Antisense strand to SEQ ID NO: 504211
uucagacacacgauggucu

SEQ ID NO: 504213 - RNA, 19 nt, Artificial Sequence
  Description of Artificial Sequence: Synthetic oligonucleotide
  Sense strand starting at position 3176 of SEQ ID NO: 317687
gcaauuccgccuugggaaa

SEQ ID NO: 504214 - RNA, 19 nt, Artificial Sequence
  Description of Artificial Sequence: Synthetic oligonucleotide
  Antisense strand to SEQ ID NO: 504213
uuucccaaggcggaauugc

SEQ ID NO: 504215 - RNA, 19 nt, Artificial Sequence
  Description of Artificial Sequence: Synthetic oligonucleotide
  Sense strand starting at position 3654 of SEQ ID NO: 317687
guuuccaaacucuggugaa

SEQ ID NO: 504216 - RNA, 19 nt, Artificial Sequence
  Description of Artificial Sequence: Synthetic oligonucleotide
  Antisense strand to SEQ ID NO: 504215
uucaccagaguuuggaaac

SEQ ID NO: 504217 - RNA, 19 nt, Artificial Sequence
  Description of Artificial Sequence: Synthetic oligonucleotide
  Sense strand starting at position 3667 of SEQ ID NO: 317687
ggugaauaaacauggugau

SEQ ID NO: 504218 - RNA, 19 nt, Artificial Sequence
  Description of Artificial Sequence: Synthetic oligonucleotide
  Antisense strand to SEQ ID NO: 504217
aucaccauguuuauucacc

SEQ ID NO: 504219 - RNA, 19 nt, Artificial Sequence
  Description of Artificial Sequence: Synthetic oligonucleotide
  Sense strand starting at position 3668 of SEQ ID NO: 317687
gugaauaaacauggugaug

SEQ ID NO: 504220 - RNA, 19 nt, Artificial Sequence
  Description of Artificial Sequence: Synthetic oligonucleotide
  Antisense strand to SEQ ID NO: 504219
caucaccauguuuauucac

SEQ ID NO: 504221 - RNA, 19 nt, Artificial Sequence
  Description of Artificial Sequence: Synthetic oligonucleotide
  Sense strand starting at position 3689 of SEQ ID NO: 317687
uuagaagccuuuguuguua

SEQ ID NO: 504222 - RNA, 19 nt, Artificial Sequence
  Description of Artificial Sequence: Synthetic oligonucleotide
  Antisense strand to SEQ ID NO: 504221
uaacaacaaaggcuucuaa

SEQ ID NO: 504223 - RNA, 19 nt, Artificial Sequence
  Description of Artificial Sequence: Synthetic oligonucleotide
  Sense strand starting at position 3947 of SEQ ID NO: 317687
agcccugagcuugaucaau

SEQ ID NO: 504224 - RNA, 19 nt, Artificial Sequence
  Description of Artificial Sequence: Synthetic oligonucleotide
  Antisense strand to SEQ ID NO: 504223
auugaucaagcucagggcu

SEQ ID NO: 504225 - RNA, 19 nt, Artificial Sequence
  Description of Artificial Sequence: Synthetic oligonucleotide
  Sense strand starting at position 3949 of SEQ ID NO: 317687
cccugagcuugaucaauau

SEQ ID NO: 504226 - RNA, 19 nt, Artificial Sequence
  Description of Artificial Sequence: Synthetic oligonucleotide
  Antisense strand to SEQ ID NO: 504225
auauugaucaagcucaggg

SEQ ID NO: 504227 - RNA, 19 nt, Artificial Sequence
  Description of Artificial Sequence: Synthetic oligonucleotide
  Sense strand starting at position 147 of SEQ ID NO: 317688
gcucaaggauauccacuau

SEQ ID NO: 504228 - RNA, 19 nt, Artificial Sequence
  Description of Artificial Sequence: Synthetic oligonucleotide
  Antisense strand to SEQ ID NO: 504227
auaguggauauccuugagc

SEQ ID NO: 504229 - RNA, 19 nt, Artificial Sequence
  Description of Artificial Sequence: Synthetic oligonucleotide
  Sense strand starting at position 263 of SEQ ID NO: 317688
ucuauuuguguacgagcuu

SEQ ID NO: 504230 - RNA, 19 nt, Artificial Sequence
  Description of Artificial Sequence: Synthetic oligonucleotide
  Antisense strand to SEQ ID NO: 504229
aagcucguacacaaauaga

SEQ ID NO: 504231 - RNA, 19 nt, Artificial Sequence
  Description of Artificial Sequence: Synthetic oligonucleotide
  Sense strand starting at position 405 of SEQ ID NO: 317688
ggcuuucguguugaaauuu

SEQ ID NO: 504232 - RNA, 19 nt, Artificial Sequence
  Description of Artificial Sequence: Synthetic oligonucleotide
  Antisense strand to SEQ ID NO: 504231
aaauuucaacacgaaagcc

SEQ ID NO: 504233 - RNA, 19 nt, Artificial Sequence
  Description of Artificial Sequence: Synthetic oligonucleotide
  Sense strand starting at position 587 of SEQ ID NO: 317688
gcagcugagcaacaugaaa

SEQ ID NO: 504234 - RNA, 19 nt, Artificial Sequence
  Description of Artificial Sequence: Synthetic oligonucleotide
  Antisense strand to SEQ ID NO: 504233
uuucauguugcucagcugc

SEQ ID NO: 504235 - RNA, 19 nt, Artificial Sequence
  Description of Artificial Sequence: Synthetic oligonucleotide
  Sense strand starting at position 1129 of SEQ ID NO: 317688
acaagaauggauugcaagu

SEQ ID NO: 504236 - RNA, 19 nt, Artificial Sequence
  Description of Artificial Sequence: Synthetic oligonucleotide
  Antisense strand to SEQ ID NO: 504235
acuugcaauccauucuugu

SEQ ID NO: 504237 - RNA, 19 nt, Artificial Sequence
  Description of Artificial Sequence: Synthetic oligonucleotide
  Sense strand starting at position 1181 of SEQ ID NO: 317688
aucaaucacgcucagauaa

SEQ ID NO: 504238 - RNA, 19 nt, Artificial Sequence
  Description of Artificial Sequence: Synthetic oligonucleotide
  Antisense strand to SEQ ID NO: 504237
uuaucugagcgugauugau

SEQ ID NO: 504239 - RNA, 19 nt, Artificial Sequence
  Description of Artificial Sequence: Synthetic oligonucleotide
  Sense strand starting at position 1263 of SEQ ID NO: 317688
uuuacaaugugacuguauu

SEQ ID NO: 504240 - RNA, 19 nt, Artificial Sequence
  Description of Artificial Sequence: Synthetic oligonucleotide
  Antisense strand to SEQ ID NO: 504239
aauacagucacauuguaaa

SEQ ID NO: 504241 - RNA, 19 nt, Artificial Sequence
  Description of Artificial Sequence: Synthetic oligonucleotide
  Sense strand starting at position 1264 of SEQ ID NO: 317688
uuacaaugugacuguauuc

SEQ ID NO: 504242 - RNA, 19 nt, Artificial Sequence
  Description of Artificial Sequence: Synthetic oligonucleotide
  Antisense strand to SEQ ID NO: 504241
gaauacagucacauuguaa

SEQ ID NO: 504243 - RNA, 19 nt, Artificial Sequence
  Description of Artificial Sequence: Synthetic oligonucleotide
  Sense strand starting at position 1269 of SEQ ID NO: 317688
augugacuguauucucuga

SEQ ID NO: 504244 - RNA, 19 nt, Artificial Sequence
  Description of Artificial Sequence: Synthetic oligonucleotide
  Antisense strand to SEQ ID NO: 504243
ucagagaauacagucacau

SEQ ID NO: 504245 - RNA, 19 nt, Artificial Sequence
  Description of Artificial Sequence: Synthetic oligonucleotide
  Sense strand starting at position 1271 of SEQ ID NO: 317688
gugacuguauucucugaag

SEQ ID NO: 504246 - RNA, 19 nt, Artificial Sequence
  Description of Artificial Sequence: Synthetic oligonucleotide
  Antisense strand to SEQ ID NO: 504245
cuucagagaauacagucac

SEQ ID NO: 504247 - RNA, 19 nt, Artificial Sequence
  Description of Artificial Sequence: Synthetic oligonucleotide
  Sense strand starting at position 1438 of SEQ ID NO: 317688
ugcagaagcuggguaugaa

SEQ ID NO: 504248 - RNA, 19 nt, Artificial Sequence
  Description of Artificial Sequence: Synthetic oligonucleotide
  Antisense strand to SEQ ID NO: 504247
uucauacccagcuucugca

SEQ ID NO: 504249 - RNA, 19 nt, Artificial Sequence
  Description of Artificial Sequence: Synthetic oligonucleotide
  Sense strand starting at position 1439 of SEQ ID NO: 317688
gcagaagcuggguaugaaa

SEQ ID NO: 504250 - RNA, 19 nt, Artificial Sequence
  Description of Artificial Sequence: Synthetic oligonucleotide
  Antisense strand to SEQ ID NO: 504249
uuucauacccagcuucugc

SEQ ID NO: 504251 - RNA, 19 nt, Artificial Sequence
  Description of Artificial Sequence: Synthetic oligonucleotide
  Sense strand starting at position 1527 of SEQ ID NO: 317688
agguaacuccaagguaauu

SEQ ID NO: 504252 - RNA, 19 nt, Artificial Sequence
  Description of Artificial Sequence: Synthetic oligonucleotide
  Antisense strand to SEQ ID NO: 504251
aauuaccuuggaguuaccu

SEQ ID NO: 504253 - RNA, 19 nt, Artificial Sequence
  Description of Artificial Sequence: Synthetic oligonucleotide
  Sense strand starting at position 1668 of SEQ ID NO: 317688
uaagaagaauuaguagguu

SEQ ID NO: 504254 - RNA, 19 nt, Artificial Sequence
  Description of Artificial Sequence: Synthetic oligonucleotide
  Antisense strand to SEQ ID NO: 504253
aaccuacuaauucuucuua

SEQ ID NO: 504255 - RNA, 19 nt, Artificial Sequence
  Description of Artificial Sequence: Synthetic oligonucleotide
  Sense strand starting at position 1680 of SEQ ID NO: 317688
guagguuugccucagaaac

SEQ ID NO: 504256 - RNA, 19 nt, Artificial Sequence
  Description of Artificial Sequence: Synthetic oligonucleotide
  Antisense strand to SEQ ID NO: 504255
guuucugaggcaaaccuac

SEQ ID NO: 504257 - RNA, 19 nt, Artificial Sequence
  Description of Artificial Sequence: Synthetic oligonucleotide
  Sense strand starting at position 1697 of SEQ ID NO: 317688
accuauauguaucuguaca

SEQ ID NO: 504258 - RNA, 19 nt, Artificial Sequence
  Description of Artificial Sequence: Synthetic oligonucleotide
  Antisense strand to SEQ ID NO: 504257
uguacagauacauauaggu

SEQ ID NO: 504259 - RNA, 19 nt, Artificial Sequence
  Description of Artificial Sequence: Synthetic oligonucleotide
  Sense strand starting at position 1724 of SEQ ID NO: 317688
uuuauaaaggcacguauaa

SEQ ID NO: 504260 - RNA, 19 nt, Artificial Sequence
  Description of Artificial Sequence: Synthetic oligonucleotide
  Antisense strand to SEQ ID NO: 504259
uuauacgugccuuuauaaa

SEQ ID NO: 504261 - RNA, 19 nt, Artificial Sequence
  Description of Artificial Sequence: Synthetic oligonucleotide
  Sense strand starting at position 1792 of SEQ ID NO: 317688
agaauaggaugucugguuu

SEQ ID NO: 504262 - RNA, 19 nt, Artificial Sequence
  Description of Artificial Sequence: Synthetic oligonucleotide
  Antisense strand to SEQ ID NO: 504261
aaaccagacauccuauucu

SEQ ID NO: 504263 - RNA, 19 nt, Artificial Sequence
  Description of Artificial Sequence: Synthetic oligonucleotide
  Sense strand starting at position 2123 of SEQ ID NO: 317688
cgacaaggaggcuguaaau

SEQ ID NO: 504264 - RNA, 19 nt, Artificial Sequence
  Description of Artificial Sequence: Synthetic oligonucleotide
  Antisense strand to SEQ ID NO: 504263
auuuacagccuccuugucg

SEQ ID NO: 504265 - RNA, 19 nt, Artificial Sequence
  Description of Artificial Sequence: Synthetic oligonucleotide
  Sense strand starting at position 2264 of SEQ ID NO: 317688
gguugcuggaaauggaaau

SEQ ID NO: 504266 - RNA, 19 nt, Artificial Sequence
  Description of Artificial Sequence: Synthetic oligonucleotide
  Antisense strand to SEQ ID NO: 504265
auuuccauuuccagcaacc

SEQ ID NO: 504267 - RNA, 19 nt, Artificial Sequence
  Description of Artificial Sequence: Synthetic oligonucleotide
  Sense strand starting at position 2356 of SEQ ID NO: 317688
uuugcucggagugagaaua

SEQ ID NO: 504268 - RNA, 19 nt, Artificial Sequence
  Description of Artificial Sequence: Synthetic oligonucleotide
  Antisense strand to SEQ ID NO: 504267
uauucucacuccgagcaaa

SEQ ID NO: 504269 - RNA, 19 nt, Artificial Sequence
  Description of Artificial Sequence: Synthetic oligonucleotide
  Sense strand starting at position 2366 of SEQ ID NO: 317688
gugagaauauugcuucuca

SEQ ID NO: 504270 - RNA, 19 nt, Artificial Sequence
  Description of Artificial Sequence: Synthetic oligonucleotide
  Antisense strand to SEQ ID NO: 504269
ugagaagcaauauucucac

SEQ ID NO: 504271 - RNA, 19 nt, Artificial Sequence
  Description of Artificial Sequence: Synthetic oligonucleotide
  Sense strand starting at position 2367 of SEQ ID NO: 317688
ugagaauauugcuucucag

SEQ ID NO: 504272 - RNA, 19 nt, Artificial Sequence
  Description of Artificial Sequence: Synthetic oligonucleotide
  Antisense strand to SEQ ID NO: 504271
cugagaagcaauauucuca

SEQ ID NO: 504273 - RNA, 19 nt, Artificial Sequence
  Description of Artificial Sequence: Synthetic oligonucleotide
  Sense strand starting at position 2394 of SEQ ID NO: 317688
cccggugccguguuagaua

SEQ ID NO: 504274 - RNA, 19 nt, Artificial Sequence
  Description of Artificial Sequence: Synthetic oligonucleotide
  Antisense strand to SEQ ID NO: 504273
uaucuaacacggcaccggg

SEQ ID NO: 504275 - RNA, 19 nt, Artificial Sequence
  Description of Artificial Sequence: Synthetic oligonucleotide
  Sense strand starting at position 2396 of SEQ ID NO: 317688
cggugccguguuagauaaa

SEQ ID NO: 504276 - RNA, 19 nt, Artificial Sequence
  Description of Artificial Sequence: Synthetic oligonucleotide
  Antisense strand to SEQ ID NO: 504275
uuuaucuaacacggcaccg

SEQ ID NO: 504277 - RNA, 19 nt, Artificial Sequence
  Description of Artificial Sequence: Synthetic oligonucleotide
  Sense strand starting at position 2488 of SEQ ID NO: 317688
gagcucuuuccagagcaga

SEQ ID NO: 504278 - RNA, 19 nt, Artificial Sequence
  Description of Artificial Sequence: Synthetic oligonucleotide
  Antisense strand to SEQ ID NO: 504277
ucugcucuggaaagagcuc

SEQ ID NO: 504279 - RNA, 19 nt, Artificial Sequence
  Description of Artificial Sequence: Synthetic oligonucleotide
  Sense strand starting at position 2734 of SEQ ID NO: 317688
gccgucaaucaucaggauu

SEQ ID NO: 504280 - RNA, 19 nt, Artificial Sequence
  Description of Artificial Sequence: Synthetic oligonucleotide
  Antisense strand to SEQ ID NO: 504279
aauccugaugauugacggc

SEQ ID NO: 504281 - RNA, 19 nt, Artificial Sequence
  Description of Artificial Sequence: Synthetic oligonucleotide
  Sense strand starting at position 2933 of SEQ ID NO: 317688
uuccuauaggcacauagau

SEQ ID NO: 504282 - RNA, 19 nt, Artificial Sequence
  Description of Artificial Sequence: Synthetic oligonucleotide
  Antisense strand to SEQ ID NO: 504281
aucuaugugccuauaggaa

SEQ ID NO: 504283 - RNA, 19 nt, Artificial Sequence
  Description of Artificial Sequence: Synthetic oligonucleotide
  Sense strand starting at position 3012 of SEQ ID NO: 317688
ucccaaauguuaucaggca

SEQ ID NO: 504284 - RNA, 19 nt, Artificial Sequence
  Description of Artificial Sequence: Synthetic oligonucleotide
  Antisense strand to SEQ ID NO: 504283
ugccugauaacauuuggga

SEQ ID NO: 504285 - RNA, 19 nt, Artificial Sequence
  Description of Artificial Sequence: Synthetic oligonucleotide
  Sense strand starting at position 3094 of SEQ ID NO: 317688
gucaccugauguccaaaua

SEQ ID NO: 504286 - RNA, 19 nt, Artificial Sequence
  Description of Artificial Sequence: Synthetic oligonucleotide
  Antisense strand to SEQ ID NO: 504285
uauuuggacaucaggugac

SEQ ID NO: 504287 - RNA, 19 nt, Artificial Sequence
  Description of Artificial Sequence: Synthetic oligonucleotide
  Sense strand starting at position 3148 of SEQ ID NO: 317688
ccauuaagucugcagacuu

SEQ ID NO: 504288 - RNA, 19 nt, Artificial Sequence
  Description of Artificial Sequence: Synthetic oligonucleotide
  Antisense strand to SEQ ID NO: 504287
aagucugcagacuuaaugg

SEQ ID NO: 504289 - RNA, 19 nt, Artificial Sequence
  Description of Artificial Sequence: Synthetic oligonucleotide
  Sense strand starting at position 3161 of SEQ ID NO: 317688
agacuuagaaggugacagu

SEQ ID NO: 504290 - RNA, 19 nt, Artificial Sequence
  Description of Artificial Sequence: Synthetic oligonucleotide
  Antisense strand to SEQ ID NO: 504289
acugucaccuucuaagucu

SEQ ID NO: 504291 - RNA, 19 nt, Artificial Sequence
  Description of Artificial Sequence: Synthetic oligonucleotide
  Sense strand starting at position 3222 of SEQ ID NO: 317688
cuaaauugucgguacuacu

SEQ ID NO: 504292 - RNA, 19 nt, Artificial Sequence
  Description of Artificial Sequence: Synthetic oligonucleotide
  Antisense strand to SEQ ID NO: 504291
aguaguaccgacaauuuag

SEQ ID NO: 504293 - RNA, 19 nt, Artificial Sequence
  Description of Artificial Sequence: Synthetic oligonucleotide
  Sense strand starting at position 3290 of SEQ ID NO: 317688
aauccugucugauugggua

SEQ ID NO: 504294 - RNA, 19 nt, Artificial Sequence
  Description of Artificial Sequence: Synthetic oligonucleotide
  Antisense strand to SEQ ID NO: 504293
uacccaaucagacaggauu

SEQ ID NO: 504295 - RNA, 19 nt, Artificial Sequence
  Description of Artificial Sequence: Synthetic oligonucleotide
  Sense strand starting at position 3453 of SEQ ID NO: 317688
acuagaguauaguuacaaa

SEQ ID NO: 504296 - RNA, 19 nt, Artificial Sequence
  Description of Artificial Sequence: Synthetic oligonucleotide
  Antisense strand to SEQ ID NO: 504295
uuuguaacuauacucuagu

SEQ ID NO: 504297 - RNA, 19 nt, Artificial Sequence
  Description of Artificial Sequence: Synthetic oligonucleotide
  Sense strand starting at position 3640 of SEQ ID NO: 317688
uccugaguaguugcgucua

SEQ ID NO: 504298 - RNA, 19 nt, Artificial Sequence
  Description of Artificial Sequence: Synthetic oligonucleotide
  Antisense strand to SEQ ID NO: 504297
uagacgcaacuacucagga

SEQ ID NO: 504299 - RNA, 19 nt, Artificial Sequence
  Description of Artificial Sequence: Synthetic oligonucleotide
  Sense strand starting at position 3832 of SEQ ID NO: 317688
ggugaauaaguacguauua

SEQ ID NO: 504300 - RNA, 19 nt, Artificial Sequence
  Description of Artificial Sequence: Synthetic oligonucleotide
  Antisense strand to SEQ ID NO: 504299
uaauacguacuuauucacc

SEQ ID NO: 504301 - RNA, 19 nt, Artificial Sequence
  Description of Artificial Sequence: Synthetic oligonucleotide
  Sense strand starting at position 3854 of SEQ ID NO: 317688
ucaaccagcuggguauaau

SEQ ID NO: 504302 - RNA, 19 nt, Artificial Sequence
  Description of Artificial Sequence: Synthetic oligonucleotide
  Antisense strand to SEQ ID NO: 504301
auuauacccagcugguuga

SEQ ID NO: 504303 - RNA, 19 nt, Artificial Sequence
  Description of Artificial Sequence: Synthetic oligonucleotide
  Sense strand starting at position 3855 of SEQ ID NO: 317688
caaccagcuggguauaauu

SEQ ID NO: 504304 - RNA, 19 nt, Artificial Sequence
  Description of Artificial Sequence: Synthetic oligonucleotide
  Antisense strand to SEQ ID NO: 504303
aauuauacccagcugguug

SEQ ID NO: 504305 - RNA, 19 nt, Artificial Sequence
  Description of Artificial Sequence: Synthetic oligonucleotide
  Sense strand starting at position 3954 of SEQ ID NO: 317688
aaucuuguggaagagcauu

SEQ ID NO: 504306 - RNA, 19 nt, Artificial Sequence
  Description of Artificial Sequence: Synthetic oligonucleotide
  Antisense strand to SEQ ID NO: 504305
aaugcucuuccacaagauu

SEQ ID NO: 504307 - RNA, 19 nt, Artificial Sequence
  Description of Artificial Sequence: Synthetic oligonucleotide
  Sense strand starting at position 26 of SEQ ID NO: 317689
acuccuauucccuggcaga

SEQ ID NO: 504308 - RNA, 19 nt, Artificial Sequence
  Description of Artificial Sequence: Synthetic oligonucleotide
  Antisense strand to SEQ ID NO: 504307
ucugccagggaauaggagu

SEQ ID NO: 504309 - RNA, 19 nt, Artificial Sequence
  Description of Artificial Sequence: Synthetic oligonucleotide
  Sense strand starting at position 27 of SEQ ID NO: 317689
cuccuauucccuggcagaa

SEQ ID NO: 504310 - RNA, 19 nt, Artificial Sequence
  Description of Artificial Sequence: Synthetic oligonucleotide
  Antisense strand to SEQ ID NO: 504309
uucugccagggaauaggag

SEQ ID NO: 504311 - RNA, 19 nt, Artificial Sequence
  Description of Artificial Sequence: Synthetic oligonucleotide
  Sense strand starting at position 54 of SEQ ID NO: 317689
gaggcucuauugcugaaua

SEQ ID NO: 504312 - RNA, 19 nt, Artificial Sequence
  Description of Artificial Sequence: Synthetic oligonucleotide
  Antisense strand to SEQ ID NO: 504311
uauucagcaauagagccuc

SEQ ID NO: 504313 - RNA, 19 nt, Artificial Sequence
  Description of Artificial Sequence: Synthetic oligonucleotide
  Sense strand starting at position 56 of SEQ ID NO: 317689
ggcucuauugcugaauaag

SEQ ID NO: 504314 - RNA, 19 nt, Artificial Sequence
  Description of Artificial Sequence: Synthetic oligonucleotide
  Antisense strand to SEQ ID NO: 504313
cuuauucagcaauagagcc

SEQ ID NO: 504315 - RNA, 19 nt, Artificial Sequence
  Description of Artificial Sequence: Synthetic oligonucleotide
  Sense strand starting at position 191 of SEQ ID NO: 317689
aggcaauugccugagcuca

SEQ ID NO: 504316 - RNA, 19 nt, Artificial Sequence
  Description of Artificial Sequence: Synthetic oligonucleotide
  Antisense strand to SEQ ID NO: 504315
ugagcucaggcaauugccu

SEQ ID NO: 504317 - RNA, 19 nt, Artificial Sequence
  Description of Artificial Sequence: Synthetic oligonucleotide
  Sense strand starting at position 479 of SEQ ID NO: 317689
gcaagugaagcccaguaaa

SEQ ID NO: 504318 - RNA, 19 nt, Artificial Sequence
  Description of Artificial Sequence: Synthetic oligonucleotide
  Antisense strand to SEQ ID NO: 504317
uuuacugggcuucacuugc

SEQ ID NO: 504319 - RNA, 19 nt, Artificial Sequence
  Description of Artificial Sequence: Synthetic oligonucleotide
  Sense strand starting at position 492 of SEQ ID NO: 317689
aguaaacacuccuuguuac

SEQ ID NO: 504320 - RNA, 19 nt, Artificial Sequence
  Description of Artificial Sequence: Synthetic oligonucleotide
  Antisense strand to SEQ ID NO: 504319
guaacaaggaguguuuacu

SEQ ID NO: 504321 - RNA, 19 nt, Artificial Sequence
  Description of Artificial Sequence: Synthetic oligonucleotide
  Sense strand starting at position 493 of SEQ ID NO: 317689
guaaacacuccuuguuaca

SEQ ID NO: 504322 - RNA, 19 nt, Artificial Sequence
  Description of Artificial Sequence: Synthetic oligonucleotide
  Antisense strand to SEQ ID NO: 504321
uguaacaaggaguguuuac

SEQ ID NO: 504323 - RNA, 19 nt, Artificial Sequence
  Description of Artificial Sequence: Synthetic oligonucleotide
  Sense strand starting at position 550 of SEQ ID NO: 317689
ucaaauauugaggguagua

SEQ ID NO: 504324 - RNA, 19 nt, Artificial Sequence
  Description of Artificial Sequence: Synthetic oligonucleotide
  Antisense strand to SEQ ID NO: 504323
uacuacccucaauauuuga

SEQ ID NO: 504325 - RNA, 19 nt, Artificial Sequence
  Description of Artificial Sequence: Synthetic oligonucleotide
  Sense strand starting at position 605 of SEQ ID NO: 317689
guaugugguguggucugua

SEQ ID NO: 504326 - RNA, 19 nt, Artificial Sequence
  Description of Artificial Sequence: Synthetic oligonucleotide
  Antisense strand to SEQ ID NO: 504325
uacagaccacaccacauac

SEQ ID NO: 504327 - RNA, 19 nt, Artificial Sequence
  Description of Artificial Sequence: Synthetic oligonucleotide
  Sense strand starting at position 610 of SEQ ID NO: 317689
ugguguggucuguaaguca

SEQ ID NO: 504328 - RNA, 19 nt, Artificial Sequence
  Description of Artificial Sequence: Synthetic oligonucleotide
  Antisense strand to SEQ ID NO: 504327
ugacuuacagaccacacca

SEQ ID NO: 504329 - RNA, 19 nt, Artificial Sequence
  Description of Artificial Sequence: Synthetic oligonucleotide
  Sense strand starting at position 613 of SEQ ID NO: 317689
uguggucuguaagucauaa

SEQ ID NO: 504330 - RNA, 19 nt, Artificial Sequence
  Description of Artificial Sequence: Synthetic oligonucleotide
  Antisense strand to SEQ ID NO: 504329
uuaugacuuacagaccaca

SEQ ID NO: 504331 - RNA, 19 nt, Artificial Sequence
  Description of Artificial Sequence: Synthetic oligonucleotide
  Sense strand starting at position 626 of SEQ ID NO: 317689
ucauaauagggcugacuuu

SEQ ID NO: 504332 - RNA, 19 nt, Artificial Sequence
  Description of Artificial Sequence: Synthetic oligonucleotide
  Antisense strand to SEQ ID NO: 504331
aaagucagcccuauuauga

SEQ ID NO: 504333 - RNA, 19 nt, Artificial Sequence
  Description of Artificial Sequence: Synthetic oligonucleotide
  Sense strand starting at position 727 of SEQ ID NO: 317689
uucccacagcuuugaugau

SEQ ID NO: 504334 - RNA, 19 nt, Artificial Sequence
  Description of Artificial Sequence: Synthetic oligonucleotide
  Antisense strand to SEQ ID NO: 504333
aucaucaaagcugugggaa

SEQ ID NO: 504335 - RNA, 19 nt, Artificial Sequence
  Description of Artificial Sequence: Synthetic oligonucleotide
  Sense strand starting at position 978 of SEQ ID NO: 317689
cccuauaaucgucagcacu

SEQ ID NO: 504336 - RNA, 19 nt, Artificial Sequence
  Description of Artificial Sequence: Synthetic oligonucleotide
  Antisense strand to SEQ ID NO: 504335
agugcugacgauuauaggg

SEQ ID NO: 504337 - RNA, 19 nt, Artificial Sequence
  Description of Artificial Sequence: Synthetic oligonucleotide
  Sense strand starting at position 1126 of SEQ ID NO: 317689
cuaugcuuccuggaucaca

SEQ ID NO: 504338 - RNA, 19 nt, Artificial Sequence
  Description of Artificial Sequence: Synthetic oligonucleotide
  Antisense strand to SEQ ID NO: 504337
ugugauccaggaagcauag

SEQ ID NO: 504339 - RNA, 19 nt, Artificial Sequence
  Description of Artificial Sequence: Synthetic oligonucleotide
  Sense strand starting at position 1247 of SEQ ID NO: 317689
gcaggcauuccuuacagca

SEQ ID NO: 504340 - RNA, 19 nt, Artificial Sequence
  Description of Artificial Sequence: Synthetic oligonucleotide
  Antisense strand to SEQ ID NO: 504339
ugcuguaaggaaugccugc

SEQ ID NO: 504341 - RNA, 19 nt, Artificial Sequence
  Description of Artificial Sequence: Synthetic oligonucleotide
  Sense strand starting at position 1506 of SEQ ID NO: 317689
acggauuucuguucucuuu

SEQ ID NO: 504342 - RNA, 19 nt, Artificial Sequence
  Description of Artificial Sequence: Synthetic oligonucleotide
  Antisense strand to SEQ ID NO: 504341
aaagagaacagaaauccgu

SEQ ID NO: 504343 - RNA, 19 nt, Artificial Sequence
  Description of Artificial Sequence: Synthetic oligonucleotide
  Sense strand starting at position 1575 of SEQ ID NO: 317689
ucuuuaccauuguuuguau

SEQ ID NO: 504344 - RNA, 19 nt, Artificial Sequence
  Description of Artificial Sequence: Synthetic oligonucleotide
  Antisense strand to SEQ ID NO: 504343
auacaaacaaugguaaaga

SEQ ID NO: 504345 - RNA, 19 nt, Artificial Sequence
  Description of Artificial Sequence: Synthetic oligonucleotide
  Sense strand starting at position 1600 of SEQ ID NO: 317689
guuguuauaauguaugcau

SEQ ID NO: 504346 - RNA, 19 nt, Artificial Sequence
  Description of Artificial Sequence: Synthetic oligonucleotide
  Antisense strand to SEQ ID NO: 504345
augcauacauuauaacaac

SEQ ID NO: 504347 - RNA, 19 nt, Artificial Sequence
  Description of Artificial Sequence: Synthetic oligonucleotide
  Sense strand starting at position 1634 of SEQ ID NO: 317689
ucugaaauccugcacggaa

SEQ ID NO: 504348 - RNA, 19 nt, Artificial Sequence
  Description of Artificial Sequence: Synthetic oligonucleotide
  Antisense strand to SEQ ID NO: 504347
uuccgugcaggauuucaga

SEQ ID NO: 504349 - RNA, 19 nt, Artificial Sequence
  Description of Artificial Sequence: Synthetic oligonucleotide
  Sense strand starting at position 1636 of SEQ ID NO: 317689
ugaaauccugcacggaaga

SEQ ID NO: 504350 - RNA, 19 nt, Artificial Sequence
  Description of Artificial Sequence: Synthetic oligonucleotide
  Antisense strand to SEQ ID NO: 504349
ucuuccgugcaggauuuca

SEQ ID NO: 504351 - RNA, 19 nt, Artificial Sequence
  Description of Artificial Sequence: Synthetic oligonucleotide
  Sense strand starting at position 1637 of SEQ ID NO: 317689
gaaauccugcacggaagaa

SEQ ID NO: 504352 - RNA, 19 nt, Artificial Sequence
  Description of Artificial Sequence: Synthetic oligonucleotide
  Antisense strand to SEQ ID NO: 504351
uucuuccgugcaggauuuc

SEQ ID NO: 504353 - RNA, 19 nt, Artificial Sequence
  Description of Artificial Sequence: Synthetic oligonucleotide
  Sense strand starting at position 1766 of SEQ ID NO: 317689
uggcuuacauucucauaag

SEQ ID NO: 504354 - RNA, 19 nt, Artificial Sequence
  Description of Artificial Sequence: Synthetic oligonucleotide
  Antisense strand to SEQ ID NO: 504353
cuuaugagaauguaagcca

SEQ ID NO: 504355 - RNA, 19 nt, Artificial Sequence
  Description of Artificial Sequence: Synthetic oligonucleotide
  Sense strand starting at position 2159 of SEQ ID NO: 317689
uguuaauugucuuucugga

SEQ ID NO: 504356 - RNA, 19 nt, Artificial Sequence
  Description of Artificial Sequence: Synthetic oligonucleotide
  Antisense strand to SEQ ID NO: 504355
uccagaaagacaauuaaca

SEQ ID NO: 504357 - RNA, 19 nt, Artificial Sequence
  Description of Artificial Sequence: Synthetic oligonucleotide
  Sense strand starting at position 2391 of SEQ ID NO: 317689
ccgguauuacuggauaccu

SEQ ID NO: 504358 - RNA, 19 nt, Artificial Sequence
  Description of Artificial Sequence: Synthetic oligonucleotide
  Antisense strand to SEQ ID NO: 504357
agguauccaguaauaccgg

SEQ ID NO: 504359 - RNA, 19 nt, Artificial Sequence
  Description of Artificial Sequence: Synthetic oligonucleotide
  Sense strand starting at position 2393 of SEQ ID NO: 317689
gguauuacuggauaccuuu

SEQ ID NO: 504360 - RNA, 19 nt, Artificial Sequence
  Description of Artificial Sequence: Synthetic oligonucleotide
  Antisense strand to SEQ ID NO: 504359
aaagguauccaguaauacc

SEQ ID NO: 504361 - RNA, 19 nt, Artificial Sequence
  Description of Artificial Sequence: Synthetic oligonucleotide
  Sense strand starting at position 2539 of SEQ ID NO: 317689
agucgcuuccaugacauga

SEQ ID NO: 504362 - RNA, 19 nt, Artificial Sequence
  Description of Artificial Sequence: Synthetic oligonucleotide
  Antisense strand to SEQ ID NO: 504361
ucaugucauggaagcgacu

SEQ ID NO: 504363 - RNA, 19 nt, Artificial Sequence
  Description of Artificial Sequence: Synthetic oligonucleotide
  Sense strand starting at position 2690 of SEQ ID NO: 317689
aagugauaguugcuaugaa

SEQ ID NO: 504364 - RNA, 19 nt, Artificial Sequence
  Description of Artificial Sequence: Synthetic oligonucleotide
  Antisense strand to SEQ ID NO: 504363
uucauagcaacuaucacuu

SEQ ID NO: 504365 - RNA, 19 nt, Artificial Sequence
  Description of Artificial Sequence: Synthetic oligonucleotide
  Sense strand starting at position 2700 of SEQ ID NO: 317689
ugcuaugaaacgcauguaa

SEQ ID NO: 504366 - RNA, 19 nt, Artificial Sequence
  Description of Artificial Sequence: Synthetic oligonucleotide
  Antisense strand to SEQ ID NO: 504365
uuacaugcguuucauagca

SEQ ID NO: 504367 - RNA, 19 nt, Artificial Sequence
  Description of Artificial Sequence: Synthetic oligonucleotide
  Sense strand starting at position 2702 of SEQ ID NO: 317689
cuaugaaacgcauguaaag

SEQ ID NO: 504368 - RNA, 19 nt, Artificial Sequence
  Description of Artificial Sequence: Synthetic oligonucleotide
  Antisense strand to SEQ ID NO: 504367
cuuuacaugcguuucauag

SEQ ID NO: 504369 - RNA, 19 nt, Artificial Sequence
  Description of Artificial Sequence: Synthetic oligonucleotide
  Sense strand starting at position 2704 of SEQ ID NO: 317689
augaaacgcauguaaaguu

SEQ ID NO: 504370 - RNA, 19 nt, Artificial Sequence
  Description of Artificial Sequence: Synthetic oligonucleotide
  Antisense strand to SEQ ID NO: 504369
aacuuuacaugcguuucau

SEQ ID NO: 504371 - RNA, 19 nt, Artificial Sequence
  Description of Artificial Sequence: Synthetic oligonucleotide
  Sense strand starting at position 2746 of SEQ ID NO: 317689
guuuguagcgucaggaaug

SEQ ID NO: 504372 - RNA, 19 nt, Artificial Sequence
  Description of Artificial Sequence: Synthetic oligonucleotide
  Antisense strand to SEQ ID NO: 504371
cauuccugacgcuacaaac

SEQ ID NO: 504373 - RNA, 19 nt, Artificial Sequence
  Description of Artificial Sequence: Synthetic oligonucleotide
  Sense strand starting at position 2854 of SEQ ID NO: 317689
gcugguaguagucauauug

SEQ ID NO: 504374 - RNA, 19 nt, Artificial Sequence
  Description of Artificial Sequence: Synthetic oligonucleotide
  Antisense strand to SEQ ID NO: 504373
caauaugacuacuaccagc

SEQ ID NO: 504375 - RNA, 19 nt, Artificial Sequence
  Description of Artificial Sequence: Synthetic oligonucleotide
  Sense strand starting at position 2863 of SEQ ID NO: 317689
agucauauugcuuacuaag

SEQ ID NO: 504376 - RNA, 19 nt, Artificial Sequence
  Description of Artificial Sequence: Synthetic oligonucleotide
  Antisense strand to SEQ ID NO: 504375
cuuaguaagcaauaugacu

SEQ ID NO: 504377 - RNA, 19 nt, Artificial Sequence
  Description of Artificial Sequence: Synthetic oligonucleotide
  Sense strand starting at position 2993 of SEQ ID NO: 317689
uuaagcuacagaggugaaa

SEQ ID NO: 504378 - RNA, 19 nt, Artificial Sequence
  Description of Artificial Sequence: Synthetic oligonucleotide
  Antisense strand to SEQ ID NO: 504377
uuucaccucuguagcuuaa

SEQ ID NO: 504379 - RNA, 19 nt, Artificial Sequence
  Description of Artificial Sequence: Synthetic oligonucleotide
  Sense strand starting at position 3135 of SEQ ID NO: 317689
ucuccucuugaaugugaca

SEQ ID NO: 504380 - RNA, 19 nt, Artificial Sequence
  Description of Artificial Sequence: Synthetic oligonucleotide
  Antisense strand to SEQ ID NO: 504379
ugucacauucaagaggaga

SEQ ID NO: 504381 - RNA, 19 nt, Artificial Sequence
  Description of Artificial Sequence: Synthetic oligonucleotide
  Sense strand starting at position 3547 of SEQ ID NO: 317689
aaaguagcccuauggauua

SEQ ID NO: 504382 - RNA, 19 nt, Artificial Sequence
  Description of Artificial Sequence: Synthetic oligonucleotide
  Antisense strand to SEQ ID NO: 504381
uaauccauagggcuacuuu

SEQ ID NO: 504383 - RNA, 19 nt, Artificial Sequence
  Description of Artificial Sequence: Synthetic oligonucleotide
  Sense strand starting at position 3615 of SEQ ID NO: 317689
ggagaugcauugcaauuua

SEQ ID NO: 504384 - RNA, 19 nt, Artificial Sequence
  Description of Artificial Sequence: Synthetic oligonucleotide
  Antisense strand to SEQ ID NO: 504383
uaaauugcaaugcaucucc

SEQ ID NO: 504385 - RNA, 19 nt, Artificial Sequence
  Description of Artificial Sequence: Synthetic oligonucleotide
  Sense strand starting at position 3881 of SEQ ID NO: 317689
gaagaauugcuugagcacu

SEQ ID NO: 504386 - RNA, 19 nt, Artificial Sequence
  Description of Artificial Sequence: Synthetic oligonucleotide
  Antisense strand to SEQ ID NO: 504385
agugcucaagcaauucuuc

SEQ ID NO: 504387 - RNA, 19 nt, Artificial Sequence
  Description of Artificial Sequence: Synthetic oligonucleotide
  Sense strand starting at position 508 of SEQ ID NO: 317690
gugggugaccuuggauuca

SEQ ID NO: 504388 - RNA, 19 nt, Artificial Sequence
  Description of Artificial Sequence: Synthetic oligonucleotide
  Antisense strand to SEQ ID NO: 504387
ugaauccaaggucacccac

SEQ ID NO: 504389 - RNA, 19 nt, Artificial Sequence
  Description of Artificial Sequence: Synthetic oligonucleotide
  Sense strand starting at position 524 of SEQ ID NO: 317690
ucaugauacuacugcugga

SEQ ID NO: 504390 - RNA, 19 nt, Artificial Sequence
  Description of Artificial Sequence: Synthetic oligonucleotide
  Antisense strand to SEQ ID NO: 504389
uccagcaguaguaucauga

SEQ ID NO: 504391 - RNA, 19 nt, Artificial Sequence
  Description of Artificial Sequence: Synthetic oligonucleotide
  Sense strand starting at position 527 of SEQ ID NO: 317690
ugauacuacugcuggaacu

SEQ ID NO: 504392 - RNA, 19 nt, Artificial Sequence
  Description of Artificial Sequence: Synthetic oligonucleotide
  Antisense strand to SEQ ID NO: 504391
aguuccagcaguaguauca

SEQ ID NO: 504393 - RNA, 19 nt, Artificial Sequence
  Description of Artificial Sequence: Synthetic oligonucleotide
  Sense strand starting at position 556 of SEQ ID NO: 317690
uggagauaacgaggguagu

SEQ ID NO: 504394 - RNA, 19 nt, Artificial Sequence
  Description of Artificial Sequence: Synthetic oligonucleotide
  Antisense strand to SEQ ID NO: 504393
acuacccucguuaucucca

SEQ ID NO: 504395 - RNA, 19 nt, Artificial Sequence
  Description of Artificial Sequence: Synthetic oligonucleotide
  Sense strand starting at position 567 of SEQ ID NO: 317690
aggguagugaccgauucua

SEQ ID NO: 504396 - RNA, 19 nt, Artificial Sequence
  Description of Artificial Sequence: Synthetic oligonucleotide
  Antisense strand to SEQ ID NO: 504395
uagaaucggucacuacccu

SEQ ID NO: 504397 - RNA, 19 nt, Artificial Sequence
  Description of Artificial Sequence: Synthetic oligonucleotide
  Sense strand starting at position 626 of SEQ ID NO: 317690
ccgucaagugcuuggcaua

SEQ ID NO: 504398 - RNA, 19 nt, Artificial Sequence
  Description of Artificial Sequence: Synthetic oligonucleotide
  Antisense strand to SEQ ID NO: 504397
uaugccaagcacuugacgg

SEQ ID NO: 504399 - RNA, 19 nt, Artificial Sequence
  Description of Artificial Sequence: Synthetic oligonucleotide
  Sense strand starting at position 627 of SEQ ID NO: 317690
cgucaagugcuuggcauau

SEQ ID NO: 504400 - RNA, 19 nt, Artificial Sequence
  Description of Artificial Sequence: Synthetic oligonucleotide
  Antisense strand to SEQ ID NO: 504399
auaugccaagcacuugacg

SEQ ID NO: 504401 - RNA, 19 nt, Artificial Sequence
  Description of Artificial Sequence: Synthetic oligonucleotide
  Sense strand starting at position 629 of SEQ ID NO: 317690
ucaagugcuuggcauauga

SEQ ID NO: 504402 - RNA, 19 nt, Artificial Sequence
  Description of Artificial Sequence: Synthetic oligonucleotide
  Antisense strand to SEQ ID NO: 504401
ucauaugccaagcacuuga

SEQ ID NO: 504403 - RNA, 19 nt, Artificial Sequence
  Description of Artificial Sequence: Synthetic oligonucleotide
  Sense strand starting at position 631 of SEQ ID NO: 317690
aagugcuuggcauaugaac

SEQ ID NO: 504404 - RNA, 19 nt, Artificial Sequence
  Description of Artificial Sequence: Synthetic oligonucleotide
  Antisense strand to SEQ ID NO: 504403
guucauaugccaagcacuu

SEQ ID NO: 504405 - RNA, 19 nt, Artificial Sequence
  Description of Artificial Sequence: Synthetic oligonucleotide
  Sense strand starting at position 655 of SEQ ID NO: 317690
gcuguuaguaucucugugu

SEQ ID NO: 504406 - RNA, 19 nt, Artificial Sequence
  Description of Artificial Sequence: Synthetic oligonucleotide
  Antisense strand to SEQ ID NO: 504405
acacagagauacuaacagc

SEQ ID NO: 504407 - RNA, 19 nt, Artificial Sequence
  Description of Artificial Sequence: Synthetic oligonucleotide
  Sense strand starting at position 658 of SEQ ID NO: 317690
guuaguaucucuguguuag

SEQ ID NO: 504408 - RNA, 19 nt, Artificial Sequence
  Description of Artificial Sequence: Synthetic oligonucleotide
  Antisense strand to SEQ ID NO: 504407
cuaacacagagauacuaac

SEQ ID NO: 504409 - RNA, 19 nt, Artificial Sequence
  Description of Artificial Sequence: Synthetic oligonucleotide
  Sense strand starting at position 659 of SEQ ID NO: 317690
uuaguaucucuguguuagg

SEQ ID NO: 504410 - RNA, 19 nt, Artificial Sequence
  Description of Artificial Sequence: Synthetic oligonucleotide
  Antisense strand to SEQ ID NO: 504409
ccuaacacagagauacuaa

SEQ ID NO: 504411 - RNA, 19 nt, Artificial Sequence
  Description of Artificial Sequence: Synthetic oligonucleotide
  Sense strand starting at position 668 of SEQ ID NO: 317690
cuguguuaggccuaucgac

SEQ ID NO: 504412 - RNA, 19 nt, Artificial Sequence
  Description of Artificial Sequence: Synthetic oligonucleotide
  Antisense strand to SEQ ID NO: 504411
gucgauaggccuaacacag

SEQ ID NO: 504413 - RNA, 19 nt, Artificial Sequence
  Description of Artificial Sequence: Synthetic oligonucleotide
  Sense strand starting at position 742 of SEQ ID NO: 317690
cccuaaaugucagagcaca

SEQ ID NO: 504414 - RNA, 19 nt, Artificial Sequence
  Description of Artificial Sequence: Synthetic oligonucleotide
  Antisense strand to SEQ ID NO: 504413
ugugcucugacauuuaggg

SEQ ID NO: 504415 - RNA, 19 nt, Artificial Sequence
  Description of Artificial Sequence: Synthetic oligonucleotide
  Sense strand starting at position 815 of SEQ ID NO: 317690
gaaugugcugcuuagacau

SEQ ID NO: 504416 - RNA, 19 nt, Artificial Sequence
  Description of Artificial Sequence: Synthetic oligonucleotide
  Antisense strand to SEQ ID NO: 504415
augucuaagcagcacauuc

SEQ ID NO: 504417 - RNA, 19 nt, Artificial Sequence
  Description of Artificial Sequence: Synthetic oligonucleotide
  Sense strand starting at position 866 of SEQ ID NO: 317690
ccaggacugguccaguaga

SEQ ID NO: 504418 - RNA, 19 nt, Artificial Sequence
  Description of Artificial Sequence: Synthetic oligonucleotide
  Antisense strand to SEQ ID NO: 504417
ucuacuggaccaguccugg

SEQ ID NO: 504419 - RNA, 19 nt, Artificial Sequence
  Description of Artificial Sequence: Synthetic oligonucleotide
  Sense strand starting at position 1166 of SEQ ID NO: 317690
gaccuuucccgagggaaga

SEQ ID NO: 504420 - RNA, 19 nt, Artificial Sequence
  Description of Artificial Sequence: Synthetic oligonucleotide
  Antisense strand to SEQ ID NO: 504419
ucuucccucgggaaagguc

SEQ ID NO: 504421 - RNA, 19 nt, Artificial Sequence
  Description of Artificial Sequence: Synthetic oligonucleotide
  Sense strand starting at position 1234 of SEQ ID NO: 317690
gcaggcauggucuggauga

SEQ ID NO: 504422 - RNA, 19 nt, Artificial Sequence
  Description of Artificial Sequence: Synthetic oligonucleotide
  Antisense strand to SEQ ID NO: 504421
ucauccagaccaugccugc

SEQ ID NO: 504423 - RNA, 19 nt, Artificial Sequence
  Description of Artificial Sequence: Synthetic oligonucleotide
  Sense strand starting at position 1236 of SEQ ID NO: 317690
aggcauggucuggaugagu

SEQ ID NO: 504424 - RNA, 19 nt, Artificial Sequence
  Description of Artificial Sequence: Synthetic oligonucleotide
  Antisense strand to SEQ ID NO: 504423
acucauccagaccaugccu

SEQ ID NO: 504425 - RNA, 19 nt, Artificial Sequence
  Description of Artificial Sequence: Synthetic oligonucleotide
  Sense strand starting at position 1265 of SEQ ID NO: 317690
ccgccuuugcaguccugaa

SEQ ID NO: 504426 - RNA, 19 nt, Artificial Sequence
  Description of Artificial Sequence: Synthetic oligonucleotide
  Antisense strand to SEQ ID NO: 504425
uucaggacugcaaaggcgg

SEQ ID NO: 504427 - RNA, 19 nt, Artificial Sequence
  Description of Artificial Sequence: Synthetic oligonucleotide
  Sense strand starting at position 1266 of SEQ ID NO: 317690
cgccuuugcaguccugaau

SEQ ID NO: 504428 - RNA, 19 nt, Artificial Sequence
  Description of Artificial Sequence: Synthetic oligonucleotide
  Antisense strand to SEQ ID NO: 504427
auucaggacugcaaaggcg

SEQ ID NO: 504429 - RNA, 19 nt, Artificial Sequence
  Description of Artificial Sequence: Synthetic oligonucleotide
  Sense strand starting at position 1664 of SEQ ID NO: 317690
gggccguuccguggucaca

SEQ ID NO: 504430 - RNA, 19 nt, Artificial Sequence
  Description of Artificial Sequence: Synthetic oligonucleotide
  Antisense strand to SEQ ID NO: 504429
ugugaccacggaacggccc

SEQ ID NO: 504431 - RNA, 19 nt, Artificial Sequence
  Description of Artificial Sequence: Synthetic oligonucleotide
  Sense strand starting at position 2329 of SEQ ID NO: 317690
aucguagugcuuuggugua

SEQ ID NO: 504432 - RNA, 19 nt, Artificial Sequence
  Description of Artificial Sequence: Synthetic oligonucleotide
  Antisense strand to SEQ ID NO: 504431
uacaccaaagcacuacgau

SEQ ID NO: 504433 - RNA, 19 nt, Artificial Sequence
  Description of Artificial Sequence: Synthetic oligonucleotide
  Sense strand starting at position 2341 of SEQ ID NO: 317690
ugguguagccugcguucaa

SEQ ID NO: 504434 - RNA, 19 nt, Artificial Sequence
  Description of Artificial Sequence: Synthetic oligonucleotide
  Antisense strand to SEQ ID NO: 504433
uugaacgcaggcuacacca

SEQ ID NO: 504435 - RNA, 19 nt, Artificial Sequence
  Description of Artificial Sequence: Synthetic oligonucleotide
  Sense strand starting at position 2342 of SEQ ID NO: 317690
gguguagccugcguucaaa

SEQ ID NO: 504436 - RNA, 19 nt, Artificial Sequence
  Description of Artificial Sequence: Synthetic oligonucleotide
  Antisense strand to SEQ ID NO: 504435
uuugaacgcaggcuacacc

SEQ ID NO: 504437 - RNA, 19 nt, Artificial Sequence
  Description of Artificial Sequence: Synthetic oligonucleotide
  Sense strand starting at position 2367 of SEQ ID NO: 317690
cgaucugucucccggucau

SEQ ID NO: 504438 - RNA, 19 nt, Artificial Sequence
  Description of Artificial Sequence: Synthetic oligonucleotide
  Antisense strand to SEQ ID NO: 504437
augaccgggagacagaucg

SEQ ID NO: 504439 - RNA, 19 nt, Artificial Sequence
  Description of Artificial Sequence: Synthetic oligonucleotide
  Sense strand starting at position 2537 of SEQ ID NO: 317690
ccuggucaggcugaauuaa

SEQ ID NO: 504440 - RNA, 19 nt, Artificial Sequence
  Description of Artificial Sequence: Synthetic oligonucleotide
  Antisense strand to SEQ ID NO: 504439
uuaauucagccugaccagg

SEQ ID NO: 504441 - RNA, 19 nt, Artificial Sequence
  Description of Artificial Sequence: Synthetic oligonucleotide
  Sense strand starting at position 2559 of SEQ ID NO: 317690
gugucaggacuucagaaug

SEQ ID NO: 504442 - RNA, 19 nt, Artificial Sequence
  Description of Artificial Sequence: Synthetic oligonucleotide
  Antisense strand to SEQ ID NO: 504441
cauucugaaguccugacac

SEQ ID NO: 504443 - RNA, 19 nt, Artificial Sequence
  Description of Artificial Sequence: Synthetic oligonucleotide
  Sense strand starting at position 2570 of SEQ ID NO: 317690
ucagaauguuuagggcuga

SEQ ID NO: 504444 - RNA, 19 nt, Artificial Sequence
  Description of Artificial Sequence: Synthetic oligonucleotide
  Antisense strand to SEQ ID NO: 504443
ucagcccuaaacauucuga

SEQ ID NO: 504445 - RNA, 19 nt, Artificial Sequence
  Description of Artificial Sequence: Synthetic oligonucleotide
  Sense strand starting at position 2583 of SEQ ID NO: 317690
ggcugacugccuuguccua

SEQ ID NO: 504446 - RNA, 19 nt, Artificial Sequence
  Description of Artificial Sequence: Synthetic oligonucleotide
  Antisense strand to SEQ ID NO: 504445
uaggacaaggcagucagcc

SEQ ID NO: 504447 - RNA, 19 nt, Artificial Sequence
  Description of Artificial Sequence: Synthetic oligonucleotide
  Sense strand starting at position 2732 of SEQ ID NO: 317690
ggguacaugggucgagaga

SEQ ID NO: 504448 - RNA, 19 nt, Artificial Sequence
  Description of Artificial Sequence: Synthetic oligonucleotide
  Antisense strand to SEQ ID NO: 504447
ucucucgacccauguaccc

SEQ ID NO: 504449 - RNA, 19 nt, Artificial Sequence
  Description of Artificial Sequence: Synthetic oligonucleotide
  Sense strand starting at position 2865 of SEQ ID NO: 317690
ccuauuccuucugauuugu

SEQ ID NO: 504450 - RNA, 19 nt, Artificial Sequence
  Description of Artificial Sequence: Synthetic oligonucleotide
  Antisense strand to SEQ ID NO: 504449
acaaaucagaaggaauagg

SEQ ID NO: 504451 - RNA, 19 nt, Artificial Sequence
  Description of Artificial Sequence: Synthetic oligonucleotide
  Sense strand starting at position 2948 of SEQ ID NO: 317690
ucuuauuucuuccggcauu

SEQ ID NO: 504452 - RNA, 19 nt, Artificial Sequence
  Description of Artificial Sequence: Synthetic oligonucleotide
  Antisense strand to SEQ ID NO: 504451
aaugccggaagaaauaaga

SEQ ID NO: 504453 - RNA, 19 nt, Artificial Sequence
  Description of Artificial Sequence: Synthetic oligonucleotide
  Sense strand starting at position 3072 of SEQ ID NO: 317690
agaauagccugccuaacau

SEQ ID NO: 504454 - RNA, 19 nt, Artificial Sequence
  Description of Artificial Sequence: Synthetic oligonucleotide
  Antisense strand to SEQ ID NO: 504453
auguuaggcaggcuauucu

SEQ ID NO: 504455 - RNA, 19 nt, Artificial Sequence
  Description of Artificial Sequence: Synthetic oligonucleotide
  Sense strand starting at position 3699 of SEQ ID NO: 317690
agaaauaggugcucucaca

SEQ ID NO: 504456 - RNA, 19 nt, Artificial Sequence
  Description of Artificial Sequence: Synthetic oligonucleotide
  Antisense strand to SEQ ID NO: 504455
ugugagagcaccuauuucu

SEQ ID NO: 504457 - RNA, 19 nt, Artificial Sequence
  Description of Artificial Sequence: Synthetic oligonucleotide
  Sense strand starting at position 3750 of SEQ ID NO: 317690
agacauugguaccacaaau

SEQ ID NO: 504458 - RNA, 19 nt, Artificial Sequence
  Description of Artificial Sequence: Synthetic oligonucleotide
  Antisense strand to SEQ ID NO: 504457
auuugugguaccaaugucu

SEQ ID NO: 504459 - RNA, 19 nt, Artificial Sequence
  Description of Artificial Sequence: Synthetic oligonucleotide
  Sense strand starting at position 3761 of SEQ ID NO: 317690
ccacaaauaucagggauaa

SEQ ID NO: 504460 - RNA, 19 nt, Artificial Sequence
  Description of Artificial Sequence: Synthetic oligonucleotide
  Antisense strand to SEQ ID NO: 504459
uuaucccugauauuugugg

SEQ ID NO: 504461 - RNA, 19 nt, Artificial Sequence
  Description of Artificial Sequence: Synthetic oligonucleotide
  Sense strand starting at position 3913 of SEQ ID NO: 317690
aagaaucaaugccggaaga

SEQ ID NO: 504462 - RNA, 19 nt, Artificial Sequence
  Description of Artificial Sequence: Synthetic oligonucleotide
  Antisense strand to SEQ ID NO: 504461
ucuuccggcauugauucuu

SEQ ID NO: 504463 - RNA, 19 nt, Artificial Sequence
  Description of Artificial Sequence: Synthetic oligonucleotide
  Sense strand starting at position 3914 of SEQ ID NO: 317690
agaaucaaugccggaagaa

SEQ ID NO: 504464 - RNA, 19 nt, Artificial Sequence
  Description of Artificial Sequence: Synthetic oligonucleotide
  Antisense strand to SEQ ID NO: 504463
uucuuccggcauugauucu

SEQ ID NO: 504465 - RNA, 19 nt, Artificial Sequence
  Description of Artificial Sequence: Synthetic oligonucleotide
  Sense strand starting at position 3951 of SEQ ID NO: 317690
aucacuaucugggaggaga

SEQ ID NO: 504466 - RNA, 19 nt, Artificial Sequence
  Description of Artificial Sequence: Synthetic oligonucleotide
  Antisense strand to SEQ ID NO: 504465
ucuccucccagauagugau

SEQ ID NO: 504467 - RNA, 19 nt, Artificial Sequence
  Description of Artificial Sequence: Synthetic oligonucleotide
  Sense strand starting at position 22 of SEQ ID NO: 317691
gaaauauugcuaggaugac

SEQ ID NO: 504468 - RNA, 19 nt, Artificial Sequence
  Description of Artificial Sequence: Synthetic oligonucleotide
  Antisense strand to SEQ ID NO: 504467
gucauccuagcaauauuuc

SEQ ID NO: 504469 - RNA, 19 nt, Artificial Sequence
  Description of Artificial Sequence: Synthetic oligonucleotide
  Sense strand starting at position 35 of SEQ ID NO: 317691
gaugacuuucuagggcaua

SEQ ID NO: 504470 - RNA, 19 nt, Artificial Sequence
  Description of Artificial Sequence: Synthetic oligonucleotide
  Antisense strand to SEQ ID NO: 504469
uaugcccuagaaagucauc

SEQ ID NO: 504471 - RNA, 19 nt, Artificial Sequence
  Description of Artificial Sequence: Synthetic oligonucleotide
  Sense strand starting at position 272 of SEQ ID NO: 317691
guacauaugcaguagagau

SEQ ID NO: 504472 - RNA, 19 nt, Artificial Sequence
  Description of Artificial Sequence: Synthetic oligonucleotide
  Antisense strand to SEQ ID NO: 504471
aucucuacugcauauguac

SEQ ID NO: 504473 - RNA, 19 nt, Artificial Sequence
  Description of Artificial Sequence: Synthetic oligonucleotide
  Sense strand starting at position 387 of SEQ ID NO: 317691
gagccacuguaauuagaaa

SEQ ID NO: 504474 - RNA, 19 nt, Artificial Sequence
  Description of Artificial Sequence: Synthetic oligonucleotide
  Antisense strand to SEQ ID NO: 504473
uuucuaauuacaguggcuc

SEQ ID NO: 504475 - RNA, 19 nt, Artificial Sequence
  Description of Artificial Sequence: Synthetic oligonucleotide
  Sense strand starting at position 495 of SEQ ID NO: 317691
acugauaacuuauugugaa

SEQ ID NO: 504476 - RNA, 19 nt, Artificial Sequence
  Description of Artificial Sequence: Synthetic oligonucleotide
  Antisense strand to SEQ ID NO: 504475
uucacaauaaguuaucagu

SEQ ID NO: 504477 - RNA, 19 nt, Artificial Sequence
  Description of Artificial Sequence: Synthetic oligonucleotide
  Sense strand starting at position 678 of SEQ ID NO: 317691
acagaaugucauggacuuu

SEQ ID NO: 504478 - RNA, 19 nt, Artificial Sequence
  Description of Artificial Sequence: Synthetic oligonucleotide
  Antisense strand to SEQ ID NO: 504477
aaaguccaugacauucugu

SEQ ID NO: 504479 - RNA, 19 nt, Artificial Sequence
  Description of Artificial Sequence: Synthetic oligonucleotide
  Sense strand starting at position 720 of SEQ ID NO: 317691
agagucuaguaagucuaaa

SEQ ID NO: 504480 - RNA, 19 nt, Artificial Sequence
  Description of Artificial Sequence: Synthetic oligonucleotide
  Antisense strand to SEQ ID NO: 504479
uuuagacuuacuagacucu

SEQ ID NO: 504481 - RNA, 19 nt, Artificial Sequence
  Description of Artificial Sequence: Synthetic oligonucleotide
  Sense strand starting at position 804 of SEQ ID NO: 317691
acuguucugcauuagauau

SEQ ID NO: 504482 - RNA, 19 nt, Artificial Sequence
  Description of Artificial Sequence: Synthetic oligonucleotide
  Antisense strand to SEQ ID NO: 504481
auaucuaaugcagaacagu

SEQ ID NO: 504483 - RNA, 19 nt, Artificial Sequence
  Description of Artificial Sequence: Synthetic oligonucleotide
  Sense strand starting at position 848 of SEQ ID NO: 317691
guacgaagcgauuacuauu

SEQ ID NO: 504484 - RNA, 19 nt, Artificial Sequence
  Description of Artificial Sequence: Synthetic oligonucleotide
  Antisense strand to SEQ ID NO: 504483
aauaguaaucgcuucguac

SEQ ID NO: 504485 - RNA, 19 nt, Artificial Sequence
  Description of Artificial Sequence: Synthetic oligonucleotide
  Sense strand starting at position 854 of SEQ ID NO: 317691
agcgauuacuauucuaagu

SEQ ID NO: 504486 - RNA, 19 nt, Artificial Sequence
  Description of Artificial Sequence: Synthetic oligonucleotide
  Antisense strand to SEQ ID NO: 504485
acuuagaauaguaaucgcu

SEQ ID NO: 504487 - RNA, 19 nt, Artificial Sequence
  Description of Artificial Sequence: Synthetic oligonucleotide
  Sense strand starting at position 1015 of SEQ ID NO: 317691
aauaguauggugugauaag

SEQ ID NO: 504488 - RNA, 19 nt, Artificial Sequence
  Description of Artificial Sequence: Synthetic oligonucleotide
  Antisense strand to SEQ ID NO: 504487
cuuaucacaccauacuauu

SEQ ID NO: 504489 - RNA, 19 nt, Artificial Sequence
  Description of Artificial Sequence: Synthetic oligonucleotide
  Sense strand starting at position 1062 of SEQ ID NO: 317691
agagccauaacgugacaua

SEQ ID NO: 504490 - RNA, 19 nt, Artificial Sequence
  Description of Artificial Sequence: Synthetic oligonucleotide
  Antisense strand to SEQ ID NO: 504489
uaugucacguuauggcucu

SEQ ID NO: 504491 - RNA, 19 nt, Artificial Sequence
  Description of Artificial Sequence: Synthetic oligonucleotide
  Sense strand starting at position 1063 of SEQ ID NO: 317691
gagccauaacgugacauaa

SEQ ID NO: 504492 - RNA, 19 nt, Artificial Sequence
  Description of Artificial Sequence: Synthetic oligonucleotide
  Antisense strand to SEQ ID NO: 504491
uuaugucacguuauggcuc

SEQ ID NO: 504493 - RNA, 19 nt, Artificial Sequence
  Description of Artificial Sequence: Synthetic oligonucleotide
  Sense strand starting at position 1886 of SEQ ID NO: 317691
auagaaucugugugccaua

SEQ ID NO: 504494 - RNA, 19 nt, Artificial Sequence
  Description of Artificial Sequence: Synthetic oligonucleotide
  Antisense strand to SEQ ID NO: 504493
uauggcacacagauucuau

SEQ ID NO: 504495 - RNA, 19 nt, Artificial Sequence
  Description of Artificial Sequence: Synthetic oligonucleotide
  Sense strand starting at position 2064 of SEQ ID NO: 317691
acuauaucuggugauucuu

SEQ ID NO: 504496 - RNA, 19 nt, Artificial Sequence
  Description of Artificial Sequence: Synthetic oligonucleotide
  Antisense strand to SEQ ID NO: 504495
aagaaucaccagauauagu

SEQ ID NO: 504497 - RNA, 19 nt, Artificial Sequence
  Description of Artificial Sequence: Synthetic oligonucleotide
  Sense strand starting at position 2123 of SEQ ID NO: 317691
cuguaucuguacucccaga

SEQ ID NO: 504498 - RNA, 19 nt, Artificial Sequence
  Description of Artificial Sequence: Synthetic oligonucleotide
  Antisense strand to SEQ ID NO: 504497
ucugggaguacagauacag

SEQ ID NO: 504499 - RNA, 19 nt, Artificial Sequence
  Description of Artificial Sequence: Synthetic oligonucleotide
  Sense strand starting at position 2243 of SEQ ID NO: 317691
cuuugacaguccuuagcau

SEQ ID NO: 504500 - RNA, 19 nt, Artificial Sequence
  Description of Artificial Sequence: Synthetic oligonucleotide
  Antisense strand to SEQ ID NO: 504499
augcuaaggacugucaaag

SEQ ID NO: 504501 - RNA, 19 nt, Artificial Sequence
  Description of Artificial Sequence: Synthetic oligonucleotide
  Sense strand starting at position 2269 of SEQ ID NO: 317691
cucucuuaagcaggauuaa

SEQ ID NO: 504502 - RNA, 19 nt, Artificial Sequence
  Description of Artificial Sequence: Synthetic oligonucleotide
  Antisense strand to SEQ ID NO: 504501
uuaauccugcuuaagagag

SEQ ID NO: 504503 - RNA, 19 nt, Artificial Sequence
  Description of Artificial Sequence: Synthetic oligonucleotide
  Sense strand starting at position 2284 of SEQ ID NO: 317691
uuaagaagacucugaguuu

SEQ ID NO: 504504 - RNA, 19 nt, Artificial Sequence
  Description of Artificial Sequence: Synthetic oligonucleotide
  Antisense strand to SEQ ID NO: 504503
aaacucagagucuucuuaa

SEQ ID NO: 504505 - RNA, 19 nt, Artificial Sequence
  Description of Artificial Sequence: Synthetic oligonucleotide
  Sense strand starting at position 2346 of SEQ ID NO: 317691
aaaguaugauacguuaaug

SEQ ID NO: 504506 - RNA, 19 nt, Artificial Sequence
  Description of Artificial Sequence: Synthetic oligonucleotide
  Antisense strand to SEQ ID NO: 504505
cauuaacguaucauacuuu

SEQ ID NO: 504507 - RNA, 19 nt, Artificial Sequence
  Description of Artificial Sequence: Synthetic oligonucleotide
  Sense strand starting at position 2356 of SEQ ID NO: 317691
acguuaaugccauauguac

SEQ ID NO: 504508 - RNA, 19 nt, Artificial Sequence
  Description of Artificial Sequence: Synthetic oligonucleotide
  Antisense strand to SEQ ID NO: 504507
guacauauggcauuaacgu

SEQ ID NO: 504509 - RNA, 19 nt, Artificial Sequence
  Description of Artificial Sequence: Synthetic oligonucleotide
  Sense strand starting at position 2367 of SEQ ID NO: 317691
auauguacacaguaauguu

SEQ ID NO: 504510 - RNA, 19 nt, Artificial Sequence
  Description of Artificial Sequence: Synthetic oligonucleotide
  Antisense strand to SEQ ID NO: 504509
aacauuacuguguacauau

SEQ ID NO: 504511 - RNA, 19 nt, Artificial Sequence
  Description of Artificial Sequence: Synthetic oligonucleotide
  Sense strand starting at position 2432 of SEQ ID NO: 317691
guaucauucccacagugac

SEQ ID NO: 504512 - RNA, 19 nt, Artificial Sequence
  Description of Artificial Sequence: Synthetic oligonucleotide
  Antisense strand to SEQ ID NO: 504511
gucacugugggaaugauac

SEQ ID NO: 504513 - RNA, 19 nt, Artificial Sequence
  Description of Artificial Sequence: Synthetic oligonucleotide
  Sense strand starting at position 2509 of SEQ ID NO: 317691
gcuaaaugguaaucagguu

SEQ ID NO: 504514 - RNA, 19 nt, Artificial Sequence
  Description of Artificial Sequence: Synthetic oligonucleotide
  Antisense strand to SEQ ID NO: 504513
aaccugauuaccauuuagc

SEQ ID NO: 504515 - RNA, 19 nt, Artificial Sequence
  Description of Artificial Sequence: Synthetic oligonucleotide
  Sense strand starting at position 2703 of SEQ ID NO: 317691
ugguaaucaugagugacag

SEQ ID NO: 504516 - RNA, 19 nt, Artificial Sequence
  Description of Artificial Sequence: Synthetic oligonucleotide
  Antisense strand to SEQ ID NO: 504515
cugucacucaugauuacca

SEQ ID NO: 504517 - RNA, 19 nt, Artificial Sequence
  Description of Artificial Sequence: Synthetic oligonucleotide
  Sense strand starting at position 2704 of SEQ ID NO: 317691
gguaaucaugagugacagu

SEQ ID NO: 504518 - RNA, 19 nt, Artificial Sequence
  Description of Artificial Sequence: Synthetic oligonucleotide
  Antisense strand to SEQ ID NO: 504517
acugucacucaugauuacc

SEQ ID NO: 504519 - RNA, 19 nt, Artificial Sequence
  Description of Artificial Sequence: Synthetic oligonucleotide
  Sense strand starting at position 2857 of SEQ ID NO: 317691
agaguuaggcguuaucaug

SEQ ID NO: 504520 - RNA, 19 nt, Artificial Sequence
  Description of Artificial Sequence: Synthetic oligonucleotide
  Antisense strand to SEQ ID NO: 504519
caugauaacgccuaacucu

SEQ ID NO: 504521 - RNA, 19 nt, Artificial Sequence
  Description of Artificial Sequence: Synthetic oligonucleotide
  Sense strand starting at position 2864 of SEQ ID NO: 317691
ggcguuaucauguuggcuu

SEQ ID NO: 504522 - RNA, 19 nt, Artificial Sequence
  Description of Artificial Sequence: Synthetic oligonucleotide
  Antisense strand to SEQ ID NO: 504521
aagccaacaugauaacgcc

SEQ ID NO: 504523 - RNA, 19 nt, Artificial Sequence
  Description of Artificial Sequence: Synthetic oligonucleotide
  Sense strand starting at position 2871 of SEQ ID NO: 317691
ucauguuggcuugacucau

SEQ ID NO: 504524 - RNA, 19 nt, Artificial Sequence
  Description of Artificial Sequence: Synthetic oligonucleotide
  Antisense strand to SEQ ID NO: 504523
augagucaagccaacauga

SEQ ID NO: 504525 - RNA, 19 nt, Artificial Sequence
  Description of Artificial Sequence: Synthetic oligonucleotide
  Sense strand starting at position 2877 of SEQ ID NO: 317691
uggcuugacucauuuagca

SEQ ID NO: 504526 - RNA, 19 nt, Artificial Sequence
  Description of Artificial Sequence: Synthetic oligonucleotide
  Antisense strand to SEQ ID NO: 504525
ugcuaaaugagucaagcca

SEQ ID NO: 504527 - RNA, 19 nt, Artificial Sequence
  Description of Artificial Sequence: Synthetic oligonucleotide
  Sense strand starting at position 2924 of SEQ ID NO: 317691
ccaauucuaucagugggaa

SEQ ID NO: 504528 - RNA, 19 nt, Artificial Sequence
  Description of Artificial Sequence: Synthetic oligonucleotide
  Antisense strand to SEQ ID NO: 504527
uucccacugauagaauugg

SEQ ID NO: 504529 - RNA, 19 nt, Artificial Sequence
  Description of Artificial Sequence: Synthetic oligonucleotide
  Sense strand starting at position 2925 of SEQ ID NO: 317691
caauucuaucagugggaaa

SEQ ID NO: 504530 - RNA, 19 nt, Artificial Sequence
  Description of Artificial Sequence: Synthetic oligonucleotide
  Antisense strand to SEQ ID NO: 504529
uuucccacugauagaauug

SEQ ID NO: 504531 - RNA, 19 nt, Artificial Sequence
  Description of Artificial Sequence: Synthetic oligonucleotide
  Sense strand starting at position 2927 of SEQ ID NO: 317691
auucuaucagugggaaauc

SEQ ID NO: 504532 - RNA, 19 nt, Artificial Sequence
  Description of Artificial Sequence: Synthetic oligonucleotide
  Antisense strand to SEQ ID NO: 504531
gauuucccacugauagaau

SEQ ID NO: 504533 - RNA, 19 nt, Artificial Sequence
  Description of Artificial Sequence: Synthetic oligonucleotide
  Sense strand starting at position 2999 of SEQ ID NO: 317691
guaaguaugcaccaaggaa

SEQ ID NO: 504534 - RNA, 19 nt, Artificial Sequence
  Description of Artificial Sequence: Synthetic oligonucleotide
  Antisense strand to SEQ ID NO: 504533
uuccuuggugcauacuuac

SEQ ID NO: 504535 - RNA, 19 nt, Artificial Sequence
  Description of Artificial Sequence: Synthetic oligonucleotide
  Sense strand starting at position 3242 of SEQ ID NO: 317691
guaugaugcucauuaccua

SEQ ID NO: 504536 - RNA, 19 nt, Artificial Sequence
  Description of Artificial Sequence: Synthetic oligonucleotide
  Antisense strand to SEQ ID NO: 504535
uagguaaugagcaucauac

SEQ ID NO: 504537 - RNA, 19 nt, Artificial Sequence
  Description of Artificial Sequence: Synthetic oligonucleotide
  Sense strand starting at position 3284 of SEQ ID NO: 317691
accugcauaugugucuaaa

SEQ ID NO: 504538 - RNA, 19 nt, Artificial Sequence
  Description of Artificial Sequence: Synthetic oligonucleotide
  Antisense strand to SEQ ID NO: 504537
uuuagacacauaugcaggu

SEQ ID NO: 504539 - RNA, 19 nt, Artificial Sequence
  Description of Artificial Sequence: Synthetic oligonucleotide
  Sense strand starting at position 3445 of SEQ ID NO: 317691
gcagauacauauguauaca

SEQ ID NO: 504540 - RNA, 19 nt, Artificial Sequence
  Description of Artificial Sequence: Synthetic oligonucleotide
  Antisense strand to SEQ ID NO: 504539
uguauacauauguaucugc

SEQ ID NO: 504541 - RNA, 19 nt, Artificial Sequence
  Description of Artificial Sequence: Synthetic oligonucleotide
  Sense strand starting at position 3762 of SEQ ID NO: 317691
acuauuuguuggcuuagca

SEQ ID NO: 504542 - RNA, 19 nt, Artificial Sequence
  Description of Artificial Sequence: Synthetic oligonucleotide
  Antisense strand to SEQ ID NO: 504541
ugcuaagccaacaaauagu

SEQ ID NO: 504543 - RNA, 19 nt, Artificial Sequence
  Description of Artificial Sequence: Synthetic oligonucleotide
  Sense strand starting at position 3907 of SEQ ID NO: 317691
aguaucaugcaauaugcuu

SEQ ID NO: 504544 - RNA, 19 nt, Artificial Sequence
  Description of Artificial Sequence: Synthetic oligonucleotide
  Antisense strand to SEQ ID NO: 504543
aagcauauugcaugauacu

SEQ ID NO: 504545 - RNA, 19 nt, Artificial Sequence
  Description of Artificial Sequence: Synthetic oligonucleotide
  Sense strand starting at position 3944 of SEQ ID NO: 317691
gguacuuccugauucuaaa

SEQ ID NO: 504546 - RNA, 19 nt, Artificial Sequence
  Description of Artificial Sequence: Synthetic oligonucleotide
  Antisense strand to SEQ ID NO: 504545
uuuagaaucaggaaguacc

SEQ ID NO: 504547 - RNA, 19 nt, Artificial Sequence
  Description of Artificial Sequence: Synthetic oligonucleotide
  Sense strand starting at position 32 of SEQ ID NO: 317692
guuaguaaauuggcaaaua

SEQ ID NO: 504548 - RNA, 19 nt, Artificial Sequence
  Description of Artificial Sequence: Synthetic oligonucleotide
  Antisense strand to SEQ ID NO: 504547
uauuugccaauuuacuaac

SEQ ID NO: 504549 - RNA, 19 nt, Artificial Sequence
  Description of Artificial Sequence: Synthetic oligonucleotide
  Sense strand starting at position 111 of SEQ ID NO: 317692
uaugccuaucuagagguua

SEQ ID NO: 504550 - RNA, 19 nt, Artificial Sequence
  Description of Artificial Sequence: Synthetic oligonucleotide
  Antisense strand to SEQ ID NO: 504549
uaaccucuagauaggcaua

SEQ ID NO: 504551 - RNA, 19 nt, Artificial Sequence
  Description of Artificial Sequence: Synthetic oligonucleotide
  Sense strand starting at position 122 of SEQ ID NO: 317692
agagguuagccugaguaau

SEQ ID NO: 504552 - RNA, 19 nt, Artificial Sequence
  Description of Artificial Sequence: Synthetic oligonucleotide
  Antisense strand to SEQ ID NO: 504551
auuacucaggcuaaccucu

SEQ ID NO: 504553 - RNA, 19 nt, Artificial Sequence
  Description of Artificial Sequence: Synthetic oligonucleotide
  Sense strand starting at position 124 of SEQ ID NO: 317692
agguuagccugaguaauua

SEQ ID NO: 504554 - RNA, 19 nt, Artificial Sequence
  Description of Artificial Sequence: Synthetic oligonucleotide
  Antisense strand to SEQ ID NO: 504553
uaauuacucaggcuaaccu

SEQ ID NO: 504555 - RNA, 19 nt, Artificial Sequence
  Description of Artificial Sequence: Synthetic oligonucleotide
  Sense strand starting at position 132 of SEQ ID NO: 317692
cugaguaauuaaccagagu

SEQ ID NO: 504556 - RNA, 19 nt, Artificial Sequence
  Description of Artificial Sequence: Synthetic oligonucleotide
  Antisense strand to SEQ ID NO: 504555
acucugguuaauuacucag

SEQ ID NO: 504557 - RNA, 19 nt, Artificial Sequence
  Description of Artificial Sequence: Synthetic oligonucleotide
  Sense strand starting at position 195 of SEQ ID NO: 317692
caaagacagcuuugugaug

SEQ ID NO: 504558 - RNA, 19 nt, Artificial Sequence
  Description of Artificial Sequence: Synthetic oligonucleotide
  Antisense strand to SEQ ID NO: 504557
caucacaaagcugucuuug

SEQ ID NO: 504559 - RNA, 19 nt, Artificial Sequence
  Description of Artificial Sequence: Synthetic oligonucleotide
  Sense strand starting at position 502 of SEQ ID NO: 317692
uuguauugugaagaauguu

SEQ ID NO: 504560 - RNA, 19 nt, Artificial Sequence
  Description of Artificial Sequence: Synthetic oligonucleotide
  Antisense strand to SEQ ID NO: 504559
aacauucuucacaauacaa

SEQ ID NO: 504561 - RNA, 19 nt, Artificial Sequence
  Description of Artificial Sequence: Synthetic oligonucleotide
  Sense strand starting at position 548 of SEQ ID NO: 317692
uacaguacugggugaauaa

SEQ ID NO: 504562 - RNA, 19 nt, Artificial Sequence
  Description of Artificial Sequence: Synthetic oligonucleotide
  Antisense strand to SEQ ID NO: 504561
uuauucacccaguacugua

SEQ ID NO: 504563 - RNA, 19 nt, Artificial Sequence
  Description of Artificial Sequence: Synthetic oligonucleotide
  Sense strand starting at position 846 of SEQ ID NO: 317692
guguaauuccuagaaggca

SEQ ID NO: 504564 - RNA, 19 nt, Artificial Sequence
  Description of Artificial Sequence: Synthetic oligonucleotide
  Antisense strand to SEQ ID NO: 504563
ugccuucuaggaauuacac

SEQ ID NO: 504565 - RNA, 19 nt, Artificial Sequence
  Description of Artificial Sequence: Synthetic oligonucleotide
  Sense strand starting at position 931 of SEQ ID NO: 317692
gagggucaauguuucuaac

SEQ ID NO: 504566 - RNA, 19 nt, Artificial Sequence
  Description of Artificial Sequence: Synthetic oligonucleotide
  Antisense strand to SEQ ID NO: 504565
guuagaaacauugacccuc

SEQ ID NO: 504567 - RNA, 19 nt, Artificial Sequence
  Description of Artificial Sequence: Synthetic oligonucleotide
  Sense strand starting at position 1027 of SEQ ID NO: 317692
agucucuguaaaugaggau

SEQ ID NO: 504568 - RNA, 19 nt, Artificial Sequence
  Description of Artificial Sequence: Synthetic oligonucleotide
  Antisense strand to SEQ ID NO: 504567
auccucauuuacagagacu

SEQ ID NO: 504569 - RNA, 19 nt, Artificial Sequence
  Description of Artificial Sequence: Synthetic oligonucleotide
  Sense strand starting at position 1107 of SEQ ID NO: 317692
cgcauaauuccacaaagac

SEQ ID NO: 504570 - RNA, 19 nt, Artificial Sequence
  Description of Artificial Sequence: Synthetic oligonucleotide
  Antisense strand to SEQ ID NO: 504569
gucuuuguggaauuaugcg

SEQ ID NO: 504571 - RNA, 19 nt, Artificial Sequence
  Description of Artificial Sequence: Synthetic oligonucleotide
  Sense strand starting at position 1224 of SEQ ID NO: 317692
guuccaauccgugcacagu

SEQ ID NO: 504572 - RNA, 19 nt, Artificial Sequence
  Description of Artificial Sequence: Synthetic oligonucleotide
  Antisense strand to SEQ ID NO: 504571
acugugcacggauuggaac

SEQ ID NO: 504573 - RNA, 19 nt, Artificial Sequence
  Description of Artificial Sequence: Synthetic oligonucleotide
  Sense strand starting at position 1379 of SEQ ID NO: 317692
aggucauagcuuuagagau

SEQ ID NO: 504574 - RNA, 19 nt, Artificial Sequence
  Description of Artificial Sequence: Synthetic oligonucleotide
  Antisense strand to SEQ ID NO: 504573
aucucuaaagcuaugaccu

SEQ ID NO: 504575 - RNA, 19 nt, Artificial Sequence
  Description of Artificial Sequence: Synthetic oligonucleotide
  Sense strand starting at position 1858 of SEQ ID NO: 317692
ccagauaauccauguacag

SEQ ID NO: 504576 - RNA, 19 nt, Artificial Sequence
  Description of Artificial Sequence: Synthetic oligonucleotide
  Antisense strand to SEQ ID NO: 504575
cuguacauggauuaucugg

SEQ ID NO: 504577 - RNA, 19 nt, Artificial Sequence
  Description of Artificial Sequence: Synthetic oligonucleotide
  Sense strand starting at position 1873 of SEQ ID NO: 317692
acagaaacgccucaguuau

SEQ ID NO: 504578 - RNA, 19 nt, Artificial Sequence
  Description of Artificial Sequence: Synthetic oligonucleotide
  Antisense strand to SEQ ID NO: 504577
auaacugaggcguuucugu

SEQ ID NO: 504579 - RNA, 19 nt, Artificial Sequence
  Description of Artificial Sequence: Synthetic oligonucleotide
  Sense strand starting at position 2023 of SEQ ID NO: 317692
cgacuagccggagauuaca

SEQ ID NO: 504580 - RNA, 19 nt, Artificial Sequence
  Description of Artificial Sequence: Synthetic oligonucleotide
  Antisense strand to SEQ ID NO: 504579
uguaaucuccggcuagucg

SEQ ID NO: 504581 - RNA, 19 nt, Artificial Sequence
  Description of Artificial Sequence: Synthetic oligonucleotide
  Sense strand starting at position 2461 of SEQ ID NO: 317692
gaaagaagugugugaaagu

SEQ ID NO: 504582 - RNA, 19 nt, Artificial Sequence
  Description of Artificial Sequence: Synthetic oligonucleotide
  Antisense strand to SEQ ID NO: 504581
acuuucacacacuucuuuc

SEQ ID NO: 504583 - RNA, 19 nt, Artificial Sequence
  Description of Artificial Sequence: Synthetic oligonucleotide
  Sense strand starting at position 2470 of SEQ ID NO: 317692
gugugaaaguguacuccgu

SEQ ID NO: 504584 - RNA, 19 nt, Artificial Sequence
  Description of Artificial Sequence: Synthetic oligonucleotide
  Antisense strand to SEQ ID NO: 504583
acggaguacacuuucacac

SEQ ID NO: 504585 - RNA, 19 nt, Artificial Sequence
  Description of Artificial Sequence: Synthetic oligonucleotide
  Sense strand starting at position 2476 of SEQ ID NO: 317692
aaguguacuccguaaacag

SEQ ID NO: 504586 - RNA, 19 nt, Artificial Sequence
  Description of Artificial Sequence: Synthetic oligonucleotide
  Antisense strand to SEQ ID NO: 504585
cuguuuacggaguacacuu

SEQ ID NO: 504587 - RNA, 19 nt, Artificial Sequence
  Description of Artificial Sequence: Synthetic oligonucleotide
  Sense strand starting at position 2571 of SEQ ID NO: 317692
ccuggugucccugagggua

SEQ ID NO: 504588 - RNA, 19 nt, Artificial Sequence
  Description of Artificial Sequence: Synthetic oligonucleotide
  Antisense strand to SEQ ID NO: 504587
uacccucagggacaccagg

SEQ ID NO: 504589 - RNA, 19 nt, Artificial Sequence
  Description of Artificial Sequence: Synthetic oligonucleotide
  Sense strand starting at position 2655 of SEQ ID NO: 317692
ccgaacagucuucggagaa

SEQ ID NO: 504590 - RNA, 19 nt, Artificial Sequence
  Description of Artificial Sequence: Synthetic oligonucleotide
  Antisense strand to SEQ ID NO: 504589
uucuccgaagacuguucgg

SEQ ID NO: 504591 - RNA, 19 nt, Artificial Sequence
  Description of Artificial Sequence: Synthetic oligonucleotide
  Sense strand starting at position 2720 of SEQ ID NO: 317692
cgcaguagucacuuguacu

SEQ ID NO: 504592 - RNA, 19 nt, Artificial Sequence
  Description of Artificial Sequence: Synthetic oligonucleotide
  Antisense strand to SEQ ID NO: 504591
aguacaagugacuacugcg

SEQ ID NO: 504593 - RNA, 19 nt, Artificial Sequence
  Description of Artificial Sequence: Synthetic oligonucleotide
  Sense strand starting at position 2752 of SEQ ID NO: 317692
ggaagaaguugaucaguuu

SEQ ID NO: 504594 - RNA, 19 nt, Artificial Sequence
  Description of Artificial Sequence: Synthetic oligonucleotide
  Antisense strand to SEQ ID NO: 504593
aaacugaucaacuucuucc

SEQ ID NO: 504595 - RNA, 19 nt, Artificial Sequence
  Description of Artificial Sequence: Synthetic oligonucleotide
  Sense strand starting at position 2783 of SEQ ID NO: 317692
ucaaauuacgcucagcaca

SEQ ID NO: 504596 - RNA, 19 nt, Artificial Sequence
  Description of Artificial Sequence: Synthetic oligonucleotide
  Antisense strand to SEQ ID NO: 504595
ugugcugagcguaauuuga

SEQ ID NO: 504597 - RNA, 19 nt, Artificial Sequence
  Description of Artificial Sequence: Synthetic oligonucleotide
  Sense strand starting at position 2856 of SEQ ID NO: 317692
caguauuugugacccggua

SEQ ID NO: 504598 - RNA, 19 nt, Artificial Sequence
  Description of Artificial Sequence: Synthetic oligonucleotide
  Antisense strand to SEQ ID NO: 504597
uaccgggucacaaauacug

SEQ ID NO: 504599 - RNA, 19 nt, Artificial Sequence
  Description of Artificial Sequence: Synthetic oligonucleotide
  Sense strand starting at position 2858 of SEQ ID NO: 317692
guauuugugacccgguauu

SEQ ID NO: 504600 - RNA, 19 nt, Artificial Sequence
  Description of Artificial Sequence: Synthetic oligonucleotide
  Antisense strand to SEQ ID NO: 504599
aauaccgggucacaaauac

SEQ ID NO: 504601 - RNA, 19 nt, Artificial Sequence
  Description of Artificial Sequence: Synthetic oligonucleotide
  Sense strand starting at position 2909 of SEQ ID NO: 317692
gcauuugggacguaugcau

SEQ ID NO: 504602 - RNA, 19 nt, Artificial Sequence
  Description of Artificial Sequence: Synthetic oligonucleotide
  Antisense strand to SEQ ID NO: 504601
augcauacgucccaaaugc

SEQ ID NO: 504603 - RNA, 19 nt, Artificial Sequence
  Description of Artificial Sequence: Synthetic oligonucleotide
  Sense strand starting at position 2940 of SEQ ID NO: 317692
ucaauaucgcauuaagcua

SEQ ID NO: 504604 - RNA, 19 nt, Artificial Sequence
  Description of Artificial Sequence: Synthetic oligonucleotide
  Antisense strand to SEQ ID NO: 504603
uagcuuaaugcgauauuga

SEQ ID NO: 504605 - RNA, 19 nt, Artificial Sequence
  Description of Artificial Sequence: Synthetic oligonucleotide
  Sense strand starting at position 3171 of SEQ ID NO: 317692
gcauacauacaguaaaguu

SEQ ID NO: 504606 - RNA, 19 nt, Artificial Sequence
  Description of Artificial Sequence: Synthetic oligonucleotide
  Antisense strand to SEQ ID NO: 504605
aacuuuacuguauguaugc

SEQ ID NO: 504607 - RNA, 19 nt, Artificial Sequence
  Description of Artificial Sequence: Synthetic oligonucleotide
  Sense strand starting at position 3225 of SEQ ID NO: 317692
aagugacugccugacucua

SEQ ID NO: 504608 - RNA, 19 nt, Artificial Sequence
  Description of Artificial Sequence: Synthetic oligonucleotide
  Antisense strand to SEQ ID NO: 504607
uagagucaggcagucacuu

SEQ ID NO: 504609 - RNA, 19 nt, Artificial Sequence
  Description of Artificial Sequence: Synthetic oligonucleotide
  Sense strand starting at position 3310 of SEQ ID NO: 317692
aaacaaauuuccguaccgu

SEQ ID NO: 504610 - RNA, 19 nt, Artificial Sequence
  Description of Artificial Sequence: Synthetic oligonucleotide
  Antisense strand to SEQ ID NO: 504609
acgguacggaaauuuguuu

SEQ ID NO: 504611 - RNA, 19 nt, Artificial Sequence
  Description of Artificial Sequence: Synthetic oligonucleotide
  Sense strand starting at position 3327 of SEQ ID NO: 317692
guaaguuuaccugggacua

SEQ ID NO: 504612 - RNA, 19 nt, Artificial Sequence
  Description of Artificial Sequence: Synthetic oligonucleotide
  Antisense strand to SEQ ID NO: 504611
uagucccagguaaacuuac

SEQ ID NO: 504613 - RNA, 19 nt, Artificial Sequence
  Description of Artificial Sequence: Synthetic oligonucleotide
  Sense strand starting at position 3357 of SEQ ID NO: 317692
cuguuagaugaccguggaa

SEQ ID NO: 504614 - RNA, 19 nt, Artificial Sequence
  Description of Artificial Sequence: Synthetic oligonucleotide
  Antisense strand to SEQ ID NO: 504613
uuccacggucaucuaacag

SEQ ID NO: 504615 - RNA, 19 nt, Artificial Sequence
  Description of Artificial Sequence: Synthetic oligonucleotide
  Sense strand starting at position 3359 of SEQ ID NO: 317692
guuagaugaccguggaauu

SEQ ID NO: 504616 - RNA, 19 nt, Artificial Sequence
  Description of Artificial Sequence: Synthetic oligonucleotide
  Antisense strand to SEQ ID NO: 504615
aauuccacggucaucuaac

SEQ ID NO: 504617 - RNA, 19 nt, Artificial Sequence
  Description of Artificial Sequence: Synthetic oligonucleotide
  Sense strand starting at position 3423 of SEQ ID NO: 317692
gagggagcuguagguugau

SEQ ID NO: 504618 - RNA, 19 nt, Artificial Sequence
  Description of Artificial Sequence: Synthetic oligonucleotide
  Antisense strand to SEQ ID NO: 504617
aucaaccuacagcucccuc

SEQ ID NO: 504619 - RNA, 19 nt, Artificial Sequence
  Description of Artificial Sequence: Synthetic oligonucleotide
  Sense strand starting at position 3501 of SEQ ID NO: 317692
cgagaauuccuacagccag

SEQ ID NO: 504620 - RNA, 19 nt, Artificial Sequence
  Description of Artificial Sequence: Synthetic oligonucleotide
  Antisense strand to SEQ ID NO: 504619
cuggcuguaggaauucucg

SEQ ID NO: 504621 - RNA, 19 nt, Artificial Sequence
  Description of Artificial Sequence: Synthetic oligonucleotide
  Sense strand starting at position 3507 of SEQ ID NO: 317692
uuccuacagccagaaaguu

SEQ ID NO: 504622 - RNA, 19 nt, Artificial Sequence
  Description of Artificial Sequence: Synthetic oligonucleotide
  Antisense strand to SEQ ID NO: 504621
aacuuucuggcuguaggaa

SEQ ID NO: 504623 - RNA, 19 nt, Artificial Sequence
  Description of Artificial Sequence: Synthetic oligonucleotide
  Sense strand starting at position 3915 of SEQ ID NO: 317692
gauggacguccauaaacgu

SEQ ID NO: 504624 - RNA, 19 nt, Artificial Sequence
  Description of Artificial Sequence: Synthetic oligonucleotide
  Antisense strand to SEQ ID NO: 504623
acguuuauggacguccauc

SEQ ID NO: 504625 - RNA, 19 nt, Artificial Sequence
  Description of Artificial Sequence: Synthetic oligonucleotide
  Sense strand starting at position 3978 of SEQ ID NO: 317692
aucucucaaugagcagaaa

SEQ ID NO: 504626 - RNA, 19 nt, Artificial Sequence
  Description of Artificial Sequence: Synthetic oligonucleotide
  Antisense strand to SEQ ID NO: 504625
uuucugcucauugagagau

SEQ ID NO: 504627 - RNA, 19 nt, Artificial Sequence
  Description of Artificial Sequence: Synthetic oligonucleotide
  Sense strand starting at position 131 of SEQ ID NO: 317693
aguguuaacacuuggagag

SEQ ID NO: 504628 - RNA, 19 nt, Artificial Sequence
  Description of Artificial Sequence: Synthetic oligonucleotide
  Antisense strand to SEQ ID NO: 504627
cucuccaaguguuaacacu

SEQ ID NO: 504629 - RNA, 19 nt, Artificial Sequence
  Description of Artificial Sequence: Synthetic oligonucleotide
  Sense strand starting at position 132 of SEQ ID NO: 317693
guguuaacacuuggagaga

SEQ ID NO: 504630 - RNA, 19 nt, Artificial Sequence
  Description of Artificial Sequence: Synthetic oligonucleotide
  Antisense strand to SEQ ID NO: 504629
ucucuccaaguguuaacac

SEQ ID NO: 504631 - RNA, 19 nt, Artificial Sequence
  Description of Artificial Sequence: Synthetic oligonucleotide
  Sense strand starting at position 178 of SEQ ID NO: 317693
accuguaucuaacuacgaa

SEQ ID NO: 504632 - RNA, 19 nt, Artificial Sequence
  Description of Artificial Sequence: Synthetic oligonucleotide
  Antisense strand to SEQ ID NO: 504631
uucguaguuagauacaggu

SEQ ID NO: 504633 - RNA, 19 nt, Artificial Sequence
  Description of Artificial Sequence: Synthetic oligonucleotide
  Sense strand starting at position 444 of SEQ ID NO: 317693
uucuucuugggcuaggaau

SEQ ID NO: 504634 - RNA, 19 nt, Artificial Sequence
  Description of Artificial Sequence: Synthetic oligonucleotide
  Antisense strand to SEQ ID NO: 504633
auuccuagcccaagaagaa

SEQ ID NO: 504635 - RNA, 19 nt, Artificial Sequence
  Description of Artificial Sequence: Synthetic oligonucleotide
  Sense strand starting at position 446 of SEQ ID NO: 317693
cuucuugggcuaggaauua

SEQ ID NO: 504636 - RNA, 19 nt, Artificial Sequence
  Description of Artificial Sequence: Synthetic oligonucleotide
  Antisense strand to SEQ ID NO: 504635
uaauuccuagcccaagaag

SEQ ID NO: 504637 - RNA, 19 nt, Artificial Sequence
  Description of Artificial Sequence: Synthetic oligonucleotide
  Sense strand starting at position 536 of SEQ ID NO: 317693
ccagaacugguccgaaaca

SEQ ID NO: 504638 - RNA, 19 nt, Artificial Sequence
  Description of Artificial Sequence: Synthetic oligonucleotide
  Antisense strand to SEQ ID NO: 504637
uguuucggaccaguucugg

SEQ ID NO: 504639 - RNA, 19 nt, Artificial Sequence
  Description of Artificial Sequence: Synthetic oligonucleotide
  Sense strand starting at position 782 of SEQ ID NO: 317693
uagacaugaugcucggaaa

SEQ ID NO: 504640 - RNA, 19 nt, Artificial Sequence
  Description of Artificial Sequence: Synthetic oligonucleotide
  Antisense strand to SEQ ID NO: 504639
uuuccgagcaucaugucua

SEQ ID NO: 504641 - RNA, 19 nt, Artificial Sequence
  Description of Artificial Sequence: Synthetic oligonucleotide
  Sense strand starting at position 825 of SEQ ID NO: 317693
uucuaaaccugacucgaua

SEQ ID NO: 504642 - RNA, 19 nt, Artificial Sequence
  Description of Artificial Sequence: Synthetic oligonucleotide
  Antisense strand to SEQ ID NO: 504641
uaucgagucagguuuagaa

SEQ ID NO: 504643 - RNA, 19 nt, Artificial Sequence
  Description of Artificial Sequence: Synthetic oligonucleotide
  Sense strand starting at position 879 of SEQ ID NO: 317693
aaggaaugcuggguguaaa

SEQ ID NO: 504644 - RNA, 19 nt, Artificial Sequence
  Description of Artificial Sequence: Synthetic oligonucleotide
  Antisense strand to SEQ ID NO: 504643
uuuacacccagcauuccuu

SEQ ID NO: 504645 - RNA, 19 nt, Artificial Sequence
  Description of Artificial Sequence: Synthetic oligonucleotide
  Sense strand starting at position 1258 of SEQ ID NO: 317693
gagguagcugaauaagugu

SEQ ID NO: 504646 - RNA, 19 nt, Artificial Sequence
  Description of Artificial Sequence: Synthetic oligonucleotide
  Antisense strand to SEQ ID NO: 504645
acacuuauucagcuaccuc

SEQ ID NO: 504647 - RNA, 19 nt, Artificial Sequence
  Description of Artificial Sequence: Synthetic oligonucleotide
  Sense strand starting at position 1425 of SEQ ID NO: 317693
aaagguacguuuccaaaga

SEQ ID NO: 504648 - RNA, 19 nt, Artificial Sequence
  Description of Artificial Sequence: Synthetic oligonucleotide
  Antisense strand to SEQ ID NO: 504647
ucuuuggaaacguaccuuu

SEQ ID NO: 504649 - RNA, 19 nt, Artificial Sequence
  Description of Artificial Sequence: Synthetic oligonucleotide
  Sense strand starting at position 1496 of SEQ ID NO: 317693
uuaagaugucuuuaugguu

SEQ ID NO: 504650 - RNA, 19 nt, Artificial Sequence
  Description of Artificial Sequence: Synthetic oligonucleotide
  Antisense strand to SEQ ID NO: 504649
aaccauaaagacaucuuaa

SEQ ID NO: 504651 - RNA, 19 nt, Artificial Sequence
  Description of Artificial Sequence: Synthetic oligonucleotide
  Sense strand starting at position 1503 of SEQ ID NO: 317693
gucuuuaugguugaaauac

SEQ ID NO: 504652 - RNA, 19 nt, Artificial Sequence
  Description of Artificial Sequence: Synthetic oligonucleotide
  Antisense strand to SEQ ID NO: 504651
guauuucaaccauaaagac

SEQ ID NO: 504653 - RNA, 19 nt, Artificial Sequence
  Description of Artificial Sequence: Synthetic oligonucleotide
  Sense strand starting at position 1600 of SEQ ID NO: 317693
uguccucuugcaugaauuu

SEQ ID NO: 504654 - RNA, 19 nt, Artificial Sequence
  Description of Artificial Sequence: Synthetic oligonucleotide
  Antisense strand to SEQ ID NO: 504653
aaauucaugcaagaggaca

SEQ ID NO: 504655 - RNA, 19 nt, Artificial Sequence
  Description of Artificial Sequence: Synthetic oligonucleotide
  Sense strand starting at position 1832 of SEQ ID NO: 317693
acuuaacacugaucgauau

SEQ ID NO: 504656 - RNA, 19 nt, Artificial Sequence
  Description of Artificial Sequence: Synthetic oligonucleotide
  Antisense strand to SEQ ID NO: 504655
auaucgaucaguguuaagu

SEQ ID NO: 504657 - RNA, 19 nt, Artificial Sequence
  Description of Artificial Sequence: Synthetic oligonucleotide
  Sense strand starting at position 1833 of SEQ ID NO: 317693
cuuaacacugaucgauauu

SEQ ID NO: 504658 - RNA, 19 nt, Artificial Sequence
  Description of Artificial Sequence: Synthetic oligonucleotide
  Antisense strand to SEQ ID NO: 504657
aauaucgaucaguguuaag

SEQ ID NO: 504659 - RNA, 19 nt, Artificial Sequence
  Description of Artificial Sequence: Synthetic oligonucleotide
  Sense strand starting at position 2278 of SEQ ID NO: 317693
cgcacucuacuagaaagau

SEQ ID NO: 504660 - RNA, 19 nt, Artificial Sequence
  Description of Artificial Sequence: Synthetic oligonucleotide
  Antisense strand to SEQ ID NO: 504659
aucuuucuaguagagugcg

SEQ ID NO: 504661 - RNA, 19 nt, Artificial Sequence
  Description of Artificial Sequence: Synthetic oligonucleotide
  Sense strand starting at position 2492 of SEQ ID NO: 317693
gauuguugagcauaaucua

SEQ ID NO: 504662 - RNA, 19 nt, Artificial Sequence
  Description of Artificial Sequence: Synthetic oligonucleotide
  Antisense strand to SEQ ID NO: 504661
uagauuaugcucaacaauc

SEQ ID NO: 504663 - RNA, 19 nt, Artificial Sequence
  Description of Artificial Sequence: Synthetic oligonucleotide
  Sense strand starting at position 2569 of SEQ ID NO: 317693
gcauacuuugcuuggauuu

SEQ ID NO: 504664 - RNA, 19 nt, Artificial Sequence
  Description of Artificial Sequence: Synthetic oligonucleotide
  Antisense strand to SEQ ID NO: 504663
aaauccaagcaaaguaugc

SEQ ID NO: 504665 - RNA, 19 nt, Artificial Sequence
  Description of Artificial Sequence: Synthetic oligonucleotide
  Sense strand starting at position 2627 of SEQ ID NO: 317693
gaacucagucgaggucaaa

SEQ ID NO: 504666 - RNA, 19 nt, Artificial Sequence
  Description of Artificial Sequence: Synthetic oligonucleotide
  Antisense strand to SEQ ID NO: 504665
uuugaccucgacugaguuc

SEQ ID NO: 504667 - RNA, 19 nt, Artificial Sequence
  Description of Artificial Sequence: Synthetic oligonucleotide
  Sense strand starting at position 2649 of SEQ ID NO: 317693
accuuaauccuuugaagag

SEQ ID NO: 504668 - RNA, 19 nt, Artificial Sequence
  Description of Artificial Sequence: Synthetic oligonucleotide
  Antisense strand to SEQ ID NO: 504667
cucuucaaaggauuaaggu

SEQ ID NO: 504669 - RNA, 19 nt, Artificial Sequence
  Description of Artificial Sequence: Synthetic oligonucleotide
  Sense strand starting at position 2683 of SEQ ID NO: 317693
aguacaauguaaucaauag

SEQ ID NO: 504670 - RNA, 19 nt, Artificial Sequence
  Description of Artificial Sequence: Synthetic oligonucleotide
  Antisense strand to SEQ ID NO: 504669
cuauugauuacauuguacu

SEQ ID NO: 504671 - RNA, 19 nt, Artificial Sequence
  Description of Artificial Sequence: Synthetic oligonucleotide
  Sense strand starting at position 2763 of SEQ ID NO: 317693
aguuguuuccaggaugaca

SEQ ID NO: 504672 - RNA, 19 nt, Artificial Sequence
  Description of Artificial Sequence: Synthetic oligonucleotide
  Antisense strand to SEQ ID NO: 504671
ugucauccuggaaacaacu

SEQ ID NO: 504673 - RNA, 19 nt, Artificial Sequence
  Description of Artificial Sequence: Synthetic oligonucleotide
  Sense strand starting at position 2804 of SEQ ID NO: 317693
ugaucacuuccucgaagga

SEQ ID NO: 504674 - RNA, 19 nt, Artificial Sequence
  Description of Artificial Sequence: Synthetic oligonucleotide
  Antisense strand to SEQ ID NO: 504673
uccuucgaggaagugauca

SEQ ID NO: 504675 - RNA, 19 nt, Artificial Sequence
  Description of Artificial Sequence: Synthetic oligonucleotide
  Sense strand starting at position 2950 of SEQ ID NO: 317693
gacauagugguuuagcuga

SEQ ID NO: 504676 - RNA, 19 nt, Artificial Sequence
  Description of Artificial Sequence: Synthetic oligonucleotide
  Antisense strand to SEQ ID NO: 504675
ucagcuaaaccacuauguc

SEQ ID NO: 504677 - RNA, 19 nt, Artificial Sequence
  Description of Artificial Sequence: Synthetic oligonucleotide
  Sense strand starting at position 3199 of SEQ ID NO: 317693
gucacaucacacugggauu

SEQ ID NO: 504678 - RNA, 19 nt, Artificial Sequence
  Description of Artificial Sequence: Synthetic oligonucleotide
  Antisense strand to SEQ ID NO: 504677
aaucccagugugaugugac

SEQ ID NO: 504679 - RNA, 19 nt, Artificial Sequence
  Description of Artificial Sequence: Synthetic oligonucleotide
  Sense strand starting at position 3238 of SEQ ID NO: 317693
ucaucuagauuacuggcaa

SEQ ID NO: 504680 - RNA, 19 nt, Artificial Sequence
  Description of Artificial Sequence: Synthetic oligonucleotide
  Antisense strand to SEQ ID NO: 504679
uugccaguaaucuagauga

SEQ ID NO: 504681 - RNA, 19 nt, Artificial Sequence
  Description of Artificial Sequence: Synthetic oligonucleotide
  Sense strand starting at position 3357 of SEQ ID NO: 317693
uuggcuguccgugucuaaa

SEQ ID NO: 504682 - RNA, 19 nt, Artificial Sequence
  Description of Artificial Sequence: Synthetic oligonucleotide
  Antisense strand to SEQ ID NO: 504681
uuuagacacggacagccaa

SEQ ID NO: 504683 - RNA, 19 nt, Artificial Sequence
  Description of Artificial Sequence: Synthetic oligonucleotide
  Sense strand starting at position 3407 of SEQ ID NO: 317693
auagguugagccuaugagu

SEQ ID NO: 504684 - RNA, 19 nt, Artificial Sequence
  Description of Artificial Sequence: Synthetic oligonucleotide
  Antisense strand to SEQ ID NO: 504683
acucauaggcucaaccuau

SEQ ID NO: 504685 - RNA, 19 nt, Artificial Sequence
  Description of Artificial Sequence: Synthetic oligonucleotide
  Sense strand starting at position 3494 of SEQ ID NO: 317693
uuuaguugacaaggcaaua

SEQ ID NO: 504686 - RNA, 19 nt, Artificial Sequence
  Description of Artificial Sequence: Synthetic oligonucleotide
  Antisense strand to SEQ ID NO: 504685
uauugccuugucaacuaaa

SEQ ID NO: 504687 - RNA, 19 nt, Artificial Sequence
  Description of Artificial Sequence: Synthetic oligonucleotide
  Sense strand starting at position 3505 of SEQ ID NO: 317693
aggcaauaucuuggacuca

SEQ ID NO: 504688 - RNA, 19 nt, Artificial Sequence
  Description of Artificial Sequence: Synthetic oligonucleotide
  Antisense strand to SEQ ID NO: 504687
ugaguccaagauauugccu

SEQ ID NO: 504689 - RNA, 19 nt, Artificial Sequence
  Description of Artificial Sequence: Synthetic oligonucleotide
  Sense strand starting at position 3669 of SEQ ID NO: 317693
uugacaccugguggaaauu

SEQ ID NO: 504690 - RNA, 19 nt, Artificial Sequence
  Description of Artificial Sequence: Synthetic oligonucleotide
  Antisense strand to SEQ ID NO: 504689
aauuuccaccaggugucaa

SEQ ID NO: 504691 - RNA, 19 nt, Artificial Sequence
  Description of Artificial Sequence: Synthetic oligonucleotide
  Sense strand starting at position 3679 of SEQ ID NO: 317693
guggaaauucuagguaaag

SEQ ID NO: 504692 - RNA, 19 nt, Artificial Sequence
  Description of Artificial Sequence: Synthetic oligonucleotide
  Antisense strand to SEQ ID NO: 504691
cuuuaccuagaauuuccac

SEQ ID NO: 504693 - RNA, 19 nt, Artificial Sequence
  Description of Artificial Sequence: Synthetic oligonucleotide
  Sense strand starting at position 3680 of SEQ ID NO: 317693
uggaaauucuagguaaagu

SEQ ID NO: 504694 - RNA, 19 nt, Artificial Sequence
  Description of Artificial Sequence: Synthetic oligonucleotide
  Antisense strand to SEQ ID NO: 504693
acuuuaccuagaauuucca

SEQ ID NO: 504695 - RNA, 19 nt, Artificial Sequence
  Description of Artificial Sequence: Synthetic oligonucleotide
  Sense strand starting at position 3713 of SEQ ID NO: 317693
acuagcuuugauuacagau

SEQ ID NO: 504696 - RNA, 19 nt, Artificial Sequence
  Description of Artificial Sequence: Synthetic oligonucleotide
  Antisense strand to SEQ ID NO: 504695
aucuguaaucaaagcuagu

SEQ ID NO: 504697 - RNA, 19 nt, Artificial Sequence
  Description of Artificial Sequence: Synthetic oligonucleotide
  Sense strand starting at position 3797 of SEQ ID NO: 317693
ucagcauaaggucaaugau

SEQ ID NO: 504698 - RNA, 19 nt, Artificial Sequence
  Description of Artificial Sequence: Synthetic oligonucleotide
  Antisense strand to SEQ ID NO: 504697
aucauugaccuuaugcuga

SEQ ID NO: 504699 - RNA, 19 nt, Artificial Sequence
  Description of Artificial Sequence: Synthetic oligonucleotide
  Sense strand starting at position 3800 of SEQ ID NO: 317693
gcauaaggucaaugauauu

SEQ ID NO: 504700 - RNA, 19 nt, Artificial Sequence
  Description of Artificial Sequence: Synthetic oligonucleotide
  Antisense strand to SEQ ID NO: 504699
aauaucauugaccuuaugc

SEQ ID NO: 504701 - RNA, 19 nt, Artificial Sequence
  Description of Artificial Sequence: Synthetic oligonucleotide
  Sense strand starting at position 3860 of SEQ ID NO: 317693
aaguguaguccauaaugaa

SEQ ID NO: 504702 - RNA, 19 nt, Artificial Sequence
  Description of Artificial Sequence: Synthetic oligonucleotide
  Antisense strand to SEQ ID NO: 504701
uucauuauggacuacacuu

SEQ ID NO: 504703 - RNA, 19 nt, Artificial Sequence
  Description of Artificial Sequence: Synthetic oligonucleotide
  Sense strand starting at position 3893 of SEQ ID NO: 317693
gcacauuugugucuacauu

SEQ ID NO: 504704 - RNA, 19 nt, Artificial Sequence
  Description of Artificial Sequence: Synthetic oligonucleotide
  Antisense strand to SEQ ID NO: 504703
aauguagacacaaaugugc

SEQ ID NO: 504705 - RNA, 19 nt, Artificial Sequence
  Description of Artificial Sequence: Synthetic oligonucleotide
  Sense strand starting at position 3924 of SEQ ID NO: 317693
uauuaaggguuagugaaca

SEQ ID NO: 504706 - RNA, 19 nt, Artificial Sequence
  Description of Artificial Sequence: Synthetic oligonucleotide
  Antisense strand to SEQ ID NO: 504705
uguucacuaacccuuaaua

SEQ ID NO: 504707 - RNA, 19 nt, Artificial Sequence
  Description of Artificial Sequence: Synthetic oligonucleotide
  Sense strand starting at position 757 of SEQ ID NO: 317694
ccuuguaccgcugauagaa

SEQ ID NO: 504708 - RNA, 19 nt, Artificial Sequence
  Description of Artificial Sequence: Synthetic oligonucleotide
  Antisense strand to SEQ ID NO: 504707
uucuaucagcgguacaagg

SEQ ID NO: 504709 - RNA, 19 nt, Artificial Sequence
  Description of Artificial Sequence: Synthetic oligonucleotide
  Sense strand starting at position 1004 of SEQ ID NO: 317694
uuaaauuugcacugugguu

SEQ ID NO: 504710 - RNA, 19 nt, Artificial Sequence
  Description of Artificial Sequence: Synthetic oligonucleotide
  Antisense strand to SEQ ID NO: 504709
aaccacagugcaaauuuaa

SEQ ID NO: 504711 - RNA, 19 nt, Artificial Sequence
  Description of Artificial Sequence: Synthetic oligonucleotide
  Sense strand starting at position 1036 of SEQ ID NO: 317694
agauguguucuuuaauaac

SEQ ID NO: 504712 - RNA, 19 nt, Artificial Sequence
  Description of Artificial Sequence: Synthetic oligonucleotide
  Antisense strand to SEQ ID NO: 504711
guuauuaaagaacacaucu

SEQ ID NO: 504713 - RNA, 19 nt, Artificial Sequence
  Description of Artificial Sequence: Synthetic oligonucleotide
  Sense strand starting at position 1170 of SEQ ID NO: 317694
ugguuaaaccucugacuca

SEQ ID NO: 504714 - RNA, 19 nt, Artificial Sequence
  Description of Artificial Sequence: Synthetic oligonucleotide
  Antisense strand to SEQ ID NO: 504713
ugagucagagguuuaacca

SEQ ID NO: 504715 - RNA, 19 nt, Artificial Sequence
  Description of Artificial Sequence: Synthetic oligonucleotide
  Sense strand starting at position 1195 of SEQ ID NO: 317694
gaaccaugaugucuagcua

SEQ ID NO: 504716 - RNA, 19 nt, Artificial Sequence
  Description of Artificial Sequence: Synthetic oligonucleotide
  Antisense strand to SEQ ID NO: 504715
uagcuagacaucaugguuc

SEQ ID NO: 504717 - RNA, 19 nt, Artificial Sequence
  Description of Artificial Sequence: Synthetic oligonucleotide
  Sense strand starting at position 1296 of SEQ ID NO: 317694
uucauuuaugcguagugua

SEQ ID NO: 504718 - RNA, 19 nt, Artificial Sequence
  Description of Artificial Sequence: Synthetic oligonucleotide
  Antisense strand to SEQ ID NO: 504717
uacacuacgcauaaaugaa

SEQ ID NO: 504719 - RNA, 19 nt, Artificial Sequence
  Description of Artificial Sequence: Synthetic oligonucleotide
  Sense strand starting at position 1406 of SEQ ID NO: 317694
caaguugcccugggaggau

SEQ ID NO: 504720 - RNA, 19 nt, Artificial Sequence
  Description of Artificial Sequence: Synthetic oligonucleotide
  Antisense strand to SEQ ID NO: 504719
auccucccagggcaacuug

SEQ ID NO: 504721 - RNA, 19 nt, Artificial Sequence
  Description of Artificial Sequence: Synthetic oligonucleotide
  Sense strand starting at position 1533 of SEQ ID NO: 317694
ucuaguuagccugaaauau

SEQ ID NO: 504722 - RNA, 19 nt, Artificial Sequence
  Description of Artificial Sequence: Synthetic oligonucleotide
  Antisense strand to SEQ ID NO: 504721
auauuucaggcuaacuaga

SEQ ID NO: 504723 - RNA, 19 nt, Artificial Sequence
  Description of Artificial Sequence: Synthetic oligonucleotide
  Sense strand starting at position 1597 of SEQ ID NO: 317694
ggaaguuagccguaugacc

SEQ ID NO: 504724 - RNA, 19 nt, Artificial Sequence
  Description of Artificial Sequence: Synthetic oligonucleotide
  Antisense strand to SEQ ID NO: 504723
ggucauacggcuaacuucc

SEQ ID NO: 504725 - RNA, 19 nt, Artificial Sequence
  Description of Artificial Sequence: Synthetic oligonucleotide
  Sense strand starting at position 1606 of SEQ ID NO: 317694
ccguaugaccaguagauuc

SEQ ID NO: 504726 - RNA, 19 nt, Artificial Sequence
  Description of Artificial Sequence: Synthetic oligonucleotide
  Antisense strand to SEQ ID NO: 504725
gaaucuacuggucauacgg

SEQ ID NO: 504727 - RNA, 19 nt, Artificial Sequence
  Description of Artificial Sequence: Synthetic oligonucleotide
  Sense strand starting at position 1648 of SEQ ID NO: 317694
cuacucugucuggagauau

SEQ ID NO: 504728 - RNA, 19 nt, Artificial Sequence
  Description of Artificial Sequence: Synthetic oligonucleotide
  Antisense strand to SEQ ID NO: 504727
auaucuccagacagaguag

SEQ ID NO: 504729 - RNA, 19 nt, Artificial Sequence
  Description of Artificial Sequence: Synthetic oligonucleotide
  Sense strand starting at position 1731 of SEQ ID NO: 317694
gagucugauuccguggaag

SEQ ID NO: 504730 - RNA, 19 nt, Artificial Sequence
  Description of Artificial Sequence: Synthetic oligonucleotide
  Antisense strand to SEQ ID NO: 504729
cuuccacggaaucagacuc

SEQ ID NO: 504731 - RNA, 19 nt, Artificial Sequence
  Description of Artificial Sequence: Synthetic oligonucleotide
  Sense strand starting at position 1743 of SEQ ID NO: 317694
guggaaguuguuuacaacu

SEQ ID NO: 504732 - RNA, 19 nt, Artificial Sequence
  Description of Artificial Sequence: Synthetic oligonucleotide
  Antisense strand to SEQ ID NO: 504731
aguuguaaacaacuuccac

SEQ ID NO: 504733 - RNA, 19 nt, Artificial Sequence
  Description of Artificial Sequence: Synthetic oligonucleotide
  Sense strand starting at position 1899 of SEQ ID NO: 317694
uuuaguauuccugaucugu

SEQ ID NO: 504734 - RNA, 19 nt, Artificial Sequence
  Description of Artificial Sequence: Synthetic oligonucleotide
  Antisense strand to SEQ ID NO: 504733
acagaucaggaauacuaaa

SEQ ID NO: 504735 - RNA, 19 nt, Artificial Sequence
  Description of Artificial Sequence: Synthetic oligonucleotide
  Sense strand starting at position 1910 of SEQ ID NO: 317694
ugaucuguucuuuggauug

SEQ ID NO: 504736 - RNA, 19 nt, Artificial Sequence
  Description of Artificial Sequence: Synthetic oligonucleotide
  Antisense strand to SEQ ID NO: 504735
caauccaaagaacagauca

SEQ ID NO: 504737 - RNA, 19 nt, Artificial Sequence
  Description of Artificial Sequence: Synthetic oligonucleotide
  Sense strand starting at position 1920 of SEQ ID NO: 317694
uuuggauuguccuuugaau

SEQ ID NO: 504738 - RNA, 19 nt, Artificial Sequence
  Description of Artificial Sequence: Synthetic oligonucleotide
  Antisense strand to SEQ ID NO: 504737
auucaaaggacaauccaaa

SEQ ID NO: 504739 - RNA, 19 nt, Artificial Sequence
  Description of Artificial Sequence: Synthetic oligonucleotide
  Sense strand starting at position 1922 of SEQ ID NO: 317694
uggauuguccuuugaauug

SEQ ID NO: 504740 - RNA, 19 nt, Artificial Sequence
  Description of Artificial Sequence: Synthetic oligonucleotide
  Antisense strand to SEQ ID NO: 504739
caauucaaaggacaaucca

SEQ ID NO: 504741 - RNA, 19 nt, Artificial Sequence
  Description of Artificial Sequence: Synthetic oligonucleotide
  Sense strand starting at position 2005 of SEQ ID NO: 317694
uuguaugagggucaugauu

SEQ ID NO: 504742 - RNA, 19 nt, Artificial Sequence
  Description of Artificial Sequence: Synthetic oligonucleotide
  Antisense strand to SEQ ID NO: 504741
aaucaugacccucauacaa

SEQ ID NO: 504743 - RNA, 19 nt, Artificial Sequence
  Description of Artificial Sequence: Synthetic oligonucleotide
  Sense strand starting at position 2097 of SEQ ID NO: 317694
gaaguagauuaguuuaugu

SEQ ID NO: 504744 - RNA, 19 nt, Artificial Sequence
  Description of Artificial Sequence: Synthetic oligonucleotide
  Antisense strand to SEQ ID NO: 504743
acauaaacuaaucuacuuc

SEQ ID NO: 504745 - RNA, 19 nt, Artificial Sequence
  Description of Artificial Sequence: Synthetic oligonucleotide
  Sense strand starting at position 2099 of SEQ ID NO: 317694
aguagauuaguuuauguug

SEQ ID NO: 504746 - RNA, 19 nt, Artificial Sequence
  Description of Artificial Sequence: Synthetic oligonucleotide
  Antisense strand to SEQ ID NO: 504745
caacauaaacuaaucuacu

SEQ ID NO: 504747 - RNA, 19 nt, Artificial Sequence
  Description of Artificial Sequence: Synthetic oligonucleotide
  Sense strand starting at position 2202 of SEQ ID NO: 317694
gagagaacuguuugacuca

SEQ ID NO: 504748 - RNA, 19 nt, Artificial Sequence
  Description of Artificial Sequence: Synthetic oligonucleotide
  Antisense strand to SEQ ID NO: 504747
ugagucaaacaguucucuc

SEQ ID NO: 504749 - RNA, 19 nt, Artificial Sequence
  Description of Artificial Sequence: Synthetic oligonucleotide
  Sense strand starting at position 2205 of SEQ ID NO: 317694
agaacuguuugacucauua

SEQ ID NO: 504750 - RNA, 19 nt, Artificial Sequence
  Description of Artificial Sequence: Synthetic oligonucleotide
  Antisense strand to SEQ ID NO: 504749
uaaugagucaaacaguucu

SEQ ID NO: 504751 - RNA, 19 nt, Artificial Sequence
  Description of Artificial Sequence: Synthetic oligonucleotide
  Sense strand starting at position 2218 of SEQ ID NO: 317694
ucauuaugucaaggguuga

SEQ ID NO: 504752 - RNA, 19 nt, Artificial Sequence
  Description of Artificial Sequence: Synthetic oligonucleotide
  Antisense strand to SEQ ID NO: 504751
ucaacccuugacauaauga

SEQ ID NO: 504753 - RNA, 19 nt, Artificial Sequence
  Description of Artificial Sequence: Synthetic oligonucleotide
  Sense strand starting at position 2351 of SEQ ID NO: 317694
aauaauugaugggugcuaa

SEQ ID NO: 504754 - RNA, 19 nt, Artificial Sequence
  Description of Artificial Sequence: Synthetic oligonucleotide
  Antisense strand to SEQ ID NO: 504753
uuagcacccaucaauuauu

SEQ ID NO: 504755 - RNA, 19 nt, Artificial Sequence
  Description of Artificial Sequence: Synthetic oligonucleotide
  Sense strand starting at position 2352 of SEQ ID NO: 317694
auaauugaugggugcuaau

SEQ ID NO: 504756 - RNA, 19 nt, Artificial Sequence
  Description of Artificial Sequence: Synthetic oligonucleotide
  Antisense strand to SEQ ID NO: 504755
auuagcacccaucaauuau

SEQ ID NO: 504757 - RNA, 19 nt, Artificial Sequence
  Description of Artificial Sequence: Synthetic oligonucleotide
  Sense strand starting at position 2364 of SEQ ID NO: 317694
ugcuaaucugcaggaacaa

SEQ ID NO: 504758 - RNA, 19 nt, Artificial Sequence
  Description of Artificial Sequence: Synthetic oligonucleotide
  Antisense strand to SEQ ID NO: 504757
uuguuccugcagauuagca

SEQ ID NO: 504759 - RNA, 19 nt, Artificial Sequence
  Description of Artificial Sequence: Synthetic oligonucleotide
  Sense strand starting at position 2365 of SEQ ID NO: 317694
gcuaaucugcaggaacaau

SEQ ID NO: 504760 - RNA, 19 nt, Artificial Sequence
  Description of Artificial Sequence: Synthetic oligonucleotide
  Antisense strand to SEQ ID NO: 504759
auuguuccugcagauuagc

SEQ ID NO: 504761 - RNA, 19 nt, Artificial Sequence
  Description of Artificial Sequence: Synthetic oligonucleotide
  Sense strand starting at position 2466 of SEQ ID NO: 317694
uuaauagugcucuggaaau

SEQ ID NO: 504762 - RNA, 19 nt, Artificial Sequence
  Description of Artificial Sequence: Synthetic oligonucleotide
  Antisense strand to SEQ ID NO: 504761
auuuccagagcacuauuaa

SEQ ID NO: 504763 - RNA, 19 nt, Artificial Sequence
  Description of Artificial Sequence: Synthetic oligonucleotide
  Sense strand starting at position 2468 of SEQ ID NO: 317694
aauagugcucuggaaaugu

SEQ ID NO: 504764 - RNA, 19 nt, Artificial Sequence
  Description of Artificial Sequence: Synthetic oligonucleotide
  Antisense strand to SEQ ID NO: 504763
acauuuccagagcacuauu

SEQ ID NO: 504765 - RNA, 19 nt, Artificial Sequence
  Description of Artificial Sequence: Synthetic oligonucleotide
  Sense strand starting at position 2485 of SEQ ID NO: 317694
gugcaaauugaagaguuaa

SEQ ID NO: 504766 - RNA, 19 nt, Artificial Sequence
  Description of Artificial Sequence: Synthetic oligonucleotide
  Antisense strand to SEQ ID NO: 504765
uuaacucuucaauuugcac

SEQ ID NO: 504767 - RNA, 19 nt, Artificial Sequence
  Description of Artificial Sequence: Synthetic oligonucleotide
  Sense strand starting at position 2570 of SEQ ID NO: 317694
ucaauuggaguuugauguu

SEQ ID NO: 504768 - RNA, 19 nt, Artificial Sequence
  Description of Artificial Sequence: Synthetic oligonucleotide
  Antisense strand to SEQ ID NO: 504767
aacaucaaacuccaauuga

SEQ ID NO: 504769 - RNA, 19 nt, Artificial Sequence
  Description of Artificial Sequence: Synthetic oligonucleotide
  Sense strand starting at position 2701 of SEQ ID NO: 317694
augggauaacuuuguuaag

SEQ ID NO: 504770 - RNA, 19 nt, Artificial Sequence
  Description of Artificial Sequence: Synthetic oligonucleotide
  Antisense strand to SEQ ID NO: 504769
cuuaacaaaguuaucccau

SEQ ID NO: 504771 - RNA, 19 nt, Artificial Sequence
  Description of Artificial Sequence: Synthetic oligonucleotide
  Sense strand starting at position 2703 of SEQ ID NO: 317694
gggauaacuuuguuaaggu

SEQ ID NO: 504772 - RNA, 19 nt, Artificial Sequence
  Description of Artificial Sequence: Synthetic oligonucleotide
  Antisense strand to SEQ ID NO: 504771
accuuaacaaaguuauccc

SEQ ID NO: 504773 - RNA, 19 nt, Artificial Sequence
  Description of Artificial Sequence: Synthetic oligonucleotide
  Sense strand starting at position 2940 of SEQ ID NO: 317694
gccuuucuacuguaaggaa

SEQ ID NO: 504774 - RNA, 19 nt, Artificial Sequence
  Description of Artificial Sequence: Synthetic oligonucleotide
  Antisense strand to SEQ ID NO: 504773
uuccuuacaguagaaaggc

SEQ ID NO: 504775 - RNA, 19 nt, Artificial Sequence
  Description of Artificial Sequence: Synthetic oligonucleotide
  Sense strand starting at position 3112 of SEQ ID NO: 317694
gcauguccucuugaaucuu

SEQ ID NO: 504776 - RNA, 19 nt, Artificial Sequence
  Description of Artificial Sequence: Synthetic oligonucleotide
  Antisense strand to SEQ ID NO: 504775
aagauucaagaggacaugc

SEQ ID NO: 504777 - RNA, 19 nt, Artificial Sequence
  Description of Artificial Sequence: Synthetic oligonucleotide
  Sense strand starting at position 3118 of SEQ ID NO: 317694
ccucuugaaucuuugagca

SEQ ID NO: 504778 - RNA, 19 nt, Artificial Sequence
  Description of Artificial Sequence: Synthetic oligonucleotide
  Antisense strand to SEQ ID NO: 504777
ugcucaaagauucaagagg

SEQ ID NO: 504779 - RNA, 19 nt, Artificial Sequence
  Description of Artificial Sequence: Synthetic oligonucleotide
  Sense strand starting at position 3819 of SEQ ID NO: 317694
acuagcaacugaguaguau

SEQ ID NO: 504780 - RNA, 19 nt, Artificial Sequence
  Description of Artificial Sequence: Synthetic oligonucleotide
  Antisense strand to SEQ ID NO: 504779
auacuacucaguugcuagu

SEQ ID NO: 504781 - RNA, 19 nt, Artificial Sequence
  Description of Artificial Sequence: Synthetic oligonucleotide
  Sense strand starting at position 3820 of SEQ ID NO: 317694
cuagcaacugaguaguaua

SEQ ID NO: 504782 - RNA, 19 nt, Artificial Sequence
  Description of Artificial Sequence: Synthetic oligonucleotide
  Antisense strand to SEQ ID NO: 504781
uauacuacucaguugcuag

SEQ ID NO: 504783 - RNA, 19 nt, Artificial Sequence
  Description of Artificial Sequence: Synthetic oligonucleotide
  Sense strand starting at position 3909 of SEQ ID NO: 317694
uugguaucuaucugaagga

SEQ ID NO: 504784 - RNA, 19 nt, Artificial Sequence
  Description of Artificial Sequence: Synthetic oligonucleotide
  Antisense strand to SEQ ID NO: 504783
uccuucagauagauaccaa

SEQ ID NO: 504785 - RNA, 19 nt, Artificial Sequence
  Description of Artificial Sequence: Synthetic oligonucleotide
  Sense strand starting at position 3956 of SEQ ID NO: 317694
ugcacacauguuuauagua

SEQ ID NO: 504786 - RNA, 19 nt, Artificial Sequence
  Description of Artificial Sequence: Synthetic oligonucleotide
  Antisense strand to SEQ ID NO: 504785
uacuauaaacaugugugca

SEQ ID NO: 504787 - RNA, 19 nt, Artificial Sequence
  Description of Artificial Sequence: Synthetic oligonucleotide
  Sense strand starting at position 170 of SEQ ID NO: 317695
cuagcugugcgauucuuau

SEQ ID NO: 504788 - RNA, 19 nt, Artificial Sequence
  Description of Artificial Sequence: Synthetic oligonucleotide
  Antisense strand to SEQ ID NO: 504787
auaagaaucgcacagcuag

SEQ ID NO: 504789 - RNA, 19 nt, Artificial Sequence
  Description of Artificial Sequence: Synthetic oligonucleotide
  Sense strand starting at position 443 of SEQ ID NO: 317695
aaggaaugucagcagccua

SEQ ID NO: 504790 - RNA, 19 nt, Artificial Sequence
  Description of Artificial Sequence: Synthetic oligonucleotide
  Antisense strand to SEQ ID NO: 504789
uaggcugcugacauuccuu

SEQ ID NO: 504791 - RNA, 19 nt, Artificial Sequence
  Description of Artificial Sequence: Synthetic oligonucleotide
  Sense strand starting at position 448 of SEQ ID NO: 317695
augucagcagccuaagaaa

SEQ ID NO: 504792 - RNA, 19 nt, Artificial Sequence
  Description of Artificial Sequence: Synthetic oligonucleotide
  Antisense strand to SEQ ID NO: 504791
uuucuuaggcugcugacau

SEQ ID NO: 504793 - RNA, 19 nt, Artificial Sequence
  Description of Artificial Sequence: Synthetic oligonucleotide
  Sense strand starting at position 520 of SEQ ID NO: 317695
uaaucuuuggugggacacu

SEQ ID NO: 504794 - RNA, 19 nt, Artificial Sequence
  Description of Artificial Sequence: Synthetic oligonucleotide
  Antisense strand to SEQ ID NO: 504793
agugucccaccaaagauua

SEQ ID NO: 504795 - RNA, 19 nt, Artificial Sequence
  Description of Artificial Sequence: Synthetic oligonucleotide
  Sense strand starting at position 1348 of SEQ ID NO: 317695
ccuuguaccgcugauagaa

SEQ ID NO: 504796 - RNA, 19 nt, Artificial Sequence
  Description of Artificial Sequence: Synthetic oligonucleotide
  Antisense strand to SEQ ID NO: 504795
uucuaucagcgguacaagg

SEQ ID NO: 504797 - RNA, 19 nt, Artificial Sequence
  Description of Artificial Sequence: Synthetic oligonucleotide
  Sense strand starting at position 1595 of SEQ ID NO: 317695
uuaaauuugcacugugguu

SEQ ID NO: 504798 - RNA, 19 nt, Artificial Sequence
  Description of Artificial Sequence: Synthetic oligonucleotide
  Antisense strand to SEQ ID NO: 504797
aaccacagugcaaauuuaa

SEQ ID NO: 504799 - RNA, 19 nt, Artificial Sequence
  Description of Artificial Sequence: Synthetic oligonucleotide
  Sense strand starting at position 1627 of SEQ ID NO: 317695
agauguguucuuuaauaac

SEQ ID NO: 504800 - RNA, 19 nt, Artificial Sequence
  Description of Artificial Sequence: Synthetic oligonucleotide
  Antisense strand to SEQ ID NO: 504799
guuauuaaagaacacaucu

SEQ ID NO: 504801 - RNA, 19 nt, Artificial Sequence
  Description of Artificial Sequence: Synthetic oligonucleotide
  Sense strand starting at position 1761 of SEQ ID NO: 317695
ugguuaaaccucugacuca

SEQ ID NO: 504802 - RNA, 19 nt, Artificial Sequence
  Description of Artificial Sequence: Synthetic oligonucleotide
  Antisense strand to SEQ ID NO: 504801
ugagucagagguuuaacca

SEQ ID NO: 504803 - RNA, 19 nt, Artificial Sequence
  Description of Artificial Sequence: Synthetic oligonucleotide
  Sense strand starting at position 1786 of SEQ ID NO: 317695
gaaccaugaugucuagcua

SEQ ID NO: 504804 - RNA, 19 nt, Artificial Sequence
  Description of Artificial Sequence: Synthetic oligonucleotide
  Antisense strand to SEQ ID NO: 504803
uagcuagacaucaugguuc

SEQ ID NO: 504805 - RNA, 19 nt, Artificial Sequence
  Description of Artificial Sequence: Synthetic oligonucleotide
  Sense strand starting at position 1887 of SEQ ID NO: 317695
uucauuuaugcguagugua

SEQ ID NO: 504806 - RNA, 19 nt, Artificial Sequence
  Description of Artificial Sequence: Synthetic oligonucleotide
  Antisense strand to SEQ ID NO: 504805
uacacuacgcauaaaugaa

SEQ ID NO: 504807 - RNA, 19 nt, Artificial Sequence
  Description of Artificial Sequence: Synthetic oligonucleotide
  Sense strand starting at position 1997 of SEQ ID NO: 317695
caaguugcccugggaggau

SEQ ID NO: 504808 - RNA, 19 nt, Artificial Sequence
  Description of Artificial Sequence: Synthetic oligonucleotide
  Antisense strand to SEQ ID NO: 504807
auccucccagggcaacuug

SEQ ID NO: 504809 - RNA, 19 nt, Artificial Sequence
  Description of Artificial Sequence: Synthetic oligonucleotide
  Sense strand starting at position 2124 of SEQ ID NO: 317695
ucuaguuagccugaaauau

SEQ ID NO: 504810 - RNA, 19 nt, Artificial Sequence
  Description of Artificial Sequence: Synthetic oligonucleotide
  Antisense strand to SEQ ID NO: 504809
auauuucaggcuaacuaga

SEQ ID NO: 504811 - RNA, 19 nt, Artificial Sequence
  Description of Artificial Sequence: Synthetic oligonucleotide
  Sense strand starting at position 2188 of SEQ ID NO: 317695
ggaaguuagccguaugacc

SEQ ID NO: 504812 - RNA, 19 nt, Artificial Sequence
  Description of Artificial Sequence: Synthetic oligonucleotide
  Antisense strand to SEQ ID NO: 504811
ggucauacggcuaacuucc

SEQ ID NO: 504813 - RNA, 19 nt, Artificial Sequence
  Description of Artificial Sequence: Synthetic oligonucleotide
  Sense strand starting at position 2197 of SEQ ID NO: 317695
ccguaugaccaguagauuc

SEQ ID NO: 504814 - RNA, 19 nt, Artificial Sequence
  Description of Artificial Sequence: Synthetic oligonucleotide
  Antisense strand to SEQ ID NO: 504813
gaaucuacuggucauacgg

SEQ ID NO: 504815 - RNA, 19 nt, Artificial Sequence
  Description of Artificial Sequence: Synthetic oligonucleotide
  Sense strand starting at position 2239 of SEQ ID NO: 317695
cuacucugucuggagauau

SEQ ID NO: 504816 - RNA, 19 nt, Artificial Sequence
  Description of Artificial Sequence: Synthetic oligonucleotide
  Antisense strand to SEQ ID NO: 504815
auaucuccagacagaguag

SEQ ID NO: 504817 - RNA, 19 nt, Artificial Sequence
  Description of Artificial Sequence: Synthetic oligonucleotide
  Sense strand starting at position 2322 of SEQ ID NO: 317695
gagucugauuccguggaag

SEQ ID NO: 504818 - RNA, 19 nt, Artificial Sequence
  Description of Artificial Sequence: Synthetic oligonucleotide
  Antisense strand to SEQ ID NO: 504817
cuuccacggaaucagacuc

SEQ ID NO: 504819 - RNA, 19 nt, Artificial Sequence
  Description of Artificial Sequence: Synthetic oligonucleotide
  Sense strand starting at position 2334 of SEQ ID NO: 317695
guggaaguuguuuacaacu

SEQ ID NO: 504820 - RNA, 19 nt, Artificial Sequence
  Description of Artificial Sequence: Synthetic oligonucleotide
  Antisense strand to SEQ ID NO: 504819
aguuguaaacaacuuccac

SEQ ID NO: 504821 - RNA, 19 nt, Artificial Sequence
  Description of Artificial Sequence: Synthetic oligonucleotide
  Sense strand starting at position 2490 of SEQ ID NO: 317695
uuuaguauuccugaucugu

SEQ ID NO: 504822 - RNA, 19 nt, Artificial Sequence
  Description of Artificial Sequence: Synthetic oligonucleotide
  Antisense strand to SEQ ID NO: 504821
acagaucaggaauacuaaa

SEQ ID NO: 504823 - RNA, 19 nt, Artificial Sequence
  Description of Artificial Sequence: Synthetic oligonucleotide
  Sense strand starting at position 2501 of SEQ ID NO: 317695
ugaucuguucuuuggauug

SEQ ID NO: 504824 - RNA, 19 nt, Artificial Sequence
  Description of Artificial Sequence: Synthetic oligonucleotide
  Antisense strand to SEQ ID NO: 504823
caauccaaagaacagauca

SEQ ID NO: 504825 - RNA, 19 nt, Artificial Sequence
  Description of Artificial Sequence: Synthetic oligonucleotide
  Sense strand starting at position 2511 of SEQ ID NO: 317695
uuuggauuguccuuugaau

SEQ ID NO: 504826 - RNA, 19 nt, Artificial Sequence
  Description of Artificial Sequence: Synthetic oligonucleotide
  Antisense strand to SEQ ID NO: 504825
auucaaaggacaauccaaa

SEQ ID NO: 504827 - RNA, 19 nt, Artificial Sequence
  Description of Artificial Sequence: Synthetic oligonucleotide
  Sense strand starting at position 2513 of SEQ ID NO: 317695
uggauuguccuuugaauug

SEQ ID NO: 504828 - RNA, 19 nt, Artificial Sequence
  Description of Artificial Sequence: Synthetic oligonucleotide
  Antisense strand to SEQ ID NO: 504827
caauucaaaggacaaucca

SEQ ID NO: 504829 - RNA, 19 nt, Artificial Sequence
  Description of Artificial Sequence: Synthetic oligonucleotide
  Sense strand starting at position 2596 of SEQ ID NO: 317695
uuguaugagggucaugauu

SEQ ID NO: 504830 - RNA, 19 nt, Artificial Sequence
  Description of Artificial Sequence: Synthetic oligonucleotide
  Antisense strand to SEQ ID NO: 504829
aaucaugacccucauacaa

SEQ ID NO: 504831 - RNA, 19 nt, Artificial Sequence
  Description of Artificial Sequence: Synthetic oligonucleotide
  Sense strand starting at position 2688 of SEQ ID NO: 317695
gaaguagauuaguuuaugu

SEQ ID NO: 504832 - RNA, 19 nt, Artificial Sequence
  Description of Artificial Sequence: Synthetic oligonucleotide
  Antisense strand to SEQ ID NO: 504831
acauaaacuaaucuacuuc

SEQ ID NO: 504833 - RNA, 19 nt, Artificial Sequence
  Description of Artificial Sequence: Synthetic oligonucleotide
  Sense strand starting at position 2690 of SEQ ID NO: 317695
aguagauuaguuuauguug

SEQ ID NO: 504834 - RNA, 19 nt, Artificial Sequence
  Description of Artificial Sequence: Synthetic oligonucleotide
  Antisense strand to SEQ ID NO: 504833
caacauaaacuaaucuacu

SEQ ID NO: 504835 - RNA, 19 nt, Artificial Sequence
  Description of Artificial Sequence: Synthetic oligonucleotide
  Sense strand starting at position 2793 of SEQ ID NO: 317695
gagagaacuguuugacuca

SEQ ID NO: 504836 - RNA, 19 nt, Artificial Sequence
  Description of Artificial Sequence: Synthetic oligonucleotide
  Antisense strand to SEQ ID NO: 504835
ugagucaaacaguucucuc

SEQ ID NO: 504837 - RNA, 19 nt, Artificial Sequence
  Description of Artificial Sequence: Synthetic oligonucleotide
  Sense strand starting at position 2796 of SEQ ID NO: 317695
agaacuguuugacucauua

SEQ ID NO: 504838 - RNA, 19 nt, Artificial Sequence
  Description of Artificial Sequence: Synthetic oligonucleotide
  Antisense strand to SEQ ID NO: 504837
uaaugagucaaacaguucu

SEQ ID NO: 504839 - RNA, 19 nt, Artificial Sequence
  Description of Artificial Sequence: Synthetic oligonucleotide
  Sense strand starting at position 2809 of SEQ ID NO: 317695
ucauuaugucaaggguuga

SEQ ID NO: 504840 - RNA, 19 nt, Artificial Sequence
  Description of Artificial Sequence: Synthetic oligonucleotide
  Antisense strand to SEQ ID NO: 504839
ucaacccuugacauaauga

SEQ ID NO: 504841 - RNA, 19 nt, Artificial Sequence
  Description of Artificial Sequence: Synthetic oligonucleotide
  Sense strand starting at position 2942 of SEQ ID NO: 317695
aauaauugaugggugcuaa

SEQ ID NO: 504842 - RNA, 19 nt, Artificial Sequence
  Description of Artificial Sequence: Synthetic oligonucleotide
  Antisense strand to SEQ ID NO: 504841
uuagcacccaucaauuauu

SEQ ID NO: 504843 - RNA, 19 nt, Artificial Sequence
  Description of Artificial Sequence: Synthetic oligonucleotide
  Sense strand starting at position 2943 of SEQ ID NO: 317695
auaauugaugggugcuaau

SEQ ID NO: 504844 - RNA, 19 nt, Artificial Sequence
  Description of Artificial Sequence: Synthetic oligonucleotide
  Antisense strand to SEQ ID NO: 504843
auuagcacccaucaauuau

SEQ ID NO: 504845 - RNA, 19 nt, Artificial Sequence
  Description of Artificial Sequence: Synthetic oligonucleotide
  Sense strand starting at position 2955 of SEQ ID NO: 317695
ugcuaaucugcaggaacaa

SEQ ID NO: 504846 - RNA, 19 nt, Artificial Sequence
  Description of Artificial Sequence: Synthetic oligonucleotide
  Antisense strand to SEQ ID NO: 504845
uuguuccugcagauuagca

SEQ ID NO: 504847 - RNA, 19 nt, Artificial Sequence
  Description of Artificial Sequence: Synthetic oligonucleotide
  Sense strand starting at position 2956 of SEQ ID NO: 317695
gcuaaucugcaggaacaau

SEQ ID NO: 504848 - RNA, 19 nt, Artificial Sequence
  Description of Artificial Sequence: Synthetic oligonucleotide
  Antisense strand to SEQ ID NO: 504847
auuguuccugcagauuagc

SEQ ID NO: 504849 - RNA, 19 nt, Artificial Sequence
  Description of Artificial Sequence: Synthetic oligonucleotide
  Sense strand starting at position 3057 of SEQ ID NO: 317695
uuaauagugcucuggaaau

SEQ ID NO: 504850 - RNA, 19 nt, Artificial Sequence
  Description of Artificial Sequence: Synthetic oligonucleotide
  Antisense strand to SEQ ID NO: 504849
auuuccagagcacuauuaa

SEQ ID NO: 504851 - RNA, 19 nt, Artificial Sequence
  Description of Artificial Sequence: Synthetic oligonucleotide
  Sense strand starting at position 3059 of SEQ ID NO: 317695
aauagugcucuggaaaugu

SEQ ID NO: 504852 - RNA, 19 nt, Artificial Sequence
  Description of Artificial Sequence: Synthetic oligonucleotide
  Antisense strand to SEQ ID NO: 504851
acauuuccagagcacuauu

SEQ ID NO: 504853 - RNA, 19 nt, Artificial Sequence
  Description of Artificial Sequence: Synthetic oligonucleotide
  Sense strand starting at position 3076 of SEQ ID NO: 317695
gugcaaauugaagaguuaa

SEQ ID NO: 504854 - RNA, 19 nt, Artificial Sequence
  Description of Artificial Sequence: Synthetic oligonucleotide
  Antisense strand to SEQ ID NO: 504853
uuaacucuucaauuugcac

SEQ ID NO: 504855 - RNA, 19 nt, Artificial Sequence
  Description of Artificial Sequence: Synthetic oligonucleotide
  Sense strand starting at position 3161 of SEQ ID NO: 317695
ucaauuggaguuugauguu

SEQ ID NO: 504856 - RNA, 19 nt, Artificial Sequence
  Description of Artificial Sequence: Synthetic oligonucleotide
  Antisense strand to SEQ ID NO: 504855
aacaucaaacuccaauuga

SEQ ID NO: 504857 - RNA, 19 nt, Artificial Sequence
  Description of Artificial Sequence: Synthetic oligonucleotide
  Sense strand starting at position 3292 of SEQ ID NO: 317695
augggauaacuuuguuaag

SEQ ID NO: 504858 - RNA, 19 nt, Artificial Sequence
  Description of Artificial Sequence: Synthetic oligonucleotide
  Antisense strand to SEQ ID NO: 504857
cuuaacaaaguuaucccau

SEQ ID NO: 504859 - RNA, 19 nt, Artificial Sequence
  Description of Artificial Sequence: Synthetic oligonucleotide
  Sense strand starting at position 3294 of SEQ ID NO: 317695
gggauaacuuuguuaaggu

SEQ ID NO: 504860 - RNA, 19 nt, Artificial Sequence
  Description of Artificial Sequence: Synthetic oligonucleotide
  Antisense strand to SEQ ID NO: 504859
accuuaacaaaguuauccc

SEQ ID NO: 504861 - RNA, 19 nt, Artificial Sequence
  Description of Artificial Sequence: Synthetic oligonucleotide
  Sense strand starting at position 3531 of SEQ ID NO: 317695
gccuuucuacuguaaggaa

SEQ ID NO: 504862 - RNA, 19 nt, Artificial Sequence
  Description of Artificial Sequence: Synthetic oligonucleotide
  Antisense strand to SEQ ID NO: 504861
uuccuuacaguagaaaggc

SEQ ID NO: 504863 - RNA, 19 nt, Artificial Sequence
  Description of Artificial Sequence: Synthetic oligonucleotide
  Sense strand starting at position 3703 of SEQ ID NO: 317695
gcauguccucuugaaucuu

SEQ ID NO: 504864 - RNA, 19 nt, Artificial Sequence
  Description of Artificial Sequence: Synthetic oligonucleotide
  Antisense strand to SEQ ID NO: 504863
aagauucaagaggacaugc

SEQ ID NO: 504865 - RNA, 19 nt, Artificial Sequence
  Description of Artificial Sequence: Synthetic oligonucleotide
  Sense strand starting at position 3709 of SEQ ID NO: 317695
ccucuugaaucuuugagca

SEQ ID NO: 504866 - RNA, 19 nt, Artificial Sequence
  Description of Artificial Sequence: Synthetic oligonucleotide
  Antisense strand to SEQ ID NO: 504865
ugcucaaagauucaagagg

SEQ ID NO: 504867 - RNA, 19 nt, Artificial Sequence
  Description of Artificial Sequence: Synthetic oligonucleotide
  Sense strand starting at position 150 of SEQ ID NO: 317696
cugaguccuugccucaauu

SEQ ID NO: 504868 - RNA, 19 nt, Artificial Sequence
  Description of Artificial Sequence: Synthetic oligonucleotide
  Antisense strand to SEQ ID NO: 504867
aauugaggcaaggacucag

SEQ ID NO: 504869 - RNA, 19 nt, Artificial Sequence
  Description of Artificial Sequence: Synthetic oligonucleotide
  Sense strand starting at position 213 of SEQ ID NO: 317696
ggcuucugguuccugagau

SEQ ID NO: 504870 - RNA, 19 nt, Artificial Sequence
  Description of Artificial Sequence: Synthetic oligonucleotide
  Antisense strand to SEQ ID NO: 504869
aucucaggaaccagaagcc

SEQ ID NO: 504871 - RNA, 19 nt, Artificial Sequence
  Description of Artificial Sequence: Synthetic oligonucleotide
  Sense strand starting at position 409 of SEQ ID NO: 317696
gacauuuccuuguggagga

SEQ ID NO: 504872 - RNA, 19 nt, Artificial Sequence
  Description of Artificial Sequence: Synthetic oligonucleotide
  Antisense strand to SEQ ID NO: 504871
uccuccacaaggaaauguc

SEQ ID NO: 504873 - RNA, 19 nt, Artificial Sequence
  Description of Artificial Sequence: Synthetic oligonucleotide
  Sense strand starting at position 410 of SEQ ID NO: 317696
acauuuccuuguggaggaa

SEQ ID NO: 504874 - RNA, 19 nt, Artificial Sequence
  Description of Artificial Sequence: Synthetic oligonucleotide
  Antisense strand to SEQ ID NO: 504873
uuccuccacaaggaaaugu

SEQ ID NO: 504875 - RNA, 19 nt, Artificial Sequence
  Description of Artificial Sequence: Synthetic oligonucleotide
  Sense strand starting at position 575 of SEQ ID NO: 317696
gucuucucccaauguauuc

SEQ ID NO: 504876 - RNA, 19 nt, Artificial Sequence
  Description of Artificial Sequence: Synthetic oligonucleotide
  Antisense strand to SEQ ID NO: 504875
gaauacauugggagaagac

SEQ ID NO: 504877 - RNA, 19 nt, Artificial Sequence
  Description of Artificial Sequence: Synthetic oligonucleotide
  Sense strand starting at position 868 of SEQ ID NO: 317696
gaaugugaguguccuggaa

SEQ ID NO: 504878 - RNA, 19 nt, Artificial Sequence
  Description of Artificial Sequence: Synthetic oligonucleotide
  Antisense strand to SEQ ID NO: 504877
uuccaggacacucacauuc

SEQ ID NO: 504879 - RNA, 19 nt, Artificial Sequence
  Description of Artificial Sequence: Synthetic oligonucleotide
  Sense strand starting at position 872 of SEQ ID NO: 317696
gugaguguccuggaacauc

SEQ ID NO: 504880 - RNA, 19 nt, Artificial Sequence
  Description of Artificial Sequence: Synthetic oligonucleotide
  Antisense strand to SEQ ID NO: 504879
gauguuccaggacacucac

SEQ ID NO: 504881 - RNA, 19 nt, Artificial Sequence
  Description of Artificial Sequence: Synthetic oligonucleotide
  Sense strand starting at position 927 of SEQ ID NO: 317696
aguguaaaggaaggguaau

SEQ ID NO: 504882 - RNA, 19 nt, Artificial Sequence
  Description of Artificial Sequence: Synthetic oligonucleotide
  Antisense strand to SEQ ID NO: 504881
auuacccuuccuuuacacu

SEQ ID NO: 504883 - RNA, 19 nt, Artificial Sequence
  Description of Artificial Sequence: Synthetic oligonucleotide
  Sense strand starting at position 928 of SEQ ID NO: 317696
guguaaaggaaggguaauu

SEQ ID NO: 504884 - RNA, 19 nt, Artificial Sequence
  Description of Artificial Sequence: Synthetic oligonucleotide
  Antisense strand to SEQ ID NO: 504883
aauuacccuuccuuuacac

SEQ ID NO: 504885 - RNA, 19 nt, Artificial Sequence
  Description of Artificial Sequence: Synthetic oligonucleotide
  Sense strand starting at position 959 of SEQ ID NO: 317696
gggcgagggacuuacuaau

SEQ ID NO: 504886 - RNA, 19 nt, Artificial Sequence
  Description of Artificial Sequence: Synthetic oligonucleotide
  Antisense strand to SEQ ID NO: 504885
auuaguaagucccucgccc

SEQ ID NO: 504887 - RNA, 19 nt, Artificial Sequence
  Description of Artificial Sequence: Synthetic oligonucleotide
  Sense strand starting at position 1020 of SEQ ID NO: 317696
gugguacuggcaggagaaa

SEQ ID NO: 504888 - RNA, 19 nt, Artificial Sequence
  Description of Artificial Sequence: Synthetic oligonucleotide
  Antisense strand to SEQ ID NO: 504887
uuucuccugccaguaccac

SEQ ID NO: 504889 - RNA, 19 nt, Artificial Sequence
  Description of Artificial Sequence: Synthetic oligonucleotide
  Sense strand starting at position 1032 of SEQ ID NO: 317696
ggagaaaucuaucaacugg

SEQ ID NO: 504890 - RNA, 19 nt, Artificial Sequence
  Description of Artificial Sequence: Synthetic oligonucleotide
  Antisense strand to SEQ ID NO: 504889
ccaguugauagauuucucc

SEQ ID NO: 504891 - RNA, 19 nt, Artificial Sequence
  Description of Artificial Sequence: Synthetic oligonucleotide
  Sense strand starting at position 1039 of SEQ ID NO: 317696
ucuaucaacuggguugauu

SEQ ID NO: 504892 - RNA, 19 nt, Artificial Sequence
  Description of Artificial Sequence: Synthetic oligonucleotide
  Antisense strand to SEQ ID NO: 504891
aaucaacccaguugauaga

SEQ ID NO: 504893 - RNA, 19 nt, Artificial Sequence
  Description of Artificial Sequence: Synthetic oligonucleotide
  Sense strand starting at position 1133 of SEQ ID NO: 317696
gcagaugggcuggauguaa

SEQ ID NO: 504894 - RNA, 19 nt, Artificial Sequence
  Description of Artificial Sequence: Synthetic oligonucleotide
  Antisense strand to SEQ ID NO: 504893
uuacauccagcccaucugc

SEQ ID NO: 504895 - RNA, 19 nt, Artificial Sequence
  Description of Artificial Sequence: Synthetic oligonucleotide
  Sense strand starting at position 1199 of SEQ ID NO: 317696
ggucucgauaucugaacca

SEQ ID NO: 504896 - RNA, 19 nt, Artificial Sequence
  Description of Artificial Sequence: Synthetic oligonucleotide
  Antisense strand to SEQ ID NO: 504895
ugguucagauaucgagacc

SEQ ID NO: 504897 - RNA, 19 nt, Artificial Sequence
  Description of Artificial Sequence: Synthetic oligonucleotide
  Sense strand starting at position 1204 of SEQ ID NO: 317696
cgauaucugaaccauggua

SEQ ID NO: 504898 - RNA, 19 nt, Artificial Sequence
  Description of Artificial Sequence: Synthetic oligonucleotide
  Antisense strand to SEQ ID NO: 504897
uaccaugguucagauaucg

SEQ ID NO: 504899 - RNA, 19 nt, Artificial Sequence
  Description of Artificial Sequence: Synthetic oligonucleotide
  Sense strand starting at position 2104 of SEQ ID NO: 317696
cuuggaauucgauggaaca

SEQ ID NO: 504900 - RNA, 19 nt, Artificial Sequence
  Description of Artificial Sequence: Synthetic oligonucleotide
  Antisense strand to SEQ ID NO: 504899
uguuccaucgaauuccaag

SEQ ID NO: 504901 - RNA, 19 nt, Artificial Sequence
  Description of Artificial Sequence: Synthetic oligonucleotide
  Sense strand starting at position 2126 of SEQ ID NO: 317696
ccagaauggcugggucaga

SEQ ID NO: 504902 - RNA, 19 nt, Artificial Sequence
  Description of Artificial Sequence: Synthetic oligonucleotide
  Antisense strand to SEQ ID NO: 504901
ucugacccagccauucugg

SEQ ID NO: 504903 - RNA, 19 nt, Artificial Sequence
  Description of Artificial Sequence: Synthetic oligonucleotide
  Sense strand starting at position 2139 of SEQ ID NO: 317696
gucagacauuccucgauca

SEQ ID NO: 504904 - RNA, 19 nt, Artificial Sequence
  Description of Artificial Sequence: Synthetic oligonucleotide
  Antisense strand to SEQ ID NO: 504903
ugaucgaggaaugucugac

SEQ ID NO: 504905 - RNA, 19 nt, Artificial Sequence
  Description of Artificial Sequence: Synthetic oligonucleotide
  Sense strand starting at position 2140 of SEQ ID NO: 317696
ucagacauuccucgaucau

SEQ ID NO: 504906 - RNA, 19 nt, Artificial Sequence
  Description of Artificial Sequence: Synthetic oligonucleotide
  Antisense strand to SEQ ID NO: 504905
augaucgaggaaugucuga

SEQ ID NO: 504907 - RNA, 19 nt, Artificial Sequence
  Description of Artificial Sequence: Synthetic oligonucleotide
  Sense strand starting at position 2141 of SEQ ID NO: 317696
cagacauuccucgaucaug

SEQ ID NO: 504908 - RNA, 19 nt, Artificial Sequence
  Description of Artificial Sequence: Synthetic oligonucleotide
  Antisense strand to SEQ ID NO: 504907
caugaucgaggaaugucug

SEQ ID NO: 504909 - RNA, 19 nt, Artificial Sequence
  Description of Artificial Sequence: Synthetic oligonucleotide
  Sense strand starting at position 2282 of SEQ ID NO: 317696
agaacaagucaguggcuau

SEQ ID NO: 504910 - RNA, 19 nt, Artificial Sequence
  Description of Artificial Sequence: Synthetic oligonucleotide
  Antisense strand to SEQ ID NO: 504909
auagccacugacuuguucu

SEQ ID NO: 504911 - RNA, 19 nt, Artificial Sequence
  Description of Artificial Sequence: Synthetic oligonucleotide
  Sense strand starting at position 2294 of SEQ ID NO: 317696
uggcuaugucucuaaggcu

SEQ ID NO: 504912 - RNA, 19 nt, Artificial Sequence
  Description of Artificial Sequence: Synthetic oligonucleotide
  Antisense strand to SEQ ID NO: 504911
agccuuagagacauagcca

SEQ ID NO: 504913 - RNA, 19 nt, Artificial Sequence
  Description of Artificial Sequence: Synthetic oligonucleotide
  Sense strand starting at position 2580 of SEQ ID NO: 317696
guauauguugcaugaguga

SEQ ID NO: 504914 - RNA, 19 nt, Artificial Sequence
  Description of Artificial Sequence: Synthetic oligonucleotide
  Antisense strand to SEQ ID NO: 504913
ucacucaugcaacauauac

SEQ ID NO: 504915 - RNA, 19 nt, Artificial Sequence
  Description of Artificial Sequence: Synthetic oligonucleotide
  Sense strand starting at position 2687 of SEQ ID NO: 317696
cccgaugagcaucauaaau

SEQ ID NO: 504916 - RNA, 19 nt, Artificial Sequence
  Description of Artificial Sequence: Synthetic oligonucleotide
  Antisense strand to SEQ ID NO: 504915
auuuaugaugcucaucggg

SEQ ID NO: 504917 - RNA, 19 nt, Artificial Sequence
  Description of Artificial Sequence: Synthetic oligonucleotide
  Sense strand starting at position 2713 of SEQ ID NO: 317696
gcaagagauaguugucuug

SEQ ID NO: 504918 - RNA, 19 nt, Artificial Sequence
  Description of Artificial Sequence: Synthetic oligonucleotide
  Antisense strand to SEQ ID NO: 504917
caagacaacuaucucuugc

SEQ ID NO: 504919 - RNA, 19 nt, Artificial Sequence
  Description of Artificial Sequence: Synthetic oligonucleotide
  Sense strand starting at position 2720 of SEQ ID NO: 317696
auaguugucuugcccuaag

SEQ ID NO: 504920 - RNA, 19 nt, Artificial Sequence
  Description of Artificial Sequence: Synthetic oligonucleotide
  Antisense strand to SEQ ID NO: 504919
cuuagggcaagacaacuau

SEQ ID NO: 504921 - RNA, 19 nt, Artificial Sequence
  Description of Artificial Sequence: Synthetic oligonucleotide
  Sense strand starting at position 2883 of SEQ ID NO: 317696
ugugaaauguuagugacua

SEQ ID NO: 504922 - RNA, 19 nt, Artificial Sequence
  Description of Artificial Sequence: Synthetic oligonucleotide
  Antisense strand to SEQ ID NO: 504921
uagucacuaacauuucaca

SEQ ID NO: 504923 - RNA, 19 nt, Artificial Sequence
  Description of Artificial Sequence: Synthetic oligonucleotide
  Sense strand starting at position 2887 of SEQ ID NO: 317696
aaauguuagugacuaauug

SEQ ID NO: 504924 - RNA, 19 nt, Artificial Sequence
  Description of Artificial Sequence: Synthetic oligonucleotide
  Antisense strand to SEQ ID NO: 504923
caauuagucacuaacauuu

SEQ ID NO: 504925 - RNA, 19 nt, Artificial Sequence
  Description of Artificial Sequence: Synthetic oligonucleotide
  Sense strand starting at position 2891 of SEQ ID NO: 317696
guuagugacuaauugaaag

SEQ ID NO: 504926 - RNA, 19 nt, Artificial Sequence
  Description of Artificial Sequence: Synthetic oligonucleotide
  Antisense strand to SEQ ID NO: 504925
cuuucaauuagucacuaac

SEQ ID NO: 504927 - RNA, 19 nt, Artificial Sequence
  Description of Artificial Sequence: Synthetic oligonucleotide
  Sense strand starting at position 2919 of SEQ ID NO: 317696
agcacuuuguaggccaaau

SEQ ID NO: 504928 - RNA, 19 nt, Artificial Sequence
  Description of Artificial Sequence: Synthetic oligonucleotide
  Antisense strand to SEQ ID NO: 504927
auuuggccuacaaagugcu

SEQ ID NO: 504929 - RNA, 19 nt, Artificial Sequence
  Description of Artificial Sequence: Synthetic oligonucleotide
  Sense strand starting at position 2948 of SEQ ID NO: 317696
ccaggaauauaucagacca

SEQ ID NO: 504930 - RNA, 19 nt, Artificial Sequence
  Description of Artificial Sequence: Synthetic oligonucleotide
  Antisense strand to SEQ ID NO: 504929
uggucugauauauuccugg

SEQ ID NO: 504931 - RNA, 19 nt, Artificial Sequence
  Description of Artificial Sequence: Synthetic oligonucleotide
  Sense strand starting at position 2950 of SEQ ID NO: 317696
aggaauauaucagaccauc

SEQ ID NO: 504932 - RNA, 19 nt, Artificial Sequence
  Description of Artificial Sequence: Synthetic oligonucleotide
  Antisense strand to SEQ ID NO: 504931
gauggucugauauauuccu

SEQ ID NO: 504933 - RNA, 19 nt, Artificial Sequence
  Description of Artificial Sequence: Synthetic oligonucleotide
  Sense strand starting at position 3137 of SEQ ID NO: 317696
uguauuucccaguguuaug

SEQ ID NO: 504934 - RNA, 19 nt, Artificial Sequence
  Description of Artificial Sequence: Synthetic oligonucleotide
  Antisense strand to SEQ ID NO: 504933
cauaacacugggaaauaca

SEQ ID NO: 504935 - RNA, 19 nt, Artificial Sequence
  Description of Artificial Sequence: Synthetic oligonucleotide
  Sense strand starting at position 3147 of SEQ ID NO: 317696
aguguuauguuaccaugga

SEQ ID NO: 504936 - RNA, 19 nt, Artificial Sequence
  Description of Artificial Sequence: Synthetic oligonucleotide
  Antisense strand to SEQ ID NO: 504935
uccaugguaacauaacacu

SEQ ID NO: 504937 - RNA, 19 nt, Artificial Sequence
  Description of Artificial Sequence: Synthetic oligonucleotide
  Sense strand starting at position 3278 of SEQ ID NO: 317696
ugccaagauucugucauga

SEQ ID NO: 504938 - RNA, 19 nt, Artificial Sequence
  Description of Artificial Sequence: Synthetic oligonucleotide
  Antisense strand to SEQ ID NO: 504937
ucaugacagaaucuuggca

SEQ ID NO: 504939 - RNA, 19 nt, Artificial Sequence
  Description of Artificial Sequence: Synthetic oligonucleotide
  Sense strand starting at position 3359 of SEQ ID NO: 317696
gcccgugugaaucugcauu

SEQ ID NO: 504940 - RNA, 19 nt, Artificial Sequence
  Description of Artificial Sequence: Synthetic oligonucleotide
  Antisense strand to SEQ ID NO: 504939
aaugcagauucacacgggc

SEQ ID NO: 504941 - RNA, 19 nt, Artificial Sequence
  Description of Artificial Sequence: Synthetic oligonucleotide
  Sense strand starting at position 3471 of SEQ ID NO: 317696
guuguucuggcagaagaca

SEQ ID NO: 504942 - RNA, 19 nt, Artificial Sequence
  Description of Artificial Sequence: Synthetic oligonucleotide
  Antisense strand to SEQ ID NO: 504941
ugucuucugccagaacaac

SEQ ID NO: 504943 - RNA, 19 nt, Artificial Sequence
  Description of Artificial Sequence: Synthetic oligonucleotide
  Sense strand starting at position 3960 of SEQ ID NO: 317696
cuacaaugcucaguaaagu

SEQ ID NO: 504944 - RNA, 19 nt, Artificial Sequence
  Description of Artificial Sequence: Synthetic oligonucleotide
  Antisense strand to SEQ ID NO: 504943
acuuuacugagcauuguag

SEQ ID NO: 504945 - RNA, 19 nt, Artificial Sequence
  Description of Artificial Sequence: Synthetic oligonucleotide
  Sense strand starting at position 3961 of SEQ ID NO: 317696
uacaaugcucaguaaagug

SEQ ID NO: 504946 - RNA, 19 nt, Artificial Sequence
  Description of Artificial Sequence: Synthetic oligonucleotide
  Antisense strand to SEQ ID NO: 504945
cacuuuacugagcauugua

SEQ ID NO: 504947 - RNA, 19 nt, Artificial Sequence
  Description of Artificial Sequence: Synthetic oligonucleotide
  Sense strand starting at position 476 of SEQ ID NO: 317697
cucagucaucuuuggaagu

SEQ ID NO: 504948 - RNA, 19 nt, Artificial Sequence
  Description of Artificial Sequence: Synthetic oligonucleotide
  Antisense strand to SEQ ID NO: 504947
acuuccaaagaugacugag

SEQ ID NO: 504949 - RNA, 19 nt, Artificial Sequence
  Description of Artificial Sequence: Synthetic oligonucleotide
  Sense strand starting at position 675 of SEQ ID NO: 317697
gcaccauacuaguuugaga

SEQ ID NO: 504950 - RNA, 19 nt, Artificial Sequence
  Description of Artificial Sequence: Synthetic oligonucleotide
  Antisense strand to SEQ ID NO: 504949
ucucaaacuaguauggugc

SEQ ID NO: 504951 - RNA, 19 nt, Artificial Sequence
  Description of Artificial Sequence: Synthetic oligonucleotide
  Sense strand starting at position 756 of SEQ ID NO: 317697
uuugccuuugauuacaaga

SEQ ID NO: 504952 - RNA, 19 nt, Artificial Sequence
  Description of Artificial Sequence: Synthetic oligonucleotide
  Antisense strand to SEQ ID NO: 504951
ucuuguaaucaaaggcaaa

SEQ ID NO: 504953 - RNA, 19 nt, Artificial Sequence
  Description of Artificial Sequence: Synthetic oligonucleotide
  Sense strand starting at position 761 of SEQ ID NO: 317697
cuuugauuacaagagcacu

SEQ ID NO: 504954 - RNA, 19 nt, Artificial Sequence
  Description of Artificial Sequence: Synthetic oligonucleotide
  Antisense strand to SEQ ID NO: 504953
agugcucuuguaaucaaag

SEQ ID NO: 504955 - RNA, 19 nt, Artificial Sequence
  Description of Artificial Sequence: Synthetic oligonucleotide
  Sense strand starting at position 769 of SEQ ID NO: 317697
acaagagcacucuguaaua

SEQ ID NO: 504956 - RNA, 19 nt, Artificial Sequence
  Description of Artificial Sequence: Synthetic oligonucleotide
  Antisense strand to SEQ ID NO: 504955
uauuacagagugcucuugu

SEQ ID NO: 504957 - RNA, 19 nt, Artificial Sequence
  Description of Artificial Sequence: Synthetic oligonucleotide
  Sense strand starting at position 879 of SEQ ID NO: 317697
gcacauccagacuauguaa

SEQ ID NO: 504958 - RNA, 19 nt, Artificial Sequence
  Description of Artificial Sequence: Synthetic oligonucleotide
  Antisense strand to SEQ ID NO: 504957
uuacauagucuggaugugc

SEQ ID NO: 504959 - RNA, 19 nt, Artificial Sequence
  Description of Artificial Sequence: Synthetic oligonucleotide
  Sense strand starting at position 960 of SEQ ID NO: 317697
gccagauaugcuuaacacc

SEQ ID NO: 504960 - RNA, 19 nt, Artificial Sequence
  Description of Artificial Sequence: Synthetic oligonucleotide
  Antisense strand to SEQ ID NO: 504959
gguguuaagcauaucuggc

SEQ ID NO: 504961 - RNA, 19 nt, Artificial Sequence
  Description of Artificial Sequence: Synthetic oligonucleotide
  Sense strand starting at position 996 of SEQ ID NO: 317697
aguaacaccgagugauaau

SEQ ID NO: 504962 - RNA, 19 nt, Artificial Sequence
  Description of Artificial Sequence: Synthetic oligonucleotide
  Antisense strand to SEQ ID NO: 504961
auuaucacucgguguuacu

SEQ ID NO: 504963 - RNA, 19 nt, Artificial Sequence
  Description of Artificial Sequence: Synthetic oligonucleotide
  Sense strand starting at position 997 of SEQ ID NO: 317697
guaacaccgagugauaaua

SEQ ID NO: 504964 - RNA, 19 nt, Artificial Sequence
  Description of Artificial Sequence: Synthetic oligonucleotide
  Antisense strand to SEQ ID NO: 504963
uauuaucacucgguguuac

SEQ ID NO: 504965 - RNA, 19 nt, Artificial Sequence
  Description of Artificial Sequence: Synthetic oligonucleotide
  Sense strand starting at position 1136 of SEQ ID NO: 317697
acuguuuaaguuugggauu

SEQ ID NO: 504966 - RNA, 19 nt, Artificial Sequence
  Description of Artificial Sequence: Synthetic oligonucleotide
  Antisense strand to SEQ ID NO: 504965
aaucccaaacuuaaacagu

SEQ ID NO: 504967 - RNA, 19 nt, Artificial Sequence
  Description of Artificial Sequence: Synthetic oligonucleotide
  Sense strand starting at position 1258 of SEQ ID NO: 317697
uaucacagaccuggguaau

SEQ ID NO: 504968 - RNA, 19 nt, Artificial Sequence
  Description of Artificial Sequence: Synthetic oligonucleotide
  Antisense strand to SEQ ID NO: 504967
auuacccaggucugugaua

SEQ ID NO: 504969 - RNA, 19 nt, Artificial Sequence
  Description of Artificial Sequence: Synthetic oligonucleotide
  Sense strand starting at position 1259 of SEQ ID NO: 317697
aucacagaccuggguaaua

SEQ ID NO: 504970 - RNA, 19 nt, Artificial Sequence
  Description of Artificial Sequence: Synthetic oligonucleotide
  Antisense strand to SEQ ID NO: 504969
uauuacccaggucugugau

SEQ ID NO: 504971 - RNA, 19 nt, Artificial Sequence
  Description of Artificial Sequence: Synthetic oligonucleotide
  Sense strand starting at position 1372 of SEQ ID NO: 317697
ggagaugcagaauguuauu

SEQ ID NO: 504972 - RNA, 19 nt, Artificial Sequence
  Description of Artificial Sequence: Synthetic oligonucleotide
  Antisense strand to SEQ ID NO: 504971
aauaacauucugcaucucc

SEQ ID NO: 504973 - RNA, 19 nt, Artificial Sequence
  Description of Artificial Sequence: Synthetic oligonucleotide
  Sense strand starting at position 1460 of SEQ ID NO: 317697
aaucgaggucaguauuaaa

SEQ ID NO: 504974 - RNA, 19 nt, Artificial Sequence
  Description of Artificial Sequence: Synthetic oligonucleotide
  Antisense strand to SEQ ID NO: 504973
uuuaauacugaccucgauu

SEQ ID NO: 504975 - RNA, 19 nt, Artificial Sequence
  Description of Artificial Sequence: Synthetic oligonucleotide
  Sense strand starting at position 1541 of SEQ ID NO: 317697
ugugguguacgugugagua

SEQ ID NO: 504976 - RNA, 19 nt, Artificial Sequence
  Description of Artificial Sequence: Synthetic oligonucleotide
  Antisense strand to SEQ ID NO: 504975
uacucacacguacaccaca

SEQ ID NO: 504977 - RNA, 19 nt, Artificial Sequence
  Description of Artificial Sequence: Synthetic oligonucleotide
  Sense strand starting at position 1578 of SEQ ID NO: 317697
auguauuucuuucuuugca

SEQ ID NO: 504978 - RNA, 19 nt, Artificial Sequence
  Description of Artificial Sequence: Synthetic oligonucleotide
  Antisense strand to SEQ ID NO: 504977
ugcaaagaaagaaauacau

SEQ ID NO: 504979 - RNA, 19 nt, Artificial Sequence
  Description of Artificial Sequence: Synthetic oligonucleotide
  Sense strand starting at position 1579 of SEQ ID NO: 317697
uguauuucuuucuuugcau

SEQ ID NO: 504980 - RNA, 19 nt, Artificial Sequence
  Description of Artificial Sequence: Synthetic oligonucleotide
  Antisense strand to SEQ ID NO: 504979
augcaaagaaagaaauaca

SEQ ID NO: 504981 - RNA, 19 nt, Artificial Sequence
  Description of Artificial Sequence: Synthetic oligonucleotide
  Sense strand starting at position 2223 of SEQ ID NO: 317697
ccuaaaggcgauugaaaug

SEQ ID NO: 504982 - RNA, 19 nt, Artificial Sequence
  Description of Artificial Sequence: Synthetic oligonucleotide
  Antisense strand to SEQ ID NO: 504981
cauuucaaucgccuuuagg

SEQ ID NO: 504983 - RNA, 19 nt, Artificial Sequence
  Description of Artificial Sequence: Synthetic oligonucleotide
  Sense strand starting at position 2228 of SEQ ID NO: 317697
aggcgauugaaaugguacu

SEQ ID NO: 504984 - RNA, 19 nt, Artificial Sequence
  Description of Artificial Sequence: Synthetic oligonucleotide
  Antisense strand to SEQ ID NO: 504983
aguaccauuucaaucgccu

SEQ ID NO: 504985 - RNA, 19 nt, Artificial Sequence
  Description of Artificial Sequence: Synthetic oligonucleotide
  Sense strand starting at position 2348 of SEQ ID NO: 317697
cgcggcugucacuuaaguu

SEQ ID NO: 504986 - RNA, 19 nt, Artificial Sequence
  Description of Artificial Sequence: Synthetic oligonucleotide
  Antisense strand to SEQ ID NO: 504985
aacuuaagugacagccgcg

SEQ ID NO: 504987 - RNA, 19 nt, Artificial Sequence
  Description of Artificial Sequence: Synthetic oligonucleotide
  Sense strand starting at position 2441 of SEQ ID NO: 317697
auaccuucccagggaaauc

SEQ ID NO: 504988 - RNA, 19 nt, Artificial Sequence
  Description of Artificial Sequence: Synthetic oligonucleotide
  Antisense strand to SEQ ID NO: 504987
gauuucccugggaagguau

SEQ ID NO: 504989 - RNA, 19 nt, Artificial Sequence
  Description of Artificial Sequence: Synthetic oligonucleotide
  Sense strand starting at position 2505 of SEQ ID NO: 317697
gauuuacugugcucccaug

SEQ ID NO: 504990 - RNA, 19 nt, Artificial Sequence
  Description of Artificial Sequence: Synthetic oligonucleotide
  Antisense strand to SEQ ID NO: 504989
caugggagcacaguaaauc

SEQ ID NO: 504991 - RNA, 19 nt, Artificial Sequence
  Description of Artificial Sequence: Synthetic oligonucleotide
  Sense strand starting at position 2627 of SEQ ID NO: 317697
ggaaaugggcugugugaca

SEQ ID NO: 504992 - RNA, 19 nt, Artificial Sequence
  Description of Artificial Sequence: Synthetic oligonucleotide
  Antisense strand to SEQ ID NO: 504991
ugucacacagcccauuucc

SEQ ID NO: 504993 - RNA, 19 nt, Artificial Sequence
  Description of Artificial Sequence: Synthetic oligonucleotide
  Sense strand starting at position 2638 of SEQ ID NO: 317697
gugugacauguucaguuag

SEQ ID NO: 504994 - RNA, 19 nt, Artificial Sequence
  Description of Artificial Sequence: Synthetic oligonucleotide
  Antisense strand to SEQ ID NO: 504993
cuaacugaacaugucacac

SEQ ID NO: 504995 - RNA, 19 nt, Artificial Sequence
  Description of Artificial Sequence: Synthetic oligonucleotide
  Sense strand starting at position 2785 of SEQ ID NO: 317697
ucuaguuucggguauauaa

SEQ ID NO: 504996 - RNA, 19 nt, Artificial Sequence
  Description of Artificial Sequence: Synthetic oligonucleotide
  Antisense strand to SEQ ID NO: 504995
uuauauacccgaaacuaga

SEQ ID NO: 504997 - RNA, 19 nt, Artificial Sequence
  Description of Artificial Sequence: Synthetic oligonucleotide
  Sense strand starting at position 2787 of SEQ ID NO: 317697
uaguuucggguauauaauu

SEQ ID NO: 504998 - RNA, 19 nt, Artificial Sequence
  Description of Artificial Sequence: Synthetic oligonucleotide
  Antisense strand to SEQ ID NO: 504997
aauuauauacccgaaacua

SEQ ID NO: 504999 - RNA, 19 nt, Artificial Sequence
  Description of Artificial Sequence: Synthetic oligonucleotide
  Sense strand starting at position 2972 of SEQ ID NO: 317697
gcguuauacuaagcauuua

SEQ ID NO: 505000 - RNA, 19 nt, Artificial Sequence
  Description of Artificial Sequence: Synthetic oligonucleotide
  Antisense strand to SEQ ID NO: 504999
uaaaugcuuaguauaacgc

SEQ ID NO: 505001 - RNA, 19 nt, Artificial Sequence
  Description of Artificial Sequence: Synthetic oligonucleotide
  Sense strand starting at position 3087 of SEQ ID NO: 317697
uuaaaugacuggccugagu

SEQ ID NO: 505002 - RNA, 19 nt, Artificial Sequence
  Description of Artificial Sequence: Synthetic oligonucleotide
  Antisense strand to SEQ ID NO: 505001
acucaggccagucauuuaa

SEQ ID NO: 505003 - RNA, 19 nt, Artificial Sequence
  Description of Artificial Sequence: Synthetic oligonucleotide
  Sense strand starting at position 3089 of SEQ ID NO: 317697
aaaugacuggccugaguuu

SEQ ID NO: 505004 - RNA, 19 nt, Artificial Sequence
  Description of Artificial Sequence: Synthetic oligonucleotide
  Antisense strand to SEQ ID NO: 505003
aaacucaggccagucauuu

SEQ ID NO: 505005 - RNA, 19 nt, Artificial Sequence
  Description of Artificial Sequence: Synthetic oligonucleotide
  Sense strand starting at position 3090 of SEQ ID NO: 317697
aaugacuggccugaguuua

SEQ ID NO: 505006 - RNA, 19 nt, Artificial Sequence
  Description of Artificial Sequence: Synthetic oligonucleotide
  Antisense strand to SEQ ID NO: 505005
uaaacucaggccagucauu

SEQ ID NO: 505007 - RNA, 19 nt, Artificial Sequence
  Description of Artificial Sequence: Synthetic oligonucleotide
  Sense strand starting at position 3171 of SEQ ID NO: 317697
cucugucugcaguuaguuu

SEQ ID NO: 505008 - RNA, 19 nt, Artificial Sequence
  Description of Artificial Sequence: Synthetic oligonucleotide
  Antisense strand to SEQ ID NO: 505007
aaacuaacugcagacagag

SEQ ID NO: 505009 - RNA, 19 nt, Artificial Sequence
  Description of Artificial Sequence: Synthetic oligonucleotide
  Sense strand starting at position 3212 of SEQ ID NO: 317697
uuacucaagcagcaugaua

SEQ ID NO: 505010 - RNA, 19 nt, Artificial Sequence
  Description of Artificial Sequence: Synthetic oligonucleotide
  Antisense strand to SEQ ID NO: 505009
uaucaugcugcuugaguaa

SEQ ID NO: 505011 - RNA, 19 nt, Artificial Sequence
  Description of Artificial Sequence: Synthetic oligonucleotide
  Sense strand starting at position 3214 of SEQ ID NO: 317697
acucaagcagcaugauaaa

SEQ ID NO: 505012 - RNA, 19 nt, Artificial Sequence
  Description of Artificial Sequence: Synthetic oligonucleotide
  Antisense strand to SEQ ID NO: 505011
uuuaucaugcugcuugagu

SEQ ID NO: 505013 - RNA, 19 nt, Artificial Sequence
  Description of Artificial Sequence: Synthetic oligonucleotide
  Sense strand starting at position 3225 of SEQ ID NO: 317697
augauaaagaucugcggga

SEQ ID NO: 505014 - RNA, 19 nt, Artificial Sequence
  Description of Artificial Sequence: Synthetic oligonucleotide
  Antisense strand to SEQ ID NO: 505013
ucccgcagaucuuuaucau

SEQ ID NO: 505015 - RNA, 19 nt, Artificial Sequence
  Description of Artificial Sequence: Synthetic oligonucleotide
  Sense strand starting at position 3576 of SEQ ID NO: 317697
acaauagucucaguuuaca

SEQ ID NO: 505016 - RNA, 19 nt, Artificial Sequence
  Description of Artificial Sequence: Synthetic oligonucleotide
  Antisense strand to SEQ ID NO: 505015
uguaaacugagacuauugu

SEQ ID NO: 505017 - RNA, 19 nt, Artificial Sequence
  Description of Artificial Sequence: Synthetic oligonucleotide
  Sense strand starting at position 3584 of SEQ ID NO: 317697
cucaguuuacaugaguuua

SEQ ID NO: 505018 - RNA, 19 nt, Artificial Sequence
  Description of Artificial Sequence: Synthetic oligonucleotide
  Antisense strand to SEQ ID NO: 505017
uaaacucauguaaacugag

SEQ ID NO: 505019 - RNA, 19 nt, Artificial Sequence
  Description of Artificial Sequence: Synthetic oligonucleotide
  Sense strand starting at position 3586 of SEQ ID NO: 317697
caguuuacaugaguuuaga

SEQ ID NO: 505020 - RNA, 19 nt, Artificial Sequence
  Description of Artificial Sequence: Synthetic oligonucleotide
  Antisense strand to SEQ ID NO: 505019
ucuaaacucauguaaacug

SEQ ID NO: 505021 - RNA, 19 nt, Artificial Sequence
  Description of Artificial Sequence: Synthetic oligonucleotide
  Sense strand starting at position 3695 of SEQ ID NO: 317697
ugaguuaauuuggaaugua

SEQ ID NO: 505022 - RNA, 19 nt, Artificial Sequence
  Description of Artificial Sequence: Synthetic oligonucleotide
  Antisense strand to SEQ ID NO: 505021
uacauuccaaauuaacuca

SEQ ID NO: 505023 - RNA, 19 nt, Artificial Sequence
  Description of Artificial Sequence: Synthetic oligonucleotide
  Sense strand starting at position 3831 of SEQ ID NO: 317697
ggacauguacucugaugac

SEQ ID NO: 505024 - RNA, 19 nt, Artificial Sequence
  Description of Artificial Sequence: Synthetic oligonucleotide
  Antisense strand to SEQ ID NO: 505023
gucaucagaguacaugucc

SEQ ID NO: 505025 - RNA, 19 nt, Artificial Sequence
  Description of Artificial Sequence: Synthetic oligonucleotide
  Sense strand starting at position 3954 of SEQ ID NO: 317697
gacguugugcuggaagaau

SEQ ID NO: 505026 - RNA, 19 nt, Artificial Sequence
  Description of Artificial Sequence: Synthetic oligonucleotide
  Antisense strand to SEQ ID NO: 505025
auucuuccagcacaacguc

SEQ ID NO: 505027 - RNA, 19 nt, Artificial Sequence
  Description of Artificial Sequence: Synthetic oligonucleotide
  Sense strand starting at position 4 of SEQ ID NO: 317698
acauguaguuugucacaaa

SEQ ID NO: 505028 - RNA, 19 nt, Artificial Sequence
  Description of Artificial Sequence: Synthetic oligonucleotide
  Antisense strand to SEQ ID NO: 505027
uuugugacaaacuacaugu

SEQ ID NO: 505029 - RNA, 19 nt, Artificial Sequence
  Description of Artificial Sequence: Synthetic oligonucleotide
  Sense strand starting at position 255 of SEQ ID NO: 317698
ggucaaaguucuguaacau

SEQ ID NO: 505030 - RNA, 19 nt, Artificial Sequence
  Description of Artificial Sequence: Synthetic oligonucleotide
  Antisense strand to SEQ ID NO: 505029
auguuacagaacuuugacc

SEQ ID NO: 505031 - RNA, 19 nt, Artificial Sequence
  Description of Artificial Sequence: Synthetic oligonucleotide
  Sense strand starting at position 256 of SEQ ID NO: 317698
gucaaaguucuguaacauu

SEQ ID NO: 505032 - RNA, 19 nt, Artificial Sequence
  Description of Artificial Sequence: Synthetic oligonucleotide
  Antisense strand to SEQ ID NO: 505031
aauguuacagaacuuugac

SEQ ID NO: 505033 - RNA, 19 nt, Artificial Sequence
  Description of Artificial Sequence: Synthetic oligonucleotide
  Sense strand starting at position 275 of SEQ ID NO: 317698
uccucuggucacuguuuaa

SEQ ID NO: 505034 - RNA, 19 nt, Artificial Sequence
  Description of Artificial Sequence: Synthetic oligonucleotide
  Antisense strand to SEQ ID NO: 505033
uuaaacagugaccagagga

SEQ ID NO: 505035 - RNA, 19 nt, Artificial Sequence
  Description of Artificial Sequence: Synthetic oligonucleotide
  Sense strand starting at position 312 of SEQ ID NO: 317698
aaaggauucuacuuggagu

SEQ ID NO: 505036 - RNA, 19 nt, Artificial Sequence
  Description of Artificial Sequence: Synthetic oligonucleotide
  Antisense strand to SEQ ID NO: 505035
acuccaaguagaauccuuu

SEQ ID NO: 505037 - RNA, 19 nt, Artificial Sequence
  Description of Artificial Sequence: Synthetic oligonucleotide
  Sense strand starting at position 561 of SEQ ID NO: 317698
guaaguuugauagguuaga

SEQ ID NO: 505038 - RNA, 19 nt, Artificial Sequence
  Description of Artificial Sequence: Synthetic oligonucleotide
  Antisense strand to SEQ ID NO: 505037
ucuaaccuaucaaacuuac

SEQ ID NO: 505039 - RNA, 19 nt, Artificial Sequence
  Description of Artificial Sequence: Synthetic oligonucleotide
  Sense strand starting at position 900 of SEQ ID NO: 317698
gcuaauauccuacaaggca

SEQ ID NO: 505040 - RNA, 19 nt, Artificial Sequence
  Description of Artificial Sequence: Synthetic oligonucleotide
  Antisense strand to SEQ ID NO: 505039
ugccuuguaggauauuagc

SEQ ID NO: 505041 - RNA, 19 nt, Artificial Sequence
  Description of Artificial Sequence: Synthetic oligonucleotide
  Sense strand starting at position 929 of SEQ ID NO: 317698
aaccuuuaggaguacugua

SEQ ID NO: 505042 - RNA, 19 nt, Artificial Sequence
  Description of Artificial Sequence: Synthetic oligonucleotide
  Antisense strand to SEQ ID NO: 505041
uacaguacuccuaaagguu

SEQ ID NO: 505043 - RNA, 19 nt, Artificial Sequence
  Description of Artificial Sequence: Synthetic oligonucleotide
  Sense strand starting at position 1269 of SEQ ID NO: 317698
gaaagaccuguuggcucua

SEQ ID NO: 505044 - RNA, 19 nt, Artificial Sequence
  Description of Artificial Sequence: Synthetic oligonucleotide
  Antisense strand to SEQ ID NO: 505043
uagagccaacaggucuuuc

SEQ ID NO: 505045 - RNA, 19 nt, Artificial Sequence
  Description of Artificial Sequence: Synthetic oligonucleotide
  Sense strand starting at position 1271 of SEQ ID NO: 317698
aagaccuguuggcucuaaa

SEQ ID NO: 505046 - RNA, 19 nt, Artificial Sequence
  Description of Artificial Sequence: Synthetic oligonucleotide
  Antisense strand to SEQ ID NO: 505045
uuuagagccaacaggucuu

SEQ ID NO: 505047 - RNA, 19 nt, Artificial Sequence
  Description of Artificial Sequence: Synthetic oligonucleotide
  Sense strand starting at position 1274 of SEQ ID NO: 317698
accuguuggcucuaaauau

SEQ ID NO: 505048 - RNA, 19 nt, Artificial Sequence
  Description of Artificial Sequence: Synthetic oligonucleotide
  Antisense strand to SEQ ID NO: 505047
auauuuagagccaacaggu

SEQ ID NO: 505049 - RNA, 19 nt, Artificial Sequence
  Description of Artificial Sequence: Synthetic oligonucleotide
  Sense strand starting at position 1296 of SEQ ID NO: 317698
guuauuccuccugauacuu

SEQ ID NO: 505050 - RNA, 19 nt, Artificial Sequence
  Description of Artificial Sequence: Synthetic oligonucleotide
  Antisense strand to SEQ ID NO: 505049
aaguaucaggaggaauaac

SEQ ID NO: 505051 - RNA, 19 nt, Artificial Sequence
  Description of Artificial Sequence: Synthetic oligonucleotide
  Sense strand starting at position 1358 of SEQ ID NO: 317698
ccaguaauuuaauacuguu

SEQ ID NO: 505052 - RNA, 19 nt, Artificial Sequence
  Description of Artificial Sequence: Synthetic oligonucleotide
  Antisense strand to SEQ ID NO: 505051
aacaguauuaaauuacugg

SEQ ID NO: 505053 - RNA, 19 nt, Artificial Sequence
  Description of Artificial Sequence: Synthetic oligonucleotide
  Sense strand starting at position 1384 of SEQ ID NO: 317698
aagauuugcuaucaguaug

SEQ ID NO: 505054 - RNA, 19 nt, Artificial Sequence
  Description of Artificial Sequence: Synthetic oligonucleotide
  Antisense strand to SEQ ID NO: 505053
cauacugauagcaaaucuu

SEQ ID NO: 505055 - RNA, 19 nt, Artificial Sequence
  Description of Artificial Sequence: Synthetic oligonucleotide
  Sense strand starting at position 1389 of SEQ ID NO: 317698
uugcuaucaguauguggau

SEQ ID NO: 505056 - RNA, 19 nt, Artificial Sequence
  Description of Artificial Sequence: Synthetic oligonucleotide
  Antisense strand to SEQ ID NO: 505055
auccacauacugauagcaa

SEQ ID NO: 505057 - RNA, 19 nt, Artificial Sequence
  Description of Artificial Sequence: Synthetic oligonucleotide
  Sense strand starting at position 1390 of SEQ ID NO: 317698
ugcuaucaguauguggauu

SEQ ID NO: 505058 - RNA, 19 nt, Artificial Sequence
  Description of Artificial Sequence: Synthetic oligonucleotide
  Antisense strand to SEQ ID NO: 505057
aauccacauacugauagca

SEQ ID NO: 505059 - RNA, 19 nt, Artificial Sequence
  Description of Artificial Sequence: Synthetic oligonucleotide
  Sense strand starting at position 1391 of SEQ ID NO: 317698
gcuaucaguauguggauuu

SEQ ID NO: 505060 - RNA, 19 nt, Artificial Sequence
  Description of Artificial Sequence: Synthetic oligonucleotide
  Antisense strand to SEQ ID NO: 505059
aaauccacauacugauagc

SEQ ID NO: 505061 - RNA, 19 nt, Artificial Sequence
  Description of Artificial Sequence: Synthetic oligonucleotide
  Sense strand starting at position 2529 of SEQ ID NO: 317698
ggguaaucgaacugaaaua

SEQ ID NO: 505062 - RNA, 19 nt, Artificial Sequence
  Description of Artificial Sequence: Synthetic oligonucleotide
  Antisense strand to SEQ ID NO: 505061
uauuucaguucgauuaccc

SEQ ID NO: 505063 - RNA, 19 nt, Artificial Sequence
  Description of Artificial Sequence: Synthetic oligonucleotide
  Sense strand starting at position 2687 of SEQ ID NO: 317698
uacuacaguuguguaagau

SEQ ID NO: 505064 - RNA, 19 nt, Artificial Sequence
  Description of Artificial Sequence: Synthetic oligonucleotide
  Antisense strand to SEQ ID NO: 505063
aucuuacacaacuguagua

SEQ ID NO: 505065 - RNA, 19 nt, Artificial Sequence
  Description of Artificial Sequence: Synthetic oligonucleotide
  Sense strand starting at position 2688 of SEQ ID NO: 317698
acuacaguuguguaagaug

SEQ ID NO: 505066 - RNA, 19 nt, Artificial Sequence
  Description of Artificial Sequence: Synthetic oligonucleotide
  Antisense strand to SEQ ID NO: 505065
caucuuacacaacuguagu

SEQ ID NO: 505067 - RNA, 19 nt, Artificial Sequence
  Description of Artificial Sequence: Synthetic oligonucleotide
  Sense strand starting at position 2765 of SEQ ID NO: 317698
ugcaauuuccugugucuau

SEQ ID NO: 505068 - RNA, 19 nt, Artificial Sequence
  Description of Artificial Sequence: Synthetic oligonucleotide
  Antisense strand to SEQ ID NO: 505067
auagacacaggaaauugca

SEQ ID NO: 505069 - RNA, 19 nt, Artificial Sequence
  Description of Artificial Sequence: Synthetic oligonucleotide
  Sense strand starting at position 2766 of SEQ ID NO: 317698
gcaauuuccugugucuaua

SEQ ID NO: 505070 - RNA, 19 nt, Artificial Sequence
  Description of Artificial Sequence: Synthetic oligonucleotide
  Antisense strand to SEQ ID NO: 505069
uauagacacaggaaauugc

SEQ ID NO: 505071 - RNA, 19 nt, Artificial Sequence
  Description of Artificial Sequence: Synthetic oligonucleotide
  Sense strand starting at position 2898 of SEQ ID NO: 317698
gugauuguguuggugacua

SEQ ID NO: 505072 - RNA, 19 nt, Artificial Sequence
  Description of Artificial Sequence: Synthetic oligonucleotide
  Antisense strand to SEQ ID NO: 505071
uagucaccaacacaaucac

SEQ ID NO: 505073 - RNA, 19 nt, Artificial Sequence
  Description of Artificial Sequence: Synthetic oligonucleotide
  Sense strand starting at position 2900 of SEQ ID NO: 317698
gauuguguuggugacuaaa

SEQ ID NO: 505074 - RNA, 19 nt, Artificial Sequence
  Description of Artificial Sequence: Synthetic oligonucleotide
  Antisense strand to SEQ ID NO: 505073
uuuagucaccaacacaauc

SEQ ID NO: 505075 - RNA, 19 nt, Artificial Sequence
  Description of Artificial Sequence: Synthetic oligonucleotide
  Sense strand starting at position 2903 of SEQ ID NO: 317698
uguguuggugacuaaacca

SEQ ID NO: 505076 - RNA, 19 nt, Artificial Sequence
  Description of Artificial Sequence: Synthetic oligonucleotide
  Antisense strand to SEQ ID NO: 505075
ugguuuagucaccaacaca

SEQ ID NO: 505077 - RNA, 19 nt, Artificial Sequence
  Description of Artificial Sequence: Synthetic oligonucleotide
  Sense strand starting at position 2911 of SEQ ID NO: 317698
ugacuaaaccacuguuuga

SEQ ID NO: 505078 - RNA, 19 nt, Artificial Sequence
  Description of Artificial Sequence: Synthetic oligonucleotide
  Antisense strand to SEQ ID NO: 505077
ucaaacagugguuuaguca

SEQ ID NO: 505079 - RNA, 19 nt, Artificial Sequence
  Description of Artificial Sequence: Synthetic oligonucleotide
  Sense strand starting at position 3095 of SEQ ID NO: 317698
aaggcaguguguucugaau

SEQ ID NO: 505080 - RNA, 19 nt, Artificial Sequence
  Description of Artificial Sequence: Synthetic oligonucleotide
  Antisense strand to SEQ ID NO: 505079
auucagaacacacugccuu

SEQ ID NO: 505081 - RNA, 19 nt, Artificial Sequence
  Description of Artificial Sequence: Synthetic oligonucleotide
  Sense strand starting at position 3101 of SEQ ID NO: 317698
guguguucugaaugagagc

SEQ ID NO: 505082 - RNA, 19 nt, Artificial Sequence
  Description of Artificial Sequence: Synthetic oligonucleotide
  Antisense strand to SEQ ID NO: 505081
gcucucauucagaacacac

SEQ ID NO: 505083 - RNA, 19 nt, Artificial Sequence
  Description of Artificial Sequence: Synthetic oligonucleotide
  Sense strand starting at position 3131 of SEQ ID NO: 317698
aggugucuccaucaacuuu

SEQ ID NO: 505084 - RNA, 19 nt, Artificial Sequence
  Description of Artificial Sequence: Synthetic oligonucleotide
  Antisense strand to SEQ ID NO: 505083
aaaguugauggagacaccu

SEQ ID NO: 505085 - RNA, 19 nt, Artificial Sequence
  Description of Artificial Sequence: Synthetic oligonucleotide
  Sense strand starting at position 3502 of SEQ ID NO: 317698
aguuaaccuccauguacuu

SEQ ID NO: 505086 - RNA, 19 nt, Artificial Sequence
  Description of Artificial Sequence: Synthetic oligonucleotide
  Antisense strand to SEQ ID NO: 505085
aaguacauggagguuaacu

SEQ ID NO: 505087 - RNA, 19 nt, Artificial Sequence
  Description of Artificial Sequence: Synthetic oligonucleotide
  Sense strand starting at position 3547 of SEQ ID NO: 317698
gaaugauauuggccuguuu

SEQ ID NO: 505088 - RNA, 19 nt, Artificial Sequence
  Description of Artificial Sequence: Synthetic oligonucleotide
  Antisense strand to SEQ ID NO: 505087
aaacaggccaauaucauuc

SEQ ID NO: 505089 - RNA, 19 nt, Artificial Sequence
  Description of Artificial Sequence: Synthetic oligonucleotide
  Sense strand starting at position 3549 of SEQ ID NO: 317698
augauauuggccuguuuau

SEQ ID NO: 505090 - RNA, 19 nt, Artificial Sequence
  Description of Artificial Sequence: Synthetic oligonucleotide
  Antisense strand to SEQ ID NO: 505089
auaaacaggccaauaucau

SEQ ID NO: 505091 - RNA, 19 nt, Artificial Sequence
  Description of Artificial Sequence: Synthetic oligonucleotide
  Sense strand starting at position 3561 of SEQ ID NO: 317698
uguuuauguguuuacccua

SEQ ID NO: 505092 - RNA, 19 nt, Artificial Sequence
  Description of Artificial Sequence: Synthetic oligonucleotide
  Antisense strand to SEQ ID NO: 505091
uaggguaaacacauaaaca

SEQ ID NO: 505093 - RNA, 19 nt, Artificial Sequence
  Description of Artificial Sequence: Synthetic oligonucleotide
  Sense strand starting at position 3564 of SEQ ID NO: 317698
uuauguguuuacccuacaa

SEQ ID NO: 505094 - RNA, 19 nt, Artificial Sequence
  Description of Artificial Sequence: Synthetic oligonucleotide
  Antisense strand to SEQ ID NO: 505093
uuguaggguaaacacauaa

SEQ ID NO: 505095 - RNA, 19 nt, Artificial Sequence
  Description of Artificial Sequence: Synthetic oligonucleotide
  Sense strand starting at position 3566 of SEQ ID NO: 317698
auguguuuacccuacaaca

SEQ ID NO: 505096 - RNA, 19 nt, Artificial Sequence
  Description of Artificial Sequence: Synthetic oligonucleotide
  Antisense strand to SEQ ID NO: 505095
uguuguaggguaaacacau

SEQ ID NO: 505097 - RNA, 19 nt, Artificial Sequence
  Description of Artificial Sequence: Synthetic oligonucleotide
  Sense strand starting at position 3568 of SEQ ID NO: 317698
guguuuacccuacaacacu

SEQ ID NO: 505098 - RNA, 19 nt, Artificial Sequence
  Description of Artificial Sequence: Synthetic oligonucleotide
  Antisense strand to SEQ ID NO: 505097
aguguuguaggguaaacac

SEQ ID NO: 505099 - RNA, 19 nt, Artificial Sequence
  Description of Artificial Sequence: Synthetic oligonucleotide
  Sense strand starting at position 3605 of SEQ ID NO: 317698
acggucugucaucauagca

SEQ ID NO: 505100 - RNA, 19 nt, Artificial Sequence
  Description of Artificial Sequence: Synthetic oligonucleotide
  Antisense strand to SEQ ID NO: 505099
ugcuaugaugacagaccgu

SEQ ID NO: 505101 - RNA, 19 nt, Artificial Sequence
  Description of Artificial Sequence: Synthetic oligonucleotide
  Sense strand starting at position 3711 of SEQ ID NO: 317698
ggaggaaaugcaugcaagu

SEQ ID NO: 505102 - RNA, 19 nt, Artificial Sequence
  Description of Artificial Sequence: Synthetic oligonucleotide
  Antisense strand to SEQ ID NO: 505101
acuugcaugcauuuccucc

SEQ ID NO: 505103 - RNA, 19 nt, Artificial Sequence
  Description of Artificial Sequence: Synthetic oligonucleotide
  Sense strand starting at position 3713 of SEQ ID NO: 317698
aggaaaugcaugcaaguuu

SEQ ID NO: 505104 - RNA, 19 nt, Artificial Sequence
  Description of Artificial Sequence: Synthetic oligonucleotide
  Antisense strand to SEQ ID NO: 505103
aaacuugcaugcauuuccu

SEQ ID NO: 505105 - RNA, 19 nt, Artificial Sequence
  Description of Artificial Sequence: Synthetic oligonucleotide
  Sense strand starting at position 3722 of SEQ ID NO: 317698
augcaaguuuauuuagcau

SEQ ID NO: 505106 - RNA, 19 nt, Artificial Sequence
  Description of Artificial Sequence: Synthetic oligonucleotide
  Antisense strand to SEQ ID NO: 505105
augcuaaauaaacuugcau

SEQ ID NO: 505107 - RNA, 19 nt, Artificial Sequence
  Description of Artificial Sequence: Synthetic oligonucleotide
  Sense strand starting at position 184 of SEQ ID NO: 317699
uuugacuaagacuguuaga

SEQ ID NO: 505108 - RNA, 19 nt, Artificial Sequence
  Description of Artificial Sequence: Synthetic oligonucleotide
  Antisense strand to SEQ ID NO: 505107
ucuaacagucuuagucaaa

SEQ ID NO: 505109 - RNA, 19 nt, Artificial Sequence
  Description of Artificial Sequence: Synthetic oligonucleotide
  Sense strand starting at position 298 of SEQ ID NO: 317699
gaaagauuccaguggcuau

SEQ ID NO: 505110 - RNA, 19 nt, Artificial Sequence
  Description of Artificial Sequence: Synthetic oligonucleotide
  Antisense strand to SEQ ID NO: 505109
auagccacuggaaucuuuc

SEQ ID NO: 505111 - RNA, 19 nt, Artificial Sequence
  Description of Artificial Sequence: Synthetic oligonucleotide
  Sense strand starting at position 308 of SEQ ID NO: 317699
aguggcuauccauggaaau

SEQ ID NO: 505112 - RNA, 19 nt, Artificial Sequence
  Description of Artificial Sequence: Synthetic oligonucleotide
  Antisense strand to SEQ ID NO: 505111
auuuccauggauagccacu

SEQ ID NO: 505113 - RNA, 19 nt, Artificial Sequence
  Description of Artificial Sequence: Synthetic oligonucleotide
  Sense strand starting at position 309 of SEQ ID NO: 317699
guggcuauccauggaaaua

SEQ ID NO: 505114 - RNA, 19 nt, Artificial Sequence
  Description of Artificial Sequence: Synthetic oligonucleotide
  Antisense strand to SEQ ID NO: 505113
uauuuccauggauagccac

SEQ ID NO: 505115 - RNA, 19 nt, Artificial Sequence
  Description of Artificial Sequence: Synthetic oligonucleotide
  Sense strand starting at position 379 of SEQ ID NO: 317699
gcagucuugggagagaauu

SEQ ID NO: 505116 - RNA, 19 nt, Artificial Sequence
  Description of Artificial Sequence: Synthetic oligonucleotide
  Antisense strand to SEQ ID NO: 505115
aauucucucccaagacugc

SEQ ID NO: 505117 - RNA, 19 nt, Artificial Sequence
  Description of Artificial Sequence: Synthetic oligonucleotide
  Sense strand starting at position 749 of SEQ ID NO: 317699
agaccacugucaucuuaag

SEQ ID NO: 505118 - RNA, 19 nt, Artificial Sequence
  Description of Artificial Sequence: Synthetic oligonucleotide
  Antisense strand to SEQ ID NO: 505117
cuuaagaugacaguggucu

SEQ ID NO: 505119 - RNA, 19 nt, Artificial Sequence
  Description of Artificial Sequence: Synthetic oligonucleotide
  Sense strand starting at position 805 of SEQ ID NO: 317699
cucugaaucgaggaugcuu

SEQ ID NO: 505120 - RNA, 19 nt, Artificial Sequence
  Description of Artificial Sequence: Synthetic oligonucleotide
  Antisense strand to SEQ ID NO: 505119
aagcauccucgauucagag

SEQ ID NO: 505121 - RNA, 19 nt, Artificial Sequence
  Description of Artificial Sequence: Synthetic oligonucleotide
  Sense strand starting at position 810 of SEQ ID NO: 317699
aaucgaggaugcuuauaug

SEQ ID NO: 505122 - RNA, 19 nt, Artificial Sequence
  Description of Artificial Sequence: Synthetic oligonucleotide
  Antisense strand to SEQ ID NO: 505121
cauauaagcauccucgauu

SEQ ID NO: 505123 - RNA, 19 nt, Artificial Sequence
  Description of Artificial Sequence: Synthetic oligonucleotide
  Sense strand starting at position 857 of SEQ ID NO: 317699
uaaacagagugcuuuagaa

SEQ ID NO: 505124 - RNA, 19 nt, Artificial Sequence
  Description of Artificial Sequence: Synthetic oligonucleotide
  Antisense strand to SEQ ID NO: 505123
uucuaaagcacucuguuua

SEQ ID NO: 505125 - RNA, 19 nt, Artificial Sequence
  Description of Artificial Sequence: Synthetic oligonucleotide
  Sense strand starting at position 864 of SEQ ID NO: 317699
agugcuuuagaacacguaa

SEQ ID NO: 505126 - RNA, 19 nt, Artificial Sequence
  Description of Artificial Sequence: Synthetic oligonucleotide
  Antisense strand to SEQ ID NO: 505125
uuacguguucuaaagcacu

SEQ ID NO: 505127 - RNA, 19 nt, Artificial Sequence
  Description of Artificial Sequence: Synthetic oligonucleotide
  Sense strand starting at position 920 of SEQ ID NO: 317699
gcaauaaaggguugaggau

SEQ ID NO: 505128 - RNA, 19 nt, Artificial Sequence
  Description of Artificial Sequence: Synthetic oligonucleotide
  Antisense strand to SEQ ID NO: 505127
auccucaacccuuuauugc

SEQ ID NO: 505129 - RNA, 19 nt, Artificial Sequence
  Description of Artificial Sequence: Synthetic oligonucleotide
  Sense strand starting at position 1057 of SEQ ID NO: 317699
ugguuuaaggagugaauuc

SEQ ID NO: 505130 - RNA, 19 nt, Artificial Sequence
  Description of Artificial Sequence: Synthetic oligonucleotide
  Antisense strand to SEQ ID NO: 505129
gaauucacuccuuaaacca

SEQ ID NO: 505131 - RNA, 19 nt, Artificial Sequence
  Description of Artificial Sequence: Synthetic oligonucleotide
  Sense strand starting at position 1199 of SEQ ID NO: 317699
uguuaaguaccuggaauua

SEQ ID NO: 505132 - RNA, 19 nt, Artificial Sequence
  Description of Artificial Sequence: Synthetic oligonucleotide
  Antisense strand to SEQ ID NO: 505131
uaauuccagguacuuaaca

SEQ ID NO: 505133 - RNA, 19 nt, Artificial Sequence
  Description of Artificial Sequence: Synthetic oligonucleotide
  Sense strand starting at position 1407 of SEQ ID NO: 317699
ucuucugaugacuggucaa

SEQ ID NO: 505134 - RNA, 19 nt, Artificial Sequence
  Description of Artificial Sequence: Synthetic oligonucleotide
  Antisense strand to SEQ ID NO: 505133
uugaccagucaucagaaga

SEQ ID NO: 505135 - RNA, 19 nt, Artificial Sequence
  Description of Artificial Sequence: Synthetic oligonucleotide
  Sense strand starting at position 1510 of SEQ ID NO: 317699
ccucucugcccggaaauaa

SEQ ID NO: 505136 - RNA, 19 nt, Artificial Sequence
  Description of Artificial Sequence: Synthetic oligonucleotide
  Antisense strand to SEQ ID NO: 505135
uuauuuccgggcagagagg

SEQ ID NO: 505137 - RNA, 19 nt, Artificial Sequence
  Description of Artificial Sequence: Synthetic oligonucleotide
  Sense strand starting at position 1804 of SEQ ID NO: 317699
gcaauuacacagugaaacu

SEQ ID NO: 505138 - RNA, 19 nt, Artificial Sequence
  Description of Artificial Sequence: Synthetic oligonucleotide
  Antisense strand to SEQ ID NO: 505137
aguuucacuguguaauugc

SEQ ID NO: 505139 - RNA, 19 nt, Artificial Sequence
  Description of Artificial Sequence: Synthetic oligonucleotide
  Sense strand starting at position 1823 of SEQ ID NO: 317699
ugguguucccggcuaguca

SEQ ID NO: 505140 - RNA, 19 nt, Artificial Sequence
  Description of Artificial Sequence: Synthetic oligonucleotide
  Antisense strand to SEQ ID NO: 505139
ugacuagccgggaacacca

SEQ ID NO: 505141 - RNA, 19 nt, Artificial Sequence
  Description of Artificial Sequence: Synthetic oligonucleotide
  Sense strand starting at position 1937 of SEQ ID NO: 317699
gucugugcucggucgaaug

SEQ ID NO: 505142 - RNA, 19 nt, Artificial Sequence
  Description of Artificial Sequence: Synthetic oligonucleotide
  Antisense strand to SEQ ID NO: 505141
cauucgaccgagcacagac

SEQ ID NO: 505143 - RNA, 19 nt, Artificial Sequence
  Description of Artificial Sequence: Synthetic oligonucleotide
  Sense strand starting at position 1976 of SEQ ID NO: 317699
cuggcucggaccuagaaau

SEQ ID NO: 505144 - RNA, 19 nt, Artificial Sequence
  Description of Artificial Sequence: Synthetic oligonucleotide
  Antisense strand to SEQ ID NO: 505143
auuucuagguccgagccag

SEQ ID NO: 505145 - RNA, 19 nt, Artificial Sequence
  Description of Artificial Sequence: Synthetic oligonucleotide
  Sense strand starting at position 2799 of SEQ ID NO: 317699
uggcuuccugcguuugaua

SEQ ID NO: 505146 - RNA, 19 nt, Artificial Sequence
  Description of Artificial Sequence: Synthetic oligonucleotide
  Antisense strand to SEQ ID NO: 505145
uaucaaacgcaggaagcca

SEQ ID NO: 505147 - RNA, 19 nt, Artificial Sequence
  Description of Artificial Sequence: Synthetic oligonucleotide
  Sense strand starting at position 3146 of SEQ ID NO: 317699
guaaauacuguuuaguaug

SEQ ID NO: 505148 - RNA, 19 nt, Artificial Sequence
  Description of Artificial Sequence: Synthetic oligonucleotide
  Antisense strand to SEQ ID NO: 505147
cauacuaaacaguauuuac

SEQ ID NO: 505149 - RNA, 19 nt, Artificial Sequence
  Description of Artificial Sequence: Synthetic oligonucleotide
  Sense strand starting at position 3151 of SEQ ID NO: 317699
uacuguuuaguauggacaa

SEQ ID NO: 505150 - RNA, 19 nt, Artificial Sequence
  Description of Artificial Sequence: Synthetic oligonucleotide
  Antisense strand to SEQ ID NO: 505149
uuguccauacuaaacagua

SEQ ID NO: 505151 - RNA, 19 nt, Artificial Sequence
  Description of Artificial Sequence: Synthetic oligonucleotide
  Sense strand starting at position 3153 of SEQ ID NO: 317699
cuguuuaguauggacaagu

SEQ ID NO: 505152 - RNA, 19 nt, Artificial Sequence
  Description of Artificial Sequence: Synthetic oligonucleotide
  Antisense strand to SEQ ID NO: 505151
acuuguccauacuaaacag

SEQ ID NO: 505153 - RNA, 19 nt, Artificial Sequence
  Description of Artificial Sequence: Synthetic oligonucleotide
  Sense strand starting at position 3176 of SEQ ID NO: 317699
gaggcauuaagguaguaga

SEQ ID NO: 505154 - RNA, 19 nt, Artificial Sequence
  Description of Artificial Sequence: Synthetic oligonucleotide
  Antisense strand to SEQ ID NO: 505153
ucuacuaccuuaaugccuc

SEQ ID NO: 505155 - RNA, 19 nt, Artificial Sequence
  Description of Artificial Sequence: Synthetic oligonucleotide
  Sense strand starting at position 3204 of SEQ ID NO: 317699
uuuguugaugaucgaggaa

SEQ ID NO: 505156 - RNA, 19 nt, Artificial Sequence
  Description of Artificial Sequence: Synthetic oligonucleotide
  Antisense strand to SEQ ID NO: 505155
uuccucgaucaucaacaaa

SEQ ID NO: 505157 - RNA, 19 nt, Artificial Sequence
  Description of Artificial Sequence: Synthetic oligonucleotide
  Sense strand starting at position 3233 of SEQ ID NO: 317699
gaguuaugugcuuaccuga

SEQ ID NO: 505158 - RNA, 19 nt, Artificial Sequence
  Description of Artificial Sequence: Synthetic oligonucleotide
  Antisense strand to SEQ ID NO: 505157
ucagguaagcacauaacuc

SEQ ID NO: 505159 - RNA, 19 nt, Artificial Sequence
  Description of Artificial Sequence: Synthetic oligonucleotide
  Sense strand starting at position 3288 of SEQ ID NO: 317699
cucccagugguaggauuaa

SEQ ID NO: 505160 - RNA, 19 nt, Artificial Sequence
  Description of Artificial Sequence: Synthetic oligonucleotide
  Antisense strand to SEQ ID NO: 505159
uuaauccuaccacugggag

SEQ ID NO: 505161 - RNA, 19 nt, Artificial Sequence
  Description of Artificial Sequence: Synthetic oligonucleotide
  Sense strand starting at position 3297 of SEQ ID NO: 317699
guaggauuaaugugaggua

SEQ ID NO: 505162 - RNA, 19 nt, Artificial Sequence
  Description of Artificial Sequence: Synthetic oligonucleotide
  Antisense strand to SEQ ID NO: 505161
uaccucacauuaauccuac

SEQ ID NO: 505163 - RNA, 19 nt, Artificial Sequence
  Description of Artificial Sequence: Synthetic oligonucleotide
  Sense strand starting at position 3304 of SEQ ID NO: 317699
uaaugugagguauaacugu

SEQ ID NO: 505164 - RNA, 19 nt, Artificial Sequence
  Description of Artificial Sequence: Synthetic oligonucleotide
  Antisense strand to SEQ ID NO: 505163
acaguuauaccucacauua

SEQ ID NO: 505165 - RNA, 19 nt, Artificial Sequence
  Description of Artificial Sequence: Synthetic oligonucleotide
  Sense strand starting at position 3343 of SEQ ID NO: 317699
ugcuuauagcaagaaauga

SEQ ID NO: 505166 - RNA, 19 nt, Artificial Sequence
  Description of Artificial Sequence: Synthetic oligonucleotide
  Antisense strand to SEQ ID NO: 505165
ucauuucuugcuauaagca

SEQ ID NO: 505167 - RNA, 19 nt, Artificial Sequence
  Description of Artificial Sequence: Synthetic oligonucleotide
  Sense strand starting at position 3498 of SEQ ID NO: 317699
guuaguugaagugagaaau

SEQ ID NO: 505168 - RNA, 19 nt, Artificial Sequence
  Description of Artificial Sequence: Synthetic oligonucleotide
  Antisense strand to SEQ ID NO: 505167
auuucucacuucaacuaac

SEQ ID NO: 505169 - RNA, 19 nt, Artificial Sequence
  Description of Artificial Sequence: Synthetic oligonucleotide
  Sense strand starting at position 3508 of SEQ ID NO: 317699
gugagaaaucuugagcuua

SEQ ID NO: 505170 - RNA, 19 nt, Artificial Sequence
  Description of Artificial Sequence: Synthetic oligonucleotide
  Antisense strand to SEQ ID NO: 505169
uaagcucaagauuucucac

SEQ ID NO: 505171 - RNA, 19 nt, Artificial Sequence
  Description of Artificial Sequence: Synthetic oligonucleotide
  Sense strand starting at position 3616 of SEQ ID NO: 317699
auacuaauggucuguuuaa

SEQ ID NO: 505172 - RNA, 19 nt, Artificial Sequence
  Description of Artificial Sequence: Synthetic oligonucleotide
  Antisense strand to SEQ ID NO: 505171
uuaaacagaccauuaguau

SEQ ID NO: 505173 - RNA, 19 nt, Artificial Sequence
  Description of Artificial Sequence: Synthetic oligonucleotide
  Sense strand starting at position 3675 of SEQ ID NO: 317699
gauccucccgaaugggaaa

SEQ ID NO: 505174 - RNA, 19 nt, Artificial Sequence
  Description of Artificial Sequence: Synthetic oligonucleotide
  Antisense strand to SEQ ID NO: 505173
uuucccauucgggaggauc

SEQ ID NO: 505175 - RNA, 19 nt, Artificial Sequence
  Description of Artificial Sequence: Synthetic oligonucleotide
  Sense strand starting at position 3728 of SEQ ID NO: 317699
aguaccagccuuuauugaa

SEQ ID NO: 505176 - RNA, 19 nt, Artificial Sequence
  Description of Artificial Sequence: Synthetic oligonucleotide
  Antisense strand to SEQ ID NO: 505175
uucaauaaaggcugguacu

SEQ ID NO: 505177 - RNA, 19 nt, Artificial Sequence
  Description of Artificial Sequence: Synthetic oligonucleotide
  Sense strand starting at position 3744 of SEQ ID NO: 317699
gaaggagucuuugucauaa

SEQ ID NO: 505178 - RNA, 19 nt, Artificial Sequence
  Description of Artificial Sequence: Synthetic oligonucleotide
  Antisense strand to SEQ ID NO: 505177
uuaugacaaagacuccuuc

SEQ ID NO: 505179 - RNA, 19 nt, Artificial Sequence
  Description of Artificial Sequence: Synthetic oligonucleotide
  Sense strand starting at position 3768 of SEQ ID NO: 317699
uugccagugucauccauuu

SEQ ID NO: 505180 - RNA, 19 nt, Artificial Sequence
  Description of Artificial Sequence: Synthetic oligonucleotide
  Antisense strand to SEQ ID NO: 505179
aaauggaugacacuggcaa

SEQ ID NO: 505181 - RNA, 19 nt, Artificial Sequence
  Description of Artificial Sequence: Synthetic oligonucleotide
  Sense strand starting at position 3774 of SEQ ID NO: 317699
gugucauccauuugcagug

SEQ ID NO: 505182 - RNA, 19 nt, Artificial Sequence
  Description of Artificial Sequence: Synthetic oligonucleotide
  Antisense strand to SEQ ID NO: 505181
cacugcaaauggaugacac

SEQ ID NO: 505183 - RNA, 19 nt, Artificial Sequence
  Description of Artificial Sequence: Synthetic oligonucleotide
  Sense strand starting at position 3873 of SEQ ID NO: 317699
ggguuuccuggcuaaucca

SEQ ID NO: 505184 - RNA, 19 nt, Artificial Sequence
  Description of Artificial Sequence: Synthetic oligonucleotide
  Antisense strand to SEQ ID NO: 505183
uggauuagccaggaaaccc

SEQ ID NO: 505185 - RNA, 19 nt, Artificial Sequence
  Description of Artificial Sequence: Synthetic oligonucleotide
  Sense strand starting at position 3891 of SEQ ID NO: 317699
auguaaucgguguauacua

SEQ ID NO: 505186 - RNA, 19 nt, Artificial Sequence
  Description of Artificial Sequence: Synthetic oligonucleotide
  Antisense strand to SEQ ID NO: 505185
uaguauacaccgauuacau

SEQ ID NO: 505187 - RNA, 19 nt, Artificial Sequence
  Description of Artificial Sequence: Synthetic oligonucleotide
  Sense strand starting at position 246 of SEQ ID NO: 317700
acaacaguccugugagguc

SEQ ID NO: 505188 - RNA, 19 nt, Artificial Sequence
  Description of Artificial Sequence: Synthetic oligonucleotide
  Antisense strand to SEQ ID NO: 505187
gaccucacaggacuguugu

SEQ ID NO: 505189 - RNA, 19 nt, Artificial Sequence
  Description of Artificial Sequence: Synthetic oligonucleotide
  Sense strand starting at position 295 of SEQ ID NO: 317700
aaaucaaggcagugagaua

SEQ ID NO: 505190 - RNA, 19 nt, Artificial Sequence
  Description of Artificial Sequence: Synthetic oligonucleotide
  Antisense strand to SEQ ID NO: 505189
uaucucacugccuugauuu

SEQ ID NO: 505191 - RNA, 19 nt, Artificial Sequence
  Description of Artificial Sequence: Synthetic oligonucleotide
  Sense strand starting at position 442 of SEQ ID NO: 317700
ccaguauguguauauagau

SEQ ID NO: 505192 - RNA, 19 nt, Artificial Sequence
  Description of Artificial Sequence: Synthetic oligonucleotide
  Antisense strand to SEQ ID NO: 505191
aucuauauacacauacugg

SEQ ID NO: 505193 - RNA, 19 nt, Artificial Sequence
  Description of Artificial Sequence: Synthetic oligonucleotide
  Sense strand starting at position 617 of SEQ ID NO: 317700
uacagugaugaucaagcua

SEQ ID NO: 505194 - RNA, 19 nt, Artificial Sequence
  Description of Artificial Sequence: Synthetic oligonucleotide
  Antisense strand to SEQ ID NO: 505193
uagcuugaucaucacugua

SEQ ID NO: 505195 - RNA, 19 nt, Artificial Sequence
  Description of Artificial Sequence: Synthetic oligonucleotide
  Sense strand starting at position 744 of SEQ ID NO: 317700
acugguagggcugauucua

SEQ ID NO: 505196 - RNA, 19 nt, Artificial Sequence
  Description of Artificial Sequence: Synthetic oligonucleotide
  Antisense strand to SEQ ID NO: 505195
uagaaucagcccuaccagu

SEQ ID NO: 505197 - RNA, 19 nt, Artificial Sequence
  Description of Artificial Sequence: Synthetic oligonucleotide
  Sense strand starting at position 779 of SEQ ID NO: 317700
uacuuuguuguuggaggau

SEQ ID NO: 505198 - RNA, 19 nt, Artificial Sequence
  Description of Artificial Sequence: Synthetic oligonucleotide
  Antisense strand to SEQ ID NO: 505197
auccuccaacaacaaagua

SEQ ID NO: 505199 - RNA, 19 nt, Artificial Sequence
  Description of Artificial Sequence: Synthetic oligonucleotide
  Sense strand starting at position 792 of SEQ ID NO: 317700
gaggauuugucucaaggca

SEQ ID NO: 505200 - RNA, 19 nt, Artificial Sequence
  Description of Artificial Sequence: Synthetic oligonucleotide
  Antisense strand to SEQ ID NO: 505199
ugccuugagacaaauccuc

SEQ ID NO: 505201 - RNA, 19 nt, Artificial Sequence
  Description of Artificial Sequence: Synthetic oligonucleotide
  Sense strand starting at position 922 of SEQ ID NO: 317700
gugggauaccucuggguau

SEQ ID NO: 505202 - RNA, 19 nt, Artificial Sequence
  Description of Artificial Sequence: Synthetic oligonucleotide
  Antisense strand to SEQ ID NO: 505201
auacccagagguaucccac

SEQ ID NO: 505203 - RNA, 19 nt, Artificial Sequence
  Description of Artificial Sequence: Synthetic oligonucleotide
  Sense strand starting at position 947 of SEQ ID NO: 317700
ggcccagagccaugaauua

SEQ ID NO: 505204 - RNA, 19 nt, Artificial Sequence
  Description of Artificial Sequence: Synthetic oligonucleotide
  Antisense strand to SEQ ID NO: 505203
uaauucauggcucugggcc

SEQ ID NO: 505205 - RNA, 19 nt, Artificial Sequence
  Description of Artificial Sequence: Synthetic oligonucleotide
  Sense strand starting at position 1074 of SEQ ID NO: 317700
uggucaggccuggagagau

SEQ ID NO: 505206 - RNA, 19 nt, Artificial Sequence
  Description of Artificial Sequence: Synthetic oligonucleotide
  Antisense strand to SEQ ID NO: 505205
aucucuccaggccugacca

SEQ ID NO: 505207 - RNA, 19 nt, Artificial Sequence
  Description of Artificial Sequence: Synthetic oligonucleotide
  Sense strand starting at position 1223 of SEQ ID NO: 317700
gcaacaauauaugugauaa

SEQ ID NO: 505208 - RNA, 19 nt, Artificial Sequence
  Description of Artificial Sequence: Synthetic oligonucleotide
  Antisense strand to SEQ ID NO: 505207
uuaucacauauauuguugc

SEQ ID NO: 505209 - RNA, 19 nt, Artificial Sequence
  Description of Artificial Sequence: Synthetic oligonucleotide
  Sense strand starting at position 1233 of SEQ ID NO: 317700
augugauaagacugaguga

SEQ ID NO: 505210 - RNA, 19 nt, Artificial Sequence
  Description of Artificial Sequence: Synthetic oligonucleotide
  Antisense strand to SEQ ID NO: 505209
ucacucagucuuaucacau

SEQ ID NO: 505211 - RNA, 19 nt, Artificial Sequence
  Description of Artificial Sequence: Synthetic oligonucleotide
  Sense strand starting at position 1236 of SEQ ID NO: 317700
ugauaagacugagugaucu

SEQ ID NO: 505212 - RNA, 19 nt, Artificial Sequence
  Description of Artificial Sequence: Synthetic oligonucleotide
  Antisense strand to SEQ ID NO: 505211
agaucacucagucuuauca

SEQ ID NO: 505213 - RNA, 19 nt, Artificial Sequence
  Description of Artificial Sequence: Synthetic oligonucleotide
  Sense strand starting at position 1240 of SEQ ID NO: 317700
aagacugagugaucugcaa

SEQ ID NO: 505214 - RNA, 19 nt, Artificial Sequence
  Description of Artificial Sequence: Synthetic oligonucleotide
  Antisense strand to SEQ ID NO: 505213
uugcagaucacucagucuu

SEQ ID NO: 505215 - RNA, 19 nt, Artificial Sequence
  Description of Artificial Sequence: Synthetic oligonucleotide
  Sense strand starting at position 1343 of SEQ ID NO: 317700
auggguucaggcugagaaa

SEQ ID NO: 505216 - RNA, 19 nt, Artificial Sequence
  Description of Artificial Sequence: Synthetic oligonucleotide
  Antisense strand to SEQ ID NO: 505215
uuucucagccugaacccau

SEQ ID NO: 505217 - RNA, 19 nt, Artificial Sequence
  Description of Artificial Sequence: Synthetic oligonucleotide
  Sense strand starting at position 1354 of SEQ ID NO: 317700
cugagaaagugucuccauu

SEQ ID NO: 505218 - RNA, 19 nt, Artificial Sequence
  Description of Artificial Sequence: Synthetic oligonucleotide
  Antisense strand to SEQ ID NO: 505217
aauggagacacuuucucag

SEQ ID NO: 505219 - RNA, 19 nt, Artificial Sequence
  Description of Artificial Sequence: Synthetic oligonucleotide
  Sense strand starting at position 1406 of SEQ ID NO: 317700
cagagugggcagggaaauu

SEQ ID NO: 505220 - RNA, 19 nt, Artificial Sequence
  Description of Artificial Sequence: Synthetic oligonucleotide
  Antisense strand to SEQ ID NO: 505219
aauuucccugcccacucug

SEQ ID NO: 505221 - RNA, 19 nt, Artificial Sequence
  Description of Artificial Sequence: Synthetic oligonucleotide
  Sense strand starting at position 1703 of SEQ ID NO: 317700
agauuaaacucccuucgga

SEQ ID NO: 505222 - RNA, 19 nt, Artificial Sequence
  Description of Artificial Sequence: Synthetic oligonucleotide
  Antisense strand to SEQ ID NO: 505221
uccgaagggaguuuaaucu

SEQ ID NO: 505223 - RNA, 19 nt, Artificial Sequence
  Description of Artificial Sequence: Synthetic oligonucleotide
  Sense strand starting at position 2510 of SEQ ID NO: 317700
agccuuuaucgcccuguua

SEQ ID NO: 505224 - RNA, 19 nt, Artificial Sequence
  Description of Artificial Sequence: Synthetic oligonucleotide
  Antisense strand to SEQ ID NO: 505223
uaacagggcgauaaaggcu

SEQ ID NO: 505225 - RNA, 19 nt, Artificial Sequence
  Description of Artificial Sequence: Synthetic oligonucleotide
  Sense strand starting at position 2530 of SEQ ID NO: 317700
aggcuuugucucuaaauac

SEQ ID NO: 505226 - RNA, 19 nt, Artificial Sequence
  Description of Artificial Sequence: Synthetic oligonucleotide
  Antisense strand to SEQ ID NO: 505225
guauuuagagacaaagccu

SEQ ID NO: 505227 - RNA, 19 nt, Artificial Sequence
  Description of Artificial Sequence: Synthetic oligonucleotide
  Sense strand starting at position 2630 of SEQ ID NO: 317700
gagccauacugacuagagu

SEQ ID NO: 505228 - RNA, 19 nt, Artificial Sequence
  Description of Artificial Sequence: Synthetic oligonucleotide
  Antisense strand to SEQ ID NO: 505227
acucuagucaguauggcuc

SEQ ID NO: 505229 - RNA, 19 nt, Artificial Sequence
  Description of Artificial Sequence: Synthetic oligonucleotide
  Sense strand starting at position 2631 of SEQ ID NO: 317700
agccauacugacuagaguu

SEQ ID NO: 505230 - RNA, 19 nt, Artificial Sequence
  Description of Artificial Sequence: Synthetic oligonucleotide
  Antisense strand to SEQ ID NO: 505229
aacucuagucaguauggcu

SEQ ID NO: 505231 - RNA, 19 nt, Artificial Sequence
  Description of Artificial Sequence: Synthetic oligonucleotide
  Sense strand starting at position 2905 of SEQ ID NO: 317700
auguaaugugugcaaacuu

SEQ ID NO: 505232 - RNA, 19 nt, Artificial Sequence
  Description of Artificial Sequence: Synthetic oligonucleotide
  Antisense strand to SEQ ID NO: 505231
aaguuugcacacauuacau

SEQ ID NO: 505233 - RNA, 19 nt, Artificial Sequence
  Description of Artificial Sequence: Synthetic oligonucleotide
  Sense strand starting at position 3163 of SEQ ID NO: 317700
uugguaguccuggguacaa

SEQ ID NO: 505234 - RNA, 19 nt, Artificial Sequence
  Description of Artificial Sequence: Synthetic oligonucleotide
  Antisense strand to SEQ ID NO: 505233
uuguacccaggacuaccaa

SEQ ID NO: 505235 - RNA, 19 nt, Artificial Sequence
  Description of Artificial Sequence: Synthetic oligonucleotide
  Sense strand starting at position 3165 of SEQ ID NO: 317700
gguaguccuggguacaacu

SEQ ID NO: 505236 - RNA, 19 nt, Artificial Sequence
  Description of Artificial Sequence: Synthetic oligonucleotide
  Antisense strand to SEQ ID NO: 505235
aguuguacccaggacuacc

SEQ ID NO: 505237 - RNA, 19 nt, Artificial Sequence
  Description of Artificial Sequence: Synthetic oligonucleotide
  Sense strand starting at position 3204 of SEQ ID NO: 317700
gcuagauugccaugaggga

SEQ ID NO: 505238 - RNA, 19 nt, Artificial Sequence
  Description of Artificial Sequence: Synthetic oligonucleotide
  Antisense strand to SEQ ID NO: 505237
ucccucauggcaaucuagc

SEQ ID NO: 505239 - RNA, 19 nt, Artificial Sequence
  Description of Artificial Sequence: Synthetic oligonucleotide
  Sense strand starting at position 3435 of SEQ ID NO: 317700
guaguuccugcauaaauau

SEQ ID NO: 505240 - RNA, 19 nt, Artificial Sequence
  Description of Artificial Sequence: Synthetic oligonucleotide
  Antisense strand to SEQ ID NO: 505239
auauuuaugcaggaacuac

SEQ ID NO: 505241 - RNA, 19 nt, Artificial Sequence
  Description of Artificial Sequence: Synthetic oligonucleotide
  Sense strand starting at position 3456 of SEQ ID NO: 317700
acauacauuccguguauuu

SEQ ID NO: 505242 - RNA, 19 nt, Artificial Sequence
  Description of Artificial Sequence: Synthetic oligonucleotide
  Antisense strand to SEQ ID NO: 505241
aaauacacggaauguaugu

SEQ ID NO: 505243 - RNA, 19 nt, Artificial Sequence
  Description of Artificial Sequence: Synthetic oligonucleotide
  Sense strand starting at position 3513 of SEQ ID NO: 317700
acuagaaguuaucuuggau

SEQ ID NO: 505244 - RNA, 19 nt, Artificial Sequence
  Description of Artificial Sequence: Synthetic oligonucleotide
  Antisense strand to SEQ ID NO: 505243
auccaagauaacuucuagu

SEQ ID NO: 505245 - RNA, 19 nt, Artificial Sequence
  Description of Artificial Sequence: Synthetic oligonucleotide
  Sense strand starting at position 3519 of SEQ ID NO: 317700
aguuaucuuggauaagugu

SEQ ID NO: 505246 - RNA, 19 nt, Artificial Sequence
  Description of Artificial Sequence: Synthetic oligonucleotide
  Antisense strand to SEQ ID NO: 505245
acacuuauccaagauaacu

SEQ ID NO: 505247 - RNA, 19 nt, Artificial Sequence
  Description of Artificial Sequence: Synthetic oligonucleotide
  Sense strand starting at position 3525 of SEQ ID NO: 317700
cuuggauaaguguaggauu

SEQ ID NO: 505248 - RNA, 19 nt, Artificial Sequence
  Description of Artificial Sequence: Synthetic oligonucleotide
  Antisense strand to SEQ ID NO: 505247
aauccuacacuuauccaag

SEQ ID NO: 505249 - RNA, 19 nt, Artificial Sequence
  Description of Artificial Sequence: Synthetic oligonucleotide
  Sense strand starting at position 3549 of SEQ ID NO: 317700
guggaaucccaauguaccu

SEQ ID NO: 505250 - RNA, 19 nt, Artificial Sequence
  Description of Artificial Sequence: Synthetic oligonucleotide
  Antisense strand to SEQ ID NO: 505249
agguacauugggauuccac

SEQ ID NO: 505251 - RNA, 19 nt, Artificial Sequence
  Description of Artificial Sequence: Synthetic oligonucleotide
  Sense strand starting at position 3707 of SEQ ID NO: 317700
gagauuauuccugggccag

SEQ ID NO: 505252 - RNA, 19 nt, Artificial Sequence
  Description of Artificial Sequence: Synthetic oligonucleotide
  Antisense strand to SEQ ID NO: 505251
cuggcccaggaauaaucuc

SEQ ID NO: 505253 - RNA, 19 nt, Artificial Sequence
  Description of Artificial Sequence: Synthetic oligonucleotide
  Sense strand starting at position 3708 of SEQ ID NO: 317700
agauuauuccugggccaga

SEQ ID NO: 505254 - RNA, 19 nt, Artificial Sequence
  Description of Artificial Sequence: Synthetic oligonucleotide
  Antisense strand to SEQ ID NO: 505253
ucuggcccaggaauaaucu

SEQ ID NO: 505255 - RNA, 19 nt, Artificial Sequence
  Description of Artificial Sequence: Synthetic oligonucleotide
  Sense strand starting at position 3709 of SEQ ID NO: 317700
gauuauuccugggccagau

SEQ ID NO: 505256 - RNA, 19 nt, Artificial Sequence
  Description of Artificial Sequence: Synthetic oligonucleotide
  Antisense strand to SEQ ID NO: 505255
aucuggcccaggaauaauc

SEQ ID NO: 505257 - RNA, 19 nt, Artificial Sequence
  Description of Artificial Sequence: Synthetic oligonucleotide
  Sense strand starting at position 3741 of SEQ ID NO: 317700
ccuguaaucgcauugcuuu

SEQ ID NO: 505258 - RNA, 19 nt, Artificial Sequence
  Description of Artificial Sequence: Synthetic oligonucleotide
  Antisense strand to SEQ ID NO: 505257
aaagcaaugcgauuacagg

SEQ ID NO: 505259 - RNA, 19 nt, Artificial Sequence
  Description of Artificial Sequence: Synthetic oligonucleotide
  Sense strand starting at position 3752 of SEQ ID NO: 317700
auugcuuugagaggccuaa

SEQ ID NO: 505260 - RNA, 19 nt, Artificial Sequence
  Description of Artificial Sequence: Synthetic oligonucleotide
  Antisense strand to SEQ ID NO: 505259
uuaggccucucaaagcaau

SEQ ID NO: 505261 - RNA, 19 nt, Artificial Sequence
  Description of Artificial Sequence: Synthetic oligonucleotide
  Sense strand starting at position 3801 of SEQ ID NO: 317700
agaccagacuaagaaacau

SEQ ID NO: 505262 - RNA, 19 nt, Artificial Sequence
  Description of Artificial Sequence: Synthetic oligonucleotide
  Antisense strand to SEQ ID NO: 505261
auguuucuuagucuggucu

SEQ ID NO: 505263 - RNA, 19 nt, Artificial Sequence
  Description of Artificial Sequence: Synthetic oligonucleotide
  Sense strand starting at position 3940 of SEQ ID NO: 317700
ugcauugagccauaaguac

SEQ ID NO: 505264 - RNA, 19 nt, Artificial Sequence
  Description of Artificial Sequence: Synthetic oligonucleotide
  Antisense strand to SEQ ID NO: 505263
guacuuauggcucaaugca

SEQ ID NO: 505265 - RNA, 19 nt, Artificial Sequence
  Description of Artificial Sequence: Synthetic oligonucleotide
  Sense strand starting at position 3981 of SEQ ID NO: 317700
gacagaauaugacccugua

SEQ ID NO: 505266 - RNA, 19 nt, Artificial Sequence
  Description of Artificial Sequence: Synthetic oligonucleotide
  Antisense strand to SEQ ID NO: 505265
uacagggucauauucuguc

SEQ ID NO: 505267 - RNA, 19 nt, Artificial Sequence
  Description of Artificial Sequence: Synthetic oligonucleotide
  Sense strand starting at position 434 of SEQ ID NO: 317701
aaagauaaggcucaucguu

SEQ ID NO: 505268 - RNA, 19 nt, Artificial Sequence
  Description of Artificial Sequence: Synthetic oligonucleotide
  Antisense strand to SEQ ID NO: 505267
aacgaugagccuuaucuuu

SEQ ID NO: 505269 - RNA, 19 nt, Artificial Sequence
  Description of Artificial Sequence: Synthetic oligonucleotide
  Sense strand starting at position 447 of SEQ ID NO: 317701
aucguuuagcacgagagga

SEQ ID NO: 505270 - RNA, 19 nt, Artificial Sequence
  Description of Artificial Sequence: Synthetic oligonucleotide
  Antisense strand to SEQ ID NO: 505269
uccucucgugcuaaacgau

SEQ ID NO: 505271 - RNA, 19 nt, Artificial Sequence
  Description of Artificial Sequence: Synthetic oligonucleotide
  Sense strand starting at position 455 of SEQ ID NO: 317701
gcacgagaggaguaugauu

SEQ ID NO: 505272 - RNA, 19 nt, Artificial Sequence
  Description of Artificial Sequence: Synthetic oligonucleotide
  Antisense strand to SEQ ID NO: 505271
aaucauacuccucucgugc

SEQ ID NO: 505273 - RNA, 19 nt, Artificial Sequence
  Description of Artificial Sequence: Synthetic oligonucleotide
  Sense strand starting at position 508 of SEQ ID NO: 317701
ucaguuucucaagagccua

SEQ ID NO: 505274 - RNA, 19 nt, Artificial Sequence
  Description of Artificial Sequence: Synthetic oligonucleotide
  Antisense strand to SEQ ID NO: 505273
uaggcucuugagaaacuga

SEQ ID NO: 505275 - RNA, 19 nt, Artificial Sequence
  Description of Artificial Sequence: Synthetic oligonucleotide
  Sense strand starting at position 547 of SEQ ID NO: 317701
guuauacugcuauacucuu

SEQ ID NO: 505276 - RNA, 19 nt, Artificial Sequence
  Description of Artificial Sequence: Synthetic oligonucleotide
  Antisense strand to SEQ ID NO: 505275
aagaguauagcaguauaac

SEQ ID NO: 505277 - RNA, 19 nt, Artificial Sequence
  Description of Artificial Sequence: Synthetic oligonucleotide
  Sense strand starting at position 614 of SEQ ID NO: 317701
ccauauaauuaggcuguaa

SEQ ID NO: 505278 - RNA, 19 nt, Artificial Sequence
  Description of Artificial Sequence: Synthetic oligonucleotide
  Antisense strand to SEQ ID NO: 505277
uuacagccuaauuauaugg

SEQ ID NO: 505279 - RNA, 19 nt, Artificial Sequence
  Description of Artificial Sequence: Synthetic oligonucleotide
  Sense strand starting at position 616 of SEQ ID NO: 317701
auauaauuaggcuguaaga

SEQ ID NO: 505280 - RNA, 19 nt, Artificial Sequence
  Description of Artificial Sequence: Synthetic oligonucleotide
  Antisense strand to SEQ ID NO: 505279
ucuuacagccuaauuauau

SEQ ID NO: 505281 - RNA, 19 nt, Artificial Sequence
  Description of Artificial Sequence: Synthetic oligonucleotide
  Sense strand starting at position 751 of SEQ ID NO: 317701
ccugauuaauggcuuaaug

SEQ ID NO: 505282 - RNA, 19 nt, Artificial Sequence
  Description of Artificial Sequence: Synthetic oligonucleotide
  Antisense strand to SEQ ID NO: 505281
cauuaagccauuaaucagg

SEQ ID NO: 505283 - RNA, 19 nt, Artificial Sequence
  Description of Artificial Sequence: Synthetic oligonucleotide
  Sense strand starting at position 753 of SEQ ID NO: 317701
ugauuaauggcuuaaugua

SEQ ID NO: 505284 - RNA, 19 nt, Artificial Sequence
  Description of Artificial Sequence: Synthetic oligonucleotide
  Antisense strand to SEQ ID NO: 505283
uacauuaagccauuaauca

SEQ ID NO: 505285 - RNA, 19 nt, Artificial Sequence
  Description of Artificial Sequence: Synthetic oligonucleotide
  Sense strand starting at position 800 of SEQ ID NO: 317701
ccaagcagucuugacugua

SEQ ID NO: 505286 - RNA, 19 nt, Artificial Sequence
  Description of Artificial Sequence: Synthetic oligonucleotide
  Antisense strand to SEQ ID NO: 505285
uacagucaagacugcuugg

SEQ ID NO: 505287 - RNA, 19 nt, Artificial Sequence
  Description of Artificial Sequence: Synthetic oligonucleotide
  Sense strand starting at position 1023 of SEQ ID NO: 317701
cuagcagcucaguauaauu

SEQ ID NO: 505288 - RNA, 19 nt, Artificial Sequence
  Description of Artificial Sequence: Synthetic oligonucleotide
  Antisense strand to SEQ ID NO: 505287
aauuauacugagcugcuag

SEQ ID NO: 505289 - RNA, 19 nt, Artificial Sequence
  Description of Artificial Sequence: Synthetic oligonucleotide
  Sense strand starting at position 1375 of SEQ ID NO: 317701
ugagaagaaggcuguaacu

SEQ ID NO: 505290 - RNA, 19 nt, Artificial Sequence
  Description of Artificial Sequence: Synthetic oligonucleotide
  Antisense strand to SEQ ID NO: 505289
aguuacagccuucuucuca

SEQ ID NO: 505291 - RNA, 19 nt, Artificial Sequence
  Description of Artificial Sequence: Synthetic oligonucleotide
  Sense strand starting at position 1505 of SEQ ID NO: 317701
agcauuugccaucagcuua

SEQ ID NO: 505292 - RNA, 19 nt, Artificial Sequence
  Description of Artificial Sequence: Synthetic oligonucleotide
  Antisense strand to SEQ ID NO: 505291
uaagcugauggcaaaugcu

SEQ ID NO: 505293 - RNA, 19 nt, Artificial Sequence
  Description of Artificial Sequence: Synthetic oligonucleotide
  Sense strand starting at position 1608 of SEQ ID NO: 317701
ucaaaugcaguguaaagaa

SEQ ID NO: 505294 - RNA, 19 nt, Artificial Sequence
  Description of Artificial Sequence: Synthetic oligonucleotide
  Antisense strand to SEQ ID NO: 505293
uucuuuacacugcauuuga

SEQ ID NO: 505295 - RNA, 19 nt, Artificial Sequence
  Description of Artificial Sequence: Synthetic oligonucleotide
  Sense strand starting at position 1781 of SEQ ID NO: 317701
cuugaaaguggcgguauuu

SEQ ID NO: 505296 - RNA, 19 nt, Artificial Sequence
  Description of Artificial Sequence: Synthetic oligonucleotide
  Antisense strand to SEQ ID NO: 505295
aaauaccgccacuuucaag

SEQ ID NO: 505297 - RNA, 19 nt, Artificial Sequence
  Description of Artificial Sequence: Synthetic oligonucleotide
  Sense strand starting at position 2027 of SEQ ID NO: 317701
ggccgagucccagaacagu

SEQ ID NO: 505298 - RNA, 19 nt, Artificial Sequence
  Description of Artificial Sequence: Synthetic oligonucleotide
  Antisense strand to SEQ ID NO: 505297
acuguucugggacucggcc

SEQ ID NO: 505299 - RNA, 19 nt, Artificial Sequence
  Description of Artificial Sequence: Synthetic oligonucleotide
  Sense strand starting at position 2059 of SEQ ID NO: 317701
uucgacuuggcugaacauu

SEQ ID NO: 505300 - RNA, 19 nt, Artificial Sequence
  Description of Artificial Sequence: Synthetic oligonucleotide
  Antisense strand to SEQ ID NO: 505299
aauguucagccaagucgaa

SEQ ID NO: 505301 - RNA, 19 nt, Artificial Sequence
  Description of Artificial Sequence: Synthetic oligonucleotide
  Sense strand starting at position 2086 of SEQ ID NO: 317701
uagacaugguucuugcaua

SEQ ID NO: 505302 - RNA, 19 nt, Artificial Sequence
  Description of Artificial Sequence: Synthetic oligonucleotide
  Antisense strand to SEQ ID NO: 505301
uaugcaagaaccaugucua

SEQ ID NO: 505303 - RNA, 19 nt, Artificial Sequence
  Description of Artificial Sequence: Synthetic oligonucleotide
  Sense strand starting at position 2214 of SEQ ID NO: 317701
uguaauuaagugugagaca

SEQ ID NO: 505304 - RNA, 19 nt, Artificial Sequence
  Description of Artificial Sequence: Synthetic oligonucleotide
  Antisense strand to SEQ ID NO: 505303
ugucucacacuuaauuaca

SEQ ID NO: 505305 - RNA, 19 nt, Artificial Sequence
  Description of Artificial Sequence: Synthetic oligonucleotide
  Sense strand starting at position 2334 of SEQ ID NO: 317701
augcaugcugaugaugaau

SEQ ID NO: 505306 - RNA, 19 nt, Artificial Sequence
  Description of Artificial Sequence: Synthetic oligonucleotide
  Antisense strand to SEQ ID NO: 505305
auucaucaucagcaugcau

SEQ ID NO: 505307 - RNA, 19 nt, Artificial Sequence
  Description of Artificial Sequence: Synthetic oligonucleotide
  Sense strand starting at position 2454 of SEQ ID NO: 317701
guggcagauuaugugaaug

SEQ ID NO: 505308 - RNA, 19 nt, Artificial Sequence
  Description of Artificial Sequence: Synthetic oligonucleotide
  Antisense strand to SEQ ID NO: 505307
cauucacauaaucugccac

SEQ ID NO: 505309 - RNA, 19 nt, Artificial Sequence
  Description of Artificial Sequence: Synthetic oligonucleotide
  Sense strand starting at position 2459 of SEQ ID NO: 317701
agauuaugugaauggugca

SEQ ID NO: 505310 - RNA, 19 nt, Artificial Sequence
  Description of Artificial Sequence: Synthetic oligonucleotide
  Antisense strand to SEQ ID NO: 505309
ugcaccauucacauaaucu

SEQ ID NO: 505311 - RNA, 19 nt, Artificial Sequence
  Description of Artificial Sequence: Synthetic oligonucleotide
  Sense strand starting at position 2464 of SEQ ID NO: 317701
augugaauggugcaaacuu

SEQ ID NO: 505312 - RNA, 19 nt, Artificial Sequence
  Description of Artificial Sequence: Synthetic oligonucleotide
  Antisense strand to SEQ ID NO: 505311
aaguuugcaccauucacau

SEQ ID NO: 505313 - RNA, 19 nt, Artificial Sequence
  Description of Artificial Sequence: Synthetic oligonucleotide
  Sense strand starting at position 2493 of SEQ ID NO: 317701
agaauuaguaaugggcuua

SEQ ID NO: 505314 - RNA, 19 nt, Artificial Sequence
  Description of Artificial Sequence: Synthetic oligonucleotide
  Antisense strand to SEQ ID NO: 505313
uaagcccauuacuaauucu

SEQ ID NO: 505315 - RNA, 19 nt, Artificial Sequence
  Description of Artificial Sequence: Synthetic oligonucleotide
  Sense strand starting at position 2498 of SEQ ID NO: 317701
uaguaaugggcuuauugau

SEQ ID NO: 505316 - RNA, 19 nt, Artificial Sequence
  Description of Artificial Sequence: Synthetic oligonucleotide
  Antisense strand to SEQ ID NO: 505315
aucaauaagcccauuacua

SEQ ID NO: 505317 - RNA, 19 nt, Artificial Sequence
  Description of Artificial Sequence: Synthetic oligonucleotide
  Sense strand starting at position 2613 of SEQ ID NO: 317701
ugcuguauugauggauaau

SEQ ID NO: 505318 - RNA, 19 nt, Artificial Sequence
  Description of Artificial Sequence: Synthetic oligonucleotide
  Antisense strand to SEQ ID NO: 505317
auuauccaucaauacagca

SEQ ID NO: 505319 - RNA, 19 nt, Artificial Sequence
  Description of Artificial Sequence: Synthetic oligonucleotide
  Sense strand starting at position 2614 of SEQ ID NO: 317701
gcuguauugauggauaauu

SEQ ID NO: 505320 - RNA, 19 nt, Artificial Sequence
  Description of Artificial Sequence: Synthetic oligonucleotide
  Antisense strand to SEQ ID NO: 505319
aauuauccaucaauacagc

SEQ ID NO: 505321 - RNA, 19 nt, Artificial Sequence
  Description of Artificial Sequence: Synthetic oligonucleotide
  Sense strand starting at position 2629 of SEQ ID NO: 317701
aauuauugauggguccaua

SEQ ID NO: 505322 - RNA, 19 nt, Artificial Sequence
  Description of Artificial Sequence: Synthetic oligonucleotide
  Antisense strand to SEQ ID NO: 505321
uauggacccaucaauaauu

SEQ ID NO: 505323 - RNA, 19 nt, Artificial Sequence
  Description of Artificial Sequence: Synthetic oligonucleotide
  Sense strand starting at position 2791 of SEQ ID NO: 317701
uugguagaguaauugugaa

SEQ ID NO: 505324 - RNA, 19 nt, Artificial Sequence
  Description of Artificial Sequence: Synthetic oligonucleotide
  Antisense strand to SEQ ID NO: 505323
uucacaauuacucuaccaa

SEQ ID NO: 505325 - RNA, 19 nt, Artificial Sequence
  Description of Artificial Sequence: Synthetic oligonucleotide
  Sense strand starting at position 2806 of SEQ ID NO: 317701
ugaacuuuguauguaccua

SEQ ID NO: 505326 - RNA, 19 nt, Artificial Sequence
  Description of Artificial Sequence: Synthetic oligonucleotide
  Antisense strand to SEQ ID NO: 505325
uagguacauacaaaguuca

SEQ ID NO: 505327 - RNA, 19 nt, Artificial Sequence
  Description of Artificial Sequence: Synthetic oligonucleotide
  Sense strand starting at position 2810 of SEQ ID NO: 317701
cuuuguauguaccuacaga

SEQ ID NO: 505328 - RNA, 19 nt, Artificial Sequence
  Description of Artificial Sequence: Synthetic oligonucleotide
  Antisense strand to SEQ ID NO: 505327
ucuguagguacauacaaag

SEQ ID NO: 505329 - RNA, 19 nt, Artificial Sequence
  Description of Artificial Sequence: Synthetic oligonucleotide
  Sense strand starting at position 2918 of SEQ ID NO: 317701
guguguaagacacaagcua

SEQ ID NO: 505330 - RNA, 19 nt, Artificial Sequence
  Description of Artificial Sequence: Synthetic oligonucleotide
  Antisense strand to SEQ ID NO: 505329
uagcuugugucuuacacac

SEQ ID NO: 505331 - RNA, 19 nt, Artificial Sequence
  Description of Artificial Sequence: Synthetic oligonucleotide
  Sense strand starting at position 3030 of SEQ ID NO: 317701
agagaagaaugcuuaaguc

SEQ ID NO: 505332 - RNA, 19 nt, Artificial Sequence
  Description of Artificial Sequence: Synthetic oligonucleotide
  Antisense strand to SEQ ID NO: 505331
gacuuaagcauucuucucu

SEQ ID NO: 505333 - RNA, 19 nt, Artificial Sequence
  Description of Artificial Sequence: Synthetic oligonucleotide
  Sense strand starting at position 3095 of SEQ ID NO: 317701
acgaguguggucuagaauc

SEQ ID NO: 505334 - RNA, 19 nt, Artificial Sequence
  Description of Artificial Sequence: Synthetic oligonucleotide
  Antisense strand to SEQ ID NO: 505333
gauucuagaccacacucgu

SEQ ID NO: 505335 - RNA, 19 nt, Artificial Sequence
  Description of Artificial Sequence: Synthetic oligonucleotide
  Sense strand starting at position 3097 of SEQ ID NO: 317701
gaguguggucuagaaucac

SEQ ID NO: 505336 - RNA, 19 nt, Artificial Sequence
  Description of Artificial Sequence: Synthetic oligonucleotide
  Antisense strand to SEQ ID NO: 505335
gugauucuagaccacacuc

SEQ ID NO: 505337 - RNA, 19 nt, Artificial Sequence
  Description of Artificial Sequence: Synthetic oligonucleotide
  Sense strand starting at position 3122 of SEQ ID NO: 317701
gguuaaauugcagaauauu

SEQ ID NO: 505338 - RNA, 19 nt, Artificial Sequence
  Description of Artificial Sequence: Synthetic oligonucleotide
  Antisense strand to SEQ ID NO: 505337
aauauucugcaauuuaacc

SEQ ID NO: 505339 - RNA, 19 nt, Artificial Sequence
  Description of Artificial Sequence: Synthetic oligonucleotide
  Sense strand starting at position 3148 of SEQ ID NO: 317701
uggguaacuggagguuauu

SEQ ID NO: 505340 - RNA, 19 nt, Artificial Sequence
  Description of Artificial Sequence: Synthetic oligonucleotide
  Antisense strand to SEQ ID NO: 505339
aauaaccuccaguuaccca

SEQ ID NO: 505341 - RNA, 19 nt, Artificial Sequence
  Description of Artificial Sequence: Synthetic oligonucleotide
  Sense strand starting at position 3311 of SEQ ID NO: 317701
acuggucuuucuccuaaga

SEQ ID NO: 505342 - RNA, 19 nt, Artificial Sequence
  Description of Artificial Sequence: Synthetic oligonucleotide
  Antisense strand to SEQ ID NO: 505341
ucuuaggagaaagaccagu

SEQ ID NO: 505343 - RNA, 19 nt, Artificial Sequence
  Description of Artificial Sequence: Synthetic oligonucleotide
  Sense strand starting at position 3516 of SEQ ID NO: 317701
auguguugaaauuaaguga

SEQ ID NO: 505344 - RNA, 19 nt, Artificial Sequence
  Description of Artificial Sequence: Synthetic oligonucleotide
  Antisense strand to SEQ ID NO: 505343
ucacuuaauuucaacacau

SEQ ID NO: 505345 - RNA, 19 nt, Artificial Sequence
  Description of Artificial Sequence: Synthetic oligonucleotide
  Sense strand starting at position 3533 of SEQ ID NO: 317701
gacacugucuggcuaauua

SEQ ID NO: 505346 - RNA, 19 nt, Artificial Sequence
  Description of Artificial Sequence: Synthetic oligonucleotide
  Antisense strand to SEQ ID NO: 505345
uaauuagccagacaguguc

SEQ ID NO: 505347 - RNA, 19 nt, Artificial Sequence
  Description of Artificial Sequence: Synthetic oligonucleotide
  Sense strand starting at position 27 of SEQ ID NO: 317702
caugcaguauuugugaauc

SEQ ID NO: 505348 - RNA, 19 nt, Artificial Sequence
  Description of Artificial Sequence: Synthetic oligonucleotide
  Antisense strand to SEQ ID NO: 505347
gauucacaaauacugcaug

SEQ ID NO: 505349 - RNA, 19 nt, Artificial Sequence
  Description of Artificial Sequence: Synthetic oligonucleotide
  Sense strand starting at position 35 of SEQ ID NO: 317702
auuugugaaucugaagaaa

SEQ ID NO: 505350 - RNA, 19 nt, Artificial Sequence
  Description of Artificial Sequence: Synthetic oligonucleotide
  Antisense strand to SEQ ID NO: 505349
uuucuucagauucacaaau

SEQ ID NO: 505351 - RNA, 19 nt, Artificial Sequence
  Description of Artificial Sequence: Synthetic oligonucleotide
  Sense strand starting at position 155 of SEQ ID NO: 317702
ucuagauuaggaggcagua

SEQ ID NO: 505352 - RNA, 19 nt, Artificial Sequence
  Description of Artificial Sequence: Synthetic oligonucleotide
  Antisense strand to SEQ ID NO: 505351
uacugccuccuaaucuaga

SEQ ID NO: 505353 - RNA, 19 nt, Artificial Sequence
  Description of Artificial Sequence: Synthetic oligonucleotide
  Sense strand starting at position 202 of SEQ ID NO: 317702
accagauuaccuggguuaa

SEQ ID NO: 505354 - RNA, 19 nt, Artificial Sequence
  Description of Artificial Sequence: Synthetic oligonucleotide
  Antisense strand to SEQ ID NO: 505353
uuaacccagguaaucuggu

SEQ ID NO: 505355 - RNA, 19 nt, Artificial Sequence
  Description of Artificial Sequence: Synthetic oligonucleotide
  Sense strand starting at position 290 of SEQ ID NO: 317702
guauaucuaucccucagua

SEQ ID NO: 505356 - RNA, 19 nt, Artificial Sequence
  Description of Artificial Sequence: Synthetic oligonucleotide
  Antisense strand to SEQ ID NO: 505355
uacugagggauagauauac

SEQ ID NO: 505357 - RNA, 19 nt, Artificial Sequence
  Description of Artificial Sequence: Synthetic oligonucleotide
  Sense strand starting at position 315 of SEQ ID NO: 317702
ucguuaucugucccucagu

SEQ ID NO: 505358 - RNA, 19 nt, Artificial Sequence
  Description of Artificial Sequence: Synthetic oligonucleotide
  Antisense strand to SEQ ID NO: 505357
acugagggacagauaacga

SEQ ID NO: 505359 - RNA, 19 nt, Artificial Sequence
  Description of Artificial Sequence: Synthetic oligonucleotide
  Sense strand starting at position 318 of SEQ ID NO: 317702
uuaucugucccucaguaaa

SEQ ID NO: 505360 - RNA, 19 nt, Artificial Sequence
  Description of Artificial Sequence: Synthetic oligonucleotide
  Antisense strand to SEQ ID NO: 505359
uuuacugagggacagauaa

SEQ ID NO: 505361 - RNA, 19 nt, Artificial Sequence
  Description of Artificial Sequence: Synthetic oligonucleotide
  Sense strand starting at position 626 of SEQ ID NO: 317702
cuguuauuguuccuacagu

SEQ ID NO: 505362 - RNA, 19 nt, Artificial Sequence
  Description of Artificial Sequence: Synthetic oligonucleotide
  Antisense strand to SEQ ID NO: 505361
acuguaggaacaauaacag

SEQ ID NO: 505363 - RNA, 19 nt, Artificial Sequence
  Description of Artificial Sequence: Synthetic oligonucleotide
  Sense strand starting at position 666 of SEQ ID NO: 317702
cuucuagucuacuuaagga

SEQ ID NO: 505364 - RNA, 19 nt, Artificial Sequence
  Description of Artificial Sequence: Synthetic oligonucleotide
  Antisense strand to SEQ ID NO: 505363
uccuuaaguagacuagaag

SEQ ID NO: 505365 - RNA, 19 nt, Artificial Sequence
  Description of Artificial Sequence: Synthetic oligonucleotide
  Sense strand starting at position 820 of SEQ ID NO: 317702
ggugccauuucucugcaca

SEQ ID NO: 505366 - RNA, 19 nt, Artificial Sequence
  Description of Artificial Sequence: Synthetic oligonucleotide
  Antisense strand to SEQ ID NO: 505365
ugugcagagaaauggcacc

SEQ ID NO: 505367 - RNA, 19 nt, Artificial Sequence
  Description of Artificial Sequence: Synthetic oligonucleotide
  Sense strand starting at position 821 of SEQ ID NO: 317702
gugccauuucucugcacau

SEQ ID NO: 505368 - RNA, 19 nt, Artificial Sequence
  Description of Artificial Sequence: Synthetic oligonucleotide
  Antisense strand to SEQ ID NO: 505367
augugcagagaaauggcac

SEQ ID NO: 505369 - RNA, 19 nt, Artificial Sequence
  Description of Artificial Sequence: Synthetic oligonucleotide
  Sense strand starting at position 864 of SEQ ID NO: 317702
uauaguugcugucuagacu

SEQ ID NO: 505370 - RNA, 19 nt, Artificial Sequence
  Description of Artificial Sequence: Synthetic oligonucleotide
  Antisense strand to SEQ ID NO: 505369
agucuagacagcaacuaua

SEQ ID NO: 505371 - RNA, 19 nt, Artificial Sequence
  Description of Artificial Sequence: Synthetic oligonucleotide
  Sense strand starting at position 865 of SEQ ID NO: 317702
auaguugcugucuagacuu

SEQ ID NO: 505372 - RNA, 19 nt, Artificial Sequence
  Description of Artificial Sequence: Synthetic oligonucleotide
  Antisense strand to SEQ ID NO: 505371
aagucuagacagcaacuau

SEQ ID NO: 505373 - RNA, 19 nt, Artificial Sequence
  Description of Artificial Sequence: Synthetic oligonucleotide
  Sense strand starting at position 995 of SEQ ID NO: 317702
aggcaauucucaguccuca

SEQ ID NO: 505374 - RNA, 19 nt, Artificial Sequence
  Description of Artificial Sequence: Synthetic oligonucleotide
  Antisense strand to SEQ ID NO: 505373
ugaggacugagaauugccu

SEQ ID NO: 505375 - RNA, 19 nt, Artificial Sequence
  Description of Artificial Sequence: Synthetic oligonucleotide
  Sense strand starting at position 1053 of SEQ ID NO: 317702
uggcuuugaacagagugua

SEQ ID NO: 505376 - RNA, 19 nt, Artificial Sequence
  Description of Artificial Sequence: Synthetic oligonucleotide
  Antisense strand to SEQ ID NO: 505375
uacacucuguucaaagcca

SEQ ID NO: 505377 - RNA, 19 nt, Artificial Sequence
  Description of Artificial Sequence: Synthetic oligonucleotide
  Sense strand starting at position 1056 of SEQ ID NO: 317702
cuuugaacagaguguaaca

SEQ ID NO: 505378 - RNA, 19 nt, Artificial Sequence
  Description of Artificial Sequence: Synthetic oligonucleotide
  Antisense strand to SEQ ID NO: 505377
uguuacacucuguucaaag

SEQ ID NO: 505379 - RNA, 19 nt, Artificial Sequence
  Description of Artificial Sequence: Synthetic oligonucleotide
  Sense strand starting at position 1136 of SEQ ID NO: 317702
uggugugcucaggacucua

SEQ ID NO: 505380 - RNA, 19 nt, Artificial Sequence
  Description of Artificial Sequence: Synthetic oligonucleotide
  Antisense strand to SEQ ID NO: 505379
uagaguccugagcacacca

SEQ ID NO: 505381 - RNA, 19 nt, Artificial Sequence
  Description of Artificial Sequence: Synthetic oligonucleotide
  Sense strand starting at position 1159 of SEQ ID NO: 317702
cuguucuaccuacagucau

SEQ ID NO: 505382 - RNA, 19 nt, Artificial Sequence
  Description of Artificial Sequence: Synthetic oligonucleotide
  Antisense strand to SEQ ID NO: 505381
augacuguagguagaacag

SEQ ID NO: 505383 - RNA, 19 nt, Artificial Sequence
  Description of Artificial Sequence: Synthetic oligonucleotide
  Sense strand starting at position 1461 of SEQ ID NO: 317702
uccuacaguccugagcaaa

SEQ ID NO: 505384 - RNA, 19 nt, Artificial Sequence
  Description of Artificial Sequence: Synthetic oligonucleotide
  Antisense strand to SEQ ID NO: 505383
uuugcucaggacuguagga

SEQ ID NO: 505385 - RNA, 19 nt, Artificial Sequence
  Description of Artificial Sequence: Synthetic oligonucleotide
  Sense strand starting at position 2012 of SEQ ID NO: 317702
acuggucuguccucucaca

SEQ ID NO: 505386 - RNA, 19 nt, Artificial Sequence
  Description of Artificial Sequence: Synthetic oligonucleotide
  Antisense strand to SEQ ID NO: 505385
ugugagaggacagaccagu

SEQ ID NO: 505387 - RNA, 19 nt, Artificial Sequence
  Description of Artificial Sequence: Synthetic oligonucleotide
  Sense strand starting at position 2134 of SEQ ID NO: 317702
aacauccuugcugagugaa

SEQ ID NO: 505388 - RNA, 19 nt, Artificial Sequence
  Description of Artificial Sequence: Synthetic oligonucleotide
  Antisense strand to SEQ ID NO: 505387
uucacucagcaaggauguu

SEQ ID NO: 505389 - RNA, 19 nt, Artificial Sequence
  Description of Artificial Sequence: Synthetic oligonucleotide
  Sense strand starting at position 2194 of SEQ ID NO: 317702
gagaaacaguauuaaagag

SEQ ID NO: 505390 - RNA, 19 nt, Artificial Sequence
  Description of Artificial Sequence: Synthetic oligonucleotide
  Antisense strand to SEQ ID NO: 505389
cucuuuaauacuguuucuc

SEQ ID NO: 505391 - RNA, 19 nt, Artificial Sequence
  Description of Artificial Sequence: Synthetic oligonucleotide
  Sense strand starting at position 2541 of SEQ ID NO: 317702
guaaaugacucgccaguca

SEQ ID NO: 505392 - RNA, 19 nt, Artificial Sequence
  Description of Artificial Sequence: Synthetic oligonucleotide
  Antisense strand to SEQ ID NO: 505391
ugacuggcgagucauuuac

SEQ ID NO: 505393 - RNA, 19 nt, Artificial Sequence
  Description of Artificial Sequence: Synthetic oligonucleotide
  Sense strand starting at position 2586 of SEQ ID NO: 317702
ggcccaaucuggcuccaaa

SEQ ID NO: 505394 - RNA, 19 nt, Artificial Sequence
  Description of Artificial Sequence: Synthetic oligonucleotide
  Antisense strand to SEQ ID NO: 505393
uuuggagccagauugggcc

SEQ ID NO: 505395 - RNA, 19 nt, Artificial Sequence
  Description of Artificial Sequence: Synthetic oligonucleotide
  Sense strand starting at position 2654 of SEQ ID NO: 317702
uuacuagcugcuuauaagu

SEQ ID NO: 505396 - RNA, 19 nt, Artificial Sequence
  Description of Artificial Sequence: Synthetic oligonucleotide
  Antisense strand to SEQ ID NO: 505395
acuuauaagcagcuaguaa

SEQ ID NO: 505397 - RNA, 19 nt, Artificial Sequence
  Description of Artificial Sequence: Synthetic oligonucleotide
  Sense strand starting at position 2659 of SEQ ID NO: 317702
agcugcuuauaaguaugaa

SEQ ID NO: 505398 - RNA, 19 nt, Artificial Sequence
  Description of Artificial Sequence: Synthetic oligonucleotide
  Antisense strand to SEQ ID NO: 505397
uucauacuuauaagcagcu

SEQ ID NO: 505399 - RNA, 19 nt, Artificial Sequence
  Description of Artificial Sequence: Synthetic oligonucleotide
  Sense strand starting at position 2849 of SEQ ID NO: 317702
ugggauugguaguccaugu

SEQ ID NO: 505400 - RNA, 19 nt, Artificial Sequence
  Description of Artificial Sequence: Synthetic oligonucleotide
  Antisense strand to SEQ ID NO: 505399
acauggacuaccaauccca

SEQ ID NO: 505401 - RNA, 19 nt, Artificial Sequence
  Description of Artificial Sequence: Synthetic oligonucleotide
  Sense strand starting at position 2956 of SEQ ID NO: 317702
cgcagauucuggcucagga

SEQ ID NO: 505402 - RNA, 19 nt, Artificial Sequence
  Description of Artificial Sequence: Synthetic oligonucleotide
  Antisense strand to SEQ ID NO: 505401
uccugagccagaaucugcg

SEQ ID NO: 505403 - RNA, 19 nt, Artificial Sequence
  Description of Artificial Sequence: Synthetic oligonucleotide
  Sense strand starting at position 3206 of SEQ ID NO: 317702
ggcggaugcgaauagagua

SEQ ID NO: 505404 - RNA, 19 nt, Artificial Sequence
  Description of Artificial Sequence: Synthetic oligonucleotide
  Antisense strand to SEQ ID NO: 505403
uacucuauucgcauccgcc

SEQ ID NO: 505405 - RNA, 19 nt, Artificial Sequence
  Description of Artificial Sequence: Synthetic oligonucleotide
  Sense strand starting at position 3433 of SEQ ID NO: 317702
gaacguuuauuagucgguu

SEQ ID NO: 505406 - RNA, 19 nt, Artificial Sequence
  Description of Artificial Sequence: Synthetic oligonucleotide
  Antisense strand to SEQ ID NO: 505405
aaccgacuaauaaacguuc

SEQ ID NO: 505407 - RNA, 19 nt, Artificial Sequence
  Description of Artificial Sequence: Synthetic oligonucleotide
  Sense strand starting at position 3467 of SEQ ID NO: 317702
gccaaauguuuggcccaca

SEQ ID NO: 505408 - RNA, 19 nt, Artificial Sequence
  Description of Artificial Sequence: Synthetic oligonucleotide
  Antisense strand to SEQ ID NO: 505407
ugugggccaaacauuuggc

SEQ ID NO: 505409 - RNA, 19 nt, Artificial Sequence
  Description of Artificial Sequence: Synthetic oligonucleotide
  Sense strand starting at position 3513 of SEQ ID NO: 317702
ggcuuaaggguuuauucca

SEQ ID NO: 505410 - RNA, 19 nt, Artificial Sequence
  Description of Artificial Sequence: Synthetic oligonucleotide
  Antisense strand to SEQ ID NO: 505409
uggaauaaacccuuaagcc

SEQ ID NO: 505411 - RNA, 19 nt, Artificial Sequence
  Description of Artificial Sequence: Synthetic oligonucleotide
  Sense strand starting at position 3520 of SEQ ID NO: 317702
ggguuuauuccaggugagg

SEQ ID NO: 505412 - RNA, 19 nt, Artificial Sequence
  Description of Artificial Sequence: Synthetic oligonucleotide
  Antisense strand to SEQ ID NO: 505411
ccucaccuggaauaaaccc

SEQ ID NO: 505413 - RNA, 19 nt, Artificial Sequence
  Description of Artificial Sequence: Synthetic oligonucleotide
  Sense strand starting at position 3531 of SEQ ID NO: 317702
aggugaggcgagugucuua

SEQ ID NO: 505414 - RNA, 19 nt, Artificial Sequence
  Description of Artificial Sequence: Synthetic oligonucleotide
  Antisense strand to SEQ ID NO: 505413
uaagacacucgccucaccu

SEQ ID NO: 505415 - RNA, 19 nt, Artificial Sequence
  Description of Artificial Sequence: Synthetic oligonucleotide
  Sense strand starting at position 3534 of SEQ ID NO: 317702
ugaggcgagugucuuagaa

SEQ ID NO: 505416 - RNA, 19 nt, Artificial Sequence
  Description of Artificial Sequence: Synthetic oligonucleotide
  Antisense strand to SEQ ID NO: 505415
uucuaagacacucgccuca

SEQ ID NO: 505417 - RNA, 19 nt, Artificial Sequence
  Description of Artificial Sequence: Synthetic oligonucleotide
  Sense strand starting at position 3663 of SEQ ID NO: 317702
ccagaaguggcaugauaaa

SEQ ID NO: 505418 - RNA, 19 nt, Artificial Sequence
  Description of Artificial Sequence: Synthetic oligonucleotide
  Antisense strand to SEQ ID NO: 505417
uuuaucaugccacuucugg

SEQ ID NO: 505419 - RNA, 19 nt, Artificial Sequence
  Description of Artificial Sequence: Synthetic oligonucleotide
  Sense strand starting at position 3778 of SEQ ID NO: 317702
cauugcucccgucaaguuu

SEQ ID NO: 505420 - RNA, 19 nt, Artificial Sequence
  Description of Artificial Sequence: Synthetic oligonucleotide
  Antisense strand to SEQ ID NO: 505419
aaacuugacgggagcaaug

SEQ ID NO: 505421 - RNA, 19 nt, Artificial Sequence
  Description of Artificial Sequence: Synthetic oligonucleotide
  Sense strand starting at position 3903 of SEQ ID NO: 317702
caaagcguuuguucuauuu

SEQ ID NO: 505422 - RNA, 19 nt, Artificial Sequence
  Description of Artificial Sequence: Synthetic oligonucleotide
  Antisense strand to SEQ ID NO: 505421
aaauagaacaaacgcuuug

SEQ ID NO: 505423 - RNA, 19 nt, Artificial Sequence
  Description of Artificial Sequence: Synthetic oligonucleotide
  Sense strand starting at position 3946 of SEQ ID NO: 317702
ggaauuagguaguuaaggu

SEQ ID NO: 505424 - RNA, 19 nt, Artificial Sequence
  Description of Artificial Sequence: Synthetic oligonucleotide
  Antisense strand to SEQ ID NO: 505423
accuuaacuaccuaauucc

SEQ ID NO: 505425 - RNA, 19 nt, Artificial Sequence
  Description of Artificial Sequence: Synthetic oligonucleotide
  Sense strand starting at position 3947 of SEQ ID NO: 317702
gaauuagguaguuaagguu

SEQ ID NO: 505426 - RNA, 19 nt, Artificial Sequence
  Description of Artificial Sequence: Synthetic oligonucleotide
  Antisense strand to SEQ ID NO: 505425
aaccuuaacuaccuaauuc

SEQ ID NO: 505427 - RNA, 19 nt, Artificial Sequence
  Description of Artificial Sequence: Synthetic oligonucleotide
  Sense strand starting at position 37 of SEQ ID NO: 317703
ggauaauggcaaugacauc

SEQ ID NO: 505428 - RNA, 19 nt, Artificial Sequence
  Description of Artificial Sequence: Synthetic oligonucleotide
  Antisense strand to SEQ ID NO: 505427
gaugucauugccauuaucc

SEQ ID NO: 505429 - RNA, 19 nt, Artificial Sequence
  Description of Artificial Sequence: Synthetic oligonucleotide
  Sense strand starting at position 86 of SEQ ID NO: 317703
aaggaauugucagugcuau

SEQ ID NO: 505430 - RNA, 19 nt, Artificial Sequence
  Description of Artificial Sequence: Synthetic oligonucleotide
  Antisense strand to SEQ ID NO: 505429
auagcacugacaauuccuu

SEQ ID NO: 505431 - RNA, 19 nt, Artificial Sequence
  Description of Artificial Sequence: Synthetic oligonucleotide
  Sense strand starting at position 87 of SEQ ID NO: 317703
aggaauugucagugcuauu

SEQ ID NO: 505432 - RNA, 19 nt, Artificial Sequence
  Description of Artificial Sequence: Synthetic oligonucleotide
  Antisense strand to SEQ ID NO: 505431
aauagcacugacaauuccu

SEQ ID NO: 505433 - RNA, 19 nt, Artificial Sequence
  Description of Artificial Sequence: Synthetic oligonucleotide
  Sense strand starting at position 98 of SEQ ID NO: 317703
gugcuauuaguacauuaau

SEQ ID NO: 505434 - RNA, 19 nt, Artificial Sequence
  Description of Artificial Sequence: Synthetic oligonucleotide
  Antisense strand to SEQ ID NO: 505433
auuaauguacuaauagcac

SEQ ID NO: 505435 - RNA, 19 nt, Artificial Sequence
  Description of Artificial Sequence: Synthetic oligonucleotide
  Sense strand starting at position 115 of SEQ ID NO: 317703
auaaaugcuucuuugagua

SEQ ID NO: 505436 - RNA, 19 nt, Artificial Sequence
  Description of Artificial Sequence: Synthetic oligonucleotide
  Antisense strand to SEQ ID NO: 505435
uacucaaagaagcauuuau

SEQ ID NO: 505437 - RNA, 19 nt, Artificial Sequence
  Description of Artificial Sequence: Synthetic oligonucleotide
  Sense strand starting at position 119 of SEQ ID NO: 317703
augcuucuuugaguacaaa

SEQ ID NO: 505438 - RNA, 19 nt, Artificial Sequence
  Description of Artificial Sequence: Synthetic oligonucleotide
  Antisense strand to SEQ ID NO: 505437
uuuguacucaaagaagcau

SEQ ID NO: 505439 - RNA, 19 nt, Artificial Sequence
  Description of Artificial Sequence: Synthetic oligonucleotide
  Sense strand starting at position 120 of SEQ ID NO: 317703
ugcuucuuugaguacaaag

SEQ ID NO: 505440 - RNA, 19 nt, Artificial Sequence
  Description of Artificial Sequence: Synthetic oligonucleotide
  Antisense strand to SEQ ID NO: 505439
cuuuguacucaaagaagca

SEQ ID NO: 505441 - RNA, 19 nt, Artificial Sequence
  Description of Artificial Sequence: Synthetic oligonucleotide
  Sense strand starting at position 210 of SEQ ID NO: 317703
cgcuaacuccaguaggaaa

SEQ ID NO: 505442 - RNA, 19 nt, Artificial Sequence
  Description of Artificial Sequence: Synthetic oligonucleotide
  Antisense strand to SEQ ID NO: 505441
uuuccuacuggaguuagcg

SEQ ID NO: 505443 - RNA, 19 nt, Artificial Sequence
  Description of Artificial Sequence: Synthetic oligonucleotide
  Sense strand starting at position 273 of SEQ ID NO: 317703
ccagaauucugacucuguc

SEQ ID NO: 505444 - RNA, 19 nt, Artificial Sequence
  Description of Artificial Sequence: Synthetic oligonucleotide
  Antisense strand to SEQ ID NO: 505443
gacagagucagaauucugg

SEQ ID NO: 505445 - RNA, 19 nt, Artificial Sequence
  Description of Artificial Sequence: Synthetic oligonucleotide
  Sense strand starting at position 346 of SEQ ID NO: 317703
ggaggaacuugauacuuaa

SEQ ID NO: 505446 - RNA, 19 nt, Artificial Sequence
  Description of Artificial Sequence: Synthetic oligonucleotide
  Antisense strand to SEQ ID NO: 505445
uuaaguaucaaguuccucc

SEQ ID NO: 505447 - RNA, 19 nt, Artificial Sequence
  Description of Artificial Sequence: Synthetic oligonucleotide
  Sense strand starting at position 427 of SEQ ID NO: 317703
aaauguaucccagggagca

SEQ ID NO: 505448 - RNA, 19 nt, Artificial Sequence
  Description of Artificial Sequence: Synthetic oligonucleotide
  Antisense strand to SEQ ID NO: 505447
ugcucccugggauacauuu

SEQ ID NO: 505449 - RNA, 19 nt, Artificial Sequence
  Description of Artificial Sequence: Synthetic oligonucleotide
  Sense strand starting at position 428 of SEQ ID NO: 317703
aauguaucccagggagcaa

SEQ ID NO: 505450 - RNA, 19 nt, Artificial Sequence
  Description of Artificial Sequence: Synthetic oligonucleotide
  Antisense strand to SEQ ID NO: 505449
uugcucccugggauacauu

SEQ ID NO: 505451 - RNA, 19 nt, Artificial Sequence
  Description of Artificial Sequence: Synthetic oligonucleotide
  Sense strand starting at position 929 of SEQ ID NO: 317703
aagagaugguguuucugac

SEQ ID NO: 505452 - RNA, 19 nt, Artificial Sequence
  Description of Artificial Sequence: Synthetic oligonucleotide
  Antisense strand to SEQ ID NO: 505451
gucagaaacaccaucucuu

SEQ ID NO: 505453 - RNA, 19 nt, Artificial Sequence
  Description of Artificial Sequence: Synthetic oligonucleotide
  Sense strand starting at position 1245 of SEQ ID NO: 317703
gcucuuugguaauuaaucu

SEQ ID NO: 505454 - RNA, 19 nt, Artificial Sequence
  Description of Artificial Sequence: Synthetic oligonucleotide
  Antisense strand to SEQ ID NO: 505453
agauuaauuaccaaagagc

SEQ ID NO: 505455 - RNA, 19 nt, Artificial Sequence
  Description of Artificial Sequence: Synthetic oligonucleotide
  Sense strand starting at position 1257 of SEQ ID NO: 317703
uuaaucucgcuuuagauca

SEQ ID NO: 505456 - RNA, 19 nt, Artificial Sequence
  Description of Artificial Sequence: Synthetic oligonucleotide
  Antisense strand to SEQ ID NO: 505455
ugaucuaaagcgagauuaa

SEQ ID NO: 505457 - RNA, 19 nt, Artificial Sequence
  Description of Artificial Sequence: Synthetic oligonucleotide
  Sense strand starting at position 1331 of SEQ ID NO: 317703
gaaggagcuuguucuguac

SEQ ID NO: 505458 - RNA, 19 nt, Artificial Sequence
  Description of Artificial Sequence: Synthetic oligonucleotide
  Antisense strand to SEQ ID NO: 505457
guacagaacaagcuccuuc

SEQ ID NO: 505459 - RNA, 19 nt, Artificial Sequence
  Description of Artificial Sequence: Synthetic oligonucleotide
  Sense strand starting at position 1555 of SEQ ID NO: 317703
cccugaaacucguuuccaa

SEQ ID NO: 505460 - RNA, 19 nt, Artificial Sequence
  Description of Artificial Sequence: Synthetic oligonucleotide
  Antisense strand to SEQ ID NO: 505459
uuggaaacgaguuucaggg

SEQ ID NO: 505461 - RNA, 19 nt, Artificial Sequence
  Description of Artificial Sequence: Synthetic oligonucleotide
  Sense strand starting at position 2148 of SEQ ID NO: 317703
ucagcaaaguguucugaug

SEQ ID NO: 505462 - RNA, 19 nt, Artificial Sequence
  Description of Artificial Sequence: Synthetic oligonucleotide
  Antisense strand to SEQ ID NO: 505461
caucagaacacuuugcuga

SEQ ID NO: 505463 - RNA, 19 nt, Artificial Sequence
  Description of Artificial Sequence: Synthetic oligonucleotide
  Sense strand starting at position 2186 of SEQ ID NO: 317703
caaagaguguaguuaucua

SEQ ID NO: 505464 - RNA, 19 nt, Artificial Sequence
  Description of Artificial Sequence: Synthetic oligonucleotide
  Antisense strand to SEQ ID NO: 505463
uagauaacuacacucuuug

SEQ ID NO: 505465 - RNA, 19 nt, Artificial Sequence
  Description of Artificial Sequence: Synthetic oligonucleotide
  Sense strand starting at position 2246 of SEQ ID NO: 317703
auaguugucccuuacuauu

SEQ ID NO: 505466 - RNA, 19 nt, Artificial Sequence
  Description of Artificial Sequence: Synthetic oligonucleotide
  Antisense strand to SEQ ID NO: 505465
aauaguaagggacaacuau

SEQ ID NO: 505467 - RNA, 19 nt, Artificial Sequence
  Description of Artificial Sequence: Synthetic oligonucleotide
  Sense strand starting at position 2289 of SEQ ID NO: 317703
gggccaugaucuuuaaguu

SEQ ID NO: 505468 - RNA, 19 nt, Artificial Sequence
  Description of Artificial Sequence: Synthetic oligonucleotide
  Antisense strand to SEQ ID NO: 505467
aacuuaaagaucauggccc

SEQ ID NO: 505469 - RNA, 19 nt, Artificial Sequence
  Description of Artificial Sequence: Synthetic oligonucleotide
  Sense strand starting at position 2290 of SEQ ID NO: 317703
ggccaugaucuuuaaguuc

SEQ ID NO: 505470 - RNA, 19 nt, Artificial Sequence
  Description of Artificial Sequence: Synthetic oligonucleotide
  Antisense strand to SEQ ID NO: 505469
gaacuuaaagaucauggcc

SEQ ID NO: 505471 - RNA, 19 nt, Artificial Sequence
  Description of Artificial Sequence: Synthetic oligonucleotide
  Sense strand starting at position 2816 of SEQ ID NO: 317703
uauuuaucuugugugcugu

SEQ ID NO: 505472 - RNA, 19 nt, Artificial Sequence
  Description of Artificial Sequence: Synthetic oligonucleotide
  Antisense strand to SEQ ID NO: 505471
acagcacacaagauaaaua

SEQ ID NO: 505473 - RNA, 19 nt, Artificial Sequence
  Description of Artificial Sequence: Synthetic oligonucleotide
  Sense strand starting at position 2895 of SEQ ID NO: 317703
agcagaugaccuugcaaac

SEQ ID NO: 505474 - RNA, 19 nt, Artificial Sequence
  Description of Artificial Sequence: Synthetic oligonucleotide
  Antisense strand to SEQ ID NO: 505473
guuugcaaggucaucugcu

SEQ ID NO: 505475 - RNA, 19 nt, Artificial Sequence
  Description of Artificial Sequence: Synthetic oligonucleotide
  Sense strand starting at position 2918 of SEQ ID NO: 317703
gacucaaugcagugugaaa

SEQ ID NO: 505476 - RNA, 19 nt, Artificial Sequence
  Description of Artificial Sequence: Synthetic oligonucleotide
  Antisense strand to SEQ ID NO: 505475
uuucacacugcauugaguc

SEQ ID NO: 505477 - RNA, 19 nt, Artificial Sequence
  Description of Artificial Sequence: Synthetic oligonucleotide
  Sense strand starting at position 2977 of SEQ ID NO: 317703
cuugcugagccuugaaaga

SEQ ID NO: 505478 - RNA, 19 nt, Artificial Sequence
  Description of Artificial Sequence: Synthetic oligonucleotide
  Antisense strand to SEQ ID NO: 505477
ucuuucaaggcucagcaag

SEQ ID NO: 505479 - RNA, 19 nt, Artificial Sequence
  Description of Artificial Sequence: Synthetic oligonucleotide
  Sense strand starting at position 2998 of SEQ ID NO: 317703
aguagaaauuagccagaau

SEQ ID NO: 505480 - RNA, 19 nt, Artificial Sequence
  Description of Artificial Sequence: Synthetic oligonucleotide
  Antisense strand to SEQ ID NO: 505479
auucuggcuaauuucuacu

SEQ ID NO: 505481 - RNA, 19 nt, Artificial Sequence
  Description of Artificial Sequence: Synthetic oligonucleotide
  Sense strand starting at position 3010 of SEQ ID NO: 317703
ccagaaugguaagaagaaa

SEQ ID NO: 505482 - RNA, 19 nt, Artificial Sequence
  Description of Artificial Sequence: Synthetic oligonucleotide
  Antisense strand to SEQ ID NO: 505481
uuucuucuuaccauucugg

SEQ ID NO: 505483 - RNA, 19 nt, Artificial Sequence
  Description of Artificial Sequence: Synthetic oligonucleotide
  Sense strand starting at position 3669 of SEQ ID NO: 317703
uuagaacgcuugcugagaa

SEQ ID NO: 505484 - RNA, 19 nt, Artificial Sequence
  Description of Artificial Sequence: Synthetic oligonucleotide
  Antisense strand to SEQ ID NO: 505483
uucucagcaagcguucuaa

SEQ ID NO: 505485 - RNA, 19 nt, Artificial Sequence
  Description of Artificial Sequence: Synthetic oligonucleotide
  Sense strand starting at position 3691 of SEQ ID NO: 317703
ucacauauguuaguuauag

SEQ ID NO: 505486 - RNA, 19 nt, Artificial Sequence
  Description of Artificial Sequence: Synthetic oligonucleotide
  Antisense strand to SEQ ID NO: 505485
cuauaacuaacauauguga

SEQ ID NO: 505487 - RNA, 19 nt, Artificial Sequence
  Description of Artificial Sequence: Synthetic oligonucleotide
  Sense strand starting at position 3692 of SEQ ID NO: 317703
cacauauguuaguuauagu

SEQ ID NO: 505488 - RNA, 19 nt, Artificial Sequence
  Description of Artificial Sequence: Synthetic oligonucleotide
  Antisense strand to SEQ ID NO: 505487
acuauaacuaacauaugug

SEQ ID NO: 505489 - RNA, 19 nt, Artificial Sequence
  Description of Artificial Sequence: Synthetic oligonucleotide
  Sense strand starting at position 3735 of SEQ ID NO: 317703
ggaagccaguucucagaga

SEQ ID NO: 505490 - RNA, 19 nt, Artificial Sequence
  Description of Artificial Sequence: Synthetic oligonucleotide
  Antisense strand to SEQ ID NO: 505489
ucucugagaacuggcuucc

SEQ ID NO: 505491 - RNA, 19 nt, Artificial Sequence
  Description of Artificial Sequence: Synthetic oligonucleotide
  Sense strand starting at position 3754 of SEQ ID NO: 317703
gguugaggagcuugaugau

SEQ ID NO: 505492 - RNA, 19 nt, Artificial Sequence
  Description of Artificial Sequence: Synthetic oligonucleotide
  Antisense strand to SEQ ID NO: 505491
aucaucaagcuccucaacc

SEQ ID NO: 505493 - RNA, 19 nt, Artificial Sequence
  Description of Artificial Sequence: Synthetic oligonucleotide
  Sense strand starting at position 3798 of SEQ ID NO: 317703
gaaagcaggucuuuaaaug

SEQ ID NO: 505494 - RNA, 19 nt, Artificial Sequence
  Description of Artificial Sequence: Synthetic oligonucleotide
  Antisense strand to SEQ ID NO: 505493
cauuuaaagaccugcuuuc

SEQ ID NO: 505495 - RNA, 19 nt, Artificial Sequence
  Description of Artificial Sequence: Synthetic oligonucleotide
  Sense strand starting at position 3821 of SEQ ID NO: 317703
gugcuuuaccagggaccau

SEQ ID NO: 505496 - RNA, 19 nt, Artificial Sequence
  Description of Artificial Sequence: Synthetic oligonucleotide
  Antisense strand to SEQ ID NO: 505495
auggucccugguaaagcac

SEQ ID NO: 505497 - RNA, 19 nt, Artificial Sequence
  Description of Artificial Sequence: Synthetic oligonucleotide
  Sense strand starting at position 3891 of SEQ ID NO: 317703
uagaauggauuccuguauu

SEQ ID NO: 505498 - RNA, 19 nt, Artificial Sequence
  Description of Artificial Sequence: Synthetic oligonucleotide
  Antisense strand to SEQ ID NO: 505497
aauacaggaauccauucua

SEQ ID NO: 505499 - RNA, 19 nt, Artificial Sequence
  Description of Artificial Sequence: Synthetic oligonucleotide
  Sense strand starting at position 3901 of SEQ ID NO: 317703
uccuguauuaaacgggaaa

SEQ ID NO: 505500 - RNA, 19 nt, Artificial Sequence
  Description of Artificial Sequence: Synthetic oligonucleotide
  Antisense strand to SEQ ID NO: 505499
uuucccguuuaauacagga

SEQ ID NO: 505501 - RNA, 19 nt, Artificial Sequence
  Description of Artificial Sequence: Synthetic oligonucleotide
  Sense strand starting at position 3902 of SEQ ID NO: 317703
ccuguauuaaacgggaaac

SEQ ID NO: 505502 - RNA, 19 nt, Artificial Sequence
  Description of Artificial Sequence: Synthetic oligonucleotide
  Antisense strand to SEQ ID NO: 505501
guuucccguuuaauacagg

SEQ ID NO: 505503 - RNA, 19 nt, Artificial Sequence
  Description of Artificial Sequence: Synthetic oligonucleotide
  Sense strand starting at position 3903 of SEQ ID NO: 317703
cuguauuaaacgggaaacu

SEQ ID NO: 505504 - RNA, 19 nt, Artificial Sequence
  Description of Artificial Sequence: Synthetic oligonucleotide
  Antisense strand to SEQ ID NO: 505503
aguuucccguuuaauacag

SEQ ID NO: 505505 - RNA, 19 nt, Artificial Sequence
  Description of Artificial Sequence: Synthetic oligonucleotide
  Sense strand starting at position 3979 of SEQ ID NO: 317703
ccugaucagcaauguagaa

SEQ ID NO: 505506 - RNA, 19 nt, Artificial Sequence
  Description of Artificial Sequence: Synthetic oligonucleotide
  Antisense strand to SEQ ID NO: 505505
uucuacauugcugaucagg

SEQ ID NO: 505507 - RNA, 19 nt, Artificial Sequence
  Description of Artificial Sequence: Synthetic oligonucleotide
  Sense strand starting at position 211 of SEQ ID NO: 317704
gcaucauccugugcucuaa

SEQ ID NO: 505508 - RNA, 19 nt, Artificial Sequence
  Description of Artificial Sequence: Synthetic oligonucleotide
  Antisense strand to SEQ ID NO: 505507
uuagagcacaggaugaugc

SEQ ID NO: 505509 - RNA, 19 nt, Artificial Sequence
  Description of Artificial Sequence: Synthetic oligonucleotide
  Sense strand starting at position 213 of SEQ ID NO: 317704
aucauccugugcucuaaga

SEQ ID NO: 505510 - RNA, 19 nt, Artificial Sequence
  Description of Artificial Sequence: Synthetic oligonucleotide
  Antisense strand to SEQ ID NO: 505509
ucuuagagcacaggaugau

SEQ ID NO: 505511 - RNA, 19 nt, Artificial Sequence
  Description of Artificial Sequence: Synthetic oligonucleotide
  Sense strand starting at position 266 of SEQ ID NO: 317704
gucccaauuccucaggaca

SEQ ID NO: 505512 - RNA, 19 nt, Artificial Sequence
  Description of Artificial Sequence: Synthetic oligonucleotide
  Antisense strand to SEQ ID NO: 505511
uguccugaggaauugggac

SEQ ID NO: 505513 - RNA, 19 nt, Artificial Sequence
  Description of Artificial Sequence: Synthetic oligonucleotide
  Sense strand starting at position 393 of SEQ ID NO: 317704
gaggcuuugucucccucau

SEQ ID NO: 505514 - RNA, 19 nt, Artificial Sequence
  Description of Artificial Sequence: Synthetic oligonucleotide
  Antisense strand to SEQ ID NO: 505513
augagggagacaaagccuc

SEQ ID NO: 505515 - RNA, 19 nt, Artificial Sequence
  Description of Artificial Sequence: Synthetic oligonucleotide
  Sense strand starting at position 395 of SEQ ID NO: 317704
ggcuuugucucccucauca

SEQ ID NO: 505516 - RNA, 19 nt, Artificial Sequence
  Description of Artificial Sequence: Synthetic oligonucleotide
  Antisense strand to SEQ ID NO: 505515
ugaugagggagacaaagcc

SEQ ID NO: 505517 - RNA, 19 nt, Artificial Sequence
  Description of Artificial Sequence: Synthetic oligonucleotide
  Sense strand starting at position 518 of SEQ ID NO: 317704
gcaccaacccugugucaaa

SEQ ID NO: 505518 - RNA, 19 nt, Artificial Sequence
  Description of Artificial Sequence: Synthetic oligonucleotide
  Antisense strand to SEQ ID NO: 505517
uuugacacaggguuggugc

SEQ ID NO: 505519 - RNA, 19 nt, Artificial Sequence
  Description of Artificial Sequence: Synthetic oligonucleotide
  Sense strand starting at position 555 of SEQ ID NO: 317704
guaaauuucucuggaaaca

SEQ ID NO: 505520 - RNA, 19 nt, Artificial Sequence
  Description of Artificial Sequence: Synthetic oligonucleotide
  Antisense strand to SEQ ID NO: 505519
uguuuccagagaaauuuac

SEQ ID NO: 505521 - RNA, 19 nt, Artificial Sequence
  Description of Artificial Sequence: Synthetic oligonucleotide
  Sense strand starting at position 738 of SEQ ID NO: 317704
ggcagugccaugcucuuua

SEQ ID NO: 505522 - RNA, 19 nt, Artificial Sequence
  Description of Artificial Sequence: Synthetic oligonucleotide
  Antisense strand to SEQ ID NO: 505521
uaaagagcauggcacugcc

SEQ ID NO: 505523 - RNA, 19 nt, Artificial Sequence
  Description of Artificial Sequence: Synthetic oligonucleotide
  Sense strand starting at position 742 of SEQ ID NO: 317704
gugccaugcucuuuacaug

SEQ ID NO: 505524 - RNA, 19 nt, Artificial Sequence
  Description of Artificial Sequence: Synthetic oligonucleotide
  Antisense strand to SEQ ID NO: 505523
cauguaaagagcauggcac

SEQ ID NO: 505525 - RNA, 19 nt, Artificial Sequence
  Description of Artificial Sequence: Synthetic oligonucleotide
  Sense strand starting at position 756 of SEQ ID NO: 317704
acaugugugcgguccuuua

SEQ ID NO: 505526 - RNA, 19 nt, Artificial Sequence
  Description of Artificial Sequence: Synthetic oligonucleotide
  Antisense strand to SEQ ID NO: 505525
uaaaggaccgcacacaugu

SEQ ID NO: 505527 - RNA, 19 nt, Artificial Sequence
  Description of Artificial Sequence: Synthetic oligonucleotide
  Sense strand starting at position 758 of SEQ ID NO: 317704
augugugcgguccuuuaau

SEQ ID NO: 505528 - RNA, 19 nt, Artificial Sequence
  Description of Artificial Sequence: Synthetic oligonucleotide
  Antisense strand to SEQ ID NO: 505527
auuaaaggaccgcacacau

SEQ ID NO: 505529 - RNA, 19 nt, Artificial Sequence
  Description of Artificial Sequence: Synthetic oligonucleotide
  Sense strand starting at position 898 of SEQ ID NO: 317704
gcuaguccacgcuuucuau

SEQ ID NO: 505530 - RNA, 19 nt, Artificial Sequence
  Description of Artificial Sequence: Synthetic oligonucleotide
  Antisense strand to SEQ ID NO: 505529
auagaaagcguggacuagc

SEQ ID NO: 505531 - RNA, 19 nt, Artificial Sequence
  Description of Artificial Sequence: Synthetic oligonucleotide
  Sense strand starting at position 901 of SEQ ID NO: 317704
aguccacgcuuucuauuau

SEQ ID NO: 505532 - RNA, 19 nt, Artificial Sequence
  Description of Artificial Sequence: Synthetic oligonucleotide
  Antisense strand to SEQ ID NO: 505531
auaauagaaagcguggacu

SEQ ID NO: 505533 - RNA, 19 nt, Artificial Sequence
  Description of Artificial Sequence: Synthetic oligonucleotide
  Sense strand starting at position 968 of SEQ ID NO: 317704
acaaguuguggccacuaaa

SEQ ID NO: 505534 - RNA, 19 nt, Artificial Sequence
  Description of Artificial Sequence: Synthetic oligonucleotide
  Antisense strand to SEQ ID NO: 505533
uuuaguggccacaacuugu

SEQ ID NO: 505535 - RNA, 19 nt, Artificial Sequence
  Description of Artificial Sequence: Synthetic oligonucleotide
  Sense strand starting at position 1053 of SEQ ID NO: 317704
aggagauccagucaugugu

SEQ ID NO: 505536 - RNA, 19 nt, Artificial Sequence
  Description of Artificial Sequence: Synthetic oligonucleotide
  Antisense strand to SEQ ID NO: 505535
acacaugacuggaucuccu

SEQ ID NO: 505537 - RNA, 19 nt, Artificial Sequence
  Description of Artificial Sequence: Synthetic oligonucleotide
  Sense strand starting at position 1060 of SEQ ID NO: 317704
ccagucauguguucuguga

SEQ ID NO: 505538 - RNA, 19 nt, Artificial Sequence
  Description of Artificial Sequence: Synthetic oligonucleotide
  Antisense strand to SEQ ID NO: 505537
ucacagaacacaugacugg

SEQ ID NO: 505539 - RNA, 19 nt, Artificial Sequence
  Description of Artificial Sequence: Synthetic oligonucleotide
  Sense strand starting at position 1064 of SEQ ID NO: 317704
ucauguguucugugagaag

SEQ ID NO: 505540 - RNA, 19 nt, Artificial Sequence
  Description of Artificial Sequence: Synthetic oligonucleotide
  Antisense strand to SEQ ID NO: 505539
cuucucacagaacacauga

SEQ ID NO: 505541 - RNA, 19 nt, Artificial Sequence
  Description of Artificial Sequence: Synthetic oligonucleotide
  Sense strand starting at position 1140 of SEQ ID NO: 317704
cauucugcuuuagugagaa

SEQ ID NO: 505542 - RNA, 19 nt, Artificial Sequence
  Description of Artificial Sequence: Synthetic oligonucleotide
  Antisense strand to SEQ ID NO: 505541
uucucacuaaagcagaaug

SEQ ID NO: 505543 - RNA, 19 nt, Artificial Sequence
  Description of Artificial Sequence: Synthetic oligonucleotide
  Sense strand starting at position 1226 of SEQ ID NO: 317704
auggacuaaugcguguaua

SEQ ID NO: 505544 - RNA, 19 nt, Artificial Sequence
  Description of Artificial Sequence: Synthetic oligonucleotide
  Antisense strand to SEQ ID NO: 505543
uauacacgcauuaguccau

SEQ ID NO: 505545 - RNA, 19 nt, Artificial Sequence
  Description of Artificial Sequence: Synthetic oligonucleotide
  Sense strand starting at position 1227 of SEQ ID NO: 317704
uggacuaaugcguguauaa

SEQ ID NO: 505546 - RNA, 19 nt, Artificial Sequence
  Description of Artificial Sequence: Synthetic oligonucleotide
  Antisense strand to SEQ ID NO: 505545
uuauacacgcauuagucca

SEQ ID NO: 505547 - RNA, 19 nt, Artificial Sequence
  Description of Artificial Sequence: Synthetic oligonucleotide
  Sense strand starting at position 1229 of SEQ ID NO: 317704
gacuaaugcguguauaagg

SEQ ID NO: 505548 - RNA, 19 nt, Artificial Sequence
  Description of Artificial Sequence: Synthetic oligonucleotide
  Antisense strand to SEQ ID NO: 505547
ccuuauacacgcauuaguc

SEQ ID NO: 505549 - RNA, 19 nt, Artificial Sequence
  Description of Artificial Sequence: Synthetic oligonucleotide
  Sense strand starting at position 1368 of SEQ ID NO: 317704
aggcuauauggaugugaug

SEQ ID NO: 505550 - RNA, 19 nt, Artificial Sequence
  Description of Artificial Sequence: Synthetic oligonucleotide
  Antisense strand to SEQ ID NO: 505549
caucacauccauauagccu

SEQ ID NO: 505551 - RNA, 19 nt, Artificial Sequence
  Description of Artificial Sequence: Synthetic oligonucleotide
  Sense strand starting at position 1370 of SEQ ID NO: 317704
gcuauauggaugugaugag

SEQ ID NO: 505552 - RNA, 19 nt, Artificial Sequence
  Description of Artificial Sequence: Synthetic oligonucleotide
  Antisense strand to SEQ ID NO: 505551
cucaucacauccauauagc

SEQ ID NO: 505553 - RNA, 19 nt, Artificial Sequence
  Description of Artificial Sequence: Synthetic oligonucleotide
  Sense strand starting at position 1411 of SEQ ID NO: 317704
gaauacacguccucaggga

SEQ ID NO: 505554 - RNA, 19 nt, Artificial Sequence
  Description of Artificial Sequence: Synthetic oligonucleotide
  Antisense strand to SEQ ID NO: 505553
ucccugaggacguguauuc

SEQ ID NO: 505555 - RNA, 19 nt, Artificial Sequence
  Description of Artificial Sequence: Synthetic oligonucleotide
  Sense strand starting at position 1412 of SEQ ID NO: 317704
aauacacguccucagggau

SEQ ID NO: 505556 - RNA, 19 nt, Artificial Sequence
  Description of Artificial Sequence: Synthetic oligonucleotide
  Antisense strand to SEQ ID NO: 505555
aucccugaggacguguauu

SEQ ID NO: 505557 - RNA, 19 nt, Artificial Sequence
  Description of Artificial Sequence: Synthetic oligonucleotide
  Sense strand starting at position 2826 of SEQ ID NO: 317704
guuuccucaccuggguaua

SEQ ID NO: 505558 - RNA, 19 nt, Artificial Sequence
  Description of Artificial Sequence: Synthetic oligonucleotide
  Antisense strand to SEQ ID NO: 505557
uauacccaggugaggaaac

SEQ ID NO: 505559 - RNA, 19 nt, Artificial Sequence
  Description of Artificial Sequence: Synthetic oligonucleotide
  Sense strand starting at position 2827 of SEQ ID NO: 317704
uuuccucaccuggguauau

SEQ ID NO: 505560 - RNA, 19 nt, Artificial Sequence
  Description of Artificial Sequence: Synthetic oligonucleotide
  Antisense strand to SEQ ID NO: 505559
auauacccaggugaggaaa

SEQ ID NO: 505561 - RNA, 19 nt, Artificial Sequence
  Description of Artificial Sequence: Synthetic oligonucleotide
  Sense strand starting at position 2851 of SEQ ID NO: 317704
gcuccuauucuauauggua

SEQ ID NO: 505562 - RNA, 19 nt, Artificial Sequence
  Description of Artificial Sequence: Synthetic oligonucleotide
  Antisense strand to SEQ ID NO: 505561
uaccauauagaauaggagc

SEQ ID NO: 505563 - RNA, 19 nt, Artificial Sequence
  Description of Artificial Sequence: Synthetic oligonucleotide
  Sense strand starting at position 3001 of SEQ ID NO: 317704
gagacugaguucccauauc

SEQ ID NO: 505564 - RNA, 19 nt, Artificial Sequence
  Description of Artificial Sequence: Synthetic oligonucleotide
  Antisense strand to SEQ ID NO: 505563
gauaugggaacucagucuc

SEQ ID NO: 505565 - RNA, 19 nt, Artificial Sequence
  Description of Artificial Sequence: Synthetic oligonucleotide
  Sense strand starting at position 3097 of SEQ ID NO: 317704
gaaagaaagcggcaauugu

SEQ ID NO: 505566 - RNA, 19 nt, Artificial Sequence
  Description of Artificial Sequence: Synthetic oligonucleotide
  Antisense strand to SEQ ID NO: 505565
acaauugccgcuuucuuuc

SEQ ID NO: 505567 - RNA, 19 nt, Artificial Sequence
  Description of Artificial Sequence: Synthetic oligonucleotide
  Sense strand starting at position 3101 of SEQ ID NO: 317704
gaaagcggcaauuguuaga

SEQ ID NO: 505568 - RNA, 19 nt, Artificial Sequence
  Description of Artificial Sequence: Synthetic oligonucleotide
  Antisense strand to SEQ ID NO: 505567
ucuaacaauugccgcuuuc

SEQ ID NO: 505569 - RNA, 19 nt, Artificial Sequence
  Description of Artificial Sequence: Synthetic oligonucleotide
  Sense strand starting at position 3207 of SEQ ID NO: 317704
uguuaauaguucuuacuac

SEQ ID NO: 505570 - RNA, 19 nt, Artificial Sequence
  Description of Artificial Sequence: Synthetic oligonucleotide
  Antisense strand to SEQ ID NO: 505569
guaguaagaacuauuaaca

SEQ ID NO: 505571 - RNA, 19 nt, Artificial Sequence
  Description of Artificial Sequence: Synthetic oligonucleotide
  Sense strand starting at position 3215 of SEQ ID NO: 317704
guucuuacuacaugagggu

SEQ ID NO: 505572 - RNA, 19 nt, Artificial Sequence
  Description of Artificial Sequence: Synthetic oligonucleotide
  Antisense strand to SEQ ID NO: 505571
acccucauguaguaagaac

SEQ ID NO: 505573 - RNA, 19 nt, Artificial Sequence
  Description of Artificial Sequence: Synthetic oligonucleotide
  Sense strand starting at position 3231 of SEQ ID NO: 317704
gguuaucucacguaguccu

SEQ ID NO: 505574 - RNA, 19 nt, Artificial Sequence
  Description of Artificial Sequence: Synthetic oligonucleotide
  Antisense strand to SEQ ID NO: 505573
aggacuacgugagauaacc

SEQ ID NO: 505575 - RNA, 19 nt, Artificial Sequence
  Description of Artificial Sequence: Synthetic oligonucleotide
  Sense strand starting at position 3309 of SEQ ID NO: 317704
ucagguaguuugguugcaa

SEQ ID NO: 505576 - RNA, 19 nt, Artificial Sequence
  Description of Artificial Sequence: Synthetic oligonucleotide
  Antisense strand to SEQ ID NO: 505575
uugcaaccaaacuaccuga

SEQ ID NO: 505577 - RNA, 19 nt, Artificial Sequence
  Description of Artificial Sequence: Synthetic oligonucleotide
  Sense strand starting at position 3321 of SEQ ID NO: 317704
guugcaaaucuauggguuu

SEQ ID NO: 505578 - RNA, 19 nt, Artificial Sequence
  Description of Artificial Sequence: Synthetic oligonucleotide
  Antisense strand to SEQ ID NO: 505577
aaacccauagauuugcaac

SEQ ID NO: 505579 - RNA, 19 nt, Artificial Sequence
  Description of Artificial Sequence: Synthetic oligonucleotide
  Sense strand starting at position 3446 of SEQ ID NO: 317704
cccguaaaccuggaaguau

SEQ ID NO: 505580 - RNA, 19 nt, Artificial Sequence
  Description of Artificial Sequence: Synthetic oligonucleotide
  Antisense strand to SEQ ID NO: 505579
auacuuccagguuuacggg

SEQ ID NO: 505581 - RNA, 19 nt, Artificial Sequence
  Description of Artificial Sequence: Synthetic oligonucleotide
  Sense strand starting at position 3578 of SEQ ID NO: 317704
acuauaucaggaugaagcu

SEQ ID NO: 505582 - RNA, 19 nt, Artificial Sequence
  Description of Artificial Sequence: Synthetic oligonucleotide
  Antisense strand to SEQ ID NO: 505581
agcuucauccugauauagu

SEQ ID NO: 505583 - RNA, 19 nt, Artificial Sequence
  Description of Artificial Sequence: Synthetic oligonucleotide
  Sense strand starting at position 3673 of SEQ ID NO: 317704
gugauauccagcuaagagc

SEQ ID NO: 505584 - RNA, 19 nt, Artificial Sequence
  Description of Artificial Sequence: Synthetic oligonucleotide
  Antisense strand to SEQ ID NO: 505583
gcucuuagcuggauaucac

SEQ ID NO: 505585 - RNA, 19 nt, Artificial Sequence
  Description of Artificial Sequence: Synthetic oligonucleotide
  Sense strand starting at position 3682 of SEQ ID NO: 317704
agcuaagagccauguugau

SEQ ID NO: 505586 - RNA, 19 nt, Artificial Sequence
  Description of Artificial Sequence: Synthetic oligonucleotide
  Antisense strand to SEQ ID NO: 505585
aucaacauggcucuuagcu

SEQ ID NO: 505587 - RNA, 19 nt, Artificial Sequence
  Description of Artificial Sequence: Synthetic oligonucleotide
  Sense strand starting at position 434 of SEQ ID NO: 317705
agucccaugggucgagaaa

SEQ ID NO: 505588 - RNA, 19 nt, Artificial Sequence
  Description of Artificial Sequence: Synthetic oligonucleotide
  Antisense strand to SEQ ID NO: 505587
uuucucgacccaugggacu

SEQ ID NO: 505589 - RNA, 19 nt, Artificial Sequence
  Description of Artificial Sequence: Synthetic oligonucleotide
  Sense strand starting at position 674 of SEQ ID NO: 317705
ggguuucgcauucggcaau

SEQ ID NO: 505590 - RNA, 19 nt, Artificial Sequence
  Description of Artificial Sequence: Synthetic oligonucleotide
  Antisense strand to SEQ ID NO: 505589
auugccgaaugcgaaaccc

SEQ ID NO: 505591 - RNA, 19 nt, Artificial Sequence
  Description of Artificial Sequence: Synthetic oligonucleotide
  Sense strand starting at position 1587 of SEQ ID NO: 317705
ccgccaacguuuccuaaau

SEQ ID NO: 505592 - RNA, 19 nt, Artificial Sequence
  Description of Artificial Sequence: Synthetic oligonucleotide
  Antisense strand to SEQ ID NO: 505591
auuuaggaaacguuggcgg

SEQ ID NO: 505593 - RNA, 19 nt, Artificial Sequence
  Description of Artificial Sequence: Synthetic oligonucleotide
  Sense strand starting at position 1782 of SEQ ID NO: 317705
uuuggaaccguuggauaag

SEQ ID NO: 505594 - RNA, 19 nt, Artificial Sequence
  Description of Artificial Sequence: Synthetic oligonucleotide
  Antisense strand to SEQ ID NO: 505593
cuuauccaacgguuccaaa

SEQ ID NO: 505595 - RNA, 19 nt, Artificial Sequence
  Description of Artificial Sequence: Synthetic oligonucleotide
  Sense strand starting at position 1783 of SEQ ID NO: 317705
uuggaaccguuggauaaga

SEQ ID NO: 505596 - RNA, 19 nt, Artificial Sequence
  Description of Artificial Sequence: Synthetic oligonucleotide
  Antisense strand to SEQ ID NO: 505595
ucuuauccaacgguuccaa

SEQ ID NO: 505597 - RNA, 19 nt, Artificial Sequence
  Description of Artificial Sequence: Synthetic oligonucleotide
  Sense strand starting at position 1829 of SEQ ID NO: 317705
ggagcugccucgaggugau

SEQ ID NO: 505598 - RNA, 19 nt, Artificial Sequence
  Description of Artificial Sequence: Synthetic oligonucleotide
  Antisense strand to SEQ ID NO: 505597
aucaccucgaggcagcucc

SEQ ID NO: 505599 - RNA, 19 nt, Artificial Sequence
  Description of Artificial Sequence: Synthetic oligonucleotide
  Sense strand starting at position 1832 of SEQ ID NO: 317705
gcugccucgaggugaugaa

SEQ ID NO: 505600 - RNA, 19 nt, Artificial Sequence
  Description of Artificial Sequence: Synthetic oligonucleotide
  Antisense strand to SEQ ID NO: 505599
uucaucaccucgaggcagc

SEQ ID NO: 505601 - RNA, 19 nt, Artificial Sequence
  Description of Artificial Sequence: Synthetic oligonucleotide
  Sense strand starting at position 1833 of SEQ ID NO: 317705
cugccucgaggugaugaau

SEQ ID NO: 505602 - RNA, 19 nt, Artificial Sequence
  Description of Artificial Sequence: Synthetic oligonucleotide
  Antisense strand to SEQ ID NO: 505601
auucaucaccucgaggcag

SEQ ID NO: 505603 - RNA, 19 nt, Artificial Sequence
  Description of Artificial Sequence: Synthetic oligonucleotide
  Sense strand starting at position 2120 of SEQ ID NO: 317705
gaggaugcucucggaacuu

SEQ ID NO: 505604 - RNA, 19 nt, Artificial Sequence
  Description of Artificial Sequence: Synthetic oligonucleotide
  Antisense strand to SEQ ID NO: 505603
aaguuccgagagcauccuc

SEQ ID NO: 505605 - RNA, 19 nt, Artificial Sequence
  Description of Artificial Sequence: Synthetic oligonucleotide
  Sense strand starting at position 2186 of SEQ ID NO: 317705
uuugaugucugugcuuuaa

SEQ ID NO: 505606 - RNA, 19 nt, Artificial Sequence
  Description of Artificial Sequence: Synthetic oligonucleotide
  Antisense strand to SEQ ID NO: 505605
uuaaagcacagacaucaaa

SEQ ID NO: 505607 - RNA, 19 nt, Artificial Sequence
  Description of Artificial Sequence: Synthetic oligonucleotide
  Sense strand starting at position 2188 of SEQ ID NO: 317705
ugaugucugugcuuuaaug

SEQ ID NO: 505608 - RNA, 19 nt, Artificial Sequence
  Description of Artificial Sequence: Synthetic oligonucleotide
  Antisense strand to SEQ ID NO: 505607
cauuaaagcacagacauca

SEQ ID NO: 505609 - RNA, 19 nt, Artificial Sequence
  Description of Artificial Sequence: Synthetic oligonucleotide
  Sense strand starting at position 2190 of SEQ ID NO: 317705
augucugugcuuuaaugga

SEQ ID NO: 505610 - RNA, 19 nt, Artificial Sequence
  Description of Artificial Sequence: Synthetic oligonucleotide
  Antisense strand to SEQ ID NO: 505609
uccauuaaagcacagacau

SEQ ID NO: 505611 - RNA, 19 nt, Artificial Sequence
  Description of Artificial Sequence: Synthetic oligonucleotide
  Sense strand starting at position 2364 of SEQ ID NO: 317705
guaggaagaugcguucacu

SEQ ID NO: 505612 - RNA, 19 nt, Artificial Sequence
  Description of Artificial Sequence: Synthetic oligonucleotide
  Antisense strand to SEQ ID NO: 505611
agugaacgcaucuuccuac

SEQ ID NO: 505613 - RNA, 19 nt, Artificial Sequence
  Description of Artificial Sequence: Synthetic oligonucleotide
  Sense strand starting at position 2367 of SEQ ID NO: 317705
ggaagaugcguucacuuug

SEQ ID NO: 505614 - RNA, 19 nt, Artificial Sequence
  Description of Artificial Sequence: Synthetic oligonucleotide
  Antisense strand to SEQ ID NO: 505613
caaagugaacgcaucuucc

SEQ ID NO: 505615 - RNA, 19 nt, Artificial Sequence
  Description of Artificial Sequence: Synthetic oligonucleotide
  Sense strand starting at position 2424 of SEQ ID NO: 317705
acgugacaucguugacaac

SEQ ID NO: 505616 - RNA, 19 nt, Artificial Sequence
  Description of Artificial Sequence: Synthetic oligonucleotide
  Antisense strand to SEQ ID NO: 505615
guugucaacgaugucacgu

SEQ ID NO: 505617 - RNA, 19 nt, Artificial Sequence
  Description of Artificial Sequence: Synthetic oligonucleotide
  Sense strand starting at position 2440 of SEQ ID NO: 317705
aacgguagcucuuugauua

SEQ ID NO: 505618 - RNA, 19 nt, Artificial Sequence
  Description of Artificial Sequence: Synthetic oligonucleotide
  Antisense strand to SEQ ID NO: 505617
uaaucaaagagcuaccguu

SEQ ID NO: 505619 - RNA, 19 nt, Artificial Sequence
  Description of Artificial Sequence: Synthetic oligonucleotide
  Sense strand starting at position 2441 of SEQ ID NO: 317705
acgguagcucuuugauuac

SEQ ID NO: 505620 - RNA, 19 nt, Artificial Sequence
  Description of Artificial Sequence: Synthetic oligonucleotide
  Antisense strand to SEQ ID NO: 505619
guaaucaaagagcuaccgu

SEQ ID NO: 505621 - RNA, 19 nt, Artificial Sequence
  Description of Artificial Sequence: Synthetic oligonucleotide
  Sense strand starting at position 2444 of SEQ ID NO: 317705
guagcucuuugauuacaca

SEQ ID NO: 505622 - RNA, 19 nt, Artificial Sequence
  Description of Artificial Sequence: Synthetic oligonucleotide
  Antisense strand to SEQ ID NO: 505621
uguguaaucaaagagcuac

SEQ ID NO: 505623 - RNA, 19 nt, Artificial Sequence
  Description of Artificial Sequence: Synthetic oligonucleotide
  Sense strand starting at position 2538 of SEQ ID NO: 317705
ggcuguguuuggaucgcuu

SEQ ID NO: 505624 - RNA, 19 nt, Artificial Sequence
  Description of Artificial Sequence: Synthetic oligonucleotide
  Antisense strand to SEQ ID NO: 505623
aagcgauccaaacacagcc

SEQ ID NO: 505625 - RNA, 19 nt, Artificial Sequence
  Description of Artificial Sequence: Synthetic oligonucleotide
  Sense strand starting at position 2542 of SEQ ID NO: 317705
guguuuggaucgcuuucau

SEQ ID NO: 505626 - RNA, 19 nt, Artificial Sequence
  Description of Artificial Sequence: Synthetic oligonucleotide
  Antisense strand to SEQ ID NO: 505625
augaaagcgauccaaacac

SEQ ID NO: 505627 - RNA, 19 nt, Artificial Sequence
  Description of Artificial Sequence: Synthetic oligonucleotide
  Sense strand starting at position 2600 of SEQ ID NO: 317705
gcagguuguccucaggaug

SEQ ID NO: 505628 - RNA, 19 nt, Artificial Sequence
  Description of Artificial Sequence: Synthetic oligonucleotide
  Antisense strand to SEQ ID NO: 505627
cauccugaggacaaccugc

SEQ ID NO: 505629 - RNA, 19 nt, Artificial Sequence
  Description of Artificial Sequence: Synthetic oligonucleotide
  Sense strand starting at position 2603 of SEQ ID NO: 317705
gguuguccucaggaugguu

SEQ ID NO: 505630 - RNA, 19 nt, Artificial Sequence
  Description of Artificial Sequence: Synthetic oligonucleotide
  Antisense strand to SEQ ID NO: 505629
aaccauccugaggacaacc

SEQ ID NO: 505631 - RNA, 19 nt, Artificial Sequence
  Description of Artificial Sequence: Synthetic oligonucleotide
  Sense strand starting at position 2741 of SEQ ID NO: 317705
gguaaagguaagugcauuu

SEQ ID NO: 505632 - RNA, 19 nt, Artificial Sequence
  Description of Artificial Sequence: Synthetic oligonucleotide
  Antisense strand to SEQ ID NO: 505631
aaaugcacuuaccuuuacc

SEQ ID NO: 505633 - RNA, 19 nt, Artificial Sequence
  Description of Artificial Sequence: Synthetic oligonucleotide
  Sense strand starting at position 2923 of SEQ ID NO: 317705
augcaugccagcuggaaau

SEQ ID NO: 505634 - RNA, 19 nt, Artificial Sequence
  Description of Artificial Sequence: Synthetic oligonucleotide
  Antisense strand to SEQ ID NO: 505633
auuuccagcuggcaugcau

SEQ ID NO: 505635 - RNA, 19 nt, Artificial Sequence
  Description of Artificial Sequence: Synthetic oligonucleotide
  Sense strand starting at position 3063 of SEQ ID NO: 317705
aaaugagguugcuucuaaa

SEQ ID NO: 505636 - RNA, 19 nt, Artificial Sequence
  Description of Artificial Sequence: Synthetic oligonucleotide
  Antisense strand to SEQ ID NO: 505635
uuuagaagcaaccucauuu

SEQ ID NO: 505637 - RNA, 19 nt, Artificial Sequence
  Description of Artificial Sequence: Synthetic oligonucleotide
  Sense strand starting at position 3396 of SEQ ID NO: 317705
augagcaagucucuagguu

SEQ ID NO: 505638 - RNA, 19 nt, Artificial Sequence
  Description of Artificial Sequence: Synthetic oligonucleotide
  Antisense strand to SEQ ID NO: 505637
aaccuagagacuugcucau

SEQ ID NO: 505639 - RNA, 19 nt, Artificial Sequence
  Description of Artificial Sequence: Synthetic oligonucleotide
  Sense strand starting at position 3397 of SEQ ID NO: 317705
ugagcaagucucuagguuu

SEQ ID NO: 505640 - RNA, 19 nt, Artificial Sequence
  Description of Artificial Sequence: Synthetic oligonucleotide
  Antisense strand to SEQ ID NO: 505639
aaaccuagagacuugcuca

SEQ ID NO: 505641 - RNA, 19 nt, Artificial Sequence
  Description of Artificial Sequence: Synthetic oligonucleotide
  Sense strand starting at position 3420 of SEQ ID NO: 317705
ccuaucgaauuagaugaau

SEQ ID NO: 505642 - RNA, 19 nt, Artificial Sequence
  Description of Artificial Sequence: Synthetic oligonucleotide
  Antisense strand to SEQ ID NO: 505641
auucaucuaauucgauagg

SEQ ID NO: 505643 - RNA, 19 nt, Artificial Sequence
  Description of Artificial Sequence: Synthetic oligonucleotide
  Sense strand starting at position 3432 of SEQ ID NO: 317705
gaugaauauuugcaauguu

SEQ ID NO: 505644 - RNA, 19 nt, Artificial Sequence
  Description of Artificial Sequence: Synthetic oligonucleotide
  Antisense strand to SEQ ID NO: 505643
aacauugcaaauauucauc

SEQ ID NO: 505645 - RNA, 19 nt, Artificial Sequence
  Description of Artificial Sequence: Synthetic oligonucleotide
  Sense strand starting at position 3441 of SEQ ID NO: 317705
uugcaauguucugcucaag

SEQ ID NO: 505646 - RNA, 19 nt, Artificial Sequence
  Description of Artificial Sequence: Synthetic oligonucleotide
  Antisense strand to SEQ ID NO: 505645
cuugagcagaacauugcaa

SEQ ID NO: 505647 - RNA, 19 nt, Artificial Sequence
  Description of Artificial Sequence: Synthetic oligonucleotide
  Sense strand starting at position 3524 of SEQ ID NO: 317705
ugugaucuuccaggcaugu

SEQ ID NO: 505648 - RNA, 19 nt, Artificial Sequence
  Description of Artificial Sequence: Synthetic oligonucleotide
  Antisense strand to SEQ ID NO: 505647
acaugccuggaagaucaca

SEQ ID NO: 505649 - RNA, 19 nt, Artificial Sequence
  Description of Artificial Sequence: Synthetic oligonucleotide
  Sense strand starting at position 3528 of SEQ ID NO: 317705
aucuuccaggcauguaaau

SEQ ID NO: 505650 - RNA, 19 nt, Artificial Sequence
  Description of Artificial Sequence: Synthetic oligonucleotide
  Antisense strand to SEQ ID NO: 505649
auuuacaugccuggaagau

SEQ ID NO: 505651 - RNA, 19 nt, Artificial Sequence
  Description of Artificial Sequence: Synthetic oligonucleotide
  Sense strand starting at position 3601 of SEQ ID NO: 317705
gguguuaucuuccuucucu

SEQ ID NO: 505652 - RNA, 19 nt, Artificial Sequence
  Description of Artificial Sequence: Synthetic oligonucleotide
  Antisense strand to SEQ ID NO: 505651
agagaaggaagauaacacc

SEQ ID NO: 505653 - RNA, 19 nt, Artificial Sequence
  Description of Artificial Sequence: Synthetic oligonucleotide
  Sense strand starting at position 3602 of SEQ ID NO: 317705
guguuaucuuccuucucua

SEQ ID NO: 505654 - RNA, 19 nt, Artificial Sequence
  Description of Artificial Sequence: Synthetic oligonucleotide
  Antisense strand to SEQ ID NO: 505653
uagagaaggaagauaacac

SEQ ID NO: 505655 - RNA, 19 nt, Artificial Sequence
  Description of Artificial Sequence: Synthetic oligonucleotide
  Sense strand starting at position 3745 of SEQ ID NO: 317705
cagaucacggguuaccaua

SEQ ID NO: 505656 - RNA, 19 nt, Artificial Sequence
  Description of Artificial Sequence: Synthetic oligonucleotide
  Antisense strand to SEQ ID NO: 505655
uaugguaacccgugaucug

SEQ ID NO: 505657 - RNA, 19 nt, Artificial Sequence
  Description of Artificial Sequence: Synthetic oligonucleotide
  Sense strand starting at position 3819 of SEQ ID NO: 317705
ugucuuccaucagauuuag

SEQ ID NO: 505658 - RNA, 19 nt, Artificial Sequence
  Description of Artificial Sequence: Synthetic oligonucleotide
  Antisense strand to SEQ ID NO: 505657
cuaaaucugauggaagaca

SEQ ID NO: 505659 - RNA, 19 nt, Artificial Sequence
  Description of Artificial Sequence: Synthetic oligonucleotide
  Sense strand starting at position 3896 of SEQ ID NO: 317705
augagauaaugaugcaacu

SEQ ID NO: 505660 - RNA, 19 nt, Artificial Sequence
  Description of Artificial Sequence: Synthetic oligonucleotide
  Antisense strand to SEQ ID NO: 505659
aguugcaucauuaucucau

SEQ ID NO: 505661 - RNA, 19 nt, Artificial Sequence
  Description of Artificial Sequence: Synthetic oligonucleotide
  Sense strand starting at position 3906 of SEQ ID NO: 317705
gaugcaacugacugauagu

SEQ ID NO: 505662 - RNA, 19 nt, Artificial Sequence
  Description of Artificial Sequence: Synthetic oligonucleotide
  Antisense strand to SEQ ID NO: 505661
acuaucagucaguugcauc

SEQ ID NO: 505663 - RNA, 19 nt, Artificial Sequence
  Description of Artificial Sequence: Synthetic oligonucleotide
  Sense strand starting at position 3915 of SEQ ID NO: 317705
gacugauagugcuauuaau

SEQ ID NO: 505664 - RNA, 19 nt, Artificial Sequence
  Description of Artificial Sequence: Synthetic oligonucleotide
  Antisense strand to SEQ ID NO: 505663
auuaauagcacuaucaguc

SEQ ID NO: 505665 - RNA, 19 nt, Artificial Sequence
  Description of Artificial Sequence: Synthetic oligonucleotide
  Sense strand starting at position 3965 of SEQ ID NO: 317705
gcagcaaaugguugccaaa

SEQ ID NO: 505666 - RNA, 19 nt, Artificial Sequence
  Description of Artificial Sequence: Synthetic oligonucleotide
  Antisense strand to SEQ ID NO: 505665
uuuggcaaccauuugcugc

SEQ ID NO: 505667 - RNA, 19 nt, Artificial Sequence
  Description of Artificial Sequence: Synthetic oligonucleotide
  Sense strand starting at position 1 of SEQ ID NO: 317706
cccucacugcaguaagaua

SEQ ID NO: 505668 - RNA, 19 nt, Artificial Sequence
  Description of Artificial Sequence: Synthetic oligonucleotide
  Antisense strand to SEQ ID NO: 505667
uaucuuacugcagugaggg

SEQ ID NO: 505669 - RNA, 19 nt, Artificial Sequence
  Description of Artificial Sequence: Synthetic oligonucleotide
  Sense strand starting at position 9 of SEQ ID NO: 317706
gcaguaagauauguuacag

SEQ ID NO: 505670 - RNA, 19 nt, Artificial Sequence
  Description of Artificial Sequence: Synthetic oligonucleotide
  Antisense strand to SEQ ID NO: 505669
cuguaacauaucuuacugc

SEQ ID NO: 505671 - RNA, 19 nt, Artificial Sequence
  Description of Artificial Sequence: Synthetic oligonucleotide
  Sense strand starting at position 13 of SEQ ID NO: 317706
uaagauauguuacaggaaa

SEQ ID NO: 505672 - RNA, 19 nt, Artificial Sequence
  Description of Artificial Sequence: Synthetic oligonucleotide
  Antisense strand to SEQ ID NO: 505671
uuuccuguaacauaucuua

SEQ ID NO: 505673 - RNA, 19 nt, Artificial Sequence
  Description of Artificial Sequence: Synthetic oligonucleotide
  Sense strand starting at position 226 of SEQ ID NO: 317706
aaggguuucccgcaacauu

SEQ ID NO: 505674 - RNA, 19 nt, Artificial Sequence
  Description of Artificial Sequence: Synthetic oligonucleotide
  Antisense strand to SEQ ID NO: 505673
aauguugcgggaaacccuu

SEQ ID NO: 505675 - RNA, 19 nt, Artificial Sequence
  Description of Artificial Sequence: Synthetic oligonucleotide
  Sense strand starting at position 366 of SEQ ID NO: 317706
aggaauagguaauuacagu

SEQ ID NO: 505676 - RNA, 19 nt, Artificial Sequence
  Description of Artificial Sequence: Synthetic oligonucleotide
  Antisense strand to SEQ ID NO: 505675
acuguaauuaccuauuccu

SEQ ID NO: 505677 - RNA, 19 nt, Artificial Sequence
  Description of Artificial Sequence: Synthetic oligonucleotide
  Sense strand starting at position 433 of SEQ ID NO: 317706
ggcuguaaucccgggaggu

SEQ ID NO: 505678 - RNA, 19 nt, Artificial Sequence
  Description of Artificial Sequence: Synthetic oligonucleotide
  Antisense strand to SEQ ID NO: 505677
accucccgggauuacagcc

SEQ ID NO: 505679 - RNA, 19 nt, Artificial Sequence
  Description of Artificial Sequence: Synthetic oligonucleotide
  Sense strand starting at position 434 of SEQ ID NO: 317706
gcuguaaucccgggaggug

SEQ ID NO: 505680 - RNA, 19 nt, Artificial Sequence
  Description of Artificial Sequence: Synthetic oligonucleotide
  Antisense strand to SEQ ID NO: 505679
caccucccgggauuacagc

SEQ ID NO: 505681 - RNA, 19 nt, Artificial Sequence
  Description of Artificial Sequence: Synthetic oligonucleotide
  Sense strand starting at position 487 of SEQ ID NO: 317706
aggccauuucgacgcuagu

SEQ ID NO: 505682 - RNA, 19 nt, Artificial Sequence
  Description of Artificial Sequence: Synthetic oligonucleotide
  Antisense strand to SEQ ID NO: 505681
acuagcgucgaaauggccu

SEQ ID NO: 505683 - RNA, 19 nt, Artificial Sequence
  Description of Artificial Sequence: Synthetic oligonucleotide
  Sense strand starting at position 592 of SEQ ID NO: 317706
ccaugugugcugugcuaau

SEQ ID NO: 505684 - RNA, 19 nt, Artificial Sequence
  Description of Artificial Sequence: Synthetic oligonucleotide
  Antisense strand to SEQ ID NO: 505683
auuagcacagcacacaugg

SEQ ID NO: 505685 - RNA, 19 nt, Artificial Sequence
  Description of Artificial Sequence: Synthetic oligonucleotide
  Sense strand starting at position 620 of SEQ ID NO: 317706
gugagaauuacaugggcaa

SEQ ID NO: 505686 - RNA, 19 nt, Artificial Sequence
  Description of Artificial Sequence: Synthetic oligonucleotide
  Antisense strand to SEQ ID NO: 505685
uugcccauguaauucucac

SEQ ID NO: 505687 - RNA, 19 nt, Artificial Sequence
  Description of Artificial Sequence: Synthetic oligonucleotide
  Sense strand starting at position 699 of SEQ ID NO: 317706
uggccaagcguucgaugaa

SEQ ID NO: 505688 - RNA, 19 nt, Artificial Sequence
  Description of Artificial Sequence: Synthetic oligonucleotide
  Antisense strand to SEQ ID NO: 505687
uucaucgaacgcuuggcca

SEQ ID NO: 505689 - RNA, 19 nt, Artificial Sequence
  Description of Artificial Sequence: Synthetic oligonucleotide
  Sense strand starting at position 702 of SEQ ID NO: 317706
ccaagcguucgaugaauau

SEQ ID NO: 505690 - RNA, 19 nt, Artificial Sequence
  Description of Artificial Sequence: Synthetic oligonucleotide
  Antisense strand to SEQ ID NO: 505689
auauucaucgaacgcuugg

SEQ ID NO: 505691 - RNA, 19 nt, Artificial Sequence
  Description of Artificial Sequence: Synthetic oligonucleotide
  Sense strand starting at position 706 of SEQ ID NO: 317706
gcguucgaugaauauucau

SEQ ID NO: 505692 - RNA, 19 nt, Artificial Sequence
  Description of Artificial Sequence: Synthetic oligonucleotide
  Antisense strand to SEQ ID NO: 505691
augaauauucaucgaacgc

SEQ ID NO: 505693 - RNA, 19 nt, Artificial Sequence
  Description of Artificial Sequence: Synthetic oligonucleotide
  Sense strand starting at position 851 of SEQ ID NO: 317706
gcuuuagcgcuuugggcaa

SEQ ID NO: 505694 - RNA, 19 nt, Artificial Sequence
  Description of Artificial Sequence: Synthetic oligonucleotide
  Antisense strand to SEQ ID NO: 505693
uugcccaaagcgcuaaagc

SEQ ID NO: 505695 - RNA, 19 nt, Artificial Sequence
  Description of Artificial Sequence: Synthetic oligonucleotide
  Sense strand starting at position 1172 of SEQ ID NO: 317706
agucccaugggucgagaaa

SEQ ID NO: 505696 - RNA, 19 nt, Artificial Sequence
  Description of Artificial Sequence: Synthetic oligonucleotide
  Antisense strand to SEQ ID NO: 505695
uuucucgacccaugggacu

SEQ ID NO: 505697 - RNA, 19 nt, Artificial Sequence
  Description of Artificial Sequence: Synthetic oligonucleotide
  Sense strand starting at position 1412 of SEQ ID NO: 317706
ggguuucgcauucggcaau

SEQ ID NO: 505698 - RNA, 19 nt, Artificial Sequence
  Description of Artificial Sequence: Synthetic oligonucleotide
  Antisense strand to SEQ ID NO: 505697
auugccgaaugcgaaaccc

SEQ ID NO: 505699 - RNA, 19 nt, Artificial Sequence
  Description of Artificial Sequence: Synthetic oligonucleotide
  Sense strand starting at position 2325 of SEQ ID NO: 317706
ccgccaacguuuccuaaau

SEQ ID NO: 505700 - RNA, 19 nt, Artificial Sequence
  Description of Artificial Sequence: Synthetic oligonucleotide
  Antisense strand to SEQ ID NO: 505699
auuuaggaaacguuggcgg

SEQ ID NO: 505701 - RNA, 19 nt, Artificial Sequence
  Description of Artificial Sequence: Synthetic oligonucleotide
  Sense strand starting at position 2520 of SEQ ID NO: 317706
uuuggaaccguuggauaag

SEQ ID NO: 505702 - RNA, 19 nt, Artificial Sequence
  Description of Artificial Sequence: Synthetic oligonucleotide
  Antisense strand to SEQ ID NO: 505701
cuuauccaacgguuccaaa

SEQ ID NO: 505703 - RNA, 19 nt, Artificial Sequence
  Description of Artificial Sequence: Synthetic oligonucleotide
  Sense strand starting at position 2521 of SEQ ID NO: 317706
uuggaaccguuggauaaga

SEQ ID NO: 505704 - RNA, 19 nt, Artificial Sequence
  Description of Artificial Sequence: Synthetic oligonucleotide
  Antisense strand to SEQ ID NO: 505703
ucuuauccaacgguuccaa

SEQ ID NO: 505705 - RNA, 19 nt, Artificial Sequence
  Description of Artificial Sequence: Synthetic oligonucleotide
  Sense strand starting at position 2567 of SEQ ID NO: 317706
ggagcugccucgaggugau

SEQ ID NO: 505706 - RNA, 19 nt, Artificial Sequence
  Description of Artificial Sequence: Synthetic oligonucleotide
  Antisense strand to SEQ ID NO: 505705
aucaccucgaggcagcucc

SEQ ID NO: 505707 - RNA, 19 nt, Artificial Sequence
  Description of Artificial Sequence: Synthetic oligonucleotide
  Sense strand starting at position 2570 of SEQ ID NO: 317706
gcugccucgaggugaugaa

SEQ ID NO: 505708 - RNA, 19 nt, Artificial Sequence
  Description of Artificial Sequence: Synthetic oligonucleotide
  Antisense strand to SEQ ID NO: 505707
uucaucaccucgaggcagc

SEQ ID NO: 505709 - RNA, 19 nt, Artificial Sequence
  Description of Artificial Sequence: Synthetic oligonucleotide
  Sense strand starting at position 2571 of SEQ ID NO: 317706
cugccucgaggugaugaau

SEQ ID NO: 505710 - RNA, 19 nt, Artificial Sequence
  Description of Artificial Sequence: Synthetic oligonucleotide
  Antisense strand to SEQ ID NO: 505709
auucaucaccucgaggcag

SEQ ID NO: 505711 - RNA, 19 nt, Artificial Sequence
  Description of Artificial Sequence: Synthetic oligonucleotide
  Sense strand starting at position 2857 of SEQ ID NO: 317706
ggaggaugcucucggaacu

SEQ ID NO: 505712 - RNA, 19 nt, Artificial Sequence
  Description of Artificial Sequence: Synthetic oligonucleotide
  Antisense strand to SEQ ID NO: 505711
aguuccgagagcauccucc

SEQ ID NO: 505713 - RNA, 19 nt, Artificial Sequence
  Description of Artificial Sequence: Synthetic oligonucleotide
  Sense strand starting at position 2858 of SEQ ID NO: 317706
gaggaugcucucggaacuu

SEQ ID NO: 505714 - RNA, 19 nt, Artificial Sequence
  Description of Artificial Sequence: Synthetic oligonucleotide
  Antisense strand to SEQ ID NO: 505713
aaguuccgagagcauccuc

SEQ ID NO: 505715 - RNA, 19 nt, Artificial Sequence
  Description of Artificial Sequence: Synthetic oligonucleotide
  Sense strand starting at position 2924 of SEQ ID NO: 317706
uuugaugucugugcuuuaa

SEQ ID NO: 505716 - RNA, 19 nt, Artificial Sequence
  Description of Artificial Sequence: Synthetic oligonucleotide
  Antisense strand to SEQ ID NO: 505715
uuaaagcacagacaucaaa

SEQ ID NO: 505717 - RNA, 19 nt, Artificial Sequence
  Description of Artificial Sequence: Synthetic oligonucleotide
  Sense strand starting at position 2926 of SEQ ID NO: 317706
ugaugucugugcuuuaaug

SEQ ID NO: 505718 - RNA, 19 nt, Artificial Sequence
  Description of Artificial Sequence: Synthetic oligonucleotide
  Antisense strand to SEQ ID NO: 505717
cauuaaagcacagacauca

SEQ ID NO: 505719 - RNA, 19 nt, Artificial Sequence
  Description of Artificial Sequence: Synthetic oligonucleotide
  Sense strand starting at position 2928 of SEQ ID NO: 317706
augucugugcuuuaaugga

SEQ ID NO: 505720 - RNA, 19 nt, Artificial Sequence
  Description of Artificial Sequence: Synthetic oligonucleotide
  Antisense strand to SEQ ID NO: 505719
uccauuaaagcacagacau

SEQ ID NO: 505721 - RNA, 19 nt, Artificial Sequence
  Description of Artificial Sequence: Synthetic oligonucleotide
  Sense strand starting at position 3102 of SEQ ID NO: 317706
guaggaagaugcguucacu

SEQ ID NO: 505722 - RNA, 19 nt, Artificial Sequence
  Description of Artificial Sequence: Synthetic oligonucleotide
  Antisense strand to SEQ ID NO: 505721
agugaacgcaucuuccuac

SEQ ID NO: 505723 - RNA, 19 nt, Artificial Sequence
  Description of Artificial Sequence: Synthetic oligonucleotide
  Sense strand starting at position 3105 of SEQ ID NO: 317706
ggaagaugcguucacuuug

SEQ ID NO: 505724 - RNA, 19 nt, Artificial Sequence
  Description of Artificial Sequence: Synthetic oligonucleotide
  Antisense strand to SEQ ID NO: 505723
caaagugaacgcaucuucc

SEQ ID NO: 505725 - RNA, 19 nt, Artificial Sequence
  Description of Artificial Sequence: Synthetic oligonucleotide
  Sense strand starting at position 3162 of SEQ ID NO: 317706
acgugacaucguugacaac

SEQ ID NO: 505726 - RNA, 19 nt, Artificial Sequence
  Description of Artificial Sequence: Synthetic oligonucleotide
  Antisense strand to SEQ ID NO: 505725
guugucaacgaugucacgu

SEQ ID NO: 505727 - RNA, 19 nt, Artificial Sequence
  Description of Artificial Sequence: Synthetic oligonucleotide
  Sense strand starting at position 3178 of SEQ ID NO: 317706
aacgguagcucuuugauua

SEQ ID NO: 505728 - RNA, 19 nt, Artificial Sequence
  Description of Artificial Sequence: Synthetic oligonucleotide
  Antisense strand to SEQ ID NO: 505727
uaaucaaagagcuaccguu

SEQ ID NO: 505729 - RNA, 19 nt, Artificial Sequence
  Description of Artificial Sequence: Synthetic oligonucleotide
  Sense strand starting at position 3179 of SEQ ID NO: 317706
acgguagcucuuugauuac

SEQ ID NO: 505730 - RNA, 19 nt, Artificial Sequence
  Description of Artificial Sequence: Synthetic oligonucleotide
  Antisense strand to SEQ ID NO: 505729
guaaucaaagagcuaccgu

SEQ ID NO: 505731 - RNA, 19 nt, Artificial Sequence
  Description of Artificial Sequence: Synthetic oligonucleotide
  Sense strand starting at position 3182 of SEQ ID NO: 317706
guagcucuuugauuacaca

SEQ ID NO: 505732 - RNA, 19 nt, Artificial Sequence
  Description of Artificial Sequence: Synthetic oligonucleotide
  Antisense strand to SEQ ID NO: 505731
uguguaaucaaagagcuac

SEQ ID NO: 505733 - RNA, 19 nt, Artificial Sequence
  Description of Artificial Sequence: Synthetic oligonucleotide
  Sense strand starting at position 3276 of SEQ ID NO: 317706
ggcuguguuuggaucgcuu

SEQ ID NO: 505734 - RNA, 19 nt, Artificial Sequence
  Description of Artificial Sequence: Synthetic oligonucleotide
  Antisense strand to SEQ ID NO: 505733
aagcgauccaaacacagcc

SEQ ID NO: 505735 - RNA, 19 nt, Artificial Sequence
  Description of Artificial Sequence: Synthetic oligonucleotide
  Sense strand starting at position 3280 of SEQ ID NO: 317706
guguuuggaucgcuuucau

SEQ ID NO: 505736 - RNA, 19 nt, Artificial Sequence
  Description of Artificial Sequence: Synthetic oligonucleotide
  Antisense strand to SEQ ID NO: 505735
augaaagcgauccaaacac

SEQ ID NO: 505737 - RNA, 19 nt, Artificial Sequence
  Description of Artificial Sequence: Synthetic oligonucleotide
  Sense strand starting at position 3338 of SEQ ID NO: 317706
gcagguuguccucaggaug

SEQ ID NO: 505738 - RNA, 19 nt, Artificial Sequence
  Description of Artificial Sequence: Synthetic oligonucleotide
  Antisense strand to SEQ ID NO: 505737
cauccugaggacaaccugc

SEQ ID NO: 505739 - RNA, 19 nt, Artificial Sequence
  Description of Artificial Sequence: Synthetic oligonucleotide
  Sense strand starting at position 3341 of SEQ ID NO: 317706
gguuguccucaggaugguu

SEQ ID NO: 505740 - RNA, 19 nt, Artificial Sequence
  Description of Artificial Sequence: Synthetic oligonucleotide
  Antisense strand to SEQ ID NO: 505739
aaccauccugaggacaacc

SEQ ID NO: 505741 - RNA, 19 nt, Artificial Sequence
  Description of Artificial Sequence: Synthetic oligonucleotide
  Sense strand starting at position 3479 of SEQ ID NO: 317706
gguaaagguaagugcauuu

SEQ ID NO: 505742 - RNA, 19 nt, Artificial Sequence
  Description of Artificial Sequence: Synthetic oligonucleotide
  Antisense strand to SEQ ID NO: 505741
aaaugcacuuaccuuuacc

SEQ ID NO: 505743 - RNA, 19 nt, Artificial Sequence
  Description of Artificial Sequence: Synthetic oligonucleotide
  Sense strand starting at position 3661 of SEQ ID NO: 317706
augcaugccagcuggaaau

SEQ ID NO: 505744 - RNA, 19 nt, Artificial Sequence
  Description of Artificial Sequence: Synthetic oligonucleotide
  Antisense strand to SEQ ID NO: 505743
auuuccagcuggcaugcau

SEQ ID NO: 505745 - RNA, 19 nt, Artificial Sequence
  Description of Artificial Sequence: Synthetic oligonucleotide
  Sense strand starting at position 3801 of SEQ ID NO: 317706
aaaugagguugcuucuaaa

SEQ ID NO: 505746 - RNA, 19 nt, Artificial Sequence
  Description of Artificial Sequence: Synthetic oligonucleotide
  Antisense strand to SEQ ID NO: 505745
uuuagaagcaaccucauuu

SEQ ID NO: 505747 - RNA, 19 nt, Artificial Sequence
  Description of Artificial Sequence: Synthetic oligonucleotide
  Sense strand starting at position 494 of SEQ ID NO: 317707
cugagaacuuuauuaaugu

SEQ ID NO: 505748 - RNA, 19 nt, Artificial Sequence
  Description of Artificial Sequence: Synthetic oligonucleotide
  Antisense strand to SEQ ID NO: 505747
acauuaauaaaguucucag

SEQ ID NO: 505749 - RNA, 19 nt, Artificial Sequence
  Description of Artificial Sequence: Synthetic oligonucleotide
  Sense strand starting at position 532 of SEQ ID NO: 317707
aucuccuuucuguguagaa

SEQ ID NO: 505750 - RNA, 19 nt, Artificial Sequence
  Description of Artificial Sequence: Synthetic oligonucleotide
  Antisense strand to SEQ ID NO: 505749
uucuacacagaaaggagau

SEQ ID NO: 505751 - RNA, 19 nt, Artificial Sequence
  Description of Artificial Sequence: Synthetic oligonucleotide
  Sense strand starting at position 598 of SEQ ID NO: 317707
cugaacuaucaacguaaca

SEQ ID NO: 505752 - RNA, 19 nt, Artificial Sequence
  Description of Artificial Sequence: Synthetic oligonucleotide
  Antisense strand to SEQ ID NO: 505751
uguuacguugauaguucag

SEQ ID NO: 505753 - RNA, 19 nt, Artificial Sequence
  Description of Artificial Sequence: Synthetic oligonucleotide
  Sense strand starting at position 838 of SEQ ID NO: 317707
ggcaacuauucugcuauau

SEQ ID NO: 505754 - RNA, 19 nt, Artificial Sequence
  Description of Artificial Sequence: Synthetic oligonucleotide
  Antisense strand to SEQ ID NO: 505753
auauagcagaauaguugcc

SEQ ID NO: 505755 - RNA, 19 nt, Artificial Sequence
  Description of Artificial Sequence: Synthetic oligonucleotide
  Sense strand starting at position 859 of SEQ ID NO: 317707
ccugcaagguaguuaauau

SEQ ID NO: 505756 - RNA, 19 nt, Artificial Sequence
  Description of Artificial Sequence: Synthetic oligonucleotide
  Antisense strand to SEQ ID NO: 505755
auauuaacuaccuugcagg

SEQ ID NO: 505757 - RNA, 19 nt, Artificial Sequence
  Description of Artificial Sequence: Synthetic oligonucleotide
  Sense strand starting at position 860 of SEQ ID NO: 317707
cugcaagguaguuaauaug

SEQ ID NO: 505758 - RNA, 19 nt, Artificial Sequence
  Description of Artificial Sequence: Synthetic oligonucleotide
  Antisense strand to SEQ ID NO: 505757
cauauuaacuaccuugcag

SEQ ID NO: 505759 - RNA, 19 nt, Artificial Sequence
  Description of Artificial Sequence: Synthetic oligonucleotide
  Sense strand starting at position 941 of SEQ ID NO: 317707
agcaaauucugccugagaa

SEQ ID NO: 505760 - RNA, 19 nt, Artificial Sequence
  Description of Artificial Sequence: Synthetic oligonucleotide
  Antisense strand to SEQ ID NO: 505759
uucucaggcagaauuugcu

SEQ ID NO: 505761 - RNA, 19 nt, Artificial Sequence
  Description of Artificial Sequence: Synthetic oligonucleotide
  Sense strand starting at position 942 of SEQ ID NO: 317707
gcaaauucugccugagaaa

SEQ ID NO: 505762 - RNA, 19 nt, Artificial Sequence
  Description of Artificial Sequence: Synthetic oligonucleotide
  Antisense strand to SEQ ID NO: 505761
uuucucaggcagaauuugc

SEQ ID NO: 505763 - RNA, 19 nt, Artificial Sequence
  Description of Artificial Sequence: Synthetic oligonucleotide
  Sense strand starting at position 961 of SEQ ID NO: 317707
aguuuaccuguagacuaaa

SEQ ID NO: 505764 - RNA, 19 nt, Artificial Sequence
  Description of Artificial Sequence: Synthetic oligonucleotide
  Antisense strand to SEQ ID NO: 505763
uuuagucuacagguaaacu

SEQ ID NO: 505765 - RNA, 19 nt, Artificial Sequence
  Description of Artificial Sequence: Synthetic oligonucleotide
  Sense strand starting at position 1041 of SEQ ID NO: 317707
cggucaccauaguuaaaga

SEQ ID NO: 505766 - RNA, 19 nt, Artificial Sequence
  Description of Artificial Sequence: Synthetic oligonucleotide
  Antisense strand to SEQ ID NO: 505765
ucuuuaacuauggugaccg

SEQ ID NO: 505767 - RNA, 19 nt, Artificial Sequence
  Description of Artificial Sequence: Synthetic oligonucleotide
  Sense strand starting at position 1096 of SEQ ID NO: 317707
cugacauaaaucgguaaag

SEQ ID NO: 505768 - RNA, 19 nt, Artificial Sequence
  Description of Artificial Sequence: Synthetic oligonucleotide
  Antisense strand to SEQ ID NO: 505767
cuuuaccgauuuaugucag

SEQ ID NO: 505769 - RNA, 19 nt, Artificial Sequence
  Description of Artificial Sequence: Synthetic oligonucleotide
  Sense strand starting at position 1230 of SEQ ID NO: 317707
aaaugaauaguguggauau

SEQ ID NO: 505770 - RNA, 19 nt, Artificial Sequence
  Description of Artificial Sequence: Synthetic oligonucleotide
  Antisense strand to SEQ ID NO: 505769
auauccacacuauucauuu

SEQ ID NO: 505771 - RNA, 19 nt, Artificial Sequence
  Description of Artificial Sequence: Synthetic oligonucleotide
  Sense strand starting at position 1302 of SEQ ID NO: 317707
uggucuccucucggagaau

SEQ ID NO: 505772 - RNA, 19 nt, Artificial Sequence
  Description of Artificial Sequence: Synthetic oligonucleotide
  Antisense strand to SEQ ID NO: 505771
auucuccgagaggagacca

SEQ ID NO: 505773 - RNA, 19 nt, Artificial Sequence
  Description of Artificial Sequence: Synthetic oligonucleotide
  Sense strand starting at position 1305 of SEQ ID NO: 317707
ucuccucucggagaaucua

SEQ ID NO: 505774 - RNA, 19 nt, Artificial Sequence
  Description of Artificial Sequence: Synthetic oligonucleotide
  Antisense strand to SEQ ID NO: 505773
uagauucuccgagaggaga

SEQ ID NO: 505775 - RNA, 19 nt, Artificial Sequence
  Description of Artificial Sequence: Synthetic oligonucleotide
  Sense strand starting at position 1317 of SEQ ID NO: 317707
gaaucuauagaccgugaca

SEQ ID NO: 505776 - RNA, 19 nt, Artificial Sequence
  Description of Artificial Sequence: Synthetic oligonucleotide
  Antisense strand to SEQ ID NO: 505775
ugucacggucuauagauuc

SEQ ID NO: 505777 - RNA, 19 nt, Artificial Sequence
  Description of Artificial Sequence: Synthetic oligonucleotide
  Sense strand starting at position 1319 of SEQ ID NO: 317707
aucuauagaccgugacaaa

SEQ ID NO: 505778 - RNA, 19 nt, Artificial Sequence
  Description of Artificial Sequence: Synthetic oligonucleotide
  Antisense strand to SEQ ID NO: 505777
uuugucacggucuauagau

SEQ ID NO: 505779 - RNA, 19 nt, Artificial Sequence
  Description of Artificial Sequence: Synthetic oligonucleotide
  Sense strand starting at position 1408 of SEQ ID NO: 317707
cugaaaggcuuacugcaaa

SEQ ID NO: 505780 - RNA, 19 nt, Artificial Sequence
  Description of Artificial Sequence: Synthetic oligonucleotide
  Antisense strand to SEQ ID NO: 505779
uuugcaguaagccuuucag

SEQ ID NO: 505781 - RNA, 19 nt, Artificial Sequence
  Description of Artificial Sequence: Synthetic oligonucleotide
  Sense strand starting at position 1431 of SEQ ID NO: 317707
agcggacuccugugauaaa

SEQ ID NO: 505782 - RNA, 19 nt, Artificial Sequence
  Description of Artificial Sequence: Synthetic oligonucleotide
  Antisense strand to SEQ ID NO: 505781
uuuaucacaggaguccgcu

SEQ ID NO: 505783 - RNA, 19 nt, Artificial Sequence
  Description of Artificial Sequence: Synthetic oligonucleotide
  Sense strand starting at position 2125 of SEQ ID NO: 317707
cucuuucuucuccaggagu

SEQ ID NO: 505784 - RNA, 19 nt, Artificial Sequence
  Description of Artificial Sequence: Synthetic oligonucleotide
  Antisense strand to SEQ ID NO: 505783
acuccuggagaagaaagag

SEQ ID NO: 505785 - RNA, 19 nt, Artificial Sequence
  Description of Artificial Sequence: Synthetic oligonucleotide
  Sense strand starting at position 2141 of SEQ ID NO: 317707
aguccuuaggaguaguuga

SEQ ID NO: 505786 - RNA, 19 nt, Artificial Sequence
  Description of Artificial Sequence: Synthetic oligonucleotide
  Antisense strand to SEQ ID NO: 505785
ucaacuacuccuaaggacu

SEQ ID NO: 505787 - RNA, 19 nt, Artificial Sequence
  Description of Artificial Sequence: Synthetic oligonucleotide
  Sense strand starting at position 2297 of SEQ ID NO: 317707
gugugaagaaacugauaau

SEQ ID NO: 505788 - RNA, 19 nt, Artificial Sequence
  Description of Artificial Sequence: Synthetic oligonucleotide
  Antisense strand to SEQ ID NO: 505787
auuaucaguuucuucacac

SEQ ID NO: 505789 - RNA, 19 nt, Artificial Sequence
  Description of Artificial Sequence: Synthetic oligonucleotide
  Sense strand starting at position 2300 of SEQ ID NO: 317707
ugaagaaacugauaauagu

SEQ ID NO: 505790 - RNA, 19 nt, Artificial Sequence
  Description of Artificial Sequence: Synthetic oligonucleotide
  Antisense strand to SEQ ID NO: 505789
acuauuaucaguuucuuca

SEQ ID NO: 505791 - RNA, 19 nt, Artificial Sequence
  Description of Artificial Sequence: Synthetic oligonucleotide
  Sense strand starting at position 2325 of SEQ ID NO: 317707
ccaggagaggaauguguuu

SEQ ID NO: 505792 - RNA, 19 nt, Artificial Sequence
  Description of Artificial Sequence: Synthetic oligonucleotide
  Antisense strand to SEQ ID NO: 505791
aaacacauuccucuccugg

SEQ ID NO: 505793 - RNA, 19 nt, Artificial Sequence
  Description of Artificial Sequence: Synthetic oligonucleotide
  Sense strand starting at position 2332 of SEQ ID NO: 317707
aggaauguguuucuggaaa

SEQ ID NO: 505794 - RNA, 19 nt, Artificial Sequence
  Description of Artificial Sequence: Synthetic oligonucleotide
  Antisense strand to SEQ ID NO: 505793
uuuccagaaacacauuccu

SEQ ID NO: 505795 - RNA, 19 nt, Artificial Sequence
  Description of Artificial Sequence: Synthetic oligonucleotide
  Sense strand starting at position 2375 of SEQ ID NO: 317707
uaccguacgccuuugugua

SEQ ID NO: 505796 - RNA, 19 nt, Artificial Sequence
  Description of Artificial Sequence: Synthetic oligonucleotide
  Antisense strand to SEQ ID NO: 505795
uacacaaaggcguacggua

SEQ ID NO: 505797 - RNA, 19 nt, Artificial Sequence
  Description of Artificial Sequence: Synthetic oligonucleotide
  Sense strand starting at position 2723 of SEQ ID NO: 317707
augaauguaucacccgaga

SEQ ID NO: 505798 - RNA, 19 nt, Artificial Sequence
  Description of Artificial Sequence: Synthetic oligonucleotide
  Antisense strand to SEQ ID NO: 505797
ucucgggugauacauucau

SEQ ID NO: 505799 - RNA, 19 nt, Artificial Sequence
  Description of Artificial Sequence: Synthetic oligonucleotide
  Sense strand starting at position 2728 of SEQ ID NO: 317707
uguaucacccgagaucgua

SEQ ID NO: 505800 - RNA, 19 nt, Artificial Sequence
  Description of Artificial Sequence: Synthetic oligonucleotide
  Antisense strand to SEQ ID NO: 505799
uacgaucucgggugauaca

SEQ ID NO: 505801 - RNA, 19 nt, Artificial Sequence
  Description of Artificial Sequence: Synthetic oligonucleotide
  Sense strand starting at position 2794 of SEQ ID NO: 317707
aaauuauugugaguguucu

SEQ ID NO: 505802 - RNA, 19 nt, Artificial Sequence
  Description of Artificial Sequence: Synthetic oligonucleotide
  Antisense strand to SEQ ID NO: 505801
agaacacucacaauaauuu

SEQ ID NO: 505803 - RNA, 19 nt, Artificial Sequence
  Description of Artificial Sequence: Synthetic oligonucleotide
  Sense strand starting at position 2795 of SEQ ID NO: 317707
aauuauugugaguguucuu

SEQ ID NO: 505804 - RNA, 19 nt, Artificial Sequence
  Description of Artificial Sequence: Synthetic oligonucleotide
  Antisense strand to SEQ ID NO: 505803
aagaacacucacaauaauu

SEQ ID NO: 505805 - RNA, 19 nt, Artificial Sequence
  Description of Artificial Sequence: Synthetic oligonucleotide
  Sense strand starting at position 2798 of SEQ ID NO: 317707
uauugugaguguucuuaau

SEQ ID NO: 505806 - RNA, 19 nt, Artificial Sequence
  Description of Artificial Sequence: Synthetic oligonucleotide
  Antisense strand to SEQ ID NO: 505805
auuaagaacacucacaaua

SEQ ID NO: 505807 - RNA, 19 nt, Artificial Sequence
  Description of Artificial Sequence: Synthetic oligonucleotide
  Sense strand starting at position 2800 of SEQ ID NO: 317707
uugugaguguucuuaaucu

SEQ ID NO: 505808 - RNA, 19 nt, Artificial Sequence
  Description of Artificial Sequence: Synthetic oligonucleotide
  Antisense strand to SEQ ID NO: 505807
agauuaagaacacucacaa

SEQ ID NO: 505809 - RNA, 19 nt, Artificial Sequence
  Description of Artificial Sequence: Synthetic oligonucleotide
  Sense strand starting at position 3514 of SEQ ID NO: 317707
agugaaaccuuguccuuaa

SEQ ID NO: 505810 - RNA, 19 nt, Artificial Sequence
  Description of Artificial Sequence: Synthetic oligonucleotide
  Antisense strand to SEQ ID NO: 505809
uuaaggacaagguuucacu

SEQ ID NO: 505811 - RNA, 19 nt, Artificial Sequence
  Description of Artificial Sequence: Synthetic oligonucleotide
  Sense strand starting at position 3515 of SEQ ID NO: 317707
gugaaaccuuguccuuaaa

SEQ ID NO: 505812 - RNA, 19 nt, Artificial Sequence
  Description of Artificial Sequence: Synthetic oligonucleotide
  Antisense strand to SEQ ID NO: 505811
uuuaaggacaagguuucac

SEQ ID NO: 505813 - RNA, 19 nt, Artificial Sequence
  Description of Artificial Sequence: Synthetic oligonucleotide
  Sense strand starting at position 3575 of SEQ ID NO: 317707
acaggaugaugugauagaa

SEQ ID NO: 505814 - RNA, 19 nt, Artificial Sequence
  Description of Artificial Sequence: Synthetic oligonucleotide
  Antisense strand to SEQ ID NO: 505813
uucuaucacaucauccugu

SEQ ID NO: 505815 - RNA, 19 nt, Artificial Sequence
  Description of Artificial Sequence: Synthetic oligonucleotide
  Sense strand starting at position 3629 of SEQ ID NO: 317707
ggaaguccucuaugaugag

SEQ ID NO: 505816 - RNA, 19 nt, Artificial Sequence
  Description of Artificial Sequence: Synthetic oligonucleotide
  Antisense strand to SEQ ID NO: 505815
cucaucauagaggacuucc

SEQ ID NO: 505817 - RNA, 19 nt, Artificial Sequence
  Description of Artificial Sequence: Synthetic oligonucleotide
  Sense strand starting at position 3635 of SEQ ID NO: 317707
ccucuaugaugagaggaaa

SEQ ID NO: 505818 - RNA, 19 nt, Artificial Sequence
  Description of Artificial Sequence: Synthetic oligonucleotide
  Antisense strand to SEQ ID NO: 505817
uuuccucucaucauagagg

SEQ ID NO: 505819 - RNA, 19 nt, Artificial Sequence
  Description of Artificial Sequence: Synthetic oligonucleotide
  Sense strand starting at position 3680 of SEQ ID NO: 317707
gagguauugggccaauguu

SEQ ID NO: 505820 - RNA, 19 nt, Artificial Sequence
  Description of Artificial Sequence: Synthetic oligonucleotide
  Antisense strand to SEQ ID NO: 505819
aacauuggcccaauaccuc

SEQ ID NO: 505821 - RNA, 19 nt, Artificial Sequence
  Description of Artificial Sequence: Synthetic oligonucleotide
  Sense strand starting at position 3739 of SEQ ID NO: 317707
aggccugacuuucuucuua

SEQ ID NO: 505822 - RNA, 19 nt, Artificial Sequence
  Description of Artificial Sequence: Synthetic oligonucleotide
  Antisense strand to SEQ ID NO: 505821
uaagaagaaagucaggccu

SEQ ID NO: 505823 - RNA, 19 nt, Artificial Sequence
  Description of Artificial Sequence: Synthetic oligonucleotide
  Sense strand starting at position 3741 of SEQ ID NO: 317707
gccugacuuucuucuuaga

SEQ ID NO: 505824 - RNA, 19 nt, Artificial Sequence
  Description of Artificial Sequence: Synthetic oligonucleotide
  Antisense strand to SEQ ID NO: 505823
ucuaagaagaaagucaggc

SEQ ID NO: 505825 - RNA, 19 nt, Artificial Sequence
  Description of Artificial Sequence: Synthetic oligonucleotide
  Sense strand starting at position 3743 of SEQ ID NO: 317707
cugacuuucuucuuagaag

SEQ ID NO: 505826 - RNA, 19 nt, Artificial Sequence
  Description of Artificial Sequence: Synthetic oligonucleotide
  Antisense strand to SEQ ID NO: 505825
cuucuaagaagaaagucag

SEQ ID NO: 505827 - RNA, 19 nt, Artificial Sequence
  Description of Artificial Sequence: Synthetic oligonucleotide
  Sense strand starting at position 132 of SEQ ID NO: 317708
gugcauauuugccucaaca

SEQ ID NO: 505828 - RNA, 19 nt, Artificial Sequence
  Description of Artificial Sequence: Synthetic oligonucleotide
  Antisense strand to SEQ ID NO: 505827
uguugaggcaaauaugcac

SEQ ID NO: 505829 - RNA, 19 nt, Artificial Sequence
  Description of Artificial Sequence: Synthetic oligonucleotide
  Sense strand starting at position 195 of SEQ ID NO: 317708
uugugcuuucccucauugu

SEQ ID NO: 505830 - RNA, 19 nt, Artificial Sequence
  Description of Artificial Sequence: Synthetic oligonucleotide
  Antisense strand to SEQ ID NO: 505829
acaaugagggaaagcacaa

SEQ ID NO: 505831 - RNA, 19 nt, Artificial Sequence
  Description of Artificial Sequence: Synthetic oligonucleotide
  Sense strand starting at position 225 of SEQ ID NO: 317708
augugcaaacuuuguaaca

SEQ ID NO: 505832 - RNA, 19 nt, Artificial Sequence
  Description of Artificial Sequence: Synthetic oligonucleotide
  Antisense strand to SEQ ID NO: 505831
uguuacaaaguuugcacau

SEQ ID NO: 505833 - RNA, 19 nt, Artificial Sequence
  Description of Artificial Sequence: Synthetic oligonucleotide
  Sense strand starting at position 226 of SEQ ID NO: 317708
ugugcaaacuuuguaacau

SEQ ID NO: 505834 - RNA, 19 nt, Artificial Sequence
  Description of Artificial Sequence: Synthetic oligonucleotide
  Antisense strand to SEQ ID NO: 505833
auguuacaaaguuugcaca

SEQ ID NO: 505835 - RNA, 19 nt, Artificial Sequence
  Description of Artificial Sequence: Synthetic oligonucleotide
  Sense strand starting at position 270 of SEQ ID NO: 317708
guagacauguuauugucca

SEQ ID NO: 505836 - RNA, 19 nt, Artificial Sequence
  Description of Artificial Sequence: Synthetic oligonucleotide
  Antisense strand to SEQ ID NO: 505835
uggacaauaacaugucuac

SEQ ID NO: 505837 - RNA, 19 nt, Artificial Sequence
  Description of Artificial Sequence: Synthetic oligonucleotide
  Sense strand starting at position 277 of SEQ ID NO: 317708
uguuauuguccauauauug

SEQ ID NO: 505838 - RNA, 19 nt, Artificial Sequence
  Description of Artificial Sequence: Synthetic oligonucleotide
  Antisense strand to SEQ ID NO: 505837
caauauauggacaauaaca

SEQ ID NO: 505839 - RNA, 19 nt, Artificial Sequence
  Description of Artificial Sequence: Synthetic oligonucleotide
  Sense strand starting at position 305 of SEQ ID NO: 317708
ugacauaugcacggaaaca

SEQ ID NO: 505840 - RNA, 19 nt, Artificial Sequence
  Description of Artificial Sequence: Synthetic oligonucleotide
  Antisense strand to SEQ ID NO: 505839
uguuuccgugcauauguca

SEQ ID NO: 505841 - RNA, 19 nt, Artificial Sequence
  Description of Artificial Sequence: Synthetic oligonucleotide
  Sense strand starting at position 357 of SEQ ID NO: 317708
ucaucuguugcuuagauaa

SEQ ID NO: 505842 - RNA, 19 nt, Artificial Sequence
  Description of Artificial Sequence: Synthetic oligonucleotide
  Antisense strand to SEQ ID NO: 505841
uuaucuaagcaacagauga

SEQ ID NO: 505843 - RNA, 19 nt, Artificial Sequence
  Description of Artificial Sequence: Synthetic oligonucleotide
  Sense strand starting at position 438 of SEQ ID NO: 317708
gacuuacguggcuaugaga

SEQ ID NO: 505844 - RNA, 19 nt, Artificial Sequence
  Description of Artificial Sequence: Synthetic oligonucleotide
  Antisense strand to SEQ ID NO: 505843
ucucauagccacguaaguc

SEQ ID NO: 505845 - RNA, 19 nt, Artificial Sequence
  Description of Artificial Sequence: Synthetic oligonucleotide
  Sense strand starting at position 502 of SEQ ID NO: 317708
ccagucucuguggacuauu

SEQ ID NO: 505846 - RNA, 19 nt, Artificial Sequence
  Description of Artificial Sequence: Synthetic oligonucleotide
  Antisense strand to SEQ ID NO: 505845
aauaguccacagagacugg

SEQ ID NO: 505847 - RNA, 19 nt, Artificial Sequence
  Description of Artificial Sequence: Synthetic oligonucleotide
  Sense strand starting at position 568 of SEQ ID NO: 317708
ggugauaguccauaguccu

SEQ ID NO: 505848 - RNA, 19 nt, Artificial Sequence
  Description of Artificial Sequence: Synthetic oligonucleotide
  Antisense strand to SEQ ID NO: 505847
aggacuauggacuaucacc

SEQ ID NO: 505849 - RNA, 19 nt, Artificial Sequence
  Description of Artificial Sequence: Synthetic oligonucleotide
  Sense strand starting at position 696 of SEQ ID NO: 317708
aggccaucccuuuagaaac

SEQ ID NO: 505850 - RNA, 19 nt, Artificial Sequence
  Description of Artificial Sequence: Synthetic oligonucleotide
  Antisense strand to SEQ ID NO: 505849
guuucuaaagggauggccu

SEQ ID NO: 505851 - RNA, 19 nt, Artificial Sequence
  Description of Artificial Sequence: Synthetic oligonucleotide
  Sense strand starting at position 1102 of SEQ ID NO: 317708
gcccuuccucaguaucuua

SEQ ID NO: 505852 - RNA, 19 nt, Artificial Sequence
  Description of Artificial Sequence: Synthetic oligonucleotide
  Antisense strand to SEQ ID NO: 505851
uaagauacugaggaagggc

SEQ ID NO: 505853 - RNA, 19 nt, Artificial Sequence
  Description of Artificial Sequence: Synthetic oligonucleotide
  Sense strand starting at position 1186 of SEQ ID NO: 317708
ugucaucacggacaucaaa

SEQ ID NO: 505854 - RNA, 19 nt, Artificial Sequence
  Description of Artificial Sequence: Synthetic oligonucleotide
  Antisense strand to SEQ ID NO: 505853
uuugauguccgugaugaca

SEQ ID NO: 505855 - RNA, 19 nt, Artificial Sequence
  Description of Artificial Sequence: Synthetic oligonucleotide
  Sense strand starting at position 1197 of SEQ ID NO: 317708
acaucaaauugccugugaa

SEQ ID NO: 505856 - RNA, 19 nt, Artificial Sequence
  Description of Artificial Sequence: Synthetic oligonucleotide
  Antisense strand to SEQ ID NO: 505855
uucacaggcaauuugaugu

SEQ ID NO: 505857 - RNA, 19 nt, Artificial Sequence
  Description of Artificial Sequence: Synthetic oligonucleotide
  Sense strand starting at position 1439 of SEQ ID NO: 317708
ggagcaguaucucuaggga

SEQ ID NO: 505858 - RNA, 19 nt, Artificial Sequence
  Description of Artificial Sequence: Synthetic oligonucleotide
  Antisense strand to SEQ ID NO: 505857
ucccuagagauacugcucc

SEQ ID NO: 505859 - RNA, 19 nt, Artificial Sequence
  Description of Artificial Sequence: Synthetic oligonucleotide
  Sense strand starting at position 1984 of SEQ ID NO: 317708
cgcagccugccucuuuaua

SEQ ID NO: 505860 - RNA, 19 nt, Artificial Sequence
  Description of Artificial Sequence: Synthetic oligonucleotide
  Antisense strand to SEQ ID NO: 505859
uauaaagaggcaggcugcg

SEQ ID NO: 505861 - RNA, 19 nt, Artificial Sequence
  Description of Artificial Sequence: Synthetic oligonucleotide
  Sense strand starting at position 2124 of SEQ ID NO: 317708
ggagguaauccagauuguu

SEQ ID NO: 505862 - RNA, 19 nt, Artificial Sequence
  Description of Artificial Sequence: Synthetic oligonucleotide
  Antisense strand to SEQ ID NO: 505861
aacaaucuggauuaccucc

SEQ ID NO: 505863 - RNA, 19 nt, Artificial Sequence
  Description of Artificial Sequence: Synthetic oligonucleotide
  Sense strand starting at position 2190 of SEQ ID NO: 317708
guugccacucgcucagauu

SEQ ID NO: 505864 - RNA, 19 nt, Artificial Sequence
  Description of Artificial Sequence: Synthetic oligonucleotide
  Antisense strand to SEQ ID NO: 505863
aaucugagcgaguggcaac

SEQ ID NO: 505865 - RNA, 19 nt, Artificial Sequence
  Description of Artificial Sequence: Synthetic oligonucleotide
  Sense strand starting at position 2191 of SEQ ID NO: 317708
uugccacucgcucagauuu

SEQ ID NO: 505866 - RNA, 19 nt, Artificial Sequence
  Description of Artificial Sequence: Synthetic oligonucleotide
  Antisense strand to SEQ ID NO: 505865
aaaucugagcgaguggcaa

SEQ ID NO: 505867 - RNA, 19 nt, Artificial Sequence
  Description of Artificial Sequence: Synthetic oligonucleotide
  Sense strand starting at position 2310 of SEQ ID NO: 317708
cagagaggccucugagaag

SEQ ID NO: 505868 - RNA, 19 nt, Artificial Sequence
  Description of Artificial Sequence: Synthetic oligonucleotide
  Antisense strand to SEQ ID NO: 505867
cuucucagaggccucucug

SEQ ID NO: 505869 - RNA, 19 nt, Artificial Sequence
  Description of Artificial Sequence: Synthetic oligonucleotide
  Sense strand starting at position 2319 of SEQ ID NO: 317708
cucugagaaguccauucga

SEQ ID NO: 505870 - RNA, 19 nt, Artificial Sequence
  Description of Artificial Sequence: Synthetic oligonucleotide
  Antisense strand to SEQ ID NO: 505869
ucgaauggacuucucagag

SEQ ID NO: 505871 - RNA, 19 nt, Artificial Sequence
  Description of Artificial Sequence: Synthetic oligonucleotide
  Sense strand starting at position 2329 of SEQ ID NO: 317708
uccauucgaugcucagaua

SEQ ID NO: 505872 - RNA, 19 nt, Artificial Sequence
  Description of Artificial Sequence: Synthetic oligonucleotide
  Antisense strand to SEQ ID NO: 505871
uaucugagcaucgaaugga

SEQ ID NO: 505873 - RNA, 19 nt, Artificial Sequence
  Description of Artificial Sequence: Synthetic oligonucleotide
  Sense strand starting at position 2330 of SEQ ID NO: 317708
ccauucgaugcucagauau

SEQ ID NO: 505874 - RNA, 19 nt, Artificial Sequence
  Description of Artificial Sequence: Synthetic oligonucleotide
  Antisense strand to SEQ ID NO: 505873
auaucugagcaucgaaugg

SEQ ID NO: 505875 - RNA, 19 nt, Artificial Sequence
  Description of Artificial Sequence: Synthetic oligonucleotide
  Sense strand starting at position 2356 of SEQ ID NO: 317708
aggccaaggcgucaagauu

SEQ ID NO: 505876 - RNA, 19 nt, Artificial Sequence
  Description of Artificial Sequence: Synthetic oligonucleotide
  Antisense strand to SEQ ID NO: 505875
aaucuugacgccuuggccu

SEQ ID NO: 505877 - RNA, 19 nt, Artificial Sequence
  Description of Artificial Sequence: Synthetic oligonucleotide
  Sense strand starting at position 2362 of SEQ ID NO: 317708
aggcgucaagauuauggaa

SEQ ID NO: 505878 - RNA, 19 nt, Artificial Sequence
  Description of Artificial Sequence: Synthetic oligonucleotide
  Antisense strand to SEQ ID NO: 505877
uuccauaaucuugacgccu

SEQ ID NO: 505879 - RNA, 19 nt, Artificial Sequence
  Description of Artificial Sequence: Synthetic oligonucleotide
  Sense strand starting at position 2420 of SEQ ID NO: 317708
ugaucuccugugugauaua

SEQ ID NO: 505880 - RNA, 19 nt, Artificial Sequence
  Description of Artificial Sequence: Synthetic oligonucleotide
  Antisense strand to SEQ ID NO: 505879
uauaucacacaggagauca

SEQ ID NO: 505881 - RNA, 19 nt, Artificial Sequence
  Description of Artificial Sequence: Synthetic oligonucleotide
  Sense strand starting at position 2560 of SEQ ID NO: 317708
auaacacaguaguuucuaa

SEQ ID NO: 505882 - RNA, 19 nt, Artificial Sequence
  Description of Artificial Sequence: Synthetic oligonucleotide
  Antisense strand to SEQ ID NO: 505881
uuagaaacuacuguguuau

SEQ ID NO: 505883 - RNA, 19 nt, Artificial Sequence
  Description of Artificial Sequence: Synthetic oligonucleotide
  Sense strand starting at position 2635 of SEQ ID NO: 317708
gcagaaauguacuuugaag

SEQ ID NO: 505884 - RNA, 19 nt, Artificial Sequence
  Description of Artificial Sequence: Synthetic oligonucleotide
  Antisense strand to SEQ ID NO: 505883
cuucaaaguacauuucugc

SEQ ID NO: 505885 - RNA, 19 nt, Artificial Sequence
  Description of Artificial Sequence: Synthetic oligonucleotide
  Sense strand starting at position 2720 of SEQ ID NO: 317708
uguuaacaguaguuaccua

SEQ ID NO: 505886 - RNA, 19 nt, Artificial Sequence
  Description of Artificial Sequence: Synthetic oligonucleotide
  Antisense strand to SEQ ID NO: 505885
uagguaacuacuguuaaca

SEQ ID NO: 505887 - RNA, 19 nt, Artificial Sequence
  Description of Artificial Sequence: Synthetic oligonucleotide
  Sense strand starting at position 2732 of SEQ ID NO: 317708
uuaccuauugauggcggaa

SEQ ID NO: 505888 - RNA, 19 nt, Artificial Sequence
  Description of Artificial Sequence: Synthetic oligonucleotide
  Antisense strand to SEQ ID NO: 505887
uuccgccaucaauagguaa

SEQ ID NO: 505889 - RNA, 19 nt, Artificial Sequence
  Description of Artificial Sequence: Synthetic oligonucleotide
  Sense strand starting at position 2735 of SEQ ID NO: 317708
ccuauugauggcggaauua

SEQ ID NO: 505890 - RNA, 19 nt, Artificial Sequence
  Description of Artificial Sequence: Synthetic oligonucleotide
  Antisense strand to SEQ ID NO: 505889
uaauuccgccaucaauagg

SEQ ID NO: 505891 - RNA, 19 nt, Artificial Sequence
  Description of Artificial Sequence: Synthetic oligonucleotide
  Sense strand starting at position 3347 of SEQ ID NO: 317708
agugacauguguuugaaau

SEQ ID NO: 505892 - RNA, 19 nt, Artificial Sequence
  Description of Artificial Sequence: Synthetic oligonucleotide
  Antisense strand to SEQ ID NO: 505891
auuucaaacacaugucacu

SEQ ID NO: 505893 - RNA, 19 nt, Artificial Sequence
  Description of Artificial Sequence: Synthetic oligonucleotide
  Sense strand starting at position 3348 of SEQ ID NO: 317708
gugacauguguuugaaaua

SEQ ID NO: 505894 - RNA, 19 nt, Artificial Sequence
  Description of Artificial Sequence: Synthetic oligonucleotide
  Antisense strand to SEQ ID NO: 505893
uauuucaaacacaugucac

SEQ ID NO: 505895 - RNA, 19 nt, Artificial Sequence
  Description of Artificial Sequence: Synthetic oligonucleotide
  Sense strand starting at position 3574 of SEQ ID NO: 317708
ccuugaaggcauuggagua

SEQ ID NO: 505896 - RNA, 19 nt, Artificial Sequence
  Description of Artificial Sequence: Synthetic oligonucleotide
  Antisense strand to SEQ ID NO: 505895
uacuccaaugccuucaagg

SEQ ID NO: 505897 - RNA, 19 nt, Artificial Sequence
  Description of Artificial Sequence: Synthetic oligonucleotide
  Sense strand starting at position 3575 of SEQ ID NO: 317708
cuugaaggcauuggaguau

SEQ ID NO: 505898 - RNA, 19 nt, Artificial Sequence
  Description of Artificial Sequence: Synthetic oligonucleotide
  Antisense strand to SEQ ID NO: 505897
auacuccaaugccuucaag

SEQ ID NO: 505899 - RNA, 19 nt, Artificial Sequence
  Description of Artificial Sequence: Synthetic oligonucleotide
  Sense strand starting at position 3587 of SEQ ID NO: 317708
ggaguauccgaauagguaa

SEQ ID NO: 505900 - RNA, 19 nt, Artificial Sequence
  Description of Artificial Sequence: Synthetic oligonucleotide
  Antisense strand to SEQ ID NO: 505899
uuaccuauucggauacucc

SEQ ID NO: 505901 - RNA, 19 nt, Artificial Sequence
  Description of Artificial Sequence: Synthetic oligonucleotide
  Sense strand starting at position 3605 of SEQ ID NO: 317708
acaguuuaguuaguuaaug

SEQ ID NO: 505902 - RNA, 19 nt, Artificial Sequence
  Description of Artificial Sequence: Synthetic oligonucleotide
  Antisense strand to SEQ ID NO: 505901
cauuaacuaacuaaacugu

SEQ ID NO: 505903 - RNA, 19 nt, Artificial Sequence
  Description of Artificial Sequence: Synthetic oligonucleotide
  Sense strand starting at position 3623 of SEQ ID NO: 317708
gcguuaacuaguuaaggua

SEQ ID NO: 505904 - RNA, 19 nt, Artificial Sequence
  Description of Artificial Sequence: Synthetic oligonucleotide
  Antisense strand to SEQ ID NO: 505903
uaccuuaacuaguuaacgc

SEQ ID NO: 505905 - RNA, 19 nt, Artificial Sequence
  Description of Artificial Sequence: Synthetic oligonucleotide
  Sense strand starting at position 3840 of SEQ ID NO: 317708
gcauuaaauuuagaaguga

SEQ ID NO: 505906 - RNA, 19 nt, Artificial Sequence
  Description of Artificial Sequence: Synthetic oligonucleotide
  Antisense strand to SEQ ID NO: 505905
ucacuucuaaauuuaaugc

SEQ ID NO: 505907 - RNA, 19 nt, Artificial Sequence
  Description of Artificial Sequence: Synthetic oligonucleotide
  Sense strand starting at position 86 of SEQ ID NO: 317709
guuguuccucaccauuaua

SEQ ID NO: 505908 - RNA, 19 nt, Artificial Sequence
  Description of Artificial Sequence: Synthetic oligonucleotide
  Antisense strand to SEQ ID NO: 505907
uauaauggugaggaacaac

SEQ ID NO: 505909 - RNA, 19 nt, Artificial Sequence
  Description of Artificial Sequence: Synthetic oligonucleotide
  Sense strand starting at position 99 of SEQ ID NO: 317709
auuauacuaguacgaucua

SEQ ID NO: 505910 - RNA, 19 nt, Artificial Sequence
  Description of Artificial Sequence: Synthetic oligonucleotide
  Antisense strand to SEQ ID NO: 505909
uagaucguacuaguauaau

SEQ ID NO: 505911 - RNA, 19 nt, Artificial Sequence
  Description of Artificial Sequence: Synthetic oligonucleotide
  Sense strand starting at position 281 of SEQ ID NO: 317709
ugcagauaucacuacguaa

SEQ ID NO: 505912 - RNA, 19 nt, Artificial Sequence
  Description of Artificial Sequence: Synthetic oligonucleotide
  Antisense strand to SEQ ID NO: 505911
uuacguagugauaucugca

SEQ ID NO: 505913 - RNA, 19 nt, Artificial Sequence
  Description of Artificial Sequence: Synthetic oligonucleotide
  Sense strand starting at position 283 of SEQ ID NO: 317709
cagauaucacuacguaaga

SEQ ID NO: 505914 - RNA, 19 nt, Artificial Sequence
  Description of Artificial Sequence: Synthetic oligonucleotide
  Antisense strand to SEQ ID NO: 505913
ucuuacguagugauaucug

SEQ ID NO: 505915 - RNA, 19 nt, Artificial Sequence
  Description of Artificial Sequence: Synthetic oligonucleotide
  Sense strand starting at position 284 of SEQ ID NO: 317709
agauaucacuacguaagac

SEQ ID NO: 505916 - RNA, 19 nt, Artificial Sequence
  Description of Artificial Sequence: Synthetic oligonucleotide
  Antisense strand to SEQ ID NO: 505915
gucuuacguagugauaucu

SEQ ID NO: 505917 - RNA, 19 nt, Artificial Sequence
  Description of Artificial Sequence: Synthetic oligonucleotide
  Sense strand starting at position 296 of SEQ ID NO: 317709
guaagaccucuggguuuaa

SEQ ID NO: 505918 - RNA, 19 nt, Artificial Sequence
  Description of Artificial Sequence: Synthetic oligonucleotide
  Antisense strand to SEQ ID NO: 505917
uuaaacccagaggucuuac

SEQ ID NO: 505919 - RNA, 19 nt, Artificial Sequence
  Description of Artificial Sequence: Synthetic oligonucleotide
  Sense strand starting at position 476 of SEQ ID NO: 317709
gucuguggcaauuaaauga

SEQ ID NO: 505920 - RNA, 19 nt, Artificial Sequence
  Description of Artificial Sequence: Synthetic oligonucleotide
  Antisense strand to SEQ ID NO: 505919
ucauuuaauugccacagac

SEQ ID NO: 505921 - RNA, 19 nt, Artificial Sequence
  Description of Artificial Sequence: Synthetic oligonucleotide
  Sense strand starting at position 530 of SEQ ID NO: 317709
ugagauuaguuccuuccca

SEQ ID NO: 505922 - RNA, 19 nt, Artificial Sequence
  Description of Artificial Sequence: Synthetic oligonucleotide
  Antisense strand to SEQ ID NO: 505921
ugggaaggaacuaaucuca

SEQ ID NO: 505923 - RNA, 19 nt, Artificial Sequence
  Description of Artificial Sequence: Synthetic oligonucleotide
  Sense strand starting at position 580 of SEQ ID NO: 317709
auggauuagugugugauaa

SEQ ID NO: 505924 - RNA, 19 nt, Artificial Sequence
  Description of Artificial Sequence: Synthetic oligonucleotide
  Antisense strand to SEQ ID NO: 505923
uuaucacacacuaauccau

SEQ ID NO: 505925 - RNA, 19 nt, Artificial Sequence
  Description of Artificial Sequence: Synthetic oligonucleotide
  Sense strand starting at position 825 of SEQ ID NO: 317709
ccacaucuuguguaacuau

SEQ ID NO: 505926 - RNA, 19 nt, Artificial Sequence
  Description of Artificial Sequence: Synthetic oligonucleotide
  Antisense strand to SEQ ID NO: 505925
auaguuacacaagaugugg

SEQ ID NO: 505927 - RNA, 19 nt, Artificial Sequence
  Description of Artificial Sequence: Synthetic oligonucleotide
  Sense strand starting at position 862 of SEQ ID NO: 317709
ccuuacaguguguauauaa

SEQ ID NO: 505928 - RNA, 19 nt, Artificial Sequence
  Description of Artificial Sequence: Synthetic oligonucleotide
  Antisense strand to SEQ ID NO: 505927
uuauauacacacuguaagg

SEQ ID NO: 505929 - RNA, 19 nt, Artificial Sequence
  Description of Artificial Sequence: Synthetic oligonucleotide
  Sense strand starting at position 885 of SEQ ID NO: 317709
uuguauaugguugggauca

SEQ ID NO: 505930 - RNA, 19 nt, Artificial Sequence
  Description of Artificial Sequence: Synthetic oligonucleotide
  Antisense strand to SEQ ID NO: 505929
ugaucccaaccauauacaa

SEQ ID NO: 505931 - RNA, 19 nt, Artificial Sequence
  Description of Artificial Sequence: Synthetic oligonucleotide
  Sense strand starting at position 895 of SEQ ID NO: 317709
uugggaucaguuugugaua

SEQ ID NO: 505932 - RNA, 19 nt, Artificial Sequence
  Description of Artificial Sequence: Synthetic oligonucleotide
  Antisense strand to SEQ ID NO: 505931
uaucacaaacugaucccaa

SEQ ID NO: 505933 - RNA, 19 nt, Artificial Sequence
  Description of Artificial Sequence: Synthetic oligonucleotide
  Sense strand starting at position 896 of SEQ ID NO: 317709
ugggaucaguuugugauau

SEQ ID NO: 505934 - RNA, 19 nt, Artificial Sequence
  Description of Artificial Sequence: Synthetic oligonucleotide
  Antisense strand to SEQ ID NO: 505933
auaucacaaacugauccca

SEQ ID NO: 505935 - RNA, 19 nt, Artificial Sequence
  Description of Artificial Sequence: Synthetic oligonucleotide
  Sense strand starting at position 1077 of SEQ ID NO: 317709
ugcacauuuccacgcauaa

SEQ ID NO: 505936 - RNA, 19 nt, Artificial Sequence
  Description of Artificial Sequence: Synthetic oligonucleotide
  Antisense strand to SEQ ID NO: 505935
uuaugcguggaaaugugca

SEQ ID NO: 505937 - RNA, 19 nt, Artificial Sequence
  Description of Artificial Sequence: Synthetic oligonucleotide
  Sense strand starting at position 1233 of SEQ ID NO: 317709
acacauacucgacguagaa

SEQ ID NO: 505938 - RNA, 19 nt, Artificial Sequence
  Description of Artificial Sequence: Synthetic oligonucleotide
  Antisense strand to SEQ ID NO: 505937
uucuacgucgaguaugugu

SEQ ID NO: 505939 - RNA, 19 nt, Artificial Sequence
  Description of Artificial Sequence: Synthetic oligonucleotide
  Sense strand starting at position 1235 of SEQ ID NO: 317709
acauacucgacguagaaau

SEQ ID NO: 505940 - RNA, 19 nt, Artificial Sequence
  Description of Artificial Sequence: Synthetic oligonucleotide
  Antisense strand to SEQ ID NO: 505939
auuucuacgucgaguaugu

SEQ ID NO: 505941 - RNA, 19 nt, Artificial Sequence
  Description of Artificial Sequence: Synthetic oligonucleotide
  Sense strand starting at position 1247 of SEQ ID NO: 317709
uagaaauggcugggcauaa

SEQ ID NO: 505942 - RNA, 19 nt, Artificial Sequence
  Description of Artificial Sequence: Synthetic oligonucleotide
  Antisense strand to SEQ ID NO: 505941
uuaugcccagccauuucua

SEQ ID NO: 505943 - RNA, 19 nt, Artificial Sequence
  Description of Artificial Sequence: Synthetic oligonucleotide
  Sense strand starting at position 1248 of SEQ ID NO: 317709
agaaauggcugggcauaaa

SEQ ID NO: 505944 - RNA, 19 nt, Artificial Sequence
  Description of Artificial Sequence: Synthetic oligonucleotide
  Antisense strand to SEQ ID NO: 505943
uuuaugcccagccauuucu

SEQ ID NO: 505945 - RNA, 19 nt, Artificial Sequence
  Description of Artificial Sequence: Synthetic oligonucleotide
  Sense strand starting at position 1563 of SEQ ID NO: 317709
guccgaaagcuagacuucu

SEQ ID NO: 505946 - RNA, 19 nt, Artificial Sequence
  Description of Artificial Sequence: Synthetic oligonucleotide
  Antisense strand to SEQ ID NO: 505945
agaagucuagcuuucggac

SEQ ID NO: 505947 - RNA, 19 nt, Artificial Sequence
  Description of Artificial Sequence: Synthetic oligonucleotide
  Sense strand starting at position 1897 of SEQ ID NO: 317709
ggacgaaacucaccuucuu

SEQ ID NO: 505948 - RNA, 19 nt, Artificial Sequence
  Description of Artificial Sequence: Synthetic oligonucleotide
  Antisense strand to SEQ ID NO: 505947
aagaaggugaguuucgucc

SEQ ID NO: 505949 - RNA, 19 nt, Artificial Sequence
  Description of Artificial Sequence: Synthetic oligonucleotide
  Sense strand starting at position 2306 of SEQ ID NO: 317709
agaaauaggccuugauaua

SEQ ID NO: 505950 - RNA, 19 nt, Artificial Sequence
  Description of Artificial Sequence: Synthetic oligonucleotide
  Antisense strand to SEQ ID NO: 505949
uauaucaaggccuauuucu

SEQ ID NO: 505951 - RNA, 19 nt, Artificial Sequence
  Description of Artificial Sequence: Synthetic oligonucleotide
  Sense strand starting at position 2316 of SEQ ID NO: 317709
cuugauauaucuucucgaa

SEQ ID NO: 505952 - RNA, 19 nt, Artificial Sequence
  Description of Artificial Sequence: Synthetic oligonucleotide
  Antisense strand to SEQ ID NO: 505951
uucgagaagauauaucaag

SEQ ID NO: 505953 - RNA, 19 nt, Artificial Sequence
  Description of Artificial Sequence: Synthetic oligonucleotide
  Sense strand starting at position 2318 of SEQ ID NO: 317709
ugauauaucuucucgaauu

SEQ ID NO: 505954 - RNA, 19 nt, Artificial Sequence
  Description of Artificial Sequence: Synthetic oligonucleotide
  Antisense strand to SEQ ID NO: 505953
aauucgagaagauauauca

SEQ ID NO: 505955 - RNA, 19 nt, Artificial Sequence
  Description of Artificial Sequence: Synthetic oligonucleotide
  Sense strand starting at position 2412 of SEQ ID NO: 317709
agugaacaauuguuaauag

SEQ ID NO: 505956 - RNA, 19 nt, Artificial Sequence
  Description of Artificial Sequence: Synthetic oligonucleotide
  Antisense strand to SEQ ID NO: 505955
cuauuaacaauuguucacu

SEQ ID NO: 505957 - RNA, 19 nt, Artificial Sequence
  Description of Artificial Sequence: Synthetic oligonucleotide
  Sense strand starting at position 2528 of SEQ ID NO: 317709
ucaauauaucuuggagauu

SEQ ID NO: 505958 - RNA, 19 nt, Artificial Sequence
  Description of Artificial Sequence: Synthetic oligonucleotide
  Antisense strand to SEQ ID NO: 505957
aaucuccaagauauauuga

SEQ ID NO: 505959 - RNA, 19 nt, Artificial Sequence
  Description of Artificial Sequence: Synthetic oligonucleotide
  Sense strand starting at position 2707 of SEQ ID NO: 317709
aucuaucuuugaguacaua

SEQ ID NO: 505960 - RNA, 19 nt, Artificial Sequence
  Description of Artificial Sequence: Synthetic oligonucleotide
  Antisense strand to SEQ ID NO: 505959
uauguacucaaagauagau

SEQ ID NO: 505961 - RNA, 19 nt, Artificial Sequence
  Description of Artificial Sequence: Synthetic oligonucleotide
  Sense strand starting at position 2708 of SEQ ID NO: 317709
ucuaucuuugaguacauau

SEQ ID NO: 505962 - RNA, 19 nt, Artificial Sequence
  Description of Artificial Sequence: Synthetic oligonucleotide
  Antisense strand to SEQ ID NO: 505961
auauguacucaaagauaga

SEQ ID NO: 505963 - RNA, 19 nt, Artificial Sequence
  Description of Artificial Sequence: Synthetic oligonucleotide
  Sense strand starting at position 2770 of SEQ ID NO: 317709
aaagguuacgugcaucuga

SEQ ID NO: 505964 - RNA, 19 nt, Artificial Sequence
  Description of Artificial Sequence: Synthetic oligonucleotide
  Antisense strand to SEQ ID NO: 505963
ucagaugcacguaaccuuu

SEQ ID NO: 505965 - RNA, 19 nt, Artificial Sequence
  Description of Artificial Sequence: Synthetic oligonucleotide
  Sense strand starting at position 3022 of SEQ ID NO: 317709
ccaggaaaggcuuguuuau

SEQ ID NO: 505966 - RNA, 19 nt, Artificial Sequence
  Description of Artificial Sequence: Synthetic oligonucleotide
  Antisense strand to SEQ ID NO: 505965
auaaacaagccuuuccugg

SEQ ID NO: 505967 - RNA, 19 nt, Artificial Sequence
  Description of Artificial Sequence: Synthetic oligonucleotide
  Sense strand starting at position 3032 of SEQ ID NO: 317709
cuuguuuaucagcaucacu

SEQ ID NO: 505968 - RNA, 19 nt, Artificial Sequence
  Description of Artificial Sequence: Synthetic oligonucleotide
  Antisense strand to SEQ ID NO: 505967
agugaugcugauaaacaag

SEQ ID NO: 505969 - RNA, 19 nt, Artificial Sequence
  Description of Artificial Sequence: Synthetic oligonucleotide
  Sense strand starting at position 3056 of SEQ ID NO: 317709
uuauuaugaguugauucga

SEQ ID NO: 505970 - RNA, 19 nt, Artificial Sequence
  Description of Artificial Sequence: Synthetic oligonucleotide
  Antisense strand to SEQ ID NO: 505969
ucgaaucaacucauaauaa

SEQ ID NO: 505971 - RNA, 19 nt, Artificial Sequence
  Description of Artificial Sequence: Synthetic oligonucleotide
  Sense strand starting at position 3087 of SEQ ID NO: 317709
guccuaugaccugaaauuc

SEQ ID NO: 505972 - RNA, 19 nt, Artificial Sequence
  Description of Artificial Sequence: Synthetic oligonucleotide
  Antisense strand to SEQ ID NO: 505971
gaauuucaggucauaggac

SEQ ID NO: 505973 - RNA, 19 nt, Artificial Sequence
  Description of Artificial Sequence: Synthetic oligonucleotide
  Sense strand starting at position 3164 of SEQ ID NO: 317709
uguugugaugugcuagguu

SEQ ID NO: 505974 - RNA, 19 nt, Artificial Sequence
  Description of Artificial Sequence: Synthetic oligonucleotide
  Antisense strand to SEQ ID NO: 505973
aaccuagcacaucacaaca

SEQ ID NO: 505975 - RNA, 19 nt, Artificial Sequence
  Description of Artificial Sequence: Synthetic oligonucleotide
  Sense strand starting at position 3222 of SEQ ID NO: 317709
guuccugcgccaucuguua

SEQ ID NO: 505976 - RNA, 19 nt, Artificial Sequence
  Description of Artificial Sequence: Synthetic oligonucleotide
  Antisense strand to SEQ ID NO: 505975
uaacagauggcgcaggaac

SEQ ID NO: 505977 - RNA, 19 nt, Artificial Sequence
  Description of Artificial Sequence: Synthetic oligonucleotide
  Sense strand starting at position 3346 of SEQ ID NO: 317709
agagaaugcaugugaaagu

SEQ ID NO: 505978 - RNA, 19 nt, Artificial Sequence
  Description of Artificial Sequence: Synthetic oligonucleotide
  Antisense strand to SEQ ID NO: 505977
acuuucacaugcauucucu

SEQ ID NO: 505979 - RNA, 19 nt, Artificial Sequence
  Description of Artificial Sequence: Synthetic oligonucleotide
  Sense strand starting at position 3638 of SEQ ID NO: 317709
aaauuaacugggugucaug

SEQ ID NO: 505980 - RNA, 19 nt, Artificial Sequence
  Description of Artificial Sequence: Synthetic oligonucleotide
  Antisense strand to SEQ ID NO: 505979
caugacacccaguuaauuu

SEQ ID NO: 505981 - RNA, 19 nt, Artificial Sequence
  Description of Artificial Sequence: Synthetic oligonucleotide
  Sense strand starting at position 3728 of SEQ ID NO: 317709
ugcagugagaaccgagauu

SEQ ID NO: 505982 - RNA, 19 nt, Artificial Sequence
  Description of Artificial Sequence: Synthetic oligonucleotide
  Antisense strand to SEQ ID NO: 505981
aaucucgguucucacugca

SEQ ID NO: 505983 - RNA, 19 nt, Artificial Sequence
  Description of Artificial Sequence: Synthetic oligonucleotide
  Sense strand starting at position 3879 of SEQ ID NO: 317709
uuggaaagcaguugaacaa

SEQ ID NO: 505984 - RNA, 19 nt, Artificial Sequence
  Description of Artificial Sequence: Synthetic oligonucleotide
  Antisense strand to SEQ ID NO: 505983
uuguucaacugcuuuccaa

SEQ ID NO: 505985 - RNA, 19 nt, Artificial Sequence
  Description of Artificial Sequence: Synthetic oligonucleotide
  Sense strand starting at position 3932 of SEQ ID NO: 317709
agauaacugaccuggguuu

SEQ ID NO: 505986 - RNA, 19 nt, Artificial Sequence
  Description of Artificial Sequence: Synthetic oligonucleotide
  Antisense strand to SEQ ID NO: 505985
aaacccaggucaguuaucu

SEQ ID NO: 505987 - RNA, 19 nt, Artificial Sequence
  Description of Artificial Sequence: Synthetic oligonucleotide
  Sense strand starting at position 43 of SEQ ID NO: 317710
aguguuuauauagacaugu

SEQ ID NO: 505988 - RNA, 19 nt, Artificial Sequence
  Description of Artificial Sequence: Synthetic oligonucleotide
  Antisense strand to SEQ ID NO: 505987
acaugucuauauaaacacu

SEQ ID NO: 505989 - RNA, 19 nt, Artificial Sequence
  Description of Artificial Sequence: Synthetic oligonucleotide
  Sense strand starting at position 77 of SEQ ID NO: 317710
gaaucuguugcuggacauu

SEQ ID NO: 505990 - RNA, 19 nt, Artificial Sequence
  Description of Artificial Sequence: Synthetic oligonucleotide
  Antisense strand to SEQ ID NO: 505989
aauguccagcaacagauuc

SEQ ID NO: 505991 - RNA, 19 nt, Artificial Sequence
  Description of Artificial Sequence: Synthetic oligonucleotide
  Sense strand starting at position 169 of SEQ ID NO: 317710
acuuaugagcuguguaaag

SEQ ID NO: 505992 - RNA, 19 nt, Artificial Sequence
  Description of Artificial Sequence: Synthetic oligonucleotide
  Antisense strand to SEQ ID NO: 505991
cuuuacacagcucauaagu

SEQ ID NO: 505993 - RNA, 19 nt, Artificial Sequence
  Description of Artificial Sequence: Synthetic oligonucleotide
  Sense strand starting at position 171 of SEQ ID NO: 317710
uuaugagcuguguaaaguu

SEQ ID NO: 505994 - RNA, 19 nt, Artificial Sequence
  Description of Artificial Sequence: Synthetic oligonucleotide
  Antisense strand to SEQ ID NO: 505993
aacuuuacacagcucauaa

SEQ ID NO: 505995 - RNA, 19 nt, Artificial Sequence
  Description of Artificial Sequence: Synthetic oligonucleotide
  Sense strand starting at position 179 of SEQ ID NO: 317710
uguguaaaguuaccuggaa

SEQ ID NO: 505996 - RNA, 19 nt, Artificial Sequence
  Description of Artificial Sequence: Synthetic oligonucleotide
  Antisense strand to SEQ ID NO: 505995
uuccagguaacuuuacaca

SEQ ID NO: 505997 - RNA, 19 nt, Artificial Sequence
  Description of Artificial Sequence: Synthetic oligonucleotide
  Sense strand starting at position 181 of SEQ ID NO: 317710
uguaaaguuaccuggaaag

SEQ ID NO: 505998 - RNA, 19 nt, Artificial Sequence
  Description of Artificial Sequence: Synthetic oligonucleotide
  Antisense strand to SEQ ID NO: 505997
cuuuccagguaacuuuaca

SEQ ID NO: 505999 - RNA, 19 nt, Artificial Sequence
  Description of Artificial Sequence: Synthetic oligonucleotide
  Sense strand starting at position 204 of SEQ ID NO: 317710
uuaaauucucugugucuga

SEQ ID NO: 506000 - RNA, 19 nt, Artificial Sequence
  Description of Artificial Sequence: Synthetic oligonucleotide
  Antisense strand to SEQ ID NO: 505999
ucagacacagagaauuuaa

SEQ ID NO: 506001 - RNA, 19 nt, Artificial Sequence
  Description of Artificial Sequence: Synthetic oligonucleotide
  Sense strand starting at position 207 of SEQ ID NO: 317710
aauucucugugucugaguu

SEQ ID NO: 506002 - RNA, 19 nt, Artificial Sequence
  Description of Artificial Sequence: Synthetic oligonucleotide
  Antisense strand to SEQ ID NO: 506001
aacucagacacagagaauu

SEQ ID NO: 506003 - RNA, 19 nt, Artificial Sequence
  Description of Artificial Sequence: Synthetic oligonucleotide
  Sense strand starting at position 217 of SEQ ID NO: 317710
gucugaguuuccuuaucac

SEQ ID NO: 506004 - RNA, 19 nt, Artificial Sequence
  Description of Artificial Sequence: Synthetic oligonucleotide
  Antisense strand to SEQ ID NO: 506003
gugauaaggaaacucagac

SEQ ID NO: 506005 - RNA, 19 nt, Artificial Sequence
  Description of Artificial Sequence: Synthetic oligonucleotide
  Sense strand starting at position 455 of SEQ ID NO: 317710
cuauaauuggcccagaagu

SEQ ID NO: 506006 - RNA, 19 nt, Artificial Sequence
  Description of Artificial Sequence: Synthetic oligonucleotide
  Antisense strand to SEQ ID NO: 506005
acuucugggccaauuauag

SEQ ID NO: 506007 - RNA, 19 nt, Artificial Sequence
  Description of Artificial Sequence: Synthetic oligonucleotide
  Sense strand starting at position 457 of SEQ ID NO: 317710
auaauuggcccagaaguuu

SEQ ID NO: 506008 - RNA, 19 nt, Artificial Sequence
  Description of Artificial Sequence: Synthetic oligonucleotide
  Antisense strand to SEQ ID NO: 506007
aaacuucugggccaauuau

SEQ ID NO: 506009 - RNA, 19 nt, Artificial Sequence
  Description of Artificial Sequence: Synthetic oligonucleotide
  Sense strand starting at position 486 of SEQ ID NO: 317710
acaucagagaagugaaguu

SEQ ID NO: 506010 - RNA, 19 nt, Artificial Sequence
  Description of Artificial Sequence: Synthetic oligonucleotide
  Antisense strand to SEQ ID NO: 506009
aacuucacuucucugaugu

SEQ ID NO: 506011 - RNA, 19 nt, Artificial Sequence
  Description of Artificial Sequence: Synthetic oligonucleotide
  Sense strand starting at position 578 of SEQ ID NO: 317710
cguauuuguuuauucugca

SEQ ID NO: 506012 - RNA, 19 nt, Artificial Sequence
  Description of Artificial Sequence: Synthetic oligonucleotide
  Antisense strand to SEQ ID NO: 506011
ugcagaauaaacaaauacg

SEQ ID NO: 506013 - RNA, 19 nt, Artificial Sequence
  Description of Artificial Sequence: Synthetic oligonucleotide
  Sense strand starting at position 594 of SEQ ID NO: 317710
gcaucuaauuugguuuauu

SEQ ID NO: 506014 - RNA, 19 nt, Artificial Sequence
  Description of Artificial Sequence: Synthetic oligonucleotide
  Antisense strand to SEQ ID NO: 506013
aauaaaccaaauuagaugc

SEQ ID NO: 506015 - RNA, 19 nt, Artificial Sequence
  Description of Artificial Sequence: Synthetic oligonucleotide
  Sense strand starting at position 687 of SEQ ID NO: 317710
aucuaauguuuagugacuu

SEQ ID NO: 506016 - RNA, 19 nt, Artificial Sequence
  Description of Artificial Sequence: Synthetic oligonucleotide
  Antisense strand to SEQ ID NO: 506015
aagucacuaaacauuagau

SEQ ID NO: 506017 - RNA, 19 nt, Artificial Sequence
  Description of Artificial Sequence: Synthetic oligonucleotide
  Sense strand starting at position 691 of SEQ ID NO: 317710
aauguuuagugacuuuguu

SEQ ID NO: 506018 - RNA, 19 nt, Artificial Sequence
  Description of Artificial Sequence: Synthetic oligonucleotide
  Antisense strand to SEQ ID NO: 506017
aacaaagucacuaaacauu

SEQ ID NO: 506019 - RNA, 19 nt, Artificial Sequence
  Description of Artificial Sequence: Synthetic oligonucleotide
  Sense strand starting at position 695 of SEQ ID NO: 317710
uuuagugacuuuguugaaa

SEQ ID NO: 506020 - RNA, 19 nt, Artificial Sequence
  Description of Artificial Sequence: Synthetic oligonucleotide
  Antisense strand to SEQ ID NO: 506019
uuucaacaaagucacuaaa

SEQ ID NO: 506021 - RNA, 19 nt, Artificial Sequence
  Description of Artificial Sequence: Synthetic oligonucleotide
  Sense strand starting at position 1209 of SEQ ID NO: 317710
guguuauuccuagguugac

SEQ ID NO: 506022 - RNA, 19 nt, Artificial Sequence
  Description of Artificial Sequence: Synthetic oligonucleotide
  Antisense strand to SEQ ID NO: 506021
gucaaccuaggaauaacac

SEQ ID NO: 506023 - RNA, 19 nt, Artificial Sequence
  Description of Artificial Sequence: Synthetic oligonucleotide
  Sense strand starting at position 1210 of SEQ ID NO: 317710
uguuauuccuagguugacu

SEQ ID NO: 506024 - RNA, 19 nt, Artificial Sequence
  Description of Artificial Sequence: Synthetic oligonucleotide
  Antisense strand to SEQ ID NO: 506023
agucaaccuaggaauaaca

SEQ ID NO: 506025 - RNA, 19 nt, Artificial Sequence
  Description of Artificial Sequence: Synthetic oligonucleotide
  Sense strand starting at position 1696 of SEQ ID NO: 317710
gagccuguggucugggaaa

SEQ ID NO: 506026 - RNA, 19 nt, Artificial Sequence
  Description of Artificial Sequence: Synthetic oligonucleotide
  Antisense strand to SEQ ID NO: 506025
uuucccagaccacaggcuc

SEQ ID NO: 506027 - RNA, 19 nt, Artificial Sequence
  Description of Artificial Sequence: Synthetic oligonucleotide
  Sense strand starting at position 1802 of SEQ ID NO: 317710
cgggaucaguaccugaaua

SEQ ID NO: 506028 - RNA, 19 nt, Artificial Sequence
  Description of Artificial Sequence: Synthetic oligonucleotide
  Antisense strand to SEQ ID NO: 506027
uauucagguacugaucccg

SEQ ID NO: 506029 - RNA, 19 nt, Artificial Sequence
  Description of Artificial Sequence: Synthetic oligonucleotide
  Sense strand starting at position 2041 of SEQ ID NO: 317710
gggacuuucccugacacgu

SEQ ID NO: 506030 - RNA, 19 nt, Artificial Sequence
  Description of Artificial Sequence: Synthetic oligonucleotide
  Antisense strand to SEQ ID NO: 506029
acgugucagggaaaguccc

SEQ ID NO: 506031 - RNA, 19 nt, Artificial Sequence
  Description of Artificial Sequence: Synthetic oligonucleotide
  Sense strand starting at position 2051 of SEQ ID NO: 317710
cugacacguguagggaaau

SEQ ID NO: 506032 - RNA, 19 nt, Artificial Sequence
  Description of Artificial Sequence: Synthetic oligonucleotide
  Antisense strand to SEQ ID NO: 506031
auuucccuacacgugucag

SEQ ID NO: 506033 - RNA, 19 nt, Artificial Sequence
  Description of Artificial Sequence: Synthetic oligonucleotide
  Sense strand starting at position 2082 of SEQ ID NO: 317710
uugguauggcccuaauaac

SEQ ID NO: 506034 - RNA, 19 nt, Artificial Sequence
  Description of Artificial Sequence: Synthetic oligonucleotide
  Antisense strand to SEQ ID NO: 506033
guuauuagggccauaccaa

SEQ ID NO: 506035 - RNA, 19 nt, Artificial Sequence
  Description of Artificial Sequence: Synthetic oligonucleotide
  Sense strand starting at position 2141 of SEQ ID NO: 317710
aguggucucuuuccaucuu

SEQ ID NO: 506036 - RNA, 19 nt, Artificial Sequence
  Description of Artificial Sequence: Synthetic oligonucleotide
  Antisense strand to SEQ ID NO: 506035
aagauggaaagagaccacu

SEQ ID NO: 506037 - RNA, 19 nt, Artificial Sequence
  Description of Artificial Sequence: Synthetic oligonucleotide
  Sense strand starting at position 2299 of SEQ ID NO: 317710
uuucuacagugaguauaaa

SEQ ID NO: 506038 - RNA, 19 nt, Artificial Sequence
  Description of Artificial Sequence: Synthetic oligonucleotide
  Antisense strand to SEQ ID NO: 506037
uuuauacucacuguagaaa

SEQ ID NO: 506039 - RNA, 19 nt, Artificial Sequence
  Description of Artificial Sequence: Synthetic oligonucleotide
  Sense strand starting at position 2300 of SEQ ID NO: 317710
uucuacagugaguauaaau

SEQ ID NO: 506040 - RNA, 19 nt, Artificial Sequence
  Description of Artificial Sequence: Synthetic oligonucleotide
  Antisense strand to SEQ ID NO: 506039
auuuauacucacuguagaa

SEQ ID NO: 506041 - RNA, 19 nt, Artificial Sequence
  Description of Artificial Sequence: Synthetic oligonucleotide
  Sense strand starting at position 2333 of SEQ ID NO: 317710
ggaaaugauaaacgucaua

SEQ ID NO: 506042 - RNA, 19 nt, Artificial Sequence
  Description of Artificial Sequence: Synthetic oligonucleotide
  Antisense strand to SEQ ID NO: 506041
uaugacguuuaucauuucc

SEQ ID NO: 506043 - RNA, 19 nt, Artificial Sequence
  Description of Artificial Sequence: Synthetic oligonucleotide
  Sense strand starting at position 2435 of SEQ ID NO: 317710
acacgaaauugaucaaguc

SEQ ID NO: 506044 - RNA, 19 nt, Artificial Sequence
  Description of Artificial Sequence: Synthetic oligonucleotide
  Antisense strand to SEQ ID NO: 506043
gacuugaucaauuucgugu

SEQ ID NO: 506045 - RNA, 19 nt, Artificial Sequence
  Description of Artificial Sequence: Synthetic oligonucleotide
  Sense strand starting at position 2594 of SEQ ID NO: 317710
guuaguaaauaauccaagu

SEQ ID NO: 506046 - RNA, 19 nt, Artificial Sequence
  Description of Artificial Sequence: Synthetic oligonucleotide
  Antisense strand to SEQ ID NO: 506045
acuuggauuauuuacuaac

SEQ ID NO: 506047 - RNA, 19 nt, Artificial Sequence
  Description of Artificial Sequence: Synthetic oligonucleotide
  Sense strand starting at position 2612 of SEQ ID NO: 317710
uuucuuagcugguccucaa

SEQ ID NO: 506048 - RNA, 19 nt, Artificial Sequence
  Description of Artificial Sequence: Synthetic oligonucleotide
  Antisense strand to SEQ ID NO: 506047
uugaggaccagcuaagaaa

SEQ ID NO: 506049 - RNA, 19 nt, Artificial Sequence
  Description of Artificial Sequence: Synthetic oligonucleotide
  Sense strand starting at position 2697 of SEQ ID NO: 317710
cuggauguguagccuuaga

SEQ ID NO: 506050 - RNA, 19 nt, Artificial Sequence
  Description of Artificial Sequence: Synthetic oligonucleotide
  Antisense strand to SEQ ID NO: 506049
ucuaaggcuacacauccag

SEQ ID NO: 506051 - RNA, 19 nt, Artificial Sequence
  Description of Artificial Sequence: Synthetic oligonucleotide
  Sense strand starting at position 2720 of SEQ ID NO: 317710
gguguucccucucccuaga

SEQ ID NO: 506052 - RNA, 19 nt, Artificial Sequence
  Description of Artificial Sequence: Synthetic oligonucleotide
  Antisense strand to SEQ ID NO: 506051
ucuagggagagggaacacc

SEQ ID NO: 506053 - RNA, 19 nt, Artificial Sequence
  Description of Artificial Sequence: Synthetic oligonucleotide
  Sense strand starting at position 2768 of SEQ ID NO: 317710
ucugcauuuguucggguca

SEQ ID NO: 506054 - RNA, 19 nt, Artificial Sequence
  Description of Artificial Sequence: Synthetic oligonucleotide
  Antisense strand to SEQ ID NO: 506053
ugacccgaacaaaugcaga

SEQ ID NO: 506055 - RNA, 19 nt, Artificial Sequence
  Description of Artificial Sequence: Synthetic oligonucleotide
  Sense strand starting at position 2817 of SEQ ID NO: 317710
aggcuuaggacuugaaugu

SEQ ID NO: 506056 - RNA, 19 nt, Artificial Sequence
  Description of Artificial Sequence: Synthetic oligonucleotide
  Antisense strand to SEQ ID NO: 506055
acauucaaguccuaagccu

SEQ ID NO: 506057 - RNA, 19 nt, Artificial Sequence
  Description of Artificial Sequence: Synthetic oligonucleotide
  Sense strand starting at position 2818 of SEQ ID NO: 317710
ggcuuaggacuugaauguu

SEQ ID NO: 506058 - RNA, 19 nt, Artificial Sequence
  Description of Artificial Sequence: Synthetic oligonucleotide
  Antisense strand to SEQ ID NO: 506057
aacauucaaguccuaagcc

SEQ ID NO: 506059 - RNA, 19 nt, Artificial Sequence
  Description of Artificial Sequence: Synthetic oligonucleotide
  Sense strand starting at position 3057 of SEQ ID NO: 317710
cagguuggucucgaacuga

SEQ ID NO: 506060 - RNA, 19 nt, Artificial Sequence
  Description of Artificial Sequence: Synthetic oligonucleotide
  Antisense strand to SEQ ID NO: 506059
ucaguucgagaccaaccug

SEQ ID NO: 506061 - RNA, 19 nt, Artificial Sequence
  Description of Artificial Sequence: Synthetic oligonucleotide
  Sense strand starting at position 3207 of SEQ ID NO: 317710
aggaguagggcuuagagua

SEQ ID NO: 506062 - RNA, 19 nt, Artificial Sequence
  Description of Artificial Sequence: Synthetic oligonucleotide
  Antisense strand to SEQ ID NO: 506061
uacucuaagcccuacuccu

SEQ ID NO: 506063 - RNA, 19 nt, Artificial Sequence
  Description of Artificial Sequence: Synthetic oligonucleotide
  Sense strand starting at position 3933 of SEQ ID NO: 317710
gcuaauguggcauauagua

SEQ ID NO: 506064 - RNA, 19 nt, Artificial Sequence
  Description of Artificial Sequence: Synthetic oligonucleotide
  Antisense strand to SEQ ID NO: 506063
uacuauaugccacauuagc

SEQ ID NO: 506065 - RNA, 19 nt, Artificial Sequence
  Description of Artificial Sequence: Synthetic oligonucleotide
  Sense strand starting at position 3962 of SEQ ID NO: 317710
gcccguuagcugcuguuau

SEQ ID NO: 506066 - RNA, 19 nt, Artificial Sequence
  Description of Artificial Sequence: Synthetic oligonucleotide
  Antisense strand to SEQ ID NO: 506065
auaacagcagcuaacgggc

SEQ ID NO: 506067 - RNA, 19 nt, Artificial Sequence
  Description of Artificial Sequence: Synthetic oligonucleotide
  Sense strand starting at position 391 of SEQ ID NO: 317711
uggagaacuuguccuagga

SEQ ID NO: 506068 - RNA, 19 nt, Artificial Sequence
  Description of Artificial Sequence: Synthetic oligonucleotide
  Antisense strand to SEQ ID NO: 506067
uccuaggacaaguucucca

SEQ ID NO: 506069 - RNA, 19 nt, Artificial Sequence
  Description of Artificial Sequence: Synthetic oligonucleotide
  Sense strand starting at position 400 of SEQ ID NO: 317711
uguccuaggaaaggugaaa

SEQ ID NO: 506070 - RNA, 19 nt, Artificial Sequence
  Description of Artificial Sequence: Synthetic oligonucleotide
  Antisense strand to SEQ ID NO: 506069
uuucaccuuuccuaggaca

SEQ ID NO: 506071 - RNA, 19 nt, Artificial Sequence
  Description of Artificial Sequence: Synthetic oligonucleotide
  Sense strand starting at position 411 of SEQ ID NO: 317711
aggugaaagcucugucaau

SEQ ID NO: 506072 - RNA, 19 nt, Artificial Sequence
  Description of Artificial Sequence: Synthetic oligonucleotide
  Antisense strand to SEQ ID NO: 506071
auugacagagcuuucaccu

SEQ ID NO: 506073 - RNA, 19 nt, Artificial Sequence
  Description of Artificial Sequence: Synthetic oligonucleotide
  Sense strand starting at position 412 of SEQ ID NO: 317711
ggugaaagcucugucaaua

SEQ ID NO: 506074 - RNA, 19 nt, Artificial Sequence
  Description of Artificial Sequence: Synthetic oligonucleotide
  Antisense strand to SEQ ID NO: 506073
uauugacagagcuuucacc

SEQ ID NO: 506075 - RNA, 19 nt, Artificial Sequence
  Description of Artificial Sequence: Synthetic oligonucleotide
  Sense strand starting at position 430 of SEQ ID NO: 317711
acagaucugggauguauau

SEQ ID NO: 506076 - RNA, 19 nt, Artificial Sequence
  Description of Artificial Sequence: Synthetic oligonucleotide
  Antisense strand to SEQ ID NO: 506075
auauacaucccagaucugu

SEQ ID NO: 506077 - RNA, 19 nt, Artificial Sequence
  Description of Artificial Sequence: Synthetic oligonucleotide
  Sense strand starting at position 432 of SEQ ID NO: 317711
agaucugggauguauaugu

SEQ ID NO: 506078 - RNA, 19 nt, Artificial Sequence
  Description of Artificial Sequence: Synthetic oligonucleotide
  Antisense strand to SEQ ID NO: 506077
acauauacaucccagaucu

SEQ ID NO: 506079 - RNA, 19 nt, Artificial Sequence
  Description of Artificial Sequence: Synthetic oligonucleotide
  Sense strand starting at position 436 of SEQ ID NO: 317711
cugggauguauauguauua

SEQ ID NO: 506080 - RNA, 19 nt, Artificial Sequence
  Description of Artificial Sequence: Synthetic oligonucleotide
  Antisense strand to SEQ ID NO: 506079
uaauacauauacaucccag

SEQ ID NO: 506081 - RNA, 19 nt, Artificial Sequence
  Description of Artificial Sequence: Synthetic oligonucleotide
  Sense strand starting at position 437 of SEQ ID NO: 317711
ugggauguauauguauuaa

SEQ ID NO: 506082 - RNA, 19 nt, Artificial Sequence
  Description of Artificial Sequence: Synthetic oligonucleotide
  Antisense strand to SEQ ID NO: 506081
uuaauacauauacauccca

SEQ ID NO: 506083 - RNA, 19 nt, Artificial Sequence
  Description of Artificial Sequence: Synthetic oligonucleotide
  Sense strand starting at position 529 of SEQ ID NO: 317711
cucucuacauccguauuua

SEQ ID NO: 506084 - RNA, 19 nt, Artificial Sequence
  Description of Artificial Sequence: Synthetic oligonucleotide
  Antisense strand to SEQ ID NO: 506083
uaaauacggauguagagag

SEQ ID NO: 506085 - RNA, 19 nt, Artificial Sequence
  Description of Artificial Sequence: Synthetic oligonucleotide
  Sense strand starting at position 554 of SEQ ID NO: 317711
gguuuauuuacaugucagu

SEQ ID NO: 506086 - RNA, 19 nt, Artificial Sequence
  Description of Artificial Sequence: Synthetic oligonucleotide
  Antisense strand to SEQ ID NO: 506085
acugacauguaaauaaacc

SEQ ID NO: 506087 - RNA, 19 nt, Artificial Sequence
  Description of Artificial Sequence: Synthetic oligonucleotide
  Sense strand starting at position 719 of SEQ ID NO: 317711
cuugcugugagguaagcaa

SEQ ID NO: 506088 - RNA, 19 nt, Artificial Sequence
  Description of Artificial Sequence: Synthetic oligonucleotide
  Antisense strand to SEQ ID NO: 506087
uugcuuaccucacagcaag

SEQ ID NO: 506089 - RNA, 19 nt, Artificial Sequence
  Description of Artificial Sequence: Synthetic oligonucleotide
  Sense strand starting at position 816 of SEQ ID NO: 317711
cacagucguggcuagacaa

SEQ ID NO: 506090 - RNA, 19 nt, Artificial Sequence
  Description of Artificial Sequence: Synthetic oligonucleotide
  Antisense strand to SEQ ID NO: 506089
uugucuagccacgacugug

SEQ ID NO: 506091 - RNA, 19 nt, Artificial Sequence
  Description of Artificial Sequence: Synthetic oligonucleotide
  Sense strand starting at position 931 of SEQ ID NO: 317711
gguaaagugaaauagcguu

SEQ ID NO: 506092 - RNA, 19 nt, Artificial Sequence
  Description of Artificial Sequence: Synthetic oligonucleotide
  Antisense strand to SEQ ID NO: 506091
aacgcuauuucacuuuacc

SEQ ID NO: 506093 - RNA, 19 nt, Artificial Sequence
  Description of Artificial Sequence: Synthetic oligonucleotide
  Sense strand starting at position 958 of SEQ ID NO: 317711
gggacugaccaauggcauu

SEQ ID NO: 506094 - RNA, 19 nt, Artificial Sequence
  Description of Artificial Sequence: Synthetic oligonucleotide
  Antisense strand to SEQ ID NO: 506093
aaugccauuggucaguccc

SEQ ID NO: 506095 - RNA, 19 nt, Artificial Sequence
  Description of Artificial Sequence: Synthetic oligonucleotide
  Sense strand starting at position 1063 of SEQ ID NO: 317711
cgccguacuagucugcaaa

SEQ ID NO: 506096 - RNA, 19 nt, Artificial Sequence
  Description of Artificial Sequence: Synthetic oligonucleotide
  Antisense strand to SEQ ID NO: 506095
uuugcagacuaguacggcg

SEQ ID NO: 506097 - RNA, 19 nt, Artificial Sequence
  Description of Artificial Sequence: Synthetic oligonucleotide
  Sense strand starting at position 1209 of SEQ ID NO: 317711
uuaucuacuugguuucgaa

SEQ ID NO: 506098 - RNA, 19 nt, Artificial Sequence
  Description of Artificial Sequence: Synthetic oligonucleotide
  Antisense strand to SEQ ID NO: 506097
uucgaaaccaaguagauaa

SEQ ID NO: 506099 - RNA, 19 nt, Artificial Sequence
  Description of Artificial Sequence: Synthetic oligonucleotide
  Sense strand starting at position 1261 of SEQ ID NO: 317711
uugggaaugauacggucua

SEQ ID NO: 506100 - RNA, 19 nt, Artificial Sequence
  Description of Artificial Sequence: Synthetic oligonucleotide
  Antisense strand to SEQ ID NO: 506099
uagaccguaucauucccaa

SEQ ID NO: 506101 - RNA, 19 nt, Artificial Sequence
  Description of Artificial Sequence: Synthetic oligonucleotide
  Sense strand starting at position 1414 of SEQ ID NO: 317711
agaccucaccgcugagauu

SEQ ID NO: 506102 - RNA, 19 nt, Artificial Sequence
  Description of Artificial Sequence: Synthetic oligonucleotide
  Antisense strand to SEQ ID NO: 506101
aaucucagcggugaggucu

SEQ ID NO: 506103 - RNA, 19 nt, Artificial Sequence
  Description of Artificial Sequence: Synthetic oligonucleotide
  Sense strand starting at position 1450 of SEQ ID NO: 317711
uuugcucucggcuuucgaa

SEQ ID NO: 506104 - RNA, 19 nt, Artificial Sequence
  Description of Artificial Sequence: Synthetic oligonucleotide
  Antisense strand to SEQ ID NO: 506103
uucgaaagccgagagcaaa

SEQ ID NO: 506105 - RNA, 19 nt, Artificial Sequence
  Description of Artificial Sequence: Synthetic oligonucleotide
  Sense strand starting at position 1451 of SEQ ID NO: 317711
uugcucucggcuuucgaaa

SEQ ID NO: 506106 - RNA, 19 nt, Artificial Sequence
  Description of Artificial Sequence: Synthetic oligonucleotide
  Antisense strand to SEQ ID NO: 506105
uuucgaaagccgagagcaa

SEQ ID NO: 506107 - RNA, 19 nt, Artificial Sequence
  Description of Artificial Sequence: Synthetic oligonucleotide
  Sense strand starting at position 1810 of SEQ ID NO: 317711
gcuucuucuccaggacaga

SEQ ID NO: 506108 - RNA, 19 nt, Artificial Sequence
  Description of Artificial Sequence: Synthetic oligonucleotide
  Antisense strand to SEQ ID NO: 506107
ucuguccuggagaagaagc

SEQ ID NO: 506109 - RNA, 19 nt, Artificial Sequence
  Description of Artificial Sequence: Synthetic oligonucleotide
  Sense strand starting at position 2090 of SEQ ID NO: 317711
gcggccuagccgagagaaa

SEQ ID NO: 506110 - RNA, 19 nt, Artificial Sequence
  Description of Artificial Sequence: Synthetic oligonucleotide
  Antisense strand to SEQ ID NO: 506109
uuucucucggcuaggccgc

SEQ ID NO: 506111 - RNA, 19 nt, Artificial Sequence
  Description of Artificial Sequence: Synthetic oligonucleotide
  Sense strand starting at position 2287 of SEQ ID NO: 317711
cagucaucuguggagcuga

SEQ ID NO: 506112 - RNA, 19 nt, Artificial Sequence
  Description of Artificial Sequence: Synthetic oligonucleotide
  Antisense strand to SEQ ID NO: 506111
ucagcuccacagaugacug

SEQ ID NO: 506113 - RNA, 19 nt, Artificial Sequence
  Description of Artificial Sequence: Synthetic oligonucleotide
  Sense strand starting at position 2292 of SEQ ID NO: 317711
aucuguggagcugauuaaa

SEQ ID NO: 506114 - RNA, 19 nt, Artificial Sequence
  Description of Artificial Sequence: Synthetic oligonucleotide
  Antisense strand to SEQ ID NO: 506113
uuuaaucagcuccacagau

SEQ ID NO: 506115 - RNA, 19 nt, Artificial Sequence
  Description of Artificial Sequence: Synthetic oligonucleotide
  Sense strand starting at position 2349 of SEQ ID NO: 317711
ccaguauuuacgggucgag

SEQ ID NO: 506116 - RNA, 19 nt, Artificial Sequence
  Description of Artificial Sequence: Synthetic oligonucleotide
  Antisense strand to SEQ ID NO: 506115
cucgacccguaaauacugg

SEQ ID NO: 506117 - RNA, 19 nt, Artificial Sequence
  Description of Artificial Sequence: Synthetic oligonucleotide
  Sense strand starting at position 2359 of SEQ ID NO: 317711
cgggucgagaccuagcaau

SEQ ID NO: 506118 - RNA, 19 nt, Artificial Sequence
  Description of Artificial Sequence: Synthetic oligonucleotide
  Antisense strand to SEQ ID NO: 506117
auugcuaggucucgacccg

SEQ ID NO: 506119 - RNA, 19 nt, Artificial Sequence
  Description of Artificial Sequence: Synthetic oligonucleotide
  Sense strand starting at position 2414 of SEQ ID NO: 317711
caacauguuccgggaaauu

SEQ ID NO: 506120 - RNA, 19 nt, Artificial Sequence
  Description of Artificial Sequence: Synthetic oligonucleotide
  Antisense strand to SEQ ID NO: 506119
aauuucccggaacauguug

SEQ ID NO: 506121 - RNA, 19 nt, Artificial Sequence
  Description of Artificial Sequence: Synthetic oligonucleotide
  Sense strand starting at position 2761 of SEQ ID NO: 317711
gaagaaaguuuguuaaccu

SEQ ID NO: 506122 - RNA, 19 nt, Artificial Sequence
  Description of Artificial Sequence: Synthetic oligonucleotide
  Antisense strand to SEQ ID NO: 506121
agguuaacaaacuuucuuc

SEQ ID NO: 506123 - RNA, 19 nt, Artificial Sequence
  Description of Artificial Sequence: Synthetic oligonucleotide
  Sense strand starting at position 3121 of SEQ ID NO: 317711
ggcaaagauccaggauguu

SEQ ID NO: 506124 - RNA, 19 nt, Artificial Sequence
  Description of Artificial Sequence: Synthetic oligonucleotide
  Antisense strand to SEQ ID NO: 506123
aacauccuggaucuuugcc

SEQ ID NO: 506125 - RNA, 19 nt, Artificial Sequence
  Description of Artificial Sequence: Synthetic oligonucleotide
  Sense strand starting at position 3133 of SEQ ID NO: 317711
ggauguucuccacaccaau

SEQ ID NO: 506126 - RNA, 19 nt, Artificial Sequence
  Description of Artificial Sequence: Synthetic oligonucleotide
  Antisense strand to SEQ ID NO: 506125
auugguguggagaacaucc

SEQ ID NO: 506127 - RNA, 19 nt, Artificial Sequence
  Description of Artificial Sequence: Synthetic oligonucleotide
  Sense strand starting at position 3153 of SEQ ID NO: 317711
uuuaguacucaagacaguu

SEQ ID NO: 506128 - RNA, 19 nt, Artificial Sequence
  Description of Artificial Sequence: Synthetic oligonucleotide
  Antisense strand to SEQ ID NO: 506127
aacugucuugaguacuaaa

SEQ ID NO: 506129 - RNA, 19 nt, Artificial Sequence
  Description of Artificial Sequence: Synthetic oligonucleotide
  Sense strand starting at position 3470 of SEQ ID NO: 317711
acaccuguccaagagaguu

SEQ ID NO: 506130 - RNA, 19 nt, Artificial Sequence
  Description of Artificial Sequence: Synthetic oligonucleotide
  Antisense strand to SEQ ID NO: 506129
aacucucuuggacaggugu

SEQ ID NO: 506131 - RNA, 19 nt, Artificial Sequence
  Description of Artificial Sequence: Synthetic oligonucleotide
  Sense strand starting at position 3519 of SEQ ID NO: 317711
guuggauuauacucauccu

SEQ ID NO: 506132 - RNA, 19 nt, Artificial Sequence
  Description of Artificial Sequence: Synthetic oligonucleotide
  Antisense strand to SEQ ID NO: 506131
aggaugaguauaauccaac

SEQ ID NO: 506133 - RNA, 19 nt, Artificial Sequence
  Description of Artificial Sequence: Synthetic oligonucleotide
  Sense strand starting at position 3558 of SEQ ID NO: 317711
cacaaugggucaguuaaug

SEQ ID NO: 506134 - RNA, 19 nt, Artificial Sequence
  Description of Artificial Sequence: Synthetic oligonucleotide
  Antisense strand to SEQ ID NO: 506133
cauuaacugacccauugug

SEQ ID NO: 506135 - RNA, 19 nt, Artificial Sequence
  Description of Artificial Sequence: Synthetic oligonucleotide
  Sense strand starting at position 3596 of SEQ ID NO: 317711
agcucaccauccuugagau

SEQ ID NO: 506136 - RNA, 19 nt, Artificial Sequence
  Description of Artificial Sequence: Synthetic oligonucleotide
  Antisense strand to SEQ ID NO: 506135
aucucaaggauggugagcu

SEQ ID NO: 506137 - RNA, 19 nt, Artificial Sequence
  Description of Artificial Sequence: Synthetic oligonucleotide
  Sense strand starting at position 3597 of SEQ ID NO: 317711
gcucaccauccuugagauu

SEQ ID NO: 506138 - RNA, 19 nt, Artificial Sequence
  Description of Artificial Sequence: Synthetic oligonucleotide
  Antisense strand to SEQ ID NO: 506137
aaucucaaggauggugagc

SEQ ID NO: 506139 - RNA, 19 nt, Artificial Sequence
  Description of Artificial Sequence: Synthetic oligonucleotide
  Sense strand starting at position 3606 of SEQ ID NO: 317711
ccuugagauuaccuaaugu

SEQ ID NO: 506140 - RNA, 19 nt, Artificial Sequence
  Description of Artificial Sequence: Synthetic oligonucleotide
  Antisense strand to SEQ ID NO: 506139
acauuagguaaucucaagg

SEQ ID NO: 506141 - RNA, 19 nt, Artificial Sequence
  Description of Artificial Sequence: Synthetic oligonucleotide
  Sense strand starting at position 3723 of SEQ ID NO: 317711
ccuugaucacucugacuag

SEQ ID NO: 506142 - RNA, 19 nt, Artificial Sequence
  Description of Artificial Sequence: Synthetic oligonucleotide
  Antisense strand to SEQ ID NO: 506141
cuagucagagugaucaagg

SEQ ID NO: 506143 - RNA, 19 nt, Artificial Sequence
  Description of Artificial Sequence: Synthetic oligonucleotide
  Sense strand starting at position 3883 of SEQ ID NO: 317711
gugaaugauuuacagacaa

SEQ ID NO: 506144 - RNA, 19 nt, Artificial Sequence
  Description of Artificial Sequence: Synthetic oligonucleotide
  Antisense strand to SEQ ID NO: 506143
uugucuguaaaucauucac

SEQ ID NO: 506145 - RNA, 19 nt, Artificial Sequence
  Description of Artificial Sequence: Synthetic oligonucleotide
  Sense strand starting at position 3919 of SEQ ID NO: 317711
ccugauaggguguaauauu

SEQ ID NO: 506146 - RNA, 19 nt, Artificial Sequence
  Description of Artificial Sequence: Synthetic oligonucleotide
  Antisense strand to SEQ ID NO: 506145
aauauuacacccuaucagg

SEQ ID NO: 506147 - RNA, 19 nt, Artificial Sequence
  Description of Artificial Sequence: Synthetic oligonucleotide
  Sense strand starting at position 341 of SEQ ID NO: 317712
cugagauauggagguugca

SEQ ID NO: 506148 - RNA, 19 nt, Artificial Sequence
  Description of Artificial Sequence: Synthetic oligonucleotide
  Antisense strand to SEQ ID NO: 506147
ugcaaccuccauaucucag

SEQ ID NO: 506149 - RNA, 19 nt, Artificial Sequence
  Description of Artificial Sequence: Synthetic oligonucleotide
  Sense strand starting at position 830 of SEQ ID NO: 317712
gaaaucuaccgaugugaaa

SEQ ID NO: 506150 - RNA, 19 nt, Artificial Sequence
  Description of Artificial Sequence: Synthetic oligonucleotide
  Antisense strand to SEQ ID NO: 506149
uuucacaucgguagauuuc

SEQ ID NO: 506151 - RNA, 19 nt, Artificial Sequence
  Description of Artificial Sequence: Synthetic oligonucleotide
  Sense strand starting at position 913 of SEQ ID NO: 317712
gccacuucucaugacagaa

SEQ ID NO: 506152 - RNA, 19 nt, Artificial Sequence
  Description of Artificial Sequence: Synthetic oligonucleotide
  Antisense strand to SEQ ID NO: 506151
uucugucaugagaaguggc

SEQ ID NO: 506153 - RNA, 19 nt, Artificial Sequence
  Description of Artificial Sequence: Synthetic oligonucleotide
  Sense strand starting at position 942 of SEQ ID NO: 317712
auagcuucucucggaugga

SEQ ID NO: 506154 - RNA, 19 nt, Artificial Sequence
  Description of Artificial Sequence: Synthetic oligonucleotide
  Antisense strand to SEQ ID NO: 506153
uccauccgagagaagcuau

SEQ ID NO: 506155 - RNA, 19 nt, Artificial Sequence
  Description of Artificial Sequence: Synthetic oligonucleotide
  Sense strand starting at position 1162 of SEQ ID NO: 317712
agugaaauaucaccaguga

SEQ ID NO: 506156 - RNA, 19 nt, Artificial Sequence
  Description of Artificial Sequence: Synthetic oligonucleotide
  Antisense strand to SEQ ID NO: 506155
ucacuggugauauuucacu

SEQ ID NO: 506157 - RNA, 19 nt, Artificial Sequence
  Description of Artificial Sequence: Synthetic oligonucleotide
  Sense strand starting at position 1199 of SEQ ID NO: 317712
gcaugugaauuauuaacau

SEQ ID NO: 506158 - RNA, 19 nt, Artificial Sequence
  Description of Artificial Sequence: Synthetic oligonucleotide
  Antisense strand to SEQ ID NO: 506157
auguuaauaauucacaugc

SEQ ID NO: 506159 - RNA, 19 nt, Artificial Sequence
  Description of Artificial Sequence: Synthetic oligonucleotide
  Sense strand starting at position 1243 of SEQ ID NO: 317712
gaagcuccgcuuuauuaag

SEQ ID NO: 506160 - RNA, 19 nt, Artificial Sequence
  Description of Artificial Sequence: Synthetic oligonucleotide
  Antisense strand to SEQ ID NO: 506159
cuuaauaaagcggagcuuc

SEQ ID NO: 506161 - RNA, 19 nt, Artificial Sequence
  Description of Artificial Sequence: Synthetic oligonucleotide
  Sense strand starting at position 1279 of SEQ ID NO: 317712
uuaggcaguucucccuaaa

SEQ ID NO: 506162 - RNA, 19 nt, Artificial Sequence
  Description of Artificial Sequence: Synthetic oligonucleotide
  Antisense strand to SEQ ID NO: 506161
uuuagggagaacugccuaa

SEQ ID NO: 506163 - RNA, 19 nt, Artificial Sequence
  Description of Artificial Sequence: Synthetic oligonucleotide
  Sense strand starting at position 1412 of SEQ ID NO: 317712
cuuguuuacuucucucaga

SEQ ID NO: 506164 - RNA, 19 nt, Artificial Sequence
  Description of Artificial Sequence: Synthetic oligonucleotide
  Antisense strand to SEQ ID NO: 506163
ucugagagaaguaaacaag

SEQ ID NO: 506165 - RNA, 19 nt, Artificial Sequence
  Description of Artificial Sequence: Synthetic oligonucleotide
  Sense strand starting at position 1413 of SEQ ID NO: 317712
uuguuuacuucucucagau

SEQ ID NO: 506166 - RNA, 19 nt, Artificial Sequence
  Description of Artificial Sequence: Synthetic oligonucleotide
  Antisense strand to SEQ ID NO: 506165
aucugagagaaguaaacaa

SEQ ID NO: 506167 - RNA, 19 nt, Artificial Sequence
  Description of Artificial Sequence: Synthetic oligonucleotide
  Sense strand starting at position 1505 of SEQ ID NO: 317712
gcaauuuccugaguggcaa

SEQ ID NO: 506168 - RNA, 19 nt, Artificial Sequence
  Description of Artificial Sequence: Synthetic oligonucleotide
  Antisense strand to SEQ ID NO: 506167
uugccacucaggaaauugc

SEQ ID NO: 506169 - RNA, 19 nt, Artificial Sequence
  Description of Artificial Sequence: Synthetic oligonucleotide
  Sense strand starting at position 1582 of SEQ ID NO: 317712
augaauggcucuuugaggu

SEQ ID NO: 506170 - RNA, 19 nt, Artificial Sequence
  Description of Artificial Sequence: Synthetic oligonucleotide
  Antisense strand to SEQ ID NO: 506169
accucaaagagccauucau

SEQ ID NO: 506171 - RNA, 19 nt, Artificial Sequence
  Description of Artificial Sequence: Synthetic oligonucleotide
  Sense strand starting at position 1727 of SEQ ID NO: 317712
cgcucucucccugagaaac

SEQ ID NO: 506172 - RNA, 19 nt, Artificial Sequence
  Description of Artificial Sequence: Synthetic oligonucleotide
  Antisense strand to SEQ ID NO: 506171
guuucucagggagagagcg

SEQ ID NO: 506173 - RNA, 19 nt, Artificial Sequence
  Description of Artificial Sequence: Synthetic oligonucleotide
  Sense strand starting at position 1846 of SEQ ID NO: 317712
ucccuaagcguguaacaaa

SEQ ID NO: 506174 - RNA, 19 nt, Artificial Sequence
  Description of Artificial Sequence: Synthetic oligonucleotide
  Antisense strand to SEQ ID NO: 506173
uuuguuacacgcuuaggga

SEQ ID NO: 506175 - RNA, 19 nt, Artificial Sequence
  Description of Artificial Sequence: Synthetic oligonucleotide
  Sense strand starting at position 1990 of SEQ ID NO: 317712
ggccgaaacccuggaauuc

SEQ ID NO: 506176 - RNA, 19 nt, Artificial Sequence
  Description of Artificial Sequence: Synthetic oligonucleotide
  Antisense strand to SEQ ID NO: 506175
gaauuccaggguuucggcc

SEQ ID NO: 506177 - RNA, 19 nt, Artificial Sequence
  Description of Artificial Sequence: Synthetic oligonucleotide
  Sense strand starting at position 1991 of SEQ ID NO: 317712
gccgaaacccuggaauucu

SEQ ID NO: 506178 - RNA, 19 nt, Artificial Sequence
  Description of Artificial Sequence: Synthetic oligonucleotide
  Antisense strand to SEQ ID NO: 506177
agaauuccaggguuucggc

SEQ ID NO: 506179 - RNA, 19 nt, Artificial Sequence
  Description of Artificial Sequence: Synthetic oligonucleotide
  Sense strand starting at position 2775 of SEQ ID NO: 317712
acuucuguucgcguucaga

SEQ ID NO: 506180 - RNA, 19 nt, Artificial Sequence
  Description of Artificial Sequence: Synthetic oligonucleotide
  Antisense strand to SEQ ID NO: 506179
ucugaacgcgaacagaagu

SEQ ID NO: 506181 - RNA, 19 nt, Artificial Sequence
  Description of Artificial Sequence: Synthetic oligonucleotide
  Sense strand starting at position 2777 of SEQ ID NO: 317712
uucuguucgcguucagaaa

SEQ ID NO: 506182 - RNA, 19 nt, Artificial Sequence
  Description of Artificial Sequence: Synthetic oligonucleotide
  Antisense strand to SEQ ID NO: 506181
uuucugaacgcgaacagaa

SEQ ID NO: 506183 - RNA, 19 nt, Artificial Sequence
  Description of Artificial Sequence: Synthetic oligonucleotide
  Sense strand starting at position 3207 of SEQ ID NO: 317712
aagugauauccucaggcca

SEQ ID NO: 506184 - RNA, 19 nt, Artificial Sequence
  Description of Artificial Sequence: Synthetic oligonucleotide
  Antisense strand to SEQ ID NO: 506183
uggccugaggauaucacuu

SEQ ID NO: 506185 - RNA, 19 nt, Artificial Sequence
  Description of Artificial Sequence: Synthetic oligonucleotide
  Sense strand starting at position 3221 of SEQ ID NO: 317712
ggccaauaauuguccauac

SEQ ID NO: 506186 - RNA, 19 nt, Artificial Sequence
  Description of Artificial Sequence: Synthetic oligonucleotide
  Antisense strand to SEQ ID NO: 506185
guauggacaauuauuggcc

SEQ ID NO: 506187 - RNA, 19 nt, Artificial Sequence
  Description of Artificial Sequence: Synthetic oligonucleotide
  Sense strand starting at position 3243 of SEQ ID NO: 317712
guaguaugaggucaaagac

SEQ ID NO: 506188 - RNA, 19 nt, Artificial Sequence
  Description of Artificial Sequence: Synthetic oligonucleotide
  Antisense strand to SEQ ID NO: 506187
gucuuugaccucauacuac

SEQ ID NO: 506189 - RNA, 19 nt, Artificial Sequence
  Description of Artificial Sequence: Synthetic oligonucleotide
  Sense strand starting at position 3267 of SEQ ID NO: 317712
auccuaaaggucugagauc

SEQ ID NO: 506190 - RNA, 19 nt, Artificial Sequence
  Description of Artificial Sequence: Synthetic oligonucleotide
  Antisense strand to SEQ ID NO: 506189
gaucucagaccuuuaggau

SEQ ID NO: 506191 - RNA, 19 nt, Artificial Sequence
  Description of Artificial Sequence: Synthetic oligonucleotide
  Sense strand starting at position 3380 of SEQ ID NO: 317712
guguguccagaagaacuau

SEQ ID NO: 506192 - RNA, 19 nt, Artificial Sequence
  Description of Artificial Sequence: Synthetic oligonucleotide
  Antisense strand to SEQ ID NO: 506191
auaguucuucuggacacac

SEQ ID NO: 506193 - RNA, 19 nt, Artificial Sequence
  Description of Artificial Sequence: Synthetic oligonucleotide
  Sense strand starting at position 3401 of SEQ ID NO: 317712
uuugcauugcauuaaugaa

SEQ ID NO: 506194 - RNA, 19 nt, Artificial Sequence
  Description of Artificial Sequence: Synthetic oligonucleotide
  Antisense strand to SEQ ID NO: 506193
uucauuaaugcaaugcaaa

SEQ ID NO: 506195 - RNA, 19 nt, Artificial Sequence
  Description of Artificial Sequence: Synthetic oligonucleotide
  Sense strand starting at position 3454 of SEQ ID NO: 317712
agggaauaauaguuaucuc

SEQ ID NO: 506196 - RNA, 19 nt, Artificial Sequence
  Description of Artificial Sequence: Synthetic oligonucleotide
  Antisense strand to SEQ ID NO: 506195
gagauaacuauuauucccu

SEQ ID NO: 506197 - RNA, 19 nt, Artificial Sequence
  Description of Artificial Sequence: Synthetic oligonucleotide
  Sense strand starting at position 3513 of SEQ ID NO: 317712
aggucauauaggcauuaug

SEQ ID NO: 506198 - RNA, 19 nt, Artificial Sequence
  Description of Artificial Sequence: Synthetic oligonucleotide
  Antisense strand to SEQ ID NO: 506197
cauaaugccuauaugaccu

SEQ ID NO: 506199 - RNA, 19 nt, Artificial Sequence
  Description of Artificial Sequence: Synthetic oligonucleotide
  Sense strand starting at position 3516 of SEQ ID NO: 317712
ucauauaggcauuauguaa

SEQ ID NO: 506200 - RNA, 19 nt, Artificial Sequence
  Description of Artificial Sequence: Synthetic oligonucleotide
  Antisense strand to SEQ ID NO: 506199
uuacauaaugccuauauga

SEQ ID NO: 506201 - RNA, 19 nt, Artificial Sequence
  Description of Artificial Sequence: Synthetic oligonucleotide
  Sense strand starting at position 3523 of SEQ ID NO: 317712
ggcauuauguaaguggaau

SEQ ID NO: 506202 - RNA, 19 nt, Artificial Sequence
  Description of Artificial Sequence: Synthetic oligonucleotide
  Antisense strand to SEQ ID NO: 506201
auuccacuuacauaaugcc

SEQ ID NO: 506203 - RNA, 19 nt, Artificial Sequence
  Description of Artificial Sequence: Synthetic oligonucleotide
  Sense strand starting at position 3524 of SEQ ID NO: 317712
gcauuauguaaguggaaug

SEQ ID NO: 506204 - RNA, 19 nt, Artificial Sequence
  Description of Artificial Sequence: Synthetic oligonucleotide
  Antisense strand to SEQ ID NO: 506203
cauuccacuuacauaaugc

SEQ ID NO: 506205 - RNA, 19 nt, Artificial Sequence
  Description of Artificial Sequence: Synthetic oligonucleotide
  Sense strand starting at position 3603 of SEQ ID NO: 317712
caggguuucucaguuacag

SEQ ID NO: 506206 - RNA, 19 nt, Artificial Sequence
  Description of Artificial Sequence: Synthetic oligonucleotide
  Antisense strand to SEQ ID NO: 506205
cuguaacugagaaacccug

SEQ ID NO: 506207 - RNA, 19 nt, Artificial Sequence
  Description of Artificial Sequence: Synthetic oligonucleotide
  Sense strand starting at position 3605 of SEQ ID NO: 317712
ggguuucucaguuacagca

SEQ ID NO: 506208 - RNA, 19 nt, Artificial Sequence
  Description of Artificial Sequence: Synthetic oligonucleotide
  Antisense strand to SEQ ID NO: 506207
ugcuguaacugagaaaccc

SEQ ID NO: 506209 - RNA, 19 nt, Artificial Sequence
  Description of Artificial Sequence: Synthetic oligonucleotide
  Sense strand starting at position 3615 of SEQ ID NO: 317712
guuacagcauuauugacau

SEQ ID NO: 506210 - RNA, 19 nt, Artificial Sequence
  Description of Artificial Sequence: Synthetic oligonucleotide
  Antisense strand to SEQ ID NO: 506209
augucaauaaugcuguaac

SEQ ID NO: 506211 - RNA, 19 nt, Artificial Sequence
  Description of Artificial Sequence: Synthetic oligonucleotide
  Sense strand starting at position 3781 of SEQ ID NO: 317712
uggcccuuggaguggaaau

SEQ ID NO: 506212 - RNA, 19 nt, Artificial Sequence
  Description of Artificial Sequence: Synthetic oligonucleotide
  Antisense strand to SEQ ID NO: 506211
auuuccacuccaagggcca

SEQ ID NO: 506213 - RNA, 19 nt, Artificial Sequence
  Description of Artificial Sequence: Synthetic oligonucleotide
  Sense strand starting at position 3794 of SEQ ID NO: 317712
ggaaaugacccugguugag

SEQ ID NO: 506214 - RNA, 19 nt, Artificial Sequence
  Description of Artificial Sequence: Synthetic oligonucleotide
  Antisense strand to SEQ ID NO: 506213
cucaaccagggucauuucc

SEQ ID NO: 506215 - RNA, 19 nt, Artificial Sequence
  Description of Artificial Sequence: Synthetic oligonucleotide
  Sense strand starting at position 3871 of SEQ ID NO: 317712
uauagaguuucucuuagag

SEQ ID NO: 506216 - RNA, 19 nt, Artificial Sequence
  Description of Artificial Sequence: Synthetic oligonucleotide
  Antisense strand to SEQ ID NO: 506215
cucuaagagaaacucuaua

SEQ ID NO: 506217 - RNA, 19 nt, Artificial Sequence
  Description of Artificial Sequence: Synthetic oligonucleotide
  Sense strand starting at position 3893 of SEQ ID NO: 317712
uauaaaguuccaugagagc

SEQ ID NO: 506218 - RNA, 19 nt, Artificial Sequence
  Description of Artificial Sequence: Synthetic oligonucleotide
  Antisense strand to SEQ ID NO: 506217
gcucucauggaacuuuaua

SEQ ID NO: 506219 - RNA, 19 nt, Artificial Sequence
  Description of Artificial Sequence: Synthetic oligonucleotide
  Sense strand starting at position 3907 of SEQ ID NO: 317712
agagcaugguccuugauga

SEQ ID NO: 506220 - RNA, 19 nt, Artificial Sequence
  Description of Artificial Sequence: Synthetic oligonucleotide
  Antisense strand to SEQ ID NO: 506219
ucaucaaggaccaugcucu

SEQ ID NO: 506221 - RNA, 19 nt, Artificial Sequence
  Description of Artificial Sequence: Synthetic oligonucleotide
  Sense strand starting at position 3908 of SEQ ID NO: 317712
gagcaugguccuugaugau

SEQ ID NO: 506222 - RNA, 19 nt, Artificial Sequence
  Description of Artificial Sequence: Synthetic oligonucleotide
  Antisense strand to SEQ ID NO: 506221
aucaucaaggaccaugcuc

SEQ ID NO: 506223 - RNA, 19 nt, Artificial Sequence
  Description of Artificial Sequence: Synthetic oligonucleotide
  Sense strand starting at position 3923 of SEQ ID NO: 317712
ugaugucucucacuaugga

SEQ ID NO: 506224 - RNA, 19 nt, Artificial Sequence
  Description of Artificial Sequence: Synthetic oligonucleotide
  Antisense strand to SEQ ID NO: 506223
uccauagugagagacauca

SEQ ID NO: 506225 - RNA, 19 nt, Artificial Sequence
  Description of Artificial Sequence: Synthetic oligonucleotide
  Sense strand starting at position 3958 of SEQ ID NO: 317712
guuccuaggccauaguaga

SEQ ID NO: 506226 - RNA, 19 nt, Artificial Sequence
  Description of Artificial Sequence: Synthetic oligonucleotide
  Antisense strand to SEQ ID NO: 506225
ucuacuauggccuaggaac

SEQ ID NO: 506227 - RNA, 19 nt, Artificial Sequence
  Description of Artificial Sequence: Synthetic oligonucleotide
  Sense strand starting at position 178 of SEQ ID NO: 317713
uuccaauacugucuuaagu

SEQ ID NO: 506228 - RNA, 19 nt, Artificial Sequence
  Description of Artificial Sequence: Synthetic oligonucleotide
  Antisense strand to SEQ ID NO: 506227
acuuaagacaguauuggaa

SEQ ID NO: 506229 - RNA, 19 nt, Artificial Sequence
  Description of Artificial Sequence: Synthetic oligonucleotide
  Sense strand starting at position 186 of SEQ ID NO: 317713
cugucuuaagugcaaacaa

SEQ ID NO: 506230 - RNA, 19 nt, Artificial Sequence
  Description of Artificial Sequence: Synthetic oligonucleotide
  Antisense strand to SEQ ID NO: 506229
uuguuugcacuuaagacag

SEQ ID NO: 506231 - RNA, 19 nt, Artificial Sequence
  Description of Artificial Sequence: Synthetic oligonucleotide
  Sense strand starting at position 285 of SEQ ID NO: 317713
uacgauuggucucugugga

SEQ ID NO: 506232 - RNA, 19 nt, Artificial Sequence
  Description of Artificial Sequence: Synthetic oligonucleotide
  Antisense strand to SEQ ID NO: 506231
uccacagagaccaaucgua

SEQ ID NO: 506233 - RNA, 19 nt, Artificial Sequence
  Description of Artificial Sequence: Synthetic oligonucleotide
  Sense strand starting at position 405 of SEQ ID NO: 317713
cacgccuugcucuagacau

SEQ ID NO: 506234 - RNA, 19 nt, Artificial Sequence
  Description of Artificial Sequence: Synthetic oligonucleotide
  Antisense strand to SEQ ID NO: 506233
augucuagagcaaggcgug

SEQ ID NO: 506235 - RNA, 19 nt, Artificial Sequence
  Description of Artificial Sequence: Synthetic oligonucleotide
  Sense strand starting at position 464 of SEQ ID NO: 317713
ggaugaggcccuggaaaua

SEQ ID NO: 506236 - RNA, 19 nt, Artificial Sequence
  Description of Artificial Sequence: Synthetic oligonucleotide
  Antisense strand to SEQ ID NO: 506235
uauuuccagggccucaucc

SEQ ID NO: 506237 - RNA, 19 nt, Artificial Sequence
  Description of Artificial Sequence: Synthetic oligonucleotide
  Sense strand starting at position 661 of SEQ ID NO: 317713
ggaucaaagucgucagccu

SEQ ID NO: 506238 - RNA, 19 nt, Artificial Sequence
  Description of Artificial Sequence: Synthetic oligonucleotide
  Antisense strand to SEQ ID NO: 506237
aggcugacgacuuugaucc

SEQ ID NO: 506239 - RNA, 19 nt, Artificial Sequence
  Description of Artificial Sequence: Synthetic oligonucleotide
  Sense strand starting at position 1178 of SEQ ID NO: 317713
ucugaccugucaucauagu

SEQ ID NO: 506240 - RNA, 19 nt, Artificial Sequence
  Description of Artificial Sequence: Synthetic oligonucleotide
  Antisense strand to SEQ ID NO: 506239
acuaugaugacaggucaga

SEQ ID NO: 506241 - RNA, 19 nt, Artificial Sequence
  Description of Artificial Sequence: Synthetic oligonucleotide
  Sense strand starting at position 1179 of SEQ ID NO: 317713
cugaccugucaucauagua

SEQ ID NO: 506242 - RNA, 19 nt, Artificial Sequence
  Description of Artificial Sequence: Synthetic oligonucleotide
  Antisense strand to SEQ ID NO: 506241
uacuaugaugacaggucag

SEQ ID NO: 506243 - RNA, 19 nt, Artificial Sequence
  Description of Artificial Sequence: Synthetic oligonucleotide
  Sense strand starting at position 1286 of SEQ ID NO: 317713
ucggcauaaucugcacaga

SEQ ID NO: 506244 - RNA, 19 nt, Artificial Sequence
  Description of Artificial Sequence: Synthetic oligonucleotide
  Antisense strand to SEQ ID NO: 506243
ucugugcagauuaugccga

SEQ ID NO: 506245 - RNA, 19 nt, Artificial Sequence
  Description of Artificial Sequence: Synthetic oligonucleotide
  Sense strand starting at position 1322 of SEQ ID NO: 317713
ccgcgugcucaggugcaaa

SEQ ID NO: 506246 - RNA, 19 nt, Artificial Sequence
  Description of Artificial Sequence: Synthetic oligonucleotide
  Antisense strand to SEQ ID NO: 506245
uuugcaccugagcacgcgg

SEQ ID NO: 506247 - RNA, 19 nt, Artificial Sequence
  Description of Artificial Sequence: Synthetic oligonucleotide
  Sense strand starting at position 1603 of SEQ ID NO: 317713
cgaucucccuccuagaaac

SEQ ID NO: 506248 - RNA, 19 nt, Artificial Sequence
  Description of Artificial Sequence: Synthetic oligonucleotide
  Antisense strand to SEQ ID NO: 506247
guuucuaggagggagaucg

SEQ ID NO: 506249 - RNA, 19 nt, Artificial Sequence
  Description of Artificial Sequence: Synthetic oligonucleotide
  Sense strand starting at position 1882 of SEQ ID NO: 317713
ccgguucccugcccgaaau

SEQ ID NO: 506250 - RNA, 19 nt, Artificial Sequence
  Description of Artificial Sequence: Synthetic oligonucleotide
  Antisense strand to SEQ ID NO: 506249
auuucgggcagggaaccgg

SEQ ID NO: 506251 - RNA, 19 nt, Artificial Sequence
  Description of Artificial Sequence: Synthetic oligonucleotide
  Sense strand starting at position 2834 of SEQ ID NO: 317713
ggcuguccuccagugcauu

SEQ ID NO: 506252 - RNA, 19 nt, Artificial Sequence
  Description of Artificial Sequence: Synthetic oligonucleotide
  Antisense strand to SEQ ID NO: 506251
aaugcacuggaggacagcc

SEQ ID NO: 506253 - RNA, 19 nt, Artificial Sequence
  Description of Artificial Sequence: Synthetic oligonucleotide
  Sense strand starting at position 2881 of SEQ ID NO: 317713
auaggauggcugcgcauua

SEQ ID NO: 506254 - RNA, 19 nt, Artificial Sequence
  Description of Artificial Sequence: Synthetic oligonucleotide
  Antisense strand to SEQ ID NO: 506253
uaaugcgcagccauccuau

SEQ ID NO: 506255 - RNA, 19 nt, Artificial Sequence
  Description of Artificial Sequence: Synthetic oligonucleotide
  Sense strand starting at position 2906 of SEQ ID NO: 317713
gcucuagucucagccgaaa

SEQ ID NO: 506256 - RNA, 19 nt, Artificial Sequence
  Description of Artificial Sequence: Synthetic oligonucleotide
  Antisense strand to SEQ ID NO: 506255
uuucggcugagacuagagc

SEQ ID NO: 506257 - RNA, 19 nt, Artificial Sequence
  Description of Artificial Sequence: Synthetic oligonucleotide
  Sense strand starting at position 2918 of SEQ ID NO: 317713
gccgaaagcugggugguua

SEQ ID NO: 506258 - RNA, 19 nt, Artificial Sequence
  Description of Artificial Sequence: Synthetic oligonucleotide
  Antisense strand to SEQ ID NO: 506257
uaaccacccagcuuucggc

SEQ ID NO: 506259 - RNA, 19 nt, Artificial Sequence
  Description of Artificial Sequence: Synthetic oligonucleotide
  Sense strand starting at position 2919 of SEQ ID NO: 317713
ccgaaagcugggugguuau

SEQ ID NO: 506260 - RNA, 19 nt, Artificial Sequence
  Description of Artificial Sequence: Synthetic oligonucleotide
  Antisense strand to SEQ ID NO: 506259
auaaccacccagcuuucgg

SEQ ID NO: 506261 - RNA, 19 nt, Artificial Sequence
  Description of Artificial Sequence: Synthetic oligonucleotide
  Sense strand starting at position 2926 of SEQ ID NO: 317713
cugggugguuauucuuuga

SEQ ID NO: 506262 - RNA, 19 nt, Artificial Sequence
  Description of Artificial Sequence: Synthetic oligonucleotide
  Antisense strand to SEQ ID NO: 506261
ucaaagaauaaccacccag

SEQ ID NO: 506263 - RNA, 19 nt, Artificial Sequence
  Description of Artificial Sequence: Synthetic oligonucleotide
  Sense strand starting at position 2930 of SEQ ID NO: 317713
gugguuauucuuugagcca

SEQ ID NO: 506264 - RNA, 19 nt, Artificial Sequence
  Description of Artificial Sequence: Synthetic oligonucleotide
  Antisense strand to SEQ ID NO: 506263
uggcucaaagaauaaccac

SEQ ID NO: 506265 - RNA, 19 nt, Artificial Sequence
  Description of Artificial Sequence: Synthetic oligonucleotide
  Sense strand starting at position 2985 of SEQ ID NO: 317713
cggacucgauguuaaauuu

SEQ ID NO: 506266 - RNA, 19 nt, Artificial Sequence
  Description of Artificial Sequence: Synthetic oligonucleotide
  Antisense strand to SEQ ID NO: 506265
aaauuuaacaucgaguccg

SEQ ID NO: 506267 - RNA, 19 nt, Artificial Sequence
  Description of Artificial Sequence: Synthetic oligonucleotide
  Sense strand starting at position 3149 of SEQ ID NO: 317713
ggauugaggucaggugaga

SEQ ID NO: 506268 - RNA, 19 nt, Artificial Sequence
  Description of Artificial Sequence: Synthetic oligonucleotide
  Antisense strand to SEQ ID NO: 506267
ucucaccugaccucaaucc

SEQ ID NO: 506269 - RNA, 19 nt, Artificial Sequence
  Description of Artificial Sequence: Synthetic oligonucleotide
  Sense strand starting at position 3253 of SEQ ID NO: 317713
ucagacacgucagcauaau

SEQ ID NO: 506270 - RNA, 19 nt, Artificial Sequence
  Description of Artificial Sequence: Synthetic oligonucleotide
  Antisense strand to SEQ ID NO: 506269
auuaugcugacgugucuga

SEQ ID NO: 506271 - RNA, 19 nt, Artificial Sequence
  Description of Artificial Sequence: Synthetic oligonucleotide
  Sense strand starting at position 3254 of SEQ ID NO: 317713
cagacacgucagcauaauu

SEQ ID NO: 506272 - RNA, 19 nt, Artificial Sequence
  Description of Artificial Sequence: Synthetic oligonucleotide
  Antisense strand to SEQ ID NO: 506271
aauuaugcugacgugucug

SEQ ID NO: 506273 - RNA, 19 nt, Artificial Sequence
  Description of Artificial Sequence: Synthetic oligonucleotide
  Sense strand starting at position 3316 of SEQ ID NO: 317713
uggcgacaccuguguaaac

SEQ ID NO: 506274 - RNA, 19 nt, Artificial Sequence
  Description of Artificial Sequence: Synthetic oligonucleotide
  Antisense strand to SEQ ID NO: 506273
guuuacacaggugucgcca

SEQ ID NO: 506275 - RNA, 19 nt, Artificial Sequence
  Description of Artificial Sequence: Synthetic oligonucleotide
  Sense strand starting at position 3317 of SEQ ID NO: 317713
ggcgacaccuguguaaaca

SEQ ID NO: 506276 - RNA, 19 nt, Artificial Sequence
  Description of Artificial Sequence: Synthetic oligonucleotide
  Antisense strand to SEQ ID NO: 506275
uguuuacacaggugucgcc

SEQ ID NO: 506277 - RNA, 19 nt, Artificial Sequence
  Description of Artificial Sequence: Synthetic oligonucleotide
  Sense strand starting at position 3411 of SEQ ID NO: 317713
cagagacgcuaggcauaau

SEQ ID NO: 506278 - RNA, 19 nt, Artificial Sequence
  Description of Artificial Sequence: Synthetic oligonucleotide
  Antisense strand to SEQ ID NO: 506277
auuaugccuagcgucucug

SEQ ID NO: 506279 - RNA, 19 nt, Artificial Sequence
  Description of Artificial Sequence: Synthetic oligonucleotide
  Sense strand starting at position 3423 of SEQ ID NO: 317713
gcauaaucacaccagagca

SEQ ID NO: 506280 - RNA, 19 nt, Artificial Sequence
  Description of Artificial Sequence: Synthetic oligonucleotide
  Antisense strand to SEQ ID NO: 506279
ugcucuggugugauuaugc

SEQ ID NO: 506281 - RNA, 19 nt, Artificial Sequence
  Description of Artificial Sequence: Synthetic oligonucleotide
  Sense strand starting at position 3707 of SEQ ID NO: 317713
ggaccaggucacuguugua

SEQ ID NO: 506282 - RNA, 19 nt, Artificial Sequence
  Description of Artificial Sequence: Synthetic oligonucleotide
  Antisense strand to SEQ ID NO: 506281
uacaacagugaccuggucc

SEQ ID NO: 506283 - RNA, 19 nt, Artificial Sequence
  Description of Artificial Sequence: Synthetic oligonucleotide
  Sense strand starting at position 3712 of SEQ ID NO: 317713
aggucacuguuguagaaag

SEQ ID NO: 506284 - RNA, 19 nt, Artificial Sequence
  Description of Artificial Sequence: Synthetic oligonucleotide
  Antisense strand to SEQ ID NO: 506283
cuuucuacaacagugaccu

SEQ ID NO: 506285 - RNA, 19 nt, Artificial Sequence
  Description of Artificial Sequence: Synthetic oligonucleotide
  Sense strand starting at position 3824 of SEQ ID NO: 317713
auuggagacuuguuacaau

SEQ ID NO: 506286 - RNA, 19 nt, Artificial Sequence
  Description of Artificial Sequence: Synthetic oligonucleotide
  Antisense strand to SEQ ID NO: 506285
auuguaacaagucuccaau

SEQ ID NO: 506287 - RNA, 19 nt, Artificial Sequence
  Description of Artificial Sequence: Synthetic oligonucleotide
  Sense strand starting at position 3827 of SEQ ID NO: 317713
ggagacuuguuacaaugca

SEQ ID NO: 506288 - RNA, 19 nt, Artificial Sequence
  Description of Artificial Sequence: Synthetic oligonucleotide
  Antisense strand to SEQ ID NO: 506287
ugcauuguaacaagucucc

SEQ ID NO: 506289 - RNA, 19 nt, Artificial Sequence
  Description of Artificial Sequence: Synthetic oligonucleotide
  Sense strand starting at position 3889 of SEQ ID NO: 317713
agugaaagccaacauuauu

SEQ ID NO: 506290 - RNA, 19 nt, Artificial Sequence
  Description of Artificial Sequence: Synthetic oligonucleotide
  Antisense strand to SEQ ID NO: 506289
aauaauguuggcuuucacu

SEQ ID NO: 506291 - RNA, 19 nt, Artificial Sequence
  Description of Artificial Sequence: Synthetic oligonucleotide
  Sense strand starting at position 3898 of SEQ ID NO: 317713
caacauuauugcgugcuua

SEQ ID NO: 506292 - RNA, 19 nt, Artificial Sequence
  Description of Artificial Sequence: Synthetic oligonucleotide
  Antisense strand to SEQ ID NO: 506291
uaagcacgcaauaauguug

SEQ ID NO: 506293 - RNA, 19 nt, Artificial Sequence
  Description of Artificial Sequence: Synthetic oligonucleotide
  Sense strand starting at position 3899 of SEQ ID NO: 317713
aacauuauugcgugcuuac

SEQ ID NO: 506294 - RNA, 19 nt, Artificial Sequence
  Description of Artificial Sequence: Synthetic oligonucleotide
  Antisense strand to SEQ ID NO: 506293
guaagcacgcaauaauguu

SEQ ID NO: 506295 - RNA, 19 nt, Artificial Sequence
  Description of Artificial Sequence: Synthetic oligonucleotide
  Sense strand starting at position 3902 of SEQ ID NO: 317713
auuauugcgugcuuacuau

SEQ ID NO: 506296 - RNA, 19 nt, Artificial Sequence
  Description of Artificial Sequence: Synthetic oligonucleotide
  Antisense strand to SEQ ID NO: 506295
auaguaagcacgcaauaau

SEQ ID NO: 506297 - RNA, 19 nt, Artificial Sequence
  Description of Artificial Sequence: Synthetic oligonucleotide
  Sense strand starting at position 3934 of SEQ ID NO: 317713
uccuaaacacuuugagugu

SEQ ID NO: 506298 - RNA, 19 nt, Artificial Sequence
  Description of Artificial Sequence: Synthetic oligonucleotide
  Antisense strand to SEQ ID NO: 506297
acacucaaaguguuuagga

SEQ ID NO: 506299 - RNA, 19 nt, Artificial Sequence
  Description of Artificial Sequence: Synthetic oligonucleotide
  Sense strand starting at position 3935 of SEQ ID NO: 317713
ccuaaacacuuugagugua

SEQ ID NO: 506300 - RNA, 19 nt, Artificial Sequence
  Description of Artificial Sequence: Synthetic oligonucleotide
  Antisense strand to SEQ ID NO: 506299
uacacucaaaguguuuagg

SEQ ID NO: 506301 - RNA, 19 nt, Artificial Sequence
  Description of Artificial Sequence: Synthetic oligonucleotide
  Sense strand starting at position 3940 of SEQ ID NO: 317713
acacuuugaguguauuaau

SEQ ID NO: 506302 - RNA, 19 nt, Artificial Sequence
  Description of Artificial Sequence: Synthetic oligonucleotide
  Antisense strand to SEQ ID NO: 506301
auuaauacacucaaagugu

SEQ ID NO: 506303 - RNA, 19 nt, Artificial Sequence
  Description of Artificial Sequence: Synthetic oligonucleotide
  Sense strand starting at position 3943 of SEQ ID NO: 317713
cuuugaguguauuaaugac

SEQ ID NO: 506304 - RNA, 19 nt, Artificial Sequence
  Description of Artificial Sequence: Synthetic oligonucleotide
  Antisense strand to SEQ ID NO: 506303
gucauuaauacacucaaag

SEQ ID NO: 506305 - RNA, 19 nt, Artificial Sequence
  Description of Artificial Sequence: Synthetic oligonucleotide
  Sense strand starting at position 3982 of SEQ ID NO: 317713
cgagaacucuuacuguugu

SEQ ID NO: 506306 - RNA, 19 nt, Artificial Sequence
  Description of Artificial Sequence: Synthetic oligonucleotide
  Antisense strand to SEQ ID NO: 506305
acaacaguaagaguucucg

SEQ ID NO: 506307 - RNA, 19 nt, Artificial Sequence
  Description of Artificial Sequence: Synthetic oligonucleotide
  Sense strand starting at position 20 of SEQ ID NO: 317714
uacgauuggucucugugga

SEQ ID NO: 506308 - RNA, 19 nt, Artificial Sequence
  Description of Artificial Sequence: Synthetic oligonucleotide
  Antisense strand to SEQ ID NO: 506307
uccacagagaccaaucgua

SEQ ID NO: 506309 - RNA, 19 nt, Artificial Sequence
  Description of Artificial Sequence: Synthetic oligonucleotide
  Sense strand starting at position 140 of SEQ ID NO: 317714
cacgccuugcucuagacau

SEQ ID NO: 506310 - RNA, 19 nt, Artificial Sequence
  Description of Artificial Sequence: Synthetic oligonucleotide
  Antisense strand to SEQ ID NO: 506309
augucuagagcaaggcgug

SEQ ID NO: 506311 - RNA, 19 nt, Artificial Sequence
  Description of Artificial Sequence: Synthetic oligonucleotide
  Sense strand starting at position 199 of SEQ ID NO: 317714
ggaugaggcccuggaaaua

SEQ ID NO: 506312 - RNA, 19 nt, Artificial Sequence
  Description of Artificial Sequence: Synthetic oligonucleotide
  Antisense strand to SEQ ID NO: 506311
uauuuccagggccucaucc

SEQ ID NO: 506313 - RNA, 19 nt, Artificial Sequence
  Description of Artificial Sequence: Synthetic oligonucleotide
  Sense strand starting at position 396 of SEQ ID NO: 317714
ggaucaaagucgucagccu

SEQ ID NO: 506314 - RNA, 19 nt, Artificial Sequence
  Description of Artificial Sequence: Synthetic oligonucleotide
  Antisense strand to SEQ ID NO: 506313
aggcugacgacuuugaucc

SEQ ID NO: 506315 - RNA, 19 nt, Artificial Sequence
  Description of Artificial Sequence: Synthetic oligonucleotide
  Sense strand starting at position 913 of SEQ ID NO: 317714
ucugaccugucaucauagu

SEQ ID NO: 506316 - RNA, 19 nt, Artificial Sequence
  Description of Artificial Sequence: Synthetic oligonucleotide
  Antisense strand to SEQ ID NO: 506315
acuaugaugacaggucaga

SEQ ID NO: 506317 - RNA, 19 nt, Artificial Sequence
  Description of Artificial Sequence: Synthetic oligonucleotide
  Sense strand starting at position 914 of SEQ ID NO: 317714
cugaccugucaucauagua

SEQ ID NO: 506318 - RNA, 19 nt, Artificial Sequence
  Description of Artificial Sequence: Synthetic oligonucleotide
  Antisense strand to SEQ ID NO: 506317
uacuaugaugacaggucag

SEQ ID NO: 506319 - RNA, 19 nt, Artificial Sequence
  Description of Artificial Sequence: Synthetic oligonucleotide
  Sense strand starting at position 1021 of SEQ ID NO: 317714
ucggcauaaucugcacaga

SEQ ID NO: 506320 - RNA, 19 nt, Artificial Sequence
  Description of Artificial Sequence: Synthetic oligonucleotide
  Antisense strand to SEQ ID NO: 506319
ucugugcagauuaugccga

SEQ ID NO: 506321 - RNA, 19 nt, Artificial Sequence
  Description of Artificial Sequence: Synthetic oligonucleotide
  Sense strand starting at position 1057 of SEQ ID NO: 317714
ccgcgugcucaggugcaaa

SEQ ID NO: 506322 - RNA, 19 nt, Artificial Sequence
  Description of Artificial Sequence: Synthetic oligonucleotide
  Antisense strand to SEQ ID NO: 506321
uuugcaccugagcacgcgg

SEQ ID NO: 506323 - RNA, 19 nt, Artificial Sequence
  Description of Artificial Sequence: Synthetic oligonucleotide
  Sense strand starting at position 1338 of SEQ ID NO: 317714
cgaucucccuccuagaaac

SEQ ID NO: 506324 - RNA, 19 nt, Artificial Sequence
  Description of Artificial Sequence: Synthetic oligonucleotide
  Antisense strand to SEQ ID NO: 506323
guuucuaggagggagaucg

SEQ ID NO: 506325 - RNA, 19 nt, Artificial Sequence
  Description of Artificial Sequence: Synthetic oligonucleotide
  Sense strand starting at position 1617 of SEQ ID NO: 317714
ccgguucccugcccgaaau

SEQ ID NO: 506326 - RNA, 19 nt, Artificial Sequence
  Description of Artificial Sequence: Synthetic oligonucleotide
  Antisense strand to SEQ ID NO: 506325
auuucgggcagggaaccgg

SEQ ID NO: 506327 - RNA, 19 nt, Artificial Sequence
  Description of Artificial Sequence: Synthetic oligonucleotide
  Sense strand starting at position 2569 of SEQ ID NO: 317714
ggcuguccuccagugcauu

SEQ ID NO: 506328 - RNA, 19 nt, Artificial Sequence
  Description of Artificial Sequence: Synthetic oligonucleotide
  Antisense strand to SEQ ID NO: 506327
aaugcacuggaggacagcc

SEQ ID NO: 506329 - RNA, 19 nt, Artificial Sequence
  Description of Artificial Sequence: Synthetic oligonucleotide
  Sense strand starting at position 2616 of SEQ ID NO: 317714
auaggauggcugcgcauua

SEQ ID NO: 506330 - RNA, 19 nt, Artificial Sequence
  Description of Artificial Sequence: Synthetic oligonucleotide
  Antisense strand to SEQ ID NO: 506329
uaaugcgcagccauccuau

SEQ ID NO: 506331 - RNA, 19 nt, Artificial Sequence
  Description of Artificial Sequence: Synthetic oligonucleotide
  Sense strand starting at position 2641 of SEQ ID NO: 317714
gcucuagucucagccgaaa

SEQ ID NO: 506332 - RNA, 19 nt, Artificial Sequence
  Description of Artificial Sequence: Synthetic oligonucleotide
  Antisense strand to SEQ ID NO: 506331
uuucggcugagacuagagc

SEQ ID NO: 506333 - RNA, 19 nt, Artificial Sequence
  Description of Artificial Sequence: Synthetic oligonucleotide
  Sense strand starting at position 2653 of SEQ ID NO: 317714
gccgaaagcugggugguua

SEQ ID NO: 506334 - RNA, 19 nt, Artificial Sequence
  Description of Artificial Sequence: Synthetic oligonucleotide
  Antisense strand to SEQ ID NO: 506333
uaaccacccagcuuucggc

SEQ ID NO: 506335 - RNA, 19 nt, Artificial Sequence
  Description of Artificial Sequence: Synthetic oligonucleotide
  Sense strand starting at position 2654 of SEQ ID NO: 317714
ccgaaagcugggugguuau

SEQ ID NO: 506336 - RNA, 19 nt, Artificial Sequence
  Description of Artificial Sequence: Synthetic oligonucleotide
  Antisense strand to SEQ ID NO: 506335
auaaccacccagcuuucgg

SEQ ID NO: 506337 - RNA, 19 nt, Artificial Sequence
  Description of Artificial Sequence: Synthetic oligonucleotide
  Sense strand starting at position 2661 of SEQ ID NO: 317714
cugggugguuauucuuuga

SEQ ID NO: 506338 - RNA, 19 nt, Artificial Sequence
  Description of Artificial Sequence: Synthetic oligonucleotide
  Antisense strand to SEQ ID NO: 506337
ucaaagaauaaccacccag

SEQ ID NO: 506339 - RNA, 19 nt, Artificial Sequence
  Description of Artificial Sequence: Synthetic oligonucleotide
  Sense strand starting at position 2665 of SEQ ID NO: 317714
gugguuauucuuugagcca

SEQ ID NO: 506340 - RNA, 19 nt, Artificial Sequence
  Description of Artificial Sequence: Synthetic oligonucleotide
  Antisense strand to SEQ ID NO: 506339
uggcucaaagaauaaccac

SEQ ID NO: 506341 - RNA, 19 nt, Artificial Sequence
  Description of Artificial Sequence: Synthetic oligonucleotide
  Sense strand starting at position 2720 of SEQ ID NO: 317714
cggacucgauguuaaauuu

SEQ ID NO: 506342 - RNA, 19 nt, Artificial Sequence
  Description of Artificial Sequence: Synthetic oligonucleotide
  Antisense strand to SEQ ID NO: 506341
aaauuuaacaucgaguccg

SEQ ID NO: 506343 - RNA, 19 nt, Artificial Sequence
  Description of Artificial Sequence: Synthetic oligonucleotide
  Sense strand starting at position 2884 of SEQ ID NO: 317714
ggauugaggucaggugaga

SEQ ID NO: 506344 - RNA, 19 nt, Artificial Sequence
  Description of Artificial Sequence: Synthetic oligonucleotide
  Antisense strand to SEQ ID NO: 506343
ucucaccugaccucaaucc

SEQ ID NO: 506345 - RNA, 19 nt, Artificial Sequence
  Description of Artificial Sequence: Synthetic oligonucleotide
  Sense strand starting at position 2988 of SEQ ID NO: 317714
ucagacacgucagcauaau

SEQ ID NO: 506346 - RNA, 19 nt, Artificial Sequence
  Description of Artificial Sequence: Synthetic oligonucleotide
  Antisense strand to SEQ ID NO: 506345
auuaugcugacgugucuga

SEQ ID NO: 506347 - RNA, 19 nt, Artificial Sequence
  Description of Artificial Sequence: Synthetic oligonucleotide
  Sense strand starting at position 2989 of SEQ ID NO: 317714
cagacacgucagcauaauu

SEQ ID NO: 506348 - RNA, 19 nt, Artificial Sequence
  Description of Artificial Sequence: Synthetic oligonucleotide
  Antisense strand to SEQ ID NO: 506347
aauuaugcugacgugucug

SEQ ID NO: 506349 - RNA, 19 nt, Artificial Sequence
  Description of Artificial Sequence: Synthetic oligonucleotide
  Sense strand starting at position 3051 of SEQ ID NO: 317714
uggcgacaccuguguaaac

SEQ ID NO: 506350 - RNA, 19 nt, Artificial Sequence
  Description of Artificial Sequence: Synthetic oligonucleotide
  Antisense strand to SEQ ID NO: 506349
guuuacacaggugucgcca

SEQ ID NO: 506351 - RNA, 19 nt, Artificial Sequence
  Description of Artificial Sequence: Synthetic oligonucleotide
  Sense strand starting at position 3052 of SEQ ID NO: 317714
ggcgacaccuguguaaaca

SEQ ID NO: 506352 - RNA, 19 nt, Artificial Sequence
  Description of Artificial Sequence: Synthetic oligonucleotide
  Antisense strand to SEQ ID NO: 506351
uguuuacacaggugucgcc

SEQ ID NO: 506353 - RNA, 19 nt, Artificial Sequence
  Description of Artificial Sequence: Synthetic oligonucleotide
  Sense strand starting at position 3146 of SEQ ID NO: 317714
cagagacgcuaggcauaau

SEQ ID NO: 506354 - RNA, 19 nt, Artificial Sequence
  Description of Artificial Sequence: Synthetic oligonucleotide
  Antisense strand to SEQ ID NO: 506353
auuaugccuagcgucucug

SEQ ID NO: 506355 - RNA, 19 nt, Artificial Sequence
  Description of Artificial Sequence: Synthetic oligonucleotide
  Sense strand starting at position 3158 of SEQ ID NO: 317714
gcauaaucacaccagagca

SEQ ID NO: 506356 - RNA, 19 nt, Artificial Sequence
  Description of Artificial Sequence: Synthetic oligonucleotide
  Antisense strand to SEQ ID NO: 506355
ugcucuggugugauuaugc

SEQ ID NO: 506357 - RNA, 19 nt, Artificial Sequence
  Description of Artificial Sequence: Synthetic oligonucleotide
  Sense strand starting at position 3442 of SEQ ID NO: 317714
ggaccaggucacuguugua

SEQ ID NO: 506358 - RNA, 19 nt, Artificial Sequence
  Description of Artificial Sequence: Synthetic oligonucleotide
  Antisense strand to SEQ ID NO: 506357
uacaacagugaccuggucc

SEQ ID NO: 506359 - RNA, 19 nt, Artificial Sequence
  Description of Artificial Sequence: Synthetic oligonucleotide
  Sense strand starting at position 3447 of SEQ ID NO: 317714
aggucacuguuguagaaag

SEQ ID NO: 506360 - RNA, 19 nt, Artificial Sequence
  Description of Artificial Sequence: Synthetic oligonucleotide
  Antisense strand to SEQ ID NO: 506359
cuuucuacaacagugaccu

SEQ ID NO: 506361 - RNA, 19 nt, Artificial Sequence
  Description of Artificial Sequence: Synthetic oligonucleotide
  Sense strand starting at position 3559 of SEQ ID NO: 317714
auuggagacuuguuacaau

SEQ ID NO: 506362 - RNA, 19 nt, Artificial Sequence
  Description of Artificial Sequence: Synthetic oligonucleotide
  Antisense strand to SEQ ID NO: 506361
auuguaacaagucuccaau

SEQ ID NO: 506363 - RNA, 19 nt, Artificial Sequence
  Description of Artificial Sequence: Synthetic oligonucleotide
  Sense strand starting at position 3562 of SEQ ID NO: 317714
ggagacuuguuacaaugca

SEQ ID NO: 506364 - RNA, 19 nt, Artificial Sequence
  Description of Artificial Sequence: Synthetic oligonucleotide
  Antisense strand to SEQ ID NO: 506363
ugcauuguaacaagucucc

SEQ ID NO: 506365 - RNA, 19 nt, Artificial Sequence
  Description of Artificial Sequence: Synthetic oligonucleotide
  Sense strand starting at position 3624 of SEQ ID NO: 317714
agugaaagccaacauuauu

SEQ ID NO: 506366 - RNA, 19 nt, Artificial Sequence
  Description of Artificial Sequence: Synthetic oligonucleotide
  Antisense strand to SEQ ID NO: 506365
aauaauguuggcuuucacu

SEQ ID NO: 506367 - RNA, 19 nt, Artificial Sequence
  Description of Artificial Sequence: Synthetic oligonucleotide
  Sense strand starting at position 3633 of SEQ ID NO: 317714
caacauuauugcgugcuua

SEQ ID NO: 506368 - RNA, 19 nt, Artificial Sequence
  Description of Artificial Sequence: Synthetic oligonucleotide
  Antisense strand to SEQ ID NO: 506367
uaagcacgcaauaauguug

SEQ ID NO: 506369 - RNA, 19 nt, Artificial Sequence
  Description of Artificial Sequence: Synthetic oligonucleotide
  Sense strand starting at position 3634 of SEQ ID NO: 317714
aacauuauugcgugcuuac

SEQ ID NO: 506370 - RNA, 19 nt, Artificial Sequence
  Description of Artificial Sequence: Synthetic oligonucleotide
  Antisense strand to SEQ ID NO: 506369
guaagcacgcaauaauguu

SEQ ID NO: 506371 - RNA, 19 nt, Artificial Sequence
  Description of Artificial Sequence: Synthetic oligonucleotide
  Sense strand starting at position 3637 of SEQ ID NO: 317714
auuauugcgugcuuacuau

SEQ ID NO: 506372 - RNA, 19 nt, Artificial Sequence
  Description of Artificial Sequence: Synthetic oligonucleotide
  Antisense strand to SEQ ID NO: 506371
auaguaagcacgcaauaau

SEQ ID NO: 506373 - RNA, 19 nt, Artificial Sequence
  Description of Artificial Sequence: Synthetic oligonucleotide
  Sense strand starting at position 3669 of SEQ ID NO: 317714
uccuaaacacuuugagugu

SEQ ID NO: 506374 - RNA, 19 nt, Artificial Sequence
  Description of Artificial Sequence: Synthetic oligonucleotide
  Antisense strand to SEQ ID NO: 506373
acacucaaaguguuuagga

SEQ ID NO: 506375 - RNA, 19 nt, Artificial Sequence
  Description of Artificial Sequence: Synthetic oligonucleotide
  Sense strand starting at position 3675 of SEQ ID NO: 317714
acacuuugaguguauuaau

SEQ ID NO: 506376 - RNA, 19 nt, Artificial Sequence
  Description of Artificial Sequence: Synthetic oligonucleotide
  Antisense strand to SEQ ID NO: 506375
auuaauacacucaaagugu

SEQ ID NO: 506377 - RNA, 19 nt, Artificial Sequence
  Description of Artificial Sequence: Synthetic oligonucleotide
  Sense strand starting at position 3717 of SEQ ID NO: 317714
cgagaacucuuacuguugu

SEQ ID NO: 506378 - RNA, 19 nt, Artificial Sequence
  Description of Artificial Sequence: Synthetic oligonucleotide
  Antisense strand to SEQ ID NO: 506377
acaacaguaagaguucucg

SEQ ID NO: 506379 - RNA, 19 nt, Artificial Sequence
  Description of Artificial Sequence: Synthetic oligonucleotide
  Sense strand starting at position 3863 of SEQ ID NO: 317714
gggcuuucuuauguauugu

SEQ ID NO: 506380 - RNA, 19 nt, Artificial Sequence
  Description of Artificial Sequence: Synthetic oligonucleotide
  Antisense strand to SEQ ID NO: 506379
acaauacauaagaaagccc

SEQ ID NO: 506381 - RNA, 19 nt, Artificial Sequence
  Description of Artificial Sequence: Synthetic oligonucleotide
  Sense strand starting at position 3869 of SEQ ID NO: 317714
ucuuauguauugucugagu

SEQ ID NO: 506382 - RNA, 19 nt, Artificial Sequence
  Description of Artificial Sequence: Synthetic oligonucleotide
  Antisense strand to SEQ ID NO: 506381
acucagacaauacauaaga

SEQ ID NO: 506383 - RNA, 19 nt, Artificial Sequence
  Description of Artificial Sequence: Synthetic oligonucleotide
  Sense strand starting at position 3871 of SEQ ID NO: 317714
uuauguauugucugaguuu

SEQ ID NO: 506384 - RNA, 19 nt, Artificial Sequence
  Description of Artificial Sequence: Synthetic oligonucleotide
  Antisense strand to SEQ ID NO: 506383
aaacucagacaauacauaa

SEQ ID NO: 506385 - RNA, 19 nt, Artificial Sequence
  Description of Artificial Sequence: Synthetic oligonucleotide
  Sense strand starting at position 3928 of SEQ ID NO: 317714
agaucauuuauguguguuu

SEQ ID NO: 506386 - RNA, 19 nt, Artificial Sequence
  Description of Artificial Sequence: Synthetic oligonucleotide
  Antisense strand to SEQ ID NO: 506385
aaacacacauaaaugaucu

SEQ ID NO: 506387 - RNA, 19 nt, Artificial Sequence
  Description of Artificial Sequence: Synthetic oligonucleotide
  Sense strand starting at position 426 of SEQ ID NO: 317715
augacauagcuuugacacu

SEQ ID NO: 506388 - RNA, 19 nt, Artificial Sequence
  Description of Artificial Sequence: Synthetic oligonucleotide
  Antisense strand to SEQ ID NO: 506387
agugucaaagcuaugucau

SEQ ID NO: 506389 - RNA, 19 nt, Artificial Sequence
  Description of Artificial Sequence: Synthetic oligonucleotide
  Sense strand starting at position 463 of SEQ ID NO: 317715
ucacgucuacaucauuauu

SEQ ID NO: 506390 - RNA, 19 nt, Artificial Sequence
  Description of Artificial Sequence: Synthetic oligonucleotide
  Antisense strand to SEQ ID NO: 506389
aauaaugauguagacguga

SEQ ID NO: 506391 - RNA, 19 nt, Artificial Sequence
  Description of Artificial Sequence: Synthetic oligonucleotide
  Sense strand starting at position 670 of SEQ ID NO: 317715
cuuauuauacuaggguaaa

SEQ ID NO: 506392 - RNA, 19 nt, Artificial Sequence
  Description of Artificial Sequence: Synthetic oligonucleotide
  Antisense strand to SEQ ID NO: 506391
uuuacccuaguauaauaag

SEQ ID NO: 506393 - RNA, 19 nt, Artificial Sequence
  Description of Artificial Sequence: Synthetic oligonucleotide
  Sense strand starting at position 703 of SEQ ID NO: 317715
ccugcacuuccauagaaug

SEQ ID NO: 506394 - RNA, 19 nt, Artificial Sequence
  Description of Artificial Sequence: Synthetic oligonucleotide
  Antisense strand to SEQ ID NO: 506393
cauucuauggaagugcagg

SEQ ID NO: 506395 - RNA, 19 nt, Artificial Sequence
  Description of Artificial Sequence: Synthetic oligonucleotide
  Sense strand starting at position 714 of SEQ ID NO: 317715
auagaauguaucgaaguau

SEQ ID NO: 506396 - RNA, 19 nt, Artificial Sequence
  Description of Artificial Sequence: Synthetic oligonucleotide
  Antisense strand to SEQ ID NO: 506395
auacuucgauacauucuau

SEQ ID NO: 506397 - RNA, 19 nt, Artificial Sequence
  Description of Artificial Sequence: Synthetic oligonucleotide
  Sense strand starting at position 725 of SEQ ID NO: 317715
cgaaguauggcucagauua

SEQ ID NO: 506398 - RNA, 19 nt, Artificial Sequence
  Description of Artificial Sequence: Synthetic oligonucleotide
  Antisense strand to SEQ ID NO: 506397
uaaucugagccauacuucg

SEQ ID NO: 506399 - RNA, 19 nt, Artificial Sequence
  Description of Artificial Sequence: Synthetic oligonucleotide
  Sense strand starting at position 1064 of SEQ ID NO: 317715
uucugucuagcuuaagaag

SEQ ID NO: 506400 - RNA, 19 nt, Artificial Sequence
  Description of Artificial Sequence: Synthetic oligonucleotide
  Antisense strand to SEQ ID NO: 506399
cuucuuaagcuagacagaa

SEQ ID NO: 506401 - RNA, 19 nt, Artificial Sequence
  Description of Artificial Sequence: Synthetic oligonucleotide
  Sense strand starting at position 1076 of SEQ ID NO: 317715
uaagaagaguucuuaguug

SEQ ID NO: 506402 - RNA, 19 nt, Artificial Sequence
  Description of Artificial Sequence: Synthetic oligonucleotide
  Antisense strand to SEQ ID NO: 506401
caacuaagaacucuucuua

SEQ ID NO: 506403 - RNA, 19 nt, Artificial Sequence
  Description of Artificial Sequence: Synthetic oligonucleotide
  Sense strand starting at position 1080 of SEQ ID NO: 317715
aagaguucuuaguugaaug

SEQ ID NO: 506404 - RNA, 19 nt, Artificial Sequence
  Description of Artificial Sequence: Synthetic oligonucleotide
  Antisense strand to SEQ ID NO: 506403
cauucaacuaagaacucuu

SEQ ID NO: 506405 - RNA, 19 nt, Artificial Sequence
  Description of Artificial Sequence: Synthetic oligonucleotide
  Sense strand starting at position 1081 of SEQ ID NO: 317715
agaguucuuaguugaauga

SEQ ID NO: 506406 - RNA, 19 nt, Artificial Sequence
  Description of Artificial Sequence: Synthetic oligonucleotide
  Antisense strand to SEQ ID NO: 506405
ucauucaacuaagaacucu

SEQ ID NO: 506407 - RNA, 19 nt, Artificial Sequence
  Description of Artificial Sequence: Synthetic oligonucleotide
  Sense strand starting at position 1275 of SEQ ID NO: 317715
augucuguugaauacaagu

SEQ ID NO: 506408 - RNA, 19 nt, Artificial Sequence
  Description of Artificial Sequence: Synthetic oligonucleotide
  Antisense strand to SEQ ID NO: 506407
acuuguauucaacagacau

SEQ ID NO: 506409 - RNA, 19 nt, Artificial Sequence
  Description of Artificial Sequence: Synthetic oligonucleotide
  Sense strand starting at position 1320 of SEQ ID NO: 317715
ucaguaucucuugaguuaa

SEQ ID NO: 506410 - RNA, 19 nt, Artificial Sequence
  Description of Artificial Sequence: Synthetic oligonucleotide
  Antisense strand to SEQ ID NO: 506409
uuaacucaagagauacuga

SEQ ID NO: 506411 - RNA, 19 nt, Artificial Sequence
  Description of Artificial Sequence: Synthetic oligonucleotide
  Sense strand starting at position 1322 of SEQ ID NO: 317715
aguaucucuugaguuaaug

SEQ ID NO: 506412 - RNA, 19 nt, Artificial Sequence
  Description of Artificial Sequence: Synthetic oligonucleotide
  Antisense strand to SEQ ID NO: 506411
cauuaacucaagagauacu

SEQ ID NO: 506413 - RNA, 19 nt, Artificial Sequence
  Description of Artificial Sequence: Synthetic oligonucleotide
  Sense strand starting at position 1330 of SEQ ID NO: 317715
uugaguuaaugaccugguu

SEQ ID NO: 506414 - RNA, 19 nt, Artificial Sequence
  Description of Artificial Sequence: Synthetic oligonucleotide
  Antisense strand to SEQ ID NO: 506413
aaccaggucauuaacucaa

SEQ ID NO: 506415 - RNA, 19 nt, Artificial Sequence
  Description of Artificial Sequence: Synthetic oligonucleotide
  Sense strand starting at position 1333 of SEQ ID NO: 317715
aguuaaugaccugguuaac

SEQ ID NO: 506416 - RNA, 19 nt, Artificial Sequence
  Description of Artificial Sequence: Synthetic oligonucleotide
  Antisense strand to SEQ ID NO: 506415
guuaaccaggucauuaacu

SEQ ID NO: 506417 - RNA, 19 nt, Artificial Sequence
  Description of Artificial Sequence: Synthetic oligonucleotide
  Sense strand starting at position 1440 of SEQ ID NO: 317715
gcaguauaugggcauacua

SEQ ID NO: 506418 - RNA, 19 nt, Artificial Sequence
  Description of Artificial Sequence: Synthetic oligonucleotide
  Antisense strand to SEQ ID NO: 506417
uaguaugcccauauacugc

SEQ ID NO: 506419 - RNA, 19 nt, Artificial Sequence
  Description of Artificial Sequence: Synthetic oligonucleotide
  Sense strand starting at position 1442 of SEQ ID NO: 317715
aguauaugggcauacuaau

SEQ ID NO: 506420 - RNA, 19 nt, Artificial Sequence
  Description of Artificial Sequence: Synthetic oligonucleotide
  Antisense strand to SEQ ID NO: 506419
auuaguaugcccauauacu

SEQ ID NO: 506421 - RNA, 19 nt, Artificial Sequence
  Description of Artificial Sequence: Synthetic oligonucleotide
  Sense strand starting at position 1451 of SEQ ID NO: 317715
gcauacuaaucacuggaga

SEQ ID NO: 506422 - RNA, 19 nt, Artificial Sequence
  Description of Artificial Sequence: Synthetic oligonucleotide
  Antisense strand to SEQ ID NO: 506421
ucuccagugauuaguaugc

SEQ ID NO: 506423 - RNA, 19 nt, Artificial Sequence
  Description of Artificial Sequence: Synthetic oligonucleotide
  Sense strand starting at position 1671 of SEQ ID NO: 317715
cagucuggccgggagaauu

SEQ ID NO: 506424 - RNA, 19 nt, Artificial Sequence
  Description of Artificial Sequence: Synthetic oligonucleotide
  Antisense strand to SEQ ID NO: 506423
aauucucccggccagacug

SEQ ID NO: 506425 - RNA, 19 nt, Artificial Sequence
  Description of Artificial Sequence: Synthetic oligonucleotide
  Sense strand starting at position 1727 of SEQ ID NO: 317715
gaaauuaagcaaggcugua

SEQ ID NO: 506426 - RNA, 19 nt, Artificial Sequence
  Description of Artificial Sequence: Synthetic oligonucleotide
  Antisense strand to SEQ ID NO: 506425
uacagccuugcuuaauuuc

SEQ ID NO: 506427 - RNA, 19 nt, Artificial Sequence
  Description of Artificial Sequence: Synthetic oligonucleotide
  Sense strand starting at position 2518 of SEQ ID NO: 317715
gucaguugcgugucuucau

SEQ ID NO: 506428 - RNA, 19 nt, Artificial Sequence
  Description of Artificial Sequence: Synthetic oligonucleotide
  Antisense strand to SEQ ID NO: 506427
augaagacacgcaacugac

SEQ ID NO: 506429 - RNA, 19 nt, Artificial Sequence
  Description of Artificial Sequence: Synthetic oligonucleotide
  Sense strand starting at position 2577 of SEQ ID NO: 317715
aggaaaccguagcuuagau

SEQ ID NO: 506430 - RNA, 19 nt, Artificial Sequence
  Description of Artificial Sequence: Synthetic oligonucleotide
  Antisense strand to SEQ ID NO: 506429
aucuaagcuacgguuuccu

SEQ ID NO: 506431 - RNA, 19 nt, Artificial Sequence
  Description of Artificial Sequence: Synthetic oligonucleotide
  Sense strand starting at position 2579 of SEQ ID NO: 317715
gaaaccguagcuuagauaa

SEQ ID NO: 506432 - RNA, 19 nt, Artificial Sequence
  Description of Artificial Sequence: Synthetic oligonucleotide
  Antisense strand to SEQ ID NO: 506431
uuaucuaagcuacgguuuc

SEQ ID NO: 506433 - RNA, 19 nt, Artificial Sequence
  Description of Artificial Sequence: Synthetic oligonucleotide
  Sense strand starting at position 2761 of SEQ ID NO: 317715
ggcgauccgccgagaaguu

SEQ ID NO: 506434 - RNA, 19 nt, Artificial Sequence
  Description of Artificial Sequence: Synthetic oligonucleotide
  Antisense strand to SEQ ID NO: 506433
aacuucucggcggaucgcc

SEQ ID NO: 506435 - RNA, 19 nt, Artificial Sequence
  Description of Artificial Sequence: Synthetic oligonucleotide
  Sense strand starting at position 2883 of SEQ ID NO: 317715
ccuugacaacguuaggaau

SEQ ID NO: 506436 - RNA, 19 nt, Artificial Sequence
  Description of Artificial Sequence: Synthetic oligonucleotide
  Antisense strand to SEQ ID NO: 506435
auuccuaacguugucaagg

SEQ ID NO: 506437 - RNA, 19 nt, Artificial Sequence
  Description of Artificial Sequence: Synthetic oligonucleotide
  Sense strand starting at position 3036 of SEQ ID NO: 317715
gccuuuaagccugugccau

SEQ ID NO: 506438 - RNA, 19 nt, Artificial Sequence
  Description of Artificial Sequence: Synthetic oligonucleotide
  Antisense strand to SEQ ID NO: 506437
auggcacaggcuuaaaggc

SEQ ID NO: 506439 - RNA, 19 nt, Artificial Sequence
  Description of Artificial Sequence: Synthetic oligonucleotide
  Sense strand starting at position 3042 of SEQ ID NO: 317715
aagccugugccauagauac

SEQ ID NO: 506440 - RNA, 19 nt, Artificial Sequence
  Description of Artificial Sequence: Synthetic oligonucleotide
  Antisense strand to SEQ ID NO: 506439
guaucuauggcacaggcuu

SEQ ID NO: 506441 - RNA, 19 nt, Artificial Sequence
  Description of Artificial Sequence: Synthetic oligonucleotide
  Sense strand starting at position 3121 of SEQ ID NO: 317715
auaacuugucaauagucau

SEQ ID NO: 506442 - RNA, 19 nt, Artificial Sequence
  Description of Artificial Sequence: Synthetic oligonucleotide
  Antisense strand to SEQ ID NO: 506441
augacuauugacaaguuau

SEQ ID NO: 506443 - RNA, 19 nt, Artificial Sequence
  Description of Artificial Sequence: Synthetic oligonucleotide
  Sense strand starting at position 3124 of SEQ ID NO: 317715
acuugucaauagucauaau

SEQ ID NO: 506444 - RNA, 19 nt, Artificial Sequence
  Description of Artificial Sequence: Synthetic oligonucleotide
  Antisense strand to SEQ ID NO: 506443
auuaugacuauugacaagu

SEQ ID NO: 506445 - RNA, 19 nt, Artificial Sequence
  Description of Artificial Sequence: Synthetic oligonucleotide
  Sense strand starting at position 3207 of SEQ ID NO: 317715
uuucucucccgguaacaaa

SEQ ID NO: 506446 - RNA, 19 nt, Artificial Sequence
  Description of Artificial Sequence: Synthetic oligonucleotide
  Antisense strand to SEQ ID NO: 506445
uuuguuaccgggagagaaa

SEQ ID NO: 506447 - RNA, 19 nt, Artificial Sequence
  Description of Artificial Sequence: Synthetic oligonucleotide
  Sense strand starting at position 3247 of SEQ ID NO: 317715
cagagauaaugguuaguaa

SEQ ID NO: 506448 - RNA, 19 nt, Artificial Sequence
  Description of Artificial Sequence: Synthetic oligonucleotide
  Antisense strand to SEQ ID NO: 506447
uuacuaaccauuaucucug

SEQ ID NO: 506449 - RNA, 19 nt, Artificial Sequence
  Description of Artificial Sequence: Synthetic oligonucleotide
  Sense strand starting at position 3250 of SEQ ID NO: 317715
agauaaugguuaguaauga

SEQ ID NO: 506450 - RNA, 19 nt, Artificial Sequence
  Description of Artificial Sequence: Synthetic oligonucleotide
  Antisense strand to SEQ ID NO: 506449
ucauuacuaaccauuaucu

SEQ ID NO: 506451 - RNA, 19 nt, Artificial Sequence
  Description of Artificial Sequence: Synthetic oligonucleotide
  Sense strand starting at position 3258 of SEQ ID NO: 317715
guuaguaaugacuaaaguu

SEQ ID NO: 506452 - RNA, 19 nt, Artificial Sequence
  Description of Artificial Sequence: Synthetic oligonucleotide
  Antisense strand to SEQ ID NO: 506451
aacuuuagucauuacuaac

SEQ ID NO: 506453 - RNA, 19 nt, Artificial Sequence
  Description of Artificial Sequence: Synthetic oligonucleotide
  Sense strand starting at position 3385 of SEQ ID NO: 317715
guggaaacgaggcacaauu

SEQ ID NO: 506454 - RNA, 19 nt, Artificial Sequence
  Description of Artificial Sequence: Synthetic oligonucleotide
  Antisense strand to SEQ ID NO: 506453
aauugugccucguuuccac

SEQ ID NO: 506455 - RNA, 19 nt, Artificial Sequence
  Description of Artificial Sequence: Synthetic oligonucleotide
  Sense strand starting at position 3450 of SEQ ID NO: 317715
ggauaagaacgcugaauau

SEQ ID NO: 506456 - RNA, 19 nt, Artificial Sequence
  Description of Artificial Sequence: Synthetic oligonucleotide
  Antisense strand to SEQ ID NO: 506455
auauucagcguucuuaucc

SEQ ID NO: 506457 - RNA, 19 nt, Artificial Sequence
  Description of Artificial Sequence: Synthetic oligonucleotide
  Sense strand starting at position 3459 of SEQ ID NO: 317715
cgcugaauauuuguuucca

SEQ ID NO: 506458 - RNA, 19 nt, Artificial Sequence
  Description of Artificial Sequence: Synthetic oligonucleotide
  Antisense strand to SEQ ID NO: 506457
uggaaacaaauauucagcg

SEQ ID NO: 506459 - RNA, 19 nt, Artificial Sequence
  Description of Artificial Sequence: Synthetic oligonucleotide
  Sense strand starting at position 3569 of SEQ ID NO: 317715
guaauauuugugugguuca

SEQ ID NO: 506460 - RNA, 19 nt, Artificial Sequence
  Description of Artificial Sequence: Synthetic oligonucleotide
  Antisense strand to SEQ ID NO: 506459
ugaaccacacaaauauuac

SEQ ID NO: 506461 - RNA, 19 nt, Artificial Sequence
  Description of Artificial Sequence: Synthetic oligonucleotide
  Sense strand starting at position 3636 of SEQ ID NO: 317715
gcaugaucucagggauaga

SEQ ID NO: 506462 - RNA, 19 nt, Artificial Sequence
  Description of Artificial Sequence: Synthetic oligonucleotide
  Antisense strand to SEQ ID NO: 506461
ucuaucccugagaucaugc

SEQ ID NO: 506463 - RNA, 19 nt, Artificial Sequence
  Description of Artificial Sequence: Synthetic oligonucleotide
  Sense strand starting at position 3862 of SEQ ID NO: 317715
ucaagucauucgucuauuu

SEQ ID NO: 506464 - RNA, 19 nt, Artificial Sequence
  Description of Artificial Sequence: Synthetic oligonucleotide
  Antisense strand to SEQ ID NO: 506463
aaauagacgaaugacuuga

SEQ ID NO: 506465 - RNA, 19 nt, Artificial Sequence
  Description of Artificial Sequence: Synthetic oligonucleotide
  Sense strand starting at position 3887 of SEQ ID NO: 317715
ugaccuuagcaguagugau

SEQ ID NO: 506466 - RNA, 19 nt, Artificial Sequence
  Description of Artificial Sequence: Synthetic oligonucleotide
  Antisense strand to SEQ ID NO: 506465
aucacuacugcuaagguca

SEQ ID NO: 506467 - RNA, 19 nt, Artificial Sequence
  Description of Artificial Sequence: Synthetic oligonucleotide
  Sense strand starting at position 64 of SEQ ID NO: 317716
cuguacugaaaguaagagu

SEQ ID NO: 506468 - RNA, 19 nt, Artificial Sequence
  Description of Artificial Sequence: Synthetic oligonucleotide
  Antisense strand to SEQ ID NO: 506467
acucuuacuuucaguacag

SEQ ID NO: 506469 - RNA, 19 nt, Artificial Sequence
  Description of Artificial Sequence: Synthetic oligonucleotide
  Sense strand starting at position 71 of SEQ ID NO: 317716
gaaaguaagagugguuaaa

SEQ ID NO: 506470 - RNA, 19 nt, Artificial Sequence
  Description of Artificial Sequence: Synthetic oligonucleotide
  Antisense strand to SEQ ID NO: 506469
uuuaaccacucuuacuuuc

SEQ ID NO: 506471 - RNA, 19 nt, Artificial Sequence
  Description of Artificial Sequence: Synthetic oligonucleotide
  Sense strand starting at position 226 of SEQ ID NO: 317716
ccugaagauggcuaacguu

SEQ ID NO: 506472 - RNA, 19 nt, Artificial Sequence
  Description of Artificial Sequence: Synthetic oligonucleotide
  Antisense strand to SEQ ID NO: 506471
aacguuagccaucuucagg

SEQ ID NO: 506473 - RNA, 19 nt, Artificial Sequence
  Description of Artificial Sequence: Synthetic oligonucleotide
  Sense strand starting at position 232 of SEQ ID NO: 317716
gauggcuaacguuaacaaa

SEQ ID NO: 506474 - RNA, 19 nt, Artificial Sequence
  Description of Artificial Sequence: Synthetic oligonucleotide
  Antisense strand to SEQ ID NO: 506473
uuuguuaacguuagccauc

SEQ ID NO: 506475 - RNA, 19 nt, Artificial Sequence
  Description of Artificial Sequence: Synthetic oligonucleotide
  Sense strand starting at position 370 of SEQ ID NO: 317716
aaguuaaacgcuuaaaguu

SEQ ID NO: 506476 - RNA, 19 nt, Artificial Sequence
  Description of Artificial Sequence: Synthetic oligonucleotide
  Antisense strand to SEQ ID NO: 506475
aacuuuaagcguuuaacuu

SEQ ID NO: 506477 - RNA, 19 nt, Artificial Sequence
  Description of Artificial Sequence: Synthetic oligonucleotide
  Sense strand starting at position 536 of SEQ ID NO: 317716
guggacuucuuauuaauua

SEQ ID NO: 506478 - RNA, 19 nt, Artificial Sequence
  Description of Artificial Sequence: Synthetic oligonucleotide
  Antisense strand to SEQ ID NO: 506477
uaauuaauaagaaguccac

SEQ ID NO: 506479 - RNA, 19 nt, Artificial Sequence
  Description of Artificial Sequence: Synthetic oligonucleotide
  Sense strand starting at position 594 of SEQ ID NO: 317716
ugaugugaaucaguaucca

SEQ ID NO: 506480 - RNA, 19 nt, Artificial Sequence
  Description of Artificial Sequence: Synthetic oligonucleotide
  Antisense strand to SEQ ID NO: 506479
uggauacugauucacauca

SEQ ID NO: 506481 - RNA, 19 nt, Artificial Sequence
  Description of Artificial Sequence: Synthetic oligonucleotide
  Sense strand starting at position 708 of SEQ ID NO: 317716
auaccuacuuggguuauau

SEQ ID NO: 506482 - RNA, 19 nt, Artificial Sequence
  Description of Artificial Sequence: Synthetic oligonucleotide
  Antisense strand to SEQ ID NO: 506481
auauaacccaaguagguau

SEQ ID NO: 506483 - RNA, 19 nt, Artificial Sequence
  Description of Artificial Sequence: Synthetic oligonucleotide
  Sense strand starting at position 833 of SEQ ID NO: 317716
acagaaaggucucaauuua

SEQ ID NO: 506484 - RNA, 19 nt, Artificial Sequence
  Description of Artificial Sequence: Synthetic oligonucleotide
  Antisense strand to SEQ ID NO: 506483
uaaauugagaccuuucugu

SEQ ID NO: 506485 - RNA, 19 nt, Artificial Sequence
  Description of Artificial Sequence: Synthetic oligonucleotide
  Sense strand starting at position 840 of SEQ ID NO: 317716
ggucucaauuuacaagaga

SEQ ID NO: 506486 - RNA, 19 nt, Artificial Sequence
  Description of Artificial Sequence: Synthetic oligonucleotide
  Antisense strand to SEQ ID NO: 506485
ucucuuguaaauugagacc

SEQ ID NO: 506487 - RNA, 19 nt, Artificial Sequence
  Description of Artificial Sequence: Synthetic oligonucleotide
  Sense strand starting at position 907 of SEQ ID NO: 317716
guaugaugugcacaacgau

SEQ ID NO: 506488 - RNA, 19 nt, Artificial Sequence
  Description of Artificial Sequence: Synthetic oligonucleotide
  Antisense strand to SEQ ID NO: 506487
aucguugugcacaucauac

SEQ ID NO: 506489 - RNA, 19 nt, Artificial Sequence
  Description of Artificial Sequence: Synthetic oligonucleotide
  Sense strand starting at position 1089 of SEQ ID NO: 317716
auuugcuagcuccgugaau

SEQ ID NO: 506490 - RNA, 19 nt, Artificial Sequence
  Description of Artificial Sequence: Synthetic oligonucleotide
  Antisense strand to SEQ ID NO: 506489
auucacggagcuagcaaau

SEQ ID NO: 506491 - RNA, 19 nt, Artificial Sequence
  Description of Artificial Sequence: Synthetic oligonucleotide
  Sense strand starting at position 1100 of SEQ ID NO: 317716
ccgugaauuucccucgaua

SEQ ID NO: 506492 - RNA, 19 nt, Artificial Sequence
  Description of Artificial Sequence: Synthetic oligonucleotide
  Antisense strand to SEQ ID NO: 506491
uaucgagggaaauucacgg

SEQ ID NO: 506493 - RNA, 19 nt, Artificial Sequence
  Description of Artificial Sequence: Synthetic oligonucleotide
  Sense strand starting at position 1121 of SEQ ID NO: 317716
caaaguuugucaccgauaa

SEQ ID NO: 506494 - RNA, 19 nt, Artificial Sequence
  Description of Artificial Sequence: Synthetic oligonucleotide
  Antisense strand to SEQ ID NO: 506493
uuaucggugacaaacuuug

SEQ ID NO: 506495 - RNA, 19 nt, Artificial Sequence
  Description of Artificial Sequence: Synthetic oligonucleotide
  Sense strand starting at position 1125 of SEQ ID NO: 317716
guuugucaccgauaauaua

SEQ ID NO: 506496 - RNA, 19 nt, Artificial Sequence
  Description of Artificial Sequence: Synthetic oligonucleotide
  Antisense strand to SEQ ID NO: 506495
uauauuaucggugacaaac

SEQ ID NO: 506497 - RNA, 19 nt, Artificial Sequence
  Description of Artificial Sequence: Synthetic oligonucleotide
  Sense strand starting at position 1316 of SEQ ID NO: 317716
caaggauagguuuagcuca

SEQ ID NO: 506498 - RNA, 19 nt, Artificial Sequence
  Description of Artificial Sequence: Synthetic oligonucleotide
  Antisense strand to SEQ ID NO: 506497
ugagcuaaaccuauccuug

SEQ ID NO: 506499 - RNA, 19 nt, Artificial Sequence
  Description of Artificial Sequence: Synthetic oligonucleotide
  Sense strand starting at position 1321 of SEQ ID NO: 317716
auagguuuagcucacucua

SEQ ID NO: 506500 - RNA, 19 nt, Artificial Sequence
  Description of Artificial Sequence: Synthetic oligonucleotide
  Antisense strand to SEQ ID NO: 506499
uagagugagcuaaaccuau

SEQ ID NO: 506501 - RNA, 19 nt, Artificial Sequence
  Description of Artificial Sequence: Synthetic oligonucleotide
  Sense strand starting at position 1342 of SEQ ID NO: 317716
auuccaugcucguuauuuc

SEQ ID NO: 506502 - RNA, 19 nt, Artificial Sequence
  Description of Artificial Sequence: Synthetic oligonucleotide
  Antisense strand to SEQ ID NO: 506501
gaaauaacgagcauggaau

SEQ ID NO: 506503 - RNA, 19 nt, Artificial Sequence
  Description of Artificial Sequence: Synthetic oligonucleotide
  Sense strand starting at position 1349 of SEQ ID NO: 317716
gcucguuauuucccaagau

SEQ ID NO: 506504 - RNA, 19 nt, Artificial Sequence
  Description of Artificial Sequence: Synthetic oligonucleotide
  Antisense strand to SEQ ID NO: 506503
aucuugggaaauaacgagc

SEQ ID NO: 506505 - RNA, 19 nt, Artificial Sequence
  Description of Artificial Sequence: Synthetic oligonucleotide
  Sense strand starting at position 2228 of SEQ ID NO: 317716
gguuaaguccgcucagucu

SEQ ID NO: 506506 - RNA, 19 nt, Artificial Sequence
  Description of Artificial Sequence: Synthetic oligonucleotide
  Antisense strand to SEQ ID NO: 506505
agacugagcggacuuaacc

SEQ ID NO: 506507 - RNA, 19 nt, Artificial Sequence
  Description of Artificial Sequence: Synthetic oligonucleotide
  Sense strand starting at position 2364 of SEQ ID NO: 317716
ggagguguggguuggagaa

SEQ ID NO: 506508 - RNA, 19 nt, Artificial Sequence
  Description of Artificial Sequence: Synthetic oligonucleotide
  Antisense strand to SEQ ID NO: 506507
uucuccaacccacaccucc

SEQ ID NO: 506509 - RNA, 19 nt, Artificial Sequence
  Description of Artificial Sequence: Synthetic oligonucleotide
  Sense strand starting at position 2699 of SEQ ID NO: 317716
cacgguuaagcagacuuua

SEQ ID NO: 506510 - RNA, 19 nt, Artificial Sequence
  Description of Artificial Sequence: Synthetic oligonucleotide
  Antisense strand to SEQ ID NO: 506509
uaaagucugcuuaaccgug

SEQ ID NO: 506511 - RNA, 19 nt, Artificial Sequence
  Description of Artificial Sequence: Synthetic oligonucleotide
  Sense strand starting at position 2739 of SEQ ID NO: 317716
gagaauuucugccugcugu

SEQ ID NO: 506512 - RNA, 19 nt, Artificial Sequence
  Description of Artificial Sequence: Synthetic oligonucleotide
  Antisense strand to SEQ ID NO: 506511
acagcaggcagaaauucuc

SEQ ID NO: 506513 - RNA, 19 nt, Artificial Sequence
  Description of Artificial Sequence: Synthetic oligonucleotide
  Sense strand starting at position 2775 of SEQ ID NO: 317716
guggaugugaguuaaacuu

SEQ ID NO: 506514 - RNA, 19 nt, Artificial Sequence
  Description of Artificial Sequence: Synthetic oligonucleotide
  Antisense strand to SEQ ID NO: 506513
aaguuuaacucacauccac

SEQ ID NO: 506515 - RNA, 19 nt, Artificial Sequence
  Description of Artificial Sequence: Synthetic oligonucleotide
  Sense strand starting at position 2881 of SEQ ID NO: 317716
uggucuuaaccaugaaaug

SEQ ID NO: 506516 - RNA, 19 nt, Artificial Sequence
  Description of Artificial Sequence: Synthetic oligonucleotide
  Antisense strand to SEQ ID NO: 506515
cauuucaugguuaagacca

SEQ ID NO: 506517 - RNA, 19 nt, Artificial Sequence
  Description of Artificial Sequence: Synthetic oligonucleotide
  Sense strand starting at position 2882 of SEQ ID NO: 317716
ggucuuaaccaugaaaugu

SEQ ID NO: 506518 - RNA, 19 nt, Artificial Sequence
  Description of Artificial Sequence: Synthetic oligonucleotide
  Antisense strand to SEQ ID NO: 506517
acauuucaugguuaagacc

SEQ ID NO: 506519 - RNA, 19 nt, Artificial Sequence
  Description of Artificial Sequence: Synthetic oligonucleotide
  Sense strand starting at position 2981 of SEQ ID NO: 317716
uccaguuaagaucaauguu

SEQ ID NO: 506520 - RNA, 19 nt, Artificial Sequence
  Description of Artificial Sequence: Synthetic oligonucleotide
  Antisense strand to SEQ ID NO: 506519
aacauugaucuuaacugga

SEQ ID NO: 506521 - RNA, 19 nt, Artificial Sequence
  Description of Artificial Sequence: Synthetic oligonucleotide
  Sense strand starting at position 3035 of SEQ ID NO: 317716
ugcaacugaugucucaaga

SEQ ID NO: 506522 - RNA, 19 nt, Artificial Sequence
  Description of Artificial Sequence: Synthetic oligonucleotide
  Antisense strand to SEQ ID NO: 506521
ucuugagacaucaguugca

SEQ ID NO: 506523 - RNA, 19 nt, Artificial Sequence
  Description of Artificial Sequence: Synthetic oligonucleotide
  Sense strand starting at position 3131 of SEQ ID NO: 317716
aguuaaauaugagugaagu

SEQ ID NO: 506524 - RNA, 19 nt, Artificial Sequence
  Description of Artificial Sequence: Synthetic oligonucleotide
  Antisense strand to SEQ ID NO: 506523
acuucacucauauuuaacu

SEQ ID NO: 506525 - RNA, 19 nt, Artificial Sequence
  Description of Artificial Sequence: Synthetic oligonucleotide
  Sense strand starting at position 3132 of SEQ ID NO: 317716
guuaaauaugagugaaguu

SEQ ID NO: 506526 - RNA, 19 nt, Artificial Sequence
  Description of Artificial Sequence: Synthetic oligonucleotide
  Antisense strand to SEQ ID NO: 506525
aacuucacucauauuuaac

SEQ ID NO: 506527 - RNA, 19 nt, Artificial Sequence
  Description of Artificial Sequence: Synthetic oligonucleotide
  Sense strand starting at position 3187 of SEQ ID NO: 317716
uggguuaccuuccuaauga

SEQ ID NO: 506528 - RNA, 19 nt, Artificial Sequence
  Description of Artificial Sequence: Synthetic oligonucleotide
  Antisense strand to SEQ ID NO: 506527
ucauuaggaagguaaccca

SEQ ID NO: 506529 - RNA, 19 nt, Artificial Sequence
  Description of Artificial Sequence: Synthetic oligonucleotide
  Sense strand starting at position 3237 of SEQ ID NO: 317716
cugugcucuggagauauua

SEQ ID NO: 506530 - RNA, 19 nt, Artificial Sequence
  Description of Artificial Sequence: Synthetic oligonucleotide
  Antisense strand to SEQ ID NO: 506529
uaauaucuccagagcacag

SEQ ID NO: 506531 - RNA, 19 nt, Artificial Sequence
  Description of Artificial Sequence: Synthetic oligonucleotide
  Sense strand starting at position 3239 of SEQ ID NO: 317716
gugcucuggagauauuaca

SEQ ID NO: 506532 - RNA, 19 nt, Artificial Sequence
  Description of Artificial Sequence: Synthetic oligonucleotide
  Antisense strand to SEQ ID NO: 506531
uguaauaucuccagagcac

SEQ ID NO: 506533 - RNA, 19 nt, Artificial Sequence
  Description of Artificial Sequence: Synthetic oligonucleotide
  Sense strand starting at position 3282 of SEQ ID NO: 317716
uuggaagaaauguguaucu

SEQ ID NO: 506534 - RNA, 19 nt, Artificial Sequence
  Description of Artificial Sequence: Synthetic oligonucleotide
  Antisense strand to SEQ ID NO: 506533
agauacacauuucuuccaa

SEQ ID NO: 506535 - RNA, 19 nt, Artificial Sequence
  Description of Artificial Sequence: Synthetic oligonucleotide
  Sense strand starting at position 3296 of SEQ ID NO: 317716
uaucuuuguccaggaacag

SEQ ID NO: 506536 - RNA, 19 nt, Artificial Sequence
  Description of Artificial Sequence: Synthetic oligonucleotide
  Antisense strand to SEQ ID NO: 506535
cuguuccuggacaaagaua

SEQ ID NO: 506537 - RNA, 19 nt, Artificial Sequence
  Description of Artificial Sequence: Synthetic oligonucleotide
  Sense strand starting at position 3297 of SEQ ID NO: 317716
aucuuuguccaggaacagu

SEQ ID NO: 506538 - RNA, 19 nt, Artificial Sequence
  Description of Artificial Sequence: Synthetic oligonucleotide
  Antisense strand to SEQ ID NO: 506537
acuguuccuggacaaagau

SEQ ID NO: 506539 - RNA, 19 nt, Artificial Sequence
  Description of Artificial Sequence: Synthetic oligonucleotide
  Sense strand starting at position 3330 of SEQ ID NO: 317716
ccauguuauauuggaggca

SEQ ID NO: 506540 - RNA, 19 nt, Artificial Sequence
  Description of Artificial Sequence: Synthetic oligonucleotide
  Antisense strand to SEQ ID NO: 506539
ugccuccaauauaacaugg

SEQ ID NO: 506541 - RNA, 19 nt, Artificial Sequence
  Description of Artificial Sequence: Synthetic oligonucleotide
  Sense strand starting at position 3394 of SEQ ID NO: 317716
acaagauuguauguaugua

SEQ ID NO: 506542 - RNA, 19 nt, Artificial Sequence
  Description of Artificial Sequence: Synthetic oligonucleotide
  Antisense strand to SEQ ID NO: 506541
uacauacauacaaucuugu

SEQ ID NO: 506543 - RNA, 19 nt, Artificial Sequence
  Description of Artificial Sequence: Synthetic oligonucleotide
  Sense strand starting at position 3482 of SEQ ID NO: 317716
gaaauauugugagcuacuu

SEQ ID NO: 506544 - RNA, 19 nt, Artificial Sequence
  Description of Artificial Sequence: Synthetic oligonucleotide
  Antisense strand to SEQ ID NO: 506543
aaguagcucacaauauuuc

SEQ ID NO: 506545 - RNA, 19 nt, Artificial Sequence
  Description of Artificial Sequence: Synthetic oligonucleotide
  Sense strand starting at position 3662 of SEQ ID NO: 317716
gucucagccacuugagaag

SEQ ID NO: 506546 - RNA, 19 nt, Artificial Sequence
  Description of Artificial Sequence: Synthetic oligonucleotide
  Antisense strand to SEQ ID NO: 506545
cuucucaaguggcugagac

SEQ ID NO: 506547 - RNA, 19 nt, Artificial Sequence
  Description of Artificial Sequence: Synthetic oligonucleotide
  Sense strand starting at position 77 of SEQ ID NO: 317717
cugagaacagucugcuaaa

SEQ ID NO: 506548 - RNA, 19 nt, Artificial Sequence
  Description of Artificial Sequence: Synthetic oligonucleotide
  Antisense strand to SEQ ID NO: 506547
uuuagcagacuguucucag

SEQ ID NO: 506549 - RNA, 19 nt, Artificial Sequence
  Description of Artificial Sequence: Synthetic oligonucleotide
  Sense strand starting at position 78 of SEQ ID NO: 317717
ugagaacagucugcuaaac

SEQ ID NO: 506550 - RNA, 19 nt, Artificial Sequence
  Description of Artificial Sequence: Synthetic oligonucleotide
  Antisense strand to SEQ ID NO: 506549
guuuagcagacuguucuca

SEQ ID NO: 506551 - RNA, 19 nt, Artificial Sequence
  Description of Artificial Sequence: Synthetic oligonucleotide
  Sense strand starting at position 112 of SEQ ID NO: 317717
aggcccuugcucuagauca

SEQ ID NO: 506552 - RNA, 19 nt, Artificial Sequence
  Description of Artificial Sequence: Synthetic oligonucleotide
  Antisense strand to SEQ ID NO: 506551
ugaucuagagcaagggccu

SEQ ID NO: 506553 - RNA, 19 nt, Artificial Sequence
  Description of Artificial Sequence: Synthetic oligonucleotide
  Sense strand starting at position 317 of SEQ ID NO: 317717
cugucuguugucgcaacau

SEQ ID NO: 506554 - RNA, 19 nt, Artificial Sequence
  Description of Artificial Sequence: Synthetic oligonucleotide
  Antisense strand to SEQ ID NO: 506553
auguugcgacaacagacag

SEQ ID NO: 506555 - RNA, 19 nt, Artificial Sequence
  Description of Artificial Sequence: Synthetic oligonucleotide
  Sense strand starting at position 477 of SEQ ID NO: 317717
agaaguuauuagccacaag

SEQ ID NO: 506556 - RNA, 19 nt, Artificial Sequence
  Description of Artificial Sequence: Synthetic oligonucleotide
  Antisense strand to SEQ ID NO: 506555
cuuguggcuaauaacuucu

SEQ ID NO: 506557 - RNA, 19 nt, Artificial Sequence
  Description of Artificial Sequence: Synthetic oligonucleotide
  Sense strand starting at position 588 of SEQ ID NO: 317717
gacagaaaggcuugucaga

SEQ ID NO: 506558 - RNA, 19 nt, Artificial Sequence
  Description of Artificial Sequence: Synthetic oligonucleotide
  Antisense strand to SEQ ID NO: 506557
ucugacaagccuuucuguc

SEQ ID NO: 506559 - RNA, 19 nt, Artificial Sequence
  Description of Artificial Sequence: Synthetic oligonucleotide
  Sense strand starting at position 590 of SEQ ID NO: 317717
cagaaaggcuugucagaaa

SEQ ID NO: 506560 - RNA, 19 nt, Artificial Sequence
  Description of Artificial Sequence: Synthetic oligonucleotide
  Antisense strand to SEQ ID NO: 506559
uuucugacaagccuuucug

SEQ ID NO: 506561 - RNA, 19 nt, Artificial Sequence
  Description of Artificial Sequence: Synthetic oligonucleotide
  Sense strand starting at position 613 of SEQ ID NO: 317717
gugagaauguacuuaaacg

SEQ ID NO: 506562 - RNA, 19 nt, Artificial Sequence
  Description of Artificial Sequence: Synthetic oligonucleotide
  Antisense strand to SEQ ID NO: 506561
cguuuaaguacauucucac

SEQ ID NO: 506563 - RNA, 19 nt, Artificial Sequence
  Description of Artificial Sequence: Synthetic oligonucleotide
  Sense strand starting at position 636 of SEQ ID NO: 317717
cugucuugugaguaacaua

SEQ ID NO: 506564 - RNA, 19 nt, Artificial Sequence
  Description of Artificial Sequence: Synthetic oligonucleotide
  Antisense strand to SEQ ID NO: 506563
uauguuacucacaagacag

SEQ ID NO: 506565 - RNA, 19 nt, Artificial Sequence
  Description of Artificial Sequence: Synthetic oligonucleotide
  Sense strand starting at position 644 of SEQ ID NO: 317717
ugaguaacauacguggauu

SEQ ID NO: 506566 - RNA, 19 nt, Artificial Sequence
  Description of Artificial Sequence: Synthetic oligonucleotide
  Antisense strand to SEQ ID NO: 506565
aauccacguauguuacuca

SEQ ID NO: 506567 - RNA, 19 nt, Artificial Sequence
  Description of Artificial Sequence: Synthetic oligonucleotide
  Sense strand starting at position 645 of SEQ ID NO: 317717
gaguaacauacguggauug

SEQ ID NO: 506568 - RNA, 19 nt, Artificial Sequence
  Description of Artificial Sequence: Synthetic oligonucleotide
  Antisense strand to SEQ ID NO: 506567
caauccacguauguuacuc

SEQ ID NO: 506569 - RNA, 19 nt, Artificial Sequence
  Description of Artificial Sequence: Synthetic oligonucleotide
  Sense strand starting at position 1197 of SEQ ID NO: 317717
ugucuugaugguuacuaga

SEQ ID NO: 506570 - RNA, 19 nt, Artificial Sequence
  Description of Artificial Sequence: Synthetic oligonucleotide
  Antisense strand to SEQ ID NO: 506569
ucuaguaaccaucaagaca

SEQ ID NO: 506571 - RNA, 19 nt, Artificial Sequence
  Description of Artificial Sequence: Synthetic oligonucleotide
  Sense strand starting at position 1199 of SEQ ID NO: 317717
ucuugaugguuacuagaag

SEQ ID NO: 506572 - RNA, 19 nt, Artificial Sequence
  Description of Artificial Sequence: Synthetic oligonucleotide
  Antisense strand to SEQ ID NO: 506571
cuucuaguaaccaucaaga

SEQ ID NO: 506573 - RNA, 19 nt, Artificial Sequence
  Description of Artificial Sequence: Synthetic oligonucleotide
  Sense strand starting at position 1230 of SEQ ID NO: 317717
uggguuucugccuagacua

SEQ ID NO: 506574 - RNA, 19 nt, Artificial Sequence
  Description of Artificial Sequence: Synthetic oligonucleotide
  Antisense strand to SEQ ID NO: 506573
uagucuaggcagaaaccca

SEQ ID NO: 506575 - RNA, 19 nt, Artificial Sequence
  Description of Artificial Sequence: Synthetic oligonucleotide
  Sense strand starting at position 1324 of SEQ ID NO: 317717
ugugcauaacuggacacau

SEQ ID NO: 506576 - RNA, 19 nt, Artificial Sequence
  Description of Artificial Sequence: Synthetic oligonucleotide
  Antisense strand to SEQ ID NO: 506575
auguguccaguuaugcaca

SEQ ID NO: 506577 - RNA, 19 nt, Artificial Sequence
  Description of Artificial Sequence: Synthetic oligonucleotide
  Sense strand starting at position 1455 of SEQ ID NO: 317717
gggagaacaauguguuuac

SEQ ID NO: 506578 - RNA, 19 nt, Artificial Sequence
  Description of Artificial Sequence: Synthetic oligonucleotide
  Antisense strand to SEQ ID NO: 506577
guaaacacauuguucuccc

SEQ ID NO: 506579 - RNA, 19 nt, Artificial Sequence
  Description of Artificial Sequence: Synthetic oligonucleotide
  Sense strand starting at position 1458 of SEQ ID NO: 317717
agaacaauguguuuaccuu

SEQ ID NO: 506580 - RNA, 19 nt, Artificial Sequence
  Description of Artificial Sequence: Synthetic oligonucleotide
  Antisense strand to SEQ ID NO: 506579
aagguaaacacauuguucu

SEQ ID NO: 506581 - RNA, 19 nt, Artificial Sequence
  Description of Artificial Sequence: Synthetic oligonucleotide
  Sense strand starting at position 1459 of SEQ ID NO: 317717
gaacaauguguuuaccuug

SEQ ID NO: 506582 - RNA, 19 nt, Artificial Sequence
  Description of Artificial Sequence: Synthetic oligonucleotide
  Antisense strand to SEQ ID NO: 506581
caagguaaacacauuguuc

SEQ ID NO: 506583 - RNA, 19 nt, Artificial Sequence
  Description of Artificial Sequence: Synthetic oligonucleotide
  Sense strand starting at position 1544 of SEQ ID NO: 317717
ugcccaaguccuugagaaa

SEQ ID NO: 506584 - RNA, 19 nt, Artificial Sequence
  Description of Artificial Sequence: Synthetic oligonucleotide
  Antisense strand to SEQ ID NO: 506583
uuucucaaggacuugggca

SEQ ID NO: 506585 - RNA, 19 nt, Artificial Sequence
  Description of Artificial Sequence: Synthetic oligonucleotide
  Sense strand starting at position 1545 of SEQ ID NO: 317717
gcccaaguccuugagaaac

SEQ ID NO: 506586 - RNA, 19 nt, Artificial Sequence
  Description of Artificial Sequence: Synthetic oligonucleotide
  Antisense strand to SEQ ID NO: 506585
guuucucaaggacuugggc

SEQ ID NO: 506587 - RNA, 19 nt, Artificial Sequence
  Description of Artificial Sequence: Synthetic oligonucleotide
  Sense strand starting at position 1692 of SEQ ID NO: 317717
cugagaucauugucaugaa

SEQ ID NO: 506588 - RNA, 19 nt, Artificial Sequence
  Description of Artificial Sequence: Synthetic oligonucleotide
  Antisense strand to SEQ ID NO: 506587
uucaugacaaugaucucag

SEQ ID NO: 506589 - RNA, 19 nt, Artificial Sequence
  Description of Artificial Sequence: Synthetic oligonucleotide
  Sense strand starting at position 1756 of SEQ ID NO: 317717
cugaaaggcuuaccugaca

SEQ ID NO: 506590 - RNA, 19 nt, Artificial Sequence
  Description of Artificial Sequence: Synthetic oligonucleotide
  Antisense strand to SEQ ID NO: 506589
ugucagguaagccuuucag

SEQ ID NO: 506591 - RNA, 19 nt, Artificial Sequence
  Description of Artificial Sequence: Synthetic oligonucleotide
  Sense strand starting at position 2007 of SEQ ID NO: 317717
uggaguuugagucacugca

SEQ ID NO: 506592 - RNA, 19 nt, Artificial Sequence
  Description of Artificial Sequence: Synthetic oligonucleotide
  Antisense strand to SEQ ID NO: 506591
ugcagugacucaaacucca

SEQ ID NO: 506593 - RNA, 19 nt, Artificial Sequence
  Description of Artificial Sequence: Synthetic oligonucleotide
  Sense strand starting at position 2141 of SEQ ID NO: 317717
augccagaugcagagauau

SEQ ID NO: 506594 - RNA, 19 nt, Artificial Sequence
  Description of Artificial Sequence: Synthetic oligonucleotide
  Antisense strand to SEQ ID NO: 506593
auaucucugcaucuggcau

SEQ ID NO: 506595 - RNA, 19 nt, Artificial Sequence
  Description of Artificial Sequence: Synthetic oligonucleotide
  Sense strand starting at position 2198 of SEQ ID NO: 317717
gugaacaucugucccugaa

SEQ ID NO: 506596 - RNA, 19 nt, Artificial Sequence
  Description of Artificial Sequence: Synthetic oligonucleotide
  Antisense strand to SEQ ID NO: 506595
uucagggacagauguucac

SEQ ID NO: 506597 - RNA, 19 nt, Artificial Sequence
  Description of Artificial Sequence: Synthetic oligonucleotide
  Sense strand starting at position 2200 of SEQ ID NO: 317717
gaacaucugucccugaaag

SEQ ID NO: 506598 - RNA, 19 nt, Artificial Sequence
  Description of Artificial Sequence: Synthetic oligonucleotide
  Antisense strand to SEQ ID NO: 506597
cuuucagggacagauguuc

SEQ ID NO: 506599 - RNA, 19 nt, Artificial Sequence
  Description of Artificial Sequence: Synthetic oligonucleotide
  Sense strand starting at position 2562 of SEQ ID NO: 317717
cagugaauuugcccaggca

SEQ ID NO: 506600 - RNA, 19 nt, Artificial Sequence
  Description of Artificial Sequence: Synthetic oligonucleotide
  Antisense strand to SEQ ID NO: 506599
ugccugggcaaauucacug

SEQ ID NO: 506601 - RNA, 19 nt, Artificial Sequence
  Description of Artificial Sequence: Synthetic oligonucleotide
  Sense strand starting at position 2753 of SEQ ID NO: 317717
ggaccaagacgauguuuca

SEQ ID NO: 506602 - RNA, 19 nt, Artificial Sequence
  Description of Artificial Sequence: Synthetic oligonucleotide
  Antisense strand to SEQ ID NO: 506601
ugaaacaucgucuuggucc

SEQ ID NO: 506603 - RNA, 19 nt, Artificial Sequence
  Description of Artificial Sequence: Synthetic oligonucleotide
  Sense strand starting at position 2917 of SEQ ID NO: 317717
cagguuuccacggagagca

SEQ ID NO: 506604 - RNA, 19 nt, Artificial Sequence
  Description of Artificial Sequence: Synthetic oligonucleotide
  Antisense strand to SEQ ID NO: 506603
ugcucuccguggaaaccug

SEQ ID NO: 506605 - RNA, 19 nt, Artificial Sequence
  Description of Artificial Sequence: Synthetic oligonucleotide
  Sense strand starting at position 3046 of SEQ ID NO: 317717
auagaaguugaagguaauu

SEQ ID NO: 506606 - RNA, 19 nt, Artificial Sequence
  Description of Artificial Sequence: Synthetic oligonucleotide
  Antisense strand to SEQ ID NO: 506605
aauuaccuucaacuucuau

SEQ ID NO: 506607 - RNA, 19 nt, Artificial Sequence
  Description of Artificial Sequence: Synthetic oligonucleotide
  Sense strand starting at position 3051 of SEQ ID NO: 317717
aguugaagguaauuagacu

SEQ ID NO: 506608 - RNA, 19 nt, Artificial Sequence
  Description of Artificial Sequence: Synthetic oligonucleotide
  Antisense strand to SEQ ID NO: 506607
agucuaauuaccuucaacu

SEQ ID NO: 506609 - RNA, 19 nt, Artificial Sequence
  Description of Artificial Sequence: Synthetic oligonucleotide
  Sense strand starting at position 3102 of SEQ ID NO: 317717
cuaugaugcauguaaggca

SEQ ID NO: 506610 - RNA, 19 nt, Artificial Sequence
  Description of Artificial Sequence: Synthetic oligonucleotide
  Antisense strand to SEQ ID NO: 506609
ugccuuacaugcaucauag

SEQ ID NO: 506611 - RNA, 19 nt, Artificial Sequence
  Description of Artificial Sequence: Synthetic oligonucleotide
  Sense strand starting at position 3170 of SEQ ID NO: 317717
gucugaaauuggcugaaca

SEQ ID NO: 506612 - RNA, 19 nt, Artificial Sequence
  Description of Artificial Sequence: Synthetic oligonucleotide
  Antisense strand to SEQ ID NO: 506611
uguucagccaauuucagac

SEQ ID NO: 506613 - RNA, 19 nt, Artificial Sequence
  Description of Artificial Sequence: Synthetic oligonucleotide
  Sense strand starting at position 3171 of SEQ ID NO: 317717
ucugaaauuggcugaacaa

SEQ ID NO: 506614 - RNA, 19 nt, Artificial Sequence
  Description of Artificial Sequence: Synthetic oligonucleotide
  Antisense strand to SEQ ID NO: 506613
uuguucagccaauuucaga

SEQ ID NO: 506615 - RNA, 19 nt, Artificial Sequence
  Description of Artificial Sequence: Synthetic oligonucleotide
  Sense strand starting at position 3207 of SEQ ID NO: 317717
gaguuaacucuuggauccu

SEQ ID NO: 506616 - RNA, 19 nt, Artificial Sequence
  Description of Artificial Sequence: Synthetic oligonucleotide
  Antisense strand to SEQ ID NO: 506615
aggauccaagaguuaacuc

SEQ ID NO: 506617 - RNA, 19 nt, Artificial Sequence
  Description of Artificial Sequence: Synthetic oligonucleotide
  Sense strand starting at position 3300 of SEQ ID NO: 317717
auguaauccuaccuuaagu

SEQ ID NO: 506618 - RNA, 19 nt, Artificial Sequence
  Description of Artificial Sequence: Synthetic oligonucleotide
  Antisense strand to SEQ ID NO: 506617
acuuaagguaggauuacau

SEQ ID NO: 506619 - RNA, 19 nt, Artificial Sequence
  Description of Artificial Sequence: Synthetic oligonucleotide
  Sense strand starting at position 3376 of SEQ ID NO: 317717
acaguaauagcugaaaugu

SEQ ID NO: 506620 - RNA, 19 nt, Artificial Sequence
  Description of Artificial Sequence: Synthetic oligonucleotide
  Antisense strand to SEQ ID NO: 506619
acauuucagcuauuacugu

SEQ ID NO: 506621 - RNA, 19 nt, Artificial Sequence
  Description of Artificial Sequence: Synthetic oligonucleotide
  Sense strand starting at position 3520 of SEQ ID NO: 317717
agagcuauuugacaaauuc

SEQ ID NO: 506622 - RNA, 19 nt, Artificial Sequence
  Description of Artificial Sequence: Synthetic oligonucleotide
  Antisense strand to SEQ ID NO: 506621
gaauuugucaaauagcucu

SEQ ID NO: 506623 - RNA, 19 nt, Artificial Sequence
  Description of Artificial Sequence: Synthetic oligonucleotide
  Sense strand starting at position 3557 of SEQ ID NO: 317717
uguagacauguuuaacaac

SEQ ID NO: 506624 - RNA, 19 nt, Artificial Sequence
  Description of Artificial Sequence: Synthetic oligonucleotide
  Antisense strand to SEQ ID NO: 506623
guuguuaaacaugucuaca

SEQ ID NO: 506625 - RNA, 19 nt, Artificial Sequence
  Description of Artificial Sequence: Synthetic oligonucleotide
  Sense strand starting at position 3636 of SEQ ID NO: 317717
ucacaaguauuaguaauga

SEQ ID NO: 506626 - RNA, 19 nt, Artificial Sequence
  Description of Artificial Sequence: Synthetic oligonucleotide
  Antisense strand to SEQ ID NO: 506625
ucauuacuaauacuuguga

SEQ ID NO: 506627 - RNA, 19 nt, Artificial Sequence
  Description of Artificial Sequence: Synthetic oligonucleotide
  Sense strand starting at position 154 of SEQ ID NO: 317718
cucagaagguuugcgauuu

SEQ ID NO: 506628 - RNA, 19 nt, Artificial Sequence
  Description of Artificial Sequence: Synthetic oligonucleotide
  Antisense strand to SEQ ID NO: 506627
aaaucgcaaaccuucugag

SEQ ID NO: 506629 - RNA, 19 nt, Artificial Sequence
  Description of Artificial Sequence: Synthetic oligonucleotide
  Sense strand starting at position 215 of SEQ ID NO: 317718
acaguagauguuggaauga

SEQ ID NO: 506630 - RNA, 19 nt, Artificial Sequence
  Description of Artificial Sequence: Synthetic oligonucleotide
  Antisense strand to SEQ ID NO: 506629
ucauuccaacaucuacugu

SEQ ID NO: 506631 - RNA, 19 nt, Artificial Sequence
  Description of Artificial Sequence: Synthetic oligonucleotide
  Sense strand starting at position 225 of SEQ ID NO: 317718
uuggaaugacucugagcca

SEQ ID NO: 506632 - RNA, 19 nt, Artificial Sequence
  Description of Artificial Sequence: Synthetic oligonucleotide
  Antisense strand to SEQ ID NO: 506631
uggcucagagucauuccaa

SEQ ID NO: 506633 - RNA, 19 nt, Artificial Sequence
  Description of Artificial Sequence: Synthetic oligonucleotide
  Sense strand starting at position 489 of SEQ ID NO: 317718
gggcucuugaggcaaggaa

SEQ ID NO: 506634 - RNA, 19 nt, Artificial Sequence
  Description of Artificial Sequence: Synthetic oligonucleotide
  Antisense strand to SEQ ID NO: 506633
uuccuugccucaagagccc

SEQ ID NO: 506635 - RNA, 19 nt, Artificial Sequence
  Description of Artificial Sequence: Synthetic oligonucleotide
  Sense strand starting at position 817 of SEQ ID NO: 317718
uguuucugucuccaagauc

SEQ ID NO: 506636 - RNA, 19 nt, Artificial Sequence
  Description of Artificial Sequence: Synthetic oligonucleotide
  Antisense strand to SEQ ID NO: 506635
gaucuuggagacagaaaca

SEQ ID NO: 506637 - RNA, 19 nt, Artificial Sequence
  Description of Artificial Sequence: Synthetic oligonucleotide
  Sense strand starting at position 880 of SEQ ID NO: 317718
caaagaagcucgucagaaa

SEQ ID NO: 506638 - RNA, 19 nt, Artificial Sequence
  Description of Artificial Sequence: Synthetic oligonucleotide
  Antisense strand to SEQ ID NO: 506637
uuucugacgagcuucuuug

SEQ ID NO: 506639 - RNA, 19 nt, Artificial Sequence
  Description of Artificial Sequence: Synthetic oligonucleotide
  Sense strand starting at position 934 of SEQ ID NO: 317718
guuaguaacacauaugggu

SEQ ID NO: 506640 - RNA, 19 nt, Artificial Sequence
  Description of Artificial Sequence: Synthetic oligonucleotide
  Antisense strand to SEQ ID NO: 506639
acccauauguguuacuaac

SEQ ID NO: 506641 - RNA, 19 nt, Artificial Sequence
  Description of Artificial Sequence: Synthetic oligonucleotide
  Sense strand starting at position 962 of SEQ ID NO: 317718
aaggaaacaugcucuaugu

SEQ ID NO: 506642 - RNA, 19 nt, Artificial Sequence
  Description of Artificial Sequence: Synthetic oligonucleotide
  Antisense strand to SEQ ID NO: 506641
acauagagcauguuuccuu

SEQ ID NO: 506643 - RNA, 19 nt, Artificial Sequence
  Description of Artificial Sequence: Synthetic oligonucleotide
  Sense strand starting at position 964 of SEQ ID NO: 317718
ggaaacaugcucuauguuu

SEQ ID NO: 506644 - RNA, 19 nt, Artificial Sequence
  Description of Artificial Sequence: Synthetic oligonucleotide
  Antisense strand to SEQ ID NO: 506643
aaacauagagcauguuucc

SEQ ID NO: 506645 - RNA, 19 nt, Artificial Sequence
  Description of Artificial Sequence: Synthetic oligonucleotide
  Sense strand starting at position 1229 of SEQ ID NO: 317718
uggauuucuucccagaaua

SEQ ID NO: 506646 - RNA, 19 nt, Artificial Sequence
  Description of Artificial Sequence: Synthetic oligonucleotide
  Antisense strand to SEQ ID NO: 506645
uauucugggaagaaaucca

SEQ ID NO: 506647 - RNA, 19 nt, Artificial Sequence
  Description of Artificial Sequence: Synthetic oligonucleotide
  Sense strand starting at position 1336 of SEQ ID NO: 317718
ugucuuuagcuggauacau

SEQ ID NO: 506648 - RNA, 19 nt, Artificial Sequence
  Description of Artificial Sequence: Synthetic oligonucleotide
  Antisense strand to SEQ ID NO: 506647
auguauccagcuaaagaca

SEQ ID NO: 506649 - RNA, 19 nt, Artificial Sequence
  Description of Artificial Sequence: Synthetic oligonucleotide
  Sense strand starting at position 1679 of SEQ ID NO: 317718
aacuguuaguuaguaagga

SEQ ID NO: 506650 - RNA, 19 nt, Artificial Sequence
  Description of Artificial Sequence: Synthetic oligonucleotide
  Antisense strand to SEQ ID NO: 506649
uccuuacuaacuaacaguu

SEQ ID NO: 506651 - RNA, 19 nt, Artificial Sequence
  Description of Artificial Sequence: Synthetic oligonucleotide
  Sense strand starting at position 1706 of SEQ ID NO: 317718
agaugagucuuaccugauc

SEQ ID NO: 506652 - RNA, 19 nt, Artificial Sequence
  Description of Artificial Sequence: Synthetic oligonucleotide
  Antisense strand to SEQ ID NO: 506651
gaucagguaagacucaucu

SEQ ID NO: 506653 - RNA, 19 nt, Artificial Sequence
  Description of Artificial Sequence: Synthetic oligonucleotide
  Sense strand starting at position 1709 of SEQ ID NO: 317718
ugagucuuaccugauccca

SEQ ID NO: 506654 - RNA, 19 nt, Artificial Sequence
  Description of Artificial Sequence: Synthetic oligonucleotide
  Antisense strand to SEQ ID NO: 506653
ugggaucagguaagacuca

SEQ ID NO: 506655 - RNA, 19 nt, Artificial Sequence
  Description of Artificial Sequence: Synthetic oligonucleotide
  Sense strand starting at position 1997 of SEQ ID NO: 317718
gucuauaucuuaucaagga

SEQ ID NO: 506656 - RNA, 19 nt, Artificial Sequence
  Description of Artificial Sequence: Synthetic oligonucleotide
  Antisense strand to SEQ ID NO: 506655
uccuugauaagauauagac

SEQ ID NO: 506657 - RNA, 19 nt, Artificial Sequence
  Description of Artificial Sequence: Synthetic oligonucleotide
  Sense strand starting at position 2001 of SEQ ID NO: 317718
auaucuuaucaaggaagca

SEQ ID NO: 506658 - RNA, 19 nt, Artificial Sequence
  Description of Artificial Sequence: Synthetic oligonucleotide
  Antisense strand to SEQ ID NO: 506657
ugcuuccuugauaagauau

SEQ ID NO: 506659 - RNA, 19 nt, Artificial Sequence
  Description of Artificial Sequence: Synthetic oligonucleotide
  Sense strand starting at position 2052 of SEQ ID NO: 317718
gaacuuuguccugggcaaa

SEQ ID NO: 506660 - RNA, 19 nt, Artificial Sequence
  Description of Artificial Sequence: Synthetic oligonucleotide
  Antisense strand to SEQ ID NO: 506659
uuugcccaggacaaaguuc

SEQ ID NO: 506661 - RNA, 19 nt, Artificial Sequence
  Description of Artificial Sequence: Synthetic oligonucleotide
  Sense strand starting at position 2094 of SEQ ID NO: 317718
aggaaugucagaugcggaa

SEQ ID NO: 506662 - RNA, 19 nt, Artificial Sequence
  Description of Artificial Sequence: Synthetic oligonucleotide
  Antisense strand to SEQ ID NO: 506661
uuccgcaucugacauuccu

SEQ ID NO: 506663 - RNA, 19 nt, Artificial Sequence
  Description of Artificial Sequence: Synthetic oligonucleotide
  Sense strand starting at position 2096 of SEQ ID NO: 317718
gaaugucagaugcggaaau

SEQ ID NO: 506664 - RNA, 19 nt, Artificial Sequence
  Description of Artificial Sequence: Synthetic oligonucleotide
  Antisense strand to SEQ ID NO: 506663
auuuccgcaucugacauuc

SEQ ID NO: 506665 - RNA, 19 nt, Artificial Sequence
  Description of Artificial Sequence: Synthetic oligonucleotide
  Sense strand starting at position 2179 of SEQ ID NO: 317718
auguuagcacuggauaguu

SEQ ID NO: 506666 - RNA, 19 nt, Artificial Sequence
  Description of Artificial Sequence: Synthetic oligonucleotide
  Antisense strand to SEQ ID NO: 506665
aacuauccagugcuaacau

SEQ ID NO: 506667 - RNA, 19 nt, Artificial Sequence
  Description of Artificial Sequence: Synthetic oligonucleotide
  Sense strand starting at position 2312 of SEQ ID NO: 317718
gggccaggacuguaaucau

SEQ ID NO: 506668 - RNA, 19 nt, Artificial Sequence
  Description of Artificial Sequence: Synthetic oligonucleotide
  Antisense strand to SEQ ID NO: 506667
augauuacaguccuggccc

SEQ ID NO: 506669 - RNA, 19 nt, Artificial Sequence
  Description of Artificial Sequence: Synthetic oligonucleotide
  Sense strand starting at position 2319 of SEQ ID NO: 317718
gacuguaaucaugaggcca

SEQ ID NO: 506670 - RNA, 19 nt, Artificial Sequence
  Description of Artificial Sequence: Synthetic oligonucleotide
  Antisense strand to SEQ ID NO: 506669
uggccucaugauuacaguc

SEQ ID NO: 506671 - RNA, 19 nt, Artificial Sequence
  Description of Artificial Sequence: Synthetic oligonucleotide
  Sense strand starting at position 2822 of SEQ ID NO: 317718
acgguuguucuagaagaca

SEQ ID NO: 506672 - RNA, 19 nt, Artificial Sequence
  Description of Artificial Sequence: Synthetic oligonucleotide
  Antisense strand to SEQ ID NO: 506671
ugucuucuagaacaaccgu

SEQ ID NO: 506673 - RNA, 19 nt, Artificial Sequence
  Description of Artificial Sequence: Synthetic oligonucleotide
  Sense strand starting at position 2825 of SEQ ID NO: 317718
guuguucuagaagacaguu

SEQ ID NO: 506674 - RNA, 19 nt, Artificial Sequence
  Description of Artificial Sequence: Synthetic oligonucleotide
  Antisense strand to SEQ ID NO: 506673
aacugucuucuagaacaac

SEQ ID NO: 506675 - RNA, 19 nt, Artificial Sequence
  Description of Artificial Sequence: Synthetic oligonucleotide
  Sense strand starting at position 3062 of SEQ ID NO: 317718
auggaauauuacucuguga

SEQ ID NO: 506676 - RNA, 19 nt, Artificial Sequence
  Description of Artificial Sequence: Synthetic oligonucleotide
  Antisense strand to SEQ ID NO: 506675
ucacagaguaauauuccau

SEQ ID NO: 506677 - RNA, 19 nt, Artificial Sequence
  Description of Artificial Sequence: Synthetic oligonucleotide
  Sense strand starting at position 3064 of SEQ ID NO: 317718
ggaauauuacucugugaua

SEQ ID NO: 506678 - RNA, 19 nt, Artificial Sequence
  Description of Artificial Sequence: Synthetic oligonucleotide
  Antisense strand to SEQ ID NO: 506677
uaucacagaguaauauucc

SEQ ID NO: 506679 - RNA, 19 nt, Artificial Sequence
  Description of Artificial Sequence: Synthetic oligonucleotide
  Sense strand starting at position 3093 of SEQ ID NO: 317718
ggaaaugaguuguugaaug

SEQ ID NO: 506680 - RNA, 19 nt, Artificial Sequence
  Description of Artificial Sequence: Synthetic oligonucleotide
  Antisense strand to SEQ ID NO: 506679
cauucaacaacucauuucc

SEQ ID NO: 506681 - RNA, 19 nt, Artificial Sequence
  Description of Artificial Sequence: Synthetic oligonucleotide
  Sense strand starting at position 3095 of SEQ ID NO: 317718
aaaugaguuguugaauguu

SEQ ID NO: 506682 - RNA, 19 nt, Artificial Sequence
  Description of Artificial Sequence: Synthetic oligonucleotide
  Antisense strand to SEQ ID NO: 506681
aacauucaacaacucauuu

SEQ ID NO: 506683 - RNA, 19 nt, Artificial Sequence
  Description of Artificial Sequence: Synthetic oligonucleotide
  Sense strand starting at position 3110 of SEQ ID NO: 317718
uguuguaagcaagagagua

SEQ ID NO: 506684 - RNA, 19 nt, Artificial Sequence
  Description of Artificial Sequence: Synthetic oligonucleotide
  Antisense strand to SEQ ID NO: 506683
uacucucuugcuuacaaca

SEQ ID NO: 506685 - RNA, 19 nt, Artificial Sequence
  Description of Artificial Sequence: Synthetic oligonucleotide
  Sense strand starting at position 3510 of SEQ ID NO: 317718
ccaggaaagcaaugucuga

SEQ ID NO: 506686 - RNA, 19 nt, Artificial Sequence
  Description of Artificial Sequence: Synthetic oligonucleotide
  Antisense strand to SEQ ID NO: 506685
ucagacauugcuuuccugg

SEQ ID NO: 506687 - RNA, 19 nt, Artificial Sequence
  Description of Artificial Sequence: Synthetic oligonucleotide
  Sense strand starting at position 3514 of SEQ ID NO: 317718
gaaagcaaugucugagaug

SEQ ID NO: 506688 - RNA, 19 nt, Artificial Sequence
  Description of Artificial Sequence: Synthetic oligonucleotide
  Antisense strand to SEQ ID NO: 506687
caucucagacauugcuuuc

SEQ ID NO: 506689 - RNA, 19 nt, Artificial Sequence
  Description of Artificial Sequence: Synthetic oligonucleotide
  Sense strand starting at position 3519 of SEQ ID NO: 317718
caaugucugagauggugga

SEQ ID NO: 506690 - RNA, 19 nt, Artificial Sequence
  Description of Artificial Sequence: Synthetic oligonucleotide
  Antisense strand to SEQ ID NO: 506689
uccaccaucucagacauug

SEQ ID NO: 506691 - RNA, 19 nt, Artificial Sequence
  Description of Artificial Sequence: Synthetic oligonucleotide
  Sense strand starting at position 3603 of SEQ ID NO: 317718
ccagaacacuggucuuauu

SEQ ID NO: 506692 - RNA, 19 nt, Artificial Sequence
  Description of Artificial Sequence: Synthetic oligonucleotide
  Antisense strand to SEQ ID NO: 506691
aauaagaccaguguucugg

SEQ ID NO: 506693 - RNA, 19 nt, Artificial Sequence
  Description of Artificial Sequence: Synthetic oligonucleotide
  Sense strand starting at position 3683 of SEQ ID NO: 317718
guaguugugcucucuuggu

SEQ ID NO: 506694 - RNA, 19 nt, Artificial Sequence
  Description of Artificial Sequence: Synthetic oligonucleotide
  Antisense strand to SEQ ID NO: 506693
accaagagagcacaacuac

SEQ ID NO: 506695 - RNA, 19 nt, Artificial Sequence
  Description of Artificial Sequence: Synthetic oligonucleotide
  Sense strand starting at position 3704 of SEQ ID NO: 317718
cugagcucaguguaaucua

SEQ ID NO: 506696 - RNA, 19 nt, Artificial Sequence
  Description of Artificial Sequence: Synthetic oligonucleotide
  Antisense strand to SEQ ID NO: 506695
uagauuacacugagcucag

SEQ ID NO: 506697 - RNA, 19 nt, Artificial Sequence
  Description of Artificial Sequence: Synthetic oligonucleotide
  Sense strand starting at position 3772 of SEQ ID NO: 317718
auccacuugucacugacau

SEQ ID NO: 506698 - RNA, 19 nt, Artificial Sequence
  Description of Artificial Sequence: Synthetic oligonucleotide
  Antisense strand to SEQ ID NO: 506697
augucagugacaaguggau

SEQ ID NO: 506699 - RNA, 19 nt, Artificial Sequence
  Description of Artificial Sequence: Synthetic oligonucleotide
  Sense strand starting at position 3779 of SEQ ID NO: 317718
ugucacugacauugauuau

SEQ ID NO: 506700 - RNA, 19 nt, Artificial Sequence
  Description of Artificial Sequence: Synthetic oligonucleotide
  Antisense strand to SEQ ID NO: 506699
auaaucaaugucagugaca

SEQ ID NO: 506701 - RNA, 19 nt, Artificial Sequence
  Description of Artificial Sequence: Synthetic oligonucleotide
  Sense strand starting at position 3789 of SEQ ID NO: 317718
auugauuauagcugagaag

SEQ ID NO: 506702 - RNA, 19 nt, Artificial Sequence
  Description of Artificial Sequence: Synthetic oligonucleotide
  Antisense strand to SEQ ID NO: 506701
cuucucagcuauaaucaau

SEQ ID NO: 506703 - RNA, 19 nt, Artificial Sequence
  Description of Artificial Sequence: Synthetic oligonucleotide
  Sense strand starting at position 3909 of SEQ ID NO: 317718
gcuacuuuauaaguuagga

SEQ ID NO: 506704 - RNA, 19 nt, Artificial Sequence
  Description of Artificial Sequence: Synthetic oligonucleotide
  Antisense strand to SEQ ID NO: 506703
uccuaacuuauaaaguagc

SEQ ID NO: 506705 - RNA, 19 nt, Artificial Sequence
  Description of Artificial Sequence: Synthetic oligonucleotide
  Sense strand starting at position 3924 of SEQ ID NO: 317718
aggagaggcaaauguucua

SEQ ID NO: 506706 - RNA, 19 nt, Artificial Sequence
  Description of Artificial Sequence: Synthetic oligonucleotide
  Antisense strand to SEQ ID NO: 506705
uagaacauuugccucuccu

SEQ ID NO: 506707 - RNA, 19 nt, Artificial Sequence
  Description of Artificial Sequence: Synthetic oligonucleotide
  Sense strand starting at position 278 of SEQ ID NO: 317719
cagcaauucugagucaggu

SEQ ID NO: 506708 - RNA, 19 nt, Artificial Sequence
  Description of Artificial Sequence: Synthetic oligonucleotide
  Antisense strand to SEQ ID NO: 506707
accugacucagaauugcug

SEQ ID NO: 506709 - RNA, 19 nt, Artificial Sequence
  Description of Artificial Sequence: Synthetic oligonucleotide
  Sense strand starting at position 474 of SEQ ID NO: 317719
gaaacuugucaggagcuca

SEQ ID NO: 506710 - RNA, 19 nt, Artificial Sequence
  Description of Artificial Sequence: Synthetic oligonucleotide
  Antisense strand to SEQ ID NO: 506709
ugagcuccugacaaguuuc

SEQ ID NO: 506711 - RNA, 19 nt, Artificial Sequence
  Description of Artificial Sequence: Synthetic oligonucleotide
  Sense strand starting at position 569 of SEQ ID NO: 317719
uagugaagccucuaaucag

SEQ ID NO: 506712 - RNA, 19 nt, Artificial Sequence
  Description of Artificial Sequence: Synthetic oligonucleotide
  Antisense strand to SEQ ID NO: 506711
cugauuagaggcuucacua

SEQ ID NO: 506713 - RNA, 19 nt, Artificial Sequence
  Description of Artificial Sequence: Synthetic oligonucleotide
  Sense strand starting at position 939 of SEQ ID NO: 317719
guaggaaaguacuuugcaa

SEQ ID NO: 506714 - RNA, 19 nt, Artificial Sequence
  Description of Artificial Sequence: Synthetic oligonucleotide
  Antisense strand to SEQ ID NO: 506713
uugcaaaguacuuuccuac

SEQ ID NO: 506715 - RNA, 19 nt, Artificial Sequence
  Description of Artificial Sequence: Synthetic oligonucleotide
  Sense strand starting at position 970 of SEQ ID NO: 317719
gcaaguuagcaugagggaa

SEQ ID NO: 506716 - RNA, 19 nt, Artificial Sequence
  Description of Artificial Sequence: Synthetic oligonucleotide
  Antisense strand to SEQ ID NO: 506715
uucccucaugcuaacuugc

SEQ ID NO: 506717 - RNA, 19 nt, Artificial Sequence
  Description of Artificial Sequence: Synthetic oligonucleotide
  Sense strand starting at position 1030 of SEQ ID NO: 317719
ggagcuugggcugaucgau

SEQ ID NO: 506718 - RNA, 19 nt, Artificial Sequence
  Description of Artificial Sequence: Synthetic oligonucleotide
  Antisense strand to SEQ ID NO: 506717
aucgaucagcccaagcucc

SEQ ID NO: 506719 - RNA, 19 nt, Artificial Sequence
  Description of Artificial Sequence: Synthetic oligonucleotide
  Sense strand starting at position 1084 of SEQ ID NO: 317719
uuugucagcugggauauuu

SEQ ID NO: 506720 - RNA, 19 nt, Artificial Sequence
  Description of Artificial Sequence: Synthetic oligonucleotide
  Antisense strand to SEQ ID NO: 506719
aaauaucccagcugacaaa

SEQ ID NO: 506721 - RNA, 19 nt, Artificial Sequence
  Description of Artificial Sequence: Synthetic oligonucleotide
  Sense strand starting at position 1107 of SEQ ID NO: 317719
aauugagguguuugaugau

SEQ ID NO: 506722 - RNA, 19 nt, Artificial Sequence
  Description of Artificial Sequence: Synthetic oligonucleotide
  Antisense strand to SEQ ID NO: 506721
aucaucaaacaccucaauu

SEQ ID NO: 506723 - RNA, 19 nt, Artificial Sequence
  Description of Artificial Sequence: Synthetic oligonucleotide
  Sense strand starting at position 1137 of SEQ ID NO: 317719
cugugaguuauguauguua

SEQ ID NO: 506724 - RNA, 19 nt, Artificial Sequence
  Description of Artificial Sequence: Synthetic oligonucleotide
  Antisense strand to SEQ ID NO: 506723
uaacauacauaacucacag

SEQ ID NO: 506725 - RNA, 19 nt, Artificial Sequence
  Description of Artificial Sequence: Synthetic oligonucleotide
  Sense strand starting at position 1139 of SEQ ID NO: 317719
gugaguuauguauguuauc

SEQ ID NO: 506726 - RNA, 19 nt, Artificial Sequence
  Description of Artificial Sequence: Synthetic oligonucleotide
  Antisense strand to SEQ ID NO: 506725
gauaacauacauaacucac

SEQ ID NO: 506727 - RNA, 19 nt, Artificial Sequence
  Description of Artificial Sequence: Synthetic oligonucleotide
  Sense strand starting at position 1140 of SEQ ID NO: 317719
ugaguuauguauguuaucu

SEQ ID NO: 506728 - RNA, 19 nt, Artificial Sequence
  Description of Artificial Sequence: Synthetic oligonucleotide
  Antisense strand to SEQ ID NO: 506727
agauaacauacauaacuca

SEQ ID NO: 506729 - RNA, 19 nt, Artificial Sequence
  Description of Artificial Sequence: Synthetic oligonucleotide
  Sense strand starting at position 1148 of SEQ ID NO: 317719
guauguuaucugggcagga

SEQ ID NO: 506730 - RNA, 19 nt, Artificial Sequence
  Description of Artificial Sequence: Synthetic oligonucleotide
  Antisense strand to SEQ ID NO: 506729
uccugcccagauaacauac

SEQ ID NO: 506731 - RNA, 19 nt, Artificial Sequence
  Description of Artificial Sequence: Synthetic oligonucleotide
  Sense strand starting at position 1149 of SEQ ID NO: 317719
uauguuaucugggcaggaa

SEQ ID NO: 506732 - RNA, 19 nt, Artificial Sequence
  Description of Artificial Sequence: Synthetic oligonucleotide
  Antisense strand to SEQ ID NO: 506731
uuccugcccagauaacaua

SEQ ID NO: 506733 - RNA, 19 nt, Artificial Sequence
  Description of Artificial Sequence: Synthetic oligonucleotide
  Sense strand starting at position 1150 of SEQ ID NO: 317719
auguuaucugggcaggaag

SEQ ID NO: 506734 - RNA, 19 nt, Artificial Sequence
  Description of Artificial Sequence: Synthetic oligonucleotide
  Antisense strand to SEQ ID NO: 506733
cuuccugcccagauaacau

SEQ ID NO: 506735 - RNA, 19 nt, Artificial Sequence
  Description of Artificial Sequence: Synthetic oligonucleotide
  Sense strand starting at position 1170 of SEQ ID NO: 317719
ccaaauguucugggccaua

SEQ ID NO: 506736 - RNA, 19 nt, Artificial Sequence
  Description of Artificial Sequence: Synthetic oligonucleotide
  Antisense strand to SEQ ID NO: 506735
uauggcccagaacauuugg

SEQ ID NO: 506737 - RNA, 19 nt, Artificial Sequence
  Description of Artificial Sequence: Synthetic oligonucleotide
  Sense strand starting at position 1173 of SEQ ID NO: 317719
aauguucugggccauauau

SEQ ID NO: 506738 - RNA, 19 nt, Artificial Sequence
  Description of Artificial Sequence: Synthetic oligonucleotide
  Antisense strand to SEQ ID NO: 506737
auauauggcccagaacauu

SEQ ID NO: 506739 - RNA, 19 nt, Artificial Sequence
  Description of Artificial Sequence: Synthetic oligonucleotide
  Sense strand starting at position 1183 of SEQ ID NO: 317719
gccauauauccuggacugu

SEQ ID NO: 506740 - RNA, 19 nt, Artificial Sequence
  Description of Artificial Sequence: Synthetic oligonucleotide
  Antisense strand to SEQ ID NO: 506739
acaguccaggauauauggc

SEQ ID NO: 506741 - RNA, 19 nt, Artificial Sequence
  Description of Artificial Sequence: Synthetic oligonucleotide
  Sense strand starting at position 1273 of SEQ ID NO: 317719
ugaagaaaggcauguuuau

SEQ ID NO: 506742 - RNA, 19 nt, Artificial Sequence
  Description of Artificial Sequence: Synthetic oligonucleotide
  Antisense strand to SEQ ID NO: 506741
auaaacaugccuuucuuca

SEQ ID NO: 506743 - RNA, 19 nt, Artificial Sequence
  Description of Artificial Sequence: Synthetic oligonucleotide
  Sense strand starting at position 1407 of SEQ ID NO: 317719
cugcccaaggccugagauu

SEQ ID NO: 506744 - RNA, 19 nt, Artificial Sequence
  Description of Artificial Sequence: Synthetic oligonucleotide
  Antisense strand to SEQ ID NO: 506743
aaucucaggccuugggcag

SEQ ID NO: 506745 - RNA, 19 nt, Artificial Sequence
  Description of Artificial Sequence: Synthetic oligonucleotide
  Sense strand starting at position 1416 of SEQ ID NO: 317719
gccugagauucugagaauu

SEQ ID NO: 506746 - RNA, 19 nt, Artificial Sequence
  Description of Artificial Sequence: Synthetic oligonucleotide
  Antisense strand to SEQ ID NO: 506745
aauucucagaaucucaggc

SEQ ID NO: 506747 - RNA, 19 nt, Artificial Sequence
  Description of Artificial Sequence: Synthetic oligonucleotide
  Sense strand starting at position 1418 of SEQ ID NO: 317719
cugagauucugagaauuaa

SEQ ID NO: 506748 - RNA, 19 nt, Artificial Sequence
  Description of Artificial Sequence: Synthetic oligonucleotide
  Antisense strand to SEQ ID NO: 506747
uuaauucucagaaucucag

SEQ ID NO: 506749 - RNA, 19 nt, Artificial Sequence
  Description of Artificial Sequence: Synthetic oligonucleotide
  Sense strand starting at position 1436 of SEQ ID NO: 317719
aaaugccugggcuagaaau

SEQ ID NO: 506750 - RNA, 19 nt, Artificial Sequence
  Description of Artificial Sequence: Synthetic oligonucleotide
  Antisense strand to SEQ ID NO: 506749
auuucuagcccaggcauuu

SEQ ID NO: 506751 - RNA, 19 nt, Artificial Sequence
  Description of Artificial Sequence: Synthetic oligonucleotide
  Sense strand starting at position 1521 of SEQ ID NO: 317719
cugcaaagcauugguugua

SEQ ID NO: 506752 - RNA, 19 nt, Artificial Sequence
  Description of Artificial Sequence: Synthetic oligonucleotide
  Antisense strand to SEQ ID NO: 506751
uacaaccaaugcuuugcag

SEQ ID NO: 506753 - RNA, 19 nt, Artificial Sequence
  Description of Artificial Sequence: Synthetic oligonucleotide
  Sense strand starting at position 1667 of SEQ ID NO: 317719
gucguaugccaauuguagu

SEQ ID NO: 506754 - RNA, 19 nt, Artificial Sequence
  Description of Artificial Sequence: Synthetic oligonucleotide
  Antisense strand to SEQ ID NO: 506753
acuacaauuggcauacgac

SEQ ID NO: 506755 - RNA, 19 nt, Artificial Sequence
  Description of Artificial Sequence: Synthetic oligonucleotide
  Sense strand starting at position 1688 of SEQ ID NO: 317719
cacuacuaaguucggauaa

SEQ ID NO: 506756 - RNA, 19 nt, Artificial Sequence
  Description of Artificial Sequence: Synthetic oligonucleotide
  Antisense strand to SEQ ID NO: 506755
uuauccgaacuuaguagug

SEQ ID NO: 506757 - RNA, 19 nt, Artificial Sequence
  Description of Artificial Sequence: Synthetic oligonucleotide
  Sense strand starting at position 1985 of SEQ ID NO: 317719
cugugaagggugugacuau

SEQ ID NO: 506758 - RNA, 19 nt, Artificial Sequence
  Description of Artificial Sequence: Synthetic oligonucleotide
  Antisense strand to SEQ ID NO: 506757
auagucacacccuucacag

SEQ ID NO: 506759 - RNA, 19 nt, Artificial Sequence
  Description of Artificial Sequence: Synthetic oligonucleotide
  Sense strand starting at position 2002 of SEQ ID NO: 317719
auggaaguauggucaaguu

SEQ ID NO: 506760 - RNA, 19 nt, Artificial Sequence
  Description of Artificial Sequence: Synthetic oligonucleotide
  Antisense strand to SEQ ID NO: 506759
aacuugaccauacuuccau

SEQ ID NO: 506761 - RNA, 19 nt, Artificial Sequence
  Description of Artificial Sequence: Synthetic oligonucleotide
  Sense strand starting at position 2200 of SEQ ID NO: 317719
gaaauaaaguaucgauaca

SEQ ID NO: 506762 - RNA, 19 nt, Artificial Sequence
  Description of Artificial Sequence: Synthetic oligonucleotide
  Antisense strand to SEQ ID NO: 506761
uguaucgauacuuuauuuc

SEQ ID NO: 506763 - RNA, 19 nt, Artificial Sequence
  Description of Artificial Sequence: Synthetic oligonucleotide
  Sense strand starting at position 2231 of SEQ ID NO: 317719
gauagaucgcaagagcauu

SEQ ID NO: 506764 - RNA, 19 nt, Artificial Sequence
  Description of Artificial Sequence: Synthetic oligonucleotide
  Antisense strand to SEQ ID NO: 506763
aaugcucuugcgaucuauc

SEQ ID NO: 506765 - RNA, 19 nt, Artificial Sequence
  Description of Artificial Sequence: Synthetic oligonucleotide
  Sense strand starting at position 2290 of SEQ ID NO: 317719
gugugaagcuguguaugua

SEQ ID NO: 506766 - RNA, 19 nt, Artificial Sequence
  Description of Artificial Sequence: Synthetic oligonucleotide
  Antisense strand to SEQ ID NO: 506765
uacauacacagcuucacac

SEQ ID NO: 506767 - RNA, 19 nt, Artificial Sequence
  Description of Artificial Sequence: Synthetic oligonucleotide
  Sense strand starting at position 2291 of SEQ ID NO: 317719
ugugaagcuguguauguaa

SEQ ID NO: 506768 - RNA, 19 nt, Artificial Sequence
  Description of Artificial Sequence: Synthetic oligonucleotide
  Antisense strand to SEQ ID NO: 506767
uuacauacacagcuucaca

SEQ ID NO: 506769 - RNA, 19 nt, Artificial Sequence
  Description of Artificial Sequence: Synthetic oligonucleotide
  Sense strand starting at position 2293 of SEQ ID NO: 317719
ugaagcuguguauguaaca

SEQ ID NO: 506770 - RNA, 19 nt, Artificial Sequence
  Description of Artificial Sequence: Synthetic oligonucleotide
  Antisense strand to SEQ ID NO: 506769
uguuacauacacagcuuca

SEQ ID NO: 506771 - RNA, 19 nt, Artificial Sequence
  Description of Artificial Sequence: Synthetic oligonucleotide
  Sense strand starting at position 2294 of SEQ ID NO: 317719
gaagcuguguauguaacau

SEQ ID NO: 506772 - RNA, 19 nt, Artificial Sequence
  Description of Artificial Sequence: Synthetic oligonucleotide
  Antisense strand to SEQ ID NO: 506771
auguuacauacacagcuuc

SEQ ID NO: 506773 - RNA, 19 nt, Artificial Sequence
  Description of Artificial Sequence: Synthetic oligonucleotide
  Sense strand starting at position 2394 of SEQ ID NO: 317719
gagggagaucuucgugaug

SEQ ID NO: 506774 - RNA, 19 nt, Artificial Sequence
  Description of Artificial Sequence: Synthetic oligonucleotide
  Antisense strand to SEQ ID NO: 506773
caucacgaagaucucccuc

SEQ ID NO: 506775 - RNA, 19 nt, Artificial Sequence
  Description of Artificial Sequence: Synthetic oligonucleotide
  Sense strand starting at position 2421 of SEQ ID NO: 317719
guucuauaccuugauguga

SEQ ID NO: 506776 - RNA, 19 nt, Artificial Sequence
  Description of Artificial Sequence: Synthetic oligonucleotide
  Antisense strand to SEQ ID NO: 506775
ucacaucaagguauagaac

SEQ ID NO: 506777 - RNA, 19 nt, Artificial Sequence
  Description of Artificial Sequence: Synthetic oligonucleotide
  Sense strand starting at position 2429 of SEQ ID NO: 317719
ccuugaugugauggugguu

SEQ ID NO: 506778 - RNA, 19 nt, Artificial Sequence
  Description of Artificial Sequence: Synthetic oligonucleotide
  Antisense strand to SEQ ID NO: 506777
aaccaccaucacaucaagg

SEQ ID NO: 506779 - RNA, 19 nt, Artificial Sequence
  Description of Artificial Sequence: Synthetic oligonucleotide
  Sense strand starting at position 2520 of SEQ ID NO: 317719
gcugccuucuaacuaaaug

SEQ ID NO: 506780 - RNA, 19 nt, Artificial Sequence
  Description of Artificial Sequence: Synthetic oligonucleotide
  Antisense strand to SEQ ID NO: 506779
cauuuaguuagaaggcagc

SEQ ID NO: 506781 - RNA, 19 nt, Artificial Sequence
  Description of Artificial Sequence: Synthetic oligonucleotide
  Sense strand starting at position 2585 of SEQ ID NO: 317719
ccaggaugguucuuuggga

SEQ ID NO: 506782 - RNA, 19 nt, Artificial Sequence
  Description of Artificial Sequence: Synthetic oligonucleotide
  Antisense strand to SEQ ID NO: 506781
ucccaaagaaccauccugg

SEQ ID NO: 506783 - RNA, 19 nt, Artificial Sequence
  Description of Artificial Sequence: Synthetic oligonucleotide
  Sense strand starting at position 2590 of SEQ ID NO: 317719
augguucuuugggacaacu

SEQ ID NO: 506784 - RNA, 19 nt, Artificial Sequence
  Description of Artificial Sequence: Synthetic oligonucleotide
  Antisense strand to SEQ ID NO: 506783
aguugucccaaagaaccau

SEQ ID NO: 506785 - RNA, 19 nt, Artificial Sequence
  Description of Artificial Sequence: Synthetic oligonucleotide
  Sense strand starting at position 3326 of SEQ ID NO: 317719
uuccgaugggcuuaagaaa

SEQ ID NO: 506786 - RNA, 19 nt, Artificial Sequence
  Description of Artificial Sequence: Synthetic oligonucleotide
  Antisense strand to SEQ ID NO: 506785
uuucuuaagcccaucggaa

SEQ ID NO: 506787 - RNA, 19 nt, Artificial Sequence
  Description of Artificial Sequence: Synthetic oligonucleotide
  Sense strand starting at position 41 of SEQ ID NO: 317720
gguccugagaaaugucacu

SEQ ID NO: 506788 - RNA, 19 nt, Artificial Sequence
  Description of Artificial Sequence: Synthetic oligonucleotide
  Antisense strand to SEQ ID NO: 506787
agugacauuucucaggacc

SEQ ID NO: 506789 - RNA, 19 nt, Artificial Sequence
  Description of Artificial Sequence: Synthetic oligonucleotide
  Sense strand starting at position 46 of SEQ ID NO: 317720
ugagaaaugucacugccug

SEQ ID NO: 506790 - RNA, 19 nt, Artificial Sequence
  Description of Artificial Sequence: Synthetic oligonucleotide
  Antisense strand to SEQ ID NO: 506789
caggcagugacauuucuca

SEQ ID NO: 506791 - RNA, 19 nt, Artificial Sequence
  Description of Artificial Sequence: Synthetic oligonucleotide
  Sense strand starting at position 222 of SEQ ID NO: 317720
ucgagucugucuuuaaaga

SEQ ID NO: 506792 - RNA, 19 nt, Artificial Sequence
  Description of Artificial Sequence: Synthetic oligonucleotide
  Antisense strand to SEQ ID NO: 506791
ucuuuaaagacagacucga

SEQ ID NO: 506793 - RNA, 19 nt, Artificial Sequence
  Description of Artificial Sequence: Synthetic oligonucleotide
  Sense strand starting at position 223 of SEQ ID NO: 317720
cgagucugucuuuaaagau

SEQ ID NO: 506794 - RNA, 19 nt, Artificial Sequence
  Description of Artificial Sequence: Synthetic oligonucleotide
  Antisense strand to SEQ ID NO: 506793
aucuuuaaagacagacucg

SEQ ID NO: 506795 - RNA, 19 nt, Artificial Sequence
  Description of Artificial Sequence: Synthetic oligonucleotide
  Sense strand starting at position 230 of SEQ ID NO: 317720
gucuuuaaagaugaguacu

SEQ ID NO: 506796 - RNA, 19 nt, Artificial Sequence
  Description of Artificial Sequence: Synthetic oligonucleotide
  Antisense strand to SEQ ID NO: 506795
aguacucaucuuuaaagac

SEQ ID NO: 506797 - RNA, 19 nt, Artificial Sequence
  Description of Artificial Sequence: Synthetic oligonucleotide
  Sense strand starting at position 232 of SEQ ID NO: 317720
cuuuaaagaugaguacuuu

SEQ ID NO: 506798 - RNA, 19 nt, Artificial Sequence
  Description of Artificial Sequence: Synthetic oligonucleotide
  Antisense strand to SEQ ID NO: 506797
aaaguacucaucuuuaaag

SEQ ID NO: 506799 - RNA, 19 nt, Artificial Sequence
  Description of Artificial Sequence: Synthetic oligonucleotide
  Sense strand starting at position 443 of SEQ ID NO: 317720
aagucuguauuugaaagga

SEQ ID NO: 506800 - RNA, 19 nt, Artificial Sequence
  Description of Artificial Sequence: Synthetic oligonucleotide
  Antisense strand to SEQ ID NO: 506799
uccuuucaaauacagacuu

SEQ ID NO: 506801 - RNA, 19 nt, Artificial Sequence
  Description of Artificial Sequence: Synthetic oligonucleotide
  Sense strand starting at position 633 of SEQ ID NO: 317720
ggcgaaucacuauggauug

SEQ ID NO: 506802 - RNA, 19 nt, Artificial Sequence
  Description of Artificial Sequence: Synthetic oligonucleotide
  Antisense strand to SEQ ID NO: 506801
caauccauagugauucgcc

SEQ ID NO: 506803 - RNA, 19 nt, Artificial Sequence
  Description of Artificial Sequence: Synthetic oligonucleotide
  Sense strand starting at position 644 of SEQ ID NO: 317720
auggauugguguccucuga

SEQ ID NO: 506804 - RNA, 19 nt, Artificial Sequence
  Description of Artificial Sequence: Synthetic oligonucleotide
  Antisense strand to SEQ ID NO: 506803
ucagaggacaccaauccau

SEQ ID NO: 506805 - RNA, 19 nt, Artificial Sequence
  Description of Artificial Sequence: Synthetic oligonucleotide
  Sense strand starting at position 648 of SEQ ID NO: 317720
auugguguccucugagcca

SEQ ID NO: 506806 - RNA, 19 nt, Artificial Sequence
  Description of Artificial Sequence: Synthetic oligonucleotide
  Antisense strand to SEQ ID NO: 506805
uggcucagaggacaccaau

SEQ ID NO: 506807 - RNA, 19 nt, Artificial Sequence
  Description of Artificial Sequence: Synthetic oligonucleotide
  Sense strand starting at position 763 of SEQ ID NO: 317720
uucccuggugaauaacuua

SEQ ID NO: 506808 - RNA, 19 nt, Artificial Sequence
  Description of Artificial Sequence: Synthetic oligonucleotide
  Antisense strand to SEQ ID NO: 506807
uaaguuauucaccagggaa

SEQ ID NO: 506809 - RNA, 19 nt, Artificial Sequence
  Description of Artificial Sequence: Synthetic oligonucleotide
  Sense strand starting at position 839 of SEQ ID NO: 317720
uuacucuauuggugaauuu

SEQ ID NO: 506810 - RNA, 19 nt, Artificial Sequence
  Description of Artificial Sequence: Synthetic oligonucleotide
  Antisense strand to SEQ ID NO: 506809
aaauucaccaauagaguaa

SEQ ID NO: 506811 - RNA, 19 nt, Artificial Sequence
  Description of Artificial Sequence: Synthetic oligonucleotide
  Sense strand starting at position 857 of SEQ ID NO: 317720
ucagauucuguccacacau

SEQ ID NO: 506812 - RNA, 19 nt, Artificial Sequence
  Description of Artificial Sequence: Synthetic oligonucleotide
  Antisense strand to SEQ ID NO: 506811
auguguggacagaaucuga

SEQ ID NO: 506813 - RNA, 19 nt, Artificial Sequence
  Description of Artificial Sequence: Synthetic oligonucleotide
  Sense strand starting at position 1054 of SEQ ID NO: 317720
gggauucucuaacauaauu

SEQ ID NO: 506814 - RNA, 19 nt, Artificial Sequence
  Description of Artificial Sequence: Synthetic oligonucleotide
  Antisense strand to SEQ ID NO: 506813
aauuauguuagagaauccc

SEQ ID NO: 506815 - RNA, 19 nt, Artificial Sequence
  Description of Artificial Sequence: Synthetic oligonucleotide
  Sense strand starting at position 1091 of SEQ ID NO: 317720
cuuaaaugaccacguuaug

SEQ ID NO: 506816 - RNA, 19 nt, Artificial Sequence
  Description of Artificial Sequence: Synthetic oligonucleotide
  Antisense strand to SEQ ID NO: 506815
cauaacguggucauuuaag

SEQ ID NO: 506817 - RNA, 19 nt, Artificial Sequence
  Description of Artificial Sequence: Synthetic oligonucleotide
  Sense strand starting at position 1106 of SEQ ID NO: 317720
uaugaaaccuggcaggaaa

SEQ ID NO: 506818 - RNA, 19 nt, Artificial Sequence
  Description of Artificial Sequence: Synthetic oligonucleotide
  Antisense strand to SEQ ID NO: 506817
uuuccugccagguuucaua

SEQ ID NO: 506819 - RNA, 19 nt, Artificial Sequence
  Description of Artificial Sequence: Synthetic oligonucleotide
  Sense strand starting at position 1262 of SEQ ID NO: 317720
gaaguauagucuuugcuuu

SEQ ID NO: 506820 - RNA, 19 nt, Artificial Sequence
  Description of Artificial Sequence: Synthetic oligonucleotide
  Antisense strand to SEQ ID NO: 506819
aaagcaaagacuauacuuc

SEQ ID NO: 506821 - RNA, 19 nt, Artificial Sequence
  Description of Artificial Sequence: Synthetic oligonucleotide
  Sense strand starting at position 1293 of SEQ ID NO: 317720
agcuguguaacuggugaau

SEQ ID NO: 506822 - RNA, 19 nt, Artificial Sequence
  Description of Artificial Sequence: Synthetic oligonucleotide
  Antisense strand to SEQ ID NO: 506821
auucaccaguuacacagcu

SEQ ID NO: 506823 - RNA, 19 nt, Artificial Sequence
  Description of Artificial Sequence: Synthetic oligonucleotide
  Sense strand starting at position 1463 of SEQ ID NO: 317720
uuucgauagguccacaaga

SEQ ID NO: 506824 - RNA, 19 nt, Artificial Sequence
  Description of Artificial Sequence: Synthetic oligonucleotide
  Antisense strand to SEQ ID NO: 506823
ucuuguggaccuaucgaaa

SEQ ID NO: 506825 - RNA, 19 nt, Artificial Sequence
  Description of Artificial Sequence: Synthetic oligonucleotide
  Sense strand starting at position 1491 of SEQ ID NO: 317720
cccucuuagucucuaagga

SEQ ID NO: 506826 - RNA, 19 nt, Artificial Sequence
  Description of Artificial Sequence: Synthetic oligonucleotide
  Antisense strand to SEQ ID NO: 506825
uccuuagagacuaagaggg

SEQ ID NO: 506827 - RNA, 19 nt, Artificial Sequence
  Description of Artificial Sequence: Synthetic oligonucleotide
  Sense strand starting at position 1492 of SEQ ID NO: 317720
ccucuuagucucuaaggaa

SEQ ID NO: 506828 - RNA, 19 nt, Artificial Sequence
  Description of Artificial Sequence: Synthetic oligonucleotide
  Antisense strand to SEQ ID NO: 506827
uuccuuagagacuaagagg

SEQ ID NO: 506829 - RNA, 19 nt, Artificial Sequence
  Description of Artificial Sequence: Synthetic oligonucleotide
  Sense strand starting at position 1535 of SEQ ID NO: 317720
cgcaaugaggcuugaaauc

SEQ ID NO: 506830 - RNA, 19 nt, Artificial Sequence
  Description of Artificial Sequence: Synthetic oligonucleotide
  Antisense strand to SEQ ID NO: 506829
gauuucaagccucauugcg

SEQ ID NO: 506831 - RNA, 19 nt, Artificial Sequence
  Description of Artificial Sequence: Synthetic oligonucleotide
  Sense strand starting at position 2127 of SEQ ID NO: 317720
aucugagagcuuuguagag

SEQ ID NO: 506832 - RNA, 19 nt, Artificial Sequence
  Description of Artificial Sequence: Synthetic oligonucleotide
  Antisense strand to SEQ ID NO: 506831
cucuacaaagcucucagau

SEQ ID NO: 506833 - RNA, 19 nt, Artificial Sequence
  Description of Artificial Sequence: Synthetic oligonucleotide
  Sense strand starting at position 2373 of SEQ ID NO: 317720
gggcauugucgugaggcaa

SEQ ID NO: 506834 - RNA, 19 nt, Artificial Sequence
  Description of Artificial Sequence: Synthetic oligonucleotide
  Antisense strand to SEQ ID NO: 506833
uugccucacgacaaugccc

SEQ ID NO: 506835 - RNA, 19 nt, Artificial Sequence
  Description of Artificial Sequence: Synthetic oligonucleotide
  Sense strand starting at position 2374 of SEQ ID NO: 317720
ggcauugucgugaggcaac

SEQ ID NO: 506836 - RNA, 19 nt, Artificial Sequence
  Description of Artificial Sequence: Synthetic oligonucleotide
  Antisense strand to SEQ ID NO: 506835
guugccucacgacaaugcc

SEQ ID NO: 506837 - RNA, 19 nt, Artificial Sequence
  Description of Artificial Sequence: Synthetic oligonucleotide
  Sense strand starting at position 2444 of SEQ ID NO: 317720
ggauuucucuaguggagaa

SEQ ID NO: 506838 - RNA, 19 nt, Artificial Sequence
  Description of Artificial Sequence: Synthetic oligonucleotide
  Antisense strand to SEQ ID NO: 506837
uucuccacuagagaaaucc

SEQ ID NO: 506839 - RNA, 19 nt, Artificial Sequence
  Description of Artificial Sequence: Synthetic oligonucleotide
  Sense strand starting at position 2637 of SEQ ID NO: 317720
ugcaguguugugggaaacu

SEQ ID NO: 506840 - RNA, 19 nt, Artificial Sequence
  Description of Artificial Sequence: Synthetic oligonucleotide
  Antisense strand to SEQ ID NO: 506839
aguuucccacaacacugca

SEQ ID NO: 506841 - RNA, 19 nt, Artificial Sequence
  Description of Artificial Sequence: Synthetic oligonucleotide
  Sense strand starting at position 2662 of SEQ ID NO: 317720
cggagagaccgaugugaag

SEQ ID NO: 506842 - RNA, 19 nt, Artificial Sequence
  Description of Artificial Sequence: Synthetic oligonucleotide
  Antisense strand to SEQ ID NO: 506841
cuucacaucggucucuccg

SEQ ID NO: 506843 - RNA, 19 nt, Artificial Sequence
  Description of Artificial Sequence: Synthetic oligonucleotide
  Sense strand starting at position 2802 of SEQ ID NO: 317720
gcagcuaaucaugauaggu

SEQ ID NO: 506844 - RNA, 19 nt, Artificial Sequence
  Description of Artificial Sequence: Synthetic oligonucleotide
  Antisense strand to SEQ ID NO: 506843
accuaucaugauuagcugc

SEQ ID NO: 506845 - RNA, 19 nt, Artificial Sequence
  Description of Artificial Sequence: Synthetic oligonucleotide
  Sense strand starting at position 3052 of SEQ ID NO: 317720
cuuucuggacacuguuaua

SEQ ID NO: 506846 - RNA, 19 nt, Artificial Sequence
  Description of Artificial Sequence: Synthetic oligonucleotide
  Antisense strand to SEQ ID NO: 506845
uauaacaguguccagaaag

SEQ ID NO: 506847 - RNA, 19 nt, Artificial Sequence
  Description of Artificial Sequence: Synthetic oligonucleotide
  Sense strand starting at position 3315 of SEQ ID NO: 317720
gacugucugugcucagaca

SEQ ID NO: 506848 - RNA, 19 nt, Artificial Sequence
  Description of Artificial Sequence: Synthetic oligonucleotide
  Antisense strand to SEQ ID NO: 506847
ugucugagcacagacaguc

SEQ ID NO: 506849 - RNA, 19 nt, Artificial Sequence
  Description of Artificial Sequence: Synthetic oligonucleotide
  Sense strand starting at position 3348 of SEQ ID NO: 317720
ggcacccaggcuuauuaau

SEQ ID NO: 506850 - RNA, 19 nt, Artificial Sequence
  Description of Artificial Sequence: Synthetic oligonucleotide
  Antisense strand to SEQ ID NO: 506849
auuaauaagccugggugcc

SEQ ID NO: 506851 - RNA, 19 nt, Artificial Sequence
  Description of Artificial Sequence: Synthetic oligonucleotide
  Sense strand starting at position 3356 of SEQ ID NO: 317720
ggcuuauuaaugugaacag

SEQ ID NO: 506852 - RNA, 19 nt, Artificial Sequence
  Description of Artificial Sequence: Synthetic oligonucleotide
  Antisense strand to SEQ ID NO: 506851
cuguucacauuaauaagcc

SEQ ID NO: 506853 - RNA, 19 nt, Artificial Sequence
  Description of Artificial Sequence: Synthetic oligonucleotide
  Sense strand starting at position 3398 of SEQ ID NO: 317720
gcugaacagugagcucaaa

SEQ ID NO: 506854 - RNA, 19 nt, Artificial Sequence
  Description of Artificial Sequence: Synthetic oligonucleotide
  Antisense strand to SEQ ID NO: 506853
uuugagcucacuguucagc

SEQ ID NO: 506855 - RNA, 19 nt, Artificial Sequence
  Description of Artificial Sequence: Synthetic oligonucleotide
  Sense strand starting at position 3468 of SEQ ID NO: 317720
ggguauacuuaagauggau

SEQ ID NO: 506856 - RNA, 19 nt, Artificial Sequence
  Description of Artificial Sequence: Synthetic oligonucleotide
  Antisense strand to SEQ ID NO: 506855
auccaucuuaaguauaccc

SEQ ID NO: 506857 - RNA, 19 nt, Artificial Sequence
  Description of Artificial Sequence: Synthetic oligonucleotide
  Sense strand starting at position 3547 of SEQ ID NO: 317720
gacagacauucuucgugga

SEQ ID NO: 506858 - RNA, 19 nt, Artificial Sequence
  Description of Artificial Sequence: Synthetic oligonucleotide
  Antisense strand to SEQ ID NO: 506857
uccacgaagaaugucuguc

SEQ ID NO: 506859 - RNA, 19 nt, Artificial Sequence
  Description of Artificial Sequence: Synthetic oligonucleotide
  Sense strand starting at position 3551 of SEQ ID NO: 317720
gacauucuucguggaggga

SEQ ID NO: 506860 - RNA, 19 nt, Artificial Sequence
  Description of Artificial Sequence: Synthetic oligonucleotide
  Antisense strand to SEQ ID NO: 506859
ucccuccacgaagaauguc

SEQ ID NO: 506861 - RNA, 19 nt, Artificial Sequence
  Description of Artificial Sequence: Synthetic oligonucleotide
  Sense strand starting at position 3569 of SEQ ID NO: 317720
aggugauuagcauguggga

SEQ ID NO: 506862 - RNA, 19 nt, Artificial Sequence
  Description of Artificial Sequence: Synthetic oligonucleotide
  Antisense strand to SEQ ID NO: 506861
ucccacaugcuaaucaccu

SEQ ID NO: 506863 - RNA, 19 nt, Artificial Sequence
  Description of Artificial Sequence: Synthetic oligonucleotide
  Sense strand starting at position 3784 of SEQ ID NO: 317720
guuggauuccuccaugcug

SEQ ID NO: 506864 - RNA, 19 nt, Artificial Sequence
  Description of Artificial Sequence: Synthetic oligonucleotide
  Antisense strand to SEQ ID NO: 506863
cagcauggaggaauccaac

SEQ ID NO: 506865 - RNA, 19 nt, Artificial Sequence
  Description of Artificial Sequence: Synthetic oligonucleotide
  Sense strand starting at position 3943 of SEQ ID NO: 317720
cgcaucaugcaguaggaaa

SEQ ID NO: 506866 - RNA, 19 nt, Artificial Sequence
  Description of Artificial Sequence: Synthetic oligonucleotide
  Antisense strand to SEQ ID NO: 506865
uuuccuacugcaugaugcg

SEQ ID NO: 506867 - RNA, 19 nt, Artificial Sequence
  Description of Artificial Sequence: Synthetic oligonucleotide
  Sense strand starting at position 82 of SEQ ID NO: 317721
agcaucagugauugagaca

SEQ ID NO: 506868 - RNA, 19 nt, Artificial Sequence
  Description of Artificial Sequence: Synthetic oligonucleotide
  Antisense strand to SEQ ID NO: 506867
ugucucaaucacugaugcu

SEQ ID NO: 506869 - RNA, 19 nt, Artificial Sequence
  Description of Artificial Sequence: Synthetic oligonucleotide
  Sense strand starting at position 323 of SEQ ID NO: 317721
ccuguauaugcagauauga

SEQ ID NO: 506870 - RNA, 19 nt, Artificial Sequence
  Description of Artificial Sequence: Synthetic oligonucleotide
  Antisense strand to SEQ ID NO: 506869
ucauaucugcauauacagg

SEQ ID NO: 506871 - RNA, 19 nt, Artificial Sequence
  Description of Artificial Sequence: Synthetic oligonucleotide
  Sense strand starting at position 379 of SEQ ID NO: 317721
aguuguaccauggaaugua

SEQ ID NO: 506872 - RNA, 19 nt, Artificial Sequence
  Description of Artificial Sequence: Synthetic oligonucleotide
  Antisense strand to SEQ ID NO: 506871
uacauuccaugguacaacu

SEQ ID NO: 506873 - RNA, 19 nt, Artificial Sequence
  Description of Artificial Sequence: Synthetic oligonucleotide
  Sense strand starting at position 711 of SEQ ID NO: 317721
gaaacaaauucugcaguga

SEQ ID NO: 506874 - RNA, 19 nt, Artificial Sequence
  Description of Artificial Sequence: Synthetic oligonucleotide
  Antisense strand to SEQ ID NO: 506873
ucacugcagaauuuguuuc

SEQ ID NO: 506875 - RNA, 19 nt, Artificial Sequence
  Description of Artificial Sequence: Synthetic oligonucleotide
  Sense strand starting at position 727 of SEQ ID NO: 317721
ugaaucugauguguuacaa

SEQ ID NO: 506876 - RNA, 19 nt, Artificial Sequence
  Description of Artificial Sequence: Synthetic oligonucleotide
  Antisense strand to SEQ ID NO: 506875
uuguaacacaucagauuca

SEQ ID NO: 506877 - RNA, 19 nt, Artificial Sequence
  Description of Artificial Sequence: Synthetic oligonucleotide
  Sense strand starting at position 744 of SEQ ID NO: 317721
aaugaagggcuguagugau

SEQ ID NO: 506878 - RNA, 19 nt, Artificial Sequence
  Description of Artificial Sequence: Synthetic oligonucleotide
  Antisense strand to SEQ ID NO: 506877
aucacuacagcccuucauu

SEQ ID NO: 506879 - RNA, 19 nt, Artificial Sequence
  Description of Artificial Sequence: Synthetic oligonucleotide
  Sense strand starting at position 766 of SEQ ID NO: 317721
uggaaauguguggagaguu

SEQ ID NO: 506880 - RNA, 19 nt, Artificial Sequence
  Description of Artificial Sequence: Synthetic oligonucleotide
  Antisense strand to SEQ ID NO: 506879
aacucuccacacauuucca

SEQ ID NO: 506881 - RNA, 19 nt, Artificial Sequence
  Description of Artificial Sequence: Synthetic oligonucleotide
  Sense strand starting at position 773 of SEQ ID NO: 317721
guguggagaguuugaggau

SEQ ID NO: 506882 - RNA, 19 nt, Artificial Sequence
  Description of Artificial Sequence: Synthetic oligonucleotide
  Antisense strand to SEQ ID NO: 506881
auccucaaacucuccacac

SEQ ID NO: 506883 - RNA, 19 nt, Artificial Sequence
  Description of Artificial Sequence: Synthetic oligonucleotide
  Sense strand starting at position 926 of SEQ ID NO: 317721
uggauugaccuauguaaga

SEQ ID NO: 506884 - RNA, 19 nt, Artificial Sequence
  Description of Artificial Sequence: Synthetic oligonucleotide
  Antisense strand to SEQ ID NO: 506883
ucuuacauaggucaaucca

SEQ ID NO: 506885 - RNA, 19 nt, Artificial Sequence
  Description of Artificial Sequence: Synthetic oligonucleotide
  Sense strand starting at position 994 of SEQ ID NO: 317721
cugagagauggccagucua

SEQ ID NO: 506886 - RNA, 19 nt, Artificial Sequence
  Description of Artificial Sequence: Synthetic oligonucleotide
  Antisense strand to SEQ ID NO: 506885
uagacuggccaucucucag

SEQ ID NO: 506887 - RNA, 19 nt, Artificial Sequence
  Description of Artificial Sequence: Synthetic oligonucleotide
  Sense strand starting at position 1099 of SEQ ID NO: 317721
cauggugucagaggagaga

SEQ ID NO: 506888 - RNA, 19 nt, Artificial Sequence
  Description of Artificial Sequence: Synthetic oligonucleotide
  Antisense strand to SEQ ID NO: 506887
ucucuccucugacaccaug

SEQ ID NO: 506889 - RNA, 19 nt, Artificial Sequence
  Description of Artificial Sequence: Synthetic oligonucleotide
  Sense strand starting at position 1264 of SEQ ID NO: 317721
ucaugaggcauugaguaca

SEQ ID NO: 506890 - RNA, 19 nt, Artificial Sequence
  Description of Artificial Sequence: Synthetic oligonucleotide
  Antisense strand to SEQ ID NO: 506889
uguacucaaugccucauga

SEQ ID NO: 506891 - RNA, 19 nt, Artificial Sequence
  Description of Artificial Sequence: Synthetic oligonucleotide
  Sense strand starting at position 1350 of SEQ ID NO: 317721
ugugaagguuaagugaaau

SEQ ID NO: 506892 - RNA, 19 nt, Artificial Sequence
  Description of Artificial Sequence: Synthetic oligonucleotide
  Antisense strand to SEQ ID NO: 506891
auuucacuuaaccuucaca

SEQ ID NO: 506893 - RNA, 19 nt, Artificial Sequence
  Description of Artificial Sequence: Synthetic oligonucleotide
  Sense strand starting at position 1378 of SEQ ID NO: 317721
aguaaauguuaacugugau

SEQ ID NO: 506894 - RNA, 19 nt, Artificial Sequence
  Description of Artificial Sequence: Synthetic oligonucleotide
  Antisense strand to SEQ ID NO: 506893
aucacaguuaacauuuacu

SEQ ID NO: 506895 - RNA, 19 nt, Artificial Sequence
  Description of Artificial Sequence: Synthetic oligonucleotide
  Sense strand starting at position 1520 of SEQ ID NO: 317721
gauaaucuguugucaugaa

SEQ ID NO: 506896 - RNA, 19 nt, Artificial Sequence
  Description of Artificial Sequence: Synthetic oligonucleotide
  Antisense strand to SEQ ID NO: 506895
uucaugacaacagauuauc

SEQ ID NO: 506897 - RNA, 19 nt, Artificial Sequence
  Description of Artificial Sequence: Synthetic oligonucleotide
  Sense strand starting at position 1619 of SEQ ID NO: 317721
uauuguaacggguaaacca

SEQ ID NO: 506898 - RNA, 19 nt, Artificial Sequence
  Description of Artificial Sequence: Synthetic oligonucleotide
  Antisense strand to SEQ ID NO: 506897
ugguuuacccguuacaaua

SEQ ID NO: 506899 - RNA, 19 nt, Artificial Sequence
  Description of Artificial Sequence: Synthetic oligonucleotide
  Sense strand starting at position 1689 of SEQ ID NO: 317721
uuauaauacgaagguagaa

SEQ ID NO: 506900 - RNA, 19 nt, Artificial Sequence
  Description of Artificial Sequence: Synthetic oligonucleotide
  Antisense strand to SEQ ID NO: 506899
uucuaccuucguauuauaa

SEQ ID NO: 506901 - RNA, 19 nt, Artificial Sequence
  Description of Artificial Sequence: Synthetic oligonucleotide
  Sense strand starting at position 2118 of SEQ ID NO: 317721
gcaucucugcguuuguaga

SEQ ID NO: 506902 - RNA, 19 nt, Artificial Sequence
  Description of Artificial Sequence: Synthetic oligonucleotide
  Antisense strand to SEQ ID NO: 506901
ucuacaaacgcagagaugc

SEQ ID NO: 506903 - RNA, 19 nt, Artificial Sequence
  Description of Artificial Sequence: Synthetic oligonucleotide
  Sense strand starting at position 2126 of SEQ ID NO: 317721
gcguuuguagagcuuguua

SEQ ID NO: 506904 - RNA, 19 nt, Artificial Sequence
  Description of Artificial Sequence: Synthetic oligonucleotide
  Antisense strand to SEQ ID NO: 506903
uaacaagcucuacaaacgc

SEQ ID NO: 506905 - RNA, 19 nt, Artificial Sequence
  Description of Artificial Sequence: Synthetic oligonucleotide
  Sense strand starting at position 2171 of SEQ ID NO: 317721
agugaucagagugauuguu

SEQ ID NO: 506906 - RNA, 19 nt, Artificial Sequence
  Description of Artificial Sequence: Synthetic oligonucleotide
  Antisense strand to SEQ ID NO: 506905
aacaaucacucugaucacu

SEQ ID NO: 506907 - RNA, 19 nt, Artificial Sequence
  Description of Artificial Sequence: Synthetic oligonucleotide
  Sense strand starting at position 2234 of SEQ ID NO: 317721
aaaucauagggauguguuu

SEQ ID NO: 506908 - RNA, 19 nt, Artificial Sequence
  Description of Artificial Sequence: Synthetic oligonucleotide
  Antisense strand to SEQ ID NO: 506907
aaacacaucccuaugauuu

SEQ ID NO: 506909 - RNA, 19 nt, Artificial Sequence
  Description of Artificial Sequence: Synthetic oligonucleotide
  Sense strand starting at position 2295 of SEQ ID NO: 317721
gggcuguucgguguaugua

SEQ ID NO: 506910 - RNA, 19 nt, Artificial Sequence
  Description of Artificial Sequence: Synthetic oligonucleotide
  Antisense strand to SEQ ID NO: 506909
uacauacaccgaacagccc

SEQ ID NO: 506911 - RNA, 19 nt, Artificial Sequence
  Description of Artificial Sequence: Synthetic oligonucleotide
  Sense strand starting at position 2383 of SEQ ID NO: 317721
cacgauaguggcuagacau

SEQ ID NO: 506912 - RNA, 19 nt, Artificial Sequence
  Description of Artificial Sequence: Synthetic oligonucleotide
  Antisense strand to SEQ ID NO: 506911
augucuagccacuaucgug

SEQ ID NO: 506913 - RNA, 19 nt, Artificial Sequence
  Description of Artificial Sequence: Synthetic oligonucleotide
  Sense strand starting at position 2491 of SEQ ID NO: 317721
uuuaaauguguguaugacu

SEQ ID NO: 506914 - RNA, 19 nt, Artificial Sequence
  Description of Artificial Sequence: Synthetic oligonucleotide
  Antisense strand to SEQ ID NO: 506913
agucauacacacauuuaaa

SEQ ID NO: 506915 - RNA, 19 nt, Artificial Sequence
  Description of Artificial Sequence: Synthetic oligonucleotide
  Sense strand starting at position 2498 of SEQ ID NO: 317721
guguguaugacugugcagu

SEQ ID NO: 506916 - RNA, 19 nt, Artificial Sequence
  Description of Artificial Sequence: Synthetic oligonucleotide
  Antisense strand to SEQ ID NO: 506915
acugcacagucauacacac

SEQ ID NO: 506917 - RNA, 19 nt, Artificial Sequence
  Description of Artificial Sequence: Synthetic oligonucleotide
  Sense strand starting at position 2527 of SEQ ID NO: 317721
auguguugauuucuaugca

SEQ ID NO: 506918 - RNA, 19 nt, Artificial Sequence
  Description of Artificial Sequence: Synthetic oligonucleotide
  Antisense strand to SEQ ID NO: 506917
ugcauagaaaucaacacau

SEQ ID NO: 506919 - RNA, 19 nt, Artificial Sequence
  Description of Artificial Sequence: Synthetic oligonucleotide
  Sense strand starting at position 2680 of SEQ ID NO: 317721
gccucaagucauugagaga

SEQ ID NO: 506920 - RNA, 19 nt, Artificial Sequence
  Description of Artificial Sequence: Synthetic oligonucleotide
  Antisense strand to SEQ ID NO: 506919
ucucucaaugacuugaggc

SEQ ID NO: 506921 - RNA, 19 nt, Artificial Sequence
  Description of Artificial Sequence: Synthetic oligonucleotide
  Sense strand starting at position 2696 of SEQ ID NO: 317721
agacuuauggagggucuca

SEQ ID NO: 506922 - RNA, 19 nt, Artificial Sequence
  Description of Artificial Sequence: Synthetic oligonucleotide
  Antisense strand to SEQ ID NO: 506921
ugagacccuccauaagucu

SEQ ID NO: 506923 - RNA, 19 nt, Artificial Sequence
  Description of Artificial Sequence: Synthetic oligonucleotide
  Sense strand starting at position 3056 of SEQ ID NO: 317721
ucauaaagauguuugguaa

SEQ ID NO: 506924 - RNA, 19 nt, Artificial Sequence
  Description of Artificial Sequence: Synthetic oligonucleotide
  Antisense strand to SEQ ID NO: 506923
uuaccaaacaucuuuauga

SEQ ID NO: 506925 - RNA, 19 nt, Artificial Sequence
  Description of Artificial Sequence: Synthetic oligonucleotide
  Sense strand starting at position 3057 of SEQ ID NO: 317721
cauaaagauguuugguaag

SEQ ID NO: 506926 - RNA, 19 nt, Artificial Sequence
  Description of Artificial Sequence: Synthetic oligonucleotide
  Antisense strand to SEQ ID NO: 506925
cuuaccaaacaucuuuaug

SEQ ID NO: 506927 - RNA, 19 nt, Artificial Sequence
  Description of Artificial Sequence: Synthetic oligonucleotide
  Sense strand starting at position 3079 of SEQ ID NO: 317721
uugaacuauguagggaauu

SEQ ID NO: 506928 - RNA, 19 nt, Artificial Sequence
  Description of Artificial Sequence: Synthetic oligonucleotide
  Antisense strand to SEQ ID NO: 506927
aauucccuacauaguucaa

SEQ ID NO: 506929 - RNA, 19 nt, Artificial Sequence
  Description of Artificial Sequence: Synthetic oligonucleotide
  Sense strand starting at position 3127 of SEQ ID NO: 317721
gaaagaaaguuuguaggcu

SEQ ID NO: 506930 - RNA, 19 nt, Artificial Sequence
  Description of Artificial Sequence: Synthetic oligonucleotide
  Antisense strand to SEQ ID NO: 506929
agccuacaaacuuucuuuc

SEQ ID NO: 506931 - RNA, 19 nt, Artificial Sequence
  Description of Artificial Sequence: Synthetic oligonucleotide
  Sense strand starting at position 3283 of SEQ ID NO: 317721
gacacaagugguuacaagu

SEQ ID NO: 506932 - RNA, 19 nt, Artificial Sequence
  Description of Artificial Sequence: Synthetic oligonucleotide
  Antisense strand to SEQ ID NO: 506931
acuuguaaccacuuguguc

SEQ ID NO: 506933 - RNA, 19 nt, Artificial Sequence
  Description of Artificial Sequence: Synthetic oligonucleotide
  Sense strand starting at position 3289 of SEQ ID NO: 317721
agugguuacaagugaaaug

SEQ ID NO: 506934 - RNA, 19 nt, Artificial Sequence
  Description of Artificial Sequence: Synthetic oligonucleotide
  Antisense strand to SEQ ID NO: 506933
cauuucacuuguaaccacu

SEQ ID NO: 506935 - RNA, 19 nt, Artificial Sequence
  Description of Artificial Sequence: Synthetic oligonucleotide
  Sense strand starting at position 3290 of SEQ ID NO: 317721
gugguuacaagugaaauga

SEQ ID NO: 506936 - RNA, 19 nt, Artificial Sequence
  Description of Artificial Sequence: Synthetic oligonucleotide
  Antisense strand to SEQ ID NO: 506935
ucauuucacuuguaaccac

SEQ ID NO: 506937 - RNA, 19 nt, Artificial Sequence
  Description of Artificial Sequence: Synthetic oligonucleotide
  Sense strand starting at position 3298 of SEQ ID NO: 317721
aagugaaaugaguguuaua

SEQ ID NO: 506938 - RNA, 19 nt, Artificial Sequence
  Description of Artificial Sequence: Synthetic oligonucleotide
  Antisense strand to SEQ ID NO: 506937
uauaacacucauuucacuu

SEQ ID NO: 506939 - RNA, 19 nt, Artificial Sequence
  Description of Artificial Sequence: Synthetic oligonucleotide
  Sense strand starting at position 3397 of SEQ ID NO: 317721
gacugagacuugucugaau

SEQ ID NO: 506940 - RNA, 19 nt, Artificial Sequence
  Description of Artificial Sequence: Synthetic oligonucleotide
  Antisense strand to SEQ ID NO: 506939
auucagacaagucucaguc

SEQ ID NO: 506941 - RNA, 19 nt, Artificial Sequence
  Description of Artificial Sequence: Synthetic oligonucleotide
  Sense strand starting at position 3552 of SEQ ID NO: 317721
ugaggaaacugcuuagaau

SEQ ID NO: 506942 - RNA, 19 nt, Artificial Sequence
  Description of Artificial Sequence: Synthetic oligonucleotide
  Antisense strand to SEQ ID NO: 506941
auucuaagcaguuuccuca

SEQ ID NO: 506943 - RNA, 19 nt, Artificial Sequence
  Description of Artificial Sequence: Synthetic oligonucleotide
  Sense strand starting at position 3616 of SEQ ID NO: 317721
ccuagaguagagugguaau

SEQ ID NO: 506944 - RNA, 19 nt, Artificial Sequence
  Description of Artificial Sequence: Synthetic oligonucleotide
  Antisense strand to SEQ ID NO: 506943
auuaccacucuacucuagg

SEQ ID NO: 506945 - RNA, 19 nt, Artificial Sequence
  Description of Artificial Sequence: Synthetic oligonucleotide
  Sense strand starting at position 3671 of SEQ ID NO: 317721
gguugaaaucacuggcaug

SEQ ID NO: 506946 - RNA, 19 nt, Artificial Sequence
  Description of Artificial Sequence: Synthetic oligonucleotide
  Antisense strand to SEQ ID NO: 506945
caugccagugauuucaacc

SEQ ID NO: 506947 - RNA, 19 nt, Artificial Sequence
  Description of Artificial Sequence: Synthetic oligonucleotide
  Sense strand starting at position 103 of SEQ ID NO: 317722
guugguugucaggacauaa

SEQ ID NO: 506948 - RNA, 19 nt, Artificial Sequence
  Description of Artificial Sequence: Synthetic oligonucleotide
  Antisense strand to SEQ ID NO: 506947
uuauguccugacaaccaac

SEQ ID NO: 506949 - RNA, 19 nt, Artificial Sequence
  Description of Artificial Sequence: Synthetic oligonucleotide
  Sense strand starting at position 170 of SEQ ID NO: 317722
cacugucauggccaggaaa

SEQ ID NO: 506950 - RNA, 19 nt, Artificial Sequence
  Description of Artificial Sequence: Synthetic oligonucleotide
  Antisense strand to SEQ ID NO: 506949
uuuccuggccaugacagug

SEQ ID NO: 506951 - RNA, 19 nt, Artificial Sequence
  Description of Artificial Sequence: Synthetic oligonucleotide
  Sense strand starting at position 172 of SEQ ID NO: 317722
cugucauggccaggaaaga

SEQ ID NO: 506952 - RNA, 19 nt, Artificial Sequence
  Description of Artificial Sequence: Synthetic oligonucleotide
  Antisense strand to SEQ ID NO: 506951
ucuuuccuggccaugacag

SEQ ID NO: 506953 - RNA, 19 nt, Artificial Sequence
  Description of Artificial Sequence: Synthetic oligonucleotide
  Sense strand starting at position 192 of SEQ ID NO: 317722
accaucuguuggccaagaa

SEQ ID NO: 506954 - RNA, 19 nt, Artificial Sequence
  Description of Artificial Sequence: Synthetic oligonucleotide
  Antisense strand to SEQ ID NO: 506953
uucuuggccaacagauggu

SEQ ID NO: 506955 - RNA, 19 nt, Artificial Sequence
  Description of Artificial Sequence: Synthetic oligonucleotide
  Sense strand starting at position 196 of SEQ ID NO: 317722
ucuguuggccaagaaggau

SEQ ID NO: 506956 - RNA, 19 nt, Artificial Sequence
  Description of Artificial Sequence: Synthetic oligonucleotide
  Antisense strand to SEQ ID NO: 506955
auccuucuuggccaacaga

SEQ ID NO: 506957 - RNA, 19 nt, Artificial Sequence
  Description of Artificial Sequence: Synthetic oligonucleotide
  Sense strand starting at position 210 of SEQ ID NO: 317722
aggauaccaugugugaaau

SEQ ID NO: 506958 - RNA, 19 nt, Artificial Sequence
  Description of Artificial Sequence: Synthetic oligonucleotide
  Antisense strand to SEQ ID NO: 506957
auuucacacaugguauccu

SEQ ID NO: 506959 - RNA, 19 nt, Artificial Sequence
  Description of Artificial Sequence: Synthetic oligonucleotide
  Sense strand starting at position 211 of SEQ ID NO: 317722
ggauaccaugugugaaaug

SEQ ID NO: 506960 - RNA, 19 nt, Artificial Sequence
  Description of Artificial Sequence: Synthetic oligonucleotide
  Antisense strand to SEQ ID NO: 506959
cauuucacacaugguaucc

SEQ ID NO: 506961 - RNA, 19 nt, Artificial Sequence
  Description of Artificial Sequence: Synthetic oligonucleotide
  Sense strand starting at position 216 of SEQ ID NO: 317722
ccaugugugaaauggaaag

SEQ ID NO: 506962 - RNA, 19 nt, Artificial Sequence
  Description of Artificial Sequence: Synthetic oligonucleotide
  Antisense strand to SEQ ID NO: 506961
cuuuccauuucacacaugg

SEQ ID NO: 506963 - RNA, 19 nt, Artificial Sequence
  Description of Artificial Sequence: Synthetic oligonucleotide
  Sense strand starting at position 238 of SEQ ID NO: 317722
agaucaagucuuggacaca

SEQ ID NO: 506964 - RNA, 19 nt, Artificial Sequence
  Description of Artificial Sequence: Synthetic oligonucleotide
  Antisense strand to SEQ ID NO: 506963
uguguccaagacuugaucu

SEQ ID NO: 506965 - RNA, 19 nt, Artificial Sequence
  Description of Artificial Sequence: Synthetic oligonucleotide
  Sense strand starting at position 241 of SEQ ID NO: 317722
ucaagucuuggacacaagu

SEQ ID NO: 506966 - RNA, 19 nt, Artificial Sequence
  Description of Artificial Sequence: Synthetic oligonucleotide
  Antisense strand to SEQ ID NO: 506965
acuuguguccaagacuuga

SEQ ID NO: 506967 - RNA, 19 nt, Artificial Sequence
  Description of Artificial Sequence: Synthetic oligonucleotide
  Sense strand starting at position 386 of SEQ ID NO: 317722
ggaucauauuuagagauua

SEQ ID NO: 506968 - RNA, 19 nt, Artificial Sequence
  Description of Artificial Sequence: Synthetic oligonucleotide
  Antisense strand to SEQ ID NO: 506967
uaaucucuaaauaugaucc

SEQ ID NO: 506969 - RNA, 19 nt, Artificial Sequence
  Description of Artificial Sequence: Synthetic oligonucleotide
  Sense strand starting at position 456 of SEQ ID NO: 317722
cacagaaugguuugggcaa

SEQ ID NO: 506970 - RNA, 19 nt, Artificial Sequence
  Description of Artificial Sequence: Synthetic oligonucleotide
  Antisense strand to SEQ ID NO: 506969
uugcccaaaccauucugug

SEQ ID NO: 506971 - RNA, 19 nt, Artificial Sequence
  Description of Artificial Sequence: Synthetic oligonucleotide
  Sense strand starting at position 475 of SEQ ID NO: 317722
cugccuuguguggucaagu

SEQ ID NO: 506972 - RNA, 19 nt, Artificial Sequence
  Description of Artificial Sequence: Synthetic oligonucleotide
  Antisense strand to SEQ ID NO: 506971
acuugaccacacaaggcag

SEQ ID NO: 506973 - RNA, 19 nt, Artificial Sequence
  Description of Artificial Sequence: Synthetic oligonucleotide
  Sense strand starting at position 579 of SEQ ID NO: 317722
uucugaauccaugguagga

SEQ ID NO: 506974 - RNA, 19 nt, Artificial Sequence
  Description of Artificial Sequence: Synthetic oligonucleotide
  Antisense strand to SEQ ID NO: 506973
uccuaccauggauucagaa

SEQ ID NO: 506975 - RNA, 19 nt, Artificial Sequence
  Description of Artificial Sequence: Synthetic oligonucleotide
  Sense strand starting at position 744 of SEQ ID NO: 317722
agaugucuagaggguaauu

SEQ ID NO: 506976 - RNA, 19 nt, Artificial Sequence
  Description of Artificial Sequence: Synthetic oligonucleotide
  Antisense strand to SEQ ID NO: 506975
aauuacccucuagacaucu

SEQ ID NO: 506977 - RNA, 19 nt, Artificial Sequence
  Description of Artificial Sequence: Synthetic oligonucleotide
  Sense strand starting at position 908 of SEQ ID NO: 317722
uagaucaaguccucuguga

SEQ ID NO: 506978 - RNA, 19 nt, Artificial Sequence
  Description of Artificial Sequence: Synthetic oligonucleotide
  Antisense strand to SEQ ID NO: 506977
ucacagaggacuugaucua

SEQ ID NO: 506979 - RNA, 19 nt, Artificial Sequence
  Description of Artificial Sequence: Synthetic oligonucleotide
  Sense strand starting at position 945 of SEQ ID NO: 317722
ugcuauaagguaugcauuu

SEQ ID NO: 506980 - RNA, 19 nt, Artificial Sequence
  Description of Artificial Sequence: Synthetic oligonucleotide
  Antisense strand to SEQ ID NO: 506979
aaaugcauaccuuauagca

SEQ ID NO: 506981 - RNA, 19 nt, Artificial Sequence
  Description of Artificial Sequence: Synthetic oligonucleotide
  Sense strand starting at position 1056 of SEQ ID NO: 317722
acaagacugccaugaaaug

SEQ ID NO: 506982 - RNA, 19 nt, Artificial Sequence
  Description of Artificial Sequence: Synthetic oligonucleotide
  Antisense strand to SEQ ID NO: 506981
cauuucauggcagucuugu

SEQ ID NO: 506983 - RNA, 19 nt, Artificial Sequence
  Description of Artificial Sequence: Synthetic oligonucleotide
  Sense strand starting at position 1057 of SEQ ID NO: 317722
caagacugccaugaaaugu

SEQ ID NO: 506984 - RNA, 19 nt, Artificial Sequence
  Description of Artificial Sequence: Synthetic oligonucleotide
  Antisense strand to SEQ ID NO: 506983
acauuucauggcagucuug

SEQ ID NO: 506985 - RNA, 19 nt, Artificial Sequence
  Description of Artificial Sequence: Synthetic oligonucleotide
  Sense strand starting at position 1074 of SEQ ID NO: 317722
gucacaguauacucacaaa

SEQ ID NO: 506986 - RNA, 19 nt, Artificial Sequence
  Description of Artificial Sequence: Synthetic oligonucleotide
  Antisense strand to SEQ ID NO: 506985
uuugugaguauacugugac

SEQ ID NO: 506987 - RNA, 19 nt, Artificial Sequence
  Description of Artificial Sequence: Synthetic oligonucleotide
  Sense strand starting at position 1187 of SEQ ID NO: 317722
acaaaugauugucuacagu

SEQ ID NO: 506988 - RNA, 19 nt, Artificial Sequence
  Description of Artificial Sequence: Synthetic oligonucleotide
  Antisense strand to SEQ ID NO: 506987
acuguagacaaucauuugu

SEQ ID NO: 506989 - RNA, 19 nt, Artificial Sequence
  Description of Artificial Sequence: Synthetic oligonucleotide
  Sense strand starting at position 1389 of SEQ ID NO: 317722
ucuuguacccaagagcaau

SEQ ID NO: 506990 - RNA, 19 nt, Artificial Sequence
  Description of Artificial Sequence: Synthetic oligonucleotide
  Antisense strand to SEQ ID NO: 506989
auugcucuuggguacaaga

SEQ ID NO: 506991 - RNA, 19 nt, Artificial Sequence
  Description of Artificial Sequence: Synthetic oligonucleotide
  Sense strand starting at position 1541 of SEQ ID NO: 317722
agagaauucugaguaccug

SEQ ID NO: 506992 - RNA, 19 nt, Artificial Sequence
  Description of Artificial Sequence: Synthetic oligonucleotide
  Antisense strand to SEQ ID NO: 506991
cagguacucagaauucucu

SEQ ID NO: 506993 - RNA, 19 nt, Artificial Sequence
  Description of Artificial Sequence: Synthetic oligonucleotide
  Sense strand starting at position 1825 of SEQ ID NO: 317722
agcaguugccaauagauga

SEQ ID NO: 506994 - RNA, 19 nt, Artificial Sequence
  Description of Artificial Sequence: Synthetic oligonucleotide
  Antisense strand to SEQ ID NO: 506993
ucaucuauuggcaacugcu

SEQ ID NO: 506995 - RNA, 19 nt, Artificial Sequence
  Description of Artificial Sequence: Synthetic oligonucleotide
  Sense strand starting at position 1875 of SEQ ID NO: 317722
cucagagucucccugagaa

SEQ ID NO: 506996 - RNA, 19 nt, Artificial Sequence
  Description of Artificial Sequence: Synthetic oligonucleotide
  Antisense strand to SEQ ID NO: 506995
uucucagggagacucugag

SEQ ID NO: 506997 - RNA, 19 nt, Artificial Sequence
  Description of Artificial Sequence: Synthetic oligonucleotide
  Sense strand starting at position 1975 of SEQ ID NO: 317722
uacuuugguguguaauaaa

SEQ ID NO: 506998 - RNA, 19 nt, Artificial Sequence
  Description of Artificial Sequence: Synthetic oligonucleotide
  Antisense strand to SEQ ID NO: 506997
uuuauuacacaccaaagua

SEQ ID NO: 506999 - RNA, 19 nt, Artificial Sequence
  Description of Artificial Sequence: Synthetic oligonucleotide
  Sense strand starting at position 1982 of SEQ ID NO: 317722
guguguaauaaauaaggcu

SEQ ID NO: 507000 - RNA, 19 nt, Artificial Sequence
  Description of Artificial Sequence: Synthetic oligonucleotide
  Antisense strand to SEQ ID NO: 506999
agccuuauuuauuacacac

SEQ ID NO: 507001 - RNA, 19 nt, Artificial Sequence
  Description of Artificial Sequence: Synthetic oligonucleotide
  Sense strand starting at position 2080 of SEQ ID NO: 317722
gaacgauuugugugcacag

SEQ ID NO: 507002 - RNA, 19 nt, Artificial Sequence
  Description of Artificial Sequence: Synthetic oligonucleotide
  Antisense strand to SEQ ID NO: 507001
cugugcacacaaaucguuc

SEQ ID NO: 507003 - RNA, 19 nt, Artificial Sequence
  Description of Artificial Sequence: Synthetic oligonucleotide
  Sense strand starting at position 2081 of SEQ ID NO: 317722
aacgauuugugugcacagu

SEQ ID NO: 507004 - RNA, 19 nt, Artificial Sequence
  Description of Artificial Sequence: Synthetic oligonucleotide
  Antisense strand to SEQ ID NO: 507003
acugugcacacaaaucguu

SEQ ID NO: 507005 - RNA, 19 nt, Artificial Sequence
  Description of Artificial Sequence: Synthetic oligonucleotide
  Sense strand starting at position 2082 of SEQ ID NO: 317722
acgauuugugugcacaguu

SEQ ID NO: 507006 - RNA, 19 nt, Artificial Sequence
  Description of Artificial Sequence: Synthetic oligonucleotide
  Antisense strand to SEQ ID NO: 507005
aacugugcacacaaaucgu

SEQ ID NO: 507007 - RNA, 19 nt, Artificial Sequence
  Description of Artificial Sequence: Synthetic oligonucleotide
  Sense strand starting at position 2142 of SEQ ID NO: 317722
ucuguugaagugugaagaa

SEQ ID NO: 507008 - RNA, 19 nt, Artificial Sequence
  Description of Artificial Sequence: Synthetic oligonucleotide
  Antisense strand to SEQ ID NO: 507007
uucuucacacuucaacaga

SEQ ID NO: 507009 - RNA, 19 nt, Artificial Sequence
  Description of Artificial Sequence: Synthetic oligonucleotide
  Sense strand starting at position 2585 of SEQ ID NO: 317722
agucacuuauugucagaug

SEQ ID NO: 507010 - RNA, 19 nt, Artificial Sequence
  Description of Artificial Sequence: Synthetic oligonucleotide
  Antisense strand to SEQ ID NO: 507009
caucugacaauaagugacu

SEQ ID NO: 507011 - RNA, 19 nt, Artificial Sequence
  Description of Artificial Sequence: Synthetic oligonucleotide
  Sense strand starting at position 3286 of SEQ ID NO: 317722
aagagccaucucuggaagu

SEQ ID NO: 507012 - RNA, 19 nt, Artificial Sequence
  Description of Artificial Sequence: Synthetic oligonucleotide
  Antisense strand to SEQ ID NO: 507011
acuuccagagauggcucuu

SEQ ID NO: 507013 - RNA, 19 nt, Artificial Sequence
  Description of Artificial Sequence: Synthetic oligonucleotide
  Sense strand starting at position 3412 of SEQ ID NO: 317722
gagaguuacucugugaacu

SEQ ID NO: 507014 - RNA, 19 nt, Artificial Sequence
  Description of Artificial Sequence: Synthetic oligonucleotide
  Antisense strand to SEQ ID NO: 507013
aguucacagaguaacucuc

SEQ ID NO: 507015 - RNA, 19 nt, Artificial Sequence
  Description of Artificial Sequence: Synthetic oligonucleotide
  Sense strand starting at position 3413 of SEQ ID NO: 317722
agaguuacucugugaacua

SEQ ID NO: 507016 - RNA, 19 nt, Artificial Sequence
  Description of Artificial Sequence: Synthetic oligonucleotide
  Antisense strand to SEQ ID NO: 507015
uaguucacagaguaacucu

SEQ ID NO: 507017 - RNA, 19 nt, Artificial Sequence
  Description of Artificial Sequence: Synthetic oligonucleotide
  Sense strand starting at position 3463 of SEQ ID NO: 317722
gggagucauguucagucca

SEQ ID NO: 507018 - RNA, 19 nt, Artificial Sequence
  Description of Artificial Sequence: Synthetic oligonucleotide
  Antisense strand to SEQ ID NO: 507017
uggacugaacaugacuccc

SEQ ID NO: 507019 - RNA, 19 nt, Artificial Sequence
  Description of Artificial Sequence: Synthetic oligonucleotide
  Sense strand starting at position 3569 of SEQ ID NO: 317722
ggaggauuccuugaguucu

SEQ ID NO: 507020 - RNA, 19 nt, Artificial Sequence
  Description of Artificial Sequence: Synthetic oligonucleotide
  Antisense strand to SEQ ID NO: 507019
agaacucaaggaauccucc

SEQ ID NO: 507021 - RNA, 19 nt, Artificial Sequence
  Description of Artificial Sequence: Synthetic oligonucleotide
  Sense strand starting at position 3587 of SEQ ID NO: 317722
ugucauguccaccauuaaa

SEQ ID NO: 507022 - RNA, 19 nt, Artificial Sequence
  Description of Artificial Sequence: Synthetic oligonucleotide
  Antisense strand to SEQ ID NO: 507021
uuuaaugguggacaugaca

SEQ ID NO: 507023 - RNA, 19 nt, Artificial Sequence
  Description of Artificial Sequence: Synthetic oligonucleotide
  Sense strand starting at position 3607 of SEQ ID NO: 317722
gguagaugucccugggaag

SEQ ID NO: 507024 - RNA, 19 nt, Artificial Sequence
  Description of Artificial Sequence: Synthetic oligonucleotide
  Antisense strand to SEQ ID NO: 507023
cuucccagggacaucuacc

SEQ ID NO: 507025 - RNA, 19 nt, Artificial Sequence
  Description of Artificial Sequence: Synthetic oligonucleotide
  Sense strand starting at position 3841 of SEQ ID NO: 317722
ggcucugaaaucuagguca

SEQ ID NO: 507026 - RNA, 19 nt, Artificial Sequence
  Description of Artificial Sequence: Synthetic oligonucleotide
  Antisense strand to SEQ ID NO: 507025
ugaccuagauuucagagcc

SEQ ID NO: 507027 - RNA, 19 nt, Artificial Sequence
  Description of Artificial Sequence: Synthetic oligonucleotide
  Sense strand starting at position 2 of SEQ ID NO: 317723
auuauaagguaugcuuaca

SEQ ID NO: 507028 - RNA, 19 nt, Artificial Sequence
  Description of Artificial Sequence: Synthetic oligonucleotide
  Antisense strand to SEQ ID NO: 507027
uguaagcauaccuuauaau

SEQ ID NO: 507029 - RNA, 19 nt, Artificial Sequence
  Description of Artificial Sequence: Synthetic oligonucleotide
  Sense strand starting at position 140 of SEQ ID NO: 317723
uuuaaacugguguauguaa

SEQ ID NO: 507030 - RNA, 19 nt, Artificial Sequence
  Description of Artificial Sequence: Synthetic oligonucleotide
  Antisense strand to SEQ ID NO: 507029
uuacauacaccaguuuaaa

SEQ ID NO: 507031 - RNA, 19 nt, Artificial Sequence
  Description of Artificial Sequence: Synthetic oligonucleotide
  Sense strand starting at position 148 of SEQ ID NO: 317723
gguguauguaaagacuuaa

SEQ ID NO: 507032 - RNA, 19 nt, Artificial Sequence
  Description of Artificial Sequence: Synthetic oligonucleotide
  Antisense strand to SEQ ID NO: 507031
uuaagucuuuacauacacc

SEQ ID NO: 507033 - RNA, 19 nt, Artificial Sequence
  Description of Artificial Sequence: Synthetic oligonucleotide
  Sense strand starting at position 193 of SEQ ID NO: 317723
gucucaguauaguuagaaa

SEQ ID NO: 507034 - RNA, 19 nt, Artificial Sequence
  Description of Artificial Sequence: Synthetic oligonucleotide
  Antisense strand to SEQ ID NO: 507033
uuucuaacuauacugagac

SEQ ID NO: 507035 - RNA, 19 nt, Artificial Sequence
  Description of Artificial Sequence: Synthetic oligonucleotide
  Sense strand starting at position 360 of SEQ ID NO: 317723
agcauuccagcaggaaaua

SEQ ID NO: 507036 - RNA, 19 nt, Artificial Sequence
  Description of Artificial Sequence: Synthetic oligonucleotide
  Antisense strand to SEQ ID NO: 507035
uauuuccugcuggaaugcu

SEQ ID NO: 507037 - RNA, 19 nt, Artificial Sequence
  Description of Artificial Sequence: Synthetic oligonucleotide
  Sense strand starting at position 361 of SEQ ID NO: 317723
gcauuccagcaggaaauau

SEQ ID NO: 507038 - RNA, 19 nt, Artificial Sequence
  Description of Artificial Sequence: Synthetic oligonucleotide
  Antisense strand to SEQ ID NO: 507037
auauuuccugcuggaaugc

SEQ ID NO: 507039 - RNA, 19 nt, Artificial Sequence
  Description of Artificial Sequence: Synthetic oligonucleotide
  Sense strand starting at position 432 of SEQ ID NO: 317723
cuacuuaaguacuuuagga

SEQ ID NO: 507040 - RNA, 19 nt, Artificial Sequence
  Description of Artificial Sequence: Synthetic oligonucleotide
  Antisense strand to SEQ ID NO: 507039
uccuaaaguacuuaaguag

SEQ ID NO: 507041 - RNA, 19 nt, Artificial Sequence
  Description of Artificial Sequence: Synthetic oligonucleotide
  Sense strand starting at position 440 of SEQ ID NO: 317723
guacuuuaggaacgggaau

SEQ ID NO: 507042 - RNA, 19 nt, Artificial Sequence
  Description of Artificial Sequence: Synthetic oligonucleotide
  Antisense strand to SEQ ID NO: 507041
auucccguuccuaaaguac

SEQ ID NO: 507043 - RNA, 19 nt, Artificial Sequence
  Description of Artificial Sequence: Synthetic oligonucleotide
  Sense strand starting at position 451 of SEQ ID NO: 317723
acgggaauaucugcaucaa

SEQ ID NO: 507044 - RNA, 19 nt, Artificial Sequence
  Description of Artificial Sequence: Synthetic oligonucleotide
  Antisense strand to SEQ ID NO: 507043
uugaugcagauauucccgu

SEQ ID NO: 507045 - RNA, 19 nt, Artificial Sequence
  Description of Artificial Sequence: Synthetic oligonucleotide
  Sense strand starting at position 452 of SEQ ID NO: 317723
cgggaauaucugcaucaac

SEQ ID NO: 507046 - RNA, 19 nt, Artificial Sequence
  Description of Artificial Sequence: Synthetic oligonucleotide
  Antisense strand to SEQ ID NO: 507045
guugaugcagauauucccg

SEQ ID NO: 507047 - RNA, 19 nt, Artificial Sequence
  Description of Artificial Sequence: Synthetic oligonucleotide
  Sense strand starting at position 461 of SEQ ID NO: 317723
cugcaucaaccagggaaau

SEQ ID NO: 507048 - RNA, 19 nt, Artificial Sequence
  Description of Artificial Sequence: Synthetic oligonucleotide
  Antisense strand to SEQ ID NO: 507047
auuucccugguugaugcag

SEQ ID NO: 507049 - RNA, 19 nt, Artificial Sequence
  Description of Artificial Sequence: Synthetic oligonucleotide
  Sense strand starting at position 580 of SEQ ID NO: 317723
acugaaauguugcugagga

SEQ ID NO: 507050 - RNA, 19 nt, Artificial Sequence
  Description of Artificial Sequence: Synthetic oligonucleotide
  Antisense strand to SEQ ID NO: 507049
uccucagcaacauuucagu

SEQ ID NO: 507051 - RNA, 19 nt, Artificial Sequence
  Description of Artificial Sequence: Synthetic oligonucleotide
  Sense strand starting at position 602 of SEQ ID NO: 317723
auaaguauguacccacagu

SEQ ID NO: 507052 - RNA, 19 nt, Artificial Sequence
  Description of Artificial Sequence: Synthetic oligonucleotide
  Antisense strand to SEQ ID NO: 507051
acuguggguacauacuuau

SEQ ID NO: 507053 - RNA, 19 nt, Artificial Sequence
  Description of Artificial Sequence: Synthetic oligonucleotide
  Sense strand starting at position 618 of SEQ ID NO: 317723
aguacugucgcagaggaau

SEQ ID NO: 507054 - RNA, 19 nt, Artificial Sequence
  Description of Artificial Sequence: Synthetic oligonucleotide
  Antisense strand to SEQ ID NO: 507053
auuccucugcgacaguacu

SEQ ID NO: 507055 - RNA, 19 nt, Artificial Sequence
  Description of Artificial Sequence: Synthetic oligonucleotide
  Sense strand starting at position 735 of SEQ ID NO: 317723
gugucuuggccugaaagaa

SEQ ID NO: 507056 - RNA, 19 nt, Artificial Sequence
  Description of Artificial Sequence: Synthetic oligonucleotide
  Antisense strand to SEQ ID NO: 507055
uucuuucaggccaagacac

SEQ ID NO: 507057 - RNA, 19 nt, Artificial Sequence
  Description of Artificial Sequence: Synthetic oligonucleotide
  Sense strand starting at position 776 of SEQ ID NO: 317723
accguuuaauccuuacaag

SEQ ID NO: 507058 - RNA, 19 nt, Artificial Sequence
  Description of Artificial Sequence: Synthetic oligonucleotide
  Antisense strand to SEQ ID NO: 507057
cuuguaaggauuaaacggu

SEQ ID NO: 507059 - RNA, 19 nt, Artificial Sequence
  Description of Artificial Sequence: Synthetic oligonucleotide
  Sense strand starting at position 777 of SEQ ID NO: 317723
ccguuuaauccuuacaagu

SEQ ID NO: 507060 - RNA, 19 nt, Artificial Sequence
  Description of Artificial Sequence: Synthetic oligonucleotide
  Antisense strand to SEQ ID NO: 507059
acuuguaaggauuaaacgg

SEQ ID NO: 507061 - RNA, 19 nt, Artificial Sequence
  Description of Artificial Sequence: Synthetic oligonucleotide
  Sense strand starting at position 888 of SEQ ID NO: 317723
augcaacauuugcaagaaa

SEQ ID NO: 507062 - RNA, 19 nt, Artificial Sequence
  Description of Artificial Sequence: Synthetic oligonucleotide
  Antisense strand to SEQ ID NO: 507061
uuucuugcaaauguugcau

SEQ ID NO: 507063 - RNA, 19 nt, Artificial Sequence
  Description of Artificial Sequence: Synthetic oligonucleotide
  Sense strand starting at position 952 of SEQ ID NO: 317723
caggguuauccugguuaac

SEQ ID NO: 507064 - RNA, 19 nt, Artificial Sequence
  Description of Artificial Sequence: Synthetic oligonucleotide
  Antisense strand to SEQ ID NO: 507063
guuaaccaggauaacccug

SEQ ID NO: 507065 - RNA, 19 nt, Artificial Sequence
  Description of Artificial Sequence: Synthetic oligonucleotide
  Sense strand starting at position 1104 of SEQ ID NO: 317723
gcaccaguacccuaagaca

SEQ ID NO: 507066 - RNA, 19 nt, Artificial Sequence
  Description of Artificial Sequence: Synthetic oligonucleotide
  Antisense strand to SEQ ID NO: 507065
ugucuuaggguacuggugc

SEQ ID NO: 507067 - RNA, 19 nt, Artificial Sequence
  Description of Artificial Sequence: Synthetic oligonucleotide
  Sense strand starting at position 1137 of SEQ ID NO: 317723
acuuucccucucggaaaua

SEQ ID NO: 507068 - RNA, 19 nt, Artificial Sequence
  Description of Artificial Sequence: Synthetic oligonucleotide
  Antisense strand to SEQ ID NO: 507067
uauuuccgagagggaaagu

SEQ ID NO: 507069 - RNA, 19 nt, Artificial Sequence
  Description of Artificial Sequence: Synthetic oligonucleotide
  Sense strand starting at position 1167 of SEQ ID NO: 317723
caguccagucacuggauua

SEQ ID NO: 507070 - RNA, 19 nt, Artificial Sequence
  Description of Artificial Sequence: Synthetic oligonucleotide
  Antisense strand to SEQ ID NO: 507069
uaauccagugacuggacug

SEQ ID NO: 507071 - RNA, 19 nt, Artificial Sequence
  Description of Artificial Sequence: Synthetic oligonucleotide
  Sense strand starting at position 1973 of SEQ ID NO: 317723
ggagacgugcucuggaaac

SEQ ID NO: 507072 - RNA, 19 nt, Artificial Sequence
  Description of Artificial Sequence: Synthetic oligonucleotide
  Antisense strand to SEQ ID NO: 507071
guuuccagagcacgucucc

SEQ ID NO: 507073 - RNA, 19 nt, Artificial Sequence
  Description of Artificial Sequence: Synthetic oligonucleotide
  Sense strand starting at position 2023 of SEQ ID NO: 317723
ggaguugccgcuaggcgaa

SEQ ID NO: 507074 - RNA, 19 nt, Artificial Sequence
  Description of Artificial Sequence: Synthetic oligonucleotide
  Antisense strand to SEQ ID NO: 507073
uucgccuagcggcaacucc

SEQ ID NO: 507075 - RNA, 19 nt, Artificial Sequence
  Description of Artificial Sequence: Synthetic oligonucleotide
  Sense strand starting at position 2181 of SEQ ID NO: 317723
ggaagauccagcuguagaa

SEQ ID NO: 507076 - RNA, 19 nt, Artificial Sequence
  Description of Artificial Sequence: Synthetic oligonucleotide
  Antisense strand to SEQ ID NO: 507075
uucuacagcuggaucuucc

SEQ ID NO: 507077 - RNA, 19 nt, Artificial Sequence
  Description of Artificial Sequence: Synthetic oligonucleotide
  Sense strand starting at position 2279 of SEQ ID NO: 317723
cggugaugggauuauaagu

SEQ ID NO: 507078 - RNA, 19 nt, Artificial Sequence
  Description of Artificial Sequence: Synthetic oligonucleotide
  Antisense strand to SEQ ID NO: 507077
acuuauaaucccaucaccg

SEQ ID NO: 507079 - RNA, 19 nt, Artificial Sequence
  Description of Artificial Sequence: Synthetic oligonucleotide
  Sense strand starting at position 2955 of SEQ ID NO: 317723
cuguguguacguucuguaa

SEQ ID NO: 507080 - RNA, 19 nt, Artificial Sequence
  Description of Artificial Sequence: Synthetic oligonucleotide
  Antisense strand to SEQ ID NO: 507079
uuacagaacguacacacag

SEQ ID NO: 507081 - RNA, 19 nt, Artificial Sequence
  Description of Artificial Sequence: Synthetic oligonucleotide
  Sense strand starting at position 3085 of SEQ ID NO: 317723
ccauucuggucucuaugau

SEQ ID NO: 507082 - RNA, 19 nt, Artificial Sequence
  Description of Artificial Sequence: Synthetic oligonucleotide
  Antisense strand to SEQ ID NO: 507081
aucauagagaccagaaugg

SEQ ID NO: 507083 - RNA, 19 nt, Artificial Sequence
  Description of Artificial Sequence: Synthetic oligonucleotide
  Sense strand starting at position 3098 of SEQ ID NO: 317723
uaugauucccugcgaagau

SEQ ID NO: 507084 - RNA, 19 nt, Artificial Sequence
  Description of Artificial Sequence: Synthetic oligonucleotide
  Antisense strand to SEQ ID NO: 507083
aucuucgcagggaaucaua

SEQ ID NO: 507085 - RNA, 19 nt, Artificial Sequence
  Description of Artificial Sequence: Synthetic oligonucleotide
  Sense strand starting at position 3200 of SEQ ID NO: 317723
uuaucucacccuggugaca

SEQ ID NO: 507086 - RNA, 19 nt, Artificial Sequence
  Description of Artificial Sequence: Synthetic oligonucleotide
  Antisense strand to SEQ ID NO: 507085
ugucaccagggugagauaa

SEQ ID NO: 507087 - RNA, 19 nt, Artificial Sequence
  Description of Artificial Sequence: Synthetic oligonucleotide
  Sense strand starting at position 3227 of SEQ ID NO: 317723
acacacaaacucuguguua

SEQ ID NO: 507088 - RNA, 19 nt, Artificial Sequence
  Description of Artificial Sequence: Synthetic oligonucleotide
  Antisense strand to SEQ ID NO: 507087
uaacacagaguuugugugu

SEQ ID NO: 507089 - RNA, 19 nt, Artificial Sequence
  Description of Artificial Sequence: Synthetic oligonucleotide
  Sense strand starting at position 3229 of SEQ ID NO: 317723
acacaaacucuguguuaag

SEQ ID NO: 507090 - RNA, 19 nt, Artificial Sequence
  Description of Artificial Sequence: Synthetic oligonucleotide
  Antisense strand to SEQ ID NO: 507089
cuuaacacagaguuugugu

SEQ ID NO: 507091 - RNA, 19 nt, Artificial Sequence
  Description of Artificial Sequence: Synthetic oligonucleotide
  Sense strand starting at position 3288 of SEQ ID NO: 317723
cccagaagcccguauuaga

SEQ ID NO: 507092 - RNA, 19 nt, Artificial Sequence
  Description of Artificial Sequence: Synthetic oligonucleotide
  Antisense strand to SEQ ID NO: 507091
ucuaauacgggcuucuggg

SEQ ID NO: 507093 - RNA, 19 nt, Artificial Sequence
  Description of Artificial Sequence: Synthetic oligonucleotide
  Sense strand starting at position 3297 of SEQ ID NO: 317723
ccguauuagacugaauggu

SEQ ID NO: 507094 - RNA, 19 nt, Artificial Sequence
  Description of Artificial Sequence: Synthetic oligonucleotide
  Antisense strand to SEQ ID NO: 507093
accauucagucuaauacgg

SEQ ID NO: 507095 - RNA, 19 nt, Artificial Sequence
  Description of Artificial Sequence: Synthetic oligonucleotide
  Sense strand starting at position 3306 of SEQ ID NO: 317723
acugaaugguguccuuauu

SEQ ID NO: 507096 - RNA, 19 nt, Artificial Sequence
  Description of Artificial Sequence: Synthetic oligonucleotide
  Antisense strand to SEQ ID NO: 507095
aauaaggacaccauucagu

SEQ ID NO: 507097 - RNA, 19 nt, Artificial Sequence
  Description of Artificial Sequence: Synthetic oligonucleotide
  Sense strand starting at position 3524 of SEQ ID NO: 317723
guccauuuguguccucaua

SEQ ID NO: 507098 - RNA, 19 nt, Artificial Sequence
  Description of Artificial Sequence: Synthetic oligonucleotide
  Antisense strand to SEQ ID NO: 507097
uaugaggacacaaauggac

SEQ ID NO: 507099 - RNA, 19 nt, Artificial Sequence
  Description of Artificial Sequence: Synthetic oligonucleotide
  Sense strand starting at position 3871 of SEQ ID NO: 317723
ccugacaucugacuagaug

SEQ ID NO: 507100 - RNA, 19 nt, Artificial Sequence
  Description of Artificial Sequence: Synthetic oligonucleotide
  Antisense strand to SEQ ID NO: 507099
caucuagucagaugucagg

SEQ ID NO: 507101 - RNA, 19 nt, Artificial Sequence
  Description of Artificial Sequence: Synthetic oligonucleotide
  Sense strand starting at position 3907 of SEQ ID NO: 317723
gugccauaaucucuggaua

SEQ ID NO: 507102 - RNA, 19 nt, Artificial Sequence
  Description of Artificial Sequence: Synthetic oligonucleotide
  Antisense strand to SEQ ID NO: 507101
uauccagagauuauggcac

SEQ ID NO: 507103 - RNA, 19 nt, Artificial Sequence
  Description of Artificial Sequence: Synthetic oligonucleotide
  Sense strand starting at position 3908 of SEQ ID NO: 317723
ugccauaaucucuggauaa

SEQ ID NO: 507104 - RNA, 19 nt, Artificial Sequence
  Description of Artificial Sequence: Synthetic oligonucleotide
  Antisense strand to SEQ ID NO: 507103
uuauccagagauuauggca

SEQ ID NO: 507105 - RNA, 19 nt, Artificial Sequence
  Description of Artificial Sequence: Synthetic oligonucleotide
  Sense strand starting at position 3954 of SEQ ID NO: 317723
cugcaagucccugaagaca

SEQ ID NO: 507106 - RNA, 19 nt, Artificial Sequence
  Description of Artificial Sequence: Synthetic oligonucleotide
  Antisense strand to SEQ ID NO: 507105
ugucuucagggacuugcag

SEQ ID NO: 507107 - RNA, 19 nt, Artificial Sequence
  Description of Artificial Sequence: Synthetic oligonucleotide
  Sense strand starting at position 144 of SEQ ID NO: 317724
guagauggugcagaugaua

SEQ ID NO: 507108 - RNA, 19 nt, Artificial Sequence
  Description of Artificial Sequence: Synthetic oligonucleotide
  Antisense strand to SEQ ID NO: 507107
uaucaucugcaccaucuac

SEQ ID NO: 507109 - RNA, 19 nt, Artificial Sequence
  Description of Artificial Sequence: Synthetic oligonucleotide
  Sense strand starting at position 170 of SEQ ID NO: 317724
gcauuacuuuguccucaga

SEQ ID NO: 507110 - RNA, 19 nt, Artificial Sequence
  Description of Artificial Sequence: Synthetic oligonucleotide
  Antisense strand to SEQ ID NO: 507109
ucugaggacaaaguaaugc

SEQ ID NO: 507111 - RNA, 19 nt, Artificial Sequence
  Description of Artificial Sequence: Synthetic oligonucleotide
  Sense strand starting at position 604 of SEQ ID NO: 317724
ugggcuagguggucuauaa

SEQ ID NO: 507112 - RNA, 19 nt, Artificial Sequence
  Description of Artificial Sequence: Synthetic oligonucleotide
  Antisense strand to SEQ ID NO: 507111
uuauagaccaccuagccca

SEQ ID NO: 507113 - RNA, 19 nt, Artificial Sequence
  Description of Artificial Sequence: Synthetic oligonucleotide
  Sense strand starting at position 675 of SEQ ID NO: 317724
gaaagcaccgucuaaccua

SEQ ID NO: 507114 - RNA, 19 nt, Artificial Sequence
  Description of Artificial Sequence: Synthetic oligonucleotide
  Antisense strand to SEQ ID NO: 507113
uagguuagacggugcuuuc

SEQ ID NO: 507115 - RNA, 19 nt, Artificial Sequence
  Description of Artificial Sequence: Synthetic oligonucleotide
  Sense strand starting at position 764 of SEQ ID NO: 317724
agcugucaccaacaguaaa

SEQ ID NO: 507116 - RNA, 19 nt, Artificial Sequence
  Description of Artificial Sequence: Synthetic oligonucleotide
  Antisense strand to SEQ ID NO: 507115
uuuacuguuggugacagcu

SEQ ID NO: 507117 - RNA, 19 nt, Artificial Sequence
  Description of Artificial Sequence: Synthetic oligonucleotide
  Sense strand starting at position 854 of SEQ ID NO: 317724
uuauuagauccaugggccu

SEQ ID NO: 507118 - RNA, 19 nt, Artificial Sequence
  Description of Artificial Sequence: Synthetic oligonucleotide
  Antisense strand to SEQ ID NO: 507117
aggcccauggaucuaauaa

SEQ ID NO: 507119 - RNA, 19 nt, Artificial Sequence
  Description of Artificial Sequence: Synthetic oligonucleotide
  Sense strand starting at position 871 of SEQ ID NO: 317724
cuccuuuguugacuuggaa

SEQ ID NO: 507120 - RNA, 19 nt, Artificial Sequence
  Description of Artificial Sequence: Synthetic oligonucleotide
  Antisense strand to SEQ ID NO: 507119
uuccaagucaacaaaggag

SEQ ID NO: 507121 - RNA, 19 nt, Artificial Sequence
  Description of Artificial Sequence: Synthetic oligonucleotide
  Sense strand starting at position 1157 of SEQ ID NO: 317724
cggugaugcgugccuguga

SEQ ID NO: 507122 - RNA, 19 nt, Artificial Sequence
  Description of Artificial Sequence: Synthetic oligonucleotide
  Antisense strand to SEQ ID NO: 507121
ucacaggcacgcaucaccg

SEQ ID NO: 507123 - RNA, 19 nt, Artificial Sequence
  Description of Artificial Sequence: Synthetic oligonucleotide
  Sense strand starting at position 1442 of SEQ ID NO: 317724
uggcgauuccaggagauac

SEQ ID NO: 507124 - RNA, 19 nt, Artificial Sequence
  Description of Artificial Sequence: Synthetic oligonucleotide
  Antisense strand to SEQ ID NO: 507123
guaucuccuggaaucgcca

SEQ ID NO: 507125 - RNA, 19 nt, Artificial Sequence
  Description of Artificial Sequence: Synthetic oligonucleotide
  Sense strand starting at position 1444 of SEQ ID NO: 317724
gcgauuccaggagauacuu

SEQ ID NO: 507126 - RNA, 19 nt, Artificial Sequence
  Description of Artificial Sequence: Synthetic oligonucleotide
  Antisense strand to SEQ ID NO: 507125
aaguaucuccuggaaucgc

SEQ ID NO: 507127 - RNA, 19 nt, Artificial Sequence
  Description of Artificial Sequence: Synthetic oligonucleotide
  Sense strand starting at position 1469 of SEQ ID NO: 317724
cagaguuaacugcagguua

SEQ ID NO: 507128 - RNA, 19 nt, Artificial Sequence
  Description of Artificial Sequence: Synthetic oligonucleotide
  Antisense strand to SEQ ID NO: 507127
uaaccugcaguuaacucug

SEQ ID NO: 507129 - RNA, 19 nt, Artificial Sequence
  Description of Artificial Sequence: Synthetic oligonucleotide
  Sense strand starting at position 1471 of SEQ ID NO: 317724
gaguuaacugcagguuaag

SEQ ID NO: 507130 - RNA, 19 nt, Artificial Sequence
  Description of Artificial Sequence: Synthetic oligonucleotide
  Antisense strand to SEQ ID NO: 507129
cuuaaccugcaguuaacuc

SEQ ID NO: 507131 - RNA, 19 nt, Artificial Sequence
  Description of Artificial Sequence: Synthetic oligonucleotide
  Sense strand starting at position 1596 of SEQ ID NO: 317724
guaggaagcgcccauaaau

SEQ ID NO: 507132 - RNA, 19 nt, Artificial Sequence
  Description of Artificial Sequence: Synthetic oligonucleotide
  Antisense strand to SEQ ID NO: 507131
auuuaugggcgcuuccuac

SEQ ID NO: 507133 - RNA, 19 nt, Artificial Sequence
  Description of Artificial Sequence: Synthetic oligonucleotide
  Sense strand starting at position 1607 of SEQ ID NO: 317724
ccauaaaugucaguucuca

SEQ ID NO: 507134 - RNA, 19 nt, Artificial Sequence
  Description of Artificial Sequence: Synthetic oligonucleotide
  Antisense strand to SEQ ID NO: 507133
ugagaacugacauuuaugg

SEQ ID NO: 507135 - RNA, 19 nt, Artificial Sequence
  Description of Artificial Sequence: Synthetic oligonucleotide
  Sense strand starting at position 1678 of SEQ ID NO: 317724
guuuaacucugguuaacuc

SEQ ID NO: 507136 - RNA, 19 nt, Artificial Sequence
  Description of Artificial Sequence: Synthetic oligonucleotide
  Antisense strand to SEQ ID NO: 507135
gaguuaaccagaguuaaac

SEQ ID NO: 507137 - RNA, 19 nt, Artificial Sequence
  Description of Artificial Sequence: Synthetic oligonucleotide
  Sense strand starting at position 2044 of SEQ ID NO: 317724
ugcugacgauuggucuaga

SEQ ID NO: 507138 - RNA, 19 nt, Artificial Sequence
  Description of Artificial Sequence: Synthetic oligonucleotide
  Antisense strand to SEQ ID NO: 507137
ucuagaccaaucgucagca

SEQ ID NO: 507139 - RNA, 19 nt, Artificial Sequence
  Description of Artificial Sequence: Synthetic oligonucleotide
  Sense strand starting at position 2047 of SEQ ID NO: 317724
ugacgauuggucuagacgu

SEQ ID NO: 507140 - RNA, 19 nt, Artificial Sequence
  Description of Artificial Sequence: Synthetic oligonucleotide
  Antisense strand to SEQ ID NO: 507139
acgucuagaccaaucguca

SEQ ID NO: 507141 - RNA, 19 nt, Artificial Sequence
  Description of Artificial Sequence: Synthetic oligonucleotide
  Sense strand starting at position 2536 of SEQ ID NO: 317724
gagugagauccugagcuca

SEQ ID NO: 507142 - RNA, 19 nt, Artificial Sequence
  Description of Artificial Sequence: Synthetic oligonucleotide
  Antisense strand to SEQ ID NO: 507141
ugagcucaggaucucacuc

SEQ ID NO: 507143 - RNA, 19 nt, Artificial Sequence
  Description of Artificial Sequence: Synthetic oligonucleotide
  Sense strand starting at position 2596 of SEQ ID NO: 317724
acaguaaaugugcaguuau

SEQ ID NO: 507144 - RNA, 19 nt, Artificial Sequence
  Description of Artificial Sequence: Synthetic oligonucleotide
  Antisense strand to SEQ ID NO: 507143
auaacugcacauuuacugu

SEQ ID NO: 507145 - RNA, 19 nt, Artificial Sequence
  Description of Artificial Sequence: Synthetic oligonucleotide
  Sense strand starting at position 2607 of SEQ ID NO: 317724
gcaguuauggaucaggaug

SEQ ID NO: 507146 - RNA, 19 nt, Artificial Sequence
  Description of Artificial Sequence: Synthetic oligonucleotide
  Antisense strand to SEQ ID NO: 507145
cauccugauccauaacugc

SEQ ID NO: 507147 - RNA, 19 nt, Artificial Sequence
  Description of Artificial Sequence: Synthetic oligonucleotide
  Sense strand starting at position 2714 of SEQ ID NO: 317724
gacguucuggccguguuaa

SEQ ID NO: 507148 - RNA, 19 nt, Artificial Sequence
  Description of Artificial Sequence: Synthetic oligonucleotide
  Antisense strand to SEQ ID NO: 507147
uuaacacggccagaacguc

SEQ ID NO: 507149 - RNA, 19 nt, Artificial Sequence
  Description of Artificial Sequence: Synthetic oligonucleotide
  Sense strand starting at position 2716 of SEQ ID NO: 317724
cguucuggccguguuaacu

SEQ ID NO: 507150 - RNA, 19 nt, Artificial Sequence
  Description of Artificial Sequence: Synthetic oligonucleotide
  Antisense strand to SEQ ID NO: 507149
aguuaacacggccagaacg

SEQ ID NO: 507151 - RNA, 19 nt, Artificial Sequence
  Description of Artificial Sequence: Synthetic oligonucleotide
  Sense strand starting at position 2819 of SEQ ID NO: 317724
ugcagugaauuccuugacu

SEQ ID NO: 507152 - RNA, 19 nt, Artificial Sequence
  Description of Artificial Sequence: Synthetic oligonucleotide
  Antisense strand to SEQ ID NO: 507151
agucaaggaauucacugca

SEQ ID NO: 507153 - RNA, 19 nt, Artificial Sequence
  Description of Artificial Sequence: Synthetic oligonucleotide
  Sense strand starting at position 2940 of SEQ ID NO: 317724
aggaucuggcagugaaugu

SEQ ID NO: 507154 - RNA, 19 nt, Artificial Sequence
  Description of Artificial Sequence: Synthetic oligonucleotide
  Antisense strand to SEQ ID NO: 507153
acauucacugccagauccu

SEQ ID NO: 507155 - RNA, 19 nt, Artificial Sequence
  Description of Artificial Sequence: Synthetic oligonucleotide
  Sense strand starting at position 2941 of SEQ ID NO: 317724
ggaucuggcagugaauguu

SEQ ID NO: 507156 - RNA, 19 nt, Artificial Sequence
  Description of Artificial Sequence: Synthetic oligonucleotide
  Antisense strand to SEQ ID NO: 507155
aacauucacugccagaucc

SEQ ID NO: 507157 - RNA, 19 nt, Artificial Sequence
  Description of Artificial Sequence: Synthetic oligonucleotide
  Sense strand starting at position 2965 of SEQ ID NO: 317724
cuuguuacacacuguacaa

SEQ ID NO: 507158 - RNA, 19 nt, Artificial Sequence
  Description of Artificial Sequence: Synthetic oligonucleotide
  Antisense strand to SEQ ID NO: 507157
uuguacaguguguaacaag

SEQ ID NO: 507159 - RNA, 19 nt, Artificial Sequence
  Description of Artificial Sequence: Synthetic oligonucleotide
  Sense strand starting at position 3121 of SEQ ID NO: 317724
uucugaguuccuugaaucc

SEQ ID NO: 507160 - RNA, 19 nt, Artificial Sequence
  Description of Artificial Sequence: Synthetic oligonucleotide
  Antisense strand to SEQ ID NO: 507159
ggauucaaggaacucagaa

SEQ ID NO: 507161 - RNA, 19 nt, Artificial Sequence
  Description of Artificial Sequence: Synthetic oligonucleotide
  Sense strand starting at position 3153 of SEQ ID NO: 317724
ucuuauuaucucugagucu

SEQ ID NO: 507162 - RNA, 19 nt, Artificial Sequence
  Description of Artificial Sequence: Synthetic oligonucleotide
  Antisense strand to SEQ ID NO: 507161
agacucagagauaauaaga

SEQ ID NO: 507163 - RNA, 19 nt, Artificial Sequence
  Description of Artificial Sequence: Synthetic oligonucleotide
  Sense strand starting at position 3491 of SEQ ID NO: 317724
aguauagacuaagucuaga

SEQ ID NO: 507164 - RNA, 19 nt, Artificial Sequence
  Description of Artificial Sequence: Synthetic oligonucleotide
  Antisense strand to SEQ ID NO: 507163
ucuagacuuagucuauacu

SEQ ID NO: 507165 - RNA, 19 nt, Artificial Sequence
  Description of Artificial Sequence: Synthetic oligonucleotide
  Sense strand starting at position 3555 of SEQ ID NO: 317724
gguggcauuuaagauugau

SEQ ID NO: 507166 - RNA, 19 nt, Artificial Sequence
  Description of Artificial Sequence: Synthetic oligonucleotide
  Antisense strand to SEQ ID NO: 507165
aucaaucuuaaaugccacc

SEQ ID NO: 507167 - RNA, 19 nt, Artificial Sequence
  Description of Artificial Sequence: Synthetic oligonucleotide
  Sense strand starting at position 3595 of SEQ ID NO: 317724
gcagauucauacguuggga

SEQ ID NO: 507168 - RNA, 19 nt, Artificial Sequence
  Description of Artificial Sequence: Synthetic oligonucleotide
  Antisense strand to SEQ ID NO: 507167
ucccaacguaugaaucugc

SEQ ID NO: 507169 - RNA, 19 nt, Artificial Sequence
  Description of Artificial Sequence: Synthetic oligonucleotide
  Sense strand starting at position 3597 of SEQ ID NO: 317724
agauucauacguugggaga

SEQ ID NO: 507170 - RNA, 19 nt, Artificial Sequence
  Description of Artificial Sequence: Synthetic oligonucleotide
  Antisense strand to SEQ ID NO: 507169
ucucccaacguaugaaucu

SEQ ID NO: 507171 - RNA, 19 nt, Artificial Sequence
  Description of Artificial Sequence: Synthetic oligonucleotide
  Sense strand starting at position 3757 of SEQ ID NO: 317724
uucuuuguacucgaauggu

SEQ ID NO: 507172 - RNA, 19 nt, Artificial Sequence
  Description of Artificial Sequence: Synthetic oligonucleotide
  Antisense strand to SEQ ID NO: 507171
accauucgaguacaaagaa

SEQ ID NO: 507173 - RNA, 19 nt, Artificial Sequence
  Description of Artificial Sequence: Synthetic oligonucleotide
  Sense strand starting at position 3760 of SEQ ID NO: 317724
uuuguacucgaaugguaau

SEQ ID NO: 507174 - RNA, 19 nt, Artificial Sequence
  Description of Artificial Sequence: Synthetic oligonucleotide
  Antisense strand to SEQ ID NO: 507173
auuaccauucgaguacaaa

SEQ ID NO: 507175 - RNA, 19 nt, Artificial Sequence
  Description of Artificial Sequence: Synthetic oligonucleotide
  Sense strand starting at position 3874 of SEQ ID NO: 317724
agagguugaacuugauucu

SEQ ID NO: 507176 - RNA, 19 nt, Artificial Sequence
  Description of Artificial Sequence: Synthetic oligonucleotide
  Antisense strand to SEQ ID NO: 507175
agaaucaaguucaaccucu

SEQ ID NO: 507177 - RNA, 19 nt, Artificial Sequence
  Description of Artificial Sequence: Synthetic oligonucleotide
  Sense strand starting at position 3877 of SEQ ID NO: 317724
gguugaacuugauucuguu

SEQ ID NO: 507178 - RNA, 19 nt, Artificial Sequence
  Description of Artificial Sequence: Synthetic oligonucleotide
  Antisense strand to SEQ ID NO: 507177
aacagaaucaaguucaacc

SEQ ID NO: 507179 - RNA, 19 nt, Artificial Sequence
  Description of Artificial Sequence: Synthetic oligonucleotide
  Sense strand starting at position 3881 of SEQ ID NO: 317724
gaacuugauucuguuggca

SEQ ID NO: 507180 - RNA, 19 nt, Artificial Sequence
  Description of Artificial Sequence: Synthetic oligonucleotide
  Antisense strand to SEQ ID NO: 507179
ugccaacagaaucaaguuc

SEQ ID NO: 507181 - RNA, 19 nt, Artificial Sequence
  Description of Artificial Sequence: Synthetic oligonucleotide
  Sense strand starting at position 3939 of SEQ ID NO: 317724
cagguuuaucaugagggua

SEQ ID NO: 507182 - RNA, 19 nt, Artificial Sequence
  Description of Artificial Sequence: Synthetic oligonucleotide
  Antisense strand to SEQ ID NO: 507181
uacccucaugauaaaccug

SEQ ID NO: 507183 - RNA, 19 nt, Artificial Sequence
  Description of Artificial Sequence: Synthetic oligonucleotide
  Sense strand starting at position 3953 of SEQ ID NO: 317724
ggguacuggacuggauaau

SEQ ID NO: 507184 - RNA, 19 nt, Artificial Sequence
  Description of Artificial Sequence: Synthetic oligonucleotide
  Antisense strand to SEQ ID NO: 507183
auuauccaguccaguaccc

SEQ ID NO: 507185 - RNA, 19 nt, Artificial Sequence
  Description of Artificial Sequence: Synthetic oligonucleotide
  Sense strand starting at position 3965 of SEQ ID NO: 317724
ggauaauaguaauaaggag

SEQ ID NO: 507186 - RNA, 19 nt, Artificial Sequence
  Description of Artificial Sequence: Synthetic oligonucleotide
  Antisense strand to SEQ ID NO: 507185
cuccuuauuacuauuaucc

SEQ ID NO: 507187 - RNA, 19 nt, Artificial Sequence
  Description of Artificial Sequence: Synthetic oligonucleotide
  Sense strand starting at position 306 of SEQ ID NO: 317725
agccaagaguuauagaaca

SEQ ID NO: 507188 - RNA, 19 nt, Artificial Sequence
  Description of Artificial Sequence: Synthetic oligonucleotide
  Antisense strand to SEQ ID NO: 507187
uguucuauaacucuuggcu

SEQ ID NO: 507189 - RNA, 19 nt, Artificial Sequence
  Description of Artificial Sequence: Synthetic oligonucleotide
  Sense strand starting at position 325 of SEQ ID NO: 317725
gguuguguagacuaucaaa

SEQ ID NO: 507190 - RNA, 19 nt, Artificial Sequence
  Description of Artificial Sequence: Synthetic oligonucleotide
  Antisense strand to SEQ ID NO: 507189
uuugauagucuacacaacc

SEQ ID NO: 507191 - RNA, 19 nt, Artificial Sequence
  Description of Artificial Sequence: Synthetic oligonucleotide
  Sense strand starting at position 685 of SEQ ID NO: 317725
auaaauaguucccugaaug

SEQ ID NO: 507192 - RNA, 19 nt, Artificial Sequence
  Description of Artificial Sequence: Synthetic oligonucleotide
  Antisense strand to SEQ ID NO: 507191
cauucagggaacuauuuau

SEQ ID NO: 507193 - RNA, 19 nt, Artificial Sequence
  Description of Artificial Sequence: Synthetic oligonucleotide
  Sense strand starting at position 733 of SEQ ID NO: 317725
uuuggacugugacuaaauu

SEQ ID NO: 507194 - RNA, 19 nt, Artificial Sequence
  Description of Artificial Sequence: Synthetic oligonucleotide
  Antisense strand to SEQ ID NO: 507193
aauuuagucacaguccaaa

SEQ ID NO: 507195 - RNA, 19 nt, Artificial Sequence
  Description of Artificial Sequence: Synthetic oligonucleotide
  Sense strand starting at position 741 of SEQ ID NO: 317725
gugacuaaauucgaauacu

SEQ ID NO: 507196 - RNA, 19 nt, Artificial Sequence
  Description of Artificial Sequence: Synthetic oligonucleotide
  Antisense strand to SEQ ID NO: 507195
aguauucgaauuuagucac

SEQ ID NO: 507197 - RNA, 19 nt, Artificial Sequence
  Description of Artificial Sequence: Synthetic oligonucleotide
  Sense strand starting at position 833 of SEQ ID NO: 317725
augagccguucuuuauaga

SEQ ID NO: 507198 - RNA, 19 nt, Artificial Sequence
  Description of Artificial Sequence: Synthetic oligonucleotide
  Antisense strand to SEQ ID NO: 507197
ucuauaaagaacggcucau

SEQ ID NO: 507199 - RNA, 19 nt, Artificial Sequence
  Description of Artificial Sequence: Synthetic oligonucleotide
  Sense strand starting at position 834 of SEQ ID NO: 317725
ugagccguucuuuauagaa

SEQ ID NO: 507200 - RNA, 19 nt, Artificial Sequence
  Description of Artificial Sequence: Synthetic oligonucleotide
  Antisense strand to SEQ ID NO: 507199
uucuauaaagaacggcuca

SEQ ID NO: 507201 - RNA, 19 nt, Artificial Sequence
  Description of Artificial Sequence: Synthetic oligonucleotide
  Sense strand starting at position 985 of SEQ ID NO: 317725
aguucuguucuccaaagau

SEQ ID NO: 507202 - RNA, 19 nt, Artificial Sequence
  Description of Artificial Sequence: Synthetic oligonucleotide
  Antisense strand to SEQ ID NO: 507201
aucuuuggagaacagaacu

SEQ ID NO: 507203 - RNA, 19 nt, Artificial Sequence
  Description of Artificial Sequence: Synthetic oligonucleotide
  Sense strand starting at position 1010 of SEQ ID NO: 317725
ucacguaauucucagagau

SEQ ID NO: 507204 - RNA, 19 nt, Artificial Sequence
  Description of Artificial Sequence: Synthetic oligonucleotide
  Antisense strand to SEQ ID NO: 507203
aucucugagaauuacguga

SEQ ID NO: 507205 - RNA, 19 nt, Artificial Sequence
  Description of Artificial Sequence: Synthetic oligonucleotide
  Sense strand starting at position 1012 of SEQ ID NO: 317725
acguaauucucagagauuu

SEQ ID NO: 507206 - RNA, 19 nt, Artificial Sequence
  Description of Artificial Sequence: Synthetic oligonucleotide
  Antisense strand to SEQ ID NO: 507205
aaaucucugagaauuacgu

SEQ ID NO: 507207 - RNA, 19 nt, Artificial Sequence
  Description of Artificial Sequence: Synthetic oligonucleotide
  Sense strand starting at position 1272 of SEQ ID NO: 317725
acacgaggcguuuagaaug

SEQ ID NO: 507208 - RNA, 19 nt, Artificial Sequence
  Description of Artificial Sequence: Synthetic oligonucleotide
  Antisense strand to SEQ ID NO: 507207
cauucuaaacgccucgugu

SEQ ID NO: 507209 - RNA, 19 nt, Artificial Sequence
  Description of Artificial Sequence: Synthetic oligonucleotide
  Sense strand starting at position 1275 of SEQ ID NO: 317725
cgaggcguuuagaauguau

SEQ ID NO: 507210 - RNA, 19 nt, Artificial Sequence
  Description of Artificial Sequence: Synthetic oligonucleotide
  Antisense strand to SEQ ID NO: 507209
auacauucuaaacgccucg

SEQ ID NO: 507211 - RNA, 19 nt, Artificial Sequence
  Description of Artificial Sequence: Synthetic oligonucleotide
  Sense strand starting at position 1277 of SEQ ID NO: 317725
aggcguuuagaauguauua

SEQ ID NO: 507212 - RNA, 19 nt, Artificial Sequence
  Description of Artificial Sequence: Synthetic oligonucleotide
  Antisense strand to SEQ ID NO: 507211
uaauacauucuaaacgccu

SEQ ID NO: 507213 - RNA, 19 nt, Artificial Sequence
  Description of Artificial Sequence: Synthetic oligonucleotide
  Sense strand starting at position 1293 of SEQ ID NO: 317725
uuaccuguugugugcugaa

SEQ ID NO: 507214 - RNA, 19 nt, Artificial Sequence
  Description of Artificial Sequence: Synthetic oligonucleotide
  Antisense strand to SEQ ID NO: 507213
uucagcacacaacagguaa

SEQ ID NO: 507215 - RNA, 19 nt, Artificial Sequence
  Description of Artificial Sequence: Synthetic oligonucleotide
  Sense strand starting at position 1298 of SEQ ID NO: 317725
uguugugugcugaaagcga

SEQ ID NO: 507216 - RNA, 19 nt, Artificial Sequence
  Description of Artificial Sequence: Synthetic oligonucleotide
  Antisense strand to SEQ ID NO: 507215
ucgcuuucagcacacaaca

SEQ ID NO: 507217 - RNA, 19 nt, Artificial Sequence
  Description of Artificial Sequence: Synthetic oligonucleotide
  Sense strand starting at position 1311 of SEQ ID NO: 317725
aagcgacuauuagcguauu

SEQ ID NO: 507218 - RNA, 19 nt, Artificial Sequence
  Description of Artificial Sequence: Synthetic oligonucleotide
  Antisense strand to SEQ ID NO: 507217
aauacgcuaauagucgcuu

SEQ ID NO: 507219 - RNA, 19 nt, Artificial Sequence
  Description of Artificial Sequence: Synthetic oligonucleotide
  Sense strand starting at position 1323 of SEQ ID NO: 317725
gcguauuggcaauaacaag

SEQ ID NO: 507220 - RNA, 19 nt, Artificial Sequence
  Description of Artificial Sequence: Synthetic oligonucleotide
  Antisense strand to SEQ ID NO: 507219
cuuguuauugccaauacgc

SEQ ID NO: 507221 - RNA, 19 nt, Artificial Sequence
  Description of Artificial Sequence: Synthetic oligonucleotide
  Sense strand starting at position 1334 of SEQ ID NO: 317725
auaacaaguuugcagaaga

SEQ ID NO: 507222 - RNA, 19 nt, Artificial Sequence
  Description of Artificial Sequence: Synthetic oligonucleotide
  Antisense strand to SEQ ID NO: 507221
ucuucugcaaacuuguuau

SEQ ID NO: 507223 - RNA, 19 nt, Artificial Sequence
  Description of Artificial Sequence: Synthetic oligonucleotide
  Sense strand starting at position 1372 of SEQ ID NO: 317725
aggguuguguacccucuaa

SEQ ID NO: 507224 - RNA, 19 nt, Artificial Sequence
  Description of Artificial Sequence: Synthetic oligonucleotide
  Antisense strand to SEQ ID NO: 507223
uuagaggguacacaacccu

SEQ ID NO: 507225 - RNA, 19 nt, Artificial Sequence
  Description of Artificial Sequence: Synthetic oligonucleotide
  Sense strand starting at position 1514 of SEQ ID NO: 317725
ugcggauucugaccucuca

SEQ ID NO: 507226 - RNA, 19 nt, Artificial Sequence
  Description of Artificial Sequence: Synthetic oligonucleotide
  Antisense strand to SEQ ID NO: 507225
ugagaggucagaauccgca

SEQ ID NO: 507227 - RNA, 19 nt, Artificial Sequence
  Description of Artificial Sequence: Synthetic oligonucleotide
  Sense strand starting at position 2339 of SEQ ID NO: 317725
ccaggaucaugugauaaug

SEQ ID NO: 507228 - RNA, 19 nt, Artificial Sequence
  Description of Artificial Sequence: Synthetic oligonucleotide
  Antisense strand to SEQ ID NO: 507227
cauuaucacaugauccugg

SEQ ID NO: 507229 - RNA, 19 nt, Artificial Sequence
  Description of Artificial Sequence: Synthetic oligonucleotide
  Sense strand starting at position 2341 of SEQ ID NO: 317725
aggaucaugugauaaugaa

SEQ ID NO: 507230 - RNA, 19 nt, Artificial Sequence
  Description of Artificial Sequence: Synthetic oligonucleotide
  Antisense strand to SEQ ID NO: 507229
uucauuaucacaugauccu

SEQ ID NO: 507231 - RNA, 19 nt, Artificial Sequence
  Description of Artificial Sequence: Synthetic oligonucleotide
  Sense strand starting at position 2373 of SEQ ID NO: 317725
ugggacauccuaugaucca

SEQ ID NO: 507232 - RNA, 19 nt, Artificial Sequence
  Description of Artificial Sequence: Synthetic oligonucleotide
  Antisense strand to SEQ ID NO: 507231
uggaucauaggauguccca

SEQ ID NO: 507233 - RNA, 19 nt, Artificial Sequence
  Description of Artificial Sequence: Synthetic oligonucleotide
  Sense strand starting at position 2380 of SEQ ID NO: 317725
uccuaugauccacgcagau

SEQ ID NO: 507234 - RNA, 19 nt, Artificial Sequence
  Description of Artificial Sequence: Synthetic oligonucleotide
  Antisense strand to SEQ ID NO: 507233
aucugcguggaucauagga

SEQ ID NO: 507235 - RNA, 19 nt, Artificial Sequence
  Description of Artificial Sequence: Synthetic oligonucleotide
  Sense strand starting at position 2499 of SEQ ID NO: 317725
ugagauaucugacauauca

SEQ ID NO: 507236 - RNA, 19 nt, Artificial Sequence
  Description of Artificial Sequence: Synthetic oligonucleotide
  Antisense strand to SEQ ID NO: 507235
ugauaugucagauaucuca

SEQ ID NO: 507237 - RNA, 19 nt, Artificial Sequence
  Description of Artificial Sequence: Synthetic oligonucleotide
  Sense strand starting at position 2628 of SEQ ID NO: 317725
ggagacacuuuauuaagca

SEQ ID NO: 507238 - RNA, 19 nt, Artificial Sequence
  Description of Artificial Sequence: Synthetic oligonucleotide
  Antisense strand to SEQ ID NO: 507237
ugcuuaauaaagugucucc

SEQ ID NO: 507239 - RNA, 19 nt, Artificial Sequence
  Description of Artificial Sequence: Synthetic oligonucleotide
  Sense strand starting at position 2636 of SEQ ID NO: 317725
uuuauuaagcagugggaag

SEQ ID NO: 507240 - RNA, 19 nt, Artificial Sequence
  Description of Artificial Sequence: Synthetic oligonucleotide
  Antisense strand to SEQ ID NO: 507239
cuucccacugcuuaauaaa

SEQ ID NO: 507241 - RNA, 19 nt, Artificial Sequence
  Description of Artificial Sequence: Synthetic oligonucleotide
  Sense strand starting at position 2637 of SEQ ID NO: 317725
uuauuaagcagugggaaga

SEQ ID NO: 507242 - RNA, 19 nt, Artificial Sequence
  Description of Artificial Sequence: Synthetic oligonucleotide
  Antisense strand to SEQ ID NO: 507241
ucuucccacugcuuaauaa

SEQ ID NO: 507243 - RNA, 19 nt, Artificial Sequence
  Description of Artificial Sequence: Synthetic oligonucleotide
  Sense strand starting at position 2685 of SEQ ID NO: 317725
ccauguaaugaaggauauu

SEQ ID NO: 507244 - RNA, 19 nt, Artificial Sequence
  Description of Artificial Sequence: Synthetic oligonucleotide
  Antisense strand to SEQ ID NO: 507243
aauauccuucauuacaugg

SEQ ID NO: 507245 - RNA, 19 nt, Artificial Sequence
  Description of Artificial Sequence: Synthetic oligonucleotide
  Sense strand starting at position 2695 of SEQ ID NO: 317725
aaggauauuugaggaugga

SEQ ID NO: 507246 - RNA, 19 nt, Artificial Sequence
  Description of Artificial Sequence: Synthetic oligonucleotide
  Antisense strand to SEQ ID NO: 507245
uccauccucaaauauccuu

SEQ ID NO: 507247 - RNA, 19 nt, Artificial Sequence
  Description of Artificial Sequence: Synthetic oligonucleotide
  Sense strand starting at position 2722 of SEQ ID NO: 317725
agaacugaguucuaccaua

SEQ ID NO: 507248 - RNA, 19 nt, Artificial Sequence
  Description of Artificial Sequence: Synthetic oligonucleotide
  Antisense strand to SEQ ID NO: 507247
uaugguagaacucaguucu

SEQ ID NO: 507249 - RNA, 19 nt, Artificial Sequence
  Description of Artificial Sequence: Synthetic oligonucleotide
  Sense strand starting at position 2727 of SEQ ID NO: 317725
ugaguucuaccauaagcac

SEQ ID NO: 507250 - RNA, 19 nt, Artificial Sequence
  Description of Artificial Sequence: Synthetic oligonucleotide
  Antisense strand to SEQ ID NO: 507249
gugcuuaugguagaacuca

SEQ ID NO: 507251 - RNA, 19 nt, Artificial Sequence
  Description of Artificial Sequence: Synthetic oligonucleotide
  Sense strand starting at position 2879 of SEQ ID NO: 317725
acagauaagccaugugaac

SEQ ID NO: 507252 - RNA, 19 nt, Artificial Sequence
  Description of Artificial Sequence: Synthetic oligonucleotide
  Antisense strand to SEQ ID NO: 507251
guucacauggcuuaucugu

SEQ ID NO: 507253 - RNA, 19 nt, Artificial Sequence
  Description of Artificial Sequence: Synthetic oligonucleotide
  Sense strand starting at position 2881 of SEQ ID NO: 317725
agauaagccaugugaacag

SEQ ID NO: 507254 - RNA, 19 nt, Artificial Sequence
  Description of Artificial Sequence: Synthetic oligonucleotide
  Antisense strand to SEQ ID NO: 507253
cuguucacauggcuuaucu

SEQ ID NO: 507255 - RNA, 19 nt, Artificial Sequence
  Description of Artificial Sequence: Synthetic oligonucleotide
  Sense strand starting at position 3263 of SEQ ID NO: 317725
ggaauucccugguugggaa

SEQ ID NO: 507256 - RNA, 19 nt, Artificial Sequence
  Description of Artificial Sequence: Synthetic oligonucleotide
  Antisense strand to SEQ ID NO: 507255
uucccaaccagggaauucc

SEQ ID NO: 507257 - RNA, 19 nt, Artificial Sequence
  Description of Artificial Sequence: Synthetic oligonucleotide
  Sense strand starting at position 3470 of SEQ ID NO: 317725
ggugaugaguacuuguagu

SEQ ID NO: 507258 - RNA, 19 nt, Artificial Sequence
  Description of Artificial Sequence: Synthetic oligonucleotide
  Antisense strand to SEQ ID NO: 507257
acuacaaguacucaucacc

SEQ ID NO: 507259 - RNA, 19 nt, Artificial Sequence
  Description of Artificial Sequence: Synthetic oligonucleotide
  Sense strand starting at position 3551 of SEQ ID NO: 317725
uuccuuaagcuguguuugu

SEQ ID NO: 507260 - RNA, 19 nt, Artificial Sequence
  Description of Artificial Sequence: Synthetic oligonucleotide
  Antisense strand to SEQ ID NO: 507259
acaaacacagcuuaaggaa

SEQ ID NO: 507261 - RNA, 19 nt, Artificial Sequence
  Description of Artificial Sequence: Synthetic oligonucleotide
  Sense strand starting at position 3645 of SEQ ID NO: 317725
ucaugcuaguguuauuuau

SEQ ID NO: 507262 - RNA, 19 nt, Artificial Sequence
  Description of Artificial Sequence: Synthetic oligonucleotide
  Antisense strand to SEQ ID NO: 507261
auaaauaacacuagcauga

SEQ ID NO: 507263 - RNA, 19 nt, Artificial Sequence
  Description of Artificial Sequence: Synthetic oligonucleotide
  Sense strand starting at position 3649 of SEQ ID NO: 317725
gcuaguguuauuuauaugu

SEQ ID NO: 507264 - RNA, 19 nt, Artificial Sequence
  Description of Artificial Sequence: Synthetic oligonucleotide
  Antisense strand to SEQ ID NO: 507263
acauauaaauaacacuagc

SEQ ID NO: 507265 - RNA, 19 nt, Artificial Sequence
  Description of Artificial Sequence: Synthetic oligonucleotide
  Sense strand starting at position 3784 of SEQ ID NO: 317725
ggagcacucccauaccaua

SEQ ID NO: 507266 - RNA, 19 nt, Artificial Sequence
  Description of Artificial Sequence: Synthetic oligonucleotide
  Antisense strand to SEQ ID NO: 507265
uaugguaugggagugcucc

SEQ ID NO: 507267 - RNA, 19 nt, Artificial Sequence
  Description of Artificial Sequence: Synthetic oligonucleotide
  Sense strand starting at position 18 of SEQ ID NO: 317726
agccaagaguuauagaaca

SEQ ID NO: 507268 - RNA, 19 nt, Artificial Sequence
  Description of Artificial Sequence: Synthetic oligonucleotide
  Antisense strand to SEQ ID NO: 507267
uguucuauaacucuuggcu

SEQ ID NO: 507269 - RNA, 19 nt, Artificial Sequence
  Description of Artificial Sequence: Synthetic oligonucleotide
  Sense strand starting at position 37 of SEQ ID NO: 317726
gguuguguagacuaucaaa

SEQ ID NO: 507270 - RNA, 19 nt, Artificial Sequence
  Description of Artificial Sequence: Synthetic oligonucleotide
  Antisense strand to SEQ ID NO: 507269
uuugauagucuacacaacc

SEQ ID NO: 507271 - RNA, 19 nt, Artificial Sequence
  Description of Artificial Sequence: Synthetic oligonucleotide
  Sense strand starting at position 397 of SEQ ID NO: 317726
auaaauaguucccugaaug

SEQ ID NO: 507272 - RNA, 19 nt, Artificial Sequence
  Description of Artificial Sequence: Synthetic oligonucleotide
  Antisense strand to SEQ ID NO: 507271
cauucagggaacuauuuau

SEQ ID NO: 507273 - RNA, 19 nt, Artificial Sequence
  Description of Artificial Sequence: Synthetic oligonucleotide
  Sense strand starting at position 445 of SEQ ID NO: 317726
uuuggacugugacuaaauu

SEQ ID NO: 507274 - RNA, 19 nt, Artificial Sequence
  Description of Artificial Sequence: Synthetic oligonucleotide
  Antisense strand to SEQ ID NO: 507273
aauuuagucacaguccaaa

SEQ ID NO: 507275 - RNA, 19 nt, Artificial Sequence
  Description of Artificial Sequence: Synthetic oligonucleotide
  Sense strand starting at position 545 of SEQ ID NO: 317726
augagccguucuuuauaga

SEQ ID NO: 507276 - RNA, 19 nt, Artificial Sequence
  Description of Artificial Sequence: Synthetic oligonucleotide
  Antisense strand to SEQ ID NO: 507275
ucuauaaagaacggcucau

SEQ ID NO: 507277 - RNA, 19 nt, Artificial Sequence
  Description of Artificial Sequence: Synthetic oligonucleotide
  Sense strand starting at position 546 of SEQ ID NO: 317726
ugagccguucuuuauagaa

SEQ ID NO: 507278 - RNA, 19 nt, Artificial Sequence
  Description of Artificial Sequence: Synthetic oligonucleotide
  Antisense strand to SEQ ID NO: 507277
uucuauaaagaacggcuca

SEQ ID NO: 507279 - RNA, 19 nt, Artificial Sequence
  Description of Artificial Sequence: Synthetic oligonucleotide
  Sense strand starting at position 697 of SEQ ID NO: 317726
aguucuguucuccaaagau

SEQ ID NO: 507280 - RNA, 19 nt, Artificial Sequence
  Description of Artificial Sequence: Synthetic oligonucleotide
  Antisense strand to SEQ ID NO: 507279
aucuuuggagaacagaacu

SEQ ID NO: 507281 - RNA, 19 nt, Artificial Sequence
  Description of Artificial Sequence: Synthetic oligonucleotide
  Sense strand starting at position 724 of SEQ ID NO: 317726
acguaauucucagagauuu

SEQ ID NO: 507282 - RNA, 19 nt, Artificial Sequence
  Description of Artificial Sequence: Synthetic oligonucleotide
  Antisense strand to SEQ ID NO: 507281
aaaucucugagaauuacgu

SEQ ID NO: 507283 - RNA, 19 nt, Artificial Sequence
  Description of Artificial Sequence: Synthetic oligonucleotide
  Sense strand starting at position 984 of SEQ ID NO: 317726
acacgaggcguuuagaaug

SEQ ID NO: 507284 - RNA, 19 nt, Artificial Sequence
  Description of Artificial Sequence: Synthetic oligonucleotide
  Antisense strand to SEQ ID NO: 507283
cauucuaaacgccucgugu

SEQ ID NO: 507285 - RNA, 19 nt, Artificial Sequence
  Description of Artificial Sequence: Synthetic oligonucleotide
  Sense strand starting at position 987 of SEQ ID NO: 317726
cgaggcguuuagaauguau

SEQ ID NO: 507286 - RNA, 19 nt, Artificial Sequence
  Description of Artificial Sequence: Synthetic oligonucleotide
  Antisense strand to SEQ ID NO: 507285
auacauucuaaacgccucg

SEQ ID NO: 507287 - RNA, 19 nt, Artificial Sequence
  Description of Artificial Sequence: Synthetic oligonucleotide
  Sense strand starting at position 989 of SEQ ID NO: 317726
aggcguuuagaauguauua

SEQ ID NO: 507288 - RNA, 19 nt, Artificial Sequence
  Description of Artificial Sequence: Synthetic oligonucleotide
  Antisense strand to SEQ ID NO: 507287
uaauacauucuaaacgccu

SEQ ID NO: 507289 - RNA, 19 nt, Artificial Sequence
  Description of Artificial Sequence: Synthetic oligonucleotide
  Sense strand starting at position 1005 of SEQ ID NO: 317726
uuaccuguugugugcugaa

SEQ ID NO: 507290 - RNA, 19 nt, Artificial Sequence
  Description of Artificial Sequence: Synthetic oligonucleotide
  Antisense strand to SEQ ID NO: 507289
uucagcacacaacagguaa

SEQ ID NO: 507291 - RNA, 19 nt, Artificial Sequence
  Description of Artificial Sequence: Synthetic oligonucleotide
  Sense strand starting at position 1010 of SEQ ID NO: 317726
uguugugugcugaaagcga

SEQ ID NO: 507292 - RNA, 19 nt, Artificial Sequence
  Description of Artificial Sequence: Synthetic oligonucleotide
  Antisense strand to SEQ ID NO: 507291
ucgcuuucagcacacaaca

SEQ ID NO: 507293 - RNA, 19 nt, Artificial Sequence
  Description of Artificial Sequence: Synthetic oligonucleotide
  Sense strand starting at position 1035 of SEQ ID NO: 317726
gcguauuggcaauaacaag

SEQ ID NO: 507294 - RNA, 19 nt, Artificial Sequence
  Description of Artificial Sequence: Synthetic oligonucleotide
  Antisense strand to SEQ ID NO: 507293
cuuguuauugccaauacgc

SEQ ID NO: 507295 - RNA, 19 nt, Artificial Sequence
  Description of Artificial Sequence: Synthetic oligonucleotide
  Sense strand starting at position 1046 of SEQ ID NO: 317726
auaacaaguuugcagaaga

SEQ ID NO: 507296 - RNA, 19 nt, Artificial Sequence
  Description of Artificial Sequence: Synthetic oligonucleotide
  Antisense strand to SEQ ID NO: 507295
ucuucugcaaacuuguuau

SEQ ID NO: 507297 - RNA, 19 nt, Artificial Sequence
  Description of Artificial Sequence: Synthetic oligonucleotide
  Sense strand starting at position 1084 of SEQ ID NO: 317726
aggguuguguacccucuaa

SEQ ID NO: 507298 - RNA, 19 nt, Artificial Sequence
  Description of Artificial Sequence: Synthetic oligonucleotide
  Antisense strand to SEQ ID NO: 507297
uuagaggguacacaacccu

SEQ ID NO: 507299 - RNA, 19 nt, Artificial Sequence
  Description of Artificial Sequence: Synthetic oligonucleotide
  Sense strand starting at position 1226 of SEQ ID NO: 317726
ugcggauucugaccucuca

SEQ ID NO: 507300 - RNA, 19 nt, Artificial Sequence
  Description of Artificial Sequence: Synthetic oligonucleotide
  Antisense strand to SEQ ID NO: 507299
ugagaggucagaauccgca

SEQ ID NO: 507301 - RNA, 19 nt, Artificial Sequence
  Description of Artificial Sequence: Synthetic oligonucleotide
  Sense strand starting at position 2051 of SEQ ID NO: 317726
ccaggaucaugugauaaug

SEQ ID NO: 507302 - RNA, 19 nt, Artificial Sequence
  Description of Artificial Sequence: Synthetic oligonucleotide
  Antisense strand to SEQ ID NO: 507301
cauuaucacaugauccugg

SEQ ID NO: 507303 - RNA, 19 nt, Artificial Sequence
  Description of Artificial Sequence: Synthetic oligonucleotide
  Sense strand starting at position 2053 of SEQ ID NO: 317726
aggaucaugugauaaugaa

SEQ ID NO: 507304 - RNA, 19 nt, Artificial Sequence
  Description of Artificial Sequence: Synthetic oligonucleotide
  Antisense strand to SEQ ID NO: 507303
uucauuaucacaugauccu

SEQ ID NO: 507305 - RNA, 19 nt, Artificial Sequence
  Description of Artificial Sequence: Synthetic oligonucleotide
  Sense strand starting at position 2085 of SEQ ID NO: 317726
ugggacauccuaugaucca

SEQ ID NO: 507306 - RNA, 19 nt, Artificial Sequence
  Description of Artificial Sequence: Synthetic oligonucleotide
  Antisense strand to SEQ ID NO: 507305
uggaucauaggauguccca

SEQ ID NO: 507307 - RNA, 19 nt, Artificial Sequence
  Description of Artificial Sequence: Synthetic oligonucleotide
  Sense strand starting at position 2092 of SEQ ID NO: 317726
uccuaugauccacgcagau

SEQ ID NO: 507308 - RNA, 19 nt, Artificial Sequence
  Description of Artificial Sequence: Synthetic oligonucleotide
  Antisense strand to SEQ ID NO: 507307
aucugcguggaucauagga

SEQ ID NO: 507309 - RNA, 19 nt, Artificial Sequence
  Description of Artificial Sequence: Synthetic oligonucleotide
  Sense strand starting at position 2211 of SEQ ID NO: 317726
ugagauaucugacauauca

SEQ ID NO: 507310 - RNA, 19 nt, Artificial Sequence
  Description of Artificial Sequence: Synthetic oligonucleotide
  Antisense strand to SEQ ID NO: 507309
ugauaugucagauaucuca

SEQ ID NO: 507311 - RNA, 19 nt, Artificial Sequence
  Description of Artificial Sequence: Synthetic oligonucleotide
  Sense strand starting at position 2340 of SEQ ID NO: 317726
ggagacacuuuauuaagca

SEQ ID NO: 507312 - RNA, 19 nt, Artificial Sequence
  Description of Artificial Sequence: Synthetic oligonucleotide
  Antisense strand to SEQ ID NO: 507311
ugcuuaauaaagugucucc

SEQ ID NO: 507313 - RNA, 19 nt, Artificial Sequence
  Description of Artificial Sequence: Synthetic oligonucleotide
  Sense strand starting at position 2348 of SEQ ID NO: 317726
uuuauuaagcagugggaag

SEQ ID NO: 507314 - RNA, 19 nt, Artificial Sequence
  Description of Artificial Sequence: Synthetic oligonucleotide
  Antisense strand to SEQ ID NO: 507313
cuucccacugcuuaauaaa

SEQ ID NO: 507315 - RNA, 19 nt, Artificial Sequence
  Description of Artificial Sequence: Synthetic oligonucleotide
  Sense strand starting at position 2349 of SEQ ID NO: 317726
uuauuaagcagugggaaga

SEQ ID NO: 507316 - RNA, 19 nt, Artificial Sequence
  Description of Artificial Sequence: Synthetic oligonucleotide
  Antisense strand to SEQ ID NO: 507315
ucuucccacugcuuaauaa

SEQ ID NO: 507317 - RNA, 19 nt, Artificial Sequence
  Description of Artificial Sequence: Synthetic oligonucleotide
  Sense strand starting at position 2397 of SEQ ID NO: 317726
ccauguaaugaaggauauu

SEQ ID NO: 507318 - RNA, 19 nt, Artificial Sequence
  Description of Artificial Sequence: Synthetic oligonucleotide
  Antisense strand to SEQ ID NO: 507317
aauauccuucauuacaugg

SEQ ID NO: 507319 - RNA, 19 nt, Artificial Sequence
  Description of Artificial Sequence: Synthetic oligonucleotide
  Sense strand starting at position 2407 of SEQ ID NO: 317726
aaggauauuugaggaugga

SEQ ID NO: 507320 - RNA, 19 nt, Artificial Sequence
  Description of Artificial Sequence: Synthetic oligonucleotide
  Antisense strand to SEQ ID NO: 507319
uccauccucaaauauccuu

SEQ ID NO: 507321 - RNA, 19 nt, Artificial Sequence
  Description of Artificial Sequence: Synthetic oligonucleotide
  Sense strand starting at position 2434 of SEQ ID NO: 317726
agaacugaguucuaccaua

SEQ ID NO: 507322 - RNA, 19 nt, Artificial Sequence
  Description of Artificial Sequence: Synthetic oligonucleotide
  Antisense strand to SEQ ID NO: 507321
uaugguagaacucaguucu

SEQ ID NO: 507323 - RNA, 19 nt, Artificial Sequence
  Description of Artificial Sequence: Synthetic oligonucleotide
  Sense strand starting at position 2439 of SEQ ID NO: 317726
ugaguucuaccauaagcac

SEQ ID NO: 507324 - RNA, 19 nt, Artificial Sequence
  Description of Artificial Sequence: Synthetic oligonucleotide
  Antisense strand to SEQ ID NO: 507323
gugcuuaugguagaacuca

SEQ ID NO: 507325 - RNA, 19 nt, Artificial Sequence
  Description of Artificial Sequence: Synthetic oligonucleotide
  Sense strand starting at position 2591 of SEQ ID NO: 317726
acagauaagccaugugaac

SEQ ID NO: 507326 - RNA, 19 nt, Artificial Sequence
  Description of Artificial Sequence: Synthetic oligonucleotide
  Antisense strand to SEQ ID NO: 507325
guucacauggcuuaucugu

SEQ ID NO: 507327 - RNA, 19 nt, Artificial Sequence
  Description of Artificial Sequence: Synthetic oligonucleotide
  Sense strand starting at position 2593 of SEQ ID NO: 317726
agauaagccaugugaacag

SEQ ID NO: 507328 - RNA, 19 nt, Artificial Sequence
  Description of Artificial Sequence: Synthetic oligonucleotide
  Antisense strand to SEQ ID NO: 507327
cuguucacauggcuuaucu

SEQ ID NO: 507329 - RNA, 19 nt, Artificial Sequence
  Description of Artificial Sequence: Synthetic oligonucleotide
  Sense strand starting at position 2975 of SEQ ID NO: 317726
ggaauucccugguugggaa

SEQ ID NO: 507330 - RNA, 19 nt, Artificial Sequence
  Description of Artificial Sequence: Synthetic oligonucleotide
  Antisense strand to SEQ ID NO: 507329
uucccaaccagggaauucc

SEQ ID NO: 507331 - RNA, 19 nt, Artificial Sequence
  Description of Artificial Sequence: Synthetic oligonucleotide
  Sense strand starting at position 3182 of SEQ ID NO: 317726
ggugaugaguacuuguagu

SEQ ID NO: 507332 - RNA, 19 nt, Artificial Sequence
  Description of Artificial Sequence: Synthetic oligonucleotide
  Antisense strand to SEQ ID NO: 507331
acuacaaguacucaucacc

SEQ ID NO: 507333 - RNA, 19 nt, Artificial Sequence
  Description of Artificial Sequence: Synthetic oligonucleotide
  Sense strand starting at position 3361 of SEQ ID NO: 317726
gcuaguguuauuuauaugu

SEQ ID NO: 507334 - RNA, 19 nt, Artificial Sequence
  Description of Artificial Sequence: Synthetic oligonucleotide
  Antisense strand to SEQ ID NO: 507333
acauauaaauaacacuagc

SEQ ID NO: 507335 - RNA, 19 nt, Artificial Sequence
  Description of Artificial Sequence: Synthetic oligonucleotide
  Sense strand starting at position 3496 of SEQ ID NO: 317726
ggagcacucccauaccaua

SEQ ID NO: 507336 - RNA, 19 nt, Artificial Sequence
  Description of Artificial Sequence: Synthetic oligonucleotide
  Antisense strand to SEQ ID NO: 507335
uaugguaugggagugcucc

SEQ ID NO: 507337 - RNA, 19 nt, Artificial Sequence
  Description of Artificial Sequence: Synthetic oligonucleotide
  Sense strand starting at position 3716 of SEQ ID NO: 317726
gcaagucauugcuccacca

SEQ ID NO: 507338 - RNA, 19 nt, Artificial Sequence
  Description of Artificial Sequence: Synthetic oligonucleotide
  Antisense strand to SEQ ID NO: 507337
ugguggagcaaugacuugc

SEQ ID NO: 507339 - RNA, 19 nt, Artificial Sequence
  Description of Artificial Sequence: Synthetic oligonucleotide
  Sense strand starting at position 3748 of SEQ ID NO: 317726
guaagaaauuaagacaaug

SEQ ID NO: 507340 - RNA, 19 nt, Artificial Sequence
  Description of Artificial Sequence: Synthetic oligonucleotide
  Antisense strand to SEQ ID NO: 507339
cauugucuuaauuucuuac

SEQ ID NO: 507341 - RNA, 19 nt, Artificial Sequence
  Description of Artificial Sequence: Synthetic oligonucleotide
  Sense strand starting at position 3760 of SEQ ID NO: 317726
gacaaugucuuccuuguag

SEQ ID NO: 507342 - RNA, 19 nt, Artificial Sequence
  Description of Artificial Sequence: Synthetic oligonucleotide
  Antisense strand to SEQ ID NO: 507341
cuacaaggaagacauuguc

SEQ ID NO: 507343 - RNA, 19 nt, Artificial Sequence
  Description of Artificial Sequence: Synthetic oligonucleotide
  Sense strand starting at position 3762 of SEQ ID NO: 317726
caaugucuuccuuguagag

SEQ ID NO: 507344 - RNA, 19 nt, Artificial Sequence
  Description of Artificial Sequence: Synthetic oligonucleotide
  Antisense strand to SEQ ID NO: 507343
cucuacaaggaagacauug

SEQ ID NO: 507345 - RNA, 19 nt, Artificial Sequence
  Description of Artificial Sequence: Synthetic oligonucleotide
  Sense strand starting at position 3772 of SEQ ID NO: 317726
cuuguagagcugugaaauu

SEQ ID NO: 507346 - RNA, 19 nt, Artificial Sequence
  Description of Artificial Sequence: Synthetic oligonucleotide
  Antisense strand to SEQ ID NO: 507345
aauuucacagcucuacaag

SEQ ID NO: 507347 - RNA, 19 nt, Artificial Sequence
  Description of Artificial Sequence: Synthetic oligonucleotide
  Sense strand starting at position 286 of SEQ ID NO: 317727
gguguaauuuauuacacaa

SEQ ID NO: 507348 - RNA, 19 nt, Artificial Sequence
  Description of Artificial Sequence: Synthetic oligonucleotide
  Antisense strand to SEQ ID NO: 507347
uuguguaauaaauuacacc

SEQ ID NO: 507349 - RNA, 19 nt, Artificial Sequence
  Description of Artificial Sequence: Synthetic oligonucleotide
  Sense strand starting at position 422 of SEQ ID NO: 317727
cucagagucugaguauuag

SEQ ID NO: 507350 - RNA, 19 nt, Artificial Sequence
  Description of Artificial Sequence: Synthetic oligonucleotide
  Antisense strand to SEQ ID NO: 507349
cuaauacucagacucugag

SEQ ID NO: 507351 - RNA, 19 nt, Artificial Sequence
  Description of Artificial Sequence: Synthetic oligonucleotide
  Sense strand starting at position 445 of SEQ ID NO: 317727
agagaaauuuacuaagugu

SEQ ID NO: 507352 - RNA, 19 nt, Artificial Sequence
  Description of Artificial Sequence: Synthetic oligonucleotide
  Antisense strand to SEQ ID NO: 507351
acacuuaguaaauuucucu

SEQ ID NO: 507353 - RNA, 19 nt, Artificial Sequence
  Description of Artificial Sequence: Synthetic oligonucleotide
  Sense strand starting at position 610 of SEQ ID NO: 317727
uugauaagguuccuuaaga

SEQ ID NO: 507354 - RNA, 19 nt, Artificial Sequence
  Description of Artificial Sequence: Synthetic oligonucleotide
  Antisense strand to SEQ ID NO: 507353
ucuuaaggaaccuuaucaa

SEQ ID NO: 507355 - RNA, 19 nt, Artificial Sequence
  Description of Artificial Sequence: Synthetic oligonucleotide
  Sense strand starting at position 611 of SEQ ID NO: 317727
ugauaagguuccuuaagag

SEQ ID NO: 507356 - RNA, 19 nt, Artificial Sequence
  Description of Artificial Sequence: Synthetic oligonucleotide
  Antisense strand to SEQ ID NO: 507355
cucuuaaggaaccuuauca

SEQ ID NO: 507357 - RNA, 19 nt, Artificial Sequence
  Description of Artificial Sequence: Synthetic oligonucleotide
  Sense strand starting at position 618 of SEQ ID NO: 317727
guuccuuaagaguagugau

SEQ ID NO: 507358 - RNA, 19 nt, Artificial Sequence
  Description of Artificial Sequence: Synthetic oligonucleotide
  Antisense strand to SEQ ID NO: 507357
aucacuacucuuaaggaac

SEQ ID NO: 507359 - RNA, 19 nt, Artificial Sequence
  Description of Artificial Sequence: Synthetic oligonucleotide
  Sense strand starting at position 666 of SEQ ID NO: 317727
cagugugcucaagguauuu

SEQ ID NO: 507360 - RNA, 19 nt, Artificial Sequence
  Description of Artificial Sequence: Synthetic oligonucleotide
  Antisense strand to SEQ ID NO: 507359
aaauaccuugagcacacug

SEQ ID NO: 507361 - RNA, 19 nt, Artificial Sequence
  Description of Artificial Sequence: Synthetic oligonucleotide
  Sense strand starting at position 723 of SEQ ID NO: 317727
auaauaaauccgcagccua

SEQ ID NO: 507362 - RNA, 19 nt, Artificial Sequence
  Description of Artificial Sequence: Synthetic oligonucleotide
  Antisense strand to SEQ ID NO: 507361
uaggcugcggauuuauuau

SEQ ID NO: 507363 - RNA, 19 nt, Artificial Sequence
  Description of Artificial Sequence: Synthetic oligonucleotide
  Sense strand starting at position 747 of SEQ ID NO: 317727
uaaagauacuguuugggau

SEQ ID NO: 507364 - RNA, 19 nt, Artificial Sequence
  Description of Artificial Sequence: Synthetic oligonucleotide
  Antisense strand to SEQ ID NO: 507363
aucccaaacaguaucuuua

SEQ ID NO: 507365 - RNA, 19 nt, Artificial Sequence
  Description of Artificial Sequence: Synthetic oligonucleotide
  Sense strand starting at position 760 of SEQ ID NO: 317727
ugggauagcuucucugaca

SEQ ID NO: 507366 - RNA, 19 nt, Artificial Sequence
  Description of Artificial Sequence: Synthetic oligonucleotide
  Antisense strand to SEQ ID NO: 507365
ugucagagaagcuauccca

SEQ ID NO: 507367 - RNA, 19 nt, Artificial Sequence
  Description of Artificial Sequence: Synthetic oligonucleotide
  Sense strand starting at position 761 of SEQ ID NO: 317727
gggauagcuucucugacau

SEQ ID NO: 507368 - RNA, 19 nt, Artificial Sequence
  Description of Artificial Sequence: Synthetic oligonucleotide
  Antisense strand to SEQ ID NO: 507367
augucagagaagcuauccc

SEQ ID NO: 507369 - RNA, 19 nt, Artificial Sequence
  Description of Artificial Sequence: Synthetic oligonucleotide
  Sense strand starting at position 939 of SEQ ID NO: 317727
auauaauuagcuggucacu

SEQ ID NO: 507370 - RNA, 19 nt, Artificial Sequence
  Description of Artificial Sequence: Synthetic oligonucleotide
  Antisense strand to SEQ ID NO: 507369
agugaccagcuaauuauau

SEQ ID NO: 507371 - RNA, 19 nt, Artificial Sequence
  Description of Artificial Sequence: Synthetic oligonucleotide
  Sense strand starting at position 944 of SEQ ID NO: 317727
auuagcuggucacuuuaau

SEQ ID NO: 507372 - RNA, 19 nt, Artificial Sequence
  Description of Artificial Sequence: Synthetic oligonucleotide
  Antisense strand to SEQ ID NO: 507371
auuaaagugaccagcuaau

SEQ ID NO: 507373 - RNA, 19 nt, Artificial Sequence
  Description of Artificial Sequence: Synthetic oligonucleotide
  Sense strand starting at position 958 of SEQ ID NO: 317727
uuaauuauacgcuaucaug

SEQ ID NO: 507374 - RNA, 19 nt, Artificial Sequence
  Description of Artificial Sequence: Synthetic oligonucleotide
  Antisense strand to SEQ ID NO: 507373
caugauagcguauaauuaa

SEQ ID NO: 507375 - RNA, 19 nt, Artificial Sequence
  Description of Artificial Sequence: Synthetic oligonucleotide
  Sense strand starting at position 1028 of SEQ ID NO: 317727
gcugauacauucucuaagu

SEQ ID NO: 507376 - RNA, 19 nt, Artificial Sequence
  Description of Artificial Sequence: Synthetic oligonucleotide
  Antisense strand to SEQ ID NO: 507375
acuuagagaauguaucagc

SEQ ID NO: 507377 - RNA, 19 nt, Artificial Sequence
  Description of Artificial Sequence: Synthetic oligonucleotide
  Sense strand starting at position 1145 of SEQ ID NO: 317727
uuuauuaugcuuuaccagu

SEQ ID NO: 507378 - RNA, 19 nt, Artificial Sequence
  Description of Artificial Sequence: Synthetic oligonucleotide
  Antisense strand to SEQ ID NO: 507377
acugguaaagcauaauaaa

SEQ ID NO: 507379 - RNA, 19 nt, Artificial Sequence
  Description of Artificial Sequence: Synthetic oligonucleotide
  Sense strand starting at position 1151 of SEQ ID NO: 317727
augcuuuaccaguaagucu

SEQ ID NO: 507380 - RNA, 19 nt, Artificial Sequence
  Description of Artificial Sequence: Synthetic oligonucleotide
  Antisense strand to SEQ ID NO: 507379
agacuuacugguaaagcau

SEQ ID NO: 507381 - RNA, 19 nt, Artificial Sequence
  Description of Artificial Sequence: Synthetic oligonucleotide
  Sense strand starting at position 1314 of SEQ ID NO: 317727
aucagaugucugcacuuaa

SEQ ID NO: 507382 - RNA, 19 nt, Artificial Sequence
  Description of Artificial Sequence: Synthetic oligonucleotide
  Antisense strand to SEQ ID NO: 507381
uuaagugcagacaucugau

SEQ ID NO: 507383 - RNA, 19 nt, Artificial Sequence
  Description of Artificial Sequence: Synthetic oligonucleotide
  Sense strand starting at position 1343 of SEQ ID NO: 317727
uccuaugcccauuacgaau

SEQ ID NO: 507384 - RNA, 19 nt, Artificial Sequence
  Description of Artificial Sequence: Synthetic oligonucleotide
  Antisense strand to SEQ ID NO: 507383
auucguaaugggcauagga

SEQ ID NO: 507385 - RNA, 19 nt, Artificial Sequence
  Description of Artificial Sequence: Synthetic oligonucleotide
  Sense strand starting at position 1426 of SEQ ID NO: 317727
ucuggugugaugcaauaau

SEQ ID NO: 507386 - RNA, 19 nt, Artificial Sequence
  Description of Artificial Sequence: Synthetic oligonucleotide
  Antisense strand to SEQ ID NO: 507385
auuauugcaucacaccaga

SEQ ID NO: 507387 - RNA, 19 nt, Artificial Sequence
  Description of Artificial Sequence: Synthetic oligonucleotide
  Sense strand starting at position 2115 of SEQ ID NO: 317727
gguagauaccucgaguuuc

SEQ ID NO: 507388 - RNA, 19 nt, Artificial Sequence
  Description of Artificial Sequence: Synthetic oligonucleotide
  Antisense strand to SEQ ID NO: 507387
gaaacucgagguaucuacc

SEQ ID NO: 507389 - RNA, 19 nt, Artificial Sequence
  Description of Artificial Sequence: Synthetic oligonucleotide
  Sense strand starting at position 2361 of SEQ ID NO: 317727
gccuuacuaccagaagcuu

SEQ ID NO: 507390 - RNA, 19 nt, Artificial Sequence
  Description of Artificial Sequence: Synthetic oligonucleotide
  Antisense strand to SEQ ID NO: 507389
aagcuucugguaguaaggc

SEQ ID NO: 507391 - RNA, 19 nt, Artificial Sequence
  Description of Artificial Sequence: Synthetic oligonucleotide
  Sense strand starting at position 2528 of SEQ ID NO: 317727
gggauuucuugauaauucu

SEQ ID NO: 507392 - RNA, 19 nt, Artificial Sequence
  Description of Artificial Sequence: Synthetic oligonucleotide
  Antisense strand to SEQ ID NO: 507391
agaauuaucaagaaauccc

SEQ ID NO: 507393 - RNA, 19 nt, Artificial Sequence
  Description of Artificial Sequence: Synthetic oligonucleotide
  Sense strand starting at position 2658 of SEQ ID NO: 317727
agaauaguuugacccuaau

SEQ ID NO: 507394 - RNA, 19 nt, Artificial Sequence
  Description of Artificial Sequence: Synthetic oligonucleotide
  Antisense strand to SEQ ID NO: 507393
auuagggucaaacuauucu

SEQ ID NO: 507395 - RNA, 19 nt, Artificial Sequence
  Description of Artificial Sequence: Synthetic oligonucleotide
  Sense strand starting at position 2676 of SEQ ID NO: 317727
uuaaauugcgcuuacaaga

SEQ ID NO: 507396 - RNA, 19 nt, Artificial Sequence
  Description of Artificial Sequence: Synthetic oligonucleotide
  Antisense strand to SEQ ID NO: 507395
ucuuguaagcgcaauuuaa

SEQ ID NO: 507397 - RNA, 19 nt, Artificial Sequence
  Description of Artificial Sequence: Synthetic oligonucleotide
  Sense strand starting at position 2832 of SEQ ID NO: 317727
gggacauucuucuuucccu

SEQ ID NO: 507398 - RNA, 19 nt, Artificial Sequence
  Description of Artificial Sequence: Synthetic oligonucleotide
  Antisense strand to SEQ ID NO: 507397
agggaaagaagaauguccc

SEQ ID NO: 507399 - RNA, 19 nt, Artificial Sequence
  Description of Artificial Sequence: Synthetic oligonucleotide
  Sense strand starting at position 2873 of SEQ ID NO: 317727
ccaagugucagauggaaag

SEQ ID NO: 507400 - RNA, 19 nt, Artificial Sequence
  Description of Artificial Sequence: Synthetic oligonucleotide
  Antisense strand to SEQ ID NO: 507399
cuuuccaucugacacuugg

SEQ ID NO: 507401 - RNA, 19 nt, Artificial Sequence
  Description of Artificial Sequence: Synthetic oligonucleotide
  Sense strand starting at position 2901 of SEQ ID NO: 317727
guaucaucguaauuauaca

SEQ ID NO: 507402 - RNA, 19 nt, Artificial Sequence
  Description of Artificial Sequence: Synthetic oligonucleotide
  Antisense strand to SEQ ID NO: 507401
uguauaauuacgaugauac

SEQ ID NO: 507403 - RNA, 19 nt, Artificial Sequence
  Description of Artificial Sequence: Synthetic oligonucleotide
  Sense strand starting at position 3172 of SEQ ID NO: 317727
uucugaaugcaguaauaau

SEQ ID NO: 507404 - RNA, 19 nt, Artificial Sequence
  Description of Artificial Sequence: Synthetic oligonucleotide
  Antisense strand to SEQ ID NO: 507403
auuauuacugcauucagaa

SEQ ID NO: 507405 - RNA, 19 nt, Artificial Sequence
  Description of Artificial Sequence: Synthetic oligonucleotide
  Sense strand starting at position 3237 of SEQ ID NO: 317727
gcuuuauggagcuauugag

SEQ ID NO: 507406 - RNA, 19 nt, Artificial Sequence
  Description of Artificial Sequence: Synthetic oligonucleotide
  Antisense strand to SEQ ID NO: 507405
cucaauagcuccauaaagc

SEQ ID NO: 507407 - RNA, 19 nt, Artificial Sequence
  Description of Artificial Sequence: Synthetic oligonucleotide
  Sense strand starting at position 3719 of SEQ ID NO: 317727
gggugugagccacaaggaa

SEQ ID NO: 507408 - RNA, 19 nt, Artificial Sequence
  Description of Artificial Sequence: Synthetic oligonucleotide
  Antisense strand to SEQ ID NO: 507407
uuccuuguggcucacaccc

SEQ ID NO: 507409 - RNA, 19 nt, Artificial Sequence
  Description of Artificial Sequence: Synthetic oligonucleotide
  Sense strand starting at position 3773 of SEQ ID NO: 317727
aaguaaauagggugaugua

SEQ ID NO: 507410 - RNA, 19 nt, Artificial Sequence
  Description of Artificial Sequence: Synthetic oligonucleotide
  Antisense strand to SEQ ID NO: 507409
uacaucacccuauuuacuu

SEQ ID NO: 507411 - RNA, 19 nt, Artificial Sequence
  Description of Artificial Sequence: Synthetic oligonucleotide
  Sense strand starting at position 3800 of SEQ ID NO: 317727
gggagaugcuaacuuuagu

SEQ ID NO: 507412 - RNA, 19 nt, Artificial Sequence
  Description of Artificial Sequence: Synthetic oligonucleotide
  Antisense strand to SEQ ID NO: 507411
acuaaaguuagcaucuccc

SEQ ID NO: 507413 - RNA, 19 nt, Artificial Sequence
  Description of Artificial Sequence: Synthetic oligonucleotide
  Sense strand starting at position 3811 of SEQ ID NO: 317727
acuuuagucagguaguaag

SEQ ID NO: 507414 - RNA, 19 nt, Artificial Sequence
  Description of Artificial Sequence: Synthetic oligonucleotide
  Antisense strand to SEQ ID NO: 507413
cuuacuaccugacuaaagu

SEQ ID NO: 507415 - RNA, 19 nt, Artificial Sequence
  Description of Artificial Sequence: Synthetic oligonucleotide
  Sense strand starting at position 3844 of SEQ ID NO: 317727
ggaaaugguacuuguuuga

SEQ ID NO: 507416 - RNA, 19 nt, Artificial Sequence
  Description of Artificial Sequence: Synthetic oligonucleotide
  Antisense strand to SEQ ID NO: 507415
ucaaacaaguaccauuucc

SEQ ID NO: 507417 - RNA, 19 nt, Artificial Sequence
  Description of Artificial Sequence: Synthetic oligonucleotide
  Sense strand starting at position 3847 of SEQ ID NO: 317727
aaugguacuuguuugagaa

SEQ ID NO: 507418 - RNA, 19 nt, Artificial Sequence
  Description of Artificial Sequence: Synthetic oligonucleotide
  Antisense strand to SEQ ID NO: 507417
uucucaaacaaguaccauu

SEQ ID NO: 507419 - RNA, 19 nt, Artificial Sequence
  Description of Artificial Sequence: Synthetic oligonucleotide
  Sense strand starting at position 3848 of SEQ ID NO: 317727
augguacuuguuugagaau

SEQ ID NO: 507420 - RNA, 19 nt, Artificial Sequence
  Description of Artificial Sequence: Synthetic oligonucleotide
  Antisense strand to SEQ ID NO: 507419
auucucaaacaaguaccau

SEQ ID NO: 507421 - RNA, 19 nt, Artificial Sequence
  Description of Artificial Sequence: Synthetic oligonucleotide
  Sense strand starting at position 3855 of SEQ ID NO: 317727
uuguuugagaauugaaaug

SEQ ID NO: 507422 - RNA, 19 nt, Artificial Sequence
  Description of Artificial Sequence: Synthetic oligonucleotide
  Antisense strand to SEQ ID NO: 507421
cauuucaauucucaaacaa

SEQ ID NO: 507423 - RNA, 19 nt, Artificial Sequence
  Description of Artificial Sequence: Synthetic oligonucleotide
  Sense strand starting at position 3882 of SEQ ID NO: 317727
uccagugucagaggaacua

SEQ ID NO: 507424 - RNA, 19 nt, Artificial Sequence
  Description of Artificial Sequence: Synthetic oligonucleotide
  Antisense strand to SEQ ID NO: 507423
uaguuccucugacacugga

SEQ ID NO: 507425 - RNA, 19 nt, Artificial Sequence
  Description of Artificial Sequence: Synthetic oligonucleotide
  Sense strand starting at position 3935 of SEQ ID NO: 317727
gugacauuaucauuccuga

SEQ ID NO: 507426 - RNA, 19 nt, Artificial Sequence
  Description of Artificial Sequence: Synthetic oligonucleotide
  Antisense strand to SEQ ID NO: 507425
ucaggaaugauaaugucac

SEQ ID NO: 507427 - RNA, 19 nt, Artificial Sequence
  Description of Artificial Sequence: Synthetic oligonucleotide
  Sense strand starting at position 199 of SEQ ID NO: 317728
auuaacaggucucuguauu

SEQ ID NO: 507428 - RNA, 19 nt, Artificial Sequence
  Description of Artificial Sequence: Synthetic oligonucleotide
  Antisense strand to SEQ ID NO: 507427
aauacagagaccuguuaau

SEQ ID NO: 507429 - RNA, 19 nt, Artificial Sequence
  Description of Artificial Sequence: Synthetic oligonucleotide
  Sense strand starting at position 434 of SEQ ID NO: 317728
gugucaauccagcauuaca

SEQ ID NO: 507430 - RNA, 19 nt, Artificial Sequence
  Description of Artificial Sequence: Synthetic oligonucleotide
  Antisense strand to SEQ ID NO: 507429
uguaaugcuggauugacac

SEQ ID NO: 507431 - RNA, 19 nt, Artificial Sequence
  Description of Artificial Sequence: Synthetic oligonucleotide
  Sense strand starting at position 689 of SEQ ID NO: 317728
cacggaaaucuugguucca

SEQ ID NO: 507432 - RNA, 19 nt, Artificial Sequence
  Description of Artificial Sequence: Synthetic oligonucleotide
  Antisense strand to SEQ ID NO: 507431
uggaaccaagauuuccgug

SEQ ID NO: 507433 - RNA, 19 nt, Artificial Sequence
  Description of Artificial Sequence: Synthetic oligonucleotide
  Sense strand starting at position 690 of SEQ ID NO: 317728
acggaaaucuugguuccac

SEQ ID NO: 507434 - RNA, 19 nt, Artificial Sequence
  Description of Artificial Sequence: Synthetic oligonucleotide
  Antisense strand to SEQ ID NO: 507433
guggaaccaagauuuccgu

SEQ ID NO: 507435 - RNA, 19 nt, Artificial Sequence
  Description of Artificial Sequence: Synthetic oligonucleotide
  Sense strand starting at position 804 of SEQ ID NO: 317728
ccaucauucccuucgcguu

SEQ ID NO: 507436 - RNA, 19 nt, Artificial Sequence
  Description of Artificial Sequence: Synthetic oligonucleotide
  Antisense strand to SEQ ID NO: 507435
aacgcgaagggaaugaugg

SEQ ID NO: 507437 - RNA, 19 nt, Artificial Sequence
  Description of Artificial Sequence: Synthetic oligonucleotide
  Sense strand starting at position 847 of SEQ ID NO: 317728
ugcagauuccaccacuaga

SEQ ID NO: 507438 - RNA, 19 nt, Artificial Sequence
  Description of Artificial Sequence: Synthetic oligonucleotide
  Antisense strand to SEQ ID NO: 507437
ucuagugguggaaucugca

SEQ ID NO: 507439 - RNA, 19 nt, Artificial Sequence
  Description of Artificial Sequence: Synthetic oligonucleotide
  Sense strand starting at position 995 of SEQ ID NO: 317728
gcccgacaucugccgcuua

SEQ ID NO: 507440 - RNA, 19 nt, Artificial Sequence
  Description of Artificial Sequence: Synthetic oligonucleotide
  Antisense strand to SEQ ID NO: 507439
uaagcggcagaugucgggc

SEQ ID NO: 507441 - RNA, 19 nt, Artificial Sequence
  Description of Artificial Sequence: Synthetic oligonucleotide
  Sense strand starting at position 2341 of SEQ ID NO: 317728
ugcugauauuugucacuug

SEQ ID NO: 507442 - RNA, 19 nt, Artificial Sequence
  Description of Artificial Sequence: Synthetic oligonucleotide
  Antisense strand to SEQ ID NO: 507441
caagugacaaauaucagca

SEQ ID NO: 507443 - RNA, 19 nt, Artificial Sequence
  Description of Artificial Sequence: Synthetic oligonucleotide
  Sense strand starting at position 2346 of SEQ ID NO: 317728
auauuugucacuugugagu

SEQ ID NO: 507444 - RNA, 19 nt, Artificial Sequence
  Description of Artificial Sequence: Synthetic oligonucleotide
  Antisense strand to SEQ ID NO: 507443
acucacaagugacaaauau

SEQ ID NO: 507445 - RNA, 19 nt, Artificial Sequence
  Description of Artificial Sequence: Synthetic oligonucleotide
  Sense strand starting at position 2405 of SEQ ID NO: 317728
acuagaaggccaugaaauu

SEQ ID NO: 507446 - RNA, 19 nt, Artificial Sequence
  Description of Artificial Sequence: Synthetic oligonucleotide
  Antisense strand to SEQ ID NO: 507445
aauuucauggccuucuagu

SEQ ID NO: 507447 - RNA, 19 nt, Artificial Sequence
  Description of Artificial Sequence: Synthetic oligonucleotide
  Sense strand starting at position 2503 of SEQ ID NO: 317728
ucagauucugauuggauua

SEQ ID NO: 507448 - RNA, 19 nt, Artificial Sequence
  Description of Artificial Sequence: Synthetic oligonucleotide
  Antisense strand to SEQ ID NO: 507447
uaauccaaucagaaucuga

SEQ ID NO: 507449 - RNA, 19 nt, Artificial Sequence
  Description of Artificial Sequence: Synthetic oligonucleotide
  Sense strand starting at position 2545 of SEQ ID NO: 317728
guugaucuugucuauuauu

SEQ ID NO: 507450 - RNA, 19 nt, Artificial Sequence
  Description of Artificial Sequence: Synthetic oligonucleotide
  Antisense strand to SEQ ID NO: 507449
aauaauagacaagaucaac

SEQ ID NO: 507451 - RNA, 19 nt, Artificial Sequence
  Description of Artificial Sequence: Synthetic oligonucleotide
  Sense strand starting at position 2625 of SEQ ID NO: 317728
acugguuaagcucagcaau

SEQ ID NO: 507452 - RNA, 19 nt, Artificial Sequence
  Description of Artificial Sequence: Synthetic oligonucleotide
  Antisense strand to SEQ ID NO: 507451
auugcugagcuuaaccagu

SEQ ID NO: 507453 - RNA, 19 nt, Artificial Sequence
  Description of Artificial Sequence: Synthetic oligonucleotide
  Sense strand starting at position 2627 of SEQ ID NO: 317728
ugguuaagcucagcaauaa

SEQ ID NO: 507454 - RNA, 19 nt, Artificial Sequence
  Description of Artificial Sequence: Synthetic oligonucleotide
  Antisense strand to SEQ ID NO: 507453
uuauugcugagcuuaacca

SEQ ID NO: 507455 - RNA, 19 nt, Artificial Sequence
  Description of Artificial Sequence: Synthetic oligonucleotide
  Sense strand starting at position 2628 of SEQ ID NO: 317728
gguuaagcucagcaauaag

SEQ ID NO: 507456 - RNA, 19 nt, Artificial Sequence
  Description of Artificial Sequence: Synthetic oligonucleotide
  Antisense strand to SEQ ID NO: 507455
cuuauugcugagcuuaacc

SEQ ID NO: 507457 - RNA, 19 nt, Artificial Sequence
  Description of Artificial Sequence: Synthetic oligonucleotide
  Sense strand starting at position 2656 of SEQ ID NO: 317728
uggcaugcauauccaaauu

SEQ ID NO: 507458 - RNA, 19 nt, Artificial Sequence
  Description of Artificial Sequence: Synthetic oligonucleotide
  Antisense strand to SEQ ID NO: 507457
aauuuggauaugcaugcca

SEQ ID NO: 507459 - RNA, 19 nt, Artificial Sequence
  Description of Artificial Sequence: Synthetic oligonucleotide
  Sense strand starting at position 2686 of SEQ ID NO: 317728
auaaccauucugugaggaa

SEQ ID NO: 507460 - RNA, 19 nt, Artificial Sequence
  Description of Artificial Sequence: Synthetic oligonucleotide
  Antisense strand to SEQ ID NO: 507459
uuccucacagaaugguuau

SEQ ID NO: 507461 - RNA, 19 nt, Artificial Sequence
  Description of Artificial Sequence: Synthetic oligonucleotide
  Sense strand starting at position 2736 of SEQ ID NO: 317728
cagaaaguuuaggucauau

SEQ ID NO: 507462 - RNA, 19 nt, Artificial Sequence
  Description of Artificial Sequence: Synthetic oligonucleotide
  Antisense strand to SEQ ID NO: 507461
auaugaccuaaacuuucug

SEQ ID NO: 507463 - RNA, 19 nt, Artificial Sequence
  Description of Artificial Sequence: Synthetic oligonucleotide
  Sense strand starting at position 2772 of SEQ ID NO: 317728
ggcugaauguguacgcagu

SEQ ID NO: 507464 - RNA, 19 nt, Artificial Sequence
  Description of Artificial Sequence: Synthetic oligonucleotide
  Antisense strand to SEQ ID NO: 507463
acugcguacacauucagcc

SEQ ID NO: 507465 - RNA, 19 nt, Artificial Sequence
  Description of Artificial Sequence: Synthetic oligonucleotide
  Sense strand starting at position 2830 of SEQ ID NO: 317728
gguaccaguguccaaucaa

SEQ ID NO: 507466 - RNA, 19 nt, Artificial Sequence
  Description of Artificial Sequence: Synthetic oligonucleotide
  Antisense strand to SEQ ID NO: 507465
uugauuggacacugguacc

SEQ ID NO: 507467 - RNA, 19 nt, Artificial Sequence
  Description of Artificial Sequence: Synthetic oligonucleotide
  Sense strand starting at position 2837 of SEQ ID NO: 317728
guguccaaucaagagaguu

SEQ ID NO: 507468 - RNA, 19 nt, Artificial Sequence
  Description of Artificial Sequence: Synthetic oligonucleotide
  Antisense strand to SEQ ID NO: 507467
aacucucuugauuggacac

SEQ ID NO: 507469 - RNA, 19 nt, Artificial Sequence
  Description of Artificial Sequence: Synthetic oligonucleotide
  Sense strand starting at position 3163 of SEQ ID NO: 317728
ccgacauagauuugcaugu

SEQ ID NO: 507470 - RNA, 19 nt, Artificial Sequence
  Description of Artificial Sequence: Synthetic oligonucleotide
  Antisense strand to SEQ ID NO: 507469
acaugcaaaucuaugucgg

SEQ ID NO: 507471 - RNA, 19 nt, Artificial Sequence
  Description of Artificial Sequence: Synthetic oligonucleotide
  Sense strand starting at position 3165 of SEQ ID NO: 317728
gacauagauuugcauguaa

SEQ ID NO: 507472 - RNA, 19 nt, Artificial Sequence
  Description of Artificial Sequence: Synthetic oligonucleotide
  Antisense strand to SEQ ID NO: 507471
uuacaugcaaaucuauguc

SEQ ID NO: 507473 - RNA, 19 nt, Artificial Sequence
  Description of Artificial Sequence: Synthetic oligonucleotide
  Sense strand starting at position 3283 of SEQ ID NO: 317728
cgauuauaaucuguuugac

SEQ ID NO: 507474 - RNA, 19 nt, Artificial Sequence
  Description of Artificial Sequence: Synthetic oligonucleotide
  Antisense strand to SEQ ID NO: 507473
gucaaacagauuauaaucg

SEQ ID NO: 507475 - RNA, 19 nt, Artificial Sequence
  Description of Artificial Sequence: Synthetic oligonucleotide
  Sense strand starting at position 3308 of SEQ ID NO: 317728
guguauuguccugaugauc

SEQ ID NO: 507476 - RNA, 19 nt, Artificial Sequence
  Description of Artificial Sequence: Synthetic oligonucleotide
  Antisense strand to SEQ ID NO: 507475
gaucaucaggacaauacac

SEQ ID NO: 507477 - RNA, 19 nt, Artificial Sequence
  Description of Artificial Sequence: Synthetic oligonucleotide
  Sense strand starting at position 3497 of SEQ ID NO: 317728
guuuauuaggcucaaggcu

SEQ ID NO: 507478 - RNA, 19 nt, Artificial Sequence
  Description of Artificial Sequence: Synthetic oligonucleotide
  Antisense strand to SEQ ID NO: 507477
agccuugagccuaauaaac

SEQ ID NO: 507479 - RNA, 19 nt, Artificial Sequence
  Description of Artificial Sequence: Synthetic oligonucleotide
  Sense strand starting at position 3526 of SEQ ID NO: 317728
agggcauugucuccaaauu

SEQ ID NO: 507480 - RNA, 19 nt, Artificial Sequence
  Description of Artificial Sequence: Synthetic oligonucleotide
  Antisense strand to SEQ ID NO: 507479
aauuuggagacaaugcccu

SEQ ID NO: 507481 - RNA, 19 nt, Artificial Sequence
  Description of Artificial Sequence: Synthetic oligonucleotide
  Sense strand starting at position 3527 of SEQ ID NO: 317728
gggcauugucuccaaauug

SEQ ID NO: 507482 - RNA, 19 nt, Artificial Sequence
  Description of Artificial Sequence: Synthetic oligonucleotide
  Antisense strand to SEQ ID NO: 507481
caauuuggagacaaugccc

SEQ ID NO: 507483 - RNA, 19 nt, Artificial Sequence
  Description of Artificial Sequence: Synthetic oligonucleotide
  Sense strand starting at position 3660 of SEQ ID NO: 317728
ugcaguaaugguugauaau

SEQ ID NO: 507484 - RNA, 19 nt, Artificial Sequence
  Description of Artificial Sequence: Synthetic oligonucleotide
  Antisense strand to SEQ ID NO: 507483
auuaucaaccauuacugca

SEQ ID NO: 507485 - RNA, 19 nt, Artificial Sequence
  Description of Artificial Sequence: Synthetic oligonucleotide
  Sense strand starting at position 3661 of SEQ ID NO: 317728
gcaguaaugguugauaaua

SEQ ID NO: 507486 - RNA, 19 nt, Artificial Sequence
  Description of Artificial Sequence: Synthetic oligonucleotide
  Antisense strand to SEQ ID NO: 507485
uauuaucaaccauuacugc

SEQ ID NO: 507487 - RNA, 19 nt, Artificial Sequence
  Description of Artificial Sequence: Synthetic oligonucleotide
  Sense strand starting at position 3669 of SEQ ID NO: 317728
gguugauaauagcuuuaug

SEQ ID NO: 507488 - RNA, 19 nt, Artificial Sequence
  Description of Artificial Sequence: Synthetic oligonucleotide
  Antisense strand to SEQ ID NO: 507487
cauaaagcuauuaucaacc

SEQ ID NO: 507489 - RNA, 19 nt, Artificial Sequence
  Description of Artificial Sequence: Synthetic oligonucleotide
  Sense strand starting at position 3672 of SEQ ID NO: 317728
ugauaauagcuuuaugugu

SEQ ID NO: 507490 - RNA, 19 nt, Artificial Sequence
  Description of Artificial Sequence: Synthetic oligonucleotide
  Antisense strand to SEQ ID NO: 507489
acacauaaagcuauuauca

SEQ ID NO: 507491 - RNA, 19 nt, Artificial Sequence
  Description of Artificial Sequence: Synthetic oligonucleotide
  Sense strand starting at position 3680 of SEQ ID NO: 317728
gcuuuauguguggcuccau

SEQ ID NO: 507492 - RNA, 19 nt, Artificial Sequence
  Description of Artificial Sequence: Synthetic oligonucleotide
  Antisense strand to SEQ ID NO: 507491
auggagccacacauaaagc

SEQ ID NO: 507493 - RNA, 19 nt, Artificial Sequence
  Description of Artificial Sequence: Synthetic oligonucleotide
  Sense strand starting at position 3691 of SEQ ID NO: 317728
ggcuccaucaaggauaugu

SEQ ID NO: 507494 - RNA, 19 nt, Artificial Sequence
  Description of Artificial Sequence: Synthetic oligonucleotide
  Antisense strand to SEQ ID NO: 507493
acauauccuugauggagcc

SEQ ID NO: 507495 - RNA, 19 nt, Artificial Sequence
  Description of Artificial Sequence: Synthetic oligonucleotide
  Sense strand starting at position 3693 of SEQ ID NO: 317728
cuccaucaaggauauguuu

SEQ ID NO: 507496 - RNA, 19 nt, Artificial Sequence
  Description of Artificial Sequence: Synthetic oligonucleotide
  Antisense strand to SEQ ID NO: 507495
aaacauauccuugauggag

SEQ ID NO: 507497 - RNA, 19 nt, Artificial Sequence
  Description of Artificial Sequence: Synthetic oligonucleotide
  Sense strand starting at position 3699 of SEQ ID NO: 317728
caaggauauguuuaugcca

SEQ ID NO: 507498 - RNA, 19 nt, Artificial Sequence
  Description of Artificial Sequence: Synthetic oligonucleotide
  Antisense strand to SEQ ID NO: 507497
uggcauaaacauauccuug

SEQ ID NO: 507499 - RNA, 19 nt, Artificial Sequence
  Description of Artificial Sequence: Synthetic oligonucleotide
  Sense strand starting at position 3785 of SEQ ID NO: 317728
gggcauauaagaggugcaa

SEQ ID NO: 507500 - RNA, 19 nt, Artificial Sequence
  Description of Artificial Sequence: Synthetic oligonucleotide
  Antisense strand to SEQ ID NO: 507499
uugcaccucuuauaugccc

SEQ ID NO: 507501 - RNA, 19 nt, Artificial Sequence
  Description of Artificial Sequence: Synthetic oligonucleotide
  Sense strand starting at position 3789 of SEQ ID NO: 317728
auauaagaggugcaaguua

SEQ ID NO: 507502 - RNA, 19 nt, Artificial Sequence
  Description of Artificial Sequence: Synthetic oligonucleotide
  Antisense strand to SEQ ID NO: 507501
uaacuugcaccucuuauau

SEQ ID NO: 507503 - RNA, 19 nt, Artificial Sequence
  Description of Artificial Sequence: Synthetic oligonucleotide
  Sense strand starting at position 3886 of SEQ ID NO: 317728
aaggguuaggcccaaaugu

SEQ ID NO: 507504 - RNA, 19 nt, Artificial Sequence
  Description of Artificial Sequence: Synthetic oligonucleotide
  Antisense strand to SEQ ID NO: 507503
acauuugggccuaacccuu

SEQ ID NO: 507505 - RNA, 19 nt, Artificial Sequence
  Description of Artificial Sequence: Synthetic oligonucleotide
  Sense strand starting at position 3966 of SEQ ID NO: 317728
acacuccuuguguaaguua

SEQ ID NO: 507506 - RNA, 19 nt, Artificial Sequence
  Description of Artificial Sequence: Synthetic oligonucleotide
  Antisense strand to SEQ ID NO: 507505
uaacuuacacaaggagugu

SEQ ID NO: 507507 - RNA, 19 nt, Artificial Sequence
  Description of Artificial Sequence: Synthetic oligonucleotide
  Sense strand starting at position 136 of SEQ ID NO: 317729
gucccugucccauagauaa

SEQ ID NO: 507508 - RNA, 19 nt, Artificial Sequence
  Description of Artificial Sequence: Synthetic oligonucleotide
  Antisense strand to SEQ ID NO: 507507
uuaucuaugggacagggac

SEQ ID NO: 507509 - RNA, 19 nt, Artificial Sequence
  Description of Artificial Sequence: Synthetic oligonucleotide
  Sense strand starting at position 554 of SEQ ID NO: 317729
caaggcugguucuuuauca

SEQ ID NO: 507510 - RNA, 19 nt, Artificial Sequence
  Description of Artificial Sequence: Synthetic oligonucleotide
  Antisense strand to SEQ ID NO: 507509
ugauaaagaaccagccuug

SEQ ID NO: 507511 - RNA, 19 nt, Artificial Sequence
  Description of Artificial Sequence: Synthetic oligonucleotide
  Sense strand starting at position 555 of SEQ ID NO: 317729
aaggcugguucuuuaucau

SEQ ID NO: 507512 - RNA, 19 nt, Artificial Sequence
  Description of Artificial Sequence: Synthetic oligonucleotide
  Antisense strand to SEQ ID NO: 507511
augauaaagaaccagccuu

SEQ ID NO: 507513 - RNA, 19 nt, Artificial Sequence
  Description of Artificial Sequence: Synthetic oligonucleotide
  Sense strand starting at position 626 of SEQ ID NO: 317729
aguuaaaguuacucccaaa

SEQ ID NO: 507514 - RNA, 19 nt, Artificial Sequence
  Description of Artificial Sequence: Synthetic oligonucleotide
  Antisense strand to SEQ ID NO: 507513
uuugggaguaacuuuaacu

SEQ ID NO: 507515 - RNA, 19 nt, Artificial Sequence
  Description of Artificial Sequence: Synthetic oligonucleotide
  Sense strand starting at position 863 of SEQ ID NO: 317729
guaaacugcuccucuugaa

SEQ ID NO: 507516 - RNA, 19 nt, Artificial Sequence
  Description of Artificial Sequence: Synthetic oligonucleotide
  Antisense strand to SEQ ID NO: 507515
uucaagaggagcaguuuac

SEQ ID NO: 507517 - RNA, 19 nt, Artificial Sequence
  Description of Artificial Sequence: Synthetic oligonucleotide
  Sense strand starting at position 911 of SEQ ID NO: 317729
guuagcagccaauauucua

SEQ ID NO: 507518 - RNA, 19 nt, Artificial Sequence
  Description of Artificial Sequence: Synthetic oligonucleotide
  Antisense strand to SEQ ID NO: 507517
uagaauauuggcugcuaac

SEQ ID NO: 507519 - RNA, 19 nt, Artificial Sequence
  Description of Artificial Sequence: Synthetic oligonucleotide
  Sense strand starting at position 1039 of SEQ ID NO: 317729
uccugcaacugucuggaau

SEQ ID NO: 507520 - RNA, 19 nt, Artificial Sequence
  Description of Artificial Sequence: Synthetic oligonucleotide
  Antisense strand to SEQ ID NO: 507519
auuccagacaguugcagga

SEQ ID NO: 507521 - RNA, 19 nt, Artificial Sequence
  Description of Artificial Sequence: Synthetic oligonucleotide
  Sense strand starting at position 1040 of SEQ ID NO: 317729
ccugcaacugucuggaauu

SEQ ID NO: 507522 - RNA, 19 nt, Artificial Sequence
  Description of Artificial Sequence: Synthetic oligonucleotide
  Antisense strand to SEQ ID NO: 507521
aauuccagacaguugcagg

SEQ ID NO: 507523 - RNA, 19 nt, Artificial Sequence
  Description of Artificial Sequence: Synthetic oligonucleotide
  Sense strand starting at position 1097 of SEQ ID NO: 317729
gguaacuuuccacaaguca

SEQ ID NO: 507524 - RNA, 19 nt, Artificial Sequence
  Description of Artificial Sequence: Synthetic oligonucleotide
  Antisense strand to SEQ ID NO: 507523
ugacuuguggaaaguuacc

SEQ ID NO: 507525 - RNA, 19 nt, Artificial Sequence
  Description of Artificial Sequence: Synthetic oligonucleotide
  Sense strand starting at position 1199 of SEQ ID NO: 317729
guauauaucggguaugucu

SEQ ID NO: 507526 - RNA, 19 nt, Artificial Sequence
  Description of Artificial Sequence: Synthetic oligonucleotide
  Antisense strand to SEQ ID NO: 507525
agacauacccgauauauac

SEQ ID NO: 507527 - RNA, 19 nt, Artificial Sequence
  Description of Artificial Sequence: Synthetic oligonucleotide
  Sense strand starting at position 1210 of SEQ ID NO: 317729
guaugucuacuugguauuu

SEQ ID NO: 507528 - RNA, 19 nt, Artificial Sequence
  Description of Artificial Sequence: Synthetic oligonucleotide
  Antisense strand to SEQ ID NO: 507527
aaauaccaaguagacauac

SEQ ID NO: 507529 - RNA, 19 nt, Artificial Sequence
  Description of Artificial Sequence: Synthetic oligonucleotide
  Sense strand starting at position 1377 of SEQ ID NO: 317729
caguguaaugacuaagguu

SEQ ID NO: 507530 - RNA, 19 nt, Artificial Sequence
  Description of Artificial Sequence: Synthetic oligonucleotide
  Antisense strand to SEQ ID NO: 507529
aaccuuagucauuacacug

SEQ ID NO: 507531 - RNA, 19 nt, Artificial Sequence
  Description of Artificial Sequence: Synthetic oligonucleotide
  Sense strand starting at position 1385 of SEQ ID NO: 317729
ugacuaagguucuuggcau

SEQ ID NO: 507532 - RNA, 19 nt, Artificial Sequence
  Description of Artificial Sequence: Synthetic oligonucleotide
  Antisense strand to SEQ ID NO: 507531
augccaagaaccuuaguca

SEQ ID NO: 507533 - RNA, 19 nt, Artificial Sequence
  Description of Artificial Sequence: Synthetic oligonucleotide
  Sense strand starting at position 1391 of SEQ ID NO: 317729
agguucuuggcauaccaua

SEQ ID NO: 507534 - RNA, 19 nt, Artificial Sequence
  Description of Artificial Sequence: Synthetic oligonucleotide
  Antisense strand to SEQ ID NO: 507533
uaugguaugccaagaaccu

SEQ ID NO: 507535 - RNA, 19 nt, Artificial Sequence
  Description of Artificial Sequence: Synthetic oligonucleotide
  Sense strand starting at position 1525 of SEQ ID NO: 317729
ccacaagucuguucuugac

SEQ ID NO: 507536 - RNA, 19 nt, Artificial Sequence
  Description of Artificial Sequence: Synthetic oligonucleotide
  Antisense strand to SEQ ID NO: 507535
gucaagaacagacuugugg

SEQ ID NO: 507537 - RNA, 19 nt, Artificial Sequence
  Description of Artificial Sequence: Synthetic oligonucleotide
  Sense strand starting at position 1527 of SEQ ID NO: 317729
acaagucuguucuugacau

SEQ ID NO: 507538 - RNA, 19 nt, Artificial Sequence
  Description of Artificial Sequence: Synthetic oligonucleotide
  Antisense strand to SEQ ID NO: 507537
augucaagaacagacuugu

SEQ ID NO: 507539 - RNA, 19 nt, Artificial Sequence
  Description of Artificial Sequence: Synthetic oligonucleotide
  Sense strand starting at position 1529 of SEQ ID NO: 317729
aagucuguucuugacauga

SEQ ID NO: 507540 - RNA, 19 nt, Artificial Sequence
  Description of Artificial Sequence: Synthetic oligonucleotide
  Antisense strand to SEQ ID NO: 507539
ucaugucaagaacagacuu

SEQ ID NO: 507541 - RNA, 19 nt, Artificial Sequence
  Description of Artificial Sequence: Synthetic oligonucleotide
  Sense strand starting at position 1767 of SEQ ID NO: 317729
acaaauuaccagcgaguga

SEQ ID NO: 507542 - RNA, 19 nt, Artificial Sequence
  Description of Artificial Sequence: Synthetic oligonucleotide
  Antisense strand to SEQ ID NO: 507541
ucacucgcugguaauuugu

SEQ ID NO: 507543 - RNA, 19 nt, Artificial Sequence
  Description of Artificial Sequence: Synthetic oligonucleotide
  Sense strand starting at position 1771 of SEQ ID NO: 317729
auuaccagcgagugauauu

SEQ ID NO: 507544 - RNA, 19 nt, Artificial Sequence
  Description of Artificial Sequence: Synthetic oligonucleotide
  Antisense strand to SEQ ID NO: 507543
aauaucacucgcugguaau

SEQ ID NO: 507545 - RNA, 19 nt, Artificial Sequence
  Description of Artificial Sequence: Synthetic oligonucleotide
  Sense strand starting at position 1784 of SEQ ID NO: 317729
gauauuucuuggugaaaga

SEQ ID NO: 507546 - RNA, 19 nt, Artificial Sequence
  Description of Artificial Sequence: Synthetic oligonucleotide
  Antisense strand to SEQ ID NO: 507545
ucuuucaccaagaaauauc

SEQ ID NO: 507547 - RNA, 19 nt, Artificial Sequence
  Description of Artificial Sequence: Synthetic oligonucleotide
  Sense strand starting at position 2128 of SEQ ID NO: 317729
guuggcuccucuuugauuu

SEQ ID NO: 507548 - RNA, 19 nt, Artificial Sequence
  Description of Artificial Sequence: Synthetic oligonucleotide
  Antisense strand to SEQ ID NO: 507547
aaaucaaagaggagccaac

SEQ ID NO: 507549 - RNA, 19 nt, Artificial Sequence
  Description of Artificial Sequence: Synthetic oligonucleotide
  Sense strand starting at position 2358 of SEQ ID NO: 317729
uuccuaauuugguaucaga

SEQ ID NO: 507550 - RNA, 19 nt, Artificial Sequence
  Description of Artificial Sequence: Synthetic oligonucleotide
  Antisense strand to SEQ ID NO: 507549
ucugauaccaaauuaggaa

SEQ ID NO: 507551 - RNA, 19 nt, Artificial Sequence
  Description of Artificial Sequence: Synthetic oligonucleotide
  Sense strand starting at position 2453 of SEQ ID NO: 317729
cuaaacaaguguuuaugga

SEQ ID NO: 507552 - RNA, 19 nt, Artificial Sequence
  Description of Artificial Sequence: Synthetic oligonucleotide
  Antisense strand to SEQ ID NO: 507551
uccauaaacacuuguuuag

SEQ ID NO: 507553 - RNA, 19 nt, Artificial Sequence
  Description of Artificial Sequence: Synthetic oligonucleotide
  Sense strand starting at position 2593 of SEQ ID NO: 317729
uugugaguguuucuaagau

SEQ ID NO: 507554 - RNA, 19 nt, Artificial Sequence
  Description of Artificial Sequence: Synthetic oligonucleotide
  Antisense strand to SEQ ID NO: 507553
aucuuagaaacacucacaa

SEQ ID NO: 507555 - RNA, 19 nt, Artificial Sequence
  Description of Artificial Sequence: Synthetic oligonucleotide
  Sense strand starting at position 2614 of SEQ ID NO: 317729
aauacagagguuugugaga

SEQ ID NO: 507556 - RNA, 19 nt, Artificial Sequence
  Description of Artificial Sequence: Synthetic oligonucleotide
  Antisense strand to SEQ ID NO: 507555
ucucacaaaccucuguauu

SEQ ID NO: 507557 - RNA, 19 nt, Artificial Sequence
  Description of Artificial Sequence: Synthetic oligonucleotide
  Sense strand starting at position 2678 of SEQ ID NO: 317729
ugcagauacugaguuuacu

SEQ ID NO: 507558 - RNA, 19 nt, Artificial Sequence
  Description of Artificial Sequence: Synthetic oligonucleotide
  Antisense strand to SEQ ID NO: 507557
aguaaacucaguaucugca

SEQ ID NO: 507559 - RNA, 19 nt, Artificial Sequence
  Description of Artificial Sequence: Synthetic oligonucleotide
  Sense strand starting at position 2834 of SEQ ID NO: 317729
aucuguuagagugaucugu

SEQ ID NO: 507560 - RNA, 19 nt, Artificial Sequence
  Description of Artificial Sequence: Synthetic oligonucleotide
  Antisense strand to SEQ ID NO: 507559
acagaucacucuaacagau

SEQ ID NO: 507561 - RNA, 19 nt, Artificial Sequence
  Description of Artificial Sequence: Synthetic oligonucleotide
  Sense strand starting at position 2840 of SEQ ID NO: 317729
uagagugaucugugugauc

SEQ ID NO: 507562 - RNA, 19 nt, Artificial Sequence
  Description of Artificial Sequence: Synthetic oligonucleotide
  Antisense strand to SEQ ID NO: 507561
gaucacacagaucacucua

SEQ ID NO: 507563 - RNA, 19 nt, Artificial Sequence
  Description of Artificial Sequence: Synthetic oligonucleotide
  Sense strand starting at position 2842 of SEQ ID NO: 317729
gagugaucugugugaucac

SEQ ID NO: 507564 - RNA, 19 nt, Artificial Sequence
  Description of Artificial Sequence: Synthetic oligonucleotide
  Antisense strand to SEQ ID NO: 507563
gugaucacacagaucacuc

SEQ ID NO: 507565 - RNA, 19 nt, Artificial Sequence
  Description of Artificial Sequence: Synthetic oligonucleotide
  Sense strand starting at position 2845 of SEQ ID NO: 317729
ugaucugugugaucacuga

SEQ ID NO: 507566 - RNA, 19 nt, Artificial Sequence
  Description of Artificial Sequence: Synthetic oligonucleotide
  Antisense strand to SEQ ID NO: 507565
ucagugaucacacagauca

SEQ ID NO: 507567 - RNA, 19 nt, Artificial Sequence
  Description of Artificial Sequence: Synthetic oligonucleotide
  Sense strand starting at position 2928 of SEQ ID NO: 317729
gcgaacugaaucuguuaca

SEQ ID NO: 507568 - RNA, 19 nt, Artificial Sequence
  Description of Artificial Sequence: Synthetic oligonucleotide
  Antisense strand to SEQ ID NO: 507567
uguaacagauucaguucgc

SEQ ID NO: 507569 - RNA, 19 nt, Artificial Sequence
  Description of Artificial Sequence: Synthetic oligonucleotide
  Sense strand starting at position 3152 of SEQ ID NO: 317729
gggcaugccgguuaagaga

SEQ ID NO: 507570 - RNA, 19 nt, Artificial Sequence
  Description of Artificial Sequence: Synthetic oligonucleotide
  Antisense strand to SEQ ID NO: 507569
ucucuuaaccggcaugccc

SEQ ID NO: 507571 - RNA, 19 nt, Artificial Sequence
  Description of Artificial Sequence: Synthetic oligonucleotide
  Sense strand starting at position 3285 of SEQ ID NO: 317729
uaaagagggcucugagcau

SEQ ID NO: 507572 - RNA, 19 nt, Artificial Sequence
  Description of Artificial Sequence: Synthetic oligonucleotide
  Antisense strand to SEQ ID NO: 507571
augcucagagcccucuuua

SEQ ID NO: 507573 - RNA, 19 nt, Artificial Sequence
  Description of Artificial Sequence: Synthetic oligonucleotide
  Sense strand starting at position 3316 of SEQ ID NO: 317729
uccuaagaucaugguuaaa

SEQ ID NO: 507574 - RNA, 19 nt, Artificial Sequence
  Description of Artificial Sequence: Synthetic oligonucleotide
  Antisense strand to SEQ ID NO: 507573
uuuaaccaugaucuuagga

SEQ ID NO: 507575 - RNA, 19 nt, Artificial Sequence
  Description of Artificial Sequence: Synthetic oligonucleotide
  Sense strand starting at position 3318 of SEQ ID NO: 317729
cuaagaucaugguuaaaug

SEQ ID NO: 507576 - RNA, 19 nt, Artificial Sequence
  Description of Artificial Sequence: Synthetic oligonucleotide
  Antisense strand to SEQ ID NO: 507575
cauuuaaccaugaucuuag

SEQ ID NO: 507577 - RNA, 19 nt, Artificial Sequence
  Description of Artificial Sequence: Synthetic oligonucleotide
  Sense strand starting at position 3328 of SEQ ID NO: 317729
gguuaaaugcggcacuuga

SEQ ID NO: 507578 - RNA, 19 nt, Artificial Sequence
  Description of Artificial Sequence: Synthetic oligonucleotide
  Antisense strand to SEQ ID NO: 507577
ucaagugccgcauuuaacc

SEQ ID NO: 507579 - RNA, 19 nt, Artificial Sequence
  Description of Artificial Sequence: Synthetic oligonucleotide
  Sense strand starting at position 3823 of SEQ ID NO: 317729
auucuuucuucucugagga

SEQ ID NO: 507580 - RNA, 19 nt, Artificial Sequence
  Description of Artificial Sequence: Synthetic oligonucleotide
  Antisense strand to SEQ ID NO: 507579
uccucagagaagaaagaau

SEQ ID NO: 507581 - RNA, 19 nt, Artificial Sequence
  Description of Artificial Sequence: Synthetic oligonucleotide
  Sense strand starting at position 3915 of SEQ ID NO: 317729
cuaguaacaagucgauuga

SEQ ID NO: 507582 - RNA, 19 nt, Artificial Sequence
  Description of Artificial Sequence: Synthetic oligonucleotide
  Antisense strand to SEQ ID NO: 507581
ucaaucgacuuguuacuag

SEQ ID NO: 507583 - RNA, 19 nt, Artificial Sequence
  Description of Artificial Sequence: Synthetic oligonucleotide
  Sense strand starting at position 3916 of SEQ ID NO: 317729
uaguaacaagucgauugau

SEQ ID NO: 507584 - RNA, 19 nt, Artificial Sequence
  Description of Artificial Sequence: Synthetic oligonucleotide
  Antisense strand to SEQ ID NO: 507583
aucaaucgacuuguuacua

SEQ ID NO: 507585 - RNA, 19 nt, Artificial Sequence
  Description of Artificial Sequence: Synthetic oligonucleotide
  Sense strand starting at position 3919 of SEQ ID NO: 317729
uaacaagucgauugauaua

SEQ ID NO: 507586 - RNA, 19 nt, Artificial Sequence
  Description of Artificial Sequence: Synthetic oligonucleotide
  Antisense strand to SEQ ID NO: 507585
uauaucaaucgacuuguua

SEQ ID NO: 507587 - RNA, 19 nt, Artificial Sequence
  Description of Artificial Sequence: Synthetic oligonucleotide
  Sense strand starting at position 37 of SEQ ID NO: 317730
aacugaggauguuuguaua

SEQ ID NO: 507588 - RNA, 19 nt, Artificial Sequence
  Description of Artificial Sequence: Synthetic oligonucleotide
  Antisense strand to SEQ ID NO: 507587
uauacaaacauccucaguu

SEQ ID NO: 507589 - RNA, 19 nt, Artificial Sequence
  Description of Artificial Sequence: Synthetic oligonucleotide
  Sense strand starting at position 40 of SEQ ID NO: 317730
ugaggauguuuguauaaua

SEQ ID NO: 507590 - RNA, 19 nt, Artificial Sequence
  Description of Artificial Sequence: Synthetic oligonucleotide
  Antisense strand to SEQ ID NO: 507589
uauuauacaaacauccuca

SEQ ID NO: 507591 - RNA, 19 nt, Artificial Sequence
  Description of Artificial Sequence: Synthetic oligonucleotide
  Sense strand starting at position 165 of SEQ ID NO: 317730
gggaaccgcucuuuagaaa

SEQ ID NO: 507592 - RNA, 19 nt, Artificial Sequence
  Description of Artificial Sequence: Synthetic oligonucleotide
  Antisense strand to SEQ ID NO: 507591
uuucuaaagagcgguuccc

SEQ ID NO: 507593 - RNA, 19 nt, Artificial Sequence
  Description of Artificial Sequence: Synthetic oligonucleotide
  Sense strand starting at position 166 of SEQ ID NO: 317730
ggaaccgcucuuuagaaau

SEQ ID NO: 507594 - RNA, 19 nt, Artificial Sequence
  Description of Artificial Sequence: Synthetic oligonucleotide
  Antisense strand to SEQ ID NO: 507593
auuucuaaagagcgguucc

SEQ ID NO: 507595 - RNA, 19 nt, Artificial Sequence
  Description of Artificial Sequence: Synthetic oligonucleotide
  Sense strand starting at position 185 of SEQ ID NO: 317730
ggaaauacuccaggccagu

SEQ ID NO: 507596 - RNA, 19 nt, Artificial Sequence
  Description of Artificial Sequence: Synthetic oligonucleotide
  Antisense strand to SEQ ID NO: 507595
acuggccuggaguauuucc

SEQ ID NO: 507597 - RNA, 19 nt, Artificial Sequence
  Description of Artificial Sequence: Synthetic oligonucleotide
  Sense strand starting at position 198 of SEQ ID NO: 317730
gccagugcucccuggugau

SEQ ID NO: 507598 - RNA, 19 nt, Artificial Sequence
  Description of Artificial Sequence: Synthetic oligonucleotide
  Antisense strand to SEQ ID NO: 507597
aucaccagggagcacuggc

SEQ ID NO: 507599 - RNA, 19 nt, Artificial Sequence
  Description of Artificial Sequence: Synthetic oligonucleotide
  Sense strand starting at position 201 of SEQ ID NO: 317730
agugcucccuggugauaaa

SEQ ID NO: 507600 - RNA, 19 nt, Artificial Sequence
  Description of Artificial Sequence: Synthetic oligonucleotide
  Antisense strand to SEQ ID NO: 507599
uuuaucaccagggagcacu

SEQ ID NO: 507601 - RNA, 19 nt, Artificial Sequence
  Description of Artificial Sequence: Synthetic oligonucleotide
  Sense strand starting at position 244 of SEQ ID NO: 317730
uuaaacugaucugaucgua

SEQ ID NO: 507602 - RNA, 19 nt, Artificial Sequence
  Description of Artificial Sequence: Synthetic oligonucleotide
  Antisense strand to SEQ ID NO: 507601
uacgaucagaucaguuuaa

SEQ ID NO: 507603 - RNA, 19 nt, Artificial Sequence
  Description of Artificial Sequence: Synthetic oligonucleotide
  Sense strand starting at position 247 of SEQ ID NO: 317730
aacugaucugaucguaaag

SEQ ID NO: 507604 - RNA, 19 nt, Artificial Sequence
  Description of Artificial Sequence: Synthetic oligonucleotide
  Antisense strand to SEQ ID NO: 507603
cuuuacgaucagaucaguu

SEQ ID NO: 507605 - RNA, 19 nt, Artificial Sequence
  Description of Artificial Sequence: Synthetic oligonucleotide
  Sense strand starting at position 249 of SEQ ID NO: 317730
cugaucugaucguaaagga

SEQ ID NO: 507606 - RNA, 19 nt, Artificial Sequence
  Description of Artificial Sequence: Synthetic oligonucleotide
  Antisense strand to SEQ ID NO: 507605
uccuuuacgaucagaucag

SEQ ID NO: 507607 - RNA, 19 nt, Artificial Sequence
  Description of Artificial Sequence: Synthetic oligonucleotide
  Sense strand starting at position 277 of SEQ ID NO: 317730
guugccaucugaucugaca

SEQ ID NO: 507608 - RNA, 19 nt, Artificial Sequence
  Description of Artificial Sequence: Synthetic oligonucleotide
  Antisense strand to SEQ ID NO: 507607
ugucagaucagauggcaac

SEQ ID NO: 507609 - RNA, 19 nt, Artificial Sequence
  Description of Artificial Sequence: Synthetic oligonucleotide
  Sense strand starting at position 294 of SEQ ID NO: 317730
caguguuuguguuugccau

SEQ ID NO: 507610 - RNA, 19 nt, Artificial Sequence
  Description of Artificial Sequence: Synthetic oligonucleotide
  Antisense strand to SEQ ID NO: 507609
auggcaaacacaaacacug

SEQ ID NO: 507611 - RNA, 19 nt, Artificial Sequence
  Description of Artificial Sequence: Synthetic oligonucleotide
  Sense strand starting at position 338 of SEQ ID NO: 317730
ccucuucuuggaggaauuc

SEQ ID NO: 507612 - RNA, 19 nt, Artificial Sequence
  Description of Artificial Sequence: Synthetic oligonucleotide
  Antisense strand to SEQ ID NO: 507611
gaauuccuccaagaagagg

SEQ ID NO: 507613 - RNA, 19 nt, Artificial Sequence
  Description of Artificial Sequence: Synthetic oligonucleotide
  Sense strand starting at position 434 of SEQ ID NO: 317730
ucagcucuauaguaauuga

SEQ ID NO: 507614 - RNA, 19 nt, Artificial Sequence
  Description of Artificial Sequence: Synthetic oligonucleotide
  Antisense strand to SEQ ID NO: 507613
ucaauuacuauagagcuga

SEQ ID NO: 507615 - RNA, 19 nt, Artificial Sequence
  Description of Artificial Sequence: Synthetic oligonucleotide
  Sense strand starting at position 458 of SEQ ID NO: 317730
aauaucuguccuggacuga

SEQ ID NO: 507616 - RNA, 19 nt, Artificial Sequence
  Description of Artificial Sequence: Synthetic oligonucleotide
  Antisense strand to SEQ ID NO: 507615
ucaguccaggacagauauu

SEQ ID NO: 507617 - RNA, 19 nt, Artificial Sequence
  Description of Artificial Sequence: Synthetic oligonucleotide
  Sense strand starting at position 462 of SEQ ID NO: 317730
ucuguccuggacugaauua

SEQ ID NO: 507618 - RNA, 19 nt, Artificial Sequence
  Description of Artificial Sequence: Synthetic oligonucleotide
  Antisense strand to SEQ ID NO: 507617
uaauucaguccaggacaga

SEQ ID NO: 507619 - RNA, 19 nt, Artificial Sequence
  Description of Artificial Sequence: Synthetic oligonucleotide
  Sense strand starting at position 599 of SEQ ID NO: 317730
gcgugugcguguguugaga

SEQ ID NO: 507620 - RNA, 19 nt, Artificial Sequence
  Description of Artificial Sequence: Synthetic oligonucleotide
  Antisense strand to SEQ ID NO: 507619
ucucaacacacgcacacgc

SEQ ID NO: 507621 - RNA, 19 nt, Artificial Sequence
  Description of Artificial Sequence: Synthetic oligonucleotide
  Sense strand starting at position 649 of SEQ ID NO: 317730
ugugguuuguaggaagagu

SEQ ID NO: 507622 - RNA, 19 nt, Artificial Sequence
  Description of Artificial Sequence: Synthetic oligonucleotide
  Antisense strand to SEQ ID NO: 507621
acucuuccuacaaaccaca

SEQ ID NO: 507623 - RNA, 19 nt, Artificial Sequence
  Description of Artificial Sequence: Synthetic oligonucleotide
  Sense strand starting at position 861 of SEQ ID NO: 317730
gccugaugccgugaguguu

SEQ ID NO: 507624 - RNA, 19 nt, Artificial Sequence
  Description of Artificial Sequence: Synthetic oligonucleotide
  Antisense strand to SEQ ID NO: 507623
aacacucacggcaucaggc

SEQ ID NO: 507625 - RNA, 19 nt, Artificial Sequence
  Description of Artificial Sequence: Synthetic oligonucleotide
  Sense strand starting at position 867 of SEQ ID NO: 317730
ugccgugaguguuucucuu

SEQ ID NO: 507626 - RNA, 19 nt, Artificial Sequence
  Description of Artificial Sequence: Synthetic oligonucleotide
  Antisense strand to SEQ ID NO: 507625
aagagaaacacucacggca

SEQ ID NO: 507627 - RNA, 19 nt, Artificial Sequence
  Description of Artificial Sequence: Synthetic oligonucleotide
  Sense strand starting at position 972 of SEQ ID NO: 317730
uccugagaucacuaaggcu

SEQ ID NO: 507628 - RNA, 19 nt, Artificial Sequence
  Description of Artificial Sequence: Synthetic oligonucleotide
  Antisense strand to SEQ ID NO: 507627
agccuuagugaucucagga

SEQ ID NO: 507629 - RNA, 19 nt, Artificial Sequence
  Description of Artificial Sequence: Synthetic oligonucleotide
  Sense strand starting at position 1097 of SEQ ID NO: 317730
gacggcuuccgaggauaga

SEQ ID NO: 507630 - RNA, 19 nt, Artificial Sequence
  Description of Artificial Sequence: Synthetic oligonucleotide
  Antisense strand to SEQ ID NO: 507629
ucuauccucggaagccguc

SEQ ID NO: 507631 - RNA, 19 nt, Artificial Sequence
  Description of Artificial Sequence: Synthetic oligonucleotide
  Sense strand starting at position 1587 of SEQ ID NO: 317730
uggcgucauucccaacagu

SEQ ID NO: 507632 - RNA, 19 nt, Artificial Sequence
  Description of Artificial Sequence: Synthetic oligonucleotide
  Antisense strand to SEQ ID NO: 507631
acuguugggaaugacgcca

SEQ ID NO: 507633 - RNA, 19 nt, Artificial Sequence
  Description of Artificial Sequence: Synthetic oligonucleotide
  Sense strand starting at position 1603 of SEQ ID NO: 317730
aguggaaagucguaacguu

SEQ ID NO: 507634 - RNA, 19 nt, Artificial Sequence
  Description of Artificial Sequence: Synthetic oligonucleotide
  Antisense strand to SEQ ID NO: 507633
aacguuacgacuuuccacu

SEQ ID NO: 507635 - RNA, 19 nt, Artificial Sequence
  Description of Artificial Sequence: Synthetic oligonucleotide
  Sense strand starting at position 2398 of SEQ ID NO: 317730
gacagcugcgcguuccaau

SEQ ID NO: 507636 - RNA, 19 nt, Artificial Sequence
  Description of Artificial Sequence: Synthetic oligonucleotide
  Antisense strand to SEQ ID NO: 507635
auuggaacgcgcagcuguc

SEQ ID NO: 507637 - RNA, 19 nt, Artificial Sequence
  Description of Artificial Sequence: Synthetic oligonucleotide
  Sense strand starting at position 2409 of SEQ ID NO: 317730
guuccaaugucccucggaa

SEQ ID NO: 507638 - RNA, 19 nt, Artificial Sequence
  Description of Artificial Sequence: Synthetic oligonucleotide
  Antisense strand to SEQ ID NO: 507637
uuccgagggacauuggaac

SEQ ID NO: 507639 - RNA, 19 nt, Artificial Sequence
  Description of Artificial Sequence: Synthetic oligonucleotide
  Sense strand starting at position 3329 of SEQ ID NO: 317730
cugugugcucgccugcauu

SEQ ID NO: 507640 - RNA, 19 nt, Artificial Sequence
  Description of Artificial Sequence: Synthetic oligonucleotide
  Antisense strand to SEQ ID NO: 507639
aaugcaggcgagcacacag

SEQ ID NO: 507641 - RNA, 19 nt, Artificial Sequence
  Description of Artificial Sequence: Synthetic oligonucleotide
  Sense strand starting at position 3634 of SEQ ID NO: 317730
cgcgagucucgagguuacu

SEQ ID NO: 507642 - RNA, 19 nt, Artificial Sequence
  Description of Artificial Sequence: Synthetic oligonucleotide
  Antisense strand to SEQ ID NO: 507641
aguaaccucgagacucgcg

SEQ ID NO: 507643 - RNA, 19 nt, Artificial Sequence
  Description of Artificial Sequence: Synthetic oligonucleotide
  Sense strand starting at position 3682 of SEQ ID NO: 317730
gcacguuacgggcgauuga

SEQ ID NO: 507644 - RNA, 19 nt, Artificial Sequence
  Description of Artificial Sequence: Synthetic oligonucleotide
  Antisense strand to SEQ ID NO: 507643
ucaaucgcccguaacgugc

SEQ ID NO: 507645 - RNA, 19 nt, Artificial Sequence
  Description of Artificial Sequence: Synthetic oligonucleotide
  Sense strand starting at position 3737 of SEQ ID NO: 317730
cggaauuucugggcagcga

SEQ ID NO: 507646 - RNA, 19 nt, Artificial Sequence
  Description of Artificial Sequence: Synthetic oligonucleotide
  Antisense strand to SEQ ID NO: 507645
ucgcugcccagaaauuccg

SEQ ID NO: 507647 - RNA, 19 nt, Artificial Sequence
  Description of Artificial Sequence: Synthetic oligonucleotide
  Sense strand starting at position 3782 of SEQ ID NO: 317730
cugcaaaugccucgaauuu

SEQ ID NO: 507648 - RNA, 19 nt, Artificial Sequence
  Description of Artificial Sequence: Synthetic oligonucleotide
  Antisense strand to SEQ ID NO: 507647
aaauucgaggcauuugcag

SEQ ID NO: 507649 - RNA, 19 nt, Artificial Sequence
  Description of Artificial Sequence: Synthetic oligonucleotide
  Sense strand starting at position 3802 of SEQ ID NO: 317730
aacguuaaaggaugaauua

SEQ ID NO: 507650 - RNA, 19 nt, Artificial Sequence
  Description of Artificial Sequence: Synthetic oligonucleotide
  Antisense strand to SEQ ID NO: 507649
uaauucauccuuuaacguu

SEQ ID NO: 507651 - RNA, 19 nt, Artificial Sequence
  Description of Artificial Sequence: Synthetic oligonucleotide
  Sense strand starting at position 3823 of SEQ ID NO: 317730
augcuaauuacggcguauu

SEQ ID NO: 507652 - RNA, 19 nt, Artificial Sequence
  Description of Artificial Sequence: Synthetic oligonucleotide
  Antisense strand to SEQ ID NO: 507651
aauacgccguaauuagcau

SEQ ID NO: 507653 - RNA, 19 nt, Artificial Sequence
  Description of Artificial Sequence: Synthetic oligonucleotide
  Sense strand starting at position 3824 of SEQ ID NO: 317730
ugcuaauuacggcguauuu

SEQ ID NO: 507654 - RNA, 19 nt, Artificial Sequence
  Description of Artificial Sequence: Synthetic oligonucleotide
  Antisense strand to SEQ ID NO: 507653
aaauacgccguaauuagca

SEQ ID NO: 507655 - RNA, 19 nt, Artificial Sequence
  Description of Artificial Sequence: Synthetic oligonucleotide
  Sense strand starting at position 3831 of SEQ ID NO: 317730
uacggcguauuugaagaau

SEQ ID NO: 507656 - RNA, 19 nt, Artificial Sequence
  Description of Artificial Sequence: Synthetic oligonucleotide
  Antisense strand to SEQ ID NO: 507655
auucuucaaauacgccgua

SEQ ID NO: 507657 - RNA, 19 nt, Artificial Sequence
  Description of Artificial Sequence: Synthetic oligonucleotide
  Sense strand starting at position 3861 of SEQ ID NO: 317730
acuggcuucugaguugcaa

SEQ ID NO: 507658 - RNA, 19 nt, Artificial Sequence
  Description of Artificial Sequence: Synthetic oligonucleotide
  Antisense strand to SEQ ID NO: 507657
uugcaacucagaagccagu

SEQ ID NO: 507659 - RNA, 19 nt, Artificial Sequence
  Description of Artificial Sequence: Synthetic oligonucleotide
  Sense strand starting at position 3863 of SEQ ID NO: 317730
uggcuucugaguugcaaau

SEQ ID NO: 507660 - RNA, 19 nt, Artificial Sequence
  Description of Artificial Sequence: Synthetic oligonucleotide
  Antisense strand to SEQ ID NO: 507659
auuugcaacucagaagcca

SEQ ID NO: 507661 - RNA, 19 nt, Artificial Sequence
  Description of Artificial Sequence: Synthetic oligonucleotide
  Sense strand starting at position 3891 of SEQ ID NO: 317730
ccagcuuuagagcagugaa

SEQ ID NO: 507662 - RNA, 19 nt, Artificial Sequence
  Description of Artificial Sequence: Synthetic oligonucleotide
  Antisense strand to SEQ ID NO: 507661
uucacugcucuaaagcugg

SEQ ID NO: 507663 - RNA, 19 nt, Artificial Sequence
  Description of Artificial Sequence: Synthetic oligonucleotide
  Sense strand starting at position 3894 of SEQ ID NO: 317730
gcuuuagagcagugaauag

SEQ ID NO: 507664 - RNA, 19 nt, Artificial Sequence
  Description of Artificial Sequence: Synthetic oligonucleotide
  Antisense strand to SEQ ID NO: 507663
cuauucacugcucuaaagc

SEQ ID NO: 507665 - RNA, 19 nt, Artificial Sequence
  Description of Artificial Sequence: Synthetic oligonucleotide
  Sense strand starting at position 66 of SEQ ID NO: 317731
uguagauccuccuccagua

SEQ ID NO: 507666 - RNA, 19 nt, Artificial Sequence
  Description of Artificial Sequence: Synthetic oligonucleotide
  Antisense strand to SEQ ID NO: 507665
uacuggaggaggaucuaca

SEQ ID NO: 507667 - RNA, 19 nt, Artificial Sequence
  Description of Artificial Sequence: Synthetic oligonucleotide
  Sense strand starting at position 159 of SEQ ID NO: 317731
acugguauugcaugaauaa

SEQ ID NO: 507668 - RNA, 19 nt, Artificial Sequence
  Description of Artificial Sequence: Synthetic oligonucleotide
  Antisense strand to SEQ ID NO: 507667
uuauucaugcaauaccagu

SEQ ID NO: 507669 - RNA, 19 nt, Artificial Sequence
  Description of Artificial Sequence: Synthetic oligonucleotide
  Sense strand starting at position 160 of SEQ ID NO: 317731
cugguauugcaugaauaaa

SEQ ID NO: 507670 - RNA, 19 nt, Artificial Sequence
  Description of Artificial Sequence: Synthetic oligonucleotide
  Antisense strand to SEQ ID NO: 507669
uuuauucaugcaauaccag

SEQ ID NO: 507671 - RNA, 19 nt, Artificial Sequence
  Description of Artificial Sequence: Synthetic oligonucleotide
  Sense strand starting at position 258 of SEQ ID NO: 317731
aucuuaucuccauguuugu

SEQ ID NO: 507672 - RNA, 19 nt, Artificial Sequence
  Description of Artificial Sequence: Synthetic oligonucleotide
  Antisense strand to SEQ ID NO: 507671
acaaacauggagauaagau

SEQ ID NO: 507673 - RNA, 19 nt, Artificial Sequence
  Description of Artificial Sequence: Synthetic oligonucleotide
  Sense strand starting at position 261 of SEQ ID NO: 317731
uuaucuccauguuuguuaa

SEQ ID NO: 507674 - RNA, 19 nt, Artificial Sequence
  Description of Artificial Sequence: Synthetic oligonucleotide
  Antisense strand to SEQ ID NO: 507673
uuaacaaacauggagauaa

SEQ ID NO: 507675 - RNA, 19 nt, Artificial Sequence
  Description of Artificial Sequence: Synthetic oligonucleotide
  Sense strand starting at position 998 of SEQ ID NO: 317731
ggccaaauuagaugggcuu

SEQ ID NO: 507676 - RNA, 19 nt, Artificial Sequence
  Description of Artificial Sequence: Synthetic oligonucleotide
  Antisense strand to SEQ ID NO: 507675
aagcccaucuaauuuggcc

SEQ ID NO: 507677 - RNA, 19 nt, Artificial Sequence
  Description of Artificial Sequence: Synthetic oligonucleotide
  Sense strand starting at position 1275 of SEQ ID NO: 317731
ggguuaaccaaaugccaga

SEQ ID NO: 507678 - RNA, 19 nt, Artificial Sequence
  Description of Artificial Sequence: Synthetic oligonucleotide
  Antisense strand to SEQ ID NO: 507677
ucuggcauuugguuaaccc

SEQ ID NO: 507679 - RNA, 19 nt, Artificial Sequence
  Description of Artificial Sequence: Synthetic oligonucleotide
  Sense strand starting at position 1290 of SEQ ID NO: 317731
cagagaaacgccggcauua

SEQ ID NO: 507680 - RNA, 19 nt, Artificial Sequence
  Description of Artificial Sequence: Synthetic oligonucleotide
  Antisense strand to SEQ ID NO: 507679
uaaugccggcguuucucug

SEQ ID NO: 507681 - RNA, 19 nt, Artificial Sequence
  Description of Artificial Sequence: Synthetic oligonucleotide
  Sense strand starting at position 1292 of SEQ ID NO: 317731
gagaaacgccggcauuaga

SEQ ID NO: 507682 - RNA, 19 nt, Artificial Sequence
  Description of Artificial Sequence: Synthetic oligonucleotide
  Antisense strand to SEQ ID NO: 507681
ucuaaugccggcguuucuc

SEQ ID NO: 507683 - RNA, 19 nt, Artificial Sequence
  Description of Artificial Sequence: Synthetic oligonucleotide
  Sense strand starting at position 1478 of SEQ ID NO: 317731
uccggauccugcucgagaa

SEQ ID NO: 507684 - RNA, 19 nt, Artificial Sequence
  Description of Artificial Sequence: Synthetic oligonucleotide
  Antisense strand to SEQ ID NO: 507683
uucucgagcaggauccgga

SEQ ID NO: 507685 - RNA, 19 nt, Artificial Sequence
  Description of Artificial Sequence: Synthetic oligonucleotide
  Sense strand starting at position 2479 of SEQ ID NO: 317731
gagcucugcucaccuggaa

SEQ ID NO: 507686 - RNA, 19 nt, Artificial Sequence
  Description of Artificial Sequence: Synthetic oligonucleotide
  Antisense strand to SEQ ID NO: 507685
uuccaggugagcagagcuc

SEQ ID NO: 507687 - RNA, 19 nt, Artificial Sequence
  Description of Artificial Sequence: Synthetic oligonucleotide
  Sense strand starting at position 2632 of SEQ ID NO: 317731
agguauguucugcaccgaa

SEQ ID NO: 507688 - RNA, 19 nt, Artificial Sequence
  Description of Artificial Sequence: Synthetic oligonucleotide
  Antisense strand to SEQ ID NO: 507687
uucggugcagaacauaccu

SEQ ID NO: 507689 - RNA, 19 nt, Artificial Sequence
  Description of Artificial Sequence: Synthetic oligonucleotide
  Sense strand starting at position 2725 of SEQ ID NO: 317731
gcgaacuggcugcaucaga

SEQ ID NO: 507690 - RNA, 19 nt, Artificial Sequence
  Description of Artificial Sequence: Synthetic oligonucleotide
  Antisense strand to SEQ ID NO: 507689
ucugaugcagccaguucgc

SEQ ID NO: 507691 - RNA, 19 nt, Artificial Sequence
  Description of Artificial Sequence: Synthetic oligonucleotide
  Sense strand starting at position 2758 of SEQ ID NO: 317731
ugugucucugggugggaua

SEQ ID NO: 507692 - RNA, 19 nt, Artificial Sequence
  Description of Artificial Sequence: Synthetic oligonucleotide
  Antisense strand to SEQ ID NO: 507691
uaucccacccagagacaca

SEQ ID NO: 507693 - RNA, 19 nt, Artificial Sequence
  Description of Artificial Sequence: Synthetic oligonucleotide
  Sense strand starting at position 2759 of SEQ ID NO: 317731
gugucucugggugggauaa

SEQ ID NO: 507694 - RNA, 19 nt, Artificial Sequence
  Description of Artificial Sequence: Synthetic oligonucleotide
  Antisense strand to SEQ ID NO: 507693
uuaucccacccagagacac

SEQ ID NO: 507695 - RNA, 19 nt, Artificial Sequence
  Description of Artificial Sequence: Synthetic oligonucleotide
  Sense strand starting at position 2820 of SEQ ID NO: 317731
agguuauagaucugaggug

SEQ ID NO: 507696 - RNA, 19 nt, Artificial Sequence
  Description of Artificial Sequence: Synthetic oligonucleotide
  Antisense strand to SEQ ID NO: 507695
caccucagaucuauaaccu

SEQ ID NO: 507697 - RNA, 19 nt, Artificial Sequence
  Description of Artificial Sequence: Synthetic oligonucleotide
  Sense strand starting at position 2880 of SEQ ID NO: 317731
gugcuagaguuagcauaaa

SEQ ID NO: 507698 - RNA, 19 nt, Artificial Sequence
  Description of Artificial Sequence: Synthetic oligonucleotide
  Antisense strand to SEQ ID NO: 507697
uuuaugcuaacucuagcac

SEQ ID NO: 507699 - RNA, 19 nt, Artificial Sequence
  Description of Artificial Sequence: Synthetic oligonucleotide
  Sense strand starting at position 3028 of SEQ ID NO: 317731
ccuagaaauauugguguga

SEQ ID NO: 507700 - RNA, 19 nt, Artificial Sequence
  Description of Artificial Sequence: Synthetic oligonucleotide
  Antisense strand to SEQ ID NO: 507699
ucacaccaauauuucuagg

SEQ ID NO: 507701 - RNA, 19 nt, Artificial Sequence
  Description of Artificial Sequence: Synthetic oligonucleotide
  Sense strand starting at position 3029 of SEQ ID NO: 317731
cuagaaauauuggugugau

SEQ ID NO: 507702 - RNA, 19 nt, Artificial Sequence
  Description of Artificial Sequence: Synthetic oligonucleotide
  Antisense strand to SEQ ID NO: 507701
aucacaccaauauuucuag

SEQ ID NO: 507703 - RNA, 19 nt, Artificial Sequence
  Description of Artificial Sequence: Synthetic oligonucleotide
  Sense strand starting at position 3032 of SEQ ID NO: 317731
gaaauauuggugugauucu

SEQ ID NO: 507704 - RNA, 19 nt, Artificial Sequence
  Description of Artificial Sequence: Synthetic oligonucleotide
  Antisense strand to SEQ ID NO: 507703
agaaucacaccaauauuuc

SEQ ID NO: 507705 - RNA, 19 nt, Artificial Sequence
  Description of Artificial Sequence: Synthetic oligonucleotide
  Sense strand starting at position 3050 of SEQ ID NO: 317731
uggaguugauugcuccaca

SEQ ID NO: 507706 - RNA, 19 nt, Artificial Sequence
  Description of Artificial Sequence: Synthetic oligonucleotide
  Antisense strand to SEQ ID NO: 507705
uguggagcaaucaacucca

SEQ ID NO: 507707 - RNA, 19 nt, Artificial Sequence
  Description of Artificial Sequence: Synthetic oligonucleotide
  Sense strand starting at position 3051 of SEQ ID NO: 317731
ggaguugauugcuccacac

SEQ ID NO: 507708 - RNA, 19 nt, Artificial Sequence
  Description of Artificial Sequence: Synthetic oligonucleotide
  Antisense strand to SEQ ID NO: 507707
guguggagcaaucaacucc

SEQ ID NO: 507709 - RNA, 19 nt, Artificial Sequence
  Description of Artificial Sequence: Synthetic oligonucleotide
  Sense strand starting at position 3053 of SEQ ID NO: 317731
aguugauugcuccacacgu

SEQ ID NO: 507710 - RNA, 19 nt, Artificial Sequence
  Description of Artificial Sequence: Synthetic oligonucleotide
  Antisense strand to SEQ ID NO: 507709
acguguggagcaaucaacu

SEQ ID NO: 507711 - RNA, 19 nt, Artificial Sequence
  Description of Artificial Sequence: Synthetic oligonucleotide
  Sense strand starting at position 3055 of SEQ ID NO: 317731
uugauugcuccacacguuu

SEQ ID NO: 507712 - RNA, 19 nt, Artificial Sequence
  Description of Artificial Sequence: Synthetic oligonucleotide
  Antisense strand to SEQ ID NO: 507711
aaacguguggagcaaucaa

SEQ ID NO: 507713 - RNA, 19 nt, Artificial Sequence
  Description of Artificial Sequence: Synthetic oligonucleotide
  Sense strand starting at position 3061 of SEQ ID NO: 317731
gcuccacacguuuauuuau

SEQ ID NO: 507714 - RNA, 19 nt, Artificial Sequence
  Description of Artificial Sequence: Synthetic oligonucleotide
  Antisense strand to SEQ ID NO: 507713
auaaauaaacguguggagc

SEQ ID NO: 507715 - RNA, 19 nt, Artificial Sequence
  Description of Artificial Sequence: Synthetic oligonucleotide
  Sense strand starting at position 3132 of SEQ ID NO: 317731
auggaaauguauccggcaa

SEQ ID NO: 507716 - RNA, 19 nt, Artificial Sequence
  Description of Artificial Sequence: Synthetic oligonucleotide
  Antisense strand to SEQ ID NO: 507715
uugccggauacauuuccau

SEQ ID NO: 507717 - RNA, 19 nt, Artificial Sequence
  Description of Artificial Sequence: Synthetic oligonucleotide
  Sense strand starting at position 3133 of SEQ ID NO: 317731
uggaaauguauccggcaau

SEQ ID NO: 507718 - RNA, 19 nt, Artificial Sequence
  Description of Artificial Sequence: Synthetic oligonucleotide
  Antisense strand to SEQ ID NO: 507717
auugccggauacauuucca

SEQ ID NO: 507719 - RNA, 19 nt, Artificial Sequence
  Description of Artificial Sequence: Synthetic oligonucleotide
  Sense strand starting at position 3136 of SEQ ID NO: 317731
aaauguauccggcaauguu

SEQ ID NO: 507720 - RNA, 19 nt, Artificial Sequence
  Description of Artificial Sequence: Synthetic oligonucleotide
  Antisense strand to SEQ ID NO: 507719
aacauugccggauacauuu

SEQ ID NO: 507721 - RNA, 19 nt, Artificial Sequence
  Description of Artificial Sequence: Synthetic oligonucleotide
  Sense strand starting at position 3228 of SEQ ID NO: 317731
gacacuaugcuagguauaa

SEQ ID NO: 507722 - RNA, 19 nt, Artificial Sequence
  Description of Artificial Sequence: Synthetic oligonucleotide
  Antisense strand to SEQ ID NO: 507721
uuauaccuagcauaguguc

SEQ ID NO: 507723 - RNA, 19 nt, Artificial Sequence
  Description of Artificial Sequence: Synthetic oligonucleotide
  Sense strand starting at position 3229 of SEQ ID NO: 317731
acacuaugcuagguauaaa

SEQ ID NO: 507724 - RNA, 19 nt, Artificial Sequence
  Description of Artificial Sequence: Synthetic oligonucleotide
  Antisense strand to SEQ ID NO: 507723
uuuauaccuagcauagugu

SEQ ID NO: 507725 - RNA, 19 nt, Artificial Sequence
  Description of Artificial Sequence: Synthetic oligonucleotide
  Sense strand starting at position 3252 of SEQ ID NO: 317731
ggaagauggugucccuauu

SEQ ID NO: 507726 - RNA, 19 nt, Artificial Sequence
  Description of Artificial Sequence: Synthetic oligonucleotide
  Antisense strand to SEQ ID NO: 507725
aauagggacaccaucuucc

SEQ ID NO: 507727 - RNA, 19 nt, Artificial Sequence
  Description of Artificial Sequence: Synthetic oligonucleotide
  Sense strand starting at position 3354 of SEQ ID NO: 317731
gggugaugggaagguucaa

SEQ ID NO: 507728 - RNA, 19 nt, Artificial Sequence
  Description of Artificial Sequence: Synthetic oligonucleotide
  Antisense strand to SEQ ID NO: 507727
uugaaccuucccaucaccc

SEQ ID NO: 507729 - RNA, 19 nt, Artificial Sequence
  Description of Artificial Sequence: Synthetic oligonucleotide
  Sense strand starting at position 3435 of SEQ ID NO: 317731
ucuggagcuaucuagugaa

SEQ ID NO: 507730 - RNA, 19 nt, Artificial Sequence
  Description of Artificial Sequence: Synthetic oligonucleotide
  Antisense strand to SEQ ID NO: 507729
uucacuagauagcuccaga

SEQ ID NO: 507731 - RNA, 19 nt, Artificial Sequence
  Description of Artificial Sequence: Synthetic oligonucleotide
  Sense strand starting at position 3453 of SEQ ID NO: 317731
acaauuuagaugcgugguu

SEQ ID NO: 507732 - RNA, 19 nt, Artificial Sequence
  Description of Artificial Sequence: Synthetic oligonucleotide
  Antisense strand to SEQ ID NO: 507731
aaccacgcaucuaaauugu

SEQ ID NO: 507733 - RNA, 19 nt, Artificial Sequence
  Description of Artificial Sequence: Synthetic oligonucleotide
  Sense strand starting at position 3458 of SEQ ID NO: 317731
uuagaugcgugguucagaa

SEQ ID NO: 507734 - RNA, 19 nt, Artificial Sequence
  Description of Artificial Sequence: Synthetic oligonucleotide
  Antisense strand to SEQ ID NO: 507733
uucugaaccacgcaucuaa

SEQ ID NO: 507735 - RNA, 19 nt, Artificial Sequence
  Description of Artificial Sequence: Synthetic oligonucleotide
  Sense strand starting at position 3553 of SEQ ID NO: 317731
agggucaucugucuuuagu

SEQ ID NO: 507736 - RNA, 19 nt, Artificial Sequence
  Description of Artificial Sequence: Synthetic oligonucleotide
  Antisense strand to SEQ ID NO: 507735
acuaaagacagaugacccu

SEQ ID NO: 507737 - RNA, 19 nt, Artificial Sequence
  Description of Artificial Sequence: Synthetic oligonucleotide
  Sense strand starting at position 3556 of SEQ ID NO: 317731
gucaucugucuuuaguaua

SEQ ID NO: 507738 - RNA, 19 nt, Artificial Sequence
  Description of Artificial Sequence: Synthetic oligonucleotide
  Antisense strand to SEQ ID NO: 507737
uauacuaaagacagaugac

SEQ ID NO: 507739 - RNA, 19 nt, Artificial Sequence
  Description of Artificial Sequence: Synthetic oligonucleotide
  Sense strand starting at position 3568 of SEQ ID NO: 317731
uaguauauauugguaagag

SEQ ID NO: 507740 - RNA, 19 nt, Artificial Sequence
  Description of Artificial Sequence: Synthetic oligonucleotide
  Antisense strand to SEQ ID NO: 507739
cucuuaccaauauauacua

SEQ ID NO: 507741 - RNA, 19 nt, Artificial Sequence
  Description of Artificial Sequence: Synthetic oligonucleotide
  Sense strand starting at position 3909 of SEQ ID NO: 317731
accaauucuuaugagagaa

SEQ ID NO: 507742 - RNA, 19 nt, Artificial Sequence
  Description of Artificial Sequence: Synthetic oligonucleotide
  Antisense strand to SEQ ID NO: 507741
uucucucauaagaauuggu

SEQ ID NO: 507743 - RNA, 19 nt, Artificial Sequence
  Description of Artificial Sequence: Synthetic oligonucleotide
  Sense strand starting at position 3951 of SEQ ID NO: 317731
ggaaaugguugaccaggua

SEQ ID NO: 507744 - RNA, 19 nt, Artificial Sequence
  Description of Artificial Sequence: Synthetic oligonucleotide
  Antisense strand to SEQ ID NO: 507743
uaccuggucaaccauuucc

SEQ ID NO: 507745 - RNA, 19 nt, Artificial Sequence
  Description of Artificial Sequence: Synthetic oligonucleotide
  Sense strand starting at position 68 of SEQ ID NO: 317732
gccgaaaccucauuccuac

SEQ ID NO: 507746 - RNA, 19 nt, Artificial Sequence
  Description of Artificial Sequence: Synthetic oligonucleotide
  Antisense strand to SEQ ID NO: 507745
guaggaaugagguuucggc

SEQ ID NO: 507747 - RNA, 19 nt, Artificial Sequence
  Description of Artificial Sequence: Synthetic oligonucleotide
  Sense strand starting at position 601 of SEQ ID NO: 317732
cagagugagacgugagacu

SEQ ID NO: 507748 - RNA, 19 nt, Artificial Sequence
  Description of Artificial Sequence: Synthetic oligonucleotide
  Antisense strand to SEQ ID NO: 507747
agucucacgucucacucug

SEQ ID NO: 507749 - RNA, 19 nt, Artificial Sequence
  Description of Artificial Sequence: Synthetic oligonucleotide
  Sense strand starting at position 682 of SEQ ID NO: 317732
ugaaacauuagacguggaa

SEQ ID NO: 507750 - RNA, 19 nt, Artificial Sequence
  Description of Artificial Sequence: Synthetic oligonucleotide
  Antisense strand to SEQ ID NO: 507749
uuccacgucuaauguuuca

SEQ ID NO: 507751 - RNA, 19 nt, Artificial Sequence
  Description of Artificial Sequence: Synthetic oligonucleotide
  Sense strand starting at position 685 of SEQ ID NO: 317732
aacauuagacguggaauaa

SEQ ID NO: 507752 - RNA, 19 nt, Artificial Sequence
  Description of Artificial Sequence: Synthetic oligonucleotide
  Antisense strand to SEQ ID NO: 507751
uuauuccacgucuaauguu

SEQ ID NO: 507753 - RNA, 19 nt, Artificial Sequence
  Description of Artificial Sequence: Synthetic oligonucleotide
  Sense strand starting at position 745 of SEQ ID NO: 317732
gacccagcucccgaaagaa

SEQ ID NO: 507754 - RNA, 19 nt, Artificial Sequence
  Description of Artificial Sequence: Synthetic oligonucleotide
  Antisense strand to SEQ ID NO: 507753
uucuuucgggagcuggguc

SEQ ID NO: 507755 - RNA, 19 nt, Artificial Sequence
  Description of Artificial Sequence: Synthetic oligonucleotide
  Sense strand starting at position 799 of SEQ ID NO: 317732
cuuacaaacgcuuagcauu

SEQ ID NO: 507756 - RNA, 19 nt, Artificial Sequence
  Description of Artificial Sequence: Synthetic oligonucleotide
  Antisense strand to SEQ ID NO: 507755
aaugcuaagcguuuguaag

SEQ ID NO: 507757 - RNA, 19 nt, Artificial Sequence
  Description of Artificial Sequence: Synthetic oligonucleotide
  Sense strand starting at position 1219 of SEQ ID NO: 317732
ggcauagcagauuaccaau

SEQ ID NO: 507758 - RNA, 19 nt, Artificial Sequence
  Description of Artificial Sequence: Synthetic oligonucleotide
  Antisense strand to SEQ ID NO: 507757
auugguaaucugcuaugcc

SEQ ID NO: 507759 - RNA, 19 nt, Artificial Sequence
  Description of Artificial Sequence: Synthetic oligonucleotide
  Sense strand starting at position 1270 of SEQ ID NO: 317732
cggugacugcaguguuaag

SEQ ID NO: 507760 - RNA, 19 nt, Artificial Sequence
  Description of Artificial Sequence: Synthetic oligonucleotide
  Antisense strand to SEQ ID NO: 507759
cuuaacacugcagucaccg

SEQ ID NO: 507761 - RNA, 19 nt, Artificial Sequence
  Description of Artificial Sequence: Synthetic oligonucleotide
  Sense strand starting at position 1277 of SEQ ID NO: 317732
ugcaguguuaagugauauc

SEQ ID NO: 507762 - RNA, 19 nt, Artificial Sequence
  Description of Artificial Sequence: Synthetic oligonucleotide
  Antisense strand to SEQ ID NO: 507761
gauaucacuuaacacugca

SEQ ID NO: 507763 - RNA, 19 nt, Artificial Sequence
  Description of Artificial Sequence: Synthetic oligonucleotide
  Sense strand starting at position 1366 of SEQ ID NO: 317732
aggcaaauauguccuagaa

SEQ ID NO: 507764 - RNA, 19 nt, Artificial Sequence
  Description of Artificial Sequence: Synthetic oligonucleotide
  Antisense strand to SEQ ID NO: 507763
uucuaggacauauuugccu

SEQ ID NO: 507765 - RNA, 19 nt, Artificial Sequence
  Description of Artificial Sequence: Synthetic oligonucleotide
  Sense strand starting at position 1419 of SEQ ID NO: 317732
gugguuuaugcgucggcga

SEQ ID NO: 507766 - RNA, 19 nt, Artificial Sequence
  Description of Artificial Sequence: Synthetic oligonucleotide
  Antisense strand to SEQ ID NO: 507765
ucgccgacgcauaaaccac

SEQ ID NO: 507767 - RNA, 19 nt, Artificial Sequence
  Description of Artificial Sequence: Synthetic oligonucleotide
  Sense strand starting at position 1433 of SEQ ID NO: 317732
ggcgaacagccauaucaag

SEQ ID NO: 507768 - RNA, 19 nt, Artificial Sequence
  Description of Artificial Sequence: Synthetic oligonucleotide
  Antisense strand to SEQ ID NO: 507767
cuugauauggcuguucgcc

SEQ ID NO: 507769 - RNA, 19 nt, Artificial Sequence
  Description of Artificial Sequence: Synthetic oligonucleotide
  Sense strand starting at position 1536 of SEQ ID NO: 317732
gcgcgcucggucucuaaga

SEQ ID NO: 507770 - RNA, 19 nt, Artificial Sequence
  Description of Artificial Sequence: Synthetic oligonucleotide
  Antisense strand to SEQ ID NO: 507769
ucuuagagaccgagcgcgc

SEQ ID NO: 507771 - RNA, 19 nt, Artificial Sequence
  Description of Artificial Sequence: Synthetic oligonucleotide
  Sense strand starting at position 1602 of SEQ ID NO: 317732
guaggcucugcguaaagga

SEQ ID NO: 507772 - RNA, 19 nt, Artificial Sequence
  Description of Artificial Sequence: Synthetic oligonucleotide
  Antisense strand to SEQ ID NO: 507771
uccuuuacgcagagccuac

SEQ ID NO: 507773 - RNA, 19 nt, Artificial Sequence
  Description of Artificial Sequence: Synthetic oligonucleotide
  Sense strand starting at position 1609 of SEQ ID NO: 317732
cugcguaaaggaugcuaua

SEQ ID NO: 507774 - RNA, 19 nt, Artificial Sequence
  Description of Artificial Sequence: Synthetic oligonucleotide
  Antisense strand to SEQ ID NO: 507773
uauagcauccuuuacgcag

SEQ ID NO: 507775 - RNA, 19 nt, Artificial Sequence
  Description of Artificial Sequence: Synthetic oligonucleotide
  Sense strand starting at position 2299 of SEQ ID NO: 317732
ugaccaguccuuggacaca

SEQ ID NO: 507776 - RNA, 19 nt, Artificial Sequence
  Description of Artificial Sequence: Synthetic oligonucleotide
  Antisense strand to SEQ ID NO: 507775
uguguccaaggacugguca

SEQ ID NO: 507777 - RNA, 19 nt, Artificial Sequence
  Description of Artificial Sequence: Synthetic oligonucleotide
  Sense strand starting at position 2596 of SEQ ID NO: 317732
guuguaaccucguuggaaa

SEQ ID NO: 507778 - RNA, 19 nt, Artificial Sequence
  Description of Artificial Sequence: Synthetic oligonucleotide
  Antisense strand to SEQ ID NO: 507777
uuuccaacgagguuacaac

SEQ ID NO: 507779 - RNA, 19 nt, Artificial Sequence
  Description of Artificial Sequence: Synthetic oligonucleotide
  Sense strand starting at position 2661 of SEQ ID NO: 317732
ggugucuaggguuguaauu

SEQ ID NO: 507780 - RNA, 19 nt, Artificial Sequence
  Description of Artificial Sequence: Synthetic oligonucleotide
  Antisense strand to SEQ ID NO: 507779
aauuacaacccuagacacc

SEQ ID NO: 507781 - RNA, 19 nt, Artificial Sequence
  Description of Artificial Sequence: Synthetic oligonucleotide
  Sense strand starting at position 3090 of SEQ ID NO: 317732
ggagaacggucaagugcaa

SEQ ID NO: 507782 - RNA, 19 nt, Artificial Sequence
  Description of Artificial Sequence: Synthetic oligonucleotide
  Antisense strand to SEQ ID NO: 507781
uugcacuugaccguucucc

SEQ ID NO: 507783 - RNA, 19 nt, Artificial Sequence
  Description of Artificial Sequence: Synthetic oligonucleotide
  Sense strand starting at position 3183 of SEQ ID NO: 317732
ucccuaguguucccugaag

SEQ ID NO: 507784 - RNA, 19 nt, Artificial Sequence
  Description of Artificial Sequence: Synthetic oligonucleotide
  Antisense strand to SEQ ID NO: 507783
cuucagggaacacuaggga

SEQ ID NO: 507785 - RNA, 19 nt, Artificial Sequence
  Description of Artificial Sequence: Synthetic oligonucleotide
  Sense strand starting at position 3185 of SEQ ID NO: 317732
ccuaguguucccugaagaa

SEQ ID NO: 507786 - RNA, 19 nt, Artificial Sequence
  Description of Artificial Sequence: Synthetic oligonucleotide
  Antisense strand to SEQ ID NO: 507785
uucuucagggaacacuagg

SEQ ID NO: 507787 - RNA, 19 nt, Artificial Sequence
  Description of Artificial Sequence: Synthetic oligonucleotide
  Sense strand starting at position 3215 of SEQ ID NO: 317732
aauggaaaucaguguucug

SEQ ID NO: 507788 - RNA, 19 nt, Artificial Sequence
  Description of Artificial Sequence: Synthetic oligonucleotide
  Antisense strand to SEQ ID NO: 507787
cagaacacugauuuccauu

SEQ ID NO: 507789 - RNA, 19 nt, Artificial Sequence
  Description of Artificial Sequence: Synthetic oligonucleotide
  Sense strand starting at position 3218 of SEQ ID NO: 317732
ggaaaucaguguucugaag

SEQ ID NO: 507790 - RNA, 19 nt, Artificial Sequence
  Description of Artificial Sequence: Synthetic oligonucleotide
  Antisense strand to SEQ ID NO: 507789
cuucagaacacugauuucc

SEQ ID NO: 507791 - RNA, 19 nt, Artificial Sequence
  Description of Artificial Sequence: Synthetic oligonucleotide
  Sense strand starting at position 3267 of SEQ ID NO: 317732
gcaagaaccugaguuugaa

SEQ ID NO: 507792 - RNA, 19 nt, Artificial Sequence
  Description of Artificial Sequence: Synthetic oligonucleotide
  Antisense strand to SEQ ID NO: 507791
uucaaacucagguucuugc

SEQ ID NO: 507793 - RNA, 19 nt, Artificial Sequence
  Description of Artificial Sequence: Synthetic oligonucleotide
  Sense strand starting at position 3271 of SEQ ID NO: 317732
gaaccugaguuugaaguga

SEQ ID NO: 507794 - RNA, 19 nt, Artificial Sequence
  Description of Artificial Sequence: Synthetic oligonucleotide
  Antisense strand to SEQ ID NO: 507793
ucacuucaaacucagguuc

SEQ ID NO: 507795 - RNA, 19 nt, Artificial Sequence
  Description of Artificial Sequence: Synthetic oligonucleotide
  Sense strand starting at position 3275 of SEQ ID NO: 317732
cugaguuugaagugacaac

SEQ ID NO: 507796 - RNA, 19 nt, Artificial Sequence
  Description of Artificial Sequence: Synthetic oligonucleotide
  Antisense strand to SEQ ID NO: 507795
guugucacuucaaacucag

SEQ ID NO: 507797 - RNA, 19 nt, Artificial Sequence
  Description of Artificial Sequence: Synthetic oligonucleotide
  Sense strand starting at position 3304 of SEQ ID NO: 317732
gaggcaagguuacagaauu

SEQ ID NO: 507798 - RNA, 19 nt, Artificial Sequence
  Description of Artificial Sequence: Synthetic oligonucleotide
  Antisense strand to SEQ ID NO: 507797
aauucuguaaccuugccuc

SEQ ID NO: 507799 - RNA, 19 nt, Artificial Sequence
  Description of Artificial Sequence: Synthetic oligonucleotide
  Sense strand starting at position 3322 of SEQ ID NO: 317732
uacaguacaucguuugacu

SEQ ID NO: 507800 - RNA, 19 nt, Artificial Sequence
  Description of Artificial Sequence: Synthetic oligonucleotide
  Antisense strand to SEQ ID NO: 507799
agucaaacgauguacugua

SEQ ID NO: 507801 - RNA, 19 nt, Artificial Sequence
  Description of Artificial Sequence: Synthetic oligonucleotide
  Sense strand starting at position 3333 of SEQ ID NO: 317732
guuugacuucugugacacc

SEQ ID NO: 507802 - RNA, 19 nt, Artificial Sequence
  Description of Artificial Sequence: Synthetic oligonucleotide
  Antisense strand to SEQ ID NO: 507801
ggugucacagaagucaaac

SEQ ID NO: 507803 - RNA, 19 nt, Artificial Sequence
  Description of Artificial Sequence: Synthetic oligonucleotide
  Sense strand starting at position 3340 of SEQ ID NO: 317732
uucugugacaccggcauua

SEQ ID NO: 507804 - RNA, 19 nt, Artificial Sequence
  Description of Artificial Sequence: Synthetic oligonucleotide
  Antisense strand to SEQ ID NO: 507803
uaaugccggugucacagaa

SEQ ID NO: 507805 - RNA, 19 nt, Artificial Sequence
  Description of Artificial Sequence: Synthetic oligonucleotide
  Sense strand starting at position 3342 of SEQ ID NO: 317732
cugugacaccggcauuauu

SEQ ID NO: 507806 - RNA, 19 nt, Artificial Sequence
  Description of Artificial Sequence: Synthetic oligonucleotide
  Antisense strand to SEQ ID NO: 507805
aauaaugccggugucacag

SEQ ID NO: 507807 - RNA, 19 nt, Artificial Sequence
  Description of Artificial Sequence: Synthetic oligonucleotide
  Sense strand starting at position 3386 of SEQ ID NO: 317732
ggcuaaggucguagguaau

SEQ ID NO: 507808 - RNA, 19 nt, Artificial Sequence
  Description of Artificial Sequence: Synthetic oligonucleotide
  Antisense strand to SEQ ID NO: 507807
auuaccuacgaccuuagcc

SEQ ID NO: 507809 - RNA, 19 nt, Artificial Sequence
  Description of Artificial Sequence: Synthetic oligonucleotide
  Sense strand starting at position 3433 of SEQ ID NO: 317732
uacaguaaguaguuagaaa

SEQ ID NO: 507810 - RNA, 19 nt, Artificial Sequence
  Description of Artificial Sequence: Synthetic oligonucleotide
  Antisense strand to SEQ ID NO: 507809
uuucuaacuacuuacugua

SEQ ID NO: 507811 - RNA, 19 nt, Artificial Sequence
  Description of Artificial Sequence: Synthetic oligonucleotide
  Sense strand starting at position 3766 of SEQ ID NO: 317732
ugcugacucccuugcugua

SEQ ID NO: 507812 - RNA, 19 nt, Artificial Sequence
  Description of Artificial Sequence: Synthetic oligonucleotide
  Antisense strand to SEQ ID NO: 507811
uacagcaagggagucagca

SEQ ID NO: 507813 - RNA, 19 nt, Artificial Sequence
  Description of Artificial Sequence: Synthetic oligonucleotide
  Sense strand starting at position 3785 of SEQ ID NO: 317732
gcaagcucugaauacuguu

SEQ ID NO: 507814 - RNA, 19 nt, Artificial Sequence
  Description of Artificial Sequence: Synthetic oligonucleotide
  Antisense strand to SEQ ID NO: 507813
aacaguauucagagcuugc

SEQ ID NO: 507815 - RNA, 19 nt, Artificial Sequence
  Description of Artificial Sequence: Synthetic oligonucleotide
  Sense strand starting at position 3797 of SEQ ID NO: 317732
uacuguuucucauuugggu

SEQ ID NO: 507816 - RNA, 19 nt, Artificial Sequence
  Description of Artificial Sequence: Synthetic oligonucleotide
  Antisense strand to SEQ ID NO: 507815
acccaaaugagaaacagua

SEQ ID NO: 507817 - RNA, 19 nt, Artificial Sequence
  Description of Artificial Sequence: Synthetic oligonucleotide
  Sense strand starting at position 3826 of SEQ ID NO: 317732
cauuucuacguuugagcua

SEQ ID NO: 507818 - RNA, 19 nt, Artificial Sequence
  Description of Artificial Sequence: Synthetic oligonucleotide
  Antisense strand to SEQ ID NO: 507817
uagcucaaacguagaaaug

SEQ ID NO: 507819 - RNA, 19 nt, Artificial Sequence
  Description of Artificial Sequence: Synthetic oligonucleotide
  Sense strand starting at position 3839 of SEQ ID NO: 317732
gagcuacuguggcugagaa

SEQ ID NO: 507820 - RNA, 19 nt, Artificial Sequence
  Description of Artificial Sequence: Synthetic oligonucleotide
  Antisense strand to SEQ ID NO: 507819
uucucagccacaguagcuc

SEQ ID NO: 507821 - RNA, 19 nt, Artificial Sequence
  Description of Artificial Sequence: Synthetic oligonucleotide
  Sense strand starting at position 3841 of SEQ ID NO: 317732
gcuacuguggcugagaaca

SEQ ID NO: 507822 - RNA, 19 nt, Artificial Sequence
  Description of Artificial Sequence: Synthetic oligonucleotide
  Antisense strand to SEQ ID NO: 507821
uguucucagccacaguagc

SEQ ID NO: 507823 - RNA, 19 nt, Artificial Sequence
  Description of Artificial Sequence: Synthetic oligonucleotide
  Sense strand starting at position 3969 of SEQ ID NO: 317732
cugaguaaucuguagcacu

SEQ ID NO: 507824 - RNA, 19 nt, Artificial Sequence
  Description of Artificial Sequence: Synthetic oligonucleotide
  Antisense strand to SEQ ID NO: 507823
agugcuacagauuacucag

SEQ ID NO: 507825 - RNA, 19 nt, Artificial Sequence
  Description of Artificial Sequence: Synthetic oligonucleotide
  Sense strand starting at position 49 of SEQ ID NO: 317733
augcaagaagccugggauu

SEQ ID NO: 507826 - RNA, 19 nt, Artificial Sequence
  Description of Artificial Sequence: Synthetic oligonucleotide
  Antisense strand to SEQ ID NO: 507825
aaucccaggcuucuugcau

SEQ ID NO: 507827 - RNA, 19 nt, Artificial Sequence
  Description of Artificial Sequence: Synthetic oligonucleotide
  Sense strand starting at position 123 of SEQ ID NO: 317733
gagguauuaaagugugaug

SEQ ID NO: 507828 - RNA, 19 nt, Artificial Sequence
  Description of Artificial Sequence: Synthetic oligonucleotide
  Antisense strand to SEQ ID NO: 507827
caucacacuuuaauaccuc

SEQ ID NO: 507829 - RNA, 19 nt, Artificial Sequence
  Description of Artificial Sequence: Synthetic oligonucleotide
  Sense strand starting at position 125 of SEQ ID NO: 317733
gguauuaaagugugaugga

SEQ ID NO: 507830 - RNA, 19 nt, Artificial Sequence
  Description of Artificial Sequence: Synthetic oligonucleotide
  Antisense strand to SEQ ID NO: 507829
uccaucacacuuuaauacc

SEQ ID NO: 507831 - RNA, 19 nt, Artificial Sequence
  Description of Artificial Sequence: Synthetic oligonucleotide
  Sense strand starting at position 130 of SEQ ID NO: 317733
uaaagugugauggauugca

SEQ ID NO: 507832 - RNA, 19 nt, Artificial Sequence
  Description of Artificial Sequence: Synthetic oligonucleotide
  Antisense strand to SEQ ID NO: 507831
ugcaauccaucacacuuua

SEQ ID NO: 507833 - RNA, 19 nt, Artificial Sequence
  Description of Artificial Sequence: Synthetic oligonucleotide
  Sense strand starting at position 246 of SEQ ID NO: 317733
ccucauauguugucaggau

SEQ ID NO: 507834 - RNA, 19 nt, Artificial Sequence
  Description of Artificial Sequence: Synthetic oligonucleotide
  Antisense strand to SEQ ID NO: 507833
auccugacaacauaugagg

SEQ ID NO: 507835 - RNA, 19 nt, Artificial Sequence
  Description of Artificial Sequence: Synthetic oligonucleotide
  Sense strand starting at position 253 of SEQ ID NO: 317733
uguugucaggauugaaaga

SEQ ID NO: 507836 - RNA, 19 nt, Artificial Sequence
  Description of Artificial Sequence: Synthetic oligonucleotide
  Antisense strand to SEQ ID NO: 507835
ucuuucaauccugacaaca

SEQ ID NO: 507837 - RNA, 19 nt, Artificial Sequence
  Description of Artificial Sequence: Synthetic oligonucleotide
  Sense strand starting at position 497 of SEQ ID NO: 317733
ccucuagugcuuuagaaga

SEQ ID NO: 507838 - RNA, 19 nt, Artificial Sequence
  Description of Artificial Sequence: Synthetic oligonucleotide
  Antisense strand to SEQ ID NO: 507837
ucuucuaaagcacuagagg

SEQ ID NO: 507839 - RNA, 19 nt, Artificial Sequence
  Description of Artificial Sequence: Synthetic oligonucleotide
  Sense strand starting at position 650 of SEQ ID NO: 317733
uugaguuucuuagugaaug

SEQ ID NO: 507840 - RNA, 19 nt, Artificial Sequence
  Description of Artificial Sequence: Synthetic oligonucleotide
  Antisense strand to SEQ ID NO: 507839
cauucacuaagaaacucaa

SEQ ID NO: 507841 - RNA, 19 nt, Artificial Sequence
  Description of Artificial Sequence: Synthetic oligonucleotide
  Sense strand starting at position 652 of SEQ ID NO: 317733
gaguuucuuagugaaugug

SEQ ID NO: 507842 - RNA, 19 nt, Artificial Sequence
  Description of Artificial Sequence: Synthetic oligonucleotide
  Antisense strand to SEQ ID NO: 507841
cacauucacuaagaaacuc

SEQ ID NO: 507843 - RNA, 19 nt, Artificial Sequence
  Description of Artificial Sequence: Synthetic oligonucleotide
  Sense strand starting at position 655 of SEQ ID NO: 317733
uuucuuagugaaugugaau

SEQ ID NO: 507844 - RNA, 19 nt, Artificial Sequence
  Description of Artificial Sequence: Synthetic oligonucleotide
  Antisense strand to SEQ ID NO: 507843
auucacauucacuaagaaa

SEQ ID NO: 507845 - RNA, 19 nt, Artificial Sequence
  Description of Artificial Sequence: Synthetic oligonucleotide
  Sense strand starting at position 900 of SEQ ID NO: 317733
ugauuucuuuaggaguaga

SEQ ID NO: 507846 - RNA, 19 nt, Artificial Sequence
  Description of Artificial Sequence: Synthetic oligonucleotide
  Antisense strand to SEQ ID NO: 507845
ucuacuccuaaagaaauca

SEQ ID NO: 507847 - RNA, 19 nt, Artificial Sequence
  Description of Artificial Sequence: Synthetic oligonucleotide
  Sense strand starting at position 938 of SEQ ID NO: 317733
uggccaugucuagaguaau

SEQ ID NO: 507848 - RNA, 19 nt, Artificial Sequence
  Description of Artificial Sequence: Synthetic oligonucleotide
  Antisense strand to SEQ ID NO: 507847
auuacucuagacauggcca

SEQ ID NO: 507849 - RNA, 19 nt, Artificial Sequence
  Description of Artificial Sequence: Synthetic oligonucleotide
  Sense strand starting at position 941 of SEQ ID NO: 317733
ccaugucuagaguaauucu

SEQ ID NO: 507850 - RNA, 19 nt, Artificial Sequence
  Description of Artificial Sequence: Synthetic oligonucleotide
  Antisense strand to SEQ ID NO: 507849
agaauuacucuagacaugg

SEQ ID NO: 507851 - RNA, 19 nt, Artificial Sequence
  Description of Artificial Sequence: Synthetic oligonucleotide
  Sense strand starting at position 948 of SEQ ID NO: 317733
uagaguaauucuguuguaa

SEQ ID NO: 507852 - RNA, 19 nt, Artificial Sequence
  Description of Artificial Sequence: Synthetic oligonucleotide
  Antisense strand to SEQ ID NO: 507851
uuacaacagaauuacucua

SEQ ID NO: 507853 - RNA, 19 nt, Artificial Sequence
  Description of Artificial Sequence: Synthetic oligonucleotide
  Sense strand starting at position 961 of SEQ ID NO: 317733
uuguaaugucugucugugu

SEQ ID NO: 507854 - RNA, 19 nt, Artificial Sequence
  Description of Artificial Sequence: Synthetic oligonucleotide
  Antisense strand to SEQ ID NO: 507853
acacagacagacauuacaa

SEQ ID NO: 507855 - RNA, 19 nt, Artificial Sequence
  Description of Artificial Sequence: Synthetic oligonucleotide
  Sense strand starting at position 1004 of SEQ ID NO: 317733
aggauucugucacuaaaug

SEQ ID NO: 507856 - RNA, 19 nt, Artificial Sequence
  Description of Artificial Sequence: Synthetic oligonucleotide
  Antisense strand to SEQ ID NO: 507855
cauuuagugacagaauccu

SEQ ID NO: 507857 - RNA, 19 nt, Artificial Sequence
  Description of Artificial Sequence: Synthetic oligonucleotide
  Sense strand starting at position 1005 of SEQ ID NO: 317733
ggauucugucacuaaaugu

SEQ ID NO: 507858 - RNA, 19 nt, Artificial Sequence
  Description of Artificial Sequence: Synthetic oligonucleotide
  Antisense strand to SEQ ID NO: 507857
acauuuagugacagaaucc

SEQ ID NO: 507859 - RNA, 19 nt, Artificial Sequence
  Description of Artificial Sequence: Synthetic oligonucleotide
  Sense strand starting at position 1041 of SEQ ID NO: 317733
ucuggucuaucauucugaa

SEQ ID NO: 507860 - RNA, 19 nt, Artificial Sequence
  Description of Artificial Sequence: Synthetic oligonucleotide
  Antisense strand to SEQ ID NO: 507859
uucagaaugauagaccaga

SEQ ID NO: 507861 - RNA, 19 nt, Artificial Sequence
  Description of Artificial Sequence: Synthetic oligonucleotide
  Sense strand starting at position 1152 of SEQ ID NO: 317733
aagaaauaguugcucgaua

SEQ ID NO: 507862 - RNA, 19 nt, Artificial Sequence
  Description of Artificial Sequence: Synthetic oligonucleotide
  Antisense strand to SEQ ID NO: 507861
uaucgagcaacuauuucuu

SEQ ID NO: 507863 - RNA, 19 nt, Artificial Sequence
  Description of Artificial Sequence: Synthetic oligonucleotide
  Sense strand starting at position 1153 of SEQ ID NO: 317733
agaaauaguugcucgauaa

SEQ ID NO: 507864 - RNA, 19 nt, Artificial Sequence
  Description of Artificial Sequence: Synthetic oligonucleotide
  Antisense strand to SEQ ID NO: 507863
uuaucgagcaacuauuucu

SEQ ID NO: 507865 - RNA, 19 nt, Artificial Sequence
  Description of Artificial Sequence: Synthetic oligonucleotide
  Sense strand starting at position 1154 of SEQ ID NO: 317733
gaaauaguugcucgauaau

SEQ ID NO: 507866 - RNA, 19 nt, Artificial Sequence
  Description of Artificial Sequence: Synthetic oligonucleotide
  Antisense strand to SEQ ID NO: 507865
auuaucgagcaacuauuuc

SEQ ID NO: 507867 - RNA, 19 nt, Artificial Sequence
  Description of Artificial Sequence: Synthetic oligonucleotide
  Sense strand starting at position 1299 of SEQ ID NO: 317733
auguuuacaucauuggauu

SEQ ID NO: 507868 - RNA, 19 nt, Artificial Sequence
  Description of Artificial Sequence: Synthetic oligonucleotide
  Antisense strand to SEQ ID NO: 507867
aauccaaugauguaaacau

SEQ ID NO: 507869 - RNA, 19 nt, Artificial Sequence
  Description of Artificial Sequence: Synthetic oligonucleotide
  Sense strand starting at position 1300 of SEQ ID NO: 317733
uguuuacaucauuggauua

SEQ ID NO: 507870 - RNA, 19 nt, Artificial Sequence
  Description of Artificial Sequence: Synthetic oligonucleotide
  Antisense strand to SEQ ID NO: 507869
uaauccaaugauguaaaca

SEQ ID NO: 507871 - RNA, 19 nt, Artificial Sequence
  Description of Artificial Sequence: Synthetic oligonucleotide
  Sense strand starting at position 1324 of SEQ ID NO: 317733
agaaccaaaugagauuaua

SEQ ID NO: 507872 - RNA, 19 nt, Artificial Sequence
  Description of Artificial Sequence: Synthetic oligonucleotide
  Antisense strand to SEQ ID NO: 507871
uauaaucucauuugguucu

SEQ ID NO: 507873 - RNA, 19 nt, Artificial Sequence
  Description of Artificial Sequence: Synthetic oligonucleotide
  Sense strand starting at position 1441 of SEQ ID NO: 317733
uuacgagaaaguuaaaugu

SEQ ID NO: 507874 - RNA, 19 nt, Artificial Sequence
  Description of Artificial Sequence: Synthetic oligonucleotide
  Antisense strand to SEQ ID NO: 507873
acauuuaacuuucucguaa

SEQ ID NO: 507875 - RNA, 19 nt, Artificial Sequence
  Description of Artificial Sequence: Synthetic oligonucleotide
  Sense strand starting at position 1489 of SEQ ID NO: 317733
ugaauagcauuccuaaagu

SEQ ID NO: 507876 - RNA, 19 nt, Artificial Sequence
  Description of Artificial Sequence: Synthetic oligonucleotide
  Antisense strand to SEQ ID NO: 507875
acuuuaggaaugcuauuca

SEQ ID NO: 507877 - RNA, 19 nt, Artificial Sequence
  Description of Artificial Sequence: Synthetic oligonucleotide
  Sense strand starting at position 1637 of SEQ ID NO: 317733
agaauagugucauuauauc

SEQ ID NO: 507878 - RNA, 19 nt, Artificial Sequence
  Description of Artificial Sequence: Synthetic oligonucleotide
  Antisense strand to SEQ ID NO: 507877
gauauaaugacacuauucu

SEQ ID NO: 507879 - RNA, 19 nt, Artificial Sequence
  Description of Artificial Sequence: Synthetic oligonucleotide
  Sense strand starting at position 1977 of SEQ ID NO: 317733
gguauucgugcagauaaau

SEQ ID NO: 507880 - RNA, 19 nt, Artificial Sequence
  Description of Artificial Sequence: Synthetic oligonucleotide
  Antisense strand to SEQ ID NO: 507879
auuuaucugcacgaauacc

SEQ ID NO: 507881 - RNA, 19 nt, Artificial Sequence
  Description of Artificial Sequence: Synthetic oligonucleotide
  Sense strand starting at position 2032 of SEQ ID NO: 317733
ggcauagauaggugacauc

SEQ ID NO: 507882 - RNA, 19 nt, Artificial Sequence
  Description of Artificial Sequence: Synthetic oligonucleotide
  Antisense strand to SEQ ID NO: 507881
gaugucaccuaucuaugcc

SEQ ID NO: 507883 - RNA, 19 nt, Artificial Sequence
  Description of Artificial Sequence: Synthetic oligonucleotide
  Sense strand starting at position 2066 of SEQ ID NO: 317733
uagauuguugcacaagaug

SEQ ID NO: 507884 - RNA, 19 nt, Artificial Sequence
  Description of Artificial Sequence: Synthetic oligonucleotide
  Antisense strand to SEQ ID NO: 507883
caucuugugcaacaaucua

SEQ ID NO: 507885 - RNA, 19 nt, Artificial Sequence
  Description of Artificial Sequence: Synthetic oligonucleotide
  Sense strand starting at position 2077 of SEQ ID NO: 317733
acaagaugucugcacagcu

SEQ ID NO: 507886 - RNA, 19 nt, Artificial Sequence
  Description of Artificial Sequence: Synthetic oligonucleotide
  Antisense strand to SEQ ID NO: 507885
agcugugcagacaucuugu

SEQ ID NO: 507887 - RNA, 19 nt, Artificial Sequence
  Description of Artificial Sequence: Synthetic oligonucleotide
  Sense strand starting at position 2200 of SEQ ID NO: 317733
aggguucuggagugaaucu

SEQ ID NO: 507888 - RNA, 19 nt, Artificial Sequence
  Description of Artificial Sequence: Synthetic oligonucleotide
  Antisense strand to SEQ ID NO: 507887
agauucacuccagaacccu

SEQ ID NO: 507889 - RNA, 19 nt, Artificial Sequence
  Description of Artificial Sequence: Synthetic oligonucleotide
  Sense strand starting at position 2210 of SEQ ID NO: 317733
agugaaucucuugaggcua

SEQ ID NO: 507890 - RNA, 19 nt, Artificial Sequence
  Description of Artificial Sequence: Synthetic oligonucleotide
  Antisense strand to SEQ ID NO: 507889
uagccucaagagauucacu

SEQ ID NO: 507891 - RNA, 19 nt, Artificial Sequence
  Description of Artificial Sequence: Synthetic oligonucleotide
  Sense strand starting at position 3498 of SEQ ID NO: 317733
uguguucucauaggagaac

SEQ ID NO: 507892 - RNA, 19 nt, Artificial Sequence
  Description of Artificial Sequence: Synthetic oligonucleotide
  Antisense strand to SEQ ID NO: 507891
guucuccuaugagaacaca

SEQ ID NO: 507893 - RNA, 19 nt, Artificial Sequence
  Description of Artificial Sequence: Synthetic oligonucleotide
  Sense strand starting at position 3640 of SEQ ID NO: 317733
ggcuauaucuggcuauuua

SEQ ID NO: 507894 - RNA, 19 nt, Artificial Sequence
  Description of Artificial Sequence: Synthetic oligonucleotide
  Antisense strand to SEQ ID NO: 507893
uaaauagccagauauagcc

SEQ ID NO: 507895 - RNA, 19 nt, Artificial Sequence
  Description of Artificial Sequence: Synthetic oligonucleotide
  Sense strand starting at position 3919 of SEQ ID NO: 317733
agagucugcauguaaauga

SEQ ID NO: 507896 - RNA, 19 nt, Artificial Sequence
  Description of Artificial Sequence: Synthetic oligonucleotide
  Antisense strand to SEQ ID NO: 507895
ucauuuacaugcagacucu

SEQ ID NO: 507897 - RNA, 19 nt, Artificial Sequence
  Description of Artificial Sequence: Synthetic oligonucleotide
  Sense strand starting at position 3938 of SEQ ID NO: 317733
gaucaugugguauguauuu

SEQ ID NO: 507898 - RNA, 19 nt, Artificial Sequence
  Description of Artificial Sequence: Synthetic oligonucleotide
  Antisense strand to SEQ ID NO: 507897
aaauacauaccacaugauc

SEQ ID NO: 507899 - RNA, 19 nt, Artificial Sequence
  Description of Artificial Sequence: Synthetic oligonucleotide
  Sense strand starting at position 3943 of SEQ ID NO: 317733
ugugguauguauuugucuu

SEQ ID NO: 507900 - RNA, 19 nt, Artificial Sequence
  Description of Artificial Sequence: Synthetic oligonucleotide
  Antisense strand to SEQ ID NO: 507899
aagacaaauacauaccaca

SEQ ID NO: 507901 - RNA, 19 nt, Artificial Sequence
  Description of Artificial Sequence: Synthetic oligonucleotide
  Sense strand starting at position 3944 of SEQ ID NO: 317733
gugguauguauuugucuuu

SEQ ID NO: 507902 - RNA, 19 nt, Artificial Sequence
  Description of Artificial Sequence: Synthetic oligonucleotide
  Antisense strand to SEQ ID NO: 507901
aaagacaaauacauaccac

SEQ ID NO: 507903 - RNA, 19 nt, Artificial Sequence
  Description of Artificial Sequence: Synthetic oligonucleotide
  Sense strand starting at position 3947 of SEQ ID NO: 317733
guauguauuugucuuucuu

SEQ ID NO: 507904 - RNA, 19 nt, Artificial Sequence
  Description of Artificial Sequence: Synthetic oligonucleotide
  Antisense strand to SEQ ID NO: 507903
aagaaagacaaauacauac

SEQ ID NO: 507905 - RNA, 19 nt, Artificial Sequence
  Description of Artificial Sequence: Synthetic oligonucleotide
  Sense strand starting at position 63 of SEQ ID NO: 317734
ugguuaaaucuauggagac

SEQ ID NO: 507906 - RNA, 19 nt, Artificial Sequence
  Description of Artificial Sequence: Synthetic oligonucleotide
  Antisense strand to SEQ ID NO: 507905
gucuccauagauuuaacca

SEQ ID NO: 507907 - RNA, 19 nt, Artificial Sequence
  Description of Artificial Sequence: Synthetic oligonucleotide
  Sense strand starting at position 87 of SEQ ID NO: 317734
acagauuaguacuugguua

SEQ ID NO: 507908 - RNA, 19 nt, Artificial Sequence
  Description of Artificial Sequence: Synthetic oligonucleotide
  Antisense strand to SEQ ID NO: 507907
uaaccaaguacuaaucugu

SEQ ID NO: 507909 - RNA, 19 nt, Artificial Sequence
  Description of Artificial Sequence: Synthetic oligonucleotide
  Sense strand starting at position 110 of SEQ ID NO: 317734
ugggcuuaugcguaaagga

SEQ ID NO: 507910 - RNA, 19 nt, Artificial Sequence
  Description of Artificial Sequence: Synthetic oligonucleotide
  Antisense strand to SEQ ID NO: 507909
uccuuuacgcauaagccca

SEQ ID NO: 507911 - RNA, 19 nt, Artificial Sequence
  Description of Artificial Sequence: Synthetic oligonucleotide
  Sense strand starting at position 139 of SEQ ID NO: 317734
ggagaauggugagcaaugu

SEQ ID NO: 507912 - RNA, 19 nt, Artificial Sequence
  Description of Artificial Sequence: Synthetic oligonucleotide
  Antisense strand to SEQ ID NO: 507911
acauugcucaccauucucc

SEQ ID NO: 507913 - RNA, 19 nt, Artificial Sequence
  Description of Artificial Sequence: Synthetic oligonucleotide
  Sense strand starting at position 140 of SEQ ID NO: 317734
gagaauggugagcaauguu

SEQ ID NO: 507914 - RNA, 19 nt, Artificial Sequence
  Description of Artificial Sequence: Synthetic oligonucleotide
  Antisense strand to SEQ ID NO: 507913
aacauugcucaccauucuc

SEQ ID NO: 507915 - RNA, 19 nt, Artificial Sequence
  Description of Artificial Sequence: Synthetic oligonucleotide
  Sense strand starting at position 147 of SEQ ID NO: 317734
gugagcaauguuuaacgga

SEQ ID NO: 507916 - RNA, 19 nt, Artificial Sequence
  Description of Artificial Sequence: Synthetic oligonucleotide
  Antisense strand to SEQ ID NO: 507915
uccguuaaacauugcucac

SEQ ID NO: 507917 - RNA, 19 nt, Artificial Sequence
  Description of Artificial Sequence: Synthetic oligonucleotide
  Sense strand starting at position 200 of SEQ ID NO: 317734
aauggugaugguugaauau

SEQ ID NO: 507918 - RNA, 19 nt, Artificial Sequence
  Description of Artificial Sequence: Synthetic oligonucleotide
  Antisense strand to SEQ ID NO: 507917
auauucaaccaucaccauu

SEQ ID NO: 507919 - RNA, 19 nt, Artificial Sequence
  Description of Artificial Sequence: Synthetic oligonucleotide
  Sense strand starting at position 239 of SEQ ID NO: 317734
gggugaauuguaugcacug

SEQ ID NO: 507920 - RNA, 19 nt, Artificial Sequence
  Description of Artificial Sequence: Synthetic oligonucleotide
  Antisense strand to SEQ ID NO: 507919
cagugcauacaauucaccc

SEQ ID NO: 507921 - RNA, 19 nt, Artificial Sequence
  Description of Artificial Sequence: Synthetic oligonucleotide
  Sense strand starting at position 240 of SEQ ID NO: 317734
ggugaauuguaugcacugu

SEQ ID NO: 507922 - RNA, 19 nt, Artificial Sequence
  Description of Artificial Sequence: Synthetic oligonucleotide
  Antisense strand to SEQ ID NO: 507921
acagugcauacaauucacc

SEQ ID NO: 507923 - RNA, 19 nt, Artificial Sequence
  Description of Artificial Sequence: Synthetic oligonucleotide
  Sense strand starting at position 244 of SEQ ID NO: 317734
aauuguaugcacugugaac

SEQ ID NO: 507924 - RNA, 19 nt, Artificial Sequence
  Description of Artificial Sequence: Synthetic oligonucleotide
  Antisense strand to SEQ ID NO: 507923
guucacagugcauacaauu

SEQ ID NO: 507925 - RNA, 19 nt, Artificial Sequence
  Description of Artificial Sequence: Synthetic oligonucleotide
  Sense strand starting at position 246 of SEQ ID NO: 317734
uuguaugcacugugaacua

SEQ ID NO: 507926 - RNA, 19 nt, Artificial Sequence
  Description of Artificial Sequence: Synthetic oligonucleotide
  Antisense strand to SEQ ID NO: 507925
uaguucacagugcauacaa

SEQ ID NO: 507927 - RNA, 19 nt, Artificial Sequence
  Description of Artificial Sequence: Synthetic oligonucleotide
  Sense strand starting at position 273 of SEQ ID NO: 317734
uaaagcuguuauuccguaa

SEQ ID NO: 507928 - RNA, 19 nt, Artificial Sequence
  Description of Artificial Sequence: Synthetic oligonucleotide
  Antisense strand to SEQ ID NO: 507927
uuacggaauaacagcuuua

SEQ ID NO: 507929 - RNA, 19 nt, Artificial Sequence
  Description of Artificial Sequence: Synthetic oligonucleotide
  Sense strand starting at position 277 of SEQ ID NO: 317734
gcuguuauuccguaaguac

SEQ ID NO: 507930 - RNA, 19 nt, Artificial Sequence
  Description of Artificial Sequence: Synthetic oligonucleotide
  Antisense strand to SEQ ID NO: 507929
guacuuacggaauaacagc

SEQ ID NO: 507931 - RNA, 19 nt, Artificial Sequence
  Description of Artificial Sequence: Synthetic oligonucleotide
  Sense strand starting at position 292 of SEQ ID NO: 317734
guacaagugauggaaaugu

SEQ ID NO: 507932 - RNA, 19 nt, Artificial Sequence
  Description of Artificial Sequence: Synthetic oligonucleotide
  Antisense strand to SEQ ID NO: 507931
acauuuccaucacuuguac

SEQ ID NO: 507933 - RNA, 19 nt, Artificial Sequence
  Description of Artificial Sequence: Synthetic oligonucleotide
  Sense strand starting at position 318 of SEQ ID NO: 317734
cuuaauuaugguggcaguu

SEQ ID NO: 507934 - RNA, 19 nt, Artificial Sequence
  Description of Artificial Sequence: Synthetic oligonucleotide
  Antisense strand to SEQ ID NO: 507933
aacugccaccauaauuaag

SEQ ID NO: 507935 - RNA, 19 nt, Artificial Sequence
  Description of Artificial Sequence: Synthetic oligonucleotide
  Sense strand starting at position 332 of SEQ ID NO: 317734
caguuacuaggguguguau

SEQ ID NO: 507936 - RNA, 19 nt, Artificial Sequence
  Description of Artificial Sequence: Synthetic oligonucleotide
  Antisense strand to SEQ ID NO: 507935
auacacacccuaguaacug

SEQ ID NO: 507937 - RNA, 19 nt, Artificial Sequence
  Description of Artificial Sequence: Synthetic oligonucleotide
  Sense strand starting at position 334 of SEQ ID NO: 317734
guuacuaggguguguauaa

SEQ ID NO: 507938 - RNA, 19 nt, Artificial Sequence
  Description of Artificial Sequence: Synthetic oligonucleotide
  Antisense strand to SEQ ID NO: 507937
uuauacacacccuaguaac

SEQ ID NO: 507939 - RNA, 19 nt, Artificial Sequence
  Description of Artificial Sequence: Synthetic oligonucleotide
  Sense strand starting at position 335 of SEQ ID NO: 317734
uuacuaggguguguauaaa

SEQ ID NO: 507940 - RNA, 19 nt, Artificial Sequence
  Description of Artificial Sequence: Synthetic oligonucleotide
  Antisense strand to SEQ ID NO: 507939
uuuauacacacccuaguaa

SEQ ID NO: 507941 - RNA, 19 nt, Artificial Sequence
  Description of Artificial Sequence: Synthetic oligonucleotide
  Sense strand starting at position 345 of SEQ ID NO: 317734
guguauaaaucugucaaac

SEQ ID NO: 507942 - RNA, 19 nt, Artificial Sequence
  Description of Artificial Sequence: Synthetic oligonucleotide
  Antisense strand to SEQ ID NO: 507941
guuugacagauuuauacac

SEQ ID NO: 507943 - RNA, 19 nt, Artificial Sequence
  Description of Artificial Sequence: Synthetic oligonucleotide
  Sense strand starting at position 356 of SEQ ID NO: 317734
ugucaaaccucuucgaaac

SEQ ID NO: 507944 - RNA, 19 nt, Artificial Sequence
  Description of Artificial Sequence: Synthetic oligonucleotide
  Antisense strand to SEQ ID NO: 507943
guuucgaagagguuugaca

SEQ ID NO: 507945 - RNA, 19 nt, Artificial Sequence
  Description of Artificial Sequence: Synthetic oligonucleotide
  Sense strand starting at position 357 of SEQ ID NO: 317734
gucaaaccucuucgaaaca

SEQ ID NO: 507946 - RNA, 19 nt, Artificial Sequence
  Description of Artificial Sequence: Synthetic oligonucleotide
  Antisense strand to SEQ ID NO: 507945
uguuucgaagagguuugac

SEQ ID NO: 507947 - RNA, 19 nt, Artificial Sequence
  Description of Artificial Sequence: Synthetic oligonucleotide
  Sense strand starting at position 367 of SEQ ID NO: 317734
uucgaaacauacguaaauu

SEQ ID NO: 507948 - RNA, 19 nt, Artificial Sequence
  Description of Artificial Sequence: Synthetic oligonucleotide
  Antisense strand to SEQ ID NO: 507947
aauuuacguauguuucgaa

SEQ ID NO: 507949 - RNA, 19 nt, Artificial Sequence
  Description of Artificial Sequence: Synthetic oligonucleotide
  Sense strand starting at position 392 of SEQ ID NO: 317734
caguaaagcugacuuagaa

SEQ ID NO: 507950 - RNA, 19 nt, Artificial Sequence
  Description of Artificial Sequence: Synthetic oligonucleotide
  Antisense strand to SEQ ID NO: 507949
uucuaagucagcuuuacug

SEQ ID NO: 507951 - RNA, 19 nt, Artificial Sequence
  Description of Artificial Sequence: Synthetic oligonucleotide
  Sense strand starting at position 761 of SEQ ID NO: 317734
cauguaaucccagggcugu

SEQ ID NO: 507952 - RNA, 19 nt, Artificial Sequence
  Description of Artificial Sequence: Synthetic oligonucleotide
  Antisense strand to SEQ ID NO: 507951
acagcccugggauuacaug

SEQ ID NO: 507953 - RNA, 19 nt, Artificial Sequence
  Description of Artificial Sequence: Synthetic oligonucleotide
  Sense strand starting at position 1195 of SEQ ID NO: 317734
cguaaagcucaugcuguuu

SEQ ID NO: 507954 - RNA, 19 nt, Artificial Sequence
  Description of Artificial Sequence: Synthetic oligonucleotide
  Antisense strand to SEQ ID NO: 507953
aaacagcaugagcuuuacg

SEQ ID NO: 507955 - RNA, 19 nt, Artificial Sequence
  Description of Artificial Sequence: Synthetic oligonucleotide
  Sense strand starting at position 1242 of SEQ ID NO: 317734
aagucaauccuccagguga

SEQ ID NO: 507956 - RNA, 19 nt, Artificial Sequence
  Description of Artificial Sequence: Synthetic oligonucleotide
  Antisense strand to SEQ ID NO: 507955
ucaccuggaggauugacuu

SEQ ID NO: 507957 - RNA, 19 nt, Artificial Sequence
  Description of Artificial Sequence: Synthetic oligonucleotide
  Sense strand starting at position 1267 of SEQ ID NO: 317734
uugcgaagucaacgaaucu

SEQ ID NO: 507958 - RNA, 19 nt, Artificial Sequence
  Description of Artificial Sequence: Synthetic oligonucleotide
  Antisense strand to SEQ ID NO: 507957
agauucguugacuucgcaa

SEQ ID NO: 507959 - RNA, 19 nt, Artificial Sequence
  Description of Artificial Sequence: Synthetic oligonucleotide
  Sense strand starting at position 1395 of SEQ ID NO: 317734
ggcccucugaagggaauua

SEQ ID NO: 507960 - RNA, 19 nt, Artificial Sequence
  Description of Artificial Sequence: Synthetic oligonucleotide
  Antisense strand to SEQ ID NO: 507959
uaauucccuucagagggcc

SEQ ID NO: 507961 - RNA, 19 nt, Artificial Sequence
  Description of Artificial Sequence: Synthetic oligonucleotide
  Sense strand starting at position 2387 of SEQ ID NO: 317734
gggagaaagcugggcuuga

SEQ ID NO: 507962 - RNA, 19 nt, Artificial Sequence
  Description of Artificial Sequence: Synthetic oligonucleotide
  Antisense strand to SEQ ID NO: 507961
ucaagcccagcuuucuccc

SEQ ID NO: 507963 - RNA, 19 nt, Artificial Sequence
  Description of Artificial Sequence: Synthetic oligonucleotide
  Sense strand starting at position 2768 of SEQ ID NO: 317734
uagugauggagcugugauc

SEQ ID NO: 507964 - RNA, 19 nt, Artificial Sequence
  Description of Artificial Sequence: Synthetic oligonucleotide
  Antisense strand to SEQ ID NO: 507963
gaucacagcuccaucacua

SEQ ID NO: 507965 - RNA, 19 nt, Artificial Sequence
  Description of Artificial Sequence: Synthetic oligonucleotide
  Sense strand starting at position 3286 of SEQ ID NO: 317734
gagagauaguuauccauuc

SEQ ID NO: 507966 - RNA, 19 nt, Artificial Sequence
  Description of Artificial Sequence: Synthetic oligonucleotide
  Antisense strand to SEQ ID NO: 507965
gaauggauaacuaucucuc

SEQ ID NO: 507967 - RNA, 19 nt, Artificial Sequence
  Description of Artificial Sequence: Synthetic oligonucleotide
  Sense strand starting at position 3315 of SEQ ID NO: 317734
cugugaggugcacauugua

SEQ ID NO: 507968 - RNA, 19 nt, Artificial Sequence
  Description of Artificial Sequence: Synthetic oligonucleotide
  Antisense strand to SEQ ID NO: 507967
uacaaugugcaccucacag

SEQ ID NO: 507969 - RNA, 19 nt, Artificial Sequence
  Description of Artificial Sequence: Synthetic oligonucleotide
  Sense strand starting at position 3318 of SEQ ID NO: 317734
ugaggugcacauuguaauu

SEQ ID NO: 507970 - RNA, 19 nt, Artificial Sequence
  Description of Artificial Sequence: Synthetic oligonucleotide
  Antisense strand to SEQ ID NO: 507969
aauuacaaugugcaccuca

SEQ ID NO: 507971 - RNA, 19 nt, Artificial Sequence
  Description of Artificial Sequence: Synthetic oligonucleotide
  Sense strand starting at position 3465 of SEQ ID NO: 317734
agguuuaagcgauucgcuu

SEQ ID NO: 507972 - RNA, 19 nt, Artificial Sequence
  Description of Artificial Sequence: Synthetic oligonucleotide
  Antisense strand to SEQ ID NO: 507971
aagcgaaucgcuuaaaccu

SEQ ID NO: 507973 - RNA, 19 nt, Artificial Sequence
  Description of Artificial Sequence: Synthetic oligonucleotide
  Sense strand starting at position 3472 of SEQ ID NO: 317734
agcgauucgcuugccucaa

SEQ ID NO: 507974 - RNA, 19 nt, Artificial Sequence
  Description of Artificial Sequence: Synthetic oligonucleotide
  Antisense strand to SEQ ID NO: 507973
uugaggcaagcgaaucgcu

SEQ ID NO: 507975 - RNA, 19 nt, Artificial Sequence
  Description of Artificial Sequence: Synthetic oligonucleotide
  Sense strand starting at position 3756 of SEQ ID NO: 317734
aguaauaggcagugacaga

SEQ ID NO: 507976 - RNA, 19 nt, Artificial Sequence
  Description of Artificial Sequence: Synthetic oligonucleotide
  Antisense strand to SEQ ID NO: 507975
ucugucacugccuauuacu

SEQ ID NO: 507977 - RNA, 19 nt, Artificial Sequence
  Description of Artificial Sequence: Synthetic oligonucleotide
  Sense strand starting at position 3810 of SEQ ID NO: 317734
ugcagaaaccugcacaaau

SEQ ID NO: 507978 - RNA, 19 nt, Artificial Sequence
  Description of Artificial Sequence: Synthetic oligonucleotide
  Antisense strand to SEQ ID NO: 507977
auuugugcagguuucugca

SEQ ID NO: 507979 - RNA, 19 nt, Artificial Sequence
  Description of Artificial Sequence: Synthetic oligonucleotide
  Sense strand starting at position 3834 of SEQ ID NO: 317734
cuauguagauggcugaauu

SEQ ID NO: 507980 - RNA, 19 nt, Artificial Sequence
  Description of Artificial Sequence: Synthetic oligonucleotide
  Antisense strand to SEQ ID NO: 507979
aauucagccaucuacauag

SEQ ID NO: 507981 - RNA, 19 nt, Artificial Sequence
  Description of Artificial Sequence: Synthetic oligonucleotide
  Sense strand starting at position 3859 of SEQ ID NO: 317734
cagugaauauacuugugua

SEQ ID NO: 507982 - RNA, 19 nt, Artificial Sequence
  Description of Artificial Sequence: Synthetic oligonucleotide
  Antisense strand to SEQ ID NO: 507981
uacacaaguauauucacug

SEQ ID NO: 507983 - RNA, 19 nt, Artificial Sequence
  Description of Artificial Sequence: Synthetic oligonucleotide
  Sense strand starting at position 3863 of SEQ ID NO: 317734
gaauauacuuguguaagau

SEQ ID NO: 507984 - RNA, 19 nt, Artificial Sequence
  Description of Artificial Sequence: Synthetic oligonucleotide
  Antisense strand to SEQ ID NO: 507983
aucuuacacaaguauauuc

SEQ ID NO: 507985 - RNA, 19 nt, Artificial Sequence
  Description of Artificial Sequence: Synthetic oligonucleotide
  Sense strand starting at position 4 of SEQ ID NO: 317735
ggcugaggguccucaauga

SEQ ID NO: 507986 - RNA, 19 nt, Artificial Sequence
  Description of Artificial Sequence: Synthetic oligonucleotide
  Antisense strand to SEQ ID NO: 507985
ucauugaggacccucagcc

SEQ ID NO: 507987 - RNA, 19 nt, Artificial Sequence
  Description of Artificial Sequence: Synthetic oligonucleotide
  Sense strand starting at position 54 of SEQ ID NO: 317735
cugcaucuugagcaagaca

SEQ ID NO: 507988 - RNA, 19 nt, Artificial Sequence
  Description of Artificial Sequence: Synthetic oligonucleotide
  Antisense strand to SEQ ID NO: 507987
ugucuugcucaagaugcag

SEQ ID NO: 507989 - RNA, 19 nt, Artificial Sequence
  Description of Artificial Sequence: Synthetic oligonucleotide
  Sense strand starting at position 89 of SEQ ID NO: 317735
gaacaauggugagaagaaa

SEQ ID NO: 507990 - RNA, 19 nt, Artificial Sequence
  Description of Artificial Sequence: Synthetic oligonucleotide
  Antisense strand to SEQ ID NO: 507989
uuucuucucaccauuguuc

SEQ ID NO: 507991 - RNA, 19 nt, Artificial Sequence
  Description of Artificial Sequence: Synthetic oligonucleotide
  Sense strand starting at position 1887 of SEQ ID NO: 317735
gaccauuagugacugagca

SEQ ID NO: 507992 - RNA, 19 nt, Artificial Sequence
  Description of Artificial Sequence: Synthetic oligonucleotide
  Antisense strand to SEQ ID NO: 507991
ugcucagucacuaaugguc

SEQ ID NO: 507993 - RNA, 19 nt, Artificial Sequence
  Description of Artificial Sequence: Synthetic oligonucleotide
  Sense strand starting at position 1919 of SEQ ID NO: 317735
gugucaggagcuggagauu

SEQ ID NO: 507994 - RNA, 19 nt, Artificial Sequence
  Description of Artificial Sequence: Synthetic oligonucleotide
  Antisense strand to SEQ ID NO: 507993
aaucuccagcuccugacac

SEQ ID NO: 507995 - RNA, 19 nt, Artificial Sequence
  Description of Artificial Sequence: Synthetic oligonucleotide
  Sense strand starting at position 1970 of SEQ ID NO: 317735
aagcuuacagucuggagaa

SEQ ID NO: 507996 - RNA, 19 nt, Artificial Sequence
  Description of Artificial Sequence: Synthetic oligonucleotide
  Antisense strand to SEQ ID NO: 507995
uucuccagacuguaagcuu

SEQ ID NO: 507997 - RNA, 19 nt, Artificial Sequence
  Description of Artificial Sequence: Synthetic oligonucleotide
  Sense strand starting at position 2070 of SEQ ID NO: 317735
acgugugucguuucuuauu

SEQ ID NO: 507998 - RNA, 19 nt, Artificial Sequence
  Description of Artificial Sequence: Synthetic oligonucleotide
  Antisense strand to SEQ ID NO: 507997
aauaagaaacgacacacgu

SEQ ID NO: 507999 - RNA, 19 nt, Artificial Sequence
  Description of Artificial Sequence: Synthetic oligonucleotide
  Sense strand starting at position 2075 of SEQ ID NO: 317735
ugucguuucuuauuugacu

SEQ ID NO: 508000 - RNA, 19 nt, Artificial Sequence
  Description of Artificial Sequence: Synthetic oligonucleotide
  Antisense strand to SEQ ID NO: 507999
agucaaauaagaaacgaca

SEQ ID NO: 508001 - RNA, 19 nt, Artificial Sequence
  Description of Artificial Sequence: Synthetic oligonucleotide
  Sense strand starting at position 2194 of SEQ ID NO: 317735
gguguaaggcugcaugaau

SEQ ID NO: 508002 - RNA, 19 nt, Artificial Sequence
  Description of Artificial Sequence: Synthetic oligonucleotide
  Antisense strand to SEQ ID NO: 508001
auucaugcagccuuacacc

SEQ ID NO: 508003 - RNA, 19 nt, Artificial Sequence
  Description of Artificial Sequence: Synthetic oligonucleotide
  Sense strand starting at position 2291 of SEQ ID NO: 317735
aucugaaugcugggucaau

SEQ ID NO: 508004 - RNA, 19 nt, Artificial Sequence
  Description of Artificial Sequence: Synthetic oligonucleotide
  Antisense strand to SEQ ID NO: 508003
auugacccagcauucagau

SEQ ID NO: 508005 - RNA, 19 nt, Artificial Sequence
  Description of Artificial Sequence: Synthetic oligonucleotide
  Sense strand starting at position 2292 of SEQ ID NO: 317735
ucugaaugcugggucaaua

SEQ ID NO: 508006 - RNA, 19 nt, Artificial Sequence
  Description of Artificial Sequence: Synthetic oligonucleotide
  Antisense strand to SEQ ID NO: 508005
uauugacccagcauucaga

SEQ ID NO: 508007 - RNA, 19 nt, Artificial Sequence
  Description of Artificial Sequence: Synthetic oligonucleotide
  Sense strand starting at position 2411 of SEQ ID NO: 317735
ugaccaaggcuugggaaau

SEQ ID NO: 508008 - RNA, 19 nt, Artificial Sequence
  Description of Artificial Sequence: Synthetic oligonucleotide
  Antisense strand to SEQ ID NO: 508007
auuucccaagccuugguca

SEQ ID NO: 508009 - RNA, 19 nt, Artificial Sequence
  Description of Artificial Sequence: Synthetic oligonucleotide
  Sense strand starting at position 2417 of SEQ ID NO: 317735
aggcuugggaaaugcuuua

SEQ ID NO: 508010 - RNA, 19 nt, Artificial Sequence
  Description of Artificial Sequence: Synthetic oligonucleotide
  Antisense strand to SEQ ID NO: 508009
uaaagcauuucccaagccu

SEQ ID NO: 508011 - RNA, 19 nt, Artificial Sequence
  Description of Artificial Sequence: Synthetic oligonucleotide
  Sense strand starting at position 2468 of SEQ ID NO: 317735
gaaggugguguuugagaug

SEQ ID NO: 508012 - RNA, 19 nt, Artificial Sequence
  Description of Artificial Sequence: Synthetic oligonucleotide
  Antisense strand to SEQ ID NO: 508011
caucucaaacaccaccuuc

SEQ ID NO: 508013 - RNA, 19 nt, Artificial Sequence
  Description of Artificial Sequence: Synthetic oligonucleotide
  Sense strand starting at position 2473 of SEQ ID NO: 317735
ugguguuugagaugaagca

SEQ ID NO: 508014 - RNA, 19 nt, Artificial Sequence
  Description of Artificial Sequence: Synthetic oligonucleotide
  Antisense strand to SEQ ID NO: 508013
ugcuucaucucaaacacca

SEQ ID NO: 508015 - RNA, 19 nt, Artificial Sequence
  Description of Artificial Sequence: Synthetic oligonucleotide
  Sense strand starting at position 2474 of SEQ ID NO: 317735
gguguuugagaugaagcau

SEQ ID NO: 508016 - RNA, 19 nt, Artificial Sequence
  Description of Artificial Sequence: Synthetic oligonucleotide
  Antisense strand to SEQ ID NO: 508015
augcuucaucucaaacacc

SEQ ID NO: 508017 - RNA, 19 nt, Artificial Sequence
  Description of Artificial Sequence: Synthetic oligonucleotide
  Sense strand starting at position 2480 of SEQ ID NO: 317735
ugagaugaagcauagcgau

SEQ ID NO: 508018 - RNA, 19 nt, Artificial Sequence
  Description of Artificial Sequence: Synthetic oligonucleotide
  Antisense strand to SEQ ID NO: 508017
aucgcuaugcuucaucuca

SEQ ID NO: 508019 - RNA, 19 nt, Artificial Sequence
  Description of Artificial Sequence: Synthetic oligonucleotide
  Sense strand starting at position 2486 of SEQ ID NO: 317735
gaagcauagcgauaaugag

SEQ ID NO: 508020 - RNA, 19 nt, Artificial Sequence
  Description of Artificial Sequence: Synthetic oligonucleotide
  Antisense strand to SEQ ID NO: 508019
cucauuaucgcuaugcuuc

SEQ ID NO: 508021 - RNA, 19 nt, Artificial Sequence
  Description of Artificial Sequence: Synthetic oligonucleotide
  Sense strand starting at position 2562 of SEQ ID NO: 317735
agacaaucuuguguuugaa

SEQ ID NO: 508022 - RNA, 19 nt, Artificial Sequence
  Description of Artificial Sequence: Synthetic oligonucleotide
  Antisense strand to SEQ ID NO: 508021
uucaaacacaagauugucu

SEQ ID NO: 508023 - RNA, 19 nt, Artificial Sequence
  Description of Artificial Sequence: Synthetic oligonucleotide
  Sense strand starting at position 2564 of SEQ ID NO: 317735
acaaucuuguguuugaaug

SEQ ID NO: 508024 - RNA, 19 nt, Artificial Sequence
  Description of Artificial Sequence: Synthetic oligonucleotide
  Antisense strand to SEQ ID NO: 508023
cauucaaacacaagauugu

SEQ ID NO: 508025 - RNA, 19 nt, Artificial Sequence
  Description of Artificial Sequence: Synthetic oligonucleotide
  Sense strand starting at position 2813 of SEQ ID NO: 317735
uguagaggucuccagaguu

SEQ ID NO: 508026 - RNA, 19 nt, Artificial Sequence
  Description of Artificial Sequence: Synthetic oligonucleotide
  Antisense strand to SEQ ID NO: 508025
aacucuggagaccucuaca

SEQ ID NO: 508027 - RNA, 19 nt, Artificial Sequence
  Description of Artificial Sequence: Synthetic oligonucleotide
  Sense strand starting at position 2836 of SEQ ID NO: 317735
agauccuucugggcaggau

SEQ ID NO: 508028 - RNA, 19 nt, Artificial Sequence
  Description of Artificial Sequence: Synthetic oligonucleotide
  Antisense strand to SEQ ID NO: 508027
auccugcccagaaggaucu

SEQ ID NO: 508029 - RNA, 19 nt, Artificial Sequence
  Description of Artificial Sequence: Synthetic oligonucleotide
  Sense strand starting at position 2837 of SEQ ID NO: 317735
gauccuucugggcaggauu

SEQ ID NO: 508030 - RNA, 19 nt, Artificial Sequence
  Description of Artificial Sequence: Synthetic oligonucleotide
  Antisense strand to SEQ ID NO: 508029
aauccugcccagaaggauc

SEQ ID NO: 508031 - RNA, 19 nt, Artificial Sequence
  Description of Artificial Sequence: Synthetic oligonucleotide
  Sense strand starting at position 2935 of SEQ ID NO: 317735
cugagaaacccaugugccu

SEQ ID NO: 508032 - RNA, 19 nt, Artificial Sequence
  Description of Artificial Sequence: Synthetic oligonucleotide
  Antisense strand to SEQ ID NO: 508031
aggcacauggguuucucag

SEQ ID NO: 508033 - RNA, 19 nt, Artificial Sequence
  Description of Artificial Sequence: Synthetic oligonucleotide
  Sense strand starting at position 3000 of SEQ ID NO: 317735
acaagucagccaugaguca

SEQ ID NO: 508034 - RNA, 19 nt, Artificial Sequence
  Description of Artificial Sequence: Synthetic oligonucleotide
  Antisense strand to SEQ ID NO: 508033
ugacucauggcugacuugu

SEQ ID NO: 508035 - RNA, 19 nt, Artificial Sequence
  Description of Artificial Sequence: Synthetic oligonucleotide
  Sense strand starting at position 3001 of SEQ ID NO: 317735
caagucagccaugagucaa

SEQ ID NO: 508036 - RNA, 19 nt, Artificial Sequence
  Description of Artificial Sequence: Synthetic oligonucleotide
  Antisense strand to SEQ ID NO: 508035
uugacucauggcugacuug

SEQ ID NO: 508037 - RNA, 19 nt, Artificial Sequence
  Description of Artificial Sequence: Synthetic oligonucleotide
  Sense strand starting at position 3009 of SEQ ID NO: 317735
ccaugagucaagggucaga

SEQ ID NO: 508038 - RNA, 19 nt, Artificial Sequence
  Description of Artificial Sequence: Synthetic oligonucleotide
  Antisense strand to SEQ ID NO: 508037
ucugacccuugacucaugg

SEQ ID NO: 508039 - RNA, 19 nt, Artificial Sequence
  Description of Artificial Sequence: Synthetic oligonucleotide
  Sense strand starting at position 3125 of SEQ ID NO: 317735
ccaucucuccuacauguga

SEQ ID NO: 508040 - RNA, 19 nt, Artificial Sequence
  Description of Artificial Sequence: Synthetic oligonucleotide
  Antisense strand to SEQ ID NO: 508039
ucacauguaggagagaugg

SEQ ID NO: 508041 - RNA, 19 nt, Artificial Sequence
  Description of Artificial Sequence: Synthetic oligonucleotide
  Sense strand starting at position 3187 of SEQ ID NO: 317735
ucaugaaaggcaugacuca

SEQ ID NO: 508042 - RNA, 19 nt, Artificial Sequence
  Description of Artificial Sequence: Synthetic oligonucleotide
  Antisense strand to SEQ ID NO: 508041
ugagucaugccuuucauga

SEQ ID NO: 508043 - RNA, 19 nt, Artificial Sequence
  Description of Artificial Sequence: Synthetic oligonucleotide
  Sense strand starting at position 3368 of SEQ ID NO: 317735
ccaguaucauacuuuggaa

SEQ ID NO: 508044 - RNA, 19 nt, Artificial Sequence
  Description of Artificial Sequence: Synthetic oligonucleotide
  Antisense strand to SEQ ID NO: 508043
uuccaaaguaugauacugg

SEQ ID NO: 508045 - RNA, 19 nt, Artificial Sequence
  Description of Artificial Sequence: Synthetic oligonucleotide
  Sense strand starting at position 3370 of SEQ ID NO: 317735
aguaucauacuuuggaaag

SEQ ID NO: 508046 - RNA, 19 nt, Artificial Sequence
  Description of Artificial Sequence: Synthetic oligonucleotide
  Antisense strand to SEQ ID NO: 508045
cuuuccaaaguaugauacu

SEQ ID NO: 508047 - RNA, 19 nt, Artificial Sequence
  Description of Artificial Sequence: Synthetic oligonucleotide
  Sense strand starting at position 3403 of SEQ ID NO: 317735
accaauuaucuugggaauu

SEQ ID NO: 508048 - RNA, 19 nt, Artificial Sequence
  Description of Artificial Sequence: Synthetic oligonucleotide
  Antisense strand to SEQ ID NO: 508047
aauucccaagauaauuggu

SEQ ID NO: 508049 - RNA, 19 nt, Artificial Sequence
  Description of Artificial Sequence: Synthetic oligonucleotide
  Sense strand starting at position 3487 of SEQ ID NO: 317735
agaugugaaucugcuaacu

SEQ ID NO: 508050 - RNA, 19 nt, Artificial Sequence
  Description of Artificial Sequence: Synthetic oligonucleotide
  Antisense strand to SEQ ID NO: 508049
aguuagcagauucacaucu

SEQ ID NO: 508051 - RNA, 19 nt, Artificial Sequence
  Description of Artificial Sequence: Synthetic oligonucleotide
  Sense strand starting at position 3576 of SEQ ID NO: 317735
uuucuucuuggauggagau

SEQ ID NO: 508052 - RNA, 19 nt, Artificial Sequence
  Description of Artificial Sequence: Synthetic oligonucleotide
  Antisense strand to SEQ ID NO: 508051
aucuccauccaagaagaaa

SEQ ID NO: 508053 - RNA, 19 nt, Artificial Sequence
  Description of Artificial Sequence: Synthetic oligonucleotide
  Sense strand starting at position 3577 of SEQ ID NO: 317735
uucuucuuggauggagaua

SEQ ID NO: 508054 - RNA, 19 nt, Artificial Sequence
  Description of Artificial Sequence: Synthetic oligonucleotide
  Antisense strand to SEQ ID NO: 508053
uaucuccauccaagaagaa

SEQ ID NO: 508055 - RNA, 19 nt, Artificial Sequence
  Description of Artificial Sequence: Synthetic oligonucleotide
  Sense strand starting at position 3588 of SEQ ID NO: 317735
uggagauaugguuaggcuu

SEQ ID NO: 508056 - RNA, 19 nt, Artificial Sequence
  Description of Artificial Sequence: Synthetic oligonucleotide
  Antisense strand to SEQ ID NO: 508055
aagccuaaccauaucucca

SEQ ID NO: 508057 - RNA, 19 nt, Artificial Sequence
  Description of Artificial Sequence: Synthetic oligonucleotide
  Sense strand starting at position 3653 of SEQ ID NO: 317735
ccacaugucaaaggaguga

SEQ ID NO: 508058 - RNA, 19 nt, Artificial Sequence
  Description of Artificial Sequence: Synthetic oligonucleotide
  Antisense strand to SEQ ID NO: 508057
ucacuccuuugacaugugg

SEQ ID NO: 508059 - RNA, 19 nt, Artificial Sequence
  Description of Artificial Sequence: Synthetic oligonucleotide
  Sense strand starting at position 3666 of SEQ ID NO: 317735
gagugaccaaguggagaua

SEQ ID NO: 508060 - RNA, 19 nt, Artificial Sequence
  Description of Artificial Sequence: Synthetic oligonucleotide
  Antisense strand to SEQ ID NO: 508059
uaucuccacuuggucacuc

SEQ ID NO: 508061 - RNA, 19 nt, Artificial Sequence
  Description of Artificial Sequence: Synthetic oligonucleotide
  Sense strand starting at position 3871 of SEQ ID NO: 317735
gccauacugaacugugaga

SEQ ID NO: 508062 - RNA, 19 nt, Artificial Sequence
  Description of Artificial Sequence: Synthetic oligonucleotide
  Antisense strand to SEQ ID NO: 508061
ucucacaguucaguauggc

SEQ ID NO: 508063 - RNA, 19 nt, Artificial Sequence
  Description of Artificial Sequence: Synthetic oligonucleotide
  Sense strand starting at position 3873 of SEQ ID NO: 317735
cauacugaacugugagaca

SEQ ID NO: 508064 - RNA, 19 nt, Artificial Sequence
  Description of Artificial Sequence: Synthetic oligonucleotide
  Antisense strand to SEQ ID NO: 508063
ugucucacaguucaguaug

SEQ ID NO: 508065 - RNA, 19 nt, Artificial Sequence
  Description of Artificial Sequence: Synthetic oligonucleotide
  Sense strand starting at position 83 of SEQ ID NO: 317736
cuuauauaaucuguggaaa

SEQ ID NO: 508066 - RNA, 19 nt, Artificial Sequence
  Description of Artificial Sequence: Synthetic oligonucleotide
  Antisense strand to SEQ ID NO: 508065
uuuccacagauuauauaag

SEQ ID NO: 508067 - RNA, 19 nt, Artificial Sequence
  Description of Artificial Sequence: Synthetic oligonucleotide
  Sense strand starting at position 113 of SEQ ID NO: 317736
gacguacuuccauagagua

SEQ ID NO: 508068 - RNA, 19 nt, Artificial Sequence
  Description of Artificial Sequence: Synthetic oligonucleotide
  Antisense strand to SEQ ID NO: 508067
uacucuauggaaguacguc

SEQ ID NO: 508069 - RNA, 19 nt, Artificial Sequence
  Description of Artificial Sequence: Synthetic oligonucleotide
  Sense strand starting at position 586 of SEQ ID NO: 317736
gggaaaugagaauggcuuu

SEQ ID NO: 508070 - RNA, 19 nt, Artificial Sequence
  Description of Artificial Sequence: Synthetic oligonucleotide
  Antisense strand to SEQ ID NO: 508069
aaagccauucucauuuccc

SEQ ID NO: 508071 - RNA, 19 nt, Artificial Sequence
  Description of Artificial Sequence: Synthetic oligonucleotide
  Sense strand starting at position 772 of SEQ ID NO: 317736
ucuguaggucuuuaaagaa

SEQ ID NO: 508072 - RNA, 19 nt, Artificial Sequence
  Description of Artificial Sequence: Synthetic oligonucleotide
  Antisense strand to SEQ ID NO: 508071
uucuuuaaagaccuacaga

SEQ ID NO: 508073 - RNA, 19 nt, Artificial Sequence
  Description of Artificial Sequence: Synthetic oligonucleotide
  Sense strand starting at position 1161 of SEQ ID NO: 317736
cuaugaguccgaugauaug

SEQ ID NO: 508074 - RNA, 19 nt, Artificial Sequence
  Description of Artificial Sequence: Synthetic oligonucleotide
  Antisense strand to SEQ ID NO: 508073
cauaucaucggacucauag

SEQ ID NO: 508075 - RNA, 19 nt, Artificial Sequence
  Description of Artificial Sequence: Synthetic oligonucleotide
  Sense strand starting at position 1173 of SEQ ID NO: 317736
ugauaugagucaguccaca

SEQ ID NO: 508076 - RNA, 19 nt, Artificial Sequence
  Description of Artificial Sequence: Synthetic oligonucleotide
  Antisense strand to SEQ ID NO: 508075
uguggacugacucauauca

SEQ ID NO: 508077 - RNA, 19 nt, Artificial Sequence
  Description of Artificial Sequence: Synthetic oligonucleotide
  Sense strand starting at position 1178 of SEQ ID NO: 317736
ugagucaguccacagaauu

SEQ ID NO: 508078 - RNA, 19 nt, Artificial Sequence
  Description of Artificial Sequence: Synthetic oligonucleotide
  Antisense strand to SEQ ID NO: 508077
aauucuguggacugacuca

SEQ ID NO: 508079 - RNA, 19 nt, Artificial Sequence
  Description of Artificial Sequence: Synthetic oligonucleotide
  Sense strand starting at position 1210 of SEQ ID NO: 317736
guaguaauugcucaaacuc

SEQ ID NO: 508080 - RNA, 19 nt, Artificial Sequence
  Description of Artificial Sequence: Synthetic oligonucleotide
  Antisense strand to SEQ ID NO: 508079
gaguuugagcaauuacuac

SEQ ID NO: 508081 - RNA, 19 nt, Artificial Sequence
  Description of Artificial Sequence: Synthetic oligonucleotide
  Sense strand starting at position 1255 of SEQ ID NO: 317736
gcagcugagacguaaugaa

SEQ ID NO: 508082 - RNA, 19 nt, Artificial Sequence
  Description of Artificial Sequence: Synthetic oligonucleotide
  Antisense strand to SEQ ID NO: 508081
uucauuacgucucagcugc

SEQ ID NO: 508083 - RNA, 19 nt, Artificial Sequence
  Description of Artificial Sequence: Synthetic oligonucleotide
  Sense strand starting at position 1381 of SEQ ID NO: 317736
ugagaacuggcaugaugua

SEQ ID NO: 508084 - RNA, 19 nt, Artificial Sequence
  Description of Artificial Sequence: Synthetic oligonucleotide
  Antisense strand to SEQ ID NO: 508083
uacaucaugccaguucuca

SEQ ID NO: 508085 - RNA, 19 nt, Artificial Sequence
  Description of Artificial Sequence: Synthetic oligonucleotide
  Sense strand starting at position 1403 of SEQ ID NO: 317736
ggcagaauagucuacacac

SEQ ID NO: 508086 - RNA, 19 nt, Artificial Sequence
  Description of Artificial Sequence: Synthetic oligonucleotide
  Antisense strand to SEQ ID NO: 508085
guguguagacuauucugcc

SEQ ID NO: 508087 - RNA, 19 nt, Artificial Sequence
  Description of Artificial Sequence: Synthetic oligonucleotide
  Sense strand starting at position 1424 of SEQ ID NO: 317736
auguaaagcucuucuauag

SEQ ID NO: 508088 - RNA, 19 nt, Artificial Sequence
  Description of Artificial Sequence: Synthetic oligonucleotide
  Antisense strand to SEQ ID NO: 508087
cuauagaagagcuuuacau

SEQ ID NO: 508089 - RNA, 19 nt, Artificial Sequence
  Description of Artificial Sequence: Synthetic oligonucleotide
  Sense strand starting at position 1521 of SEQ ID NO: 317736
uuaucuuuacaggaugcaa

SEQ ID NO: 508090 - RNA, 19 nt, Artificial Sequence
  Description of Artificial Sequence: Synthetic oligonucleotide
  Antisense strand to SEQ ID NO: 508089
uugcauccuguaaagauaa

SEQ ID NO: 508091 - RNA, 19 nt, Artificial Sequence
  Description of Artificial Sequence: Synthetic oligonucleotide
  Sense strand starting at position 2036 of SEQ ID NO: 317736
ccguguuggcccgcaauca

SEQ ID NO: 508092 - RNA, 19 nt, Artificial Sequence
  Description of Artificial Sequence: Synthetic oligonucleotide
  Antisense strand to SEQ ID NO: 508091
ugauugcgggccaacacgg

SEQ ID NO: 508093 - RNA, 19 nt, Artificial Sequence
  Description of Artificial Sequence: Synthetic oligonucleotide
  Sense strand starting at position 2111 of SEQ ID NO: 317736
agacaucagcuccggaaga

SEQ ID NO: 508094 - RNA, 19 nt, Artificial Sequence
  Description of Artificial Sequence: Synthetic oligonucleotide
  Antisense strand to SEQ ID NO: 508093
ucuuccggagcugaugucu

SEQ ID NO: 508095 - RNA, 19 nt, Artificial Sequence
  Description of Artificial Sequence: Synthetic oligonucleotide
  Sense strand starting at position 2194 of SEQ ID NO: 317736
ccauaauccugagcagcaa

SEQ ID NO: 508096 - RNA, 19 nt, Artificial Sequence
  Description of Artificial Sequence: Synthetic oligonucleotide
  Antisense strand to SEQ ID NO: 508095
uugcugcucaggauuaugg

SEQ ID NO: 508097 - RNA, 19 nt, Artificial Sequence
  Description of Artificial Sequence: Synthetic oligonucleotide
  Sense strand starting at position 2474 of SEQ ID NO: 317736
uaguaaggagguugcuaaa

SEQ ID NO: 508098 - RNA, 19 nt, Artificial Sequence
  Description of Artificial Sequence: Synthetic oligonucleotide
  Antisense strand to SEQ ID NO: 508097
uuuagcaaccuccuuacua

SEQ ID NO: 508099 - RNA, 19 nt, Artificial Sequence
  Description of Artificial Sequence: Synthetic oligonucleotide
  Sense strand starting at position 2555 of SEQ ID NO: 317736
ccaagucuccaagaguuug

SEQ ID NO: 508100 - RNA, 19 nt, Artificial Sequence
  Description of Artificial Sequence: Synthetic oligonucleotide
  Antisense strand to SEQ ID NO: 508099
caaacucuuggagacuugg

SEQ ID NO: 508101 - RNA, 19 nt, Artificial Sequence
  Description of Artificial Sequence: Synthetic oligonucleotide
  Sense strand starting at position 2616 of SEQ ID NO: 317736
cagucuacaugguugaaua

SEQ ID NO: 508102 - RNA, 19 nt, Artificial Sequence
  Description of Artificial Sequence: Synthetic oligonucleotide
  Antisense strand to SEQ ID NO: 508101
uauucaaccauguagacug

SEQ ID NO: 508103 - RNA, 19 nt, Artificial Sequence
  Description of Artificial Sequence: Synthetic oligonucleotide
  Sense strand starting at position 2617 of SEQ ID NO: 317736
agucuacaugguugaauau

SEQ ID NO: 508104 - RNA, 19 nt, Artificial Sequence
  Description of Artificial Sequence: Synthetic oligonucleotide
  Antisense strand to SEQ ID NO: 508103
auauucaaccauguagacu

SEQ ID NO: 508105 - RNA, 19 nt, Artificial Sequence
  Description of Artificial Sequence: Synthetic oligonucleotide
  Sense strand starting at position 2618 of SEQ ID NO: 317736
gucuacaugguugaauauu

SEQ ID NO: 508106 - RNA, 19 nt, Artificial Sequence
  Description of Artificial Sequence: Synthetic oligonucleotide
  Antisense strand to SEQ ID NO: 508105
aauauucaaccauguagac

SEQ ID NO: 508107 - RNA, 19 nt, Artificial Sequence
  Description of Artificial Sequence: Synthetic oligonucleotide
  Sense strand starting at position 2717 of SEQ ID NO: 317736
uugcguccagugguaguaa

SEQ ID NO: 508108 - RNA, 19 nt, Artificial Sequence
  Description of Artificial Sequence: Synthetic oligonucleotide
  Antisense strand to SEQ ID NO: 508107
uuacuaccacuggacgcaa

SEQ ID NO: 508109 - RNA, 19 nt, Artificial Sequence
  Description of Artificial Sequence: Synthetic oligonucleotide
  Sense strand starting at position 2719 of SEQ ID NO: 317736
gcguccagugguaguaaau

SEQ ID NO: 508110 - RNA, 19 nt, Artificial Sequence
  Description of Artificial Sequence: Synthetic oligonucleotide
  Antisense strand to SEQ ID NO: 508109
auuuacuaccacuggacgc

SEQ ID NO: 508111 - RNA, 19 nt, Artificial Sequence
  Description of Artificial Sequence: Synthetic oligonucleotide
  Sense strand starting at position 2969 of SEQ ID NO: 317736
auuguuucucauggaaggu

SEQ ID NO: 508112 - RNA, 19 nt, Artificial Sequence
  Description of Artificial Sequence: Synthetic oligonucleotide
  Antisense strand to SEQ ID NO: 508111
accuuccaugagaaacaau

SEQ ID NO: 508113 - RNA, 19 nt, Artificial Sequence
  Description of Artificial Sequence: Synthetic oligonucleotide
  Sense strand starting at position 2970 of SEQ ID NO: 317736
uuguuucucauggaaggua

SEQ ID NO: 508114 - RNA, 19 nt, Artificial Sequence
  Description of Artificial Sequence: Synthetic oligonucleotide
  Antisense strand to SEQ ID NO: 508113
uaccuuccaugagaaacaa

SEQ ID NO: 508115 - RNA, 19 nt, Artificial Sequence
  Description of Artificial Sequence: Synthetic oligonucleotide
  Sense strand starting at position 3042 of SEQ ID NO: 317736
uuuauaagugauugaccac

SEQ ID NO: 508116 - RNA, 19 nt, Artificial Sequence
  Description of Artificial Sequence: Synthetic oligonucleotide
  Antisense strand to SEQ ID NO: 508115
guggucaaucacuuauaaa

SEQ ID NO: 508117 - RNA, 19 nt, Artificial Sequence
  Description of Artificial Sequence: Synthetic oligonucleotide
  Sense strand starting at position 3086 of SEQ ID NO: 317736
auaccaguuucuucugaca

SEQ ID NO: 508118 - RNA, 19 nt, Artificial Sequence
  Description of Artificial Sequence: Synthetic oligonucleotide
  Antisense strand to SEQ ID NO: 508117
ugucagaagaaacugguau

SEQ ID NO: 508119 - RNA, 19 nt, Artificial Sequence
  Description of Artificial Sequence: Synthetic oligonucleotide
  Sense strand starting at position 3252 of SEQ ID NO: 317736
ugggaauuguaggugagga

SEQ ID NO: 508120 - RNA, 19 nt, Artificial Sequence
  Description of Artificial Sequence: Synthetic oligonucleotide
  Antisense strand to SEQ ID NO: 508119
uccucaccuacaauuccca

SEQ ID NO: 508121 - RNA, 19 nt, Artificial Sequence
  Description of Artificial Sequence: Synthetic oligonucleotide
  Sense strand starting at position 3302 of SEQ ID NO: 317736
agagaaggcuuucucaaca

SEQ ID NO: 508122 - RNA, 19 nt, Artificial Sequence
  Description of Artificial Sequence: Synthetic oligonucleotide
  Antisense strand to SEQ ID NO: 508121
uguugagaaagccuucucu

SEQ ID NO: 508123 - RNA, 19 nt, Artificial Sequence
  Description of Artificial Sequence: Synthetic oligonucleotide
  Sense strand starting at position 3349 of SEQ ID NO: 317736
gggcaagugcuggaaggua

SEQ ID NO: 508124 - RNA, 19 nt, Artificial Sequence
  Description of Artificial Sequence: Synthetic oligonucleotide
  Antisense strand to SEQ ID NO: 508123
uaccuuccagcacuugccc

SEQ ID NO: 508125 - RNA, 19 nt, Artificial Sequence
  Description of Artificial Sequence: Synthetic oligonucleotide
  Sense strand starting at position 3369 of SEQ ID NO: 317736
gguggagaaugaucguauc

SEQ ID NO: 508126 - RNA, 19 nt, Artificial Sequence
  Description of Artificial Sequence: Synthetic oligonucleotide
  Antisense strand to SEQ ID NO: 508125
gauacgaucauucuccacc

SEQ ID NO: 508127 - RNA, 19 nt, Artificial Sequence
  Description of Artificial Sequence: Synthetic oligonucleotide
  Sense strand starting at position 3711 of SEQ ID NO: 317736
auuaucucugcagaagugu

SEQ ID NO: 508128 - RNA, 19 nt, Artificial Sequence
  Description of Artificial Sequence: Synthetic oligonucleotide
  Antisense strand to SEQ ID NO: 508127
acacuucugcagagauaau

SEQ ID NO: 508129 - RNA, 19 nt, Artificial Sequence
  Description of Artificial Sequence: Synthetic oligonucleotide
  Sense strand starting at position 3780 of SEQ ID NO: 317736
ggaucuauguaaucagguc

SEQ ID NO: 508130 - RNA, 19 nt, Artificial Sequence
  Description of Artificial Sequence: Synthetic oligonucleotide
  Antisense strand to SEQ ID NO: 508129
gaccugauuacauagaucc

SEQ ID NO: 508131 - RNA, 19 nt, Artificial Sequence
  Description of Artificial Sequence: Synthetic oligonucleotide
  Sense strand starting at position 3786 of SEQ ID NO: 317736
auguaaucaggucauccau

SEQ ID NO: 508132 - RNA, 19 nt, Artificial Sequence
  Description of Artificial Sequence: Synthetic oligonucleotide
  Antisense strand to SEQ ID NO: 508131
auggaugaccugauuacau

SEQ ID NO: 508133 - RNA, 19 nt, Artificial Sequence
  Description of Artificial Sequence: Synthetic oligonucleotide
  Sense strand starting at position 3829 of SEQ ID NO: 317736
gggagaucuugcucaugau

SEQ ID NO: 508134 - RNA, 19 nt, Artificial Sequence
  Description of Artificial Sequence: Synthetic oligonucleotide
  Antisense strand to SEQ ID NO: 508133
aucaugagcaagaucuccc

SEQ ID NO: 508135 - RNA, 19 nt, Artificial Sequence
  Description of Artificial Sequence: Synthetic oligonucleotide
  Sense strand starting at position 3830 of SEQ ID NO: 317736
ggagaucuugcucaugauu

SEQ ID NO: 508136 - RNA, 19 nt, Artificial Sequence
  Description of Artificial Sequence: Synthetic oligonucleotide
  Antisense strand to SEQ ID NO: 508135
aaucaugagcaagaucucc

SEQ ID NO: 508137 - RNA, 19 nt, Artificial Sequence
  Description of Artificial Sequence: Synthetic oligonucleotide
  Sense strand starting at position 3835 of SEQ ID NO: 317736
ucuugcucaugauuucgaa

SEQ ID NO: 508138 - RNA, 19 nt, Artificial Sequence
  Description of Artificial Sequence: Synthetic oligonucleotide
  Antisense strand to SEQ ID NO: 508137
uucgaaaucaugagcaaga

SEQ ID NO: 508139 - RNA, 19 nt, Artificial Sequence
  Description of Artificial Sequence: Synthetic oligonucleotide
  Sense strand starting at position 3954 of SEQ ID NO: 317736
guucccucuccauaaaugu

SEQ ID NO: 508140 - RNA, 19 nt, Artificial Sequence
  Description of Artificial Sequence: Synthetic oligonucleotide
  Antisense strand to SEQ ID NO: 508139
acauuuauggagagggaac

SEQ ID NO: 508141 - RNA, 19 nt, Artificial Sequence
  Description of Artificial Sequence: Synthetic oligonucleotide
  Sense strand starting at position 3963 of SEQ ID NO: 317736
ccauaaauguggcuauuga

SEQ ID NO: 508142 - RNA, 19 nt, Artificial Sequence
  Description of Artificial Sequence: Synthetic oligonucleotide
  Antisense strand to SEQ ID NO: 508141
ucaauagccacauuuaugg

SEQ ID NO: 508143 - RNA, 19 nt, Artificial Sequence
  Description of Artificial Sequence: Synthetic oligonucleotide
  Sense strand starting at position 3964 of SEQ ID NO: 317736
cauaaauguggcuauugaa

SEQ ID NO: 508144 - RNA, 19 nt, Artificial Sequence
  Description of Artificial Sequence: Synthetic oligonucleotide
  Antisense strand to SEQ ID NO: 508143
uucaauagccacauuuaug

SEQ ID NO: 508145 - RNA, 19 nt, Artificial Sequence
  Description of Artificial Sequence: Synthetic oligonucleotide
  Sense strand starting at position 12 of SEQ ID NO: 317737
ugguguauuagaugggaga

SEQ ID NO: 508146 - RNA, 19 nt, Artificial Sequence
  Description of Artificial Sequence: Synthetic oligonucleotide
  Antisense strand to SEQ ID NO: 508145
ucucccaucuaauacacca

SEQ ID NO: 508147 - RNA, 19 nt, Artificial Sequence
  Description of Artificial Sequence: Synthetic oligonucleotide
  Sense strand starting at position 13 of SEQ ID NO: 317737
gguguauuagaugggagaa

SEQ ID NO: 508148 - RNA, 19 nt, Artificial Sequence
  Description of Artificial Sequence: Synthetic oligonucleotide
  Antisense strand to SEQ ID NO: 508147
uucucccaucuaauacacc

SEQ ID NO: 508149 - RNA, 19 nt, Artificial Sequence
  Description of Artificial Sequence: Synthetic oligonucleotide
  Sense strand starting at position 14 of SEQ ID NO: 317737
guguauuagaugggagaag

SEQ ID NO: 508150 - RNA, 19 nt, Artificial Sequence
  Description of Artificial Sequence: Synthetic oligonucleotide
  Antisense strand to SEQ ID NO: 508149
cuucucccaucuaauacac

SEQ ID NO: 508151 - RNA, 19 nt, Artificial Sequence
  Description of Artificial Sequence: Synthetic oligonucleotide
  Sense strand starting at position 15 of SEQ ID NO: 317737
uguauuagaugggagaaga

SEQ ID NO: 508152 - RNA, 19 nt, Artificial Sequence
  Description of Artificial Sequence: Synthetic oligonucleotide
  Antisense strand to SEQ ID NO: 508151
ucuucucccaucuaauaca

SEQ ID NO: 508153 - RNA, 19 nt, Artificial Sequence
  Description of Artificial Sequence: Synthetic oligonucleotide
  Sense strand starting at position 32 of SEQ ID NO: 317737
gaaagcagguuacuagaaa

SEQ ID NO: 508154 - RNA, 19 nt, Artificial Sequence
  Description of Artificial Sequence: Synthetic oligonucleotide
  Antisense strand to SEQ ID NO: 508153
uuucuaguaaccugcuuuc

SEQ ID NO: 508155 - RNA, 19 nt, Artificial Sequence
  Description of Artificial Sequence: Synthetic oligonucleotide
  Sense strand starting at position 140 of SEQ ID NO: 317737
aaauguuaacggugauugu

SEQ ID NO: 508156 - RNA, 19 nt, Artificial Sequence
  Description of Artificial Sequence: Synthetic oligonucleotide
  Antisense strand to SEQ ID NO: 508155
acaaucaccguuaacauuu

SEQ ID NO: 508157 - RNA, 19 nt, Artificial Sequence
  Description of Artificial Sequence: Synthetic oligonucleotide
  Sense strand starting at position 150 of SEQ ID NO: 317737
ggugauugucccuagccaa

SEQ ID NO: 508158 - RNA, 19 nt, Artificial Sequence
  Description of Artificial Sequence: Synthetic oligonucleotide
  Antisense strand to SEQ ID NO: 508157
uuggcuagggacaaucacc

SEQ ID NO: 508159 - RNA, 19 nt, Artificial Sequence
  Description of Artificial Sequence: Synthetic oligonucleotide
  Sense strand starting at position 403 of SEQ ID NO: 317737
ugaccugacuggucucgaa

SEQ ID NO: 508160 - RNA, 19 nt, Artificial Sequence
  Description of Artificial Sequence: Synthetic oligonucleotide
  Antisense strand to SEQ ID NO: 508159
uucgagaccagucagguca

SEQ ID NO: 508161 - RNA, 19 nt, Artificial Sequence
  Description of Artificial Sequence: Synthetic oligonucleotide
  Sense strand starting at position 507 of SEQ ID NO: 317737
ccauaaguguaugcuacuu

SEQ ID NO: 508162 - RNA, 19 nt, Artificial Sequence
  Description of Artificial Sequence: Synthetic oligonucleotide
  Antisense strand to SEQ ID NO: 508161
aaguagcauacacuuaugg

SEQ ID NO: 508163 - RNA, 19 nt, Artificial Sequence
  Description of Artificial Sequence: Synthetic oligonucleotide
  Sense strand starting at position 823 of SEQ ID NO: 317737
ccggagugucguguauguu

SEQ ID NO: 508164 - RNA, 19 nt, Artificial Sequence
  Description of Artificial Sequence: Synthetic oligonucleotide
  Antisense strand to SEQ ID NO: 508163
aacauacacgacacuccgg

SEQ ID NO: 508165 - RNA, 19 nt, Artificial Sequence
  Description of Artificial Sequence: Synthetic oligonucleotide
  Sense strand starting at position 916 of SEQ ID NO: 317737
cuagguaugaggugaugga

SEQ ID NO: 508166 - RNA, 19 nt, Artificial Sequence
  Description of Artificial Sequence: Synthetic oligonucleotide
  Antisense strand to SEQ ID NO: 508165
uccaucaccucauaccuag

SEQ ID NO: 508167 - RNA, 19 nt, Artificial Sequence
  Description of Artificial Sequence: Synthetic oligonucleotide
  Sense strand starting at position 1101 of SEQ ID NO: 317737
gguggcaacgacuggaaau

SEQ ID NO: 508168 - RNA, 19 nt, Artificial Sequence
  Description of Artificial Sequence: Synthetic oligonucleotide
  Antisense strand to SEQ ID NO: 508167
auuuccagucguugccacc

SEQ ID NO: 508169 - RNA, 19 nt, Artificial Sequence
  Description of Artificial Sequence: Synthetic oligonucleotide
  Sense strand starting at position 1102 of SEQ ID NO: 317737
guggcaacgacuggaaaua

SEQ ID NO: 508170 - RNA, 19 nt, Artificial Sequence
  Description of Artificial Sequence: Synthetic oligonucleotide
  Antisense strand to SEQ ID NO: 508169
uauuuccagucguugccac

SEQ ID NO: 508171 - RNA, 19 nt, Artificial Sequence
  Description of Artificial Sequence: Synthetic oligonucleotide
  Sense strand starting at position 1166 of SEQ ID NO: 317737
accucaaguucuccaugga

SEQ ID NO: 508172 - RNA, 19 nt, Artificial Sequence
  Description of Artificial Sequence: Synthetic oligonucleotide
  Antisense strand to SEQ ID NO: 508171
uccauggagaacuugaggu

SEQ ID NO: 508173 - RNA, 19 nt, Artificial Sequence
  Description of Artificial Sequence: Synthetic oligonucleotide
  Sense strand starting at position 1169 of SEQ ID NO: 317737
ucaaguucuccauggacag

SEQ ID NO: 508174 - RNA, 19 nt, Artificial Sequence
  Description of Artificial Sequence: Synthetic oligonucleotide
  Antisense strand to SEQ ID NO: 508173
cuguccauggagaacuuga

SEQ ID NO: 508175 - RNA, 19 nt, Artificial Sequence
  Description of Artificial Sequence: Synthetic oligonucleotide
  Sense strand starting at position 1211 of SEQ ID NO: 317737
ggguuuguggaauggaaag

SEQ ID NO: 508176 - RNA, 19 nt, Artificial Sequence
  Description of Artificial Sequence: Synthetic oligonucleotide
  Antisense strand to SEQ ID NO: 508175
cuuuccauuccacaaaccc

SEQ ID NO: 508177 - RNA, 19 nt, Artificial Sequence
  Description of Artificial Sequence: Synthetic oligonucleotide
  Sense strand starting at position 1325 of SEQ ID NO: 317737
gcguaugagacggauucga

SEQ ID NO: 508178 - RNA, 19 nt, Artificial Sequence
  Description of Artificial Sequence: Synthetic oligonucleotide
  Antisense strand to SEQ ID NO: 508177
ucgaauccgucucauacgc

SEQ ID NO: 508179 - RNA, 19 nt, Artificial Sequence
  Description of Artificial Sequence: Synthetic oligonucleotide
  Sense strand starting at position 1329 of SEQ ID NO: 317737
augagacggauucgaacuu

SEQ ID NO: 508180 - RNA, 19 nt, Artificial Sequence
  Description of Artificial Sequence: Synthetic oligonucleotide
  Antisense strand to SEQ ID NO: 508179
aaguucgaauccgucucau

SEQ ID NO: 508181 - RNA, 19 nt, Artificial Sequence
  Description of Artificial Sequence: Synthetic oligonucleotide
  Sense strand starting at position 1599 of SEQ ID NO: 317737
cgagaaaucgacuauccug

SEQ ID NO: 508182 - RNA, 19 nt, Artificial Sequence
  Description of Artificial Sequence: Synthetic oligonucleotide
  Antisense strand to SEQ ID NO: 508181
caggauagucgauuucucg

SEQ ID NO: 508183 - RNA, 19 nt, Artificial Sequence
  Description of Artificial Sequence: Synthetic oligonucleotide
  Sense strand starting at position 1653 of SEQ ID NO: 317737
gcgcgagucccaaagaguu

SEQ ID NO: 508184 - RNA, 19 nt, Artificial Sequence
  Description of Artificial Sequence: Synthetic oligonucleotide
  Antisense strand to SEQ ID NO: 508183
aacucuuugggacucgcgc

SEQ ID NO: 508185 - RNA, 19 nt, Artificial Sequence
  Description of Artificial Sequence: Synthetic oligonucleotide
  Sense strand starting at position 1659 of SEQ ID NO: 317737
gucccaaagaguuaggguu

SEQ ID NO: 508186 - RNA, 19 nt, Artificial Sequence
  Description of Artificial Sequence: Synthetic oligonucleotide
  Antisense strand to SEQ ID NO: 508185
aacccuaacucuuugggac

SEQ ID NO: 508187 - RNA, 19 nt, Artificial Sequence
  Description of Artificial Sequence: Synthetic oligonucleotide
  Sense strand starting at position 2373 of SEQ ID NO: 317737
cgacgagacaauugcuaug

SEQ ID NO: 508188 - RNA, 19 nt, Artificial Sequence
  Description of Artificial Sequence: Synthetic oligonucleotide
  Antisense strand to SEQ ID NO: 508187
cauagcaauugucucgucg

SEQ ID NO: 508189 - RNA, 19 nt, Artificial Sequence
  Description of Artificial Sequence: Synthetic oligonucleotide
  Sense strand starting at position 2378 of SEQ ID NO: 317737
agacaauugcuauggaaac

SEQ ID NO: 508190 - RNA, 19 nt, Artificial Sequence
  Description of Artificial Sequence: Synthetic oligonucleotide
  Antisense strand to SEQ ID NO: 508189
guuuccauagcaauugucu

SEQ ID NO: 508191 - RNA, 19 nt, Artificial Sequence
  Description of Artificial Sequence: Synthetic oligonucleotide
  Sense strand starting at position 2450 of SEQ ID NO: 317737
ccggaagacccuuggcuaa

SEQ ID NO: 508192 - RNA, 19 nt, Artificial Sequence
  Description of Artificial Sequence: Synthetic oligonucleotide
  Antisense strand to SEQ ID NO: 508191
uuagccaagggucuuccgg

SEQ ID NO: 508193 - RNA, 19 nt, Artificial Sequence
  Description of Artificial Sequence: Synthetic oligonucleotide
  Sense strand starting at position 2597 of SEQ ID NO: 317737
ggugccucgcucucguuaa

SEQ ID NO: 508194 - RNA, 19 nt, Artificial Sequence
  Description of Artificial Sequence: Synthetic oligonucleotide
  Antisense strand to SEQ ID NO: 508193
uuaacgagagcgaggcacc

SEQ ID NO: 508195 - RNA, 19 nt, Artificial Sequence
  Description of Artificial Sequence: Synthetic oligonucleotide
  Sense strand starting at position 2615 of SEQ ID NO: 317737
acucuuagacuuuguucca

SEQ ID NO: 508196 - RNA, 19 nt, Artificial Sequence
  Description of Artificial Sequence: Synthetic oligonucleotide
  Antisense strand to SEQ ID NO: 508195
uggaacaaagucuaagagu

SEQ ID NO: 508197 - RNA, 19 nt, Artificial Sequence
  Description of Artificial Sequence: Synthetic oligonucleotide
  Sense strand starting at position 2714 of SEQ ID NO: 317737
uccggacuuugcuuuauga

SEQ ID NO: 508198 - RNA, 19 nt, Artificial Sequence
  Description of Artificial Sequence: Synthetic oligonucleotide
  Antisense strand to SEQ ID NO: 508197
ucauaaagcaaaguccgga

SEQ ID NO: 508199 - RNA, 19 nt, Artificial Sequence
  Description of Artificial Sequence: Synthetic oligonucleotide
  Sense strand starting at position 2716 of SEQ ID NO: 317737
cggacuuugcuuuaugacu

SEQ ID NO: 508200 - RNA, 19 nt, Artificial Sequence
  Description of Artificial Sequence: Synthetic oligonucleotide
  Antisense strand to SEQ ID NO: 508199
agucauaaagcaaaguccg

SEQ ID NO: 508201 - RNA, 19 nt, Artificial Sequence
  Description of Artificial Sequence: Synthetic oligonucleotide
  Sense strand starting at position 2721 of SEQ ID NO: 317737
uuugcuuuaugacucugaa

SEQ ID NO: 508202 - RNA, 19 nt, Artificial Sequence
  Description of Artificial Sequence: Synthetic oligonucleotide
  Antisense strand to SEQ ID NO: 508201
uucagagucauaaagcaaa

SEQ ID NO: 508203 - RNA, 19 nt, Artificial Sequence
  Description of Artificial Sequence: Synthetic oligonucleotide
  Sense strand starting at position 2724 of SEQ ID NO: 317737
gcuuuaugacucugaacaa

SEQ ID NO: 508204 - RNA, 19 nt, Artificial Sequence
  Description of Artificial Sequence: Synthetic oligonucleotide
  Antisense strand to SEQ ID NO: 508203
uuguucagagucauaaagc

SEQ ID NO: 508205 - RNA, 19 nt, Artificial Sequence
  Description of Artificial Sequence: Synthetic oligonucleotide
  Sense strand starting at position 2809 of SEQ ID NO: 317737
ucugguuagguuugaagau

SEQ ID NO: 508206 - RNA, 19 nt, Artificial Sequence
  Description of Artificial Sequence: Synthetic oligonucleotide
  Antisense strand to SEQ ID NO: 508205
aucuucaaaccuaaccaga

SEQ ID NO: 508207 - RNA, 19 nt, Artificial Sequence
  Description of Artificial Sequence: Synthetic oligonucleotide
  Sense strand starting at position 2939 of SEQ ID NO: 317737
ucagauuucuugugauuuc

SEQ ID NO: 508208 - RNA, 19 nt, Artificial Sequence
  Description of Artificial Sequence: Synthetic oligonucleotide
  Antisense strand to SEQ ID NO: 508207
gaaaucacaagaaaucuga

SEQ ID NO: 508209 - RNA, 19 nt, Artificial Sequence
  Description of Artificial Sequence: Synthetic oligonucleotide
  Sense strand starting at position 3093 of SEQ ID NO: 317737
ugugccaagcccugauaaa

SEQ ID NO: 508210 - RNA, 19 nt, Artificial Sequence
  Description of Artificial Sequence: Synthetic oligonucleotide
  Antisense strand to SEQ ID NO: 508209
uuuaucagggcuuggcaca

SEQ ID NO: 508211 - RNA, 19 nt, Artificial Sequence
  Description of Artificial Sequence: Synthetic oligonucleotide
  Sense strand starting at position 3155 of SEQ ID NO: 317737
uaagguagccacuguuauc

SEQ ID NO: 508212 - RNA, 19 nt, Artificial Sequence
  Description of Artificial Sequence: Synthetic oligonucleotide
  Antisense strand to SEQ ID NO: 508211
gauaacaguggcuaccuua

SEQ ID NO: 508213 - RNA, 19 nt, Artificial Sequence
  Description of Artificial Sequence: Synthetic oligonucleotide
  Sense strand starting at position 3193 of SEQ ID NO: 317737
gccuguaauugccuauuua

SEQ ID NO: 508214 - RNA, 19 nt, Artificial Sequence
  Description of Artificial Sequence: Synthetic oligonucleotide
  Antisense strand to SEQ ID NO: 508213
uaaauaggcaauuacaggc

SEQ ID NO: 508215 - RNA, 19 nt, Artificial Sequence
  Description of Artificial Sequence: Synthetic oligonucleotide
  Sense strand starting at position 3197 of SEQ ID NO: 317737
guaauugccuauuuaaugu

SEQ ID NO: 508216 - RNA, 19 nt, Artificial Sequence
  Description of Artificial Sequence: Synthetic oligonucleotide
  Antisense strand to SEQ ID NO: 508215
acauuaaauaggcaauuac

SEQ ID NO: 508217 - RNA, 19 nt, Artificial Sequence
  Description of Artificial Sequence: Synthetic oligonucleotide
  Sense strand starting at position 3227 of SEQ ID NO: 317737
acuagacuuugagcucuga

SEQ ID NO: 508218 - RNA, 19 nt, Artificial Sequence
  Description of Artificial Sequence: Synthetic oligonucleotide
  Antisense strand to SEQ ID NO: 508217
ucagagcucaaagucuagu

SEQ ID NO: 508219 - RNA, 19 nt, Artificial Sequence
  Description of Artificial Sequence: Synthetic oligonucleotide
  Sense strand starting at position 3291 of SEQ ID NO: 317737
cuaauacagugccugauaa

SEQ ID NO: 508220 - RNA, 19 nt, Artificial Sequence
  Description of Artificial Sequence: Synthetic oligonucleotide
  Antisense strand to SEQ ID NO: 508219
uuaucaggcacuguauuag

SEQ ID NO: 508221 - RNA, 19 nt, Artificial Sequence
  Description of Artificial Sequence: Synthetic oligonucleotide
  Sense strand starting at position 3427 of SEQ ID NO: 317737
ucccauuacucacugguuu

SEQ ID NO: 508222 - RNA, 19 nt, Artificial Sequence
  Description of Artificial Sequence: Synthetic oligonucleotide
  Antisense strand to SEQ ID NO: 508221
aaaccagugaguaauggga

SEQ ID NO: 508223 - RNA, 19 nt, Artificial Sequence
  Description of Artificial Sequence: Synthetic oligonucleotide
  Sense strand starting at position 3623 of SEQ ID NO: 317737
ggcguuggcagguagaauu

SEQ ID NO: 508224 - RNA, 19 nt, Artificial Sequence
  Description of Artificial Sequence: Synthetic oligonucleotide
  Antisense strand to SEQ ID NO: 508223
aauucuaccugccaacgcc

SEQ ID NO: 508225 - RNA, 19 nt, Artificial Sequence
  Description of Artificial Sequence: Synthetic oligonucleotide
  Sense strand starting at position 743 of SEQ ID NO: 317738
cugauauaauaguaugagu

SEQ ID NO: 508226 - RNA, 19 nt, Artificial Sequence
  Description of Artificial Sequence: Synthetic oligonucleotide
  Antisense strand to SEQ ID NO: 508225
acucauacuauuauaucag

SEQ ID NO: 508227 - RNA, 19 nt, Artificial Sequence
  Description of Artificial Sequence: Synthetic oligonucleotide
  Sense strand starting at position 745 of SEQ ID NO: 317738
gauauaauaguaugagucu

SEQ ID NO: 508228 - RNA, 19 nt, Artificial Sequence
  Description of Artificial Sequence: Synthetic oligonucleotide
  Antisense strand to SEQ ID NO: 508227
agacucauacuauuauauc

SEQ ID NO: 508229 - RNA, 19 nt, Artificial Sequence
  Description of Artificial Sequence: Synthetic oligonucleotide
  Sense strand starting at position 752 of SEQ ID NO: 317738
uaguaugagucuuuaguuc

SEQ ID NO: 508230 - RNA, 19 nt, Artificial Sequence
  Description of Artificial Sequence: Synthetic oligonucleotide
  Antisense strand to SEQ ID NO: 508229
gaacuaaagacucauacua

SEQ ID NO: 508231 - RNA, 19 nt, Artificial Sequence
  Description of Artificial Sequence: Synthetic oligonucleotide
  Sense strand starting at position 908 of SEQ ID NO: 317738
cucaacuuguugcuagauu

SEQ ID NO: 508232 - RNA, 19 nt, Artificial Sequence
  Description of Artificial Sequence: Synthetic oligonucleotide
  Antisense strand to SEQ ID NO: 508231
aaucuagcaacaaguugag

SEQ ID NO: 508233 - RNA, 19 nt, Artificial Sequence
  Description of Artificial Sequence: Synthetic oligonucleotide
  Sense strand starting at position 909 of SEQ ID NO: 317738
ucaacuuguugcuagauuu

SEQ ID NO: 508234 - RNA, 19 nt, Artificial Sequence
  Description of Artificial Sequence: Synthetic oligonucleotide
  Antisense strand to SEQ ID NO: 508233
aaaucuagcaacaaguuga

SEQ ID NO: 508235 - RNA, 19 nt, Artificial Sequence
  Description of Artificial Sequence: Synthetic oligonucleotide
  Sense strand starting at position 1121 of SEQ ID NO: 317738
uccuuucguguggcuaauu

SEQ ID NO: 508236 - RNA, 19 nt, Artificial Sequence
  Description of Artificial Sequence: Synthetic oligonucleotide
  Antisense strand to SEQ ID NO: 508235
aauuagccacacgaaagga

SEQ ID NO: 508237 - RNA, 19 nt, Artificial Sequence
  Description of Artificial Sequence: Synthetic oligonucleotide
  Sense strand starting at position 1122 of SEQ ID NO: 317738
ccuuucguguggcuaauuu

SEQ ID NO: 508238 - RNA, 19 nt, Artificial Sequence
  Description of Artificial Sequence: Synthetic oligonucleotide
  Antisense strand to SEQ ID NO: 508237
aaauuagccacacgaaagg

SEQ ID NO: 508239 - RNA, 19 nt, Artificial Sequence
  Description of Artificial Sequence: Synthetic oligonucleotide
  Sense strand starting at position 1168 of SEQ ID NO: 317738
agcuccaaccuaugaaaga

SEQ ID NO: 508240 - RNA, 19 nt, Artificial Sequence
  Description of Artificial Sequence: Synthetic oligonucleotide
  Antisense strand to SEQ ID NO: 508239
ucuuucauagguuggagcu

SEQ ID NO: 508241 - RNA, 19 nt, Artificial Sequence
  Description of Artificial Sequence: Synthetic oligonucleotide
  Sense strand starting at position 1178 of SEQ ID NO: 317738
uaugaaagacuuugucagu

SEQ ID NO: 508242 - RNA, 19 nt, Artificial Sequence
  Description of Artificial Sequence: Synthetic oligonucleotide
  Antisense strand to SEQ ID NO: 508241
acugacaaagucuuucaua

SEQ ID NO: 508243 - RNA, 19 nt, Artificial Sequence
  Description of Artificial Sequence: Synthetic oligonucleotide
  Sense strand starting at position 1179 of SEQ ID NO: 317738
augaaagacuuugucaguu

SEQ ID NO: 508244 - RNA, 19 nt, Artificial Sequence
  Description of Artificial Sequence: Synthetic oligonucleotide
  Antisense strand to SEQ ID NO: 508243
aacugacaaagucuuucau

SEQ ID NO: 508245 - RNA, 19 nt, Artificial Sequence
  Description of Artificial Sequence: Synthetic oligonucleotide
  Sense strand starting at position 1202 of SEQ ID NO: 317738
ugucaaagccagcaucuuu

SEQ ID NO: 508246 - RNA, 19 nt, Artificial Sequence
  Description of Artificial Sequence: Synthetic oligonucleotide
  Antisense strand to SEQ ID NO: 508245
aaagaugcuggcuuugaca

SEQ ID NO: 508247 - RNA, 19 nt, Artificial Sequence
  Description of Artificial Sequence: Synthetic oligonucleotide
  Sense strand starting at position 1236 of SEQ ID NO: 317738
cccugaacgcucgugguuu

SEQ ID NO: 508248 - RNA, 19 nt, Artificial Sequence
  Description of Artificial Sequence: Synthetic oligonucleotide
  Antisense strand to SEQ ID NO: 508247
aaaccacgagcguucaggg

SEQ ID NO: 508249 - RNA, 19 nt, Artificial Sequence
  Description of Artificial Sequence: Synthetic oligonucleotide
  Sense strand starting at position 1528 of SEQ ID NO: 317738
gcagguaugacagacguuu

SEQ ID NO: 508250 - RNA, 19 nt, Artificial Sequence
  Description of Artificial Sequence: Synthetic oligonucleotide
  Antisense strand to SEQ ID NO: 508249
aaacgucugucauaccugc

SEQ ID NO: 508251 - RNA, 19 nt, Artificial Sequence
  Description of Artificial Sequence: Synthetic oligonucleotide
  Sense strand starting at position 1537 of SEQ ID NO: 317738
acagacguuugauucccaa

SEQ ID NO: 508252 - RNA, 19 nt, Artificial Sequence
  Description of Artificial Sequence: Synthetic oligonucleotide
  Antisense strand to SEQ ID NO: 508251
uugggaaucaaacgucugu

SEQ ID NO: 508253 - RNA, 19 nt, Artificial Sequence
  Description of Artificial Sequence: Synthetic oligonucleotide
  Sense strand starting at position 1566 of SEQ ID NO: 317738
uuugguuucuucguuuacu

SEQ ID NO: 508254 - RNA, 19 nt, Artificial Sequence
  Description of Artificial Sequence: Synthetic oligonucleotide
  Antisense strand to SEQ ID NO: 508253
aguaaacgaagaaaccaaa

SEQ ID NO: 508255 - RNA, 19 nt, Artificial Sequence
  Description of Artificial Sequence: Synthetic oligonucleotide
  Sense strand starting at position 1569 of SEQ ID NO: 317738
gguuucuucguuuacugaa

SEQ ID NO: 508256 - RNA, 19 nt, Artificial Sequence
  Description of Artificial Sequence: Synthetic oligonucleotide
  Antisense strand to SEQ ID NO: 508255
uucaguaaacgaagaaacc

SEQ ID NO: 508257 - RNA, 19 nt, Artificial Sequence
  Description of Artificial Sequence: Synthetic oligonucleotide
  Sense strand starting at position 2190 of SEQ ID NO: 317738
gguggucgccgucuuucau

SEQ ID NO: 508258 - RNA, 19 nt, Artificial Sequence
  Description of Artificial Sequence: Synthetic oligonucleotide
  Antisense strand to SEQ ID NO: 508257
augaaagacggcgaccacc

SEQ ID NO: 508259 - RNA, 19 nt, Artificial Sequence
  Description of Artificial Sequence: Synthetic oligonucleotide
  Sense strand starting at position 2570 of SEQ ID NO: 317738
gcaggaguucuccaaggug

SEQ ID NO: 508260 - RNA, 19 nt, Artificial Sequence
  Description of Artificial Sequence: Synthetic oligonucleotide
  Antisense strand to SEQ ID NO: 508259
caccuuggagaacuccugc

SEQ ID NO: 508261 - RNA, 19 nt, Artificial Sequence
  Description of Artificial Sequence: Synthetic oligonucleotide
  Sense strand starting at position 2573 of SEQ ID NO: 317738
ggaguucuccaaggugcaa

SEQ ID NO: 508262 - RNA, 19 nt, Artificial Sequence
  Description of Artificial Sequence: Synthetic oligonucleotide
  Antisense strand to SEQ ID NO: 508261
uugcaccuuggagaacucc

SEQ ID NO: 508263 - RNA, 19 nt, Artificial Sequence
  Description of Artificial Sequence: Synthetic oligonucleotide
  Sense strand starting at position 2677 of SEQ ID NO: 317738
gcaguuguccuuccuggca

SEQ ID NO: 508264 - RNA, 19 nt, Artificial Sequence
  Description of Artificial Sequence: Synthetic oligonucleotide
  Antisense strand to SEQ ID NO: 508263
ugccaggaaggacaacugc

SEQ ID NO: 508265 - RNA, 19 nt, Artificial Sequence
  Description of Artificial Sequence: Synthetic oligonucleotide
  Sense strand starting at position 3058 of SEQ ID NO: 317738
ggaccugggucucuguuua

SEQ ID NO: 508266 - RNA, 19 nt, Artificial Sequence
  Description of Artificial Sequence: Synthetic oligonucleotide
  Antisense strand to SEQ ID NO: 508265
uaaacagagacccaggucc

SEQ ID NO: 508267 - RNA, 19 nt, Artificial Sequence
  Description of Artificial Sequence: Synthetic oligonucleotide
  Sense strand starting at position 3068 of SEQ ID NO: 317738
cucuguuuauggucucuga

SEQ ID NO: 508268 - RNA, 19 nt, Artificial Sequence
  Description of Artificial Sequence: Synthetic oligonucleotide
  Antisense strand to SEQ ID NO: 508267
ucagagaccauaaacagag

SEQ ID NO: 508269 - RNA, 19 nt, Artificial Sequence
  Description of Artificial Sequence: Synthetic oligonucleotide
  Sense strand starting at position 3071 of SEQ ID NO: 317738
uguuuauggucucugaguu

SEQ ID NO: 508270 - RNA, 19 nt, Artificial Sequence
  Description of Artificial Sequence: Synthetic oligonucleotide
  Antisense strand to SEQ ID NO: 508269
aacucagagaccauaaaca

SEQ ID NO: 508271 - RNA, 19 nt, Artificial Sequence
  Description of Artificial Sequence: Synthetic oligonucleotide
  Sense strand starting at position 3072 of SEQ ID NO: 317738
guuuauggucucugaguuc

SEQ ID NO: 508272 - RNA, 19 nt, Artificial Sequence
  Description of Artificial Sequence: Synthetic oligonucleotide
  Antisense strand to SEQ ID NO: 508271
gaacucagagaccauaaac

SEQ ID NO: 508273 - RNA, 19 nt, Artificial Sequence
  Description of Artificial Sequence: Synthetic oligonucleotide
  Sense strand starting at position 3182 of SEQ ID NO: 317738
ccacaugaguagcuuuauu

SEQ ID NO: 508274 - RNA, 19 nt, Artificial Sequence
  Description of Artificial Sequence: Synthetic oligonucleotide
  Antisense strand to SEQ ID NO: 508273
aauaaagcuacucaugugg

SEQ ID NO: 508275 - RNA, 19 nt, Artificial Sequence
  Description of Artificial Sequence: Synthetic oligonucleotide
  Sense strand starting at position 3193 of SEQ ID NO: 317738
gcuuuauucugacuccaag

SEQ ID NO: 508276 - RNA, 19 nt, Artificial Sequence
  Description of Artificial Sequence: Synthetic oligonucleotide
  Antisense strand to SEQ ID NO: 508275
cuuggagucagaauaaagc

SEQ ID NO: 508277 - RNA, 19 nt, Artificial Sequence
  Description of Artificial Sequence: Synthetic oligonucleotide
  Sense strand starting at position 3336 of SEQ ID NO: 317738
gguccacuucuuggguuau

SEQ ID NO: 508278 - RNA, 19 nt, Artificial Sequence
  Description of Artificial Sequence: Synthetic oligonucleotide
  Antisense strand to SEQ ID NO: 508277
auaacccaagaaguggacc

SEQ ID NO: 508279 - RNA, 19 nt, Artificial Sequence
  Description of Artificial Sequence: Synthetic oligonucleotide
  Sense strand starting at position 3338 of SEQ ID NO: 317738
uccacuucuuggguuauua

SEQ ID NO: 508280 - RNA, 19 nt, Artificial Sequence
  Description of Artificial Sequence: Synthetic oligonucleotide
  Antisense strand to SEQ ID NO: 508279
uaauaacccaagaagugga

SEQ ID NO: 508281 - RNA, 19 nt, Artificial Sequence
  Description of Artificial Sequence: Synthetic oligonucleotide
  Sense strand starting at position 3457 of SEQ ID NO: 317738
ucauauaagcaguggaauc

SEQ ID NO: 508282 - RNA, 19 nt, Artificial Sequence
  Description of Artificial Sequence: Synthetic oligonucleotide
  Antisense strand to SEQ ID NO: 508281
gauuccacugcuuauauga

SEQ ID NO: 508283 - RNA, 19 nt, Artificial Sequence
  Description of Artificial Sequence: Synthetic oligonucleotide
  Sense strand starting at position 3467 of SEQ ID NO: 317738
aguggaaucuuagcuuuaa

SEQ ID NO: 508284 - RNA, 19 nt, Artificial Sequence
  Description of Artificial Sequence: Synthetic oligonucleotide
  Antisense strand to SEQ ID NO: 508283
uuaaagcuaagauuccacu

SEQ ID NO: 508285 - RNA, 19 nt, Artificial Sequence
  Description of Artificial Sequence: Synthetic oligonucleotide
  Sense strand starting at position 3468 of SEQ ID NO: 317738
guggaaucuuagcuuuaaa

SEQ ID NO: 508286 - RNA, 19 nt, Artificial Sequence
  Description of Artificial Sequence: Synthetic oligonucleotide
  Antisense strand to SEQ ID NO: 508285
uuuaaagcuaagauuccac

SEQ ID NO: 508287 - RNA, 19 nt, Artificial Sequence
  Description of Artificial Sequence: Synthetic oligonucleotide
  Sense strand starting at position 3601 of SEQ ID NO: 317738
cccugaguggugggauaua

SEQ ID NO: 508288 - RNA, 19 nt, Artificial Sequence
  Description of Artificial Sequence: Synthetic oligonucleotide
  Antisense strand to SEQ ID NO: 508287
uauaucccaccacucaggg

SEQ ID NO: 508289 - RNA, 19 nt, Artificial Sequence
  Description of Artificial Sequence: Synthetic oligonucleotide
  Sense strand starting at position 3639 of SEQ ID NO: 317738
ggugggauuuacgggaagu

SEQ ID NO: 508290 - RNA, 19 nt, Artificial Sequence
  Description of Artificial Sequence: Synthetic oligonucleotide
  Antisense strand to SEQ ID NO: 508289
acuucccguaaaucccacc

SEQ ID NO: 508291 - RNA, 19 nt, Artificial Sequence
  Description of Artificial Sequence: Synthetic oligonucleotide
  Sense strand starting at position 3652 of SEQ ID NO: 317738
ggaaguugucccuggauug

SEQ ID NO: 508292 - RNA, 19 nt, Artificial Sequence
  Description of Artificial Sequence: Synthetic oligonucleotide
  Antisense strand to SEQ ID NO: 508291
caauccagggacaacuucc

SEQ ID NO: 508293 - RNA, 19 nt, Artificial Sequence
  Description of Artificial Sequence: Synthetic oligonucleotide
  Sense strand starting at position 3653 of SEQ ID NO: 317738
gaaguugucccuggauugu

SEQ ID NO: 508294 - RNA, 19 nt, Artificial Sequence
  Description of Artificial Sequence: Synthetic oligonucleotide
  Antisense strand to SEQ ID NO: 508293
acaauccagggacaacuuc

SEQ ID NO: 508295 - RNA, 19 nt, Artificial Sequence
  Description of Artificial Sequence: Synthetic oligonucleotide
  Sense strand starting at position 3662 of SEQ ID NO: 317738
ccuggauugugagauuuaa

SEQ ID NO: 508296 - RNA, 19 nt, Artificial Sequence
  Description of Artificial Sequence: Synthetic oligonucleotide
  Antisense strand to SEQ ID NO: 508295
uuaaaucucacaauccagg

SEQ ID NO: 508297 - RNA, 19 nt, Artificial Sequence
  Description of Artificial Sequence: Synthetic oligonucleotide
  Sense strand starting at position 3742 of SEQ ID NO: 317738
gggaguugccucuggcauc

SEQ ID NO: 508298 - RNA, 19 nt, Artificial Sequence
  Description of Artificial Sequence: Synthetic oligonucleotide
  Antisense strand to SEQ ID NO: 508297
gaugccagaggcaacuccc

SEQ ID NO: 508299 - RNA, 19 nt, Artificial Sequence
  Description of Artificial Sequence: Synthetic oligonucleotide
  Sense strand starting at position 3788 of SEQ ID NO: 317738
cuacguugguaugccaaau

SEQ ID NO: 508300 - RNA, 19 nt, Artificial Sequence
  Description of Artificial Sequence: Synthetic oligonucleotide
  Antisense strand to SEQ ID NO: 508299
auuuggcauaccaacguag

SEQ ID NO: 508301 - RNA, 19 nt, Artificial Sequence
  Description of Artificial Sequence: Synthetic oligonucleotide
  Sense strand starting at position 3830 of SEQ ID NO: 317738
aaggaaagguugcaaugua

SEQ ID NO: 508302 - RNA, 19 nt, Artificial Sequence
  Description of Artificial Sequence: Synthetic oligonucleotide
  Antisense strand to SEQ ID NO: 508301
uacauugcaaccuuuccuu

SEQ ID NO: 508303 - RNA, 19 nt, Artificial Sequence
  Description of Artificial Sequence: Synthetic oligonucleotide
  Sense strand starting at position 3885 of SEQ ID NO: 317738
gcaugugggcauggagaau

SEQ ID NO: 508304 - RNA, 19 nt, Artificial Sequence
  Description of Artificial Sequence: Synthetic oligonucleotide
  Antisense strand to SEQ ID NO: 508303
auucuccaugcccacaugc

SEQ ID NO: 508305 - RNA, 19 nt, Artificial Sequence
  Description of Artificial Sequence: Synthetic oligonucleotide
  Sense strand starting at position 178 of SEQ ID NO: 317739
ggaugagguuccuuccuca

SEQ ID NO: 508306 - RNA, 19 nt, Artificial Sequence
  Description of Artificial Sequence: Synthetic oligonucleotide
  Antisense strand to SEQ ID NO: 508305
ugaggaaggaaccucaucc

SEQ ID NO: 508307 - RNA, 19 nt, Artificial Sequence
  Description of Artificial Sequence: Synthetic oligonucleotide
  Sense strand starting at position 217 of SEQ ID NO: 317739
uagggcuuacaauggaaau

SEQ ID NO: 508308 - RNA, 19 nt, Artificial Sequence
  Description of Artificial Sequence: Synthetic oligonucleotide
  Antisense strand to SEQ ID NO: 508307
auuuccauuguaagcccua

SEQ ID NO: 508309 - RNA, 19 nt, Artificial Sequence
  Description of Artificial Sequence: Synthetic oligonucleotide
  Sense strand starting at position 283 of SEQ ID NO: 317739
caauuuagcguuuguguua

SEQ ID NO: 508310 - RNA, 19 nt, Artificial Sequence
  Description of Artificial Sequence: Synthetic oligonucleotide
  Antisense strand to SEQ ID NO: 508309
uaacacaaacgcuaaauug

SEQ ID NO: 508311 - RNA, 19 nt, Artificial Sequence
  Description of Artificial Sequence: Synthetic oligonucleotide
  Sense strand starting at position 284 of SEQ ID NO: 317739
aauuuagcguuuguguuaa

SEQ ID NO: 508312 - RNA, 19 nt, Artificial Sequence
  Description of Artificial Sequence: Synthetic oligonucleotide
  Antisense strand to SEQ ID NO: 508311
uuaacacaaacgcuaaauu

SEQ ID NO: 508313 - RNA, 19 nt, Artificial Sequence
  Description of Artificial Sequence: Synthetic oligonucleotide
  Sense strand starting at position 296 of SEQ ID NO: 317739
guguuaagaucuucucuaa

SEQ ID NO: 508314 - RNA, 19 nt, Artificial Sequence
  Description of Artificial Sequence: Synthetic oligonucleotide
  Antisense strand to SEQ ID NO: 508313
uuagagaagaucuuaacac

SEQ ID NO: 508315 - RNA, 19 nt, Artificial Sequence
  Description of Artificial Sequence: Synthetic oligonucleotide
  Sense strand starting at position 364 of SEQ ID NO: 317739
gggcccacauaugauuuaa

SEQ ID NO: 508316 - RNA, 19 nt, Artificial Sequence
  Description of Artificial Sequence: Synthetic oligonucleotide
  Antisense strand to SEQ ID NO: 508315
uuaaaucauaugugggccc

SEQ ID NO: 508317 - RNA, 19 nt, Artificial Sequence
  Description of Artificial Sequence: Synthetic oligonucleotide
  Sense strand starting at position 379 of SEQ ID NO: 317739
uuaaguacacagugaaacu

SEQ ID NO: 508318 - RNA, 19 nt, Artificial Sequence
  Description of Artificial Sequence: Synthetic oligonucleotide
  Antisense strand to SEQ ID NO: 508317
aguuucacuguguacuuaa

SEQ ID NO: 508319 - RNA, 19 nt, Artificial Sequence
  Description of Artificial Sequence: Synthetic oligonucleotide
  Sense strand starting at position 447 of SEQ ID NO: 317739
ccacuaagaguauggcaaa

SEQ ID NO: 508320 - RNA, 19 nt, Artificial Sequence
  Description of Artificial Sequence: Synthetic oligonucleotide
  Antisense strand to SEQ ID NO: 508319
uuugccauacucuuagugg

SEQ ID NO: 508321 - RNA, 19 nt, Artificial Sequence
  Description of Artificial Sequence: Synthetic oligonucleotide
  Sense strand starting at position 565 of SEQ ID NO: 317739
uuaaccaauugugucagau

SEQ ID NO: 508322 - RNA, 19 nt, Artificial Sequence
  Description of Artificial Sequence: Synthetic oligonucleotide
  Antisense strand to SEQ ID NO: 508321
aucugacacaauugguuaa

SEQ ID NO: 508323 - RNA, 19 nt, Artificial Sequence
  Description of Artificial Sequence: Synthetic oligonucleotide
  Sense strand starting at position 596 of SEQ ID NO: 317739
agaggugguucacuagaaa

SEQ ID NO: 508324 - RNA, 19 nt, Artificial Sequence
  Description of Artificial Sequence: Synthetic oligonucleotide
  Antisense strand to SEQ ID NO: 508323
uuucuagugaaccaccucu

SEQ ID NO: 508325 - RNA, 19 nt, Artificial Sequence
  Description of Artificial Sequence: Synthetic oligonucleotide
  Sense strand starting at position 677 of SEQ ID NO: 317739
caacuccagcagugugaaa

SEQ ID NO: 508326 - RNA, 19 nt, Artificial Sequence
  Description of Artificial Sequence: Synthetic oligonucleotide
  Antisense strand to SEQ ID NO: 508325
uuucacacugcuggaguug

SEQ ID NO: 508327 - RNA, 19 nt, Artificial Sequence
  Description of Artificial Sequence: Synthetic oligonucleotide
  Sense strand starting at position 976 of SEQ ID NO: 317739
ggguggagugguggaauua

SEQ ID NO: 508328 - RNA, 19 nt, Artificial Sequence
  Description of Artificial Sequence: Synthetic oligonucleotide
  Antisense strand to SEQ ID NO: 508327
uaauuccaccacuccaccc

SEQ ID NO: 508329 - RNA, 19 nt, Artificial Sequence
  Description of Artificial Sequence: Synthetic oligonucleotide
  Sense strand starting at position 977 of SEQ ID NO: 317739
gguggagugguggaauuaa

SEQ ID NO: 508330 - RNA, 19 nt, Artificial Sequence
  Description of Artificial Sequence: Synthetic oligonucleotide
  Antisense strand to SEQ ID NO: 508329
uuaauuccaccacuccacc

SEQ ID NO: 508331 - RNA, 19 nt, Artificial Sequence
  Description of Artificial Sequence: Synthetic oligonucleotide
  Sense strand starting at position 1253 of SEQ ID NO: 317739
acagcaauucaccgggagu

SEQ ID NO: 508332 - RNA, 19 nt, Artificial Sequence
  Description of Artificial Sequence: Synthetic oligonucleotide
  Antisense strand to SEQ ID NO: 508331
acucccggugaauugcugu

SEQ ID NO: 508333 - RNA, 19 nt, Artificial Sequence
  Description of Artificial Sequence: Synthetic oligonucleotide
  Sense strand starting at position 1323 of SEQ ID NO: 317739
caggaugucgcugacucaa

SEQ ID NO: 508334 - RNA, 19 nt, Artificial Sequence
  Description of Artificial Sequence: Synthetic oligonucleotide
  Antisense strand to SEQ ID NO: 508333
uugagucagcgacauccug

SEQ ID NO: 508335 - RNA, 19 nt, Artificial Sequence
  Description of Artificial Sequence: Synthetic oligonucleotide
  Sense strand starting at position 1865 of SEQ ID NO: 317739
cuggaaauuucagcggucu

SEQ ID NO: 508336 - RNA, 19 nt, Artificial Sequence
  Description of Artificial Sequence: Synthetic oligonucleotide
  Antisense strand to SEQ ID NO: 508335
agaccgcugaaauuuccag

SEQ ID NO: 508337 - RNA, 19 nt, Artificial Sequence
  Description of Artificial Sequence: Synthetic oligonucleotide
  Sense strand starting at position 2267 of SEQ ID NO: 317739
guuguauagaugcagauaa

SEQ ID NO: 508338 - RNA, 19 nt, Artificial Sequence
  Description of Artificial Sequence: Synthetic oligonucleotide
  Antisense strand to SEQ ID NO: 508337
uuaucugcaucuauacaac

SEQ ID NO: 508339 - RNA, 19 nt, Artificial Sequence
  Description of Artificial Sequence: Synthetic oligonucleotide
  Sense strand starting at position 2304 of SEQ ID NO: 317739
ugcagauguccucaccuau

SEQ ID NO: 508340 - RNA, 19 nt, Artificial Sequence
  Description of Artificial Sequence: Synthetic oligonucleotide
  Antisense strand to SEQ ID NO: 508339
auaggugaggacaucugca

SEQ ID NO: 508341 - RNA, 19 nt, Artificial Sequence
  Description of Artificial Sequence: Synthetic oligonucleotide
  Sense strand starting at position 2320 of SEQ ID NO: 317739
uaucguauggaacgauaau

SEQ ID NO: 508342 - RNA, 19 nt, Artificial Sequence
  Description of Artificial Sequence: Synthetic oligonucleotide
  Antisense strand to SEQ ID NO: 508341
auuaucguuccauacgaua

SEQ ID NO: 508343 - RNA, 19 nt, Artificial Sequence
  Description of Artificial Sequence: Synthetic oligonucleotide
  Sense strand starting at position 2321 of SEQ ID NO: 317739
aucguauggaacgauaaua

SEQ ID NO: 508344 - RNA, 19 nt, Artificial Sequence
  Description of Artificial Sequence: Synthetic oligonucleotide
  Antisense strand to SEQ ID NO: 508343
uauuaucguuccauacgau

SEQ ID NO: 508345 - RNA, 19 nt, Artificial Sequence
  Description of Artificial Sequence: Synthetic oligonucleotide
  Sense strand starting at position 2341 of SEQ ID NO: 317739
cugccuuccaguguuaguu

SEQ ID NO: 508346 - RNA, 19 nt, Artificial Sequence
  Description of Artificial Sequence: Synthetic oligonucleotide
  Antisense strand to SEQ ID NO: 508345
aacuaacacuggaaggcag

SEQ ID NO: 508347 - RNA, 19 nt, Artificial Sequence
  Description of Artificial Sequence: Synthetic oligonucleotide
  Sense strand starting at position 2342 of SEQ ID NO: 317739
ugccuuccaguguuaguuu

SEQ ID NO: 508348 - RNA, 19 nt, Artificial Sequence
  Description of Artificial Sequence: Synthetic oligonucleotide
  Antisense strand to SEQ ID NO: 508347
aaacuaacacuggaaggca

SEQ ID NO: 508349 - RNA, 19 nt, Artificial Sequence
  Description of Artificial Sequence: Synthetic oligonucleotide
  Sense strand starting at position 2355 of SEQ ID NO: 317739
uaguuugaggguuaaguga

SEQ ID NO: 508350 - RNA, 19 nt, Artificial Sequence
  Description of Artificial Sequence: Synthetic oligonucleotide
  Antisense strand to SEQ ID NO: 508349
ucacuuaacccucaaacua

SEQ ID NO: 508351 - RNA, 19 nt, Artificial Sequence
  Description of Artificial Sequence: Synthetic oligonucleotide
  Sense strand starting at position 2403 of SEQ ID NO: 317739
ccaagugcuccauaacugu

SEQ ID NO: 508352 - RNA, 19 nt, Artificial Sequence
  Description of Artificial Sequence: Synthetic oligonucleotide
  Antisense strand to SEQ ID NO: 508351
acaguuauggagcacuugg

SEQ ID NO: 508353 - RNA, 19 nt, Artificial Sequence
  Description of Artificial Sequence: Synthetic oligonucleotide
  Sense strand starting at position 2453 of SEQ ID NO: 317739
gaaugauaauaguaaagag

SEQ ID NO: 508354 - RNA, 19 nt, Artificial Sequence
  Description of Artificial Sequence: Synthetic oligonucleotide
  Antisense strand to SEQ ID NO: 508353
cucuuuacuauuaucauuc

SEQ ID NO: 508355 - RNA, 19 nt, Artificial Sequence
  Description of Artificial Sequence: Synthetic oligonucleotide
  Sense strand starting at position 2562 of SEQ ID NO: 317739
agaggaaucucugccacug

SEQ ID NO: 508356 - RNA, 19 nt, Artificial Sequence
  Description of Artificial Sequence: Synthetic oligonucleotide
  Antisense strand to SEQ ID NO: 508355
caguggcagagauuccucu

SEQ ID NO: 508357 - RNA, 19 nt, Artificial Sequence
  Description of Artificial Sequence: Synthetic oligonucleotide
  Sense strand starting at position 2628 of SEQ ID NO: 317739
ugaggaguuuaggcuuuca

SEQ ID NO: 508358 - RNA, 19 nt, Artificial Sequence
  Description of Artificial Sequence: Synthetic oligonucleotide
  Antisense strand to SEQ ID NO: 508357
ugaaagccuaaacuccuca

SEQ ID NO: 508359 - RNA, 19 nt, Artificial Sequence
  Description of Artificial Sequence: Synthetic oligonucleotide
  Sense strand starting at position 2737 of SEQ ID NO: 317739
aucacaauuguuggguauu

SEQ ID NO: 508360 - RNA, 19 nt, Artificial Sequence
  Description of Artificial Sequence: Synthetic oligonucleotide
  Antisense strand to SEQ ID NO: 508359
aauacccaacaauugugau

SEQ ID NO: 508361 - RNA, 19 nt, Artificial Sequence
  Description of Artificial Sequence: Synthetic oligonucleotide
  Sense strand starting at position 2853 of SEQ ID NO: 317739
ccagcuguaugaucuuaga

SEQ ID NO: 508362 - RNA, 19 nt, Artificial Sequence
  Description of Artificial Sequence: Synthetic oligonucleotide
  Antisense strand to SEQ ID NO: 508361
ucuaagaucauacagcugg

SEQ ID NO: 508363 - RNA, 19 nt, Artificial Sequence
  Description of Artificial Sequence: Synthetic oligonucleotide
  Sense strand starting at position 2978 of SEQ ID NO: 317739
uuaagauucugugcuuaug

SEQ ID NO: 508364 - RNA, 19 nt, Artificial Sequence
  Description of Artificial Sequence: Synthetic oligonucleotide
  Antisense strand to SEQ ID NO: 508363
cauaagcacagaaucuuaa

SEQ ID NO: 508365 - RNA, 19 nt, Artificial Sequence
  Description of Artificial Sequence: Synthetic oligonucleotide
  Sense strand starting at position 3044 of SEQ ID NO: 317739
ugguuaacuacagggaguu

SEQ ID NO: 508366 - RNA, 19 nt, Artificial Sequence
  Description of Artificial Sequence: Synthetic oligonucleotide
  Antisense strand to SEQ ID NO: 508365
aacucccuguaguuaacca

SEQ ID NO: 508367 - RNA, 19 nt, Artificial Sequence
  Description of Artificial Sequence: Synthetic oligonucleotide
  Sense strand starting at position 3045 of SEQ ID NO: 317739
gguuaacuacagggaguuu

SEQ ID NO: 508368 - RNA, 19 nt, Artificial Sequence
  Description of Artificial Sequence: Synthetic oligonucleotide
  Antisense strand to SEQ ID NO: 508367
aaacucccuguaguuaacc

SEQ ID NO: 508369 - RNA, 19 nt, Artificial Sequence
  Description of Artificial Sequence: Synthetic oligonucleotide
  Sense strand starting at position 3057 of SEQ ID NO: 317739
ggaguuucuaaaggugaag

SEQ ID NO: 508370 - RNA, 19 nt, Artificial Sequence
  Description of Artificial Sequence: Synthetic oligonucleotide
  Antisense strand to SEQ ID NO: 508369
cuucaccuuuagaaacucc

SEQ ID NO: 508371 - RNA, 19 nt, Artificial Sequence
  Description of Artificial Sequence: Synthetic oligonucleotide
  Sense strand starting at position 3059 of SEQ ID NO: 317739
aguuucuaaaggugaagaa

SEQ ID NO: 508372 - RNA, 19 nt, Artificial Sequence
  Description of Artificial Sequence: Synthetic oligonucleotide
  Antisense strand to SEQ ID NO: 508371
uucuucaccuuuagaaacu

SEQ ID NO: 508373 - RNA, 19 nt, Artificial Sequence
  Description of Artificial Sequence: Synthetic oligonucleotide
  Sense strand starting at position 3173 of SEQ ID NO: 317739
aucuuuauaucaccagugu

SEQ ID NO: 508374 - RNA, 19 nt, Artificial Sequence
  Description of Artificial Sequence: Synthetic oligonucleotide
  Antisense strand to SEQ ID NO: 508373
acacuggugauauaaagau

SEQ ID NO: 508375 - RNA, 19 nt, Artificial Sequence
  Description of Artificial Sequence: Synthetic oligonucleotide
  Sense strand starting at position 3174 of SEQ ID NO: 317739
ucuuuauaucaccaguguu

SEQ ID NO: 508376 - RNA, 19 nt, Artificial Sequence
  Description of Artificial Sequence: Synthetic oligonucleotide
  Antisense strand to SEQ ID NO: 508375
aacacuggugauauaaaga

SEQ ID NO: 508377 - RNA, 19 nt, Artificial Sequence
  Description of Artificial Sequence: Synthetic oligonucleotide
  Sense strand starting at position 3177 of SEQ ID NO: 317739
uuauaucaccaguguuaaa

SEQ ID NO: 508378 - RNA, 19 nt, Artificial Sequence
  Description of Artificial Sequence: Synthetic oligonucleotide
  Antisense strand to SEQ ID NO: 508377
uuuaacacuggugauauaa

SEQ ID NO: 508379 - RNA, 19 nt, Artificial Sequence
  Description of Artificial Sequence: Synthetic oligonucleotide
  Sense strand starting at position 3628 of SEQ ID NO: 317739
guucuuauuaaguguuaga

SEQ ID NO: 508380 - RNA, 19 nt, Artificial Sequence
  Description of Artificial Sequence: Synthetic oligonucleotide
  Antisense strand to SEQ ID NO: 508379
ucuaacacuuaauaagaac

SEQ ID NO: 508381 - RNA, 19 nt, Artificial Sequence
  Description of Artificial Sequence: Synthetic oligonucleotide
  Sense strand starting at position 3635 of SEQ ID NO: 317739
uuaaguguuagagaagugu

SEQ ID NO: 508382 - RNA, 19 nt, Artificial Sequence
  Description of Artificial Sequence: Synthetic oligonucleotide
  Antisense strand to SEQ ID NO: 508381
acacuucucuaacacuuaa

SEQ ID NO: 508383 - RNA, 19 nt, Artificial Sequence
  Description of Artificial Sequence: Synthetic oligonucleotide
  Sense strand starting at position 3899 of SEQ ID NO: 317739
agacuaucuugacagaaag

SEQ ID NO: 508384 - RNA, 19 nt, Artificial Sequence
  Description of Artificial Sequence: Synthetic oligonucleotide
  Antisense strand to SEQ ID NO: 508383
cuuucugucaagauagucu

SEQ ID NO: 508385 - RNA, 19 nt, Artificial Sequence
  Description of Artificial Sequence: Synthetic oligonucleotide
  Sense strand starting at position 276 of SEQ ID NO: 317740
gugacaucauggcugugau

SEQ ID NO: 508386 - RNA, 19 nt, Artificial Sequence
  Description of Artificial Sequence: Synthetic oligonucleotide
  Antisense strand to SEQ ID NO: 508385
aucacagccaugaugucac

SEQ ID NO: 508387 - RNA, 19 nt, Artificial Sequence
  Description of Artificial Sequence: Synthetic oligonucleotide
  Sense strand starting at position 277 of SEQ ID NO: 317740
ugacaucauggcugugauc

SEQ ID NO: 508388 - RNA, 19 nt, Artificial Sequence
  Description of Artificial Sequence: Synthetic oligonucleotide
  Antisense strand to SEQ ID NO: 508387
gaucacagccaugauguca

SEQ ID NO: 508389 - RNA, 19 nt, Artificial Sequence
  Description of Artificial Sequence: Synthetic oligonucleotide
  Sense strand starting at position 279 of SEQ ID NO: 317740
acaucauggcugugaucuc

SEQ ID NO: 508390 - RNA, 19 nt, Artificial Sequence
  Description of Artificial Sequence: Synthetic oligonucleotide
  Antisense strand to SEQ ID NO: 508389
gagaucacagccaugaugu

SEQ ID NO: 508391 - RNA, 19 nt, Artificial Sequence
  Description of Artificial Sequence: Synthetic oligonucleotide
  Sense strand starting at position 432 of SEQ ID NO: 317740
agaauucuguaaucuggaa

SEQ ID NO: 508392 - RNA, 19 nt, Artificial Sequence
  Description of Artificial Sequence: Synthetic oligonucleotide
  Antisense strand to SEQ ID NO: 508391
uuccagauuacagaauucu

SEQ ID NO: 508393 - RNA, 19 nt, Artificial Sequence
  Description of Artificial Sequence: Synthetic oligonucleotide
  Sense strand starting at position 436 of SEQ ID NO: 317740
uucuguaaucuggaaagca

SEQ ID NO: 508394 - RNA, 19 nt, Artificial Sequence
  Description of Artificial Sequence: Synthetic oligonucleotide
  Antisense strand to SEQ ID NO: 508393
ugcuuuccagauuacagaa

SEQ ID NO: 508395 - RNA, 19 nt, Artificial Sequence
  Description of Artificial Sequence: Synthetic oligonucleotide
  Sense strand starting at position 708 of SEQ ID NO: 317740
agaggacucagccauguua

SEQ ID NO: 508396 - RNA, 19 nt, Artificial Sequence
  Description of Artificial Sequence: Synthetic oligonucleotide
  Antisense strand to SEQ ID NO: 508395
uaacauggcugaguccucu

SEQ ID NO: 508397 - RNA, 19 nt, Artificial Sequence
  Description of Artificial Sequence: Synthetic oligonucleotide
  Sense strand starting at position 710 of SEQ ID NO: 317740
aggacucagccauguuaaa

SEQ ID NO: 508398 - RNA, 19 nt, Artificial Sequence
  Description of Artificial Sequence: Synthetic oligonucleotide
  Antisense strand to SEQ ID NO: 508397
uuuaacauggcugaguccu

SEQ ID NO: 508399 - RNA, 19 nt, Artificial Sequence
  Description of Artificial Sequence: Synthetic oligonucleotide
  Sense strand starting at position 881 of SEQ ID NO: 317740
ccaucaggccucugcagau

SEQ ID NO: 508400 - RNA, 19 nt, Artificial Sequence
  Description of Artificial Sequence: Synthetic oligonucleotide
  Antisense strand to SEQ ID NO: 508399
aucugcagaggccugaugg

SEQ ID NO: 508401 - RNA, 19 nt, Artificial Sequence
  Description of Artificial Sequence: Synthetic oligonucleotide
  Sense strand starting at position 898 of SEQ ID NO: 317740
augacuuccuaggagacuu

SEQ ID NO: 508402 - RNA, 19 nt, Artificial Sequence
  Description of Artificial Sequence: Synthetic oligonucleotide
  Antisense strand to SEQ ID NO: 508401
aagucuccuaggaagucau

SEQ ID NO: 508403 - RNA, 19 nt, Artificial Sequence
  Description of Artificial Sequence: Synthetic oligonucleotide
  Sense strand starting at position 1033 of SEQ ID NO: 317740
gcuugauccugagagacaa

SEQ ID NO: 508404 - RNA, 19 nt, Artificial Sequence
  Description of Artificial Sequence: Synthetic oligonucleotide
  Antisense strand to SEQ ID NO: 508403
uugucucucaggaucaagc

SEQ ID NO: 508405 - RNA, 19 nt, Artificial Sequence
  Description of Artificial Sequence: Synthetic oligonucleotide
  Sense strand starting at position 1098 of SEQ ID NO: 317740
agacccagugcucgugaau

SEQ ID NO: 508406 - RNA, 19 nt, Artificial Sequence
  Description of Artificial Sequence: Synthetic oligonucleotide
  Antisense strand to SEQ ID NO: 508405
auucacgagcacugggucu

SEQ ID NO: 508407 - RNA, 19 nt, Artificial Sequence
  Description of Artificial Sequence: Synthetic oligonucleotide
  Sense strand starting at position 1101 of SEQ ID NO: 317740
cccagugcucgugaaugac

SEQ ID NO: 508408 - RNA, 19 nt, Artificial Sequence
  Description of Artificial Sequence: Synthetic oligonucleotide
  Antisense strand to SEQ ID NO: 508407
gucauucacgagcacuggg

SEQ ID NO: 508409 - RNA, 19 nt, Artificial Sequence
  Description of Artificial Sequence: Synthetic oligonucleotide
  Sense strand starting at position 1104 of SEQ ID NO: 317740
agugcucgugaaugacaca

SEQ ID NO: 508410 - RNA, 19 nt, Artificial Sequence
  Description of Artificial Sequence: Synthetic oligonucleotide
  Antisense strand to SEQ ID NO: 508409
ugugucauucacgagcacu

SEQ ID NO: 508411 - RNA, 19 nt, Artificial Sequence
  Description of Artificial Sequence: Synthetic oligonucleotide
  Sense strand starting at position 1166 of SEQ ID NO: 317740
ugguuucuaaagugcguaa

SEQ ID NO: 508412 - RNA, 19 nt, Artificial Sequence
  Description of Artificial Sequence: Synthetic oligonucleotide
  Antisense strand to SEQ ID NO: 508411
uuacgcacuuuagaaacca

SEQ ID NO: 508413 - RNA, 19 nt, Artificial Sequence
  Description of Artificial Sequence: Synthetic oligonucleotide
  Sense strand starting at position 1168 of SEQ ID NO: 317740
guuucuaaagugcguaaua

SEQ ID NO: 508414 - RNA, 19 nt, Artificial Sequence
  Description of Artificial Sequence: Synthetic oligonucleotide
  Antisense strand to SEQ ID NO: 508413
uauuacgcacuuuagaaac

SEQ ID NO: 508415 - RNA, 19 nt, Artificial Sequence
  Description of Artificial Sequence: Synthetic oligonucleotide
  Sense strand starting at position 1169 of SEQ ID NO: 317740
uuucuaaagugcguaauaa

SEQ ID NO: 508416 - RNA, 19 nt, Artificial Sequence
  Description of Artificial Sequence: Synthetic oligonucleotide
  Antisense strand to SEQ ID NO: 508415
uuauuacgcacuuuagaaa

SEQ ID NO: 508417 - RNA, 19 nt, Artificial Sequence
  Description of Artificial Sequence: Synthetic oligonucleotide
  Sense strand starting at position 1170 of SEQ ID NO: 317740
uucuaaagugcguaauaac

SEQ ID NO: 508418 - RNA, 19 nt, Artificial Sequence
  Description of Artificial Sequence: Synthetic oligonucleotide
  Antisense strand to SEQ ID NO: 508417
guuauuacgcacuuuagaa

SEQ ID NO: 508419 - RNA, 19 nt, Artificial Sequence
  Description of Artificial Sequence: Synthetic oligonucleotide
  Sense strand starting at position 1195 of SEQ ID NO: 317740
cugguuuccuucucuggaa

SEQ ID NO: 508420 - RNA, 19 nt, Artificial Sequence
  Description of Artificial Sequence: Synthetic oligonucleotide
  Antisense strand to SEQ ID NO: 508419
uuccagagaaggaaaccag

SEQ ID NO: 508421 - RNA, 19 nt, Artificial Sequence
  Description of Artificial Sequence: Synthetic oligonucleotide
  Sense strand starting at position 1197 of SEQ ID NO: 317740
gguuuccuucucuggaaag

SEQ ID NO: 508422 - RNA, 19 nt, Artificial Sequence
  Description of Artificial Sequence: Synthetic oligonucleotide
  Antisense strand to SEQ ID NO: 508421
cuuuccagagaaggaaacc

SEQ ID NO: 508423 - RNA, 19 nt, Artificial Sequence
  Description of Artificial Sequence: Synthetic oligonucleotide
  Sense strand starting at position 1322 of SEQ ID NO: 317740
ggaggauucugcuuccgag

SEQ ID NO: 508424 - RNA, 19 nt, Artificial Sequence
  Description of Artificial Sequence: Synthetic oligonucleotide
  Antisense strand to SEQ ID NO: 508423
cucggaagcagaauccucc

SEQ ID NO: 508425 - RNA, 19 nt, Artificial Sequence
  Description of Artificial Sequence: Synthetic oligonucleotide
  Sense strand starting at position 1579 of SEQ ID NO: 317740
gggagcuuggguuggaaau

SEQ ID NO: 508426 - RNA, 19 nt, Artificial Sequence
  Description of Artificial Sequence: Synthetic oligonucleotide
  Antisense strand to SEQ ID NO: 508425
auuuccaacccaagcuccc

SEQ ID NO: 508427 - RNA, 19 nt, Artificial Sequence
  Description of Artificial Sequence: Synthetic oligonucleotide
  Sense strand starting at position 1644 of SEQ ID NO: 317740
ugaugagaguucccaucac

SEQ ID NO: 508428 - RNA, 19 nt, Artificial Sequence
  Description of Artificial Sequence: Synthetic oligonucleotide
  Antisense strand to SEQ ID NO: 508427
gugaugggaacucucauca

SEQ ID NO: 508429 - RNA, 19 nt, Artificial Sequence
  Description of Artificial Sequence: Synthetic oligonucleotide
  Sense strand starting at position 1801 of SEQ ID NO: 317740
aauguagaggcguaagaua

SEQ ID NO: 508430 - RNA, 19 nt, Artificial Sequence
  Description of Artificial Sequence: Synthetic oligonucleotide
  Antisense strand to SEQ ID NO: 508429
uaucuuacgccucuacauu

SEQ ID NO: 508431 - RNA, 19 nt, Artificial Sequence
  Description of Artificial Sequence: Synthetic oligonucleotide
  Sense strand starting at position 1809 of SEQ ID NO: 317740
ggcguaagauaaucaggau

SEQ ID NO: 508432 - RNA, 19 nt, Artificial Sequence
  Description of Artificial Sequence: Synthetic oligonucleotide
  Antisense strand to SEQ ID NO: 508431
auccugauuaucuuacgcc

SEQ ID NO: 508433 - RNA, 19 nt, Artificial Sequence
  Description of Artificial Sequence: Synthetic oligonucleotide
  Sense strand starting at position 1810 of SEQ ID NO: 317740
gcguaagauaaucaggauc

SEQ ID NO: 508434 - RNA, 19 nt, Artificial Sequence
  Description of Artificial Sequence: Synthetic oligonucleotide
  Antisense strand to SEQ ID NO: 508433
gauccugauuaucuuacgc

SEQ ID NO: 508435 - RNA, 19 nt, Artificial Sequence
  Description of Artificial Sequence: Synthetic oligonucleotide
  Sense strand starting at position 1884 of SEQ ID NO: 317740
ggcacagcucuguaccaau

SEQ ID NO: 508436 - RNA, 19 nt, Artificial Sequence
  Description of Artificial Sequence: Synthetic oligonucleotide
  Antisense strand to SEQ ID NO: 508435
auugguacagagcugugcc

SEQ ID NO: 508437 - RNA, 19 nt, Artificial Sequence
  Description of Artificial Sequence: Synthetic oligonucleotide
  Sense strand starting at position 2226 of SEQ ID NO: 317740
guaccugguucauuggaga

SEQ ID NO: 508438 - RNA, 19 nt, Artificial Sequence
  Description of Artificial Sequence: Synthetic oligonucleotide
  Antisense strand to SEQ ID NO: 508437
ucuccaaugaaccagguac

SEQ ID NO: 508439 - RNA, 19 nt, Artificial Sequence
  Description of Artificial Sequence: Synthetic oligonucleotide
  Sense strand starting at position 2240 of SEQ ID NO: 317740
ggagaucucugcucagacu

SEQ ID NO: 508440 - RNA, 19 nt, Artificial Sequence
  Description of Artificial Sequence: Synthetic oligonucleotide
  Antisense strand to SEQ ID NO: 508439
agucugagcagagaucucc

SEQ ID NO: 508441 - RNA, 19 nt, Artificial Sequence
  Description of Artificial Sequence: Synthetic oligonucleotide
  Sense strand starting at position 2304 of SEQ ID NO: 317740
uccuguuauuuccagggau

SEQ ID NO: 508442 - RNA, 19 nt, Artificial Sequence
  Description of Artificial Sequence: Synthetic oligonucleotide
  Antisense strand to SEQ ID NO: 508441
aucccuggaaauaacagga

SEQ ID NO: 508443 - RNA, 19 nt, Artificial Sequence
  Description of Artificial Sequence: Synthetic oligonucleotide
  Sense strand starting at position 2319 of SEQ ID NO: 317740
ggauuauugcuccaggguc

SEQ ID NO: 508444 - RNA, 19 nt, Artificial Sequence
  Description of Artificial Sequence: Synthetic oligonucleotide
  Antisense strand to SEQ ID NO: 508443
gacccuggagcaauaaucc

SEQ ID NO: 508445 - RNA, 19 nt, Artificial Sequence
  Description of Artificial Sequence: Synthetic oligonucleotide
  Sense strand starting at position 2680 of SEQ ID NO: 317740
cuggcucuggcagaaugaa

SEQ ID NO: 508446 - RNA, 19 nt, Artificial Sequence
  Description of Artificial Sequence: Synthetic oligonucleotide
  Antisense strand to SEQ ID NO: 508445
uucauucugccagagccag

SEQ ID NO: 508447 - RNA, 19 nt, Artificial Sequence
  Description of Artificial Sequence: Synthetic oligonucleotide
  Sense strand starting at position 3015 of SEQ ID NO: 317740
ucacgucucgacuauuaga

SEQ ID NO: 508448 - RNA, 19 nt, Artificial Sequence
  Description of Artificial Sequence: Synthetic oligonucleotide
  Antisense strand to SEQ ID NO: 508447
ucuaauagucgagacguga

SEQ ID NO: 508449 - RNA, 19 nt, Artificial Sequence
  Description of Artificial Sequence: Synthetic oligonucleotide
  Sense strand starting at position 3044 of SEQ ID NO: 317740
caagaugcauguuccugau

SEQ ID NO: 508450 - RNA, 19 nt, Artificial Sequence
  Description of Artificial Sequence: Synthetic oligonucleotide
  Antisense strand to SEQ ID NO: 508449
aucaggaacaugcaucuug

SEQ ID NO: 508451 - RNA, 19 nt, Artificial Sequence
  Description of Artificial Sequence: Synthetic oligonucleotide
  Sense strand starting at position 3070 of SEQ ID NO: 317740
aguugcuuacauggugauu

SEQ ID NO: 508452 - RNA, 19 nt, Artificial Sequence
  Description of Artificial Sequence: Synthetic oligonucleotide
  Antisense strand to SEQ ID NO: 508451
aaucaccauguaagcaacu

SEQ ID NO: 508453 - RNA, 19 nt, Artificial Sequence
  Description of Artificial Sequence: Synthetic oligonucleotide
  Sense strand starting at position 3084 of SEQ ID NO: 317740
ugauucuugcaagaugcau

SEQ ID NO: 508454 - RNA, 19 nt, Artificial Sequence
  Description of Artificial Sequence: Synthetic oligonucleotide
  Antisense strand to SEQ ID NO: 508453
augcaucuugcaagaauca

SEQ ID NO: 508455 - RNA, 19 nt, Artificial Sequence
  Description of Artificial Sequence: Synthetic oligonucleotide
  Sense strand starting at position 3133 of SEQ ID NO: 317740
ggauucuugcaagaugcau

SEQ ID NO: 508456 - RNA, 19 nt, Artificial Sequence
  Description of Artificial Sequence: Synthetic oligonucleotide
  Antisense strand to SEQ ID NO: 508455
augcaucuugcaagaaucc

SEQ ID NO: 508457 - RNA, 19 nt, Artificial Sequence
  Description of Artificial Sequence: Synthetic oligonucleotide
  Sense strand starting at position 3716 of SEQ ID NO: 317740
cauggugauucuucuuuga

SEQ ID NO: 508458 - RNA, 19 nt, Artificial Sequence
  Description of Artificial Sequence: Synthetic oligonucleotide
  Antisense strand to SEQ ID NO: 508457
ucaaagaagaaucaccaug

SEQ ID NO: 508459 - RNA, 19 nt, Artificial Sequence
  Description of Artificial Sequence: Synthetic oligonucleotide
  Sense strand starting at position 3720 of SEQ ID NO: 317740
gugauucuucuuugaguua

SEQ ID NO: 508460 - RNA, 19 nt, Artificial Sequence
  Description of Artificial Sequence: Synthetic oligonucleotide
  Antisense strand to SEQ ID NO: 508459
uaacucaaagaagaaucac

SEQ ID NO: 508461 - RNA, 19 nt, Artificial Sequence
  Description of Artificial Sequence: Synthetic oligonucleotide
  Sense strand starting at position 3723 of SEQ ID NO: 317740
auucuucuuugaguuauug

SEQ ID NO: 508462 - RNA, 19 nt, Artificial Sequence
  Description of Artificial Sequence: Synthetic oligonucleotide
  Antisense strand to SEQ ID NO: 508461
caauaacucaaagaagaau

SEQ ID NO: 508463 - RNA, 19 nt, Artificial Sequence
  Description of Artificial Sequence: Synthetic oligonucleotide
  Sense strand starting at position 3729 of SEQ ID NO: 317740
cuuugaguuauugguguuu

SEQ ID NO: 508464 - RNA, 19 nt, Artificial Sequence
  Description of Artificial Sequence: Synthetic oligonucleotide
  Antisense strand to SEQ ID NO: 508463
aaacaccaauaacucaaag

SEQ ID NO: 508465 - RNA, 19 nt, Artificial Sequence
  Description of Artificial Sequence: Synthetic oligonucleotide
  Sense strand starting at position 183 of SEQ ID NO: 317741
gauguacaguccuugaaua

SEQ ID NO: 508466 - RNA, 19 nt, Artificial Sequence
  Description of Artificial Sequence: Synthetic oligonucleotide
  Antisense strand to SEQ ID NO: 508465
uauucaaggacuguacauc

SEQ ID NO: 508467 - RNA, 19 nt, Artificial Sequence
  Description of Artificial Sequence: Synthetic oligonucleotide
  Sense strand starting at position 184 of SEQ ID NO: 317741
auguacaguccuugaauaa

SEQ ID NO: 508468 - RNA, 19 nt, Artificial Sequence
  Description of Artificial Sequence: Synthetic oligonucleotide
  Antisense strand to SEQ ID NO: 508467
uuauucaaggacuguacau

SEQ ID NO: 508469 - RNA, 19 nt, Artificial Sequence
  Description of Artificial Sequence: Synthetic oligonucleotide
  Sense strand starting at position 185 of SEQ ID NO: 317741
uguacaguccuugaauaaa

SEQ ID NO: 508470 - RNA, 19 nt, Artificial Sequence
  Description of Artificial Sequence: Synthetic oligonucleotide
  Antisense strand to SEQ ID NO: 508469
uuuauucaaggacuguaca

SEQ ID NO: 508471 - RNA, 19 nt, Artificial Sequence
  Description of Artificial Sequence: Synthetic oligonucleotide
  Sense strand starting at position 196 of SEQ ID NO: 317741
ugaauaaagcaguagcaaa

SEQ ID NO: 508472 - RNA, 19 nt, Artificial Sequence
  Description of Artificial Sequence: Synthetic oligonucleotide
  Antisense strand to SEQ ID NO: 508471
uuugcuacugcuuuauuca

SEQ ID NO: 508473 - RNA, 19 nt, Artificial Sequence
  Description of Artificial Sequence: Synthetic oligonucleotide
  Sense strand starting at position 296 of SEQ ID NO: 317741
aaggccuagcauuagagua

SEQ ID NO: 508474 - RNA, 19 nt, Artificial Sequence
  Description of Artificial Sequence: Synthetic oligonucleotide
  Antisense strand to SEQ ID NO: 508473
uacucuaaugcuaggccuu

SEQ ID NO: 508475 - RNA, 19 nt, Artificial Sequence
  Description of Artificial Sequence: Synthetic oligonucleotide
  Sense strand starting at position 301 of SEQ ID NO: 317741
cuagcauuagaguaacuga

SEQ ID NO: 508476 - RNA, 19 nt, Artificial Sequence
  Description of Artificial Sequence: Synthetic oligonucleotide
  Antisense strand to SEQ ID NO: 508475
ucaguuacucuaaugcuag

SEQ ID NO: 508477 - RNA, 19 nt, Artificial Sequence
  Description of Artificial Sequence: Synthetic oligonucleotide
  Sense strand starting at position 304 of SEQ ID NO: 317741
gcauuagaguaacugaaua

SEQ ID NO: 508478 - RNA, 19 nt, Artificial Sequence
  Description of Artificial Sequence: Synthetic oligonucleotide
  Antisense strand to SEQ ID NO: 508477
uauucaguuacucuaaugc

SEQ ID NO: 508479 - RNA, 19 nt, Artificial Sequence
  Description of Artificial Sequence: Synthetic oligonucleotide
  Sense strand starting at position 329 of SEQ ID NO: 317741
ccagcuagaguauauacaa

SEQ ID NO: 508480 - RNA, 19 nt, Artificial Sequence
  Description of Artificial Sequence: Synthetic oligonucleotide
  Antisense strand to SEQ ID NO: 508479
uuguauauacucuagcugg

SEQ ID NO: 508481 - RNA, 19 nt, Artificial Sequence
  Description of Artificial Sequence: Synthetic oligonucleotide
  Sense strand starting at position 728 of SEQ ID NO: 317741
agguuauugggcuacgaua

SEQ ID NO: 508482 - RNA, 19 nt, Artificial Sequence
  Description of Artificial Sequence: Synthetic oligonucleotide
  Antisense strand to SEQ ID NO: 508481
uaucguagcccaauaaccu

SEQ ID NO: 508483 - RNA, 19 nt, Artificial Sequence
  Description of Artificial Sequence: Synthetic oligonucleotide
  Sense strand starting at position 879 of SEQ ID NO: 317741
cuccaaauauugguagaga

SEQ ID NO: 508484 - RNA, 19 nt, Artificial Sequence
  Description of Artificial Sequence: Synthetic oligonucleotide
  Antisense strand to SEQ ID NO: 508483
ucucuaccaauauuuggag

SEQ ID NO: 508485 - RNA, 19 nt, Artificial Sequence
  Description of Artificial Sequence: Synthetic oligonucleotide
  Sense strand starting at position 915 of SEQ ID NO: 317741
auaagcuaguccucagaau

SEQ ID NO: 508486 - RNA, 19 nt, Artificial Sequence
  Description of Artificial Sequence: Synthetic oligonucleotide
  Antisense strand to SEQ ID NO: 508485
auucugaggacuagcuuau

SEQ ID NO: 508487 - RNA, 19 nt, Artificial Sequence
  Description of Artificial Sequence: Synthetic oligonucleotide
  Sense strand starting at position 949 of SEQ ID NO: 317741
gacugcgaccucuaauaga

SEQ ID NO: 508488 - RNA, 19 nt, Artificial Sequence
  Description of Artificial Sequence: Synthetic oligonucleotide
  Antisense strand to SEQ ID NO: 508487
ucuauuagaggucgcaguc

SEQ ID NO: 508489 - RNA, 19 nt, Artificial Sequence
  Description of Artificial Sequence: Synthetic oligonucleotide
  Sense strand starting at position 1044 of SEQ ID NO: 317741
ugggaaaugcgcuagaaag

SEQ ID NO: 508490 - RNA, 19 nt, Artificial Sequence
  Description of Artificial Sequence: Synthetic oligonucleotide
  Antisense strand to SEQ ID NO: 508489
cuuucuagcgcauuuccca

SEQ ID NO: 508491 - RNA, 19 nt, Artificial Sequence
  Description of Artificial Sequence: Synthetic oligonucleotide
  Sense strand starting at position 1046 of SEQ ID NO: 317741
ggaaaugcgcuagaaagua

SEQ ID NO: 508492 - RNA, 19 nt, Artificial Sequence
  Description of Artificial Sequence: Synthetic oligonucleotide
  Antisense strand to SEQ ID NO: 508491
uacuuucuagcgcauuucc

SEQ ID NO: 508493 - RNA, 19 nt, Artificial Sequence
  Description of Artificial Sequence: Synthetic oligonucleotide
  Sense strand starting at position 1090 of SEQ ID NO: 317741
caucucuguccuugaggaa

SEQ ID NO: 508494 - RNA, 19 nt, Artificial Sequence
  Description of Artificial Sequence: Synthetic oligonucleotide
  Antisense strand to SEQ ID NO: 508493
uuccucaaggacagagaug

SEQ ID NO: 508495 - RNA, 19 nt, Artificial Sequence
  Description of Artificial Sequence: Synthetic oligonucleotide
  Sense strand starting at position 1091 of SEQ ID NO: 317741
aucucuguccuugaggaau

SEQ ID NO: 508496 - RNA, 19 nt, Artificial Sequence
  Description of Artificial Sequence: Synthetic oligonucleotide
  Antisense strand to SEQ ID NO: 508495
auuccucaaggacagagau

SEQ ID NO: 508497 - RNA, 19 nt, Artificial Sequence
  Description of Artificial Sequence: Synthetic oligonucleotide
  Sense strand starting at position 1331 of SEQ ID NO: 317741
ugagcugcuauuugucaga

SEQ ID NO: 508498 - RNA, 19 nt, Artificial Sequence
  Description of Artificial Sequence: Synthetic oligonucleotide
  Antisense strand to SEQ ID NO: 508497
ucugacaaauagcagcuca

SEQ ID NO: 508499 - RNA, 19 nt, Artificial Sequence
  Description of Artificial Sequence: Synthetic oligonucleotide
  Sense strand starting at position 1333 of SEQ ID NO: 317741
agcugcuauuugucagaag

SEQ ID NO: 508500 - RNA, 19 nt, Artificial Sequence
  Description of Artificial Sequence: Synthetic oligonucleotide
  Antisense strand to SEQ ID NO: 508499
cuucugacaaauagcagcu

SEQ ID NO: 508501 - RNA, 19 nt, Artificial Sequence
  Description of Artificial Sequence: Synthetic oligonucleotide
  Sense strand starting at position 1344 of SEQ ID NO: 317741
gucagaagugaauaucugu

SEQ ID NO: 508502 - RNA, 19 nt, Artificial Sequence
  Description of Artificial Sequence: Synthetic oligonucleotide
  Antisense strand to SEQ ID NO: 508501
acagauauucacuucugac

SEQ ID NO: 508503 - RNA, 19 nt, Artificial Sequence
  Description of Artificial Sequence: Synthetic oligonucleotide
  Sense strand starting at position 1347 of SEQ ID NO: 317741
agaagugaauaucuguuga

SEQ ID NO: 508504 - RNA, 19 nt, Artificial Sequence
  Description of Artificial Sequence: Synthetic oligonucleotide
  Antisense strand to SEQ ID NO: 508503
ucaacagauauucacuucu

SEQ ID NO: 508505 - RNA, 19 nt, Artificial Sequence
  Description of Artificial Sequence: Synthetic oligonucleotide
  Sense strand starting at position 1583 of SEQ ID NO: 317741
gugugauuacacuaccacu

SEQ ID NO: 508506 - RNA, 19 nt, Artificial Sequence
  Description of Artificial Sequence: Synthetic oligonucleotide
  Antisense strand to SEQ ID NO: 508505
agugguaguguaaucacac

SEQ ID NO: 508507 - RNA, 19 nt, Artificial Sequence
  Description of Artificial Sequence: Synthetic oligonucleotide
  Sense strand starting at position 1636 of SEQ ID NO: 317741
ggcgaaucacuggaggagu

SEQ ID NO: 508508 - RNA, 19 nt, Artificial Sequence
  Description of Artificial Sequence: Synthetic oligonucleotide
  Antisense strand to SEQ ID NO: 508507
acuccuccagugauucgcc

SEQ ID NO: 508509 - RNA, 19 nt, Artificial Sequence
  Description of Artificial Sequence: Synthetic oligonucleotide
  Sense strand starting at position 1638 of SEQ ID NO: 317741
cgaaucacuggaggaguau

SEQ ID NO: 508510 - RNA, 19 nt, Artificial Sequence
  Description of Artificial Sequence: Synthetic oligonucleotide
  Antisense strand to SEQ ID NO: 508509
auacuccuccagugauucg

SEQ ID NO: 508511 - RNA, 19 nt, Artificial Sequence
  Description of Artificial Sequence: Synthetic oligonucleotide
  Sense strand starting at position 1650 of SEQ ID NO: 317741
ggaguaugaaguugagaug

SEQ ID NO: 508512 - RNA, 19 nt, Artificial Sequence
  Description of Artificial Sequence: Synthetic oligonucleotide
  Antisense strand to SEQ ID NO: 508511
caucucaacuucauacucc

SEQ ID NO: 508513 - RNA, 19 nt, Artificial Sequence
  Description of Artificial Sequence: Synthetic oligonucleotide
  Sense strand starting at position 1651 of SEQ ID NO: 317741
gaguaugaaguugagaugu

SEQ ID NO: 508514 - RNA, 19 nt, Artificial Sequence
  Description of Artificial Sequence: Synthetic oligonucleotide
  Antisense strand to SEQ ID NO: 508513
acaucucaacuucauacuc

SEQ ID NO: 508515 - RNA, 19 nt, Artificial Sequence
  Description of Artificial Sequence: Synthetic oligonucleotide
  Sense strand starting at position 1838 of SEQ ID NO: 317741
ccguauaacgacuauccaa

SEQ ID NO: 508516 - RNA, 19 nt, Artificial Sequence
  Description of Artificial Sequence: Synthetic oligonucleotide
  Antisense strand to SEQ ID NO: 508515
uuggauagucguuauacgg

SEQ ID NO: 508517 - RNA, 19 nt, Artificial Sequence
  Description of Artificial Sequence: Synthetic oligonucleotide
  Sense strand starting at position 2133 of SEQ ID NO: 317741
accuuuacucgugaagagu

SEQ ID NO: 508518 - RNA, 19 nt, Artificial Sequence
  Description of Artificial Sequence: Synthetic oligonucleotide
  Antisense strand to SEQ ID NO: 508517
acucuucacgaguaaaggu

SEQ ID NO: 508519 - RNA, 19 nt, Artificial Sequence
  Description of Artificial Sequence: Synthetic oligonucleotide
  Sense strand starting at position 2450 of SEQ ID NO: 317741
uaaauaggccauggguuua

SEQ ID NO: 508520 - RNA, 19 nt, Artificial Sequence
  Description of Artificial Sequence: Synthetic oligonucleotide
  Antisense strand to SEQ ID NO: 508519
uaaacccauggccuauuua

SEQ ID NO: 508521 - RNA, 19 nt, Artificial Sequence
  Description of Artificial Sequence: Synthetic oligonucleotide
  Sense strand starting at position 2478 of SEQ ID NO: 317741
gugcuuugcagggaaggaa

SEQ ID NO: 508522 - RNA, 19 nt, Artificial Sequence
  Description of Artificial Sequence: Synthetic oligonucleotide
  Antisense strand to SEQ ID NO: 508521
uuccuucccugcaaagcac

SEQ ID NO: 508523 - RNA, 19 nt, Artificial Sequence
  Description of Artificial Sequence: Synthetic oligonucleotide
  Sense strand starting at position 2641 of SEQ ID NO: 317741
acgaguauggcugagacuu

SEQ ID NO: 508524 - RNA, 19 nt, Artificial Sequence
  Description of Artificial Sequence: Synthetic oligonucleotide
  Antisense strand to SEQ ID NO: 508523
aagucucagccauacucgu

SEQ ID NO: 508525 - RNA, 19 nt, Artificial Sequence
  Description of Artificial Sequence: Synthetic oligonucleotide
  Sense strand starting at position 2844 of SEQ ID NO: 317741
ggguuuaggauaggcaaga

SEQ ID NO: 508526 - RNA, 19 nt, Artificial Sequence
  Description of Artificial Sequence: Synthetic oligonucleotide
  Antisense strand to SEQ ID NO: 508525
ucuugccuauccuaaaccc

SEQ ID NO: 508527 - RNA, 19 nt, Artificial Sequence
  Description of Artificial Sequence: Synthetic oligonucleotide
  Sense strand starting at position 3036 of SEQ ID NO: 317741
uccugagaacaaugcaauu

SEQ ID NO: 508528 - RNA, 19 nt, Artificial Sequence
  Description of Artificial Sequence: Synthetic oligonucleotide
  Antisense strand to SEQ ID NO: 508527
aauugcauuguucucagga

SEQ ID NO: 508529 - RNA, 19 nt, Artificial Sequence
  Description of Artificial Sequence: Synthetic oligonucleotide
  Sense strand starting at position 3078 of SEQ ID NO: 317741
agaugaaguaauggagguu

SEQ ID NO: 508530 - RNA, 19 nt, Artificial Sequence
  Description of Artificial Sequence: Synthetic oligonucleotide
  Antisense strand to SEQ ID NO: 508529
aaccuccauuacuucaucu

SEQ ID NO: 508531 - RNA, 19 nt, Artificial Sequence
  Description of Artificial Sequence: Synthetic oligonucleotide
  Sense strand starting at position 3081 of SEQ ID NO: 317741
ugaaguaauggagguuuaa

SEQ ID NO: 508532 - RNA, 19 nt, Artificial Sequence
  Description of Artificial Sequence: Synthetic oligonucleotide
  Antisense strand to SEQ ID NO: 508531
uuaaaccuccauuacuuca

SEQ ID NO: 508533 - RNA, 19 nt, Artificial Sequence
  Description of Artificial Sequence: Synthetic oligonucleotide
  Sense strand starting at position 3360 of SEQ ID NO: 317741
ugugacugucaacagacua

SEQ ID NO: 508534 - RNA, 19 nt, Artificial Sequence
  Description of Artificial Sequence: Synthetic oligonucleotide
  Antisense strand to SEQ ID NO: 508533
uagucuguugacagucaca

SEQ ID NO: 508535 - RNA, 19 nt, Artificial Sequence
  Description of Artificial Sequence: Synthetic oligonucleotide
  Sense strand starting at position 3529 of SEQ ID NO: 317741
gggcaugaguaucuuagau

SEQ ID NO: 508536 - RNA, 19 nt, Artificial Sequence
  Description of Artificial Sequence: Synthetic oligonucleotide
  Antisense strand to SEQ ID NO: 508535
aucuaagauacucaugccc

SEQ ID NO: 508537 - RNA, 19 nt, Artificial Sequence
  Description of Artificial Sequence: Synthetic oligonucleotide
  Sense strand starting at position 3545 of SEQ ID NO: 317741
gauauuguggagugacaga

SEQ ID NO: 508538 - RNA, 19 nt, Artificial Sequence
  Description of Artificial Sequence: Synthetic oligonucleotide
  Antisense strand to SEQ ID NO: 508537
ucugucacuccacaauauc

SEQ ID NO: 508539 - RNA, 19 nt, Artificial Sequence
  Description of Artificial Sequence: Synthetic oligonucleotide
  Sense strand starting at position 3775 of SEQ ID NO: 317741
ugaguuuaaucaguaagaa

SEQ ID NO: 508540 - RNA, 19 nt, Artificial Sequence
  Description of Artificial Sequence: Synthetic oligonucleotide
  Antisense strand to SEQ ID NO: 508539
uucuuacugauuaaacuca

SEQ ID NO: 508541 - RNA, 19 nt, Artificial Sequence
  Description of Artificial Sequence: Synthetic oligonucleotide
  Sense strand starting at position 3793 of SEQ ID NO: 317741
auuucuuggguuuguaagu

SEQ ID NO: 508542 - RNA, 19 nt, Artificial Sequence
  Description of Artificial Sequence: Synthetic oligonucleotide
  Antisense strand to SEQ ID NO: 508541
acuuacaaacccaagaaau

SEQ ID NO: 508543 - RNA, 19 nt, Artificial Sequence
  Description of Artificial Sequence: Synthetic oligonucleotide
  Sense strand starting at position 3886 of SEQ ID NO: 317741
gagaacucacuaugguuga

SEQ ID NO: 508544 - RNA, 19 nt, Artificial Sequence
  Description of Artificial Sequence: Synthetic oligonucleotide
  Antisense strand to SEQ ID NO: 508543
ucaaccauagugaguucuc

SEQ ID NO: 508545 - RNA, 19 nt, Artificial Sequence
  Description of Artificial Sequence: Synthetic oligonucleotide
  Sense strand starting at position 175 of SEQ ID NO: 317742
ggcuucucagaaugggauu

SEQ ID NO: 508546 - RNA, 19 nt, Artificial Sequence
  Description of Artificial Sequence: Synthetic oligonucleotide
  Antisense strand to SEQ ID NO: 508545
aaucccauucugagaagcc

SEQ ID NO: 508547 - RNA, 19 nt, Artificial Sequence
  Description of Artificial Sequence: Synthetic oligonucleotide
  Sense strand starting at position 299 of SEQ ID NO: 317742
gagaguguagauggaagua

SEQ ID NO: 508548 - RNA, 19 nt, Artificial Sequence
  Description of Artificial Sequence: Synthetic oligonucleotide
  Antisense strand to SEQ ID NO: 508547
uacuuccaucuacacucuc

SEQ ID NO: 508549 - RNA, 19 nt, Artificial Sequence
  Description of Artificial Sequence: Synthetic oligonucleotide
  Sense strand starting at position 807 of SEQ ID NO: 317742
ggccaaucugcucaagaca

SEQ ID NO: 508550 - RNA, 19 nt, Artificial Sequence
  Description of Artificial Sequence: Synthetic oligonucleotide
  Antisense strand to SEQ ID NO: 508549
ugucuugagcagauuggcc

SEQ ID NO: 508551 - RNA, 19 nt, Artificial Sequence
  Description of Artificial Sequence: Synthetic oligonucleotide
  Sense strand starting at position 972 of SEQ ID NO: 317742
auucuuggaugcucuugaa

SEQ ID NO: 508552 - RNA, 19 nt, Artificial Sequence
  Description of Artificial Sequence: Synthetic oligonucleotide
  Antisense strand to SEQ ID NO: 508551
uucaagagcauccaagaau

SEQ ID NO: 508553 - RNA, 19 nt, Artificial Sequence
  Description of Artificial Sequence: Synthetic oligonucleotide
  Sense strand starting at position 976 of SEQ ID NO: 317742
uuggaugcucuugaauauu

SEQ ID NO: 508554 - RNA, 19 nt, Artificial Sequence
  Description of Artificial Sequence: Synthetic oligonucleotide
  Antisense strand to SEQ ID NO: 508553
aauauucaagagcauccaa

SEQ ID NO: 508555 - RNA, 19 nt, Artificial Sequence
  Description of Artificial Sequence: Synthetic oligonucleotide
  Sense strand starting at position 1167 of SEQ ID NO: 317742
cugcucuguccagagagau

SEQ ID NO: 508556 - RNA, 19 nt, Artificial Sequence
  Description of Artificial Sequence: Synthetic oligonucleotide
  Antisense strand to SEQ ID NO: 508555
aucucucuggacagagcag

SEQ ID NO: 508557 - RNA, 19 nt, Artificial Sequence
  Description of Artificial Sequence: Synthetic oligonucleotide
  Sense strand starting at position 1220 of SEQ ID NO: 317742
aucugcugggaucaugauu

SEQ ID NO: 508558 - RNA, 19 nt, Artificial Sequence
  Description of Artificial Sequence: Synthetic oligonucleotide
  Antisense strand to SEQ ID NO: 508557
aaucaugaucccagcagau

SEQ ID NO: 508559 - RNA, 19 nt, Artificial Sequence
  Description of Artificial Sequence: Synthetic oligonucleotide
  Sense strand starting at position 1239 of SEQ ID NO: 317742
ucuauacucuggucacaca

SEQ ID NO: 508560 - RNA, 19 nt, Artificial Sequence
  Description of Artificial Sequence: Synthetic oligonucleotide
  Antisense strand to SEQ ID NO: 508559
ugugugaccagaguauaga

SEQ ID NO: 508561 - RNA, 19 nt, Artificial Sequence
  Description of Artificial Sequence: Synthetic oligonucleotide
  Sense strand starting at position 1469 of SEQ ID NO: 317742
gucuguccuccucacacaa

SEQ ID NO: 508562 - RNA, 19 nt, Artificial Sequence
  Description of Artificial Sequence: Synthetic oligonucleotide
  Antisense strand to SEQ ID NO: 508561
uugugugaggaggacagac

SEQ ID NO: 508563 - RNA, 19 nt, Artificial Sequence
  Description of Artificial Sequence: Synthetic oligonucleotide
  Sense strand starting at position 1593 of SEQ ID NO: 317742
ugcuuugauagagggauga

SEQ ID NO: 508564 - RNA, 19 nt, Artificial Sequence
  Description of Artificial Sequence: Synthetic oligonucleotide
  Antisense strand to SEQ ID NO: 508563
ucaucccucuaucaaagca

SEQ ID NO: 508565 - RNA, 19 nt, Artificial Sequence
  Description of Artificial Sequence: Synthetic oligonucleotide
  Sense strand starting at position 1647 of SEQ ID NO: 317742
gcauaaaccgaccaaguuu

SEQ ID NO: 508566 - RNA, 19 nt, Artificial Sequence
  Description of Artificial Sequence: Synthetic oligonucleotide
  Antisense strand to SEQ ID NO: 508565
aaacuuggucgguuuaugc

SEQ ID NO: 508567 - RNA, 19 nt, Artificial Sequence
  Description of Artificial Sequence: Synthetic oligonucleotide
  Sense strand starting at position 1668 of SEQ ID NO: 317742
gggccugaagcauauucua

SEQ ID NO: 508568 - RNA, 19 nt, Artificial Sequence
  Description of Artificial Sequence: Synthetic oligonucleotide
  Antisense strand to SEQ ID NO: 508567
uagaauaugcuucaggccc

SEQ ID NO: 508569 - RNA, 19 nt, Artificial Sequence
  Description of Artificial Sequence: Synthetic oligonucleotide
  Sense strand starting at position 1816 of SEQ ID NO: 317742
ugauuuggcccuugcauau

SEQ ID NO: 508570 - RNA, 19 nt, Artificial Sequence
  Description of Artificial Sequence: Synthetic oligonucleotide
  Antisense strand to SEQ ID NO: 508569
auaugcaagggccaaauca

SEQ ID NO: 508571 - RNA, 19 nt, Artificial Sequence
  Description of Artificial Sequence: Synthetic oligonucleotide
  Sense strand starting at position 1841 of SEQ ID NO: 317742
auuguuuaucuugacauac

SEQ ID NO: 508572 - RNA, 19 nt, Artificial Sequence
  Description of Artificial Sequence: Synthetic oligonucleotide
  Antisense strand to SEQ ID NO: 508571
guaugucaagauaaacaau

SEQ ID NO: 508573 - RNA, 19 nt, Artificial Sequence
  Description of Artificial Sequence: Synthetic oligonucleotide
  Sense strand starting at position 1894 of SEQ ID NO: 317742
cauggagacccuggcuaua

SEQ ID NO: 508574 - RNA, 19 nt, Artificial Sequence
  Description of Artificial Sequence: Synthetic oligonucleotide
  Antisense strand to SEQ ID NO: 508573
uauagccagggucuccaug

SEQ ID NO: 508575 - RNA, 19 nt, Artificial Sequence
  Description of Artificial Sequence: Synthetic oligonucleotide
  Sense strand starting at position 1916 of SEQ ID NO: 317742
agaaaugcagcuuaacuua

SEQ ID NO: 508576 - RNA, 19 nt, Artificial Sequence
  Description of Artificial Sequence: Synthetic oligonucleotide
  Antisense strand to SEQ ID NO: 508575
uaaguuaagcugcauuucu

SEQ ID NO: 508577 - RNA, 19 nt, Artificial Sequence
  Description of Artificial Sequence: Synthetic oligonucleotide
  Sense strand starting at position 2071 of SEQ ID NO: 317742
uuguguucucucuaaauaa

SEQ ID NO: 508578 - RNA, 19 nt, Artificial Sequence
  Description of Artificial Sequence: Synthetic oligonucleotide
  Antisense strand to SEQ ID NO: 508577
uuauuuagagagaacacaa

SEQ ID NO: 508579 - RNA, 19 nt, Artificial Sequence
  Description of Artificial Sequence: Synthetic oligonucleotide
  Sense strand starting at position 2262 of SEQ ID NO: 317742
cccacugguguuuagagua

SEQ ID NO: 508580 - RNA, 19 nt, Artificial Sequence
  Description of Artificial Sequence: Synthetic oligonucleotide
  Antisense strand to SEQ ID NO: 508579
uacucuaaacaccaguggg

SEQ ID NO: 508581 - RNA, 19 nt, Artificial Sequence
  Description of Artificial Sequence: Synthetic oligonucleotide
  Sense strand starting at position 2270 of SEQ ID NO: 317742
uguuuagaguaauuaggua

SEQ ID NO: 508582 - RNA, 19 nt, Artificial Sequence
  Description of Artificial Sequence: Synthetic oligonucleotide
  Antisense strand to SEQ ID NO: 508581
uaccuaauuacucuaaaca

SEQ ID NO: 508583 - RNA, 19 nt, Artificial Sequence
  Description of Artificial Sequence: Synthetic oligonucleotide
  Sense strand starting at position 2434 of SEQ ID NO: 317742
gguaauuauuucuugcauu

SEQ ID NO: 508584 - RNA, 19 nt, Artificial Sequence
  Description of Artificial Sequence: Synthetic oligonucleotide
  Antisense strand to SEQ ID NO: 508583
aaugcaagaaauaauuacc

SEQ ID NO: 508585 - RNA, 19 nt, Artificial Sequence
  Description of Artificial Sequence: Synthetic oligonucleotide
  Sense strand starting at position 2692 of SEQ ID NO: 317742
auguauauagcaggcagaa

SEQ ID NO: 508586 - RNA, 19 nt, Artificial Sequence
  Description of Artificial Sequence: Synthetic oligonucleotide
  Antisense strand to SEQ ID NO: 508585
uucugccugcuauauacau

SEQ ID NO: 508587 - RNA, 19 nt, Artificial Sequence
  Description of Artificial Sequence: Synthetic oligonucleotide
  Sense strand starting at position 2732 of SEQ ID NO: 317742
aauucugaaggcugugaau

SEQ ID NO: 508588 - RNA, 19 nt, Artificial Sequence
  Description of Artificial Sequence: Synthetic oligonucleotide
  Antisense strand to SEQ ID NO: 508587
auucacagccuucagaauu

SEQ ID NO: 508589 - RNA, 19 nt, Artificial Sequence
  Description of Artificial Sequence: Synthetic oligonucleotide
  Sense strand starting at position 2734 of SEQ ID NO: 317742
uucugaaggcugugaauag

SEQ ID NO: 508590 - RNA, 19 nt, Artificial Sequence
  Description of Artificial Sequence: Synthetic oligonucleotide
  Antisense strand to SEQ ID NO: 508589
cuauucacagccuucagaa

SEQ ID NO: 508591 - RNA, 19 nt, Artificial Sequence
  Description of Artificial Sequence: Synthetic oligonucleotide
  Sense strand starting at position 2738 of SEQ ID NO: 317742
gaaggcugugaauagguua

SEQ ID NO: 508592 - RNA, 19 nt, Artificial Sequence
  Description of Artificial Sequence: Synthetic oligonucleotide
  Antisense strand to SEQ ID NO: 508591
uaaccuauucacagccuuc

SEQ ID NO: 508593 - RNA, 19 nt, Artificial Sequence
  Description of Artificial Sequence: Synthetic oligonucleotide
  Sense strand starting at position 2745 of SEQ ID NO: 317742
gugaauagguuaccucaaa

SEQ ID NO: 508594 - RNA, 19 nt, Artificial Sequence
  Description of Artificial Sequence: Synthetic oligonucleotide
  Antisense strand to SEQ ID NO: 508593
uuugagguaaccuauucac

SEQ ID NO: 508595 - RNA, 19 nt, Artificial Sequence
  Description of Artificial Sequence: Synthetic oligonucleotide
  Sense strand starting at position 2746 of SEQ ID NO: 317742
ugaauagguuaccucaaau

SEQ ID NO: 508596 - RNA, 19 nt, Artificial Sequence
  Description of Artificial Sequence: Synthetic oligonucleotide
  Antisense strand to SEQ ID NO: 508595
auuugagguaaccuauuca

SEQ ID NO: 508597 - RNA, 19 nt, Artificial Sequence
  Description of Artificial Sequence: Synthetic oligonucleotide
  Sense strand starting at position 2847 of SEQ ID NO: 317742
ugccauggucuuuaauaag

SEQ ID NO: 508598 - RNA, 19 nt, Artificial Sequence
  Description of Artificial Sequence: Synthetic oligonucleotide
  Antisense strand to SEQ ID NO: 508597
cuuauuaaagaccauggca

SEQ ID NO: 508599 - RNA, 19 nt, Artificial Sequence
  Description of Artificial Sequence: Synthetic oligonucleotide
  Sense strand starting at position 2887 of SEQ ID NO: 317742
gugagaaugacagggaugu

SEQ ID NO: 508600 - RNA, 19 nt, Artificial Sequence
  Description of Artificial Sequence: Synthetic oligonucleotide
  Antisense strand to SEQ ID NO: 508599
acaucccugucauucucac

SEQ ID NO: 508601 - RNA, 19 nt, Artificial Sequence
  Description of Artificial Sequence: Synthetic oligonucleotide
  Sense strand starting at position 2935 of SEQ ID NO: 317742
cgggucaugagucaaggaa

SEQ ID NO: 508602 - RNA, 19 nt, Artificial Sequence
  Description of Artificial Sequence: Synthetic oligonucleotide
  Antisense strand to SEQ ID NO: 508601
uuccuugacucaugacccg

SEQ ID NO: 508603 - RNA, 19 nt, Artificial Sequence
  Description of Artificial Sequence: Synthetic oligonucleotide
  Sense strand starting at position 3036 of SEQ ID NO: 317742
cugauaacccacugugaac

SEQ ID NO: 508604 - RNA, 19 nt, Artificial Sequence
  Description of Artificial Sequence: Synthetic oligonucleotide
  Antisense strand to SEQ ID NO: 508603
guucacaguggguuaucag

SEQ ID NO: 508605 - RNA, 19 nt, Artificial Sequence
  Description of Artificial Sequence: Synthetic oligonucleotide
  Sense strand starting at position 3072 of SEQ ID NO: 317742
guaagauaucuugguccau

SEQ ID NO: 508606 - RNA, 19 nt, Artificial Sequence
  Description of Artificial Sequence: Synthetic oligonucleotide
  Antisense strand to SEQ ID NO: 508605
auggaccaagauaucuuac

SEQ ID NO: 508607 - RNA, 19 nt, Artificial Sequence
  Description of Artificial Sequence: Synthetic oligonucleotide
  Sense strand starting at position 3116 of SEQ ID NO: 317742
caggcuagguaacuuauaa

SEQ ID NO: 508608 - RNA, 19 nt, Artificial Sequence
  Description of Artificial Sequence: Synthetic oligonucleotide
  Antisense strand to SEQ ID NO: 508607
uuauaaguuaccuagccug

SEQ ID NO: 508609 - RNA, 19 nt, Artificial Sequence
  Description of Artificial Sequence: Synthetic oligonucleotide
  Sense strand starting at position 3305 of SEQ ID NO: 317742
ggagcccacuccuuugaua

SEQ ID NO: 508610 - RNA, 19 nt, Artificial Sequence
  Description of Artificial Sequence: Synthetic oligonucleotide
  Antisense strand to SEQ ID NO: 508609
uaucaaaggagugggcucc

SEQ ID NO: 508611 - RNA, 19 nt, Artificial Sequence
  Description of Artificial Sequence: Synthetic oligonucleotide
  Sense strand starting at position 3503 of SEQ ID NO: 317742
ugaguuuguagucauuugu

SEQ ID NO: 508612 - RNA, 19 nt, Artificial Sequence
  Description of Artificial Sequence: Synthetic oligonucleotide
  Antisense strand to SEQ ID NO: 508611
acaaaugacuacaaacuca

SEQ ID NO: 508613 - RNA, 19 nt, Artificial Sequence
  Description of Artificial Sequence: Synthetic oligonucleotide
  Sense strand starting at position 3507 of SEQ ID NO: 317742
uuuguagucauuuguugga

SEQ ID NO: 508614 - RNA, 19 nt, Artificial Sequence
  Description of Artificial Sequence: Synthetic oligonucleotide
  Antisense strand to SEQ ID NO: 508613
uccaacaaaugacuacaaa

SEQ ID NO: 508615 - RNA, 19 nt, Artificial Sequence
  Description of Artificial Sequence: Synthetic oligonucleotide
  Sense strand starting at position 3829 of SEQ ID NO: 317742
ucaggaaaugagugaguuc

SEQ ID NO: 508616 - RNA, 19 nt, Artificial Sequence
  Description of Artificial Sequence: Synthetic oligonucleotide
  Antisense strand to SEQ ID NO: 508615
gaacucacucauuuccuga

SEQ ID NO: 508617 - RNA, 19 nt, Artificial Sequence
  Description of Artificial Sequence: Synthetic oligonucleotide
  Sense strand starting at position 3832 of SEQ ID NO: 317742
ggaaaugagugaguucuga

SEQ ID NO: 508618 - RNA, 19 nt, Artificial Sequence
  Description of Artificial Sequence: Synthetic oligonucleotide
  Antisense strand to SEQ ID NO: 508617
ucagaacucacucauuucc

SEQ ID NO: 508619 - RNA, 19 nt, Artificial Sequence
  Description of Artificial Sequence: Synthetic oligonucleotide
  Sense strand starting at position 3868 of SEQ ID NO: 317742
augcuaaagugauccggga

SEQ ID NO: 508620 - RNA, 19 nt, Artificial Sequence
  Description of Artificial Sequence: Synthetic oligonucleotide
  Antisense strand to SEQ ID NO: 508619
ucccggaucacuuuagcau

SEQ ID NO: 508621 - RNA, 19 nt, Artificial Sequence
  Description of Artificial Sequence: Synthetic oligonucleotide
  Sense strand starting at position 3870 of SEQ ID NO: 317742
gcuaaagugauccgggaag

SEQ ID NO: 508622 - RNA, 19 nt, Artificial Sequence
  Description of Artificial Sequence: Synthetic oligonucleotide
  Antisense strand to SEQ ID NO: 508621
cuucccggaucacuuuagc

SEQ ID NO: 508623 - RNA, 19 nt, Artificial Sequence
  Description of Artificial Sequence: Synthetic oligonucleotide
  Sense strand starting at position 3872 of SEQ ID NO: 317742
uaaagugauccgggaagac

SEQ ID NO: 508624 - RNA, 19 nt, Artificial Sequence
  Description of Artificial Sequence: Synthetic oligonucleotide
  Antisense strand to SEQ ID NO: 508623
gucuucccggaucacuuua

SEQ ID NO: 508625 - RNA, 19 nt, Artificial Sequence
  Description of Artificial Sequence: Synthetic oligonucleotide
  Sense strand starting at position 295 of SEQ ID NO: 317743
cagaaacguuucgucugau

SEQ ID NO: 508626 - RNA, 19 nt, Artificial Sequence
  Description of Artificial Sequence: Synthetic oligonucleotide
  Antisense strand to SEQ ID NO: 508625
aucagacgaaacguuucug

SEQ ID NO: 508627 - RNA, 19 nt, Artificial Sequence
  Description of Artificial Sequence: Synthetic oligonucleotide
  Sense strand starting at position 296 of SEQ ID NO: 317743
agaaacguuucgucugauu

SEQ ID NO: 508628 - RNA, 19 nt, Artificial Sequence
  Description of Artificial Sequence: Synthetic oligonucleotide
  Antisense strand to SEQ ID NO: 508627
aaucagacgaaacguuucu

SEQ ID NO: 508629 - RNA, 19 nt, Artificial Sequence
  Description of Artificial Sequence: Synthetic oligonucleotide
  Sense strand starting at position 298 of SEQ ID NO: 317743
aaacguuucgucugauuag

SEQ ID NO: 508630 - RNA, 19 nt, Artificial Sequence
  Description of Artificial Sequence: Synthetic oligonucleotide
  Antisense strand to SEQ ID NO: 508629
cuaaucagacgaaacguuu

SEQ ID NO: 508631 - RNA, 19 nt, Artificial Sequence
  Description of Artificial Sequence: Synthetic oligonucleotide
  Sense strand starting at position 301 of SEQ ID NO: 317743
cguuucgucugauuagaag

SEQ ID NO: 508632 - RNA, 19 nt, Artificial Sequence
  Description of Artificial Sequence: Synthetic oligonucleotide
  Antisense strand to SEQ ID NO: 508631
cuucuaaucagacgaaacg

SEQ ID NO: 508633 - RNA, 19 nt, Artificial Sequence
  Description of Artificial Sequence: Synthetic oligonucleotide
  Sense strand starting at position 463 of SEQ ID NO: 317743
ggcugaguucccgggagaa

SEQ ID NO: 508634 - RNA, 19 nt, Artificial Sequence
  Description of Artificial Sequence: Synthetic oligonucleotide
  Antisense strand to SEQ ID NO: 508633
uucucccgggaacucagcc

SEQ ID NO: 508635 - RNA, 19 nt, Artificial Sequence
  Description of Artificial Sequence: Synthetic oligonucleotide
  Sense strand starting at position 598 of SEQ ID NO: 317743
cgauccuguucggcaaaca

SEQ ID NO: 508636 - RNA, 19 nt, Artificial Sequence
  Description of Artificial Sequence: Synthetic oligonucleotide
  Antisense strand to SEQ ID NO: 508635
uguuugccgaacaggaucg

SEQ ID NO: 508637 - RNA, 19 nt, Artificial Sequence
  Description of Artificial Sequence: Synthetic oligonucleotide
  Sense strand starting at position 599 of SEQ ID NO: 317743
gauccuguucggcaaacau

SEQ ID NO: 508638 - RNA, 19 nt, Artificial Sequence
  Description of Artificial Sequence: Synthetic oligonucleotide
  Antisense strand to SEQ ID NO: 508637
auguuugccgaacaggauc

SEQ ID NO: 508639 - RNA, 19 nt, Artificial Sequence
  Description of Artificial Sequence: Synthetic oligonucleotide
  Sense strand starting at position 673 of SEQ ID NO: 317743
ggaguugauucuaggcgaa

SEQ ID NO: 508640 - RNA, 19 nt, Artificial Sequence
  Description of Artificial Sequence: Synthetic oligonucleotide
  Antisense strand to SEQ ID NO: 508639
uucgccuagaaucaacucc

SEQ ID NO: 508641 - RNA, 19 nt, Artificial Sequence
  Description of Artificial Sequence: Synthetic oligonucleotide
  Sense strand starting at position 675 of SEQ ID NO: 317743
aguugauucuaggcgaaac

SEQ ID NO: 508642 - RNA, 19 nt, Artificial Sequence
  Description of Artificial Sequence: Synthetic oligonucleotide
  Antisense strand to SEQ ID NO: 508641
guuucgccuagaaucaacu

SEQ ID NO: 508643 - RNA, 19 nt, Artificial Sequence
  Description of Artificial Sequence: Synthetic oligonucleotide
  Sense strand starting at position 676 of SEQ ID NO: 317743
guugauucuaggcgaaaca

SEQ ID NO: 508644 - RNA, 19 nt, Artificial Sequence
  Description of Artificial Sequence: Synthetic oligonucleotide
  Antisense strand to SEQ ID NO: 508643
uguuucgccuagaaucaac

SEQ ID NO: 508645 - RNA, 19 nt, Artificial Sequence
  Description of Artificial Sequence: Synthetic oligonucleotide
  Sense strand starting at position 677 of SEQ ID NO: 317743
uugauucuaggcgaaacaa

SEQ ID NO: 508646 - RNA, 19 nt, Artificial Sequence
  Description of Artificial Sequence: Synthetic oligonucleotide
  Antisense strand to SEQ ID NO: 508645
uuguuucgccuagaaucaa

SEQ ID NO: 508647 - RNA, 19 nt, Artificial Sequence
  Description of Artificial Sequence: Synthetic oligonucleotide
  Sense strand starting at position 769 of SEQ ID NO: 317743
gggagaacucgguguguca

SEQ ID NO: 508648 - RNA, 19 nt, Artificial Sequence
  Description of Artificial Sequence: Synthetic oligonucleotide
  Antisense strand to SEQ ID NO: 508647
ugacacaccgaguucuccc

SEQ ID NO: 508649 - RNA, 19 nt, Artificial Sequence
  Description of Artificial Sequence: Synthetic oligonucleotide
  Sense strand starting at position 1038 of SEQ ID NO: 317743
gcgcgcugucgcuuuaaga

SEQ ID NO: 508650 - RNA, 19 nt, Artificial Sequence
  Description of Artificial Sequence: Synthetic oligonucleotide
  Antisense strand to SEQ ID NO: 508649
ucuuaaagcgacagcgcgc

SEQ ID NO: 508651 - RNA, 19 nt, Artificial Sequence
  Description of Artificial Sequence: Synthetic oligonucleotide
  Sense strand starting at position 1039 of SEQ ID NO: 317743
cgcgcugucgcuuuaagac

SEQ ID NO: 508652 - RNA, 19 nt, Artificial Sequence
  Description of Artificial Sequence: Synthetic oligonucleotide
  Antisense strand to SEQ ID NO: 508651
gucuuaaagcgacagcgcg

SEQ ID NO: 508653 - RNA, 19 nt, Artificial Sequence
  Description of Artificial Sequence: Synthetic oligonucleotide
  Sense strand starting at position 2410 of SEQ ID NO: 317743
agcugaauguuucucucca

SEQ ID NO: 508654 - RNA, 19 nt, Artificial Sequence
  Description of Artificial Sequence: Synthetic oligonucleotide
  Antisense strand to SEQ ID NO: 508653
uggagagaaacauucagcu

SEQ ID NO: 508655 - RNA, 19 nt, Artificial Sequence
  Description of Artificial Sequence: Synthetic oligonucleotide
  Sense strand starting at position 2411 of SEQ ID NO: 317743
gcugaauguuucucuccac

SEQ ID NO: 508656 - RNA, 19 nt, Artificial Sequence
  Description of Artificial Sequence: Synthetic oligonucleotide
  Antisense strand to SEQ ID NO: 508655
guggagagaaacauucagc

SEQ ID NO: 508657 - RNA, 19 nt, Artificial Sequence
  Description of Artificial Sequence: Synthetic oligonucleotide
  Sense strand starting at position 2433 of SEQ ID NO: 317743
cuuaguaucuguuucucuu

SEQ ID NO: 508658 - RNA, 19 nt, Artificial Sequence
  Description of Artificial Sequence: Synthetic oligonucleotide
  Antisense strand to SEQ ID NO: 508657
aagagaaacagauacuaag

SEQ ID NO: 508659 - RNA, 19 nt, Artificial Sequence
  Description of Artificial Sequence: Synthetic oligonucleotide
  Sense strand starting at position 2452 of SEQ ID NO: 317743
uugcaucccuaagugauuu

SEQ ID NO: 508660 - RNA, 19 nt, Artificial Sequence
  Description of Artificial Sequence: Synthetic oligonucleotide
  Antisense strand to SEQ ID NO: 508659
aaaucacuuagggaugcaa

SEQ ID NO: 508661 - RNA, 19 nt, Artificial Sequence
  Description of Artificial Sequence: Synthetic oligonucleotide
  Sense strand starting at position 2477 of SEQ ID NO: 317743
gagguuguuugcuugguua

SEQ ID NO: 508662 - RNA, 19 nt, Artificial Sequence
  Description of Artificial Sequence: Synthetic oligonucleotide
  Antisense strand to SEQ ID NO: 508661
uaaccaagcaaacaaccuc

SEQ ID NO: 508663 - RNA, 19 nt, Artificial Sequence
  Description of Artificial Sequence: Synthetic oligonucleotide
  Sense strand starting at position 2479 of SEQ ID NO: 317743
gguuguuugcuugguuaaa

SEQ ID NO: 508664 - RNA, 19 nt, Artificial Sequence
  Description of Artificial Sequence: Synthetic oligonucleotide
  Antisense strand to SEQ ID NO: 508663
uuuaaccaagcaaacaacc

SEQ ID NO: 508665 - RNA, 19 nt, Artificial Sequence
  Description of Artificial Sequence: Synthetic oligonucleotide
  Sense strand starting at position 2611 of SEQ ID NO: 317743
ccaaaucuaugaggaugaa

SEQ ID NO: 508666 - RNA, 19 nt, Artificial Sequence
  Description of Artificial Sequence: Synthetic oligonucleotide
  Antisense strand to SEQ ID NO: 508665
uucauccucauagauuugg

SEQ ID NO: 508667 - RNA, 19 nt, Artificial Sequence
  Description of Artificial Sequence: Synthetic oligonucleotide
  Sense strand starting at position 2636 of SEQ ID NO: 317743
uuaacuguaucuuucgauu

SEQ ID NO: 508668 - RNA, 19 nt, Artificial Sequence
  Description of Artificial Sequence: Synthetic oligonucleotide
  Antisense strand to SEQ ID NO: 508667
aaucgaaagauacaguuaa

SEQ ID NO: 508669 - RNA, 19 nt, Artificial Sequence
  Description of Artificial Sequence: Synthetic oligonucleotide
  Sense strand starting at position 2645 of SEQ ID NO: 317743
ucuuucgauucugaaagaa

SEQ ID NO: 508670 - RNA, 19 nt, Artificial Sequence
  Description of Artificial Sequence: Synthetic oligonucleotide
  Antisense strand to SEQ ID NO: 508669
uucuuucagaaucgaaaga

SEQ ID NO: 508671 - RNA, 19 nt, Artificial Sequence
  Description of Artificial Sequence: Synthetic oligonucleotide
  Sense strand starting at position 2674 of SEQ ID NO: 317743
aaguguaggucuggaauuu

SEQ ID NO: 508672 - RNA, 19 nt, Artificial Sequence
  Description of Artificial Sequence: Synthetic oligonucleotide
  Antisense strand to SEQ ID NO: 508671
aaauuccagaccuacacuu

SEQ ID NO: 508673 - RNA, 19 nt, Artificial Sequence
  Description of Artificial Sequence: Synthetic oligonucleotide
  Sense strand starting at position 2706 of SEQ ID NO: 317743
gcaacauuauucuuccgga

SEQ ID NO: 508674 - RNA, 19 nt, Artificial Sequence
  Description of Artificial Sequence: Synthetic oligonucleotide
  Antisense strand to SEQ ID NO: 508673
uccggaagaauaauguugc

SEQ ID NO: 508675 - RNA, 19 nt, Artificial Sequence
  Description of Artificial Sequence: Synthetic oligonucleotide
  Sense strand starting at position 2822 of SEQ ID NO: 317743
uaauguguuucucugggau

SEQ ID NO: 508676 - RNA, 19 nt, Artificial Sequence
  Description of Artificial Sequence: Synthetic oligonucleotide
  Antisense strand to SEQ ID NO: 508675
aucccagagaaacacauua

SEQ ID NO: 508677 - RNA, 19 nt, Artificial Sequence
  Description of Artificial Sequence: Synthetic oligonucleotide
  Sense strand starting at position 2825 of SEQ ID NO: 317743
uguguuucucugggauuua

SEQ ID NO: 508678 - RNA, 19 nt, Artificial Sequence
  Description of Artificial Sequence: Synthetic oligonucleotide
  Antisense strand to SEQ ID NO: 508677
uaaaucccagagaaacaca

SEQ ID NO: 508679 - RNA, 19 nt, Artificial Sequence
  Description of Artificial Sequence: Synthetic oligonucleotide
  Sense strand starting at position 2826 of SEQ ID NO: 317743
guguuucucugggauuuaa

SEQ ID NO: 508680 - RNA, 19 nt, Artificial Sequence
  Description of Artificial Sequence: Synthetic oligonucleotide
  Antisense strand to SEQ ID NO: 508679
uuaaaucccagagaaacac

SEQ ID NO: 508681 - RNA, 19 nt, Artificial Sequence
  Description of Artificial Sequence: Synthetic oligonucleotide
  Sense strand starting at position 2863 of SEQ ID NO: 317743
ccuuauugggaaggaguua

SEQ ID NO: 508682 - RNA, 19 nt, Artificial Sequence
  Description of Artificial Sequence: Synthetic oligonucleotide
  Antisense strand to SEQ ID NO: 508681
uaacuccuucccaauaagg

SEQ ID NO: 508683 - RNA, 19 nt, Artificial Sequence
  Description of Artificial Sequence: Synthetic oligonucleotide
  Sense strand starting at position 2935 of SEQ ID NO: 317743
uucugucaaccuggaguuu

SEQ ID NO: 508684 - RNA, 19 nt, Artificial Sequence
  Description of Artificial Sequence: Synthetic oligonucleotide
  Antisense strand to SEQ ID NO: 508683
aaacuccagguugacagaa

SEQ ID NO: 508685 - RNA, 19 nt, Artificial Sequence
  Description of Artificial Sequence: Synthetic oligonucleotide
  Sense strand starting at position 2936 of SEQ ID NO: 317743
ucugucaaccuggaguuua

SEQ ID NO: 508686 - RNA, 19 nt, Artificial Sequence
  Description of Artificial Sequence: Synthetic oligonucleotide
  Antisense strand to SEQ ID NO: 508685
uaaacuccagguugacaga

SEQ ID NO: 508687 - RNA, 19 nt, Artificial Sequence
  Description of Artificial Sequence: Synthetic oligonucleotide
  Sense strand starting at position 2962 of SEQ ID NO: 317743
acagcucuguauuuaguua

SEQ ID NO: 508688 - RNA, 19 nt, Artificial Sequence
  Description of Artificial Sequence: Synthetic oligonucleotide
  Antisense strand to SEQ ID NO: 508687
uaacuaaauacagagcugu

SEQ ID NO: 508689 - RNA, 19 nt, Artificial Sequence
  Description of Artificial Sequence: Synthetic oligonucleotide
  Sense strand starting at position 2985 of SEQ ID NO: 317743
uguguuuguacggagcuuu

SEQ ID NO: 508690 - RNA, 19 nt, Artificial Sequence
  Description of Artificial Sequence: Synthetic oligonucleotide
  Antisense strand to SEQ ID NO: 508689
aaagcuccguacaaacaca

SEQ ID NO: 508691 - RNA, 19 nt, Artificial Sequence
  Description of Artificial Sequence: Synthetic oligonucleotide
  Sense strand starting at position 3017 of SEQ ID NO: 317743
uuacauuugcucuguguuu

SEQ ID NO: 508692 - RNA, 19 nt, Artificial Sequence
  Description of Artificial Sequence: Synthetic oligonucleotide
  Antisense strand to SEQ ID NO: 508691
aaacacagagcaaauguaa

SEQ ID NO: 508693 - RNA, 19 nt, Artificial Sequence
  Description of Artificial Sequence: Synthetic oligonucleotide
  Sense strand starting at position 3050 of SEQ ID NO: 317743
uugagaauuuguggcccuu

SEQ ID NO: 508694 - RNA, 19 nt, Artificial Sequence
  Description of Artificial Sequence: Synthetic oligonucleotide
  Antisense strand to SEQ ID NO: 508693
aagggccacaaauucucaa

SEQ ID NO: 508695 - RNA, 19 nt, Artificial Sequence
  Description of Artificial Sequence: Synthetic oligonucleotide
  Sense strand starting at position 3073 of SEQ ID NO: 317743
ugucuuuaggcauagagcu

SEQ ID NO: 508696 - RNA, 19 nt, Artificial Sequence
  Description of Artificial Sequence: Synthetic oligonucleotide
  Antisense strand to SEQ ID NO: 508695
agcucuaugccuaaagaca

SEQ ID NO: 508697 - RNA, 19 nt, Artificial Sequence
  Description of Artificial Sequence: Synthetic oligonucleotide
  Sense strand starting at position 3081 of SEQ ID NO: 317743
ggcauagagcugugagcuu

SEQ ID NO: 508698 - RNA, 19 nt, Artificial Sequence
  Description of Artificial Sequence: Synthetic oligonucleotide
  Antisense strand to SEQ ID NO: 508697
aagcucacagcucuaugcc

SEQ ID NO: 508699 - RNA, 19 nt, Artificial Sequence
  Description of Artificial Sequence: Synthetic oligonucleotide
  Sense strand starting at position 3142 of SEQ ID NO: 317743
guauuaauguuucuaugac

SEQ ID NO: 508700 - RNA, 19 nt, Artificial Sequence
  Description of Artificial Sequence: Synthetic oligonucleotide
  Antisense strand to SEQ ID NO: 508699
gucauagaaacauuaauac

SEQ ID NO: 508701 - RNA, 19 nt, Artificial Sequence
  Description of Artificial Sequence: Synthetic oligonucleotide
  Sense strand starting at position 3358 of SEQ ID NO: 317743
ggacuuuaggcuggagaga

SEQ ID NO: 508702 - RNA, 19 nt, Artificial Sequence
  Description of Artificial Sequence: Synthetic oligonucleotide
  Antisense strand to SEQ ID NO: 508701
ucucuccagccuaaagucc

SEQ ID NO: 508703 - RNA, 19 nt, Artificial Sequence
  Description of Artificial Sequence: Synthetic oligonucleotide
  Sense strand starting at position 3367 of SEQ ID NO: 317743
gcuggagagaucugauccu

SEQ ID NO: 508704 - RNA, 19 nt, Artificial Sequence
  Description of Artificial Sequence: Synthetic oligonucleotide
  Antisense strand to SEQ ID NO: 508703
aggaucagaucucuccagc

SEQ ID NO: 508705 - RNA, 19 nt, Artificial Sequence
  Description of Artificial Sequence: Synthetic oligonucleotide
  Sense strand starting at position 148 of SEQ ID NO: 317744
uuauuagauguuggacaag

SEQ ID NO: 508706 - RNA, 19 nt, Artificial Sequence
  Description of Artificial Sequence: Synthetic oligonucleotide
  Antisense strand to SEQ ID NO: 508705
cuuguccaacaucuaauaa

SEQ ID NO: 508707 - RNA, 19 nt, Artificial Sequence
  Description of Artificial Sequence: Synthetic oligonucleotide
  Sense strand starting at position 238 of SEQ ID NO: 317744
uguaaauaauuuggagaag

SEQ ID NO: 508708 - RNA, 19 nt, Artificial Sequence
  Description of Artificial Sequence: Synthetic oligonucleotide
  Antisense strand to SEQ ID NO: 508707
cuucuccaaauuauuuaca

SEQ ID NO: 508709 - RNA, 19 nt, Artificial Sequence
  Description of Artificial Sequence: Synthetic oligonucleotide
  Sense strand starting at position 239 of SEQ ID NO: 317744
guaaauaauuuggagaagu

SEQ ID NO: 508710 - RNA, 19 nt, Artificial Sequence
  Description of Artificial Sequence: Synthetic oligonucleotide
  Antisense strand to SEQ ID NO: 508709
acuucuccaaauuauuuac

SEQ ID NO: 508711 - RNA, 19 nt, Artificial Sequence
  Description of Artificial Sequence: Synthetic oligonucleotide
  Sense strand starting at position 319 of SEQ ID NO: 317744
gcuugaaagguauggguga

SEQ ID NO: 508712 - RNA, 19 nt, Artificial Sequence
  Description of Artificial Sequence: Synthetic oligonucleotide
  Antisense strand to SEQ ID NO: 508711
ucacccauaccuuucaagc

SEQ ID NO: 508713 - RNA, 19 nt, Artificial Sequence
  Description of Artificial Sequence: Synthetic oligonucleotide
  Sense strand starting at position 969 of SEQ ID NO: 317744
cuaggcauucuggagguau

SEQ ID NO: 508714 - RNA, 19 nt, Artificial Sequence
  Description of Artificial Sequence: Synthetic oligonucleotide
  Antisense strand to SEQ ID NO: 508713
auaccuccagaaugccuag

SEQ ID NO: 508715 - RNA, 19 nt, Artificial Sequence
  Description of Artificial Sequence: Synthetic oligonucleotide
  Sense strand starting at position 973 of SEQ ID NO: 317744
gcauucuggagguaucuaa

SEQ ID NO: 508716 - RNA, 19 nt, Artificial Sequence
  Description of Artificial Sequence: Synthetic oligonucleotide
  Antisense strand to SEQ ID NO: 508715
uuagauaccuccagaaugc

SEQ ID NO: 508717 - RNA, 19 nt, Artificial Sequence
  Description of Artificial Sequence: Synthetic oligonucleotide
  Sense strand starting at position 1048 of SEQ ID NO: 317744
aaagaauguucggucaaua

SEQ ID NO: 508718 - RNA, 19 nt, Artificial Sequence
  Description of Artificial Sequence: Synthetic oligonucleotide
  Antisense strand to SEQ ID NO: 508717
uauugaccgaacauucuuu

SEQ ID NO: 508719 - RNA, 19 nt, Artificial Sequence
  Description of Artificial Sequence: Synthetic oligonucleotide
  Sense strand starting at position 1187 of SEQ ID NO: 317744
cauugaugauagcuuuaug

SEQ ID NO: 508720 - RNA, 19 nt, Artificial Sequence
  Description of Artificial Sequence: Synthetic oligonucleotide
  Antisense strand to SEQ ID NO: 508719
cauaaagcuaucaucaaug

SEQ ID NO: 508721 - RNA, 19 nt, Artificial Sequence
  Description of Artificial Sequence: Synthetic oligonucleotide
  Sense strand starting at position 1190 of SEQ ID NO: 317744
ugaugauagcuuuaugagc

SEQ ID NO: 508722 - RNA, 19 nt, Artificial Sequence
  Description of Artificial Sequence: Synthetic oligonucleotide
  Antisense strand to SEQ ID NO: 508721
gcucauaaagcuaucauca

SEQ ID NO: 508723 - RNA, 19 nt, Artificial Sequence
  Description of Artificial Sequence: Synthetic oligonucleotide
  Sense strand starting at position 1319 of SEQ ID NO: 317744
ccaacagauuucugaggau

SEQ ID NO: 508724 - RNA, 19 nt, Artificial Sequence
  Description of Artificial Sequence: Synthetic oligonucleotide
  Antisense strand to SEQ ID NO: 508723
auccucagaaaucuguugg

SEQ ID NO: 508725 - RNA, 19 nt, Artificial Sequence
  Description of Artificial Sequence: Synthetic oligonucleotide
  Sense strand starting at position 1358 of SEQ ID NO: 317744
auagguucuuccuuuacau

SEQ ID NO: 508726 - RNA, 19 nt, Artificial Sequence
  Description of Artificial Sequence: Synthetic oligonucleotide
  Antisense strand to SEQ ID NO: 508725
auguaaaggaagaaccuau

SEQ ID NO: 508727 - RNA, 19 nt, Artificial Sequence
  Description of Artificial Sequence: Synthetic oligonucleotide
  Sense strand starting at position 1506 of SEQ ID NO: 317744
augacugaccuuggcuaaa

SEQ ID NO: 508728 - RNA, 19 nt, Artificial Sequence
  Description of Artificial Sequence: Synthetic oligonucleotide
  Antisense strand to SEQ ID NO: 508727
uuuagccaaggucagucau

SEQ ID NO: 508729 - RNA, 19 nt, Artificial Sequence
  Description of Artificial Sequence: Synthetic oligonucleotide
  Sense strand starting at position 1508 of SEQ ID NO: 317744
gacugaccuuggcuaaaga

SEQ ID NO: 508730 - RNA, 19 nt, Artificial Sequence
  Description of Artificial Sequence: Synthetic oligonucleotide
  Antisense strand to SEQ ID NO: 508729
ucuuuagccaaggucaguc

SEQ ID NO: 508731 - RNA, 19 nt, Artificial Sequence
  Description of Artificial Sequence: Synthetic oligonucleotide
  Sense strand starting at position 1574 of SEQ ID NO: 317744
ucucaaauguccucuggaa

SEQ ID NO: 508732 - RNA, 19 nt, Artificial Sequence
  Description of Artificial Sequence: Synthetic oligonucleotide
  Antisense strand to SEQ ID NO: 508731
uuccagaggacauuugaga

SEQ ID NO: 508733 - RNA, 19 nt, Artificial Sequence
  Description of Artificial Sequence: Synthetic oligonucleotide
  Sense strand starting at position 1576 of SEQ ID NO: 317744
ucaaauguccucuggaaug

SEQ ID NO: 508734 - RNA, 19 nt, Artificial Sequence
  Description of Artificial Sequence: Synthetic oligonucleotide
  Antisense strand to SEQ ID NO: 508733
cauuccagaggacauuuga

SEQ ID NO: 508735 - RNA, 19 nt, Artificial Sequence
  Description of Artificial Sequence: Synthetic oligonucleotide
  Sense strand starting at position 1581 of SEQ ID NO: 317744
uguccucuggaaugacauu

SEQ ID NO: 508736 - RNA, 19 nt, Artificial Sequence
  Description of Artificial Sequence: Synthetic oligonucleotide
  Antisense strand to SEQ ID NO: 508735
aaugucauuccagaggaca

SEQ ID NO: 508737 - RNA, 19 nt, Artificial Sequence
  Description of Artificial Sequence: Synthetic oligonucleotide
  Sense strand starting at position 1809 of SEQ ID NO: 317744
ggaccuaagcugcaaauua

SEQ ID NO: 508738 - RNA, 19 nt, Artificial Sequence
  Description of Artificial Sequence: Synthetic oligonucleotide
  Antisense strand to SEQ ID NO: 508737
uaauuugcagcuuaggucc

SEQ ID NO: 508739 - RNA, 19 nt, Artificial Sequence
  Description of Artificial Sequence: Synthetic oligonucleotide
  Sense strand starting at position 1857 of SEQ ID NO: 317744
gaggguauauauguuaauc

SEQ ID NO: 508740 - RNA, 19 nt, Artificial Sequence
  Description of Artificial Sequence: Synthetic oligonucleotide
  Antisense strand to SEQ ID NO: 508739
gauuaacauauauacccuc

SEQ ID NO: 508741 - RNA, 19 nt, Artificial Sequence
  Description of Artificial Sequence: Synthetic oligonucleotide
  Sense strand starting at position 1921 of SEQ ID NO: 317744
ugucauaucccagaagccu

SEQ ID NO: 508742 - RNA, 19 nt, Artificial Sequence
  Description of Artificial Sequence: Synthetic oligonucleotide
  Antisense strand to SEQ ID NO: 508741
aggcuucugggauaugaca

SEQ ID NO: 508743 - RNA, 19 nt, Artificial Sequence
  Description of Artificial Sequence: Synthetic oligonucleotide
  Sense strand starting at position 1945 of SEQ ID NO: 317744
caccuagaggguugucaaa

SEQ ID NO: 508744 - RNA, 19 nt, Artificial Sequence
  Description of Artificial Sequence: Synthetic oligonucleotide
  Antisense strand to SEQ ID NO: 508743
uuugacaacccucuaggug

SEQ ID NO: 508745 - RNA, 19 nt, Artificial Sequence
  Description of Artificial Sequence: Synthetic oligonucleotide
  Sense strand starting at position 1964 of SEQ ID NO: 317744
auaaauguucucuggaacu

SEQ ID NO: 508746 - RNA, 19 nt, Artificial Sequence
  Description of Artificial Sequence: Synthetic oligonucleotide
  Antisense strand to SEQ ID NO: 508745
aguuccagagaacauuuau

SEQ ID NO: 508747 - RNA, 19 nt, Artificial Sequence
  Description of Artificial Sequence: Synthetic oligonucleotide
  Sense strand starting at position 2010 of SEQ ID NO: 317744
aguaguaacccugaaacuc

SEQ ID NO: 508748 - RNA, 19 nt, Artificial Sequence
  Description of Artificial Sequence: Synthetic oligonucleotide
  Antisense strand to SEQ ID NO: 508747
gaguuucaggguuacuacu

SEQ ID NO: 508749 - RNA, 19 nt, Artificial Sequence
  Description of Artificial Sequence: Synthetic oligonucleotide
  Sense strand starting at position 2099 of SEQ ID NO: 317744
auugcuacugcauagaaau

SEQ ID NO: 508750 - RNA, 19 nt, Artificial Sequence
  Description of Artificial Sequence: Synthetic oligonucleotide
  Antisense strand to SEQ ID NO: 508749
auuucuaugcaguagcaau

SEQ ID NO: 508751 - RNA, 19 nt, Artificial Sequence
  Description of Artificial Sequence: Synthetic oligonucleotide
  Sense strand starting at position 2244 of SEQ ID NO: 317744
gagacaaugugauugugua

SEQ ID NO: 508752 - RNA, 19 nt, Artificial Sequence
  Description of Artificial Sequence: Synthetic oligonucleotide
  Antisense strand to SEQ ID NO: 508751
uacacaaucacauugucuc

SEQ ID NO: 508753 - RNA, 19 nt, Artificial Sequence
  Description of Artificial Sequence: Synthetic oligonucleotide
  Sense strand starting at position 2743 of SEQ ID NO: 317744
uuaucacauggugggaaau

SEQ ID NO: 508754 - RNA, 19 nt, Artificial Sequence
  Description of Artificial Sequence: Synthetic oligonucleotide
  Antisense strand to SEQ ID NO: 508753
auuucccaccaugugauaa

SEQ ID NO: 508755 - RNA, 19 nt, Artificial Sequence
  Description of Artificial Sequence: Synthetic oligonucleotide
  Sense strand starting at position 2761 of SEQ ID NO: 317744
ugaugaucucagcaagucu

SEQ ID NO: 508756 - RNA, 19 nt, Artificial Sequence
  Description of Artificial Sequence: Synthetic oligonucleotide
  Antisense strand to SEQ ID NO: 508755
agacuugcugagaucauca

SEQ ID NO: 508757 - RNA, 19 nt, Artificial Sequence
  Description of Artificial Sequence: Synthetic oligonucleotide
  Sense strand starting at position 2820 of SEQ ID NO: 317744
ggucacauaguuuaauaua

SEQ ID NO: 508758 - RNA, 19 nt, Artificial Sequence
  Description of Artificial Sequence: Synthetic oligonucleotide
  Antisense strand to SEQ ID NO: 508757
uauauuaaacuaugugacc

SEQ ID NO: 508759 - RNA, 19 nt, Artificial Sequence
  Description of Artificial Sequence: Synthetic oligonucleotide
  Sense strand starting at position 2860 of SEQ ID NO: 317744
gccagaguaagucagaacu

SEQ ID NO: 508760 - RNA, 19 nt, Artificial Sequence
  Description of Artificial Sequence: Synthetic oligonucleotide
  Antisense strand to SEQ ID NO: 508759
aguucugacuuacucuggc

SEQ ID NO: 508761 - RNA, 19 nt, Artificial Sequence
  Description of Artificial Sequence: Synthetic oligonucleotide
  Sense strand starting at position 2866 of SEQ ID NO: 317744
guaagucagaacuggaaua

SEQ ID NO: 508762 - RNA, 19 nt, Artificial Sequence
  Description of Artificial Sequence: Synthetic oligonucleotide
  Antisense strand to SEQ ID NO: 508761
uauuccaguucugacuuac

SEQ ID NO: 508763 - RNA, 19 nt, Artificial Sequence
  Description of Artificial Sequence: Synthetic oligonucleotide
  Sense strand starting at position 3227 of SEQ ID NO: 317744
ccaguaggaugagcuuaaa

SEQ ID NO: 508764 - RNA, 19 nt, Artificial Sequence
  Description of Artificial Sequence: Synthetic oligonucleotide
  Antisense strand to SEQ ID NO: 508763
uuuaagcucauccuacugg

SEQ ID NO: 508765 - RNA, 19 nt, Artificial Sequence
  Description of Artificial Sequence: Synthetic oligonucleotide
  Sense strand starting at position 3253 of SEQ ID NO: 317744
uuauuuguaaugugggcua

SEQ ID NO: 508766 - RNA, 19 nt, Artificial Sequence
  Description of Artificial Sequence: Synthetic oligonucleotide
  Antisense strand to SEQ ID NO: 508765
uagcccacauuacaaauaa

SEQ ID NO: 508767 - RNA, 19 nt, Artificial Sequence
  Description of Artificial Sequence: Synthetic oligonucleotide
  Sense strand starting at position 3258 of SEQ ID NO: 317744
uguaaugugggcuaugaag

SEQ ID NO: 508768 - RNA, 19 nt, Artificial Sequence
  Description of Artificial Sequence: Synthetic oligonucleotide
  Antisense strand to SEQ ID NO: 508767
cuucauagcccacauuaca

SEQ ID NO: 508769 - RNA, 19 nt, Artificial Sequence
  Description of Artificial Sequence: Synthetic oligonucleotide
  Sense strand starting at position 3370 of SEQ ID NO: 317744
gaaugucugugauccaaac

SEQ ID NO: 508770 - RNA, 19 nt, Artificial Sequence
  Description of Artificial Sequence: Synthetic oligonucleotide
  Antisense strand to SEQ ID NO: 508769
guuuggaucacagacauuc

SEQ ID NO: 508771 - RNA, 19 nt, Artificial Sequence
  Description of Artificial Sequence: Synthetic oligonucleotide
  Sense strand starting at position 3508 of SEQ ID NO: 317744
uagagcagggauugguaaa

SEQ ID NO: 508772 - RNA, 19 nt, Artificial Sequence
  Description of Artificial Sequence: Synthetic oligonucleotide
  Antisense strand to SEQ ID NO: 508771
uuuaccaaucccugcucua

SEQ ID NO: 508773 - RNA, 19 nt, Artificial Sequence
  Description of Artificial Sequence: Synthetic oligonucleotide
  Sense strand starting at position 3751 of SEQ ID NO: 317744
ggcuuugggaaguagaagu

SEQ ID NO: 508774 - RNA, 19 nt, Artificial Sequence
  Description of Artificial Sequence: Synthetic oligonucleotide
  Antisense strand to SEQ ID NO: 508773
acuucuacuucccaaagcc

SEQ ID NO: 508775 - RNA, 19 nt, Artificial Sequence
  Description of Artificial Sequence: Synthetic oligonucleotide
  Sense strand starting at position 3759 of SEQ ID NO: 317744
gaaguagaaguaggcuaau

SEQ ID NO: 508776 - RNA, 19 nt, Artificial Sequence
  Description of Artificial Sequence: Synthetic oligonucleotide
  Antisense strand to SEQ ID NO: 508775
auuagccuacuucuacuuc

SEQ ID NO: 508777 - RNA, 19 nt, Artificial Sequence
  Description of Artificial Sequence: Synthetic oligonucleotide
  Sense strand starting at position 3781 of SEQ ID NO: 317744
gacugaugaguaggugauu

SEQ ID NO: 508778 - RNA, 19 nt, Artificial Sequence
  Description of Artificial Sequence: Synthetic oligonucleotide
  Antisense strand to SEQ ID NO: 508777
aaucaccuacucaucaguc

SEQ ID NO: 508779 - RNA, 19 nt, Artificial Sequence
  Description of Artificial Sequence: Synthetic oligonucleotide
  Sense strand starting at position 3784 of SEQ ID NO: 317744
ugaugaguaggugauuguu

SEQ ID NO: 508780 - RNA, 19 nt, Artificial Sequence
  Description of Artificial Sequence: Synthetic oligonucleotide
  Antisense strand to SEQ ID NO: 508779
aacaaucaccuacucauca

SEQ ID NO: 508781 - RNA, 19 nt, Artificial Sequence
  Description of Artificial Sequence: Synthetic oligonucleotide
  Sense strand starting at position 3800 of SEQ ID NO: 317744
guuucagagcuaggaauug

SEQ ID NO: 508782 - RNA, 19 nt, Artificial Sequence
  Description of Artificial Sequence: Synthetic oligonucleotide
  Antisense strand to SEQ ID NO: 508781
caauuccuagcucugaaac

SEQ ID NO: 508783 - RNA, 19 nt, Artificial Sequence
  Description of Artificial Sequence: Synthetic oligonucleotide
  Sense strand starting at position 3869 of SEQ ID NO: 317744
auagguguucucuaaacaa

SEQ ID NO: 508784 - RNA, 19 nt, Artificial Sequence
  Description of Artificial Sequence: Synthetic oligonucleotide
  Antisense strand to SEQ ID NO: 508783
uuguuuagagaacaccuau

SEQ ID NO: 508785 - RNA, 19 nt, Artificial Sequence
  Description of Artificial Sequence: Synthetic oligonucleotide
  Sense strand starting at position 257 of SEQ ID NO: 317745
agagguuucuguuuccuaa

SEQ ID NO: 508786 - RNA, 19 nt, Artificial Sequence
  Description of Artificial Sequence: Synthetic oligonucleotide
  Antisense strand to SEQ ID NO: 508785
uuaggaaacagaaaccucu

SEQ ID NO: 508787 - RNA, 19 nt, Artificial Sequence
  Description of Artificial Sequence: Synthetic oligonucleotide
  Sense strand starting at position 628 of SEQ ID NO: 317745
gauaaugauuucuagguua

SEQ ID NO: 508788 - RNA, 19 nt, Artificial Sequence
  Description of Artificial Sequence: Synthetic oligonucleotide
  Antisense strand to SEQ ID NO: 508787
uaaccuagaaaucauuauc

SEQ ID NO: 508789 - RNA, 19 nt, Artificial Sequence
  Description of Artificial Sequence: Synthetic oligonucleotide
  Sense strand starting at position 791 of SEQ ID NO: 317745
ggcaaaugaagugguaacu

SEQ ID NO: 508790 - RNA, 19 nt, Artificial Sequence
  Description of Artificial Sequence: Synthetic oligonucleotide
  Antisense strand to SEQ ID NO: 508789
aguuaccacuucauuugcc

SEQ ID NO: 508791 - RNA, 19 nt, Artificial Sequence
  Description of Artificial Sequence: Synthetic oligonucleotide
  Sense strand starting at position 851 of SEQ ID NO: 317745
cuuugugacuuaguuacau

SEQ ID NO: 508792 - RNA, 19 nt, Artificial Sequence
  Description of Artificial Sequence: Synthetic oligonucleotide
  Antisense strand to SEQ ID NO: 508791
auguaacuaagucacaaag

SEQ ID NO: 508793 - RNA, 19 nt, Artificial Sequence
  Description of Artificial Sequence: Synthetic oligonucleotide
  Sense strand starting at position 970 of SEQ ID NO: 317745
ucaguaaauccagaauugu

SEQ ID NO: 508794 - RNA, 19 nt, Artificial Sequence
  Description of Artificial Sequence: Synthetic oligonucleotide
  Antisense strand to SEQ ID NO: 508793
acaauucuggauuuacuga

SEQ ID NO: 508795 - RNA, 19 nt, Artificial Sequence
  Description of Artificial Sequence: Synthetic oligonucleotide
  Sense strand starting at position 1404 of SEQ ID NO: 317745
aguccuauagauggauacu

SEQ ID NO: 508796 - RNA, 19 nt, Artificial Sequence
  Description of Artificial Sequence: Synthetic oligonucleotide
  Antisense strand to SEQ ID NO: 508795
aguauccaucuauaggacu

SEQ ID NO: 508797 - RNA, 19 nt, Artificial Sequence
  Description of Artificial Sequence: Synthetic oligonucleotide
  Sense strand starting at position 1843 of SEQ ID NO: 317745
augagcucucagcaggaau

SEQ ID NO: 508798 - RNA, 19 nt, Artificial Sequence
  Description of Artificial Sequence: Synthetic oligonucleotide
  Antisense strand to SEQ ID NO: 508797
auuccugcugagagcucau

SEQ ID NO: 508799 - RNA, 19 nt, Artificial Sequence
  Description of Artificial Sequence: Synthetic oligonucleotide
  Sense strand starting at position 1854 of SEQ ID NO: 317745
gcaggaaucuuacuauaug

SEQ ID NO: 508800 - RNA, 19 nt, Artificial Sequence
  Description of Artificial Sequence: Synthetic oligonucleotide
  Antisense strand to SEQ ID NO: 508799
cauauaguaagauuccugc

SEQ ID NO: 508801 - RNA, 19 nt, Artificial Sequence
  Description of Artificial Sequence: Synthetic oligonucleotide
  Sense strand starting at position 1948 of SEQ ID NO: 317745
aaugaauguuauguugaag

SEQ ID NO: 508802 - RNA, 19 nt, Artificial Sequence
  Description of Artificial Sequence: Synthetic oligonucleotide
  Antisense strand to SEQ ID NO: 508801
cuucaacauaacauucauu

SEQ ID NO: 508803 - RNA, 19 nt, Artificial Sequence
  Description of Artificial Sequence: Synthetic oligonucleotide
  Sense strand starting at position 1954 of SEQ ID NO: 317745
uguuauguugaagacauac

SEQ ID NO: 508804 - RNA, 19 nt, Artificial Sequence
  Description of Artificial Sequence: Synthetic oligonucleotide
  Antisense strand to SEQ ID NO: 508803
guaugucuucaacauaaca

SEQ ID NO: 508805 - RNA, 19 nt, Artificial Sequence
  Description of Artificial Sequence: Synthetic oligonucleotide
  Sense strand starting at position 1977 of SEQ ID NO: 317745
uuaagagagacggguauau

SEQ ID NO: 508806 - RNA, 19 nt, Artificial Sequence
  Description of Artificial Sequence: Synthetic oligonucleotide
  Antisense strand to SEQ ID NO: 508805
auauacccgucucucuuaa

SEQ ID NO: 508807 - RNA, 19 nt, Artificial Sequence
  Description of Artificial Sequence: Synthetic oligonucleotide
  Sense strand starting at position 2002 of SEQ ID NO: 317745
gagaaacuccuauguaugc

SEQ ID NO: 508808 - RNA, 19 nt, Artificial Sequence
  Description of Artificial Sequence: Synthetic oligonucleotide
  Antisense strand to SEQ ID NO: 508807
gcauacauaggaguuucuc

SEQ ID NO: 508809 - RNA, 19 nt, Artificial Sequence
  Description of Artificial Sequence: Synthetic oligonucleotide
  Sense strand starting at position 2015 of SEQ ID NO: 317745
guaugcuaaaccggauuga

SEQ ID NO: 508810 - RNA, 19 nt, Artificial Sequence
  Description of Artificial Sequence: Synthetic oligonucleotide
  Antisense strand to SEQ ID NO: 508809
ucaauccgguuuagcauac

SEQ ID NO: 508811 - RNA, 19 nt, Artificial Sequence
  Description of Artificial Sequence: Synthetic oligonucleotide
  Sense strand starting at position 2019 of SEQ ID NO: 317745
gcuaaaccggauugagaau

SEQ ID NO: 508812 - RNA, 19 nt, Artificial Sequence
  Description of Artificial Sequence: Synthetic oligonucleotide
  Antisense strand to SEQ ID NO: 508811
auucucaauccgguuuagc

SEQ ID NO: 508813 - RNA, 19 nt, Artificial Sequence
  Description of Artificial Sequence: Synthetic oligonucleotide
  Sense strand starting at position 2712 of SEQ ID NO: 317745
ccuaaaguauguucuacaa

SEQ ID NO: 508814 - RNA, 19 nt, Artificial Sequence
  Description of Artificial Sequence: Synthetic oligonucleotide
  Antisense strand to SEQ ID NO: 508813
uuguagaacauacuuuagg

SEQ ID NO: 508815 - RNA, 19 nt, Artificial Sequence
  Description of Artificial Sequence: Synthetic oligonucleotide
  Sense strand starting at position 2847 of SEQ ID NO: 317745
uaggcacugcuugaaguaa

SEQ ID NO: 508816 - RNA, 19 nt, Artificial Sequence
  Description of Artificial Sequence: Synthetic oligonucleotide
  Antisense strand to SEQ ID NO: 508815
uuacuucaagcagugccua

SEQ ID NO: 508817 - RNA, 19 nt, Artificial Sequence
  Description of Artificial Sequence: Synthetic oligonucleotide
  Sense strand starting at position 2892 of SEQ ID NO: 317745
uguauuguaguaugaggau

SEQ ID NO: 508818 - RNA, 19 nt, Artificial Sequence
  Description of Artificial Sequence: Synthetic oligonucleotide
  Antisense strand to SEQ ID NO: 508817
auccucauacuacaauaca

SEQ ID NO: 508819 - RNA, 19 nt, Artificial Sequence
  Description of Artificial Sequence: Synthetic oligonucleotide
  Sense strand starting at position 3037 of SEQ ID NO: 317745
cauagugagcaggaaguuu

SEQ ID NO: 508820 - RNA, 19 nt, Artificial Sequence
  Description of Artificial Sequence: Synthetic oligonucleotide
  Antisense strand to SEQ ID NO: 508819
aaacuuccugcucacuaug

SEQ ID NO: 508821 - RNA, 19 nt, Artificial Sequence
  Description of Artificial Sequence: Synthetic oligonucleotide
  Sense strand starting at position 3054 of SEQ ID NO: 317745
uugugucuucugggauaac

SEQ ID NO: 508822 - RNA, 19 nt, Artificial Sequence
  Description of Artificial Sequence: Synthetic oligonucleotide
  Antisense strand to SEQ ID NO: 508821
guuaucccagaagacacaa

SEQ ID NO: 508823 - RNA, 19 nt, Artificial Sequence
  Description of Artificial Sequence: Synthetic oligonucleotide
  Sense strand starting at position 3057 of SEQ ID NO: 317745
ugucuucugggauaacuca

SEQ ID NO: 508824 - RNA, 19 nt, Artificial Sequence
  Description of Artificial Sequence: Synthetic oligonucleotide
  Antisense strand to SEQ ID NO: 508823
ugaguuaucccagaagaca

SEQ ID NO: 508825 - RNA, 19 nt, Artificial Sequence
  Description of Artificial Sequence: Synthetic oligonucleotide
  Sense strand starting at position 3107 of SEQ ID NO: 317745
uguguauaucuguauggau

SEQ ID NO: 508826 - RNA, 19 nt, Artificial Sequence
  Description of Artificial Sequence: Synthetic oligonucleotide
  Antisense strand to SEQ ID NO: 508825
auccauacagauauacaca

SEQ ID NO: 508827 - RNA, 19 nt, Artificial Sequence
  Description of Artificial Sequence: Synthetic oligonucleotide
  Sense strand starting at position 3109 of SEQ ID NO: 317745
uguauaucuguauggauag

SEQ ID NO: 508828 - RNA, 19 nt, Artificial Sequence
  Description of Artificial Sequence: Synthetic oligonucleotide
  Antisense strand to SEQ ID NO: 508827
cuauccauacagauauaca

SEQ ID NO: 508829 - RNA, 19 nt, Artificial Sequence
  Description of Artificial Sequence: Synthetic oligonucleotide
  Sense strand starting at position 3120 of SEQ ID NO: 317745
auggauagggcuuguguaa

SEQ ID NO: 508830 - RNA, 19 nt, Artificial Sequence
  Description of Artificial Sequence: Synthetic oligonucleotide
  Antisense strand to SEQ ID NO: 508829
uuacacaagcccuauccau

SEQ ID NO: 508831 - RNA, 19 nt, Artificial Sequence
  Description of Artificial Sequence: Synthetic oligonucleotide
  Sense strand starting at position 3135 of SEQ ID NO: 317745
guaacugacuucccaguuu

SEQ ID NO: 508832 - RNA, 19 nt, Artificial Sequence
  Description of Artificial Sequence: Synthetic oligonucleotide
  Antisense strand to SEQ ID NO: 508831
aaacugggaagucaguuac

SEQ ID NO: 508833 - RNA, 19 nt, Artificial Sequence
  Description of Artificial Sequence: Synthetic oligonucleotide
  Sense strand starting at position 3204 of SEQ ID NO: 317745
gaggcauucuuugauuuag

SEQ ID NO: 508834 - RNA, 19 nt, Artificial Sequence
  Description of Artificial Sequence: Synthetic oligonucleotide
  Antisense strand to SEQ ID NO: 508833
cuaaaucaaagaaugccuc

SEQ ID NO: 508835 - RNA, 19 nt, Artificial Sequence
  Description of Artificial Sequence: Synthetic oligonucleotide
  Sense strand starting at position 3252 of SEQ ID NO: 317745
uucuguguucuguaaucca

SEQ ID NO: 508836 - RNA, 19 nt, Artificial Sequence
  Description of Artificial Sequence: Synthetic oligonucleotide
  Antisense strand to SEQ ID NO: 508835
uggauuacagaacacagaa

SEQ ID NO: 508837 - RNA, 19 nt, Artificial Sequence
  Description of Artificial Sequence: Synthetic oligonucleotide
  Sense strand starting at position 3268 of SEQ ID NO: 317745
ccauuugguuaugacaaac

SEQ ID NO: 508838 - RNA, 19 nt, Artificial Sequence
  Description of Artificial Sequence: Synthetic oligonucleotide
  Antisense strand to SEQ ID NO: 508837
guuugucauaaccaaaugg

SEQ ID NO: 508839 - RNA, 19 nt, Artificial Sequence
  Description of Artificial Sequence: Synthetic oligonucleotide
  Sense strand starting at position 3299 of SEQ ID NO: 317745
ugcuguuuggagucagugu

SEQ ID NO: 508840 - RNA, 19 nt, Artificial Sequence
  Description of Artificial Sequence: Synthetic oligonucleotide
  Antisense strand to SEQ ID NO: 508839
acacugacuccaaacagca

SEQ ID NO: 508841 - RNA, 19 nt, Artificial Sequence
  Description of Artificial Sequence: Synthetic oligonucleotide
  Sense strand starting at position 3307 of SEQ ID NO: 317745
ggagucagugugcaaacaa

SEQ ID NO: 508842 - RNA, 19 nt, Artificial Sequence
  Description of Artificial Sequence: Synthetic oligonucleotide
  Antisense strand to SEQ ID NO: 508841
uuguuugcacacugacucc

SEQ ID NO: 508843 - RNA, 19 nt, Artificial Sequence
  Description of Artificial Sequence: Synthetic oligonucleotide
  Sense strand starting at position 3460 of SEQ ID NO: 317745
guacuugauucuuuacuca

SEQ ID NO: 508844 - RNA, 19 nt, Artificial Sequence
  Description of Artificial Sequence: Synthetic oligonucleotide
  Antisense strand to SEQ ID NO: 508843
ugaguaaagaaucaaguac

SEQ ID NO: 508845 - RNA, 19 nt, Artificial Sequence
  Description of Artificial Sequence: Synthetic oligonucleotide
  Sense strand starting at position 3577 of SEQ ID NO: 317745
auaaguauaugacugggua

SEQ ID NO: 508846 - RNA, 19 nt, Artificial Sequence
  Description of Artificial Sequence: Synthetic oligonucleotide
  Antisense strand to SEQ ID NO: 508845
uacccagucauauacuuau

SEQ ID NO: 508847 - RNA, 19 nt, Artificial Sequence
  Description of Artificial Sequence: Synthetic oligonucleotide
  Sense strand starting at position 3578 of SEQ ID NO: 317745
uaaguauaugacuggguaa

SEQ ID NO: 508848 - RNA, 19 nt, Artificial Sequence
  Description of Artificial Sequence: Synthetic oligonucleotide
  Antisense strand to SEQ ID NO: 508847
uuacccagucauauacuua

SEQ ID NO: 508849 - RNA, 19 nt, Artificial Sequence
  Description of Artificial Sequence: Synthetic oligonucleotide
  Sense strand starting at position 3580 of SEQ ID NO: 317745
aguauaugacuggguaauu

SEQ ID NO: 508850 - RNA, 19 nt, Artificial Sequence
  Description of Artificial Sequence: Synthetic oligonucleotide
  Antisense strand to SEQ ID NO: 508849
aauuacccagucauauacu

SEQ ID NO: 508851 - RNA, 19 nt, Artificial Sequence
  Description of Artificial Sequence: Synthetic oligonucleotide
  Sense strand starting at position 3632 of SEQ ID NO: 317745
ugaugucauuuacaagggu

SEQ ID NO: 508852 - RNA, 19 nt, Artificial Sequence
  Description of Artificial Sequence: Synthetic oligonucleotide
  Antisense strand to SEQ ID NO: 508851
acccuuguaaaugacauca

SEQ ID NO: 508853 - RNA, 19 nt, Artificial Sequence
  Description of Artificial Sequence: Synthetic oligonucleotide
  Sense strand starting at position 3648 of SEQ ID NO: 317745
gguguaaagugaccaaacu

SEQ ID NO: 508854 - RNA, 19 nt, Artificial Sequence
  Description of Artificial Sequence: Synthetic oligonucleotide
  Antisense strand to SEQ ID NO: 508853
aguuuggucacuuuacacc

SEQ ID NO: 508855 - RNA, 19 nt, Artificial Sequence
  Description of Artificial Sequence: Synthetic oligonucleotide
  Sense strand starting at position 3649 of SEQ ID NO: 317745
guguaaagugaccaaacuu

SEQ ID NO: 508856 - RNA, 19 nt, Artificial Sequence
  Description of Artificial Sequence: Synthetic oligonucleotide
  Antisense strand to SEQ ID NO: 508855
aaguuuggucacuuuacac

SEQ ID NO: 508857 - RNA, 19 nt, Artificial Sequence
  Description of Artificial Sequence: Synthetic oligonucleotide
  Sense strand starting at position 3668 of SEQ ID NO: 317745
ggaaauaagccauggccau

SEQ ID NO: 508858 - RNA, 19 nt, Artificial Sequence
  Description of Artificial Sequence: Synthetic oligonucleotide
  Antisense strand to SEQ ID NO: 508857
auggccauggcuuauuucc

SEQ ID NO: 508859 - RNA, 19 nt, Artificial Sequence
  Description of Artificial Sequence: Synthetic oligonucleotide
  Sense strand starting at position 3754 of SEQ ID NO: 317745
gguaguuuauaggcugaua

SEQ ID NO: 508860 - RNA, 19 nt, Artificial Sequence
  Description of Artificial Sequence: Synthetic oligonucleotide
  Antisense strand to SEQ ID NO: 508859
uaucagccuauaaacuacc

SEQ ID NO: 508861 - RNA, 19 nt, Artificial Sequence
  Description of Artificial Sequence: Synthetic oligonucleotide
  Sense strand starting at position 3756 of SEQ ID NO: 317745
uaguuuauaggcugauaga

SEQ ID NO: 508862 - RNA, 19 nt, Artificial Sequence
  Description of Artificial Sequence: Synthetic oligonucleotide
  Antisense strand to SEQ ID NO: 508861
ucuaucagccuauaaacua

SEQ ID NO: 508863 - RNA, 19 nt, Artificial Sequence
  Description of Artificial Sequence: Synthetic oligonucleotide
  Sense strand starting at position 3757 of SEQ ID NO: 317745
aguuuauaggcugauagau

SEQ ID NO: 508864 - RNA, 19 nt, Artificial Sequence
  Description of Artificial Sequence: Synthetic oligonucleotide
  Antisense strand to SEQ ID NO: 508863
aucuaucagccuauaaacu

SEQ ID NO: 508865 - RNA, 19 nt, Artificial Sequence
  Description of Artificial Sequence: Synthetic oligonucleotide
  Sense strand starting at position 120 of SEQ ID NO: 317746
aagggaauccugugacugu

SEQ ID NO: 508866 - RNA, 19 nt, Artificial Sequence
  Description of Artificial Sequence: Synthetic oligonucleotide
  Antisense strand to SEQ ID NO: 508865
acagucacaggauucccuu

SEQ ID NO: 508867 - RNA, 19 nt, Artificial Sequence
  Description of Artificial Sequence: Synthetic oligonucleotide
  Sense strand starting at position 129 of SEQ ID NO: 317746
cugugacugucucucugaa

SEQ ID NO: 508868 - RNA, 19 nt, Artificial Sequence
  Description of Artificial Sequence: Synthetic oligonucleotide
  Antisense strand to SEQ ID NO: 508867
uucagagagacagucacag

SEQ ID NO: 508869 - RNA, 19 nt, Artificial Sequence
  Description of Artificial Sequence: Synthetic oligonucleotide
  Sense strand starting at position 131 of SEQ ID NO: 317746
gugacugucucucugaauu

SEQ ID NO: 508870 - RNA, 19 nt, Artificial Sequence
  Description of Artificial Sequence: Synthetic oligonucleotide
  Antisense strand to SEQ ID NO: 508869
aauucagagagacagucac

SEQ ID NO: 508871 - RNA, 19 nt, Artificial Sequence
  Description of Artificial Sequence: Synthetic oligonucleotide
  Sense strand starting at position 330 of SEQ ID NO: 317746
guaagaacucuacaugcga

SEQ ID NO: 508872 - RNA, 19 nt, Artificial Sequence
  Description of Artificial Sequence: Synthetic oligonucleotide
  Antisense strand to SEQ ID NO: 508871
ucgcauguagaguucuuac

SEQ ID NO: 508873 - RNA, 19 nt, Artificial Sequence
  Description of Artificial Sequence: Synthetic oligonucleotide
  Sense strand starting at position 344 of SEQ ID NO: 317746
ugcgacuuggagugaaaua

SEQ ID NO: 508874 - RNA, 19 nt, Artificial Sequence
  Description of Artificial Sequence: Synthetic oligonucleotide
  Antisense strand to SEQ ID NO: 508873
uauuucacuccaagucgca

SEQ ID NO: 508875 - RNA, 19 nt, Artificial Sequence
  Description of Artificial Sequence: Synthetic oligonucleotide
  Sense strand starting at position 345 of SEQ ID NO: 317746
gcgacuuggagugaaauaa

SEQ ID NO: 508876 - RNA, 19 nt, Artificial Sequence
  Description of Artificial Sequence: Synthetic oligonucleotide
  Antisense strand to SEQ ID NO: 508875
uuauuucacuccaagucgc

SEQ ID NO: 508877 - RNA, 19 nt, Artificial Sequence
  Description of Artificial Sequence: Synthetic oligonucleotide
  Sense strand starting at position 355 of SEQ ID NO: 317746
gugaaauaauugcuuuagu

SEQ ID NO: 508878 - RNA, 19 nt, Artificial Sequence
  Description of Artificial Sequence: Synthetic oligonucleotide
  Antisense strand to SEQ ID NO: 508877
acuaaagcaauuauuucac

SEQ ID NO: 508879 - RNA, 19 nt, Artificial Sequence
  Description of Artificial Sequence: Synthetic oligonucleotide
  Sense strand starting at position 356 of SEQ ID NO: 317746
ugaaauaauugcuuuagug

SEQ ID NO: 508880 - RNA, 19 nt, Artificial Sequence
  Description of Artificial Sequence: Synthetic oligonucleotide
  Antisense strand to SEQ ID NO: 508879
cacuaaagcaauuauuuca

SEQ ID NO: 508881 - RNA, 19 nt, Artificial Sequence
  Description of Artificial Sequence: Synthetic oligonucleotide
  Sense strand starting at position 385 of SEQ ID NO: 317746
uuuagaacuugucuaucag

SEQ ID NO: 508882 - RNA, 19 nt, Artificial Sequence
  Description of Artificial Sequence: Synthetic oligonucleotide
  Antisense strand to SEQ ID NO: 508881
cugauagacaaguucuaaa

SEQ ID NO: 508883 - RNA, 19 nt, Artificial Sequence
  Description of Artificial Sequence: Synthetic oligonucleotide
  Sense strand starting at position 709 of SEQ ID NO: 317746
gagagagucucaccuuauu

SEQ ID NO: 508884 - RNA, 19 nt, Artificial Sequence
  Description of Artificial Sequence: Synthetic oligonucleotide
  Antisense strand to SEQ ID NO: 508883
aauaaggugagacucucuc

SEQ ID NO: 508885 - RNA, 19 nt, Artificial Sequence
  Description of Artificial Sequence: Synthetic oligonucleotide
  Sense strand starting at position 768 of SEQ ID NO: 317746
gcccaugaguacccaauau

SEQ ID NO: 508886 - RNA, 19 nt, Artificial Sequence
  Description of Artificial Sequence: Synthetic oligonucleotide
  Antisense strand to SEQ ID NO: 508885
auauuggguacucaugggc

SEQ ID NO: 508887 - RNA, 19 nt, Artificial Sequence
  Description of Artificial Sequence: Synthetic oligonucleotide
  Sense strand starting at position 980 of SEQ ID NO: 317746
cacagaaggcauggcuuaa

SEQ ID NO: 508888 - RNA, 19 nt, Artificial Sequence
  Description of Artificial Sequence: Synthetic oligonucleotide
  Antisense strand to SEQ ID NO: 508887
uuaagccaugccuucugug

SEQ ID NO: 508889 - RNA, 19 nt, Artificial Sequence
  Description of Artificial Sequence: Synthetic oligonucleotide
  Sense strand starting at position 984 of SEQ ID NO: 317746
gaaggcauggcuuaaucaa

SEQ ID NO: 508890 - RNA, 19 nt, Artificial Sequence
  Description of Artificial Sequence: Synthetic oligonucleotide
  Antisense strand to SEQ ID NO: 508889
uugauuaagccaugccuuc

SEQ ID NO: 508891 - RNA, 19 nt, Artificial Sequence
  Description of Artificial Sequence: Synthetic oligonucleotide
  Sense strand starting at position 991 of SEQ ID NO: 317746
uggcuuaaucaagauccau

SEQ ID NO: 508892 - RNA, 19 nt, Artificial Sequence
  Description of Artificial Sequence: Synthetic oligonucleotide
  Antisense strand to SEQ ID NO: 508891
auggaucuugauuaagcca

SEQ ID NO: 508893 - RNA, 19 nt, Artificial Sequence
  Description of Artificial Sequence: Synthetic oligonucleotide
  Sense strand starting at position 1064 of SEQ ID NO: 317746
uggacaauacagugacuau

SEQ ID NO: 508894 - RNA, 19 nt, Artificial Sequence
  Description of Artificial Sequence: Synthetic oligonucleotide
  Antisense strand to SEQ ID NO: 508893
auagucacuguauugucca

SEQ ID NO: 508895 - RNA, 19 nt, Artificial Sequence
  Description of Artificial Sequence: Synthetic oligonucleotide
  Sense strand starting at position 1098 of SEQ ID NO: 317746
acugacagaucugugaaau

SEQ ID NO: 508896 - RNA, 19 nt, Artificial Sequence
  Description of Artificial Sequence: Synthetic oligonucleotide
  Antisense strand to SEQ ID NO: 508895
auuucacagaucugucagu

SEQ ID NO: 508897 - RNA, 19 nt, Artificial Sequence
  Description of Artificial Sequence: Synthetic oligonucleotide
  Sense strand starting at position 1110 of SEQ ID NO: 317746
gugaaauuauuccuacagu

SEQ ID NO: 508898 - RNA, 19 nt, Artificial Sequence
  Description of Artificial Sequence: Synthetic oligonucleotide
  Antisense strand to SEQ ID NO: 508897
acuguaggaauaauuucac

SEQ ID NO: 508899 - RNA, 19 nt, Artificial Sequence
  Description of Artificial Sequence: Synthetic oligonucleotide
  Sense strand starting at position 1233 of SEQ ID NO: 317746
agcgauuucuaucuuuggu

SEQ ID NO: 508900 - RNA, 19 nt, Artificial Sequence
  Description of Artificial Sequence: Synthetic oligonucleotide
  Antisense strand to SEQ ID NO: 508899
accaaagauagaaaucgcu

SEQ ID NO: 508901 - RNA, 19 nt, Artificial Sequence
  Description of Artificial Sequence: Synthetic oligonucleotide
  Sense strand starting at position 1460 of SEQ ID NO: 317746
agauaaaucgcaggacccu

SEQ ID NO: 508902 - RNA, 19 nt, Artificial Sequence
  Description of Artificial Sequence: Synthetic oligonucleotide
  Antisense strand to SEQ ID NO: 508901
aggguccugcgauuuaucu

SEQ ID NO: 508903 - RNA, 19 nt, Artificial Sequence
  Description of Artificial Sequence: Synthetic oligonucleotide
  Sense strand starting at position 1461 of SEQ ID NO: 317746
gauaaaucgcaggacccua

SEQ ID NO: 508904 - RNA, 19 nt, Artificial Sequence
  Description of Artificial Sequence: Synthetic oligonucleotide
  Antisense strand to SEQ ID NO: 508903
uaggguccugcgauuuauc

SEQ ID NO: 508905 - RNA, 19 nt, Artificial Sequence
  Description of Artificial Sequence: Synthetic oligonucleotide
  Sense strand starting at position 2103 of SEQ ID NO: 317746
cuuaaucugugccuugaaa

SEQ ID NO: 508906 - RNA, 19 nt, Artificial Sequence
  Description of Artificial Sequence: Synthetic oligonucleotide
  Antisense strand to SEQ ID NO: 508905
uuucaaggcacagauuaag

SEQ ID NO: 508907 - RNA, 19 nt, Artificial Sequence
  Description of Artificial Sequence: Synthetic oligonucleotide
  Sense strand starting at position 2170 of SEQ ID NO: 317746
cuguuuggaaguuauagau

SEQ ID NO: 508908 - RNA, 19 nt, Artificial Sequence
  Description of Artificial Sequence: Synthetic oligonucleotide
  Antisense strand to SEQ ID NO: 508907
aucuauaacuuccaaacag

SEQ ID NO: 508909 - RNA, 19 nt, Artificial Sequence
  Description of Artificial Sequence: Synthetic oligonucleotide
  Sense strand starting at position 2354 of SEQ ID NO: 317746
uguuauaugccagacuuug

SEQ ID NO: 508910 - RNA, 19 nt, Artificial Sequence
  Description of Artificial Sequence: Synthetic oligonucleotide
  Antisense strand to SEQ ID NO: 508909
caaagucuggcauauaaca

SEQ ID NO: 508911 - RNA, 19 nt, Artificial Sequence
  Description of Artificial Sequence: Synthetic oligonucleotide
  Sense strand starting at position 2359 of SEQ ID NO: 317746
uaugccagacuuugagauu

SEQ ID NO: 508912 - RNA, 19 nt, Artificial Sequence
  Description of Artificial Sequence: Synthetic oligonucleotide
  Antisense strand to SEQ ID NO: 508911
aaucucaaagucuggcaua

SEQ ID NO: 508913 - RNA, 19 nt, Artificial Sequence
  Description of Artificial Sequence: Synthetic oligonucleotide
  Sense strand starting at position 2511 of SEQ ID NO: 317746
acagaauaaucagaaagaa

SEQ ID NO: 508914 - RNA, 19 nt, Artificial Sequence
  Description of Artificial Sequence: Synthetic oligonucleotide
  Antisense strand to SEQ ID NO: 508913
uucuuucugauuauucugu

SEQ ID NO: 508915 - RNA, 19 nt, Artificial Sequence
  Description of Artificial Sequence: Synthetic oligonucleotide
  Sense strand starting at position 2541 of SEQ ID NO: 317746
guaaacauauuugaggaca

SEQ ID NO: 508916 - RNA, 19 nt, Artificial Sequence
  Description of Artificial Sequence: Synthetic oligonucleotide
  Antisense strand to SEQ ID NO: 508915
uguccucaaauauguuuac

SEQ ID NO: 508917 - RNA, 19 nt, Artificial Sequence
  Description of Artificial Sequence: Synthetic oligonucleotide
  Sense strand starting at position 2596 of SEQ ID NO: 317746
auaaucagaucacuguguu

SEQ ID NO: 508918 - RNA, 19 nt, Artificial Sequence
  Description of Artificial Sequence: Synthetic oligonucleotide
  Antisense strand to SEQ ID NO: 508917
aacacagugaucugauuau

SEQ ID NO: 508919 - RNA, 19 nt, Artificial Sequence
  Description of Artificial Sequence: Synthetic oligonucleotide
  Sense strand starting at position 2597 of SEQ ID NO: 317746
uaaucagaucacuguguug

SEQ ID NO: 508920 - RNA, 19 nt, Artificial Sequence
  Description of Artificial Sequence: Synthetic oligonucleotide
  Antisense strand to SEQ ID NO: 508919
caacacagugaucugauua

SEQ ID NO: 508921 - RNA, 19 nt, Artificial Sequence
  Description of Artificial Sequence: Synthetic oligonucleotide
  Sense strand starting at position 2599 of SEQ ID NO: 317746
aucagaucacuguguugga

SEQ ID NO: 508922 - RNA, 19 nt, Artificial Sequence
  Description of Artificial Sequence: Synthetic oligonucleotide
  Antisense strand to SEQ ID NO: 508921
uccaacacagugaucugau

SEQ ID NO: 508923 - RNA, 19 nt, Artificial Sequence
  Description of Artificial Sequence: Synthetic oligonucleotide
  Sense strand starting at position 2600 of SEQ ID NO: 317746
ucagaucacuguguuggaa

SEQ ID NO: 508924 - RNA, 19 nt, Artificial Sequence
  Description of Artificial Sequence: Synthetic oligonucleotide
  Antisense strand to SEQ ID NO: 508923
uuccaacacagugaucuga

SEQ ID NO: 508925 - RNA, 19 nt, Artificial Sequence
  Description of Artificial Sequence: Synthetic oligonucleotide
  Sense strand starting at position 2603 of SEQ ID NO: 317746
gaucacuguguuggaaagu

SEQ ID NO: 508926 - RNA, 19 nt, Artificial Sequence
  Description of Artificial Sequence: Synthetic oligonucleotide
  Antisense strand to SEQ ID NO: 508925
acuuuccaacacagugauc

SEQ ID NO: 508927 - RNA, 19 nt, Artificial Sequence
  Description of Artificial Sequence: Synthetic oligonucleotide
  Sense strand starting at position 2612 of SEQ ID NO: 317746
guuggaaaguucuucucag

SEQ ID NO: 508928 - RNA, 19 nt, Artificial Sequence
  Description of Artificial Sequence: Synthetic oligonucleotide
  Antisense strand to SEQ ID NO: 508927
cugagaagaacuuuccaac

SEQ ID NO: 508929 - RNA, 19 nt, Artificial Sequence
  Description of Artificial Sequence: Synthetic oligonucleotide
  Sense strand starting at position 2619 of SEQ ID NO: 317746
aguucuucucagggucauu

SEQ ID NO: 508930 - RNA, 19 nt, Artificial Sequence
  Description of Artificial Sequence: Synthetic oligonucleotide
  Antisense strand to SEQ ID NO: 508929
aaugacccugagaagaacu

SEQ ID NO: 508931 - RNA, 19 nt, Artificial Sequence
  Description of Artificial Sequence: Synthetic oligonucleotide
  Sense strand starting at position 2631 of SEQ ID NO: 317746
ggucauuauccacauccau

SEQ ID NO: 508932 - RNA, 19 nt, Artificial Sequence
  Description of Artificial Sequence: Synthetic oligonucleotide
  Antisense strand to SEQ ID NO: 508931
auggauguggauaaugacc

SEQ ID NO: 508933 - RNA, 19 nt, Artificial Sequence
  Description of Artificial Sequence: Synthetic oligonucleotide
  Sense strand starting at position 2676 of SEQ ID NO: 317746
cuuauucuaccaggucuuu

SEQ ID NO: 508934 - RNA, 19 nt, Artificial Sequence
  Description of Artificial Sequence: Synthetic oligonucleotide
  Antisense strand to SEQ ID NO: 508933
aaagaccugguagaauaag

SEQ ID NO: 508935 - RNA, 19 nt, Artificial Sequence
  Description of Artificial Sequence: Synthetic oligonucleotide
  Sense strand starting at position 3192 of SEQ ID NO: 317746
auaaauguuaagcgggaaa

SEQ ID NO: 508936 - RNA, 19 nt, Artificial Sequence
  Description of Artificial Sequence: Synthetic oligonucleotide
  Antisense strand to SEQ ID NO: 508935
uuucccgcuuaacauuuau

SEQ ID NO: 508937 - RNA, 19 nt, Artificial Sequence
  Description of Artificial Sequence: Synthetic oligonucleotide
  Sense strand starting at position 3194 of SEQ ID NO: 317746
aaauguuaagcgggaaaga

SEQ ID NO: 508938 - RNA, 19 nt, Artificial Sequence
  Description of Artificial Sequence: Synthetic oligonucleotide
  Antisense strand to SEQ ID NO: 508937
ucuuucccgcuuaacauuu

SEQ ID NO: 508939 - RNA, 19 nt, Artificial Sequence
  Description of Artificial Sequence: Synthetic oligonucleotide
  Sense strand starting at position 3386 of SEQ ID NO: 317746
aagcuuuagugauuugugu

SEQ ID NO: 508940 - RNA, 19 nt, Artificial Sequence
  Description of Artificial Sequence: Synthetic oligonucleotide
  Antisense strand to SEQ ID NO: 508939
acacaaaucacuaaagcuu

SEQ ID NO: 508941 - RNA, 19 nt, Artificial Sequence
  Description of Artificial Sequence: Synthetic oligonucleotide
  Sense strand starting at position 3474 of SEQ ID NO: 317746
gcauaaauuccagaugcca

SEQ ID NO: 508942 - RNA, 19 nt, Artificial Sequence
  Description of Artificial Sequence: Synthetic oligonucleotide
  Antisense strand to SEQ ID NO: 508941
uggcaucuggaauuuaugc

SEQ ID NO: 508943 - RNA, 19 nt, Artificial Sequence
  Description of Artificial Sequence: Synthetic oligonucleotide
  Sense strand starting at position 3760 of SEQ ID NO: 317746
acacgaacucugcaauuaa

SEQ ID NO: 508944 - RNA, 19 nt, Artificial Sequence
  Description of Artificial Sequence: Synthetic oligonucleotide
  Antisense strand to SEQ ID NO: 508943
uuaauugcagaguucgugu

SEQ ID NO: 508945 - RNA, 19 nt, Artificial Sequence
  Description of Artificial Sequence: Synthetic oligonucleotide
  Sense strand starting at position 23 of SEQ ID NO: 317747
augguagucccaggacaua

SEQ ID NO: 508946 - RNA, 19 nt, Artificial Sequence
  Description of Artificial Sequence: Synthetic oligonucleotide
  Antisense strand to SEQ ID NO: 508945
uauguccugggacuaccau

SEQ ID NO: 508947 - RNA, 19 nt, Artificial Sequence
  Description of Artificial Sequence: Synthetic oligonucleotide
  Sense strand starting at position 105 of SEQ ID NO: 317747
augacacuguugguaagua

SEQ ID NO: 508948 - RNA, 19 nt, Artificial Sequence
  Description of Artificial Sequence: Synthetic oligonucleotide
  Antisense strand to SEQ ID NO: 508947
uacuuaccaacagugucau

SEQ ID NO: 508949 - RNA, 19 nt, Artificial Sequence
  Description of Artificial Sequence: Synthetic oligonucleotide
  Sense strand starting at position 144 of SEQ ID NO: 317747
ugggaagucuagcuucaga

SEQ ID NO: 508950 - RNA, 19 nt, Artificial Sequence
  Description of Artificial Sequence: Synthetic oligonucleotide
  Antisense strand to SEQ ID NO: 508949
ucugaagcuagacuuccca

SEQ ID NO: 508951 - RNA, 19 nt, Artificial Sequence
  Description of Artificial Sequence: Synthetic oligonucleotide
  Sense strand starting at position 502 of SEQ ID NO: 317747
ggagcugcaaucuaggaau

SEQ ID NO: 508952 - RNA, 19 nt, Artificial Sequence
  Description of Artificial Sequence: Synthetic oligonucleotide
  Antisense strand to SEQ ID NO: 508951
auuccuagauugcagcucc

SEQ ID NO: 508953 - RNA, 19 nt, Artificial Sequence
  Description of Artificial Sequence: Synthetic oligonucleotide
  Sense strand starting at position 602 of SEQ ID NO: 317747
ggaacugccuuuccaaauc

SEQ ID NO: 508954 - RNA, 19 nt, Artificial Sequence
  Description of Artificial Sequence: Synthetic oligonucleotide
  Antisense strand to SEQ ID NO: 508953
gauuuggaaaggcaguucc

SEQ ID NO: 508955 - RNA, 19 nt, Artificial Sequence
  Description of Artificial Sequence: Synthetic oligonucleotide
  Sense strand starting at position 665 of SEQ ID NO: 317747
gguacaaugcuuuacagau

SEQ ID NO: 508956 - RNA, 19 nt, Artificial Sequence
  Description of Artificial Sequence: Synthetic oligonucleotide
  Antisense strand to SEQ ID NO: 508955
aucuguaaagcauuguacc

SEQ ID NO: 508957 - RNA, 19 nt, Artificial Sequence
  Description of Artificial Sequence: Synthetic oligonucleotide
  Sense strand starting at position 704 of SEQ ID NO: 317747
gaaggaaaggucuggucga

SEQ ID NO: 508958 - RNA, 19 nt, Artificial Sequence
  Description of Artificial Sequence: Synthetic oligonucleotide
  Antisense strand to SEQ ID NO: 508957
ucgaccagaccuuuccuuc

SEQ ID NO: 508959 - RNA, 19 nt, Artificial Sequence
  Description of Artificial Sequence: Synthetic oligonucleotide
  Sense strand starting at position 780 of SEQ ID NO: 317747
aagauacagcccugugaau

SEQ ID NO: 508960 - RNA, 19 nt, Artificial Sequence
  Description of Artificial Sequence: Synthetic oligonucleotide
  Antisense strand to SEQ ID NO: 508959
auucacagggcuguaucuu

SEQ ID NO: 508961 - RNA, 19 nt, Artificial Sequence
  Description of Artificial Sequence: Synthetic oligonucleotide
  Sense strand starting at position 782 of SEQ ID NO: 317747
gauacagcccugugaauaa

SEQ ID NO: 508962 - RNA, 19 nt, Artificial Sequence
  Description of Artificial Sequence: Synthetic oligonucleotide
  Antisense strand to SEQ ID NO: 508961
uuauucacagggcuguauc

SEQ ID NO: 508963 - RNA, 19 nt, Artificial Sequence
  Description of Artificial Sequence: Synthetic oligonucleotide
  Sense strand starting at position 1045 of SEQ ID NO: 317747
cggaucauccuguauugaa

SEQ ID NO: 508964 - RNA, 19 nt, Artificial Sequence
  Description of Artificial Sequence: Synthetic oligonucleotide
  Antisense strand to SEQ ID NO: 508963
uucaauacaggaugauccg

SEQ ID NO: 508965 - RNA, 19 nt, Artificial Sequence
  Description of Artificial Sequence: Synthetic oligonucleotide
  Sense strand starting at position 1059 of SEQ ID NO: 317747
uugaauuauacaggucgau

SEQ ID NO: 508966 - RNA, 19 nt, Artificial Sequence
  Description of Artificial Sequence: Synthetic oligonucleotide
  Antisense strand to SEQ ID NO: 508965
aucgaccuguauaauucaa

SEQ ID NO: 508967 - RNA, 19 nt, Artificial Sequence
  Description of Artificial Sequence: Synthetic oligonucleotide
  Sense strand starting at position 1251 of SEQ ID NO: 317747
aaaguaucuuugguagaag

SEQ ID NO: 508968 - RNA, 19 nt, Artificial Sequence
  Description of Artificial Sequence: Synthetic oligonucleotide
  Antisense strand to SEQ ID NO: 508967
cuucuaccaaagauacuuu

SEQ ID NO: 508969 - RNA, 19 nt, Artificial Sequence
  Description of Artificial Sequence: Synthetic oligonucleotide
  Sense strand starting at position 1254 of SEQ ID NO: 317747
guaucuuugguagaagcau

SEQ ID NO: 508970 - RNA, 19 nt, Artificial Sequence
  Description of Artificial Sequence: Synthetic oligonucleotide
  Antisense strand to SEQ ID NO: 508969
augcuucuaccaaagauac

SEQ ID NO: 508971 - RNA, 19 nt, Artificial Sequence
  Description of Artificial Sequence: Synthetic oligonucleotide
  Sense strand starting at position 1260 of SEQ ID NO: 317747
uugguagaagcaugaguga

SEQ ID NO: 508972 - RNA, 19 nt, Artificial Sequence
  Description of Artificial Sequence: Synthetic oligonucleotide
  Antisense strand to SEQ ID NO: 508971
ucacucaugcuucuaccaa

SEQ ID NO: 508973 - RNA, 19 nt, Artificial Sequence
  Description of Artificial Sequence: Synthetic oligonucleotide
  Sense strand starting at position 1426 of SEQ ID NO: 317747
gggugauguauccaaaugu

SEQ ID NO: 508974 - RNA, 19 nt, Artificial Sequence
  Description of Artificial Sequence: Synthetic oligonucleotide
  Antisense strand to SEQ ID NO: 508973
acauuuggauacaucaccc

SEQ ID NO: 508975 - RNA, 19 nt, Artificial Sequence
  Description of Artificial Sequence: Synthetic oligonucleotide
  Sense strand starting at position 1605 of SEQ ID NO: 317747
auuugagugccuuguugaa

SEQ ID NO: 508976 - RNA, 19 nt, Artificial Sequence
  Description of Artificial Sequence: Synthetic oligonucleotide
  Antisense strand to SEQ ID NO: 508975
uucaacaaggcacucaaau

SEQ ID NO: 508977 - RNA, 19 nt, Artificial Sequence
  Description of Artificial Sequence: Synthetic oligonucleotide
  Sense strand starting at position 1731 of SEQ ID NO: 317747
ugccauguggauuaacauu

SEQ ID NO: 508978 - RNA, 19 nt, Artificial Sequence
  Description of Artificial Sequence: Synthetic oligonucleotide
  Antisense strand to SEQ ID NO: 508977
aauguuaauccacauggca

SEQ ID NO: 508979 - RNA, 19 nt, Artificial Sequence
  Description of Artificial Sequence: Synthetic oligonucleotide
  Sense strand starting at position 1737 of SEQ ID NO: 317747
guggauuaacauugucaug

SEQ ID NO: 508980 - RNA, 19 nt, Artificial Sequence
  Description of Artificial Sequence: Synthetic oligonucleotide
  Antisense strand to SEQ ID NO: 508979
caugacaauguuaauccac

SEQ ID NO: 508981 - RNA, 19 nt, Artificial Sequence
  Description of Artificial Sequence: Synthetic oligonucleotide
  Sense strand starting at position 1739 of SEQ ID NO: 317747
ggauuaacauugucaugua

SEQ ID NO: 508982 - RNA, 19 nt, Artificial Sequence
  Description of Artificial Sequence: Synthetic oligonucleotide
  Antisense strand to SEQ ID NO: 508981
uacaugacaauguuaaucc

SEQ ID NO: 508983 - RNA, 19 nt, Artificial Sequence
  Description of Artificial Sequence: Synthetic oligonucleotide
  Sense strand starting at position 1777 of SEQ ID NO: 317747
uugagaugcuaauccuaca

SEQ ID NO: 508984 - RNA, 19 nt, Artificial Sequence
  Description of Artificial Sequence: Synthetic oligonucleotide
  Antisense strand to SEQ ID NO: 508983
uguaggauuagcaucucaa

SEQ ID NO: 508985 - RNA, 19 nt, Artificial Sequence
  Description of Artificial Sequence: Synthetic oligonucleotide
  Sense strand starting at position 2139 of SEQ ID NO: 317747
augcuaaagucccuaagau

SEQ ID NO: 508986 - RNA, 19 nt, Artificial Sequence
  Description of Artificial Sequence: Synthetic oligonucleotide
  Antisense strand to SEQ ID NO: 508985
aucuuagggacuuuagcau

SEQ ID NO: 508987 - RNA, 19 nt, Artificial Sequence
  Description of Artificial Sequence: Synthetic oligonucleotide
  Sense strand starting at position 2140 of SEQ ID NO: 317747
ugcuaaagucccuaagaug

SEQ ID NO: 508988 - RNA, 19 nt, Artificial Sequence
  Description of Artificial Sequence: Synthetic oligonucleotide
  Antisense strand to SEQ ID NO: 508987
caucuuagggacuuuagca

SEQ ID NO: 508989 - RNA, 19 nt, Artificial Sequence
  Description of Artificial Sequence: Synthetic oligonucleotide
  Sense strand starting at position 2159 of SEQ ID NO: 317747
ggcagcagugcugugugaa

SEQ ID NO: 508990 - RNA, 19 nt, Artificial Sequence
  Description of Artificial Sequence: Synthetic oligonucleotide
  Antisense strand to SEQ ID NO: 508989
uucacacagcacugcugcc

SEQ ID NO: 508991 - RNA, 19 nt, Artificial Sequence
  Description of Artificial Sequence: Synthetic oligonucleotide
  Sense strand starting at position 2538 of SEQ ID NO: 317747
cuuaguuugcaagacucga

SEQ ID NO: 508992 - RNA, 19 nt, Artificial Sequence
  Description of Artificial Sequence: Synthetic oligonucleotide
  Antisense strand to SEQ ID NO: 508991
ucgagucuugcaaacuaag

SEQ ID NO: 508993 - RNA, 19 nt, Artificial Sequence
  Description of Artificial Sequence: Synthetic oligonucleotide
  Sense strand starting at position 2632 of SEQ ID NO: 317747
aagucaaaguuaguaaaga

SEQ ID NO: 508994 - RNA, 19 nt, Artificial Sequence
  Description of Artificial Sequence: Synthetic oligonucleotide
  Antisense strand to SEQ ID NO: 508993
ucuuuacuaacuuugacuu

SEQ ID NO: 508995 - RNA, 19 nt, Artificial Sequence
  Description of Artificial Sequence: Synthetic oligonucleotide
  Sense strand starting at position 2723 of SEQ ID NO: 317747
agguuauuuccacgugagc

SEQ ID NO: 508996 - RNA, 19 nt, Artificial Sequence
  Description of Artificial Sequence: Synthetic oligonucleotide
  Antisense strand to SEQ ID NO: 508995
gcucacguggaaauaaccu

SEQ ID NO: 508997 - RNA, 19 nt, Artificial Sequence
  Description of Artificial Sequence: Synthetic oligonucleotide
  Sense strand starting at position 2725 of SEQ ID NO: 317747
guuauuuccacgugagcaa

SEQ ID NO: 508998 - RNA, 19 nt, Artificial Sequence
  Description of Artificial Sequence: Synthetic oligonucleotide
  Antisense strand to SEQ ID NO: 508997
uugcucacguggaaauaac

SEQ ID NO: 508999 - RNA, 19 nt, Artificial Sequence
  Description of Artificial Sequence: Synthetic oligonucleotide
  Sense strand starting at position 2834 of SEQ ID NO: 317747
cagaaagaguggucuccuu

SEQ ID NO: 509000 - RNA, 19 nt, Artificial Sequence
  Description of Artificial Sequence: Synthetic oligonucleotide
  Antisense strand to SEQ ID NO: 508999
aaggagaccacucuuucug

SEQ ID NO: 509001 - RNA, 19 nt, Artificial Sequence
  Description of Artificial Sequence: Synthetic oligonucleotide
  Sense strand starting at position 3082 of SEQ ID NO: 317747
gucugcucagcucuaaguu

SEQ ID NO: 509002 - RNA, 19 nt, Artificial Sequence
  Description of Artificial Sequence: Synthetic oligonucleotide
  Antisense strand to SEQ ID NO: 509001
aacuuagagcugagcagac

SEQ ID NO: 509003 - RNA, 19 nt, Artificial Sequence
  Description of Artificial Sequence: Synthetic oligonucleotide
  Sense strand starting at position 3095 of SEQ ID NO: 317747
uaaguuaauugacuuguga

SEQ ID NO: 509004 - RNA, 19 nt, Artificial Sequence
  Description of Artificial Sequence: Synthetic oligonucleotide
  Antisense strand to SEQ ID NO: 509003
ucacaagucaauuaacuua

SEQ ID NO: 509005 - RNA, 19 nt, Artificial Sequence
  Description of Artificial Sequence: Synthetic oligonucleotide
  Sense strand starting at position 3097 of SEQ ID NO: 317747
aguuaauugacuugugaug

SEQ ID NO: 509006 - RNA, 19 nt, Artificial Sequence
  Description of Artificial Sequence: Synthetic oligonucleotide
  Antisense strand to SEQ ID NO: 509005
caucacaagucaauuaacu

SEQ ID NO: 509007 - RNA, 19 nt, Artificial Sequence
  Description of Artificial Sequence: Synthetic oligonucleotide
  Sense strand starting at position 3208 of SEQ ID NO: 317747
aucagauaucucuggauau

SEQ ID NO: 509008 - RNA, 19 nt, Artificial Sequence
  Description of Artificial Sequence: Synthetic oligonucleotide
  Antisense strand to SEQ ID NO: 509007
auauccagagauaucugau

SEQ ID NO: 509009 - RNA, 19 nt, Artificial Sequence
  Description of Artificial Sequence: Synthetic oligonucleotide
  Sense strand starting at position 3220 of SEQ ID NO: 317747
uggauauaguucuuaaagg

SEQ ID NO: 509010 - RNA, 19 nt, Artificial Sequence
  Description of Artificial Sequence: Synthetic oligonucleotide
  Antisense strand to SEQ ID NO: 509009
ccuuuaagaacuauaucca

SEQ ID NO: 509011 - RNA, 19 nt, Artificial Sequence
  Description of Artificial Sequence: Synthetic oligonucleotide
  Sense strand starting at position 3237 of SEQ ID NO: 317747
gggacuuuauaaguauuau

SEQ ID NO: 509012 - RNA, 19 nt, Artificial Sequence
  Description of Artificial Sequence: Synthetic oligonucleotide
  Antisense strand to SEQ ID NO: 509011
auaauacuuauaaaguccc

SEQ ID NO: 509013 - RNA, 19 nt, Artificial Sequence
  Description of Artificial Sequence: Synthetic oligonucleotide
  Sense strand starting at position 3451 of SEQ ID NO: 317747
ugaggucuucaaugggacu

SEQ ID NO: 509014 - RNA, 19 nt, Artificial Sequence
  Description of Artificial Sequence: Synthetic oligonucleotide
  Antisense strand to SEQ ID NO: 509013
agucccauugaagaccuca

SEQ ID NO: 509015 - RNA, 19 nt, Artificial Sequence
  Description of Artificial Sequence: Synthetic oligonucleotide
  Sense strand starting at position 3524 of SEQ ID NO: 317747
guaauaagaugauucgaau

SEQ ID NO: 509016 - RNA, 19 nt, Artificial Sequence
  Description of Artificial Sequence: Synthetic oligonucleotide
  Antisense strand to SEQ ID NO: 509015
auucgaaucaucuuauuac

SEQ ID NO: 509017 - RNA, 19 nt, Artificial Sequence
  Description of Artificial Sequence: Synthetic oligonucleotide
  Sense strand starting at position 3548 of SEQ ID NO: 317747
ccacaacucguguaacuau

SEQ ID NO: 509018 - RNA, 19 nt, Artificial Sequence
  Description of Artificial Sequence: Synthetic oligonucleotide
  Antisense strand to SEQ ID NO: 509017
auaguuacacgaguugugg

SEQ ID NO: 509019 - RNA, 19 nt, Artificial Sequence
  Description of Artificial Sequence: Synthetic oligonucleotide
  Sense strand starting at position 3560 of SEQ ID NO: 317747
uaacuaugucaugggauga

SEQ ID NO: 509020 - RNA, 19 nt, Artificial Sequence
  Description of Artificial Sequence: Synthetic oligonucleotide
  Antisense strand to SEQ ID NO: 509019
ucaucccaugacauaguua

SEQ ID NO: 509021 - RNA, 19 nt, Artificial Sequence
  Description of Artificial Sequence: Synthetic oligonucleotide
  Sense strand starting at position 3576 of SEQ ID NO: 317747
ugaguccaugccugaaaga

SEQ ID NO: 509022 - RNA, 19 nt, Artificial Sequence
  Description of Artificial Sequence: Synthetic oligonucleotide
  Antisense strand to SEQ ID NO: 509021
ucuuucaggcauggacuca

SEQ ID NO: 509023 - RNA, 19 nt, Artificial Sequence
  Description of Artificial Sequence: Synthetic oligonucleotide
  Sense strand starting at position 3603 of SEQ ID NO: 317747
gugagucuuggcuaauaac

SEQ ID NO: 509024 - RNA, 19 nt, Artificial Sequence
  Description of Artificial Sequence: Synthetic oligonucleotide
  Antisense strand to SEQ ID NO: 509023
guuauuagccaagacucac

SEQ ID NO: 509025 - RNA, 19 nt, Artificial Sequence
  Description of Artificial Sequence: Synthetic oligonucleotide
  Sense strand starting at position 9 of SEQ ID NO: 317748
agcugaaagucugcagaua

SEQ ID NO: 509026 - RNA, 19 nt, Artificial Sequence
  Description of Artificial Sequence: Synthetic oligonucleotide
  Antisense strand to SEQ ID NO: 509025
uaucugcagacuuucagcu

SEQ ID NO: 509027 - RNA, 19 nt, Artificial Sequence
  Description of Artificial Sequence: Synthetic oligonucleotide
  Sense strand starting at position 10 of SEQ ID NO: 317748
gcugaaagucugcagauaa

SEQ ID NO: 509028 - RNA, 19 nt, Artificial Sequence
  Description of Artificial Sequence: Synthetic oligonucleotide
  Antisense strand to SEQ ID NO: 509027
uuaucugcagacuuucagc

SEQ ID NO: 509029 - RNA, 19 nt, Artificial Sequence
  Description of Artificial Sequence: Synthetic oligonucleotide
  Sense strand starting at position 52 of SEQ ID NO: 317748
gguauaugugcucaaggga

SEQ ID NO: 509030 - RNA, 19 nt, Artificial Sequence
  Description of Artificial Sequence: Synthetic oligonucleotide
  Antisense strand to SEQ ID NO: 509029
ucccuugagcacauauacc

SEQ ID NO: 509031 - RNA, 19 nt, Artificial Sequence
  Description of Artificial Sequence: Synthetic oligonucleotide
  Sense strand starting at position 74 of SEQ ID NO: 317748
ggugcaugccuguaggaua

SEQ ID NO: 509032 - RNA, 19 nt, Artificial Sequence
  Description of Artificial Sequence: Synthetic oligonucleotide
  Antisense strand to SEQ ID NO: 509031
uauccuacaggcaugcacc

SEQ ID NO: 509033 - RNA, 19 nt, Artificial Sequence
  Description of Artificial Sequence: Synthetic oligonucleotide
  Sense strand starting at position 192 of SEQ ID NO: 317748
ccagcaugagcucacacau

SEQ ID NO: 509034 - RNA, 19 nt, Artificial Sequence
  Description of Artificial Sequence: Synthetic oligonucleotide
  Antisense strand to SEQ ID NO: 509033
augugugagcucaugcugg

SEQ ID NO: 509035 - RNA, 19 nt, Artificial Sequence
  Description of Artificial Sequence: Synthetic oligonucleotide
  Sense strand starting at position 323 of SEQ ID NO: 317748
cguagaugugcauaucaag

SEQ ID NO: 509036 - RNA, 19 nt, Artificial Sequence
  Description of Artificial Sequence: Synthetic oligonucleotide
  Antisense strand to SEQ ID NO: 509035
cuugauaugcacaucuacg

SEQ ID NO: 509037 - RNA, 19 nt, Artificial Sequence
  Description of Artificial Sequence: Synthetic oligonucleotide
  Sense strand starting at position 597 of SEQ ID NO: 317748
augcaugaaugcuugcaca

SEQ ID NO: 509038 - RNA, 19 nt, Artificial Sequence
  Description of Artificial Sequence: Synthetic oligonucleotide
  Antisense strand to SEQ ID NO: 509037
ugugcaagcauucaugcau

SEQ ID NO: 509039 - RNA, 19 nt, Artificial Sequence
  Description of Artificial Sequence: Synthetic oligonucleotide
  Sense strand starting at position 989 of SEQ ID NO: 317748
agcagucaucagggcagaa

SEQ ID NO: 509040 - RNA, 19 nt, Artificial Sequence
  Description of Artificial Sequence: Synthetic oligonucleotide
  Antisense strand to SEQ ID NO: 509039
uucugcccugaugacugcu

SEQ ID NO: 509041 - RNA, 19 nt, Artificial Sequence
  Description of Artificial Sequence: Synthetic oligonucleotide
  Sense strand starting at position 1091 of SEQ ID NO: 317748
gcuacagcuuuccugauuu

SEQ ID NO: 509042 - RNA, 19 nt, Artificial Sequence
  Description of Artificial Sequence: Synthetic oligonucleotide
  Antisense strand to SEQ ID NO: 509041
aaaucaggaaagcuguagc

SEQ ID NO: 509043 - RNA, 19 nt, Artificial Sequence
  Description of Artificial Sequence: Synthetic oligonucleotide
  Sense strand starting at position 1138 of SEQ ID NO: 317748
gccugucaugcucagauau

SEQ ID NO: 509044 - RNA, 19 nt, Artificial Sequence
  Description of Artificial Sequence: Synthetic oligonucleotide
  Antisense strand to SEQ ID NO: 509043
auaucugagcaugacaggc

SEQ ID NO: 509045 - RNA, 19 nt, Artificial Sequence
  Description of Artificial Sequence: Synthetic oligonucleotide
  Sense strand starting at position 1217 of SEQ ID NO: 317748
gggagaaguuggccacucu

SEQ ID NO: 509046 - RNA, 19 nt, Artificial Sequence
  Description of Artificial Sequence: Synthetic oligonucleotide
  Antisense strand to SEQ ID NO: 509045
agaguggccaacuucuccc

SEQ ID NO: 509047 - RNA, 19 nt, Artificial Sequence
  Description of Artificial Sequence: Synthetic oligonucleotide
  Sense strand starting at position 1240 of SEQ ID NO: 317748
agucacugugggugucuaa

SEQ ID NO: 509048 - RNA, 19 nt, Artificial Sequence
  Description of Artificial Sequence: Synthetic oligonucleotide
  Antisense strand to SEQ ID NO: 509047
uuagacacccacagugacu

SEQ ID NO: 509049 - RNA, 19 nt, Artificial Sequence
  Description of Artificial Sequence: Synthetic oligonucleotide
  Sense strand starting at position 1280 of SEQ ID NO: 317748
gcuggugaauucucuguca

SEQ ID NO: 509050 - RNA, 19 nt, Artificial Sequence
  Description of Artificial Sequence: Synthetic oligonucleotide
  Antisense strand to SEQ ID NO: 509049
ugacagagaauucaccagc

SEQ ID NO: 509051 - RNA, 19 nt, Artificial Sequence
  Description of Artificial Sequence: Synthetic oligonucleotide
  Sense strand starting at position 1282 of SEQ ID NO: 317748
uggugaauucucugucacu

SEQ ID NO: 509052 - RNA, 19 nt, Artificial Sequence
  Description of Artificial Sequence: Synthetic oligonucleotide
  Antisense strand to SEQ ID NO: 509051
agugacagagaauucacca

SEQ ID NO: 509053 - RNA, 19 nt, Artificial Sequence
  Description of Artificial Sequence: Synthetic oligonucleotide
  Sense strand starting at position 1283 of SEQ ID NO: 317748
ggugaauucucugucacug

SEQ ID NO: 509054 - RNA, 19 nt, Artificial Sequence
  Description of Artificial Sequence: Synthetic oligonucleotide
  Antisense strand to SEQ ID NO: 509053
cagugacagagaauucacc

SEQ ID NO: 509055 - RNA, 19 nt, Artificial Sequence
  Description of Artificial Sequence: Synthetic oligonucleotide
  Sense strand starting at position 1289 of SEQ ID NO: 317748
uucucugucacuggaggua

SEQ ID NO: 509056 - RNA, 19 nt, Artificial Sequence
  Description of Artificial Sequence: Synthetic oligonucleotide
  Antisense strand to SEQ ID NO: 509055
uaccuccagugacagagaa

SEQ ID NO: 509057 - RNA, 19 nt, Artificial Sequence
  Description of Artificial Sequence: Synthetic oligonucleotide
  Sense strand starting at position 1294 of SEQ ID NO: 317748
ugucacuggagguaucuaa

SEQ ID NO: 509058 - RNA, 19 nt, Artificial Sequence
  Description of Artificial Sequence: Synthetic oligonucleotide
  Antisense strand to SEQ ID NO: 509057
uuagauaccuccagugaca

SEQ ID NO: 509059 - RNA, 19 nt, Artificial Sequence
  Description of Artificial Sequence: Synthetic oligonucleotide
  Sense strand starting at position 1405 of SEQ ID NO: 317748
cucuaagaaucugugugua

SEQ ID NO: 509060 - RNA, 19 nt, Artificial Sequence
  Description of Artificial Sequence: Synthetic oligonucleotide
  Antisense strand to SEQ ID NO: 509059
uacacacagauucuuagag

SEQ ID NO: 509061 - RNA, 19 nt, Artificial Sequence
  Description of Artificial Sequence: Synthetic oligonucleotide
  Sense strand starting at position 1407 of SEQ ID NO: 317748
cuaagaaucuguguguauc

SEQ ID NO: 509062 - RNA, 19 nt, Artificial Sequence
  Description of Artificial Sequence: Synthetic oligonucleotide
  Antisense strand to SEQ ID NO: 509061
gauacacacagauucuuag

SEQ ID NO: 509063 - RNA, 19 nt, Artificial Sequence
  Description of Artificial Sequence: Synthetic oligonucleotide
  Sense strand starting at position 1409 of SEQ ID NO: 317748
aagaaucuguguguaucca

SEQ ID NO: 509064 - RNA, 19 nt, Artificial Sequence
  Description of Artificial Sequence: Synthetic oligonucleotide
  Antisense strand to SEQ ID NO: 509063
uggauacacacagauucuu

SEQ ID NO: 509065 - RNA, 19 nt, Artificial Sequence
  Description of Artificial Sequence: Synthetic oligonucleotide
  Sense strand starting at position 1417 of SEQ ID NO: 317748
guguguauccagguugugu

SEQ ID NO: 509066 - RNA, 19 nt, Artificial Sequence
  Description of Artificial Sequence: Synthetic oligonucleotide
  Antisense strand to SEQ ID NO: 509065
acacaaccuggauacacac

SEQ ID NO: 509067 - RNA, 19 nt, Artificial Sequence
  Description of Artificial Sequence: Synthetic oligonucleotide
  Sense strand starting at position 1724 of SEQ ID NO: 317748
uugcccaauuccucgaaga

SEQ ID NO: 509068 - RNA, 19 nt, Artificial Sequence
  Description of Artificial Sequence: Synthetic oligonucleotide
  Antisense strand to SEQ ID NO: 509067
ucuucgaggaauugggcaa

SEQ ID NO: 509069 - RNA, 19 nt, Artificial Sequence
  Description of Artificial Sequence: Synthetic oligonucleotide
  Sense strand starting at position 1725 of SEQ ID NO: 317748
ugcccaauuccucgaagag

SEQ ID NO: 509070 - RNA, 19 nt, Artificial Sequence
  Description of Artificial Sequence: Synthetic oligonucleotide
  Antisense strand to SEQ ID NO: 509069
cucuucgaggaauugggca

SEQ ID NO: 509071 - RNA, 19 nt, Artificial Sequence
  Description of Artificial Sequence: Synthetic oligonucleotide
  Sense strand starting at position 1726 of SEQ ID NO: 317748
gcccaauuccucgaagagc

SEQ ID NO: 509072 - RNA, 19 nt, Artificial Sequence
  Description of Artificial Sequence: Synthetic oligonucleotide
  Antisense strand to SEQ ID NO: 509071
gcucuucgaggaauugggc

SEQ ID NO: 509073 - RNA, 19 nt, Artificial Sequence
  Description of Artificial Sequence: Synthetic oligonucleotide
  Sense strand starting at position 2198 of SEQ ID NO: 317748
gcaaacuuuguccacaagu

SEQ ID NO: 509074 - RNA, 19 nt, Artificial Sequence
  Description of Artificial Sequence: Synthetic oligonucleotide
  Antisense strand to SEQ ID NO: 509073
acuuguggacaaaguuugc

SEQ ID NO: 509075 - RNA, 19 nt, Artificial Sequence
  Description of Artificial Sequence: Synthetic oligonucleotide
  Sense strand starting at position 2446 of SEQ ID NO: 317748
gggaaaugauggcuaauuc

SEQ ID NO: 509076 - RNA, 19 nt, Artificial Sequence
  Description of Artificial Sequence: Synthetic oligonucleotide
  Antisense strand to SEQ ID NO: 509075
gaauuagccaucauuuccc

SEQ ID NO: 509077 - RNA, 19 nt, Artificial Sequence
  Description of Artificial Sequence: Synthetic oligonucleotide
  Sense strand starting at position 2822 of SEQ ID NO: 317748
ugugcuuccagucaaggua

SEQ ID NO: 509078 - RNA, 19 nt, Artificial Sequence
  Description of Artificial Sequence: Synthetic oligonucleotide
  Antisense strand to SEQ ID NO: 509077
uaccuugacuggaagcaca

SEQ ID NO: 509079 - RNA, 19 nt, Artificial Sequence
  Description of Artificial Sequence: Synthetic oligonucleotide
  Sense strand starting at position 2919 of SEQ ID NO: 317748
gccagagacuugccaugaa

SEQ ID NO: 509080 - RNA, 19 nt, Artificial Sequence
  Description of Artificial Sequence: Synthetic oligonucleotide
  Antisense strand to SEQ ID NO: 509079
uucauggcaagucucuggc

SEQ ID NO: 509081 - RNA, 19 nt, Artificial Sequence
  Description of Artificial Sequence: Synthetic oligonucleotide
  Sense strand starting at position 2922 of SEQ ID NO: 317748
agagacuugccaugaaauc

SEQ ID NO: 509082 - RNA, 19 nt, Artificial Sequence
  Description of Artificial Sequence: Synthetic oligonucleotide
  Antisense strand to SEQ ID NO: 509081
gauuucauggcaagucucu

SEQ ID NO: 509083 - RNA, 19 nt, Artificial Sequence
  Description of Artificial Sequence: Synthetic oligonucleotide
  Sense strand starting at position 3024 of SEQ ID NO: 317748
cuccaaggucuuggaguua

SEQ ID NO: 509084 - RNA, 19 nt, Artificial Sequence
  Description of Artificial Sequence: Synthetic oligonucleotide
  Antisense strand to SEQ ID NO: 509083
uaacuccaagaccuuggag

SEQ ID NO: 509085 - RNA, 19 nt, Artificial Sequence
  Description of Artificial Sequence: Synthetic oligonucleotide
  Sense strand starting at position 3066 of SEQ ID NO: 317748
agacuaaggaucugaguuu

SEQ ID NO: 509086 - RNA, 19 nt, Artificial Sequence
  Description of Artificial Sequence: Synthetic oligonucleotide
  Antisense strand to SEQ ID NO: 509085
aaacucagauccuuagucu

SEQ ID NO: 509087 - RNA, 19 nt, Artificial Sequence
  Description of Artificial Sequence: Synthetic oligonucleotide
  Sense strand starting at position 3075 of SEQ ID NO: 317748
aucugaguuugagcucuga

SEQ ID NO: 509088 - RNA, 19 nt, Artificial Sequence
  Description of Artificial Sequence: Synthetic oligonucleotide
  Antisense strand to SEQ ID NO: 509087
ucagagcucaaacucagau

SEQ ID NO: 509089 - RNA, 19 nt, Artificial Sequence
  Description of Artificial Sequence: Synthetic oligonucleotide
  Sense strand starting at position 3085 of SEQ ID NO: 317748
gagcucugauuccuggaca

SEQ ID NO: 509090 - RNA, 19 nt, Artificial Sequence
  Description of Artificial Sequence: Synthetic oligonucleotide
  Antisense strand to SEQ ID NO: 509089
uguccaggaaucagagcuc

SEQ ID NO: 509091 - RNA, 19 nt, Artificial Sequence
  Description of Artificial Sequence: Synthetic oligonucleotide
  Sense strand starting at position 3435 of SEQ ID NO: 317748
uuuauuagcugagugauca

SEQ ID NO: 509092 - RNA, 19 nt, Artificial Sequence
  Description of Artificial Sequence: Synthetic oligonucleotide
  Antisense strand to SEQ ID NO: 509091
ugaucacucagcuaauaaa

SEQ ID NO: 509093 - RNA, 19 nt, Artificial Sequence
  Description of Artificial Sequence: Synthetic oligonucleotide
  Sense strand starting at position 3567 of SEQ ID NO: 317748
gccuuugggaacuauguaa

SEQ ID NO: 509094 - RNA, 19 nt, Artificial Sequence
  Description of Artificial Sequence: Synthetic oligonucleotide
  Antisense strand to SEQ ID NO: 509093
uuacauaguucccaaaggc

SEQ ID NO: 509095 - RNA, 19 nt, Artificial Sequence
  Description of Artificial Sequence: Synthetic oligonucleotide
  Sense strand starting at position 3597 of SEQ ID NO: 317748
cuuucuaggcucuagagga

SEQ ID NO: 509096 - RNA, 19 nt, Artificial Sequence
  Description of Artificial Sequence: Synthetic oligonucleotide
  Antisense strand to SEQ ID NO: 509095
uccucuagagccuagaaag

SEQ ID NO: 509097 - RNA, 19 nt, Artificial Sequence
  Description of Artificial Sequence: Synthetic oligonucleotide
  Sense strand starting at position 3780 of SEQ ID NO: 317748
gcgagcauggguuggauaa

SEQ ID NO: 509098 - RNA, 19 nt, Artificial Sequence
  Description of Artificial Sequence: Synthetic oligonucleotide
  Antisense strand to SEQ ID NO: 509097
uuauccaacccaugcucgc

SEQ ID NO: 509099 - RNA, 19 nt, Artificial Sequence
  Description of Artificial Sequence: Synthetic oligonucleotide
  Sense strand starting at position 3781 of SEQ ID NO: 317748
cgagcauggguuggauaaa

SEQ ID NO: 509100 - RNA, 19 nt, Artificial Sequence
  Description of Artificial Sequence: Synthetic oligonucleotide
  Antisense strand to SEQ ID NO: 509099
uuuauccaacccaugcucg

SEQ ID NO: 509101 - RNA, 19 nt, Artificial Sequence
  Description of Artificial Sequence: Synthetic oligonucleotide
  Sense strand starting at position 3883 of SEQ ID NO: 317748
ggacauguuaucugcuugu

SEQ ID NO: 509102 - RNA, 19 nt, Artificial Sequence
  Description of Artificial Sequence: Synthetic oligonucleotide
  Antisense strand to SEQ ID NO: 509101
acaagcagauaacaugucc

SEQ ID NO: 509103 - RNA, 19 nt, Artificial Sequence
  Description of Artificial Sequence: Synthetic oligonucleotide
  Sense strand starting at position 3917 of SEQ ID NO: 317748
ccaugaagucccugacuca

SEQ ID NO: 509104 - RNA, 19 nt, Artificial Sequence
  Description of Artificial Sequence: Synthetic oligonucleotide
  Antisense strand to SEQ ID NO: 509103
ugagucagggacuucaugg

SEQ ID NO: 509105 - RNA, 19 nt, Artificial Sequence
  Description of Artificial Sequence: Synthetic oligonucleotide
  Sense strand starting at position 37 of SEQ ID NO: 317749
aagacaacguguguggaua

SEQ ID NO: 509106 - RNA, 19 nt, Artificial Sequence
  Description of Artificial Sequence: Synthetic oligonucleotide
  Antisense strand to SEQ ID NO: 509105
uauccacacacguugucuu

SEQ ID NO: 509107 - RNA, 19 nt, Artificial Sequence
  Description of Artificial Sequence: Synthetic oligonucleotide
  Sense strand starting at position 71 of SEQ ID NO: 317749
ggcaucuaggguuaauguu

SEQ ID NO: 509108 - RNA, 19 nt, Artificial Sequence
  Description of Artificial Sequence: Synthetic oligonucleotide
  Antisense strand to SEQ ID NO: 509107
aacauuaacccuagaugcc

SEQ ID NO: 509109 - RNA, 19 nt, Artificial Sequence
  Description of Artificial Sequence: Synthetic oligonucleotide
  Sense strand starting at position 79 of SEQ ID NO: 317749
ggguuaauguuacucugaa

SEQ ID NO: 509110 - RNA, 19 nt, Artificial Sequence
  Description of Artificial Sequence: Synthetic oligonucleotide
  Antisense strand to SEQ ID NO: 509109
uucagaguaacauuaaccc

SEQ ID NO: 509111 - RNA, 19 nt, Artificial Sequence
  Description of Artificial Sequence: Synthetic oligonucleotide
  Sense strand starting at position 80 of SEQ ID NO: 317749
gguuaauguuacucugaaa

SEQ ID NO: 509112 - RNA, 19 nt, Artificial Sequence
  Description of Artificial Sequence: Synthetic oligonucleotide
  Antisense strand to SEQ ID NO: 509111
uuucagaguaacauuaacc

SEQ ID NO: 509113 - RNA, 19 nt, Artificial Sequence
  Description of Artificial Sequence: Synthetic oligonucleotide
  Sense strand starting at position 149 of SEQ ID NO: 317749
acuacacaguaguuuauaa

SEQ ID NO: 509114 - RNA, 19 nt, Artificial Sequence
  Description of Artificial Sequence: Synthetic oligonucleotide
  Antisense strand to SEQ ID NO: 509113
uuauaaacuacuguguagu

SEQ ID NO: 509115 - RNA, 19 nt, Artificial Sequence
  Description of Artificial Sequence: Synthetic oligonucleotide
  Sense strand starting at position 189 of SEQ ID NO: 317749
aguagaucaucccuuuacu

SEQ ID NO: 509116 - RNA, 19 nt, Artificial Sequence
  Description of Artificial Sequence: Synthetic oligonucleotide
  Antisense strand to SEQ ID NO: 509115
aguaaagggaugaucuacu

SEQ ID NO: 509117 - RNA, 19 nt, Artificial Sequence
  Description of Artificial Sequence: Synthetic oligonucleotide
  Sense strand starting at position 355 of SEQ ID NO: 317749
auggauguuuauguauaca

SEQ ID NO: 509118 - RNA, 19 nt, Artificial Sequence
  Description of Artificial Sequence: Synthetic oligonucleotide
  Antisense strand to SEQ ID NO: 509117
uguauacauaaacauccau

SEQ ID NO: 509119 - RNA, 19 nt, Artificial Sequence
  Description of Artificial Sequence: Synthetic oligonucleotide
  Sense strand starting at position 500 of SEQ ID NO: 317749
gagagugggcagugaucau

SEQ ID NO: 509120 - RNA, 19 nt, Artificial Sequence
  Description of Artificial Sequence: Synthetic oligonucleotide
  Antisense strand to SEQ ID NO: 509119
augaucacugcccacucuc

SEQ ID NO: 509121 - RNA, 19 nt, Artificial Sequence
  Description of Artificial Sequence: Synthetic oligonucleotide
  Sense strand starting at position 504 of SEQ ID NO: 317749
gugggcagugaucauuaca

SEQ ID NO: 509122 - RNA, 19 nt, Artificial Sequence
  Description of Artificial Sequence: Synthetic oligonucleotide
  Antisense strand to SEQ ID NO: 509121
uguaaugaucacugcccac

SEQ ID NO: 509123 - RNA, 19 nt, Artificial Sequence
  Description of Artificial Sequence: Synthetic oligonucleotide
  Sense strand starting at position 507 of SEQ ID NO: 317749
ggcagugaucauuacaucu

SEQ ID NO: 509124 - RNA, 19 nt, Artificial Sequence
  Description of Artificial Sequence: Synthetic oligonucleotide
  Antisense strand to SEQ ID NO: 509123
agauguaaugaucacugcc

SEQ ID NO: 509125 - RNA, 19 nt, Artificial Sequence
  Description of Artificial Sequence: Synthetic oligonucleotide
  Sense strand starting at position 545 of SEQ ID NO: 317749
ccagaauccugcucuggau

SEQ ID NO: 509126 - RNA, 19 nt, Artificial Sequence
  Description of Artificial Sequence: Synthetic oligonucleotide
  Antisense strand to SEQ ID NO: 509125
auccagagcaggauucugg

SEQ ID NO: 509127 - RNA, 19 nt, Artificial Sequence
  Description of Artificial Sequence: Synthetic oligonucleotide
  Sense strand starting at position 670 of SEQ ID NO: 317749
uugucaaccguugaaauua

SEQ ID NO: 509128 - RNA, 19 nt, Artificial Sequence
  Description of Artificial Sequence: Synthetic oligonucleotide
  Antisense strand to SEQ ID NO: 509127
uaauuucaacgguugacaa

SEQ ID NO: 509129 - RNA, 19 nt, Artificial Sequence
  Description of Artificial Sequence: Synthetic oligonucleotide
  Sense strand starting at position 707 of SEQ ID NO: 317749
acuaaagagccuggaucua

SEQ ID NO: 509130 - RNA, 19 nt, Artificial Sequence
  Description of Artificial Sequence: Synthetic oligonucleotide
  Antisense strand to SEQ ID NO: 509129
uagauccaggcucuuuagu

SEQ ID NO: 509131 - RNA, 19 nt, Artificial Sequence
  Description of Artificial Sequence: Synthetic oligonucleotide
  Sense strand starting at position 898 of SEQ ID NO: 317749
gggacauaucugcaauccu

SEQ ID NO: 509132 - RNA, 19 nt, Artificial Sequence
  Description of Artificial Sequence: Synthetic oligonucleotide
  Antisense strand to SEQ ID NO: 509131
aggauugcagauauguccc

SEQ ID NO: 509133 - RNA, 19 nt, Artificial Sequence
  Description of Artificial Sequence: Synthetic oligonucleotide
  Sense strand starting at position 906 of SEQ ID NO: 317749
ucugcaauccuagggagau

SEQ ID NO: 509134 - RNA, 19 nt, Artificial Sequence
  Description of Artificial Sequence: Synthetic oligonucleotide
  Antisense strand to SEQ ID NO: 509133
aucucccuaggauugcaga

SEQ ID NO: 509135 - RNA, 19 nt, Artificial Sequence
  Description of Artificial Sequence: Synthetic oligonucleotide
  Sense strand starting at position 924 of SEQ ID NO: 317749
uggucuguugcauauauaa

SEQ ID NO: 509136 - RNA, 19 nt, Artificial Sequence
  Description of Artificial Sequence: Synthetic oligonucleotide
  Antisense strand to SEQ ID NO: 509135
uuauauaugcaacagacca

SEQ ID NO: 509137 - RNA, 19 nt, Artificial Sequence
  Description of Artificial Sequence: Synthetic oligonucleotide
  Sense strand starting at position 1113 of SEQ ID NO: 317749
cagggaagcuaguauuuaa

SEQ ID NO: 509138 - RNA, 19 nt, Artificial Sequence
  Description of Artificial Sequence: Synthetic oligonucleotide
  Antisense strand to SEQ ID NO: 509137
uuaaauacuagcuucccug

SEQ ID NO: 509139 - RNA, 19 nt, Artificial Sequence
  Description of Artificial Sequence: Synthetic oligonucleotide
  Sense strand starting at position 1275 of SEQ ID NO: 317749
agcuauaaucgugagcaaa

SEQ ID NO: 509140 - RNA, 19 nt, Artificial Sequence
  Description of Artificial Sequence: Synthetic oligonucleotide
  Antisense strand to SEQ ID NO: 509139
uuugcucacgauuauagcu

SEQ ID NO: 509141 - RNA, 19 nt, Artificial Sequence
  Description of Artificial Sequence: Synthetic oligonucleotide
  Sense strand starting at position 1277 of SEQ ID NO: 317749
cuauaaucgugagcaaaga

SEQ ID NO: 509142 - RNA, 19 nt, Artificial Sequence
  Description of Artificial Sequence: Synthetic oligonucleotide
  Antisense strand to SEQ ID NO: 509141
ucuuugcucacgauuauag

SEQ ID NO: 509143 - RNA, 19 nt, Artificial Sequence
  Description of Artificial Sequence: Synthetic oligonucleotide
  Sense strand starting at position 1278 of SEQ ID NO: 317749
uauaaucgugagcaaagau

SEQ ID NO: 509144 - RNA, 19 nt, Artificial Sequence
  Description of Artificial Sequence: Synthetic oligonucleotide
  Antisense strand to SEQ ID NO: 509143
aucuuugcucacgauuaua

SEQ ID NO: 509145 - RNA, 19 nt, Artificial Sequence
  Description of Artificial Sequence: Synthetic oligonucleotide
  Sense strand starting at position 1329 of SEQ ID NO: 317749
ggagcugucacccaaggga

SEQ ID NO: 509146 - RNA, 19 nt, Artificial Sequence
  Description of Artificial Sequence: Synthetic oligonucleotide
  Antisense strand to SEQ ID NO: 509145
ucccuugggugacagcucc

SEQ ID NO: 509147 - RNA, 19 nt, Artificial Sequence
  Description of Artificial Sequence: Synthetic oligonucleotide
  Sense strand starting at position 2535 of SEQ ID NO: 317749
cugacucaccuuugaguga

SEQ ID NO: 509148 - RNA, 19 nt, Artificial Sequence
  Description of Artificial Sequence: Synthetic oligonucleotide
  Antisense strand to SEQ ID NO: 509147
ucacucaaaggugagucag

SEQ ID NO: 509149 - RNA, 19 nt, Artificial Sequence
  Description of Artificial Sequence: Synthetic oligonucleotide
  Sense strand starting at position 2665 of SEQ ID NO: 317749
ucugaaguggcucagaauu

SEQ ID NO: 509150 - RNA, 19 nt, Artificial Sequence
  Description of Artificial Sequence: Synthetic oligonucleotide
  Antisense strand to SEQ ID NO: 509149
aauucugagccacuucaga

SEQ ID NO: 509151 - RNA, 19 nt, Artificial Sequence
  Description of Artificial Sequence: Synthetic oligonucleotide
  Sense strand starting at position 2671 of SEQ ID NO: 317749
guggcucagaauuacaguu

SEQ ID NO: 509152 - RNA, 19 nt, Artificial Sequence
  Description of Artificial Sequence: Synthetic oligonucleotide
  Antisense strand to SEQ ID NO: 509151
aacuguaauucugagccac

SEQ ID NO: 509153 - RNA, 19 nt, Artificial Sequence
  Description of Artificial Sequence: Synthetic oligonucleotide
  Sense strand starting at position 2690 of SEQ ID NO: 317749
cuagaagggccuuguggaa

SEQ ID NO: 509154 - RNA, 19 nt, Artificial Sequence
  Description of Artificial Sequence: Synthetic oligonucleotide
  Antisense strand to SEQ ID NO: 509153
uuccacaaggcccuucuag

SEQ ID NO: 509155 - RNA, 19 nt, Artificial Sequence
  Description of Artificial Sequence: Synthetic oligonucleotide
  Sense strand starting at position 2703 of SEQ ID NO: 317749
guggaagccaacuaguaaa

SEQ ID NO: 509156 - RNA, 19 nt, Artificial Sequence
  Description of Artificial Sequence: Synthetic oligonucleotide
  Antisense strand to SEQ ID NO: 509155
uuuacuaguuggcuuccac

SEQ ID NO: 509157 - RNA, 19 nt, Artificial Sequence
  Description of Artificial Sequence: Synthetic oligonucleotide
  Sense strand starting at position 2790 of SEQ ID NO: 317749
uucucuucccaagagaugu

SEQ ID NO: 509158 - RNA, 19 nt, Artificial Sequence
  Description of Artificial Sequence: Synthetic oligonucleotide
  Antisense strand to SEQ ID NO: 509157
acaucucuugggaagagaa

SEQ ID NO: 509159 - RNA, 19 nt, Artificial Sequence
  Description of Artificial Sequence: Synthetic oligonucleotide
  Sense strand starting at position 2803 of SEQ ID NO: 317749
agauguaucccaugauaag

SEQ ID NO: 509160 - RNA, 19 nt, Artificial Sequence
  Description of Artificial Sequence: Synthetic oligonucleotide
  Antisense strand to SEQ ID NO: 509159
cuuaucaugggauacaucu

SEQ ID NO: 509161 - RNA, 19 nt, Artificial Sequence
  Description of Artificial Sequence: Synthetic oligonucleotide
  Sense strand starting at position 2804 of SEQ ID NO: 317749
gauguaucccaugauaagc

SEQ ID NO: 509162 - RNA, 19 nt, Artificial Sequence
  Description of Artificial Sequence: Synthetic oligonucleotide
  Antisense strand to SEQ ID NO: 509161
gcuuaucaugggauacauc

SEQ ID NO: 509163 - RNA, 19 nt, Artificial Sequence
  Description of Artificial Sequence: Synthetic oligonucleotide
  Sense strand starting at position 3056 of SEQ ID NO: 317749
cugaguuuccuccaacaug

SEQ ID NO: 509164 - RNA, 19 nt, Artificial Sequence
  Description of Artificial Sequence: Synthetic oligonucleotide
  Antisense strand to SEQ ID NO: 509163
cauguuggaggaaacucag

SEQ ID NO: 509165 - RNA, 19 nt, Artificial Sequence
  Description of Artificial Sequence: Synthetic oligonucleotide
  Sense strand starting at position 3088 of SEQ ID NO: 317749
cuaguaagucuccauuccu

SEQ ID NO: 509166 - RNA, 19 nt, Artificial Sequence
  Description of Artificial Sequence: Synthetic oligonucleotide
  Antisense strand to SEQ ID NO: 509165
aggaauggagacuuacuag

SEQ ID NO: 509167 - RNA, 19 nt, Artificial Sequence
  Description of Artificial Sequence: Synthetic oligonucleotide
  Sense strand starting at position 3179 of SEQ ID NO: 317749
ugcuauacuggugaacaaa

SEQ ID NO: 509168 - RNA, 19 nt, Artificial Sequence
  Description of Artificial Sequence: Synthetic oligonucleotide
  Antisense strand to SEQ ID NO: 509167
uuuguucaccaguauagca

SEQ ID NO: 509169 - RNA, 19 nt, Artificial Sequence
  Description of Artificial Sequence: Synthetic oligonucleotide
  Sense strand starting at position 3220 of SEQ ID NO: 317749
uaguuacaggaaugugauu

SEQ ID NO: 509170 - RNA, 19 nt, Artificial Sequence
  Description of Artificial Sequence: Synthetic oligonucleotide
  Antisense strand to SEQ ID NO: 509169
aaucacauuccuguaacua

SEQ ID NO: 509171 - RNA, 19 nt, Artificial Sequence
  Description of Artificial Sequence: Synthetic oligonucleotide
  Sense strand starting at position 3225 of SEQ ID NO: 317749
acaggaaugugauuccuag

SEQ ID NO: 509172 - RNA, 19 nt, Artificial Sequence
  Description of Artificial Sequence: Synthetic oligonucleotide
  Antisense strand to SEQ ID NO: 509171
cuaggaaucacauuccugu

SEQ ID NO: 509173 - RNA, 19 nt, Artificial Sequence
  Description of Artificial Sequence: Synthetic oligonucleotide
  Sense strand starting at position 3236 of SEQ ID NO: 317749
auuccuagcugauuggaaa

SEQ ID NO: 509174 - RNA, 19 nt, Artificial Sequence
  Description of Artificial Sequence: Synthetic oligonucleotide
  Antisense strand to SEQ ID NO: 509173
uuuccaaucagcuaggaau

SEQ ID NO: 509175 - RNA, 19 nt, Artificial Sequence
  Description of Artificial Sequence: Synthetic oligonucleotide
  Sense strand starting at position 3237 of SEQ ID NO: 317749
uuccuagcugauuggaaau

SEQ ID NO: 509176 - RNA, 19 nt, Artificial Sequence
  Description of Artificial Sequence: Synthetic oligonucleotide
  Antisense strand to SEQ ID NO: 509175
auuuccaaucagcuaggaa

SEQ ID NO: 509177 - RNA, 19 nt, Artificial Sequence
  Description of Artificial Sequence: Synthetic oligonucleotide
  Sense strand starting at position 3383 of SEQ ID NO: 317749
acagcuaugcuggauggaa

SEQ ID NO: 509178 - RNA, 19 nt, Artificial Sequence
  Description of Artificial Sequence: Synthetic oligonucleotide
  Antisense strand to SEQ ID NO: 509177
uuccauccagcauagcugu

SEQ ID NO: 509179 - RNA, 19 nt, Artificial Sequence
  Description of Artificial Sequence: Synthetic oligonucleotide
  Sense strand starting at position 3385 of SEQ ID NO: 317749
agcuaugcuggauggaaua

SEQ ID NO: 509180 - RNA, 19 nt, Artificial Sequence
  Description of Artificial Sequence: Synthetic oligonucleotide
  Antisense strand to SEQ ID NO: 509179
uauuccauccagcauagcu

SEQ ID NO: 509181 - RNA, 19 nt, Artificial Sequence
  Description of Artificial Sequence: Synthetic oligonucleotide
  Sense strand starting at position 3795 of SEQ ID NO: 317749
augcucuuacgggaaucua

SEQ ID NO: 509182 - RNA, 19 nt, Artificial Sequence
  Description of Artificial Sequence: Synthetic oligonucleotide
  Antisense strand to SEQ ID NO: 509181
uagauucccguaagagcau

SEQ ID NO: 509183 - RNA, 19 nt, Artificial Sequence
  Description of Artificial Sequence: Synthetic oligonucleotide
  Sense strand starting at position 3977 of SEQ ID NO: 317749
ggaacucugcuguaggcaa

SEQ ID NO: 509184 - RNA, 19 nt, Artificial Sequence
  Description of Artificial Sequence: Synthetic oligonucleotide
  Antisense strand to SEQ ID NO: 509183
uugccuacagcagaguucc

SEQ ID NO: 509185 - RNA, 19 nt, Artificial Sequence
  Description of Artificial Sequence: Synthetic oligonucleotide
  Sense strand starting at position 55 of SEQ ID NO: 317750
ccagauguaugauugcauu

SEQ ID NO: 509186 - RNA, 19 nt, Artificial Sequence
  Description of Artificial Sequence: Synthetic oligonucleotide
  Antisense strand to SEQ ID NO: 509185
aaugcaaucauacaucugg

SEQ ID NO: 509187 - RNA, 19 nt, Artificial Sequence
  Description of Artificial Sequence: Synthetic oligonucleotide
  Sense strand starting at position 65 of SEQ ID NO: 317750
gauugcauugccugccuua

SEQ ID NO: 509188 - RNA, 19 nt, Artificial Sequence
  Description of Artificial Sequence: Synthetic oligonucleotide
  Antisense strand to SEQ ID NO: 509187
uaaggcaggcaaugcaauc

SEQ ID NO: 509189 - RNA, 19 nt, Artificial Sequence
  Description of Artificial Sequence: Synthetic oligonucleotide
  Sense strand starting at position 78 of SEQ ID NO: 317750
gccuuagcuuauuugguua

SEQ ID NO: 509190 - RNA, 19 nt, Artificial Sequence
  Description of Artificial Sequence: Synthetic oligonucleotide
  Antisense strand to SEQ ID NO: 509189
uaaccaaauaagcuaaggc

SEQ ID NO: 509191 - RNA, 19 nt, Artificial Sequence
  Description of Artificial Sequence: Synthetic oligonucleotide
  Sense strand starting at position 80 of SEQ ID NO: 317750
cuuagcuuauuugguuaaa

SEQ ID NO: 509192 - RNA, 19 nt, Artificial Sequence
  Description of Artificial Sequence: Synthetic oligonucleotide
  Antisense strand to SEQ ID NO: 509191
uuuaaccaaauaagcuaag

SEQ ID NO: 509193 - RNA, 19 nt, Artificial Sequence
  Description of Artificial Sequence: Synthetic oligonucleotide
  Sense strand starting at position 193 of SEQ ID NO: 317750
gcuacuguuuauguaguca

SEQ ID NO: 509194 - RNA, 19 nt, Artificial Sequence
  Description of Artificial Sequence: Synthetic oligonucleotide
  Antisense strand to SEQ ID NO: 509193
ugacuacauaaacaguagc

SEQ ID NO: 509195 - RNA, 19 nt, Artificial Sequence
  Description of Artificial Sequence: Synthetic oligonucleotide
  Sense strand starting at position 197 of SEQ ID NO: 317750
cuguuuauguagucaggca

SEQ ID NO: 509196 - RNA, 19 nt, Artificial Sequence
  Description of Artificial Sequence: Synthetic oligonucleotide
  Antisense strand to SEQ ID NO: 509195
ugccugacuacauaaacag

SEQ ID NO: 509197 - RNA, 19 nt, Artificial Sequence
  Description of Artificial Sequence: Synthetic oligonucleotide
  Sense strand starting at position 645 of SEQ ID NO: 317750
gaaaguaccucagguaaga

SEQ ID NO: 509198 - RNA, 19 nt, Artificial Sequence
  Description of Artificial Sequence: Synthetic oligonucleotide
  Antisense strand to SEQ ID NO: 509197
ucuuaccugagguacuuuc

SEQ ID NO: 509199 - RNA, 19 nt, Artificial Sequence
  Description of Artificial Sequence: Synthetic oligonucleotide
  Sense strand starting at position 682 of SEQ ID NO: 317750
gaauaaauagcccgauaga

SEQ ID NO: 509200 - RNA, 19 nt, Artificial Sequence
  Description of Artificial Sequence: Synthetic oligonucleotide
  Antisense strand to SEQ ID NO: 509199
ucuaucgggcuauuuauuc

SEQ ID NO: 509201 - RNA, 19 nt, Artificial Sequence
  Description of Artificial Sequence: Synthetic oligonucleotide
  Sense strand starting at position 707 of SEQ ID NO: 317750
uuucuucuauuguucuaga

SEQ ID NO: 509202 - RNA, 19 nt, Artificial Sequence
  Description of Artificial Sequence: Synthetic oligonucleotide
  Antisense strand to SEQ ID NO: 509201
ucuagaacaauagaagaaa

SEQ ID NO: 509203 - RNA, 19 nt, Artificial Sequence
  Description of Artificial Sequence: Synthetic oligonucleotide
  Sense strand starting at position 710 of SEQ ID NO: 317750
cuucuauuguucuagaaga

SEQ ID NO: 509204 - RNA, 19 nt, Artificial Sequence
  Description of Artificial Sequence: Synthetic oligonucleotide
  Antisense strand to SEQ ID NO: 509203
ucuucuagaacaauagaag

SEQ ID NO: 509205 - RNA, 19 nt, Artificial Sequence
  Description of Artificial Sequence: Synthetic oligonucleotide
  Sense strand starting at position 826 of SEQ ID NO: 317750
gcuugcgaccagugacuaa

SEQ ID NO: 509206 - RNA, 19 nt, Artificial Sequence
  Description of Artificial Sequence: Synthetic oligonucleotide
  Antisense strand to SEQ ID NO: 509205
uuagucacuggucgcaagc

SEQ ID NO: 509207 - RNA, 19 nt, Artificial Sequence
  Description of Artificial Sequence: Synthetic oligonucleotide
  Sense strand starting at position 891 of SEQ ID NO: 317750
cgcgcuaauugcucaauua

SEQ ID NO: 509208 - RNA, 19 nt, Artificial Sequence
  Description of Artificial Sequence: Synthetic oligonucleotide
  Antisense strand to SEQ ID NO: 509207
uaauugagcaauuagcgcg

SEQ ID NO: 509209 - RNA, 19 nt, Artificial Sequence
  Description of Artificial Sequence: Synthetic oligonucleotide
  Sense strand starting at position 892 of SEQ ID NO: 317750
gcgcuaauugcucaauuau

SEQ ID NO: 509210 - RNA, 19 nt, Artificial Sequence
  Description of Artificial Sequence: Synthetic oligonucleotide
  Antisense strand to SEQ ID NO: 509209
auaauugagcaauuagcgc

SEQ ID NO: 509211 - RNA, 19 nt, Artificial Sequence
  Description of Artificial Sequence: Synthetic oligonucleotide
  Sense strand starting at position 972 of SEQ ID NO: 317750
aggcgcucuccuuagaaau

SEQ ID NO: 509212 - RNA, 19 nt, Artificial Sequence
  Description of Artificial Sequence: Synthetic oligonucleotide
  Antisense strand to SEQ ID NO: 509211
auuucuaaggagagcgccu

SEQ ID NO: 509213 - RNA, 19 nt, Artificial Sequence
  Description of Artificial Sequence: Synthetic oligonucleotide
  Sense strand starting at position 1032 of SEQ ID NO: 317750
agaggaaacucucaggugu

SEQ ID NO: 509214 - RNA, 19 nt, Artificial Sequence
  Description of Artificial Sequence: Synthetic oligonucleotide
  Antisense strand to SEQ ID NO: 509213
acaccugagaguuuccucu

SEQ ID NO: 509215 - RNA, 19 nt, Artificial Sequence
  Description of Artificial Sequence: Synthetic oligonucleotide
  Sense strand starting at position 1061 of SEQ ID NO: 317750
cuugcugggucucugaaga

SEQ ID NO: 509216 - RNA, 19 nt, Artificial Sequence
  Description of Artificial Sequence: Synthetic oligonucleotide
  Antisense strand to SEQ ID NO: 509215
ucuucagagacccagcaag

SEQ ID NO: 509217 - RNA, 19 nt, Artificial Sequence
  Description of Artificial Sequence: Synthetic oligonucleotide
  Sense strand starting at position 1127 of SEQ ID NO: 317750
caguguugacggcacugaa

SEQ ID NO: 509218 - RNA, 19 nt, Artificial Sequence
  Description of Artificial Sequence: Synthetic oligonucleotide
  Antisense strand to SEQ ID NO: 509217
uucagugccgucaacacug

SEQ ID NO: 509219 - RNA, 19 nt, Artificial Sequence
  Description of Artificial Sequence: Synthetic oligonucleotide
  Sense strand starting at position 1165 of SEQ ID NO: 317750
gcacaagagucccugauac

SEQ ID NO: 509220 - RNA, 19 nt, Artificial Sequence
  Description of Artificial Sequence: Synthetic oligonucleotide
  Antisense strand to SEQ ID NO: 509219
guaucagggacucuugugc

SEQ ID NO: 509221 - RNA, 19 nt, Artificial Sequence
  Description of Artificial Sequence: Synthetic oligonucleotide
  Sense strand starting at position 1175 of SEQ ID NO: 317750
cccugauacacguaggaug

SEQ ID NO: 509222 - RNA, 19 nt, Artificial Sequence
  Description of Artificial Sequence: Synthetic oligonucleotide
  Antisense strand to SEQ ID NO: 509221
cauccuacguguaucaggg

SEQ ID NO: 509223 - RNA, 19 nt, Artificial Sequence
  Description of Artificial Sequence: Synthetic oligonucleotide
  Sense strand starting at position 1199 of SEQ ID NO: 317750
gcgggcaguucaguaaaga

SEQ ID NO: 509224 - RNA, 19 nt, Artificial Sequence
  Description of Artificial Sequence: Synthetic oligonucleotide
  Antisense strand to SEQ ID NO: 509223
ucuuuacugaacugcccgc

SEQ ID NO: 509225 - RNA, 19 nt, Artificial Sequence
  Description of Artificial Sequence: Synthetic oligonucleotide
  Sense strand starting at position 1367 of SEQ ID NO: 317750
acgugcgcccuucaagaaa

SEQ ID NO: 509226 - RNA, 19 nt, Artificial Sequence
  Description of Artificial Sequence: Synthetic oligonucleotide
  Antisense strand to SEQ ID NO: 509225
uuucuugaagggcgcacgu

SEQ ID NO: 509227 - RNA, 19 nt, Artificial Sequence
  Description of Artificial Sequence: Synthetic oligonucleotide
  Sense strand starting at position 1387 of SEQ ID NO: 317750
gcgaggaguggcuaaggaa

SEQ ID NO: 509228 - RNA, 19 nt, Artificial Sequence
  Description of Artificial Sequence: Synthetic oligonucleotide
  Antisense strand to SEQ ID NO: 509227
uuccuuagccacuccucgc

SEQ ID NO: 509229 - RNA, 19 nt, Artificial Sequence
  Description of Artificial Sequence: Synthetic oligonucleotide
  Sense strand starting at position 1531 of SEQ ID NO: 317750
augagaacuugggauauca

SEQ ID NO: 509230 - RNA, 19 nt, Artificial Sequence
  Description of Artificial Sequence: Synthetic oligonucleotide
  Antisense strand to SEQ ID NO: 509229
ugauaucccaaguucucau

SEQ ID NO: 509231 - RNA, 19 nt, Artificial Sequence
  Description of Artificial Sequence: Synthetic oligonucleotide
  Sense strand starting at position 1579 of SEQ ID NO: 317750
agagcaaggcuuggucaaa

SEQ ID NO: 509232 - RNA, 19 nt, Artificial Sequence
  Description of Artificial Sequence: Synthetic oligonucleotide
  Antisense strand to SEQ ID NO: 509231
uuugaccaagccuugcucu

SEQ ID NO: 509233 - RNA, 19 nt, Artificial Sequence
  Description of Artificial Sequence: Synthetic oligonucleotide
  Sense strand starting at position 2231 of SEQ ID NO: 317750
aggucacgauuucgagagu

SEQ ID NO: 509234 - RNA, 19 nt, Artificial Sequence
  Description of Artificial Sequence: Synthetic oligonucleotide
  Antisense strand to SEQ ID NO: 509233
acucucgaaaucgugaccu

SEQ ID NO: 509235 - RNA, 19 nt, Artificial Sequence
  Description of Artificial Sequence: Synthetic oligonucleotide
  Sense strand starting at position 2232 of SEQ ID NO: 317750
ggucacgauuucgagagua

SEQ ID NO: 509236 - RNA, 19 nt, Artificial Sequence
  Description of Artificial Sequence: Synthetic oligonucleotide
  Antisense strand to SEQ ID NO: 509235
uacucucgaaaucgugacc

SEQ ID NO: 509237 - RNA, 19 nt, Artificial Sequence
  Description of Artificial Sequence: Synthetic oligonucleotide
  Sense strand starting at position 2515 of SEQ ID NO: 317750
guaaguaggucagccuaga

SEQ ID NO: 509238 - RNA, 19 nt, Artificial Sequence
  Description of Artificial Sequence: Synthetic oligonucleotide
  Antisense strand to SEQ ID NO: 509237
ucuaggcugaccuacuuac

SEQ ID NO: 509239 - RNA, 19 nt, Artificial Sequence
  Description of Artificial Sequence: Synthetic oligonucleotide
  Sense strand starting at position 2568 of SEQ ID NO: 317750
gcagucgcuuguuuacaga

SEQ ID NO: 509240 - RNA, 19 nt, Artificial Sequence
  Description of Artificial Sequence: Synthetic oligonucleotide
  Antisense strand to SEQ ID NO: 509239
ucuguaaacaagcgacugc

SEQ ID NO: 509241 - RNA, 19 nt, Artificial Sequence
  Description of Artificial Sequence: Synthetic oligonucleotide
  Sense strand starting at position 2598 of SEQ ID NO: 317750
gccuguaggcaaugggaau

SEQ ID NO: 509242 - RNA, 19 nt, Artificial Sequence
  Description of Artificial Sequence: Synthetic oligonucleotide
  Antisense strand to SEQ ID NO: 509241
auucccauugccuacaggc

SEQ ID NO: 509243 - RNA, 19 nt, Artificial Sequence
  Description of Artificial Sequence: Synthetic oligonucleotide
  Sense strand starting at position 2644 of SEQ ID NO: 317750
ggagccuuacgcugggauu

SEQ ID NO: 509244 - RNA, 19 nt, Artificial Sequence
  Description of Artificial Sequence: Synthetic oligonucleotide
  Antisense strand to SEQ ID NO: 509243
aaucccagcguaaggcucc

SEQ ID NO: 509245 - RNA, 19 nt, Artificial Sequence
  Description of Artificial Sequence: Synthetic oligonucleotide
  Sense strand starting at position 2645 of SEQ ID NO: 317750
gagccuuacgcugggauuu

SEQ ID NO: 509246 - RNA, 19 nt, Artificial Sequence
  Description of Artificial Sequence: Synthetic oligonucleotide
  Antisense strand to SEQ ID NO: 509245
aaaucccagcguaaggcuc

SEQ ID NO: 509247 - RNA, 19 nt, Artificial Sequence
  Description of Artificial Sequence: Synthetic oligonucleotide
  Sense strand starting at position 2658 of SEQ ID NO: 317750
ggauuuguucuuggugccu

SEQ ID NO: 509248 - RNA, 19 nt, Artificial Sequence
  Description of Artificial Sequence: Synthetic oligonucleotide
  Antisense strand to SEQ ID NO: 509247
aggcaccaagaacaaaucc

SEQ ID NO: 509249 - RNA, 19 nt, Artificial Sequence
  Description of Artificial Sequence: Synthetic oligonucleotide
  Sense strand starting at position 2688 of SEQ ID NO: 317750
uuaacuucucuacggcaaa

SEQ ID NO: 509250 - RNA, 19 nt, Artificial Sequence
  Description of Artificial Sequence: Synthetic oligonucleotide
  Antisense strand to SEQ ID NO: 509249
uuugccguagagaaguuaa

SEQ ID NO: 509251 - RNA, 19 nt, Artificial Sequence
  Description of Artificial Sequence: Synthetic oligonucleotide
  Sense strand starting at position 2691 of SEQ ID NO: 317750
acuucucuacggcaaagua

SEQ ID NO: 509252 - RNA, 19 nt, Artificial Sequence
  Description of Artificial Sequence: Synthetic oligonucleotide
  Antisense strand to SEQ ID NO: 509251
uacuuugccguagagaagu

SEQ ID NO: 509253 - RNA, 19 nt, Artificial Sequence
  Description of Artificial Sequence: Synthetic oligonucleotide
  Sense strand starting at position 3593 of SEQ ID NO: 317750
uuugcuauauuguaaugga

SEQ ID NO: 509254 - RNA, 19 nt, Artificial Sequence
  Description of Artificial Sequence: Synthetic oligonucleotide
  Antisense strand to SEQ ID NO: 509253
uccauuacaauauagcaaa

SEQ ID NO: 509255 - RNA, 19 nt, Artificial Sequence
  Description of Artificial Sequence: Synthetic oligonucleotide
  Sense strand starting at position 3607 of SEQ ID NO: 317750
auggauccagucuggauua

SEQ ID NO: 509256 - RNA, 19 nt, Artificial Sequence
  Description of Artificial Sequence: Synthetic oligonucleotide
  Antisense strand to SEQ ID NO: 509255
uaauccagacuggauccau

SEQ ID NO: 509257 - RNA, 19 nt, Artificial Sequence
  Description of Artificial Sequence: Synthetic oligonucleotide
  Sense strand starting at position 3620 of SEQ ID NO: 317750
ggauuauagucaucauuaa

SEQ ID NO: 509258 - RNA, 19 nt, Artificial Sequence
  Description of Artificial Sequence: Synthetic oligonucleotide
  Antisense strand to SEQ ID NO: 509257
uuaaugaugacuauaaucc

SEQ ID NO: 509259 - RNA, 19 nt, Artificial Sequence
  Description of Artificial Sequence: Synthetic oligonucleotide
  Sense strand starting at position 3717 of SEQ ID NO: 317750
ccuugaaagucauaaugca

SEQ ID NO: 509260 - RNA, 19 nt, Artificial Sequence
  Description of Artificial Sequence: Synthetic oligonucleotide
  Antisense strand to SEQ ID NO: 509259
ugcauuaugacuuucaagg

SEQ ID NO: 509261 - RNA, 19 nt, Artificial Sequence
  Description of Artificial Sequence: Synthetic oligonucleotide
  Sense strand starting at position 3757 of SEQ ID NO: 317750
uuacuaagugaaugauuag

SEQ ID NO: 509262 - RNA, 19 nt, Artificial Sequence
  Description of Artificial Sequence: Synthetic oligonucleotide
  Antisense strand to SEQ ID NO: 509261
cuaaucauucacuuaguaa

SEQ ID NO: 509263 - RNA, 19 nt, Artificial Sequence
  Description of Artificial Sequence: Synthetic oligonucleotide
  Sense strand starting at position 3763 of SEQ ID NO: 317750
agugaaugauuagaugaau

SEQ ID NO: 509264 - RNA, 19 nt, Artificial Sequence
  Description of Artificial Sequence: Synthetic oligonucleotide
  Antisense strand to SEQ ID NO: 509263
auucaucuaaucauucacu

SEQ ID NO: 509265 - RNA, 19 nt, Artificial Sequence
  Description of Artificial Sequence: Synthetic oligonucleotide
  Sense strand starting at position 235 of SEQ ID NO: 317751
ccuuguggcccugagaaga

SEQ ID NO: 509266 - RNA, 19 nt, Artificial Sequence
  Description of Artificial Sequence: Synthetic oligonucleotide
  Antisense strand to SEQ ID NO: 509265
ucuucucagggccacaagg

SEQ ID NO: 509267 - RNA, 19 nt, Artificial Sequence
  Description of Artificial Sequence: Synthetic oligonucleotide
  Sense strand starting at position 248 of SEQ ID NO: 317751
agaagauaaugcgcuaaau

SEQ ID NO: 509268 - RNA, 19 nt, Artificial Sequence
  Description of Artificial Sequence: Synthetic oligonucleotide
  Antisense strand to SEQ ID NO: 509267
auuuagcgcauuaucuucu

SEQ ID NO: 509269 - RNA, 19 nt, Artificial Sequence
  Description of Artificial Sequence: Synthetic oligonucleotide
  Sense strand starting at position 250 of SEQ ID NO: 317751
aagauaaugcgcuaaauga

SEQ ID NO: 509270 - RNA, 19 nt, Artificial Sequence
  Description of Artificial Sequence: Synthetic oligonucleotide
  Antisense strand to SEQ ID NO: 509269
ucauuuagcgcauuaucuu

SEQ ID NO: 509271 - RNA, 19 nt, Artificial Sequence
  Description of Artificial Sequence: Synthetic oligonucleotide
  Sense strand starting at position 370 of SEQ ID NO: 317751
acucgagcauucucaugau

SEQ ID NO: 509272 - RNA, 19 nt, Artificial Sequence
  Description of Artificial Sequence: Synthetic oligonucleotide
  Antisense strand to SEQ ID NO: 509271
aucaugagaaugcucgagu

SEQ ID NO: 509273 - RNA, 19 nt, Artificial Sequence
  Description of Artificial Sequence: Synthetic oligonucleotide
  Sense strand starting at position 374 of SEQ ID NO: 317751
gagcauucucaugauccag

SEQ ID NO: 509274 - RNA, 19 nt, Artificial Sequence
  Description of Artificial Sequence: Synthetic oligonucleotide
  Antisense strand to SEQ ID NO: 509273
cuggaucaugagaaugcuc

SEQ ID NO: 509275 - RNA, 19 nt, Artificial Sequence
  Description of Artificial Sequence: Synthetic oligonucleotide
  Sense strand starting at position 376 of SEQ ID NO: 317751
gcauucucaugauccaguu

SEQ ID NO: 509276 - RNA, 19 nt, Artificial Sequence
  Description of Artificial Sequence: Synthetic oligonucleotide
  Antisense strand to SEQ ID NO: 509275
aacuggaucaugagaaugc

SEQ ID NO: 509277 - RNA, 19 nt, Artificial Sequence
  Description of Artificial Sequence: Synthetic oligonucleotide
  Sense strand starting at position 487 of SEQ ID NO: 317751
acaguugauccauauggca

SEQ ID NO: 509278 - RNA, 19 nt, Artificial Sequence
  Description of Artificial Sequence: Synthetic oligonucleotide
  Antisense strand to SEQ ID NO: 509277
ugccauauggaucaacugu

SEQ ID NO: 509279 - RNA, 19 nt, Artificial Sequence
  Description of Artificial Sequence: Synthetic oligonucleotide
  Sense strand starting at position 666 of SEQ ID NO: 317751
gguuaaucuuguccucuca

SEQ ID NO: 509280 - RNA, 19 nt, Artificial Sequence
  Description of Artificial Sequence: Synthetic oligonucleotide
  Antisense strand to SEQ ID NO: 509279
ugagaggacaagauuaacc

SEQ ID NO: 509281 - RNA, 19 nt, Artificial Sequence
  Description of Artificial Sequence: Synthetic oligonucleotide
  Sense strand starting at position 734 of SEQ ID NO: 317751
gugucaugcccagcgguaa

SEQ ID NO: 509282 - RNA, 19 nt, Artificial Sequence
  Description of Artificial Sequence: Synthetic oligonucleotide
  Antisense strand to SEQ ID NO: 509281
uuaccgcugggcaugacac

SEQ ID NO: 509283 - RNA, 19 nt, Artificial Sequence
  Description of Artificial Sequence: Synthetic oligonucleotide
  Sense strand starting at position 948 of SEQ ID NO: 317751
ucacaaauccaucggguau

SEQ ID NO: 509284 - RNA, 19 nt, Artificial Sequence
  Description of Artificial Sequence: Synthetic oligonucleotide
  Antisense strand to SEQ ID NO: 509283
auacccgauggauuuguga

SEQ ID NO: 509285 - RNA, 19 nt, Artificial Sequence
  Description of Artificial Sequence: Synthetic oligonucleotide
  Sense strand starting at position 952 of SEQ ID NO: 317751
aaauccaucggguauuauu

SEQ ID NO: 509286 - RNA, 19 nt, Artificial Sequence
  Description of Artificial Sequence: Synthetic oligonucleotide
  Antisense strand to SEQ ID NO: 509285
aauaauacccgauggauuu

SEQ ID NO: 509287 - RNA, 19 nt, Artificial Sequence
  Description of Artificial Sequence: Synthetic oligonucleotide
  Sense strand starting at position 1085 of SEQ ID NO: 317751
acggucuaucccugaacua

SEQ ID NO: 509288 - RNA, 19 nt, Artificial Sequence
  Description of Artificial Sequence: Synthetic oligonucleotide
  Antisense strand to SEQ ID NO: 509287
uaguucagggauagaccgu

SEQ ID NO: 509289 - RNA, 19 nt, Artificial Sequence
  Description of Artificial Sequence: Synthetic oligonucleotide
  Sense strand starting at position 1086 of SEQ ID NO: 317751
cggucuaucccugaacuau

SEQ ID NO: 509290 - RNA, 19 nt, Artificial Sequence
  Description of Artificial Sequence: Synthetic oligonucleotide
  Antisense strand to SEQ ID NO: 509289
auaguucagggauagaccg

SEQ ID NO: 509291 - RNA, 19 nt, Artificial Sequence
  Description of Artificial Sequence: Synthetic oligonucleotide
  Sense strand starting at position 1123 of SEQ ID NO: 317751
acacuaaucgcaugaccuu

SEQ ID NO: 509292 - RNA, 19 nt, Artificial Sequence
  Description of Artificial Sequence: Synthetic oligonucleotide
  Antisense strand to SEQ ID NO: 509291
aaggucaugcgauuagugu

SEQ ID NO: 509293 - RNA, 19 nt, Artificial Sequence
  Description of Artificial Sequence: Synthetic oligonucleotide
  Sense strand starting at position 1247 of SEQ ID NO: 317751
auuacucgccuccagaaua

SEQ ID NO: 509294 - RNA, 19 nt, Artificial Sequence
  Description of Artificial Sequence: Synthetic oligonucleotide
  Antisense strand to SEQ ID NO: 509293
uauucuggaggcgaguaau

SEQ ID NO: 509295 - RNA, 19 nt, Artificial Sequence
  Description of Artificial Sequence: Synthetic oligonucleotide
  Sense strand starting at position 1297 of SEQ ID NO: 317751
gcguguucuccuucuggua

SEQ ID NO: 509296 - RNA, 19 nt, Artificial Sequence
  Description of Artificial Sequence: Synthetic oligonucleotide
  Antisense strand to SEQ ID NO: 509295
uaccagaaggagaacacgc

SEQ ID NO: 509297 - RNA, 19 nt, Artificial Sequence
  Description of Artificial Sequence: Synthetic oligonucleotide
  Sense strand starting at position 1561 of SEQ ID NO: 317751
ucagcuuucccagagguca

SEQ ID NO: 509298 - RNA, 19 nt, Artificial Sequence
  Description of Artificial Sequence: Synthetic oligonucleotide
  Antisense strand to SEQ ID NO: 509297
ugaccucugggaaagcuga

SEQ ID NO: 509299 - RNA, 19 nt, Artificial Sequence
  Description of Artificial Sequence: Synthetic oligonucleotide
  Sense strand starting at position 2144 of SEQ ID NO: 317751
gaagauuggccgggaguga

SEQ ID NO: 509300 - RNA, 19 nt, Artificial Sequence
  Description of Artificial Sequence: Synthetic oligonucleotide
  Antisense strand to SEQ ID NO: 509299
ucacucccggccaaucuuc

SEQ ID NO: 509301 - RNA, 19 nt, Artificial Sequence
  Description of Artificial Sequence: Synthetic oligonucleotide
  Sense strand starting at position 2615 of SEQ ID NO: 317751
aauauaauccgagguuauu

SEQ ID NO: 509302 - RNA, 19 nt, Artificial Sequence
  Description of Artificial Sequence: Synthetic oligonucleotide
  Antisense strand to SEQ ID NO: 509301
aauaaccucggauuauauu

SEQ ID NO: 509303 - RNA, 19 nt, Artificial Sequence
  Description of Artificial Sequence: Synthetic oligonucleotide
  Sense strand starting at position 2649 of SEQ ID NO: 317751
uguuuccugaagugagauu

SEQ ID NO: 509304 - RNA, 19 nt, Artificial Sequence
  Description of Artificial Sequence: Synthetic oligonucleotide
  Antisense strand to SEQ ID NO: 509303
aaucucacuucaggaaaca

SEQ ID NO: 509305 - RNA, 19 nt, Artificial Sequence
  Description of Artificial Sequence: Synthetic oligonucleotide
  Sense strand starting at position 2650 of SEQ ID NO: 317751
guuuccugaagugagauua

SEQ ID NO: 509306 - RNA, 19 nt, Artificial Sequence
  Description of Artificial Sequence: Synthetic oligonucleotide
  Antisense strand to SEQ ID NO: 509305
uaaucucacuucaggaaac

SEQ ID NO: 509307 - RNA, 19 nt, Artificial Sequence
  Description of Artificial Sequence: Synthetic oligonucleotide
  Sense strand starting at position 2837 of SEQ ID NO: 317751
uagagauccugaucucuug

SEQ ID NO: 509308 - RNA, 19 nt, Artificial Sequence
  Description of Artificial Sequence: Synthetic oligonucleotide
  Antisense strand to SEQ ID NO: 509307
caagagaucaggaucucua

SEQ ID NO: 509309 - RNA, 19 nt, Artificial Sequence
  Description of Artificial Sequence: Synthetic oligonucleotide
  Sense strand starting at position 2844 of SEQ ID NO: 317751
ccugaucucuuguucucua

SEQ ID NO: 509310 - RNA, 19 nt, Artificial Sequence
  Description of Artificial Sequence: Synthetic oligonucleotide
  Antisense strand to SEQ ID NO: 509309
uagagaacaagagaucagg

SEQ ID NO: 509311 - RNA, 19 nt, Artificial Sequence
  Description of Artificial Sequence: Synthetic oligonucleotide
  Sense strand starting at position 2845 of SEQ ID NO: 317751
cugaucucuuguucucuau

SEQ ID NO: 509312 - RNA, 19 nt, Artificial Sequence
  Description of Artificial Sequence: Synthetic oligonucleotide
  Antisense strand to SEQ ID NO: 509311
auagagaacaagagaucag

SEQ ID NO: 509313 - RNA, 19 nt, Artificial Sequence
  Description of Artificial Sequence: Synthetic oligonucleotide
  Sense strand starting at position 2905 of SEQ ID NO: 317751
acuagaaucagcgaaugua

SEQ ID NO: 509314 - RNA, 19 nt, Artificial Sequence
  Description of Artificial Sequence: Synthetic oligonucleotide
  Antisense strand to SEQ ID NO: 509313
uacauucgcugauucuagu

SEQ ID NO: 509315 - RNA, 19 nt, Artificial Sequence
  Description of Artificial Sequence: Synthetic oligonucleotide
  Sense strand starting at position 2908 of SEQ ID NO: 317751
agaaucagcgaauguauca

SEQ ID NO: 509316 - RNA, 19 nt, Artificial Sequence
  Description of Artificial Sequence: Synthetic oligonucleotide
  Antisense strand to SEQ ID NO: 509315
ugauacauucgcugauucu

SEQ ID NO: 509317 - RNA, 19 nt, Artificial Sequence
  Description of Artificial Sequence: Synthetic oligonucleotide
  Sense strand starting at position 2915 of SEQ ID NO: 317751
gcgaauguaucacugaucu

SEQ ID NO: 509318 - RNA, 19 nt, Artificial Sequence
  Description of Artificial Sequence: Synthetic oligonucleotide
  Antisense strand to SEQ ID NO: 509317
agaucagugauacauucgc

SEQ ID NO: 509319 - RNA, 19 nt, Artificial Sequence
  Description of Artificial Sequence: Synthetic oligonucleotide
  Sense strand starting at position 2919 of SEQ ID NO: 317751
auguaucacugaucugaaa

SEQ ID NO: 509320 - RNA, 19 nt, Artificial Sequence
  Description of Artificial Sequence: Synthetic oligonucleotide
  Antisense strand to SEQ ID NO: 509319
uuucagaucagugauacau

SEQ ID NO: 509321 - RNA, 19 nt, Artificial Sequence
  Description of Artificial Sequence: Synthetic oligonucleotide
  Sense strand starting at position 2977 of SEQ ID NO: 317751
ugguguuugcaugaguuag

SEQ ID NO: 509322 - RNA, 19 nt, Artificial Sequence
  Description of Artificial Sequence: Synthetic oligonucleotide
  Antisense strand to SEQ ID NO: 509321
cuaacucaugcaaacacca

SEQ ID NO: 509323 - RNA, 19 nt, Artificial Sequence
  Description of Artificial Sequence: Synthetic oligonucleotide
  Sense strand starting at position 2981 of SEQ ID NO: 317751
guuugcaugaguuaguauc

SEQ ID NO: 509324 - RNA, 19 nt, Artificial Sequence
  Description of Artificial Sequence: Synthetic oligonucleotide
  Antisense strand to SEQ ID NO: 509323
gauacuaacucaugcaaac

SEQ ID NO: 509325 - RNA, 19 nt, Artificial Sequence
  Description of Artificial Sequence: Synthetic oligonucleotide
  Sense strand starting at position 2983 of SEQ ID NO: 317751
uugcaugaguuaguaucau

SEQ ID NO: 509326 - RNA, 19 nt, Artificial Sequence
  Description of Artificial Sequence: Synthetic oligonucleotide
  Antisense strand to SEQ ID NO: 509325
augauacuaacucaugcaa

SEQ ID NO: 509327 - RNA, 19 nt, Artificial Sequence
  Description of Artificial Sequence: Synthetic oligonucleotide
  Sense strand starting at position 3316 of SEQ ID NO: 317751
aaauuuguguaggagaauu

SEQ ID NO: 509328 - RNA, 19 nt, Artificial Sequence
  Description of Artificial Sequence: Synthetic oligonucleotide
  Antisense strand to SEQ ID NO: 509327
aauucuccuacacaaauuu

SEQ ID NO: 509329 - RNA, 19 nt, Artificial Sequence
  Description of Artificial Sequence: Synthetic oligonucleotide
  Sense strand starting at position 3432 of SEQ ID NO: 317751
aaguacauuugugagcaaa

SEQ ID NO: 509330 - RNA, 19 nt, Artificial Sequence
  Description of Artificial Sequence: Synthetic oligonucleotide
  Antisense strand to SEQ ID NO: 509329
uuugcucacaaauguacuu

SEQ ID NO: 509331 - RNA, 19 nt, Artificial Sequence
  Description of Artificial Sequence: Synthetic oligonucleotide
  Sense strand starting at position 3452 of SEQ ID NO: 317751
gagcuacuccugcaaaggu

SEQ ID NO: 509332 - RNA, 19 nt, Artificial Sequence
  Description of Artificial Sequence: Synthetic oligonucleotide
  Antisense strand to SEQ ID NO: 509331
accuuugcaggaguagcuc

SEQ ID NO: 509333 - RNA, 19 nt, Artificial Sequence
  Description of Artificial Sequence: Synthetic oligonucleotide
  Sense strand starting at position 3485 of SEQ ID NO: 317751
ugugguacuauggagaauu

SEQ ID NO: 509334 - RNA, 19 nt, Artificial Sequence
  Description of Artificial Sequence: Synthetic oligonucleotide
  Antisense strand to SEQ ID NO: 509333
aauucuccauaguaccaca

SEQ ID NO: 509335 - RNA, 19 nt, Artificial Sequence
  Description of Artificial Sequence: Synthetic oligonucleotide
  Sense strand starting at position 3756 of SEQ ID NO: 317751
gcaggaguauccuugacuc

SEQ ID NO: 509336 - RNA, 19 nt, Artificial Sequence
  Description of Artificial Sequence: Synthetic oligonucleotide
  Antisense strand to SEQ ID NO: 509335
gagucaaggauacuccugc

SEQ ID NO: 509337 - RNA, 19 nt, Artificial Sequence
  Description of Artificial Sequence: Synthetic oligonucleotide
  Sense strand starting at position 3758 of SEQ ID NO: 317751
aggaguauccuugacuccu

SEQ ID NO: 509338 - RNA, 19 nt, Artificial Sequence
  Description of Artificial Sequence: Synthetic oligonucleotide
  Antisense strand to SEQ ID NO: 509337
aggagucaaggauacuccu

SEQ ID NO: 509339 - RNA, 19 nt, Artificial Sequence
  Description of Artificial Sequence: Synthetic oligonucleotide
  Sense strand starting at position 3760 of SEQ ID NO: 317751
gaguauccuugacuccuga

SEQ ID NO: 509340 - RNA, 19 nt, Artificial Sequence
  Description of Artificial Sequence: Synthetic oligonucleotide
  Antisense strand to SEQ ID NO: 509339
ucaggagucaaggauacuc

SEQ ID NO: 509341 - RNA, 19 nt, Artificial Sequence
  Description of Artificial Sequence: Synthetic oligonucleotide
  Sense strand starting at position 3767 of SEQ ID NO: 317751
cuugacuccugauugagga

SEQ ID NO: 509342 - RNA, 19 nt, Artificial Sequence
  Description of Artificial Sequence: Synthetic oligonucleotide
  Antisense strand to SEQ ID NO: 509341
uccucaaucaggagucaag

SEQ ID NO: 509343 - RNA, 19 nt, Artificial Sequence
  Description of Artificial Sequence: Synthetic oligonucleotide
  Sense strand starting at position 3842 of SEQ ID NO: 317751
gagaacccgucucuaaaua

SEQ ID NO: 509344 - RNA, 19 nt, Artificial Sequence
  Description of Artificial Sequence: Synthetic oligonucleotide
  Antisense strand to SEQ ID NO: 509343
uauuuagagacggguucuc

SEQ ID NO: 509345 - RNA, 19 nt, Artificial Sequence
  Description of Artificial Sequence: Synthetic oligonucleotide
  Sense strand starting at position 266 of SEQ ID NO: 317752
ucaguuuaauguuccagag

SEQ ID NO: 509346 - RNA, 19 nt, Artificial Sequence
  Description of Artificial Sequence: Synthetic oligonucleotide
  Antisense strand to SEQ ID NO: 509345
cucuggaacauuaaacuga

SEQ ID NO: 509347 - RNA, 19 nt, Artificial Sequence
  Description of Artificial Sequence: Synthetic oligonucleotide
  Sense strand starting at position 270 of SEQ ID NO: 317752
uuuaauguuccagagccaa

SEQ ID NO: 509348 - RNA, 19 nt, Artificial Sequence
  Description of Artificial Sequence: Synthetic oligonucleotide
  Antisense strand to SEQ ID NO: 509347
uuggcucuggaacauuaaa

SEQ ID NO: 509349 - RNA, 19 nt, Artificial Sequence
  Description of Artificial Sequence: Synthetic oligonucleotide
  Sense strand starting at position 401 of SEQ ID NO: 317752
agcuaaguccuauagaguu

SEQ ID NO: 509350 - RNA, 19 nt, Artificial Sequence
  Description of Artificial Sequence: Synthetic oligonucleotide
  Antisense strand to SEQ ID NO: 509349
aacucuauaggacuuagcu

SEQ ID NO: 509351 - RNA, 19 nt, Artificial Sequence
  Description of Artificial Sequence: Synthetic oligonucleotide
  Sense strand starting at position 852 of SEQ ID NO: 317752
ccuguuggcccagagaagu

SEQ ID NO: 509352 - RNA, 19 nt, Artificial Sequence
  Description of Artificial Sequence: Synthetic oligonucleotide
  Antisense strand to SEQ ID NO: 509351
acuucucugggccaacagg

SEQ ID NO: 509353 - RNA, 19 nt, Artificial Sequence
  Description of Artificial Sequence: Synthetic oligonucleotide
  Sense strand starting at position 919 of SEQ ID NO: 317752
auugcaagacaauguaauu

SEQ ID NO: 509354 - RNA, 19 nt, Artificial Sequence
  Description of Artificial Sequence: Synthetic oligonucleotide
  Antisense strand to SEQ ID NO: 509353
aauuacauugucuugcaau

SEQ ID NO: 509355 - RNA, 19 nt, Artificial Sequence
  Description of Artificial Sequence: Synthetic oligonucleotide
  Sense strand starting at position 984 of SEQ ID NO: 317752
gagguagagcuguauccuu

SEQ ID NO: 509356 - RNA, 19 nt, Artificial Sequence
  Description of Artificial Sequence: Synthetic oligonucleotide
  Antisense strand to SEQ ID NO: 509355
aaggauacagcucuaccuc

SEQ ID NO: 509357 - RNA, 19 nt, Artificial Sequence
  Description of Artificial Sequence: Synthetic oligonucleotide
  Sense strand starting at position 991 of SEQ ID NO: 317752
agcuguauccuuugcauuu

SEQ ID NO: 509358 - RNA, 19 nt, Artificial Sequence
  Description of Artificial Sequence: Synthetic oligonucleotide
  Antisense strand to SEQ ID NO: 509357
aaaugcaaaggauacagcu

SEQ ID NO: 509359 - RNA, 19 nt, Artificial Sequence
  Description of Artificial Sequence: Synthetic oligonucleotide
  Sense strand starting at position 992 of SEQ ID NO: 317752
gcuguauccuuugcauuua

SEQ ID NO: 509360 - RNA, 19 nt, Artificial Sequence
  Description of Artificial Sequence: Synthetic oligonucleotide
  Antisense strand to SEQ ID NO: 509359
uaaaugcaaaggauacagc

SEQ ID NO: 509361 - RNA, 19 nt, Artificial Sequence
  Description of Artificial Sequence: Synthetic oligonucleotide
  Sense strand starting at position 1107 of SEQ ID NO: 317752
auacaaauguaugccugaa

SEQ ID NO: 509362 - RNA, 19 nt, Artificial Sequence
  Description of Artificial Sequence: Synthetic oligonucleotide
  Antisense strand to SEQ ID NO: 509361
uucaggcauacauuuguau

SEQ ID NO: 509363 - RNA, 19 nt, Artificial Sequence
  Description of Artificial Sequence: Synthetic oligonucleotide
  Sense strand starting at position 1175 of SEQ ID NO: 317752
guuguaggauuugaggaaa

SEQ ID NO: 509364 - RNA, 19 nt, Artificial Sequence
  Description of Artificial Sequence: Synthetic oligonucleotide
  Antisense strand to SEQ ID NO: 509363
uuuccucaaauccuacaac

SEQ ID NO: 509365 - RNA, 19 nt, Artificial Sequence
  Description of Artificial Sequence: Synthetic oligonucleotide
  Sense strand starting at position 1303 of SEQ ID NO: 317752
cuuuaaugagaacguaaag

SEQ ID NO: 509366 - RNA, 19 nt, Artificial Sequence
  Description of Artificial Sequence: Synthetic oligonucleotide
  Antisense strand to SEQ ID NO: 509365
cuuuacguucucauuaaag

SEQ ID NO: 509367 - RNA, 19 nt, Artificial Sequence
  Description of Artificial Sequence: Synthetic oligonucleotide
  Sense strand starting at position 1326 of SEQ ID NO: 317752
cccucaagucucugaugaa

SEQ ID NO: 509368 - RNA, 19 nt, Artificial Sequence
  Description of Artificial Sequence: Synthetic oligonucleotide
  Antisense strand to SEQ ID NO: 509367
uucaucagagacuugaggg

SEQ ID NO: 509369 - RNA, 19 nt, Artificial Sequence
  Description of Artificial Sequence: Synthetic oligonucleotide
  Sense strand starting at position 1382 of SEQ ID NO: 317752
guauguacacuuuaauaag

SEQ ID NO: 509370 - RNA, 19 nt, Artificial Sequence
  Description of Artificial Sequence: Synthetic oligonucleotide
  Antisense strand to SEQ ID NO: 509369
cuuauuaaaguguacauac

SEQ ID NO: 509371 - RNA, 19 nt, Artificial Sequence
  Description of Artificial Sequence: Synthetic oligonucleotide
  Sense strand starting at position 1432 of SEQ ID NO: 317752
caguguauagcagaaauag

SEQ ID NO: 509372 - RNA, 19 nt, Artificial Sequence
  Description of Artificial Sequence: Synthetic oligonucleotide
  Antisense strand to SEQ ID NO: 509371
cuauuucugcuauacacug

SEQ ID NO: 509373 - RNA, 19 nt, Artificial Sequence
  Description of Artificial Sequence: Synthetic oligonucleotide
  Sense strand starting at position 1441 of SEQ ID NO: 317752
gcagaaauagcauaaguuu

SEQ ID NO: 509374 - RNA, 19 nt, Artificial Sequence
  Description of Artificial Sequence: Synthetic oligonucleotide
  Antisense strand to SEQ ID NO: 509373
aaacuuaugcuauuucugc

SEQ ID NO: 509375 - RNA, 19 nt, Artificial Sequence
  Description of Artificial Sequence: Synthetic oligonucleotide
  Sense strand starting at position 1470 of SEQ ID NO: 317752
caaagcaaggucugaauga

SEQ ID NO: 509376 - RNA, 19 nt, Artificial Sequence
  Description of Artificial Sequence: Synthetic oligonucleotide
  Antisense strand to SEQ ID NO: 509375
ucauucagaccuugcuuug

SEQ ID NO: 509377 - RNA, 19 nt, Artificial Sequence
  Description of Artificial Sequence: Synthetic oligonucleotide
  Sense strand starting at position 2048 of SEQ ID NO: 317752
cuuaguauuaauuggagga

SEQ ID NO: 509378 - RNA, 19 nt, Artificial Sequence
  Description of Artificial Sequence: Synthetic oligonucleotide
  Antisense strand to SEQ ID NO: 509377
uccuccaauuaauacuaag

SEQ ID NO: 509379 - RNA, 19 nt, Artificial Sequence
  Description of Artificial Sequence: Synthetic oligonucleotide
  Sense strand starting at position 2153 of SEQ ID NO: 317752
acuccuguugccuaggaaa

SEQ ID NO: 509380 - RNA, 19 nt, Artificial Sequence
  Description of Artificial Sequence: Synthetic oligonucleotide
  Antisense strand to SEQ ID NO: 509379
uuuccuaggcaacaggagu

SEQ ID NO: 509381 - RNA, 19 nt, Artificial Sequence
  Description of Artificial Sequence: Synthetic oligonucleotide
  Sense strand starting at position 2165 of SEQ ID NO: 317752
uaggaaaucucagugacug

SEQ ID NO: 509382 - RNA, 19 nt, Artificial Sequence
  Description of Artificial Sequence: Synthetic oligonucleotide
  Antisense strand to SEQ ID NO: 509381
cagucacugagauuuccua

SEQ ID NO: 509383 - RNA, 19 nt, Artificial Sequence
  Description of Artificial Sequence: Synthetic oligonucleotide
  Sense strand starting at position 2422 of SEQ ID NO: 317752
ggguaauuauaggugauuc

SEQ ID NO: 509384 - RNA, 19 nt, Artificial Sequence
  Description of Artificial Sequence: Synthetic oligonucleotide
  Antisense strand to SEQ ID NO: 509383
gaaucaccuauaauuaccc

SEQ ID NO: 509385 - RNA, 19 nt, Artificial Sequence
  Description of Artificial Sequence: Synthetic oligonucleotide
  Sense strand starting at position 2564 of SEQ ID NO: 317752
guuacuuugccagauaaga

SEQ ID NO: 509386 - RNA, 19 nt, Artificial Sequence
  Description of Artificial Sequence: Synthetic oligonucleotide
  Antisense strand to SEQ ID NO: 509385
ucuuaucuggcaaaguaac

SEQ ID NO: 509387 - RNA, 19 nt, Artificial Sequence
  Description of Artificial Sequence: Synthetic oligonucleotide
  Sense strand starting at position 2696 of SEQ ID NO: 317752
ggagcaggcagguauaauu

SEQ ID NO: 509388 - RNA, 19 nt, Artificial Sequence
  Description of Artificial Sequence: Synthetic oligonucleotide
  Antisense strand to SEQ ID NO: 509387
aauuauaccugccugcucc

SEQ ID NO: 509389 - RNA, 19 nt, Artificial Sequence
  Description of Artificial Sequence: Synthetic oligonucleotide
  Sense strand starting at position 2704 of SEQ ID NO: 317752
cagguauaauuagugguga

SEQ ID NO: 509390 - RNA, 19 nt, Artificial Sequence
  Description of Artificial Sequence: Synthetic oligonucleotide
  Antisense strand to SEQ ID NO: 509389
ucaccacuaauuauaccug

SEQ ID NO: 509391 - RNA, 19 nt, Artificial Sequence
  Description of Artificial Sequence: Synthetic oligonucleotide
  Sense strand starting at position 2994 of SEQ ID NO: 317752
uuaucugaauugucugaag

SEQ ID NO: 509392 - RNA, 19 nt, Artificial Sequence
  Description of Artificial Sequence: Synthetic oligonucleotide
  Antisense strand to SEQ ID NO: 509391
cuucagacaauucagauaa

SEQ ID NO: 509393 - RNA, 19 nt, Artificial Sequence
  Description of Artificial Sequence: Synthetic oligonucleotide
  Sense strand starting at position 2996 of SEQ ID NO: 317752
aucugaauugucugaagaa

SEQ ID NO: 509394 - RNA, 19 nt, Artificial Sequence
  Description of Artificial Sequence: Synthetic oligonucleotide
  Antisense strand to SEQ ID NO: 509393
uucuucagacaauucagau

SEQ ID NO: 509395 - RNA, 19 nt, Artificial Sequence
  Description of Artificial Sequence: Synthetic oligonucleotide
  Sense strand starting at position 3006 of SEQ ID NO: 317752
ucugaagaauugucccaga

SEQ ID NO: 509396 - RNA, 19 nt, Artificial Sequence
  Description of Artificial Sequence: Synthetic oligonucleotide
  Antisense strand to SEQ ID NO: 509395
ucugggacaauucuucaga

SEQ ID NO: 509397 - RNA, 19 nt, Artificial Sequence
  Description of Artificial Sequence: Synthetic oligonucleotide
  Sense strand starting at position 3059 of SEQ ID NO: 317752
accucagaugucuaauguu

SEQ ID NO: 509398 - RNA, 19 nt, Artificial Sequence
  Description of Artificial Sequence: Synthetic oligonucleotide
  Antisense strand to SEQ ID NO: 509397
aacauuagacaucugaggu

SEQ ID NO: 509399 - RNA, 19 nt, Artificial Sequence
  Description of Artificial Sequence: Synthetic oligonucleotide
  Sense strand starting at position 3364 of SEQ ID NO: 317752
ggaguacuuaagcaaugcu

SEQ ID NO: 509400 - RNA, 19 nt, Artificial Sequence
  Description of Artificial Sequence: Synthetic oligonucleotide
  Antisense strand to SEQ ID NO: 509399
agcauugcuuaaguacucc

SEQ ID NO: 509401 - RNA, 19 nt, Artificial Sequence
  Description of Artificial Sequence: Synthetic oligonucleotide
  Sense strand starting at position 3459 of SEQ ID NO: 317752
gguauuggguuucugacaa

SEQ ID NO: 509402 - RNA, 19 nt, Artificial Sequence
  Description of Artificial Sequence: Synthetic oligonucleotide
  Antisense strand to SEQ ID NO: 509401
uugucagaaacccaauacc

SEQ ID NO: 509403 - RNA, 19 nt, Artificial Sequence
  Description of Artificial Sequence: Synthetic oligonucleotide
  Sense strand starting at position 3614 of SEQ ID NO: 317752
aauggcaaaucucuaggua

SEQ ID NO: 509404 - RNA, 19 nt, Artificial Sequence
  Description of Artificial Sequence: Synthetic oligonucleotide
  Antisense strand to SEQ ID NO: 509403
uaccuagagauuugccauu

SEQ ID NO: 509405 - RNA, 19 nt, Artificial Sequence
  Description of Artificial Sequence: Synthetic oligonucleotide
  Sense strand starting at position 3615 of SEQ ID NO: 317752
auggcaaaucucuagguaa

SEQ ID NO: 509406 - RNA, 19 nt, Artificial Sequence
  Description of Artificial Sequence: Synthetic oligonucleotide
  Antisense strand to SEQ ID NO: 509405
uuaccuagagauuugccau

SEQ ID NO: 509407 - RNA, 19 nt, Artificial Sequence
  Description of Artificial Sequence: Synthetic oligonucleotide
  Sense strand starting at position 3618 of SEQ ID NO: 317752
gcaaaucucuagguaauca

SEQ ID NO: 509408 - RNA, 19 nt, Artificial Sequence
  Description of Artificial Sequence: Synthetic oligonucleotide
  Antisense strand to SEQ ID NO: 509407
ugauuaccuagagauuugc

SEQ ID NO: 509409 - RNA, 19 nt, Artificial Sequence
  Description of Artificial Sequence: Synthetic oligonucleotide
  Sense strand starting at position 3622 of SEQ ID NO: 317752
aucucuagguaaucaugau

SEQ ID NO: 509410 - RNA, 19 nt, Artificial Sequence
  Description of Artificial Sequence: Synthetic oligonucleotide
  Antisense strand to SEQ ID NO: 509409
aucaugauuaccuagagau

SEQ ID NO: 509411 - RNA, 19 nt, Artificial Sequence
  Description of Artificial Sequence: Synthetic oligonucleotide
  Sense strand starting at position 3626 of SEQ ID NO: 317752
cuagguaaucaugauagcu

SEQ ID NO: 509412 - RNA, 19 nt, Artificial Sequence
  Description of Artificial Sequence: Synthetic oligonucleotide
  Antisense strand to SEQ ID NO: 509411
agcuaucaugauuaccuag

SEQ ID NO: 509413 - RNA, 19 nt, Artificial Sequence
  Description of Artificial Sequence: Synthetic oligonucleotide
  Sense strand starting at position 3677 of SEQ ID NO: 317752
gaggaugacugcuuguaac

SEQ ID NO: 509414 - RNA, 19 nt, Artificial Sequence
  Description of Artificial Sequence: Synthetic oligonucleotide
  Antisense strand to SEQ ID NO: 509413
guuacaagcagucauccuc

SEQ ID NO: 509415 - RNA, 19 nt, Artificial Sequence
  Description of Artificial Sequence: Synthetic oligonucleotide
  Sense strand starting at position 3724 of SEQ ID NO: 317752
gaacucagggcuugaaauu

SEQ ID NO: 509416 - RNA, 19 nt, Artificial Sequence
  Description of Artificial Sequence: Synthetic oligonucleotide
  Antisense strand to SEQ ID NO: 509415
aauuucaagcccugaguuc

SEQ ID NO: 509417 - RNA, 19 nt, Artificial Sequence
  Description of Artificial Sequence: Synthetic oligonucleotide
  Sense strand starting at position 3779 of SEQ ID NO: 317752
cuaugucuuccuggaggaa

SEQ ID NO: 509418 - RNA, 19 nt, Artificial Sequence
  Description of Artificial Sequence: Synthetic oligonucleotide
  Antisense strand to SEQ ID NO: 509417
uuccuccaggaagacauag

SEQ ID NO: 509419 - RNA, 19 nt, Artificial Sequence
  Description of Artificial Sequence: Synthetic oligonucleotide
  Sense strand starting at position 3788 of SEQ ID NO: 317752
ccuggaggaacguacuuau

SEQ ID NO: 509420 - RNA, 19 nt, Artificial Sequence
  Description of Artificial Sequence: Synthetic oligonucleotide
  Antisense strand to SEQ ID NO: 509419
auaaguacguuccuccagg

SEQ ID NO: 509421 - RNA, 19 nt, Artificial Sequence
  Description of Artificial Sequence: Synthetic oligonucleotide
  Sense strand starting at position 3849 of SEQ ID NO: 317752
gagucucauccugagagug

SEQ ID NO: 509422 - RNA, 19 nt, Artificial Sequence
  Description of Artificial Sequence: Synthetic oligonucleotide
  Antisense strand to SEQ ID NO: 509421
cacucucaggaugagacuc

SEQ ID NO: 509423 - RNA, 19 nt, Artificial Sequence
  Description of Artificial Sequence: Synthetic oligonucleotide
  Sense strand starting at position 3927 of SEQ ID NO: 317752
ggaauugauuaggaaggaa

SEQ ID NO: 509424 - RNA, 19 nt, Artificial Sequence
  Description of Artificial Sequence: Synthetic oligonucleotide
  Antisense strand to SEQ ID NO: 509423
uuccuuccuaaucaauucc

SEQ ID NO: 509425 - RNA, 19 nt, Artificial Sequence
  Description of Artificial Sequence: Synthetic oligonucleotide
  Sense strand starting at position 122 of SEQ ID NO: 317753
ucaguuuaauguuccagag

SEQ ID NO: 509426 - RNA, 19 nt, Artificial Sequence
  Description of Artificial Sequence: Synthetic oligonucleotide
  Antisense strand to SEQ ID NO: 509425
cucuggaacauuaaacuga

SEQ ID NO: 509427 - RNA, 19 nt, Artificial Sequence
  Description of Artificial Sequence: Synthetic oligonucleotide
  Sense strand starting at position 126 of SEQ ID NO: 317753
uuuaauguuccagagccaa

SEQ ID NO: 509428 - RNA, 19 nt, Artificial Sequence
  Description of Artificial Sequence: Synthetic oligonucleotide
  Antisense strand to SEQ ID NO: 509427
uuggcucuggaacauuaaa

SEQ ID NO: 509429 - RNA, 19 nt, Artificial Sequence
  Description of Artificial Sequence: Synthetic oligonucleotide
  Sense strand starting at position 257 of SEQ ID NO: 317753
agcuaaguccuauagaguu

SEQ ID NO: 509430 - RNA, 19 nt, Artificial Sequence
  Description of Artificial Sequence: Synthetic oligonucleotide
  Antisense strand to SEQ ID NO: 509429
aacucuauaggacuuagcu

SEQ ID NO: 509431 - RNA, 19 nt, Artificial Sequence
  Description of Artificial Sequence: Synthetic oligonucleotide
  Sense strand starting at position 708 of SEQ ID NO: 317753
ccuguuggcccagagaagu

SEQ ID NO: 509432 - RNA, 19 nt, Artificial Sequence
  Description of Artificial Sequence: Synthetic oligonucleotide
  Antisense strand to SEQ ID NO: 509431
acuucucugggccaacagg

SEQ ID NO: 509433 - RNA, 19 nt, Artificial Sequence
  Description of Artificial Sequence: Synthetic oligonucleotide
  Sense strand starting at position 775 of SEQ ID NO: 317753
auugcaagacaauguaauu

SEQ ID NO: 509434 - RNA, 19 nt, Artificial Sequence
  Description of Artificial Sequence: Synthetic oligonucleotide
  Antisense strand to SEQ ID NO: 509433
aauuacauugucuugcaau

SEQ ID NO: 509435 - RNA, 19 nt, Artificial Sequence
  Description of Artificial Sequence: Synthetic oligonucleotide
  Sense strand starting at position 840 of SEQ ID NO: 317753
gagguagagcuguauccuu

SEQ ID NO: 509436 - RNA, 19 nt, Artificial Sequence
  Description of Artificial Sequence: Synthetic oligonucleotide
  Antisense strand to SEQ ID NO: 509435
aaggauacagcucuaccuc

SEQ ID NO: 509437 - RNA, 19 nt, Artificial Sequence
  Description of Artificial Sequence: Synthetic oligonucleotide
  Sense strand starting at position 847 of SEQ ID NO: 317753
agcuguauccuuugcauuu

SEQ ID NO: 509438 - RNA, 19 nt, Artificial Sequence
  Description of Artificial Sequence: Synthetic oligonucleotide
  Antisense strand to SEQ ID NO: 509437
aaaugcaaaggauacagcu

SEQ ID NO: 509439 - RNA, 19 nt, Artificial Sequence
  Description of Artificial Sequence: Synthetic oligonucleotide
  Sense strand starting at position 848 of SEQ ID NO: 317753
gcuguauccuuugcauuua

SEQ ID NO: 509440 - RNA, 19 nt, Artificial Sequence
  Description of Artificial Sequence: Synthetic oligonucleotide
  Antisense strand to SEQ ID NO: 509439
uaaaugcaaaggauacagc

SEQ ID NO: 509441 - RNA, 19 nt, Artificial Sequence
  Description of Artificial Sequence: Synthetic oligonucleotide
  Sense strand starting at position 963 of SEQ ID NO: 317753
auacaaauguaugccugaa

SEQ ID NO: 509442 - RNA, 19 nt, Artificial Sequence
  Description of Artificial Sequence: Synthetic oligonucleotide
  Antisense strand to SEQ ID NO: 509441
uucaggcauacauuuguau

SEQ ID NO: 509443 - RNA, 19 nt, Artificial Sequence
  Description of Artificial Sequence: Synthetic oligonucleotide
  Sense strand starting at position 1031 of SEQ ID NO: 317753
guuguaggauuugaggaaa

SEQ ID NO: 509444 - RNA, 19 nt, Artificial Sequence
  Description of Artificial Sequence: Synthetic oligonucleotide
  Antisense strand to SEQ ID NO: 509443
uuuccucaaauccuacaac

SEQ ID NO: 509445 - RNA, 19 nt, Artificial Sequence
  Description of Artificial Sequence: Synthetic oligonucleotide
  Sense strand starting at position 1159 of SEQ ID NO: 317753
cuuuaaugagaacguaaag

SEQ ID NO: 509446 - RNA, 19 nt, Artificial Sequence
  Description of Artificial Sequence: Synthetic oligonucleotide
  Antisense strand to SEQ ID NO: 509445
cuuuacguucucauuaaag

SEQ ID NO: 509447 - RNA, 19 nt, Artificial Sequence
  Description of Artificial Sequence: Synthetic oligonucleotide
  Sense strand starting at position 1182 of SEQ ID NO: 317753
cccucaagucucugaugaa

SEQ ID NO: 509448 - RNA, 19 nt, Artificial Sequence
  Description of Artificial Sequence: Synthetic oligonucleotide
  Antisense strand to SEQ ID NO: 509447
uucaucagagacuugaggg

SEQ ID NO: 509449 - RNA, 19 nt, Artificial Sequence
  Description of Artificial Sequence: Synthetic oligonucleotide
  Sense strand starting at position 1238 of SEQ ID NO: 317753
guauguacacuuuaauaag

SEQ ID NO: 509450 - RNA, 19 nt, Artificial Sequence
  Description of Artificial Sequence: Synthetic oligonucleotide
  Antisense strand to SEQ ID NO: 509449
cuuauuaaaguguacauac

SEQ ID NO: 509451 - RNA, 19 nt, Artificial Sequence
  Description of Artificial Sequence: Synthetic oligonucleotide
  Sense strand starting at position 1288 of SEQ ID NO: 317753
caguguauagcagaaauag

SEQ ID NO: 509452 - RNA, 19 nt, Artificial Sequence
  Description of Artificial Sequence: Synthetic oligonucleotide
  Antisense strand to SEQ ID NO: 509451
cuauuucugcuauacacug

SEQ ID NO: 509453 - RNA, 19 nt, Artificial Sequence
  Description of Artificial Sequence: Synthetic oligonucleotide
  Sense strand starting at position 1297 of SEQ ID NO: 317753
gcagaaauagcauaaguuu

SEQ ID NO: 509454 - RNA, 19 nt, Artificial Sequence
  Description of Artificial Sequence: Synthetic oligonucleotide
  Antisense strand to SEQ ID NO: 509453
aaacuuaugcuauuucugc

SEQ ID NO: 509455 - RNA, 19 nt, Artificial Sequence
  Description of Artificial Sequence: Synthetic oligonucleotide
  Sense strand starting at position 1326 of SEQ ID NO: 317753
caaagcaaggucugaauga

SEQ ID NO: 509456 - RNA, 19 nt, Artificial Sequence
  Description of Artificial Sequence: Synthetic oligonucleotide
  Antisense strand to SEQ ID NO: 509455
ucauucagaccuugcuuug

SEQ ID NO: 509457 - RNA, 19 nt, Artificial Sequence
  Description of Artificial Sequence: Synthetic oligonucleotide
  Sense strand starting at position 1904 of SEQ ID NO: 317753
cuuaguauuaauuggagga

SEQ ID NO: 509458 - RNA, 19 nt, Artificial Sequence
  Description of Artificial Sequence: Synthetic oligonucleotide
  Antisense strand to SEQ ID NO: 509457
uccuccaauuaauacuaag

SEQ ID NO: 509459 - RNA, 19 nt, Artificial Sequence
  Description of Artificial Sequence: Synthetic oligonucleotide
  Sense strand starting at position 2009 of SEQ ID NO: 317753
acuccuguugccuaggaaa

SEQ ID NO: 509460 - RNA, 19 nt, Artificial Sequence
  Description of Artificial Sequence: Synthetic oligonucleotide
  Antisense strand to SEQ ID NO: 509459
uuuccuaggcaacaggagu

SEQ ID NO: 509461 - RNA, 19 nt, Artificial Sequence
  Description of Artificial Sequence: Synthetic oligonucleotide
  Sense strand starting at position 2021 of SEQ ID NO: 317753
uaggaaaucucagugacug

SEQ ID NO: 509462 - RNA, 19 nt, Artificial Sequence
  Description of Artificial Sequence: Synthetic oligonucleotide
  Antisense strand to SEQ ID NO: 509461
cagucacugagauuuccua

SEQ ID NO: 509463 - RNA, 19 nt, Artificial Sequence
  Description of Artificial Sequence: Synthetic oligonucleotide
  Sense strand starting at position 2278 of SEQ ID NO: 317753
ggguaauuauaggugauuc

SEQ ID NO: 509464 - RNA, 19 nt, Artificial Sequence
  Description of Artificial Sequence: Synthetic oligonucleotide
  Antisense strand to SEQ ID NO: 509463
gaaucaccuauaauuaccc

SEQ ID NO: 509465 - RNA, 19 nt, Artificial Sequence
  Description of Artificial Sequence: Synthetic oligonucleotide
  Sense strand starting at position 2420 of SEQ ID NO: 317753
guuacuuugccagauaaga

SEQ ID NO: 509466 - RNA, 19 nt, Artificial Sequence
  Description of Artificial Sequence: Synthetic oligonucleotide
  Antisense strand to SEQ ID NO: 509465
ucuuaucuggcaaaguaac

SEQ ID NO: 509467 - RNA, 19 nt, Artificial Sequence
  Description of Artificial Sequence: Synthetic oligonucleotide
  Sense strand starting at position 2552 of SEQ ID NO: 317753
ggagcaggcagguauaauu

SEQ ID NO: 509468 - RNA, 19 nt, Artificial Sequence
  Description of Artificial Sequence: Synthetic oligonucleotide
  Antisense strand to SEQ ID NO: 509467
aauuauaccugccugcucc

SEQ ID NO: 509469 - RNA, 19 nt, Artificial Sequence
  Description of Artificial Sequence: Synthetic oligonucleotide
  Sense strand starting at position 2560 of SEQ ID NO: 317753
cagguauaauuagugguga

SEQ ID NO: 509470 - RNA, 19 nt, Artificial Sequence
  Description of Artificial Sequence: Synthetic oligonucleotide
  Antisense strand to SEQ ID NO: 509469
ucaccacuaauuauaccug

SEQ ID NO: 509471 - RNA, 19 nt, Artificial Sequence
  Description of Artificial Sequence: Synthetic oligonucleotide
  Sense strand starting at position 2850 of SEQ ID NO: 317753
uuaucugaauugucugaag

SEQ ID NO: 509472 - RNA, 19 nt, Artificial Sequence
  Description of Artificial Sequence: Synthetic oligonucleotide
  Antisense strand to SEQ ID NO: 509471
cuucagacaauucagauaa

SEQ ID NO: 509473 - RNA, 19 nt, Artificial Sequence
  Description of Artificial Sequence: Synthetic oligonucleotide
  Sense strand starting at position 2852 of SEQ ID NO: 317753
aucugaauugucugaagaa

SEQ ID NO: 509474 - RNA, 19 nt, Artificial Sequence
  Description of Artificial Sequence: Synthetic oligonucleotide
  Antisense strand to SEQ ID NO: 509473
uucuucagacaauucagau

SEQ ID NO: 509475 - RNA, 19 nt, Artificial Sequence
  Description of Artificial Sequence: Synthetic oligonucleotide
  Sense strand starting at position 2862 of SEQ ID NO: 317753
ucugaagaauugucccaga

SEQ ID NO: 509476 - RNA, 19 nt, Artificial Sequence
  Description of Artificial Sequence: Synthetic oligonucleotide
  Antisense strand to SEQ ID NO: 509475
ucugggacaauucuucaga

SEQ ID NO: 509477 - RNA, 19 nt, Artificial Sequence
  Description of Artificial Sequence: Synthetic oligonucleotide
  Sense strand starting at position 2915 of SEQ ID NO: 317753
accucagaugucuaauguu

SEQ ID NO: 509478 - RNA, 19 nt, Artificial Sequence
  Description of Artificial Sequence: Synthetic oligonucleotide
  Antisense strand to SEQ ID NO: 509477
aacauuagacaucugaggu

SEQ ID NO: 509479 - RNA, 19 nt, Artificial Sequence
  Description of Artificial Sequence: Synthetic oligonucleotide
  Sense strand starting at position 3220 of SEQ ID NO: 317753
ggaguacuuaagcaaugcu

SEQ ID NO: 509480 - RNA, 19 nt, Artificial Sequence
  Description of Artificial Sequence: Synthetic oligonucleotide
  Antisense strand to SEQ ID NO: 509479
agcauugcuuaaguacucc

SEQ ID NO: 509481 - RNA, 19 nt, Artificial Sequence
  Description of Artificial Sequence: Synthetic oligonucleotide
  Sense strand starting at position 3315 of SEQ ID NO: 317753
gguauuggguuucugacaa

SEQ ID NO: 509482 - RNA, 19 nt, Artificial Sequence
  Description of Artificial Sequence: Synthetic oligonucleotide
  Antisense strand to SEQ ID NO: 509481
uugucagaaacccaauacc

SEQ ID NO: 509483 - RNA, 19 nt, Artificial Sequence
  Description of Artificial Sequence: Synthetic oligonucleotide
  Sense strand starting at position 3470 of SEQ ID NO: 317753
aauggcaaaucucuaggua

SEQ ID NO: 509484 - RNA, 19 nt, Artificial Sequence
  Description of Artificial Sequence: Synthetic oligonucleotide
  Antisense strand to SEQ ID NO: 509483
uaccuagagauuugccauu

SEQ ID NO: 509485 - RNA, 19 nt, Artificial Sequence
  Description of Artificial Sequence: Synthetic oligonucleotide
  Sense strand starting at position 3471 of SEQ ID NO: 317753
auggcaaaucucuagguaa

SEQ ID NO: 509486 - RNA, 19 nt, Artificial Sequence
  Description of Artificial Sequence: Synthetic oligonucleotide
  Antisense strand to SEQ ID NO: 509485
uuaccuagagauuugccau

SEQ ID NO: 509487 - RNA, 19 nt, Artificial Sequence
  Description of Artificial Sequence: Synthetic oligonucleotide
  Sense strand starting at position 3474 of SEQ ID NO: 317753
gcaaaucucuagguaauca

SEQ ID NO: 509488 - RNA, 19 nt, Artificial Sequence
  Description of Artificial Sequence: Synthetic oligonucleotide
  Antisense strand to SEQ ID NO: 509487
ugauuaccuagagauuugc

SEQ ID NO: 509489 - RNA, 19 nt, Artificial Sequence
  Description of Artificial Sequence: Synthetic oligonucleotide
  Sense strand starting at position 3478 of SEQ ID NO: 317753
aucucuagguaaucaugau

SEQ ID NO: 509490 - RNA, 19 nt, Artificial Sequence
  Description of Artificial Sequence: Synthetic oligonucleotide
  Antisense strand to SEQ ID NO: 509489
aucaugauuaccuagagau

SEQ ID NO: 509491 - RNA, 19 nt, Artificial Sequence
  Description of Artificial Sequence: Synthetic oligonucleotide
  Sense strand starting at position 3482 of SEQ ID NO: 317753
cuagguaaucaugauagcu

SEQ ID NO: 509492 - RNA, 19 nt, Artificial Sequence
  Description of Artificial Sequence: Synthetic oligonucleotide
  Antisense strand to SEQ ID NO: 509491
agcuaucaugauuaccuag

SEQ ID NO: 509493 - RNA, 19 nt, Artificial Sequence
  Description of Artificial Sequence: Synthetic oligonucleotide
  Sense strand starting at position 3533 of SEQ ID NO: 317753
gaggaugacugcuuguaac

SEQ ID NO: 509494 - RNA, 19 nt, Artificial Sequence
  Description of Artificial Sequence: Synthetic oligonucleotide
  Antisense strand to SEQ ID NO: 509493
guuacaagcagucauccuc

SEQ ID NO: 509495 - RNA, 19 nt, Artificial Sequence
  Description of Artificial Sequence: Synthetic oligonucleotide
  Sense strand starting at position 3580 of SEQ ID NO: 317753
gaacucagggcuugaaauu

SEQ ID NO: 509496 - RNA, 19 nt, Artificial Sequence
  Description of Artificial Sequence: Synthetic oligonucleotide
  Antisense strand to SEQ ID NO: 509495
aauuucaagcccugaguuc

SEQ ID NO: 509497 - RNA, 19 nt, Artificial Sequence
  Description of Artificial Sequence: Synthetic oligonucleotide
  Sense strand starting at position 3635 of SEQ ID NO: 317753
cuaugucuuccuggaggaa

SEQ ID NO: 509498 - RNA, 19 nt, Artificial Sequence
  Description of Artificial Sequence: Synthetic oligonucleotide
  Antisense strand to SEQ ID NO: 509497
uuccuccaggaagacauag

SEQ ID NO: 509499 - RNA, 19 nt, Artificial Sequence
  Description of Artificial Sequence: Synthetic oligonucleotide
  Sense strand starting at position 3644 of SEQ ID NO: 317753
ccuggaggaacguacuuau

SEQ ID NO: 509500 - RNA, 19 nt, Artificial Sequence
  Description of Artificial Sequence: Synthetic oligonucleotide
  Antisense strand to SEQ ID NO: 509499
auaaguacguuccuccagg

SEQ ID NO: 509501 - RNA, 19 nt, Artificial Sequence
  Description of Artificial Sequence: Synthetic oligonucleotide
  Sense strand starting at position 3705 of SEQ ID NO: 317753
gagucucauccugagagug

SEQ ID NO: 509502 - RNA, 19 nt, Artificial Sequence
  Description of Artificial Sequence: Synthetic oligonucleotide
  Antisense strand to SEQ ID NO: 509501
cacucucaggaugagacuc

SEQ ID NO: 509503 - RNA, 19 nt, Artificial Sequence
  Description of Artificial Sequence: Synthetic oligonucleotide
  Sense strand starting at position 3783 of SEQ ID NO: 317753
ggaauugauuaggaaggaa

SEQ ID NO: 509504 - RNA, 19 nt, Artificial Sequence
  Description of Artificial Sequence: Synthetic oligonucleotide
  Antisense strand to SEQ ID NO: 509503
uuccuuccuaaucaauucc

SEQ ID NO: 509505 - RNA, 19 nt, Artificial Sequence
  Description of Artificial Sequence: Synthetic oligonucleotide
  Sense strand starting at position 210 of SEQ ID NO: 317754
gcuagaguuccugaggccu

SEQ ID NO: 509506 - RNA, 19 nt, Artificial Sequence
  Description of Artificial Sequence: Synthetic oligonucleotide
  Antisense strand to SEQ ID NO: 509505
aggccucaggaacucuagc

SEQ ID NO: 509507 - RNA, 19 nt, Artificial Sequence
  Description of Artificial Sequence: Synthetic oligonucleotide
  Sense strand starting at position 667 of SEQ ID NO: 317754
accacugucuugcuuaaag

SEQ ID NO: 509508 - RNA, 19 nt, Artificial Sequence
  Description of Artificial Sequence: Synthetic oligonucleotide
  Antisense strand to SEQ ID NO: 509507
cuuuaagcaagacaguggu

SEQ ID NO: 509509 - RNA, 19 nt, Artificial Sequence
  Description of Artificial Sequence: Synthetic oligonucleotide
  Sense strand starting at position 683 of SEQ ID NO: 317754
aaguuugaguccuuccuag

SEQ ID NO: 509510 - RNA, 19 nt, Artificial Sequence
  Description of Artificial Sequence: Synthetic oligonucleotide
  Antisense strand to SEQ ID NO: 509509
cuaggaaggacucaaacuu

SEQ ID NO: 509511 - RNA, 19 nt, Artificial Sequence
  Description of Artificial Sequence: Synthetic oligonucleotide
  Sense strand starting at position 748 of SEQ ID NO: 317754
aacaguguuuacuugugga

SEQ ID NO: 509512 - RNA, 19 nt, Artificial Sequence
  Description of Artificial Sequence: Synthetic oligonucleotide
  Antisense strand to SEQ ID NO: 509511
uccacaaguaaacacuguu

SEQ ID NO: 509513 - RNA, 19 nt, Artificial Sequence
  Description of Artificial Sequence: Synthetic oligonucleotide
  Sense strand starting at position 762 of SEQ ID NO: 317754
guggacuuacugugacuca

SEQ ID NO: 509514 - RNA, 19 nt, Artificial Sequence
  Description of Artificial Sequence: Synthetic oligonucleotide
  Antisense strand to SEQ ID NO: 509513
ugagucacaguaaguccac

SEQ ID NO: 509515 - RNA, 19 nt, Artificial Sequence
  Description of Artificial Sequence: Synthetic oligonucleotide
  Sense strand starting at position 864 of SEQ ID NO: 317754
ggaauagugugcuuuagaa

SEQ ID NO: 509516 - RNA, 19 nt, Artificial Sequence
  Description of Artificial Sequence: Synthetic oligonucleotide
  Antisense strand to SEQ ID NO: 509515
uucuaaagcacacuauucc

SEQ ID NO: 509517 - RNA, 19 nt, Artificial Sequence
  Description of Artificial Sequence: Synthetic oligonucleotide
  Sense strand starting at position 866 of SEQ ID NO: 317754
aauagugugcuuuagaaau

SEQ ID NO: 509518 - RNA, 19 nt, Artificial Sequence
  Description of Artificial Sequence: Synthetic oligonucleotide
  Antisense strand to SEQ ID NO: 509517
auuucuaaagcacacuauu

SEQ ID NO: 509519 - RNA, 19 nt, Artificial Sequence
  Description of Artificial Sequence: Synthetic oligonucleotide
  Sense strand starting at position 1188 of SEQ ID NO: 317754
auuugccaucuauguguua

SEQ ID NO: 509520 - RNA, 19 nt, Artificial Sequence
  Description of Artificial Sequence: Synthetic oligonucleotide
  Antisense strand to SEQ ID NO: 509519
uaacacauagauggcaaau

SEQ ID NO: 509521 - RNA, 19 nt, Artificial Sequence
  Description of Artificial Sequence: Synthetic oligonucleotide
  Sense strand starting at position 1234 of SEQ ID NO: 317754
cggcuauacuaagugaaag

SEQ ID NO: 509522 - RNA, 19 nt, Artificial Sequence
  Description of Artificial Sequence: Synthetic oligonucleotide
  Antisense strand to SEQ ID NO: 509521
cuuucacuuaguauagccg

SEQ ID NO: 509523 - RNA, 19 nt, Artificial Sequence
  Description of Artificial Sequence: Synthetic oligonucleotide
  Sense strand starting at position 1235 of SEQ ID NO: 317754
ggcuauacuaagugaaaga

SEQ ID NO: 509524 - RNA, 19 nt, Artificial Sequence
  Description of Artificial Sequence: Synthetic oligonucleotide
  Antisense strand to SEQ ID NO: 509523
ucuuucacuuaguauagcc

SEQ ID NO: 509525 - RNA, 19 nt, Artificial Sequence
  Description of Artificial Sequence: Synthetic oligonucleotide
  Sense strand starting at position 1275 of SEQ ID NO: 317754
uguaaauauccacgaauuc

SEQ ID NO: 509526 - RNA, 19 nt, Artificial Sequence
  Description of Artificial Sequence: Synthetic oligonucleotide
  Antisense strand to SEQ ID NO: 509525
gaauucguggauauuuaca

SEQ ID NO: 509527 - RNA, 19 nt, Artificial Sequence
  Description of Artificial Sequence: Synthetic oligonucleotide
  Sense strand starting at position 1341 of SEQ ID NO: 317754
uccuuccaacugugagauu

SEQ ID NO: 509528 - RNA, 19 nt, Artificial Sequence
  Description of Artificial Sequence: Synthetic oligonucleotide
  Antisense strand to SEQ ID NO: 509527
aaucucacaguuggaagga

SEQ ID NO: 509529 - RNA, 19 nt, Artificial Sequence
  Description of Artificial Sequence: Synthetic oligonucleotide
  Sense strand starting at position 1365 of SEQ ID NO: 317754
auguuacugccagaauaau

SEQ ID NO: 509530 - RNA, 19 nt, Artificial Sequence
  Description of Artificial Sequence: Synthetic oligonucleotide
  Antisense strand to SEQ ID NO: 509529
auuauucuggcaguaacau

SEQ ID NO: 509531 - RNA, 19 nt, Artificial Sequence
  Description of Artificial Sequence: Synthetic oligonucleotide
  Sense strand starting at position 1374 of SEQ ID NO: 317754
ccagaauaaugagcaguuu

SEQ ID NO: 509532 - RNA, 19 nt, Artificial Sequence
  Description of Artificial Sequence: Synthetic oligonucleotide
  Antisense strand to SEQ ID NO: 509531
aaacugcucauuauucugg

SEQ ID NO: 509533 - RNA, 19 nt, Artificial Sequence
  Description of Artificial Sequence: Synthetic oligonucleotide
  Sense strand starting at position 2227 of SEQ ID NO: 317754
gguauucccugcucagaga

SEQ ID NO: 509534 - RNA, 19 nt, Artificial Sequence
  Description of Artificial Sequence: Synthetic oligonucleotide
  Antisense strand to SEQ ID NO: 509533
ucucugagcagggaauacc

SEQ ID NO: 509535 - RNA, 19 nt, Artificial Sequence
  Description of Artificial Sequence: Synthetic oligonucleotide
  Sense strand starting at position 2228 of SEQ ID NO: 317754
guauucccugcucagagaa

SEQ ID NO: 509536 - RNA, 19 nt, Artificial Sequence
  Description of Artificial Sequence: Synthetic oligonucleotide
  Antisense strand to SEQ ID NO: 509535
uucucugagcagggaauac

SEQ ID NO: 509537 - RNA, 19 nt, Artificial Sequence
  Description of Artificial Sequence: Synthetic oligonucleotide
  Sense strand starting at position 2252 of SEQ ID NO: 317754
cuaugaugccaagaaugua

SEQ ID NO: 509538 - RNA, 19 nt, Artificial Sequence
  Description of Artificial Sequence: Synthetic oligonucleotide
  Antisense strand to SEQ ID NO: 509537
uacauucuuggcaucauag

SEQ ID NO: 509539 - RNA, 19 nt, Artificial Sequence
  Description of Artificial Sequence: Synthetic oligonucleotide
  Sense strand starting at position 2255 of SEQ ID NO: 317754
ugaugccaagaauguaaau

SEQ ID NO: 509540 - RNA, 19 nt, Artificial Sequence
  Description of Artificial Sequence: Synthetic oligonucleotide
  Antisense strand to SEQ ID NO: 509539
auuuacauucuuggcauca

SEQ ID NO: 509541 - RNA, 19 nt, Artificial Sequence
  Description of Artificial Sequence: Synthetic oligonucleotide
  Sense strand starting at position 2373 of SEQ ID NO: 317754
auuccaguucuaggaaauu

SEQ ID NO: 509542 - RNA, 19 nt, Artificial Sequence
  Description of Artificial Sequence: Synthetic oligonucleotide
  Antisense strand to SEQ ID NO: 509541
aauuuccuagaacuggaau

SEQ ID NO: 509543 - RNA, 19 nt, Artificial Sequence
  Description of Artificial Sequence: Synthetic oligonucleotide
  Sense strand starting at position 2408 of SEQ ID NO: 317754
ugagcaaaugcccgaagau

SEQ ID NO: 509544 - RNA, 19 nt, Artificial Sequence
  Description of Artificial Sequence: Synthetic oligonucleotide
  Antisense strand to SEQ ID NO: 509543
aucuucgggcauuugcuca

SEQ ID NO: 509545 - RNA, 19 nt, Artificial Sequence
  Description of Artificial Sequence: Synthetic oligonucleotide
  Sense strand starting at position 2409 of SEQ ID NO: 317754
gagcaaaugcccgaagaug

SEQ ID NO: 509546 - RNA, 19 nt, Artificial Sequence
  Description of Artificial Sequence: Synthetic oligonucleotide
  Antisense strand to SEQ ID NO: 509545
caucuucgggcauuugcuc

SEQ ID NO: 509547 - RNA, 19 nt, Artificial Sequence
  Description of Artificial Sequence: Synthetic oligonucleotide
  Sense strand starting at position 2418 of SEQ ID NO: 317754
cccgaagauguauguacaa

SEQ ID NO: 509548 - RNA, 19 nt, Artificial Sequence
  Description of Artificial Sequence: Synthetic oligonucleotide
  Antisense strand to SEQ ID NO: 509547
uuguacauacaucuucggg

SEQ ID NO: 509549 - RNA, 19 nt, Artificial Sequence
  Description of Artificial Sequence: Synthetic oligonucleotide
  Sense strand starting at position 2431 of SEQ ID NO: 317754
guacaagaaucugcauuac

SEQ ID NO: 509550 - RNA, 19 nt, Artificial Sequence
  Description of Artificial Sequence: Synthetic oligonucleotide
  Antisense strand to SEQ ID NO: 509549
guaaugcagauucuuguac

SEQ ID NO: 509551 - RNA, 19 nt, Artificial Sequence
  Description of Artificial Sequence: Synthetic oligonucleotide
  Sense strand starting at position 2511 of SEQ ID NO: 317754
uugacaugucgacagugaa

SEQ ID NO: 509552 - RNA, 19 nt, Artificial Sequence
  Description of Artificial Sequence: Synthetic oligonucleotide
  Antisense strand to SEQ ID NO: 509551
uucacugucgacaugucaa

SEQ ID NO: 509553 - RNA, 19 nt, Artificial Sequence
  Description of Artificial Sequence: Synthetic oligonucleotide
  Sense strand starting at position 2514 of SEQ ID NO: 317754
acaugucgacagugaaaca

SEQ ID NO: 509554 - RNA, 19 nt, Artificial Sequence
  Description of Artificial Sequence: Synthetic oligonucleotide
  Antisense strand to SEQ ID NO: 509553
uguuucacugucgacaugu

SEQ ID NO: 509555 - RNA, 19 nt, Artificial Sequence
  Description of Artificial Sequence: Synthetic oligonucleotide
  Sense strand starting at position 2591 of SEQ ID NO: 317754
caugauauauugcuaugga

SEQ ID NO: 509556 - RNA, 19 nt, Artificial Sequence
  Description of Artificial Sequence: Synthetic oligonucleotide
  Antisense strand to SEQ ID NO: 509555
uccauagcaauauaucaug

SEQ ID NO: 509557 - RNA, 19 nt, Artificial Sequence
  Description of Artificial Sequence: Synthetic oligonucleotide
  Sense strand starting at position 2736 of SEQ ID NO: 317754
acugguuaucucugagaau

SEQ ID NO: 509558 - RNA, 19 nt, Artificial Sequence
  Description of Artificial Sequence: Synthetic oligonucleotide
  Antisense strand to SEQ ID NO: 509557
auucucagagauaaccagu

SEQ ID NO: 509559 - RNA, 19 nt, Artificial Sequence
  Description of Artificial Sequence: Synthetic oligonucleotide
  Sense strand starting at position 2849 of SEQ ID NO: 317754
ccugguuggucuuuauuua

SEQ ID NO: 509560 - RNA, 19 nt, Artificial Sequence
  Description of Artificial Sequence: Synthetic oligonucleotide
  Antisense strand to SEQ ID NO: 509559
uaaauaaagaccaaccagg

SEQ ID NO: 509561 - RNA, 19 nt, Artificial Sequence
  Description of Artificial Sequence: Synthetic oligonucleotide
  Sense strand starting at position 2892 of SEQ ID NO: 317754
gaaagcgaucugcauaacu

SEQ ID NO: 509562 - RNA, 19 nt, Artificial Sequence
  Description of Artificial Sequence: Synthetic oligonucleotide
  Antisense strand to SEQ ID NO: 509561
aguuaugcagaucgcuuuc

SEQ ID NO: 509563 - RNA, 19 nt, Artificial Sequence
  Description of Artificial Sequence: Synthetic oligonucleotide
  Sense strand starting at position 2894 of SEQ ID NO: 317754
aagcgaucugcauaacuag

SEQ ID NO: 509564 - RNA, 19 nt, Artificial Sequence
  Description of Artificial Sequence: Synthetic oligonucleotide
  Antisense strand to SEQ ID NO: 509563
cuaguuaugcagaucgcuu

SEQ ID NO: 509565 - RNA, 19 nt, Artificial Sequence
  Description of Artificial Sequence: Synthetic oligonucleotide
  Sense strand starting at position 3227 of SEQ ID NO: 317754
ggagaucauggauguccua

SEQ ID NO: 509566 - RNA, 19 nt, Artificial Sequence
  Description of Artificial Sequence: Synthetic oligonucleotide
  Antisense strand to SEQ ID NO: 509565
uaggacauccaugaucucc

SEQ ID NO: 509567 - RNA, 19 nt, Artificial Sequence
  Description of Artificial Sequence: Synthetic oligonucleotide
  Sense strand starting at position 3230 of SEQ ID NO: 317754
gaucauggauguccuacaa

SEQ ID NO: 509568 - RNA, 19 nt, Artificial Sequence
  Description of Artificial Sequence: Synthetic oligonucleotide
  Antisense strand to SEQ ID NO: 509567
uuguaggacauccaugauc

SEQ ID NO: 509569 - RNA, 19 nt, Artificial Sequence
  Description of Artificial Sequence: Synthetic oligonucleotide
  Sense strand starting at position 3234 of SEQ ID NO: 317754
auggauguccuacaaugua

SEQ ID NO: 509570 - RNA, 19 nt, Artificial Sequence
  Description of Artificial Sequence: Synthetic oligonucleotide
  Antisense strand to SEQ ID NO: 509569
uacauuguaggacauccau

SEQ ID NO: 509571 - RNA, 19 nt, Artificial Sequence
  Description of Artificial Sequence: Synthetic oligonucleotide
  Sense strand starting at position 3261 of SEQ ID NO: 317754
gccuaucagggcuacuaua

SEQ ID NO: 509572 - RNA, 19 nt, Artificial Sequence
  Description of Artificial Sequence: Synthetic oligonucleotide
  Antisense strand to SEQ ID NO: 509571
uauaguagcccugauaggc

SEQ ID NO: 509573 - RNA, 19 nt, Artificial Sequence
  Description of Artificial Sequence: Synthetic oligonucleotide
  Sense strand starting at position 3371 of SEQ ID NO: 317754
ugguaucuccaagguuaaa

SEQ ID NO: 509574 - RNA, 19 nt, Artificial Sequence
  Description of Artificial Sequence: Synthetic oligonucleotide
  Antisense strand to SEQ ID NO: 509573
uuuaaccuuggagauacca

SEQ ID NO: 509575 - RNA, 19 nt, Artificial Sequence
  Description of Artificial Sequence: Synthetic oligonucleotide
  Sense strand starting at position 3534 of SEQ ID NO: 317754
aaauuaucuggucgugaug

SEQ ID NO: 509576 - RNA, 19 nt, Artificial Sequence
  Description of Artificial Sequence: Synthetic oligonucleotide
  Antisense strand to SEQ ID NO: 509575
caucacgaccagauaauuu

SEQ ID NO: 509577 - RNA, 19 nt, Artificial Sequence
  Description of Artificial Sequence: Synthetic oligonucleotide
  Sense strand starting at position 3627 of SEQ ID NO: 317754
guuguaguaaguuacucua

SEQ ID NO: 509578 - RNA, 19 nt, Artificial Sequence
  Description of Artificial Sequence: Synthetic oligonucleotide
  Antisense strand to SEQ ID NO: 509577
uagaguaacuuacuacaac

SEQ ID NO: 509579 - RNA, 19 nt, Artificial Sequence
  Description of Artificial Sequence: Synthetic oligonucleotide
  Sense strand starting at position 3794 of SEQ ID NO: 317754
guaugcaguauggaaugau

SEQ ID NO: 509580 - RNA, 19 nt, Artificial Sequence
  Description of Artificial Sequence: Synthetic oligonucleotide
  Antisense strand to SEQ ID NO: 509579
aucauuccauacugcauac

SEQ ID NO: 509581 - RNA, 19 nt, Artificial Sequence
  Description of Artificial Sequence: Synthetic oligonucleotide
  Sense strand starting at position 3869 of SEQ ID NO: 317754
gugacuuuguauccuuuga

SEQ ID NO: 509582 - RNA, 19 nt, Artificial Sequence
  Description of Artificial Sequence: Synthetic oligonucleotide
  Antisense strand to SEQ ID NO: 509581
ucaaaggauacaaagucac

SEQ ID NO: 509583 - RNA, 19 nt, Artificial Sequence
  Description of Artificial Sequence: Synthetic oligonucleotide
  Sense strand starting at position 3938 of SEQ ID NO: 317754
auuauacucuagguaagag

SEQ ID NO: 509584 - RNA, 19 nt, Artificial Sequence
  Description of Artificial Sequence: Synthetic oligonucleotide
  Antisense strand to SEQ ID NO: 509583
cucuuaccuagaguauaau

SEQ ID NO: 509585 - RNA, 19 nt, Artificial Sequence
  Description of Artificial Sequence: Synthetic oligonucleotide
  Sense strand starting at position 106 of SEQ ID NO: 317755
gugcacuaugggcaauuau

SEQ ID NO: 509586 - RNA, 19 nt, Artificial Sequence
  Description of Artificial Sequence: Synthetic oligonucleotide
  Antisense strand to SEQ ID NO: 509585
auaauugcccauagugcac

SEQ ID NO: 509587 - RNA, 19 nt, Artificial Sequence
  Description of Artificial Sequence: Synthetic oligonucleotide
  Sense strand starting at position 647 of SEQ ID NO: 317755
cggcgucacacugaaacaa

SEQ ID NO: 509588 - RNA, 19 nt, Artificial Sequence
  Description of Artificial Sequence: Synthetic oligonucleotide
  Antisense strand to SEQ ID NO: 509587
uuguuucagugugacgccg

SEQ ID NO: 509589 - RNA, 19 nt, Artificial Sequence
  Description of Artificial Sequence: Synthetic oligonucleotide
  Sense strand starting at position 674 of SEQ ID NO: 317755
guggucaucgaguaugaac

SEQ ID NO: 509590 - RNA, 19 nt, Artificial Sequence
  Description of Artificial Sequence: Synthetic oligonucleotide
  Antisense strand to SEQ ID NO: 509589
guucauacucgaugaccac

SEQ ID NO: 509591 - RNA, 19 nt, Artificial Sequence
  Description of Artificial Sequence: Synthetic oligonucleotide
  Sense strand starting at position 676 of SEQ ID NO: 317755
ggucaucgaguaugaacaa

SEQ ID NO: 509592 - RNA, 19 nt, Artificial Sequence
  Description of Artificial Sequence: Synthetic oligonucleotide
  Antisense strand to SEQ ID NO: 509591
uuguucauacucgaugacc

SEQ ID NO: 509593 - RNA, 19 nt, Artificial Sequence
  Description of Artificial Sequence: Synthetic oligonucleotide
  Sense strand starting at position 729 of SEQ ID NO: 317755
cgcaauuucugucucuuga

SEQ ID NO: 509594 - RNA, 19 nt, Artificial Sequence
  Description of Artificial Sequence: Synthetic oligonucleotide
  Antisense strand to SEQ ID NO: 509593
ucaagagacagaaauugcg

SEQ ID NO: 509595 - RNA, 19 nt, Artificial Sequence
  Description of Artificial Sequence: Synthetic oligonucleotide
  Sense strand starting at position 733 of SEQ ID NO: 317755
auuucugucucuugaaagg

SEQ ID NO: 509596 - RNA, 19 nt, Artificial Sequence
  Description of Artificial Sequence: Synthetic oligonucleotide
  Antisense strand to SEQ ID NO: 509595
ccuuucaagagacagaaau

SEQ ID NO: 509597 - RNA, 19 nt, Artificial Sequence
  Description of Artificial Sequence: Synthetic oligonucleotide
  Sense strand starting at position 809 of SEQ ID NO: 317755
ggagccuugugcuuauaac

SEQ ID NO: 509598 - RNA, 19 nt, Artificial Sequence
  Description of Artificial Sequence: Synthetic oligonucleotide
  Antisense strand to SEQ ID NO: 509597
guuauaagcacaaggcucc

SEQ ID NO: 509599 - RNA, 19 nt, Artificial Sequence
  Description of Artificial Sequence: Synthetic oligonucleotide
  Sense strand starting at position 820 of SEQ ID NO: 317755
cuuauaaccucagugagag

SEQ ID NO: 509600 - RNA, 19 nt, Artificial Sequence
  Description of Artificial Sequence: Synthetic oligonucleotide
  Antisense strand to SEQ ID NO: 509599
cucucacugagguuauaag

SEQ ID NO: 509601 - RNA, 19 nt, Artificial Sequence
  Description of Artificial Sequence: Synthetic oligonucleotide
  Sense strand starting at position 821 of SEQ ID NO: 317755
uuauaaccucagugagagu

SEQ ID NO: 509602 - RNA, 19 nt, Artificial Sequence
  Description of Artificial Sequence: Synthetic oligonucleotide
  Antisense strand to SEQ ID NO: 509601
acucucacugagguuauaa

SEQ ID NO: 509603 - RNA, 19 nt, Artificial Sequence
  Description of Artificial Sequence: Synthetic oligonucleotide
  Sense strand starting at position 1124 of SEQ ID NO: 317755
agaagacuguguguacgau

SEQ ID NO: 509604 - RNA, 19 nt, Artificial Sequence
  Description of Artificial Sequence: Synthetic oligonucleotide
  Antisense strand to SEQ ID NO: 509603
aucguacacacagucuucu

SEQ ID NO: 509605 - RNA, 19 nt, Artificial Sequence
  Description of Artificial Sequence: Synthetic oligonucleotide
  Sense strand starting at position 1125 of SEQ ID NO: 317755
gaagacuguguguacgauu

SEQ ID NO: 509606 - RNA, 19 nt, Artificial Sequence
  Description of Artificial Sequence: Synthetic oligonucleotide
  Antisense strand to SEQ ID NO: 509605
aaucguacacacagucuuc

SEQ ID NO: 509607 - RNA, 19 nt, Artificial Sequence
  Description of Artificial Sequence: Synthetic oligonucleotide
  Sense strand starting at position 1150 of SEQ ID NO: 317755
gguguacuuucucuuggaa

SEQ ID NO: 509608 - RNA, 19 nt, Artificial Sequence
  Description of Artificial Sequence: Synthetic oligonucleotide
  Antisense strand to SEQ ID NO: 509607
uuccaagagaaaguacacc

SEQ ID NO: 509609 - RNA, 19 nt, Artificial Sequence
  Description of Artificial Sequence: Synthetic oligonucleotide
  Sense strand starting at position 1510 of SEQ ID NO: 317755
ggaugagggauucgcucaa

SEQ ID NO: 509610 - RNA, 19 nt, Artificial Sequence
  Description of Artificial Sequence: Synthetic oligonucleotide
  Antisense strand to SEQ ID NO: 509609
uugagcgaaucccucaucc

SEQ ID NO: 509611 - RNA, 19 nt, Artificial Sequence
  Description of Artificial Sequence: Synthetic oligonucleotide
  Sense strand starting at position 2350 of SEQ ID NO: 317755
ggguguugccuccagacag

SEQ ID NO: 509612 - RNA, 19 nt, Artificial Sequence
  Description of Artificial Sequence: Synthetic oligonucleotide
  Antisense strand to SEQ ID NO: 509611
cugucuggaggcaacaccc

SEQ ID NO: 509613 - RNA, 19 nt, Artificial Sequence
  Description of Artificial Sequence: Synthetic oligonucleotide
  Sense strand starting at position 2462 of SEQ ID NO: 317755
uaugauggaaucuguguga

SEQ ID NO: 509614 - RNA, 19 nt, Artificial Sequence
  Description of Artificial Sequence: Synthetic oligonucleotide
  Antisense strand to SEQ ID NO: 509613
ucacacagauuccaucaua

SEQ ID NO: 509615 - RNA, 19 nt, Artificial Sequence
  Description of Artificial Sequence: Synthetic oligonucleotide
  Sense strand starting at position 2465 of SEQ ID NO: 317755
gauggaaucugugugacaa

SEQ ID NO: 509616 - RNA, 19 nt, Artificial Sequence
  Description of Artificial Sequence: Synthetic oligonucleotide
  Antisense strand to SEQ ID NO: 509615
uugucacacagauuccauc

SEQ ID NO: 509617 - RNA, 19 nt, Artificial Sequence
  Description of Artificial Sequence: Synthetic oligonucleotide
  Sense strand starting at position 2466 of SEQ ID NO: 317755
auggaaucugugugacaau

SEQ ID NO: 509618 - RNA, 19 nt, Artificial Sequence
  Description of Artificial Sequence: Synthetic oligonucleotide
  Antisense strand to SEQ ID NO: 509617
auugucacacagauuccau

SEQ ID NO: 509619 - RNA, 19 nt, Artificial Sequence
  Description of Artificial Sequence: Synthetic oligonucleotide
  Sense strand starting at position 2585 of SEQ ID NO: 317755
aaaguuguaugacuuugaa

SEQ ID NO: 509620 - RNA, 19 nt, Artificial Sequence
  Description of Artificial Sequence: Synthetic oligonucleotide
  Antisense strand to SEQ ID NO: 509619
uucaaagucauacaacuuu

SEQ ID NO: 509621 - RNA, 19 nt, Artificial Sequence
  Description of Artificial Sequence: Synthetic oligonucleotide
  Sense strand starting at position 2588 of SEQ ID NO: 317755
guuguaugacuuugaacaa

SEQ ID NO: 509622 - RNA, 19 nt, Artificial Sequence
  Description of Artificial Sequence: Synthetic oligonucleotide
  Antisense strand to SEQ ID NO: 509621
uuguucaaagucauacaac

SEQ ID NO: 509623 - RNA, 19 nt, Artificial Sequence
  Description of Artificial Sequence: Synthetic oligonucleotide
  Sense strand starting at position 2640 of SEQ ID NO: 317755
uuuguagaucuaggauuaa

SEQ ID NO: 509624 - RNA, 19 nt, Artificial Sequence
  Description of Artificial Sequence: Synthetic oligonucleotide
  Antisense strand to SEQ ID NO: 509623
uuaauccuagaucuacaaa

SEQ ID NO: 509625 - RNA, 19 nt, Artificial Sequence
  Description of Artificial Sequence: Synthetic oligonucleotide
  Sense strand starting at position 2675 of SEQ ID NO: 317755
aagucaucaguaggaugaa

SEQ ID NO: 509626 - RNA, 19 nt, Artificial Sequence
  Description of Artificial Sequence: Synthetic oligonucleotide
  Antisense strand to SEQ ID NO: 509625
uucauccuacugaugacuu

SEQ ID NO: 509627 - RNA, 19 nt, Artificial Sequence
  Description of Artificial Sequence: Synthetic oligonucleotide
  Sense strand starting at position 2697 of SEQ ID NO: 317755
agagauuaaguaugucaaa

SEQ ID NO: 509628 - RNA, 19 nt, Artificial Sequence
  Description of Artificial Sequence: Synthetic oligonucleotide
  Antisense strand to SEQ ID NO: 509627
uuugacauacuuaaucucu

SEQ ID NO: 509629 - RNA, 19 nt, Artificial Sequence
  Description of Artificial Sequence: Synthetic oligonucleotide
  Sense strand starting at position 2698 of SEQ ID NO: 317755
gagauuaaguaugucaaac

SEQ ID NO: 509630 - RNA, 19 nt, Artificial Sequence
  Description of Artificial Sequence: Synthetic oligonucleotide
  Antisense strand to SEQ ID NO: 509629
guuugacauacuuaaucuc

SEQ ID NO: 509631 - RNA, 19 nt, Artificial Sequence
  Description of Artificial Sequence: Synthetic oligonucleotide
  Sense strand starting at position 2819 of SEQ ID NO: 317755
cuugguauccaagaagccu

SEQ ID NO: 509632 - RNA, 19 nt, Artificial Sequence
  Description of Artificial Sequence: Synthetic oligonucleotide
  Antisense strand to SEQ ID NO: 509631
aggcuucuuggauaccaag

SEQ ID NO: 509633 - RNA, 19 nt, Artificial Sequence
  Description of Artificial Sequence: Synthetic oligonucleotide
  Sense strand starting at position 2871 of SEQ ID NO: 317755
acagcuccaugauuaugaa

SEQ ID NO: 509634 - RNA, 19 nt, Artificial Sequence
  Description of Artificial Sequence: Synthetic oligonucleotide
  Antisense strand to SEQ ID NO: 509633
uucauaaucauggagcugu

SEQ ID NO: 509635 - RNA, 19 nt, Artificial Sequence
  Description of Artificial Sequence: Synthetic oligonucleotide
  Sense strand starting at position 2903 of SEQ ID NO: 317755
aucagaagucaauggugaa

SEQ ID NO: 509636 - RNA, 19 nt, Artificial Sequence
  Description of Artificial Sequence: Synthetic oligonucleotide
  Antisense strand to SEQ ID NO: 509635
uucaccauugacuucugau

SEQ ID NO: 509637 - RNA, 19 nt, Artificial Sequence
  Description of Artificial Sequence: Synthetic oligonucleotide
  Sense strand starting at position 2904 of SEQ ID NO: 317755
ucagaagucaauggugaac

SEQ ID NO: 509638 - RNA, 19 nt, Artificial Sequence
  Description of Artificial Sequence: Synthetic oligonucleotide
  Antisense strand to SEQ ID NO: 509637
guucaccauugacuucuga

SEQ ID NO: 509639 - RNA, 19 nt, Artificial Sequence
  Description of Artificial Sequence: Synthetic oligonucleotide
  Sense strand starting at position 2940 of SEQ ID NO: 317755
gggagaacaauguggcuuu

SEQ ID NO: 509640 - RNA, 19 nt, Artificial Sequence
  Description of Artificial Sequence: Synthetic oligonucleotide
  Antisense strand to SEQ ID NO: 509639
aaagccacauuguucuccc

SEQ ID NO: 509641 - RNA, 19 nt, Artificial Sequence
  Description of Artificial Sequence: Synthetic oligonucleotide
  Sense strand starting at position 3298 of SEQ ID NO: 317755
cuugcaaagcauuauauga

SEQ ID NO: 509642 - RNA, 19 nt, Artificial Sequence
  Description of Artificial Sequence: Synthetic oligonucleotide
  Antisense strand to SEQ ID NO: 509641
ucauauaaugcuuugcaag

SEQ ID NO: 509643 - RNA, 19 nt, Artificial Sequence
  Description of Artificial Sequence: Synthetic oligonucleotide
  Sense strand starting at position 3424 of SEQ ID NO: 317755
uuugaugucuuugcacuua

SEQ ID NO: 509644 - RNA, 19 nt, Artificial Sequence
  Description of Artificial Sequence: Synthetic oligonucleotide
  Antisense strand to SEQ ID NO: 509643
uaagugcaaagacaucaaa

SEQ ID NO: 509645 - RNA, 19 nt, Artificial Sequence
  Description of Artificial Sequence: Synthetic oligonucleotide
  Sense strand starting at position 3449 of SEQ ID NO: 317755
cuugaaaggucuuccugua

SEQ ID NO: 509646 - RNA, 19 nt, Artificial Sequence
  Description of Artificial Sequence: Synthetic oligonucleotide
  Antisense strand to SEQ ID NO: 509645
uacaggaagaccuuucaag

SEQ ID NO: 509647 - RNA, 19 nt, Artificial Sequence
  Description of Artificial Sequence: Synthetic oligonucleotide
  Sense strand starting at position 3575 of SEQ ID NO: 317755
gcagauuaugugggucauu

SEQ ID NO: 509648 - RNA, 19 nt, Artificial Sequence
  Description of Artificial Sequence: Synthetic oligonucleotide
  Antisense strand to SEQ ID NO: 509647
aaugacccacauaaucugc

SEQ ID NO: 509649 - RNA, 19 nt, Artificial Sequence
  Description of Artificial Sequence: Synthetic oligonucleotide
  Sense strand starting at position 3576 of SEQ ID NO: 317755
cagauuaugugggucauua

SEQ ID NO: 509650 - RNA, 19 nt, Artificial Sequence
  Description of Artificial Sequence: Synthetic oligonucleotide
  Antisense strand to SEQ ID NO: 509649
uaaugacccacauaaucug

SEQ ID NO: 509651 - RNA, 19 nt, Artificial Sequence
  Description of Artificial Sequence: Synthetic oligonucleotide
  Sense strand starting at position 3578 of SEQ ID NO: 317755
gauuaugugggucauuaag

SEQ ID NO: 509652 - RNA, 19 nt, Artificial Sequence
  Description of Artificial Sequence: Synthetic oligonucleotide
  Antisense strand to SEQ ID NO: 509651
cuuaaugacccacauaauc

SEQ ID NO: 509653 - RNA, 19 nt, Artificial Sequence
  Description of Artificial Sequence: Synthetic oligonucleotide
  Sense strand starting at position 3580 of SEQ ID NO: 317755
uuaugugggucauuaagau

SEQ ID NO: 509654 - RNA, 19 nt, Artificial Sequence
  Description of Artificial Sequence: Synthetic oligonucleotide
  Antisense strand to SEQ ID NO: 509653
aucuuaaugacccacauaa

SEQ ID NO: 509655 - RNA, 19 nt, Artificial Sequence
  Description of Artificial Sequence: Synthetic oligonucleotide
  Sense strand starting at position 3609 of SEQ ID NO: 317755
acaauauaugccugguuac

SEQ ID NO: 509656 - RNA, 19 nt, Artificial Sequence
  Description of Artificial Sequence: Synthetic oligonucleotide
  Antisense strand to SEQ ID NO: 509655
guaaccaggcauauauugu

SEQ ID NO: 509657 - RNA, 19 nt, Artificial Sequence
  Description of Artificial Sequence: Synthetic oligonucleotide
  Sense strand starting at position 3640 of SEQ ID NO: 317755
guauuuaauugguacucaa

SEQ ID NO: 509658 - RNA, 19 nt, Artificial Sequence
  Description of Artificial Sequence: Synthetic oligonucleotide
  Antisense strand to SEQ ID NO: 509657
uugaguaccaauuaaauac

SEQ ID NO: 509659 - RNA, 19 nt, Artificial Sequence
  Description of Artificial Sequence: Synthetic oligonucleotide
  Sense strand starting at position 3684 of SEQ ID NO: 317755
agugauaucucuucuaaug

SEQ ID NO: 509660 - RNA, 19 nt, Artificial Sequence
  Description of Artificial Sequence: Synthetic oligonucleotide
  Antisense strand to SEQ ID NO: 509659
cauuagaagagauaucacu

SEQ ID NO: 509661 - RNA, 19 nt, Artificial Sequence
  Description of Artificial Sequence: Synthetic oligonucleotide
  Sense strand starting at position 3958 of SEQ ID NO: 317755
auucuuccugaaggaugua

SEQ ID NO: 509662 - RNA, 19 nt, Artificial Sequence
  Description of Artificial Sequence: Synthetic oligonucleotide
  Antisense strand to SEQ ID NO: 509661
uacauccuucaggaagaau

SEQ ID NO: 509663 - RNA, 19 nt, Artificial Sequence
  Description of Artificial Sequence: Synthetic oligonucleotide
  Sense strand starting at position 3976 of SEQ ID NO: 317755
agauauugucaaugcaaua

SEQ ID NO: 509664 - RNA, 19 nt, Artificial Sequence
  Description of Artificial Sequence: Synthetic oligonucleotide
  Antisense strand to SEQ ID NO: 509663
uauugcauugacaauaucu

SEQ ID NO: 509665 - RNA, 19 nt, Artificial Sequence
  Description of Artificial Sequence: Synthetic oligonucleotide
  Sense strand starting at position 18 of SEQ ID NO: 317756
aguuucuuucuugauucuu

SEQ ID NO: 509666 - RNA, 19 nt, Artificial Sequence
  Description of Artificial Sequence: Synthetic oligonucleotide
  Antisense strand to SEQ ID NO: 509665
aagaaucaagaaagaaacu

SEQ ID NO: 509667 - RNA, 19 nt, Artificial Sequence
  Description of Artificial Sequence: Synthetic oligonucleotide
  Sense strand starting at position 43 of SEQ ID NO: 317756
gguagcuagcuccaaagaa

SEQ ID NO: 509668 - RNA, 19 nt, Artificial Sequence
  Description of Artificial Sequence: Synthetic oligonucleotide
  Antisense strand to SEQ ID NO: 509667
uucuuuggagcuagcuacc

SEQ ID NO: 509669 - RNA, 19 nt, Artificial Sequence
  Description of Artificial Sequence: Synthetic oligonucleotide
  Sense strand starting at position 271 of SEQ ID NO: 317756
gccagcuugacuggauauu

SEQ ID NO: 509670 - RNA, 19 nt, Artificial Sequence
  Description of Artificial Sequence: Synthetic oligonucleotide
  Antisense strand to SEQ ID NO: 509669
aauauccagucaagcuggc

SEQ ID NO: 509671 - RNA, 19 nt, Artificial Sequence
  Description of Artificial Sequence: Synthetic oligonucleotide
  Sense strand starting at position 272 of SEQ ID NO: 317756
ccagcuugacuggauauua

SEQ ID NO: 509672 - RNA, 19 nt, Artificial Sequence
  Description of Artificial Sequence: Synthetic oligonucleotide
  Antisense strand to SEQ ID NO: 509671
uaauauccagucaagcugg

SEQ ID NO: 509673 - RNA, 19 nt, Artificial Sequence
  Description of Artificial Sequence: Synthetic oligonucleotide
  Sense strand starting at position 292 of SEQ ID NO: 317756
accuaauuggcaggacaaa

SEQ ID NO: 509674 - RNA, 19 nt, Artificial Sequence
  Description of Artificial Sequence: Synthetic oligonucleotide
  Antisense strand to SEQ ID NO: 509673
uuuguccugccaauuaggu

SEQ ID NO: 509675 - RNA, 19 nt, Artificial Sequence
  Description of Artificial Sequence: Synthetic oligonucleotide
  Sense strand starting at position 337 of SEQ ID NO: 317756
guucuugucccucauccaa

SEQ ID NO: 509676 - RNA, 19 nt, Artificial Sequence
  Description of Artificial Sequence: Synthetic oligonucleotide
  Antisense strand to SEQ ID NO: 509675
uuggaugagggacaagaac

SEQ ID NO: 509677 - RNA, 19 nt, Artificial Sequence
  Description of Artificial Sequence: Synthetic oligonucleotide
  Sense strand starting at position 726 of SEQ ID NO: 317756
agagcauagugcuugacau

SEQ ID NO: 509678 - RNA, 19 nt, Artificial Sequence
  Description of Artificial Sequence: Synthetic oligonucleotide
  Antisense strand to SEQ ID NO: 509677
augucaagcacuaugcucu

SEQ ID NO: 509679 - RNA, 19 nt, Artificial Sequence
  Description of Artificial Sequence: Synthetic oligonucleotide
  Sense strand starting at position 727 of SEQ ID NO: 317756
gagcauagugcuugacauc

SEQ ID NO: 509680 - RNA, 19 nt, Artificial Sequence
  Description of Artificial Sequence: Synthetic oligonucleotide
  Antisense strand to SEQ ID NO: 509679
gaugucaagcacuaugcuc

SEQ ID NO: 509681 - RNA, 19 nt, Artificial Sequence
  Description of Artificial Sequence: Synthetic oligonucleotide
  Sense strand starting at position 1285 of SEQ ID NO: 317756
ggccuuagcgcggaagacu

SEQ ID NO: 509682 - RNA, 19 nt, Artificial Sequence
  Description of Artificial Sequence: Synthetic oligonucleotide
  Antisense strand to SEQ ID NO: 509681
agucuuccgcgcuaaggcc

SEQ ID NO: 509683 - RNA, 19 nt, Artificial Sequence
  Description of Artificial Sequence: Synthetic oligonucleotide
  Sense strand starting at position 2169 of SEQ ID NO: 317756
aguagauacucuuucuaca

SEQ ID NO: 509684 - RNA, 19 nt, Artificial Sequence
  Description of Artificial Sequence: Synthetic oligonucleotide
  Antisense strand to SEQ ID NO: 509683
uguagaaagaguaucuacu

SEQ ID NO: 509685 - RNA, 19 nt, Artificial Sequence
  Description of Artificial Sequence: Synthetic oligonucleotide
  Sense strand starting at position 2272 of SEQ ID NO: 317756
aacaaauuggucugugugu

SEQ ID NO: 509686 - RNA, 19 nt, Artificial Sequence
  Description of Artificial Sequence: Synthetic oligonucleotide
  Antisense strand to SEQ ID NO: 509685
acacacagaccaauuuguu

SEQ ID NO: 509687 - RNA, 19 nt, Artificial Sequence
  Description of Artificial Sequence: Synthetic oligonucleotide
  Sense strand starting at position 2406 of SEQ ID NO: 317756
ggagaacagucccaaauuu

SEQ ID NO: 509688 - RNA, 19 nt, Artificial Sequence
  Description of Artificial Sequence: Synthetic oligonucleotide
  Antisense strand to SEQ ID NO: 509687
aaauuugggacuguucucc

SEQ ID NO: 509689 - RNA, 19 nt, Artificial Sequence
  Description of Artificial Sequence: Synthetic oligonucleotide
  Sense strand starting at position 2428 of SEQ ID NO: 317756
cccuuauagucuuucuaga

SEQ ID NO: 509690 - RNA, 19 nt, Artificial Sequence
  Description of Artificial Sequence: Synthetic oligonucleotide
  Antisense strand to SEQ ID NO: 509689
ucuagaaagacuauaaggg

SEQ ID NO: 509691 - RNA, 19 nt, Artificial Sequence
  Description of Artificial Sequence: Synthetic oligonucleotide
  Sense strand starting at position 2430 of SEQ ID NO: 317756
cuuauagucuuucuagagu

SEQ ID NO: 509692 - RNA, 19 nt, Artificial Sequence
  Description of Artificial Sequence: Synthetic oligonucleotide
  Antisense strand to SEQ ID NO: 509691
acucuagaaagacuauaag

SEQ ID NO: 509693 - RNA, 19 nt, Artificial Sequence
  Description of Artificial Sequence: Synthetic oligonucleotide
  Sense strand starting at position 2482 of SEQ ID NO: 317756
ucuucuugggcucaucuua

SEQ ID NO: 509694 - RNA, 19 nt, Artificial Sequence
  Description of Artificial Sequence: Synthetic oligonucleotide
  Antisense strand to SEQ ID NO: 509693
uaagaugagcccaagaaga

SEQ ID NO: 509695 - RNA, 19 nt, Artificial Sequence
  Description of Artificial Sequence: Synthetic oligonucleotide
  Sense strand starting at position 2546 of SEQ ID NO: 317756
cuacgugcuuaugugagaa

SEQ ID NO: 509696 - RNA, 19 nt, Artificial Sequence
  Description of Artificial Sequence: Synthetic oligonucleotide
  Antisense strand to SEQ ID NO: 509695
uucucacauaagcacguag

SEQ ID NO: 509697 - RNA, 19 nt, Artificial Sequence
  Description of Artificial Sequence: Synthetic oligonucleotide
  Sense strand starting at position 2629 of SEQ ID NO: 317756
gcaguagcaucaucauucu

SEQ ID NO: 509698 - RNA, 19 nt, Artificial Sequence
  Description of Artificial Sequence: Synthetic oligonucleotide
  Antisense strand to SEQ ID NO: 509697
agaaugaugaugcuacugc

SEQ ID NO: 509699 - RNA, 19 nt, Artificial Sequence
  Description of Artificial Sequence: Synthetic oligonucleotide
  Sense strand starting at position 2681 of SEQ ID NO: 317756
gguuuagacaguugaagag

SEQ ID NO: 509700 - RNA, 19 nt, Artificial Sequence
  Description of Artificial Sequence: Synthetic oligonucleotide
  Antisense strand to SEQ ID NO: 509699
cucuucaacugucuaaacc

SEQ ID NO: 509701 - RNA, 19 nt, Artificial Sequence
  Description of Artificial Sequence: Synthetic oligonucleotide
  Sense strand starting at position 2961 of SEQ ID NO: 317756
aagugaucugcccagugcu

SEQ ID NO: 509702 - RNA, 19 nt, Artificial Sequence
  Description of Artificial Sequence: Synthetic oligonucleotide
  Antisense strand to SEQ ID NO: 509701
agcacugggcagaucacuu

SEQ ID NO: 509703 - RNA, 19 nt, Artificial Sequence
  Description of Artificial Sequence: Synthetic oligonucleotide
  Sense strand starting at position 3045 of SEQ ID NO: 317756
agagauuugucaugcuaua

SEQ ID NO: 509704 - RNA, 19 nt, Artificial Sequence
  Description of Artificial Sequence: Synthetic oligonucleotide
  Antisense strand to SEQ ID NO: 509703
uauagcaugacaaaucucu

SEQ ID NO: 509705 - RNA, 19 nt, Artificial Sequence
  Description of Artificial Sequence: Synthetic oligonucleotide
  Sense strand starting at position 3078 of SEQ ID NO: 317756
acagaauucugguuuccuu

SEQ ID NO: 509706 - RNA, 19 nt, Artificial Sequence
  Description of Artificial Sequence: Synthetic oligonucleotide
  Antisense strand to SEQ ID NO: 509705
aaggaaaccagaauucugu

SEQ ID NO: 509707 - RNA, 19 nt, Artificial Sequence
  Description of Artificial Sequence: Synthetic oligonucleotide
  Sense strand starting at position 3197 of SEQ ID NO: 317756
ugcauuuccucuuaaagug

SEQ ID NO: 509708 - RNA, 19 nt, Artificial Sequence
  Description of Artificial Sequence: Synthetic oligonucleotide
  Antisense strand to SEQ ID NO: 509707
cacuuuaagaggaaaugca

SEQ ID NO: 509709 - RNA, 19 nt, Artificial Sequence
  Description of Artificial Sequence: Synthetic oligonucleotide
  Sense strand starting at position 3293 of SEQ ID NO: 317756
cuuagauauugggacuaug

SEQ ID NO: 509710 - RNA, 19 nt, Artificial Sequence
  Description of Artificial Sequence: Synthetic oligonucleotide
  Antisense strand to SEQ ID NO: 509709
cauagucccaauaucuaag

SEQ ID NO: 509711 - RNA, 19 nt, Artificial Sequence
  Description of Artificial Sequence: Synthetic oligonucleotide
  Sense strand starting at position 3547 of SEQ ID NO: 317756
uuuagaucccuggaguacu

SEQ ID NO: 509712 - RNA, 19 nt, Artificial Sequence
  Description of Artificial Sequence: Synthetic oligonucleotide
  Antisense strand to SEQ ID NO: 509711
aguacuccagggaucuaaa

SEQ ID NO: 509713 - RNA, 19 nt, Artificial Sequence
  Description of Artificial Sequence: Synthetic oligonucleotide
  Sense strand starting at position 3577 of SEQ ID NO: 317756
cuggaaugguuuccaguga

SEQ ID NO: 509714 - RNA, 19 nt, Artificial Sequence
  Description of Artificial Sequence: Synthetic oligonucleotide
  Antisense strand to SEQ ID NO: 509713
ucacuggaaaccauuccag

SEQ ID NO: 509715 - RNA, 19 nt, Artificial Sequence
  Description of Artificial Sequence: Synthetic oligonucleotide
  Sense strand starting at position 3581 of SEQ ID NO: 317756
aaugguuuccagugacuug

SEQ ID NO: 509716 - RNA, 19 nt, Artificial Sequence
  Description of Artificial Sequence: Synthetic oligonucleotide
  Antisense strand to SEQ ID NO: 509715
caagucacuggaaaccauu

SEQ ID NO: 509717 - RNA, 19 nt, Artificial Sequence
  Description of Artificial Sequence: Synthetic oligonucleotide
  Sense strand starting at position 3590 of SEQ ID NO: 317756
cagugacuugguggcauua

SEQ ID NO: 509718 - RNA, 19 nt, Artificial Sequence
  Description of Artificial Sequence: Synthetic oligonucleotide
  Antisense strand to SEQ ID NO: 509717
uaaugccaccaagucacug

SEQ ID NO: 509719 - RNA, 19 nt, Artificial Sequence
  Description of Artificial Sequence: Synthetic oligonucleotide
  Sense strand starting at position 3602 of SEQ ID NO: 317756
ggcauuagaguuugagguu

SEQ ID NO: 509720 - RNA, 19 nt, Artificial Sequence
  Description of Artificial Sequence: Synthetic oligonucleotide
  Antisense strand to SEQ ID NO: 509719
aaccucaaacucuaaugcc

SEQ ID NO: 509721 - RNA, 19 nt, Artificial Sequence
  Description of Artificial Sequence: Synthetic oligonucleotide
  Sense strand starting at position 3669 of SEQ ID NO: 317756
ucuugagaguauucuaugu

SEQ ID NO: 509722 - RNA, 19 nt, Artificial Sequence
  Description of Artificial Sequence: Synthetic oligonucleotide
  Antisense strand to SEQ ID NO: 509721
acauagaauacucucaaga

SEQ ID NO: 509723 - RNA, 19 nt, Artificial Sequence
  Description of Artificial Sequence: Synthetic oligonucleotide
  Sense strand starting at position 3760 of SEQ ID NO: 317756
cugacaguuuagcugaagu

SEQ ID NO: 509724 - RNA, 19 nt, Artificial Sequence
  Description of Artificial Sequence: Synthetic oligonucleotide
  Antisense strand to SEQ ID NO: 509723
acuucagcuaaacugucag

SEQ ID NO: 509725 - RNA, 19 nt, Artificial Sequence
  Description of Artificial Sequence: Synthetic oligonucleotide
  Sense strand starting at position 3762 of SEQ ID NO: 317756
gacaguuuagcugaaguua

SEQ ID NO: 509726 - RNA, 19 nt, Artificial Sequence
  Description of Artificial Sequence: Synthetic oligonucleotide
  Antisense strand to SEQ ID NO: 509725
uaacuucagcuaaacuguc

SEQ ID NO: 509727 - RNA, 19 nt, Artificial Sequence
  Description of Artificial Sequence: Synthetic oligonucleotide
  Sense strand starting at position 3771 of SEQ ID NO: 317756
gcugaaguuauauggcauu

SEQ ID NO: 509728 - RNA, 19 nt, Artificial Sequence
  Description of Artificial Sequence: Synthetic oligonucleotide
  Antisense strand to SEQ ID NO: 509727
aaugccauauaacuucagc

SEQ ID NO: 509729 - RNA, 19 nt, Artificial Sequence
  Description of Artificial Sequence: Synthetic oligonucleotide
  Sense strand starting at position 3774 of SEQ ID NO: 317756
gaaguuauauggcauuugu

SEQ ID NO: 509730 - RNA, 19 nt, Artificial Sequence
  Description of Artificial Sequence: Synthetic oligonucleotide
  Antisense strand to SEQ ID NO: 509729
acaaaugccauauaacuuc

SEQ ID NO: 509731 - RNA, 19 nt, Artificial Sequence
  Description of Artificial Sequence: Synthetic oligonucleotide
  Sense strand starting at position 3783 of SEQ ID NO: 317756
uggcauuuguaacacauga

SEQ ID NO: 509732 - RNA, 19 nt, Artificial Sequence
  Description of Artificial Sequence: Synthetic oligonucleotide
  Antisense strand to SEQ ID NO: 509731
ucauguguuacaaaugcca

SEQ ID NO: 509733 - RNA, 19 nt, Artificial Sequence
  Description of Artificial Sequence: Synthetic oligonucleotide
  Sense strand starting at position 3797 of SEQ ID NO: 317756
caugaugguguagggauau

SEQ ID NO: 509734 - RNA, 19 nt, Artificial Sequence
  Description of Artificial Sequence: Synthetic oligonucleotide
  Antisense strand to SEQ ID NO: 509733
auaucccuacaccaucaug

SEQ ID NO: 509735 - RNA, 19 nt, Artificial Sequence
  Description of Artificial Sequence: Synthetic oligonucleotide
  Sense strand starting at position 3821 of SEQ ID NO: 317756
gaccuaacagugugugagu

SEQ ID NO: 509736 - RNA, 19 nt, Artificial Sequence
  Description of Artificial Sequence: Synthetic oligonucleotide
  Antisense strand to SEQ ID NO: 509735
acucacacacuguuagguc

SEQ ID NO: 509737 - RNA, 19 nt, Artificial Sequence
  Description of Artificial Sequence: Synthetic oligonucleotide
  Sense strand starting at position 3822 of SEQ ID NO: 317756
accuaacagugugugagua

SEQ ID NO: 509738 - RNA, 19 nt, Artificial Sequence
  Description of Artificial Sequence: Synthetic oligonucleotide
  Antisense strand to SEQ ID NO: 509737
uacucacacacuguuaggu

SEQ ID NO: 509739 - RNA, 19 nt, Artificial Sequence
  Description of Artificial Sequence: Synthetic oligonucleotide
  Sense strand starting at position 3823 of SEQ ID NO: 317756
ccuaacagugugugaguaa

SEQ ID NO: 509740 - RNA, 19 nt, Artificial Sequence
  Description of Artificial Sequence: Synthetic oligonucleotide
  Antisense strand to SEQ ID NO: 509739
uuacucacacacuguuagg

SEQ ID NO: 509741 - RNA, 19 nt, Artificial Sequence
  Description of Artificial Sequence: Synthetic oligonucleotide
  Sense strand starting at position 3826 of SEQ ID NO: 317756
aacagugugugaguaagua

SEQ ID NO: 509742 - RNA, 19 nt, Artificial Sequence
  Description of Artificial Sequence: Synthetic oligonucleotide
  Antisense strand to SEQ ID NO: 509741
uacuuacucacacacuguu

SEQ ID NO: 509743 - RNA, 19 nt, Artificial Sequence
  Description of Artificial Sequence: Synthetic oligonucleotide
  Sense strand starting at position 3830 of SEQ ID NO: 317756
gugugugaguaaguacaaa

SEQ ID NO: 509744 - RNA, 19 nt, Artificial Sequence
  Description of Artificial Sequence: Synthetic oligonucleotide
  Antisense strand to SEQ ID NO: 509743
uuuguacuuacucacacac

SEQ ID NO: 509745 - RNA, 19 nt, Artificial Sequence
  Description of Artificial Sequence: Synthetic oligonucleotide
  Sense strand starting at position 151 of SEQ ID NO: 317757
gccagcuugacuggauauu

SEQ ID NO: 509746 - RNA, 19 nt, Artificial Sequence
  Description of Artificial Sequence: Synthetic oligonucleotide
  Antisense strand to SEQ ID NO: 509745
aauauccagucaagcuggc

SEQ ID NO: 509747 - RNA, 19 nt, Artificial Sequence
  Description of Artificial Sequence: Synthetic oligonucleotide
  Sense strand starting at position 152 of SEQ ID NO: 317757
ccagcuugacuggauauua

SEQ ID NO: 509748 - RNA, 19 nt, Artificial Sequence
  Description of Artificial Sequence: Synthetic oligonucleotide
  Antisense strand to SEQ ID NO: 509747
uaauauccagucaagcugg

SEQ ID NO: 509749 - RNA, 19 nt, Artificial Sequence
  Description of Artificial Sequence: Synthetic oligonucleotide
  Sense strand starting at position 172 of SEQ ID NO: 317757
accuaauuggcaggacaaa

SEQ ID NO: 509750 - RNA, 19 nt, Artificial Sequence
  Description of Artificial Sequence: Synthetic oligonucleotide
  Antisense strand to SEQ ID NO: 509749
uuuguccugccaauuaggu

SEQ ID NO: 509751 - RNA, 19 nt, Artificial Sequence
  Description of Artificial Sequence: Synthetic oligonucleotide
  Sense strand starting at position 217 of SEQ ID NO: 317757
guucuugucccucauccaa

SEQ ID NO: 509752 - RNA, 19 nt, Artificial Sequence
  Description of Artificial Sequence: Synthetic oligonucleotide
  Antisense strand to SEQ ID NO: 509751
uuggaugagggacaagaac

SEQ ID NO: 509753 - RNA, 19 nt, Artificial Sequence
  Description of Artificial Sequence: Synthetic oligonucleotide
  Sense strand starting at position 606 of SEQ ID NO: 317757
agagcauagugcuugacau

SEQ ID NO: 509754 - RNA, 19 nt, Artificial Sequence
  Description of Artificial Sequence: Synthetic oligonucleotide
  Antisense strand to SEQ ID NO: 509753
augucaagcacuaugcucu

SEQ ID NO: 509755 - RNA, 19 nt, Artificial Sequence
  Description of Artificial Sequence: Synthetic oligonucleotide
  Sense strand starting at position 607 of SEQ ID NO: 317757
gagcauagugcuugacauc

SEQ ID NO: 509756 - RNA, 19 nt, Artificial Sequence
  Description of Artificial Sequence: Synthetic oligonucleotide
  Antisense strand to SEQ ID NO: 509755
gaugucaagcacuaugcuc

SEQ ID NO: 509757 - RNA, 19 nt, Artificial Sequence
  Description of Artificial Sequence: Synthetic oligonucleotide
  Sense strand starting at position 1165 of SEQ ID NO: 317757
ggccuuagcgcggaagacu

SEQ ID NO: 509758 - RNA, 19 nt, Artificial Sequence
  Description of Artificial Sequence: Synthetic oligonucleotide
  Antisense strand to SEQ ID NO: 509757
agucuuccgcgcuaaggcc

SEQ ID NO: 509759 - RNA, 19 nt, Artificial Sequence
  Description of Artificial Sequence: Synthetic oligonucleotide
  Sense strand starting at position 2049 of SEQ ID NO: 317757
aguagauacucuuucuaca

SEQ ID NO: 509760 - RNA, 19 nt, Artificial Sequence
  Description of Artificial Sequence: Synthetic oligonucleotide
  Antisense strand to SEQ ID NO: 509759
uguagaaagaguaucuacu

SEQ ID NO: 509761 - RNA, 19 nt, Artificial Sequence
  Description of Artificial Sequence: Synthetic oligonucleotide
  Sense strand starting at position 2152 of SEQ ID NO: 317757
aacaaauuggucugugugu

SEQ ID NO: 509762 - RNA, 19 nt, Artificial Sequence
  Description of Artificial Sequence: Synthetic oligonucleotide
  Antisense strand to SEQ ID NO: 509761
acacacagaccaauuuguu

SEQ ID NO: 509763 - RNA, 19 nt, Artificial Sequence
  Description of Artificial Sequence: Synthetic oligonucleotide
  Sense strand starting at position 2286 of SEQ ID NO: 317757
ggagaacagucccaaauuu

SEQ ID NO: 509764 - RNA, 19 nt, Artificial Sequence
  Description of Artificial Sequence: Synthetic oligonucleotide
  Antisense strand to SEQ ID NO: 509763
aaauuugggacuguucucc

SEQ ID NO: 509765 - RNA, 19 nt, Artificial Sequence
  Description of Artificial Sequence: Synthetic oligonucleotide
  Sense strand starting at position 2308 of SEQ ID NO: 317757
cccuuauagucuuucuaga

SEQ ID NO: 509766 - RNA, 19 nt, Artificial Sequence
  Description of Artificial Sequence: Synthetic oligonucleotide
  Antisense strand to SEQ ID NO: 509765
ucuagaaagacuauaaggg

SEQ ID NO: 509767 - RNA, 19 nt, Artificial Sequence
  Description of Artificial Sequence: Synthetic oligonucleotide
  Sense strand starting at position 2310 of SEQ ID NO: 317757
cuuauagucuuucuagagu

SEQ ID NO: 509768 - RNA, 19 nt, Artificial Sequence
  Description of Artificial Sequence: Synthetic oligonucleotide
  Antisense strand to SEQ ID NO: 509767
acucuagaaagacuauaag

SEQ ID NO: 509769 - RNA, 19 nt, Artificial Sequence
  Description of Artificial Sequence: Synthetic oligonucleotide
  Sense strand starting at position 2362 of SEQ ID NO: 317757
ucuucuugggcucaucuua

SEQ ID NO: 509770 - RNA, 19 nt, Artificial Sequence
  Description of Artificial Sequence: Synthetic oligonucleotide
  Antisense strand to SEQ ID NO: 509769
uaagaugagcccaagaaga

SEQ ID NO: 509771 - RNA, 19 nt, Artificial Sequence
  Description of Artificial Sequence: Synthetic oligonucleotide
  Sense strand starting at position 2426 of SEQ ID NO: 317757
cuacgugcuuaugugagaa

SEQ ID NO: 509772 - RNA, 19 nt, Artificial Sequence
  Description of Artificial Sequence: Synthetic oligonucleotide
  Antisense strand to SEQ ID NO: 509771
uucucacauaagcacguag

SEQ ID NO: 509773 - RNA, 19 nt, Artificial Sequence
  Description of Artificial Sequence: Synthetic oligonucleotide
  Sense strand starting at position 2509 of SEQ ID NO: 317757
gcaguagcaucaucauucu

SEQ ID NO: 509774 - RNA, 19 nt, Artificial Sequence
  Description of Artificial Sequence: Synthetic oligonucleotide
  Antisense strand to SEQ ID NO: 509773
agaaugaugaugcuacugc

SEQ ID NO: 509775 - RNA, 19 nt, Artificial Sequence
  Description of Artificial Sequence: Synthetic oligonucleotide
  Sense strand starting at position 2561 of SEQ ID NO: 317757
gguuuagacaguugaagag

SEQ ID NO: 509776 - RNA, 19 nt, Artificial Sequence
  Description of Artificial Sequence: Synthetic oligonucleotide
  Antisense strand to SEQ ID NO: 509775
cucuucaacugucuaaacc

SEQ ID NO: 509777 - RNA, 19 nt, Artificial Sequence
  Description of Artificial Sequence: Synthetic oligonucleotide
  Sense strand starting at position 2841 of SEQ ID NO: 317757
aagugaucugcccagugcu

SEQ ID NO: 509778 - RNA, 19 nt, Artificial Sequence
  Description of Artificial Sequence: Synthetic oligonucleotide
  Antisense strand to SEQ ID NO: 509777
agcacugggcagaucacuu

SEQ ID NO: 509779 - RNA, 19 nt, Artificial Sequence
  Description of Artificial Sequence: Synthetic oligonucleotide
  Sense strand starting at position 2958 of SEQ ID NO: 317757
acagaauucugguuuccuu

SEQ ID NO: 509780 - RNA, 19 nt, Artificial Sequence
  Description of Artificial Sequence: Synthetic oligonucleotide
  Antisense strand to SEQ ID NO: 509779
aaggaaaccagaauucugu

SEQ ID NO: 509781 - RNA, 19 nt, Artificial Sequence
  Description of Artificial Sequence: Synthetic oligonucleotide
  Sense strand starting at position 3077 of SEQ ID NO: 317757
ugcauuuccucuuaaagug

SEQ ID NO: 509782 - RNA, 19 nt, Artificial Sequence
  Description of Artificial Sequence: Synthetic oligonucleotide
  Antisense strand to SEQ ID NO: 509781
cacuuuaagaggaaaugca

SEQ ID NO: 509783 - RNA, 19 nt, Artificial Sequence
  Description of Artificial Sequence: Synthetic oligonucleotide
  Sense strand starting at position 3173 of SEQ ID NO: 317757
cuuagauauugggacuaug

SEQ ID NO: 509784 - RNA, 19 nt, Artificial Sequence
  Description of Artificial Sequence: Synthetic oligonucleotide
  Antisense strand to SEQ ID NO: 509783
cauagucccaauaucuaag

SEQ ID NO: 509785 - RNA, 19 nt, Artificial Sequence
  Description of Artificial Sequence: Synthetic oligonucleotide
  Sense strand starting at position 3427 of SEQ ID NO: 317757
uuuagaucccuggaguacu

SEQ ID NO: 509786 - RNA, 19 nt, Artificial Sequence
  Description of Artificial Sequence: Synthetic oligonucleotide
  Antisense strand to SEQ ID NO: 509785
aguacuccagggaucuaaa

SEQ ID NO: 509787 - RNA, 19 nt, Artificial Sequence
  Description of Artificial Sequence: Synthetic oligonucleotide
  Sense strand starting at position 3457 of SEQ ID NO: 317757
cuggaaugguuuccaguga

SEQ ID NO: 509788 - RNA, 19 nt, Artificial Sequence
  Description of Artificial Sequence: Synthetic oligonucleotide
  Antisense strand to SEQ ID NO: 509787
ucacuggaaaccauuccag

SEQ ID NO: 509789 - RNA, 19 nt, Artificial Sequence
  Description of Artificial Sequence: Synthetic oligonucleotide
  Sense strand starting at position 3461 of SEQ ID NO: 317757
aaugguuuccagugacuug

SEQ ID NO: 509790 - RNA, 19 nt, Artificial Sequence
  Description of Artificial Sequence: Synthetic oligonucleotide
  Antisense strand to SEQ ID NO: 509789
caagucacuggaaaccauu

SEQ ID NO: 509791 - RNA, 19 nt, Artificial Sequence
  Description of Artificial Sequence: Synthetic oligonucleotide
  Sense strand starting at position 3470 of SEQ ID NO: 317757
cagugacuugguggcauua

SEQ ID NO: 509792 - RNA, 19 nt, Artificial Sequence
  Description of Artificial Sequence: Synthetic oligonucleotide
  Antisense strand to SEQ ID NO: 509791
uaaugccaccaagucacug

SEQ ID NO: 509793 - RNA, 19 nt, Artificial Sequence
  Description of Artificial Sequence: Synthetic oligonucleotide
  Sense strand starting at position 3482 of SEQ ID NO: 317757
ggcauuagaguuugagguu

SEQ ID NO: 509794 - RNA, 19 nt, Artificial Sequence
  Description of Artificial Sequence: Synthetic oligonucleotide
  Antisense strand to SEQ ID NO: 509793
aaccucaaacucuaaugcc

SEQ ID NO: 509795 - RNA, 19 nt, Artificial Sequence
  Description of Artificial Sequence: Synthetic oligonucleotide
  Sense strand starting at position 3549 of SEQ ID NO: 317757
ucuugagaguauucuaugu

SEQ ID NO: 509796 - RNA, 19 nt, Artificial Sequence
  Description of Artificial Sequence: Synthetic oligonucleotide
  Antisense strand to SEQ ID NO: 509795
acauagaauacucucaaga

SEQ ID NO: 509797 - RNA, 19 nt, Artificial Sequence
  Description of Artificial Sequence: Synthetic oligonucleotide
  Sense strand starting at position 3640 of SEQ ID NO: 317757
cugacaguuuagcugaagu

SEQ ID NO: 509798 - RNA, 19 nt, Artificial Sequence
  Description of Artificial Sequence: Synthetic oligonucleotide
  Antisense strand to SEQ ID NO: 509797
acuucagcuaaacugucag

SEQ ID NO: 509799 - RNA, 19 nt, Artificial Sequence
  Description of Artificial Sequence: Synthetic oligonucleotide
  Sense strand starting at position 3642 of SEQ ID NO: 317757
gacaguuuagcugaaguua

SEQ ID NO: 509800 - RNA, 19 nt, Artificial Sequence
  Description of Artificial Sequence: Synthetic oligonucleotide
  Antisense strand to SEQ ID NO: 509799
uaacuucagcuaaacuguc

SEQ ID NO: 509801 - RNA, 19 nt, Artificial Sequence
  Description of Artificial Sequence: Synthetic oligonucleotide
  Sense strand starting at position 3651 of SEQ ID NO: 317757
gcugaaguuauauggcauu

SEQ ID NO: 509802 - RNA, 19 nt, Artificial Sequence
  Description of Artificial Sequence: Synthetic oligonucleotide
  Antisense strand to SEQ ID NO: 509801
aaugccauauaacuucagc

SEQ ID NO: 509803 - RNA, 19 nt, Artificial Sequence
  Description of Artificial Sequence: Synthetic oligonucleotide
  Sense strand starting at position 3654 of SEQ ID NO: 317757
gaaguuauauggcauuugu

SEQ ID NO: 509804 - RNA, 19 nt, Artificial Sequence
  Description of Artificial Sequence: Synthetic oligonucleotide
  Antisense strand to SEQ ID NO: 509803
acaaaugccauauaacuuc

SEQ ID NO: 509805 - RNA, 19 nt, Artificial Sequence
  Description of Artificial Sequence: Synthetic oligonucleotide
  Sense strand starting at position 3663 of SEQ ID NO: 317757
uggcauuuguaacacauga

SEQ ID NO: 509806 - RNA, 19 nt, Artificial Sequence
  Description of Artificial Sequence: Synthetic oligonucleotide
  Antisense strand to SEQ ID NO: 509805
ucauguguuacaaaugcca

SEQ ID NO: 509807 - RNA, 19 nt, Artificial Sequence
  Description of Artificial Sequence: Synthetic oligonucleotide
  Sense strand starting at position 3677 of SEQ ID NO: 317757
caugaugguguagggauau

SEQ ID NO: 509808 - RNA, 19 nt, Artificial Sequence
  Description of Artificial Sequence: Synthetic oligonucleotide
  Antisense strand to SEQ ID NO: 509807
auaucccuacaccaucaug

SEQ ID NO: 509809 - RNA, 19 nt, Artificial Sequence
  Description of Artificial Sequence: Synthetic oligonucleotide
  Sense strand starting at position 3701 of SEQ ID NO: 317757
gaccuaacagugugugagu

SEQ ID NO: 509810 - RNA, 19 nt, Artificial Sequence
  Description of Artificial Sequence: Synthetic oligonucleotide
  Antisense strand to SEQ ID NO: 509809
acucacacacuguuagguc

SEQ ID NO: 509811 - RNA, 19 nt, Artificial Sequence
  Description of Artificial Sequence: Synthetic oligonucleotide
  Sense strand starting at position 3702 of SEQ ID NO: 317757
accuaacagugugugagua

SEQ ID NO: 509812 - RNA, 19 nt, Artificial Sequence
  Description of Artificial Sequence: Synthetic oligonucleotide
  Antisense strand to SEQ ID NO: 509811
uacucacacacuguuaggu

SEQ ID NO: 509813 - RNA, 19 nt, Artificial Sequence
  Description of Artificial Sequence: Synthetic oligonucleotide
  Sense strand starting at position 3703 of SEQ ID NO: 317757
ccuaacagugugugaguaa

SEQ ID NO: 509814 - RNA, 19 nt, Artificial Sequence
  Description of Artificial Sequence: Synthetic oligonucleotide
  Antisense strand to SEQ ID NO: 509813
uuacucacacacuguuagg

SEQ ID NO: 509815 - RNA, 19 nt, Artificial Sequence
  Description of Artificial Sequence: Synthetic oligonucleotide
  Sense strand starting at position 3706 of SEQ ID NO: 317757
aacagugugugaguaagua

SEQ ID NO: 509816 - RNA, 19 nt, Artificial Sequence
  Description of Artificial Sequence: Synthetic oligonucleotide
  Antisense strand to SEQ ID NO: 509815
uacuuacucacacacuguu

SEQ ID NO: 509817 - RNA, 19 nt, Artificial Sequence
  Description of Artificial Sequence: Synthetic oligonucleotide
  Sense strand starting at position 3710 of SEQ ID NO: 317757
gugugugaguaaguacaaa

SEQ ID NO: 509818 - RNA, 19 nt, Artificial Sequence
  Description of Artificial Sequence: Synthetic oligonucleotide
  Antisense strand to SEQ ID NO: 509817
uuuguacuuacucacacac

SEQ ID NO: 509819 - RNA, 19 nt, Artificial Sequence
  Description of Artificial Sequence: Synthetic oligonucleotide
  Sense strand starting at position 3889 of SEQ ID NO: 317757
gcggagggucuauguaaug

SEQ ID NO: 509820 - RNA, 19 nt, Artificial Sequence
  Description of Artificial Sequence: Synthetic oligonucleotide
  Antisense strand to SEQ ID NO: 509819
cauuacauagacccuccgc

SEQ ID NO: 509821 - RNA, 19 nt, Artificial Sequence
  Description of Artificial Sequence: Synthetic oligonucleotide
  Sense strand starting at position 3895 of SEQ ID NO: 317757
ggucuauguaauggaguaa

SEQ ID NO: 509822 - RNA, 19 nt, Artificial Sequence
  Description of Artificial Sequence: Synthetic oligonucleotide
  Antisense strand to SEQ ID NO: 509821
uuacuccauuacauagacc

SEQ ID NO: 509823 - RNA, 19 nt, Artificial Sequence
  Description of Artificial Sequence: Synthetic oligonucleotide
  Sense strand starting at position 3906 of SEQ ID NO: 317757
uggaguaaguaaucaaucu

SEQ ID NO: 509824 - RNA, 19 nt, Artificial Sequence
  Description of Artificial Sequence: Synthetic oligonucleotide
  Antisense strand to SEQ ID NO: 509823
agauugauuacuuacucca

SEQ ID NO: 509825 - RNA, 19 nt, Artificial Sequence
  Description of Artificial Sequence: Synthetic oligonucleotide
  Sense strand starting at position 54 of SEQ ID NO: 317758
uaguaagcagauugcuaau

SEQ ID NO: 509826 - RNA, 19 nt, Artificial Sequence
  Description of Artificial Sequence: Synthetic oligonucleotide
  Antisense strand to SEQ ID NO: 509825
auuagcaaucugcuuacua

SEQ ID NO: 509827 - RNA, 19 nt, Artificial Sequence
  Description of Artificial Sequence: Synthetic oligonucleotide
  Sense strand starting at position 60 of SEQ ID NO: 317758
gcagauugcuaauucuaug

SEQ ID NO: 509828 - RNA, 19 nt, Artificial Sequence
  Description of Artificial Sequence: Synthetic oligonucleotide
  Antisense strand to SEQ ID NO: 509827
cauagaauuagcaaucugc

SEQ ID NO: 509829 - RNA, 19 nt, Artificial Sequence
  Description of Artificial Sequence: Synthetic oligonucleotide
  Sense strand starting at position 66 of SEQ ID NO: 317758
ugcuaauucuauguaucag

SEQ ID NO: 509830 - RNA, 19 nt, Artificial Sequence
  Description of Artificial Sequence: Synthetic oligonucleotide
  Antisense strand to SEQ ID NO: 509829
cugauacauagaauuagca

SEQ ID NO: 509831 - RNA, 19 nt, Artificial Sequence
  Description of Artificial Sequence: Synthetic oligonucleotide
  Sense strand starting at position 133 of SEQ ID NO: 317758
acagauaucccagauucgu

SEQ ID NO: 509832 - RNA, 19 nt, Artificial Sequence
  Description of Artificial Sequence: Synthetic oligonucleotide
  Antisense strand to SEQ ID NO: 509831
acgaaucugggauaucugu

SEQ ID NO: 509833 - RNA, 19 nt, Artificial Sequence
  Description of Artificial Sequence: Synthetic oligonucleotide
  Sense strand starting at position 138 of SEQ ID NO: 317758
uaucccagauucguaugau

SEQ ID NO: 509834 - RNA, 19 nt, Artificial Sequence
  Description of Artificial Sequence: Synthetic oligonucleotide
  Antisense strand to SEQ ID NO: 509833
aucauacgaaucugggaua

SEQ ID NO: 509835 - RNA, 19 nt, Artificial Sequence
  Description of Artificial Sequence: Synthetic oligonucleotide
  Sense strand starting at position 141 of SEQ ID NO: 317758
cccagauucguaugaucuc

SEQ ID NO: 509836 - RNA, 19 nt, Artificial Sequence
  Description of Artificial Sequence: Synthetic oligonucleotide
  Antisense strand to SEQ ID NO: 509835
gagaucauacgaaucuggg

SEQ ID NO: 509837 - RNA, 19 nt, Artificial Sequence
  Description of Artificial Sequence: Synthetic oligonucleotide
  Sense strand starting at position 144 of SEQ ID NO: 317758
agauucguaugaucuccaa

SEQ ID NO: 509838 - RNA, 19 nt, Artificial Sequence
  Description of Artificial Sequence: Synthetic oligonucleotide
  Antisense strand to SEQ ID NO: 509837
uuggagaucauacgaaucu

SEQ ID NO: 509839 - RNA, 19 nt, Artificial Sequence
  Description of Artificial Sequence: Synthetic oligonucleotide
  Sense strand starting at position 147 of SEQ ID NO: 317758
uucguaugaucuccaaauu

SEQ ID NO: 509840 - RNA, 19 nt, Artificial Sequence
  Description of Artificial Sequence: Synthetic oligonucleotide
  Antisense strand to SEQ ID NO: 509839
aauuuggagaucauacgaa

SEQ ID NO: 509841 - RNA, 19 nt, Artificial Sequence
  Description of Artificial Sequence: Synthetic oligonucleotide
  Sense strand starting at position 148 of SEQ ID NO: 317758
ucguaugaucuccaaauug

SEQ ID NO: 509842 - RNA, 19 nt, Artificial Sequence
  Description of Artificial Sequence: Synthetic oligonucleotide
  Antisense strand to SEQ ID NO: 509841
caauuuggagaucauacga

SEQ ID NO: 509843 - RNA, 19 nt, Artificial Sequence
  Description of Artificial Sequence: Synthetic oligonucleotide
  Sense strand starting at position 318 of SEQ ID NO: 317758
acuuaaaguuaacugugau

SEQ ID NO: 509844 - RNA, 19 nt, Artificial Sequence
  Description of Artificial Sequence: Synthetic oligonucleotide
  Antisense strand to SEQ ID NO: 509843
aucacaguuaacuuuaagu

SEQ ID NO: 509845 - RNA, 19 nt, Artificial Sequence
  Description of Artificial Sequence: Synthetic oligonucleotide
  Sense strand starting at position 483 of SEQ ID NO: 317758
uguuauacuuagucaauuc

SEQ ID NO: 509846 - RNA, 19 nt, Artificial Sequence
  Description of Artificial Sequence: Synthetic oligonucleotide
  Antisense strand to SEQ ID NO: 509845
gaauugacuaaguauaaca

SEQ ID NO: 509847 - RNA, 19 nt, Artificial Sequence
  Description of Artificial Sequence: Synthetic oligonucleotide
  Sense strand starting at position 965 of SEQ ID NO: 317758
ucuagugcugauuaggaaa

SEQ ID NO: 509848 - RNA, 19 nt, Artificial Sequence
  Description of Artificial Sequence: Synthetic oligonucleotide
  Antisense strand to SEQ ID NO: 509847
uuuccuaaucagcacuaga

SEQ ID NO: 509849 - RNA, 19 nt, Artificial Sequence
  Description of Artificial Sequence: Synthetic oligonucleotide
  Sense strand starting at position 1083 of SEQ ID NO: 317758
uccagagcugcugauuaag

SEQ ID NO: 509850 - RNA, 19 nt, Artificial Sequence
  Description of Artificial Sequence: Synthetic oligonucleotide
  Antisense strand to SEQ ID NO: 509849
cuuaaucagcagcucugga

SEQ ID NO: 509851 - RNA, 19 nt, Artificial Sequence
  Description of Artificial Sequence: Synthetic oligonucleotide
  Sense strand starting at position 1101 of SEQ ID NO: 317758
gcauuucugucauucugau

SEQ ID NO: 509852 - RNA, 19 nt, Artificial Sequence
  Description of Artificial Sequence: Synthetic oligonucleotide
  Antisense strand to SEQ ID NO: 509851
aucagaaugacagaaaugc

SEQ ID NO: 509853 - RNA, 19 nt, Artificial Sequence
  Description of Artificial Sequence: Synthetic oligonucleotide
  Sense strand starting at position 1109 of SEQ ID NO: 317758
gucauucugaugcauaggu

SEQ ID NO: 509854 - RNA, 19 nt, Artificial Sequence
  Description of Artificial Sequence: Synthetic oligonucleotide
  Antisense strand to SEQ ID NO: 509853
accuaugcaucagaaugac

SEQ ID NO: 509855 - RNA, 19 nt, Artificial Sequence
  Description of Artificial Sequence: Synthetic oligonucleotide
  Sense strand starting at position 1122 of SEQ ID NO: 317758
auaggugguuuccuagaaa

SEQ ID NO: 509856 - RNA, 19 nt, Artificial Sequence
  Description of Artificial Sequence: Synthetic oligonucleotide
  Antisense strand to SEQ ID NO: 509855
uuucuaggaaaccaccuau

SEQ ID NO: 509857 - RNA, 19 nt, Artificial Sequence
  Description of Artificial Sequence: Synthetic oligonucleotide
  Sense strand starting at position 1157 of SEQ ID NO: 317758
agucccgauccuuagggaa

SEQ ID NO: 509858 - RNA, 19 nt, Artificial Sequence
  Description of Artificial Sequence: Synthetic oligonucleotide
  Antisense strand to SEQ ID NO: 509857
uucccuaaggaucgggacu

SEQ ID NO: 509859 - RNA, 19 nt, Artificial Sequence
  Description of Artificial Sequence: Synthetic oligonucleotide
  Sense strand starting at position 1169 of SEQ ID NO: 317758
uagggaagcugucuaaacu

SEQ ID NO: 509860 - RNA, 19 nt, Artificial Sequence
  Description of Artificial Sequence: Synthetic oligonucleotide
  Antisense strand to SEQ ID NO: 509859
aguuuagacagcuucccua

SEQ ID NO: 509861 - RNA, 19 nt, Artificial Sequence
  Description of Artificial Sequence: Synthetic oligonucleotide
  Sense strand starting at position 1170 of SEQ ID NO: 317758
agggaagcugucuaaacuc

SEQ ID NO: 509862 - RNA, 19 nt, Artificial Sequence
  Description of Artificial Sequence: Synthetic oligonucleotide
  Antisense strand to SEQ ID NO: 509861
gaguuuagacagcuucccu

SEQ ID NO: 509863 - RNA, 19 nt, Artificial Sequence
  Description of Artificial Sequence: Synthetic oligonucleotide
  Sense strand starting at position 1204 of SEQ ID NO: 317758
gaagcuguacaaugggaau

SEQ ID NO: 509864 - RNA, 19 nt, Artificial Sequence
  Description of Artificial Sequence: Synthetic oligonucleotide
  Antisense strand to SEQ ID NO: 509863
auucccauuguacagcuuc

SEQ ID NO: 509865 - RNA, 19 nt, Artificial Sequence
  Description of Artificial Sequence: Synthetic oligonucleotide
  Sense strand starting at position 1206 of SEQ ID NO: 317758
agcuguacaaugggaauaa

SEQ ID NO: 509866 - RNA, 19 nt, Artificial Sequence
  Description of Artificial Sequence: Synthetic oligonucleotide
  Antisense strand to SEQ ID NO: 509865
uuauucccauuguacagcu

SEQ ID NO: 509867 - RNA, 19 nt, Artificial Sequence
  Description of Artificial Sequence: Synthetic oligonucleotide
  Sense strand starting at position 1240 of SEQ ID NO: 317758
cuguguguaaguggagaau

SEQ ID NO: 509868 - RNA, 19 nt, Artificial Sequence
  Description of Artificial Sequence: Synthetic oligonucleotide
  Antisense strand to SEQ ID NO: 509867
auucuccacuuacacacag

SEQ ID NO: 509869 - RNA, 19 nt, Artificial Sequence
  Description of Artificial Sequence: Synthetic oligonucleotide
  Sense strand starting at position 1334 of SEQ ID NO: 317758
aaguaacccucagugaugu

SEQ ID NO: 509870 - RNA, 19 nt, Artificial Sequence
  Description of Artificial Sequence: Synthetic oligonucleotide
  Antisense strand to SEQ ID NO: 509869
acaucacugaggguuacuu

SEQ ID NO: 509871 - RNA, 19 nt, Artificial Sequence
  Description of Artificial Sequence: Synthetic oligonucleotide
  Sense strand starting at position 1336 of SEQ ID NO: 317758
guaacccucagugauguua

SEQ ID NO: 509872 - RNA, 19 nt, Artificial Sequence
  Description of Artificial Sequence: Synthetic oligonucleotide
  Antisense strand to SEQ ID NO: 509871
uaacaucacugaggguuac

SEQ ID NO: 509873 - RNA, 19 nt, Artificial Sequence
  Description of Artificial Sequence: Synthetic oligonucleotide
  Sense strand starting at position 1699 of SEQ ID NO: 317758
guaacaguguuaccgacaa

SEQ ID NO: 509874 - RNA, 19 nt, Artificial Sequence
  Description of Artificial Sequence: Synthetic oligonucleotide
  Antisense strand to SEQ ID NO: 509873
uugucgguaacacuguuac

SEQ ID NO: 509875 - RNA, 19 nt, Artificial Sequence
  Description of Artificial Sequence: Synthetic oligonucleotide
  Sense strand starting at position 1703 of SEQ ID NO: 317758
caguguuaccgacaaggag

SEQ ID NO: 509876 - RNA, 19 nt, Artificial Sequence
  Description of Artificial Sequence: Synthetic oligonucleotide
  Antisense strand to SEQ ID NO: 509875
cuccuugucgguaacacug

SEQ ID NO: 509877 - RNA, 19 nt, Artificial Sequence
  Description of Artificial Sequence: Synthetic oligonucleotide
  Sense strand starting at position 2353 of SEQ ID NO: 317758
uaaaguggauuaguaauga

SEQ ID NO: 509878 - RNA, 19 nt, Artificial Sequence
  Description of Artificial Sequence: Synthetic oligonucleotide
  Antisense strand to SEQ ID NO: 509877
ucauuacuaauccacuuua

SEQ ID NO: 509879 - RNA, 19 nt, Artificial Sequence
  Description of Artificial Sequence: Synthetic oligonucleotide
  Sense strand starting at position 2428 of SEQ ID NO: 317758
guaguuuaacaguaagaau

SEQ ID NO: 509880 - RNA, 19 nt, Artificial Sequence
  Description of Artificial Sequence: Synthetic oligonucleotide
  Antisense strand to SEQ ID NO: 509879
auucuuacuguuaaacuac

SEQ ID NO: 509881 - RNA, 19 nt, Artificial Sequence
  Description of Artificial Sequence: Synthetic oligonucleotide
  Sense strand starting at position 2691 of SEQ ID NO: 317758
ggcucugaacccugaacuu

SEQ ID NO: 509882 - RNA, 19 nt, Artificial Sequence
  Description of Artificial Sequence: Synthetic oligonucleotide
  Antisense strand to SEQ ID NO: 509881
aaguucaggguucagagcc

SEQ ID NO: 509883 - RNA, 19 nt, Artificial Sequence
  Description of Artificial Sequence: Synthetic oligonucleotide
  Sense strand starting at position 2717 of SEQ ID NO: 317758
gagugaaggagguaguguu

SEQ ID NO: 509884 - RNA, 19 nt, Artificial Sequence
  Description of Artificial Sequence: Synthetic oligonucleotide
  Antisense strand to SEQ ID NO: 509883
aacacuaccuccuucacuc

SEQ ID NO: 509885 - RNA, 19 nt, Artificial Sequence
  Description of Artificial Sequence: Synthetic oligonucleotide
  Sense strand starting at position 2733 of SEQ ID NO: 317758
guuggucacuguuugagga

SEQ ID NO: 509886 - RNA, 19 nt, Artificial Sequence
  Description of Artificial Sequence: Synthetic oligonucleotide
  Antisense strand to SEQ ID NO: 509885
uccucaaacagugaccaac

SEQ ID NO: 509887 - RNA, 19 nt, Artificial Sequence
  Description of Artificial Sequence: Synthetic oligonucleotide
  Sense strand starting at position 2734 of SEQ ID NO: 317758
uuggucacuguuugaggaa

SEQ ID NO: 509888 - RNA, 19 nt, Artificial Sequence
  Description of Artificial Sequence: Synthetic oligonucleotide
  Antisense strand to SEQ ID NO: 509887
uuccucaaacagugaccaa

SEQ ID NO: 509889 - RNA, 19 nt, Artificial Sequence
  Description of Artificial Sequence: Synthetic oligonucleotide
  Sense strand starting at position 2999 of SEQ ID NO: 317758
agaagacccuguccuuaua

SEQ ID NO: 509890 - RNA, 19 nt, Artificial Sequence
  Description of Artificial Sequence: Synthetic oligonucleotide
  Antisense strand to SEQ ID NO: 509889
uauaaggacagggucuucu

SEQ ID NO: 509891 - RNA, 19 nt, Artificial Sequence
  Description of Artificial Sequence: Synthetic oligonucleotide
  Sense strand starting at position 3362 of SEQ ID NO: 317758
guuguugaucauuaguauu

SEQ ID NO: 509892 - RNA, 19 nt, Artificial Sequence
  Description of Artificial Sequence: Synthetic oligonucleotide
  Antisense strand to SEQ ID NO: 509891
aauacuaaugaucaacaac

SEQ ID NO: 509893 - RNA, 19 nt, Artificial Sequence
  Description of Artificial Sequence: Synthetic oligonucleotide
  Sense strand starting at position 3551 of SEQ ID NO: 317758
guauuucugugcuccugau

SEQ ID NO: 509894 - RNA, 19 nt, Artificial Sequence
  Description of Artificial Sequence: Synthetic oligonucleotide
  Antisense strand to SEQ ID NO: 509893
aucaggagcacagaaauac

SEQ ID NO: 509895 - RNA, 19 nt, Artificial Sequence
  Description of Artificial Sequence: Synthetic oligonucleotide
  Sense strand starting at position 3561 of SEQ ID NO: 317758
gcuccugaugaguacagau

SEQ ID NO: 509896 - RNA, 19 nt, Artificial Sequence
  Description of Artificial Sequence: Synthetic oligonucleotide
  Antisense strand to SEQ ID NO: 509895
aucuguacucaucaggagc

SEQ ID NO: 509897 - RNA, 19 nt, Artificial Sequence
  Description of Artificial Sequence: Synthetic oligonucleotide
  Sense strand starting at position 3570 of SEQ ID NO: 317758
gaguacagaugaguaauca

SEQ ID NO: 509898 - RNA, 19 nt, Artificial Sequence
  Description of Artificial Sequence: Synthetic oligonucleotide
  Antisense strand to SEQ ID NO: 509897
ugauuacucaucuguacuc

SEQ ID NO: 509899 - RNA, 19 nt, Artificial Sequence
  Description of Artificial Sequence: Synthetic oligonucleotide
  Sense strand starting at position 3580 of SEQ ID NO: 317758
gaguaaucacaugguuaua

SEQ ID NO: 509900 - RNA, 19 nt, Artificial Sequence
  Description of Artificial Sequence: Synthetic oligonucleotide
  Antisense strand to SEQ ID NO: 509899
uauaaccaugugauuacuc

SEQ ID NO: 509901 - RNA, 19 nt, Artificial Sequence
  Description of Artificial Sequence: Synthetic oligonucleotide
  Sense strand starting at position 3582 of SEQ ID NO: 317758
guaaucacaugguuauaaa

SEQ ID NO: 509902 - RNA, 19 nt, Artificial Sequence
  Description of Artificial Sequence: Synthetic oligonucleotide
  Antisense strand to SEQ ID NO: 509901
uuuauaaccaugugauuac

SEQ ID NO: 509903 - RNA, 19 nt, Artificial Sequence
  Description of Artificial Sequence: Synthetic oligonucleotide
  Sense strand starting at position 3921 of SEQ ID NO: 317758
auucuucugcuguaaguca

SEQ ID NO: 509904 - RNA, 19 nt, Artificial Sequence
  Description of Artificial Sequence: Synthetic oligonucleotide
  Antisense strand to SEQ ID NO: 509903
ugacuuacagcagaagaau

SEQ ID NO: 509905 - RNA, 19 nt, Artificial Sequence
  Description of Artificial Sequence: Synthetic oligonucleotide
  Sense strand starting at position 22 of SEQ ID NO: 317759
uaguaagcagauugcuaau

SEQ ID NO: 509906 - RNA, 19 nt, Artificial Sequence
  Description of Artificial Sequence: Synthetic oligonucleotide
  Antisense strand to SEQ ID NO: 509905
auuagcaaucugcuuacua

SEQ ID NO: 509907 - RNA, 19 nt, Artificial Sequence
  Description of Artificial Sequence: Synthetic oligonucleotide
  Sense strand starting at position 28 of SEQ ID NO: 317759
gcagauugcuaauucuaug

SEQ ID NO: 509908 - RNA, 19 nt, Artificial Sequence
  Description of Artificial Sequence: Synthetic oligonucleotide
  Antisense strand to SEQ ID NO: 509907
cauagaauuagcaaucugc

SEQ ID NO: 509909 - RNA, 19 nt, Artificial Sequence
  Description of Artificial Sequence: Synthetic oligonucleotide
  Sense strand starting at position 34 of SEQ ID NO: 317759
ugcuaauucuauguaucag

SEQ ID NO: 509910 - RNA, 19 nt, Artificial Sequence
  Description of Artificial Sequence: Synthetic oligonucleotide
  Antisense strand to SEQ ID NO: 509909
cugauacauagaauuagca

SEQ ID NO: 509911 - RNA, 19 nt, Artificial Sequence
  Description of Artificial Sequence: Synthetic oligonucleotide
  Sense strand starting at position 101 of SEQ ID NO: 317759
acagauaucccagauucgu

SEQ ID NO: 509912 - RNA, 19 nt, Artificial Sequence
  Description of Artificial Sequence: Synthetic oligonucleotide
  Antisense strand to SEQ ID NO: 509911
acgaaucugggauaucugu

SEQ ID NO: 509913 - RNA, 19 nt, Artificial Sequence
  Description of Artificial Sequence: Synthetic oligonucleotide
  Sense strand starting at position 106 of SEQ ID NO: 317759
uaucccagauucguaugau

SEQ ID NO: 509914 - RNA, 19 nt, Artificial Sequence
  Description of Artificial Sequence: Synthetic oligonucleotide
  Antisense strand to SEQ ID NO: 509913
aucauacgaaucugggaua

SEQ ID NO: 509915 - RNA, 19 nt, Artificial Sequence
  Description of Artificial Sequence: Synthetic oligonucleotide
  Sense strand starting at position 109 of SEQ ID NO: 317759
cccagauucguaugaucuc

SEQ ID NO: 509916 - RNA, 19 nt, Artificial Sequence
  Description of Artificial Sequence: Synthetic oligonucleotide
  Antisense strand to SEQ ID NO: 509915
gagaucauacgaaucuggg

SEQ ID NO: 509917 - RNA, 19 nt, Artificial Sequence
  Description of Artificial Sequence: Synthetic oligonucleotide
  Sense strand starting at position 112 of SEQ ID NO: 317759
agauucguaugaucuccaa

SEQ ID NO: 509918 - RNA, 19 nt, Artificial Sequence
  Description of Artificial Sequence: Synthetic oligonucleotide
  Antisense strand to SEQ ID NO: 509917
uuggagaucauacgaaucu

SEQ ID NO: 509919 - RNA, 19 nt, Artificial Sequence
  Description of Artificial Sequence: Synthetic oligonucleotide
  Sense strand starting at position 115 of SEQ ID NO: 317759
uucguaugaucuccaaauu

SEQ ID NO: 509920 - RNA, 19 nt, Artificial Sequence
  Description of Artificial Sequence: Synthetic oligonucleotide
  Antisense strand to SEQ ID NO: 509919
aauuuggagaucauacgaa

SEQ ID NO: 509921 - RNA, 19 nt, Artificial Sequence
  Description of Artificial Sequence: Synthetic oligonucleotide
  Sense strand starting at position 116 of SEQ ID NO: 317759
ucguaugaucuccaaauug

SEQ ID NO: 509922 - RNA, 19 nt, Artificial Sequence
  Description of Artificial Sequence: Synthetic oligonucleotide
  Antisense strand to SEQ ID NO: 509921
caauuuggagaucauacga

SEQ ID NO: 509923 - RNA, 19 nt, Artificial Sequence
  Description of Artificial Sequence: Synthetic oligonucleotide
  Sense strand starting at position 286 of SEQ ID NO: 317759
acuuaaaguuaacugugau

SEQ ID NO: 509924 - RNA, 19 nt, Artificial Sequence
  Description of Artificial Sequence: Synthetic oligonucleotide
  Antisense strand to SEQ ID NO: 509923
aucacaguuaacuuuaagu

SEQ ID NO: 509925 - RNA, 19 nt, Artificial Sequence
  Description of Artificial Sequence: Synthetic oligonucleotide
  Sense strand starting at position 451 of SEQ ID NO: 317759
uguuauacuuagucaauuc

SEQ ID NO: 509926 - RNA, 19 nt, Artificial Sequence
  Description of Artificial Sequence: Synthetic oligonucleotide
  Antisense strand to SEQ ID NO: 509925
gaauugacuaaguauaaca

SEQ ID NO: 509927 - RNA, 19 nt, Artificial Sequence
  Description of Artificial Sequence: Synthetic oligonucleotide
  Sense strand starting at position 933 of SEQ ID NO: 317759
ucuagugcugauuaggaaa

SEQ ID NO: 509928 - RNA, 19 nt, Artificial Sequence
  Description of Artificial Sequence: Synthetic oligonucleotide
  Antisense strand to SEQ ID NO: 509927
uuuccuaaucagcacuaga

SEQ ID NO: 509929 - RNA, 19 nt, Artificial Sequence
  Description of Artificial Sequence: Synthetic oligonucleotide
  Sense strand starting at position 1051 of SEQ ID NO: 317759
uccagagcugcugauuaag

SEQ ID NO: 509930 - RNA, 19 nt, Artificial Sequence
  Description of Artificial Sequence: Synthetic oligonucleotide
  Antisense strand to SEQ ID NO: 509929
cuuaaucagcagcucugga

SEQ ID NO: 509931 - RNA, 19 nt, Artificial Sequence
  Description of Artificial Sequence: Synthetic oligonucleotide
  Sense strand starting at position 1069 of SEQ ID NO: 317759
gcauuucugucauucugau

SEQ ID NO: 509932 - RNA, 19 nt, Artificial Sequence
  Description of Artificial Sequence: Synthetic oligonucleotide
  Antisense strand to SEQ ID NO: 509931
aucagaaugacagaaaugc

SEQ ID NO: 509933 - RNA, 19 nt, Artificial Sequence
  Description of Artificial Sequence: Synthetic oligonucleotide
  Sense strand starting at position 1077 of SEQ ID NO: 317759
gucauucugaugcauaggu

SEQ ID NO: 509934 - RNA, 19 nt, Artificial Sequence
  Description of Artificial Sequence: Synthetic oligonucleotide
  Antisense strand to SEQ ID NO: 509933
accuaugcaucagaaugac

SEQ ID NO: 509935 - RNA, 19 nt, Artificial Sequence
  Description of Artificial Sequence: Synthetic oligonucleotide
  Sense strand starting at position 1090 of SEQ ID NO: 317759
auaggugguuuccuagaaa

SEQ ID NO: 509936 - RNA, 19 nt, Artificial Sequence
  Description of Artificial Sequence: Synthetic oligonucleotide
  Antisense strand to SEQ ID NO: 509935
uuucuaggaaaccaccuau

SEQ ID NO: 509937 - RNA, 19 nt, Artificial Sequence
  Description of Artificial Sequence: Synthetic oligonucleotide
  Sense strand starting at position 1125 of SEQ ID NO: 317759
agucccgauccuuagggaa

SEQ ID NO: 509938 - RNA, 19 nt, Artificial Sequence
  Description of Artificial Sequence: Synthetic oligonucleotide
  Antisense strand to SEQ ID NO: 509937
uucccuaaggaucgggacu

SEQ ID NO: 509939 - RNA, 19 nt, Artificial Sequence
  Description of Artificial Sequence: Synthetic oligonucleotide
  Sense strand starting at position 1137 of SEQ ID NO: 317759
uagggaagcugucuaaacu

SEQ ID NO: 509940 - RNA, 19 nt, Artificial Sequence
  Description of Artificial Sequence: Synthetic oligonucleotide
  Antisense strand to SEQ ID NO: 509939
aguuuagacagcuucccua

SEQ ID NO: 509941 - RNA, 19 nt, Artificial Sequence
  Description of Artificial Sequence: Synthetic oligonucleotide
  Sense strand starting at position 1138 of SEQ ID NO: 317759
agggaagcugucuaaacuc

SEQ ID NO: 509942 - RNA, 19 nt, Artificial Sequence
  Description of Artificial Sequence: Synthetic oligonucleotide
  Antisense strand to SEQ ID NO: 509941
gaguuuagacagcuucccu

SEQ ID NO: 509943 - RNA, 19 nt, Artificial Sequence
  Description of Artificial Sequence: Synthetic oligonucleotide
  Sense strand starting at position 1172 of SEQ ID NO: 317759
gaagcuguacaaugggaau

SEQ ID NO: 509944 - RNA, 19 nt, Artificial Sequence
  Description of Artificial Sequence: Synthetic oligonucleotide
  Antisense strand to SEQ ID NO: 509943
auucccauuguacagcuuc

SEQ ID NO: 509945 - RNA, 19 nt, Artificial Sequence
  Description of Artificial Sequence: Synthetic oligonucleotide
  Sense strand starting at position 1174 of SEQ ID NO: 317759
agcuguacaaugggaauaa

SEQ ID NO: 509946 - RNA, 19 nt, Artificial Sequence
  Description of Artificial Sequence: Synthetic oligonucleotide
  Antisense strand to SEQ ID NO: 509945
uuauucccauuguacagcu

SEQ ID NO: 509947 - RNA, 19 nt, Artificial Sequence
  Description of Artificial Sequence: Synthetic oligonucleotide
  Sense strand starting at position 1208 of SEQ ID NO: 317759
cuguguguaaguggagaau

SEQ ID NO: 509948 - RNA, 19 nt, Artificial Sequence
  Description of Artificial Sequence: Synthetic oligonucleotide
  Antisense strand to SEQ ID NO: 509947
auucuccacuuacacacag

SEQ ID NO: 509949 - RNA, 19 nt, Artificial Sequence
  Description of Artificial Sequence: Synthetic oligonucleotide
  Sense strand starting at position 1302 of SEQ ID NO: 317759
aaguaacccucagugaugu

SEQ ID NO: 509950 - RNA, 19 nt, Artificial Sequence
  Description of Artificial Sequence: Synthetic oligonucleotide
  Antisense strand to SEQ ID NO: 509949
acaucacugaggguuacuu

SEQ ID NO: 509951 - RNA, 19 nt, Artificial Sequence
  Description of Artificial Sequence: Synthetic oligonucleotide
  Sense strand starting at position 1304 of SEQ ID NO: 317759
guaacccucagugauguua

SEQ ID NO: 509952 - RNA, 19 nt, Artificial Sequence
  Description of Artificial Sequence: Synthetic oligonucleotide
  Antisense strand to SEQ ID NO: 509951
uaacaucacugaggguuac

SEQ ID NO: 509953 - RNA, 19 nt, Artificial Sequence
  Description of Artificial Sequence: Synthetic oligonucleotide
  Sense strand starting at position 1667 of SEQ ID NO: 317759
guaacaguguuaccgacaa

SEQ ID NO: 509954 - RNA, 19 nt, Artificial Sequence
  Description of Artificial Sequence: Synthetic oligonucleotide
  Antisense strand to SEQ ID NO: 509953
uugucgguaacacuguuac

SEQ ID NO: 509955 - RNA, 19 nt, Artificial Sequence
  Description of Artificial Sequence: Synthetic oligonucleotide
  Sense strand starting at position 1671 of SEQ ID NO: 317759
caguguuaccgacaaggag

SEQ ID NO: 509956 - RNA, 19 nt, Artificial Sequence
  Description of Artificial Sequence: Synthetic oligonucleotide
  Antisense strand to SEQ ID NO: 509955
cuccuugucgguaacacug

SEQ ID NO: 509957 - RNA, 19 nt, Artificial Sequence
  Description of Artificial Sequence: Synthetic oligonucleotide
  Sense strand starting at position 2321 of SEQ ID NO: 317759
uaaaguggauuaguaauga

SEQ ID NO: 509958 - RNA, 19 nt, Artificial Sequence
  Description of Artificial Sequence: Synthetic oligonucleotide
  Antisense strand to SEQ ID NO: 509957
ucauuacuaauccacuuua

SEQ ID NO: 509959 - RNA, 19 nt, Artificial Sequence
  Description of Artificial Sequence: Synthetic oligonucleotide
  Sense strand starting at position 2396 of SEQ ID NO: 317759
guaguuuaacaguaagaau

SEQ ID NO: 509960 - RNA, 19 nt, Artificial Sequence
  Description of Artificial Sequence: Synthetic oligonucleotide
  Antisense strand to SEQ ID NO: 509959
auucuuacuguuaaacuac

SEQ ID NO: 509961 - RNA, 19 nt, Artificial Sequence
  Description of Artificial Sequence: Synthetic oligonucleotide
  Sense strand starting at position 2659 of SEQ ID NO: 317759
ggcucugaacccugaacuu

SEQ ID NO: 509962 - RNA, 19 nt, Artificial Sequence
  Description of Artificial Sequence: Synthetic oligonucleotide
  Antisense strand to SEQ ID NO: 509961
aaguucaggguucagagcc

SEQ ID NO: 509963 - RNA, 19 nt, Artificial Sequence
  Description of Artificial Sequence: Synthetic oligonucleotide
  Sense strand starting at position 2685 of SEQ ID NO: 317759
gagugaaggagguaguguu

SEQ ID NO: 509964 - RNA, 19 nt, Artificial Sequence
  Description of Artificial Sequence: Synthetic oligonucleotide
  Antisense strand to SEQ ID NO: 509963
aacacuaccuccuucacuc

SEQ ID NO: 509965 - RNA, 19 nt, Artificial Sequence
  Description of Artificial Sequence: Synthetic oligonucleotide
  Sense strand starting at position 2701 of SEQ ID NO: 317759
guuggucacuguuugagga

SEQ ID NO: 509966 - RNA, 19 nt, Artificial Sequence
  Description of Artificial Sequence: Synthetic oligonucleotide
  Antisense strand to SEQ ID NO: 509965
uccucaaacagugaccaac

SEQ ID NO: 509967 - RNA, 19 nt, Artificial Sequence
  Description of Artificial Sequence: Synthetic oligonucleotide
  Sense strand starting at position 2702 of SEQ ID NO: 317759
uuggucacuguuugaggaa

SEQ ID NO: 509968 - RNA, 19 nt, Artificial Sequence
  Description of Artificial Sequence: Synthetic oligonucleotide
  Antisense strand to SEQ ID NO: 509967
uuccucaaacagugaccaa

SEQ ID NO: 509969 - RNA, 19 nt, Artificial Sequence
  Description of Artificial Sequence: Synthetic oligonucleotide
  Sense strand starting at position 2967 of SEQ ID NO: 317759
agaagacccuguccuuaua

SEQ ID NO: 509970 - RNA, 19 nt, Artificial Sequence
  Description of Artificial Sequence: Synthetic oligonucleotide
  Antisense strand to SEQ ID NO: 509969
uauaaggacagggucuucu

SEQ ID NO: 509971 - RNA, 19 nt, Artificial Sequence
  Description of Artificial Sequence: Synthetic oligonucleotide
  Sense strand starting at position 3330 of SEQ ID NO: 317759
guuguugaucauuaguauu

SEQ ID NO: 509972 - RNA, 19 nt, Artificial Sequence
  Description of Artificial Sequence: Synthetic oligonucleotide
  Antisense strand to SEQ ID NO: 509971
aauacuaaugaucaacaac

SEQ ID NO: 509973 - RNA, 19 nt, Artificial Sequence
  Description of Artificial Sequence: Synthetic oligonucleotide
  Sense strand starting at position 3519 of SEQ ID NO: 317759
guauuucugugcuccugau

SEQ ID NO: 509974 - RNA, 19 nt, Artificial Sequence
  Description of Artificial Sequence: Synthetic oligonucleotide
  Antisense strand to SEQ ID NO: 509973
aucaggagcacagaaauac

SEQ ID NO: 509975 - RNA, 19 nt, Artificial Sequence
  Description of Artificial Sequence: Synthetic oligonucleotide
  Sense strand starting at position 3529 of SEQ ID NO: 317759
gcuccugaugaguacagau

SEQ ID NO: 509976 - RNA, 19 nt, Artificial Sequence
  Description of Artificial Sequence: Synthetic oligonucleotide
  Antisense strand to SEQ ID NO: 509975
aucuguacucaucaggagc

SEQ ID NO: 509977 - RNA, 19 nt, Artificial Sequence
  Description of Artificial Sequence: Synthetic oligonucleotide
  Sense strand starting at position 3538 of SEQ ID NO: 317759
gaguacagaugaguaauca

SEQ ID NO: 509978 - RNA, 19 nt, Artificial Sequence
  Description of Artificial Sequence: Synthetic oligonucleotide
  Antisense strand to SEQ ID NO: 509977
ugauuacucaucuguacuc

SEQ ID NO: 509979 - RNA, 19 nt, Artificial Sequence
  Description of Artificial Sequence: Synthetic oligonucleotide
  Sense strand starting at position 3548 of SEQ ID NO: 317759
gaguaaucacaugguuaua

SEQ ID NO: 509980 - RNA, 19 nt, Artificial Sequence
  Description of Artificial Sequence: Synthetic oligonucleotide
  Antisense strand to SEQ ID NO: 509979
uauaaccaugugauuacuc

SEQ ID NO: 509981 - RNA, 19 nt, Artificial Sequence
  Description of Artificial Sequence: Synthetic oligonucleotide
  Sense strand starting at position 3550 of SEQ ID NO: 317759
guaaucacaugguuauaaa

SEQ ID NO: 509982 - RNA, 19 nt, Artificial Sequence
  Description of Artificial Sequence: Synthetic oligonucleotide
  Antisense strand to SEQ ID NO: 509981
uuuauaaccaugugauuac

SEQ ID NO: 509983 - RNA, 19 nt, Artificial Sequence
  Description of Artificial Sequence: Synthetic oligonucleotide
  Sense strand starting at position 3889 of SEQ ID NO: 317759
auucuucugcuguaaguca

SEQ ID NO: 509984 - RNA, 19 nt, Artificial Sequence
  Description of Artificial Sequence: Synthetic oligonucleotide
  Antisense strand to SEQ ID NO: 509983
ugacuuacagcagaagaau

SEQ ID NO: 509985 - RNA, 19 nt, Artificial Sequence
  Description of Artificial Sequence: Synthetic oligonucleotide
  Sense strand starting at position 5 of SEQ ID NO: 317760
uaguaagcagauugcuaau

SEQ ID NO: 509986 - RNA, 19 nt, Artificial Sequence
  Description of Artificial Sequence: Synthetic oligonucleotide
  Antisense strand to SEQ ID NO: 509985
auuagcaaucugcuuacua

SEQ ID NO: 509987 - RNA, 19 nt, Artificial Sequence
  Description of Artificial Sequence: Synthetic oligonucleotide
  Sense strand starting at position 11 of SEQ ID NO: 317760
gcagauugcuaauucuaug

SEQ ID NO: 509988 - RNA, 19 nt, Artificial Sequence
  Description of Artificial Sequence: Synthetic oligonucleotide
  Antisense strand to SEQ ID NO: 509987
cauagaauuagcaaucugc

SEQ ID NO: 509989 - RNA, 19 nt, Artificial Sequence
  Description of Artificial Sequence: Synthetic oligonucleotide
  Sense strand starting at position 17 of SEQ ID NO: 317760
ugcuaauucuauguaucag

SEQ ID NO: 509990 - RNA, 19 nt, Artificial Sequence
  Description of Artificial Sequence: Synthetic oligonucleotide
  Antisense strand to SEQ ID NO: 509989
cugauacauagaauuagca

SEQ ID NO: 509991 - RNA, 19 nt, Artificial Sequence
  Description of Artificial Sequence: Synthetic oligonucleotide
  Sense strand starting at position 84 of SEQ ID NO: 317760
acagauaucccagauucgu

SEQ ID NO: 509992 - RNA, 19 nt, Artificial Sequence
  Description of Artificial Sequence: Synthetic oligonucleotide
  Antisense strand to SEQ ID NO: 509991
acgaaucugggauaucugu

SEQ ID NO: 509993 - RNA, 19 nt, Artificial Sequence
  Description of Artificial Sequence: Synthetic oligonucleotide
  Sense strand starting at position 89 of SEQ ID NO: 317760
uaucccagauucguaugau

SEQ ID NO: 509994 - RNA, 19 nt, Artificial Sequence
  Description of Artificial Sequence: Synthetic oligonucleotide
  Antisense strand to SEQ ID NO: 509993
aucauacgaaucugggaua

SEQ ID NO: 509995 - RNA, 19 nt, Artificial Sequence
  Description of Artificial Sequence: Synthetic oligonucleotide
  Sense strand starting at position 92 of SEQ ID NO: 317760
cccagauucguaugaucuc

SEQ ID NO: 509996 - RNA, 19 nt, Artificial Sequence
  Description of Artificial Sequence: Synthetic oligonucleotide
  Antisense strand to SEQ ID NO: 509995
gagaucauacgaaucuggg

SEQ ID NO: 509997 - RNA, 19 nt, Artificial Sequence
  Description of Artificial Sequence: Synthetic oligonucleotide
  Sense strand starting at position 95 of SEQ ID NO: 317760
agauucguaugaucuccaa

SEQ ID NO: 509998 - RNA, 19 nt, Artificial Sequence
  Description of Artificial Sequence: Synthetic oligonucleotide
  Antisense strand to SEQ ID NO: 509997
uuggagaucauacgaaucu

SEQ ID NO: 509999 - RNA, 19 nt, Artificial Sequence
  Description of Artificial Sequence: Synthetic oligonucleotide
  Sense strand starting at position 98 of SEQ ID NO: 317760
uucguaugaucuccaaauu

SEQ ID NO: 510000 - RNA, 19 nt, Artificial Sequence
  Description of Artificial Sequence: Synthetic oligonucleotide
  Antisense strand to SEQ ID NO: 509999
aauuuggagaucauacgaa

SEQ ID NO: 510001 - RNA, 19 nt, Artificial Sequence
  Description of Artificial Sequence: Synthetic oligonucleotide
  Sense strand starting at position 99 of SEQ ID NO: 317760
ucguaugaucuccaaauug

SEQ ID NO: 510002 - RNA, 19 nt, Artificial Sequence
  Description of Artificial Sequence: Synthetic oligonucleotide
  Antisense strand to SEQ ID NO: 510001
caauuuggagaucauacga

SEQ ID NO: 510003 - RNA, 19 nt, Artificial Sequence
  Description of Artificial Sequence: Synthetic oligonucleotide
  Sense strand starting at position 269 of SEQ ID NO: 317760
acuuaaaguuaacugugau

SEQ ID NO: 510004 - RNA, 19 nt, Artificial Sequence
  Description of Artificial Sequence: Synthetic oligonucleotide
  Antisense strand to SEQ ID NO: 510003
aucacaguuaacuuuaagu

SEQ ID NO: 510005 - RNA, 19 nt, Artificial Sequence
  Description of Artificial Sequence: Synthetic oligonucleotide
  Sense strand starting at position 434 of SEQ ID NO: 317760
uguuauacuuagucaauuc

SEQ ID NO: 510006 - RNA, 19 nt, Artificial Sequence
  Description of Artificial Sequence: Synthetic oligonucleotide
  Antisense strand to SEQ ID NO: 510005
gaauugacuaaguauaaca

SEQ ID NO: 510007 - RNA, 19 nt, Artificial Sequence
  Description of Artificial Sequence: Synthetic oligonucleotide
  Sense strand starting at position 916 of SEQ ID NO: 317760
ucuagugcugauuaggaaa

SEQ ID NO: 510008 - RNA, 19 nt, Artificial Sequence
  Description of Artificial Sequence: Synthetic oligonucleotide
  Antisense strand to SEQ ID NO: 510007
uuuccuaaucagcacuaga

SEQ ID NO: 510009 - RNA, 19 nt, Artificial Sequence
  Description of Artificial Sequence: Synthetic oligonucleotide
  Sense strand starting at position 1034 of SEQ ID NO: 317760
uccagagcugcugauuaag

SEQ ID NO: 510010 - RNA, 19 nt, Artificial Sequence
  Description of Artificial Sequence: Synthetic oligonucleotide
  Antisense strand to SEQ ID NO: 510009
cuuaaucagcagcucugga

SEQ ID NO: 510011 - RNA, 19 nt, Artificial Sequence
  Description of Artificial Sequence: Synthetic oligonucleotide
  Sense strand starting at position 1052 of SEQ ID NO: 317760
gcauuucugucauucugau

SEQ ID NO: 510012 - RNA, 19 nt, Artificial Sequence
  Description of Artificial Sequence: Synthetic oligonucleotide
  Antisense strand to SEQ ID NO: 510011
aucagaaugacagaaaugc

SEQ ID NO: 510013 - RNA, 19 nt, Artificial Sequence
  Description of Artificial Sequence: Synthetic oligonucleotide
  Sense strand starting at position 1060 of SEQ ID NO: 317760
gucauucugaugcauaggu

SEQ ID NO: 510014 - RNA, 19 nt, Artificial Sequence
  Description of Artificial Sequence: Synthetic oligonucleotide
  Antisense strand to SEQ ID NO: 510013
accuaugcaucagaaugac

SEQ ID NO: 510015 - RNA, 19 nt, Artificial Sequence
  Description of Artificial Sequence: Synthetic oligonucleotide
  Sense strand starting at position 1073 of SEQ ID NO: 317760
auaggugguuuccuagaaa

SEQ ID NO: 510016 - RNA, 19 nt, Artificial Sequence
  Description of Artificial Sequence: Synthetic oligonucleotide
  Antisense strand to SEQ ID NO: 510015
uuucuaggaaaccaccuau

SEQ ID NO: 510017 - RNA, 19 nt, Artificial Sequence
  Description of Artificial Sequence: Synthetic oligonucleotide
  Sense strand starting at position 1108 of SEQ ID NO: 317760
agucccgauccuuagggaa

SEQ ID NO: 510018 - RNA, 19 nt, Artificial Sequence
  Description of Artificial Sequence: Synthetic oligonucleotide
  Antisense strand to SEQ ID NO: 510017
uucccuaaggaucgggacu

SEQ ID NO: 510019 - RNA, 19 nt, Artificial Sequence
  Description of Artificial Sequence: Synthetic oligonucleotide
  Sense strand starting at position 1120 of SEQ ID NO: 317760
uagggaagcugucuaaacu

SEQ ID NO: 510020 - RNA, 19 nt, Artificial Sequence
  Description of Artificial Sequence: Synthetic oligonucleotide
  Antisense strand to SEQ ID NO: 510019
aguuuagacagcuucccua

SEQ ID NO: 510021 - RNA, 19 nt, Artificial Sequence
  Description of Artificial Sequence: Synthetic oligonucleotide
  Sense strand starting at position 1121 of SEQ ID NO: 317760
agggaagcugucuaaacuc

SEQ ID NO: 510022 - RNA, 19 nt, Artificial Sequence
  Description of Artificial Sequence: Synthetic oligonucleotide
  Antisense strand to SEQ ID NO: 510021
gaguuuagacagcuucccu

SEQ ID NO: 510023 - RNA, 19 nt, Artificial Sequence
  Description of Artificial Sequence: Synthetic oligonucleotide
  Sense strand starting at position 1155 of SEQ ID NO: 317760
gaagcuguacaaugggaau

SEQ ID NO: 510024 - RNA, 19 nt, Artificial Sequence
  Description of Artificial Sequence: Synthetic oligonucleotide
  Antisense strand to SEQ ID NO: 510023
auucccauuguacagcuuc

SEQ ID NO: 510025 - RNA, 19 nt, Artificial Sequence
  Description of Artificial Sequence: Synthetic oligonucleotide
  Sense strand starting at position 1157 of SEQ ID NO: 317760
agcuguacaaugggaauaa

SEQ ID NO: 510026 - RNA, 19 nt, Artificial Sequence
  Description of Artificial Sequence: Synthetic oligonucleotide
  Antisense strand to SEQ ID NO: 510025
uuauucccauuguacagcu

SEQ ID NO: 510027 - RNA, 19 nt, Artificial Sequence
  Description of Artificial Sequence: Synthetic oligonucleotide
  Sense strand starting at position 1191 of SEQ ID NO: 317760
cuguguguaaguggagaau

SEQ ID NO: 510028 - RNA, 19 nt, Artificial Sequence
  Description of Artificial Sequence: Synthetic oligonucleotide
  Antisense strand to SEQ ID NO: 510027
auucuccacuuacacacag

SEQ ID NO: 510029 - RNA, 19 nt, Artificial Sequence
  Description of Artificial Sequence: Synthetic oligonucleotide
  Sense strand starting at position 1285 of SEQ ID NO: 317760
aaguaacccucagugaugu

SEQ ID NO: 510030 - RNA, 19 nt, Artificial Sequence
  Description of Artificial Sequence: Synthetic oligonucleotide
  Antisense strand to SEQ ID NO: 510029
acaucacugaggguuacuu

SEQ ID NO: 510031 - RNA, 19 nt, Artificial Sequence
  Description of Artificial Sequence: Synthetic oligonucleotide
  Sense strand starting at position 1287 of SEQ ID NO: 317760
guaacccucagugauguua

SEQ ID NO: 510032 - RNA, 19 nt, Artificial Sequence
  Description of Artificial Sequence: Synthetic oligonucleotide
  Antisense strand to SEQ ID NO: 510031
uaacaucacugaggguuac

SEQ ID NO: 510033 - RNA, 19 nt, Artificial Sequence
  Description of Artificial Sequence: Synthetic oligonucleotide
  Sense strand starting at position 1650 of SEQ ID NO: 317760
guaacaguguuaccgacaa

SEQ ID NO: 510034 - RNA, 19 nt, Artificial Sequence
  Description of Artificial Sequence: Synthetic oligonucleotide
  Antisense strand to SEQ ID NO: 510033
uugucgguaacacuguuac

SEQ ID NO: 510035 - RNA, 19 nt, Artificial Sequence
  Description of Artificial Sequence: Synthetic oligonucleotide
  Sense strand starting at position 1654 of SEQ ID NO: 317760
caguguuaccgacaaggag

SEQ ID NO: 510036 - RNA, 19 nt, Artificial Sequence
  Description of Artificial Sequence: Synthetic oligonucleotide
  Antisense strand to SEQ ID NO: 510035
cuccuugucgguaacacug

SEQ ID NO: 510037 - RNA, 19 nt, Artificial Sequence
  Description of Artificial Sequence: Synthetic oligonucleotide
  Sense strand starting at position 2304 of SEQ ID NO: 317760
uaaaguggauuaguaauga

SEQ ID NO: 510038 - RNA, 19 nt, Artificial Sequence
  Description of Artificial Sequence: Synthetic oligonucleotide
  Antisense strand to SEQ ID NO: 510037
ucauuacuaauccacuuua

SEQ ID NO: 510039 - RNA, 19 nt, Artificial Sequence
  Description of Artificial Sequence: Synthetic oligonucleotide
  Sense strand starting at position 2379 of SEQ ID NO: 317760
guaguuuaacaguaagaau

SEQ ID NO: 510040 - RNA, 19 nt, Artificial Sequence
  Description of Artificial Sequence: Synthetic oligonucleotide
  Antisense strand to SEQ ID NO: 510039
auucuuacuguuaaacuac

SEQ ID NO: 510041 - RNA, 19 nt, Artificial Sequence
  Description of Artificial Sequence: Synthetic oligonucleotide
  Sense strand starting at position 2642 of SEQ ID NO: 317760
ggcucugaacccugaacuu

SEQ ID NO: 510042 - RNA, 19 nt, Artificial Sequence
  Description of Artificial Sequence: Synthetic oligonucleotide
  Antisense strand to SEQ ID NO: 510041
aaguucaggguucagagcc

SEQ ID NO: 510043 - RNA, 19 nt, Artificial Sequence
  Description of Artificial Sequence: Synthetic oligonucleotide
  Sense strand starting at position 2668 of SEQ ID NO: 317760
gagugaaggagguaguguu

SEQ ID NO: 510044 - RNA, 19 nt, Artificial Sequence
  Description of Artificial Sequence: Synthetic oligonucleotide
  Antisense strand to SEQ ID NO: 510043
aacacuaccuccuucacuc

SEQ ID NO: 510045 - RNA, 19 nt, Artificial Sequence
  Description of Artificial Sequence: Synthetic oligonucleotide
  Sense strand starting at position 2684 of SEQ ID NO: 317760
guuggucacuguuugagga

SEQ ID NO: 510046 - RNA, 19 nt, Artificial Sequence
  Description of Artificial Sequence: Synthetic oligonucleotide
  Antisense strand to SEQ ID NO: 510045
uccucaaacagugaccaac

SEQ ID NO: 510047 - RNA, 19 nt, Artificial Sequence
  Description of Artificial Sequence: Synthetic oligonucleotide
  Sense strand starting at position 2685 of SEQ ID NO: 317760
uuggucacuguuugaggaa

SEQ ID NO: 510048 - RNA, 19 nt, Artificial Sequence
  Description of Artificial Sequence: Synthetic oligonucleotide
  Antisense strand to SEQ ID NO: 510047
uuccucaaacagugaccaa

SEQ ID NO: 510049 - RNA, 19 nt, Artificial Sequence
  Description of Artificial Sequence: Synthetic oligonucleotide
  Sense strand starting at position 2950 of SEQ ID NO: 317760
agaagacccuguccuuaua

SEQ ID NO: 510050 - RNA, 19 nt, Artificial Sequence
  Description of Artificial Sequence: Synthetic oligonucleotide
  Antisense strand to SEQ ID NO: 510049
uauaaggacagggucuucu

SEQ ID NO: 510051 - RNA, 19 nt, Artificial Sequence
  Description of Artificial Sequence: Synthetic oligonucleotide
  Sense strand starting at position 3313 of SEQ ID NO: 317760
guuguugaucauuaguauu

SEQ ID NO: 510052 - RNA, 19 nt, Artificial Sequence
  Description of Artificial Sequence: Synthetic oligonucleotide
  Antisense strand to SEQ ID NO: 510051
aauacuaaugaucaacaac

SEQ ID NO: 510053 - RNA, 19 nt, Artificial Sequence
  Description of Artificial Sequence: Synthetic oligonucleotide
  Sense strand starting at position 3502 of SEQ ID NO: 317760
guauuucugugcuccugau

SEQ ID NO: 510054 - RNA, 19 nt, Artificial Sequence
  Description of Artificial Sequence: Synthetic oligonucleotide
  Antisense strand to SEQ ID NO: 510053
aucaggagcacagaaauac

SEQ ID NO: 510055 - RNA, 19 nt, Artificial Sequence
  Description of Artificial Sequence: Synthetic oligonucleotide
  Sense strand starting at position 3512 of SEQ ID NO: 317760
gcuccugaugaguacagau

SEQ ID NO: 510056 - RNA, 19 nt, Artificial Sequence
  Description of Artificial Sequence: Synthetic oligonucleotide
  Antisense strand to SEQ ID NO: 510055
aucuguacucaucaggagc

SEQ ID NO: 510057 - RNA, 19 nt, Artificial Sequence
  Description of Artificial Sequence: Synthetic oligonucleotide
  Sense strand starting at position 3521 of SEQ ID NO: 317760
gaguacagaugaguaauca

SEQ ID NO: 510058 - RNA, 19 nt, Artificial Sequence
  Description of Artificial Sequence: Synthetic oligonucleotide
  Antisense strand to SEQ ID NO: 510057
ugauuacucaucuguacuc

SEQ ID NO: 510059 - RNA, 19 nt, Artificial Sequence
  Description of Artificial Sequence: Synthetic oligonucleotide
  Sense strand starting at position 3531 of SEQ ID NO: 317760
gaguaaucacaugguuaua

SEQ ID NO: 510060 - RNA, 19 nt, Artificial Sequence
  Description of Artificial Sequence: Synthetic oligonucleotide
  Antisense strand to SEQ ID NO: 510059
uauaaccaugugauuacuc

SEQ ID NO: 510061 - RNA, 19 nt, Artificial Sequence
  Description of Artificial Sequence: Synthetic oligonucleotide
  Sense strand starting at position 3533 of SEQ ID NO: 317760
guaaucacaugguuauaaa

SEQ ID NO: 510062 - RNA, 19 nt, Artificial Sequence
  Description of Artificial Sequence: Synthetic oligonucleotide
  Antisense strand to SEQ ID NO: 510061
uuuauaaccaugugauuac

SEQ ID NO: 510063 - RNA, 19 nt, Artificial Sequence
  Description of Artificial Sequence: Synthetic oligonucleotide
  Sense strand starting at position 3872 of SEQ ID NO: 317760
auucuucugcuguaaguca

SEQ ID NO: 510064 - RNA, 19 nt, Artificial Sequence
  Description of Artificial Sequence: Synthetic oligonucleotide
  Antisense strand to SEQ ID NO: 510063
ugacuuacagcagaagaau

SEQ ID NO: 510065 - RNA, 19 nt, Artificial Sequence
  Description of Artificial Sequence: Synthetic oligonucleotide
  Sense strand starting at position 100 of SEQ ID NO: 317761
auagcaaugagauguugaa

SEQ ID NO: 510066 - RNA, 19 nt, Artificial Sequence
  Description of Artificial Sequence: Synthetic oligonucleotide
  Antisense strand to SEQ ID NO: 510065
uucaacaucucauugcuau

SEQ ID NO: 510067 - RNA, 19 nt, Artificial Sequence
  Description of Artificial Sequence: Synthetic oligonucleotide
  Sense strand starting at position 572 of SEQ ID NO: 317761
agaucuaaugcuggcaaca

SEQ ID NO: 510068 - RNA, 19 nt, Artificial Sequence
  Description of Artificial Sequence: Synthetic oligonucleotide
  Antisense strand to SEQ ID NO: 510067
uguugccagcauuagaucu

SEQ ID NO: 510069 - RNA, 19 nt, Artificial Sequence
  Description of Artificial Sequence: Synthetic oligonucleotide
  Sense strand starting at position 587 of SEQ ID NO: 317761
aacaguguaguaugauuga

SEQ ID NO: 510070 - RNA, 19 nt, Artificial Sequence
  Description of Artificial Sequence: Synthetic oligonucleotide
  Antisense strand to SEQ ID NO: 510069
ucaaucauacuacacuguu

SEQ ID NO: 510071 - RNA, 19 nt, Artificial Sequence
  Description of Artificial Sequence: Synthetic oligonucleotide
  Sense strand starting at position 592 of SEQ ID NO: 317761
uguaguaugauugagcacu

SEQ ID NO: 510072 - RNA, 19 nt, Artificial Sequence
  Description of Artificial Sequence: Synthetic oligonucleotide
  Antisense strand to SEQ ID NO: 510071
agugcucaaucauacuaca

SEQ ID NO: 510073 - RNA, 19 nt, Artificial Sequence
  Description of Artificial Sequence: Synthetic oligonucleotide
  Sense strand starting at position 787 of SEQ ID NO: 317761
aggacuguguaaguaaauu

SEQ ID NO: 510074 - RNA, 19 nt, Artificial Sequence
  Description of Artificial Sequence: Synthetic oligonucleotide
  Antisense strand to SEQ ID NO: 510073
aauuuacuuacacaguccu

SEQ ID NO: 510075 - RNA, 19 nt, Artificial Sequence
  Description of Artificial Sequence: Synthetic oligonucleotide
  Sense strand starting at position 793 of SEQ ID NO: 317761
guguaaguaaauuauggua

SEQ ID NO: 510076 - RNA, 19 nt, Artificial Sequence
  Description of Artificial Sequence: Synthetic oligonucleotide
  Antisense strand to SEQ ID NO: 510075
uaccauaauuuacuuacac

SEQ ID NO: 510077 - RNA, 19 nt, Artificial Sequence
  Description of Artificial Sequence: Synthetic oligonucleotide
  Sense strand starting at position 1017 of SEQ ID NO: 317761
aacagugucugucuaugga

SEQ ID NO: 510078 - RNA, 19 nt, Artificial Sequence
  Description of Artificial Sequence: Synthetic oligonucleotide
  Antisense strand to SEQ ID NO: 510077
uccauagacagacacuguu

SEQ ID NO: 510079 - RNA, 19 nt, Artificial Sequence
  Description of Artificial Sequence: Synthetic oligonucleotide
  Sense strand starting at position 1033 of SEQ ID NO: 317761
ggauggugagguuauaggu

SEQ ID NO: 510080 - RNA, 19 nt, Artificial Sequence
  Description of Artificial Sequence: Synthetic oligonucleotide
  Antisense strand to SEQ ID NO: 510079
accuauaaccucaccaucc

SEQ ID NO: 510081 - RNA, 19 nt, Artificial Sequence
  Description of Artificial Sequence: Synthetic oligonucleotide
  Sense strand starting at position 1039 of SEQ ID NO: 317761
ugagguuauaggugauucu

SEQ ID NO: 510082 - RNA, 19 nt, Artificial Sequence
  Description of Artificial Sequence: Synthetic oligonucleotide
  Antisense strand to SEQ ID NO: 510081
agaaucaccuauaaccuca

SEQ ID NO: 510083 - RNA, 19 nt, Artificial Sequence
  Description of Artificial Sequence: Synthetic oligonucleotide
  Sense strand starting at position 1040 of SEQ ID NO: 317761
gagguuauaggugauucuu

SEQ ID NO: 510084 - RNA, 19 nt, Artificial Sequence
  Description of Artificial Sequence: Synthetic oligonucleotide
  Antisense strand to SEQ ID NO: 510083
aagaaucaccuauaaccuc

SEQ ID NO: 510085 - RNA, 19 nt, Artificial Sequence
  Description of Artificial Sequence: Synthetic oligonucleotide
  Sense strand starting at position 1075 of SEQ ID NO: 317761
auuuaucugugcuuugcaa

SEQ ID NO: 510086 - RNA, 19 nt, Artificial Sequence
  Description of Artificial Sequence: Synthetic oligonucleotide
  Antisense strand to SEQ ID NO: 510085
uugcaaagcacagauaaau

SEQ ID NO: 510087 - RNA, 19 nt, Artificial Sequence
  Description of Artificial Sequence: Synthetic oligonucleotide
  Sense strand starting at position 1114 of SEQ ID NO: 317761
acuguuucccauuauaugu

SEQ ID NO: 510088 - RNA, 19 nt, Artificial Sequence
  Description of Artificial Sequence: Synthetic oligonucleotide
  Antisense strand to SEQ ID NO: 510087
acauauaaugggaaacagu

SEQ ID NO: 510089 - RNA, 19 nt, Artificial Sequence
  Description of Artificial Sequence: Synthetic oligonucleotide
  Sense strand starting at position 1348 of SEQ ID NO: 317761
accaucacuccgggcuaau

SEQ ID NO: 510090 - RNA, 19 nt, Artificial Sequence
  Description of Artificial Sequence: Synthetic oligonucleotide
  Antisense strand to SEQ ID NO: 510089
auuagcccggagugauggu

SEQ ID NO: 510091 - RNA, 19 nt, Artificial Sequence
  Description of Artificial Sequence: Synthetic oligonucleotide
  Sense strand starting at position 1679 of SEQ ID NO: 317761
ccagauugucaaggacaug

SEQ ID NO: 510092 - RNA, 19 nt, Artificial Sequence
  Description of Artificial Sequence: Synthetic oligonucleotide
  Antisense strand to SEQ ID NO: 510091
cauguccuugacaaucugg

SEQ ID NO: 510093 - RNA, 19 nt, Artificial Sequence
  Description of Artificial Sequence: Synthetic oligonucleotide
  Sense strand starting at position 1719 of SEQ ID NO: 317761
cgaguaucugagggaagag

SEQ ID NO: 510094 - RNA, 19 nt, Artificial Sequence
  Description of Artificial Sequence: Synthetic oligonucleotide
  Antisense strand to SEQ ID NO: 510093
cucuucccucagauacucg

SEQ ID NO: 510095 - RNA, 19 nt, Artificial Sequence
  Description of Artificial Sequence: Synthetic oligonucleotide
  Sense strand starting at position 2027 of SEQ ID NO: 317761
agggaauccuugcuuuaug

SEQ ID NO: 510096 - RNA, 19 nt, Artificial Sequence
  Description of Artificial Sequence: Synthetic oligonucleotide
  Antisense strand to SEQ ID NO: 510095
cauaaagcaaggauucccu

SEQ ID NO: 510097 - RNA, 19 nt, Artificial Sequence
  Description of Artificial Sequence: Synthetic oligonucleotide
  Sense strand starting at position 2028 of SEQ ID NO: 317761
gggaauccuugcuuuauga

SEQ ID NO: 510098 - RNA, 19 nt, Artificial Sequence
  Description of Artificial Sequence: Synthetic oligonucleotide
  Antisense strand to SEQ ID NO: 510097
ucauaaagcaaggauuccc

SEQ ID NO: 510099 - RNA, 19 nt, Artificial Sequence
  Description of Artificial Sequence: Synthetic oligonucleotide
  Sense strand starting at position 2045 of SEQ ID NO: 317761
gaggucacucuugggcauu

SEQ ID NO: 510100 - RNA, 19 nt, Artificial Sequence
  Description of Artificial Sequence: Synthetic oligonucleotide
  Antisense strand to SEQ ID NO: 510099
aaugcccaagagugaccuc

SEQ ID NO: 510101 - RNA, 19 nt, Artificial Sequence
  Description of Artificial Sequence: Synthetic oligonucleotide
  Sense strand starting at position 2128 of SEQ ID NO: 317761
cucucuucccaaggagacu

SEQ ID NO: 510102 - RNA, 19 nt, Artificial Sequence
  Description of Artificial Sequence: Synthetic oligonucleotide
  Antisense strand to SEQ ID NO: 510101
agucuccuugggaagagag

SEQ ID NO: 510103 - RNA, 19 nt, Artificial Sequence
  Description of Artificial Sequence: Synthetic oligonucleotide
  Sense strand starting at position 2200 of SEQ ID NO: 317761
ggguuaaagcuggaaguca

SEQ ID NO: 510104 - RNA, 19 nt, Artificial Sequence
  Description of Artificial Sequence: Synthetic oligonucleotide
  Antisense strand to SEQ ID NO: 510103
ugacuuccagcuuuaaccc

SEQ ID NO: 510105 - RNA, 19 nt, Artificial Sequence
  Description of Artificial Sequence: Synthetic oligonucleotide
  Sense strand starting at position 2281 of SEQ ID NO: 317761
ccuuaauaauguguuagaa

SEQ ID NO: 510106 - RNA, 19 nt, Artificial Sequence
  Description of Artificial Sequence: Synthetic oligonucleotide
  Antisense strand to SEQ ID NO: 510105
uucuaacacauuauuaagg

SEQ ID NO: 510107 - RNA, 19 nt, Artificial Sequence
  Description of Artificial Sequence: Synthetic oligonucleotide
  Sense strand starting at position 2331 of SEQ ID NO: 317761
caaguucucugggcucuaa

SEQ ID NO: 510108 - RNA, 19 nt, Artificial Sequence
  Description of Artificial Sequence: Synthetic oligonucleotide
  Antisense strand to SEQ ID NO: 510107
uuagagcccagagaacuug

SEQ ID NO: 510109 - RNA, 19 nt, Artificial Sequence
  Description of Artificial Sequence: Synthetic oligonucleotide
  Sense strand starting at position 2335 of SEQ ID NO: 317761
uucucugggcucuaagaga

SEQ ID NO: 510110 - RNA, 19 nt, Artificial Sequence
  Description of Artificial Sequence: Synthetic oligonucleotide
  Antisense strand to SEQ ID NO: 510109
ucucuuagagcccagagaa

SEQ ID NO: 510111 - RNA, 19 nt, Artificial Sequence
  Description of Artificial Sequence: Synthetic oligonucleotide
  Sense strand starting at position 2405 of SEQ ID NO: 317761
aagauugugauggguuuga

SEQ ID NO: 510112 - RNA, 19 nt, Artificial Sequence
  Description of Artificial Sequence: Synthetic oligonucleotide
  Antisense strand to SEQ ID NO: 510111
ucaaacccaucacaaucuu

SEQ ID NO: 510113 - RNA, 19 nt, Artificial Sequence
  Description of Artificial Sequence: Synthetic oligonucleotide
  Sense strand starting at position 2977 of SEQ ID NO: 317761
ggacuagccugagcaagau

SEQ ID NO: 510114 - RNA, 19 nt, Artificial Sequence
  Description of Artificial Sequence: Synthetic oligonucleotide
  Antisense strand to SEQ ID NO: 510113
aucuugcucaggcuagucc

SEQ ID NO: 510115 - RNA, 19 nt, Artificial Sequence
  Description of Artificial Sequence: Synthetic oligonucleotide
  Sense strand starting at position 3150 of SEQ ID NO: 317761
uccagucugcaugauagaa

SEQ ID NO: 510116 - RNA, 19 nt, Artificial Sequence
  Description of Artificial Sequence: Synthetic oligonucleotide
  Antisense strand to SEQ ID NO: 510115
uucuaucaugcagacugga

SEQ ID NO: 510117 - RNA, 19 nt, Artificial Sequence
  Description of Artificial Sequence: Synthetic oligonucleotide
  Sense strand starting at position 3302 of SEQ ID NO: 317761
gcacauguggcagagaugu

SEQ ID NO: 510118 - RNA, 19 nt, Artificial Sequence
  Description of Artificial Sequence: Synthetic oligonucleotide
  Antisense strand to SEQ ID NO: 510117
acaucucugccacaugugc

SEQ ID NO: 510119 - RNA, 19 nt, Artificial Sequence
  Description of Artificial Sequence: Synthetic oligonucleotide
  Sense strand starting at position 3304 of SEQ ID NO: 317761
acauguggcagagauguuu

SEQ ID NO: 510120 - RNA, 19 nt, Artificial Sequence
  Description of Artificial Sequence: Synthetic oligonucleotide
  Antisense strand to SEQ ID NO: 510119
aaacaucucugccacaugu

SEQ ID NO: 510121 - RNA, 19 nt, Artificial Sequence
  Description of Artificial Sequence: Synthetic oligonucleotide
  Sense strand starting at position 3441 of SEQ ID NO: 317761
gguagcccuguguuguauu

SEQ ID NO: 510122 - RNA, 19 nt, Artificial Sequence
  Description of Artificial Sequence: Synthetic oligonucleotide
  Antisense strand to SEQ ID NO: 510121
aauacaacacagggcuacc

SEQ ID NO: 510123 - RNA, 19 nt, Artificial Sequence
  Description of Artificial Sequence: Synthetic oligonucleotide
  Sense strand starting at position 3468 of SEQ ID NO: 317761
aguggcuaaauuggucaau

SEQ ID NO: 510124 - RNA, 19 nt, Artificial Sequence
  Description of Artificial Sequence: Synthetic oligonucleotide
  Antisense strand to SEQ ID NO: 510123
auugaccaauuuagccacu

SEQ ID NO: 510125 - RNA, 19 nt, Artificial Sequence
  Description of Artificial Sequence: Synthetic oligonucleotide
  Sense strand starting at position 3470 of SEQ ID NO: 317761
uggcuaaauuggucaaucu

SEQ ID NO: 510126 - RNA, 19 nt, Artificial Sequence
  Description of Artificial Sequence: Synthetic oligonucleotide
  Antisense strand to SEQ ID NO: 510125
agauugaccaauuuagcca

SEQ ID NO: 510127 - RNA, 19 nt, Artificial Sequence
  Description of Artificial Sequence: Synthetic oligonucleotide
  Sense strand starting at position 3471 of SEQ ID NO: 317761
ggcuaaauuggucaaucuc

SEQ ID NO: 510128 - RNA, 19 nt, Artificial Sequence
  Description of Artificial Sequence: Synthetic oligonucleotide
  Antisense strand to SEQ ID NO: 510127
gagauugaccaauuuagcc

SEQ ID NO: 510129 - RNA, 19 nt, Artificial Sequence
  Description of Artificial Sequence: Synthetic oligonucleotide
  Sense strand starting at position 3498 of SEQ ID NO: 317761
caaaguucuugggcuguaa

SEQ ID NO: 510130 - RNA, 19 nt, Artificial Sequence
  Description of Artificial Sequence: Synthetic oligonucleotide
  Antisense strand to SEQ ID NO: 510129
uuacagcccaagaacuuug

SEQ ID NO: 510131 - RNA, 19 nt, Artificial Sequence
  Description of Artificial Sequence: Synthetic oligonucleotide
  Sense strand starting at position 3500 of SEQ ID NO: 317761
aaguucuugggcuguaaga

SEQ ID NO: 510132 - RNA, 19 nt, Artificial Sequence
  Description of Artificial Sequence: Synthetic oligonucleotide
  Antisense strand to SEQ ID NO: 510131
ucuuacagcccaagaacuu

SEQ ID NO: 510133 - RNA, 19 nt, Artificial Sequence
  Description of Artificial Sequence: Synthetic oligonucleotide
  Sense strand starting at position 3502 of SEQ ID NO: 317761
guucuugggcuguaagaaa

SEQ ID NO: 510134 - RNA, 19 nt, Artificial Sequence
  Description of Artificial Sequence: Synthetic oligonucleotide
  Antisense strand to SEQ ID NO: 510133
uuucuuacagcccaagaac

SEQ ID NO: 510135 - RNA, 19 nt, Artificial Sequence
  Description of Artificial Sequence: Synthetic oligonucleotide
  Sense strand starting at position 3555 of SEQ ID NO: 317761
gguauucuacaacaaguau

SEQ ID NO: 510136 - RNA, 19 nt, Artificial Sequence
  Description of Artificial Sequence: Synthetic oligonucleotide
  Antisense strand to SEQ ID NO: 510135
auacuuguuguagaauacc

SEQ ID NO: 510137 - RNA, 19 nt, Artificial Sequence
  Description of Artificial Sequence: Synthetic oligonucleotide
  Sense strand starting at position 3597 of SEQ ID NO: 317761
auacuuugugggcaaccaa

SEQ ID NO: 510138 - RNA, 19 nt, Artificial Sequence
  Description of Artificial Sequence: Synthetic oligonucleotide
  Antisense strand to SEQ ID NO: 510137
uugguugcccacaaaguau

SEQ ID NO: 510139 - RNA, 19 nt, Artificial Sequence
  Description of Artificial Sequence: Synthetic oligonucleotide
  Sense strand starting at position 3688 of SEQ ID NO: 317761
gaaucacugugauuaaugu

SEQ ID NO: 510140 - RNA, 19 nt, Artificial Sequence
  Description of Artificial Sequence: Synthetic oligonucleotide
  Antisense strand to SEQ ID NO: 510139
acauuaaucacagugauuc

SEQ ID NO: 510141 - RNA, 19 nt, Artificial Sequence
  Description of Artificial Sequence: Synthetic oligonucleotide
  Sense strand starting at position 3745 of SEQ ID NO: 317761
cauuguuucccucagggau

SEQ ID NO: 510142 - RNA, 19 nt, Artificial Sequence
  Description of Artificial Sequence: Synthetic oligonucleotide
  Antisense strand to SEQ ID NO: 510141
aucccugagggaaacaaug

SEQ ID NO: 510143 - RNA, 19 nt, Artificial Sequence
  Description of Artificial Sequence: Synthetic oligonucleotide
  Sense strand starting at position 3759 of SEQ ID NO: 317761
gggaucagcuccuccuaua

SEQ ID NO: 510144 - RNA, 19 nt, Artificial Sequence
  Description of Artificial Sequence: Synthetic oligonucleotide
  Antisense strand to SEQ ID NO: 510143
uauaggaggagcugauccc

SEQ ID NO: 510145 - RNA, 19 nt, Artificial Sequence
  Description of Artificial Sequence: Synthetic oligonucleotide
  Sense strand starting at position 83 of SEQ ID NO: 317762
cgagaugugaucggcccaa

SEQ ID NO: 510146 - RNA, 19 nt, Artificial Sequence
  Description of Artificial Sequence: Synthetic oligonucleotide
  Antisense strand to SEQ ID NO: 510145
uugggccgaucacaucucg

SEQ ID NO: 510147 - RNA, 19 nt, Artificial Sequence
  Description of Artificial Sequence: Synthetic oligonucleotide
  Sense strand starting at position 251 of SEQ ID NO: 317762
cccggauguccagaaugau

SEQ ID NO: 510148 - RNA, 19 nt, Artificial Sequence
  Description of Artificial Sequence: Synthetic oligonucleotide
  Antisense strand to SEQ ID NO: 510147
aucauucuggacauccggg

SEQ ID NO: 510149 - RNA, 19 nt, Artificial Sequence
  Description of Artificial Sequence: Synthetic oligonucleotide
  Sense strand starting at position 364 of SEQ ID NO: 317762
ugucuuagcccugcagcua

SEQ ID NO: 510150 - RNA, 19 nt, Artificial Sequence
  Description of Artificial Sequence: Synthetic oligonucleotide
  Antisense strand to SEQ ID NO: 510149
uagcugcagggcuaagaca

SEQ ID NO: 510151 - RNA, 19 nt, Artificial Sequence
  Description of Artificial Sequence: Synthetic oligonucleotide
  Sense strand starting at position 446 of SEQ ID NO: 317762
gcagcagucucaccuaaac

SEQ ID NO: 510152 - RNA, 19 nt, Artificial Sequence
  Description of Artificial Sequence: Synthetic oligonucleotide
  Antisense strand to SEQ ID NO: 510151
guuuaggugagacugcugc

SEQ ID NO: 510153 - RNA, 19 nt, Artificial Sequence
  Description of Artificial Sequence: Synthetic oligonucleotide
  Sense strand starting at position 486 of SEQ ID NO: 317762
aggaucaggcccugggaua

SEQ ID NO: 510154 - RNA, 19 nt, Artificial Sequence
  Description of Artificial Sequence: Synthetic oligonucleotide
  Antisense strand to SEQ ID NO: 510153
uaucccagggccugauccu

SEQ ID NO: 510155 - RNA, 19 nt, Artificial Sequence
  Description of Artificial Sequence: Synthetic oligonucleotide
  Sense strand starting at position 646 of SEQ ID NO: 317762
ggagaacuucuaggcagag

SEQ ID NO: 510156 - RNA, 19 nt, Artificial Sequence
  Description of Artificial Sequence: Synthetic oligonucleotide
  Antisense strand to SEQ ID NO: 510155
cucugccuagaaguucucc

SEQ ID NO: 510157 - RNA, 19 nt, Artificial Sequence
  Description of Artificial Sequence: Synthetic oligonucleotide
  Sense strand starting at position 1179 of SEQ ID NO: 317762
aggauuggugcugggaaga

SEQ ID NO: 510158 - RNA, 19 nt, Artificial Sequence
  Description of Artificial Sequence: Synthetic oligonucleotide
  Antisense strand to SEQ ID NO: 510157
ucuucccagcaccaauccu

SEQ ID NO: 510159 - RNA, 19 nt, Artificial Sequence
  Description of Artificial Sequence: Synthetic oligonucleotide
  Sense strand starting at position 1337 of SEQ ID NO: 317762
aaagcaaucugggaggaua

SEQ ID NO: 510160 - RNA, 19 nt, Artificial Sequence
  Description of Artificial Sequence: Synthetic oligonucleotide
  Antisense strand to SEQ ID NO: 510159
uauccucccagauugcuuu

SEQ ID NO: 510161 - RNA, 19 nt, Artificial Sequence
  Description of Artificial Sequence: Synthetic oligonucleotide
  Sense strand starting at position 1351 of SEQ ID NO: 317762
ggauaucuagcauagccaa

SEQ ID NO: 510162 - RNA, 19 nt, Artificial Sequence
  Description of Artificial Sequence: Synthetic oligonucleotide
  Antisense strand to SEQ ID NO: 510161
uuggcuaugcuagauaucc

SEQ ID NO: 510163 - RNA, 19 nt, Artificial Sequence
  Description of Artificial Sequence: Synthetic oligonucleotide
  Sense strand starting at position 1391 of SEQ ID NO: 317762
ucagucauuugauagacuu

SEQ ID NO: 510164 - RNA, 19 nt, Artificial Sequence
  Description of Artificial Sequence: Synthetic oligonucleotide
  Antisense strand to SEQ ID NO: 510163
aagucuaucaaaugacuga

SEQ ID NO: 510165 - RNA, 19 nt, Artificial Sequence
  Description of Artificial Sequence: Synthetic oligonucleotide
  Sense strand starting at position 1488 of SEQ ID NO: 317762
ccuaauccagcuuggaaga

SEQ ID NO: 510166 - RNA, 19 nt, Artificial Sequence
  Description of Artificial Sequence: Synthetic oligonucleotide
  Antisense strand to SEQ ID NO: 510165
ucuuccaagcuggauuagg

SEQ ID NO: 510167 - RNA, 19 nt, Artificial Sequence
  Description of Artificial Sequence: Synthetic oligonucleotide
  Sense strand starting at position 1501 of SEQ ID NO: 317762
ggaagacagaugcguguau

SEQ ID NO: 510168 - RNA, 19 nt, Artificial Sequence
  Description of Artificial Sequence: Synthetic oligonucleotide
  Antisense strand to SEQ ID NO: 510167
auacacgcaucugucuucc

SEQ ID NO: 510169 - RNA, 19 nt, Artificial Sequence
  Description of Artificial Sequence: Synthetic oligonucleotide
  Sense strand starting at position 1502 of SEQ ID NO: 317762
gaagacagaugcguguaua

SEQ ID NO: 510170 - RNA, 19 nt, Artificial Sequence
  Description of Artificial Sequence: Synthetic oligonucleotide
  Antisense strand to SEQ ID NO: 510169
uauacacgcaucugucuuc

SEQ ID NO: 510171 - RNA, 19 nt, Artificial Sequence
  Description of Artificial Sequence: Synthetic oligonucleotide
  Sense strand starting at position 1503 of SEQ ID NO: 317762
aagacagaugcguguauag

SEQ ID NO: 510172 - RNA, 19 nt, Artificial Sequence
  Description of Artificial Sequence: Synthetic oligonucleotide
  Antisense strand to SEQ ID NO: 510171
cuauacacgcaucugucuu

SEQ ID NO: 510173 - RNA, 19 nt, Artificial Sequence
  Description of Artificial Sequence: Synthetic oligonucleotide
  Sense strand starting at position 1505 of SEQ ID NO: 317762
gacagaugcguguauagac

SEQ ID NO: 510174 - RNA, 19 nt, Artificial Sequence
  Description of Artificial Sequence: Synthetic oligonucleotide
  Antisense strand to SEQ ID NO: 510173
gucuauacacgcaucuguc

SEQ ID NO: 510175 - RNA, 19 nt, Artificial Sequence
  Description of Artificial Sequence: Synthetic oligonucleotide
  Sense strand starting at position 1564 of SEQ ID NO: 317762
augggcuagaccuaugcau

SEQ ID NO: 510176 - RNA, 19 nt, Artificial Sequence
  Description of Artificial Sequence: Synthetic oligonucleotide
  Antisense strand to SEQ ID NO: 510175
augcauaggucuagcccau

SEQ ID NO: 510177 - RNA, 19 nt, Artificial Sequence
  Description of Artificial Sequence: Synthetic oligonucleotide
  Sense strand starting at position 1566 of SEQ ID NO: 317762
gggcuagaccuaugcauag

SEQ ID NO: 510178 - RNA, 19 nt, Artificial Sequence
  Description of Artificial Sequence: Synthetic oligonucleotide
  Antisense strand to SEQ ID NO: 510177
cuaugcauaggucuagccc

SEQ ID NO: 510179 - RNA, 19 nt, Artificial Sequence
  Description of Artificial Sequence: Synthetic oligonucleotide
  Sense strand starting at position 1577 of SEQ ID NO: 317762
augcauagggcucaaagua

SEQ ID NO: 510180 - RNA, 19 nt, Artificial Sequence
  Description of Artificial Sequence: Synthetic oligonucleotide
  Antisense strand to SEQ ID NO: 510179
uacuuugagcccuaugcau

SEQ ID NO: 510181 - RNA, 19 nt, Artificial Sequence
  Description of Artificial Sequence: Synthetic oligonucleotide
  Sense strand starting at position 1719 of SEQ ID NO: 317762
ccaguaagugcugauucua

SEQ ID NO: 510182 - RNA, 19 nt, Artificial Sequence
  Description of Artificial Sequence: Synthetic oligonucleotide
  Antisense strand to SEQ ID NO: 510181
uagaaucagcacuuacugg

SEQ ID NO: 510183 - RNA, 19 nt, Artificial Sequence
  Description of Artificial Sequence: Synthetic oligonucleotide
  Sense strand starting at position 1815 of SEQ ID NO: 317762
caggguucccucuguuaug

SEQ ID NO: 510184 - RNA, 19 nt, Artificial Sequence
  Description of Artificial Sequence: Synthetic oligonucleotide
  Antisense strand to SEQ ID NO: 510183
cauaacagagggaacccug

SEQ ID NO: 510185 - RNA, 19 nt, Artificial Sequence
  Description of Artificial Sequence: Synthetic oligonucleotide
  Sense strand starting at position 1824 of SEQ ID NO: 317762
cucuguuaugccuucguua

SEQ ID NO: 510186 - RNA, 19 nt, Artificial Sequence
  Description of Artificial Sequence: Synthetic oligonucleotide
  Antisense strand to SEQ ID NO: 510185
uaacgaaggcauaacagag

SEQ ID NO: 510187 - RNA, 19 nt, Artificial Sequence
  Description of Artificial Sequence: Synthetic oligonucleotide
  Sense strand starting at position 1959 of SEQ ID NO: 317762
gagauuguaucuucucgga

SEQ ID NO: 510188 - RNA, 19 nt, Artificial Sequence
  Description of Artificial Sequence: Synthetic oligonucleotide
  Antisense strand to SEQ ID NO: 510187
uccgagaagauacaaucuc

SEQ ID NO: 510189 - RNA, 19 nt, Artificial Sequence
  Description of Artificial Sequence: Synthetic oligonucleotide
  Sense strand starting at position 1963 of SEQ ID NO: 317762
uuguaucuucucggaggau

SEQ ID NO: 510190 - RNA, 19 nt, Artificial Sequence
  Description of Artificial Sequence: Synthetic oligonucleotide
  Antisense strand to SEQ ID NO: 510189
auccuccgagaagauacaa

SEQ ID NO: 510191 - RNA, 19 nt, Artificial Sequence
  Description of Artificial Sequence: Synthetic oligonucleotide
  Sense strand starting at position 1966 of SEQ ID NO: 317762
uaucuucucggaggauguu

SEQ ID NO: 510192 - RNA, 19 nt, Artificial Sequence
  Description of Artificial Sequence: Synthetic oligonucleotide
  Antisense strand to SEQ ID NO: 510191
aacauccuccgagaagaua

SEQ ID NO: 510193 - RNA, 19 nt, Artificial Sequence
  Description of Artificial Sequence: Synthetic oligonucleotide
  Sense strand starting at position 2009 of SEQ ID NO: 317762
ugugccucaccuggaagau

SEQ ID NO: 510194 - RNA, 19 nt, Artificial Sequence
  Description of Artificial Sequence: Synthetic oligonucleotide
  Antisense strand to SEQ ID NO: 510193
aucuuccaggugaggcaca

SEQ ID NO: 510195 - RNA, 19 nt, Artificial Sequence
  Description of Artificial Sequence: Synthetic oligonucleotide
  Sense strand starting at position 2157 of SEQ ID NO: 317762
ugagcugucagauagacuc

SEQ ID NO: 510196 - RNA, 19 nt, Artificial Sequence
  Description of Artificial Sequence: Synthetic oligonucleotide
  Antisense strand to SEQ ID NO: 510195
gagucuaucugacagcuca

SEQ ID NO: 510197 - RNA, 19 nt, Artificial Sequence
  Description of Artificial Sequence: Synthetic oligonucleotide
  Sense strand starting at position 2200 of SEQ ID NO: 317762
gugcaucauugagcaccua

SEQ ID NO: 510198 - RNA, 19 nt, Artificial Sequence
  Description of Artificial Sequence: Synthetic oligonucleotide
  Antisense strand to SEQ ID NO: 510197
uaggugcucaaugaugcac

SEQ ID NO: 510199 - RNA, 19 nt, Artificial Sequence
  Description of Artificial Sequence: Synthetic oligonucleotide
  Sense strand starting at position 2227 of SEQ ID NO: 317762
uaggaacaguucuagggaa

SEQ ID NO: 510200 - RNA, 19 nt, Artificial Sequence
  Description of Artificial Sequence: Synthetic oligonucleotide
  Antisense strand to SEQ ID NO: 510199
uucccuagaacuguuccua

SEQ ID NO: 510201 - RNA, 19 nt, Artificial Sequence
  Description of Artificial Sequence: Synthetic oligonucleotide
  Sense strand starting at position 2229 of SEQ ID NO: 317762
ggaacaguucuagggaagu

SEQ ID NO: 510202 - RNA, 19 nt, Artificial Sequence
  Description of Artificial Sequence: Synthetic oligonucleotide
  Antisense strand to SEQ ID NO: 510201
acuucccuagaacuguucc

SEQ ID NO: 510203 - RNA, 19 nt, Artificial Sequence
  Description of Artificial Sequence: Synthetic oligonucleotide
  Sense strand starting at position 2235 of SEQ ID NO: 317762
guucuagggaagugaagaa

SEQ ID NO: 510204 - RNA, 19 nt, Artificial Sequence
  Description of Artificial Sequence: Synthetic oligonucleotide
  Antisense strand to SEQ ID NO: 510203
uucuucacuucccuagaac

SEQ ID NO: 510205 - RNA, 19 nt, Artificial Sequence
  Description of Artificial Sequence: Synthetic oligonucleotide
  Sense strand starting at position 2298 of SEQ ID NO: 317762
gagugaucauaagcagagu

SEQ ID NO: 510206 - RNA, 19 nt, Artificial Sequence
  Description of Artificial Sequence: Synthetic oligonucleotide
  Antisense strand to SEQ ID NO: 510205
acucugcuuaugaucacuc

SEQ ID NO: 510207 - RNA, 19 nt, Artificial Sequence
  Description of Artificial Sequence: Synthetic oligonucleotide
  Sense strand starting at position 2352 of SEQ ID NO: 317762
auagucucucaggaagcua

SEQ ID NO: 510208 - RNA, 19 nt, Artificial Sequence
  Description of Artificial Sequence: Synthetic oligonucleotide
  Antisense strand to SEQ ID NO: 510207
uagcuuccugagagacuau

SEQ ID NO: 510209 - RNA, 19 nt, Artificial Sequence
  Description of Artificial Sequence: Synthetic oligonucleotide
  Sense strand starting at position 2376 of SEQ ID NO: 317762
gcgugucaugggucagguu

SEQ ID NO: 510210 - RNA, 19 nt, Artificial Sequence
  Description of Artificial Sequence: Synthetic oligonucleotide
  Antisense strand to SEQ ID NO: 510209
aaccugacccaugacacgc

SEQ ID NO: 510211 - RNA, 19 nt, Artificial Sequence
  Description of Artificial Sequence: Synthetic oligonucleotide
  Sense strand starting at position 2637 of SEQ ID NO: 317762
ucaguuauuggccagggca

SEQ ID NO: 510212 - RNA, 19 nt, Artificial Sequence
  Description of Artificial Sequence: Synthetic oligonucleotide
  Antisense strand to SEQ ID NO: 510211
ugcccuggccaauaacuga

SEQ ID NO: 510213 - RNA, 19 nt, Artificial Sequence
  Description of Artificial Sequence: Synthetic oligonucleotide
  Sense strand starting at position 2744 of SEQ ID NO: 317762
ggaggaagauaauaggaua

SEQ ID NO: 510214 - RNA, 19 nt, Artificial Sequence
  Description of Artificial Sequence: Synthetic oligonucleotide
  Antisense strand to SEQ ID NO: 510213
uauccuauuaucuuccucc

SEQ ID NO: 510215 - RNA, 19 nt, Artificial Sequence
  Description of Artificial Sequence: Synthetic oligonucleotide
  Sense strand starting at position 2747 of SEQ ID NO: 317762
ggaagauaauaggauagau

SEQ ID NO: 510216 - RNA, 19 nt, Artificial Sequence
  Description of Artificial Sequence: Synthetic oligonucleotide
  Antisense strand to SEQ ID NO: 510215
aucuauccuauuaucuucc

SEQ ID NO: 510217 - RNA, 19 nt, Artificial Sequence
  Description of Artificial Sequence: Synthetic oligonucleotide
  Sense strand starting at position 2955 of SEQ ID NO: 317762
uagagacccuguguuuaaa

SEQ ID NO: 510218 - RNA, 19 nt, Artificial Sequence
  Description of Artificial Sequence: Synthetic oligonucleotide
  Antisense strand to SEQ ID NO: 510217
uuuaaacacagggucucua

SEQ ID NO: 510219 - RNA, 19 nt, Artificial Sequence
  Description of Artificial Sequence: Synthetic oligonucleotide
  Sense strand starting at position 3761 of SEQ ID NO: 317762
uucugauacguacagugaa

SEQ ID NO: 510220 - RNA, 19 nt, Artificial Sequence
  Description of Artificial Sequence: Synthetic oligonucleotide
  Antisense strand to SEQ ID NO: 510219
uucacuguacguaucagaa

SEQ ID NO: 510221 - RNA, 19 nt, Artificial Sequence
  Description of Artificial Sequence: Synthetic oligonucleotide
  Sense strand starting at position 3836 of SEQ ID NO: 317762
guaauuuagauguggugcu

SEQ ID NO: 510222 - RNA, 19 nt, Artificial Sequence
  Description of Artificial Sequence: Synthetic oligonucleotide
  Antisense strand to SEQ ID NO: 510221
agcaccacaucuaaauuac

SEQ ID NO: 510223 - RNA, 19 nt, Artificial Sequence
  Description of Artificial Sequence: Synthetic oligonucleotide
  Sense strand starting at position 3856 of SEQ ID NO: 317762
ggugaaggcccuugacauu

SEQ ID NO: 510224 - RNA, 19 nt, Artificial Sequence
  Description of Artificial Sequence: Synthetic oligonucleotide
  Antisense strand to SEQ ID NO: 510223
aaugucaagggccuucacc

SEQ ID NO: 510225 - RNA, 19 nt, Artificial Sequence
  Description of Artificial Sequence: Synthetic oligonucleotide
  Sense strand starting at position 8 of SEQ ID NO: 317763
agguaugugcgugugguau

SEQ ID NO: 510226 - RNA, 19 nt, Artificial Sequence
  Description of Artificial Sequence: Synthetic oligonucleotide
  Antisense strand to SEQ ID NO: 510225
auaccacacgcacauaccu

SEQ ID NO: 510227 - RNA, 19 nt, Artificial Sequence
  Description of Artificial Sequence: Synthetic oligonucleotide
  Sense strand starting at position 164 of SEQ ID NO: 317763
ugagguagauucucaacaa

SEQ ID NO: 510228 - RNA, 19 nt, Artificial Sequence
  Description of Artificial Sequence: Synthetic oligonucleotide
  Antisense strand to SEQ ID NO: 510227
uuguugagaaucuaccuca

SEQ ID NO: 510229 - RNA, 19 nt, Artificial Sequence
  Description of Artificial Sequence: Synthetic oligonucleotide
  Sense strand starting at position 165 of SEQ ID NO: 317763
gagguagauucucaacaau

SEQ ID NO: 510230 - RNA, 19 nt, Artificial Sequence
  Description of Artificial Sequence: Synthetic oligonucleotide
  Antisense strand to SEQ ID NO: 510229
auuguugagaaucuaccuc

SEQ ID NO: 510231 - RNA, 19 nt, Artificial Sequence
  Description of Artificial Sequence: Synthetic oligonucleotide
  Sense strand starting at position 283 of SEQ ID NO: 317763
ggcuguucucuggccugua

SEQ ID NO: 510232 - RNA, 19 nt, Artificial Sequence
  Description of Artificial Sequence: Synthetic oligonucleotide
  Antisense strand to SEQ ID NO: 510231
uacaggccagagaacagcc

SEQ ID NO: 510233 - RNA, 19 nt, Artificial Sequence
  Description of Artificial Sequence: Synthetic oligonucleotide
  Sense strand starting at position 362 of SEQ ID NO: 317763
gucuccaaacauugcuaga

SEQ ID NO: 510234 - RNA, 19 nt, Artificial Sequence
  Description of Artificial Sequence: Synthetic oligonucleotide
  Antisense strand to SEQ ID NO: 510233
ucuagcaauguuuggagac

SEQ ID NO: 510235 - RNA, 19 nt, Artificial Sequence
  Description of Artificial Sequence: Synthetic oligonucleotide
  Sense strand starting at position 645 of SEQ ID NO: 317763
cugagauacuugggacaga

SEQ ID NO: 510236 - RNA, 19 nt, Artificial Sequence
  Description of Artificial Sequence: Synthetic oligonucleotide
  Antisense strand to SEQ ID NO: 510235
ucugucccaaguaucucag

SEQ ID NO: 510237 - RNA, 19 nt, Artificial Sequence
  Description of Artificial Sequence: Synthetic oligonucleotide
  Sense strand starting at position 656 of SEQ ID NO: 317763
gggacagaguuagaauaau

SEQ ID NO: 510238 - RNA, 19 nt, Artificial Sequence
  Description of Artificial Sequence: Synthetic oligonucleotide
  Antisense strand to SEQ ID NO: 510237
auuauucuaacucuguccc

SEQ ID NO: 510239 - RNA, 19 nt, Artificial Sequence
  Description of Artificial Sequence: Synthetic oligonucleotide
  Sense strand starting at position 662 of SEQ ID NO: 317763
gaguuagaauaauaaagag

SEQ ID NO: 510240 - RNA, 19 nt, Artificial Sequence
  Description of Artificial Sequence: Synthetic oligonucleotide
  Antisense strand to SEQ ID NO: 510239
cucuuuauuauucuaacuc

SEQ ID NO: 510241 - RNA, 19 nt, Artificial Sequence
  Description of Artificial Sequence: Synthetic oligonucleotide
  Sense strand starting at position 674 of SEQ ID NO: 317763
uaaagagaauuauagagga

SEQ ID NO: 510242 - RNA, 19 nt, Artificial Sequence
  Description of Artificial Sequence: Synthetic oligonucleotide
  Antisense strand to SEQ ID NO: 510241
uccucuauaauucucuuua

SEQ ID NO: 510243 - RNA, 19 nt, Artificial Sequence
  Description of Artificial Sequence: Synthetic oligonucleotide
  Sense strand starting at position 681 of SEQ ID NO: 317763
aauuauagaggauguguga

SEQ ID NO: 510244 - RNA, 19 nt, Artificial Sequence
  Description of Artificial Sequence: Synthetic oligonucleotide
  Antisense strand to SEQ ID NO: 510243
ucacacauccucuauaauu

SEQ ID NO: 510245 - RNA, 19 nt, Artificial Sequence
  Description of Artificial Sequence: Synthetic oligonucleotide
  Sense strand starting at position 714 of SEQ ID NO: 317763
gguggaauuuccugaaggu

SEQ ID NO: 510246 - RNA, 19 nt, Artificial Sequence
  Description of Artificial Sequence: Synthetic oligonucleotide
  Antisense strand to SEQ ID NO: 510245
accuucaggaaauuccacc

SEQ ID NO: 510247 - RNA, 19 nt, Artificial Sequence
  Description of Artificial Sequence: Synthetic oligonucleotide
  Sense strand starting at position 724 of SEQ ID NO: 317763
ccugaaggucuacgaguaa

SEQ ID NO: 510248 - RNA, 19 nt, Artificial Sequence
  Description of Artificial Sequence: Synthetic oligonucleotide
  Antisense strand to SEQ ID NO: 510247
uuacucguagaccuucagg

SEQ ID NO: 510249 - RNA, 19 nt, Artificial Sequence
  Description of Artificial Sequence: Synthetic oligonucleotide
  Sense strand starting at position 811 of SEQ ID NO: 317763
gguuuauauugauccacaa

SEQ ID NO: 510250 - RNA, 19 nt, Artificial Sequence
  Description of Artificial Sequence: Synthetic oligonucleotide
  Antisense strand to SEQ ID NO: 510249
uuguggaucaauauaaacc

SEQ ID NO: 510251 - RNA, 19 nt, Artificial Sequence
  Description of Artificial Sequence: Synthetic oligonucleotide
  Sense strand starting at position 1108 of SEQ ID NO: 317763
uggaaagucucgcugagcu

SEQ ID NO: 510252 - RNA, 19 nt, Artificial Sequence
  Description of Artificial Sequence: Synthetic oligonucleotide
  Antisense strand to SEQ ID NO: 510251
agcucagcgagacuuucca

SEQ ID NO: 510253 - RNA, 19 nt, Artificial Sequence
  Description of Artificial Sequence: Synthetic oligonucleotide
  Sense strand starting at position 1110 of SEQ ID NO: 317763
gaaagucucgcugagcuga

SEQ ID NO: 510254 - RNA, 19 nt, Artificial Sequence
  Description of Artificial Sequence: Synthetic oligonucleotide
  Antisense strand to SEQ ID NO: 510253
ucagcucagcgagacuuuc

SEQ ID NO: 510255 - RNA, 19 nt, Artificial Sequence
  Description of Artificial Sequence: Synthetic oligonucleotide
  Sense strand starting at position 1112 of SEQ ID NO: 317763
aagucucgcugagcugaua

SEQ ID NO: 510256 - RNA, 19 nt, Artificial Sequence
  Description of Artificial Sequence: Synthetic oligonucleotide
  Antisense strand to SEQ ID NO: 510255
uaucagcucagcgagacuu

SEQ ID NO: 510257 - RNA, 19 nt, Artificial Sequence
  Description of Artificial Sequence: Synthetic oligonucleotide
  Sense strand starting at position 1268 of SEQ ID NO: 317763
accaauuacugagcacaga

SEQ ID NO: 510258 - RNA, 19 nt, Artificial Sequence
  Description of Artificial Sequence: Synthetic oligonucleotide
  Antisense strand to SEQ ID NO: 510257
ucugugcucaguaauuggu

SEQ ID NO: 510259 - RNA, 19 nt, Artificial Sequence
  Description of Artificial Sequence: Synthetic oligonucleotide
  Sense strand starting at position 1323 of SEQ ID NO: 317763
cagacauaacguuagucca

SEQ ID NO: 510260 - RNA, 19 nt, Artificial Sequence
  Description of Artificial Sequence: Synthetic oligonucleotide
  Antisense strand to SEQ ID NO: 510259
uggacuaacguuaugucug

SEQ ID NO: 510261 - RNA, 19 nt, Artificial Sequence
  Description of Artificial Sequence: Synthetic oligonucleotide
  Sense strand starting at position 1325 of SEQ ID NO: 317763
gacauaacguuaguccaaa

SEQ ID NO: 510262 - RNA, 19 nt, Artificial Sequence
  Description of Artificial Sequence: Synthetic oligonucleotide
  Antisense strand to SEQ ID NO: 510261
uuuggacuaacguuauguc

SEQ ID NO: 510263 - RNA, 19 nt, Artificial Sequence
  Description of Artificial Sequence: Synthetic oligonucleotide
  Sense strand starting at position 1388 of SEQ ID NO: 317763
gugagucgccgacagcaua

SEQ ID NO: 510264 - RNA, 19 nt, Artificial Sequence
  Description of Artificial Sequence: Synthetic oligonucleotide
  Antisense strand to SEQ ID NO: 510263
uaugcugucggcgacucac

SEQ ID NO: 510265 - RNA, 19 nt, Artificial Sequence
  Description of Artificial Sequence: Synthetic oligonucleotide
  Sense strand starting at position 1646 of SEQ ID NO: 317763
cucgguucucccggauuua

SEQ ID NO: 510266 - RNA, 19 nt, Artificial Sequence
  Description of Artificial Sequence: Synthetic oligonucleotide
  Antisense strand to SEQ ID NO: 510265
uaaauccgggagaaccgag

SEQ ID NO: 510267 - RNA, 19 nt, Artificial Sequence
  Description of Artificial Sequence: Synthetic oligonucleotide
  Sense strand starting at position 2164 of SEQ ID NO: 317763
cccugucgcggguuuauau

SEQ ID NO: 510268 - RNA, 19 nt, Artificial Sequence
  Description of Artificial Sequence: Synthetic oligonucleotide
  Antisense strand to SEQ ID NO: 510267
auauaaacccgcgacaggg

SEQ ID NO: 510269 - RNA, 19 nt, Artificial Sequence
  Description of Artificial Sequence: Synthetic oligonucleotide
  Sense strand starting at position 2165 of SEQ ID NO: 317763
ccugucgcggguuuauaua

SEQ ID NO: 510270 - RNA, 19 nt, Artificial Sequence
  Description of Artificial Sequence: Synthetic oligonucleotide
  Antisense strand to SEQ ID NO: 510269
uauauaaacccgcgacagg

SEQ ID NO: 510271 - RNA, 19 nt, Artificial Sequence
  Description of Artificial Sequence: Synthetic oligonucleotide
  Sense strand starting at position 2243 of SEQ ID NO: 317763
ugucuuacaucguccuuaa

SEQ ID NO: 510272 - RNA, 19 nt, Artificial Sequence
  Description of Artificial Sequence: Synthetic oligonucleotide
  Antisense strand to SEQ ID NO: 510271
uuaaggacgauguaagaca

SEQ ID NO: 510273 - RNA, 19 nt, Artificial Sequence
  Description of Artificial Sequence: Synthetic oligonucleotide
  Sense strand starting at position 2269 of SEQ ID NO: 317763
ucguguuauagucaauaua

SEQ ID NO: 510274 - RNA, 19 nt, Artificial Sequence
  Description of Artificial Sequence: Synthetic oligonucleotide
  Antisense strand to SEQ ID NO: 510273
uauauugacuauaacacga

SEQ ID NO: 510275 - RNA, 19 nt, Artificial Sequence
  Description of Artificial Sequence: Synthetic oligonucleotide
  Sense strand starting at position 2338 of SEQ ID NO: 317763
ugcugagacugagucuaaa

SEQ ID NO: 510276 - RNA, 19 nt, Artificial Sequence
  Description of Artificial Sequence: Synthetic oligonucleotide
  Antisense strand to SEQ ID NO: 510275
uuuagacucagucucagca

SEQ ID NO: 510277 - RNA, 19 nt, Artificial Sequence
  Description of Artificial Sequence: Synthetic oligonucleotide
  Sense strand starting at position 2465 of SEQ ID NO: 317763
guuacauuccuaggacuug

SEQ ID NO: 510278 - RNA, 19 nt, Artificial Sequence
  Description of Artificial Sequence: Synthetic oligonucleotide
  Antisense strand to SEQ ID NO: 510277
caaguccuaggaauguaac

SEQ ID NO: 510279 - RNA, 19 nt, Artificial Sequence
  Description of Artificial Sequence: Synthetic oligonucleotide
  Sense strand starting at position 2471 of SEQ ID NO: 317763
uuccuaggacuuggucaau

SEQ ID NO: 510280 - RNA, 19 nt, Artificial Sequence
  Description of Artificial Sequence: Synthetic oligonucleotide
  Antisense strand to SEQ ID NO: 510279
auugaccaaguccuaggaa

SEQ ID NO: 510281 - RNA, 19 nt, Artificial Sequence
  Description of Artificial Sequence: Synthetic oligonucleotide
  Sense strand starting at position 2480 of SEQ ID NO: 317763
cuuggucaaugagaagaca

SEQ ID NO: 510282 - RNA, 19 nt, Artificial Sequence
  Description of Artificial Sequence: Synthetic oligonucleotide
  Antisense strand to SEQ ID NO: 510281
ugucuucucauugaccaag

SEQ ID NO: 510283 - RNA, 19 nt, Artificial Sequence
  Description of Artificial Sequence: Synthetic oligonucleotide
  Sense strand starting at position 2508 of SEQ ID NO: 317763
aauacagugcugggaaguu

SEQ ID NO: 510284 - RNA, 19 nt, Artificial Sequence
  Description of Artificial Sequence: Synthetic oligonucleotide
  Antisense strand to SEQ ID NO: 510283
aacuucccagcacuguauu

SEQ ID NO: 510285 - RNA, 19 nt, Artificial Sequence
  Description of Artificial Sequence: Synthetic oligonucleotide
  Sense strand starting at position 2653 of SEQ ID NO: 317763
gcauaugucaggcacuguu

SEQ ID NO: 510286 - RNA, 19 nt, Artificial Sequence
  Description of Artificial Sequence: Synthetic oligonucleotide
  Antisense strand to SEQ ID NO: 510285
aacagugccugacauaugc

SEQ ID NO: 510287 - RNA, 19 nt, Artificial Sequence
  Description of Artificial Sequence: Synthetic oligonucleotide
  Sense strand starting at position 2668 of SEQ ID NO: 317763
uguucuaggccuugggaau

SEQ ID NO: 510288 - RNA, 19 nt, Artificial Sequence
  Description of Artificial Sequence: Synthetic oligonucleotide
  Antisense strand to SEQ ID NO: 510287
auucccaaggccuagaaca

SEQ ID NO: 510289 - RNA, 19 nt, Artificial Sequence
  Description of Artificial Sequence: Synthetic oligonucleotide
  Sense strand starting at position 2669 of SEQ ID NO: 317763
guucuaggccuugggaauu

SEQ ID NO: 510290 - RNA, 19 nt, Artificial Sequence
  Description of Artificial Sequence: Synthetic oligonucleotide
  Antisense strand to SEQ ID NO: 510289
aauucccaaggccuagaac

SEQ ID NO: 510291 - RNA, 19 nt, Artificial Sequence
  Description of Artificial Sequence: Synthetic oligonucleotide
  Sense strand starting at position 2742 of SEQ ID NO: 317763
auagguauuuauugagcaa

SEQ ID NO: 510292 - RNA, 19 nt, Artificial Sequence
  Description of Artificial Sequence: Synthetic oligonucleotide
  Antisense strand to SEQ ID NO: 510291
uugcucaauaaauaccuau

SEQ ID NO: 510293 - RNA, 19 nt, Artificial Sequence
  Description of Artificial Sequence: Synthetic oligonucleotide
  Sense strand starting at position 2766 of SEQ ID NO: 317763
uuaugccagggcuguuaua

SEQ ID NO: 510294 - RNA, 19 nt, Artificial Sequence
  Description of Artificial Sequence: Synthetic oligonucleotide
  Antisense strand to SEQ ID NO: 510293
uauaacagcccuggcauaa

SEQ ID NO: 510295 - RNA, 19 nt, Artificial Sequence
  Description of Artificial Sequence: Synthetic oligonucleotide
  Sense strand starting at position 2898 of SEQ ID NO: 317763
aggguaggauaccuaucua

SEQ ID NO: 510296 - RNA, 19 nt, Artificial Sequence
  Description of Artificial Sequence: Synthetic oligonucleotide
  Antisense strand to SEQ ID NO: 510295
uagauagguauccuacccu

SEQ ID NO: 510297 - RNA, 19 nt, Artificial Sequence
  Description of Artificial Sequence: Synthetic oligonucleotide
  Sense strand starting at position 3067 of SEQ ID NO: 317763
gugaguauaaauugaaguc

SEQ ID NO: 510298 - RNA, 19 nt, Artificial Sequence
  Description of Artificial Sequence: Synthetic oligonucleotide
  Antisense strand to SEQ ID NO: 510297
gacuucaauuuauacucac

SEQ ID NO: 510299 - RNA, 19 nt, Artificial Sequence
  Description of Artificial Sequence: Synthetic oligonucleotide
  Sense strand starting at position 3077 of SEQ ID NO: 317763
auugaagucugagaacuaa

SEQ ID NO: 510300 - RNA, 19 nt, Artificial Sequence
  Description of Artificial Sequence: Synthetic oligonucleotide
  Antisense strand to SEQ ID NO: 510299
uuaguucucagacuucaau

SEQ ID NO: 510301 - RNA, 19 nt, Artificial Sequence
  Description of Artificial Sequence: Synthetic oligonucleotide
  Sense strand starting at position 3862 of SEQ ID NO: 317763
caaagaaaugaugguugca

SEQ ID NO: 510302 - RNA, 19 nt, Artificial Sequence
  Description of Artificial Sequence: Synthetic oligonucleotide
  Antisense strand to SEQ ID NO: 510301
ugcaaccaucauuucuuug

SEQ ID NO: 510303 - RNA, 19 nt, Artificial Sequence
  Description of Artificial Sequence: Synthetic oligonucleotide
  Sense strand starting at position 3864 of SEQ ID NO: 317763
aagaaaugaugguugcauu

SEQ ID NO: 510304 - RNA, 19 nt, Artificial Sequence
  Description of Artificial Sequence: Synthetic oligonucleotide
  Antisense strand to SEQ ID NO: 510303
aaugcaaccaucauuucuu

SEQ ID NO: 510305 - RNA, 19 nt, Artificial Sequence
  Description of Artificial Sequence: Synthetic oligonucleotide
  Sense strand starting at position 57 of SEQ ID NO: 317764
gaacuaguguuccuauaag

SEQ ID NO: 510306 - RNA, 19 nt, Artificial Sequence
  Description of Artificial Sequence: Synthetic oligonucleotide
  Antisense strand to SEQ ID NO: 510305
cuuauaggaacacuaguuc

SEQ ID NO: 510307 - RNA, 19 nt, Artificial Sequence
  Description of Artificial Sequence: Synthetic oligonucleotide
  Sense strand starting at position 195 of SEQ ID NO: 317764
agggcaacuugaucuugaa

SEQ ID NO: 510308 - RNA, 19 nt, Artificial Sequence
  Description of Artificial Sequence: Synthetic oligonucleotide
  Antisense strand to SEQ ID NO: 510307
uucaagaucaaguugcccu

SEQ ID NO: 510309 - RNA, 19 nt, Artificial Sequence
  Description of Artificial Sequence: Synthetic oligonucleotide
  Sense strand starting at position 260 of SEQ ID NO: 317764
ccaccaagucuguagcauu

SEQ ID NO: 510310 - RNA, 19 nt, Artificial Sequence
  Description of Artificial Sequence: Synthetic oligonucleotide
  Antisense strand to SEQ ID NO: 510309
aaugcuacagacuuggugg

SEQ ID NO: 510311 - RNA, 19 nt, Artificial Sequence
  Description of Artificial Sequence: Synthetic oligonucleotide
  Sense strand starting at position 300 of SEQ ID NO: 317764
acaggaacuuuagauauuu

SEQ ID NO: 510312 - RNA, 19 nt, Artificial Sequence
  Description of Artificial Sequence: Synthetic oligonucleotide
  Antisense strand to SEQ ID NO: 510311
aaauaucuaaaguuccugu

SEQ ID NO: 510313 - RNA, 19 nt, Artificial Sequence
  Description of Artificial Sequence: Synthetic oligonucleotide
  Sense strand starting at position 320 of SEQ ID NO: 317764
gguagacaucucuaguauc

SEQ ID NO: 510314 - RNA, 19 nt, Artificial Sequence
  Description of Artificial Sequence: Synthetic oligonucleotide
  Antisense strand to SEQ ID NO: 510313
gauacuagagaugucuacc

SEQ ID NO: 510315 - RNA, 19 nt, Artificial Sequence
  Description of Artificial Sequence: Synthetic oligonucleotide
  Sense strand starting at position 394 of SEQ ID NO: 317764
guguuaaagucaguaggaa

SEQ ID NO: 510316 - RNA, 19 nt, Artificial Sequence
  Description of Artificial Sequence: Synthetic oligonucleotide
  Antisense strand to SEQ ID NO: 510315
uuccuacugacuuuaacac

SEQ ID NO: 510317 - RNA, 19 nt, Artificial Sequence
  Description of Artificial Sequence: Synthetic oligonucleotide
  Sense strand starting at position 395 of SEQ ID NO: 317764
uguuaaagucaguaggaau

SEQ ID NO: 510318 - RNA, 19 nt, Artificial Sequence
  Description of Artificial Sequence: Synthetic oligonucleotide
  Antisense strand to SEQ ID NO: 510317
auuccuacugacuuuaaca

SEQ ID NO: 510319 - RNA, 19 nt, Artificial Sequence
  Description of Artificial Sequence: Synthetic oligonucleotide
  Sense strand starting at position 451 of SEQ ID NO: 317764
gguguuaggcuguagaauu

SEQ ID NO: 510320 - RNA, 19 nt, Artificial Sequence
  Description of Artificial Sequence: Synthetic oligonucleotide
  Antisense strand to SEQ ID NO: 510319
aauucuacagccuaacacc

SEQ ID NO: 510321 - RNA, 19 nt, Artificial Sequence
  Description of Artificial Sequence: Synthetic oligonucleotide
  Sense strand starting at position 458 of SEQ ID NO: 317764
ggcuguagaauuugugugu

SEQ ID NO: 510322 - RNA, 19 nt, Artificial Sequence
  Description of Artificial Sequence: Synthetic oligonucleotide
  Antisense strand to SEQ ID NO: 510321
acacacaaauucuacagcc

SEQ ID NO: 510323 - RNA, 19 nt, Artificial Sequence
  Description of Artificial Sequence: Synthetic oligonucleotide
  Sense strand starting at position 459 of SEQ ID NO: 317764
gcuguagaauuugugugua

SEQ ID NO: 510324 - RNA, 19 nt, Artificial Sequence
  Description of Artificial Sequence: Synthetic oligonucleotide
  Antisense strand to SEQ ID NO: 510323
uacacacaaauucuacagc

SEQ ID NO: 510325 - RNA, 19 nt, Artificial Sequence
  Description of Artificial Sequence: Synthetic oligonucleotide
  Sense strand starting at position 461 of SEQ ID NO: 317764
uguagaauuuguguguaua

SEQ ID NO: 510326 - RNA, 19 nt, Artificial Sequence
  Description of Artificial Sequence: Synthetic oligonucleotide
  Antisense strand to SEQ ID NO: 510325
uauacacacaaauucuaca

SEQ ID NO: 510327 - RNA, 19 nt, Artificial Sequence
  Description of Artificial Sequence: Synthetic oligonucleotide
  Sense strand starting at position 462 of SEQ ID NO: 317764
guagaauuuguguguauag

SEQ ID NO: 510328 - RNA, 19 nt, Artificial Sequence
  Description of Artificial Sequence: Synthetic oligonucleotide
  Antisense strand to SEQ ID NO: 510327
cuauacacacaaauucuac

SEQ ID NO: 510329 - RNA, 19 nt, Artificial Sequence
  Description of Artificial Sequence: Synthetic oligonucleotide
  Sense strand starting at position 479 of SEQ ID NO: 317764
agguaugugcgugugguau

SEQ ID NO: 510330 - RNA, 19 nt, Artificial Sequence
  Description of Artificial Sequence: Synthetic oligonucleotide
  Antisense strand to SEQ ID NO: 510329
auaccacacgcacauaccu

SEQ ID NO: 510331 - RNA, 19 nt, Artificial Sequence
  Description of Artificial Sequence: Synthetic oligonucleotide
  Sense strand starting at position 635 of SEQ ID NO: 317764
ugagguagauucucaacaa

SEQ ID NO: 510332 - RNA, 19 nt, Artificial Sequence
  Description of Artificial Sequence: Synthetic oligonucleotide
  Antisense strand to SEQ ID NO: 510331
uuguugagaaucuaccuca

SEQ ID NO: 510333 - RNA, 19 nt, Artificial Sequence
  Description of Artificial Sequence: Synthetic oligonucleotide
  Sense strand starting at position 754 of SEQ ID NO: 317764
ggcuguucucuggccugua

SEQ ID NO: 510334 - RNA, 19 nt, Artificial Sequence
  Description of Artificial Sequence: Synthetic oligonucleotide
  Antisense strand to SEQ ID NO: 510333
uacaggccagagaacagcc

SEQ ID NO: 510335 - RNA, 19 nt, Artificial Sequence
  Description of Artificial Sequence: Synthetic oligonucleotide
  Sense strand starting at position 833 of SEQ ID NO: 317764
gucuccaaacauugcuaga

SEQ ID NO: 510336 - RNA, 19 nt, Artificial Sequence
  Description of Artificial Sequence: Synthetic oligonucleotide
  Antisense strand to SEQ ID NO: 510335
ucuagcaauguuuggagac

SEQ ID NO: 510337 - RNA, 19 nt, Artificial Sequence
  Description of Artificial Sequence: Synthetic oligonucleotide
  Sense strand starting at position 1127 of SEQ ID NO: 317764
gggacagaguuagaauaau

SEQ ID NO: 510338 - RNA, 19 nt, Artificial Sequence
  Description of Artificial Sequence: Synthetic oligonucleotide
  Antisense strand to SEQ ID NO: 510337
auuauucuaacucuguccc

SEQ ID NO: 510339 - RNA, 19 nt, Artificial Sequence
  Description of Artificial Sequence: Synthetic oligonucleotide
  Sense strand starting at position 1133 of SEQ ID NO: 317764
gaguuagaauaauaaagag

SEQ ID NO: 510340 - RNA, 19 nt, Artificial Sequence
  Description of Artificial Sequence: Synthetic oligonucleotide
  Antisense strand to SEQ ID NO: 510339
cucuuuauuauucuaacuc

SEQ ID NO: 510341 - RNA, 19 nt, Artificial Sequence
  Description of Artificial Sequence: Synthetic oligonucleotide
  Sense strand starting at position 1145 of SEQ ID NO: 317764
uaaagagaauuauagagga

SEQ ID NO: 510342 - RNA, 19 nt, Artificial Sequence
  Description of Artificial Sequence: Synthetic oligonucleotide
  Antisense strand to SEQ ID NO: 510341
uccucuauaauucucuuua

SEQ ID NO: 510343 - RNA, 19 nt, Artificial Sequence
  Description of Artificial Sequence: Synthetic oligonucleotide
  Sense strand starting at position 1152 of SEQ ID NO: 317764
aauuauagaggauguguga

SEQ ID NO: 510344 - RNA, 19 nt, Artificial Sequence
  Description of Artificial Sequence: Synthetic oligonucleotide
  Antisense strand to SEQ ID NO: 510343
ucacacauccucuauaauu

SEQ ID NO: 510345 - RNA, 19 nt, Artificial Sequence
  Description of Artificial Sequence: Synthetic oligonucleotide
  Sense strand starting at position 1195 of SEQ ID NO: 317764
ccugaaggucuacgaguaa

SEQ ID NO: 510346 - RNA, 19 nt, Artificial Sequence
  Description of Artificial Sequence: Synthetic oligonucleotide
  Antisense strand to SEQ ID NO: 510345
uuacucguagaccuucagg

SEQ ID NO: 510347 - RNA, 19 nt, Artificial Sequence
  Description of Artificial Sequence: Synthetic oligonucleotide
  Sense strand starting at position 1282 of SEQ ID NO: 317764
gguuuauauugauccacaa

SEQ ID NO: 510348 - RNA, 19 nt, Artificial Sequence
  Description of Artificial Sequence: Synthetic oligonucleotide
  Antisense strand to SEQ ID NO: 510347
uuguggaucaauauaaacc

SEQ ID NO: 510349 - RNA, 19 nt, Artificial Sequence
  Description of Artificial Sequence: Synthetic oligonucleotide
  Sense strand starting at position 1581 of SEQ ID NO: 317764
gaaagucucgcugagcuga

SEQ ID NO: 510350 - RNA, 19 nt, Artificial Sequence
  Description of Artificial Sequence: Synthetic oligonucleotide
  Antisense strand to SEQ ID NO: 510349
ucagcucagcgagacuuuc

SEQ ID NO: 510351 - RNA, 19 nt, Artificial Sequence
  Description of Artificial Sequence: Synthetic oligonucleotide
  Sense strand starting at position 1739 of SEQ ID NO: 317764
accaauuacugagcacaga

SEQ ID NO: 510352 - RNA, 19 nt, Artificial Sequence
  Description of Artificial Sequence: Synthetic oligonucleotide
  Antisense strand to SEQ ID NO: 510351
ucugugcucaguaauuggu

SEQ ID NO: 510353 - RNA, 19 nt, Artificial Sequence
  Description of Artificial Sequence: Synthetic oligonucleotide
  Sense strand starting at position 1794 of SEQ ID NO: 317764
cagacauaacguuagucca

SEQ ID NO: 510354 - RNA, 19 nt, Artificial Sequence
  Description of Artificial Sequence: Synthetic oligonucleotide
  Antisense strand to SEQ ID NO: 510353
uggacuaacguuaugucug

SEQ ID NO: 510355 - RNA, 19 nt, Artificial Sequence
  Description of Artificial Sequence: Synthetic oligonucleotide
  Sense strand starting at position 1796 of SEQ ID NO: 317764
gacauaacguuaguccaaa

SEQ ID NO: 510356 - RNA, 19 nt, Artificial Sequence
  Description of Artificial Sequence: Synthetic oligonucleotide
  Antisense strand to SEQ ID NO: 510355
uuuggacuaacguuauguc

SEQ ID NO: 510357 - RNA, 19 nt, Artificial Sequence
  Description of Artificial Sequence: Synthetic oligonucleotide
  Sense strand starting at position 2117 of SEQ ID NO: 317764
cucgguucucccggauuua

SEQ ID NO: 510358 - RNA, 19 nt, Artificial Sequence
  Description of Artificial Sequence: Synthetic oligonucleotide
  Antisense strand to SEQ ID NO: 510357
uaaauccgggagaaccgag

SEQ ID NO: 510359 - RNA, 19 nt, Artificial Sequence
  Description of Artificial Sequence: Synthetic oligonucleotide
  Sense strand starting at position 2635 of SEQ ID NO: 317764
cccugucgcggguuuauau

SEQ ID NO: 510360 - RNA, 19 nt, Artificial Sequence
  Description of Artificial Sequence: Synthetic oligonucleotide
  Antisense strand to SEQ ID NO: 510359
auauaaacccgcgacaggg

SEQ ID NO: 510361 - RNA, 19 nt, Artificial Sequence
  Description of Artificial Sequence: Synthetic oligonucleotide
  Sense strand starting at position 2636 of SEQ ID NO: 317764
ccugucgcggguuuauaua

SEQ ID NO: 510362 - RNA, 19 nt, Artificial Sequence
  Description of Artificial Sequence: Synthetic oligonucleotide
  Antisense strand to SEQ ID NO: 510361
uauauaaacccgcgacagg

SEQ ID NO: 510363 - RNA, 19 nt, Artificial Sequence
  Description of Artificial Sequence: Synthetic oligonucleotide
  Sense strand starting at position 2740 of SEQ ID NO: 317764
ucguguuauagucaauaua

SEQ ID NO: 510364 - RNA, 19 nt, Artificial Sequence
  Description of Artificial Sequence: Synthetic oligonucleotide
  Antisense strand to SEQ ID NO: 510363
uauauugacuauaacacga

SEQ ID NO: 510365 - RNA, 19 nt, Artificial Sequence
  Description of Artificial Sequence: Synthetic oligonucleotide
  Sense strand starting at position 2809 of SEQ ID NO: 317764
ugcugagacugagucuaaa

SEQ ID NO: 510366 - RNA, 19 nt, Artificial Sequence
  Description of Artificial Sequence: Synthetic oligonucleotide
  Antisense strand to SEQ ID NO: 510365
uuuagacucagucucagca

SEQ ID NO: 510367 - RNA, 19 nt, Artificial Sequence
  Description of Artificial Sequence: Synthetic oligonucleotide
  Sense strand starting at position 2936 of SEQ ID NO: 317764
guuacauuccuaggacuug

SEQ ID NO: 510368 - RNA, 19 nt, Artificial Sequence
  Description of Artificial Sequence: Synthetic oligonucleotide
  Antisense strand to SEQ ID NO: 510367
caaguccuaggaauguaac

SEQ ID NO: 510369 - RNA, 19 nt, Artificial Sequence
  Description of Artificial Sequence: Synthetic oligonucleotide
  Sense strand starting at position 2942 of SEQ ID NO: 317764
uuccuaggacuuggucaau

SEQ ID NO: 510370 - RNA, 19 nt, Artificial Sequence
  Description of Artificial Sequence: Synthetic oligonucleotide
  Antisense strand to SEQ ID NO: 510369
auugaccaaguccuaggaa

SEQ ID NO: 510371 - RNA, 19 nt, Artificial Sequence
  Description of Artificial Sequence: Synthetic oligonucleotide
  Sense strand starting at position 2979 of SEQ ID NO: 317764
aauacagugcugggaaguu

SEQ ID NO: 510372 - RNA, 19 nt, Artificial Sequence
  Description of Artificial Sequence: Synthetic oligonucleotide
  Antisense strand to SEQ ID NO: 510371
aacuucccagcacuguauu

SEQ ID NO: 510373 - RNA, 19 nt, Artificial Sequence
  Description of Artificial Sequence: Synthetic oligonucleotide
  Sense strand starting at position 3124 of SEQ ID NO: 317764
gcauaugucaggcacuguu

SEQ ID NO: 510374 - RNA, 19 nt, Artificial Sequence
  Description of Artificial Sequence: Synthetic oligonucleotide
  Antisense strand to SEQ ID NO: 510373
aacagugccugacauaugc

SEQ ID NO: 510375 - RNA, 19 nt, Artificial Sequence
  Description of Artificial Sequence: Synthetic oligonucleotide
  Sense strand starting at position 3139 of SEQ ID NO: 317764
uguucuaggccuugggaau

SEQ ID NO: 510376 - RNA, 19 nt, Artificial Sequence
  Description of Artificial Sequence: Synthetic oligonucleotide
  Antisense strand to SEQ ID NO: 510375
auucccaaggccuagaaca

SEQ ID NO: 510377 - RNA, 19 nt, Artificial Sequence
  Description of Artificial Sequence: Synthetic oligonucleotide
  Sense strand starting at position 3140 of SEQ ID NO: 317764
guucuaggccuugggaauu

SEQ ID NO: 510378 - RNA, 19 nt, Artificial Sequence
  Description of Artificial Sequence: Synthetic oligonucleotide
  Antisense strand to SEQ ID NO: 510377
aauucccaaggccuagaac

SEQ ID NO: 510379 - RNA, 19 nt, Artificial Sequence
  Description of Artificial Sequence: Synthetic oligonucleotide
  Sense strand starting at position 3369 of SEQ ID NO: 317764
aggguaggauaccuaucua

SEQ ID NO: 510380 - RNA, 19 nt, Artificial Sequence
  Description of Artificial Sequence: Synthetic oligonucleotide
  Antisense strand to SEQ ID NO: 510379
uagauagguauccuacccu

SEQ ID NO: 510381 - RNA, 19 nt, Artificial Sequence
  Description of Artificial Sequence: Synthetic oligonucleotide
  Sense strand starting at position 3538 of SEQ ID NO: 317764
gugaguauaaauugaaguc

SEQ ID NO: 510382 - RNA, 19 nt, Artificial Sequence
  Description of Artificial Sequence: Synthetic oligonucleotide
  Antisense strand to SEQ ID NO: 510381
gacuucaauuuauacucac

SEQ ID NO: 510383 - RNA, 19 nt, Artificial Sequence
  Description of Artificial Sequence: Synthetic oligonucleotide
  Sense strand starting at position 3548 of SEQ ID NO: 317764
auugaagucugagaacuaa

SEQ ID NO: 510384 - RNA, 19 nt, Artificial Sequence
  Description of Artificial Sequence: Synthetic oligonucleotide
  Antisense strand to SEQ ID NO: 510383
uuaguucucagacuucaau

SEQ ID NO: 510385 - RNA, 19 nt, Artificial Sequence
  Description of Artificial Sequence: Synthetic oligonucleotide
  Sense strand starting at position 21 of SEQ ID NO: 317765
gguggaacgucucuuuaau

SEQ ID NO: 510386 - RNA, 19 nt, Artificial Sequence
  Description of Artificial Sequence: Synthetic oligonucleotide
  Antisense strand to SEQ ID NO: 510385
auuaaagagacguuccacc

SEQ ID NO: 510387 - RNA, 19 nt, Artificial Sequence
  Description of Artificial Sequence: Synthetic oligonucleotide
  Sense strand starting at position 23 of SEQ ID NO: 317765
uggaacgucucuuuaauuc

SEQ ID NO: 510388 - RNA, 19 nt, Artificial Sequence
  Description of Artificial Sequence: Synthetic oligonucleotide
  Antisense strand to SEQ ID NO: 510387
gaauuaaagagacguucca

SEQ ID NO: 510389 - RNA, 19 nt, Artificial Sequence
  Description of Artificial Sequence: Synthetic oligonucleotide
  Sense strand starting at position 46 of SEQ ID NO: 317765
aggcuagccugauaauuuc

SEQ ID NO: 510390 - RNA, 19 nt, Artificial Sequence
  Description of Artificial Sequence: Synthetic oligonucleotide
  Antisense strand to SEQ ID NO: 510389
gaaauuaucaggcuagccu

SEQ ID NO: 510391 - RNA, 19 nt, Artificial Sequence
  Description of Artificial Sequence: Synthetic oligonucleotide
  Sense strand starting at position 166 of SEQ ID NO: 317765
gcucccauggcauguauaa

SEQ ID NO: 510392 - RNA, 19 nt, Artificial Sequence
  Description of Artificial Sequence: Synthetic oligonucleotide
  Antisense strand to SEQ ID NO: 510391
uuauacaugccaugggagc

SEQ ID NO: 510393 - RNA, 19 nt, Artificial Sequence
  Description of Artificial Sequence: Synthetic oligonucleotide
  Sense strand starting at position 179 of SEQ ID NO: 317765
guauaauuguagucaaugu

SEQ ID NO: 510394 - RNA, 19 nt, Artificial Sequence
  Description of Artificial Sequence: Synthetic oligonucleotide
  Antisense strand to SEQ ID NO: 510393
acauugacuacaauuauac

SEQ ID NO: 510395 - RNA, 19 nt, Artificial Sequence
  Description of Artificial Sequence: Synthetic oligonucleotide
  Sense strand starting at position 445 of SEQ ID NO: 317765
guuccagugagcugagaca

SEQ ID NO: 510396 - RNA, 19 nt, Artificial Sequence
  Description of Artificial Sequence: Synthetic oligonucleotide
  Antisense strand to SEQ ID NO: 510395
ugucucagcucacuggaac

SEQ ID NO: 510397 - RNA, 19 nt, Artificial Sequence
  Description of Artificial Sequence: Synthetic oligonucleotide
  Sense strand starting at position 563 of SEQ ID NO: 317765
cccaguagcggagauuaca

SEQ ID NO: 510398 - RNA, 19 nt, Artificial Sequence
  Description of Artificial Sequence: Synthetic oligonucleotide
  Antisense strand to SEQ ID NO: 510397
uguaaucuccgcuacuggg

SEQ ID NO: 510399 - RNA, 19 nt, Artificial Sequence
  Description of Artificial Sequence: Synthetic oligonucleotide
  Sense strand starting at position 780 of SEQ ID NO: 317765
acugaagugucacccuguu

SEQ ID NO: 510400 - RNA, 19 nt, Artificial Sequence
  Description of Artificial Sequence: Synthetic oligonucleotide
  Antisense strand to SEQ ID NO: 510399
aacagggugacacuucagu

SEQ ID NO: 510401 - RNA, 19 nt, Artificial Sequence
  Description of Artificial Sequence: Synthetic oligonucleotide
  Sense strand starting at position 839 of SEQ ID NO: 317765
ggcaguacucccuggaugu

SEQ ID NO: 510402 - RNA, 19 nt, Artificial Sequence
  Description of Artificial Sequence: Synthetic oligonucleotide
  Antisense strand to SEQ ID NO: 510401
acauccagggaguacugcc

SEQ ID NO: 510403 - RNA, 19 nt, Artificial Sequence
  Description of Artificial Sequence: Synthetic oligonucleotide
  Sense strand starting at position 840 of SEQ ID NO: 317765
gcaguacucccuggaugua

SEQ ID NO: 510404 - RNA, 19 nt, Artificial Sequence
  Description of Artificial Sequence: Synthetic oligonucleotide
  Antisense strand to SEQ ID NO: 510403
uacauccagggaguacugc

SEQ ID NO: 510405 - RNA, 19 nt, Artificial Sequence
  Description of Artificial Sequence: Synthetic oligonucleotide
  Sense strand starting at position 1041 of SEQ ID NO: 317765
ugugauuucuuccacaucu

SEQ ID NO: 510406 - RNA, 19 nt, Artificial Sequence
  Description of Artificial Sequence: Synthetic oligonucleotide
  Antisense strand to SEQ ID NO: 510405
agauguggaagaaaucaca

SEQ ID NO: 510407 - RNA, 19 nt, Artificial Sequence
  Description of Artificial Sequence: Synthetic oligonucleotide
  Sense strand starting at position 1054 of SEQ ID NO: 317765
acaucugagucuucccagu

SEQ ID NO: 510408 - RNA, 19 nt, Artificial Sequence
  Description of Artificial Sequence: Synthetic oligonucleotide
  Antisense strand to SEQ ID NO: 510407
acugggaagacucagaugu

SEQ ID NO: 510409 - RNA, 19 nt, Artificial Sequence
  Description of Artificial Sequence: Synthetic oligonucleotide
  Sense strand starting at position 1056 of SEQ ID NO: 317765
aucugagucuucccaguuc

SEQ ID NO: 510410 - RNA, 19 nt, Artificial Sequence
  Description of Artificial Sequence: Synthetic oligonucleotide
  Antisense strand to SEQ ID NO: 510409
gaacugggaagacucagau

SEQ ID NO: 510411 - RNA, 19 nt, Artificial Sequence
  Description of Artificial Sequence: Synthetic oligonucleotide
  Sense strand starting at position 1065 of SEQ ID NO: 317765
uucccaguucugggagguu

SEQ ID NO: 510412 - RNA, 19 nt, Artificial Sequence
  Description of Artificial Sequence: Synthetic oligonucleotide
  Antisense strand to SEQ ID NO: 510411
aaccucccagaacugggaa

SEQ ID NO: 510413 - RNA, 19 nt, Artificial Sequence
  Description of Artificial Sequence: Synthetic oligonucleotide
  Sense strand starting at position 1103 of SEQ ID NO: 317765
gugcuuacuuccuaccuga

SEQ ID NO: 510414 - RNA, 19 nt, Artificial Sequence
  Description of Artificial Sequence: Synthetic oligonucleotide
  Antisense strand to SEQ ID NO: 510413
ucagguaggaaguaagcac

SEQ ID NO: 510415 - RNA, 19 nt, Artificial Sequence
  Description of Artificial Sequence: Synthetic oligonucleotide
  Sense strand starting at position 1120 of SEQ ID NO: 317765
gaccuagacugacuguaua

SEQ ID NO: 510416 - RNA, 19 nt, Artificial Sequence
  Description of Artificial Sequence: Synthetic oligonucleotide
  Antisense strand to SEQ ID NO: 510415
uauacagucagucuagguc

SEQ ID NO: 510417 - RNA, 19 nt, Artificial Sequence
  Description of Artificial Sequence: Synthetic oligonucleotide
  Sense strand starting at position 1133 of SEQ ID NO: 317765
uguauauucccuuaugcag

SEQ ID NO: 510418 - RNA, 19 nt, Artificial Sequence
  Description of Artificial Sequence: Synthetic oligonucleotide
  Antisense strand to SEQ ID NO: 510417
cugcauaagggaauauaca

SEQ ID NO: 510419 - RNA, 19 nt, Artificial Sequence
  Description of Artificial Sequence: Synthetic oligonucleotide
  Sense strand starting at position 1139 of SEQ ID NO: 317765
uucccuuaugcagagacuu

SEQ ID NO: 510420 - RNA, 19 nt, Artificial Sequence
  Description of Artificial Sequence: Synthetic oligonucleotide
  Antisense strand to SEQ ID NO: 510419
aagucucugcauaagggaa

SEQ ID NO: 510421 - RNA, 19 nt, Artificial Sequence
  Description of Artificial Sequence: Synthetic oligonucleotide
  Sense strand starting at position 1152 of SEQ ID NO: 317765
agacuuugugugucucguu

SEQ ID NO: 510422 - RNA, 19 nt, Artificial Sequence
  Description of Artificial Sequence: Synthetic oligonucleotide
  Antisense strand to SEQ ID NO: 510421
aacgagacacacaaagucu

SEQ ID NO: 510423 - RNA, 19 nt, Artificial Sequence
  Description of Artificial Sequence: Synthetic oligonucleotide
  Sense strand starting at position 1159 of SEQ ID NO: 317765
gugugucucguuugcuuau

SEQ ID NO: 510424 - RNA, 19 nt, Artificial Sequence
  Description of Artificial Sequence: Synthetic oligonucleotide
  Antisense strand to SEQ ID NO: 510423
auaagcaaacgagacacac

SEQ ID NO: 510425 - RNA, 19 nt, Artificial Sequence
  Description of Artificial Sequence: Synthetic oligonucleotide
  Sense strand starting at position 1223 of SEQ ID NO: 317765
accgauuccugcccggaaa

SEQ ID NO: 510426 - RNA, 19 nt, Artificial Sequence
  Description of Artificial Sequence: Synthetic oligonucleotide
  Antisense strand to SEQ ID NO: 510425
uuuccgggcaggaaucggu

SEQ ID NO: 510427 - RNA, 19 nt, Artificial Sequence
  Description of Artificial Sequence: Synthetic oligonucleotide
  Sense strand starting at position 1235 of SEQ ID NO: 317765
ccggaaaccuuuggacaga

SEQ ID NO: 510428 - RNA, 19 nt, Artificial Sequence
  Description of Artificial Sequence: Synthetic oligonucleotide
  Antisense strand to SEQ ID NO: 510427
ucuguccaaagguuuccgg

SEQ ID NO: 510429 - RNA, 19 nt, Artificial Sequence
  Description of Artificial Sequence: Synthetic oligonucleotide
  Sense strand starting at position 1236 of SEQ ID NO: 317765
cggaaaccuuuggacagaa

SEQ ID NO: 510430 - RNA, 19 nt, Artificial Sequence
  Description of Artificial Sequence: Synthetic oligonucleotide
  Antisense strand to SEQ ID NO: 510429
uucuguccaaagguuuccg

SEQ ID NO: 510431 - RNA, 19 nt, Artificial Sequence
  Description of Artificial Sequence: Synthetic oligonucleotide
  Sense strand starting at position 1271 of SEQ ID NO: 317765
gccugacaacucugccuua

SEQ ID NO: 510432 - RNA, 19 nt, Artificial Sequence
  Description of Artificial Sequence: Synthetic oligonucleotide
  Antisense strand to SEQ ID NO: 510431
uaaggcagaguugucaggc

SEQ ID NO: 510433 - RNA, 19 nt, Artificial Sequence
  Description of Artificial Sequence: Synthetic oligonucleotide
  Sense strand starting at position 1370 of SEQ ID NO: 317765
ugcacuuugcuuuaggauu

SEQ ID NO: 510434 - RNA, 19 nt, Artificial Sequence
  Description of Artificial Sequence: Synthetic oligonucleotide
  Antisense strand to SEQ ID NO: 510433
aauccuaaagcaaagugca

SEQ ID NO: 510435 - RNA, 19 nt, Artificial Sequence
  Description of Artificial Sequence: Synthetic oligonucleotide
  Sense strand starting at position 1453 of SEQ ID NO: 317765
agaauuccuguguaccuuu

SEQ ID NO: 510436 - RNA, 19 nt, Artificial Sequence
  Description of Artificial Sequence: Synthetic oligonucleotide
  Antisense strand to SEQ ID NO: 510435
aaagguacacaggaauucu

SEQ ID NO: 510437 - RNA, 19 nt, Artificial Sequence
  Description of Artificial Sequence: Synthetic oligonucleotide
  Sense strand starting at position 1498 of SEQ ID NO: 317765
uuguguacaauuugucgaa

SEQ ID NO: 510438 - RNA, 19 nt, Artificial Sequence
  Description of Artificial Sequence: Synthetic oligonucleotide
  Antisense strand to SEQ ID NO: 510437
uucgacaaauuguacacaa

SEQ ID NO: 510439 - RNA, 19 nt, Artificial Sequence
  Description of Artificial Sequence: Synthetic oligonucleotide
  Sense strand starting at position 1499 of SEQ ID NO: 317765
uguguacaauuugucgaaa

SEQ ID NO: 510440 - RNA, 19 nt, Artificial Sequence
  Description of Artificial Sequence: Synthetic oligonucleotide
  Antisense strand to SEQ ID NO: 510439
uuucgacaaauuguacaca

SEQ ID NO: 510441 - RNA, 19 nt, Artificial Sequence
  Description of Artificial Sequence: Synthetic oligonucleotide
  Sense strand starting at position 1500 of SEQ ID NO: 317765
guguacaauuugucgaaau

SEQ ID NO: 510442 - RNA, 19 nt, Artificial Sequence
  Description of Artificial Sequence: Synthetic oligonucleotide
  Antisense strand to SEQ ID NO: 510441
auuucgacaaauuguacac

SEQ ID NO: 510443 - RNA, 19 nt, Artificial Sequence
  Description of Artificial Sequence: Synthetic oligonucleotide
  Sense strand starting at position 1501 of SEQ ID NO: 317765
uguacaauuugucgaaauu

SEQ ID NO: 510444 - RNA, 19 nt, Artificial Sequence
  Description of Artificial Sequence: Synthetic oligonucleotide
  Antisense strand to SEQ ID NO: 510443
aauuucgacaaauuguaca

SEQ ID NO: 510445 - RNA, 19 nt, Artificial Sequence
  Description of Artificial Sequence: Synthetic oligonucleotide
  Sense strand starting at position 1531 of SEQ ID NO: 317765
auggguacgugcuauuaac

SEQ ID NO: 510446 - RNA, 19 nt, Artificial Sequence
  Description of Artificial Sequence: Synthetic oligonucleotide
  Antisense strand to SEQ ID NO: 510445
guuaauagcacguacccau

SEQ ID NO: 510447 - RNA, 19 nt, Artificial Sequence
  Description of Artificial Sequence: Synthetic oligonucleotide
  Sense strand starting at position 1608 of SEQ ID NO: 317765
ccaggauacuggcgcuaua

SEQ ID NO: 510448 - RNA, 19 nt, Artificial Sequence
  Description of Artificial Sequence: Synthetic oligonucleotide
  Antisense strand to SEQ ID NO: 510447
uauagcgccaguauccugg

SEQ ID NO: 510449 - RNA, 19 nt, Artificial Sequence
  Description of Artificial Sequence: Synthetic oligonucleotide
  Sense strand starting at position 1611 of SEQ ID NO: 317765
ggauacuggcgcuauaguu

SEQ ID NO: 510450 - RNA, 19 nt, Artificial Sequence
  Description of Artificial Sequence: Synthetic oligonucleotide
  Antisense strand to SEQ ID NO: 510449
aacuauagcgccaguaucc

SEQ ID NO: 510451 - RNA, 19 nt, Artificial Sequence
  Description of Artificial Sequence: Synthetic oligonucleotide
  Sense strand starting at position 1788 of SEQ ID NO: 317765
ccugcagaguuuccacgaa

SEQ ID NO: 510452 - RNA, 19 nt, Artificial Sequence
  Description of Artificial Sequence: Synthetic oligonucleotide
  Antisense strand to SEQ ID NO: 510451
uucguggaaacucugcagg

SEQ ID NO: 510453 - RNA, 19 nt, Artificial Sequence
  Description of Artificial Sequence: Synthetic oligonucleotide
  Sense strand starting at position 1792 of SEQ ID NO: 317765
cagaguuuccacgaaucug

SEQ ID NO: 510454 - RNA, 19 nt, Artificial Sequence
  Description of Artificial Sequence: Synthetic oligonucleotide
  Antisense strand to SEQ ID NO: 510453
cagauucguggaaacucug

SEQ ID NO: 510455 - RNA, 19 nt, Artificial Sequence
  Description of Artificial Sequence: Synthetic oligonucleotide
  Sense strand starting at position 2134 of SEQ ID NO: 317765
cugugugcaaccugauguu

SEQ ID NO: 510456 - RNA, 19 nt, Artificial Sequence
  Description of Artificial Sequence: Synthetic oligonucleotide
  Antisense strand to SEQ ID NO: 510455
aacaucagguugcacacag

SEQ ID NO: 510457 - RNA, 19 nt, Artificial Sequence
  Description of Artificial Sequence: Synthetic oligonucleotide
  Sense strand starting at position 2185 of SEQ ID NO: 317765
acggguaaccaauaugcaa

SEQ ID NO: 510458 - RNA, 19 nt, Artificial Sequence
  Description of Artificial Sequence: Synthetic oligonucleotide
  Antisense strand to SEQ ID NO: 510457
uugcauauugguuacccgu

SEQ ID NO: 510459 - RNA, 19 nt, Artificial Sequence
  Description of Artificial Sequence: Synthetic oligonucleotide
  Sense strand starting at position 3441 of SEQ ID NO: 317765
uugcuucuaugagaucagu

SEQ ID NO: 510460 - RNA, 19 nt, Artificial Sequence
  Description of Artificial Sequence: Synthetic oligonucleotide
  Antisense strand to SEQ ID NO: 510459
acugaucucauagaagcaa

SEQ ID NO: 510461 - RNA, 19 nt, Artificial Sequence
  Description of Artificial Sequence: Synthetic oligonucleotide
  Sense strand starting at position 3450 of SEQ ID NO: 317765
ugagaucaguuucuggagu

SEQ ID NO: 510462 - RNA, 19 nt, Artificial Sequence
  Description of Artificial Sequence: Synthetic oligonucleotide
  Antisense strand to SEQ ID NO: 510461
acuccagaaacugaucuca

SEQ ID NO: 510463 - RNA, 19 nt, Artificial Sequence
  Description of Artificial Sequence: Synthetic oligonucleotide
  Sense strand starting at position 3452 of SEQ ID NO: 317765
agaucaguuucuggagugu

SEQ ID NO: 510464 - RNA, 19 nt, Artificial Sequence
  Description of Artificial Sequence: Synthetic oligonucleotide
  Antisense strand to SEQ ID NO: 510463
acacuccagaaacugaucu

SEQ ID NO: 510465 - RNA, 19 nt, Artificial Sequence
  Description of Artificial Sequence: Synthetic oligonucleotide
  Sense strand starting at position 25 of SEQ ID NO: 317766
guugcuaggucuucuagac

SEQ ID NO: 510466 - RNA, 19 nt, Artificial Sequence
  Description of Artificial Sequence: Synthetic oligonucleotide
  Antisense strand to SEQ ID NO: 510465
gucuagaagaccuagcaac

SEQ ID NO: 510467 - RNA, 19 nt, Artificial Sequence
  Description of Artificial Sequence: Synthetic oligonucleotide
  Sense strand starting at position 29 of SEQ ID NO: 317766
cuaggucuucuagacccaa

SEQ ID NO: 510468 - RNA, 19 nt, Artificial Sequence
  Description of Artificial Sequence: Synthetic oligonucleotide
  Antisense strand to SEQ ID NO: 510467
uugggucuagaagaccuag

SEQ ID NO: 510469 - RNA, 19 nt, Artificial Sequence
  Description of Artificial Sequence: Synthetic oligonucleotide
  Sense strand starting at position 63 of SEQ ID NO: 317766
cuaugucauucuuugcaca

SEQ ID NO: 510470 - RNA, 19 nt, Artificial Sequence
  Description of Artificial Sequence: Synthetic oligonucleotide
  Antisense strand to SEQ ID NO: 510469
ugugcaaagaaugacauag

SEQ ID NO: 510471 - RNA, 19 nt, Artificial Sequence
  Description of Artificial Sequence: Synthetic oligonucleotide
  Sense strand starting at position 65 of SEQ ID NO: 317766
augucauucuuugcacauu

SEQ ID NO: 510472 - RNA, 19 nt, Artificial Sequence
  Description of Artificial Sequence: Synthetic oligonucleotide
  Antisense strand to SEQ ID NO: 510471
aaugugcaaagaaugacau

SEQ ID NO: 510473 - RNA, 19 nt, Artificial Sequence
  Description of Artificial Sequence: Synthetic oligonucleotide
  Sense strand starting at position 66 of SEQ ID NO: 317766
ugucauucuuugcacauua

SEQ ID NO: 510474 - RNA, 19 nt, Artificial Sequence
  Description of Artificial Sequence: Synthetic oligonucleotide
  Antisense strand to SEQ ID NO: 510473
uaaugugcaaagaaugaca

SEQ ID NO: 510475 - RNA, 19 nt, Artificial Sequence
  Description of Artificial Sequence: Synthetic oligonucleotide
  Sense strand starting at position 98 of SEQ ID NO: 317766
gguggaacgucucuuuaau

SEQ ID NO: 510476 - RNA, 19 nt, Artificial Sequence
  Description of Artificial Sequence: Synthetic oligonucleotide
  Antisense strand to SEQ ID NO: 510475
auuaaagagacguuccacc

SEQ ID NO: 510477 - RNA, 19 nt, Artificial Sequence
  Description of Artificial Sequence: Synthetic oligonucleotide
  Sense strand starting at position 100 of SEQ ID NO: 317766
uggaacgucucuuuaauuc

SEQ ID NO: 510478 - RNA, 19 nt, Artificial Sequence
  Description of Artificial Sequence: Synthetic oligonucleotide
  Antisense strand to SEQ ID NO: 510477
gaauuaaagagacguucca

SEQ ID NO: 510479 - RNA, 19 nt, Artificial Sequence
  Description of Artificial Sequence: Synthetic oligonucleotide
  Sense strand starting at position 123 of SEQ ID NO: 317766
aggcuagccugauaauuuc

SEQ ID NO: 510480 - RNA, 19 nt, Artificial Sequence
  Description of Artificial Sequence: Synthetic oligonucleotide
  Antisense strand to SEQ ID NO: 510479
gaaauuaucaggcuagccu

SEQ ID NO: 510481 - RNA, 19 nt, Artificial Sequence
  Description of Artificial Sequence: Synthetic oligonucleotide
  Sense strand starting at position 243 of SEQ ID NO: 317766
gcucccauggcauguauaa

SEQ ID NO: 510482 - RNA, 19 nt, Artificial Sequence
  Description of Artificial Sequence: Synthetic oligonucleotide
  Antisense strand to SEQ ID NO: 510481
uuauacaugccaugggagc

SEQ ID NO: 510483 - RNA, 19 nt, Artificial Sequence
  Description of Artificial Sequence: Synthetic oligonucleotide
  Sense strand starting at position 256 of SEQ ID NO: 317766
guauaauuguagucaaugu

SEQ ID NO: 510484 - RNA, 19 nt, Artificial Sequence
  Description of Artificial Sequence: Synthetic oligonucleotide
  Antisense strand to SEQ ID NO: 510483
acauugacuacaauuauac

SEQ ID NO: 510485 - RNA, 19 nt, Artificial Sequence
  Description of Artificial Sequence: Synthetic oligonucleotide
  Sense strand starting at position 522 of SEQ ID NO: 317766
guuccagugagcugagaca

SEQ ID NO: 510486 - RNA, 19 nt, Artificial Sequence
  Description of Artificial Sequence: Synthetic oligonucleotide
  Antisense strand to SEQ ID NO: 510485
ugucucagcucacuggaac

SEQ ID NO: 510487 - RNA, 19 nt, Artificial Sequence
  Description of Artificial Sequence: Synthetic oligonucleotide
  Sense strand starting at position 640 of SEQ ID NO: 317766
cccaguagcggagauuaca

SEQ ID NO: 510488 - RNA, 19 nt, Artificial Sequence
  Description of Artificial Sequence: Synthetic oligonucleotide
  Antisense strand to SEQ ID NO: 510487
uguaaucuccgcuacuggg

SEQ ID NO: 510489 - RNA, 19 nt, Artificial Sequence
  Description of Artificial Sequence: Synthetic oligonucleotide
  Sense strand starting at position 857 of SEQ ID NO: 317766
acugaagugucacccuguu

SEQ ID NO: 510490 - RNA, 19 nt, Artificial Sequence
  Description of Artificial Sequence: Synthetic oligonucleotide
  Antisense strand to SEQ ID NO: 510489
aacagggugacacuucagu

SEQ ID NO: 510491 - RNA, 19 nt, Artificial Sequence
  Description of Artificial Sequence: Synthetic oligonucleotide
  Sense strand starting at position 916 of SEQ ID NO: 317766
ggcaguacucccuggaugu

SEQ ID NO: 510492 - RNA, 19 nt, Artificial Sequence
  Description of Artificial Sequence: Synthetic oligonucleotide
  Antisense strand to SEQ ID NO: 510491
acauccagggaguacugcc

SEQ ID NO: 510493 - RNA, 19 nt, Artificial Sequence
  Description of Artificial Sequence: Synthetic oligonucleotide
  Sense strand starting at position 917 of SEQ ID NO: 317766
gcaguacucccuggaugua

SEQ ID NO: 510494 - RNA, 19 nt, Artificial Sequence
  Description of Artificial Sequence: Synthetic oligonucleotide
  Antisense strand to SEQ ID NO: 510493
uacauccagggaguacugc

SEQ ID NO: 510495 - RNA, 19 nt, Artificial Sequence
  Description of Artificial Sequence: Synthetic oligonucleotide
  Sense strand starting at position 1118 of SEQ ID NO: 317766
ugugauuucuuccacaucu

SEQ ID NO: 510496 - RNA, 19 nt, Artificial Sequence
  Description of Artificial Sequence: Synthetic oligonucleotide
  Antisense strand to SEQ ID NO: 510495
agauguggaagaaaucaca

SEQ ID NO: 510497 - RNA, 19 nt, Artificial Sequence
  Description of Artificial Sequence: Synthetic oligonucleotide
  Sense strand starting at position 1131 of SEQ ID NO: 317766
acaucugagucuucccagu

SEQ ID NO: 510498 - RNA, 19 nt, Artificial Sequence
  Description of Artificial Sequence: Synthetic oligonucleotide
  Antisense strand to SEQ ID NO: 510497
acugggaagacucagaugu

SEQ ID NO: 510499 - RNA, 19 nt, Artificial Sequence
  Description of Artificial Sequence: Synthetic oligonucleotide
  Sense strand starting at position 1133 of SEQ ID NO: 317766
aucugagucuucccaguuc

SEQ ID NO: 510500 - RNA, 19 nt, Artificial Sequence
  Description of Artificial Sequence: Synthetic oligonucleotide
  Antisense strand to SEQ ID NO: 510499
gaacugggaagacucagau

SEQ ID NO: 510501 - RNA, 19 nt, Artificial Sequence
  Description of Artificial Sequence: Synthetic oligonucleotide
  Sense strand starting at position 1142 of SEQ ID NO: 317766
uucccaguucugggagguu

SEQ ID NO: 510502 - RNA, 19 nt, Artificial Sequence
  Description of Artificial Sequence: Synthetic oligonucleotide
  Antisense strand to SEQ ID NO: 510501
aaccucccagaacugggaa

SEQ ID NO: 510503 - RNA, 19 nt, Artificial Sequence
  Description of Artificial Sequence: Synthetic oligonucleotide
  Sense strand starting at position 1197 of SEQ ID NO: 317766
gaccuagacugacuguaua

SEQ ID NO: 510504 - RNA, 19 nt, Artificial Sequence
  Description of Artificial Sequence: Synthetic oligonucleotide
  Antisense strand to SEQ ID NO: 510503
uauacagucagucuagguc

SEQ ID NO: 510505 - RNA, 19 nt, Artificial Sequence
  Description of Artificial Sequence: Synthetic oligonucleotide
  Sense strand starting at position 1210 of SEQ ID NO: 317766
uguauauucccuuaugcag

SEQ ID NO: 510506 - RNA, 19 nt, Artificial Sequence
  Description of Artificial Sequence: Synthetic oligonucleotide
  Antisense strand to SEQ ID NO: 510505
cugcauaagggaauauaca

SEQ ID NO: 510507 - RNA, 19 nt, Artificial Sequence
  Description of Artificial Sequence: Synthetic oligonucleotide
  Sense strand starting at position 1216 of SEQ ID NO: 317766
uucccuuaugcagagacuu

SEQ ID NO: 510508 - RNA, 19 nt, Artificial Sequence
  Description of Artificial Sequence: Synthetic oligonucleotide
  Antisense strand to SEQ ID NO: 510507
aagucucugcauaagggaa

SEQ ID NO: 510509 - RNA, 19 nt, Artificial Sequence
  Description of Artificial Sequence: Synthetic oligonucleotide
  Sense strand starting at position 1229 of SEQ ID NO: 317766
agacuuugugugucucguu

SEQ ID NO: 510510 - RNA, 19 nt, Artificial Sequence
  Description of Artificial Sequence: Synthetic oligonucleotide
  Antisense strand to SEQ ID NO: 510509
aacgagacacacaaagucu

SEQ ID NO: 510511 - RNA, 19 nt, Artificial Sequence
  Description of Artificial Sequence: Synthetic oligonucleotide
  Sense strand starting at position 1300 of SEQ ID NO: 317766
accgauuccugcccggaaa

SEQ ID NO: 510512 - RNA, 19 nt, Artificial Sequence
  Description of Artificial Sequence: Synthetic oligonucleotide
  Antisense strand to SEQ ID NO: 510511
uuuccgggcaggaaucggu

SEQ ID NO: 510513 - RNA, 19 nt, Artificial Sequence
  Description of Artificial Sequence: Synthetic oligonucleotide
  Sense strand starting at position 1312 of SEQ ID NO: 317766
ccggaaaccuuuggacaga

SEQ ID NO: 510514 - RNA, 19 nt, Artificial Sequence
  Description of Artificial Sequence: Synthetic oligonucleotide
  Antisense strand to SEQ ID NO: 510513
ucuguccaaagguuuccgg

SEQ ID NO: 510515 - RNA, 19 nt, Artificial Sequence
  Description of Artificial Sequence: Synthetic oligonucleotide
  Sense strand starting at position 1313 of SEQ ID NO: 317766
cggaaaccuuuggacagaa

SEQ ID NO: 510516 - RNA, 19 nt, Artificial Sequence
  Description of Artificial Sequence: Synthetic oligonucleotide
  Antisense strand to SEQ ID NO: 510515
uucuguccaaagguuuccg

SEQ ID NO: 510517 - RNA, 19 nt, Artificial Sequence
  Description of Artificial Sequence: Synthetic oligonucleotide
  Sense strand starting at position 1348 of SEQ ID NO: 317766
gccugacaacucugccuua

SEQ ID NO: 510518 - RNA, 19 nt, Artificial Sequence
  Description of Artificial Sequence: Synthetic oligonucleotide
  Antisense strand to SEQ ID NO: 510517
uaaggcagaguugucaggc

SEQ ID NO: 510519 - RNA, 19 nt, Artificial Sequence
  Description of Artificial Sequence: Synthetic oligonucleotide
  Sense strand starting at position 1447 of SEQ ID NO: 317766
ugcacuuugcuuuaggauu

SEQ ID NO: 510520 - RNA, 19 nt, Artificial Sequence
  Description of Artificial Sequence: Synthetic oligonucleotide
  Antisense strand to SEQ ID NO: 510519
aauccuaaagcaaagugca

SEQ ID NO: 510521 - RNA, 19 nt, Artificial Sequence
  Description of Artificial Sequence: Synthetic oligonucleotide
  Sense strand starting at position 1530 of SEQ ID NO: 317766
agaauuccuguguaccuuu

SEQ ID NO: 510522 - RNA, 19 nt, Artificial Sequence
  Description of Artificial Sequence: Synthetic oligonucleotide
  Antisense strand to SEQ ID NO: 510521
aaagguacacaggaauucu

SEQ ID NO: 510523 - RNA, 19 nt, Artificial Sequence
  Description of Artificial Sequence: Synthetic oligonucleotide
  Sense strand starting at position 1575 of SEQ ID NO: 317766
uuguguacaauuugucgaa

SEQ ID NO: 510524 - RNA, 19 nt, Artificial Sequence
  Description of Artificial Sequence: Synthetic oligonucleotide
  Antisense strand to SEQ ID NO: 510523
uucgacaaauuguacacaa

SEQ ID NO: 510525 - RNA, 19 nt, Artificial Sequence
  Description of Artificial Sequence: Synthetic oligonucleotide
  Sense strand starting at position 1576 of SEQ ID NO: 317766
uguguacaauuugucgaaa

SEQ ID NO: 510526 - RNA, 19 nt, Artificial Sequence
  Description of Artificial Sequence: Synthetic oligonucleotide
  Antisense strand to SEQ ID NO: 510525
uuucgacaaauuguacaca

SEQ ID NO: 510527 - RNA, 19 nt, Artificial Sequence
  Description of Artificial Sequence: Synthetic oligonucleotide
  Sense strand starting at position 1577 of SEQ ID NO: 317766
guguacaauuugucgaaau

SEQ ID NO: 510528 - RNA, 19 nt, Artificial Sequence
  Description of Artificial Sequence: Synthetic oligonucleotide
  Antisense strand to SEQ ID NO: 510527
auuucgacaaauuguacac

SEQ ID NO: 510529 - RNA, 19 nt, Artificial Sequence
  Description of Artificial Sequence: Synthetic oligonucleotide
  Sense strand starting at position 1578 of SEQ ID NO: 317766
uguacaauuugucgaaauu

SEQ ID NO: 510530 - RNA, 19 nt, Artificial Sequence
  Description of Artificial Sequence: Synthetic oligonucleotide
  Antisense strand to SEQ ID NO: 510529
aauuucgacaaauuguaca

SEQ ID NO: 510531 - RNA, 19 nt, Artificial Sequence
  Description of Artificial Sequence: Synthetic oligonucleotide
  Sense strand starting at position 1688 of SEQ ID NO: 317766
ggauacuggcgcuauaguu

SEQ ID NO: 510532 - RNA, 19 nt, Artificial Sequence
  Description of Artificial Sequence: Synthetic oligonucleotide
  Antisense strand to SEQ ID NO: 510531
aacuauagcgccaguaucc

SEQ ID NO: 510533 - RNA, 19 nt, Artificial Sequence
  Description of Artificial Sequence: Synthetic oligonucleotide
  Sense strand starting at position 1865 of SEQ ID NO: 317766
ccugcagaguuuccacgaa

SEQ ID NO: 510534 - RNA, 19 nt, Artificial Sequence
  Description of Artificial Sequence: Synthetic oligonucleotide
  Antisense strand to SEQ ID NO: 510533
uucguggaaacucugcagg

SEQ ID NO: 510535 - RNA, 19 nt, Artificial Sequence
  Description of Artificial Sequence: Synthetic oligonucleotide
  Sense strand starting at position 1869 of SEQ ID NO: 317766
cagaguuuccacgaaucug

SEQ ID NO: 510536 - RNA, 19 nt, Artificial Sequence
  Description of Artificial Sequence: Synthetic oligonucleotide
  Antisense strand to SEQ ID NO: 510535
cagauucguggaaacucug

SEQ ID NO: 510537 - RNA, 19 nt, Artificial Sequence
  Description of Artificial Sequence: Synthetic oligonucleotide
  Sense strand starting at position 2211 of SEQ ID NO: 317766
cugugugcaaccugauguu

SEQ ID NO: 510538 - RNA, 19 nt, Artificial Sequence
  Description of Artificial Sequence: Synthetic oligonucleotide
  Antisense strand to SEQ ID NO: 510537
aacaucagguugcacacag

SEQ ID NO: 510539 - RNA, 19 nt, Artificial Sequence
  Description of Artificial Sequence: Synthetic oligonucleotide
  Sense strand starting at position 2262 of SEQ ID NO: 317766
acggguaaccaauaugcaa

SEQ ID NO: 510540 - RNA, 19 nt, Artificial Sequence
  Description of Artificial Sequence: Synthetic oligonucleotide
  Antisense strand to SEQ ID NO: 510539
uugcauauugguuacccgu

SEQ ID NO: 510541 - RNA, 19 nt, Artificial Sequence
  Description of Artificial Sequence: Synthetic oligonucleotide
  Sense strand starting at position 3518 of SEQ ID NO: 317766
uugcuucuaugagaucagu

SEQ ID NO: 510542 - RNA, 19 nt, Artificial Sequence
  Description of Artificial Sequence: Synthetic oligonucleotide
  Antisense strand to SEQ ID NO: 510541
acugaucucauagaagcaa

SEQ ID NO: 510543 - RNA, 19 nt, Artificial Sequence
  Description of Artificial Sequence: Synthetic oligonucleotide
  Sense strand starting at position 3527 of SEQ ID NO: 317766
ugagaucaguuucuggagu

SEQ ID NO: 510544 - RNA, 19 nt, Artificial Sequence
  Description of Artificial Sequence: Synthetic oligonucleotide
  Antisense strand to SEQ ID NO: 510543
acuccagaaacugaucuca

SEQ ID NO: 510545 - RNA, 19 nt, Artificial Sequence
  Description of Artificial Sequence: Synthetic oligonucleotide
  Sense strand starting at position 984 of SEQ ID NO: 317767
acaagaacuuaagaugaaa

SEQ ID NO: 510546 - RNA, 19 nt, Artificial Sequence
  Description of Artificial Sequence: Synthetic oligonucleotide
  Antisense strand to SEQ ID NO: 510545
uuucaucuuaaguucuugu

SEQ ID NO: 510547 - RNA, 19 nt, Artificial Sequence
  Description of Artificial Sequence: Synthetic oligonucleotide
  Sense strand starting at position 1266 of SEQ ID NO: 317767
uuuguugugucucuggaga

SEQ ID NO: 510548 - RNA, 19 nt, Artificial Sequence
  Description of Artificial Sequence: Synthetic oligonucleotide
  Antisense strand to SEQ ID NO: 510547
ucuccagagacacaacaaa

SEQ ID NO: 510549 - RNA, 19 nt, Artificial Sequence
  Description of Artificial Sequence: Synthetic oligonucleotide
  Sense strand starting at position 1404 of SEQ ID NO: 317767
aggaaagggucuucugauc

SEQ ID NO: 510550 - RNA, 19 nt, Artificial Sequence
  Description of Artificial Sequence: Synthetic oligonucleotide
  Antisense strand to SEQ ID NO: 510549
gaucagaagacccuuuccu

SEQ ID NO: 510551 - RNA, 19 nt, Artificial Sequence
  Description of Artificial Sequence: Synthetic oligonucleotide
  Sense strand starting at position 1409 of SEQ ID NO: 317767
agggucuucugaucagaag

SEQ ID NO: 510552 - RNA, 19 nt, Artificial Sequence
  Description of Artificial Sequence: Synthetic oligonucleotide
  Antisense strand to SEQ ID NO: 510551
cuucugaucagaagacccu

SEQ ID NO: 510553 - RNA, 19 nt, Artificial Sequence
  Description of Artificial Sequence: Synthetic oligonucleotide
  Sense strand starting at position 1471 of SEQ ID NO: 317767
caaacagugcuagaagcuu

SEQ ID NO: 510554 - RNA, 19 nt, Artificial Sequence
  Description of Artificial Sequence: Synthetic oligonucleotide
  Antisense strand to SEQ ID NO: 510553
aagcuucuagcacuguuug

SEQ ID NO: 510555 - RNA, 19 nt, Artificial Sequence
  Description of Artificial Sequence: Synthetic oligonucleotide
  Sense strand starting at position 1499 of SEQ ID NO: 317767
ccucgugguggugaugaau

SEQ ID NO: 510556 - RNA, 19 nt, Artificial Sequence
  Description of Artificial Sequence: Synthetic oligonucleotide
  Antisense strand to SEQ ID NO: 510555
auucaucaccaccacgagg

SEQ ID NO: 510557 - RNA, 19 nt, Artificial Sequence
  Description of Artificial Sequence: Synthetic oligonucleotide
  Sense strand starting at position 1524 of SEQ ID NO: 317767
auuacagaguucucugcuu

SEQ ID NO: 510558 - RNA, 19 nt, Artificial Sequence
  Description of Artificial Sequence: Synthetic oligonucleotide
  Antisense strand to SEQ ID NO: 510557
aagcagagaacucuguaau

SEQ ID NO: 510559 - RNA, 19 nt, Artificial Sequence
  Description of Artificial Sequence: Synthetic oligonucleotide
  Sense strand starting at position 1577 of SEQ ID NO: 317767
gggcuaacguuaguaagaa

SEQ ID NO: 510560 - RNA, 19 nt, Artificial Sequence
  Description of Artificial Sequence: Synthetic oligonucleotide
  Antisense strand to SEQ ID NO: 510559
uucuuacuaacguuagccc

SEQ ID NO: 510561 - RNA, 19 nt, Artificial Sequence
  Description of Artificial Sequence: Synthetic oligonucleotide
  Sense strand starting at position 1640 of SEQ ID NO: 317767
aaaguagagucacuuuaag

SEQ ID NO: 510562 - RNA, 19 nt, Artificial Sequence
  Description of Artificial Sequence: Synthetic oligonucleotide
  Antisense strand to SEQ ID NO: 510561
cuuaaagugacucuacuuu

SEQ ID NO: 510563 - RNA, 19 nt, Artificial Sequence
  Description of Artificial Sequence: Synthetic oligonucleotide
  Sense strand starting at position 1646 of SEQ ID NO: 317767
gagucacuuuaaguuuguu

SEQ ID NO: 510564 - RNA, 19 nt, Artificial Sequence
  Description of Artificial Sequence: Synthetic oligonucleotide
  Antisense strand to SEQ ID NO: 510563
aacaaacuuaaagugacuc

SEQ ID NO: 510565 - RNA, 19 nt, Artificial Sequence
  Description of Artificial Sequence: Synthetic oligonucleotide
  Sense strand starting at position 1652 of SEQ ID NO: 317767
cuuuaaguuuguuuacaug

SEQ ID NO: 510566 - RNA, 19 nt, Artificial Sequence
  Description of Artificial Sequence: Synthetic oligonucleotide
  Antisense strand to SEQ ID NO: 510565
cauguaaacaaacuuaaag

SEQ ID NO: 510567 - RNA, 19 nt, Artificial Sequence
  Description of Artificial Sequence: Synthetic oligonucleotide
  Sense strand starting at position 1705 of SEQ ID NO: 317767
uuaguuaaucaagggaugu

SEQ ID NO: 510568 - RNA, 19 nt, Artificial Sequence
  Description of Artificial Sequence: Synthetic oligonucleotide
  Antisense strand to SEQ ID NO: 510567
acaucccuugauuaacuaa

SEQ ID NO: 510569 - RNA, 19 nt, Artificial Sequence
  Description of Artificial Sequence: Synthetic oligonucleotide
  Sense strand starting at position 1716 of SEQ ID NO: 317767
agggauguauaauaaacaa

SEQ ID NO: 510570 - RNA, 19 nt, Artificial Sequence
  Description of Artificial Sequence: Synthetic oligonucleotide
  Antisense strand to SEQ ID NO: 510569
uuguuuauuauacaucccu

SEQ ID NO: 510571 - RNA, 19 nt, Artificial Sequence
  Description of Artificial Sequence: Synthetic oligonucleotide
  Sense strand starting at position 2427 of SEQ ID NO: 317767
gagcucgguccuuaguaga

SEQ ID NO: 510572 - RNA, 19 nt, Artificial Sequence
  Description of Artificial Sequence: Synthetic oligonucleotide
  Antisense strand to SEQ ID NO: 510571
ucuacuaaggaccgagcuc

SEQ ID NO: 510573 - RNA, 19 nt, Artificial Sequence
  Description of Artificial Sequence: Synthetic oligonucleotide
  Sense strand starting at position 2669 of SEQ ID NO: 317767
cggguuguccugaggagca

SEQ ID NO: 510574 - RNA, 19 nt, Artificial Sequence
  Description of Artificial Sequence: Synthetic oligonucleotide
  Antisense strand to SEQ ID NO: 510573
ugcuccucaggacaacccg

SEQ ID NO: 510575 - RNA, 19 nt, Artificial Sequence
  Description of Artificial Sequence: Synthetic oligonucleotide
  Sense strand starting at position 2808 of SEQ ID NO: 317767
ugcaguucgccuuuccaga

SEQ ID NO: 510576 - RNA, 19 nt, Artificial Sequence
  Description of Artificial Sequence: Synthetic oligonucleotide
  Antisense strand to SEQ ID NO: 510575
ucuggaaaggcgaacugca

SEQ ID NO: 510577 - RNA, 19 nt, Artificial Sequence
  Description of Artificial Sequence: Synthetic oligonucleotide
  Sense strand starting at position 2810 of SEQ ID NO: 317767
caguucgccuuuccagaaa

SEQ ID NO: 510578 - RNA, 19 nt, Artificial Sequence
  Description of Artificial Sequence: Synthetic oligonucleotide
  Antisense strand to SEQ ID NO: 510577
uuucuggaaaggcgaacug

SEQ ID NO: 510579 - RNA, 19 nt, Artificial Sequence
  Description of Artificial Sequence: Synthetic oligonucleotide
  Sense strand starting at position 2887 of SEQ ID NO: 317767
ucguguuuggugguccuua

SEQ ID NO: 510580 - RNA, 19 nt, Artificial Sequence
  Description of Artificial Sequence: Synthetic oligonucleotide
  Antisense strand to SEQ ID NO: 510579
uaaggaccaccaaacacga

SEQ ID NO: 510581 - RNA, 19 nt, Artificial Sequence
  Description of Artificial Sequence: Synthetic oligonucleotide
  Sense strand starting at position 3056 of SEQ ID NO: 317767
gaugguggucaggguuaua

SEQ ID NO: 510582 - RNA, 19 nt, Artificial Sequence
  Description of Artificial Sequence: Synthetic oligonucleotide
  Antisense strand to SEQ ID NO: 510581
uauaacccugaccaccauc

SEQ ID NO: 510583 - RNA, 19 nt, Artificial Sequence
  Description of Artificial Sequence: Synthetic oligonucleotide
  Sense strand starting at position 3059 of SEQ ID NO: 317767
gguggucaggguuauacuu

SEQ ID NO: 510584 - RNA, 19 nt, Artificial Sequence
  Description of Artificial Sequence: Synthetic oligonucleotide
  Antisense strand to SEQ ID NO: 510583
aaguauaacccugaccacc

SEQ ID NO: 510585 - RNA, 19 nt, Artificial Sequence
  Description of Artificial Sequence: Synthetic oligonucleotide
  Sense strand starting at position 3163 of SEQ ID NO: 317767
agcuaaauuggauagguuu

SEQ ID NO: 510586 - RNA, 19 nt, Artificial Sequence
  Description of Artificial Sequence: Synthetic oligonucleotide
  Antisense strand to SEQ ID NO: 510585
aaaccuauccaauuuagcu

SEQ ID NO: 510587 - RNA, 19 nt, Artificial Sequence
  Description of Artificial Sequence: Synthetic oligonucleotide
  Sense strand starting at position 3293 of SEQ ID NO: 317767
uuugaauuaugccuguaau

SEQ ID NO: 510588 - RNA, 19 nt, Artificial Sequence
  Description of Artificial Sequence: Synthetic oligonucleotide
  Antisense strand to SEQ ID NO: 510587
auuacaggcauaauucaaa

SEQ ID NO: 510589 - RNA, 19 nt, Artificial Sequence
  Description of Artificial Sequence: Synthetic oligonucleotide
  Sense strand starting at position 3294 of SEQ ID NO: 317767
uugaauuaugccuguaauu

SEQ ID NO: 510590 - RNA, 19 nt, Artificial Sequence
  Description of Artificial Sequence: Synthetic oligonucleotide
  Antisense strand to SEQ ID NO: 510589
aauuacaggcauaauucaa

SEQ ID NO: 510591 - RNA, 19 nt, Artificial Sequence
  Description of Artificial Sequence: Synthetic oligonucleotide
  Sense strand starting at position 3296 of SEQ ID NO: 317767
gaauuaugccuguaauugu

SEQ ID NO: 510592 - RNA, 19 nt, Artificial Sequence
  Description of Artificial Sequence: Synthetic oligonucleotide
  Antisense strand to SEQ ID NO: 510591
acaauuacaggcauaauuc

SEQ ID NO: 510593 - RNA, 19 nt, Artificial Sequence
  Description of Artificial Sequence: Synthetic oligonucleotide
  Sense strand starting at position 3303 of SEQ ID NO: 317767
gccuguaauugugcaauuu

SEQ ID NO: 510594 - RNA, 19 nt, Artificial Sequence
  Description of Artificial Sequence: Synthetic oligonucleotide
  Antisense strand to SEQ ID NO: 510593
aaauugcacaauuacaggc

SEQ ID NO: 510595 - RNA, 19 nt, Artificial Sequence
  Description of Artificial Sequence: Synthetic oligonucleotide
  Sense strand starting at position 3346 of SEQ ID NO: 317767
aaaucucguugaguuaaau

SEQ ID NO: 510596 - RNA, 19 nt, Artificial Sequence
  Description of Artificial Sequence: Synthetic oligonucleotide
  Antisense strand to SEQ ID NO: 510595
auuuaacucaacgagauuu

SEQ ID NO: 510597 - RNA, 19 nt, Artificial Sequence
  Description of Artificial Sequence: Synthetic oligonucleotide
  Sense strand starting at position 3354 of SEQ ID NO: 317767
uugaguuaaaugugaggau

SEQ ID NO: 510598 - RNA, 19 nt, Artificial Sequence
  Description of Artificial Sequence: Synthetic oligonucleotide
  Antisense strand to SEQ ID NO: 510597
auccucacauuuaacucaa

SEQ ID NO: 510599 - RNA, 19 nt, Artificial Sequence
  Description of Artificial Sequence: Synthetic oligonucleotide
  Sense strand starting at position 3358 of SEQ ID NO: 317767
guuaaaugugaggauuagu

SEQ ID NO: 510600 - RNA, 19 nt, Artificial Sequence
  Description of Artificial Sequence: Synthetic oligonucleotide
  Antisense strand to SEQ ID NO: 510599
acuaauccucacauuuaac

SEQ ID NO: 510601 - RNA, 19 nt, Artificial Sequence
  Description of Artificial Sequence: Synthetic oligonucleotide
  Sense strand starting at position 3405 of SEQ ID NO: 317767
gcguguaaaccguucuagu

SEQ ID NO: 510602 - RNA, 19 nt, Artificial Sequence
  Description of Artificial Sequence: Synthetic oligonucleotide
  Antisense strand to SEQ ID NO: 510601
acuagaacgguuuacacgc

SEQ ID NO: 510603 - RNA, 19 nt, Artificial Sequence
  Description of Artificial Sequence: Synthetic oligonucleotide
  Sense strand starting at position 3406 of SEQ ID NO: 317767
cguguaaaccguucuagug

SEQ ID NO: 510604 - RNA, 19 nt, Artificial Sequence
  Description of Artificial Sequence: Synthetic oligonucleotide
  Antisense strand to SEQ ID NO: 510603
cacuagaacgguuuacacg

SEQ ID NO: 510605 - RNA, 19 nt, Artificial Sequence
  Description of Artificial Sequence: Synthetic oligonucleotide
  Sense strand starting at position 3407 of SEQ ID NO: 317767
guguaaaccguucuagugu

SEQ ID NO: 510606 - RNA, 19 nt, Artificial Sequence
  Description of Artificial Sequence: Synthetic oligonucleotide
  Antisense strand to SEQ ID NO: 510605
acacuagaacgguuuacac

SEQ ID NO: 510607 - RNA, 19 nt, Artificial Sequence
  Description of Artificial Sequence: Synthetic oligonucleotide
  Sense strand starting at position 3543 of SEQ ID NO: 317767
gggaaaugguagcuuguga

SEQ ID NO: 510608 - RNA, 19 nt, Artificial Sequence
  Description of Artificial Sequence: Synthetic oligonucleotide
  Antisense strand to SEQ ID NO: 510607
ucacaagcuaccauuuccc

SEQ ID NO: 510609 - RNA, 19 nt, Artificial Sequence
  Description of Artificial Sequence: Synthetic oligonucleotide
  Sense strand starting at position 3550 of SEQ ID NO: 317767
gguagcuugugauuggaga

SEQ ID NO: 510610 - RNA, 19 nt, Artificial Sequence
  Description of Artificial Sequence: Synthetic oligonucleotide
  Antisense strand to SEQ ID NO: 510609
ucuccaaucacaagcuacc

SEQ ID NO: 510611 - RNA, 19 nt, Artificial Sequence
  Description of Artificial Sequence: Synthetic oligonucleotide
  Sense strand starting at position 3551 of SEQ ID NO: 317767
guagcuugugauuggagaa

SEQ ID NO: 510612 - RNA, 19 nt, Artificial Sequence
  Description of Artificial Sequence: Synthetic oligonucleotide
  Antisense strand to SEQ ID NO: 510611
uucuccaaucacaagcuac

SEQ ID NO: 510613 - RNA, 19 nt, Artificial Sequence
  Description of Artificial Sequence: Synthetic oligonucleotide
  Sense strand starting at position 3767 of SEQ ID NO: 317767
gcagcauauuuaucggcau

SEQ ID NO: 510614 - RNA, 19 nt, Artificial Sequence
  Description of Artificial Sequence: Synthetic oligonucleotide
  Antisense strand to SEQ ID NO: 510613
augccgauaaauaugcugc

SEQ ID NO: 510615 - RNA, 19 nt, Artificial Sequence
  Description of Artificial Sequence: Synthetic oligonucleotide
  Sense strand starting at position 3803 of SEQ ID NO: 317767
uccugaagaauuggaguuu

SEQ ID NO: 510616 - RNA, 19 nt, Artificial Sequence
  Description of Artificial Sequence: Synthetic oligonucleotide
  Antisense strand to SEQ ID NO: 510615
aaacuccaauucuucagga

SEQ ID NO: 510617 - RNA, 19 nt, Artificial Sequence
  Description of Artificial Sequence: Synthetic oligonucleotide
  Sense strand starting at position 3815 of SEQ ID NO: 317767
ggaguuuacgaaggaacag

SEQ ID NO: 510618 - RNA, 19 nt, Artificial Sequence
  Description of Artificial Sequence: Synthetic oligonucleotide
  Antisense strand to SEQ ID NO: 510617
cuguuccuucguaaacucc

SEQ ID NO: 510619 - RNA, 19 nt, Artificial Sequence
  Description of Artificial Sequence: Synthetic oligonucleotide
  Sense strand starting at position 3867 of SEQ ID NO: 317767
auucgugauagccaacuga

SEQ ID NO: 510620 - RNA, 19 nt, Artificial Sequence
  Description of Artificial Sequence: Synthetic oligonucleotide
  Antisense strand to SEQ ID NO: 510619
ucaguuggcuaucacgaau

SEQ ID NO: 510621 - RNA, 19 nt, Artificial Sequence
  Description of Artificial Sequence: Synthetic oligonucleotide
  Sense strand starting at position 3871 of SEQ ID NO: 317767
gugauagccaacugagaaa

SEQ ID NO: 510622 - RNA, 19 nt, Artificial Sequence
  Description of Artificial Sequence: Synthetic oligonucleotide
  Antisense strand to SEQ ID NO: 510621
uuucucaguuggcuaucac

SEQ ID NO: 510623 - RNA, 19 nt, Artificial Sequence
  Description of Artificial Sequence: Synthetic oligonucleotide
  Sense strand starting at position 3883 of SEQ ID NO: 317767
ugagaaauguguuuggaaa

SEQ ID NO: 510624 - RNA, 19 nt, Artificial Sequence
  Description of Artificial Sequence: Synthetic oligonucleotide
  Antisense strand to SEQ ID NO: 510623
uuuccaaacacauuucuca

SEQ ID NO: 510625 - RNA, 19 nt, Artificial Sequence
  Description of Artificial Sequence: Synthetic oligonucleotide
  Sense strand starting at position 47 of SEQ ID NO: 317768
ugcuguuaugcuuauuucu

SEQ ID NO: 510626 - RNA, 19 nt, Artificial Sequence
  Description of Artificial Sequence: Synthetic oligonucleotide
  Antisense strand to SEQ ID NO: 510625
agaaauaagcauaacagca

SEQ ID NO: 510627 - RNA, 19 nt, Artificial Sequence
  Description of Artificial Sequence: Synthetic oligonucleotide
  Sense strand starting at position 104 of SEQ ID NO: 317768
ggaaguuaaugugcucaaa

SEQ ID NO: 510628 - RNA, 19 nt, Artificial Sequence
  Description of Artificial Sequence: Synthetic oligonucleotide
  Antisense strand to SEQ ID NO: 510627
uuugagcacauuaacuucc

SEQ ID NO: 510629 - RNA, 19 nt, Artificial Sequence
  Description of Artificial Sequence: Synthetic oligonucleotide
  Sense strand starting at position 134 of SEQ ID NO: 317768
gcauuucuauugucuugua

SEQ ID NO: 510630 - RNA, 19 nt, Artificial Sequence
  Description of Artificial Sequence: Synthetic oligonucleotide
  Antisense strand to SEQ ID NO: 510629
uacaagacaauagaaaugc

SEQ ID NO: 510631 - RNA, 19 nt, Artificial Sequence
  Description of Artificial Sequence: Synthetic oligonucleotide
  Sense strand starting at position 297 of SEQ ID NO: 317768
auccauucugacuggauga

SEQ ID NO: 510632 - RNA, 19 nt, Artificial Sequence
  Description of Artificial Sequence: Synthetic oligonucleotide
  Antisense strand to SEQ ID NO: 510631
ucauccagucagaauggau

SEQ ID NO: 510633 - RNA, 19 nt, Artificial Sequence
  Description of Artificial Sequence: Synthetic oligonucleotide
  Sense strand starting at position 304 of SEQ ID NO: 317768
cugacuggaugaguuuaca

SEQ ID NO: 510634 - RNA, 19 nt, Artificial Sequence
  Description of Artificial Sequence: Synthetic oligonucleotide
  Antisense strand to SEQ ID NO: 510633
uguaaacucauccagucag

SEQ ID NO: 510635 - RNA, 19 nt, Artificial Sequence
  Description of Artificial Sequence: Synthetic oligonucleotide
  Sense strand starting at position 336 of SEQ ID NO: 317768
uguaaacaaguaugagaca

SEQ ID NO: 510636 - RNA, 19 nt, Artificial Sequence
  Description of Artificial Sequence: Synthetic oligonucleotide
  Antisense strand to SEQ ID NO: 510635
ugucucauacuuguuuaca

SEQ ID NO: 510637 - RNA, 19 nt, Artificial Sequence
  Description of Artificial Sequence: Synthetic oligonucleotide
  Sense strand starting at position 347 of SEQ ID NO: 317768
augagacacuugucuuuag

SEQ ID NO: 510638 - RNA, 19 nt, Artificial Sequence
  Description of Artificial Sequence: Synthetic oligonucleotide
  Antisense strand to SEQ ID NO: 510637
cuaaagacaagugucucau

SEQ ID NO: 510639 - RNA, 19 nt, Artificial Sequence
  Description of Artificial Sequence: Synthetic oligonucleotide
  Sense strand starting at position 348 of SEQ ID NO: 317768
ugagacacuugucuuuaga

SEQ ID NO: 510640 - RNA, 19 nt, Artificial Sequence
  Description of Artificial Sequence: Synthetic oligonucleotide
  Antisense strand to SEQ ID NO: 510639
ucuaaagacaagugucuca

SEQ ID NO: 510641 - RNA, 19 nt, Artificial Sequence
  Description of Artificial Sequence: Synthetic oligonucleotide
  Sense strand starting at position 350 of SEQ ID NO: 317768
agacacuugucuuuagauu

SEQ ID NO: 510642 - RNA, 19 nt, Artificial Sequence
  Description of Artificial Sequence: Synthetic oligonucleotide
  Antisense strand to SEQ ID NO: 510641
aaucuaaagacaagugucu

SEQ ID NO: 510643 - RNA, 19 nt, Artificial Sequence
  Description of Artificial Sequence: Synthetic oligonucleotide
  Sense strand starting at position 413 of SEQ ID NO: 317768
gggauguuagguugaggaa

SEQ ID NO: 510644 - RNA, 19 nt, Artificial Sequence
  Description of Artificial Sequence: Synthetic oligonucleotide
  Antisense strand to SEQ ID NO: 510643
uuccucaaccuaacauccc

SEQ ID NO: 510645 - RNA, 19 nt, Artificial Sequence
  Description of Artificial Sequence: Synthetic oligonucleotide
  Sense strand starting at position 463 of SEQ ID NO: 317768
cgguaacuaguccaaagua

SEQ ID NO: 510646 - RNA, 19 nt, Artificial Sequence
  Description of Artificial Sequence: Synthetic oligonucleotide
  Antisense strand to SEQ ID NO: 510645
uacuuuggacuaguuaccg

SEQ ID NO: 510647 - RNA, 19 nt, Artificial Sequence
  Description of Artificial Sequence: Synthetic oligonucleotide
  Sense strand starting at position 560 of SEQ ID NO: 317768
acagauauugcuugacaau

SEQ ID NO: 510648 - RNA, 19 nt, Artificial Sequence
  Description of Artificial Sequence: Synthetic oligonucleotide
  Antisense strand to SEQ ID NO: 510647
auugucaagcaauaucugu

SEQ ID NO: 510649 - RNA, 19 nt, Artificial Sequence
  Description of Artificial Sequence: Synthetic oligonucleotide
  Sense strand starting at position 566 of SEQ ID NO: 317768
auugcuugacaauauguua

SEQ ID NO: 510650 - RNA, 19 nt, Artificial Sequence
  Description of Artificial Sequence: Synthetic oligonucleotide
  Antisense strand to SEQ ID NO: 510649
uaacauauugucaagcaau

SEQ ID NO: 510651 - RNA, 19 nt, Artificial Sequence
  Description of Artificial Sequence: Synthetic oligonucleotide
  Sense strand starting at position 682 of SEQ ID NO: 317768
cuugaauuauuaucucgaa

SEQ ID NO: 510652 - RNA, 19 nt, Artificial Sequence
  Description of Artificial Sequence: Synthetic oligonucleotide
  Antisense strand to SEQ ID NO: 510651
uucgagauaauaauucaag

SEQ ID NO: 510653 - RNA, 19 nt, Artificial Sequence
  Description of Artificial Sequence: Synthetic oligonucleotide
  Sense strand starting at position 695 of SEQ ID NO: 317768
cucgaauuauuaucuuaug

SEQ ID NO: 510654 - RNA, 19 nt, Artificial Sequence
  Description of Artificial Sequence: Synthetic oligonucleotide
  Antisense strand to SEQ ID NO: 510653
cauaagauaauaauucgag

SEQ ID NO: 510655 - RNA, 19 nt, Artificial Sequence
  Description of Artificial Sequence: Synthetic oligonucleotide
  Sense strand starting at position 841 of SEQ ID NO: 317768
aauaauugcuguuugauag

SEQ ID NO: 510656 - RNA, 19 nt, Artificial Sequence
  Description of Artificial Sequence: Synthetic oligonucleotide
  Antisense strand to SEQ ID NO: 510655
cuaucaaacagcaauuauu

SEQ ID NO: 510657 - RNA, 19 nt, Artificial Sequence
  Description of Artificial Sequence: Synthetic oligonucleotide
  Sense strand starting at position 872 of SEQ ID NO: 317768
uuaauagugcuacauagua

SEQ ID NO: 510658 - RNA, 19 nt, Artificial Sequence
  Description of Artificial Sequence: Synthetic oligonucleotide
  Antisense strand to SEQ ID NO: 510657
uacuauguagcacuauuaa

SEQ ID NO: 510659 - RNA, 19 nt, Artificial Sequence
  Description of Artificial Sequence: Synthetic oligonucleotide
  Sense strand starting at position 880 of SEQ ID NO: 317768
gcuacauaguaaucugaag

SEQ ID NO: 510660 - RNA, 19 nt, Artificial Sequence
  Description of Artificial Sequence: Synthetic oligonucleotide
  Antisense strand to SEQ ID NO: 510659
cuucagauuacuauguagc

SEQ ID NO: 510661 - RNA, 19 nt, Artificial Sequence
  Description of Artificial Sequence: Synthetic oligonucleotide
  Sense strand starting at position 983 of SEQ ID NO: 317768
cucagaaucuggcucuuga

SEQ ID NO: 510662 - RNA, 19 nt, Artificial Sequence
  Description of Artificial Sequence: Synthetic oligonucleotide
  Antisense strand to SEQ ID NO: 510661
ucaagagccagauucugag

SEQ ID NO: 510663 - RNA, 19 nt, Artificial Sequence
  Description of Artificial Sequence: Synthetic oligonucleotide
  Sense strand starting at position 1059 of SEQ ID NO: 317768
cccuguuauuuccuuguaa

SEQ ID NO: 510664 - RNA, 19 nt, Artificial Sequence
  Description of Artificial Sequence: Synthetic oligonucleotide
  Antisense strand to SEQ ID NO: 510663
uuacaaggaaauaacaggg

SEQ ID NO: 510665 - RNA, 19 nt, Artificial Sequence
  Description of Artificial Sequence: Synthetic oligonucleotide
  Sense strand starting at position 1096 of SEQ ID NO: 317768
auuugcuaucguugcauga

SEQ ID NO: 510666 - RNA, 19 nt, Artificial Sequence
  Description of Artificial Sequence: Synthetic oligonucleotide
  Antisense strand to SEQ ID NO: 510665
ucaugcaacgauagcaaau

SEQ ID NO: 510667 - RNA, 19 nt, Artificial Sequence
  Description of Artificial Sequence: Synthetic oligonucleotide
  Sense strand starting at position 1097 of SEQ ID NO: 317768
uuugcuaucguugcaugau

SEQ ID NO: 510668 - RNA, 19 nt, Artificial Sequence
  Description of Artificial Sequence: Synthetic oligonucleotide
  Antisense strand to SEQ ID NO: 510667
aucaugcaacgauagcaaa

SEQ ID NO: 510669 - RNA, 19 nt, Artificial Sequence
  Description of Artificial Sequence: Synthetic oligonucleotide
  Sense strand starting at position 1260 of SEQ ID NO: 317768
ugucaaauuccuuagugag

SEQ ID NO: 510670 - RNA, 19 nt, Artificial Sequence
  Description of Artificial Sequence: Synthetic oligonucleotide
  Antisense strand to SEQ ID NO: 510669
cucacuaaggaauuugaca

SEQ ID NO: 510671 - RNA, 19 nt, Artificial Sequence
  Description of Artificial Sequence: Synthetic oligonucleotide
  Sense strand starting at position 1393 of SEQ ID NO: 317768
gagcgugacaguuccguuu

SEQ ID NO: 510672 - RNA, 19 nt, Artificial Sequence
  Description of Artificial Sequence: Synthetic oligonucleotide
  Antisense strand to SEQ ID NO: 510671
aaacggaacugucacgcuc

SEQ ID NO: 510673 - RNA, 19 nt, Artificial Sequence
  Description of Artificial Sequence: Synthetic oligonucleotide
  Sense strand starting at position 1653 of SEQ ID NO: 317768
gagagaagugccugagaca

SEQ ID NO: 510674 - RNA, 19 nt, Artificial Sequence
  Description of Artificial Sequence: Synthetic oligonucleotide
  Antisense strand to SEQ ID NO: 510673
ugucucaggcacuucucuc

SEQ ID NO: 510675 - RNA, 19 nt, Artificial Sequence
  Description of Artificial Sequence: Synthetic oligonucleotide
  Sense strand starting at position 1809 of SEQ ID NO: 317768
augugagagaggugucuga

SEQ ID NO: 510676 - RNA, 19 nt, Artificial Sequence
  Description of Artificial Sequence: Synthetic oligonucleotide
  Antisense strand to SEQ ID NO: 510675
ucagacaccucucucacau

SEQ ID NO: 510677 - RNA, 19 nt, Artificial Sequence
  Description of Artificial Sequence: Synthetic oligonucleotide
  Sense strand starting at position 1846 of SEQ ID NO: 317768
gacccagagcacuguaaug

SEQ ID NO: 510678 - RNA, 19 nt, Artificial Sequence
  Description of Artificial Sequence: Synthetic oligonucleotide
  Antisense strand to SEQ ID NO: 510677
cauuacagugcucuggguc

SEQ ID NO: 510679 - RNA, 19 nt, Artificial Sequence
  Description of Artificial Sequence: Synthetic oligonucleotide
  Sense strand starting at position 1848 of SEQ ID NO: 317768
cccagagcacuguaaugaa

SEQ ID NO: 510680 - RNA, 19 nt, Artificial Sequence
  Description of Artificial Sequence: Synthetic oligonucleotide
  Antisense strand to SEQ ID NO: 510679
uucauuacagugcucuggg

SEQ ID NO: 510681 - RNA, 19 nt, Artificial Sequence
  Description of Artificial Sequence: Synthetic oligonucleotide
  Sense strand starting at position 1905 of SEQ ID NO: 317768
ucgaaccgucaauagaauu

SEQ ID NO: 510682 - RNA, 19 nt, Artificial Sequence
  Description of Artificial Sequence: Synthetic oligonucleotide
  Antisense strand to SEQ ID NO: 510681
aauucuauugacgguucga

SEQ ID NO: 510683 - RNA, 19 nt, Artificial Sequence
  Description of Artificial Sequence: Synthetic oligonucleotide
  Sense strand starting at position 2237 of SEQ ID NO: 317768
gugagucagcuccauugaa

SEQ ID NO: 510684 - RNA, 19 nt, Artificial Sequence
  Description of Artificial Sequence: Synthetic oligonucleotide
  Antisense strand to SEQ ID NO: 510683
uucaauggagcugacucac

SEQ ID NO: 510685 - RNA, 19 nt, Artificial Sequence
  Description of Artificial Sequence: Synthetic oligonucleotide
  Sense strand starting at position 2324 of SEQ ID NO: 317768
agauaugguuucccaucua

SEQ ID NO: 510686 - RNA, 19 nt, Artificial Sequence
  Description of Artificial Sequence: Synthetic oligonucleotide
  Antisense strand to SEQ ID NO: 510685
uagaugggaaaccauaucu

SEQ ID NO: 510687 - RNA, 19 nt, Artificial Sequence
  Description of Artificial Sequence: Synthetic oligonucleotide
  Sense strand starting at position 2816 of SEQ ID NO: 317768
gacgguugugaugauuaaa

SEQ ID NO: 510688 - RNA, 19 nt, Artificial Sequence
  Description of Artificial Sequence: Synthetic oligonucleotide
  Antisense strand to SEQ ID NO: 510687
uuuaaucaucacaaccguc

SEQ ID NO: 510689 - RNA, 19 nt, Artificial Sequence
  Description of Artificial Sequence: Synthetic oligonucleotide
  Sense strand starting at position 2848 of SEQ ID NO: 317768
uuauaaggugcuuaaugga

SEQ ID NO: 510690 - RNA, 19 nt, Artificial Sequence
  Description of Artificial Sequence: Synthetic oligonucleotide
  Antisense strand to SEQ ID NO: 510689
uccauuaagcaccuuauaa

SEQ ID NO: 510691 - RNA, 19 nt, Artificial Sequence
  Description of Artificial Sequence: Synthetic oligonucleotide
  Sense strand starting at position 2855 of SEQ ID NO: 317768
gugcuuaauggagauccuu

SEQ ID NO: 510692 - RNA, 19 nt, Artificial Sequence
  Description of Artificial Sequence: Synthetic oligonucleotide
  Antisense strand to SEQ ID NO: 510691
aaggaucuccauuaagcac

SEQ ID NO: 510693 - RNA, 19 nt, Artificial Sequence
  Description of Artificial Sequence: Synthetic oligonucleotide
  Sense strand starting at position 2863 of SEQ ID NO: 317768
uggagauccuugcuuaaag

SEQ ID NO: 510694 - RNA, 19 nt, Artificial Sequence
  Description of Artificial Sequence: Synthetic oligonucleotide
  Antisense strand to SEQ ID NO: 510693
cuuuaagcaaggaucucca

SEQ ID NO: 510695 - RNA, 19 nt, Artificial Sequence
  Description of Artificial Sequence: Synthetic oligonucleotide
  Sense strand starting at position 2864 of SEQ ID NO: 317768
ggagauccuugcuuaaagu

SEQ ID NO: 510696 - RNA, 19 nt, Artificial Sequence
  Description of Artificial Sequence: Synthetic oligonucleotide
  Antisense strand to SEQ ID NO: 510695
acuuuaagcaaggaucucc

SEQ ID NO: 510697 - RNA, 19 nt, Artificial Sequence
  Description of Artificial Sequence: Synthetic oligonucleotide
  Sense strand starting at position 2865 of SEQ ID NO: 317768
gagauccuugcuuaaagua

SEQ ID NO: 510698 - RNA, 19 nt, Artificial Sequence
  Description of Artificial Sequence: Synthetic oligonucleotide
  Antisense strand to SEQ ID NO: 510697
uacuuuaagcaaggaucuc

SEQ ID NO: 510699 - RNA, 19 nt, Artificial Sequence
  Description of Artificial Sequence: Synthetic oligonucleotide
  Sense strand starting at position 3084 of SEQ ID NO: 317768
auacuuuacuaguugaaag

SEQ ID NO: 510700 - RNA, 19 nt, Artificial Sequence
  Description of Artificial Sequence: Synthetic oligonucleotide
  Antisense strand to SEQ ID NO: 510699
cuuucaacuaguaaaguau

SEQ ID NO: 510701 - RNA, 19 nt, Artificial Sequence
  Description of Artificial Sequence: Synthetic oligonucleotide
  Sense strand starting at position 3645 of SEQ ID NO: 317768
uggugacuggaauguguaa

SEQ ID NO: 510702 - RNA, 19 nt, Artificial Sequence
  Description of Artificial Sequence: Synthetic oligonucleotide
  Antisense strand to SEQ ID NO: 510701
uuacacauuccagucacca

SEQ ID NO: 510703 - RNA, 19 nt, Artificial Sequence
  Description of Artificial Sequence: Synthetic oligonucleotide
  Sense strand starting at position 3744 of SEQ ID NO: 317768
agcuuugacuaucuaauga

SEQ ID NO: 510704 - RNA, 19 nt, Artificial Sequence
  Description of Artificial Sequence: Synthetic oligonucleotide
  Antisense strand to SEQ ID NO: 510703
ucauuagauagucaaagcu

SEQ ID NO: 510705 - RNA, 19 nt, Artificial Sequence
  Description of Artificial Sequence: Synthetic oligonucleotide
  Sense strand starting at position 31 of SEQ ID NO: 317769
ggacuagauaccuggguuc

SEQ ID NO: 510706 - RNA, 19 nt, Artificial Sequence
  Description of Artificial Sequence: Synthetic oligonucleotide
  Antisense strand to SEQ ID NO: 510705
gaacccagguaucuagucc

SEQ ID NO: 510707 - RNA, 19 nt, Artificial Sequence
  Description of Artificial Sequence: Synthetic oligonucleotide
  Sense strand starting at position 170 of SEQ ID NO: 317769
ggcugugccagcuuuacuu

SEQ ID NO: 510708 - RNA, 19 nt, Artificial Sequence
  Description of Artificial Sequence: Synthetic oligonucleotide
  Antisense strand to SEQ ID NO: 510707
aaguaaagcuggcacagcc

SEQ ID NO: 510709 - RNA, 19 nt, Artificial Sequence
  Description of Artificial Sequence: Synthetic oligonucleotide
  Sense strand starting at position 230 of SEQ ID NO: 317769
gcugguaagucucucagaa

SEQ ID NO: 510710 - RNA, 19 nt, Artificial Sequence
  Description of Artificial Sequence: Synthetic oligonucleotide
  Antisense strand to SEQ ID NO: 510709
uucugagagacuuaccagc

SEQ ID NO: 510711 - RNA, 19 nt, Artificial Sequence
  Description of Artificial Sequence: Synthetic oligonucleotide
  Sense strand starting at position 332 of SEQ ID NO: 317769
ccucuagguagauggaauu

SEQ ID NO: 510712 - RNA, 19 nt, Artificial Sequence
  Description of Artificial Sequence: Synthetic oligonucleotide
  Antisense strand to SEQ ID NO: 510711
aauuccaucuaccuagagg

SEQ ID NO: 510713 - RNA, 19 nt, Artificial Sequence
  Description of Artificial Sequence: Synthetic oligonucleotide
  Sense strand starting at position 406 of SEQ ID NO: 317769
cucucagaugcuuagggau

SEQ ID NO: 510714 - RNA, 19 nt, Artificial Sequence
  Description of Artificial Sequence: Synthetic oligonucleotide
  Antisense strand to SEQ ID NO: 510713
aucccuaagcaucugagag

SEQ ID NO: 510715 - RNA, 19 nt, Artificial Sequence
  Description of Artificial Sequence: Synthetic oligonucleotide
  Sense strand starting at position 585 of SEQ ID NO: 317769
ggucucuccgccuugucau

SEQ ID NO: 510716 - RNA, 19 nt, Artificial Sequence
  Description of Artificial Sequence: Synthetic oligonucleotide
  Antisense strand to SEQ ID NO: 510715
augacaaggcggagagacc

SEQ ID NO: 510717 - RNA, 19 nt, Artificial Sequence
  Description of Artificial Sequence: Synthetic oligonucleotide
  Sense strand starting at position 653 of SEQ ID NO: 317769
cccuguuggagugaguaaa

SEQ ID NO: 510718 - RNA, 19 nt, Artificial Sequence
  Description of Artificial Sequence: Synthetic oligonucleotide
  Antisense strand to SEQ ID NO: 510717
uuuacucacuccaacaggg

SEQ ID NO: 510719 - RNA, 19 nt, Artificial Sequence
  Description of Artificial Sequence: Synthetic oligonucleotide
  Sense strand starting at position 664 of SEQ ID NO: 317769
ugaguaaagacaugagggu

SEQ ID NO: 510720 - RNA, 19 nt, Artificial Sequence
  Description of Artificial Sequence: Synthetic oligonucleotide
  Antisense strand to SEQ ID NO: 510719
acccucaugucuuuacuca

SEQ ID NO: 510721 - RNA, 19 nt, Artificial Sequence
  Description of Artificial Sequence: Synthetic oligonucleotide
  Sense strand starting at position 677 of SEQ ID NO: 317769
gaggguuucuaggucagga

SEQ ID NO: 510722 - RNA, 19 nt, Artificial Sequence
  Description of Artificial Sequence: Synthetic oligonucleotide
  Antisense strand to SEQ ID NO: 510721
uccugaccuagaaacccuc

SEQ ID NO: 510723 - RNA, 19 nt, Artificial Sequence
  Description of Artificial Sequence: Synthetic oligonucleotide
  Sense strand starting at position 679 of SEQ ID NO: 317769
ggguuucuaggucaggagu

SEQ ID NO: 510724 - RNA, 19 nt, Artificial Sequence
  Description of Artificial Sequence: Synthetic oligonucleotide
  Antisense strand to SEQ ID NO: 510723
acuccugaccuagaaaccc

SEQ ID NO: 510725 - RNA, 19 nt, Artificial Sequence
  Description of Artificial Sequence: Synthetic oligonucleotide
  Sense strand starting at position 762 of SEQ ID NO: 317769
aguagaauccuccaggcua

SEQ ID NO: 510726 - RNA, 19 nt, Artificial Sequence
  Description of Artificial Sequence: Synthetic oligonucleotide
  Antisense strand to SEQ ID NO: 510725
uagccuggaggauucuacu

SEQ ID NO: 510727 - RNA, 19 nt, Artificial Sequence
  Description of Artificial Sequence: Synthetic oligonucleotide
  Sense strand starting at position 782 of SEQ ID NO: 317769
gacuacuguuaggcagaaa

SEQ ID NO: 510728 - RNA, 19 nt, Artificial Sequence
  Description of Artificial Sequence: Synthetic oligonucleotide
  Antisense strand to SEQ ID NO: 510727
uuucugccuaacaguaguc

SEQ ID NO: 510729 - RNA, 19 nt, Artificial Sequence
  Description of Artificial Sequence: Synthetic oligonucleotide
  Sense strand starting at position 1021 of SEQ ID NO: 317769
cccugaggaggcuaucuuu

SEQ ID NO: 510730 - RNA, 19 nt, Artificial Sequence
  Description of Artificial Sequence: Synthetic oligonucleotide
  Antisense strand to SEQ ID NO: 510729
aaagauagccuccucaggg

SEQ ID NO: 510731 - RNA, 19 nt, Artificial Sequence
  Description of Artificial Sequence: Synthetic oligonucleotide
  Sense strand starting at position 1024 of SEQ ID NO: 317769
ugaggaggcuaucuuucua

SEQ ID NO: 510732 - RNA, 19 nt, Artificial Sequence
  Description of Artificial Sequence: Synthetic oligonucleotide
  Antisense strand to SEQ ID NO: 510731
uagaaagauagccuccuca

SEQ ID NO: 510733 - RNA, 19 nt, Artificial Sequence
  Description of Artificial Sequence: Synthetic oligonucleotide
  Sense strand starting at position 1088 of SEQ ID NO: 317769
cuggucucacugcaagaaa

SEQ ID NO: 510734 - RNA, 19 nt, Artificial Sequence
  Description of Artificial Sequence: Synthetic oligonucleotide
  Antisense strand to SEQ ID NO: 510733
uuucuugcagugagaccag

SEQ ID NO: 510735 - RNA, 19 nt, Artificial Sequence
  Description of Artificial Sequence: Synthetic oligonucleotide
  Sense strand starting at position 1300 of SEQ ID NO: 317769
gucaucaccugggcauauu

SEQ ID NO: 510736 - RNA, 19 nt, Artificial Sequence
  Description of Artificial Sequence: Synthetic oligonucleotide
  Antisense strand to SEQ ID NO: 510735
aauaugcccaggugaugac

SEQ ID NO: 510737 - RNA, 19 nt, Artificial Sequence
  Description of Artificial Sequence: Synthetic oligonucleotide
  Sense strand starting at position 1327 of SEQ ID NO: 317769
gcagcuucugucuuggcaa

SEQ ID NO: 510738 - RNA, 19 nt, Artificial Sequence
  Description of Artificial Sequence: Synthetic oligonucleotide
  Antisense strand to SEQ ID NO: 510737
uugccaagacagaagcugc

SEQ ID NO: 510739 - RNA, 19 nt, Artificial Sequence
  Description of Artificial Sequence: Synthetic oligonucleotide
  Sense strand starting at position 1349 of SEQ ID NO: 317769
ugggccugagccugagauu

SEQ ID NO: 510740 - RNA, 19 nt, Artificial Sequence
  Description of Artificial Sequence: Synthetic oligonucleotide
  Antisense strand to SEQ ID NO: 510739
aaucucaggcucaggccca

SEQ ID NO: 510741 - RNA, 19 nt, Artificial Sequence
  Description of Artificial Sequence: Synthetic oligonucleotide
  Sense strand starting at position 1412 of SEQ ID NO: 317769
guggaacacucuucgagca

SEQ ID NO: 510742 - RNA, 19 nt, Artificial Sequence
  Description of Artificial Sequence: Synthetic oligonucleotide
  Antisense strand to SEQ ID NO: 510741
ugcucgaagaguguuccac

SEQ ID NO: 510743 - RNA, 19 nt, Artificial Sequence
  Description of Artificial Sequence: Synthetic oligonucleotide
  Sense strand starting at position 1424 of SEQ ID NO: 317769
ucgagcagcccugagauua

SEQ ID NO: 510744 - RNA, 19 nt, Artificial Sequence
  Description of Artificial Sequence: Synthetic oligonucleotide
  Antisense strand to SEQ ID NO: 510743
uaaucucagggcugcucga

SEQ ID NO: 510745 - RNA, 19 nt, Artificial Sequence
  Description of Artificial Sequence: Synthetic oligonucleotide
  Sense strand starting at position 1434 of SEQ ID NO: 317769
cugagauuaucagccuuua

SEQ ID NO: 510746 - RNA, 19 nt, Artificial Sequence
  Description of Artificial Sequence: Synthetic oligonucleotide
  Antisense strand to SEQ ID NO: 510745
uaaaggcugauaaucucag

SEQ ID NO: 510747 - RNA, 19 nt, Artificial Sequence
  Description of Artificial Sequence: Synthetic oligonucleotide
  Sense strand starting at position 1608 of SEQ ID NO: 317769
ccgggugccguguuuguaa

SEQ ID NO: 510748 - RNA, 19 nt, Artificial Sequence
  Description of Artificial Sequence: Synthetic oligonucleotide
  Antisense strand to SEQ ID NO: 510747
uuacaaacacggcacccgg

SEQ ID NO: 510749 - RNA, 19 nt, Artificial Sequence
  Description of Artificial Sequence: Synthetic oligonucleotide
  Sense strand starting at position 1706 of SEQ ID NO: 317769
ccagguucuccguccggua

SEQ ID NO: 510750 - RNA, 19 nt, Artificial Sequence
  Description of Artificial Sequence: Synthetic oligonucleotide
  Antisense strand to SEQ ID NO: 510749
uaccggacggagaaccugg

SEQ ID NO: 510751 - RNA, 19 nt, Artificial Sequence
  Description of Artificial Sequence: Synthetic oligonucleotide
  Sense strand starting at position 2322 of SEQ ID NO: 317769
gccauaucagugcaacaaa

SEQ ID NO: 510752 - RNA, 19 nt, Artificial Sequence
  Description of Artificial Sequence: Synthetic oligonucleotide
  Antisense strand to SEQ ID NO: 510751
uuuguugcacugauauggc

SEQ ID NO: 510753 - RNA, 19 nt, Artificial Sequence
  Description of Artificial Sequence: Synthetic oligonucleotide
  Sense strand starting at position 3069 of SEQ ID NO: 317769
ccucacuucugggcugaua

SEQ ID NO: 510754 - RNA, 19 nt, Artificial Sequence
  Description of Artificial Sequence: Synthetic oligonucleotide
  Antisense strand to SEQ ID NO: 510753
uaucagcccagaagugagg

SEQ ID NO: 510755 - RNA, 19 nt, Artificial Sequence
  Description of Artificial Sequence: Synthetic oligonucleotide
  Sense strand starting at position 3071 of SEQ ID NO: 317769
ucacuucugggcugauagu

SEQ ID NO: 510756 - RNA, 19 nt, Artificial Sequence
  Description of Artificial Sequence: Synthetic oligonucleotide
  Antisense strand to SEQ ID NO: 510755
acuaucagcccagaaguga

SEQ ID NO: 510757 - RNA, 19 nt, Artificial Sequence
  Description of Artificial Sequence: Synthetic oligonucleotide
  Sense strand starting at position 3124 of SEQ ID NO: 317769
ucuauccaucuuggauaga

SEQ ID NO: 510758 - RNA, 19 nt, Artificial Sequence
  Description of Artificial Sequence: Synthetic oligonucleotide
  Antisense strand to SEQ ID NO: 510757
ucuauccaagauggauaga

SEQ ID NO: 510759 - RNA, 19 nt, Artificial Sequence
  Description of Artificial Sequence: Synthetic oligonucleotide
  Sense strand starting at position 3200 of SEQ ID NO: 317769
aaaugucagugucuaggaa

SEQ ID NO: 510760 - RNA, 19 nt, Artificial Sequence
  Description of Artificial Sequence: Synthetic oligonucleotide
  Antisense strand to SEQ ID NO: 510759
uuccuagacacugacauuu

SEQ ID NO: 510761 - RNA, 19 nt, Artificial Sequence
  Description of Artificial Sequence: Synthetic oligonucleotide
  Sense strand starting at position 3201 of SEQ ID NO: 317769
aaugucagugucuaggaaa

SEQ ID NO: 510762 - RNA, 19 nt, Artificial Sequence
  Description of Artificial Sequence: Synthetic oligonucleotide
  Antisense strand to SEQ ID NO: 510761
uuuccuagacacugacauu

SEQ ID NO: 510763 - RNA, 19 nt, Artificial Sequence
  Description of Artificial Sequence: Synthetic oligonucleotide
  Sense strand starting at position 3243 of SEQ ID NO: 317769
uuguuauuagcugagguuu

SEQ ID NO: 510764 - RNA, 19 nt, Artificial Sequence
  Description of Artificial Sequence: Synthetic oligonucleotide
  Antisense strand to SEQ ID NO: 510763
aaaccucagcuaauaacaa

SEQ ID NO: 510765 - RNA, 19 nt, Artificial Sequence
  Description of Artificial Sequence: Synthetic oligonucleotide
  Sense strand starting at position 3256 of SEQ ID NO: 317769
agguuucugaaauggcaau

SEQ ID NO: 510766 - RNA, 19 nt, Artificial Sequence
  Description of Artificial Sequence: Synthetic oligonucleotide
  Antisense strand to SEQ ID NO: 510765
auugccauuucagaaaccu

SEQ ID NO: 510767 - RNA, 19 nt, Artificial Sequence
  Description of Artificial Sequence: Synthetic oligonucleotide
  Sense strand starting at position 3312 of SEQ ID NO: 317769
augccuauuugcguguaua

SEQ ID NO: 510768 - RNA, 19 nt, Artificial Sequence
  Description of Artificial Sequence: Synthetic oligonucleotide
  Antisense strand to SEQ ID NO: 510767
uauacacgcaaauaggcau

SEQ ID NO: 510769 - RNA, 19 nt, Artificial Sequence
  Description of Artificial Sequence: Synthetic oligonucleotide
  Sense strand starting at position 3315 of SEQ ID NO: 317769
ccuauuugcguguauauug

SEQ ID NO: 510770 - RNA, 19 nt, Artificial Sequence
  Description of Artificial Sequence: Synthetic oligonucleotide
  Antisense strand to SEQ ID NO: 510769
caauauacacgcaaauagg

SEQ ID NO: 510771 - RNA, 19 nt, Artificial Sequence
  Description of Artificial Sequence: Synthetic oligonucleotide
  Sense strand starting at position 3381 of SEQ ID NO: 317769
acggcuuagagucaugaau

SEQ ID NO: 510772 - RNA, 19 nt, Artificial Sequence
  Description of Artificial Sequence: Synthetic oligonucleotide
  Antisense strand to SEQ ID NO: 510771
auucaugacucuaagccgu

SEQ ID NO: 510773 - RNA, 19 nt, Artificial Sequence
  Description of Artificial Sequence: Synthetic oligonucleotide
  Sense strand starting at position 3522 of SEQ ID NO: 317769
agagaaugguggcucacaa

SEQ ID NO: 510774 - RNA, 19 nt, Artificial Sequence
  Description of Artificial Sequence: Synthetic oligonucleotide
  Antisense strand to SEQ ID NO: 510773
uugugagccaccauucucu

SEQ ID NO: 510775 - RNA, 19 nt, Artificial Sequence
  Description of Artificial Sequence: Synthetic oligonucleotide
  Sense strand starting at position 3531 of SEQ ID NO: 317769
uggcucacaaagugugauu

SEQ ID NO: 510776 - RNA, 19 nt, Artificial Sequence
  Description of Artificial Sequence: Synthetic oligonucleotide
  Antisense strand to SEQ ID NO: 510775
aaucacacuuugugagcca

SEQ ID NO: 510777 - RNA, 19 nt, Artificial Sequence
  Description of Artificial Sequence: Synthetic oligonucleotide
  Sense strand starting at position 3779 of SEQ ID NO: 317769
uuggaacagugcucaugau

SEQ ID NO: 510778 - RNA, 19 nt, Artificial Sequence
  Description of Artificial Sequence: Synthetic oligonucleotide
  Antisense strand to SEQ ID NO: 510777
aucaugagcacuguuccaa

SEQ ID NO: 510779 - RNA, 19 nt, Artificial Sequence
  Description of Artificial Sequence: Synthetic oligonucleotide
  Sense strand starting at position 3780 of SEQ ID NO: 317769
uggaacagugcucaugauu

SEQ ID NO: 510780 - RNA, 19 nt, Artificial Sequence
  Description of Artificial Sequence: Synthetic oligonucleotide
  Antisense strand to SEQ ID NO: 510779
aaucaugagcacuguucca

SEQ ID NO: 510781 - RNA, 19 nt, Artificial Sequence
  Description of Artificial Sequence: Synthetic oligonucleotide
  Sense strand starting at position 3846 of SEQ ID NO: 317769
gguuaaauacauuaugcua

SEQ ID NO: 510782 - RNA, 19 nt, Artificial Sequence
  Description of Artificial Sequence: Synthetic oligonucleotide
  Antisense strand to SEQ ID NO: 510781
uagcauaauguauuuaacc

SEQ ID NO: 510783 - RNA, 19 nt, Artificial Sequence
  Description of Artificial Sequence: Synthetic oligonucleotide
  Sense strand starting at position 3977 of SEQ ID NO: 317769
accacuguauuggugagau

SEQ ID NO: 510784 - RNA, 19 nt, Artificial Sequence
  Description of Artificial Sequence: Synthetic oligonucleotide
  Antisense strand to SEQ ID NO: 510783
aucucaccaauacaguggu

SEQ ID NO: 510785 - RNA, 19 nt, Artificial Sequence
  Description of Artificial Sequence: Synthetic oligonucleotide
  Sense strand starting at position 36 of SEQ ID NO: 317770
ccuaaacugccuuagguaa

SEQ ID NO: 510786 - RNA, 19 nt, Artificial Sequence
  Description of Artificial Sequence: Synthetic oligonucleotide
  Antisense strand to SEQ ID NO: 510785
uuaccuaaggcaguuuagg

SEQ ID NO: 510787 - RNA, 19 nt, Artificial Sequence
  Description of Artificial Sequence: Synthetic oligonucleotide
  Sense strand starting at position 49 of SEQ ID NO: 317770
agguaaagcaucgagacua

SEQ ID NO: 510788 - RNA, 19 nt, Artificial Sequence
  Description of Artificial Sequence: Synthetic oligonucleotide
  Antisense strand to SEQ ID NO: 510787
uagucucgaugcuuuaccu

SEQ ID NO: 510789 - RNA, 19 nt, Artificial Sequence
  Description of Artificial Sequence: Synthetic oligonucleotide
  Sense strand starting at position 261 of SEQ ID NO: 317770
ccuccuuuccuguaggaga

SEQ ID NO: 510790 - RNA, 19 nt, Artificial Sequence
  Description of Artificial Sequence: Synthetic oligonucleotide
  Antisense strand to SEQ ID NO: 510789
ucuccuacaggaaaggagg

SEQ ID NO: 510791 - RNA, 19 nt, Artificial Sequence
  Description of Artificial Sequence: Synthetic oligonucleotide
  Sense strand starting at position 433 of SEQ ID NO: 317770
cccaaaucucaauggugaa

SEQ ID NO: 510792 - RNA, 19 nt, Artificial Sequence
  Description of Artificial Sequence: Synthetic oligonucleotide
  Antisense strand to SEQ ID NO: 510791
uucaccauugagauuuggg

SEQ ID NO: 510793 - RNA, 19 nt, Artificial Sequence
  Description of Artificial Sequence: Synthetic oligonucleotide
  Sense strand starting at position 555 of SEQ ID NO: 317770
uucuguugcuuauuuguau

SEQ ID NO: 510794 - RNA, 19 nt, Artificial Sequence
  Description of Artificial Sequence: Synthetic oligonucleotide
  Antisense strand to SEQ ID NO: 510793
auacaaauaagcaacagaa

SEQ ID NO: 510795 - RNA, 19 nt, Artificial Sequence
  Description of Artificial Sequence: Synthetic oligonucleotide
  Sense strand starting at position 556 of SEQ ID NO: 317770
ucuguugcuuauuuguaua

SEQ ID NO: 510796 - RNA, 19 nt, Artificial Sequence
  Description of Artificial Sequence: Synthetic oligonucleotide
  Antisense strand to SEQ ID NO: 510795
uauacaaauaagcaacaga

SEQ ID NO: 510797 - RNA, 19 nt, Artificial Sequence
  Description of Artificial Sequence: Synthetic oligonucleotide
  Sense strand starting at position 685 of SEQ ID NO: 317770
caugguaugguggaaucau

SEQ ID NO: 510798 - RNA, 19 nt, Artificial Sequence
  Description of Artificial Sequence: Synthetic oligonucleotide
  Antisense strand to SEQ ID NO: 510797
augauuccaccauaccaug

SEQ ID NO: 510799 - RNA, 19 nt, Artificial Sequence
  Description of Artificial Sequence: Synthetic oligonucleotide
  Sense strand starting at position 741 of SEQ ID NO: 317770
uccaauuuguaugugugua

SEQ ID NO: 510800 - RNA, 19 nt, Artificial Sequence
  Description of Artificial Sequence: Synthetic oligonucleotide
  Antisense strand to SEQ ID NO: 510799
uacacacauacaaauugga

SEQ ID NO: 510801 - RNA, 19 nt, Artificial Sequence
  Description of Artificial Sequence: Synthetic oligonucleotide
  Sense strand starting at position 742 of SEQ ID NO: 317770
ccaauuuguauguguguau

SEQ ID NO: 510802 - RNA, 19 nt, Artificial Sequence
  Description of Artificial Sequence: Synthetic oligonucleotide
  Antisense strand to SEQ ID NO: 510801
auacacacauacaaauugg

SEQ ID NO: 510803 - RNA, 19 nt, Artificial Sequence
  Description of Artificial Sequence: Synthetic oligonucleotide
  Sense strand starting at position 764 of SEQ ID NO: 317770
ugaguauguacaugagaaa

SEQ ID NO: 510804 - RNA, 19 nt, Artificial Sequence
  Description of Artificial Sequence: Synthetic oligonucleotide
  Antisense strand to SEQ ID NO: 510803
uuucucauguacauacuca

SEQ ID NO: 510805 - RNA, 19 nt, Artificial Sequence
  Description of Artificial Sequence: Synthetic oligonucleotide
  Sense strand starting at position 906 of SEQ ID NO: 317770
aagagucauuggucaagua

SEQ ID NO: 510806 - RNA, 19 nt, Artificial Sequence
  Description of Artificial Sequence: Synthetic oligonucleotide
  Antisense strand to SEQ ID NO: 510805
uacuugaccaaugacucuu

SEQ ID NO: 510807 - RNA, 19 nt, Artificial Sequence
  Description of Artificial Sequence: Synthetic oligonucleotide
  Sense strand starting at position 907 of SEQ ID NO: 317770
agagucauuggucaaguau

SEQ ID NO: 510808 - RNA, 19 nt, Artificial Sequence
  Description of Artificial Sequence: Synthetic oligonucleotide
  Antisense strand to SEQ ID NO: 510807
auacuugaccaaugacucu

SEQ ID NO: 510809 - RNA, 19 nt, Artificial Sequence
  Description of Artificial Sequence: Synthetic oligonucleotide
  Sense strand starting at position 936 of SEQ ID NO: 317770
cacuuaggguuuccugaau

SEQ ID NO: 510810 - RNA, 19 nt, Artificial Sequence
  Description of Artificial Sequence: Synthetic oligonucleotide
  Antisense strand to SEQ ID NO: 510809
auucaggaaacccuaagug

SEQ ID NO: 510811 - RNA, 19 nt, Artificial Sequence
  Description of Artificial Sequence: Synthetic oligonucleotide
  Sense strand starting at position 942 of SEQ ID NO: 317770
ggguuuccugaauauagua

SEQ ID NO: 510812 - RNA, 19 nt, Artificial Sequence
  Description of Artificial Sequence: Synthetic oligonucleotide
  Antisense strand to SEQ ID NO: 510811
uacuauauucaggaaaccc

SEQ ID NO: 510813 - RNA, 19 nt, Artificial Sequence
  Description of Artificial Sequence: Synthetic oligonucleotide
  Sense strand starting at position 975 of SEQ ID NO: 317770
agaagagauucccucuagu

SEQ ID NO: 510814 - RNA, 19 nt, Artificial Sequence
  Description of Artificial Sequence: Synthetic oligonucleotide
  Antisense strand to SEQ ID NO: 510813
acuagagggaaucucuucu

SEQ ID NO: 510815 - RNA, 19 nt, Artificial Sequence
  Description of Artificial Sequence: Synthetic oligonucleotide
  Sense strand starting at position 1395 of SEQ ID NO: 317770
gcugacuuugcucaggaaa

SEQ ID NO: 510816 - RNA, 19 nt, Artificial Sequence
  Description of Artificial Sequence: Synthetic oligonucleotide
  Antisense strand to SEQ ID NO: 510815
uuuccugagcaaagucagc

SEQ ID NO: 510817 - RNA, 19 nt, Artificial Sequence
  Description of Artificial Sequence: Synthetic oligonucleotide
  Sense strand starting at position 1589 of SEQ ID NO: 317770
gaaacauagcucgaaguug

SEQ ID NO: 510818 - RNA, 19 nt, Artificial Sequence
  Description of Artificial Sequence: Synthetic oligonucleotide
  Antisense strand to SEQ ID NO: 510817
caacuucgagcuauguuuc

SEQ ID NO: 510819 - RNA, 19 nt, Artificial Sequence
  Description of Artificial Sequence: Synthetic oligonucleotide
  Sense strand starting at position 1665 of SEQ ID NO: 317770
gaaugagguuccuuccuga

SEQ ID NO: 510820 - RNA, 19 nt, Artificial Sequence
  Description of Artificial Sequence: Synthetic oligonucleotide
  Antisense strand to SEQ ID NO: 510819
ucaggaaggaaccucauuc

SEQ ID NO: 510821 - RNA, 19 nt, Artificial Sequence
  Description of Artificial Sequence: Synthetic oligonucleotide
  Sense strand starting at position 1668 of SEQ ID NO: 317770
ugagguuccuuccugaaac

SEQ ID NO: 510822 - RNA, 19 nt, Artificial Sequence
  Description of Artificial Sequence: Synthetic oligonucleotide
  Antisense strand to SEQ ID NO: 510821
guuucaggaaggaaccuca

SEQ ID NO: 510823 - RNA, 19 nt, Artificial Sequence
  Description of Artificial Sequence: Synthetic oligonucleotide
  Sense strand starting at position 1670 of SEQ ID NO: 317770
agguuccuuccugaaacuu

SEQ ID NO: 510824 - RNA, 19 nt, Artificial Sequence
  Description of Artificial Sequence: Synthetic oligonucleotide
  Antisense strand to SEQ ID NO: 510823
aaguuucaggaaggaaccu

SEQ ID NO: 510825 - RNA, 19 nt, Artificial Sequence
  Description of Artificial Sequence: Synthetic oligonucleotide
  Sense strand starting at position 1722 of SEQ ID NO: 317770
ucuuguagguaaucagaaa

SEQ ID NO: 510826 - RNA, 19 nt, Artificial Sequence
  Description of Artificial Sequence: Synthetic oligonucleotide
  Antisense strand to SEQ ID NO: 510825
uuucugauuaccuacaaga

SEQ ID NO: 510827 - RNA, 19 nt, Artificial Sequence
  Description of Artificial Sequence: Synthetic oligonucleotide
  Sense strand starting at position 1747 of SEQ ID NO: 317770
ggaaauuccugcuugaaga

SEQ ID NO: 510828 - RNA, 19 nt, Artificial Sequence
  Description of Artificial Sequence: Synthetic oligonucleotide
  Antisense strand to SEQ ID NO: 510827
ucuucaagcaggaauuucc

SEQ ID NO: 510829 - RNA, 19 nt, Artificial Sequence
  Description of Artificial Sequence: Synthetic oligonucleotide
  Sense strand starting at position 1748 of SEQ ID NO: 317770
gaaauuccugcuugaagag

SEQ ID NO: 510830 - RNA, 19 nt, Artificial Sequence
  Description of Artificial Sequence: Synthetic oligonucleotide
  Antisense strand to SEQ ID NO: 510829
cucuucaagcaggaauuuc

SEQ ID NO: 510831 - RNA, 19 nt, Artificial Sequence
  Description of Artificial Sequence: Synthetic oligonucleotide
  Sense strand starting at position 1995 of SEQ ID NO: 317770
uguccuugggcacagagaa

SEQ ID NO: 510832 - RNA, 19 nt, Artificial Sequence
  Description of Artificial Sequence: Synthetic oligonucleotide
  Antisense strand to SEQ ID NO: 510831
uucucugugcccaaggaca

SEQ ID NO: 510833 - RNA, 19 nt, Artificial Sequence
  Description of Artificial Sequence: Synthetic oligonucleotide
  Sense strand starting at position 2063 of SEQ ID NO: 317770
gguaucuauuucucauguu

SEQ ID NO: 510834 - RNA, 19 nt, Artificial Sequence
  Description of Artificial Sequence: Synthetic oligonucleotide
  Antisense strand to SEQ ID NO: 510833
aacaugagaaauagauacc

SEQ ID NO: 510835 - RNA, 19 nt, Artificial Sequence
  Description of Artificial Sequence: Synthetic oligonucleotide
  Sense strand starting at position 2432 of SEQ ID NO: 317770
aaauguaucuuuguggaaa

SEQ ID NO: 510836 - RNA, 19 nt, Artificial Sequence
  Description of Artificial Sequence: Synthetic oligonucleotide
  Antisense strand to SEQ ID NO: 510835
uuuccacaaagauacauuu

SEQ ID NO: 510837 - RNA, 19 nt, Artificial Sequence
  Description of Artificial Sequence: Synthetic oligonucleotide
  Sense strand starting at position 2435 of SEQ ID NO: 317770
uguaucuuuguggaaagau

SEQ ID NO: 510838 - RNA, 19 nt, Artificial Sequence
  Description of Artificial Sequence: Synthetic oligonucleotide
  Antisense strand to SEQ ID NO: 510837
aucuuuccacaaagauaca

SEQ ID NO: 510839 - RNA, 19 nt, Artificial Sequence
  Description of Artificial Sequence: Synthetic oligonucleotide
  Sense strand starting at position 2522 of SEQ ID NO: 317770
uagcuuauuuaggagaaag

SEQ ID NO: 510840 - RNA, 19 nt, Artificial Sequence
  Description of Artificial Sequence: Synthetic oligonucleotide
  Antisense strand to SEQ ID NO: 510839
cuuucuccuaaauaagcua

SEQ ID NO: 510841 - RNA, 19 nt, Artificial Sequence
  Description of Artificial Sequence: Synthetic oligonucleotide
  Sense strand starting at position 2609 of SEQ ID NO: 317770
gcagcuuugcugccaauca

SEQ ID NO: 510842 - RNA, 19 nt, Artificial Sequence
  Description of Artificial Sequence: Synthetic oligonucleotide
  Antisense strand to SEQ ID NO: 510841
ugauuggcagcaaagcugc

SEQ ID NO: 510843 - RNA, 19 nt, Artificial Sequence
  Description of Artificial Sequence: Synthetic oligonucleotide
  Sense strand starting at position 2653 of SEQ ID NO: 317770
gcaugaagauaauuggauu

SEQ ID NO: 510844 - RNA, 19 nt, Artificial Sequence
  Description of Artificial Sequence: Synthetic oligonucleotide
  Antisense strand to SEQ ID NO: 510843
aauccaauuaucuucaugc

SEQ ID NO: 510845 - RNA, 19 nt, Artificial Sequence
  Description of Artificial Sequence: Synthetic oligonucleotide
  Sense strand starting at position 2667 of SEQ ID NO: 317770
ggauucuaauuguuccuca

SEQ ID NO: 510846 - RNA, 19 nt, Artificial Sequence
  Description of Artificial Sequence: Synthetic oligonucleotide
  Antisense strand to SEQ ID NO: 510845
ugaggaacaauuagaaucc

SEQ ID NO: 510847 - RNA, 19 nt, Artificial Sequence
  Description of Artificial Sequence: Synthetic oligonucleotide
  Sense strand starting at position 2697 of SEQ ID NO: 317770
guuguauaaccucaggcaa

SEQ ID NO: 510848 - RNA, 19 nt, Artificial Sequence
  Description of Artificial Sequence: Synthetic oligonucleotide
  Antisense strand to SEQ ID NO: 510847
uugccugagguuauacaac

SEQ ID NO: 510849 - RNA, 19 nt, Artificial Sequence
  Description of Artificial Sequence: Synthetic oligonucleotide
  Sense strand starting at position 2834 of SEQ ID NO: 317770
gcacuugaaauaugaguag

SEQ ID NO: 510850 - RNA, 19 nt, Artificial Sequence
  Description of Artificial Sequence: Synthetic oligonucleotide
  Antisense strand to SEQ ID NO: 510849
cuacucauauuucaagugc

SEQ ID NO: 510851 - RNA, 19 nt, Artificial Sequence
  Description of Artificial Sequence: Synthetic oligonucleotide
  Sense strand starting at position 2843 of SEQ ID NO: 317770
auaugaguaguccaaacuc

SEQ ID NO: 510852 - RNA, 19 nt, Artificial Sequence
  Description of Artificial Sequence: Synthetic oligonucleotide
  Antisense strand to SEQ ID NO: 510851
gaguuuggacuacucauau

SEQ ID NO: 510853 - RNA, 19 nt, Artificial Sequence
  Description of Artificial Sequence: Synthetic oligonucleotide
  Sense strand starting at position 2863 of SEQ ID NO: 317770
gauguacuauggguauaaa

SEQ ID NO: 510854 - RNA, 19 nt, Artificial Sequence
  Description of Artificial Sequence: Synthetic oligonucleotide
  Antisense strand to SEQ ID NO: 510853
uuuauacccauaguacauc

SEQ ID NO: 510855 - RNA, 19 nt, Artificial Sequence
  Description of Artificial Sequence: Synthetic oligonucleotide
  Sense strand starting at position 2949 of SEQ ID NO: 317770
cuguuuauugauuacauga

SEQ ID NO: 510856 - RNA, 19 nt, Artificial Sequence
  Description of Artificial Sequence: Synthetic oligonucleotide
  Antisense strand to SEQ ID NO: 510855
ucauguaaucaauaaacag

SEQ ID NO: 510857 - RNA, 19 nt, Artificial Sequence
  Description of Artificial Sequence: Synthetic oligonucleotide
  Sense strand starting at position 3132 of SEQ ID NO: 317770
gacaauguuuagguuauga

SEQ ID NO: 510858 - RNA, 19 nt, Artificial Sequence
  Description of Artificial Sequence: Synthetic oligonucleotide
  Antisense strand to SEQ ID NO: 510857
ucauaaccuaaacauuguc

SEQ ID NO: 510859 - RNA, 19 nt, Artificial Sequence
  Description of Artificial Sequence: Synthetic oligonucleotide
  Sense strand starting at position 3134 of SEQ ID NO: 317770
caauguuuagguuaugaug

SEQ ID NO: 510860 - RNA, 19 nt, Artificial Sequence
  Description of Artificial Sequence: Synthetic oligonucleotide
  Antisense strand to SEQ ID NO: 510859
caucauaaccuaaacauug

SEQ ID NO: 510861 - RNA, 19 nt, Artificial Sequence
  Description of Artificial Sequence: Synthetic oligonucleotide
  Sense strand starting at position 3275 of SEQ ID NO: 317770
uggcaucaucuuggaaaua

SEQ ID NO: 510862 - RNA, 19 nt, Artificial Sequence
  Description of Artificial Sequence: Synthetic oligonucleotide
  Antisense strand to SEQ ID NO: 510861
uauuuccaagaugaugcca

SEQ ID NO: 510863 - RNA, 19 nt, Artificial Sequence
  Description of Artificial Sequence: Synthetic oligonucleotide
  Sense strand starting at position 3862 of SEQ ID NO: 317770
acuugcuggguuuagauua

SEQ ID NO: 510864 - RNA, 19 nt, Artificial Sequence
  Description of Artificial Sequence: Synthetic oligonucleotide
  Antisense strand to SEQ ID NO: 510863
uaaucuaaacccagcaagu

SEQ ID NO: 510865 - RNA, 19 nt, Artificial Sequence
  Description of Artificial Sequence: Synthetic oligonucleotide
  Sense strand starting at position 28 of SEQ ID NO: 317771
gugucauagcuuuaucuca

SEQ ID NO: 510866 - RNA, 19 nt, Artificial Sequence
  Description of Artificial Sequence: Synthetic oligonucleotide
  Antisense strand to SEQ ID NO: 510865
ugagauaaagcuaugacac

SEQ ID NO: 510867 - RNA, 19 nt, Artificial Sequence
  Description of Artificial Sequence: Synthetic oligonucleotide
  Sense strand starting at position 30 of SEQ ID NO: 317771
gucauagcuuuaucucacu

SEQ ID NO: 510868 - RNA, 19 nt, Artificial Sequence
  Description of Artificial Sequence: Synthetic oligonucleotide
  Antisense strand to SEQ ID NO: 510867
agugagauaaagcuaugac

SEQ ID NO: 510869 - RNA, 19 nt, Artificial Sequence
  Description of Artificial Sequence: Synthetic oligonucleotide
  Sense strand starting at position 35 of SEQ ID NO: 317771
agcuuuaucucacuguauu

SEQ ID NO: 510870 - RNA, 19 nt, Artificial Sequence
  Description of Artificial Sequence: Synthetic oligonucleotide
  Antisense strand to SEQ ID NO: 510869
aauacagugagauaaagcu

SEQ ID NO: 510871 - RNA, 19 nt, Artificial Sequence
  Description of Artificial Sequence: Synthetic oligonucleotide
  Sense strand starting at position 36 of SEQ ID NO: 317771
gcuuuaucucacuguauuu

SEQ ID NO: 510872 - RNA, 19 nt, Artificial Sequence
  Description of Artificial Sequence: Synthetic oligonucleotide
  Antisense strand to SEQ ID NO: 510871
aaauacagugagauaaagc

SEQ ID NO: 510873 - RNA, 19 nt, Artificial Sequence
  Description of Artificial Sequence: Synthetic oligonucleotide
  Sense strand starting at position 76 of SEQ ID NO: 317771
aauucuuaguguuugaagu

SEQ ID NO: 510874 - RNA, 19 nt, Artificial Sequence
  Description of Artificial Sequence: Synthetic oligonucleotide
  Antisense strand to SEQ ID NO: 510873
acuucaaacacuaagaauu

SEQ ID NO: 510875 - RNA, 19 nt, Artificial Sequence
  Description of Artificial Sequence: Synthetic oligonucleotide
  Sense strand starting at position 77 of SEQ ID NO: 317771
auucuuaguguuugaagug

SEQ ID NO: 510876 - RNA, 19 nt, Artificial Sequence
  Description of Artificial Sequence: Synthetic oligonucleotide
  Antisense strand to SEQ ID NO: 510875
cacuucaaacacuaagaau

SEQ ID NO: 510877 - RNA, 19 nt, Artificial Sequence
  Description of Artificial Sequence: Synthetic oligonucleotide
  Sense strand starting at position 82 of SEQ ID NO: 317771
uaguguuugaagugaaggu

SEQ ID NO: 510878 - RNA, 19 nt, Artificial Sequence
  Description of Artificial Sequence: Synthetic oligonucleotide
  Antisense strand to SEQ ID NO: 510877
accuucacuucaaacacua

SEQ ID NO: 510879 - RNA, 19 nt, Artificial Sequence
  Description of Artificial Sequence: Synthetic oligonucleotide
  Sense strand starting at position 83 of SEQ ID NO: 317771
aguguuugaagugaagguu

SEQ ID NO: 510880 - RNA, 19 nt, Artificial Sequence
  Description of Artificial Sequence: Synthetic oligonucleotide
  Antisense strand to SEQ ID NO: 510879
aaccuucacuucaaacacu

SEQ ID NO: 510881 - RNA, 19 nt, Artificial Sequence
  Description of Artificial Sequence: Synthetic oligonucleotide
  Sense strand starting at position 91 of SEQ ID NO: 317771
aagugaagguuccugugca

SEQ ID NO: 510882 - RNA, 19 nt, Artificial Sequence
  Description of Artificial Sequence: Synthetic oligonucleotide
  Antisense strand to SEQ ID NO: 510881
ugcacaggaaccuucacuu

SEQ ID NO: 510883 - RNA, 19 nt, Artificial Sequence
  Description of Artificial Sequence: Synthetic oligonucleotide
  Sense strand starting at position 95 of SEQ ID NO: 317771
gaagguuccugugcaaagu

SEQ ID NO: 510884 - RNA, 19 nt, Artificial Sequence
  Description of Artificial Sequence: Synthetic oligonucleotide
  Antisense strand to SEQ ID NO: 510883
acuuugcacaggaaccuuc

SEQ ID NO: 510885 - RNA, 19 nt, Artificial Sequence
  Description of Artificial Sequence: Synthetic oligonucleotide
  Sense strand starting at position 96 of SEQ ID NO: 317771
aagguuccugugcaaagua

SEQ ID NO: 510886 - RNA, 19 nt, Artificial Sequence
  Description of Artificial Sequence: Synthetic oligonucleotide
  Antisense strand to SEQ ID NO: 510885
uacuuugcacaggaaccuu

SEQ ID NO: 510887 - RNA, 19 nt, Artificial Sequence
  Description of Artificial Sequence: Synthetic oligonucleotide
  Sense strand starting at position 345 of SEQ ID NO: 317771
cugccauugcguuacagga

SEQ ID NO: 510888 - RNA, 19 nt, Artificial Sequence
  Description of Artificial Sequence: Synthetic oligonucleotide
  Antisense strand to SEQ ID NO: 510887
uccuguaacgcaauggcag

SEQ ID NO: 510889 - RNA, 19 nt, Artificial Sequence
  Description of Artificial Sequence: Synthetic oligonucleotide
  Sense strand starting at position 620 of SEQ ID NO: 317771
cggaguaucgcucuguauc

SEQ ID NO: 510890 - RNA, 19 nt, Artificial Sequence
  Description of Artificial Sequence: Synthetic oligonucleotide
  Antisense strand to SEQ ID NO: 510889
gauacagagcgauacuccg

SEQ ID NO: 510891 - RNA, 19 nt, Artificial Sequence
  Description of Artificial Sequence: Synthetic oligonucleotide
  Sense strand starting at position 923 of SEQ ID NO: 317771
gaccaaaucggguaacuuu

SEQ ID NO: 510892 - RNA, 19 nt, Artificial Sequence
  Description of Artificial Sequence: Synthetic oligonucleotide
  Antisense strand to SEQ ID NO: 510891
aaaguuacccgauuugguc

SEQ ID NO: 510893 - RNA, 19 nt, Artificial Sequence
  Description of Artificial Sequence: Synthetic oligonucleotide
  Sense strand starting at position 1117 of SEQ ID NO: 317771
gucauccugugacuuagau

SEQ ID NO: 510894 - RNA, 19 nt, Artificial Sequence
  Description of Artificial Sequence: Synthetic oligonucleotide
  Antisense strand to SEQ ID NO: 510893
aucuaagucacaggaugac

SEQ ID NO: 510895 - RNA, 19 nt, Artificial Sequence
  Description of Artificial Sequence: Synthetic oligonucleotide
  Sense strand starting at position 1123 of SEQ ID NO: 317771
cugugacuuagaugggaau

SEQ ID NO: 510896 - RNA, 19 nt, Artificial Sequence
  Description of Artificial Sequence: Synthetic oligonucleotide
  Antisense strand to SEQ ID NO: 510895
auucccaucuaagucacag

SEQ ID NO: 510897 - RNA, 19 nt, Artificial Sequence
  Description of Artificial Sequence: Synthetic oligonucleotide
  Sense strand starting at position 1267 of SEQ ID NO: 317771
auaaauguuuggcucuaag

SEQ ID NO: 510898 - RNA, 19 nt, Artificial Sequence
  Description of Artificial Sequence: Synthetic oligonucleotide
  Antisense strand to SEQ ID NO: 510897
cuuagagccaaacauuuau

SEQ ID NO: 510899 - RNA, 19 nt, Artificial Sequence
  Description of Artificial Sequence: Synthetic oligonucleotide
  Sense strand starting at position 1270 of SEQ ID NO: 317771
aauguuuggcucuaagcuu

SEQ ID NO: 510900 - RNA, 19 nt, Artificial Sequence
  Description of Artificial Sequence: Synthetic oligonucleotide
  Antisense strand to SEQ ID NO: 510899
aagcuuagagccaaacauu

SEQ ID NO: 510901 - RNA, 19 nt, Artificial Sequence
  Description of Artificial Sequence: Synthetic oligonucleotide
  Sense strand starting at position 1276 of SEQ ID NO: 317771
uggcucuaagcuuagaaac

SEQ ID NO: 510902 - RNA, 19 nt, Artificial Sequence
  Description of Artificial Sequence: Synthetic oligonucleotide
  Antisense strand to SEQ ID NO: 510901
guuucuaagcuuagagcca

SEQ ID NO: 510903 - RNA, 19 nt, Artificial Sequence
  Description of Artificial Sequence: Synthetic oligonucleotide
  Sense strand starting at position 1532 of SEQ ID NO: 317771
cgacguuauggcgcuuuga

SEQ ID NO: 510904 - RNA, 19 nt, Artificial Sequence
  Description of Artificial Sequence: Synthetic oligonucleotide
  Antisense strand to SEQ ID NO: 510903
ucaaagcgccauaacgucg

SEQ ID NO: 510905 - RNA, 19 nt, Artificial Sequence
  Description of Artificial Sequence: Synthetic oligonucleotide
  Sense strand starting at position 2123 of SEQ ID NO: 317771
uguuauugggauuaugcca

SEQ ID NO: 510906 - RNA, 19 nt, Artificial Sequence
  Description of Artificial Sequence: Synthetic oligonucleotide
  Antisense strand to SEQ ID NO: 510905
uggcauaaucccaauaaca

SEQ ID NO: 510907 - RNA, 19 nt, Artificial Sequence
  Description of Artificial Sequence: Synthetic oligonucleotide
  Sense strand starting at position 2155 of SEQ ID NO: 317771
uugcauuucugucuacuua

SEQ ID NO: 510908 - RNA, 19 nt, Artificial Sequence
  Description of Artificial Sequence: Synthetic oligonucleotide
  Antisense strand to SEQ ID NO: 510907
uaaguagacagaaaugcaa

SEQ ID NO: 510909 - RNA, 19 nt, Artificial Sequence
  Description of Artificial Sequence: Synthetic oligonucleotide
  Sense strand starting at position 2223 of SEQ ID NO: 317771
gguccacagccagaauuaa

SEQ ID NO: 510910 - RNA, 19 nt, Artificial Sequence
  Description of Artificial Sequence: Synthetic oligonucleotide
  Antisense strand to SEQ ID NO: 510909
uuaauucuggcuguggacc

SEQ ID NO: 510911 - RNA, 19 nt, Artificial Sequence
  Description of Artificial Sequence: Synthetic oligonucleotide
  Sense strand starting at position 2442 of SEQ ID NO: 317771
gagucugggcccuagagau

SEQ ID NO: 510912 - RNA, 19 nt, Artificial Sequence
  Description of Artificial Sequence: Synthetic oligonucleotide
  Antisense strand to SEQ ID NO: 510911
aucucuagggcccagacuc

SEQ ID NO: 510913 - RNA, 19 nt, Artificial Sequence
  Description of Artificial Sequence: Synthetic oligonucleotide
  Sense strand starting at position 2448 of SEQ ID NO: 317771
gggcccuagagauagcuuu

SEQ ID NO: 510914 - RNA, 19 nt, Artificial Sequence
  Description of Artificial Sequence: Synthetic oligonucleotide
  Antisense strand to SEQ ID NO: 510913
aaagcuaucucuagggccc

SEQ ID NO: 510915 - RNA, 19 nt, Artificial Sequence
  Description of Artificial Sequence: Synthetic oligonucleotide
  Sense strand starting at position 2485 of SEQ ID NO: 317771
uuaucuuucgguuaagauu

SEQ ID NO: 510916 - RNA, 19 nt, Artificial Sequence
  Description of Artificial Sequence: Synthetic oligonucleotide
  Antisense strand to SEQ ID NO: 510915
aaucuuaaccgaaagauaa

SEQ ID NO: 510917 - RNA, 19 nt, Artificial Sequence
  Description of Artificial Sequence: Synthetic oligonucleotide
  Sense strand starting at position 2493 of SEQ ID NO: 317771
cgguuaagauuccucuauu

SEQ ID NO: 510918 - RNA, 19 nt, Artificial Sequence
  Description of Artificial Sequence: Synthetic oligonucleotide
  Antisense strand to SEQ ID NO: 510917
aauagaggaaucuuaaccg

SEQ ID NO: 510919 - RNA, 19 nt, Artificial Sequence
  Description of Artificial Sequence: Synthetic oligonucleotide
  Sense strand starting at position 2546 of SEQ ID NO: 317771
uguuauugacauugcuaca

SEQ ID NO: 510920 - RNA, 19 nt, Artificial Sequence
  Description of Artificial Sequence: Synthetic oligonucleotide
  Antisense strand to SEQ ID NO: 510919
uguagcaaugucaauaaca

SEQ ID NO: 510921 - RNA, 19 nt, Artificial Sequence
  Description of Artificial Sequence: Synthetic oligonucleotide
  Sense strand starting at position 2633 of SEQ ID NO: 317771
uuuauucuuucuguuggaa

SEQ ID NO: 510922 - RNA, 19 nt, Artificial Sequence
  Description of Artificial Sequence: Synthetic oligonucleotide
  Antisense strand to SEQ ID NO: 510921
uuccaacagaaagaauaaa

SEQ ID NO: 510923 - RNA, 19 nt, Artificial Sequence
  Description of Artificial Sequence: Synthetic oligonucleotide
  Sense strand starting at position 2858 of SEQ ID NO: 317771
uuguaucagucuuuguaac

SEQ ID NO: 510924 - RNA, 19 nt, Artificial Sequence
  Description of Artificial Sequence: Synthetic oligonucleotide
  Antisense strand to SEQ ID NO: 510923
guuacaaagacugauacaa

SEQ ID NO: 510925 - RNA, 19 nt, Artificial Sequence
  Description of Artificial Sequence: Synthetic oligonucleotide
  Sense strand starting at position 2859 of SEQ ID NO: 317771
uguaucagucuuuguaaca

SEQ ID NO: 510926 - RNA, 19 nt, Artificial Sequence
  Description of Artificial Sequence: Synthetic oligonucleotide
  Antisense strand to SEQ ID NO: 510925
uguuacaaagacugauaca

SEQ ID NO: 510927 - RNA, 19 nt, Artificial Sequence
  Description of Artificial Sequence: Synthetic oligonucleotide
  Sense strand starting at position 2860 of SEQ ID NO: 317771
guaucagucuuuguaacag

SEQ ID NO: 510928 - RNA, 19 nt, Artificial Sequence
  Description of Artificial Sequence: Synthetic oligonucleotide
  Antisense strand to SEQ ID NO: 510927
cuguuacaaagacugauac

SEQ ID NO: 510929 - RNA, 19 nt, Artificial Sequence
  Description of Artificial Sequence: Synthetic oligonucleotide
  Sense strand starting at position 2872 of SEQ ID NO: 317771
guaacagacaccgaguaua

SEQ ID NO: 510930 - RNA, 19 nt, Artificial Sequence
  Description of Artificial Sequence: Synthetic oligonucleotide
  Antisense strand to SEQ ID NO: 510929
uauacucggugucuguuac

SEQ ID NO: 510931 - RNA, 19 nt, Artificial Sequence
  Description of Artificial Sequence: Synthetic oligonucleotide
  Sense strand starting at position 3253 of SEQ ID NO: 317771
ccauauuccuaguuacuag

SEQ ID NO: 510932 - RNA, 19 nt, Artificial Sequence
  Description of Artificial Sequence: Synthetic oligonucleotide
  Antisense strand to SEQ ID NO: 510931
cuaguaacuaggaauaugg

SEQ ID NO: 510933 - RNA, 19 nt, Artificial Sequence
  Description of Artificial Sequence: Synthetic oligonucleotide
  Sense strand starting at position 3263 of SEQ ID NO: 317771
aguuacuagucucuucuaa

SEQ ID NO: 510934 - RNA, 19 nt, Artificial Sequence
  Description of Artificial Sequence: Synthetic oligonucleotide
  Antisense strand to SEQ ID NO: 510933
uuagaagagacuaguaacu

SEQ ID NO: 510935 - RNA, 19 nt, Artificial Sequence
  Description of Artificial Sequence: Synthetic oligonucleotide
  Sense strand starting at position 3720 of SEQ ID NO: 317771
uuuacuaugucaguaacuu

SEQ ID NO: 510936 - RNA, 19 nt, Artificial Sequence
  Description of Artificial Sequence: Synthetic oligonucleotide
  Antisense strand to SEQ ID NO: 510935
aaguuacugacauaguaaa

SEQ ID NO: 510937 - RNA, 19 nt, Artificial Sequence
  Description of Artificial Sequence: Synthetic oligonucleotide
  Sense strand starting at position 3721 of SEQ ID NO: 317771
uuacuaugucaguaacuuc

SEQ ID NO: 510938 - RNA, 19 nt, Artificial Sequence
  Description of Artificial Sequence: Synthetic oligonucleotide
  Antisense strand to SEQ ID NO: 510937
gaaguuacugacauaguaa

SEQ ID NO: 510939 - RNA, 19 nt, Artificial Sequence
  Description of Artificial Sequence: Synthetic oligonucleotide
  Sense strand starting at position 3900 of SEQ ID NO: 317771
guuuaaucacuuuguacug

SEQ ID NO: 510940 - RNA, 19 nt, Artificial Sequence
  Description of Artificial Sequence: Synthetic oligonucleotide
  Antisense strand to SEQ ID NO: 510939
caguacaaagugauuaaac

SEQ ID NO: 510941 - RNA, 19 nt, Artificial Sequence
  Description of Artificial Sequence: Synthetic oligonucleotide
  Sense strand starting at position 3912 of SEQ ID NO: 317771
uguacuguuauccaagugu

SEQ ID NO: 510942 - RNA, 19 nt, Artificial Sequence
  Description of Artificial Sequence: Synthetic oligonucleotide
  Antisense strand to SEQ ID NO: 510941
acacuuggauaacaguaca

SEQ ID NO: 510943 - RNA, 19 nt, Artificial Sequence
  Description of Artificial Sequence: Synthetic oligonucleotide
  Sense strand starting at position 3959 of SEQ ID NO: 317771
gucaaacuccuguagauug

SEQ ID NO: 510944 - RNA, 19 nt, Artificial Sequence
  Description of Artificial Sequence: Synthetic oligonucleotide
  Antisense strand to SEQ ID NO: 510943
caaucuacaggaguuugac

SEQ ID NO: 510945 - RNA, 19 nt, Artificial Sequence
  Description of Artificial Sequence: Synthetic oligonucleotide
  Sense strand starting at position 189 of SEQ ID NO: 317772
auguuacaggcuuauuauu

SEQ ID NO: 510946 - RNA, 19 nt, Artificial Sequence
  Description of Artificial Sequence: Synthetic oligonucleotide
  Antisense strand to SEQ ID NO: 510945
aauaauaagccuguaacau

SEQ ID NO: 510947 - RNA, 19 nt, Artificial Sequence
  Description of Artificial Sequence: Synthetic oligonucleotide
  Sense strand starting at position 198 of SEQ ID NO: 317772
gcuuauuauuuaguagcca

SEQ ID NO: 510948 - RNA, 19 nt, Artificial Sequence
  Description of Artificial Sequence: Synthetic oligonucleotide
  Antisense strand to SEQ ID NO: 510947
uggcuacuaaauaauaagc

SEQ ID NO: 510949 - RNA, 19 nt, Artificial Sequence
  Description of Artificial Sequence: Synthetic oligonucleotide
  Sense strand starting at position 212 of SEQ ID NO: 317772
agccauaugcagcaguaaa

SEQ ID NO: 510950 - RNA, 19 nt, Artificial Sequence
  Description of Artificial Sequence: Synthetic oligonucleotide
  Antisense strand to SEQ ID NO: 510949
uuuacugcugcauauggcu

SEQ ID NO: 510951 - RNA, 19 nt, Artificial Sequence
  Description of Artificial Sequence: Synthetic oligonucleotide
  Sense strand starting at position 252 of SEQ ID NO: 317772
uguuuacgccaauaaauuc

SEQ ID NO: 510952 - RNA, 19 nt, Artificial Sequence
  Description of Artificial Sequence: Synthetic oligonucleotide
  Antisense strand to SEQ ID NO: 510951
gaauuuauuggcguaaaca

SEQ ID NO: 510953 - RNA, 19 nt, Artificial Sequence
  Description of Artificial Sequence: Synthetic oligonucleotide
  Sense strand starting at position 260 of SEQ ID NO: 317772
ccaauaaauucugcagaga

SEQ ID NO: 510954 - RNA, 19 nt, Artificial Sequence
  Description of Artificial Sequence: Synthetic oligonucleotide
  Antisense strand to SEQ ID NO: 510953
ucucugcagaauuuauugg

SEQ ID NO: 510955 - RNA, 19 nt, Artificial Sequence
  Description of Artificial Sequence: Synthetic oligonucleotide
  Sense strand starting at position 277 of SEQ ID NO: 317772
gauggcuuguaguuggaua

SEQ ID NO: 510956 - RNA, 19 nt, Artificial Sequence
  Description of Artificial Sequence: Synthetic oligonucleotide
  Antisense strand to SEQ ID NO: 510955
uauccaacuacaagccauc

SEQ ID NO: 510957 - RNA, 19 nt, Artificial Sequence
  Description of Artificial Sequence: Synthetic oligonucleotide
  Sense strand starting at position 278 of SEQ ID NO: 317772
auggcuuguaguuggauaa

SEQ ID NO: 510958 - RNA, 19 nt, Artificial Sequence
  Description of Artificial Sequence: Synthetic oligonucleotide
  Antisense strand to SEQ ID NO: 510957
uuauccaacuacaagccau

SEQ ID NO: 510959 - RNA, 19 nt, Artificial Sequence
  Description of Artificial Sequence: Synthetic oligonucleotide
  Sense strand starting at position 456 of SEQ ID NO: 317772
ugauuuaaauaguagaggu

SEQ ID NO: 510960 - RNA, 19 nt, Artificial Sequence
  Description of Artificial Sequence: Synthetic oligonucleotide
  Antisense strand to SEQ ID NO: 510959
accucuacuauuuaaauca

SEQ ID NO: 510961 - RNA, 19 nt, Artificial Sequence
  Description of Artificial Sequence: Synthetic oligonucleotide
  Sense strand starting at position 460 of SEQ ID NO: 317772
uuaaauaguagaggugaca

SEQ ID NO: 510962 - RNA, 19 nt, Artificial Sequence
  Description of Artificial Sequence: Synthetic oligonucleotide
  Antisense strand to SEQ ID NO: 510961
ugucaccucuacuauuuaa

SEQ ID NO: 510963 - RNA, 19 nt, Artificial Sequence
  Description of Artificial Sequence: Synthetic oligonucleotide
  Sense strand starting at position 483 of SEQ ID NO: 317772
cucagagaguacguguaaa

SEQ ID NO: 510964 - RNA, 19 nt, Artificial Sequence
  Description of Artificial Sequence: Synthetic oligonucleotide
  Antisense strand to SEQ ID NO: 510963
uuuacacguacucucugag

SEQ ID NO: 510965 - RNA, 19 nt, Artificial Sequence
  Description of Artificial Sequence: Synthetic oligonucleotide
  Sense strand starting at position 493 of SEQ ID NO: 317772
acguguaaagauuauguga

SEQ ID NO: 510966 - RNA, 19 nt, Artificial Sequence
  Description of Artificial Sequence: Synthetic oligonucleotide
  Antisense strand to SEQ ID NO: 510965
ucacauaaucuuuacacgu

SEQ ID NO: 510967 - RNA, 19 nt, Artificial Sequence
  Description of Artificial Sequence: Synthetic oligonucleotide
  Sense strand starting at position 496 of SEQ ID NO: 317772
uguaaagauuaugugaguu

SEQ ID NO: 510968 - RNA, 19 nt, Artificial Sequence
  Description of Artificial Sequence: Synthetic oligonucleotide
  Antisense strand to SEQ ID NO: 510967
aacucacauaaucuuuaca

SEQ ID NO: 510969 - RNA, 19 nt, Artificial Sequence
  Description of Artificial Sequence: Synthetic oligonucleotide
  Sense strand starting at position 500 of SEQ ID NO: 317772
aagauuaugugaguuaaug

SEQ ID NO: 510970 - RNA, 19 nt, Artificial Sequence
  Description of Artificial Sequence: Synthetic oligonucleotide
  Antisense strand to SEQ ID NO: 510969
cauuaacucacauaaucuu

SEQ ID NO: 510971 - RNA, 19 nt, Artificial Sequence
  Description of Artificial Sequence: Synthetic oligonucleotide
  Sense strand starting at position 585 of SEQ ID NO: 317772
ucauuugaaugcucuugca

SEQ ID NO: 510972 - RNA, 19 nt, Artificial Sequence
  Description of Artificial Sequence: Synthetic oligonucleotide
  Antisense strand to SEQ ID NO: 510971
ugcaagagcauucaaauga

SEQ ID NO: 510973 - RNA, 19 nt, Artificial Sequence
  Description of Artificial Sequence: Synthetic oligonucleotide
  Sense strand starting at position 599 of SEQ ID NO: 317772
uugcauguaucagugaaau

SEQ ID NO: 510974 - RNA, 19 nt, Artificial Sequence
  Description of Artificial Sequence: Synthetic oligonucleotide
  Antisense strand to SEQ ID NO: 510973
auuucacugauacaugcaa

SEQ ID NO: 510975 - RNA, 19 nt, Artificial Sequence
  Description of Artificial Sequence: Synthetic oligonucleotide
  Sense strand starting at position 860 of SEQ ID NO: 317772
ugaaauguuucugcaucaa

SEQ ID NO: 510976 - RNA, 19 nt, Artificial Sequence
  Description of Artificial Sequence: Synthetic oligonucleotide
  Antisense strand to SEQ ID NO: 510975
uugaugcagaaacauuuca

SEQ ID NO: 510977 - RNA, 19 nt, Artificial Sequence
  Description of Artificial Sequence: Synthetic oligonucleotide
  Sense strand starting at position 896 of SEQ ID NO: 317772
cgggcucuuacagaaguua

SEQ ID NO: 510978 - RNA, 19 nt, Artificial Sequence
  Description of Artificial Sequence: Synthetic oligonucleotide
  Antisense strand to SEQ ID NO: 510977
uaacuucuguaagagcccg

SEQ ID NO: 510979 - RNA, 19 nt, Artificial Sequence
  Description of Artificial Sequence: Synthetic oligonucleotide
  Sense strand starting at position 1098 of SEQ ID NO: 317772
cgaguucugaaagaagcaa

SEQ ID NO: 510980 - RNA, 19 nt, Artificial Sequence
  Description of Artificial Sequence: Synthetic oligonucleotide
  Antisense strand to SEQ ID NO: 510979
uugcuucuuucagaacucg

SEQ ID NO: 510981 - RNA, 19 nt, Artificial Sequence
  Description of Artificial Sequence: Synthetic oligonucleotide
  Sense strand starting at position 1147 of SEQ ID NO: 317772
cgaguaagucaaggguuaa

SEQ ID NO: 510982 - RNA, 19 nt, Artificial Sequence
  Description of Artificial Sequence: Synthetic oligonucleotide
  Antisense strand to SEQ ID NO: 510981
uuaacccuugacuuacucg

SEQ ID NO: 510983 - RNA, 19 nt, Artificial Sequence
  Description of Artificial Sequence: Synthetic oligonucleotide
  Sense strand starting at position 1148 of SEQ ID NO: 317772
gaguaagucaaggguuaau

SEQ ID NO: 510984 - RNA, 19 nt, Artificial Sequence
  Description of Artificial Sequence: Synthetic oligonucleotide
  Antisense strand to SEQ ID NO: 510983
auuaacccuugacuuacuc

SEQ ID NO: 510985 - RNA, 19 nt, Artificial Sequence
  Description of Artificial Sequence: Synthetic oligonucleotide
  Sense strand starting at position 1498 of SEQ ID NO: 317772
ccaauauccguccaguucu

SEQ ID NO: 510986 - RNA, 19 nt, Artificial Sequence
  Description of Artificial Sequence: Synthetic oligonucleotide
  Antisense strand to SEQ ID NO: 510985
agaacuggacggauauugg

SEQ ID NO: 510987 - RNA, 19 nt, Artificial Sequence
  Description of Artificial Sequence: Synthetic oligonucleotide
  Sense strand starting at position 1689 of SEQ ID NO: 317772
uaagaaggccgcguuaguu

SEQ ID NO: 510988 - RNA, 19 nt, Artificial Sequence
  Description of Artificial Sequence: Synthetic oligonucleotide
  Antisense strand to SEQ ID NO: 510987
aacuaacgcggccuucuua

SEQ ID NO: 510989 - RNA, 19 nt, Artificial Sequence
  Description of Artificial Sequence: Synthetic oligonucleotide
  Sense strand starting at position 2137 of SEQ ID NO: 317772
aaagguuagccgggcaaga

SEQ ID NO: 510990 - RNA, 19 nt, Artificial Sequence
  Description of Artificial Sequence: Synthetic oligonucleotide
  Antisense strand to SEQ ID NO: 510989
ucuugcccggcuaaccuuu

SEQ ID NO: 510991 - RNA, 19 nt, Artificial Sequence
  Description of Artificial Sequence: Synthetic oligonucleotide
  Sense strand starting at position 2329 of SEQ ID NO: 317772
ucauuugaucguugcaaca

SEQ ID NO: 510992 - RNA, 19 nt, Artificial Sequence
  Description of Artificial Sequence: Synthetic oligonucleotide
  Antisense strand to SEQ ID NO: 510991
uguugcaacgaucaaauga

SEQ ID NO: 510993 - RNA, 19 nt, Artificial Sequence
  Description of Artificial Sequence: Synthetic oligonucleotide
  Sense strand starting at position 2371 of SEQ ID NO: 317772
agcucagcgacuuagauga

SEQ ID NO: 510994 - RNA, 19 nt, Artificial Sequence
  Description of Artificial Sequence: Synthetic oligonucleotide
  Antisense strand to SEQ ID NO: 510993
ucaucuaagucgcugagcu

SEQ ID NO: 510995 - RNA, 19 nt, Artificial Sequence
  Description of Artificial Sequence: Synthetic oligonucleotide
  Sense strand starting at position 2387 of SEQ ID NO: 317772
ugacuuugccagggucaca

SEQ ID NO: 510996 - RNA, 19 nt, Artificial Sequence
  Description of Artificial Sequence: Synthetic oligonucleotide
  Antisense strand to SEQ ID NO: 510995
ugugacccuggcaaaguca

SEQ ID NO: 510997 - RNA, 19 nt, Artificial Sequence
  Description of Artificial Sequence: Synthetic oligonucleotide
  Sense strand starting at position 2460 of SEQ ID NO: 317772
ggguguauccguguuguuu

SEQ ID NO: 510998 - RNA, 19 nt, Artificial Sequence
  Description of Artificial Sequence: Synthetic oligonucleotide
  Antisense strand to SEQ ID NO: 510997
aaacaacacggauacaccc

SEQ ID NO: 510999 - RNA, 19 nt, Artificial Sequence
  Description of Artificial Sequence: Synthetic oligonucleotide
  Sense strand starting at position 2565 of SEQ ID NO: 317772
gcuuucuauuuggaaauaa

SEQ ID NO: 511000 - RNA, 19 nt, Artificial Sequence
  Description of Artificial Sequence: Synthetic oligonucleotide
  Antisense strand to SEQ ID NO: 510999
uuauuuccaaauagaaagc

SEQ ID NO: 511001 - RNA, 19 nt, Artificial Sequence
  Description of Artificial Sequence: Synthetic oligonucleotide
  Sense strand starting at position 2663 of SEQ ID NO: 317772
acauguauuugccucucau

SEQ ID NO: 511002 - RNA, 19 nt, Artificial Sequence
  Description of Artificial Sequence: Synthetic oligonucleotide
  Antisense strand to SEQ ID NO: 511001
augagaggcaaauacaugu

SEQ ID NO: 511003 - RNA, 19 nt, Artificial Sequence
  Description of Artificial Sequence: Synthetic oligonucleotide
  Sense strand starting at position 2728 of SEQ ID NO: 317772
cuuugucauuugcucagau

SEQ ID NO: 511004 - RNA, 19 nt, Artificial Sequence
  Description of Artificial Sequence: Synthetic oligonucleotide
  Antisense strand to SEQ ID NO: 511003
aucugagcaaaugacaaag

SEQ ID NO: 511005 - RNA, 19 nt, Artificial Sequence
  Description of Artificial Sequence: Synthetic oligonucleotide
  Sense strand starting at position 2729 of SEQ ID NO: 317772
uuugucauuugcucagauu

SEQ ID NO: 511006 - RNA, 19 nt, Artificial Sequence
  Description of Artificial Sequence: Synthetic oligonucleotide
  Antisense strand to SEQ ID NO: 511005
aaucugagcaaaugacaaa

SEQ ID NO: 511007 - RNA, 19 nt, Artificial Sequence
  Description of Artificial Sequence: Synthetic oligonucleotide
  Sense strand starting at position 2738 of SEQ ID NO: 317772
ugcucagauucucucuaga

SEQ ID NO: 511008 - RNA, 19 nt, Artificial Sequence
  Description of Artificial Sequence: Synthetic oligonucleotide
  Antisense strand to SEQ ID NO: 511007
ucuagagagaaucugagca

SEQ ID NO: 511009 - RNA, 19 nt, Artificial Sequence
  Description of Artificial Sequence: Synthetic oligonucleotide
  Sense strand starting at position 2849 of SEQ ID NO: 317772
auugcuaucccauagagca

SEQ ID NO: 511010 - RNA, 19 nt, Artificial Sequence
  Description of Artificial Sequence: Synthetic oligonucleotide
  Antisense strand to SEQ ID NO: 511009
ugcucuaugggauagcaau

SEQ ID NO: 511011 - RNA, 19 nt, Artificial Sequence
  Description of Artificial Sequence: Synthetic oligonucleotide
  Sense strand starting at position 2857 of SEQ ID NO: 317772
cccauagagcaacgguaua

SEQ ID NO: 511012 - RNA, 19 nt, Artificial Sequence
  Description of Artificial Sequence: Synthetic oligonucleotide
  Antisense strand to SEQ ID NO: 511011
uauaccguugcucuauggg

SEQ ID NO: 511013 - RNA, 19 nt, Artificial Sequence
  Description of Artificial Sequence: Synthetic oligonucleotide
  Sense strand starting at position 2869 of SEQ ID NO: 317772
cgguauaagagccaauaga

SEQ ID NO: 511014 - RNA, 19 nt, Artificial Sequence
  Description of Artificial Sequence: Synthetic oligonucleotide
  Antisense strand to SEQ ID NO: 511013
ucuauuggcucuuauaccg

SEQ ID NO: 511015 - RNA, 19 nt, Artificial Sequence
  Description of Artificial Sequence: Synthetic oligonucleotide
  Sense strand starting at position 2941 of SEQ ID NO: 317772
uucuuuggaucguuauuga

SEQ ID NO: 511016 - RNA, 19 nt, Artificial Sequence
  Description of Artificial Sequence: Synthetic oligonucleotide
  Antisense strand to SEQ ID NO: 511015
ucaauaacgauccaaagaa

SEQ ID NO: 511017 - RNA, 19 nt, Artificial Sequence
  Description of Artificial Sequence: Synthetic oligonucleotide
  Sense strand starting at position 2960 of SEQ ID NO: 317772
gucuucugucaucauaguu

SEQ ID NO: 511018 - RNA, 19 nt, Artificial Sequence
  Description of Artificial Sequence: Synthetic oligonucleotide
  Antisense strand to SEQ ID NO: 511017
aacuaugaugacagaagac

SEQ ID NO: 511019 - RNA, 19 nt, Artificial Sequence
  Description of Artificial Sequence: Synthetic oligonucleotide
  Sense strand starting at position 3128 of SEQ ID NO: 317772
cagucuuucuggguuugau

SEQ ID NO: 511020 - RNA, 19 nt, Artificial Sequence
  Description of Artificial Sequence: Synthetic oligonucleotide
  Antisense strand to SEQ ID NO: 511019
aucaaacccagaaagacug

SEQ ID NO: 511021 - RNA, 19 nt, Artificial Sequence
  Description of Artificial Sequence: Synthetic oligonucleotide
  Sense strand starting at position 3131 of SEQ ID NO: 317772
ucuuucuggguuugaucaa

SEQ ID NO: 511022 - RNA, 19 nt, Artificial Sequence
  Description of Artificial Sequence: Synthetic oligonucleotide
  Antisense strand to SEQ ID NO: 511021
uugaucaaacccagaaaga

SEQ ID NO: 511023 - RNA, 19 nt, Artificial Sequence
  Description of Artificial Sequence: Synthetic oligonucleotide
  Sense strand starting at position 3589 of SEQ ID NO: 317772
gcagaaaguauagagcauu

SEQ ID NO: 511024 - RNA, 19 nt, Artificial Sequence
  Description of Artificial Sequence: Synthetic oligonucleotide
  Antisense strand to SEQ ID NO: 511023
aaugcucuauacuuucugc

SEQ ID NO: 511025 - RNA, 19 nt, Artificial Sequence
  Description of Artificial Sequence: Synthetic oligonucleotide
  Sense strand starting at position 395 of SEQ ID NO: 317773
agaaaugauuuauaagccu

SEQ ID NO: 511026 - RNA, 19 nt, Artificial Sequence
  Description of Artificial Sequence: Synthetic oligonucleotide
  Antisense strand to SEQ ID NO: 511025
aggcuuauaaaucauuucu

SEQ ID NO: 511027 - RNA, 19 nt, Artificial Sequence
  Description of Artificial Sequence: Synthetic oligonucleotide
  Sense strand starting at position 427 of SEQ ID NO: 317773
gcggcuagugcaucuaagu

SEQ ID NO: 511028 - RNA, 19 nt, Artificial Sequence
  Description of Artificial Sequence: Synthetic oligonucleotide
  Antisense strand to SEQ ID NO: 511027
acuuagaugcacuagccgc

SEQ ID NO: 511029 - RNA, 19 nt, Artificial Sequence
  Description of Artificial Sequence: Synthetic oligonucleotide
  Sense strand starting at position 436 of SEQ ID NO: 317773
gcaucuaagucauugcaaa

SEQ ID NO: 511030 - RNA, 19 nt, Artificial Sequence
  Description of Artificial Sequence: Synthetic oligonucleotide
  Antisense strand to SEQ ID NO: 511029
uuugcaaugacuuagaugc

SEQ ID NO: 511031 - RNA, 19 nt, Artificial Sequence
  Description of Artificial Sequence: Synthetic oligonucleotide
  Sense strand starting at position 906 of SEQ ID NO: 317773
acgaauaaacaccguaaga

SEQ ID NO: 511032 - RNA, 19 nt, Artificial Sequence
  Description of Artificial Sequence: Synthetic oligonucleotide
  Antisense strand to SEQ ID NO: 511031
ucuuacgguguuuauucgu

SEQ ID NO: 511033 - RNA, 19 nt, Artificial Sequence
  Description of Artificial Sequence: Synthetic oligonucleotide
  Sense strand starting at position 945 of SEQ ID NO: 317773
gcagaugguaguuaaguau

SEQ ID NO: 511034 - RNA, 19 nt, Artificial Sequence
  Description of Artificial Sequence: Synthetic oligonucleotide
  Antisense strand to SEQ ID NO: 511033
auacuuaacuaccaucugc

SEQ ID NO: 511035 - RNA, 19 nt, Artificial Sequence
  Description of Artificial Sequence: Synthetic oligonucleotide
  Sense strand starting at position 959 of SEQ ID NO: 317773
aguauucugccacauauua

SEQ ID NO: 511036 - RNA, 19 nt, Artificial Sequence
  Description of Artificial Sequence: Synthetic oligonucleotide
  Antisense strand to SEQ ID NO: 511035
uaauauguggcagaauacu

SEQ ID NO: 511037 - RNA, 19 nt, Artificial Sequence
  Description of Artificial Sequence: Synthetic oligonucleotide
  Sense strand starting at position 1083 of SEQ ID NO: 317773
acguaaagagcuuagcaca

SEQ ID NO: 511038 - RNA, 19 nt, Artificial Sequence
  Description of Artificial Sequence: Synthetic oligonucleotide
  Antisense strand to SEQ ID NO: 511037
ugugcuaagcucuuuacgu

SEQ ID NO: 511039 - RNA, 19 nt, Artificial Sequence
  Description of Artificial Sequence: Synthetic oligonucleotide
  Sense strand starting at position 1143 of SEQ ID NO: 317773
uugagcuucuuucuagauu

SEQ ID NO: 511040 - RNA, 19 nt, Artificial Sequence
  Description of Artificial Sequence: Synthetic oligonucleotide
  Antisense strand to SEQ ID NO: 511039
aaucuagaaagaagcucaa

SEQ ID NO: 511041 - RNA, 19 nt, Artificial Sequence
  Description of Artificial Sequence: Synthetic oligonucleotide
  Sense strand starting at position 1220 of SEQ ID NO: 317773
ccacuuaaagaguauagca

SEQ ID NO: 511042 - RNA, 19 nt, Artificial Sequence
  Description of Artificial Sequence: Synthetic oligonucleotide
  Antisense strand to SEQ ID NO: 511041
ugcuauacucuuuaagugg

SEQ ID NO: 511043 - RNA, 19 nt, Artificial Sequence
  Description of Artificial Sequence: Synthetic oligonucleotide
  Sense strand starting at position 1351 of SEQ ID NO: 317773
uugcuaaccuagucugaaa

SEQ ID NO: 511044 - RNA, 19 nt, Artificial Sequence
  Description of Artificial Sequence: Synthetic oligonucleotide
  Antisense strand to SEQ ID NO: 511043
uuucagacuagguuagcaa

SEQ ID NO: 511045 - RNA, 19 nt, Artificial Sequence
  Description of Artificial Sequence: Synthetic oligonucleotide
  Sense strand starting at position 1353 of SEQ ID NO: 317773
gcuaaccuagucugaaaga

SEQ ID NO: 511046 - RNA, 19 nt, Artificial Sequence
  Description of Artificial Sequence: Synthetic oligonucleotide
  Antisense strand to SEQ ID NO: 511045
ucuuucagacuagguuagc

SEQ ID NO: 511047 - RNA, 19 nt, Artificial Sequence
  Description of Artificial Sequence: Synthetic oligonucleotide
  Sense strand starting at position 1429 of SEQ ID NO: 317773
agcuaagcccuggauacau

SEQ ID NO: 511048 - RNA, 19 nt, Artificial Sequence
  Description of Artificial Sequence: Synthetic oligonucleotide
  Antisense strand to SEQ ID NO: 511047
auguauccagggcuuagcu

SEQ ID NO: 511049 - RNA, 19 nt, Artificial Sequence
  Description of Artificial Sequence: Synthetic oligonucleotide
  Sense strand starting at position 1497 of SEQ ID NO: 317773
gagcuagucaugugaggaa

SEQ ID NO: 511050 - RNA, 19 nt, Artificial Sequence
  Description of Artificial Sequence: Synthetic oligonucleotide
  Antisense strand to SEQ ID NO: 511049
uuccucacaugacuagcuc

SEQ ID NO: 511051 - RNA, 19 nt, Artificial Sequence
  Description of Artificial Sequence: Synthetic oligonucleotide
  Sense strand starting at position 1636 of SEQ ID NO: 317773
ugggcuugugcucacaaca

SEQ ID NO: 511052 - RNA, 19 nt, Artificial Sequence
  Description of Artificial Sequence: Synthetic oligonucleotide
  Antisense strand to SEQ ID NO: 511051
uguugugagcacaagccca

SEQ ID NO: 511053 - RNA, 19 nt, Artificial Sequence
  Description of Artificial Sequence: Synthetic oligonucleotide
  Sense strand starting at position 1985 of SEQ ID NO: 317773
cugcccuaacgaggaauau

SEQ ID NO: 511054 - RNA, 19 nt, Artificial Sequence
  Description of Artificial Sequence: Synthetic oligonucleotide
  Antisense strand to SEQ ID NO: 511053
auauuccucguuagggcag

SEQ ID NO: 511055 - RNA, 19 nt, Artificial Sequence
  Description of Artificial Sequence: Synthetic oligonucleotide
  Sense strand starting at position 1986 of SEQ ID NO: 317773
ugcccuaacgaggaauaua

SEQ ID NO: 511056 - RNA, 19 nt, Artificial Sequence
  Description of Artificial Sequence: Synthetic oligonucleotide
  Antisense strand to SEQ ID NO: 511055
uauauuccucguuagggca

SEQ ID NO: 511057 - RNA, 19 nt, Artificial Sequence
  Description of Artificial Sequence: Synthetic oligonucleotide
  Sense strand starting at position 2015 of SEQ ID NO: 317773
gggcuuucucgcgagaagg

SEQ ID NO: 511058 - RNA, 19 nt, Artificial Sequence
  Description of Artificial Sequence: Synthetic oligonucleotide
  Antisense strand to SEQ ID NO: 511057
ccuucucgcgagaaagccc

SEQ ID NO: 511059 - RNA, 19 nt, Artificial Sequence
  Description of Artificial Sequence: Synthetic oligonucleotide
  Sense strand starting at position 2142 of SEQ ID NO: 317773
guuaucuggccucaaauuc

SEQ ID NO: 511060 - RNA, 19 nt, Artificial Sequence
  Description of Artificial Sequence: Synthetic oligonucleotide
  Antisense strand to SEQ ID NO: 511059
gaauuugaggccagauaac

SEQ ID NO: 511061 - RNA, 19 nt, Artificial Sequence
  Description of Artificial Sequence: Synthetic oligonucleotide
  Sense strand starting at position 2189 of SEQ ID NO: 317773
aagcgucucucauuggaga

SEQ ID NO: 511062 - RNA, 19 nt, Artificial Sequence
  Description of Artificial Sequence: Synthetic oligonucleotide
  Antisense strand to SEQ ID NO: 511061
ucuccaaugagagacgcuu

SEQ ID NO: 511063 - RNA, 19 nt, Artificial Sequence
  Description of Artificial Sequence: Synthetic oligonucleotide
  Sense strand starting at position 2190 of SEQ ID NO: 317773
agcgucucucauuggagaa

SEQ ID NO: 511064 - RNA, 19 nt, Artificial Sequence
  Description of Artificial Sequence: Synthetic oligonucleotide
  Antisense strand to SEQ ID NO: 511063
uucuccaaugagagacgcu

SEQ ID NO: 511065 - RNA, 19 nt, Artificial Sequence
  Description of Artificial Sequence: Synthetic oligonucleotide
  Sense strand starting at position 2202 of SEQ ID NO: 317773
uggagaauuuaacaaagug

SEQ ID NO: 511066 - RNA, 19 nt, Artificial Sequence
  Description of Artificial Sequence: Synthetic oligonucleotide
  Antisense strand to SEQ ID NO: 511065
cacuuuguuaaauucucca

SEQ ID NO: 511067 - RNA, 19 nt, Artificial Sequence
  Description of Artificial Sequence: Synthetic oligonucleotide
  Sense strand starting at position 2309 of SEQ ID NO: 317773
cguaucauuccagaaugua

SEQ ID NO: 511068 - RNA, 19 nt, Artificial Sequence
  Description of Artificial Sequence: Synthetic oligonucleotide
  Antisense strand to SEQ ID NO: 511067
uacauucuggaaugauacg

SEQ ID NO: 511069 - RNA, 19 nt, Artificial Sequence
  Description of Artificial Sequence: Synthetic oligonucleotide
  Sense strand starting at position 2346 of SEQ ID NO: 317773
uuaggaguucuacaguggu

SEQ ID NO: 511070 - RNA, 19 nt, Artificial Sequence
  Description of Artificial Sequence: Synthetic oligonucleotide
  Antisense strand to SEQ ID NO: 511069
accacuguagaacuccuaa

SEQ ID NO: 511071 - RNA, 19 nt, Artificial Sequence
  Description of Artificial Sequence: Synthetic oligonucleotide
  Sense strand starting at position 2463 of SEQ ID NO: 317773
uuuggugguuuaucaacuu

SEQ ID NO: 511072 - RNA, 19 nt, Artificial Sequence
  Description of Artificial Sequence: Synthetic oligonucleotide
  Antisense strand to SEQ ID NO: 511071
aaguugauaaaccaccaaa

SEQ ID NO: 511073 - RNA, 19 nt, Artificial Sequence
  Description of Artificial Sequence: Synthetic oligonucleotide
  Sense strand starting at position 2505 of SEQ ID NO: 317773
uuggaagucaguugauucu

SEQ ID NO: 511074 - RNA, 19 nt, Artificial Sequence
  Description of Artificial Sequence: Synthetic oligonucleotide
  Antisense strand to SEQ ID NO: 511073
agaaucaacugacuuccaa

SEQ ID NO: 511075 - RNA, 19 nt, Artificial Sequence
  Description of Artificial Sequence: Synthetic oligonucleotide
  Sense strand starting at position 2561 of SEQ ID NO: 317773
ggaguuggacuguguaauu

SEQ ID NO: 511076 - RNA, 19 nt, Artificial Sequence
  Description of Artificial Sequence: Synthetic oligonucleotide
  Antisense strand to SEQ ID NO: 511075
aauuacacaguccaacucc

SEQ ID NO: 511077 - RNA, 19 nt, Artificial Sequence
  Description of Artificial Sequence: Synthetic oligonucleotide
  Sense strand starting at position 2663 of SEQ ID NO: 317773
augaaagguauguggcaga

SEQ ID NO: 511078 - RNA, 19 nt, Artificial Sequence
  Description of Artificial Sequence: Synthetic oligonucleotide
  Antisense strand to SEQ ID NO: 511077
ucugccacauaccuuucau

SEQ ID NO: 511079 - RNA, 19 nt, Artificial Sequence
  Description of Artificial Sequence: Synthetic oligonucleotide
  Sense strand starting at position 2696 of SEQ ID NO: 317773
aauuguggugagugugaau

SEQ ID NO: 511080 - RNA, 19 nt, Artificial Sequence
  Description of Artificial Sequence: Synthetic oligonucleotide
  Antisense strand to SEQ ID NO: 511079
auucacacucaccacaauu

SEQ ID NO: 511081 - RNA, 19 nt, Artificial Sequence
  Description of Artificial Sequence: Synthetic oligonucleotide
  Sense strand starting at position 2732 of SEQ ID NO: 317773
aguguaaagcaguauuacu

SEQ ID NO: 511082 - RNA, 19 nt, Artificial Sequence
  Description of Artificial Sequence: Synthetic oligonucleotide
  Antisense strand to SEQ ID NO: 511081
aguaauacugcuuuacacu

SEQ ID NO: 511083 - RNA, 19 nt, Artificial Sequence
  Description of Artificial Sequence: Synthetic oligonucleotide
  Sense strand starting at position 2789 of SEQ ID NO: 317773
ucuccuaugccagauuagu

SEQ ID NO: 511084 - RNA, 19 nt, Artificial Sequence
  Description of Artificial Sequence: Synthetic oligonucleotide
  Antisense strand to SEQ ID NO: 511083
acuaaucuggcauaggaga

SEQ ID NO: 511085 - RNA, 19 nt, Artificial Sequence
  Description of Artificial Sequence: Synthetic oligonucleotide
  Sense strand starting at position 2917 of SEQ ID NO: 317773
aggagucauuucuaaacuc

SEQ ID NO: 511086 - RNA, 19 nt, Artificial Sequence
  Description of Artificial Sequence: Synthetic oligonucleotide
  Antisense strand to SEQ ID NO: 511085
gaguuuagaaaugacuccu

SEQ ID NO: 511087 - RNA, 19 nt, Artificial Sequence
  Description of Artificial Sequence: Synthetic oligonucleotide
  Sense strand starting at position 2956 of SEQ ID NO: 317773
ggaugucucuguucucaug

SEQ ID NO: 511088 - RNA, 19 nt, Artificial Sequence
  Description of Artificial Sequence: Synthetic oligonucleotide
  Antisense strand to SEQ ID NO: 511087
caugagaacagagacaucc

SEQ ID NO: 511089 - RNA, 19 nt, Artificial Sequence
  Description of Artificial Sequence: Synthetic oligonucleotide
  Sense strand starting at position 2985 of SEQ ID NO: 317773
ggucucucuuacuuugaaa

SEQ ID NO: 511090 - RNA, 19 nt, Artificial Sequence
  Description of Artificial Sequence: Synthetic oligonucleotide
  Antisense strand to SEQ ID NO: 511089
uuucaaaguaagagagacc

SEQ ID NO: 511091 - RNA, 19 nt, Artificial Sequence
  Description of Artificial Sequence: Synthetic oligonucleotide
  Sense strand starting at position 3169 of SEQ ID NO: 317773
acauaaucaggucaguuua

SEQ ID NO: 511092 - RNA, 19 nt, Artificial Sequence
  Description of Artificial Sequence: Synthetic oligonucleotide
  Antisense strand to SEQ ID NO: 511091
uaaacugaccugauuaugu

SEQ ID NO: 511093 - RNA, 19 nt, Artificial Sequence
  Description of Artificial Sequence: Synthetic oligonucleotide
  Sense strand starting at position 3208 of SEQ ID NO: 317773
ggaagaggccuuuguuccu

SEQ ID NO: 511094 - RNA, 19 nt, Artificial Sequence
  Description of Artificial Sequence: Synthetic oligonucleotide
  Antisense strand to SEQ ID NO: 511093
aggaacaaaggccucuucc

SEQ ID NO: 511095 - RNA, 19 nt, Artificial Sequence
  Description of Artificial Sequence: Synthetic oligonucleotide
  Sense strand starting at position 3384 of SEQ ID NO: 317773
aggaauguauaugcacaau

SEQ ID NO: 511096 - RNA, 19 nt, Artificial Sequence
  Description of Artificial Sequence: Synthetic oligonucleotide
  Antisense strand to SEQ ID NO: 511095
auugugcauauacauuccu

SEQ ID NO: 511097 - RNA, 19 nt, Artificial Sequence
  Description of Artificial Sequence: Synthetic oligonucleotide
  Sense strand starting at position 3830 of SEQ ID NO: 317773
guccuuguagaacauguaa

SEQ ID NO: 511098 - RNA, 19 nt, Artificial Sequence
  Description of Artificial Sequence: Synthetic oligonucleotide
  Antisense strand to SEQ ID NO: 511097
uuacauguucuacaaggac

SEQ ID NO: 511099 - RNA, 19 nt, Artificial Sequence
  Description of Artificial Sequence: Synthetic oligonucleotide
  Sense strand starting at position 3841 of SEQ ID NO: 317773
acauguaaccugugggcaa

SEQ ID NO: 511100 - RNA, 19 nt, Artificial Sequence
  Description of Artificial Sequence: Synthetic oligonucleotide
  Antisense strand to SEQ ID NO: 511099
uugcccacagguuacaugu

SEQ ID NO: 511101 - RNA, 19 nt, Artificial Sequence
  Description of Artificial Sequence: Synthetic oligonucleotide
  Sense strand starting at position 3845 of SEQ ID NO: 317773
guaaccugugggcaauaua

SEQ ID NO: 511102 - RNA, 19 nt, Artificial Sequence
  Description of Artificial Sequence: Synthetic oligonucleotide
  Antisense strand to SEQ ID NO: 511101
uauauugcccacagguuac

SEQ ID NO: 511103 - RNA, 19 nt, Artificial Sequence
  Description of Artificial Sequence: Synthetic oligonucleotide
  Sense strand starting at position 3917 of SEQ ID NO: 317773
auaacuuguuaugugacuu

SEQ ID NO: 511104 - RNA, 19 nt, Artificial Sequence
  Description of Artificial Sequence: Synthetic oligonucleotide
  Antisense strand to SEQ ID NO: 511103
aagucacauaacaaguuau

SEQ ID NO: 511105 - RNA, 19 nt, Artificial Sequence
  Description of Artificial Sequence: Synthetic oligonucleotide
  Sense strand starting at position 26 of SEQ ID NO: 317774
uauggcucauuaguugaga

SEQ ID NO: 511106 - RNA, 19 nt, Artificial Sequence
  Description of Artificial Sequence: Synthetic oligonucleotide
  Antisense strand to SEQ ID NO: 511105
ucucaacuaaugagccaua

SEQ ID NO: 511107 - RNA, 19 nt, Artificial Sequence
  Description of Artificial Sequence: Synthetic oligonucleotide
  Sense strand starting at position 27 of SEQ ID NO: 317774
auggcucauuaguugagaa

SEQ ID NO: 511108 - RNA, 19 nt, Artificial Sequence
  Description of Artificial Sequence: Synthetic oligonucleotide
  Antisense strand to SEQ ID NO: 511107
uucucaacuaaugagccau

SEQ ID NO: 511109 - RNA, 19 nt, Artificial Sequence
  Description of Artificial Sequence: Synthetic oligonucleotide
  Sense strand starting at position 28 of SEQ ID NO: 317774
uggcucauuaguugagaac

SEQ ID NO: 511110 - RNA, 19 nt, Artificial Sequence
  Description of Artificial Sequence: Synthetic oligonucleotide
  Antisense strand to SEQ ID NO: 511109
guucucaacuaaugagcca

SEQ ID NO: 511111 - RNA, 19 nt, Artificial Sequence
  Description of Artificial Sequence: Synthetic oligonucleotide
  Sense strand starting at position 29 of SEQ ID NO: 317774
ggcucauuaguugagaacu

SEQ ID NO: 511112 - RNA, 19 nt, Artificial Sequence
  Description of Artificial Sequence: Synthetic oligonucleotide
  Antisense strand to SEQ ID NO: 511111
aguucucaacuaaugagcc

SEQ ID NO: 511113 - RNA, 19 nt, Artificial Sequence
  Description of Artificial Sequence: Synthetic oligonucleotide
  Sense strand starting at position 377 of SEQ ID NO: 317774
cucauaguauuugcagagu

SEQ ID NO: 511114 - RNA, 19 nt, Artificial Sequence
  Description of Artificial Sequence: Synthetic oligonucleotide
  Antisense strand to SEQ ID NO: 511113
acucugcaaauacuaugag

SEQ ID NO: 511115 - RNA, 19 nt, Artificial Sequence
  Description of Artificial Sequence: Synthetic oligonucleotide
  Sense strand starting at position 383 of SEQ ID NO: 317774
guauuugcagagugucauu

SEQ ID NO: 511116 - RNA, 19 nt, Artificial Sequence
  Description of Artificial Sequence: Synthetic oligonucleotide
  Antisense strand to SEQ ID NO: 511115
aaugacacucugcaaauac

SEQ ID NO: 511117 - RNA, 19 nt, Artificial Sequence
  Description of Artificial Sequence: Synthetic oligonucleotide
  Sense strand starting at position 388 of SEQ ID NO: 317774
ugcagagugucauuucuuc

SEQ ID NO: 511118 - RNA, 19 nt, Artificial Sequence
  Description of Artificial Sequence: Synthetic oligonucleotide
  Antisense strand to SEQ ID NO: 511117
gaagaaaugacacucugca

SEQ ID NO: 511119 - RNA, 19 nt, Artificial Sequence
  Description of Artificial Sequence: Synthetic oligonucleotide
  Sense strand starting at position 656 of SEQ ID NO: 317774
cggaaugucagcuagaccu

SEQ ID NO: 511120 - RNA, 19 nt, Artificial Sequence
  Description of Artificial Sequence: Synthetic oligonucleotide
  Antisense strand to SEQ ID NO: 511119
aggucuagcugacauuccg

SEQ ID NO: 511121 - RNA, 19 nt, Artificial Sequence
  Description of Artificial Sequence: Synthetic oligonucleotide
  Sense strand starting at position 658 of SEQ ID NO: 317774
gaaugucagcuagaccuuu

SEQ ID NO: 511122 - RNA, 19 nt, Artificial Sequence
  Description of Artificial Sequence: Synthetic oligonucleotide
  Antisense strand to SEQ ID NO: 511121
aaaggucuagcugacauuc

SEQ ID NO: 511123 - RNA, 19 nt, Artificial Sequence
  Description of Artificial Sequence: Synthetic oligonucleotide
  Sense strand starting at position 798 of SEQ ID NO: 317774
uccguuucucggucaguca

SEQ ID NO: 511124 - RNA, 19 nt, Artificial Sequence
  Description of Artificial Sequence: Synthetic oligonucleotide
  Antisense strand to SEQ ID NO: 511123
ugacugaccgagaaacgga

SEQ ID NO: 511125 - RNA, 19 nt, Artificial Sequence
  Description of Artificial Sequence: Synthetic oligonucleotide
  Sense strand starting at position 975 of SEQ ID NO: 317774
aaaguaacucaguaucggu

SEQ ID NO: 511126 - RNA, 19 nt, Artificial Sequence
  Description of Artificial Sequence: Synthetic oligonucleotide
  Antisense strand to SEQ ID NO: 511125
accgauacugaguuacuuu

SEQ ID NO: 511127 - RNA, 19 nt, Artificial Sequence
  Description of Artificial Sequence: Synthetic oligonucleotide
  Sense strand starting at position 1023 of SEQ ID NO: 317774
uggagcuugcaggaaagau

SEQ ID NO: 511128 - RNA, 19 nt, Artificial Sequence
  Description of Artificial Sequence: Synthetic oligonucleotide
  Antisense strand to SEQ ID NO: 511127
aucuuuccugcaagcucca

SEQ ID NO: 511129 - RNA, 19 nt, Artificial Sequence
  Description of Artificial Sequence: Synthetic oligonucleotide
  Sense strand starting at position 1049 of SEQ ID NO: 317774
guccgagagcuguaacaga

SEQ ID NO: 511130 - RNA, 19 nt, Artificial Sequence
  Description of Artificial Sequence: Synthetic oligonucleotide
  Antisense strand to SEQ ID NO: 511129
ucuguuacagcucucggac

SEQ ID NO: 511131 - RNA, 19 nt, Artificial Sequence
  Description of Artificial Sequence: Synthetic oligonucleotide
  Sense strand starting at position 1179 of SEQ ID NO: 317774
cuguuuccagaacggaaau

SEQ ID NO: 511132 - RNA, 19 nt, Artificial Sequence
  Description of Artificial Sequence: Synthetic oligonucleotide
  Antisense strand to SEQ ID NO: 511131
auuuccguucuggaaacag

SEQ ID NO: 511133 - RNA, 19 nt, Artificial Sequence
  Description of Artificial Sequence: Synthetic oligonucleotide
  Sense strand starting at position 1253 of SEQ ID NO: 317774
ggaaauguuaaacgccuca

SEQ ID NO: 511134 - RNA, 19 nt, Artificial Sequence
  Description of Artificial Sequence: Synthetic oligonucleotide
  Antisense strand to SEQ ID NO: 511133
ugaggcguuuaacauuucc

SEQ ID NO: 511135 - RNA, 19 nt, Artificial Sequence
  Description of Artificial Sequence: Synthetic oligonucleotide
  Sense strand starting at position 1684 of SEQ ID NO: 317774
gagcgagauuguccuggga

SEQ ID NO: 511136 - RNA, 19 nt, Artificial Sequence
  Description of Artificial Sequence: Synthetic oligonucleotide
  Antisense strand to SEQ ID NO: 511135
ucccaggacaaucucgcuc

SEQ ID NO: 511137 - RNA, 19 nt, Artificial Sequence
  Description of Artificial Sequence: Synthetic oligonucleotide
  Sense strand starting at position 1688 of SEQ ID NO: 317774
gagauuguccugggagcca

SEQ ID NO: 511138 - RNA, 19 nt, Artificial Sequence
  Description of Artificial Sequence: Synthetic oligonucleotide
  Antisense strand to SEQ ID NO: 511137
uggcucccaggacaaucuc

SEQ ID NO: 511139 - RNA, 19 nt, Artificial Sequence
  Description of Artificial Sequence: Synthetic oligonucleotide
  Sense strand starting at position 1788 of SEQ ID NO: 317774
cggcuuugcaucugaauuu

SEQ ID NO: 511140 - RNA, 19 nt, Artificial Sequence
  Description of Artificial Sequence: Synthetic oligonucleotide
  Antisense strand to SEQ ID NO: 511139
aaauucagaugcaaagccg

SEQ ID NO: 511141 - RNA, 19 nt, Artificial Sequence
  Description of Artificial Sequence: Synthetic oligonucleotide
  Sense strand starting at position 2059 of SEQ ID NO: 317774
guugcauuuccggagcgga

SEQ ID NO: 511142 - RNA, 19 nt, Artificial Sequence
  Description of Artificial Sequence: Synthetic oligonucleotide
  Antisense strand to SEQ ID NO: 511141
uccgcuccggaaaugcaac

SEQ ID NO: 511143 - RNA, 19 nt, Artificial Sequence
  Description of Artificial Sequence: Synthetic oligonucleotide
  Sense strand starting at position 2249 of SEQ ID NO: 317774
ggaguaggcagauguaaau

SEQ ID NO: 511144 - RNA, 19 nt, Artificial Sequence
  Description of Artificial Sequence: Synthetic oligonucleotide
  Antisense strand to SEQ ID NO: 511143
auuuacaucugccuacucc

SEQ ID NO: 511145 - RNA, 19 nt, Artificial Sequence
  Description of Artificial Sequence: Synthetic oligonucleotide
  Sense strand starting at position 2357 of SEQ ID NO: 317774
gcuugaaagaguugaaaua

SEQ ID NO: 511146 - RNA, 19 nt, Artificial Sequence
  Description of Artificial Sequence: Synthetic oligonucleotide
  Antisense strand to SEQ ID NO: 511145
uauuucaacucuuucaagc

SEQ ID NO: 511147 - RNA, 19 nt, Artificial Sequence
  Description of Artificial Sequence: Synthetic oligonucleotide
  Sense strand starting at position 2367 of SEQ ID NO: 317774
guugaaauaguagguugau

SEQ ID NO: 511148 - RNA, 19 nt, Artificial Sequence
  Description of Artificial Sequence: Synthetic oligonucleotide
  Antisense strand to SEQ ID NO: 511147
aucaaccuacuauuucaac

SEQ ID NO: 511149 - RNA, 19 nt, Artificial Sequence
  Description of Artificial Sequence: Synthetic oligonucleotide
  Sense strand starting at position 2368 of SEQ ID NO: 317774
uugaaauaguagguugauc

SEQ ID NO: 511150 - RNA, 19 nt, Artificial Sequence
  Description of Artificial Sequence: Synthetic oligonucleotide
  Antisense strand to SEQ ID NO: 511149
gaucaaccuacuauuucaa

SEQ ID NO: 511151 - RNA, 19 nt, Artificial Sequence
  Description of Artificial Sequence: Synthetic oligonucleotide
  Sense strand starting at position 2370 of SEQ ID NO: 317774
gaaauaguagguugaucaa

SEQ ID NO: 511152 - RNA, 19 nt, Artificial Sequence
  Description of Artificial Sequence: Synthetic oligonucleotide
  Antisense strand to SEQ ID NO: 511151
uugaucaaccuacuauuuc

SEQ ID NO: 511153 - RNA, 19 nt, Artificial Sequence
  Description of Artificial Sequence: Synthetic oligonucleotide
  Sense strand starting at position 2373 of SEQ ID NO: 317774
auaguagguugaucaauca

SEQ ID NO: 511154 - RNA, 19 nt, Artificial Sequence
  Description of Artificial Sequence: Synthetic oligonucleotide
  Antisense strand to SEQ ID NO: 511153
ugauugaucaaccuacuau

SEQ ID NO: 511155 - RNA, 19 nt, Artificial Sequence
  Description of Artificial Sequence: Synthetic oligonucleotide
  Sense strand starting at position 2466 of SEQ ID NO: 317774
gaguuuggagaccaguauu

SEQ ID NO: 511156 - RNA, 19 nt, Artificial Sequence
  Description of Artificial Sequence: Synthetic oligonucleotide
  Antisense strand to SEQ ID NO: 511155
aauacuggucuccaaacuc

SEQ ID NO: 511157 - RNA, 19 nt, Artificial Sequence
  Description of Artificial Sequence: Synthetic oligonucleotide
  Sense strand starting at position 2469 of SEQ ID NO: 317774
uuuggagaccaguauucuu

SEQ ID NO: 511158 - RNA, 19 nt, Artificial Sequence
  Description of Artificial Sequence: Synthetic oligonucleotide
  Antisense strand to SEQ ID NO: 511157
aagaauacuggucuccaaa

SEQ ID NO: 511159 - RNA, 19 nt, Artificial Sequence
  Description of Artificial Sequence: Synthetic oligonucleotide
  Sense strand starting at position 2472 of SEQ ID NO: 317774
ggagaccaguauucuugaa

SEQ ID NO: 511160 - RNA, 19 nt, Artificial Sequence
  Description of Artificial Sequence: Synthetic oligonucleotide
  Antisense strand to SEQ ID NO: 511159
uucaagaauacuggucucc

SEQ ID NO: 511161 - RNA, 19 nt, Artificial Sequence
  Description of Artificial Sequence: Synthetic oligonucleotide
  Sense strand starting at position 2547 of SEQ ID NO: 317774
gcguauuggcccuuacagu

SEQ ID NO: 511162 - RNA, 19 nt, Artificial Sequence
  Description of Artificial Sequence: Synthetic oligonucleotide
  Antisense strand to SEQ ID NO: 511161
acuguaagggccaauacgc

SEQ ID NO: 511163 - RNA, 19 nt, Artificial Sequence
  Description of Artificial Sequence: Synthetic oligonucleotide
  Sense strand starting at position 2660 of SEQ ID NO: 317774
cucugaagccaggauguau

SEQ ID NO: 511164 - RNA, 19 nt, Artificial Sequence
  Description of Artificial Sequence: Synthetic oligonucleotide
  Antisense strand to SEQ ID NO: 511163
auacauccuggcuucagag

SEQ ID NO: 511165 - RNA, 19 nt, Artificial Sequence
  Description of Artificial Sequence: Synthetic oligonucleotide
  Sense strand starting at position 2723 of SEQ ID NO: 317774
ggagccuuacaguaagcua

SEQ ID NO: 511166 - RNA, 19 nt, Artificial Sequence
  Description of Artificial Sequence: Synthetic oligonucleotide
  Antisense strand to SEQ ID NO: 511165
uagcuuacuguaaggcucc

SEQ ID NO: 511167 - RNA, 19 nt, Artificial Sequence
  Description of Artificial Sequence: Synthetic oligonucleotide
  Sense strand starting at position 3012 of SEQ ID NO: 317774
gcaggaugacuuuaacucu

SEQ ID NO: 511168 - RNA, 19 nt, Artificial Sequence
  Description of Artificial Sequence: Synthetic oligonucleotide
  Antisense strand to SEQ ID NO: 511167
agaguuaaagucauccugc

SEQ ID NO: 511169 - RNA, 19 nt, Artificial Sequence
  Description of Artificial Sequence: Synthetic oligonucleotide
  Sense strand starting at position 3110 of SEQ ID NO: 317774
uagaguuugccacaguuau

SEQ ID NO: 511170 - RNA, 19 nt, Artificial Sequence
  Description of Artificial Sequence: Synthetic oligonucleotide
  Antisense strand to SEQ ID NO: 511169
auaacuguggcaaacucua

SEQ ID NO: 511171 - RNA, 19 nt, Artificial Sequence
  Description of Artificial Sequence: Synthetic oligonucleotide
  Sense strand starting at position 3206 of SEQ ID NO: 317774
ucucauaaauuggcuaaga

SEQ ID NO: 511172 - RNA, 19 nt, Artificial Sequence
  Description of Artificial Sequence: Synthetic oligonucleotide
  Antisense strand to SEQ ID NO: 511171
ucuuagccaauuuaugaga

SEQ ID NO: 511173 - RNA, 19 nt, Artificial Sequence
  Description of Artificial Sequence: Synthetic oligonucleotide
  Sense strand starting at position 3207 of SEQ ID NO: 317774
cucauaaauuggcuaagaa

SEQ ID NO: 511174 - RNA, 19 nt, Artificial Sequence
  Description of Artificial Sequence: Synthetic oligonucleotide
  Antisense strand to SEQ ID NO: 511173
uucuuagccaauuuaugag

SEQ ID NO: 511175 - RNA, 19 nt, Artificial Sequence
  Description of Artificial Sequence: Synthetic oligonucleotide
  Sense strand starting at position 3516 of SEQ ID NO: 317774
gacugugauuuccacagag

SEQ ID NO: 511176 - RNA, 19 nt, Artificial Sequence
  Description of Artificial Sequence: Synthetic oligonucleotide
  Antisense strand to SEQ ID NO: 511175
cucuguggaaaucacaguc

SEQ ID NO: 511177 - RNA, 19 nt, Artificial Sequence
  Description of Artificial Sequence: Synthetic oligonucleotide
  Sense strand starting at position 3670 of SEQ ID NO: 317774
ggaauugggcucugucuaa

SEQ ID NO: 511178 - RNA, 19 nt, Artificial Sequence
  Description of Artificial Sequence: Synthetic oligonucleotide
  Antisense strand to SEQ ID NO: 511177
uuagacagagcccaauucc

SEQ ID NO: 511179 - RNA, 19 nt, Artificial Sequence
  Description of Artificial Sequence: Synthetic oligonucleotide
  Sense strand starting at position 3674 of SEQ ID NO: 317774
uugggcucugucuaaauua

SEQ ID NO: 511180 - RNA, 19 nt, Artificial Sequence
  Description of Artificial Sequence: Synthetic oligonucleotide
  Antisense strand to SEQ ID NO: 511179
uaauuuagacagagcccaa

SEQ ID NO: 511181 - RNA, 19 nt, Artificial Sequence
  Description of Artificial Sequence: Synthetic oligonucleotide
  Sense strand starting at position 3686 of SEQ ID NO: 317774
uaaauuaacugucugagga

SEQ ID NO: 511182 - RNA, 19 nt, Artificial Sequence
  Description of Artificial Sequence: Synthetic oligonucleotide
  Antisense strand to SEQ ID NO: 511181
uccucagacaguuaauuua

SEQ ID NO: 511183 - RNA, 19 nt, Artificial Sequence
  Description of Artificial Sequence: Synthetic oligonucleotide
  Sense strand starting at position 3702 of SEQ ID NO: 317774
ggaauacaauuguugcuga

SEQ ID NO: 511184 - RNA, 19 nt, Artificial Sequence
  Description of Artificial Sequence: Synthetic oligonucleotide
  Antisense strand to SEQ ID NO: 511183
ucagcaacaauuguauucc

SEQ ID NO: 511185 - RNA, 19 nt, Artificial Sequence
  Description of Artificial Sequence: Synthetic oligonucleotide
  Sense strand starting at position 248 of SEQ ID NO: 317775
cucauaguauuugcagagu

SEQ ID NO: 511186 - RNA, 19 nt, Artificial Sequence
  Description of Artificial Sequence: Synthetic oligonucleotide
  Antisense strand to SEQ ID NO: 511185
acucugcaaauacuaugag

SEQ ID NO: 511187 - RNA, 19 nt, Artificial Sequence
  Description of Artificial Sequence: Synthetic oligonucleotide
  Sense strand starting at position 254 of SEQ ID NO: 317775
guauuugcagagugucauu

SEQ ID NO: 511188 - RNA, 19 nt, Artificial Sequence
  Description of Artificial Sequence: Synthetic oligonucleotide
  Antisense strand to SEQ ID NO: 511187
aaugacacucugcaaauac

SEQ ID NO: 511189 - RNA, 19 nt, Artificial Sequence
  Description of Artificial Sequence: Synthetic oligonucleotide
  Sense strand starting at position 259 of SEQ ID NO: 317775
ugcagagugucauuucuuc

SEQ ID NO: 511190 - RNA, 19 nt, Artificial Sequence
  Description of Artificial Sequence: Synthetic oligonucleotide
  Antisense strand to SEQ ID NO: 511189
gaagaaaugacacucugca

SEQ ID NO: 511191 - RNA, 19 nt, Artificial Sequence
  Description of Artificial Sequence: Synthetic oligonucleotide
  Sense strand starting at position 443 of SEQ ID NO: 317775
uuuauagauucgcuaauca

SEQ ID NO: 511192 - RNA, 19 nt, Artificial Sequence
  Description of Artificial Sequence: Synthetic oligonucleotide
  Antisense strand to SEQ ID NO: 511191
ugauuagcgaaucuauaaa

SEQ ID NO: 511193 - RNA, 19 nt, Artificial Sequence
  Description of Artificial Sequence: Synthetic oligonucleotide
  Sense strand starting at position 527 of SEQ ID NO: 317775
cggaaugucagcuagaccu

SEQ ID NO: 511194 - RNA, 19 nt, Artificial Sequence
  Description of Artificial Sequence: Synthetic oligonucleotide
  Antisense strand to SEQ ID NO: 511193
aggucuagcugacauuccg

SEQ ID NO: 511195 - RNA, 19 nt, Artificial Sequence
  Description of Artificial Sequence: Synthetic oligonucleotide
  Sense strand starting at position 529 of SEQ ID NO: 317775
gaaugucagcuagaccuuu

SEQ ID NO: 511196 - RNA, 19 nt, Artificial Sequence
  Description of Artificial Sequence: Synthetic oligonucleotide
  Antisense strand to SEQ ID NO: 511195
aaaggucuagcugacauuc

SEQ ID NO: 511197 - RNA, 19 nt, Artificial Sequence
  Description of Artificial Sequence: Synthetic oligonucleotide
  Sense strand starting at position 669 of SEQ ID NO: 317775
uccguuucucggucaguca

SEQ ID NO: 511198 - RNA, 19 nt, Artificial Sequence
  Description of Artificial Sequence: Synthetic oligonucleotide
  Antisense strand to SEQ ID NO: 511197
ugacugaccgagaaacgga

SEQ ID NO: 511199 - RNA, 19 nt, Artificial Sequence
  Description of Artificial Sequence: Synthetic oligonucleotide
  Sense strand starting at position 682 of SEQ ID NO: 317775
cagucauuacgucacaagu

SEQ ID NO: 511200 - RNA, 19 nt, Artificial Sequence
  Description of Artificial Sequence: Synthetic oligonucleotide
  Antisense strand to SEQ ID NO: 511199
acuugugacguaaugacug

SEQ ID NO: 511201 - RNA, 19 nt, Artificial Sequence
  Description of Artificial Sequence: Synthetic oligonucleotide
  Sense strand starting at position 846 of SEQ ID NO: 317775
aaaguaacucaguaucggu

SEQ ID NO: 511202 - RNA, 19 nt, Artificial Sequence
  Description of Artificial Sequence: Synthetic oligonucleotide
  Antisense strand to SEQ ID NO: 511201
accgauacugaguuacuuu

SEQ ID NO: 511203 - RNA, 19 nt, Artificial Sequence
  Description of Artificial Sequence: Synthetic oligonucleotide
  Sense strand starting at position 894 of SEQ ID NO: 317775
uggagcuugcaggaaagau

SEQ ID NO: 511204 - RNA, 19 nt, Artificial Sequence
  Description of Artificial Sequence: Synthetic oligonucleotide
  Antisense strand to SEQ ID NO: 511203
aucuuuccugcaagcucca

SEQ ID NO: 511205 - RNA, 19 nt, Artificial Sequence
  Description of Artificial Sequence: Synthetic oligonucleotide
  Sense strand starting at position 920 of SEQ ID NO: 317775
guccgagagcuguaacaga

SEQ ID NO: 511206 - RNA, 19 nt, Artificial Sequence
  Description of Artificial Sequence: Synthetic oligonucleotide
  Antisense strand to SEQ ID NO: 511205
ucuguuacagcucucggac

SEQ ID NO: 511207 - RNA, 19 nt, Artificial Sequence
  Description of Artificial Sequence: Synthetic oligonucleotide
  Sense strand starting at position 1050 of SEQ ID NO: 317775
cuguuuccagaacggaaau

SEQ ID NO: 511208 - RNA, 19 nt, Artificial Sequence
  Description of Artificial Sequence: Synthetic oligonucleotide
  Antisense strand to SEQ ID NO: 511207
auuuccguucuggaaacag

SEQ ID NO: 511209 - RNA, 19 nt, Artificial Sequence
  Description of Artificial Sequence: Synthetic oligonucleotide
  Sense strand starting at position 1124 of SEQ ID NO: 317775
ggaaauguuaaacgccuca

SEQ ID NO: 511210 - RNA, 19 nt, Artificial Sequence
  Description of Artificial Sequence: Synthetic oligonucleotide
  Antisense strand to SEQ ID NO: 511209
ugaggcguuuaacauuucc

SEQ ID NO: 511211 - RNA, 19 nt, Artificial Sequence
  Description of Artificial Sequence: Synthetic oligonucleotide
  Sense strand starting at position 1555 of SEQ ID NO: 317775
gagcgagauuguccuggga

SEQ ID NO: 511212 - RNA, 19 nt, Artificial Sequence
  Description of Artificial Sequence: Synthetic oligonucleotide
  Antisense strand to SEQ ID NO: 511211
ucccaggacaaucucgcuc

SEQ ID NO: 511213 - RNA, 19 nt, Artificial Sequence
  Description of Artificial Sequence: Synthetic oligonucleotide
  Sense strand starting at position 1559 of SEQ ID NO: 317775
gagauuguccugggagcca

SEQ ID NO: 511214 - RNA, 19 nt, Artificial Sequence
  Description of Artificial Sequence: Synthetic oligonucleotide
  Antisense strand to SEQ ID NO: 511213
uggcucccaggacaaucuc

SEQ ID NO: 511215 - RNA, 19 nt, Artificial Sequence
  Description of Artificial Sequence: Synthetic oligonucleotide
  Sense strand starting at position 1659 of SEQ ID NO: 317775
cggcuuugcaucugaauuu

SEQ ID NO: 511216 - RNA, 19 nt, Artificial Sequence
  Description of Artificial Sequence: Synthetic oligonucleotide
  Antisense strand to SEQ ID NO: 511215
aaauucagaugcaaagccg

SEQ ID NO: 511217 - RNA, 19 nt, Artificial Sequence
  Description of Artificial Sequence: Synthetic oligonucleotide
  Sense strand starting at position 1930 of SEQ ID NO: 317775
guugcauuuccggagcgga

SEQ ID NO: 511218 - RNA, 19 nt, Artificial Sequence
  Description of Artificial Sequence: Synthetic oligonucleotide
  Antisense strand to SEQ ID NO: 511217
uccgcuccggaaaugcaac

SEQ ID NO: 511219 - RNA, 19 nt, Artificial Sequence
  Description of Artificial Sequence: Synthetic oligonucleotide
  Sense strand starting at position 2120 of SEQ ID NO: 317775
ggaguaggcagauguaaau

SEQ ID NO: 511220 - RNA, 19 nt, Artificial Sequence
  Description of Artificial Sequence: Synthetic oligonucleotide
  Antisense strand to SEQ ID NO: 511219
auuuacaucugccuacucc

SEQ ID NO: 511221 - RNA, 19 nt, Artificial Sequence
  Description of Artificial Sequence: Synthetic oligonucleotide
  Sense strand starting at position 2228 of SEQ ID NO: 317775
gcuugaaagaguugaaaua

SEQ ID NO: 511222 - RNA, 19 nt, Artificial Sequence
  Description of Artificial Sequence: Synthetic oligonucleotide
  Antisense strand to SEQ ID NO: 511221
uauuucaacucuuucaagc

SEQ ID NO: 511223 - RNA, 19 nt, Artificial Sequence
  Description of Artificial Sequence: Synthetic oligonucleotide
  Sense strand starting at position 2238 of SEQ ID NO: 317775
guugaaauaguagguugau

SEQ ID NO: 511224 - RNA, 19 nt, Artificial Sequence
  Description of Artificial Sequence: Synthetic oligonucleotide
  Antisense strand to SEQ ID NO: 511223
aucaaccuacuauuucaac

SEQ ID NO: 511225 - RNA, 19 nt, Artificial Sequence
  Description of Artificial Sequence: Synthetic oligonucleotide
  Sense strand starting at position 2239 of SEQ ID NO: 317775
uugaaauaguagguugauc

SEQ ID NO: 511226 - RNA, 19 nt, Artificial Sequence
  Description of Artificial Sequence: Synthetic oligonucleotide
  Antisense strand to SEQ ID NO: 511225
gaucaaccuacuauuucaa

SEQ ID NO: 511227 - RNA, 19 nt, Artificial Sequence
  Description of Artificial Sequence: Synthetic oligonucleotide
  Sense strand starting at position 2241 of SEQ ID NO: 317775
gaaauaguagguugaucaa

SEQ ID NO: 511228 - RNA, 19 nt, Artificial Sequence
  Description of Artificial Sequence: Synthetic oligonucleotide
  Antisense strand to SEQ ID NO: 511227
uugaucaaccuacuauuuc

SEQ ID NO: 511229 - RNA, 19 nt, Artificial Sequence
  Description of Artificial Sequence: Synthetic oligonucleotide
  Sense strand starting at position 2244 of SEQ ID NO: 317775
auaguagguugaucaauca

SEQ ID NO: 511230 - RNA, 19 nt, Artificial Sequence
  Description of Artificial Sequence: Synthetic oligonucleotide
  Antisense strand to SEQ ID NO: 511229
ugauugaucaaccuacuau

SEQ ID NO: 511231 - RNA, 19 nt, Artificial Sequence
  Description of Artificial Sequence: Synthetic oligonucleotide
  Sense strand starting at position 2337 of SEQ ID NO: 317775
gaguuuggagaccaguauu

SEQ ID NO: 511232 - RNA, 19 nt, Artificial Sequence
  Description of Artificial Sequence: Synthetic oligonucleotide
  Antisense strand to SEQ ID NO: 511231
aauacuggucuccaaacuc

SEQ ID NO: 511233 - RNA, 19 nt, Artificial Sequence
  Description of Artificial Sequence: Synthetic oligonucleotide
  Sense strand starting at position 2340 of SEQ ID NO: 317775
uuuggagaccaguauucuu

SEQ ID NO: 511234 - RNA, 19 nt, Artificial Sequence
  Description of Artificial Sequence: Synthetic oligonucleotide
  Antisense strand to SEQ ID NO: 511233
aagaauacuggucuccaaa

SEQ ID NO: 511235 - RNA, 19 nt, Artificial Sequence
  Description of Artificial Sequence: Synthetic oligonucleotide
  Sense strand starting at position 2343 of SEQ ID NO: 317775
ggagaccaguauucuugaa

SEQ ID NO: 511236 - RNA, 19 nt, Artificial Sequence
  Description of Artificial Sequence: Synthetic oligonucleotide
  Antisense strand to SEQ ID NO: 511235
uucaagaauacuggucucc

SEQ ID NO: 511237 - RNA, 19 nt, Artificial Sequence
  Description of Artificial Sequence: Synthetic oligonucleotide
  Sense strand starting at position 2418 of SEQ ID NO: 317775
gcguauuggcccuuacagu

SEQ ID NO: 511238 - RNA, 19 nt, Artificial Sequence
  Description of Artificial Sequence: Synthetic oligonucleotide
  Antisense strand to SEQ ID NO: 511237
acuguaagggccaauacgc

SEQ ID NO: 511239 - RNA, 19 nt, Artificial Sequence
  Description of Artificial Sequence: Synthetic oligonucleotide
  Sense strand starting at position 2483 of SEQ ID NO: 317775
ccuuacccuucuguugaua

SEQ ID NO: 511240 - RNA, 19 nt, Artificial Sequence
  Description of Artificial Sequence: Synthetic oligonucleotide
  Antisense strand to SEQ ID NO: 511239
uaucaacagaaggguaagg

SEQ ID NO: 511241 - RNA, 19 nt, Artificial Sequence
  Description of Artificial Sequence: Synthetic oligonucleotide
  Sense strand starting at position 2531 of SEQ ID NO: 317775
cucugaagccaggauguau

SEQ ID NO: 511242 - RNA, 19 nt, Artificial Sequence
  Description of Artificial Sequence: Synthetic oligonucleotide
  Antisense strand to SEQ ID NO: 511241
auacauccuggcuucagag

SEQ ID NO: 511243 - RNA, 19 nt, Artificial Sequence
  Description of Artificial Sequence: Synthetic oligonucleotide
  Sense strand starting at position 2594 of SEQ ID NO: 317775
ggagccuuacaguaagcua

SEQ ID NO: 511244 - RNA, 19 nt, Artificial Sequence
  Description of Artificial Sequence: Synthetic oligonucleotide
  Antisense strand to SEQ ID NO: 511243
uagcuuacuguaaggcucc

SEQ ID NO: 511245 - RNA, 19 nt, Artificial Sequence
  Description of Artificial Sequence: Synthetic oligonucleotide
  Sense strand starting at position 2883 of SEQ ID NO: 317775
gcaggaugacuuuaacucu

SEQ ID NO: 511246 - RNA, 19 nt, Artificial Sequence
  Description of Artificial Sequence: Synthetic oligonucleotide
  Antisense strand to SEQ ID NO: 511245
agaguuaaagucauccugc

SEQ ID NO: 511247 - RNA, 19 nt, Artificial Sequence
  Description of Artificial Sequence: Synthetic oligonucleotide
  Sense strand starting at position 2981 of SEQ ID NO: 317775
uagaguuugccacaguuau

SEQ ID NO: 511248 - RNA, 19 nt, Artificial Sequence
  Description of Artificial Sequence: Synthetic oligonucleotide
  Antisense strand to SEQ ID NO: 511247
auaacuguggcaaacucua

SEQ ID NO: 511249 - RNA, 19 nt, Artificial Sequence
  Description of Artificial Sequence: Synthetic oligonucleotide
  Sense strand starting at position 2987 of SEQ ID NO: 317775
uugccacaguuaucugaau

SEQ ID NO: 511250 - RNA, 19 nt, Artificial Sequence
  Description of Artificial Sequence: Synthetic oligonucleotide
  Antisense strand to SEQ ID NO: 511249
auucagauaacuguggcaa

SEQ ID NO: 511251 - RNA, 19 nt, Artificial Sequence
  Description of Artificial Sequence: Synthetic oligonucleotide
  Sense strand starting at position 3077 of SEQ ID NO: 317775
ucucauaaauuggcuaaga

SEQ ID NO: 511252 - RNA, 19 nt, Artificial Sequence
  Description of Artificial Sequence: Synthetic oligonucleotide
  Antisense strand to SEQ ID NO: 511251
ucuuagccaauuuaugaga

SEQ ID NO: 511253 - RNA, 19 nt, Artificial Sequence
  Description of Artificial Sequence: Synthetic oligonucleotide
  Sense strand starting at position 3078 of SEQ ID NO: 317775
cucauaaauuggcuaagaa

SEQ ID NO: 511254 - RNA, 19 nt, Artificial Sequence
  Description of Artificial Sequence: Synthetic oligonucleotide
  Antisense strand to SEQ ID NO: 511253
uucuuagccaauuuaugag

SEQ ID NO: 511255 - RNA, 19 nt, Artificial Sequence
  Description of Artificial Sequence: Synthetic oligonucleotide
  Sense strand starting at position 3387 of SEQ ID NO: 317775
gacugugauuuccacagag

SEQ ID NO: 511256 - RNA, 19 nt, Artificial Sequence
  Description of Artificial Sequence: Synthetic oligonucleotide
  Antisense strand to SEQ ID NO: 511255
cucuguggaaaucacaguc

SEQ ID NO: 511257 - RNA, 19 nt, Artificial Sequence
  Description of Artificial Sequence: Synthetic oligonucleotide
  Sense strand starting at position 3541 of SEQ ID NO: 317775
ggaauugggcucugucuaa

SEQ ID NO: 511258 - RNA, 19 nt, Artificial Sequence
  Description of Artificial Sequence: Synthetic oligonucleotide
  Antisense strand to SEQ ID NO: 511257
uuagacagagcccaauucc

SEQ ID NO: 511259 - RNA, 19 nt, Artificial Sequence
  Description of Artificial Sequence: Synthetic oligonucleotide
  Sense strand starting at position 3545 of SEQ ID NO: 317775
uugggcucugucuaaauua

SEQ ID NO: 511260 - RNA, 19 nt, Artificial Sequence
  Description of Artificial Sequence: Synthetic oligonucleotide
  Antisense strand to SEQ ID NO: 511259
uaauuuagacagagcccaa

SEQ ID NO: 511261 - RNA, 19 nt, Artificial Sequence
  Description of Artificial Sequence: Synthetic oligonucleotide
  Sense strand starting at position 3557 of SEQ ID NO: 317775
uaaauuaacugucugagga

SEQ ID NO: 511262 - RNA, 19 nt, Artificial Sequence
  Description of Artificial Sequence: Synthetic oligonucleotide
  Antisense strand to SEQ ID NO: 511261
uccucagacaguuaauuua

SEQ ID NO: 511263 - RNA, 19 nt, Artificial Sequence
  Description of Artificial Sequence: Synthetic oligonucleotide
  Sense strand starting at position 3573 of SEQ ID NO: 317775
ggaauacaauuguugcuga

SEQ ID NO: 511264 - RNA, 19 nt, Artificial Sequence
  Description of Artificial Sequence: Synthetic oligonucleotide
  Antisense strand to SEQ ID NO: 511263
ucagcaacaauuguauucc

SEQ ID NO: 511265 - RNA, 19 nt, Artificial Sequence
  Description of Artificial Sequence: Synthetic oligonucleotide
  Sense strand starting at position 125 of SEQ ID NO: 317776
gcagaauaugaaugccaga

SEQ ID NO: 511266 - RNA, 19 nt, Artificial Sequence
  Description of Artificial Sequence: Synthetic oligonucleotide
  Antisense strand to SEQ ID NO: 511265
ucuggcauucauauucugc

SEQ ID NO: 511267 - RNA, 19 nt, Artificial Sequence
  Description of Artificial Sequence: Synthetic oligonucleotide
  Sense strand starting at position 270 of SEQ ID NO: 317776
uugagcgauucuccuguca

SEQ ID NO: 511268 - RNA, 19 nt, Artificial Sequence
  Description of Artificial Sequence: Synthetic oligonucleotide
  Antisense strand to SEQ ID NO: 511267
ugacaggagaaucgcucaa

SEQ ID NO: 511269 - RNA, 19 nt, Artificial Sequence
  Description of Artificial Sequence: Synthetic oligonucleotide
  Sense strand starting at position 272 of SEQ ID NO: 317776
gagcgauucuccugucaca

SEQ ID NO: 511270 - RNA, 19 nt, Artificial Sequence
  Description of Artificial Sequence: Synthetic oligonucleotide
  Antisense strand to SEQ ID NO: 511269
ugugacaggagaaucgcuc

SEQ ID NO: 511271 - RNA, 19 nt, Artificial Sequence
  Description of Artificial Sequence: Synthetic oligonucleotide
  Sense strand starting at position 529 of SEQ ID NO: 317776
acagaauguuagugccguu

SEQ ID NO: 511272 - RNA, 19 nt, Artificial Sequence
  Description of Artificial Sequence: Synthetic oligonucleotide
  Antisense strand to SEQ ID NO: 511271
aacggcacuaacauucugu

SEQ ID NO: 511273 - RNA, 19 nt, Artificial Sequence
  Description of Artificial Sequence: Synthetic oligonucleotide
  Sense strand starting at position 563 of SEQ ID NO: 317776
cgaagaugcuccugauuuc

SEQ ID NO: 511274 - RNA, 19 nt, Artificial Sequence
  Description of Artificial Sequence: Synthetic oligonucleotide
  Antisense strand to SEQ ID NO: 511273
gaaaucaggagcaucuucg

SEQ ID NO: 511275 - RNA, 19 nt, Artificial Sequence
  Description of Artificial Sequence: Synthetic oligonucleotide
  Sense strand starting at position 588 of SEQ ID NO: 317776
gcagaugacugggcaguau

SEQ ID NO: 511276 - RNA, 19 nt, Artificial Sequence
  Description of Artificial Sequence: Synthetic oligonucleotide
  Antisense strand to SEQ ID NO: 511275
auacugcccagucaucugc

SEQ ID NO: 511277 - RNA, 19 nt, Artificial Sequence
  Description of Artificial Sequence: Synthetic oligonucleotide
  Sense strand starting at position 767 of SEQ ID NO: 317776
guccaauccugaugacuac

SEQ ID NO: 511278 - RNA, 19 nt, Artificial Sequence
  Description of Artificial Sequence: Synthetic oligonucleotide
  Antisense strand to SEQ ID NO: 511277
guagucaucaggauuggac

SEQ ID NO: 511279 - RNA, 19 nt, Artificial Sequence
  Description of Artificial Sequence: Synthetic oligonucleotide
  Sense strand starting at position 844 of SEQ ID NO: 317776
cggagcaaguuaguuuaua

SEQ ID NO: 511280 - RNA, 19 nt, Artificial Sequence
  Description of Artificial Sequence: Synthetic oligonucleotide
  Antisense strand to SEQ ID NO: 511279
uauaaacuaacuugcuccg

SEQ ID NO: 511281 - RNA, 19 nt, Artificial Sequence
  Description of Artificial Sequence: Synthetic oligonucleotide
  Sense strand starting at position 845 of SEQ ID NO: 317776
ggagcaaguuaguuuauac

SEQ ID NO: 511282 - RNA, 19 nt, Artificial Sequence
  Description of Artificial Sequence: Synthetic oligonucleotide
  Antisense strand to SEQ ID NO: 511281
guauaaacuaacuugcucc

SEQ ID NO: 511283 - RNA, 19 nt, Artificial Sequence
  Description of Artificial Sequence: Synthetic oligonucleotide
  Sense strand starting at position 913 of SEQ ID NO: 317776
gagcaaagguuaguuucuu

SEQ ID NO: 511284 - RNA, 19 nt, Artificial Sequence
  Description of Artificial Sequence: Synthetic oligonucleotide
  Antisense strand to SEQ ID NO: 511283
aagaaacuaaccuuugcuc

SEQ ID NO: 511285 - RNA, 19 nt, Artificial Sequence
  Description of Artificial Sequence: Synthetic oligonucleotide
  Sense strand starting at position 919 of SEQ ID NO: 317776
agguuaguuucuucucuca

SEQ ID NO: 511286 - RNA, 19 nt, Artificial Sequence
  Description of Artificial Sequence: Synthetic oligonucleotide
  Antisense strand to SEQ ID NO: 511285
ugagagaagaaacuaaccu

SEQ ID NO: 511287 - RNA, 19 nt, Artificial Sequence
  Description of Artificial Sequence: Synthetic oligonucleotide
  Sense strand starting at position 1164 of SEQ ID NO: 317776
gcaggagccuccugcuuaa

SEQ ID NO: 511288 - RNA, 19 nt, Artificial Sequence
  Description of Artificial Sequence: Synthetic oligonucleotide
  Antisense strand to SEQ ID NO: 511287
uuaagcaggaggcuccugc

SEQ ID NO: 511289 - RNA, 19 nt, Artificial Sequence
  Description of Artificial Sequence: Synthetic oligonucleotide
  Sense strand starting at position 1298 of SEQ ID NO: 317776
uaggcugaguuccuugauu

SEQ ID NO: 511290 - RNA, 19 nt, Artificial Sequence
  Description of Artificial Sequence: Synthetic oligonucleotide
  Antisense strand to SEQ ID NO: 511289
aaucaaggaacucagccua

SEQ ID NO: 511291 - RNA, 19 nt, Artificial Sequence
  Description of Artificial Sequence: Synthetic oligonucleotide
  Sense strand starting at position 2349 of SEQ ID NO: 317776
ugggucuuaccucacauua

SEQ ID NO: 511292 - RNA, 19 nt, Artificial Sequence
  Description of Artificial Sequence: Synthetic oligonucleotide
  Antisense strand to SEQ ID NO: 511291
uaaugugagguaagaccca

SEQ ID NO: 511293 - RNA, 19 nt, Artificial Sequence
  Description of Artificial Sequence: Synthetic oligonucleotide
  Sense strand starting at position 2351 of SEQ ID NO: 317776
ggucuuaccucacauuaca

SEQ ID NO: 511294 - RNA, 19 nt, Artificial Sequence
  Description of Artificial Sequence: Synthetic oligonucleotide
  Antisense strand to SEQ ID NO: 511293
uguaaugugagguaagacc

SEQ ID NO: 511295 - RNA, 19 nt, Artificial Sequence
  Description of Artificial Sequence: Synthetic oligonucleotide
  Sense strand starting at position 2416 of SEQ ID NO: 317776
cucagacaggcuugaaaug

SEQ ID NO: 511296 - RNA, 19 nt, Artificial Sequence
  Description of Artificial Sequence: Synthetic oligonucleotide
  Antisense strand to SEQ ID NO: 511295
cauuucaagccugucugag

SEQ ID NO: 511297 - RNA, 19 nt, Artificial Sequence
  Description of Artificial Sequence: Synthetic oligonucleotide
  Sense strand starting at position 2447 of SEQ ID NO: 317776
cgcugugugaucucaugca

SEQ ID NO: 511298 - RNA, 19 nt, Artificial Sequence
  Description of Artificial Sequence: Synthetic oligonucleotide
  Antisense strand to SEQ ID NO: 511297
ugcaugagaucacacagcg

SEQ ID NO: 511299 - RNA, 19 nt, Artificial Sequence
  Description of Artificial Sequence: Synthetic oligonucleotide
  Sense strand starting at position 2452 of SEQ ID NO: 317776
ugugaucucaugcaugugu

SEQ ID NO: 511300 - RNA, 19 nt, Artificial Sequence
  Description of Artificial Sequence: Synthetic oligonucleotide
  Antisense strand to SEQ ID NO: 511299
acacaugcaugagaucaca

SEQ ID NO: 511301 - RNA, 19 nt, Artificial Sequence
  Description of Artificial Sequence: Synthetic oligonucleotide
  Sense strand starting at position 2490 of SEQ ID NO: 317776
ggcuaccucuucuccgaaa

SEQ ID NO: 511302 - RNA, 19 nt, Artificial Sequence
  Description of Artificial Sequence: Synthetic oligonucleotide
  Antisense strand to SEQ ID NO: 511301
uuucggagaagagguagcc

SEQ ID NO: 511303 - RNA, 19 nt, Artificial Sequence
  Description of Artificial Sequence: Synthetic oligonucleotide
  Sense strand starting at position 2587 of SEQ ID NO: 317776
gcuauaaacguauaauaag

SEQ ID NO: 511304 - RNA, 19 nt, Artificial Sequence
  Description of Artificial Sequence: Synthetic oligonucleotide
  Antisense strand to SEQ ID NO: 511303
cuuauuauacguuuauagc

SEQ ID NO: 511305 - RNA, 19 nt, Artificial Sequence
  Description of Artificial Sequence: Synthetic oligonucleotide
  Sense strand starting at position 2707 of SEQ ID NO: 317776
gugugaucgcagcacacua

SEQ ID NO: 511306 - RNA, 19 nt, Artificial Sequence
  Description of Artificial Sequence: Synthetic oligonucleotide
  Antisense strand to SEQ ID NO: 511305
uagugugcugcgaucacac

SEQ ID NO: 511307 - RNA, 19 nt, Artificial Sequence
  Description of Artificial Sequence: Synthetic oligonucleotide
  Sense strand starting at position 2803 of SEQ ID NO: 317776
acaccuggcuccuaaguua

SEQ ID NO: 511308 - RNA, 19 nt, Artificial Sequence
  Description of Artificial Sequence: Synthetic oligonucleotide
  Antisense strand to SEQ ID NO: 511307
uaacuuaggagccaggugu

SEQ ID NO: 511309 - RNA, 19 nt, Artificial Sequence
  Description of Artificial Sequence: Synthetic oligonucleotide
  Sense strand starting at position 2806 of SEQ ID NO: 317776
ccuggcuccuaaguuauau

SEQ ID NO: 511310 - RNA, 19 nt, Artificial Sequence
  Description of Artificial Sequence: Synthetic oligonucleotide
  Antisense strand to SEQ ID NO: 511309
auauaacuuaggagccagg

SEQ ID NO: 511311 - RNA, 19 nt, Artificial Sequence
  Description of Artificial Sequence: Synthetic oligonucleotide
  Sense strand starting at position 2975 of SEQ ID NO: 317776
cuaggaagcucugagaaca

SEQ ID NO: 511312 - RNA, 19 nt, Artificial Sequence
  Description of Artificial Sequence: Synthetic oligonucleotide
  Antisense strand to SEQ ID NO: 511311
uguucucagagcuuccuag

SEQ ID NO: 511313 - RNA, 19 nt, Artificial Sequence
  Description of Artificial Sequence: Synthetic oligonucleotide
  Sense strand starting at position 3113 of SEQ ID NO: 317776
aaguaagcauucgacaaag

SEQ ID NO: 511314 - RNA, 19 nt, Artificial Sequence
  Description of Artificial Sequence: Synthetic oligonucleotide
  Antisense strand to SEQ ID NO: 511313
cuuugucgaaugcuuacuu

SEQ ID NO: 511315 - RNA, 19 nt, Artificial Sequence
  Description of Artificial Sequence: Synthetic oligonucleotide
  Sense strand starting at position 3115 of SEQ ID NO: 317776
guaagcauucgacaaaggu

SEQ ID NO: 511316 - RNA, 19 nt, Artificial Sequence
  Description of Artificial Sequence: Synthetic oligonucleotide
  Antisense strand to SEQ ID NO: 511315
accuuugucgaaugcuuac

SEQ ID NO: 511317 - RNA, 19 nt, Artificial Sequence
  Description of Artificial Sequence: Synthetic oligonucleotide
  Sense strand starting at position 3119 of SEQ ID NO: 317776
gcauucgacaaaggucuua

SEQ ID NO: 511318 - RNA, 19 nt, Artificial Sequence
  Description of Artificial Sequence: Synthetic oligonucleotide
  Antisense strand to SEQ ID NO: 511317
uaagaccuuugucgaaugc

SEQ ID NO: 511319 - RNA, 19 nt, Artificial Sequence
  Description of Artificial Sequence: Synthetic oligonucleotide
  Sense strand starting at position 3124 of SEQ ID NO: 317776
cgacaaaggucuuaauauc

SEQ ID NO: 511320 - RNA, 19 nt, Artificial Sequence
  Description of Artificial Sequence: Synthetic oligonucleotide
  Antisense strand to SEQ ID NO: 511319
gauauuaagaccuuugucg

SEQ ID NO: 511321 - RNA, 19 nt, Artificial Sequence
  Description of Artificial Sequence: Synthetic oligonucleotide
  Sense strand starting at position 3675 of SEQ ID NO: 317776
uguccuuuguagcaaacau

SEQ ID NO: 511322 - RNA, 19 nt, Artificial Sequence
  Description of Artificial Sequence: Synthetic oligonucleotide
  Antisense strand to SEQ ID NO: 511321
auguuugcuacaaaggaca

SEQ ID NO: 511323 - RNA, 19 nt, Artificial Sequence
  Description of Artificial Sequence: Synthetic oligonucleotide
  Sense strand starting at position 3685 of SEQ ID NO: 317776
agcaaacauggaugaaguu

SEQ ID NO: 511324 - RNA, 19 nt, Artificial Sequence
  Description of Artificial Sequence: Synthetic oligonucleotide
  Antisense strand to SEQ ID NO: 511323
aacuucauccauguuugcu

SEQ ID NO: 511325 - RNA, 19 nt, Artificial Sequence
  Description of Artificial Sequence: Synthetic oligonucleotide
  Sense strand starting at position 3701 of SEQ ID NO: 317776
guuggaagcuauuauucca

SEQ ID NO: 511326 - RNA, 19 nt, Artificial Sequence
  Description of Artificial Sequence: Synthetic oligonucleotide
  Antisense strand to SEQ ID NO: 511325
uggaauaauagcuuccaac

SEQ ID NO: 511327 - RNA, 19 nt, Artificial Sequence
  Description of Artificial Sequence: Synthetic oligonucleotide
  Sense strand starting at position 3772 of SEQ ID NO: 317776
gcgagcauugaguacacau

SEQ ID NO: 511328 - RNA, 19 nt, Artificial Sequence
  Description of Artificial Sequence: Synthetic oligonucleotide
  Antisense strand to SEQ ID NO: 511327
auguguacucaaugcucgc

SEQ ID NO: 511329 - RNA, 19 nt, Artificial Sequence
  Description of Artificial Sequence: Synthetic oligonucleotide
  Sense strand starting at position 3849 of SEQ ID NO: 317776
ggacaaggguuggauaacu

SEQ ID NO: 511330 - RNA, 19 nt, Artificial Sequence
  Description of Artificial Sequence: Synthetic oligonucleotide
  Antisense strand to SEQ ID NO: 511329
aguuauccaacccuugucc

SEQ ID NO: 511331 - RNA, 19 nt, Artificial Sequence
  Description of Artificial Sequence: Synthetic oligonucleotide
  Sense strand starting at position 48 of SEQ ID NO: 317777
augucauguuaaucuggaa

SEQ ID NO: 511332 - RNA, 19 nt, Artificial Sequence
  Description of Artificial Sequence: Synthetic oligonucleotide
  Antisense strand to SEQ ID NO: 511331
uuccagauuaacaugacau

SEQ ID NO: 511333 - RNA, 19 nt, Artificial Sequence
  Description of Artificial Sequence: Synthetic oligonucleotide
  Sense strand starting at position 145 of SEQ ID NO: 317777
uggguucuacuccaaugau

SEQ ID NO: 511334 - RNA, 19 nt, Artificial Sequence
  Description of Artificial Sequence: Synthetic oligonucleotide
  Antisense strand to SEQ ID NO: 511333
aucauuggaguagaaccca

SEQ ID NO: 511335 - RNA, 19 nt, Artificial Sequence
  Description of Artificial Sequence: Synthetic oligonucleotide
  Sense strand starting at position 197 of SEQ ID NO: 317777
cagauagcaccaugugaca

SEQ ID NO: 511336 - RNA, 19 nt, Artificial Sequence
  Description of Artificial Sequence: Synthetic oligonucleotide
  Antisense strand to SEQ ID NO: 511335
ugucacauggugcuaucug

SEQ ID NO: 511337 - RNA, 19 nt, Artificial Sequence
  Description of Artificial Sequence: Synthetic oligonucleotide
  Sense strand starting at position 346 of SEQ ID NO: 317777
caccuugaucugggaucuu

SEQ ID NO: 511338 - RNA, 19 nt, Artificial Sequence
  Description of Artificial Sequence: Synthetic oligonucleotide
  Antisense strand to SEQ ID NO: 511337
aagaucccagaucaaggug

SEQ ID NO: 511339 - RNA, 19 nt, Artificial Sequence
  Description of Artificial Sequence: Synthetic oligonucleotide
  Sense strand starting at position 367 of SEQ ID NO: 317777
gcuuccagagcugaaauaa

SEQ ID NO: 511340 - RNA, 19 nt, Artificial Sequence
  Description of Artificial Sequence: Synthetic oligonucleotide
  Antisense strand to SEQ ID NO: 511339
uuauuucagcucuggaagc

SEQ ID NO: 511341 - RNA, 19 nt, Artificial Sequence
  Description of Artificial Sequence: Synthetic oligonucleotide
  Sense strand starting at position 410 of SEQ ID NO: 317777
guuugugugguccuuugua

SEQ ID NO: 511342 - RNA, 19 nt, Artificial Sequence
  Description of Artificial Sequence: Synthetic oligonucleotide
  Antisense strand to SEQ ID NO: 511341
uacaaaggaccacacaaac

SEQ ID NO: 511343 - RNA, 19 nt, Artificial Sequence
  Description of Artificial Sequence: Synthetic oligonucleotide
  Sense strand starting at position 715 of SEQ ID NO: 317777
uuauacagguguuccuuaa

SEQ ID NO: 511344 - RNA, 19 nt, Artificial Sequence
  Description of Artificial Sequence: Synthetic oligonucleotide
  Antisense strand to SEQ ID NO: 511343
uuaaggaacaccuguauaa

SEQ ID NO: 511345 - RNA, 19 nt, Artificial Sequence
  Description of Artificial Sequence: Synthetic oligonucleotide
  Sense strand starting at position 743 of SEQ ID NO: 317777
ggucccauucuagauauac

SEQ ID NO: 511346 - RNA, 19 nt, Artificial Sequence
  Description of Artificial Sequence: Synthetic oligonucleotide
  Antisense strand to SEQ ID NO: 511345
guauaucuagaaugggacc

SEQ ID NO: 511347 - RNA, 19 nt, Artificial Sequence
  Description of Artificial Sequence: Synthetic oligonucleotide
  Sense strand starting at position 779 of SEQ ID NO: 317777
uggccauaaccauguauuc

SEQ ID NO: 511348 - RNA, 19 nt, Artificial Sequence
  Description of Artificial Sequence: Synthetic oligonucleotide
  Antisense strand to SEQ ID NO: 511347
gaauacaugguuauggcca

SEQ ID NO: 511349 - RNA, 19 nt, Artificial Sequence
  Description of Artificial Sequence: Synthetic oligonucleotide
  Sense strand starting at position 861 of SEQ ID NO: 317777
cugcgacaucauuauuaca

SEQ ID NO: 511350 - RNA, 19 nt, Artificial Sequence
  Description of Artificial Sequence: Synthetic oligonucleotide
  Antisense strand to SEQ ID NO: 511349
uguaauaaugaugucgcag

SEQ ID NO: 511351 - RNA, 19 nt, Artificial Sequence
  Description of Artificial Sequence: Synthetic oligonucleotide
  Sense strand starting at position 863 of SEQ ID NO: 317777
gcgacaucauuauuacaau

SEQ ID NO: 511352 - RNA, 19 nt, Artificial Sequence
  Description of Artificial Sequence: Synthetic oligonucleotide
  Antisense strand to SEQ ID NO: 511351
auuguaauaaugaugucgc

SEQ ID NO: 511353 - RNA, 19 nt, Artificial Sequence
  Description of Artificial Sequence: Synthetic oligonucleotide
  Sense strand starting at position 901 of SEQ ID NO: 317777
cagagcuugcuagauacau

SEQ ID NO: 511354 - RNA, 19 nt, Artificial Sequence
  Description of Artificial Sequence: Synthetic oligonucleotide
  Antisense strand to SEQ ID NO: 511353
auguaucuagcaagcucug

SEQ ID NO: 511355 - RNA, 19 nt, Artificial Sequence
  Description of Artificial Sequence: Synthetic oligonucleotide
  Sense strand starting at position 1067 of SEQ ID NO: 317777
uucugagcuccuuaucaga

SEQ ID NO: 511356 - RNA, 19 nt, Artificial Sequence
  Description of Artificial Sequence: Synthetic oligonucleotide
  Antisense strand to SEQ ID NO: 511355
ucugauaaggagcucagaa

SEQ ID NO: 511357 - RNA, 19 nt, Artificial Sequence
  Description of Artificial Sequence: Synthetic oligonucleotide
  Sense strand starting at position 1069 of SEQ ID NO: 317777
cugagcuccuuaucagaaa

SEQ ID NO: 511358 - RNA, 19 nt, Artificial Sequence
  Description of Artificial Sequence: Synthetic oligonucleotide
  Antisense strand to SEQ ID NO: 511357
uuucugauaaggagcucag

SEQ ID NO: 511359 - RNA, 19 nt, Artificial Sequence
  Description of Artificial Sequence: Synthetic oligonucleotide
  Sense strand starting at position 1256 of SEQ ID NO: 317777
cagucuugagagugacaag

SEQ ID NO: 511360 - RNA, 19 nt, Artificial Sequence
  Description of Artificial Sequence: Synthetic oligonucleotide
  Antisense strand to SEQ ID NO: 511359
cuugucacucucaagacug

SEQ ID NO: 511361 - RNA, 19 nt, Artificial Sequence
  Description of Artificial Sequence: Synthetic oligonucleotide
  Sense strand starting at position 1654 of SEQ ID NO: 317777
ugcagagaaaguugucaac

SEQ ID NO: 511362 - RNA, 19 nt, Artificial Sequence
  Description of Artificial Sequence: Synthetic oligonucleotide
  Antisense strand to SEQ ID NO: 511361
guugacaacuuucucugca

SEQ ID NO: 511363 - RNA, 19 nt, Artificial Sequence
  Description of Artificial Sequence: Synthetic oligonucleotide
  Sense strand starting at position 1656 of SEQ ID NO: 317777
cagagaaaguugucaacuc

SEQ ID NO: 511364 - RNA, 19 nt, Artificial Sequence
  Description of Artificial Sequence: Synthetic oligonucleotide
  Antisense strand to SEQ ID NO: 511363
gaguugacaacuuucucug

SEQ ID NO: 511365 - RNA, 19 nt, Artificial Sequence
  Description of Artificial Sequence: Synthetic oligonucleotide
  Sense strand starting at position 2454 of SEQ ID NO: 317777
ggacaauuccagugaaagc

SEQ ID NO: 511366 - RNA, 19 nt, Artificial Sequence
  Description of Artificial Sequence: Synthetic oligonucleotide
  Antisense strand to SEQ ID NO: 511365
gcuuucacuggaauugucc

SEQ ID NO: 511367 - RNA, 19 nt, Artificial Sequence
  Description of Artificial Sequence: Synthetic oligonucleotide
  Sense strand starting at position 2461 of SEQ ID NO: 317777
uccagugaaagcugcagaa

SEQ ID NO: 511368 - RNA, 19 nt, Artificial Sequence
  Description of Artificial Sequence: Synthetic oligonucleotide
  Antisense strand to SEQ ID NO: 511367
uucugcagcuuucacugga

SEQ ID NO: 511369 - RNA, 19 nt, Artificial Sequence
  Description of Artificial Sequence: Synthetic oligonucleotide
  Sense strand starting at position 2499 of SEQ ID NO: 317777
acgagucccuaauucuaaa

SEQ ID NO: 511370 - RNA, 19 nt, Artificial Sequence
  Description of Artificial Sequence: Synthetic oligonucleotide
  Antisense strand to SEQ ID NO: 511369
uuuagaauuagggacucgu

SEQ ID NO: 511371 - RNA, 19 nt, Artificial Sequence
  Description of Artificial Sequence: Synthetic oligonucleotide
  Sense strand starting at position 2519 of SEQ ID NO: 317777
gagccuaagucacugguau

SEQ ID NO: 511372 - RNA, 19 nt, Artificial Sequence
  Description of Artificial Sequence: Synthetic oligonucleotide
  Antisense strand to SEQ ID NO: 511371
auaccagugacuuaggcuc

SEQ ID NO: 511373 - RNA, 19 nt, Artificial Sequence
  Description of Artificial Sequence: Synthetic oligonucleotide
  Sense strand starting at position 2558 of SEQ ID NO: 317777
ugaacuaugccucacauug

SEQ ID NO: 511374 - RNA, 19 nt, Artificial Sequence
  Description of Artificial Sequence: Synthetic oligonucleotide
  Antisense strand to SEQ ID NO: 511373
caaugugaggcauaguuca

SEQ ID NO: 511375 - RNA, 19 nt, Artificial Sequence
  Description of Artificial Sequence: Synthetic oligonucleotide
  Sense strand starting at position 2698 of SEQ ID NO: 317777
cuauccuucuuggcugauu

SEQ ID NO: 511376 - RNA, 19 nt, Artificial Sequence
  Description of Artificial Sequence: Synthetic oligonucleotide
  Antisense strand to SEQ ID NO: 511375
aaucagccaagaaggauag

SEQ ID NO: 511377 - RNA, 19 nt, Artificial Sequence
  Description of Artificial Sequence: Synthetic oligonucleotide
  Sense strand starting at position 2700 of SEQ ID NO: 317777
auccuucuuggcugauuga

SEQ ID NO: 511378 - RNA, 19 nt, Artificial Sequence
  Description of Artificial Sequence: Synthetic oligonucleotide
  Antisense strand to SEQ ID NO: 511377
ucaaucagccaagaaggau

SEQ ID NO: 511379 - RNA, 19 nt, Artificial Sequence
  Description of Artificial Sequence: Synthetic oligonucleotide
  Sense strand starting at position 2701 of SEQ ID NO: 317777
uccuucuuggcugauugau

SEQ ID NO: 511380 - RNA, 19 nt, Artificial Sequence
  Description of Artificial Sequence: Synthetic oligonucleotide
  Antisense strand to SEQ ID NO: 511379
aucaaucagccaagaagga

SEQ ID NO: 511381 - RNA, 19 nt, Artificial Sequence
  Description of Artificial Sequence: Synthetic oligonucleotide
  Sense strand starting at position 2783 of SEQ ID NO: 317777
uugucaaguuccucaaacu

SEQ ID NO: 511382 - RNA, 19 nt, Artificial Sequence
  Description of Artificial Sequence: Synthetic oligonucleotide
  Antisense strand to SEQ ID NO: 511381
aguuugaggaacuugacaa

SEQ ID NO: 511383 - RNA, 19 nt, Artificial Sequence
  Description of Artificial Sequence: Synthetic oligonucleotide
  Sense strand starting at position 2857 of SEQ ID NO: 317777
aggagauaaugcguguaaa

SEQ ID NO: 511384 - RNA, 19 nt, Artificial Sequence
  Description of Artificial Sequence: Synthetic oligonucleotide
  Antisense strand to SEQ ID NO: 511383
uuuacacgcauuaucuccu

SEQ ID NO: 511385 - RNA, 19 nt, Artificial Sequence
  Description of Artificial Sequence: Synthetic oligonucleotide
  Sense strand starting at position 2858 of SEQ ID NO: 317777
ggagauaaugcguguaaag

SEQ ID NO: 511386 - RNA, 19 nt, Artificial Sequence
  Description of Artificial Sequence: Synthetic oligonucleotide
  Antisense strand to SEQ ID NO: 511385
cuuuacacgcauuaucucc

SEQ ID NO: 511387 - RNA, 19 nt, Artificial Sequence
  Description of Artificial Sequence: Synthetic oligonucleotide
  Sense strand starting at position 2865 of SEQ ID NO: 317777
augcguguaaagggauaau

SEQ ID NO: 511388 - RNA, 19 nt, Artificial Sequence
  Description of Artificial Sequence: Synthetic oligonucleotide
  Antisense strand to SEQ ID NO: 511387
auuaucccuuuacacgcau

SEQ ID NO: 511389 - RNA, 19 nt, Artificial Sequence
  Description of Artificial Sequence: Synthetic oligonucleotide
  Sense strand starting at position 2882 of SEQ ID NO: 317777
aucacuacaccagguauua

SEQ ID NO: 511390 - RNA, 19 nt, Artificial Sequence
  Description of Artificial Sequence: Synthetic oligonucleotide
  Antisense strand to SEQ ID NO: 511389
uaauaccugguguagugau

SEQ ID NO: 511391 - RNA, 19 nt, Artificial Sequence
  Description of Artificial Sequence: Synthetic oligonucleotide
  Sense strand starting at position 2901 of SEQ ID NO: 317777
agugaacacucaguaaaca

SEQ ID NO: 511392 - RNA, 19 nt, Artificial Sequence
  Description of Artificial Sequence: Synthetic oligonucleotide
  Antisense strand to SEQ ID NO: 511391
uguuuacugaguguucacu

SEQ ID NO: 511393 - RNA, 19 nt, Artificial Sequence
  Description of Artificial Sequence: Synthetic oligonucleotide
  Sense strand starting at position 2989 of SEQ ID NO: 317777
uuaaaucagcuuugauaag

SEQ ID NO: 511394 - RNA, 19 nt, Artificial Sequence
  Description of Artificial Sequence: Synthetic oligonucleotide
  Antisense strand to SEQ ID NO: 511393
cuuaucaaagcugauuuaa

SEQ ID NO: 511395 - RNA, 19 nt, Artificial Sequence
  Description of Artificial Sequence: Synthetic oligonucleotide
  Sense strand starting at position 3265 of SEQ ID NO: 317777
gggagaauaucugcgagaa

SEQ ID NO: 511396 - RNA, 19 nt, Artificial Sequence
  Description of Artificial Sequence: Synthetic oligonucleotide
  Antisense strand to SEQ ID NO: 511395
uucucgcagauauucuccc

SEQ ID NO: 511397 - RNA, 19 nt, Artificial Sequence
  Description of Artificial Sequence: Synthetic oligonucleotide
  Sense strand starting at position 3266 of SEQ ID NO: 317777
ggagaauaucugcgagaaa

SEQ ID NO: 511398 - RNA, 19 nt, Artificial Sequence
  Description of Artificial Sequence: Synthetic oligonucleotide
  Antisense strand to SEQ ID NO: 511397
uuucucgcagauauucucc

SEQ ID NO: 511399 - RNA, 19 nt, Artificial Sequence
  Description of Artificial Sequence: Synthetic oligonucleotide
  Sense strand starting at position 3507 of SEQ ID NO: 317777
gcaggagagucacuugcau

SEQ ID NO: 511400 - RNA, 19 nt, Artificial Sequence
  Description of Artificial Sequence: Synthetic oligonucleotide
  Antisense strand to SEQ ID NO: 511399
augcaagugacucuccugc

SEQ ID NO: 511401 - RNA, 19 nt, Artificial Sequence
  Description of Artificial Sequence: Synthetic oligonucleotide
  Sense strand starting at position 3509 of SEQ ID NO: 317777
aggagagucacuugcaucu

SEQ ID NO: 511402 - RNA, 19 nt, Artificial Sequence
  Description of Artificial Sequence: Synthetic oligonucleotide
  Antisense strand to SEQ ID NO: 511401
agaugcaagugacucuccu

SEQ ID NO: 511403 - RNA, 19 nt, Artificial Sequence
  Description of Artificial Sequence: Synthetic oligonucleotide
  Sense strand starting at position 3713 of SEQ ID NO: 317777
gauuaagcaucaguggaau

SEQ ID NO: 511404 - RNA, 19 nt, Artificial Sequence
  Description of Artificial Sequence: Synthetic oligonucleotide
  Antisense strand to SEQ ID NO: 511403
auuccacugaugcuuaauc

SEQ ID NO: 511405 - RNA, 19 nt, Artificial Sequence
  Description of Artificial Sequence: Synthetic oligonucleotide
  Sense strand starting at position 3772 of SEQ ID NO: 317777
cuguaugauaaauguggca

SEQ ID NO: 511406 - RNA, 19 nt, Artificial Sequence
  Description of Artificial Sequence: Synthetic oligonucleotide
  Antisense strand to SEQ ID NO: 511405
ugccacauuuaucauacag

SEQ ID NO: 511407 - RNA, 19 nt, Artificial Sequence
  Description of Artificial Sequence: Synthetic oligonucleotide
  Sense strand starting at position 3774 of SEQ ID NO: 317777
guaugauaaauguggcauu

SEQ ID NO: 511408 - RNA, 19 nt, Artificial Sequence
  Description of Artificial Sequence: Synthetic oligonucleotide
  Antisense strand to SEQ ID NO: 511407
aaugccacauuuaucauac

SEQ ID NO: 511409 - RNA, 19 nt, Artificial Sequence
  Description of Artificial Sequence: Synthetic oligonucleotide
  Sense strand starting at position 3809 of SEQ ID NO: 317777
aguauaaacggcuaaauua

SEQ ID NO: 511410 - RNA, 19 nt, Artificial Sequence
  Description of Artificial Sequence: Synthetic oligonucleotide
  Antisense strand to SEQ ID NO: 511409
uaauuuagccguuuauacu

SEQ ID NO: 511411 - RNA, 19 nt, Artificial Sequence
  Description of Artificial Sequence: Synthetic oligonucleotide
  Sense strand starting at position 263 of SEQ ID NO: 317778
acugcuuccacguaaguga

SEQ ID NO: 511412 - RNA, 19 nt, Artificial Sequence
  Description of Artificial Sequence: Synthetic oligonucleotide
  Antisense strand to SEQ ID NO: 511411
ucacuuacguggaagcagu

SEQ ID NO: 511413 - RNA, 19 nt, Artificial Sequence
  Description of Artificial Sequence: Synthetic oligonucleotide
  Sense strand starting at position 274 of SEQ ID NO: 317778
guaagugaccuagagcgua

SEQ ID NO: 511414 - RNA, 19 nt, Artificial Sequence
  Description of Artificial Sequence: Synthetic oligonucleotide
  Antisense strand to SEQ ID NO: 511413
uacgcucuaggucacuuac

SEQ ID NO: 511415 - RNA, 19 nt, Artificial Sequence
  Description of Artificial Sequence: Synthetic oligonucleotide
  Sense strand starting at position 387 of SEQ ID NO: 317778
aagagcuauuugggacuga

SEQ ID NO: 511416 - RNA, 19 nt, Artificial Sequence
  Description of Artificial Sequence: Synthetic oligonucleotide
  Antisense strand to SEQ ID NO: 511415
ucagucccaaauagcucuu

SEQ ID NO: 511417 - RNA, 19 nt, Artificial Sequence
  Description of Artificial Sequence: Synthetic oligonucleotide
  Sense strand starting at position 388 of SEQ ID NO: 317778
agagcuauuugggacugau

SEQ ID NO: 511418 - RNA, 19 nt, Artificial Sequence
  Description of Artificial Sequence: Synthetic oligonucleotide
  Antisense strand to SEQ ID NO: 511417
aucagucccaaauagcucu

SEQ ID NO: 511419 - RNA, 19 nt, Artificial Sequence
  Description of Artificial Sequence: Synthetic oligonucleotide
  Sense strand starting at position 459 of SEQ ID NO: 317778
uucguuuguggagaaauug

SEQ ID NO: 511420 - RNA, 19 nt, Artificial Sequence
  Description of Artificial Sequence: Synthetic oligonucleotide
  Antisense strand to SEQ ID NO: 511419
caauuucuccacaaacgaa

SEQ ID NO: 511421 - RNA, 19 nt, Artificial Sequence
  Description of Artificial Sequence: Synthetic oligonucleotide
  Sense strand starting at position 493 of SEQ ID NO: 317778
gggauauaugcguaugcaa

SEQ ID NO: 511422 - RNA, 19 nt, Artificial Sequence
  Description of Artificial Sequence: Synthetic oligonucleotide
  Antisense strand to SEQ ID NO: 511421
uugcauacgcauauauccc

SEQ ID NO: 511423 - RNA, 19 nt, Artificial Sequence
  Description of Artificial Sequence: Synthetic oligonucleotide
  Sense strand starting at position 504 of SEQ ID NO: 317778
guaugcaaaugucugauaa

SEQ ID NO: 511424 - RNA, 19 nt, Artificial Sequence
  Description of Artificial Sequence: Synthetic oligonucleotide
  Antisense strand to SEQ ID NO: 511423
uuaucagacauuugcauac

SEQ ID NO: 511425 - RNA, 19 nt, Artificial Sequence
  Description of Artificial Sequence: Synthetic oligonucleotide
  Sense strand starting at position 614 of SEQ ID NO: 317778
ccgcguguaccuguuugau

SEQ ID NO: 511426 - RNA, 19 nt, Artificial Sequence
  Description of Artificial Sequence: Synthetic oligonucleotide
  Antisense strand to SEQ ID NO: 511425
aucaaacagguacacgcgg

SEQ ID NO: 511427 - RNA, 19 nt, Artificial Sequence
  Description of Artificial Sequence: Synthetic oligonucleotide
  Sense strand starting at position 1041 of SEQ ID NO: 317778
acacguuaccucgcguaau

SEQ ID NO: 511428 - RNA, 19 nt, Artificial Sequence
  Description of Artificial Sequence: Synthetic oligonucleotide
  Antisense strand to SEQ ID NO: 511427
auuacgcgagguaacgugu

SEQ ID NO: 511429 - RNA, 19 nt, Artificial Sequence
  Description of Artificial Sequence: Synthetic oligonucleotide
  Sense strand starting at position 1052 of SEQ ID NO: 317778
cgcguaaugggcucagcaa

SEQ ID NO: 511430 - RNA, 19 nt, Artificial Sequence
  Description of Artificial Sequence: Synthetic oligonucleotide
  Antisense strand to SEQ ID NO: 511429
uugcugagcccauuacgcg

SEQ ID NO: 511431 - RNA, 19 nt, Artificial Sequence
  Description of Artificial Sequence: Synthetic oligonucleotide
  Sense strand starting at position 1127 of SEQ ID NO: 317778
uaaauaacuugcccgaguu

SEQ ID NO: 511432 - RNA, 19 nt, Artificial Sequence
  Description of Artificial Sequence: Synthetic oligonucleotide
  Antisense strand to SEQ ID NO: 511431
aacucgggcaaguuauuua

SEQ ID NO: 511433 - RNA, 19 nt, Artificial Sequence
  Description of Artificial Sequence: Synthetic oligonucleotide
  Sense strand starting at position 1128 of SEQ ID NO: 317778
aaauaacuugcccgaguuc

SEQ ID NO: 511434 - RNA, 19 nt, Artificial Sequence
  Description of Artificial Sequence: Synthetic oligonucleotide
  Antisense strand to SEQ ID NO: 511433
gaacucgggcaaguuauuu

SEQ ID NO: 511435 - RNA, 19 nt, Artificial Sequence
  Description of Artificial Sequence: Synthetic oligonucleotide
  Sense strand starting at position 1169 of SEQ ID NO: 317778
ggaaacgaauuccucucua

SEQ ID NO: 511436 - RNA, 19 nt, Artificial Sequence
  Description of Artificial Sequence: Synthetic oligonucleotide
  Antisense strand to SEQ ID NO: 511435
uagagaggaauucguuucc

SEQ ID NO: 511437 - RNA, 19 nt, Artificial Sequence
  Description of Artificial Sequence: Synthetic oligonucleotide
  Sense strand starting at position 1510 of SEQ ID NO: 317778
gcggaaggucuguagaucu

SEQ ID NO: 511438 - RNA, 19 nt, Artificial Sequence
  Description of Artificial Sequence: Synthetic oligonucleotide
  Antisense strand to SEQ ID NO: 511437
agaucuacagaccuuccgc

SEQ ID NO: 511439 - RNA, 19 nt, Artificial Sequence
  Description of Artificial Sequence: Synthetic oligonucleotide
  Sense strand starting at position 1814 of SEQ ID NO: 317778
ccggguggccgcuuuacua

SEQ ID NO: 511440 - RNA, 19 nt, Artificial Sequence
  Description of Artificial Sequence: Synthetic oligonucleotide
  Antisense strand to SEQ ID NO: 511439
uaguaaagcggccacccgg

SEQ ID NO: 511441 - RNA, 19 nt, Artificial Sequence
  Description of Artificial Sequence: Synthetic oligonucleotide
  Sense strand starting at position 2333 of SEQ ID NO: 317778
uuuguaaaggucugauccu

SEQ ID NO: 511442 - RNA, 19 nt, Artificial Sequence
  Description of Artificial Sequence: Synthetic oligonucleotide
  Antisense strand to SEQ ID NO: 511441
aggaucagaccuuuacaaa

SEQ ID NO: 511443 - RNA, 19 nt, Artificial Sequence
  Description of Artificial Sequence: Synthetic oligonucleotide
  Sense strand starting at position 2342 of SEQ ID NO: 317778
gucugauccugaguuccaa

SEQ ID NO: 511444 - RNA, 19 nt, Artificial Sequence
  Description of Artificial Sequence: Synthetic oligonucleotide
  Antisense strand to SEQ ID NO: 511443
uuggaacucaggaucagac

SEQ ID NO: 511445 - RNA, 19 nt, Artificial Sequence
  Description of Artificial Sequence: Synthetic oligonucleotide
  Sense strand starting at position 2350 of SEQ ID NO: 317778
cugaguuccaaacgaaagu

SEQ ID NO: 511446 - RNA, 19 nt, Artificial Sequence
  Description of Artificial Sequence: Synthetic oligonucleotide
  Antisense strand to SEQ ID NO: 511445
acuuucguuuggaacucag

SEQ ID NO: 511447 - RNA, 19 nt, Artificial Sequence
  Description of Artificial Sequence: Synthetic oligonucleotide
  Sense strand starting at position 2376 of SEQ ID NO: 317778
gaauucugucgacacggga

SEQ ID NO: 511448 - RNA, 19 nt, Artificial Sequence
  Description of Artificial Sequence: Synthetic oligonucleotide
  Antisense strand to SEQ ID NO: 511447
ucccgugucgacagaauuc

SEQ ID NO: 511449 - RNA, 19 nt, Artificial Sequence
  Description of Artificial Sequence: Synthetic oligonucleotide
  Sense strand starting at position 2427 of SEQ ID NO: 317778
guguuaauucgguugcguu

SEQ ID NO: 511450 - RNA, 19 nt, Artificial Sequence
  Description of Artificial Sequence: Synthetic oligonucleotide
  Antisense strand to SEQ ID NO: 511449
aacgcaaccgaauuaacac

SEQ ID NO: 511451 - RNA, 19 nt, Artificial Sequence
  Description of Artificial Sequence: Synthetic oligonucleotide
  Sense strand starting at position 2525 of SEQ ID NO: 317778
gccguuugugcugcggaau

SEQ ID NO: 511452 - RNA, 19 nt, Artificial Sequence
  Description of Artificial Sequence: Synthetic oligonucleotide
  Antisense strand to SEQ ID NO: 511451
auuccgcagcacaaacggc

SEQ ID NO: 511453 - RNA, 19 nt, Artificial Sequence
  Description of Artificial Sequence: Synthetic oligonucleotide
  Sense strand starting at position 2566 of SEQ ID NO: 317778
ccacgcuuucgcgcucaaa

SEQ ID NO: 511454 - RNA, 19 nt, Artificial Sequence
  Description of Artificial Sequence: Synthetic oligonucleotide
  Antisense strand to SEQ ID NO: 511453
uuugagcgcgaaagcgugg

SEQ ID NO: 511455 - RNA, 19 nt, Artificial Sequence
  Description of Artificial Sequence: Synthetic oligonucleotide
  Sense strand starting at position 2691 of SEQ ID NO: 317778
gcgguuuaagaacauuguu

SEQ ID NO: 511456 - RNA, 19 nt, Artificial Sequence
  Description of Artificial Sequence: Synthetic oligonucleotide
  Antisense strand to SEQ ID NO: 511455
aacaauguucuuaaaccgc

SEQ ID NO: 511457 - RNA, 19 nt, Artificial Sequence
  Description of Artificial Sequence: Synthetic oligonucleotide
  Sense strand starting at position 2694 of SEQ ID NO: 317778
guuuaagaacauuguugga

SEQ ID NO: 511458 - RNA, 19 nt, Artificial Sequence
  Description of Artificial Sequence: Synthetic oligonucleotide
  Antisense strand to SEQ ID NO: 511457
uccaacaauguucuuaaac

SEQ ID NO: 511459 - RNA, 19 nt, Artificial Sequence
  Description of Artificial Sequence: Synthetic oligonucleotide
  Sense strand starting at position 2718 of SEQ ID NO: 317778
gcauuucgaguuugaucga

SEQ ID NO: 511460 - RNA, 19 nt, Artificial Sequence
  Description of Artificial Sequence: Synthetic oligonucleotide
  Antisense strand to SEQ ID NO: 511459
ucgaucaaacucgaaaugc

SEQ ID NO: 511461 - RNA, 19 nt, Artificial Sequence
  Description of Artificial Sequence: Synthetic oligonucleotide
  Sense strand starting at position 2920 of SEQ ID NO: 317778
ggguuuaguccacagacuc

SEQ ID NO: 511462 - RNA, 19 nt, Artificial Sequence
  Description of Artificial Sequence: Synthetic oligonucleotide
  Antisense strand to SEQ ID NO: 511461
gagucuguggacuaaaccc

SEQ ID NO: 511463 - RNA, 19 nt, Artificial Sequence
  Description of Artificial Sequence: Synthetic oligonucleotide
  Sense strand starting at position 2976 of SEQ ID NO: 317778
gugaaucuuccugaggguc

SEQ ID NO: 511464 - RNA, 19 nt, Artificial Sequence
  Description of Artificial Sequence: Synthetic oligonucleotide
  Antisense strand to SEQ ID NO: 511463
gacccucaggaagauucac

SEQ ID NO: 511465 - RNA, 19 nt, Artificial Sequence
  Description of Artificial Sequence: Synthetic oligonucleotide
  Sense strand starting at position 2988 of SEQ ID NO: 317778
gagggucucugacccuaua

SEQ ID NO: 511466 - RNA, 19 nt, Artificial Sequence
  Description of Artificial Sequence: Synthetic oligonucleotide
  Antisense strand to SEQ ID NO: 511465
uauagggucagagacccuc

SEQ ID NO: 511467 - RNA, 19 nt, Artificial Sequence
  Description of Artificial Sequence: Synthetic oligonucleotide
  Sense strand starting at position 3172 of SEQ ID NO: 317778
ugauaaaugugucugcuca

SEQ ID NO: 511468 - RNA, 19 nt, Artificial Sequence
  Description of Artificial Sequence: Synthetic oligonucleotide
  Antisense strand to SEQ ID NO: 511467
ugagcagacacauuuauca

SEQ ID NO: 511469 - RNA, 19 nt, Artificial Sequence
  Description of Artificial Sequence: Synthetic oligonucleotide
  Sense strand starting at position 3173 of SEQ ID NO: 317778
gauaaaugugucugcucaa

SEQ ID NO: 511470 - RNA, 19 nt, Artificial Sequence
  Description of Artificial Sequence: Synthetic oligonucleotide
  Antisense strand to SEQ ID NO: 511469
uugagcagacacauuuauc

SEQ ID NO: 511471 - RNA, 19 nt, Artificial Sequence
  Description of Artificial Sequence: Synthetic oligonucleotide
  Sense strand starting at position 3174 of SEQ ID NO: 317778
auaaaugugucugcucaaa

SEQ ID NO: 511472 - RNA, 19 nt, Artificial Sequence
  Description of Artificial Sequence: Synthetic oligonucleotide
  Antisense strand to SEQ ID NO: 511471
uuugagcagacacauuuau

SEQ ID NO: 511473 - RNA, 19 nt, Artificial Sequence
  Description of Artificial Sequence: Synthetic oligonucleotide
  Sense strand starting at position 3193 of SEQ ID NO: 317778
guacaaguuucugucuaug

SEQ ID NO: 511474 - RNA, 19 nt, Artificial Sequence
  Description of Artificial Sequence: Synthetic oligonucleotide
  Antisense strand to SEQ ID NO: 511473
cauagacagaaacuuguac

SEQ ID NO: 511475 - RNA, 19 nt, Artificial Sequence
  Description of Artificial Sequence: Synthetic oligonucleotide
  Sense strand starting at position 3195 of SEQ ID NO: 317778
acaaguuucugucuaugaa

SEQ ID NO: 511476 - RNA, 19 nt, Artificial Sequence
  Description of Artificial Sequence: Synthetic oligonucleotide
  Antisense strand to SEQ ID NO: 511475
uucauagacagaaacuugu

SEQ ID NO: 511477 - RNA, 19 nt, Artificial Sequence
  Description of Artificial Sequence: Synthetic oligonucleotide
  Sense strand starting at position 3306 of SEQ ID NO: 317778
ccauaacucugagcaagcu

SEQ ID NO: 511478 - RNA, 19 nt, Artificial Sequence
  Description of Artificial Sequence: Synthetic oligonucleotide
  Antisense strand to SEQ ID NO: 511477
agcuugcucagaguuaugg

SEQ ID NO: 511479 - RNA, 19 nt, Artificial Sequence
  Description of Artificial Sequence: Synthetic oligonucleotide
  Sense strand starting at position 3729 of SEQ ID NO: 317778
cagacuauuguugggagga

SEQ ID NO: 511480 - RNA, 19 nt, Artificial Sequence
  Description of Artificial Sequence: Synthetic oligonucleotide
  Antisense strand to SEQ ID NO: 511479
uccucccaacaauagucug

SEQ ID NO: 511481 - RNA, 19 nt, Artificial Sequence
  Description of Artificial Sequence: Synthetic oligonucleotide
  Sense strand starting at position 3795 of SEQ ID NO: 317778
ccagacuucuuccuagaga

SEQ ID NO: 511482 - RNA, 19 nt, Artificial Sequence
  Description of Artificial Sequence: Synthetic oligonucleotide
  Antisense strand to SEQ ID NO: 511481
ucucuaggaagaagucugg

SEQ ID NO: 511483 - RNA, 19 nt, Artificial Sequence
  Description of Artificial Sequence: Synthetic oligonucleotide
  Sense strand starting at position 3811 of SEQ ID NO: 317778
agaagcuuucugggugaga

SEQ ID NO: 511484 - RNA, 19 nt, Artificial Sequence
  Description of Artificial Sequence: Synthetic oligonucleotide
  Antisense strand to SEQ ID NO: 511483
ucucacccagaaagcuucu

SEQ ID NO: 511485 - RNA, 19 nt, Artificial Sequence
  Description of Artificial Sequence: Synthetic oligonucleotide
  Sense strand starting at position 3812 of SEQ ID NO: 317778
gaagcuuucugggugagaa

SEQ ID NO: 511486 - RNA, 19 nt, Artificial Sequence
  Description of Artificial Sequence: Synthetic oligonucleotide
  Antisense strand to SEQ ID NO: 511485
uucucacccagaaagcuuc

SEQ ID NO: 511487 - RNA, 19 nt, Artificial Sequence
  Description of Artificial Sequence: Synthetic oligonucleotide
  Sense strand starting at position 3813 of SEQ ID NO: 317778
aagcuuucugggugagaag

SEQ ID NO: 511488 - RNA, 19 nt, Artificial Sequence
  Description of Artificial Sequence: Synthetic oligonucleotide
  Antisense strand to SEQ ID NO: 511487
cuucucacccagaaagcuu

SEQ ID NO: 511489 - RNA, 19 nt, Artificial Sequence
  Description of Artificial Sequence: Synthetic oligonucleotide
  Sense strand starting at position 3814 of SEQ ID NO: 317778
agcuuucugggugagaaga

SEQ ID NO: 511490 - RNA, 19 nt, Artificial Sequence
  Description of Artificial Sequence: Synthetic oligonucleotide
  Antisense strand to SEQ ID NO: 511489
ucuucucacccagaaagcu

SEQ ID NO: 511491 - RNA, 19 nt, Artificial Sequence
  Description of Artificial Sequence: Synthetic oligonucleotide
  Sense strand starting at position 18 of SEQ ID NO: 317779
ccagguuacuguccaaaug

SEQ ID NO: 511492 - RNA, 19 nt, Artificial Sequence
  Description of Artificial Sequence: Synthetic oligonucleotide
  Antisense strand to SEQ ID NO: 511491
cauuuggacaguaaccugg

SEQ ID NO: 511493 - RNA, 19 nt, Artificial Sequence
  Description of Artificial Sequence: Synthetic oligonucleotide
  Sense strand starting at position 19 of SEQ ID NO: 317779
cagguuacuguccaaauga

SEQ ID NO: 511494 - RNA, 19 nt, Artificial Sequence
  Description of Artificial Sequence: Synthetic oligonucleotide
  Antisense strand to SEQ ID NO: 511493
ucauuuggacaguaaccug

SEQ ID NO: 511495 - RNA, 19 nt, Artificial Sequence
  Description of Artificial Sequence: Synthetic oligonucleotide
  Sense strand starting at position 87 of SEQ ID NO: 317779
ugagaaugcugcucuagac

SEQ ID NO: 511496 - RNA, 19 nt, Artificial Sequence
  Description of Artificial Sequence: Synthetic oligonucleotide
  Antisense strand to SEQ ID NO: 511495
gucuagagcagcauucuca

SEQ ID NO: 511497 - RNA, 19 nt, Artificial Sequence
  Description of Artificial Sequence: Synthetic oligonucleotide
  Sense strand starting at position 130 of SEQ ID NO: 317779
uggcccugaccaugguaau

SEQ ID NO: 511498 - RNA, 19 nt, Artificial Sequence
  Description of Artificial Sequence: Synthetic oligonucleotide
  Antisense strand to SEQ ID NO: 511497
auuaccauggucagggcca

SEQ ID NO: 511499 - RNA, 19 nt, Artificial Sequence
  Description of Artificial Sequence: Synthetic oligonucleotide
  Sense strand starting at position 240 of SEQ ID NO: 317779
gcgacuucugggcacaaau

SEQ ID NO: 511500 - RNA, 19 nt, Artificial Sequence
  Description of Artificial Sequence: Synthetic oligonucleotide
  Antisense strand to SEQ ID NO: 511499
auuugugcccagaagucgc

SEQ ID NO: 511501 - RNA, 19 nt, Artificial Sequence
  Description of Artificial Sequence: Synthetic oligonucleotide
  Sense strand starting at position 257 of SEQ ID NO: 317779
augcaugcaguuugaacaa

SEQ ID NO: 511502 - RNA, 19 nt, Artificial Sequence
  Description of Artificial Sequence: Synthetic oligonucleotide
  Antisense strand to SEQ ID NO: 511501
uuguucaaacugcaugcau

SEQ ID NO: 511503 - RNA, 19 nt, Artificial Sequence
  Description of Artificial Sequence: Synthetic oligonucleotide
  Sense strand starting at position 353 of SEQ ID NO: 317779
ggucccuguuaaguggaaa

SEQ ID NO: 511504 - RNA, 19 nt, Artificial Sequence
  Description of Artificial Sequence: Synthetic oligonucleotide
  Antisense strand to SEQ ID NO: 511503
uuuccacuuaacagggacc

SEQ ID NO: 511505 - RNA, 19 nt, Artificial Sequence
  Description of Artificial Sequence: Synthetic oligonucleotide
  Sense strand starting at position 597 of SEQ ID NO: 317779
ggaacuguauuguuucuaa

SEQ ID NO: 511506 - RNA, 19 nt, Artificial Sequence
  Description of Artificial Sequence: Synthetic oligonucleotide
  Antisense strand to SEQ ID NO: 511505
uuagaaacaauacaguucc

SEQ ID NO: 511507 - RNA, 19 nt, Artificial Sequence
  Description of Artificial Sequence: Synthetic oligonucleotide
  Sense strand starting at position 600 of SEQ ID NO: 317779
acuguauuguuucuaacuu

SEQ ID NO: 511508 - RNA, 19 nt, Artificial Sequence
  Description of Artificial Sequence: Synthetic oligonucleotide
  Antisense strand to SEQ ID NO: 511507
aaguuagaaacaauacagu

SEQ ID NO: 511509 - RNA, 19 nt, Artificial Sequence
  Description of Artificial Sequence: Synthetic oligonucleotide
  Sense strand starting at position 611 of SEQ ID NO: 317779
ucuaacuuugcguaaguaa

SEQ ID NO: 511510 - RNA, 19 nt, Artificial Sequence
  Description of Artificial Sequence: Synthetic oligonucleotide
  Antisense strand to SEQ ID NO: 511509
uuacuuacgcaaaguuaga

SEQ ID NO: 511511 - RNA, 19 nt, Artificial Sequence
  Description of Artificial Sequence: Synthetic oligonucleotide
  Sense strand starting at position 666 of SEQ ID NO: 317779
gaccuaguggaauggucua

SEQ ID NO: 511512 - RNA, 19 nt, Artificial Sequence
  Description of Artificial Sequence: Synthetic oligonucleotide
  Antisense strand to SEQ ID NO: 511511
uagaccauuccacuagguc

SEQ ID NO: 511513 - RNA, 19 nt, Artificial Sequence
  Description of Artificial Sequence: Synthetic oligonucleotide
  Sense strand starting at position 671 of SEQ ID NO: 317779
aguggaauggucuauuaug

SEQ ID NO: 511514 - RNA, 19 nt, Artificial Sequence
  Description of Artificial Sequence: Synthetic oligonucleotide
  Antisense strand to SEQ ID NO: 511513
cauaauagaccauuccacu

SEQ ID NO: 511515 - RNA, 19 nt, Artificial Sequence
  Description of Artificial Sequence: Synthetic oligonucleotide
  Sense strand starting at position 914 of SEQ ID NO: 317779
caaagauaacgucguauuu

SEQ ID NO: 511516 - RNA, 19 nt, Artificial Sequence
  Description of Artificial Sequence: Synthetic oligonucleotide
  Antisense strand to SEQ ID NO: 511515
aaauacgacguuaucuuug

SEQ ID NO: 511517 - RNA, 19 nt, Artificial Sequence
  Description of Artificial Sequence: Synthetic oligonucleotide
  Sense strand starting at position 967 of SEQ ID NO: 317779
gaacuauuguaaguuaaag

SEQ ID NO: 511518 - RNA, 19 nt, Artificial Sequence
  Description of Artificial Sequence: Synthetic oligonucleotide
  Antisense strand to SEQ ID NO: 511517
cuuuaacuuacaauaguuc

SEQ ID NO: 511519 - RNA, 19 nt, Artificial Sequence
  Description of Artificial Sequence: Synthetic oligonucleotide
  Sense strand starting at position 981 of SEQ ID NO: 317779
uaaagaagucagugcucca

SEQ ID NO: 511520 - RNA, 19 nt, Artificial Sequence
  Description of Artificial Sequence: Synthetic oligonucleotide
  Antisense strand to SEQ ID NO: 511519
uggagcacugacuucuuua

SEQ ID NO: 511521 - RNA, 19 nt, Artificial Sequence
  Description of Artificial Sequence: Synthetic oligonucleotide
  Sense strand starting at position 984 of SEQ ID NO: 317779
agaagucagugcuccauua

SEQ ID NO: 511522 - RNA, 19 nt, Artificial Sequence
  Description of Artificial Sequence: Synthetic oligonucleotide
  Antisense strand to SEQ ID NO: 511521
uaauggagcacugacuucu

SEQ ID NO: 511523 - RNA, 19 nt, Artificial Sequence
  Description of Artificial Sequence: Synthetic oligonucleotide
  Sense strand starting at position 1275 of SEQ ID NO: 317779
caccuuuacgagugacaaa

SEQ ID NO: 511524 - RNA, 19 nt, Artificial Sequence
  Description of Artificial Sequence: Synthetic oligonucleotide
  Antisense strand to SEQ ID NO: 511523
uuugucacucguaaaggug

SEQ ID NO: 511525 - RNA, 19 nt, Artificial Sequence
  Description of Artificial Sequence: Synthetic oligonucleotide
  Sense strand starting at position 1343 of SEQ ID NO: 317779
cgccuuaaccgacagguga

SEQ ID NO: 511526 - RNA, 19 nt, Artificial Sequence
  Description of Artificial Sequence: Synthetic oligonucleotide
  Antisense strand to SEQ ID NO: 511525
ucaccugucgguuaaggcg

SEQ ID NO: 511527 - RNA, 19 nt, Artificial Sequence
  Description of Artificial Sequence: Synthetic oligonucleotide
  Sense strand starting at position 2117 of SEQ ID NO: 317779
aaacguuaccacugauagu

SEQ ID NO: 511528 - RNA, 19 nt, Artificial Sequence
  Description of Artificial Sequence: Synthetic oligonucleotide
  Antisense strand to SEQ ID NO: 511527
acuaucagugguaacguuu

SEQ ID NO: 511529 - RNA, 19 nt, Artificial Sequence
  Description of Artificial Sequence: Synthetic oligonucleotide
  Sense strand starting at position 2126 of SEQ ID NO: 317779
cacugauaguuucucgaua

SEQ ID NO: 511530 - RNA, 19 nt, Artificial Sequence
  Description of Artificial Sequence: Synthetic oligonucleotide
  Antisense strand to SEQ ID NO: 511529
uaucgagaaacuaucagug

SEQ ID NO: 511531 - RNA, 19 nt, Artificial Sequence
  Description of Artificial Sequence: Synthetic oligonucleotide
  Sense strand starting at position 2127 of SEQ ID NO: 317779
acugauaguuucucgauag

SEQ ID NO: 511532 - RNA, 19 nt, Artificial Sequence
  Description of Artificial Sequence: Synthetic oligonucleotide
  Antisense strand to SEQ ID NO: 511531
cuaucgagaaacuaucagu

SEQ ID NO: 511533 - RNA, 19 nt, Artificial Sequence
  Description of Artificial Sequence: Synthetic oligonucleotide
  Sense strand starting at position 2285 of SEQ ID NO: 317779
uggaaaucucgcgauggag

SEQ ID NO: 511534 - RNA, 19 nt, Artificial Sequence
  Description of Artificial Sequence: Synthetic oligonucleotide
  Antisense strand to SEQ ID NO: 511533
cuccaucgcgagauuucca

SEQ ID NO: 511535 - RNA, 19 nt, Artificial Sequence
  Description of Artificial Sequence: Synthetic oligonucleotide
  Sense strand starting at position 2531 of SEQ ID NO: 317779
gagacuguucuaggcuacu

SEQ ID NO: 511536 - RNA, 19 nt, Artificial Sequence
  Description of Artificial Sequence: Synthetic oligonucleotide
  Antisense strand to SEQ ID NO: 511535
aguagccuagaacagucuc

SEQ ID NO: 511537 - RNA, 19 nt, Artificial Sequence
  Description of Artificial Sequence: Synthetic oligonucleotide
  Sense strand starting at position 2543 of SEQ ID NO: 317779
ggcuacuuagugcaaguga

SEQ ID NO: 511538 - RNA, 19 nt, Artificial Sequence
  Description of Artificial Sequence: Synthetic oligonucleotide
  Antisense strand to SEQ ID NO: 511537
ucacuugcacuaaguagcc

SEQ ID NO: 511539 - RNA, 19 nt, Artificial Sequence
  Description of Artificial Sequence: Synthetic oligonucleotide
  Sense strand starting at position 2565 of SEQ ID NO: 317779
agccuuuggcacgaucuua

SEQ ID NO: 511540 - RNA, 19 nt, Artificial Sequence
  Description of Artificial Sequence: Synthetic oligonucleotide
  Antisense strand to SEQ ID NO: 511539
uaagaucgugccaaaggcu

SEQ ID NO: 511541 - RNA, 19 nt, Artificial Sequence
  Description of Artificial Sequence: Synthetic oligonucleotide
  Sense strand starting at position 2775 of SEQ ID NO: 317779
gaacacaguguugguaaau

SEQ ID NO: 511542 - RNA, 19 nt, Artificial Sequence
  Description of Artificial Sequence: Synthetic oligonucleotide
  Antisense strand to SEQ ID NO: 511541
auuuaccaacacuguguuc

SEQ ID NO: 511543 - RNA, 19 nt, Artificial Sequence
  Description of Artificial Sequence: Synthetic oligonucleotide
  Sense strand starting at position 2776 of SEQ ID NO: 317779
aacacaguguugguaaaua

SEQ ID NO: 511544 - RNA, 19 nt, Artificial Sequence
  Description of Artificial Sequence: Synthetic oligonucleotide
  Antisense strand to SEQ ID NO: 511543
uauuuaccaacacuguguu

SEQ ID NO: 511545 - RNA, 19 nt, Artificial Sequence
  Description of Artificial Sequence: Synthetic oligonucleotide
  Sense strand starting at position 2832 of SEQ ID NO: 317779
cugguauacagcuaguaag

SEQ ID NO: 511546 - RNA, 19 nt, Artificial Sequence
  Description of Artificial Sequence: Synthetic oligonucleotide
  Antisense strand to SEQ ID NO: 511545
cuuacuagcuguauaccag

SEQ ID NO: 511547 - RNA, 19 nt, Artificial Sequence
  Description of Artificial Sequence: Synthetic oligonucleotide
  Sense strand starting at position 3111 of SEQ ID NO: 317779
gcugaccucaagugaugua

SEQ ID NO: 511548 - RNA, 19 nt, Artificial Sequence
  Description of Artificial Sequence: Synthetic oligonucleotide
  Antisense strand to SEQ ID NO: 511547
uacaucacuugaggucagc

SEQ ID NO: 511549 - RNA, 19 nt, Artificial Sequence
  Description of Artificial Sequence: Synthetic oligonucleotide
  Sense strand starting at position 3189 of SEQ ID NO: 317779
ucuuaagcccuguauuaug

SEQ ID NO: 511550 - RNA, 19 nt, Artificial Sequence
  Description of Artificial Sequence: Synthetic oligonucleotide
  Antisense strand to SEQ ID NO: 511549
cauaauacagggcuuaaga

SEQ ID NO: 511551 - RNA, 19 nt, Artificial Sequence
  Description of Artificial Sequence: Synthetic oligonucleotide
  Sense strand starting at position 3287 of SEQ ID NO: 317779
gacuuaauauuugauaggu

SEQ ID NO: 511552 - RNA, 19 nt, Artificial Sequence
  Description of Artificial Sequence: Synthetic oligonucleotide
  Antisense strand to SEQ ID NO: 511551
accuaucaaauauuaaguc

SEQ ID NO: 511553 - RNA, 19 nt, Artificial Sequence
  Description of Artificial Sequence: Synthetic oligonucleotide
  Sense strand starting at position 3308 of SEQ ID NO: 317779
agauuuauuuguugagggu

SEQ ID NO: 511554 - RNA, 19 nt, Artificial Sequence
  Description of Artificial Sequence: Synthetic oligonucleotide
  Antisense strand to SEQ ID NO: 511553
acccucaacaaauaaaucu

SEQ ID NO: 511555 - RNA, 19 nt, Artificial Sequence
  Description of Artificial Sequence: Synthetic oligonucleotide
  Sense strand starting at position 3378 of SEQ ID NO: 317779
guuguauuauucccagacu

SEQ ID NO: 511556 - RNA, 19 nt, Artificial Sequence
  Description of Artificial Sequence: Synthetic oligonucleotide
  Antisense strand to SEQ ID NO: 511555
agucugggaauaauacaac

SEQ ID NO: 511557 - RNA, 19 nt, Artificial Sequence
  Description of Artificial Sequence: Synthetic oligonucleotide
  Sense strand starting at position 3381 of SEQ ID NO: 317779
guauuauucccagacuuua

SEQ ID NO: 511558 - RNA, 19 nt, Artificial Sequence
  Description of Artificial Sequence: Synthetic oligonucleotide
  Antisense strand to SEQ ID NO: 511557
uaaagucugggaauaauac

SEQ ID NO: 511559 - RNA, 19 nt, Artificial Sequence
  Description of Artificial Sequence: Synthetic oligonucleotide
  Sense strand starting at position 3392 of SEQ ID NO: 317779
agacuuuauuaggcacuca

SEQ ID NO: 511560 - RNA, 19 nt, Artificial Sequence
  Description of Artificial Sequence: Synthetic oligonucleotide
  Antisense strand to SEQ ID NO: 511559
ugagugccuaauaaagucu

SEQ ID NO: 511561 - RNA, 19 nt, Artificial Sequence
  Description of Artificial Sequence: Synthetic oligonucleotide
  Sense strand starting at position 3540 of SEQ ID NO: 317779
guuuacagugcgcuauaau

SEQ ID NO: 511562 - RNA, 19 nt, Artificial Sequence
  Description of Artificial Sequence: Synthetic oligonucleotide
  Antisense strand to SEQ ID NO: 511561
auuauagcgcacuguaaac

SEQ ID NO: 511563 - RNA, 19 nt, Artificial Sequence
  Description of Artificial Sequence: Synthetic oligonucleotide
  Sense strand starting at position 3633 of SEQ ID NO: 317779
gaugguuggugaucuguua

SEQ ID NO: 511564 - RNA, 19 nt, Artificial Sequence
  Description of Artificial Sequence: Synthetic oligonucleotide
  Antisense strand to SEQ ID NO: 511563
uaacagaucaccaaccauc

SEQ ID NO: 511565 - RNA, 19 nt, Artificial Sequence
  Description of Artificial Sequence: Synthetic oligonucleotide
  Sense strand starting at position 3790 of SEQ ID NO: 317779
ucauuuggcuccuucgauu

SEQ ID NO: 511566 - RNA, 19 nt, Artificial Sequence
  Description of Artificial Sequence: Synthetic oligonucleotide
  Antisense strand to SEQ ID NO: 511565
aaucgaaggagccaaauga

SEQ ID NO: 511567 - RNA, 19 nt, Artificial Sequence
  Description of Artificial Sequence: Synthetic oligonucleotide
  Sense strand starting at position 3820 of SEQ ID NO: 317779
uagaauguccuauggcauc

SEQ ID NO: 511568 - RNA, 19 nt, Artificial Sequence
  Description of Artificial Sequence: Synthetic oligonucleotide
  Antisense strand to SEQ ID NO: 511567
gaugccauaggacauucua

SEQ ID NO: 511569 - RNA, 19 nt, Artificial Sequence
  Description of Artificial Sequence: Synthetic oligonucleotide
  Sense strand starting at position 3901 of SEQ ID NO: 317779
auagcucauguaugucaaa

SEQ ID NO: 511570 - RNA, 19 nt, Artificial Sequence
  Description of Artificial Sequence: Synthetic oligonucleotide
  Antisense strand to SEQ ID NO: 511569
uuugacauacaugagcuau

SEQ ID NO: 511571 - RNA, 19 nt, Artificial Sequence
  Description of Artificial Sequence: Synthetic oligonucleotide
  Sense strand starting at position 43 of SEQ ID NO: 317780
ugccaauaaucugcucaga

SEQ ID NO: 511572 - RNA, 19 nt, Artificial Sequence
  Description of Artificial Sequence: Synthetic oligonucleotide
  Antisense strand to SEQ ID NO: 511571
ucugagcagauuauuggca

SEQ ID NO: 511573 - RNA, 19 nt, Artificial Sequence
  Description of Artificial Sequence: Synthetic oligonucleotide
  Sense strand starting at position 165 of SEQ ID NO: 317780
ggguuucuuagggaguuag

SEQ ID NO: 511574 - RNA, 19 nt, Artificial Sequence
  Description of Artificial Sequence: Synthetic oligonucleotide
  Antisense strand to SEQ ID NO: 511573
cuaacucccuaagaaaccc

SEQ ID NO: 511575 - RNA, 19 nt, Artificial Sequence
  Description of Artificial Sequence: Synthetic oligonucleotide
  Sense strand starting at position 248 of SEQ ID NO: 317780
ccaauaaaggucuguuaaa

SEQ ID NO: 511576 - RNA, 19 nt, Artificial Sequence
  Description of Artificial Sequence: Synthetic oligonucleotide
  Antisense strand to SEQ ID NO: 511575
uuuaacagaccuuuauugg

SEQ ID NO: 511577 - RNA, 19 nt, Artificial Sequence
  Description of Artificial Sequence: Synthetic oligonucleotide
  Sense strand starting at position 277 of SEQ ID NO: 317780
ggacccguuguuuaagauu

SEQ ID NO: 511578 - RNA, 19 nt, Artificial Sequence
  Description of Artificial Sequence: Synthetic oligonucleotide
  Antisense strand to SEQ ID NO: 511577
aaucuuaaacaacgggucc

SEQ ID NO: 511579 - RNA, 19 nt, Artificial Sequence
  Description of Artificial Sequence: Synthetic oligonucleotide
  Sense strand starting at position 313 of SEQ ID NO: 317780
aaggguugaauuggucgaa

SEQ ID NO: 511580 - RNA, 19 nt, Artificial Sequence
  Description of Artificial Sequence: Synthetic oligonucleotide
  Antisense strand to SEQ ID NO: 511579
uucgaccaauucaacccuu

SEQ ID NO: 511581 - RNA, 19 nt, Artificial Sequence
  Description of Artificial Sequence: Synthetic oligonucleotide
  Sense strand starting at position 314 of SEQ ID NO: 317780
aggguugaauuggucgaaa

SEQ ID NO: 511582 - RNA, 19 nt, Artificial Sequence
  Description of Artificial Sequence: Synthetic oligonucleotide
  Antisense strand to SEQ ID NO: 511581
uuucgaccaauucaacccu

SEQ ID NO: 511583 - RNA, 19 nt, Artificial Sequence
  Description of Artificial Sequence: Synthetic oligonucleotide
  Sense strand starting at position 386 of SEQ ID NO: 317780
ucauuauucugucuuggau

SEQ ID NO: 511584 - RNA, 19 nt, Artificial Sequence
  Description of Artificial Sequence: Synthetic oligonucleotide
  Antisense strand to SEQ ID NO: 511583
auccaagacagaauaauga

SEQ ID NO: 511585 - RNA, 19 nt, Artificial Sequence
  Description of Artificial Sequence: Synthetic oligonucleotide
  Sense strand starting at position 914 of SEQ ID NO: 317780
aguccaggauugucagaca

SEQ ID NO: 511586 - RNA, 19 nt, Artificial Sequence
  Description of Artificial Sequence: Synthetic oligonucleotide
  Antisense strand to SEQ ID NO: 511585
ugucugacaauccuggacu

SEQ ID NO: 511587 - RNA, 19 nt, Artificial Sequence
  Description of Artificial Sequence: Synthetic oligonucleotide
  Sense strand starting at position 1616 of SEQ ID NO: 317780
caccauggucgauaagucu

SEQ ID NO: 511588 - RNA, 19 nt, Artificial Sequence
  Description of Artificial Sequence: Synthetic oligonucleotide
  Antisense strand to SEQ ID NO: 511587
agacuuaucgaccauggug

SEQ ID NO: 511589 - RNA, 19 nt, Artificial Sequence
  Description of Artificial Sequence: Synthetic oligonucleotide
  Sense strand starting at position 1751 of SEQ ID NO: 317780
uuauguaauccugggaugu

SEQ ID NO: 511590 - RNA, 19 nt, Artificial Sequence
  Description of Artificial Sequence: Synthetic oligonucleotide
  Antisense strand to SEQ ID NO: 511589
acaucccaggauuacauaa

SEQ ID NO: 511591 - RNA, 19 nt, Artificial Sequence
  Description of Artificial Sequence: Synthetic oligonucleotide
  Sense strand starting at position 1752 of SEQ ID NO: 317780
uauguaauccugggauguc

SEQ ID NO: 511592 - RNA, 19 nt, Artificial Sequence
  Description of Artificial Sequence: Synthetic oligonucleotide
  Antisense strand to SEQ ID NO: 511591
gacaucccaggauuacaua

SEQ ID NO: 511593 - RNA, 19 nt, Artificial Sequence
  Description of Artificial Sequence: Synthetic oligonucleotide
  Sense strand starting at position 1755 of SEQ ID NO: 317780
guaauccugggaugucauu

SEQ ID NO: 511594 - RNA, 19 nt, Artificial Sequence
  Description of Artificial Sequence: Synthetic oligonucleotide
  Antisense strand to SEQ ID NO: 511593
aaugacaucccaggauuac

SEQ ID NO: 511595 - RNA, 19 nt, Artificial Sequence
  Description of Artificial Sequence: Synthetic oligonucleotide
  Sense strand starting at position 2016 of SEQ ID NO: 317780
ggaugauccucagugccuu

SEQ ID NO: 511596 - RNA, 19 nt, Artificial Sequence
  Description of Artificial Sequence: Synthetic oligonucleotide
  Antisense strand to SEQ ID NO: 511595
aaggcacugaggaucaucc

SEQ ID NO: 511597 - RNA, 19 nt, Artificial Sequence
  Description of Artificial Sequence: Synthetic oligonucleotide
  Sense strand starting at position 2017 of SEQ ID NO: 317780
gaugauccucagugccuua

SEQ ID NO: 511598 - RNA, 19 nt, Artificial Sequence
  Description of Artificial Sequence: Synthetic oligonucleotide
  Antisense strand to SEQ ID NO: 511597
uaaggcacugaggaucauc

SEQ ID NO: 511599 - RNA, 19 nt, Artificial Sequence
  Description of Artificial Sequence: Synthetic oligonucleotide
  Sense strand starting at position 2030 of SEQ ID NO: 317780
gccuuaggccaguaccaua

SEQ ID NO: 511600 - RNA, 19 nt, Artificial Sequence
  Description of Artificial Sequence: Synthetic oligonucleotide
  Antisense strand to SEQ ID NO: 511599
uaugguacuggccuaaggc

SEQ ID NO: 511601 - RNA, 19 nt, Artificial Sequence
  Description of Artificial Sequence: Synthetic oligonucleotide
  Sense strand starting at position 2041 of SEQ ID NO: 317780
guaccauacucugcacuau

SEQ ID NO: 511602 - RNA, 19 nt, Artificial Sequence
  Description of Artificial Sequence: Synthetic oligonucleotide
  Antisense strand to SEQ ID NO: 511601
auagugcagaguaugguac

SEQ ID NO: 511603 - RNA, 19 nt, Artificial Sequence
  Description of Artificial Sequence: Synthetic oligonucleotide
  Sense strand starting at position 2202 of SEQ ID NO: 317780
uguggaagagauugugaac

SEQ ID NO: 511604 - RNA, 19 nt, Artificial Sequence
  Description of Artificial Sequence: Synthetic oligonucleotide
  Antisense strand to SEQ ID NO: 511603
guucacaaucucuuccaca

SEQ ID NO: 511605 - RNA, 19 nt, Artificial Sequence
  Description of Artificial Sequence: Synthetic oligonucleotide
  Sense strand starting at position 2211 of SEQ ID NO: 317780
gauugugaaccucaucugu

SEQ ID NO: 511606 - RNA, 19 nt, Artificial Sequence
  Description of Artificial Sequence: Synthetic oligonucleotide
  Antisense strand to SEQ ID NO: 511605
acagaugagguucacaauc

SEQ ID NO: 511607 - RNA, 19 nt, Artificial Sequence
  Description of Artificial Sequence: Synthetic oligonucleotide
  Sense strand starting at position 2308 of SEQ ID NO: 317780
uugcuccuuugauuaagua

SEQ ID NO: 511608 - RNA, 19 nt, Artificial Sequence
  Description of Artificial Sequence: Synthetic oligonucleotide
  Antisense strand to SEQ ID NO: 511607
uacuuaaucaaaggagcaa

SEQ ID NO: 511609 - RNA, 19 nt, Artificial Sequence
  Description of Artificial Sequence: Synthetic oligonucleotide
  Sense strand starting at position 2309 of SEQ ID NO: 317780
ugcuccuuugauuaaguaa

SEQ ID NO: 511610 - RNA, 19 nt, Artificial Sequence
  Description of Artificial Sequence: Synthetic oligonucleotide
  Antisense strand to SEQ ID NO: 511609
uuacuuaaucaaaggagca

SEQ ID NO: 511611 - RNA, 19 nt, Artificial Sequence
  Description of Artificial Sequence: Synthetic oligonucleotide
  Sense strand starting at position 2658 of SEQ ID NO: 317780
ggauguauuuaacagagac

SEQ ID NO: 511612 - RNA, 19 nt, Artificial Sequence
  Description of Artificial Sequence: Synthetic oligonucleotide
  Antisense strand to SEQ ID NO: 511611
gucucuguuaaauacaucc

SEQ ID NO: 511613 - RNA, 19 nt, Artificial Sequence
  Description of Artificial Sequence: Synthetic oligonucleotide
  Sense strand starting at position 2695 of SEQ ID NO: 317780
ggucacuuacacuauccau

SEQ ID NO: 511614 - RNA, 19 nt, Artificial Sequence
  Description of Artificial Sequence: Synthetic oligonucleotide
  Antisense strand to SEQ ID NO: 511613
auggauaguguaagugacc

SEQ ID NO: 511615 - RNA, 19 nt, Artificial Sequence
  Description of Artificial Sequence: Synthetic oligonucleotide
  Sense strand starting at position 2849 of SEQ ID NO: 317780
auuaguaacucaccaguuu

SEQ ID NO: 511616 - RNA, 19 nt, Artificial Sequence
  Description of Artificial Sequence: Synthetic oligonucleotide
  Antisense strand to SEQ ID NO: 511615
aaacuggugaguuacuaau

SEQ ID NO: 511617 - RNA, 19 nt, Artificial Sequence
  Description of Artificial Sequence: Synthetic oligonucleotide
  Sense strand starting at position 3658 of SEQ ID NO: 317780
cucuuuaauugagaaagaa

SEQ ID NO: 511618 - RNA, 19 nt, Artificial Sequence
  Description of Artificial Sequence: Synthetic oligonucleotide
  Antisense strand to SEQ ID NO: 511617
uucuuucucaauuaaagag

SEQ ID NO: 511619 - RNA, 19 nt, Artificial Sequence
  Description of Artificial Sequence: Synthetic oligonucleotide
  Sense strand starting at position 3789 of SEQ ID NO: 317780
cugugauaucccugaggac

SEQ ID NO: 511620 - RNA, 19 nt, Artificial Sequence
  Description of Artificial Sequence: Synthetic oligonucleotide
  Antisense strand to SEQ ID NO: 511619
guccucagggauaucacag

SEQ ID NO: 511621 - RNA, 19 nt, Artificial Sequence
  Description of Artificial Sequence: Synthetic oligonucleotide
  Sense strand starting at position 3804 of SEQ ID NO: 317780
ggaccaagauaugauuaua

SEQ ID NO: 511622 - RNA, 19 nt, Artificial Sequence
  Description of Artificial Sequence: Synthetic oligonucleotide
  Antisense strand to SEQ ID NO: 511621
uauaaucauaucuuggucc

SEQ ID NO: 511623 - RNA, 19 nt, Artificial Sequence
  Description of Artificial Sequence: Synthetic oligonucleotide
  Sense strand starting at position 3859 of SEQ ID NO: 317780
agcuuuacgacugagguua

SEQ ID NO: 511624 - RNA, 19 nt, Artificial Sequence
  Description of Artificial Sequence: Synthetic oligonucleotide
  Antisense strand to SEQ ID NO: 511623
uaaccucagucguaaagcu

SEQ ID NO: 511625 - RNA, 19 nt, Artificial Sequence
  Description of Artificial Sequence: Synthetic oligonucleotide
  Sense strand starting at position 3910 of SEQ ID NO: 317780
augauaguauuaccuguuu

SEQ ID NO: 511626 - RNA, 19 nt, Artificial Sequence
  Description of Artificial Sequence: Synthetic oligonucleotide
  Antisense strand to SEQ ID NO: 511625
aaacagguaauacuaucau

SEQ ID NO: 511627 - RNA, 19 nt, Artificial Sequence
  Description of Artificial Sequence: Synthetic oligonucleotide
  Sense strand starting at position 3915 of SEQ ID NO: 317780
aguauuaccuguuugugag

SEQ ID NO: 511628 - RNA, 19 nt, Artificial Sequence
  Description of Artificial Sequence: Synthetic oligonucleotide
  Antisense strand to SEQ ID NO: 511627
cucacaaacagguaauacu

SEQ ID NO: 511629 - RNA, 19 nt, Artificial Sequence
  Description of Artificial Sequence: Synthetic oligonucleotide
  Sense strand starting at position 3917 of SEQ ID NO: 317780
uauuaccuguuugugagua

SEQ ID NO: 511630 - RNA, 19 nt, Artificial Sequence
  Description of Artificial Sequence: Synthetic oligonucleotide
  Antisense strand to SEQ ID NO: 511629
uacucacaaacagguaaua

SEQ ID NO: 511631 - RNA, 19 nt, Artificial Sequence
  Description of Artificial Sequence: Synthetic oligonucleotide
  Sense strand starting at position 3921 of SEQ ID NO: 317780
accuguuugugaguaaagu

SEQ ID NO: 511632 - RNA, 19 nt, Artificial Sequence
  Description of Artificial Sequence: Synthetic oligonucleotide
  Antisense strand to SEQ ID NO: 511631
acuuuacucacaaacaggu

SEQ ID NO: 511633 - RNA, 19 nt, Artificial Sequence
  Description of Artificial Sequence: Synthetic oligonucleotide
  Sense strand starting at position 3922 of SEQ ID NO: 317780
ccuguuugugaguaaaguc

SEQ ID NO: 511634 - RNA, 19 nt, Artificial Sequence
  Description of Artificial Sequence: Synthetic oligonucleotide
  Antisense strand to SEQ ID NO: 511633
gacuuuacucacaaacagg

SEQ ID NO: 511635 - RNA, 19 nt, Artificial Sequence
  Description of Artificial Sequence: Synthetic oligonucleotide
  Sense strand starting at position 3930 of SEQ ID NO: 317780
ugaguaaagucuuuggcac

SEQ ID NO: 511636 - RNA, 19 nt, Artificial Sequence
  Description of Artificial Sequence: Synthetic oligonucleotide
  Antisense strand to SEQ ID NO: 511635
gugccaaagacuuuacuca

SEQ ID NO: 511637 - RNA, 19 nt, Artificial Sequence
  Description of Artificial Sequence: Synthetic oligonucleotide
  Sense strand starting at position 3931 of SEQ ID NO: 317780
gaguaaagucuuuggcaca

SEQ ID NO: 511638 - RNA, 19 nt, Artificial Sequence
  Description of Artificial Sequence: Synthetic oligonucleotide
  Antisense strand to SEQ ID NO: 511637
ugugccaaagacuuuacuc

SEQ ID NO: 511639 - RNA, 19 nt, Artificial Sequence
  Description of Artificial Sequence: Synthetic oligonucleotide
  Sense strand starting at position 3936 of SEQ ID NO: 317780
aagucuuuggcacagaaac

SEQ ID NO: 511640 - RNA, 19 nt, Artificial Sequence
  Description of Artificial Sequence: Synthetic oligonucleotide
  Antisense strand to SEQ ID NO: 511639
guuucugugccaaagacuu

SEQ ID NO: 511641 - RNA, 19 nt, Artificial Sequence
  Description of Artificial Sequence: Synthetic oligonucleotide
  Sense strand starting at position 3964 of SEQ ID NO: 317780
uaguguggucuugaugacu

SEQ ID NO: 511642 - RNA, 19 nt, Artificial Sequence
  Description of Artificial Sequence: Synthetic oligonucleotide
  Antisense strand to SEQ ID NO: 511641
agucaucaagaccacacua

SEQ ID NO: 511643 - RNA, 19 nt, Artificial Sequence
  Description of Artificial Sequence: Synthetic oligonucleotide
  Sense strand starting at position 3967 of SEQ ID NO: 317780
uguggucuugaugacuagu

SEQ ID NO: 511644 - RNA, 19 nt, Artificial Sequence
  Description of Artificial Sequence: Synthetic oligonucleotide
  Antisense strand to SEQ ID NO: 511643
acuagucaucaagaccaca

SEQ ID NO: 511645 - RNA, 19 nt, Artificial Sequence
  Description of Artificial Sequence: Synthetic oligonucleotide
  Sense strand starting at position 3970 of SEQ ID NO: 317780
ggucuugaugacuagucuu

SEQ ID NO: 511646 - RNA, 19 nt, Artificial Sequence
  Description of Artificial Sequence: Synthetic oligonucleotide
  Antisense strand to SEQ ID NO: 511645
aagacuagucaucaagacc

SEQ ID NO: 511647 - RNA, 19 nt, Artificial Sequence
  Description of Artificial Sequence: Synthetic oligonucleotide
  Sense strand starting at position 3973 of SEQ ID NO: 317780
cuugaugacuagucuucuu

SEQ ID NO: 511648 - RNA, 19 nt, Artificial Sequence
  Description of Artificial Sequence: Synthetic oligonucleotide
  Antisense strand to SEQ ID NO: 511647
aagaagacuagucaucaag

SEQ ID NO: 511649 - RNA, 19 nt, Artificial Sequence
  Description of Artificial Sequence: Synthetic oligonucleotide
  Sense strand starting at position 3978 of SEQ ID NO: 317780
ugacuagucuucuuucuca

SEQ ID NO: 511650 - RNA, 19 nt, Artificial Sequence
  Description of Artificial Sequence: Synthetic oligonucleotide
  Antisense strand to SEQ ID NO: 511649
ugagaaagaagacuaguca

SEQ ID NO: 511651 - RNA, 19 nt, Artificial Sequence
  Description of Artificial Sequence: Synthetic oligonucleotide
  Sense strand starting at position 26 of SEQ ID NO: 317781
ggacccguuguuuaagauu

SEQ ID NO: 511652 - RNA, 19 nt, Artificial Sequence
  Description of Artificial Sequence: Synthetic oligonucleotide
  Antisense strand to SEQ ID NO: 511651
aaucuuaaacaacgggucc

SEQ ID NO: 511653 - RNA, 19 nt, Artificial Sequence
  Description of Artificial Sequence: Synthetic oligonucleotide
  Sense strand starting at position 62 of SEQ ID NO: 317781
aaggguugaauuggucgaa

SEQ ID NO: 511654 - RNA, 19 nt, Artificial Sequence
  Description of Artificial Sequence: Synthetic oligonucleotide
  Antisense strand to SEQ ID NO: 511653
uucgaccaauucaacccuu

SEQ ID NO: 511655 - RNA, 19 nt, Artificial Sequence
  Description of Artificial Sequence: Synthetic oligonucleotide
  Sense strand starting at position 63 of SEQ ID NO: 317781
aggguugaauuggucgaaa

SEQ ID NO: 511656 - RNA, 19 nt, Artificial Sequence
  Description of Artificial Sequence: Synthetic oligonucleotide
  Antisense strand to SEQ ID NO: 511655
uuucgaccaauucaacccu

SEQ ID NO: 511657 - RNA, 19 nt, Artificial Sequence
  Description of Artificial Sequence: Synthetic oligonucleotide
  Sense strand starting at position 135 of SEQ ID NO: 317781
ucauuauucugucuuggau

SEQ ID NO: 511658 - RNA, 19 nt, Artificial Sequence
  Description of Artificial Sequence: Synthetic oligonucleotide
  Antisense strand to SEQ ID NO: 511657
auccaagacagaauaauga

SEQ ID NO: 511659 - RNA, 19 nt, Artificial Sequence
  Description of Artificial Sequence: Synthetic oligonucleotide
  Sense strand starting at position 663 of SEQ ID NO: 317781
aguccaggauugucagaca

SEQ ID NO: 511660 - RNA, 19 nt, Artificial Sequence
  Description of Artificial Sequence: Synthetic oligonucleotide
  Antisense strand to SEQ ID NO: 511659
ugucugacaauccuggacu

SEQ ID NO: 511661 - RNA, 19 nt, Artificial Sequence
  Description of Artificial Sequence: Synthetic oligonucleotide
  Sense strand starting at position 1365 of SEQ ID NO: 317781
caccauggucgauaagucu

SEQ ID NO: 511662 - RNA, 19 nt, Artificial Sequence
  Description of Artificial Sequence: Synthetic oligonucleotide
  Antisense strand to SEQ ID NO: 511661
agacuuaucgaccauggug

SEQ ID NO: 511663 - RNA, 19 nt, Artificial Sequence
  Description of Artificial Sequence: Synthetic oligonucleotide
  Sense strand starting at position 1500 of SEQ ID NO: 317781
uuauguaauccugggaugu

SEQ ID NO: 511664 - RNA, 19 nt, Artificial Sequence
  Description of Artificial Sequence: Synthetic oligonucleotide
  Antisense strand to SEQ ID NO: 511663
acaucccaggauuacauaa

SEQ ID NO: 511665 - RNA, 19 nt, Artificial Sequence
  Description of Artificial Sequence: Synthetic oligonucleotide
  Sense strand starting at position 1501 of SEQ ID NO: 317781
uauguaauccugggauguc

SEQ ID NO: 511666 - RNA, 19 nt, Artificial Sequence
  Description of Artificial Sequence: Synthetic oligonucleotide
  Antisense strand to SEQ ID NO: 511665
gacaucccaggauuacaua

SEQ ID NO: 511667 - RNA, 19 nt, Artificial Sequence
  Description of Artificial Sequence: Synthetic oligonucleotide
  Sense strand starting at position 1504 of SEQ ID NO: 317781
guaauccugggaugucauu

SEQ ID NO: 511668 - RNA, 19 nt, Artificial Sequence
  Description of Artificial Sequence: Synthetic oligonucleotide
  Antisense strand to SEQ ID NO: 511667
aaugacaucccaggauuac

SEQ ID NO: 511669 - RNA, 19 nt, Artificial Sequence
  Description of Artificial Sequence: Synthetic oligonucleotide
  Sense strand starting at position 1765 of SEQ ID NO: 317781
ggaugauccucagugccuu

SEQ ID NO: 511670 - RNA, 19 nt, Artificial Sequence
  Description of Artificial Sequence: Synthetic oligonucleotide
  Antisense strand to SEQ ID NO: 511669
aaggcacugaggaucaucc

SEQ ID NO: 511671 - RNA, 19 nt, Artificial Sequence
  Description of Artificial Sequence: Synthetic oligonucleotide
  Sense strand starting at position 1766 of SEQ ID NO: 317781
gaugauccucagugccuua

SEQ ID NO: 511672 - RNA, 19 nt, Artificial Sequence
  Description of Artificial Sequence: Synthetic oligonucleotide
  Antisense strand to SEQ ID NO: 511671
uaaggcacugaggaucauc

SEQ ID NO: 511673 - RNA, 19 nt, Artificial Sequence
  Description of Artificial Sequence: Synthetic oligonucleotide
  Sense strand starting at position 1779 of SEQ ID NO: 317781
gccuuaggccaguaccaua

SEQ ID NO: 511674 - RNA, 19 nt, Artificial Sequence
  Description of Artificial Sequence: Synthetic oligonucleotide
  Antisense strand to SEQ ID NO: 511673
uaugguacuggccuaaggc

SEQ ID NO: 511675 - RNA, 19 nt, Artificial Sequence
  Description of Artificial Sequence: Synthetic oligonucleotide
  Sense strand starting at position 1790 of SEQ ID NO: 317781
guaccauacucugcacuau

SEQ ID NO: 511676 - RNA, 19 nt, Artificial Sequence
  Description of Artificial Sequence: Synthetic oligonucleotide
  Antisense strand to SEQ ID NO: 511675
auagugcagaguaugguac

SEQ ID NO: 511677 - RNA, 19 nt, Artificial Sequence
  Description of Artificial Sequence: Synthetic oligonucleotide
  Sense strand starting at position 1951 of SEQ ID NO: 317781
uguggaagagauugugaac

SEQ ID NO: 511678 - RNA, 19 nt, Artificial Sequence
  Description of Artificial Sequence: Synthetic oligonucleotide
  Antisense strand to SEQ ID NO: 511677
guucacaaucucuuccaca

SEQ ID NO: 511679 - RNA, 19 nt, Artificial Sequence
  Description of Artificial Sequence: Synthetic oligonucleotide
  Sense strand starting at position 1960 of SEQ ID NO: 317781
gauugugaaccucaucugu

SEQ ID NO: 511680 - RNA, 19 nt, Artificial Sequence
  Description of Artificial Sequence: Synthetic oligonucleotide
  Antisense strand to SEQ ID NO: 511679
acagaugagguucacaauc

SEQ ID NO: 511681 - RNA, 19 nt, Artificial Sequence
  Description of Artificial Sequence: Synthetic oligonucleotide
  Sense strand starting at position 2057 of SEQ ID NO: 317781
uugcuccuuugauuaagua

SEQ ID NO: 511682 - RNA, 19 nt, Artificial Sequence
  Description of Artificial Sequence: Synthetic oligonucleotide
  Antisense strand to SEQ ID NO: 511681
uacuuaaucaaaggagcaa

SEQ ID NO: 511683 - RNA, 19 nt, Artificial Sequence
  Description of Artificial Sequence: Synthetic oligonucleotide
  Sense strand starting at position 2058 of SEQ ID NO: 317781
ugcuccuuugauuaaguaa

SEQ ID NO: 511684 - RNA, 19 nt, Artificial Sequence
  Description of Artificial Sequence: Synthetic oligonucleotide
  Antisense strand to SEQ ID NO: 511683
uuacuuaaucaaaggagca

SEQ ID NO: 511685 - RNA, 19 nt, Artificial Sequence
  Description of Artificial Sequence: Synthetic oligonucleotide
  Sense strand starting at position 2407 of SEQ ID NO: 317781
ggauguauuuaacagagac

SEQ ID NO: 511686 - RNA, 19 nt, Artificial Sequence
  Description of Artificial Sequence: Synthetic oligonucleotide
  Antisense strand to SEQ ID NO: 511685
gucucuguuaaauacaucc

SEQ ID NO: 511687 - RNA, 19 nt, Artificial Sequence
  Description of Artificial Sequence: Synthetic oligonucleotide
  Sense strand starting at position 2444 of SEQ ID NO: 317781
ggucacuuacacuauccau

SEQ ID NO: 511688 - RNA, 19 nt, Artificial Sequence
  Description of Artificial Sequence: Synthetic oligonucleotide
  Antisense strand to SEQ ID NO: 511687
auggauaguguaagugacc

SEQ ID NO: 511689 - RNA, 19 nt, Artificial Sequence
  Description of Artificial Sequence: Synthetic oligonucleotide
  Sense strand starting at position 2598 of SEQ ID NO: 317781
auuaguaacucaccaguuu

SEQ ID NO: 511690 - RNA, 19 nt, Artificial Sequence
  Description of Artificial Sequence: Synthetic oligonucleotide
  Antisense strand to SEQ ID NO: 511689
aaacuggugaguuacuaau

SEQ ID NO: 511691 - RNA, 19 nt, Artificial Sequence
  Description of Artificial Sequence: Synthetic oligonucleotide
  Sense strand starting at position 3538 of SEQ ID NO: 317781
cugugauaucccugaggac

SEQ ID NO: 511692 - RNA, 19 nt, Artificial Sequence
  Description of Artificial Sequence: Synthetic oligonucleotide
  Antisense strand to SEQ ID NO: 511691
guccucagggauaucacag

SEQ ID NO: 511693 - RNA, 19 nt, Artificial Sequence
  Description of Artificial Sequence: Synthetic oligonucleotide
  Sense strand starting at position 3553 of SEQ ID NO: 317781
ggaccaagauaugauuaua

SEQ ID NO: 511694 - RNA, 19 nt, Artificial Sequence
  Description of Artificial Sequence: Synthetic oligonucleotide
  Antisense strand to SEQ ID NO: 511693
uauaaucauaucuuggucc

SEQ ID NO: 511695 - RNA, 19 nt, Artificial Sequence
  Description of Artificial Sequence: Synthetic oligonucleotide
  Sense strand starting at position 3608 of SEQ ID NO: 317781
agcuuuacgacugagguua

SEQ ID NO: 511696 - RNA, 19 nt, Artificial Sequence
  Description of Artificial Sequence: Synthetic oligonucleotide
  Antisense strand to SEQ ID NO: 511695
uaaccucagucguaaagcu

SEQ ID NO: 511697 - RNA, 19 nt, Artificial Sequence
  Description of Artificial Sequence: Synthetic oligonucleotide
  Sense strand starting at position 3659 of SEQ ID NO: 317781
augauaguauuaccuguuu

SEQ ID NO: 511698 - RNA, 19 nt, Artificial Sequence
  Description of Artificial Sequence: Synthetic oligonucleotide
  Antisense strand to SEQ ID NO: 511697
aaacagguaauacuaucau

SEQ ID NO: 511699 - RNA, 19 nt, Artificial Sequence
  Description of Artificial Sequence: Synthetic oligonucleotide
  Sense strand starting at position 3664 of SEQ ID NO: 317781
aguauuaccuguuugugag

SEQ ID NO: 511700 - RNA, 19 nt, Artificial Sequence
  Description of Artificial Sequence: Synthetic oligonucleotide
  Antisense strand to SEQ ID NO: 511699
cucacaaacagguaauacu

SEQ ID NO: 511701 - RNA, 19 nt, Artificial Sequence
  Description of Artificial Sequence: Synthetic oligonucleotide
  Sense strand starting at position 3671 of SEQ ID NO: 317781
ccuguuugugaguaaaguc

SEQ ID NO: 511702 - RNA, 19 nt, Artificial Sequence
  Description of Artificial Sequence: Synthetic oligonucleotide
  Antisense strand to SEQ ID NO: 511701
gacuuuacucacaaacagg

SEQ ID NO: 511703 - RNA, 19 nt, Artificial Sequence
  Description of Artificial Sequence: Synthetic oligonucleotide
  Sense strand starting at position 3679 of SEQ ID NO: 317781
ugaguaaagucuuuggcac

SEQ ID NO: 511704 - RNA, 19 nt, Artificial Sequence
  Description of Artificial Sequence: Synthetic oligonucleotide
  Antisense strand to SEQ ID NO: 511703
gugccaaagacuuuacuca

SEQ ID NO: 511705 - RNA, 19 nt, Artificial Sequence
  Description of Artificial Sequence: Synthetic oligonucleotide
  Sense strand starting at position 3680 of SEQ ID NO: 317781
gaguaaagucuuuggcaca

SEQ ID NO: 511706 - RNA, 19 nt, Artificial Sequence
  Description of Artificial Sequence: Synthetic oligonucleotide
  Antisense strand to SEQ ID NO: 511705
ugugccaaagacuuuacuc

SEQ ID NO: 511707 - RNA, 19 nt, Artificial Sequence
  Description of Artificial Sequence: Synthetic oligonucleotide
  Sense strand starting at position 3685 of SEQ ID NO: 317781
aagucuuuggcacagaaac

SEQ ID NO: 511708 - RNA, 19 nt, Artificial Sequence
  Description of Artificial Sequence: Synthetic oligonucleotide
  Antisense strand to SEQ ID NO: 511707
guuucugugccaaagacuu

SEQ ID NO: 511709 - RNA, 19 nt, Artificial Sequence
  Description of Artificial Sequence: Synthetic oligonucleotide
  Sense strand starting at position 3713 of SEQ ID NO: 317781
uaguguggucuugaugacu

SEQ ID NO: 511710 - RNA, 19 nt, Artificial Sequence
  Description of Artificial Sequence: Synthetic oligonucleotide
  Antisense strand to SEQ ID NO: 511709
agucaucaagaccacacua

SEQ ID NO: 511711 - RNA, 19 nt, Artificial Sequence
  Description of Artificial Sequence: Synthetic oligonucleotide
  Sense strand starting at position 3716 of SEQ ID NO: 317781
uguggucuugaugacuagu

SEQ ID NO: 511712 - RNA, 19 nt, Artificial Sequence
  Description of Artificial Sequence: Synthetic oligonucleotide
  Antisense strand to SEQ ID NO: 511711
acuagucaucaagaccaca

SEQ ID NO: 511713 - RNA, 19 nt, Artificial Sequence
  Description of Artificial Sequence: Synthetic oligonucleotide
  Sense strand starting at position 3719 of SEQ ID NO: 317781
ggucuugaugacuagucuu

SEQ ID NO: 511714 - RNA, 19 nt, Artificial Sequence
  Description of Artificial Sequence: Synthetic oligonucleotide
  Antisense strand to SEQ ID NO: 511713
aagacuagucaucaagacc

SEQ ID NO: 511715 - RNA, 19 nt, Artificial Sequence
  Description of Artificial Sequence: Synthetic oligonucleotide
  Sense strand starting at position 3722 of SEQ ID NO: 317781
cuugaugacuagucuucuu

SEQ ID NO: 511716 - RNA, 19 nt, Artificial Sequence
  Description of Artificial Sequence: Synthetic oligonucleotide
  Antisense strand to SEQ ID NO: 511715
aagaagacuagucaucaag

SEQ ID NO: 511717 - RNA, 19 nt, Artificial Sequence
  Description of Artificial Sequence: Synthetic oligonucleotide
  Sense strand starting at position 3727 of SEQ ID NO: 317781
ugacuagucuucuuucuca

SEQ ID NO: 511718 - RNA, 19 nt, Artificial Sequence
  Description of Artificial Sequence: Synthetic oligonucleotide
  Antisense strand to SEQ ID NO: 511717
ugagaaagaagacuaguca

SEQ ID NO: 511719 - RNA, 19 nt, Artificial Sequence
  Description of Artificial Sequence: Synthetic oligonucleotide
  Sense strand starting at position 3908 of SEQ ID NO: 317781
gaguacuaggguugguaga

SEQ ID NO: 511720 - RNA, 19 nt, Artificial Sequence
  Description of Artificial Sequence: Synthetic oligonucleotide
  Antisense strand to SEQ ID NO: 511719
ucuaccaacccuaguacuc

SEQ ID NO: 511721 - RNA, 19 nt, Artificial Sequence
  Description of Artificial Sequence: Synthetic oligonucleotide
  Sense strand starting at position 3909 of SEQ ID NO: 317781
aguacuaggguugguagaa

SEQ ID NO: 511722 - RNA, 19 nt, Artificial Sequence
  Description of Artificial Sequence: Synthetic oligonucleotide
  Antisense strand to SEQ ID NO: 511721
uucuaccaacccuaguacu

SEQ ID NO: 511723 - RNA, 19 nt, Artificial Sequence
  Description of Artificial Sequence: Synthetic oligonucleotide
  Sense strand starting at position 3910 of SEQ ID NO: 317781
guacuaggguugguagaaa

SEQ ID NO: 511724 - RNA, 19 nt, Artificial Sequence
  Description of Artificial Sequence: Synthetic oligonucleotide
  Antisense strand to SEQ ID NO: 511723
uuucuaccaacccuaguac

SEQ ID NO: 511725 - RNA, 19 nt, Artificial Sequence
  Description of Artificial Sequence: Synthetic oligonucleotide
  Sense strand starting at position 3921 of SEQ ID NO: 317781
gguagaaagcccugggaca

SEQ ID NO: 511726 - RNA, 19 nt, Artificial Sequence
  Description of Artificial Sequence: Synthetic oligonucleotide
  Antisense strand to SEQ ID NO: 511725
ugucccagggcuuucuacc

SEQ ID NO: 511727 - RNA, 19 nt, Artificial Sequence
  Description of Artificial Sequence: Synthetic oligonucleotide
  Sense strand starting at position 3950 of SEQ ID NO: 317781
aaagacaagucccugaagu

SEQ ID NO: 511728 - RNA, 19 nt, Artificial Sequence
  Description of Artificial Sequence: Synthetic oligonucleotide
  Antisense strand to SEQ ID NO: 511727
acuucagggacuugucuuu

SEQ ID NO: 511729 - RNA, 19 nt, Artificial Sequence
  Description of Artificial Sequence: Synthetic oligonucleotide
  Sense strand starting at position 3951 of SEQ ID NO: 317781
aagacaagucccugaagug

SEQ ID NO: 511730 - RNA, 19 nt, Artificial Sequence
  Description of Artificial Sequence: Synthetic oligonucleotide
  Antisense strand to SEQ ID NO: 511729
cacuucagggacuugucuu

SEQ ID NO: 511731 - RNA, 19 nt, Artificial Sequence
  Description of Artificial Sequence: Synthetic oligonucleotide
  Sense strand starting at position 202 of SEQ ID NO: 317782
agaagacaccagugcucau

SEQ ID NO: 511732 - RNA, 19 nt, Artificial Sequence
  Description of Artificial Sequence: Synthetic oligonucleotide
  Antisense strand to SEQ ID NO: 511731
augagcacuggugucuucu

SEQ ID NO: 511733 - RNA, 19 nt, Artificial Sequence
  Description of Artificial Sequence: Synthetic oligonucleotide
  Sense strand starting at position 1024 of SEQ ID NO: 317782
acucaugguuccuccugua

SEQ ID NO: 511734 - RNA, 19 nt, Artificial Sequence
  Description of Artificial Sequence: Synthetic oligonucleotide
  Antisense strand to SEQ ID NO: 511733
uacaggaggaaccaugagu

SEQ ID NO: 511735 - RNA, 19 nt, Artificial Sequence
  Description of Artificial Sequence: Synthetic oligonucleotide
  Sense strand starting at position 1066 of SEQ ID NO: 317782
cgugguauugaucacuugu

SEQ ID NO: 511736 - RNA, 19 nt, Artificial Sequence
  Description of Artificial Sequence: Synthetic oligonucleotide
  Antisense strand to SEQ ID NO: 511735
acaagugaucaauaccacg

SEQ ID NO: 511737 - RNA, 19 nt, Artificial Sequence
  Description of Artificial Sequence: Synthetic oligonucleotide
  Sense strand starting at position 1180 of SEQ ID NO: 317782
cuucccacagguugauaaa

SEQ ID NO: 511738 - RNA, 19 nt, Artificial Sequence
  Description of Artificial Sequence: Synthetic oligonucleotide
  Antisense strand to SEQ ID NO: 511737
uuuaucaaccugugggaag

SEQ ID NO: 511739 - RNA, 19 nt, Artificial Sequence
  Description of Artificial Sequence: Synthetic oligonucleotide
  Sense strand starting at position 1192 of SEQ ID NO: 317782
ugauaaauauugcuauggu

SEQ ID NO: 511740 - RNA, 19 nt, Artificial Sequence
  Description of Artificial Sequence: Synthetic oligonucleotide
  Antisense strand to SEQ ID NO: 511739
accauagcaauauuuauca

SEQ ID NO: 511741 - RNA, 19 nt, Artificial Sequence
  Description of Artificial Sequence: Synthetic oligonucleotide
  Sense strand starting at position 1222 of SEQ ID NO: 317782
ggugcaauuuggcucuauu

SEQ ID NO: 511742 - RNA, 19 nt, Artificial Sequence
  Description of Artificial Sequence: Synthetic oligonucleotide
  Antisense strand to SEQ ID NO: 511741
aauagagccaaauugcacc

SEQ ID NO: 511743 - RNA, 19 nt, Artificial Sequence
  Description of Artificial Sequence: Synthetic oligonucleotide
  Sense strand starting at position 1230 of SEQ ID NO: 317782
uuggcucuauucucagauu

SEQ ID NO: 511744 - RNA, 19 nt, Artificial Sequence
  Description of Artificial Sequence: Synthetic oligonucleotide
  Antisense strand to SEQ ID NO: 511743
aaucugagaauagagccaa

SEQ ID NO: 511745 - RNA, 19 nt, Artificial Sequence
  Description of Artificial Sequence: Synthetic oligonucleotide
  Sense strand starting at position 1251 of SEQ ID NO: 317782
ccuccuauggguuaguaaa

SEQ ID NO: 511746 - RNA, 19 nt, Artificial Sequence
  Description of Artificial Sequence: Synthetic oligonucleotide
  Antisense strand to SEQ ID NO: 511745
uuuacuaacccauaggagg

SEQ ID NO: 511747 - RNA, 19 nt, Artificial Sequence
  Description of Artificial Sequence: Synthetic oligonucleotide
  Sense strand starting at position 1511 of SEQ ID NO: 317782
uugggauuauuugggugga

SEQ ID NO: 511748 - RNA, 19 nt, Artificial Sequence
  Description of Artificial Sequence: Synthetic oligonucleotide
  Antisense strand to SEQ ID NO: 511747
uccacccaaauaaucccaa

SEQ ID NO: 511749 - RNA, 19 nt, Artificial Sequence
  Description of Artificial Sequence: Synthetic oligonucleotide
  Sense strand starting at position 1512 of SEQ ID NO: 317782
ugggauuauuuggguggaa

SEQ ID NO: 511750 - RNA, 19 nt, Artificial Sequence
  Description of Artificial Sequence: Synthetic oligonucleotide
  Antisense strand to SEQ ID NO: 511749
uuccacccaaauaauccca

SEQ ID NO: 511751 - RNA, 19 nt, Artificial Sequence
  Description of Artificial Sequence: Synthetic oligonucleotide
  Sense strand starting at position 1524 of SEQ ID NO: 317782
gguggaauuguuugaagag

SEQ ID NO: 511752 - RNA, 19 nt, Artificial Sequence
  Description of Artificial Sequence: Synthetic oligonucleotide
  Antisense strand to SEQ ID NO: 511751
cucuucaaacaauuccacc

SEQ ID NO: 511753 - RNA, 19 nt, Artificial Sequence
  Description of Artificial Sequence: Synthetic oligonucleotide
  Sense strand starting at position 1666 of SEQ ID NO: 317782
uagauauugggaugccaag

SEQ ID NO: 511754 - RNA, 19 nt, Artificial Sequence
  Description of Artificial Sequence: Synthetic oligonucleotide
  Antisense strand to SEQ ID NO: 511753
cuuggcaucccaauaucua

SEQ ID NO: 511755 - RNA, 19 nt, Artificial Sequence
  Description of Artificial Sequence: Synthetic oligonucleotide
  Sense strand starting at position 1727 of SEQ ID NO: 317782
guuuaaucugcauaaagac

SEQ ID NO: 511756 - RNA, 19 nt, Artificial Sequence
  Description of Artificial Sequence: Synthetic oligonucleotide
  Antisense strand to SEQ ID NO: 511755
gucuuuaugcagauuaaac

SEQ ID NO: 511757 - RNA, 19 nt, Artificial Sequence
  Description of Artificial Sequence: Synthetic oligonucleotide
  Sense strand starting at position 1792 of SEQ ID NO: 317782
ugacuuuacagccggcaga

SEQ ID NO: 511758 - RNA, 19 nt, Artificial Sequence
  Description of Artificial Sequence: Synthetic oligonucleotide
  Antisense strand to SEQ ID NO: 511757
ucugccggcuguaaaguca

SEQ ID NO: 511759 - RNA, 19 nt, Artificial Sequence
  Description of Artificial Sequence: Synthetic oligonucleotide
  Sense strand starting at position 1885 of SEQ ID NO: 317782
augcuuggagcugagaaau

SEQ ID NO: 511760 - RNA, 19 nt, Artificial Sequence
  Description of Artificial Sequence: Synthetic oligonucleotide
  Antisense strand to SEQ ID NO: 511759
auuucucagcuccaagcau

SEQ ID NO: 511761 - RNA, 19 nt, Artificial Sequence
  Description of Artificial Sequence: Synthetic oligonucleotide
  Sense strand starting at position 1913 of SEQ ID NO: 317782
cugugaaggcccuggcaau

SEQ ID NO: 511762 - RNA, 19 nt, Artificial Sequence
  Description of Artificial Sequence: Synthetic oligonucleotide
  Antisense strand to SEQ ID NO: 511761
auugccagggccuucacag

SEQ ID NO: 511763 - RNA, 19 nt, Artificial Sequence
  Description of Artificial Sequence: Synthetic oligonucleotide
  Sense strand starting at position 1948 of SEQ ID NO: 317782
uacucagaagggugaucuu

SEQ ID NO: 511764 - RNA, 19 nt, Artificial Sequence
  Description of Artificial Sequence: Synthetic oligonucleotide
  Antisense strand to SEQ ID NO: 511763
aagaucacccuucugagua

SEQ ID NO: 511765 - RNA, 19 nt, Artificial Sequence
  Description of Artificial Sequence: Synthetic oligonucleotide
  Sense strand starting at position 2125 of SEQ ID NO: 317782
acaugaaucaguugugcag

SEQ ID NO: 511766 - RNA, 19 nt, Artificial Sequence
  Description of Artificial Sequence: Synthetic oligonucleotide
  Antisense strand to SEQ ID NO: 511765
cugcacaacugauucaugu

SEQ ID NO: 511767 - RNA, 19 nt, Artificial Sequence
  Description of Artificial Sequence: Synthetic oligonucleotide
  Sense strand starting at position 2162 of SEQ ID NO: 317782
acagacucucauugugaug

SEQ ID NO: 511768 - RNA, 19 nt, Artificial Sequence
  Description of Artificial Sequence: Synthetic oligonucleotide
  Antisense strand to SEQ ID NO: 511767
caucacaaugagagucugu

SEQ ID NO: 511769 - RNA, 19 nt, Artificial Sequence
  Description of Artificial Sequence: Synthetic oligonucleotide
  Sense strand starting at position 2293 of SEQ ID NO: 317782
aguuguccuaggugaguga

SEQ ID NO: 511770 - RNA, 19 nt, Artificial Sequence
  Description of Artificial Sequence: Synthetic oligonucleotide
  Antisense strand to SEQ ID NO: 511769
ucacucaccuaggacaacu

SEQ ID NO: 511771 - RNA, 19 nt, Artificial Sequence
  Description of Artificial Sequence: Synthetic oligonucleotide
  Sense strand starting at position 2296 of SEQ ID NO: 317782
uguccuaggugagugaaua

SEQ ID NO: 511772 - RNA, 19 nt, Artificial Sequence
  Description of Artificial Sequence: Synthetic oligonucleotide
  Antisense strand to SEQ ID NO: 511771
uauucacucaccuaggaca

SEQ ID NO: 511773 - RNA, 19 nt, Artificial Sequence
  Description of Artificial Sequence: Synthetic oligonucleotide
  Sense strand starting at position 2297 of SEQ ID NO: 317782
guccuaggugagugaauag

SEQ ID NO: 511774 - RNA, 19 nt, Artificial Sequence
  Description of Artificial Sequence: Synthetic oligonucleotide
  Antisense strand to SEQ ID NO: 511773
cuauucacucaccuaggac

SEQ ID NO: 511775 - RNA, 19 nt, Artificial Sequence
  Description of Artificial Sequence: Synthetic oligonucleotide
  Sense strand starting at position 2685 of SEQ ID NO: 317782
auagcuuugaagcaggauu

SEQ ID NO: 511776 - RNA, 19 nt, Artificial Sequence
  Description of Artificial Sequence: Synthetic oligonucleotide
  Antisense strand to SEQ ID NO: 511775
aauccugcuucaaagcuau

SEQ ID NO: 511777 - RNA, 19 nt, Artificial Sequence
  Description of Artificial Sequence: Synthetic oligonucleotide
  Sense strand starting at position 2864 of SEQ ID NO: 317782
agagcccaguucuuaguau

SEQ ID NO: 511778 - RNA, 19 nt, Artificial Sequence
  Description of Artificial Sequence: Synthetic oligonucleotide
  Antisense strand to SEQ ID NO: 511777
auacuaagaacugggcucu

SEQ ID NO: 511779 - RNA, 19 nt, Artificial Sequence
  Description of Artificial Sequence: Synthetic oligonucleotide
  Sense strand starting at position 2947 of SEQ ID NO: 317782
ucuacaguauuacuaugau

SEQ ID NO: 511780 - RNA, 19 nt, Artificial Sequence
  Description of Artificial Sequence: Synthetic oligonucleotide
  Antisense strand to SEQ ID NO: 511779
aucauaguaauacuguaga

SEQ ID NO: 511781 - RNA, 19 nt, Artificial Sequence
  Description of Artificial Sequence: Synthetic oligonucleotide
  Sense strand starting at position 2974 of SEQ ID NO: 317782
ugacuauaguaucugccau

SEQ ID NO: 511782 - RNA, 19 nt, Artificial Sequence
  Description of Artificial Sequence: Synthetic oligonucleotide
  Antisense strand to SEQ ID NO: 511781
auggcagauacuauaguca

SEQ ID NO: 511783 - RNA, 19 nt, Artificial Sequence
  Description of Artificial Sequence: Synthetic oligonucleotide
  Sense strand starting at position 3000 of SEQ ID NO: 317782
guccuuacuaugugucaga

SEQ ID NO: 511784 - RNA, 19 nt, Artificial Sequence
  Description of Artificial Sequence: Synthetic oligonucleotide
  Antisense strand to SEQ ID NO: 511783
ucugacacauaguaaggac

SEQ ID NO: 511785 - RNA, 19 nt, Artificial Sequence
  Description of Artificial Sequence: Synthetic oligonucleotide
  Sense strand starting at position 3169 of SEQ ID NO: 317782
caauuagagagugguagau

SEQ ID NO: 511786 - RNA, 19 nt, Artificial Sequence
  Description of Artificial Sequence: Synthetic oligonucleotide
  Antisense strand to SEQ ID NO: 511785
aucuaccacucucuaauug

SEQ ID NO: 511787 - RNA, 19 nt, Artificial Sequence
  Description of Artificial Sequence: Synthetic oligonucleotide
  Sense strand starting at position 3450 of SEQ ID NO: 317782
agaugcuaucagcaagaca

SEQ ID NO: 511788 - RNA, 19 nt, Artificial Sequence
  Description of Artificial Sequence: Synthetic oligonucleotide
  Antisense strand to SEQ ID NO: 511787
ugucuugcugauagcaucu

SEQ ID NO: 511789 - RNA, 19 nt, Artificial Sequence
  Description of Artificial Sequence: Synthetic oligonucleotide
  Sense strand starting at position 3516 of SEQ ID NO: 317782
agacauccaucaguguaua

SEQ ID NO: 511790 - RNA, 19 nt, Artificial Sequence
  Description of Artificial Sequence: Synthetic oligonucleotide
  Antisense strand to SEQ ID NO: 511789
uauacacugauggaugucu

SEQ ID NO: 511791 - RNA, 19 nt, Artificial Sequence
  Description of Artificial Sequence: Synthetic oligonucleotide
  Sense strand starting at position 3553 of SEQ ID NO: 317782
ugggaagagucuaguggua

SEQ ID NO: 511792 - RNA, 19 nt, Artificial Sequence
  Description of Artificial Sequence: Synthetic oligonucleotide
  Antisense strand to SEQ ID NO: 511791
uaccacuagacucuuccca

SEQ ID NO: 511793 - RNA, 19 nt, Artificial Sequence
  Description of Artificial Sequence: Synthetic oligonucleotide
  Sense strand starting at position 3576 of SEQ ID NO: 317782
gcagauccuugcuuaccaa

SEQ ID NO: 511794 - RNA, 19 nt, Artificial Sequence
  Description of Artificial Sequence: Synthetic oligonucleotide
  Antisense strand to SEQ ID NO: 511793
uugguaagcaaggaucugc

SEQ ID NO: 511795 - RNA, 19 nt, Artificial Sequence
  Description of Artificial Sequence: Synthetic oligonucleotide
  Sense strand starting at position 3707 of SEQ ID NO: 317782
uaggaucauguaugugaaa

SEQ ID NO: 511796 - RNA, 19 nt, Artificial Sequence
  Description of Artificial Sequence: Synthetic oligonucleotide
  Antisense strand to SEQ ID NO: 511795
uuucacauacaugauccua

SEQ ID NO: 511797 - RNA, 19 nt, Artificial Sequence
  Description of Artificial Sequence: Synthetic oligonucleotide
  Sense strand starting at position 3792 of SEQ ID NO: 317782
uccaaugucguguaaauau

SEQ ID NO: 511798 - RNA, 19 nt, Artificial Sequence
  Description of Artificial Sequence: Synthetic oligonucleotide
  Antisense strand to SEQ ID NO: 511797
auauuuacacgacauugga

SEQ ID NO: 511799 - RNA, 19 nt, Artificial Sequence
  Description of Artificial Sequence: Synthetic oligonucleotide
  Sense strand starting at position 3801 of SEQ ID NO: 317782
guguaaauaucacucucag

SEQ ID NO: 511800 - RNA, 19 nt, Artificial Sequence
  Description of Artificial Sequence: Synthetic oligonucleotide
  Antisense strand to SEQ ID NO: 511799
cugagagugauauuuacac

SEQ ID NO: 511801 - RNA, 19 nt, Artificial Sequence
  Description of Artificial Sequence: Synthetic oligonucleotide
  Sense strand starting at position 3843 of SEQ ID NO: 317782
uguugaaaggcauauuacu

SEQ ID NO: 511802 - RNA, 19 nt, Artificial Sequence
  Description of Artificial Sequence: Synthetic oligonucleotide
  Antisense strand to SEQ ID NO: 511801
aguaauaugccuuucaaca

SEQ ID NO: 511803 - RNA, 19 nt, Artificial Sequence
  Description of Artificial Sequence: Synthetic oligonucleotide
  Sense strand starting at position 3888 of SEQ ID NO: 317782
cucaguuaaggccaucaga

SEQ ID NO: 511804 - RNA, 19 nt, Artificial Sequence
  Description of Artificial Sequence: Synthetic oligonucleotide
  Antisense strand to SEQ ID NO: 511803
ucugauggccuuaacugag

SEQ ID NO: 511805 - RNA, 19 nt, Artificial Sequence
  Description of Artificial Sequence: Synthetic oligonucleotide
  Sense strand starting at position 3941 of SEQ ID NO: 317782
ugauuuacauguguuugca

SEQ ID NO: 511806 - RNA, 19 nt, Artificial Sequence
  Description of Artificial Sequence: Synthetic oligonucleotide
  Antisense strand to SEQ ID NO: 511805
ugcaaacacauguaaauca

SEQ ID NO: 511807 - RNA, 19 nt, Artificial Sequence
  Description of Artificial Sequence: Synthetic oligonucleotide
  Sense strand starting at position 3943 of SEQ ID NO: 317782
auuuacauguguuugcaua

SEQ ID NO: 511808 - RNA, 19 nt, Artificial Sequence
  Description of Artificial Sequence: Synthetic oligonucleotide
  Antisense strand to SEQ ID NO: 511807
uaugcaaacacauguaaau

SEQ ID NO: 511809 - RNA, 19 nt, Artificial Sequence
  Description of Artificial Sequence: Synthetic oligonucleotide
  Sense strand starting at position 3945 of SEQ ID NO: 317782
uuacauguguuugcauaau

SEQ ID NO: 511810 - RNA, 19 nt, Artificial Sequence
  Description of Artificial Sequence: Synthetic oligonucleotide
  Antisense strand to SEQ ID NO: 511809
auuaugcaaacacauguaa

SEQ ID NO: 511811 - RNA, 19 nt, Artificial Sequence
  Description of Artificial Sequence: Synthetic oligonucleotide
  Sense strand starting at position 51 of SEQ ID NO: 317783
gguggagugagcuaacacu

SEQ ID NO: 511812 - RNA, 19 nt, Artificial Sequence
  Description of Artificial Sequence: Synthetic oligonucleotide
  Antisense strand to SEQ ID NO: 511811
aguguuagcucacuccacc

SEQ ID NO: 511813 - RNA, 19 nt, Artificial Sequence
  Description of Artificial Sequence: Synthetic oligonucleotide
  Sense strand starting at position 59 of SEQ ID NO: 317783
gagcuaacacuuugauguc

SEQ ID NO: 511814 - RNA, 19 nt, Artificial Sequence
  Description of Artificial Sequence: Synthetic oligonucleotide
  Antisense strand to SEQ ID NO: 511813
gacaucaaaguguuagcuc

SEQ ID NO: 511815 - RNA, 19 nt, Artificial Sequence
  Description of Artificial Sequence: Synthetic oligonucleotide
  Sense strand starting at position 118 of SEQ ID NO: 317783
agcuaugauuacuugggua

SEQ ID NO: 511816 - RNA, 19 nt, Artificial Sequence
  Description of Artificial Sequence: Synthetic oligonucleotide
  Antisense strand to SEQ ID NO: 511815
uacccaaguaaucauagcu

SEQ ID NO: 511817 - RNA, 19 nt, Artificial Sequence
  Description of Artificial Sequence: Synthetic oligonucleotide
  Sense strand starting at position 120 of SEQ ID NO: 317783
cuaugauuacuuggguaag

SEQ ID NO: 511818 - RNA, 19 nt, Artificial Sequence
  Description of Artificial Sequence: Synthetic oligonucleotide
  Antisense strand to SEQ ID NO: 511817
cuuacccaaguaaucauag

SEQ ID NO: 511819 - RNA, 19 nt, Artificial Sequence
  Description of Artificial Sequence: Synthetic oligonucleotide
  Sense strand starting at position 123 of SEQ ID NO: 317783
ugauuacuuggguaaguca

SEQ ID NO: 511820 - RNA, 19 nt, Artificial Sequence
  Description of Artificial Sequence: Synthetic oligonucleotide
  Antisense strand to SEQ ID NO: 511819
ugacuuacccaaguaauca

SEQ ID NO: 511821 - RNA, 19 nt, Artificial Sequence
  Description of Artificial Sequence: Synthetic oligonucleotide
  Sense strand starting at position 134 of SEQ ID NO: 317783
guaagucacuuaccaauau

SEQ ID NO: 511822 - RNA, 19 nt, Artificial Sequence
  Description of Artificial Sequence: Synthetic oligonucleotide
  Antisense strand to SEQ ID NO: 511821
auauugguaagugacuuac

SEQ ID NO: 511823 - RNA, 19 nt, Artificial Sequence
  Description of Artificial Sequence: Synthetic oligonucleotide
  Sense strand starting at position 196 of SEQ ID NO: 317783
ugauucauagggugacugu

SEQ ID NO: 511824 - RNA, 19 nt, Artificial Sequence
  Description of Artificial Sequence: Synthetic oligonucleotide
  Antisense strand to SEQ ID NO: 511823
acagucacccuaugaauca

SEQ ID NO: 511825 - RNA, 19 nt, Artificial Sequence
  Description of Artificial Sequence: Synthetic oligonucleotide
  Sense strand starting at position 243 of SEQ ID NO: 317783
guauguaaauaaucacagu

SEQ ID NO: 511826 - RNA, 19 nt, Artificial Sequence
  Description of Artificial Sequence: Synthetic oligonucleotide
  Antisense strand to SEQ ID NO: 511825
acugugauuauuuacauac

SEQ ID NO: 511827 - RNA, 19 nt, Artificial Sequence
  Description of Artificial Sequence: Synthetic oligonucleotide
  Sense strand starting at position 414 of SEQ ID NO: 317783
cccuccuugccaugggauu

SEQ ID NO: 511828 - RNA, 19 nt, Artificial Sequence
  Description of Artificial Sequence: Synthetic oligonucleotide
  Antisense strand to SEQ ID NO: 511827
aaucccauggcaaggaggg

SEQ ID NO: 511829 - RNA, 19 nt, Artificial Sequence
  Description of Artificial Sequence: Synthetic oligonucleotide
  Sense strand starting at position 514 of SEQ ID NO: 317783
ucugcaggguucucccaaa

SEQ ID NO: 511830 - RNA, 19 nt, Artificial Sequence
  Description of Artificial Sequence: Synthetic oligonucleotide
  Antisense strand to SEQ ID NO: 511829
uuugggagaacccugcaga

SEQ ID NO: 511831 - RNA, 19 nt, Artificial Sequence
  Description of Artificial Sequence: Synthetic oligonucleotide
  Sense strand starting at position 861 of SEQ ID NO: 317783
ggcagaugucuccaucuac

SEQ ID NO: 511832 - RNA, 19 nt, Artificial Sequence
  Description of Artificial Sequence: Synthetic oligonucleotide
  Antisense strand to SEQ ID NO: 511831
guagauggagacaucugcc

SEQ ID NO: 511833 - RNA, 19 nt, Artificial Sequence
  Description of Artificial Sequence: Synthetic oligonucleotide
  Sense strand starting at position 927 of SEQ ID NO: 317783
agggaacuccucugugaag

SEQ ID NO: 511834 - RNA, 19 nt, Artificial Sequence
  Description of Artificial Sequence: Synthetic oligonucleotide
  Antisense strand to SEQ ID NO: 511833
cuucacagaggaguucccu

SEQ ID NO: 511835 - RNA, 19 nt, Artificial Sequence
  Description of Artificial Sequence: Synthetic oligonucleotide
  Sense strand starting at position 929 of SEQ ID NO: 317783
ggaacuccucugugaagaa

SEQ ID NO: 511836 - RNA, 19 nt, Artificial Sequence
  Description of Artificial Sequence: Synthetic oligonucleotide
  Antisense strand to SEQ ID NO: 511835
uucuucacagaggaguucc

SEQ ID NO: 511837 - RNA, 19 nt, Artificial Sequence
  Description of Artificial Sequence: Synthetic oligonucleotide
  Sense strand starting at position 1012 of SEQ ID NO: 317783
ggugcaaggucuuuauuua

SEQ ID NO: 511838 - RNA, 19 nt, Artificial Sequence
  Description of Artificial Sequence: Synthetic oligonucleotide
  Antisense strand to SEQ ID NO: 511837
uaaauaaagaccuugcacc

SEQ ID NO: 511839 - RNA, 19 nt, Artificial Sequence
  Description of Artificial Sequence: Synthetic oligonucleotide
  Sense strand starting at position 1079 of SEQ ID NO: 317783
gguacaguugcacaaucuu

SEQ ID NO: 511840 - RNA, 19 nt, Artificial Sequence
  Description of Artificial Sequence: Synthetic oligonucleotide
  Antisense strand to SEQ ID NO: 511839
aagauugugcaacuguacc

SEQ ID NO: 511841 - RNA, 19 nt, Artificial Sequence
  Description of Artificial Sequence: Synthetic oligonucleotide
  Sense strand starting at position 1385 of SEQ ID NO: 317783
cccugcauagcaugugaaa

SEQ ID NO: 511842 - RNA, 19 nt, Artificial Sequence
  Description of Artificial Sequence: Synthetic oligonucleotide
  Antisense strand to SEQ ID NO: 511841
uuucacaugcuaugcaggg

SEQ ID NO: 511843 - RNA, 19 nt, Artificial Sequence
  Description of Artificial Sequence: Synthetic oligonucleotide
  Sense strand starting at position 1447 of SEQ ID NO: 317783
ggcggugugaugcaaggaa

SEQ ID NO: 511844 - RNA, 19 nt, Artificial Sequence
  Description of Artificial Sequence: Synthetic oligonucleotide
  Antisense strand to SEQ ID NO: 511843
uuccuugcaucacaccgcc

SEQ ID NO: 511845 - RNA, 19 nt, Artificial Sequence
  Description of Artificial Sequence: Synthetic oligonucleotide
  Sense strand starting at position 1451 of SEQ ID NO: 317783
gugugaugcaaggaaaguu

SEQ ID NO: 511846 - RNA, 19 nt, Artificial Sequence
  Description of Artificial Sequence: Synthetic oligonucleotide
  Antisense strand to SEQ ID NO: 511845
aacuuuccuugcaucacac

SEQ ID NO: 511847 - RNA, 19 nt, Artificial Sequence
  Description of Artificial Sequence: Synthetic oligonucleotide
  Sense strand starting at position 1725 of SEQ ID NO: 317783
aguugcucauuguuggaga

SEQ ID NO: 511848 - RNA, 19 nt, Artificial Sequence
  Description of Artificial Sequence: Synthetic oligonucleotide
  Antisense strand to SEQ ID NO: 511847
ucuccaacaaugagcaacu

SEQ ID NO: 511849 - RNA, 19 nt, Artificial Sequence
  Description of Artificial Sequence: Synthetic oligonucleotide
  Sense strand starting at position 1727 of SEQ ID NO: 317783
uugcucauuguuggagaua

SEQ ID NO: 511850 - RNA, 19 nt, Artificial Sequence
  Description of Artificial Sequence: Synthetic oligonucleotide
  Antisense strand to SEQ ID NO: 511849
uaucuccaacaaugagcaa

SEQ ID NO: 511851 - RNA, 19 nt, Artificial Sequence
  Description of Artificial Sequence: Synthetic oligonucleotide
  Sense strand starting at position 1830 of SEQ ID NO: 317783
ccggcucgccucuuaaagu

SEQ ID NO: 511852 - RNA, 19 nt, Artificial Sequence
  Description of Artificial Sequence: Synthetic oligonucleotide
  Antisense strand to SEQ ID NO: 511851
acuuuaagaggcgagccgg

SEQ ID NO: 511853 - RNA, 19 nt, Artificial Sequence
  Description of Artificial Sequence: Synthetic oligonucleotide
  Sense strand starting at position 1861 of SEQ ID NO: 317783
ggaaucugauucguccaca

SEQ ID NO: 511854 - RNA, 19 nt, Artificial Sequence
  Description of Artificial Sequence: Synthetic oligonucleotide
  Antisense strand to SEQ ID NO: 511853
uguggacgaaucagauucc

SEQ ID NO: 511855 - RNA, 19 nt, Artificial Sequence
  Description of Artificial Sequence: Synthetic oligonucleotide
  Sense strand starting at position 1862 of SEQ ID NO: 317783
gaaucugauucguccacag

SEQ ID NO: 511856 - RNA, 19 nt, Artificial Sequence
  Description of Artificial Sequence: Synthetic oligonucleotide
  Antisense strand to SEQ ID NO: 511855
cuguggacgaaucagauuc

SEQ ID NO: 511857 - RNA, 19 nt, Artificial Sequence
  Description of Artificial Sequence: Synthetic oligonucleotide
  Sense strand starting at position 1864 of SEQ ID NO: 317783
aucugauucguccacagaa

SEQ ID NO: 511858 - RNA, 19 nt, Artificial Sequence
  Description of Artificial Sequence: Synthetic oligonucleotide
  Antisense strand to SEQ ID NO: 511857
uucuguggacgaaucagau

SEQ ID NO: 511859 - RNA, 19 nt, Artificial Sequence
  Description of Artificial Sequence: Synthetic oligonucleotide
  Sense strand starting at position 1894 of SEQ ID NO: 317783
ccacuugguagauguggaa

SEQ ID NO: 511860 - RNA, 19 nt, Artificial Sequence
  Description of Artificial Sequence: Synthetic oligonucleotide
  Antisense strand to SEQ ID NO: 511859
uuccacaucuaccaagugg

SEQ ID NO: 511861 - RNA, 19 nt, Artificial Sequence
  Description of Artificial Sequence: Synthetic oligonucleotide
  Sense strand starting at position 1919 of SEQ ID NO: 317783
gcuacaaaggcuggaaaua

SEQ ID NO: 511862 - RNA, 19 nt, Artificial Sequence
  Description of Artificial Sequence: Synthetic oligonucleotide
  Antisense strand to SEQ ID NO: 511861
uauuuccagccuuuguagc

SEQ ID NO: 511863 - RNA, 19 nt, Artificial Sequence
  Description of Artificial Sequence: Synthetic oligonucleotide
  Sense strand starting at position 2072 of SEQ ID NO: 317783
ucauaaggcucuuugaaug

SEQ ID NO: 511864 - RNA, 19 nt, Artificial Sequence
  Description of Artificial Sequence: Synthetic oligonucleotide
  Antisense strand to SEQ ID NO: 511863
cauucaaagagccuuauga

SEQ ID NO: 511865 - RNA, 19 nt, Artificial Sequence
  Description of Artificial Sequence: Synthetic oligonucleotide
  Sense strand starting at position 2143 of SEQ ID NO: 317783
agaagacaccuuuguuugu

SEQ ID NO: 511866 - RNA, 19 nt, Artificial Sequence
  Description of Artificial Sequence: Synthetic oligonucleotide
  Antisense strand to SEQ ID NO: 511865
acaaacaaaggugucuucu

SEQ ID NO: 511867 - RNA, 19 nt, Artificial Sequence
  Description of Artificial Sequence: Synthetic oligonucleotide
  Sense strand starting at position 2244 of SEQ ID NO: 317783
cuccguuaugucgucucaa

SEQ ID NO: 511868 - RNA, 19 nt, Artificial Sequence
  Description of Artificial Sequence: Synthetic oligonucleotide
  Antisense strand to SEQ ID NO: 511867
uugagacgacauaacggag

SEQ ID NO: 511869 - RNA, 19 nt, Artificial Sequence
  Description of Artificial Sequence: Synthetic oligonucleotide
  Sense strand starting at position 2246 of SEQ ID NO: 317783
ccguuaugucgucucaaac

SEQ ID NO: 511870 - RNA, 19 nt, Artificial Sequence
  Description of Artificial Sequence: Synthetic oligonucleotide
  Antisense strand to SEQ ID NO: 511869
guuugagacgacauaacgg

SEQ ID NO: 511871 - RNA, 19 nt, Artificial Sequence
  Description of Artificial Sequence: Synthetic oligonucleotide
  Sense strand starting at position 2384 of SEQ ID NO: 317783
gccaaaguugauuaacaca

SEQ ID NO: 511872 - RNA, 19 nt, Artificial Sequence
  Description of Artificial Sequence: Synthetic oligonucleotide
  Antisense strand to SEQ ID NO: 511871
uguguuaaucaacuuuggc

SEQ ID NO: 511873 - RNA, 19 nt, Artificial Sequence
  Description of Artificial Sequence: Synthetic oligonucleotide
  Sense strand starting at position 2501 of SEQ ID NO: 317783
ccguaagucccauagagug

SEQ ID NO: 511874 - RNA, 19 nt, Artificial Sequence
  Description of Artificial Sequence: Synthetic oligonucleotide
  Antisense strand to SEQ ID NO: 511873
cacucuaugggacuuacgg

SEQ ID NO: 511875 - RNA, 19 nt, Artificial Sequence
  Description of Artificial Sequence: Synthetic oligonucleotide
  Sense strand starting at position 2548 of SEQ ID NO: 317783
guuccaaagggcuggaaau

SEQ ID NO: 511876 - RNA, 19 nt, Artificial Sequence
  Description of Artificial Sequence: Synthetic oligonucleotide
  Antisense strand to SEQ ID NO: 511875
auuuccagcccuuuggaac

SEQ ID NO: 511877 - RNA, 19 nt, Artificial Sequence
  Description of Artificial Sequence: Synthetic oligonucleotide
  Sense strand starting at position 2591 of SEQ ID NO: 317783
agucaagucugauccagga

SEQ ID NO: 511878 - RNA, 19 nt, Artificial Sequence
  Description of Artificial Sequence: Synthetic oligonucleotide
  Antisense strand to SEQ ID NO: 511877
uccuggaucagacuugacu

SEQ ID NO: 511879 - RNA, 19 nt, Artificial Sequence
  Description of Artificial Sequence: Synthetic oligonucleotide
  Sense strand starting at position 2737 of SEQ ID NO: 317783
aaccuaagaguccaugguu

SEQ ID NO: 511880 - RNA, 19 nt, Artificial Sequence
  Description of Artificial Sequence: Synthetic oligonucleotide
  Antisense strand to SEQ ID NO: 511879
aaccauggacucuuagguu

SEQ ID NO: 511881 - RNA, 19 nt, Artificial Sequence
  Description of Artificial Sequence: Synthetic oligonucleotide
  Sense strand starting at position 2901 of SEQ ID NO: 317783
gcucuuguccaggaucaca

SEQ ID NO: 511882 - RNA, 19 nt, Artificial Sequence
  Description of Artificial Sequence: Synthetic oligonucleotide
  Antisense strand to SEQ ID NO: 511881
ugugauccuggacaagagc

SEQ ID NO: 511883 - RNA, 19 nt, Artificial Sequence
  Description of Artificial Sequence: Synthetic oligonucleotide
  Sense strand starting at position 3075 of SEQ ID NO: 317783
ugugcugugacauagugaa

SEQ ID NO: 511884 - RNA, 19 nt, Artificial Sequence
  Description of Artificial Sequence: Synthetic oligonucleotide
  Antisense strand to SEQ ID NO: 511883
uucacuaugucacagcaca

SEQ ID NO: 511885 - RNA, 19 nt, Artificial Sequence
  Description of Artificial Sequence: Synthetic oligonucleotide
  Sense strand starting at position 3143 of SEQ ID NO: 317783
accaaagagucuccagagu

SEQ ID NO: 511886 - RNA, 19 nt, Artificial Sequence
  Description of Artificial Sequence: Synthetic oligonucleotide
  Antisense strand to SEQ ID NO: 511885
acucuggagacucuuuggu

SEQ ID NO: 511887 - RNA, 19 nt, Artificial Sequence
  Description of Artificial Sequence: Synthetic oligonucleotide
  Sense strand starting at position 3765 of SEQ ID NO: 317783
gagugagaagaaugucuuu

SEQ ID NO: 511888 - RNA, 19 nt, Artificial Sequence
  Description of Artificial Sequence: Synthetic oligonucleotide
  Antisense strand to SEQ ID NO: 511887
aaagacauucuucucacuc

SEQ ID NO: 511889 - RNA, 19 nt, Artificial Sequence
  Description of Artificial Sequence: Synthetic oligonucleotide
  Sense strand starting at position 3925 of SEQ ID NO: 317783
guuggagguugaguucaau

SEQ ID NO: 511890 - RNA, 19 nt, Artificial Sequence
  Description of Artificial Sequence: Synthetic oligonucleotide
  Antisense strand to SEQ ID NO: 511889
auugaacucaaccuccaac

SEQ ID NO: 511891 - RNA, 19 nt, Artificial Sequence
  Description of Artificial Sequence: Synthetic oligonucleotide
  Sense strand starting at position 176 of SEQ ID NO: 317784
aucacuucuguuuacugau

SEQ ID NO: 511892 - RNA, 19 nt, Artificial Sequence
  Description of Artificial Sequence: Synthetic oligonucleotide
  Antisense strand to SEQ ID NO: 511891
aucaguaaacagaagugau

SEQ ID NO: 511893 - RNA, 19 nt, Artificial Sequence
  Description of Artificial Sequence: Synthetic oligonucleotide
  Sense strand starting at position 182 of SEQ ID NO: 317784
ucuguuuacugauccaaag

SEQ ID NO: 511894 - RNA, 19 nt, Artificial Sequence
  Description of Artificial Sequence: Synthetic oligonucleotide
  Antisense strand to SEQ ID NO: 511893
cuuuggaucaguaaacaga

SEQ ID NO: 511895 - RNA, 19 nt, Artificial Sequence
  Description of Artificial Sequence: Synthetic oligonucleotide
  Sense strand starting at position 199 of SEQ ID NO: 317784
agacuacuugucuguauua

SEQ ID NO: 511896 - RNA, 19 nt, Artificial Sequence
  Description of Artificial Sequence: Synthetic oligonucleotide
  Antisense strand to SEQ ID NO: 511895
uaauacagacaaguagucu

SEQ ID NO: 511897 - RNA, 19 nt, Artificial Sequence
  Description of Artificial Sequence: Synthetic oligonucleotide
  Sense strand starting at position 200 of SEQ ID NO: 317784
gacuacuugucuguauuag

SEQ ID NO: 511898 - RNA, 19 nt, Artificial Sequence
  Description of Artificial Sequence: Synthetic oligonucleotide
  Antisense strand to SEQ ID NO: 511897
cuaauacagacaaguaguc

SEQ ID NO: 511899 - RNA, 19 nt, Artificial Sequence
  Description of Artificial Sequence: Synthetic oligonucleotide
  Sense strand starting at position 201 of SEQ ID NO: 317784
acuacuugucuguauuaga

SEQ ID NO: 511900 - RNA, 19 nt, Artificial Sequence
  Description of Artificial Sequence: Synthetic oligonucleotide
  Antisense strand to SEQ ID NO: 511899
ucuaauacagacaaguagu

SEQ ID NO: 511901 - RNA, 19 nt, Artificial Sequence
  Description of Artificial Sequence: Synthetic oligonucleotide
  Sense strand starting at position 208 of SEQ ID NO: 317784
gucuguauuagacaguaaa

SEQ ID NO: 511902 - RNA, 19 nt, Artificial Sequence
  Description of Artificial Sequence: Synthetic oligonucleotide
  Antisense strand to SEQ ID NO: 511901
uuuacugucuaauacagac

SEQ ID NO: 511903 - RNA, 19 nt, Artificial Sequence
  Description of Artificial Sequence: Synthetic oligonucleotide
  Sense strand starting at position 227 of SEQ ID NO: 317784
auaucuaggagucgugaua

SEQ ID NO: 511904 - RNA, 19 nt, Artificial Sequence
  Description of Artificial Sequence: Synthetic oligonucleotide
  Antisense strand to SEQ ID NO: 511903
uaucacgacuccuagauau

SEQ ID NO: 511905 - RNA, 19 nt, Artificial Sequence
  Description of Artificial Sequence: Synthetic oligonucleotide
  Sense strand starting at position 360 of SEQ ID NO: 317784
ugacauuaguaaucgaguu

SEQ ID NO: 511906 - RNA, 19 nt, Artificial Sequence
  Description of Artificial Sequence: Synthetic oligonucleotide
  Antisense strand to SEQ ID NO: 511905
aacucgauuacuaauguca

SEQ ID NO: 511907 - RNA, 19 nt, Artificial Sequence
  Description of Artificial Sequence: Synthetic oligonucleotide
  Sense strand starting at position 779 of SEQ ID NO: 317784
gaacuagaaucucugcgua

SEQ ID NO: 511908 - RNA, 19 nt, Artificial Sequence
  Description of Artificial Sequence: Synthetic oligonucleotide
  Antisense strand to SEQ ID NO: 511907
uacgcagagauucuaguuc

SEQ ID NO: 511909 - RNA, 19 nt, Artificial Sequence
  Description of Artificial Sequence: Synthetic oligonucleotide
  Sense strand starting at position 781 of SEQ ID NO: 317784
acuagaaucucugcguaca

SEQ ID NO: 511910 - RNA, 19 nt, Artificial Sequence
  Description of Artificial Sequence: Synthetic oligonucleotide
  Antisense strand to SEQ ID NO: 511909
uguacgcagagauucuagu

SEQ ID NO: 511911 - RNA, 19 nt, Artificial Sequence
  Description of Artificial Sequence: Synthetic oligonucleotide
  Sense strand starting at position 782 of SEQ ID NO: 317784
cuagaaucucugcguacag

SEQ ID NO: 511912 - RNA, 19 nt, Artificial Sequence
  Description of Artificial Sequence: Synthetic oligonucleotide
  Antisense strand to SEQ ID NO: 511911
cuguacgcagagauucuag

SEQ ID NO: 511913 - RNA, 19 nt, Artificial Sequence
  Description of Artificial Sequence: Synthetic oligonucleotide
  Sense strand starting at position 812 of SEQ ID NO: 317784
augaacuauugagccuaga

SEQ ID NO: 511914 - RNA, 19 nt, Artificial Sequence
  Description of Artificial Sequence: Synthetic oligonucleotide
  Antisense strand to SEQ ID NO: 511913
ucuaggcucaauaguucau

SEQ ID NO: 511915 - RNA, 19 nt, Artificial Sequence
  Description of Artificial Sequence: Synthetic oligonucleotide
  Sense strand starting at position 867 of SEQ ID NO: 317784
gaugaaggcucuuuaugaa

SEQ ID NO: 511916 - RNA, 19 nt, Artificial Sequence
  Description of Artificial Sequence: Synthetic oligonucleotide
  Antisense strand to SEQ ID NO: 511915
uucauaaagagccuucauc

SEQ ID NO: 511917 - RNA, 19 nt, Artificial Sequence
  Description of Artificial Sequence: Synthetic oligonucleotide
  Sense strand starting at position 940 of SEQ ID NO: 317784
acuaaagaccuuuggguuu

SEQ ID NO: 511918 - RNA, 19 nt, Artificial Sequence
  Description of Artificial Sequence: Synthetic oligonucleotide
  Antisense strand to SEQ ID NO: 511917
aaacccaaaggucuuuagu

SEQ ID NO: 511919 - RNA, 19 nt, Artificial Sequence
  Description of Artificial Sequence: Synthetic oligonucleotide
  Sense strand starting at position 995 of SEQ ID NO: 317784
cuuuaaauugcucacguua

SEQ ID NO: 511920 - RNA, 19 nt, Artificial Sequence
  Description of Artificial Sequence: Synthetic oligonucleotide
  Antisense strand to SEQ ID NO: 511919
uaacgugagcaauuuaaag

SEQ ID NO: 511921 - RNA, 19 nt, Artificial Sequence
  Description of Artificial Sequence: Synthetic oligonucleotide
  Sense strand starting at position 1009 of SEQ ID NO: 317784
cguuaagaaccaugguuua

SEQ ID NO: 511922 - RNA, 19 nt, Artificial Sequence
  Description of Artificial Sequence: Synthetic oligonucleotide
  Antisense strand to SEQ ID NO: 511921
uaaaccaugguucuuaacg

SEQ ID NO: 511923 - RNA, 19 nt, Artificial Sequence
  Description of Artificial Sequence: Synthetic oligonucleotide
  Sense strand starting at position 1220 of SEQ ID NO: 317784
gaugcaaacgauugcauua

SEQ ID NO: 511924 - RNA, 19 nt, Artificial Sequence
  Description of Artificial Sequence: Synthetic oligonucleotide
  Antisense strand to SEQ ID NO: 511923
uaaugcaaucguuugcauc

SEQ ID NO: 511925 - RNA, 19 nt, Artificial Sequence
  Description of Artificial Sequence: Synthetic oligonucleotide
  Sense strand starting at position 1346 of SEQ ID NO: 317784
uaccaagaauucguuuguu

SEQ ID NO: 511926 - RNA, 19 nt, Artificial Sequence
  Description of Artificial Sequence: Synthetic oligonucleotide
  Antisense strand to SEQ ID NO: 511925
aacaaacgaauucuuggua

SEQ ID NO: 511927 - RNA, 19 nt, Artificial Sequence
  Description of Artificial Sequence: Synthetic oligonucleotide
  Sense strand starting at position 1415 of SEQ ID NO: 317784
gcggaaucuugacuucucu

SEQ ID NO: 511928 - RNA, 19 nt, Artificial Sequence
  Description of Artificial Sequence: Synthetic oligonucleotide
  Antisense strand to SEQ ID NO: 511927
agagaagucaagauuccgc

SEQ ID NO: 511929 - RNA, 19 nt, Artificial Sequence
  Description of Artificial Sequence: Synthetic oligonucleotide
  Sense strand starting at position 1437 of SEQ ID NO: 317784
gcuucaagucuuuggagag

SEQ ID NO: 511930 - RNA, 19 nt, Artificial Sequence
  Description of Artificial Sequence: Synthetic oligonucleotide
  Antisense strand to SEQ ID NO: 511929
cucuccaaagacuugaagc

SEQ ID NO: 511931 - RNA, 19 nt, Artificial Sequence
  Description of Artificial Sequence: Synthetic oligonucleotide
  Sense strand starting at position 1461 of SEQ ID NO: 317784
gcaugauacuuuccuuuga

SEQ ID NO: 511932 - RNA, 19 nt, Artificial Sequence
  Description of Artificial Sequence: Synthetic oligonucleotide
  Antisense strand to SEQ ID NO: 511931
ucaaaggaaaguaucaugc

SEQ ID NO: 511933 - RNA, 19 nt, Artificial Sequence
  Description of Artificial Sequence: Synthetic oligonucleotide
  Sense strand starting at position 1488 of SEQ ID NO: 317784
auaacauauugagggagaa

SEQ ID NO: 511934 - RNA, 19 nt, Artificial Sequence
  Description of Artificial Sequence: Synthetic oligonucleotide
  Antisense strand to SEQ ID NO: 511933
uucucccucaauauguuau

SEQ ID NO: 511935 - RNA, 19 nt, Artificial Sequence
  Description of Artificial Sequence: Synthetic oligonucleotide
  Sense strand starting at position 1548 of SEQ ID NO: 317784
agaucuugugcuugucaga

SEQ ID NO: 511936 - RNA, 19 nt, Artificial Sequence
  Description of Artificial Sequence: Synthetic oligonucleotide
  Antisense strand to SEQ ID NO: 511935
ucugacaagcacaagaucu

SEQ ID NO: 511937 - RNA, 19 nt, Artificial Sequence
  Description of Artificial Sequence: Synthetic oligonucleotide
  Sense strand starting at position 1889 of SEQ ID NO: 317784
aggucuaagucagucuuga

SEQ ID NO: 511938 - RNA, 19 nt, Artificial Sequence
  Description of Artificial Sequence: Synthetic oligonucleotide
  Antisense strand to SEQ ID NO: 511937
ucaagacugacuuagaccu

SEQ ID NO: 511939 - RNA, 19 nt, Artificial Sequence
  Description of Artificial Sequence: Synthetic oligonucleotide
  Sense strand starting at position 2307 of SEQ ID NO: 317784
cugggaguucacgaucuuu

SEQ ID NO: 511940 - RNA, 19 nt, Artificial Sequence
  Description of Artificial Sequence: Synthetic oligonucleotide
  Antisense strand to SEQ ID NO: 511939
aaagaucgugaacucccag

SEQ ID NO: 511941 - RNA, 19 nt, Artificial Sequence
  Description of Artificial Sequence: Synthetic oligonucleotide
  Sense strand starting at position 2444 of SEQ ID NO: 317784
ggccucuguccguugguaa

SEQ ID NO: 511942 - RNA, 19 nt, Artificial Sequence
  Description of Artificial Sequence: Synthetic oligonucleotide
  Antisense strand to SEQ ID NO: 511941
uuaccaacggacagaggcc

SEQ ID NO: 511943 - RNA, 19 nt, Artificial Sequence
  Description of Artificial Sequence: Synthetic oligonucleotide
  Sense strand starting at position 2459 of SEQ ID NO: 317784
guaaucgcugugucagcua

SEQ ID NO: 511944 - RNA, 19 nt, Artificial Sequence
  Description of Artificial Sequence: Synthetic oligonucleotide
  Antisense strand to SEQ ID NO: 511943
uagcugacacagcgauuac

SEQ ID NO: 511945 - RNA, 19 nt, Artificial Sequence
  Description of Artificial Sequence: Synthetic oligonucleotide
  Sense strand starting at position 2466 of SEQ ID NO: 317784
cugugucagcuauagaugu

SEQ ID NO: 511946 - RNA, 19 nt, Artificial Sequence
  Description of Artificial Sequence: Synthetic oligonucleotide
  Antisense strand to SEQ ID NO: 511945
acaucuauagcugacacag

SEQ ID NO: 511947 - RNA, 19 nt, Artificial Sequence
  Description of Artificial Sequence: Synthetic oligonucleotide
  Sense strand starting at position 2468 of SEQ ID NO: 317784
gugucagcuauagauguga

SEQ ID NO: 511948 - RNA, 19 nt, Artificial Sequence
  Description of Artificial Sequence: Synthetic oligonucleotide
  Antisense strand to SEQ ID NO: 511947
ucacaucuauagcugacac

SEQ ID NO: 511949 - RNA, 19 nt, Artificial Sequence
  Description of Artificial Sequence: Synthetic oligonucleotide
  Sense strand starting at position 2531 of SEQ ID NO: 317784
gcaagauuucuaugccgau

SEQ ID NO: 511950 - RNA, 19 nt, Artificial Sequence
  Description of Artificial Sequence: Synthetic oligonucleotide
  Antisense strand to SEQ ID NO: 511949
aucggcauagaaaucuugc

SEQ ID NO: 511951 - RNA, 19 nt, Artificial Sequence
  Description of Artificial Sequence: Synthetic oligonucleotide
  Sense strand starting at position 2553 of SEQ ID NO: 317784
aagggagagcguugacaua

SEQ ID NO: 511952 - RNA, 19 nt, Artificial Sequence
  Description of Artificial Sequence: Synthetic oligonucleotide
  Antisense strand to SEQ ID NO: 511951
uaugucaacgcucucccuu

SEQ ID NO: 511953 - RNA, 19 nt, Artificial Sequence
  Description of Artificial Sequence: Synthetic oligonucleotide
  Sense strand starting at position 2593 of SEQ ID NO: 317784
ugcucuauacauugggagu

SEQ ID NO: 511954 - RNA, 19 nt, Artificial Sequence
  Description of Artificial Sequence: Synthetic oligonucleotide
  Antisense strand to SEQ ID NO: 511953
acucccaauguauagagca

SEQ ID NO: 511955 - RNA, 19 nt, Artificial Sequence
  Description of Artificial Sequence: Synthetic oligonucleotide
  Sense strand starting at position 2594 of SEQ ID NO: 317784
gcucuauacauugggagua

SEQ ID NO: 511956 - RNA, 19 nt, Artificial Sequence
  Description of Artificial Sequence: Synthetic oligonucleotide
  Antisense strand to SEQ ID NO: 511955
uacucccaauguauagagc

SEQ ID NO: 511957 - RNA, 19 nt, Artificial Sequence
  Description of Artificial Sequence: Synthetic oligonucleotide
  Sense strand starting at position 2798 of SEQ ID NO: 317784
agaggucuggcgggaaaug

SEQ ID NO: 511958 - RNA, 19 nt, Artificial Sequence
  Description of Artificial Sequence: Synthetic oligonucleotide
  Antisense strand to SEQ ID NO: 511957
cauuucccgccagaccucu

SEQ ID NO: 511959 - RNA, 19 nt, Artificial Sequence
  Description of Artificial Sequence: Synthetic oligonucleotide
  Sense strand starting at position 2799 of SEQ ID NO: 317784
gaggucuggcgggaaauga

SEQ ID NO: 511960 - RNA, 19 nt, Artificial Sequence
  Description of Artificial Sequence: Synthetic oligonucleotide
  Antisense strand to SEQ ID NO: 511959
ucauuucccgccagaccuc

SEQ ID NO: 511961 - RNA, 19 nt, Artificial Sequence
  Description of Artificial Sequence: Synthetic oligonucleotide
  Sense strand starting at position 3373 of SEQ ID NO: 317784
acuauuauuggaugagagu

SEQ ID NO: 511962 - RNA, 19 nt, Artificial Sequence
  Description of Artificial Sequence: Synthetic oligonucleotide
  Antisense strand to SEQ ID NO: 511961
acucucauccaauaauagu

SEQ ID NO: 511963 - RNA, 19 nt, Artificial Sequence
  Description of Artificial Sequence: Synthetic oligonucleotide
  Sense strand starting at position 3384 of SEQ ID NO: 317784
augagagucagaugcauug

SEQ ID NO: 511964 - RNA, 19 nt, Artificial Sequence
  Description of Artificial Sequence: Synthetic oligonucleotide
  Antisense strand to SEQ ID NO: 511963
caaugcaucugacucucau

SEQ ID NO: 511965 - RNA, 19 nt, Artificial Sequence
  Description of Artificial Sequence: Synthetic oligonucleotide
  Sense strand starting at position 3386 of SEQ ID NO: 317784
gagagucagaugcauuguu

SEQ ID NO: 511966 - RNA, 19 nt, Artificial Sequence
  Description of Artificial Sequence: Synthetic oligonucleotide
  Antisense strand to SEQ ID NO: 511965
aacaaugcaucugacucuc

SEQ ID NO: 511967 - RNA, 19 nt, Artificial Sequence
  Description of Artificial Sequence: Synthetic oligonucleotide
  Sense strand starting at position 3467 of SEQ ID NO: 317784
aggacauauuaucuuuguu

SEQ ID NO: 511968 - RNA, 19 nt, Artificial Sequence
  Description of Artificial Sequence: Synthetic oligonucleotide
  Antisense strand to SEQ ID NO: 511967
aacaaagauaauauguccu

SEQ ID NO: 511969 - RNA, 19 nt, Artificial Sequence
  Description of Artificial Sequence: Synthetic oligonucleotide
  Sense strand starting at position 3731 of SEQ ID NO: 317784
gugugaaguagagaaagua

SEQ ID NO: 511970 - RNA, 19 nt, Artificial Sequence
  Description of Artificial Sequence: Synthetic oligonucleotide
  Antisense strand to SEQ ID NO: 511969
uacuuucucuacuucacac

SEQ ID NO: 511971 - RNA, 19 nt, Artificial Sequence
  Description of Artificial Sequence: Synthetic oligonucleotide
  Sense strand starting at position 428 of SEQ ID NO: 317785
guagcaaaucugcacaagu

SEQ ID NO: 511972 - RNA, 19 nt, Artificial Sequence
  Description of Artificial Sequence: Synthetic oligonucleotide
  Antisense strand to SEQ ID NO: 511971
acuugugcagauuugcuac

SEQ ID NO: 511973 - RNA, 19 nt, Artificial Sequence
  Description of Artificial Sequence: Synthetic oligonucleotide
  Sense strand starting at position 430 of SEQ ID NO: 317785
agcaaaucugcacaaguaa

SEQ ID NO: 511974 - RNA, 19 nt, Artificial Sequence
  Description of Artificial Sequence: Synthetic oligonucleotide
  Antisense strand to SEQ ID NO: 511973
uuacuugugcagauuugcu

SEQ ID NO: 511975 - RNA, 19 nt, Artificial Sequence
  Description of Artificial Sequence: Synthetic oligonucleotide
  Sense strand starting at position 509 of SEQ ID NO: 317785
gggccuaggcauuaugaaa

SEQ ID NO: 511976 - RNA, 19 nt, Artificial Sequence
  Description of Artificial Sequence: Synthetic oligonucleotide
  Antisense strand to SEQ ID NO: 511975
uuucauaaugccuaggccc

SEQ ID NO: 511977 - RNA, 19 nt, Artificial Sequence
  Description of Artificial Sequence: Synthetic oligonucleotide
  Sense strand starting at position 591 of SEQ ID NO: 317785
aagaguauaccguaugcuu

SEQ ID NO: 511978 - RNA, 19 nt, Artificial Sequence
  Description of Artificial Sequence: Synthetic oligonucleotide
  Antisense strand to SEQ ID NO: 511977
aagcauacgguauacucuu

SEQ ID NO: 511979 - RNA, 19 nt, Artificial Sequence
  Description of Artificial Sequence: Synthetic oligonucleotide
  Sense strand starting at position 668 of SEQ ID NO: 317785
agaugagaaggcugucacu

SEQ ID NO: 511980 - RNA, 19 nt, Artificial Sequence
  Description of Artificial Sequence: Synthetic oligonucleotide
  Antisense strand to SEQ ID NO: 511979
agugacagccuucucaucu

SEQ ID NO: 511981 - RNA, 19 nt, Artificial Sequence
  Description of Artificial Sequence: Synthetic oligonucleotide
  Sense strand starting at position 761 of SEQ ID NO: 317785
uucuaagcggucuauauua

SEQ ID NO: 511982 - RNA, 19 nt, Artificial Sequence
  Description of Artificial Sequence: Synthetic oligonucleotide
  Antisense strand to SEQ ID NO: 511981
uaauauagaccgcuuagaa

SEQ ID NO: 511983 - RNA, 19 nt, Artificial Sequence
  Description of Artificial Sequence: Synthetic oligonucleotide
  Sense strand starting at position 763 of SEQ ID NO: 317785
cuaagcggucuauauuauu

SEQ ID NO: 511984 - RNA, 19 nt, Artificial Sequence
  Description of Artificial Sequence: Synthetic oligonucleotide
  Antisense strand to SEQ ID NO: 511983
aauaauauagaccgcuuag

SEQ ID NO: 511985 - RNA, 19 nt, Artificial Sequence
  Description of Artificial Sequence: Synthetic oligonucleotide
  Sense strand starting at position 824 of SEQ ID NO: 317785
uuacuaucgucacugcaca

SEQ ID NO: 511986 - RNA, 19 nt, Artificial Sequence
  Description of Artificial Sequence: Synthetic oligonucleotide
  Antisense strand to SEQ ID NO: 511985
ugugcagugacgauaguaa

SEQ ID NO: 511987 - RNA, 19 nt, Artificial Sequence
  Description of Artificial Sequence: Synthetic oligonucleotide
  Sense strand starting at position 888 of SEQ ID NO: 317785
aacccagagucgucucaau

SEQ ID NO: 511988 - RNA, 19 nt, Artificial Sequence
  Description of Artificial Sequence: Synthetic oligonucleotide
  Antisense strand to SEQ ID NO: 511987
auugagacgacucuggguu

SEQ ID NO: 511989 - RNA, 19 nt, Artificial Sequence
  Description of Artificial Sequence: Synthetic oligonucleotide
  Sense strand starting at position 931 of SEQ ID NO: 317785
uugcuaugcugaucagaca

SEQ ID NO: 511990 - RNA, 19 nt, Artificial Sequence
  Description of Artificial Sequence: Synthetic oligonucleotide
  Antisense strand to SEQ ID NO: 511989
ugucugaucagcauagcaa

SEQ ID NO: 511991 - RNA, 19 nt, Artificial Sequence
  Description of Artificial Sequence: Synthetic oligonucleotide
  Sense strand starting at position 932 of SEQ ID NO: 317785
ugcuaugcugaucagacaa

SEQ ID NO: 511992 - RNA, 19 nt, Artificial Sequence
  Description of Artificial Sequence: Synthetic oligonucleotide
  Antisense strand to SEQ ID NO: 511991
uugucugaucagcauagca

SEQ ID NO: 511993 - RNA, 19 nt, Artificial Sequence
  Description of Artificial Sequence: Synthetic oligonucleotide
  Sense strand starting at position 1298 of SEQ ID NO: 317785
uuggguauuuauuaugaga

SEQ ID NO: 511994 - RNA, 19 nt, Artificial Sequence
  Description of Artificial Sequence: Synthetic oligonucleotide
  Antisense strand to SEQ ID NO: 511993
ucucauaauaaauacccaa

SEQ ID NO: 511995 - RNA, 19 nt, Artificial Sequence
  Description of Artificial Sequence: Synthetic oligonucleotide
  Sense strand starting at position 1300 of SEQ ID NO: 317785
ggguauuuauuaugagaua

SEQ ID NO: 511996 - RNA, 19 nt, Artificial Sequence
  Description of Artificial Sequence: Synthetic oligonucleotide
  Antisense strand to SEQ ID NO: 511995
uaucucauaauaaauaccc

SEQ ID NO: 511997 - RNA, 19 nt, Artificial Sequence
  Description of Artificial Sequence: Synthetic oligonucleotide
  Sense strand starting at position 1369 of SEQ ID NO: 317785
ugucuagguuuggcuauaa

SEQ ID NO: 511998 - RNA, 19 nt, Artificial Sequence
  Description of Artificial Sequence: Synthetic oligonucleotide
  Antisense strand to SEQ ID NO: 511997
uuauagccaaaccuagaca

SEQ ID NO: 511999 - RNA, 19 nt, Artificial Sequence
  Description of Artificial Sequence: Synthetic oligonucleotide
  Sense strand starting at position 1399 of SEQ ID NO: 317785
cugaaaucauaagcaguaa

SEQ ID NO: 512000 - RNA, 19 nt, Artificial Sequence
  Description of Artificial Sequence: Synthetic oligonucleotide
  Antisense strand to SEQ ID NO: 511999
uuacugcuuaugauuucag

SEQ ID NO: 512001 - RNA, 19 nt, Artificial Sequence
  Description of Artificial Sequence: Synthetic oligonucleotide
  Sense strand starting at position 1410 of SEQ ID NO: 317785
agcaguaauuguuuacuaa

SEQ ID NO: 512002 - RNA, 19 nt, Artificial Sequence
  Description of Artificial Sequence: Synthetic oligonucleotide
  Antisense strand to SEQ ID NO: 512001
uuaguaaacaauuacugcu

SEQ ID NO: 512003 - RNA, 19 nt, Artificial Sequence
  Description of Artificial Sequence: Synthetic oligonucleotide
  Sense strand starting at position 1411 of SEQ ID NO: 317785
gcaguaauuguuuacuaau

SEQ ID NO: 512004 - RNA, 19 nt, Artificial Sequence
  Description of Artificial Sequence: Synthetic oligonucleotide
  Antisense strand to SEQ ID NO: 512003
auuaguaaacaauuacugc

SEQ ID NO: 512005 - RNA, 19 nt, Artificial Sequence
  Description of Artificial Sequence: Synthetic oligonucleotide
  Sense strand starting at position 1513 of SEQ ID NO: 317785
cucuuugaaugccugaauu

SEQ ID NO: 512006 - RNA, 19 nt, Artificial Sequence
  Description of Artificial Sequence: Synthetic oligonucleotide
  Antisense strand to SEQ ID NO: 512005
aauucaggcauucaaagag

SEQ ID NO: 512007 - RNA, 19 nt, Artificial Sequence
  Description of Artificial Sequence: Synthetic oligonucleotide
  Sense strand starting at position 1621 of SEQ ID NO: 317785
gagcgcucacuguaaacau

SEQ ID NO: 512008 - RNA, 19 nt, Artificial Sequence
  Description of Artificial Sequence: Synthetic oligonucleotide
  Antisense strand to SEQ ID NO: 512007
auguuuacagugagcgcuc

SEQ ID NO: 512009 - RNA, 19 nt, Artificial Sequence
  Description of Artificial Sequence: Synthetic oligonucleotide
  Sense strand starting at position 1639 of SEQ ID NO: 317785
uguccuuaccucuguaaua

SEQ ID NO: 512010 - RNA, 19 nt, Artificial Sequence
  Description of Artificial Sequence: Synthetic oligonucleotide
  Antisense strand to SEQ ID NO: 512009
uauuacagagguaaggaca

SEQ ID NO: 512011 - RNA, 19 nt, Artificial Sequence
  Description of Artificial Sequence: Synthetic oligonucleotide
  Sense strand starting at position 1640 of SEQ ID NO: 317785
guccuuaccucuguaauag

SEQ ID NO: 512012 - RNA, 19 nt, Artificial Sequence
  Description of Artificial Sequence: Synthetic oligonucleotide
  Antisense strand to SEQ ID NO: 512011
cuauuacagagguaaggac

SEQ ID NO: 512013 - RNA, 19 nt, Artificial Sequence
  Description of Artificial Sequence: Synthetic oligonucleotide
  Sense strand starting at position 1888 of SEQ ID NO: 317785
cugagaaaucgcuguuuau

SEQ ID NO: 512014 - RNA, 19 nt, Artificial Sequence
  Description of Artificial Sequence: Synthetic oligonucleotide
  Antisense strand to SEQ ID NO: 512013
auaaacagcgauuucucag

SEQ ID NO: 512015 - RNA, 19 nt, Artificial Sequence
  Description of Artificial Sequence: Synthetic oligonucleotide
  Sense strand starting at position 1891 of SEQ ID NO: 317785
agaaaucgcuguuuaugga

SEQ ID NO: 512016 - RNA, 19 nt, Artificial Sequence
  Description of Artificial Sequence: Synthetic oligonucleotide
  Antisense strand to SEQ ID NO: 512015
uccauaaacagcgauuucu

SEQ ID NO: 512017 - RNA, 19 nt, Artificial Sequence
  Description of Artificial Sequence: Synthetic oligonucleotide
  Sense strand starting at position 1898 of SEQ ID NO: 317785
gcuguuuauggacaggaca

SEQ ID NO: 512018 - RNA, 19 nt, Artificial Sequence
  Description of Artificial Sequence: Synthetic oligonucleotide
  Antisense strand to SEQ ID NO: 512017
uguccuguccauaaacagc

SEQ ID NO: 512019 - RNA, 19 nt, Artificial Sequence
  Description of Artificial Sequence: Synthetic oligonucleotide
  Sense strand starting at position 1991 of SEQ ID NO: 317785
agccaaucaucggcgauaa

SEQ ID NO: 512020 - RNA, 19 nt, Artificial Sequence
  Description of Artificial Sequence: Synthetic oligonucleotide
  Antisense strand to SEQ ID NO: 512019
uuaucgccgaugauuggcu

SEQ ID NO: 512021 - RNA, 19 nt, Artificial Sequence
  Description of Artificial Sequence: Synthetic oligonucleotide
  Sense strand starting at position 1993 of SEQ ID NO: 317785
ccaaucaucggcgauaaua

SEQ ID NO: 512022 - RNA, 19 nt, Artificial Sequence
  Description of Artificial Sequence: Synthetic oligonucleotide
  Antisense strand to SEQ ID NO: 512021
uauuaucgccgaugauugg

SEQ ID NO: 512023 - RNA, 19 nt, Artificial Sequence
  Description of Artificial Sequence: Synthetic oligonucleotide
  Sense strand starting at position 1995 of SEQ ID NO: 317785
aaucaucggcgauaauacu

SEQ ID NO: 512024 - RNA, 19 nt, Artificial Sequence
  Description of Artificial Sequence: Synthetic oligonucleotide
  Antisense strand to SEQ ID NO: 512023
aguauuaucgccgaugauu

SEQ ID NO: 512025 - RNA, 19 nt, Artificial Sequence
  Description of Artificial Sequence: Synthetic oligonucleotide
  Sense strand starting at position 2313 of SEQ ID NO: 317785
gggugaugugauuggauga

SEQ ID NO: 512026 - RNA, 19 nt, Artificial Sequence
  Description of Artificial Sequence: Synthetic oligonucleotide
  Antisense strand to SEQ ID NO: 512025
ucauccaaucacaucaccc

SEQ ID NO: 512027 - RNA, 19 nt, Artificial Sequence
  Description of Artificial Sequence: Synthetic oligonucleotide
  Sense strand starting at position 2314 of SEQ ID NO: 317785
ggugaugugauuggaugaa

SEQ ID NO: 512028 - RNA, 19 nt, Artificial Sequence
  Description of Artificial Sequence: Synthetic oligonucleotide
  Antisense strand to SEQ ID NO: 512027
uucauccaaucacaucacc

SEQ ID NO: 512029 - RNA, 19 nt, Artificial Sequence
  Description of Artificial Sequence: Synthetic oligonucleotide
  Sense strand starting at position 2380 of SEQ ID NO: 317785
caaagugauguauaugcua

SEQ ID NO: 512030 - RNA, 19 nt, Artificial Sequence
  Description of Artificial Sequence: Synthetic oligonucleotide
  Antisense strand to SEQ ID NO: 512029
uagcauauacaucacuuug

SEQ ID NO: 512031 - RNA, 19 nt, Artificial Sequence
  Description of Artificial Sequence: Synthetic oligonucleotide
  Sense strand starting at position 2415 of SEQ ID NO: 317785
gccucuggauucuuccuua

SEQ ID NO: 512032 - RNA, 19 nt, Artificial Sequence
  Description of Artificial Sequence: Synthetic oligonucleotide
  Antisense strand to SEQ ID NO: 512031
uaaggaagaauccagaggc

SEQ ID NO: 512033 - RNA, 19 nt, Artificial Sequence
  Description of Artificial Sequence: Synthetic oligonucleotide
  Sense strand starting at position 2516 of SEQ ID NO: 317785
gggugagagcauuguucug

SEQ ID NO: 512034 - RNA, 19 nt, Artificial Sequence
  Description of Artificial Sequence: Synthetic oligonucleotide
  Antisense strand to SEQ ID NO: 512033
cagaacaaugcucucaccc

SEQ ID NO: 512035 - RNA, 19 nt, Artificial Sequence
  Description of Artificial Sequence: Synthetic oligonucleotide
  Sense strand starting at position 2522 of SEQ ID NO: 317785
gagcauuguucuguaacau

SEQ ID NO: 512036 - RNA, 19 nt, Artificial Sequence
  Description of Artificial Sequence: Synthetic oligonucleotide
  Antisense strand to SEQ ID NO: 512035
auguuacagaacaaugcuc

SEQ ID NO: 512037 - RNA, 19 nt, Artificial Sequence
  Description of Artificial Sequence: Synthetic oligonucleotide
  Sense strand starting at position 2523 of SEQ ID NO: 317785
agcauuguucuguaacauu

SEQ ID NO: 512038 - RNA, 19 nt, Artificial Sequence
  Description of Artificial Sequence: Synthetic oligonucleotide
  Antisense strand to SEQ ID NO: 512037
aauguuacagaacaaugcu

SEQ ID NO: 512039 - RNA, 19 nt, Artificial Sequence
  Description of Artificial Sequence: Synthetic oligonucleotide
  Sense strand starting at position 2567 of SEQ ID NO: 317785
cacauuuauugaggguuua

SEQ ID NO: 512040 - RNA, 19 nt, Artificial Sequence
  Description of Artificial Sequence: Synthetic oligonucleotide
  Antisense strand to SEQ ID NO: 512039
uaaacccucaauaaaugug

SEQ ID NO: 512041 - RNA, 19 nt, Artificial Sequence
  Description of Artificial Sequence: Synthetic oligonucleotide
  Sense strand starting at position 2641 of SEQ ID NO: 317785
gcacuaugauauucguauc

SEQ ID NO: 512042 - RNA, 19 nt, Artificial Sequence
  Description of Artificial Sequence: Synthetic oligonucleotide
  Antisense strand to SEQ ID NO: 512041
gauacgaauaucauagugc

SEQ ID NO: 512043 - RNA, 19 nt, Artificial Sequence
  Description of Artificial Sequence: Synthetic oligonucleotide
  Sense strand starting at position 3155 of SEQ ID NO: 317785
guaguauacuaucuuacca

SEQ ID NO: 512044 - RNA, 19 nt, Artificial Sequence
  Description of Artificial Sequence: Synthetic oligonucleotide
  Antisense strand to SEQ ID NO: 512043
ugguaagauaguauacuac

SEQ ID NO: 512045 - RNA, 19 nt, Artificial Sequence
  Description of Artificial Sequence: Synthetic oligonucleotide
  Sense strand starting at position 3213 of SEQ ID NO: 317785
cuggguguuauauagaagu

SEQ ID NO: 512046 - RNA, 19 nt, Artificial Sequence
  Description of Artificial Sequence: Synthetic oligonucleotide
  Antisense strand to SEQ ID NO: 512045
acuucuauauaacacccag

SEQ ID NO: 512047 - RNA, 19 nt, Artificial Sequence
  Description of Artificial Sequence: Synthetic oligonucleotide
  Sense strand starting at position 3215 of SEQ ID NO: 317785
ggguguuauauagaaguua

SEQ ID NO: 512048 - RNA, 19 nt, Artificial Sequence
  Description of Artificial Sequence: Synthetic oligonucleotide
  Antisense strand to SEQ ID NO: 512047
uaacuucuauauaacaccc

SEQ ID NO: 512049 - RNA, 19 nt, Artificial Sequence
  Description of Artificial Sequence: Synthetic oligonucleotide
  Sense strand starting at position 3897 of SEQ ID NO: 317785
aaucaauuugcgggccuau

SEQ ID NO: 512050 - RNA, 19 nt, Artificial Sequence
  Description of Artificial Sequence: Synthetic oligonucleotide
  Antisense strand to SEQ ID NO: 512049
auaggcccgcaaauugauu

SEQ ID NO: 512051 - RNA, 19 nt, Artificial Sequence
  Description of Artificial Sequence: Synthetic oligonucleotide
  Sense strand starting at position 196 of SEQ ID NO: 317786
ucugaacaguguccaaaua

SEQ ID NO: 512052 - RNA, 19 nt, Artificial Sequence
  Description of Artificial Sequence: Synthetic oligonucleotide
  Antisense strand to SEQ ID NO: 512051
uauuuggacacuguucaga

SEQ ID NO: 512053 - RNA, 19 nt, Artificial Sequence
  Description of Artificial Sequence: Synthetic oligonucleotide
  Sense strand starting at position 330 of SEQ ID NO: 317786
uuaaaugaggcccagaguu

SEQ ID NO: 512054 - RNA, 19 nt, Artificial Sequence
  Description of Artificial Sequence: Synthetic oligonucleotide
  Antisense strand to SEQ ID NO: 512053
aacucugggccucauuuaa

SEQ ID NO: 512055 - RNA, 19 nt, Artificial Sequence
  Description of Artificial Sequence: Synthetic oligonucleotide
  Sense strand starting at position 383 of SEQ ID NO: 317786
gguccugagcacuaugaac

SEQ ID NO: 512056 - RNA, 19 nt, Artificial Sequence
  Description of Artificial Sequence: Synthetic oligonucleotide
  Antisense strand to SEQ ID NO: 512055
guucauagugcucaggacc

SEQ ID NO: 512057 - RNA, 19 nt, Artificial Sequence
  Description of Artificial Sequence: Synthetic oligonucleotide
  Sense strand starting at position 458 of SEQ ID NO: 317786
cuaguugagacaugguaug

SEQ ID NO: 512058 - RNA, 19 nt, Artificial Sequence
  Description of Artificial Sequence: Synthetic oligonucleotide
  Antisense strand to SEQ ID NO: 512057
cauaccaugucucaacuag

SEQ ID NO: 512059 - RNA, 19 nt, Artificial Sequence
  Description of Artificial Sequence: Synthetic oligonucleotide
  Sense strand starting at position 607 of SEQ ID NO: 317786
auaggaagcgauuauuauu

SEQ ID NO: 512060 - RNA, 19 nt, Artificial Sequence
  Description of Artificial Sequence: Synthetic oligonucleotide
  Antisense strand to SEQ ID NO: 512059
aauaauaaucgcuuccuau

SEQ ID NO: 512061 - RNA, 19 nt, Artificial Sequence
  Description of Artificial Sequence: Synthetic oligonucleotide
  Sense strand starting at position 999 of SEQ ID NO: 317786
agacuuaaagccugaccuu

SEQ ID NO: 512062 - RNA, 19 nt, Artificial Sequence
  Description of Artificial Sequence: Synthetic oligonucleotide
  Antisense strand to SEQ ID NO: 512061
aaggucaggcuuuaagucu

SEQ ID NO: 512063 - RNA, 19 nt, Artificial Sequence
  Description of Artificial Sequence: Synthetic oligonucleotide
  Sense strand starting at position 1155 of SEQ ID NO: 317786
acuggaguucuagggacau

SEQ ID NO: 512064 - RNA, 19 nt, Artificial Sequence
  Description of Artificial Sequence: Synthetic oligonucleotide
  Antisense strand to SEQ ID NO: 512063
augucccuagaacuccagu

SEQ ID NO: 512065 - RNA, 19 nt, Artificial Sequence
  Description of Artificial Sequence: Synthetic oligonucleotide
  Sense strand starting at position 1269 of SEQ ID NO: 317786
uccucucuuguggaugaga

SEQ ID NO: 512066 - RNA, 19 nt, Artificial Sequence
  Description of Artificial Sequence: Synthetic oligonucleotide
  Antisense strand to SEQ ID NO: 512065
ucucauccacaagagagga

SEQ ID NO: 512067 - RNA, 19 nt, Artificial Sequence
  Description of Artificial Sequence: Synthetic oligonucleotide
  Sense strand starting at position 1271 of SEQ ID NO: 317786
cucucuuguggaugagaag

SEQ ID NO: 512068 - RNA, 19 nt, Artificial Sequence
  Description of Artificial Sequence: Synthetic oligonucleotide
  Antisense strand to SEQ ID NO: 512067
cuucucauccacaagagag

SEQ ID NO: 512069 - RNA, 19 nt, Artificial Sequence
  Description of Artificial Sequence: Synthetic oligonucleotide
  Sense strand starting at position 1285 of SEQ ID NO: 317786
agaagaguuccguagacau

SEQ ID NO: 512070 - RNA, 19 nt, Artificial Sequence
  Description of Artificial Sequence: Synthetic oligonucleotide
  Antisense strand to SEQ ID NO: 512069
augucuacggaacucuucu

SEQ ID NO: 512071 - RNA, 19 nt, Artificial Sequence
  Description of Artificial Sequence: Synthetic oligonucleotide
  Sense strand starting at position 1308 of SEQ ID NO: 317786
uucgaauucucaccaggag

SEQ ID NO: 512072 - RNA, 19 nt, Artificial Sequence
  Description of Artificial Sequence: Synthetic oligonucleotide
  Antisense strand to SEQ ID NO: 512071
cuccuggugagaauucgaa

SEQ ID NO: 512073 - RNA, 19 nt, Artificial Sequence
  Description of Artificial Sequence: Synthetic oligonucleotide
  Sense strand starting at position 1359 of SEQ ID NO: 317786
ucuaaaucgguacaucaca

SEQ ID NO: 512074 - RNA, 19 nt, Artificial Sequence
  Description of Artificial Sequence: Synthetic oligonucleotide
  Antisense strand to SEQ ID NO: 512073
ugugauguaccgauuuaga

SEQ ID NO: 512075 - RNA, 19 nt, Artificial Sequence
  Description of Artificial Sequence: Synthetic oligonucleotide
  Sense strand starting at position 1420 of SEQ ID NO: 317786
gcgaaucaacacuggaaga

SEQ ID NO: 512076 - RNA, 19 nt, Artificial Sequence
  Description of Artificial Sequence: Synthetic oligonucleotide
  Antisense strand to SEQ ID NO: 512075
ucuuccaguguugauucgc

SEQ ID NO: 512077 - RNA, 19 nt, Artificial Sequence
  Description of Artificial Sequence: Synthetic oligonucleotide
  Sense strand starting at position 1568 of SEQ ID NO: 317786
cgagacuccugacuagaaa

SEQ ID NO: 512078 - RNA, 19 nt, Artificial Sequence
  Description of Artificial Sequence: Synthetic oligonucleotide
  Antisense strand to SEQ ID NO: 512077
uuucuagucaggagucucg

SEQ ID NO: 512079 - RNA, 19 nt, Artificial Sequence
  Description of Artificial Sequence: Synthetic oligonucleotide
  Sense strand starting at position 1684 of SEQ ID NO: 317786
cgugauuccguggcggaga

SEQ ID NO: 512080 - RNA, 19 nt, Artificial Sequence
  Description of Artificial Sequence: Synthetic oligonucleotide
  Antisense strand to SEQ ID NO: 512079
ucuccgccacggaaucacg

SEQ ID NO: 512081 - RNA, 19 nt, Artificial Sequence
  Description of Artificial Sequence: Synthetic oligonucleotide
  Sense strand starting at position 1820 of SEQ ID NO: 317786
ggagguaguuaacuagauu

SEQ ID NO: 512082 - RNA, 19 nt, Artificial Sequence
  Description of Artificial Sequence: Synthetic oligonucleotide
  Antisense strand to SEQ ID NO: 512081
aaucuaguuaacuaccucc

SEQ ID NO: 512083 - RNA, 19 nt, Artificial Sequence
  Description of Artificial Sequence: Synthetic oligonucleotide
  Sense strand starting at position 1823 of SEQ ID NO: 317786
gguaguuaacuagauugca

SEQ ID NO: 512084 - RNA, 19 nt, Artificial Sequence
  Description of Artificial Sequence: Synthetic oligonucleotide
  Antisense strand to SEQ ID NO: 512083
ugcaaucuaguuaacuacc

SEQ ID NO: 512085 - RNA, 19 nt, Artificial Sequence
  Description of Artificial Sequence: Synthetic oligonucleotide
  Sense strand starting at position 1874 of SEQ ID NO: 317786
gacucagagucuucccuga

SEQ ID NO: 512086 - RNA, 19 nt, Artificial Sequence
  Description of Artificial Sequence: Synthetic oligonucleotide
  Antisense strand to SEQ ID NO: 512085
ucagggaagacucugaguc

SEQ ID NO: 512087 - RNA, 19 nt, Artificial Sequence
  Description of Artificial Sequence: Synthetic oligonucleotide
  Sense strand starting at position 1912 of SEQ ID NO: 317786
gccucugagcaagaauauc

SEQ ID NO: 512088 - RNA, 19 nt, Artificial Sequence
  Description of Artificial Sequence: Synthetic oligonucleotide
  Antisense strand to SEQ ID NO: 512087
gauauucuugcucagaggc

SEQ ID NO: 512089 - RNA, 19 nt, Artificial Sequence
  Description of Artificial Sequence: Synthetic oligonucleotide
  Sense strand starting at position 2268 of SEQ ID NO: 317786
agauuuaaaccgcgccuua

SEQ ID NO: 512090 - RNA, 19 nt, Artificial Sequence
  Description of Artificial Sequence: Synthetic oligonucleotide
  Antisense strand to SEQ ID NO: 512089
uaaggcgcgguuuaaaucu

SEQ ID NO: 512091 - RNA, 19 nt, Artificial Sequence
  Description of Artificial Sequence: Synthetic oligonucleotide
  Sense strand starting at position 2602 of SEQ ID NO: 317786
ggaauuaaaucaucuuggu

SEQ ID NO: 512092 - RNA, 19 nt, Artificial Sequence
  Description of Artificial Sequence: Synthetic oligonucleotide
  Antisense strand to SEQ ID NO: 512091
accaagaugauuuaauucc

SEQ ID NO: 512093 - RNA, 19 nt, Artificial Sequence
  Description of Artificial Sequence: Synthetic oligonucleotide
  Sense strand starting at position 2644 of SEQ ID NO: 317786
gaccucaaagauugguuau

SEQ ID NO: 512094 - RNA, 19 nt, Artificial Sequence
  Description of Artificial Sequence: Synthetic oligonucleotide
  Antisense strand to SEQ ID NO: 512093
auaaccaaucuuugagguc

SEQ ID NO: 512095 - RNA, 19 nt, Artificial Sequence
  Description of Artificial Sequence: Synthetic oligonucleotide
  Sense strand starting at position 2646 of SEQ ID NO: 317786
ccucaaagauugguuauua

SEQ ID NO: 512096 - RNA, 19 nt, Artificial Sequence
  Description of Artificial Sequence: Synthetic oligonucleotide
  Antisense strand to SEQ ID NO: 512095
uaauaaccaaucuuugagg

SEQ ID NO: 512097 - RNA, 19 nt, Artificial Sequence
  Description of Artificial Sequence: Synthetic oligonucleotide
  Sense strand starting at position 2647 of SEQ ID NO: 317786
cucaaagauugguuauuaa

SEQ ID NO: 512098 - RNA, 19 nt, Artificial Sequence
  Description of Artificial Sequence: Synthetic oligonucleotide
  Antisense strand to SEQ ID NO: 512097
uuaauaaccaaucuuugag

SEQ ID NO: 512099 - RNA, 19 nt, Artificial Sequence
  Description of Artificial Sequence: Synthetic oligonucleotide
  Sense strand starting at position 2675 of SEQ ID NO: 317786
gaacauugacgaggugaua

SEQ ID NO: 512100 - RNA, 19 nt, Artificial Sequence
  Description of Artificial Sequence: Synthetic oligonucleotide
  Antisense strand to SEQ ID NO: 512099
uaucaccucgucaauguuc

SEQ ID NO: 512101 - RNA, 19 nt, Artificial Sequence
  Description of Artificial Sequence: Synthetic oligonucleotide
  Sense strand starting at position 2947 of SEQ ID NO: 317786
ugggcauuagagugaaaca

SEQ ID NO: 512102 - RNA, 19 nt, Artificial Sequence
  Description of Artificial Sequence: Synthetic oligonucleotide
  Antisense strand to SEQ ID NO: 512101
uguuucacucuaaugccca

SEQ ID NO: 512103 - RNA, 19 nt, Artificial Sequence
  Description of Artificial Sequence: Synthetic oligonucleotide
  Sense strand starting at position 3038 of SEQ ID NO: 317786
caagauugacccugacugu

SEQ ID NO: 512104 - RNA, 19 nt, Artificial Sequence
  Description of Artificial Sequence: Synthetic oligonucleotide
  Antisense strand to SEQ ID NO: 512103
acagucagggucaaucuug

SEQ ID NO: 512105 - RNA, 19 nt, Artificial Sequence
  Description of Artificial Sequence: Synthetic oligonucleotide
  Sense strand starting at position 3041 of SEQ ID NO: 317786
gauugacccugacuguuga

SEQ ID NO: 512106 - RNA, 19 nt, Artificial Sequence
  Description of Artificial Sequence: Synthetic oligonucleotide
  Antisense strand to SEQ ID NO: 512105
ucaacagucagggucaauc

SEQ ID NO: 512107 - RNA, 19 nt, Artificial Sequence
  Description of Artificial Sequence: Synthetic oligonucleotide
  Sense strand starting at position 3357 of SEQ ID NO: 317786
acgauaauucgauaggucu

SEQ ID NO: 512108 - RNA, 19 nt, Artificial Sequence
  Description of Artificial Sequence: Synthetic oligonucleotide
  Antisense strand to SEQ ID NO: 512107
agaccuaucgaauuaucgu

SEQ ID NO: 512109 - RNA, 19 nt, Artificial Sequence
  Description of Artificial Sequence: Synthetic oligonucleotide
  Sense strand starting at position 3360 of SEQ ID NO: 317786
auaauucgauaggucuaaa

SEQ ID NO: 512110 - RNA, 19 nt, Artificial Sequence
  Description of Artificial Sequence: Synthetic oligonucleotide
  Antisense strand to SEQ ID NO: 512109
uuuagaccuaucgaauuau

SEQ ID NO: 512111 - RNA, 19 nt, Artificial Sequence
  Description of Artificial Sequence: Synthetic oligonucleotide
  Sense strand starting at position 3363 of SEQ ID NO: 317786
auucgauaggucuaaagug

SEQ ID NO: 512112 - RNA, 19 nt, Artificial Sequence
  Description of Artificial Sequence: Synthetic oligonucleotide
  Antisense strand to SEQ ID NO: 512111
cacuuuagaccuaucgaau

SEQ ID NO: 512113 - RNA, 19 nt, Artificial Sequence
  Description of Artificial Sequence: Synthetic oligonucleotide
  Sense strand starting at position 3567 of SEQ ID NO: 317786
ccagaaaggagauguguga

SEQ ID NO: 512114 - RNA, 19 nt, Artificial Sequence
  Description of Artificial Sequence: Synthetic oligonucleotide
  Antisense strand to SEQ ID NO: 512113
ucacacaucuccuuucugg

SEQ ID NO: 512115 - RNA, 19 nt, Artificial Sequence
  Description of Artificial Sequence: Synthetic oligonucleotide
  Sense strand starting at position 3589 of SEQ ID NO: 317786
uucuuuguccucuaggaua

SEQ ID NO: 512116 - RNA, 19 nt, Artificial Sequence
  Description of Artificial Sequence: Synthetic oligonucleotide
  Antisense strand to SEQ ID NO: 512115
uauccuagaggacaaagaa

SEQ ID NO: 512117 - RNA, 19 nt, Artificial Sequence
  Description of Artificial Sequence: Synthetic oligonucleotide
  Sense strand starting at position 3623 of SEQ ID NO: 317786
ggaguuagcacagaaccuu

SEQ ID NO: 512118 - RNA, 19 nt, Artificial Sequence
  Description of Artificial Sequence: Synthetic oligonucleotide
  Antisense strand to SEQ ID NO: 512117
aagguucugugcuaacucc

SEQ ID NO: 512119 - RNA, 19 nt, Artificial Sequence
  Description of Artificial Sequence: Synthetic oligonucleotide
  Sense strand starting at position 3674 of SEQ ID NO: 317786
ggauuaagggaguguggga

SEQ ID NO: 512120 - RNA, 19 nt, Artificial Sequence
  Description of Artificial Sequence: Synthetic oligonucleotide
  Antisense strand to SEQ ID NO: 512119
ucccacacucccuuaaucc

SEQ ID NO: 512121 - RNA, 19 nt, Artificial Sequence
  Description of Artificial Sequence: Synthetic oligonucleotide
  Sense strand starting at position 3707 of SEQ ID NO: 317786
cuuugacgacuacaguaua

SEQ ID NO: 512122 - RNA, 19 nt, Artificial Sequence
  Description of Artificial Sequence: Synthetic oligonucleotide
  Antisense strand to SEQ ID NO: 512121
uauacuguagucgucaaag

SEQ ID NO: 512123 - RNA, 19 nt, Artificial Sequence
  Description of Artificial Sequence: Synthetic oligonucleotide
  Sense strand starting at position 3710 of SEQ ID NO: 317786
ugacgacuacaguauaauc

SEQ ID NO: 512124 - RNA, 19 nt, Artificial Sequence
  Description of Artificial Sequence: Synthetic oligonucleotide
  Antisense strand to SEQ ID NO: 512123
gauuauacuguagucguca

SEQ ID NO: 512125 - RNA, 19 nt, Artificial Sequence
  Description of Artificial Sequence: Synthetic oligonucleotide
  Sense strand starting at position 3727 of SEQ ID NO: 317786
ucacacuuugugggaaauu

SEQ ID NO: 512126 - RNA, 19 nt, Artificial Sequence
  Description of Artificial Sequence: Synthetic oligonucleotide
  Antisense strand to SEQ ID NO: 512125
aauuucccacaaaguguga

SEQ ID NO: 512127 - RNA, 19 nt, Artificial Sequence
  Description of Artificial Sequence: Synthetic oligonucleotide
  Sense strand starting at position 3919 of SEQ ID NO: 317786
augucaggugauggaaaua

SEQ ID NO: 512128 - RNA, 19 nt, Artificial Sequence
  Description of Artificial Sequence: Synthetic oligonucleotide
  Antisense strand to SEQ ID NO: 512127
uauuuccaucaccugacau

SEQ ID NO: 512129 - RNA, 19 nt, Artificial Sequence
  Description of Artificial Sequence: Synthetic oligonucleotide
  Sense strand starting at position 3945 of SEQ ID NO: 317786
aucugagcacucugacaaa

SEQ ID NO: 512130 - RNA, 19 nt, Artificial Sequence
  Description of Artificial Sequence: Synthetic oligonucleotide
  Antisense strand to SEQ ID NO: 512129
uuugucagagugcucagau

SEQ ID NO: 512131 - RNA, 19 nt, Artificial Sequence
  Description of Artificial Sequence: Synthetic oligonucleotide
  Sense strand starting at position 353 of SEQ ID NO: 317787
uggugucugguacauaaga

SEQ ID NO: 512132 - RNA, 19 nt, Artificial Sequence
  Description of Artificial Sequence: Synthetic oligonucleotide
  Antisense strand to SEQ ID NO: 512131
ucuuauguaccagacacca

SEQ ID NO: 512133 - RNA, 19 nt, Artificial Sequence
  Description of Artificial Sequence: Synthetic oligonucleotide
  Sense strand starting at position 440 of SEQ ID NO: 317787
uaagcagugcaagguaaau

SEQ ID NO: 512134 - RNA, 19 nt, Artificial Sequence
  Description of Artificial Sequence: Synthetic oligonucleotide
  Antisense strand to SEQ ID NO: 512133
auuuaccuugcacugcuua

SEQ ID NO: 512135 - RNA, 19 nt, Artificial Sequence
  Description of Artificial Sequence: Synthetic oligonucleotide
  Sense strand starting at position 620 of SEQ ID NO: 317787
cccagucuugaguaaggca

SEQ ID NO: 512136 - RNA, 19 nt, Artificial Sequence
  Description of Artificial Sequence: Synthetic oligonucleotide
  Antisense strand to SEQ ID NO: 512135
ugccuuacucaagacuggg

SEQ ID NO: 512137 - RNA, 19 nt, Artificial Sequence
  Description of Artificial Sequence: Synthetic oligonucleotide
  Sense strand starting at position 674 of SEQ ID NO: 317787
acuugcugcuaaguguaau

SEQ ID NO: 512138 - RNA, 19 nt, Artificial Sequence
  Description of Artificial Sequence: Synthetic oligonucleotide
  Antisense strand to SEQ ID NO: 512137
auuacacuuagcagcaagu

SEQ ID NO: 512139 - RNA, 19 nt, Artificial Sequence
  Description of Artificial Sequence: Synthetic oligonucleotide
  Sense strand starting at position 677 of SEQ ID NO: 317787
ugcugcuaaguguaauagu

SEQ ID NO: 512140 - RNA, 19 nt, Artificial Sequence
  Description of Artificial Sequence: Synthetic oligonucleotide
  Antisense strand to SEQ ID NO: 512139
acuauuacacuuagcagca

SEQ ID NO: 512141 - RNA, 19 nt, Artificial Sequence
  Description of Artificial Sequence: Synthetic oligonucleotide
  Sense strand starting at position 692 of SEQ ID NO: 317787
uagugaagauuacuugcau

SEQ ID NO: 512142 - RNA, 19 nt, Artificial Sequence
  Description of Artificial Sequence: Synthetic oligonucleotide
  Antisense strand to SEQ ID NO: 512141
augcaaguaaucuucacua

SEQ ID NO: 512143 - RNA, 19 nt, Artificial Sequence
  Description of Artificial Sequence: Synthetic oligonucleotide
  Sense strand starting at position 693 of SEQ ID NO: 317787
agugaagauuacuugcauu

SEQ ID NO: 512144 - RNA, 19 nt, Artificial Sequence
  Description of Artificial Sequence: Synthetic oligonucleotide
  Antisense strand to SEQ ID NO: 512143
aaugcaaguaaucuucacu

SEQ ID NO: 512145 - RNA, 19 nt, Artificial Sequence
  Description of Artificial Sequence: Synthetic oligonucleotide
  Sense strand starting at position 775 of SEQ ID NO: 317787
acacgaacgcauuguuuaa

SEQ ID NO: 512146 - RNA, 19 nt, Artificial Sequence
  Description of Artificial Sequence: Synthetic oligonucleotide
  Antisense strand to SEQ ID NO: 512145
uuaaacaaugcguucgugu

SEQ ID NO: 512147 - RNA, 19 nt, Artificial Sequence
  Description of Artificial Sequence: Synthetic oligonucleotide
  Sense strand starting at position 838 of SEQ ID NO: 317787
ugugaugcuagcugagacu

SEQ ID NO: 512148 - RNA, 19 nt, Artificial Sequence
  Description of Artificial Sequence: Synthetic oligonucleotide
  Antisense strand to SEQ ID NO: 512147
agucucagcuagcaucaca

SEQ ID NO: 512149 - RNA, 19 nt, Artificial Sequence
  Description of Artificial Sequence: Synthetic oligonucleotide
  Sense strand starting at position 963 of SEQ ID NO: 317787
gugguagugguggagacuu

SEQ ID NO: 512150 - RNA, 19 nt, Artificial Sequence
  Description of Artificial Sequence: Synthetic oligonucleotide
  Antisense strand to SEQ ID NO: 512149
aagucuccaccacuaccac

SEQ ID NO: 512151 - RNA, 19 nt, Artificial Sequence
  Description of Artificial Sequence: Synthetic oligonucleotide
  Sense strand starting at position 965 of SEQ ID NO: 317787
gguagugguggagacuuaa

SEQ ID NO: 512152 - RNA, 19 nt, Artificial Sequence
  Description of Artificial Sequence: Synthetic oligonucleotide
  Antisense strand to SEQ ID NO: 512151
uuaagucuccaccacuacc

SEQ ID NO: 512153 - RNA, 19 nt, Artificial Sequence
  Description of Artificial Sequence: Synthetic oligonucleotide
  Sense strand starting at position 998 of SEQ ID NO: 317787
gucuuccugaaguggaaau

SEQ ID NO: 512154 - RNA, 19 nt, Artificial Sequence
  Description of Artificial Sequence: Synthetic oligonucleotide
  Antisense strand to SEQ ID NO: 512153
auuuccacuucaggaagac

SEQ ID NO: 512155 - RNA, 19 nt, Artificial Sequence
  Description of Artificial Sequence: Synthetic oligonucleotide
  Sense strand starting at position 1012 of SEQ ID NO: 317787
gaaauauagcgccgucaac

SEQ ID NO: 512156 - RNA, 19 nt, Artificial Sequence
  Description of Artificial Sequence: Synthetic oligonucleotide
  Antisense strand to SEQ ID NO: 512155
guugacggcgcuauauuuc

SEQ ID NO: 512157 - RNA, 19 nt, Artificial Sequence
  Description of Artificial Sequence: Synthetic oligonucleotide
  Sense strand starting at position 1059 of SEQ ID NO: 317787
uucccuuucuguuuaagga

SEQ ID NO: 512158 - RNA, 19 nt, Artificial Sequence
  Description of Artificial Sequence: Synthetic oligonucleotide
  Antisense strand to SEQ ID NO: 512157
uccuuaaacagaaagggaa

SEQ ID NO: 512159 - RNA, 19 nt, Artificial Sequence
  Description of Artificial Sequence: Synthetic oligonucleotide
  Sense strand starting at position 1060 of SEQ ID NO: 317787
ucccuuucuguuuaaggaa

SEQ ID NO: 512160 - RNA, 19 nt, Artificial Sequence
  Description of Artificial Sequence: Synthetic oligonucleotide
  Antisense strand to SEQ ID NO: 512159
uuccuuaaacagaaaggga

SEQ ID NO: 512161 - RNA, 19 nt, Artificial Sequence
  Description of Artificial Sequence: Synthetic oligonucleotide
  Sense strand starting at position 2734 of SEQ ID NO: 317787
cggccugcugcucugugaa

SEQ ID NO: 512162 - RNA, 19 nt, Artificial Sequence
  Description of Artificial Sequence: Synthetic oligonucleotide
  Antisense strand to SEQ ID NO: 512161
uucacagagcagcaggccg

SEQ ID NO: 512163 - RNA, 19 nt, Artificial Sequence
  Description of Artificial Sequence: Synthetic oligonucleotide
  Sense strand starting at position 2770 of SEQ ID NO: 317787
aguuguuaaacugagaagu

SEQ ID NO: 512164 - RNA, 19 nt, Artificial Sequence
  Description of Artificial Sequence: Synthetic oligonucleotide
  Antisense strand to SEQ ID NO: 512163
acuucucaguuuaacaacu

SEQ ID NO: 512165 - RNA, 19 nt, Artificial Sequence
  Description of Artificial Sequence: Synthetic oligonucleotide
  Sense strand starting at position 3005 of SEQ ID NO: 317787
ggaaacucaggcugagagu

SEQ ID NO: 512166 - RNA, 19 nt, Artificial Sequence
  Description of Artificial Sequence: Synthetic oligonucleotide
  Antisense strand to SEQ ID NO: 512165
acucucagccugaguuucc

SEQ ID NO: 512167 - RNA, 19 nt, Artificial Sequence
  Description of Artificial Sequence: Synthetic oligonucleotide
  Sense strand starting at position 3039 of SEQ ID NO: 317787
guaguugcauuguuccaau

SEQ ID NO: 512168 - RNA, 19 nt, Artificial Sequence
  Description of Artificial Sequence: Synthetic oligonucleotide
  Antisense strand to SEQ ID NO: 512167
auuggaacaaugcaacuac

SEQ ID NO: 512169 - RNA, 19 nt, Artificial Sequence
  Description of Artificial Sequence: Synthetic oligonucleotide
  Sense strand starting at position 3113 of SEQ ID NO: 317787
cugucuugacuugauccua

SEQ ID NO: 512170 - RNA, 19 nt, Artificial Sequence
  Description of Artificial Sequence: Synthetic oligonucleotide
  Antisense strand to SEQ ID NO: 512169
uaggaucaagucaagacag

SEQ ID NO: 512171 - RNA, 19 nt, Artificial Sequence
  Description of Artificial Sequence: Synthetic oligonucleotide
  Sense strand starting at position 3156 of SEQ ID NO: 317787
guccaaaugccucaugaaa

SEQ ID NO: 512172 - RNA, 19 nt, Artificial Sequence
  Description of Artificial Sequence: Synthetic oligonucleotide
  Antisense strand to SEQ ID NO: 512171
uuucaugaggcauuuggac

SEQ ID NO: 512173 - RNA, 19 nt, Artificial Sequence
  Description of Artificial Sequence: Synthetic oligonucleotide
  Sense strand starting at position 3176 of SEQ ID NO: 317787
gcuggagaguuugcuucau

SEQ ID NO: 512174 - RNA, 19 nt, Artificial Sequence
  Description of Artificial Sequence: Synthetic oligonucleotide
  Antisense strand to SEQ ID NO: 512173
augaagcaaacucuccagc

SEQ ID NO: 512175 - RNA, 19 nt, Artificial Sequence
  Description of Artificial Sequence: Synthetic oligonucleotide
  Sense strand starting at position 3270 of SEQ ID NO: 317787
gguugaucuuugagggcag

SEQ ID NO: 512176 - RNA, 19 nt, Artificial Sequence
  Description of Artificial Sequence: Synthetic oligonucleotide
  Antisense strand to SEQ ID NO: 512175
cugcccucaaagaucaacc

SEQ ID NO: 512177 - RNA, 19 nt, Artificial Sequence
  Description of Artificial Sequence: Synthetic oligonucleotide
  Sense strand starting at position 3274 of SEQ ID NO: 317787
gaucuuugagggcagcaga

SEQ ID NO: 512178 - RNA, 19 nt, Artificial Sequence
  Description of Artificial Sequence: Synthetic oligonucleotide
  Antisense strand to SEQ ID NO: 512177
ucugcugcccucaaagauc

SEQ ID NO: 512179 - RNA, 19 nt, Artificial Sequence
  Description of Artificial Sequence: Synthetic oligonucleotide
  Sense strand starting at position 3308 of SEQ ID NO: 317787
gcagaagugauauaagcuu

SEQ ID NO: 512180 - RNA, 19 nt, Artificial Sequence
  Description of Artificial Sequence: Synthetic oligonucleotide
  Antisense strand to SEQ ID NO: 512179
aagcuuauaucacuucugc

SEQ ID NO: 512181 - RNA, 19 nt, Artificial Sequence
  Description of Artificial Sequence: Synthetic oligonucleotide
  Sense strand starting at position 3327 of SEQ ID NO: 317787
uagcuucucccguaagaau

SEQ ID NO: 512182 - RNA, 19 nt, Artificial Sequence
  Description of Artificial Sequence: Synthetic oligonucleotide
  Antisense strand to SEQ ID NO: 512181
auucuuacgggagaagcua

SEQ ID NO: 512183 - RNA, 19 nt, Artificial Sequence
  Description of Artificial Sequence: Synthetic oligonucleotide
  Sense strand starting at position 3387 of SEQ ID NO: 317787
uuuguucagggugguaaua

SEQ ID NO: 512184 - RNA, 19 nt, Artificial Sequence
  Description of Artificial Sequence: Synthetic oligonucleotide
  Antisense strand to SEQ ID NO: 512183
uauuaccacccugaacaaa

SEQ ID NO: 512185 - RNA, 19 nt, Artificial Sequence
  Description of Artificial Sequence: Synthetic oligonucleotide
  Sense strand starting at position 3396 of SEQ ID NO: 317787
ggugguaauaauuaugcau

SEQ ID NO: 512186 - RNA, 19 nt, Artificial Sequence
  Description of Artificial Sequence: Synthetic oligonucleotide
  Antisense strand to SEQ ID NO: 512185
augcauaauuauuaccacc

SEQ ID NO: 512187 - RNA, 19 nt, Artificial Sequence
  Description of Artificial Sequence: Synthetic oligonucleotide
  Sense strand starting at position 3399 of SEQ ID NO: 317787
gguaauaauuaugcaugaa

SEQ ID NO: 512188 - RNA, 19 nt, Artificial Sequence
  Description of Artificial Sequence: Synthetic oligonucleotide
  Antisense strand to SEQ ID NO: 512187
uucaugcauaauuauuacc

SEQ ID NO: 512189 - RNA, 19 nt, Artificial Sequence
  Description of Artificial Sequence: Synthetic oligonucleotide
  Sense strand starting at position 3430 of SEQ ID NO: 317787
cuguaaugaugauugacuu

SEQ ID NO: 512190 - RNA, 19 nt, Artificial Sequence
  Description of Artificial Sequence: Synthetic oligonucleotide
  Antisense strand to SEQ ID NO: 512189
aagucaaucaucauuacag

SEQ ID NO: 512191 - RNA, 19 nt, Artificial Sequence
  Description of Artificial Sequence: Synthetic oligonucleotide
  Sense strand starting at position 3438 of SEQ ID NO: 317787
augauugacuucucuugca

SEQ ID NO: 512192 - RNA, 19 nt, Artificial Sequence
  Description of Artificial Sequence: Synthetic oligonucleotide
  Antisense strand to SEQ ID NO: 512191
ugcaagagaagucaaucau

SEQ ID NO: 512193 - RNA, 19 nt, Artificial Sequence
  Description of Artificial Sequence: Synthetic oligonucleotide
  Sense strand starting at position 3476 of SEQ ID NO: 317787
cagguacauccagguuuau

SEQ ID NO: 512194 - RNA, 19 nt, Artificial Sequence
  Description of Artificial Sequence: Synthetic oligonucleotide
  Antisense strand to SEQ ID NO: 512193
auaaaccuggauguaccug

SEQ ID NO: 512195 - RNA, 19 nt, Artificial Sequence
  Description of Artificial Sequence: Synthetic oligonucleotide
  Sense strand starting at position 3487 of SEQ ID NO: 317787
agguuuaucucuuugcucu

SEQ ID NO: 512196 - RNA, 19 nt, Artificial Sequence
  Description of Artificial Sequence: Synthetic oligonucleotide
  Antisense strand to SEQ ID NO: 512195
agagcaaagagauaaaccu

SEQ ID NO: 512197 - RNA, 19 nt, Artificial Sequence
  Description of Artificial Sequence: Synthetic oligonucleotide
  Sense strand starting at position 3629 of SEQ ID NO: 317787
ggaggaugguauucagcca

SEQ ID NO: 512198 - RNA, 19 nt, Artificial Sequence
  Description of Artificial Sequence: Synthetic oligonucleotide
  Antisense strand to SEQ ID NO: 512197
uggcugaauaccauccucc

SEQ ID NO: 512199 - RNA, 19 nt, Artificial Sequence
  Description of Artificial Sequence: Synthetic oligonucleotide
  Sense strand starting at position 3701 of SEQ ID NO: 317787
uucugaggccuugaagauu

SEQ ID NO: 512200 - RNA, 19 nt, Artificial Sequence
  Description of Artificial Sequence: Synthetic oligonucleotide
  Antisense strand to SEQ ID NO: 512199
aaucuucaaggccucagaa

SEQ ID NO: 512201 - RNA, 19 nt, Artificial Sequence
  Description of Artificial Sequence: Synthetic oligonucleotide
  Sense strand starting at position 3733 of SEQ ID NO: 317787
gagaaaugguagucugugu

SEQ ID NO: 512202 - RNA, 19 nt, Artificial Sequence
  Description of Artificial Sequence: Synthetic oligonucleotide
  Antisense strand to SEQ ID NO: 512201
acacagacuaccauuucuc

SEQ ID NO: 512203 - RNA, 19 nt, Artificial Sequence
  Description of Artificial Sequence: Synthetic oligonucleotide
  Sense strand starting at position 3802 of SEQ ID NO: 317787
guuauauuguuccugugac

SEQ ID NO: 512204 - RNA, 19 nt, Artificial Sequence
  Description of Artificial Sequence: Synthetic oligonucleotide
  Antisense strand to SEQ ID NO: 512203
gucacaggaacaauauaac

SEQ ID NO: 512205 - RNA, 19 nt, Artificial Sequence
  Description of Artificial Sequence: Synthetic oligonucleotide
  Sense strand starting at position 3810 of SEQ ID NO: 317787
guuccugugacagguuaag

SEQ ID NO: 512206 - RNA, 19 nt, Artificial Sequence
  Description of Artificial Sequence: Synthetic oligonucleotide
  Antisense strand to SEQ ID NO: 512205
cuuaaccugucacaggaac

SEQ ID NO: 512207 - RNA, 19 nt, Artificial Sequence
  Description of Artificial Sequence: Synthetic oligonucleotide
  Sense strand starting at position 3933 of SEQ ID NO: 317787
uuguucucuugacuagcua

SEQ ID NO: 512208 - RNA, 19 nt, Artificial Sequence
  Description of Artificial Sequence: Synthetic oligonucleotide
  Antisense strand to SEQ ID NO: 512207
uagcuagucaagagaacaa

SEQ ID NO: 512209 - RNA, 19 nt, Artificial Sequence
  Description of Artificial Sequence: Synthetic oligonucleotide
  Sense strand starting at position 3934 of SEQ ID NO: 317787
uguucucuugacuagcuaa

SEQ ID NO: 512210 - RNA, 19 nt, Artificial Sequence
  Description of Artificial Sequence: Synthetic oligonucleotide
  Antisense strand to SEQ ID NO: 512209
uuagcuagucaagagaaca

SEQ ID NO: 512211 - RNA, 19 nt, Artificial Sequence
  Description of Artificial Sequence: Synthetic oligonucleotide
  Sense strand starting at position 156 of SEQ ID NO: 317788
guaccaaagucuccuaaua

SEQ ID NO: 512212 - RNA, 19 nt, Artificial Sequence
  Description of Artificial Sequence: Synthetic oligonucleotide
  Antisense strand to SEQ ID NO: 512211
uauuaggagacuuugguac

SEQ ID NO: 512213 - RNA, 19 nt, Artificial Sequence
  Description of Artificial Sequence: Synthetic oligonucleotide
  Sense strand starting at position 316 of SEQ ID NO: 317788
aaaggcuguuaugaauuua

SEQ ID NO: 512214 - RNA, 19 nt, Artificial Sequence
  Description of Artificial Sequence: Synthetic oligonucleotide
  Antisense strand to SEQ ID NO: 512213
uaaauucauaacagccuuu

SEQ ID NO: 512215 - RNA, 19 nt, Artificial Sequence
  Description of Artificial Sequence: Synthetic oligonucleotide
  Sense strand starting at position 404 of SEQ ID NO: 317788
uugcgacaucaauaauaag

SEQ ID NO: 512216 - RNA, 19 nt, Artificial Sequence
  Description of Artificial Sequence: Synthetic oligonucleotide
  Antisense strand to SEQ ID NO: 512215
cuuauuauugaugucgcaa

SEQ ID NO: 512217 - RNA, 19 nt, Artificial Sequence
  Description of Artificial Sequence: Synthetic oligonucleotide
  Sense strand starting at position 488 of SEQ ID NO: 317788
gugcuuaaugaauaucugu

SEQ ID NO: 512218 - RNA, 19 nt, Artificial Sequence
  Description of Artificial Sequence: Synthetic oligonucleotide
  Antisense strand to SEQ ID NO: 512217
acagauauucauuaagcac

SEQ ID NO: 512219 - RNA, 19 nt, Artificial Sequence
  Description of Artificial Sequence: Synthetic oligonucleotide
  Sense strand starting at position 498 of SEQ ID NO: 317788
aauaucuguugaguaaaug

SEQ ID NO: 512220 - RNA, 19 nt, Artificial Sequence
  Description of Artificial Sequence: Synthetic oligonucleotide
  Antisense strand to SEQ ID NO: 512219
cauuuacucaacagauauu

SEQ ID NO: 512221 - RNA, 19 nt, Artificial Sequence
  Description of Artificial Sequence: Synthetic oligonucleotide
  Sense strand starting at position 820 of SEQ ID NO: 317788
agaguaagaacggacuguu

SEQ ID NO: 512222 - RNA, 19 nt, Artificial Sequence
  Description of Artificial Sequence: Synthetic oligonucleotide
  Antisense strand to SEQ ID NO: 512221
aacaguccguucuuacucu

SEQ ID NO: 512223 - RNA, 19 nt, Artificial Sequence
  Description of Artificial Sequence: Synthetic oligonucleotide
  Sense strand starting at position 823 of SEQ ID NO: 317788
guaagaacggacuguucau

SEQ ID NO: 512224 - RNA, 19 nt, Artificial Sequence
  Description of Artificial Sequence: Synthetic oligonucleotide
  Antisense strand to SEQ ID NO: 512223
augaacaguccguucuuac

SEQ ID NO: 512225 - RNA, 19 nt, Artificial Sequence
  Description of Artificial Sequence: Synthetic oligonucleotide
  Sense strand starting at position 845 of SEQ ID NO: 317788
caguauguuaugugggaca

SEQ ID NO: 512226 - RNA, 19 nt, Artificial Sequence
  Description of Artificial Sequence: Synthetic oligonucleotide
  Antisense strand to SEQ ID NO: 512225
ugucccacauaacauacug

SEQ ID NO: 512227 - RNA, 19 nt, Artificial Sequence
  Description of Artificial Sequence: Synthetic oligonucleotide
  Sense strand starting at position 847 of SEQ ID NO: 317788
guauguuaugugggacaaa

SEQ ID NO: 512228 - RNA, 19 nt, Artificial Sequence
  Description of Artificial Sequence: Synthetic oligonucleotide
  Antisense strand to SEQ ID NO: 512227
uuugucccacauaacauac

SEQ ID NO: 512229 - RNA, 19 nt, Artificial Sequence
  Description of Artificial Sequence: Synthetic oligonucleotide
  Sense strand starting at position 927 of SEQ ID NO: 317788
caaggaguaugugccuaaa

SEQ ID NO: 512230 - RNA, 19 nt, Artificial Sequence
  Description of Artificial Sequence: Synthetic oligonucleotide
  Antisense strand to SEQ ID NO: 512229
uuuaggcacauacuccuug

SEQ ID NO: 512231 - RNA, 19 nt, Artificial Sequence
  Description of Artificial Sequence: Synthetic oligonucleotide
  Sense strand starting at position 929 of SEQ ID NO: 317788
aggaguaugugccuaaauu

SEQ ID NO: 512232 - RNA, 19 nt, Artificial Sequence
  Description of Artificial Sequence: Synthetic oligonucleotide
  Antisense strand to SEQ ID NO: 512231
aauuuaggcacauacuccu

SEQ ID NO: 512233 - RNA, 19 nt, Artificial Sequence
  Description of Artificial Sequence: Synthetic oligonucleotide
  Sense strand starting at position 951 of SEQ ID NO: 317788
cuagaugugagauaagcuu

SEQ ID NO: 512234 - RNA, 19 nt, Artificial Sequence
  Description of Artificial Sequence: Synthetic oligonucleotide
  Antisense strand to SEQ ID NO: 512233
aagcuuaucucacaucuag

SEQ ID NO: 512235 - RNA, 19 nt, Artificial Sequence
  Description of Artificial Sequence: Synthetic oligonucleotide
  Sense strand starting at position 958 of SEQ ID NO: 317788
ugagauaagcuuugucuga

SEQ ID NO: 512236 - RNA, 19 nt, Artificial Sequence
  Description of Artificial Sequence: Synthetic oligonucleotide
  Antisense strand to SEQ ID NO: 512235
ucagacaaagcuuaucuca

SEQ ID NO: 512237 - RNA, 19 nt, Artificial Sequence
  Description of Artificial Sequence: Synthetic oligonucleotide
  Sense strand starting at position 959 of SEQ ID NO: 317788
gagauaagcuuugucugau

SEQ ID NO: 512238 - RNA, 19 nt, Artificial Sequence
  Description of Artificial Sequence: Synthetic oligonucleotide
  Antisense strand to SEQ ID NO: 512237
aucagacaaagcuuaucuc

SEQ ID NO: 512239 - RNA, 19 nt, Artificial Sequence
  Description of Artificial Sequence: Synthetic oligonucleotide
  Sense strand starting at position 960 of SEQ ID NO: 317788
agauaagcuuugucugaua

SEQ ID NO: 512240 - RNA, 19 nt, Artificial Sequence
  Description of Artificial Sequence: Synthetic oligonucleotide
  Antisense strand to SEQ ID NO: 512239
uaucagacaaagcuuaucu

SEQ ID NO: 512241 - RNA, 19 nt, Artificial Sequence
  Description of Artificial Sequence: Synthetic oligonucleotide
  Sense strand starting at position 962 of SEQ ID NO: 317788
auaagcuuugucugauauu

SEQ ID NO: 512242 - RNA, 19 nt, Artificial Sequence
  Description of Artificial Sequence: Synthetic oligonucleotide
  Antisense strand to SEQ ID NO: 512241
aauaucagacaaagcuuau

SEQ ID NO: 512243 - RNA, 19 nt, Artificial Sequence
  Description of Artificial Sequence: Synthetic oligonucleotide
  Sense strand starting at position 1003 of SEQ ID NO: 317788
auacuuuacugagcacgua

SEQ ID NO: 512244 - RNA, 19 nt, Artificial Sequence
  Description of Artificial Sequence: Synthetic oligonucleotide
  Antisense strand to SEQ ID NO: 512243
uacgugcucaguaaaguau

SEQ ID NO: 512245 - RNA, 19 nt, Artificial Sequence
  Description of Artificial Sequence: Synthetic oligonucleotide
  Sense strand starting at position 1188 of SEQ ID NO: 317788
gcuguuaaugcggcaucaa

SEQ ID NO: 512246 - RNA, 19 nt, Artificial Sequence
  Description of Artificial Sequence: Synthetic oligonucleotide
  Antisense strand to SEQ ID NO: 512245
uugaugccgcauuaacagc

SEQ ID NO: 512247 - RNA, 19 nt, Artificial Sequence
  Description of Artificial Sequence: Synthetic oligonucleotide
  Sense strand starting at position 1189 of SEQ ID NO: 317788
cuguuaaugcggcaucaag

SEQ ID NO: 512248 - RNA, 19 nt, Artificial Sequence
  Description of Artificial Sequence: Synthetic oligonucleotide
  Antisense strand to SEQ ID NO: 512247
cuugaugccgcauuaacag

SEQ ID NO: 512249 - RNA, 19 nt, Artificial Sequence
  Description of Artificial Sequence: Synthetic oligonucleotide
  Sense strand starting at position 1480 of SEQ ID NO: 317788
ccgacuuccagacgugaaa

SEQ ID NO: 512250 - RNA, 19 nt, Artificial Sequence
  Description of Artificial Sequence: Synthetic oligonucleotide
  Antisense strand to SEQ ID NO: 512249
uuucacgucuggaagucgg

SEQ ID NO: 512251 - RNA, 19 nt, Artificial Sequence
  Description of Artificial Sequence: Synthetic oligonucleotide
  Sense strand starting at position 2240 of SEQ ID NO: 317788
ccgaaagauggcgaccaaa

SEQ ID NO: 512252 - RNA, 19 nt, Artificial Sequence
  Description of Artificial Sequence: Synthetic oligonucleotide
  Antisense strand to SEQ ID NO: 512251
uuuggucgccaucuuucgg

SEQ ID NO: 512253 - RNA, 19 nt, Artificial Sequence
  Description of Artificial Sequence: Synthetic oligonucleotide
  Sense strand starting at position 2481 of SEQ ID NO: 317788
gucauuaacugguuuaagg

SEQ ID NO: 512254 - RNA, 19 nt, Artificial Sequence
  Description of Artificial Sequence: Synthetic oligonucleotide
  Antisense strand to SEQ ID NO: 512253
ccuuaaaccaguuaaugac

SEQ ID NO: 512255 - RNA, 19 nt, Artificial Sequence
  Description of Artificial Sequence: Synthetic oligonucleotide
  Sense strand starting at position 2490 of SEQ ID NO: 317788
ugguuuaaggcuggcuaaa

SEQ ID NO: 512256 - RNA, 19 nt, Artificial Sequence
  Description of Artificial Sequence: Synthetic oligonucleotide
  Antisense strand to SEQ ID NO: 512255
uuuagccagccuuaaacca

SEQ ID NO: 512257 - RNA, 19 nt, Artificial Sequence
  Description of Artificial Sequence: Synthetic oligonucleotide
  Sense strand starting at position 2514 of SEQ ID NO: 317788
ugguuugaaaugcgugaaa

SEQ ID NO: 512258 - RNA, 19 nt, Artificial Sequence
  Description of Artificial Sequence: Synthetic oligonucleotide
  Antisense strand to SEQ ID NO: 512257
uuucacgcauuucaaacca

SEQ ID NO: 512259 - RNA, 19 nt, Artificial Sequence
  Description of Artificial Sequence: Synthetic oligonucleotide
  Sense strand starting at position 2547 of SEQ ID NO: 317788
agacuucugugauuccuuu

SEQ ID NO: 512260 - RNA, 19 nt, Artificial Sequence
  Description of Artificial Sequence: Synthetic oligonucleotide
  Antisense strand to SEQ ID NO: 512259
aaaggaaucacagaagucu

SEQ ID NO: 512261 - RNA, 19 nt, Artificial Sequence
  Description of Artificial Sequence: Synthetic oligonucleotide
  Sense strand starting at position 2599 of SEQ ID NO: 317788
acaugagugcccuaucuag

SEQ ID NO: 512262 - RNA, 19 nt, Artificial Sequence
  Description of Artificial Sequence: Synthetic oligonucleotide
  Antisense strand to SEQ ID NO: 512261
cuagauagggcacucaugu

SEQ ID NO: 512263 - RNA, 19 nt, Artificial Sequence
  Description of Artificial Sequence: Synthetic oligonucleotide
  Sense strand starting at position 2674 of SEQ ID NO: 317788
cguaaugccacugaaguaa

SEQ ID NO: 512264 - RNA, 19 nt, Artificial Sequence
  Description of Artificial Sequence: Synthetic oligonucleotide
  Antisense strand to SEQ ID NO: 512263
uuacuucaguggcauuacg

SEQ ID NO: 512265 - RNA, 19 nt, Artificial Sequence
  Description of Artificial Sequence: Synthetic oligonucleotide
  Sense strand starting at position 2698 of SEQ ID NO: 317788
cgaaccuguaaguaaugua

SEQ ID NO: 512266 - RNA, 19 nt, Artificial Sequence
  Description of Artificial Sequence: Synthetic oligonucleotide
  Antisense strand to SEQ ID NO: 512265
uacauuacuuacagguucg

SEQ ID NO: 512267 - RNA, 19 nt, Artificial Sequence
  Description of Artificial Sequence: Synthetic oligonucleotide
  Sense strand starting at position 2732 of SEQ ID NO: 317788
uagguugauggcgaggauu

SEQ ID NO: 512268 - RNA, 19 nt, Artificial Sequence
  Description of Artificial Sequence: Synthetic oligonucleotide
  Antisense strand to SEQ ID NO: 512267
aauccucgccaucaaccua

SEQ ID NO: 512269 - RNA, 19 nt, Artificial Sequence
  Description of Artificial Sequence: Synthetic oligonucleotide
  Sense strand starting at position 2815 of SEQ ID NO: 317788
ucaaucugucaagaaagcu

SEQ ID NO: 512270 - RNA, 19 nt, Artificial Sequence
  Description of Artificial Sequence: Synthetic oligonucleotide
  Antisense strand to SEQ ID NO: 512269
agcuuucuugacagauuga

SEQ ID NO: 512271 - RNA, 19 nt, Artificial Sequence
  Description of Artificial Sequence: Synthetic oligonucleotide
  Sense strand starting at position 2824 of SEQ ID NO: 317788
caagaaagcuuguugguug

SEQ ID NO: 512272 - RNA, 19 nt, Artificial Sequence
  Description of Artificial Sequence: Synthetic oligonucleotide
  Antisense strand to SEQ ID NO: 512271
caaccaacaagcuuucuug

SEQ ID NO: 512273 - RNA, 19 nt, Artificial Sequence
  Description of Artificial Sequence: Synthetic oligonucleotide
  Sense strand starting at position 2919 of SEQ ID NO: 317788
guguguuggcguguaccua

SEQ ID NO: 512274 - RNA, 19 nt, Artificial Sequence
  Description of Artificial Sequence: Synthetic oligonucleotide
  Antisense strand to SEQ ID NO: 512273
uagguacacgccaacacac

SEQ ID NO: 512275 - RNA, 19 nt, Artificial Sequence
  Description of Artificial Sequence: Synthetic oligonucleotide
  Sense strand starting at position 3432 of SEQ ID NO: 317788
aucugauauguuuagcuuu

SEQ ID NO: 512276 - RNA, 19 nt, Artificial Sequence
  Description of Artificial Sequence: Synthetic oligonucleotide
  Antisense strand to SEQ ID NO: 512275
aaagcuaaacauaucagau

SEQ ID NO: 512277 - RNA, 19 nt, Artificial Sequence
  Description of Artificial Sequence: Synthetic oligonucleotide
  Sense strand starting at position 3455 of SEQ ID NO: 317788
gucugccuucccuaguaga

SEQ ID NO: 512278 - RNA, 19 nt, Artificial Sequence
  Description of Artificial Sequence: Synthetic oligonucleotide
  Antisense strand to SEQ ID NO: 512277
ucuacuagggaaggcagac

SEQ ID NO: 512279 - RNA, 19 nt, Artificial Sequence
  Description of Artificial Sequence: Synthetic oligonucleotide
  Sense strand starting at position 3766 of SEQ ID NO: 317788
agaauaacaugauagagua

SEQ ID NO: 512280 - RNA, 19 nt, Artificial Sequence
  Description of Artificial Sequence: Synthetic oligonucleotide
  Antisense strand to SEQ ID NO: 512279
uacucuaucauguuauucu

SEQ ID NO: 512281 - RNA, 19 nt, Artificial Sequence
  Description of Artificial Sequence: Synthetic oligonucleotide
  Sense strand starting at position 3784 of SEQ ID NO: 317788
agaggaagguuacauaaag

SEQ ID NO: 512282 - RNA, 19 nt, Artificial Sequence
  Description of Artificial Sequence: Synthetic oligonucleotide
  Antisense strand to SEQ ID NO: 512281
cuuuauguaaccuuccucu

SEQ ID NO: 512283 - RNA, 19 nt, Artificial Sequence
  Description of Artificial Sequence: Synthetic oligonucleotide
  Sense strand starting at position 3861 of SEQ ID NO: 317788
ugauauaugugcuuguaag

SEQ ID NO: 512284 - RNA, 19 nt, Artificial Sequence
  Description of Artificial Sequence: Synthetic oligonucleotide
  Antisense strand to SEQ ID NO: 512283
cuuacaagcacauauauca

SEQ ID NO: 512285 - RNA, 19 nt, Artificial Sequence
  Description of Artificial Sequence: Synthetic oligonucleotide
  Sense strand starting at position 3873 of SEQ ID NO: 317788
uuguaagccucccuuugaa

SEQ ID NO: 512286 - RNA, 19 nt, Artificial Sequence
  Description of Artificial Sequence: Synthetic oligonucleotide
  Antisense strand to SEQ ID NO: 512285
uucaaagggaggcuuacaa

SEQ ID NO: 512287 - RNA, 19 nt, Artificial Sequence
  Description of Artificial Sequence: Synthetic oligonucleotide
  Sense strand starting at position 3901 of SEQ ID NO: 317788
uaguaaccuugugugaaug

SEQ ID NO: 512288 - RNA, 19 nt, Artificial Sequence
  Description of Artificial Sequence: Synthetic oligonucleotide
  Antisense strand to SEQ ID NO: 512287
cauucacacaagguuacua

SEQ ID NO: 512289 - RNA, 19 nt, Artificial Sequence
  Description of Artificial Sequence: Synthetic oligonucleotide
  Sense strand starting at position 3911 of SEQ ID NO: 317788
gugugaaugccuuaaguag

SEQ ID NO: 512290 - RNA, 19 nt, Artificial Sequence
  Description of Artificial Sequence: Synthetic oligonucleotide
  Antisense strand to SEQ ID NO: 512289
cuacuuaaggcauucacac

SEQ ID NO: 512291 - RNA, 19 nt, Artificial Sequence
  Description of Artificial Sequence: Synthetic oligonucleotide
  Sense strand starting at position 40 of SEQ ID NO: 317789
uuaucaucagaauggguuu

SEQ ID NO: 512292 - RNA, 19 nt, Artificial Sequence
  Description of Artificial Sequence: Synthetic oligonucleotide
  Antisense strand to SEQ ID NO: 512291
aaacccauucugaugauaa

SEQ ID NO: 512293 - RNA, 19 nt, Artificial Sequence
  Description of Artificial Sequence: Synthetic oligonucleotide
  Sense strand starting at position 157 of SEQ ID NO: 317789
uuaugcauugcacauugaa

SEQ ID NO: 512294 - RNA, 19 nt, Artificial Sequence
  Description of Artificial Sequence: Synthetic oligonucleotide
  Antisense strand to SEQ ID NO: 512293
uucaaugugcaaugcauaa

SEQ ID NO: 512295 - RNA, 19 nt, Artificial Sequence
  Description of Artificial Sequence: Synthetic oligonucleotide
  Sense strand starting at position 225 of SEQ ID NO: 317789
cuaugcgacuuagcauuua

SEQ ID NO: 512296 - RNA, 19 nt, Artificial Sequence
  Description of Artificial Sequence: Synthetic oligonucleotide
  Antisense strand to SEQ ID NO: 512295
uaaaugcuaagucgcauag

SEQ ID NO: 512297 - RNA, 19 nt, Artificial Sequence
  Description of Artificial Sequence: Synthetic oligonucleotide
  Sense strand starting at position 236 of SEQ ID NO: 317789
agcauuuaccuguguuucu

SEQ ID NO: 512298 - RNA, 19 nt, Artificial Sequence
  Description of Artificial Sequence: Synthetic oligonucleotide
  Antisense strand to SEQ ID NO: 512297
agaaacacagguaaaugcu

SEQ ID NO: 512299 - RNA, 19 nt, Artificial Sequence
  Description of Artificial Sequence: Synthetic oligonucleotide
  Sense strand starting at position 237 of SEQ ID NO: 317789
gcauuuaccuguguuucua

SEQ ID NO: 512300 - RNA, 19 nt, Artificial Sequence
  Description of Artificial Sequence: Synthetic oligonucleotide
  Antisense strand to SEQ ID NO: 512299
uagaaacacagguaaaugc

SEQ ID NO: 512301 - RNA, 19 nt, Artificial Sequence
  Description of Artificial Sequence: Synthetic oligonucleotide
  Sense strand starting at position 491 of SEQ ID NO: 317789
ugcauugaaguauaacagu

SEQ ID NO: 512302 - RNA, 19 nt, Artificial Sequence
  Description of Artificial Sequence: Synthetic oligonucleotide
  Antisense strand to SEQ ID NO: 512301
acuguuauacuucaaugca

SEQ ID NO: 512303 - RNA, 19 nt, Artificial Sequence
  Description of Artificial Sequence: Synthetic oligonucleotide
  Sense strand starting at position 918 of SEQ ID NO: 317789
uuuauugcagcagaaacaa

SEQ ID NO: 512304 - RNA, 19 nt, Artificial Sequence
  Description of Artificial Sequence: Synthetic oligonucleotide
  Antisense strand to SEQ ID NO: 512303
uuguuucugcugcaauaaa

SEQ ID NO: 512305 - RNA, 19 nt, Artificial Sequence
  Description of Artificial Sequence: Synthetic oligonucleotide
  Sense strand starting at position 1082 of SEQ ID NO: 317789
gaugcuuagugaccauuga

SEQ ID NO: 512306 - RNA, 19 nt, Artificial Sequence
  Description of Artificial Sequence: Synthetic oligonucleotide
  Antisense strand to SEQ ID NO: 512305
ucaauggucacuaagcauc

SEQ ID NO: 512307 - RNA, 19 nt, Artificial Sequence
  Description of Artificial Sequence: Synthetic oligonucleotide
  Sense strand starting at position 1086 of SEQ ID NO: 317789
cuuagugaccauugacagu

SEQ ID NO: 512308 - RNA, 19 nt, Artificial Sequence
  Description of Artificial Sequence: Synthetic oligonucleotide
  Antisense strand to SEQ ID NO: 512307
acugucaauggucacuaag

SEQ ID NO: 512309 - RNA, 19 nt, Artificial Sequence
  Description of Artificial Sequence: Synthetic oligonucleotide
  Sense strand starting at position 1125 of SEQ ID NO: 317789
ccugucauuucuguuuaua

SEQ ID NO: 512310 - RNA, 19 nt, Artificial Sequence
  Description of Artificial Sequence: Synthetic oligonucleotide
  Antisense strand to SEQ ID NO: 512309
uauaaacagaaaugacagg

SEQ ID NO: 512311 - RNA, 19 nt, Artificial Sequence
  Description of Artificial Sequence: Synthetic oligonucleotide
  Sense strand starting at position 1169 of SEQ ID NO: 317789
cgaauaagugcagagugaa

SEQ ID NO: 512312 - RNA, 19 nt, Artificial Sequence
  Description of Artificial Sequence: Synthetic oligonucleotide
  Antisense strand to SEQ ID NO: 512311
uucacucugcacuuauucg

SEQ ID NO: 512313 - RNA, 19 nt, Artificial Sequence
  Description of Artificial Sequence: Synthetic oligonucleotide
  Sense strand starting at position 1208 of SEQ ID NO: 317789
aguaauguuagaugauguu

SEQ ID NO: 512314 - RNA, 19 nt, Artificial Sequence
  Description of Artificial Sequence: Synthetic oligonucleotide
  Antisense strand to SEQ ID NO: 512313
aacaucaucuaacauuacu

SEQ ID NO: 512315 - RNA, 19 nt, Artificial Sequence
  Description of Artificial Sequence: Synthetic oligonucleotide
  Sense strand starting at position 1243 of SEQ ID NO: 317789
auguuaucucuugaacuga

SEQ ID NO: 512316 - RNA, 19 nt, Artificial Sequence
  Description of Artificial Sequence: Synthetic oligonucleotide
  Antisense strand to SEQ ID NO: 512315
ucaguucaagagauaacau

SEQ ID NO: 512317 - RNA, 19 nt, Artificial Sequence
  Description of Artificial Sequence: Synthetic oligonucleotide
  Sense strand starting at position 1281 of SEQ ID NO: 317789
caagucugggcaugacaaa

SEQ ID NO: 512318 - RNA, 19 nt, Artificial Sequence
  Description of Artificial Sequence: Synthetic oligonucleotide
  Antisense strand to SEQ ID NO: 512317
uuugucaugcccagacuug

SEQ ID NO: 512319 - RNA, 19 nt, Artificial Sequence
  Description of Artificial Sequence: Synthetic oligonucleotide
  Sense strand starting at position 1319 of SEQ ID NO: 317789
uuuagcauuuguuccaagu

SEQ ID NO: 512320 - RNA, 19 nt, Artificial Sequence
  Description of Artificial Sequence: Synthetic oligonucleotide
  Antisense strand to SEQ ID NO: 512319
acuuggaacaaaugcuaaa

SEQ ID NO: 512321 - RNA, 19 nt, Artificial Sequence
  Description of Artificial Sequence: Synthetic oligonucleotide
  Sense strand starting at position 1329 of SEQ ID NO: 317789
guuccaagugaaugaauuc

SEQ ID NO: 512322 - RNA, 19 nt, Artificial Sequence
  Description of Artificial Sequence: Synthetic oligonucleotide
  Antisense strand to SEQ ID NO: 512321
gaauucauucacuuggaac

SEQ ID NO: 512323 - RNA, 19 nt, Artificial Sequence
  Description of Artificial Sequence: Synthetic oligonucleotide
  Sense strand starting at position 1367 of SEQ ID NO: 317789
cccacuguugagcauaaua

SEQ ID NO: 512324 - RNA, 19 nt, Artificial Sequence
  Description of Artificial Sequence: Synthetic oligonucleotide
  Antisense strand to SEQ ID NO: 512323
uauuaugcucaacaguggg

SEQ ID NO: 512325 - RNA, 19 nt, Artificial Sequence
  Description of Artificial Sequence: Synthetic oligonucleotide
  Sense strand starting at position 1454 of SEQ ID NO: 317789
agaguuguaugcuuauuua

SEQ ID NO: 512326 - RNA, 19 nt, Artificial Sequence
  Description of Artificial Sequence: Synthetic oligonucleotide
  Antisense strand to SEQ ID NO: 512325
uaaauaagcauacaacucu

SEQ ID NO: 512327 - RNA, 19 nt, Artificial Sequence
  Description of Artificial Sequence: Synthetic oligonucleotide
  Sense strand starting at position 1457 of SEQ ID NO: 317789
guuguaugcuuauuuaagu

SEQ ID NO: 512328 - RNA, 19 nt, Artificial Sequence
  Description of Artificial Sequence: Synthetic oligonucleotide
  Antisense strand to SEQ ID NO: 512327
acuuaaauaagcauacaac

SEQ ID NO: 512329 - RNA, 19 nt, Artificial Sequence
  Description of Artificial Sequence: Synthetic oligonucleotide
  Sense strand starting at position 1554 of SEQ ID NO: 317789
cccucaaguggaggaauau

SEQ ID NO: 512330 - RNA, 19 nt, Artificial Sequence
  Description of Artificial Sequence: Synthetic oligonucleotide
  Antisense strand to SEQ ID NO: 512329
auauuccuccacuugaggg

SEQ ID NO: 512331 - RNA, 19 nt, Artificial Sequence
  Description of Artificial Sequence: Synthetic oligonucleotide
  Sense strand starting at position 1671 of SEQ ID NO: 317789
gagaaauugucacuauguc

SEQ ID NO: 512332 - RNA, 19 nt, Artificial Sequence
  Description of Artificial Sequence: Synthetic oligonucleotide
  Antisense strand to SEQ ID NO: 512331
gacauagugacaauuucuc

SEQ ID NO: 512333 - RNA, 19 nt, Artificial Sequence
  Description of Artificial Sequence: Synthetic oligonucleotide
  Sense strand starting at position 1907 of SEQ ID NO: 317789
gagaaagguucugcugaua

SEQ ID NO: 512334 - RNA, 19 nt, Artificial Sequence
  Description of Artificial Sequence: Synthetic oligonucleotide
  Antisense strand to SEQ ID NO: 512333
uaucagcagaaccuuucuc

SEQ ID NO: 512335 - RNA, 19 nt, Artificial Sequence
  Description of Artificial Sequence: Synthetic oligonucleotide
  Sense strand starting at position 1948 of SEQ ID NO: 317789
aagguuagagacuguggaa

SEQ ID NO: 512336 - RNA, 19 nt, Artificial Sequence
  Description of Artificial Sequence: Synthetic oligonucleotide
  Antisense strand to SEQ ID NO: 512335
uuccacagucucuaaccuu

SEQ ID NO: 512337 - RNA, 19 nt, Artificial Sequence
  Description of Artificial Sequence: Synthetic oligonucleotide
  Sense strand starting at position 2095 of SEQ ID NO: 317789
agguaaucagcccaaucua

SEQ ID NO: 512338 - RNA, 19 nt, Artificial Sequence
  Description of Artificial Sequence: Synthetic oligonucleotide
  Antisense strand to SEQ ID NO: 512337
uagauugggcugauuaccu

SEQ ID NO: 512339 - RNA, 19 nt, Artificial Sequence
  Description of Artificial Sequence: Synthetic oligonucleotide
  Sense strand starting at position 2176 of SEQ ID NO: 317789
aaagauaguucuucuggaa

SEQ ID NO: 512340 - RNA, 19 nt, Artificial Sequence
  Description of Artificial Sequence: Synthetic oligonucleotide
  Antisense strand to SEQ ID NO: 512339
uuccagaagaacuaucuuu

SEQ ID NO: 512341 - RNA, 19 nt, Artificial Sequence
  Description of Artificial Sequence: Synthetic oligonucleotide
  Sense strand starting at position 2274 of SEQ ID NO: 317789
uuugauauguuaccagagu

SEQ ID NO: 512342 - RNA, 19 nt, Artificial Sequence
  Description of Artificial Sequence: Synthetic oligonucleotide
  Antisense strand to SEQ ID NO: 512341
acucugguaacauaucaaa

SEQ ID NO: 512343 - RNA, 19 nt, Artificial Sequence
  Description of Artificial Sequence: Synthetic oligonucleotide
  Sense strand starting at position 2656 of SEQ ID NO: 317789
cuaacugucucgcuauuua

SEQ ID NO: 512344 - RNA, 19 nt, Artificial Sequence
  Description of Artificial Sequence: Synthetic oligonucleotide
  Antisense strand to SEQ ID NO: 512343
uaaauagcgagacaguuag

SEQ ID NO: 512345 - RNA, 19 nt, Artificial Sequence
  Description of Artificial Sequence: Synthetic oligonucleotide
  Sense strand starting at position 2660 of SEQ ID NO: 317789
cugucucgcuauuuaucaa

SEQ ID NO: 512346 - RNA, 19 nt, Artificial Sequence
  Description of Artificial Sequence: Synthetic oligonucleotide
  Antisense strand to SEQ ID NO: 512345
uugauaaauagcgagacag

SEQ ID NO: 512347 - RNA, 19 nt, Artificial Sequence
  Description of Artificial Sequence: Synthetic oligonucleotide
  Sense strand starting at position 2714 of SEQ ID NO: 317789
aaaggaugucaguauagcu

SEQ ID NO: 512348 - RNA, 19 nt, Artificial Sequence
  Description of Artificial Sequence: Synthetic oligonucleotide
  Antisense strand to SEQ ID NO: 512347
agcuauacugacauccuuu

SEQ ID NO: 512349 - RNA, 19 nt, Artificial Sequence
  Description of Artificial Sequence: Synthetic oligonucleotide
  Sense strand starting at position 2722 of SEQ ID NO: 317789
ucaguauagcuccacaaag

SEQ ID NO: 512350 - RNA, 19 nt, Artificial Sequence
  Description of Artificial Sequence: Synthetic oligonucleotide
  Antisense strand to SEQ ID NO: 512349
cuuuguggagcuauacuga

SEQ ID NO: 512351 - RNA, 19 nt, Artificial Sequence
  Description of Artificial Sequence: Synthetic oligonucleotide
  Sense strand starting at position 2724 of SEQ ID NO: 317789
aguauagcuccacaaagua

SEQ ID NO: 512352 - RNA, 19 nt, Artificial Sequence
  Description of Artificial Sequence: Synthetic oligonucleotide
  Antisense strand to SEQ ID NO: 512351
uacuuuguggagcuauacu

SEQ ID NO: 512353 - RNA, 19 nt, Artificial Sequence
  Description of Artificial Sequence: Synthetic oligonucleotide
  Sense strand starting at position 3000 of SEQ ID NO: 317789
cuacuuccaguuuaguauu

SEQ ID NO: 512354 - RNA, 19 nt, Artificial Sequence
  Description of Artificial Sequence: Synthetic oligonucleotide
  Antisense strand to SEQ ID NO: 512353
aauacuaaacuggaaguag

SEQ ID NO: 512355 - RNA, 19 nt, Artificial Sequence
  Description of Artificial Sequence: Synthetic oligonucleotide
  Sense strand starting at position 3015 of SEQ ID NO: 317789
uauuguuuccgguugccau

SEQ ID NO: 512356 - RNA, 19 nt, Artificial Sequence
  Description of Artificial Sequence: Synthetic oligonucleotide
  Antisense strand to SEQ ID NO: 512355
auggcaaccggaaacaaua

SEQ ID NO: 512357 - RNA, 19 nt, Artificial Sequence
  Description of Artificial Sequence: Synthetic oligonucleotide
  Sense strand starting at position 3182 of SEQ ID NO: 317789
aucacaguguuauuauaug

SEQ ID NO: 512358 - RNA, 19 nt, Artificial Sequence
  Description of Artificial Sequence: Synthetic oligonucleotide
  Antisense strand to SEQ ID NO: 512357
cauauaauaacacugugau

SEQ ID NO: 512359 - RNA, 19 nt, Artificial Sequence
  Description of Artificial Sequence: Synthetic oligonucleotide
  Sense strand starting at position 3390 of SEQ ID NO: 317789
accguaucauuugcccaua

SEQ ID NO: 512360 - RNA, 19 nt, Artificial Sequence
  Description of Artificial Sequence: Synthetic oligonucleotide
  Antisense strand to SEQ ID NO: 512359
uaugggcaaaugauacggu

SEQ ID NO: 512361 - RNA, 19 nt, Artificial Sequence
  Description of Artificial Sequence: Synthetic oligonucleotide
  Sense strand starting at position 3392 of SEQ ID NO: 317789
cguaucauuugcccauagu

SEQ ID NO: 512362 - RNA, 19 nt, Artificial Sequence
  Description of Artificial Sequence: Synthetic oligonucleotide
  Antisense strand to SEQ ID NO: 512361
acuaugggcaaaugauacg

SEQ ID NO: 512363 - RNA, 19 nt, Artificial Sequence
  Description of Artificial Sequence: Synthetic oligonucleotide
  Sense strand starting at position 3498 of SEQ ID NO: 317789
acguauauuuguguguauu

SEQ ID NO: 512364 - RNA, 19 nt, Artificial Sequence
  Description of Artificial Sequence: Synthetic oligonucleotide
  Antisense strand to SEQ ID NO: 512363
aauacacacaaauauacgu

SEQ ID NO: 512365 - RNA, 19 nt, Artificial Sequence
  Description of Artificial Sequence: Synthetic oligonucleotide
  Sense strand starting at position 3514 of SEQ ID NO: 317789
auuuguguuugccugguau

SEQ ID NO: 512366 - RNA, 19 nt, Artificial Sequence
  Description of Artificial Sequence: Synthetic oligonucleotide
  Antisense strand to SEQ ID NO: 512365
auaccaggcaaacacaaau

SEQ ID NO: 512367 - RNA, 19 nt, Artificial Sequence
  Description of Artificial Sequence: Synthetic oligonucleotide
  Sense strand starting at position 3893 of SEQ ID NO: 317789
ccugucuagucaucagaaa

SEQ ID NO: 512368 - RNA, 19 nt, Artificial Sequence
  Description of Artificial Sequence: Synthetic oligonucleotide
  Antisense strand to SEQ ID NO: 512367
uuucugaugacuagacagg

SEQ ID NO: 512369 - RNA, 19 nt, Artificial Sequence
  Description of Artificial Sequence: Synthetic oligonucleotide
  Sense strand starting at position 3894 of SEQ ID NO: 317789
cugucuagucaucagaaac

SEQ ID NO: 512370 - RNA, 19 nt, Artificial Sequence
  Description of Artificial Sequence: Synthetic oligonucleotide
  Antisense strand to SEQ ID NO: 512369
guuucugaugacuagacag

SEQ ID NO: 512371 - RNA, 19 nt, Artificial Sequence
  Description of Artificial Sequence: Synthetic oligonucleotide
  Sense strand starting at position 232 of SEQ ID NO: 317790
aggauaauuuaaugaugag

SEQ ID NO: 512372 - RNA, 19 nt, Artificial Sequence
  Description of Artificial Sequence: Synthetic oligonucleotide
  Antisense strand to SEQ ID NO: 512371
cucaucauuaaauuauccu

SEQ ID NO: 512373 - RNA, 19 nt, Artificial Sequence
  Description of Artificial Sequence: Synthetic oligonucleotide
  Sense strand starting at position 318 of SEQ ID NO: 317790
cuuacaacugcucagguau

SEQ ID NO: 512374 - RNA, 19 nt, Artificial Sequence
  Description of Artificial Sequence: Synthetic oligonucleotide
  Antisense strand to SEQ ID NO: 512373
auaccugagcaguuguaag

SEQ ID NO: 512375 - RNA, 19 nt, Artificial Sequence
  Description of Artificial Sequence: Synthetic oligonucleotide
  Sense strand starting at position 329 of SEQ ID NO: 317790
ucagguauacagugaagau

SEQ ID NO: 512376 - RNA, 19 nt, Artificial Sequence
  Description of Artificial Sequence: Synthetic oligonucleotide
  Antisense strand to SEQ ID NO: 512375
aucuucacuguauaccuga

SEQ ID NO: 512377 - RNA, 19 nt, Artificial Sequence
  Description of Artificial Sequence: Synthetic oligonucleotide
  Sense strand starting at position 570 of SEQ ID NO: 317790
ucaguucccucuccagaga

SEQ ID NO: 512378 - RNA, 19 nt, Artificial Sequence
  Description of Artificial Sequence: Synthetic oligonucleotide
  Antisense strand to SEQ ID NO: 512377
ucucuggagagggaacuga

SEQ ID NO: 512379 - RNA, 19 nt, Artificial Sequence
  Description of Artificial Sequence: Synthetic oligonucleotide
  Sense strand starting at position 573 of SEQ ID NO: 317790
guucccucuccagagagua

SEQ ID NO: 512380 - RNA, 19 nt, Artificial Sequence
  Description of Artificial Sequence: Synthetic oligonucleotide
  Antisense strand to SEQ ID NO: 512379
uacucucuggagagggaac

SEQ ID NO: 512381 - RNA, 19 nt, Artificial Sequence
  Description of Artificial Sequence: Synthetic oligonucleotide
  Sense strand starting at position 588 of SEQ ID NO: 317790
aguacagagaaauguguau

SEQ ID NO: 512382 - RNA, 19 nt, Artificial Sequence
  Description of Artificial Sequence: Synthetic oligonucleotide
  Antisense strand to SEQ ID NO: 512381
auacacauuucucuguacu

SEQ ID NO: 512383 - RNA, 19 nt, Artificial Sequence
  Description of Artificial Sequence: Synthetic oligonucleotide
  Sense strand starting at position 1227 of SEQ ID NO: 317790
ggaccagagacuuguuuag

SEQ ID NO: 512384 - RNA, 19 nt, Artificial Sequence
  Description of Artificial Sequence: Synthetic oligonucleotide
  Antisense strand to SEQ ID NO: 512383
cuaaacaagucucuggucc

SEQ ID NO: 512385 - RNA, 19 nt, Artificial Sequence
  Description of Artificial Sequence: Synthetic oligonucleotide
  Sense strand starting at position 1229 of SEQ ID NO: 317790
accagagacuuguuuagaa

SEQ ID NO: 512386 - RNA, 19 nt, Artificial Sequence
  Description of Artificial Sequence: Synthetic oligonucleotide
  Antisense strand to SEQ ID NO: 512385
uucuaaacaagucucuggu

SEQ ID NO: 512387 - RNA, 19 nt, Artificial Sequence
  Description of Artificial Sequence: Synthetic oligonucleotide
  Sense strand starting at position 1360 of SEQ ID NO: 317790
guaugaauuucugugcaug

SEQ ID NO: 512388 - RNA, 19 nt, Artificial Sequence
  Description of Artificial Sequence: Synthetic oligonucleotide
  Antisense strand to SEQ ID NO: 512387
caugcacagaaauucauac

SEQ ID NO: 512389 - RNA, 19 nt, Artificial Sequence
  Description of Artificial Sequence: Synthetic oligonucleotide
  Sense strand starting at position 1362 of SEQ ID NO: 317790
augaauuucugugcaugca

SEQ ID NO: 512390 - RNA, 19 nt, Artificial Sequence
  Description of Artificial Sequence: Synthetic oligonucleotide
  Antisense strand to SEQ ID NO: 512389
ugcaugcacagaaauucau

SEQ ID NO: 512391 - RNA, 19 nt, Artificial Sequence
  Description of Artificial Sequence: Synthetic oligonucleotide
  Sense strand starting at position 1713 of SEQ ID NO: 317790
gaucaauaaugcucucgga

SEQ ID NO: 512392 - RNA, 19 nt, Artificial Sequence
  Description of Artificial Sequence: Synthetic oligonucleotide
  Antisense strand to SEQ ID NO: 512391
uccgagagcauuauugauc

SEQ ID NO: 512393 - RNA, 19 nt, Artificial Sequence
  Description of Artificial Sequence: Synthetic oligonucleotide
  Sense strand starting at position 1830 of SEQ ID NO: 317790
uuugacacaucauugagua

SEQ ID NO: 512394 - RNA, 19 nt, Artificial Sequence
  Description of Artificial Sequence: Synthetic oligonucleotide
  Antisense strand to SEQ ID NO: 512393
uacucaaugaugugucaaa

SEQ ID NO: 512395 - RNA, 19 nt, Artificial Sequence
  Description of Artificial Sequence: Synthetic oligonucleotide
  Sense strand starting at position 1834 of SEQ ID NO: 317790
acacaucauugaguaguga

SEQ ID NO: 512396 - RNA, 19 nt, Artificial Sequence
  Description of Artificial Sequence: Synthetic oligonucleotide
  Antisense strand to SEQ ID NO: 512395
ucacuacucaaugaugugu

SEQ ID NO: 512397 - RNA, 19 nt, Artificial Sequence
  Description of Artificial Sequence: Synthetic oligonucleotide
  Sense strand starting at position 1914 of SEQ ID NO: 317790
auuguagaaugcuuugaau

SEQ ID NO: 512398 - RNA, 19 nt, Artificial Sequence
  Description of Artificial Sequence: Synthetic oligonucleotide
  Antisense strand to SEQ ID NO: 512397
auucaaagcauucuacaau

SEQ ID NO: 512399 - RNA, 19 nt, Artificial Sequence
  Description of Artificial Sequence: Synthetic oligonucleotide
  Sense strand starting at position 1916 of SEQ ID NO: 317790
uguagaaugcuuugaauga

SEQ ID NO: 512400 - RNA, 19 nt, Artificial Sequence
  Description of Artificial Sequence: Synthetic oligonucleotide
  Antisense strand to SEQ ID NO: 512399
ucauucaaagcauucuaca

SEQ ID NO: 512401 - RNA, 19 nt, Artificial Sequence
  Description of Artificial Sequence: Synthetic oligonucleotide
  Sense strand starting at position 1990 of SEQ ID NO: 317790
aagauuaggcgcugagaaa

SEQ ID NO: 512402 - RNA, 19 nt, Artificial Sequence
  Description of Artificial Sequence: Synthetic oligonucleotide
  Antisense strand to SEQ ID NO: 512401
uuucucagcgccuaaucuu

SEQ ID NO: 512403 - RNA, 19 nt, Artificial Sequence
  Description of Artificial Sequence: Synthetic oligonucleotide
  Sense strand starting at position 1991 of SEQ ID NO: 317790
agauuaggcgcugagaaag

SEQ ID NO: 512404 - RNA, 19 nt, Artificial Sequence
  Description of Artificial Sequence: Synthetic oligonucleotide
  Antisense strand to SEQ ID NO: 512403
cuuucucagcgccuaaucu

SEQ ID NO: 512405 - RNA, 19 nt, Artificial Sequence
  Description of Artificial Sequence: Synthetic oligonucleotide
  Sense strand starting at position 2164 of SEQ ID NO: 317790
uaauuacguuuaccuggaa

SEQ ID NO: 512406 - RNA, 19 nt, Artificial Sequence
  Description of Artificial Sequence: Synthetic oligonucleotide
  Antisense strand to SEQ ID NO: 512405
uuccagguaaacguaauua

SEQ ID NO: 512407 - RNA, 19 nt, Artificial Sequence
  Description of Artificial Sequence: Synthetic oligonucleotide
  Sense strand starting at position 2193 of SEQ ID NO: 317790
uguuuaauugucuaaacga

SEQ ID NO: 512408 - RNA, 19 nt, Artificial Sequence
  Description of Artificial Sequence: Synthetic oligonucleotide
  Antisense strand to SEQ ID NO: 512407
ucguuuagacaauuaaaca

SEQ ID NO: 512409 - RNA, 19 nt, Artificial Sequence
  Description of Artificial Sequence: Synthetic oligonucleotide
  Sense strand starting at position 2208 of SEQ ID NO: 317790
acgagaaucagaugcuuau

SEQ ID NO: 512410 - RNA, 19 nt, Artificial Sequence
  Description of Artificial Sequence: Synthetic oligonucleotide
  Antisense strand to SEQ ID NO: 512409
auaagcaucugauucucgu

SEQ ID NO: 512411 - RNA, 19 nt, Artificial Sequence
  Description of Artificial Sequence: Synthetic oligonucleotide
  Sense strand starting at position 2212 of SEQ ID NO: 317790
gaaucagaugcuuauuggu

SEQ ID NO: 512412 - RNA, 19 nt, Artificial Sequence
  Description of Artificial Sequence: Synthetic oligonucleotide
  Antisense strand to SEQ ID NO: 512411
accaauaagcaucugauuc

SEQ ID NO: 512413 - RNA, 19 nt, Artificial Sequence
  Description of Artificial Sequence: Synthetic oligonucleotide
  Sense strand starting at position 2214 of SEQ ID NO: 317790
aucagaugcuuauugguga

SEQ ID NO: 512414 - RNA, 19 nt, Artificial Sequence
  Description of Artificial Sequence: Synthetic oligonucleotide
  Antisense strand to SEQ ID NO: 512413
ucaccaauaagcaucugau

SEQ ID NO: 512415 - RNA, 19 nt, Artificial Sequence
  Description of Artificial Sequence: Synthetic oligonucleotide
  Sense strand starting at position 2217 of SEQ ID NO: 317790
agaugcuuauuggugacaa

SEQ ID NO: 512416 - RNA, 19 nt, Artificial Sequence
  Description of Artificial Sequence: Synthetic oligonucleotide
  Antisense strand to SEQ ID NO: 512415
uugucaccaauaagcaucu

SEQ ID NO: 512417 - RNA, 19 nt, Artificial Sequence
  Description of Artificial Sequence: Synthetic oligonucleotide
  Sense strand starting at position 2219 of SEQ ID NO: 317790
augcuuauuggugacaaua

SEQ ID NO: 512418 - RNA, 19 nt, Artificial Sequence
  Description of Artificial Sequence: Synthetic oligonucleotide
  Antisense strand to SEQ ID NO: 512417
uauugucaccaauaagcau

SEQ ID NO: 512419 - RNA, 19 nt, Artificial Sequence
  Description of Artificial Sequence: Synthetic oligonucleotide
  Sense strand starting at position 2272 of SEQ ID NO: 317790
uuguuucuaggcugauuua

SEQ ID NO: 512420 - RNA, 19 nt, Artificial Sequence
  Description of Artificial Sequence: Synthetic oligonucleotide
  Antisense strand to SEQ ID NO: 512419
uaaaucagccuagaaacaa

SEQ ID NO: 512421 - RNA, 19 nt, Artificial Sequence
  Description of Artificial Sequence: Synthetic oligonucleotide
  Sense strand starting at position 2827 of SEQ ID NO: 317790
aauuauugggacugucuga

SEQ ID NO: 512422 - RNA, 19 nt, Artificial Sequence
  Description of Artificial Sequence: Synthetic oligonucleotide
  Antisense strand to SEQ ID NO: 512421
ucagacagucccaauaauu

SEQ ID NO: 512423 - RNA, 19 nt, Artificial Sequence
  Description of Artificial Sequence: Synthetic oligonucleotide
  Sense strand starting at position 2964 of SEQ ID NO: 317790
ugucuaucacgugaaggga

SEQ ID NO: 512424 - RNA, 19 nt, Artificial Sequence
  Description of Artificial Sequence: Synthetic oligonucleotide
  Antisense strand to SEQ ID NO: 512423
ucccuucacgugauagaca

SEQ ID NO: 512425 - RNA, 19 nt, Artificial Sequence
  Description of Artificial Sequence: Synthetic oligonucleotide
  Sense strand starting at position 3175 of SEQ ID NO: 317790
cccucaauuguauaguaua

SEQ ID NO: 512426 - RNA, 19 nt, Artificial Sequence
  Description of Artificial Sequence: Synthetic oligonucleotide
  Antisense strand to SEQ ID NO: 512425
uauacuauacaauugaggg

SEQ ID NO: 512427 - RNA, 19 nt, Artificial Sequence
  Description of Artificial Sequence: Synthetic oligonucleotide
  Sense strand starting at position 3229 of SEQ ID NO: 317790
auaauaggucauugacuac

SEQ ID NO: 512428 - RNA, 19 nt, Artificial Sequence
  Description of Artificial Sequence: Synthetic oligonucleotide
  Antisense strand to SEQ ID NO: 512427
guagucaaugaccuauuau

SEQ ID NO: 512429 - RNA, 19 nt, Artificial Sequence
  Description of Artificial Sequence: Synthetic oligonucleotide
  Sense strand starting at position 3232 of SEQ ID NO: 317790
auaggucauugacuacaga

SEQ ID NO: 512430 - RNA, 19 nt, Artificial Sequence
  Description of Artificial Sequence: Synthetic oligonucleotide
  Antisense strand to SEQ ID NO: 512429
ucuguagucaaugaccuau

SEQ ID NO: 512431 - RNA, 19 nt, Artificial Sequence
  Description of Artificial Sequence: Synthetic oligonucleotide
  Sense strand starting at position 3246 of SEQ ID NO: 317790
acagaacauugucuuugua

SEQ ID NO: 512432 - RNA, 19 nt, Artificial Sequence
  Description of Artificial Sequence: Synthetic oligonucleotide
  Antisense strand to SEQ ID NO: 512431
uacaaagacaauguucugu

SEQ ID NO: 512433 - RNA, 19 nt, Artificial Sequence
  Description of Artificial Sequence: Synthetic oligonucleotide
  Sense strand starting at position 3262 of SEQ ID NO: 317790
guacuacaggucgagaguu

SEQ ID NO: 512434 - RNA, 19 nt, Artificial Sequence
  Description of Artificial Sequence: Synthetic oligonucleotide
  Antisense strand to SEQ ID NO: 512433
aacucucgaccuguaguac

SEQ ID NO: 512435 - RNA, 19 nt, Artificial Sequence
  Description of Artificial Sequence: Synthetic oligonucleotide
  Sense strand starting at position 3542 of SEQ ID NO: 317790
ugccgauuucuuuauguau

SEQ ID NO: 512436 - RNA, 19 nt, Artificial Sequence
  Description of Artificial Sequence: Synthetic oligonucleotide
  Antisense strand to SEQ ID NO: 512435
auacauaaagaaaucggca

SEQ ID NO: 512437 - RNA, 19 nt, Artificial Sequence
  Description of Artificial Sequence: Synthetic oligonucleotide
  Sense strand starting at position 3545 of SEQ ID NO: 317790
cgauuucuuuauguauugu

SEQ ID NO: 512438 - RNA, 19 nt, Artificial Sequence
  Description of Artificial Sequence: Synthetic oligonucleotide
  Antisense strand to SEQ ID NO: 512437
acaauacauaaagaaaucg

SEQ ID NO: 512439 - RNA, 19 nt, Artificial Sequence
  Description of Artificial Sequence: Synthetic oligonucleotide
  Sense strand starting at position 3564 of SEQ ID NO: 317790
ccaugaccgcuuucgcauu

SEQ ID NO: 512440 - RNA, 19 nt, Artificial Sequence
  Description of Artificial Sequence: Synthetic oligonucleotide
  Antisense strand to SEQ ID NO: 512439
aaugcgaaagcggucaugg

SEQ ID NO: 512441 - RNA, 19 nt, Artificial Sequence
  Description of Artificial Sequence: Synthetic oligonucleotide
  Sense strand starting at position 3636 of SEQ ID NO: 317790
uguuuacuaucugucauuu

SEQ ID NO: 512442 - RNA, 19 nt, Artificial Sequence
  Description of Artificial Sequence: Synthetic oligonucleotide
  Antisense strand to SEQ ID NO: 512441
aaaugacagauaguaaaca

SEQ ID NO: 512443 - RNA, 19 nt, Artificial Sequence
  Description of Artificial Sequence: Synthetic oligonucleotide
  Sense strand starting at position 3687 of SEQ ID NO: 317790
uuguaagaugugcaauauu

SEQ ID NO: 512444 - RNA, 19 nt, Artificial Sequence
  Description of Artificial Sequence: Synthetic oligonucleotide
  Antisense strand to SEQ ID NO: 512443
aauauugcacaucuuacaa

SEQ ID NO: 512445 - RNA, 19 nt, Artificial Sequence
  Description of Artificial Sequence: Synthetic oligonucleotide
  Sense strand starting at position 3774 of SEQ ID NO: 317790
ugaaaucauugagauuuga

SEQ ID NO: 512446 - RNA, 19 nt, Artificial Sequence
  Description of Artificial Sequence: Synthetic oligonucleotide
  Antisense strand to SEQ ID NO: 512445
ucaaaucucaaugauuuca

SEQ ID NO: 512447 - RNA, 19 nt, Artificial Sequence
  Description of Artificial Sequence: Synthetic oligonucleotide
  Sense strand starting at position 3893 of SEQ ID NO: 317790
ggcaucuuaguaugaaaca

SEQ ID NO: 512448 - RNA, 19 nt, Artificial Sequence
  Description of Artificial Sequence: Synthetic oligonucleotide
  Antisense strand to SEQ ID NO: 512447
uguuucauacuaagaugcc

SEQ ID NO: 512449 - RNA, 19 nt, Artificial Sequence
  Description of Artificial Sequence: Synthetic oligonucleotide
  Sense strand starting at position 3963 of SEQ ID NO: 317790
uaaauuugugcgcacucua

SEQ ID NO: 512450 - RNA, 19 nt, Artificial Sequence
  Description of Artificial Sequence: Synthetic oligonucleotide
  Antisense strand to SEQ ID NO: 512449
uagagugcgcacaaauuua

SEQ ID NO: 512451 - RNA, 19 nt, Artificial Sequence
  Description of Artificial Sequence: Synthetic oligonucleotide
  Sense strand starting at position 272 of SEQ ID NO: 317791
guuggcuaucucugagaaa

SEQ ID NO: 512452 - RNA, 19 nt, Artificial Sequence
  Description of Artificial Sequence: Synthetic oligonucleotide
  Antisense strand to SEQ ID NO: 512451
uuucucagagauagccaac

SEQ ID NO: 512453 - RNA, 19 nt, Artificial Sequence
  Description of Artificial Sequence: Synthetic oligonucleotide
  Sense strand starting at position 367 of SEQ ID NO: 317791
ugaccuauaccaggucaau

SEQ ID NO: 512454 - RNA, 19 nt, Artificial Sequence
  Description of Artificial Sequence: Synthetic oligonucleotide
  Antisense strand to SEQ ID NO: 512453
auugaccugguauagguca

SEQ ID NO: 512455 - RNA, 19 nt, Artificial Sequence
  Description of Artificial Sequence: Synthetic oligonucleotide
  Sense strand starting at position 465 of SEQ ID NO: 317791
aguguuacacaauggaacu

SEQ ID NO: 512456 - RNA, 19 nt, Artificial Sequence
  Description of Artificial Sequence: Synthetic oligonucleotide
  Antisense strand to SEQ ID NO: 512455
aguuccauuguguaacacu

SEQ ID NO: 512457 - RNA, 19 nt, Artificial Sequence
  Description of Artificial Sequence: Synthetic oligonucleotide
  Sense strand starting at position 481 of SEQ ID NO: 317791
acucauuaucuacgaguau

SEQ ID NO: 512458 - RNA, 19 nt, Artificial Sequence
  Description of Artificial Sequence: Synthetic oligonucleotide
  Antisense strand to SEQ ID NO: 512457
auacucguagauaaugagu

SEQ ID NO: 512459 - RNA, 19 nt, Artificial Sequence
  Description of Artificial Sequence: Synthetic oligonucleotide
  Sense strand starting at position 485 of SEQ ID NO: 317791
auuaucuacgaguaucaca

SEQ ID NO: 512460 - RNA, 19 nt, Artificial Sequence
  Description of Artificial Sequence: Synthetic oligonucleotide
  Antisense strand to SEQ ID NO: 512459
ugugauacucguagauaau

SEQ ID NO: 512461 - RNA, 19 nt, Artificial Sequence
  Description of Artificial Sequence: Synthetic oligonucleotide
  Sense strand starting at position 539 of SEQ ID NO: 317791
auguaagaucuaggcugga

SEQ ID NO: 512462 - RNA, 19 nt, Artificial Sequence
  Description of Artificial Sequence: Synthetic oligonucleotide
  Antisense strand to SEQ ID NO: 512461
uccagccuagaucuuacau

SEQ ID NO: 512463 - RNA, 19 nt, Artificial Sequence
  Description of Artificial Sequence: Synthetic oligonucleotide
  Sense strand starting at position 624 of SEQ ID NO: 317791
acaauuauugcaggagcaa

SEQ ID NO: 512464 - RNA, 19 nt, Artificial Sequence
  Description of Artificial Sequence: Synthetic oligonucleotide
  Antisense strand to SEQ ID NO: 512463
uugcuccugcaauaauugu

SEQ ID NO: 512465 - RNA, 19 nt, Artificial Sequence
  Description of Artificial Sequence: Synthetic oligonucleotide
  Sense strand starting at position 776 of SEQ ID NO: 317791
cagugaugccaucaccuga

SEQ ID NO: 512466 - RNA, 19 nt, Artificial Sequence
  Description of Artificial Sequence: Synthetic oligonucleotide
  Antisense strand to SEQ ID NO: 512465
ucaggugauggcaucacug

SEQ ID NO: 512467 - RNA, 19 nt, Artificial Sequence
  Description of Artificial Sequence: Synthetic oligonucleotide
  Sense strand starting at position 781 of SEQ ID NO: 317791
augccaucaccugagcaaa

SEQ ID NO: 512468 - RNA, 19 nt, Artificial Sequence
  Description of Artificial Sequence: Synthetic oligonucleotide
  Antisense strand to SEQ ID NO: 512467
uuugcucaggugauggcau

SEQ ID NO: 512469 - RNA, 19 nt, Artificial Sequence
  Description of Artificial Sequence: Synthetic oligonucleotide
  Sense strand starting at position 1052 of SEQ ID NO: 317791
ggcauaauuuaccuuguuu

SEQ ID NO: 512470 - RNA, 19 nt, Artificial Sequence
  Description of Artificial Sequence: Synthetic oligonucleotide
  Antisense strand to SEQ ID NO: 512469
aaacaagguaaauuaugcc

SEQ ID NO: 512471 - RNA, 19 nt, Artificial Sequence
  Description of Artificial Sequence: Synthetic oligonucleotide
  Sense strand starting at position 1346 of SEQ ID NO: 317791
gugcucagaaaucacguaa

SEQ ID NO: 512472 - RNA, 19 nt, Artificial Sequence
  Description of Artificial Sequence: Synthetic oligonucleotide
  Antisense strand to SEQ ID NO: 512471
uuacgugauuucugagcac

SEQ ID NO: 512473 - RNA, 19 nt, Artificial Sequence
  Description of Artificial Sequence: Synthetic oligonucleotide
  Sense strand starting at position 1629 of SEQ ID NO: 317791
agcauuccugcauaagaaa

SEQ ID NO: 512474 - RNA, 19 nt, Artificial Sequence
  Description of Artificial Sequence: Synthetic oligonucleotide
  Antisense strand to SEQ ID NO: 512473
uuucuuaugcaggaaugcu

SEQ ID NO: 512475 - RNA, 19 nt, Artificial Sequence
  Description of Artificial Sequence: Synthetic oligonucleotide
  Sense strand starting at position 1653 of SEQ ID NO: 317791
aauguauaccagcgauaag

SEQ ID NO: 512476 - RNA, 19 nt, Artificial Sequence
  Description of Artificial Sequence: Synthetic oligonucleotide
  Antisense strand to SEQ ID NO: 512475
cuuaucgcugguauacauu

SEQ ID NO: 512477 - RNA, 19 nt, Artificial Sequence
  Description of Artificial Sequence: Synthetic oligonucleotide
  Sense strand starting at position 1714 of SEQ ID NO: 317791
ugugaaacccaucggagau

SEQ ID NO: 512478 - RNA, 19 nt, Artificial Sequence
  Description of Artificial Sequence: Synthetic oligonucleotide
  Antisense strand to SEQ ID NO: 512477
aucuccgauggguuucaca

SEQ ID NO: 512479 - RNA, 19 nt, Artificial Sequence
  Description of Artificial Sequence: Synthetic oligonucleotide
  Sense strand starting at position 1755 of SEQ ID NO: 317791
uugacucagaacuggguaa

SEQ ID NO: 512480 - RNA, 19 nt, Artificial Sequence
  Description of Artificial Sequence: Synthetic oligonucleotide
  Antisense strand to SEQ ID NO: 512479
uuacccaguucugagucaa

SEQ ID NO: 512481 - RNA, 19 nt, Artificial Sequence
  Description of Artificial Sequence: Synthetic oligonucleotide
  Sense strand starting at position 1900 of SEQ ID NO: 317791
gggacuuucccagagcucu

SEQ ID NO: 512482 - RNA, 19 nt, Artificial Sequence
  Description of Artificial Sequence: Synthetic oligonucleotide
  Antisense strand to SEQ ID NO: 512481
agagcucugggaaaguccc

SEQ ID NO: 512483 - RNA, 19 nt, Artificial Sequence
  Description of Artificial Sequence: Synthetic oligonucleotide
  Sense strand starting at position 2316 of SEQ ID NO: 317791
ccaggacuccgugacaguu

SEQ ID NO: 512484 - RNA, 19 nt, Artificial Sequence
  Description of Artificial Sequence: Synthetic oligonucleotide
  Antisense strand to SEQ ID NO: 512483
aacugucacggaguccugg

SEQ ID NO: 512485 - RNA, 19 nt, Artificial Sequence
  Description of Artificial Sequence: Synthetic oligonucleotide
  Sense strand starting at position 2533 of SEQ ID NO: 317791
aucagugauccauagucca

SEQ ID NO: 512486 - RNA, 19 nt, Artificial Sequence
  Description of Artificial Sequence: Synthetic oligonucleotide
  Antisense strand to SEQ ID NO: 512485
uggacuauggaucacugau

SEQ ID NO: 512487 - RNA, 19 nt, Artificial Sequence
  Description of Artificial Sequence: Synthetic oligonucleotide
  Sense strand starting at position 2548 of SEQ ID NO: 317791
uccagugguagccaugaga

SEQ ID NO: 512488 - RNA, 19 nt, Artificial Sequence
  Description of Artificial Sequence: Synthetic oligonucleotide
  Antisense strand to SEQ ID NO: 512487
ucucauggcuaccacugga

SEQ ID NO: 512489 - RNA, 19 nt, Artificial Sequence
  Description of Artificial Sequence: Synthetic oligonucleotide
  Sense strand starting at position 2562 of SEQ ID NO: 317791
ugagauuucgcuugaguga

SEQ ID NO: 512490 - RNA, 19 nt, Artificial Sequence
  Description of Artificial Sequence: Synthetic oligonucleotide
  Antisense strand to SEQ ID NO: 512489
ucacucaagcgaaaucuca

SEQ ID NO: 512491 - RNA, 19 nt, Artificial Sequence
  Description of Artificial Sequence: Synthetic oligonucleotide
  Sense strand starting at position 2565 of SEQ ID NO: 317791
gauuucgcuugagugaugu

SEQ ID NO: 512492 - RNA, 19 nt, Artificial Sequence
  Description of Artificial Sequence: Synthetic oligonucleotide
  Antisense strand to SEQ ID NO: 512491
acaucacucaagcgaaauc

SEQ ID NO: 512493 - RNA, 19 nt, Artificial Sequence
  Description of Artificial Sequence: Synthetic oligonucleotide
  Sense strand starting at position 2610 of SEQ ID NO: 317791
caagguauggaggguuuau

SEQ ID NO: 512494 - RNA, 19 nt, Artificial Sequence
  Description of Artificial Sequence: Synthetic oligonucleotide
  Antisense strand to SEQ ID NO: 512493
auaaacccuccauaccuug

SEQ ID NO: 512495 - RNA, 19 nt, Artificial Sequence
  Description of Artificial Sequence: Synthetic oligonucleotide
  Sense strand starting at position 2775 of SEQ ID NO: 317791
aucgauuugcaauguacau

SEQ ID NO: 512496 - RNA, 19 nt, Artificial Sequence
  Description of Artificial Sequence: Synthetic oligonucleotide
  Antisense strand to SEQ ID NO: 512495
auguacauugcaaaucgau

SEQ ID NO: 512497 - RNA, 19 nt, Artificial Sequence
  Description of Artificial Sequence: Synthetic oligonucleotide
  Sense strand starting at position 2934 of SEQ ID NO: 317791
uaaacaaguguaggaguuu

SEQ ID NO: 512498 - RNA, 19 nt, Artificial Sequence
  Description of Artificial Sequence: Synthetic oligonucleotide
  Antisense strand to SEQ ID NO: 512497
aaacuccuacacuuguuua

SEQ ID NO: 512499 - RNA, 19 nt, Artificial Sequence
  Description of Artificial Sequence: Synthetic oligonucleotide
  Sense strand starting at position 2940 of SEQ ID NO: 317791
aguguaggaguuuaucuaa

SEQ ID NO: 512500 - RNA, 19 nt, Artificial Sequence
  Description of Artificial Sequence: Synthetic oligonucleotide
  Antisense strand to SEQ ID NO: 512499
uuagauaaacuccuacacu

SEQ ID NO: 512501 - RNA, 19 nt, Artificial Sequence
  Description of Artificial Sequence: Synthetic oligonucleotide
  Sense strand starting at position 2943 of SEQ ID NO: 317791
guaggaguuuaucuaaauu

SEQ ID NO: 512502 - RNA, 19 nt, Artificial Sequence
  Description of Artificial Sequence: Synthetic oligonucleotide
  Antisense strand to SEQ ID NO: 512501
aauuuagauaaacuccuac

SEQ ID NO: 512503 - RNA, 19 nt, Artificial Sequence
  Description of Artificial Sequence: Synthetic oligonucleotide
  Sense strand starting at position 3157 of SEQ ID NO: 317791
gcaagaagacguggauuca

SEQ ID NO: 512504 - RNA, 19 nt, Artificial Sequence
  Description of Artificial Sequence: Synthetic oligonucleotide
  Antisense strand to SEQ ID NO: 512503
ugaauccacgucuucuugc

SEQ ID NO: 512505 - RNA, 19 nt, Artificial Sequence
  Description of Artificial Sequence: Synthetic oligonucleotide
  Sense strand starting at position 3410 of SEQ ID NO: 317791
aagauaagguaaguuguau

SEQ ID NO: 512506 - RNA, 19 nt, Artificial Sequence
  Description of Artificial Sequence: Synthetic oligonucleotide
  Antisense strand to SEQ ID NO: 512505
auacaacuuaccuuaucuu

SEQ ID NO: 512507 - RNA, 19 nt, Artificial Sequence
  Description of Artificial Sequence: Synthetic oligonucleotide
  Sense strand starting at position 3422 of SEQ ID NO: 317791
guuguauuucuuggaaguu

SEQ ID NO: 512508 - RNA, 19 nt, Artificial Sequence
  Description of Artificial Sequence: Synthetic oligonucleotide
  Antisense strand to SEQ ID NO: 512507
aacuuccaagaaauacaac

SEQ ID NO: 512509 - RNA, 19 nt, Artificial Sequence
  Description of Artificial Sequence: Synthetic oligonucleotide
  Sense strand starting at position 3451 of SEQ ID NO: 317791
gagagugaauguuugaauc

SEQ ID NO: 512510 - RNA, 19 nt, Artificial Sequence
  Description of Artificial Sequence: Synthetic oligonucleotide
  Antisense strand to SEQ ID NO: 512509
gauucaaacauucacucuc

SEQ ID NO: 512511 - RNA, 19 nt, Artificial Sequence
  Description of Artificial Sequence: Synthetic oligonucleotide
  Sense strand starting at position 3500 of SEQ ID NO: 317791
agugaugugaaauguggaa

SEQ ID NO: 512512 - RNA, 19 nt, Artificial Sequence
  Description of Artificial Sequence: Synthetic oligonucleotide
  Antisense strand to SEQ ID NO: 512511
uuccacauuucacaucacu

SEQ ID NO: 512513 - RNA, 19 nt, Artificial Sequence
  Description of Artificial Sequence: Synthetic oligonucleotide
  Sense strand starting at position 3593 of SEQ ID NO: 317791
uauuucuaauugggaagga

SEQ ID NO: 512514 - RNA, 19 nt, Artificial Sequence
  Description of Artificial Sequence: Synthetic oligonucleotide
  Antisense strand to SEQ ID NO: 512513
uccuucccaauuagaaaua

SEQ ID NO: 512515 - RNA, 19 nt, Artificial Sequence
  Description of Artificial Sequence: Synthetic oligonucleotide
  Sense strand starting at position 3623 of SEQ ID NO: 317791
caguguucuguugcucuua

SEQ ID NO: 512516 - RNA, 19 nt, Artificial Sequence
  Description of Artificial Sequence: Synthetic oligonucleotide
  Antisense strand to SEQ ID NO: 512515
uaagagcaacagaacacug

SEQ ID NO: 512517 - RNA, 19 nt, Artificial Sequence
  Description of Artificial Sequence: Synthetic oligonucleotide
  Sense strand starting at position 3635 of SEQ ID NO: 317791
gcucuuaaggaagauguua

SEQ ID NO: 512518 - RNA, 19 nt, Artificial Sequence
  Description of Artificial Sequence: Synthetic oligonucleotide
  Antisense strand to SEQ ID NO: 512517
uaacaucuuccuuaagagc

SEQ ID NO: 512519 - RNA, 19 nt, Artificial Sequence
  Description of Artificial Sequence: Synthetic oligonucleotide
  Sense strand starting at position 3724 of SEQ ID NO: 317791
ucaagauaauaugccagua

SEQ ID NO: 512520 - RNA, 19 nt, Artificial Sequence
  Description of Artificial Sequence: Synthetic oligonucleotide
  Antisense strand to SEQ ID NO: 512519
uacuggcauauuaucuuga

SEQ ID NO: 512521 - RNA, 19 nt, Artificial Sequence
  Description of Artificial Sequence: Synthetic oligonucleotide
  Sense strand starting at position 3736 of SEQ ID NO: 317791
gccaguauuauauugcgca

SEQ ID NO: 512522 - RNA, 19 nt, Artificial Sequence
  Description of Artificial Sequence: Synthetic oligonucleotide
  Antisense strand to SEQ ID NO: 512521
ugcgcaauauaauacuggc

SEQ ID NO: 512523 - RNA, 19 nt, Artificial Sequence
  Description of Artificial Sequence: Synthetic oligonucleotide
  Sense strand starting at position 3791 of SEQ ID NO: 317791
gagggauucuccuugugua

SEQ ID NO: 512524 - RNA, 19 nt, Artificial Sequence
  Description of Artificial Sequence: Synthetic oligonucleotide
  Antisense strand to SEQ ID NO: 512523
uacacaaggagaaucccuc

SEQ ID NO: 512525 - RNA, 19 nt, Artificial Sequence
  Description of Artificial Sequence: Synthetic oligonucleotide
  Sense strand starting at position 3951 of SEQ ID NO: 317791
aacuuuaagucuguaagag

SEQ ID NO: 512526 - RNA, 19 nt, Artificial Sequence
  Description of Artificial Sequence: Synthetic oligonucleotide
  Antisense strand to SEQ ID NO: 512525
cucuuacagacuuaaaguu

SEQ ID NO: 512527 - RNA, 19 nt, Artificial Sequence
  Description of Artificial Sequence: Synthetic oligonucleotide
  Sense strand starting at position 3967 of SEQ ID NO: 317791
gagguccuauaguuuaauu

SEQ ID NO: 512528 - RNA, 19 nt, Artificial Sequence
  Description of Artificial Sequence: Synthetic oligonucleotide
  Antisense strand to SEQ ID NO: 512527
aauuaaacuauaggaccuc

SEQ ID NO: 512529 - RNA, 19 nt, Artificial Sequence
  Description of Artificial Sequence: Synthetic oligonucleotide
  Sense strand starting at position 3969 of SEQ ID NO: 317791
gguccuauaguuuaauugu

SEQ ID NO: 512530 - RNA, 19 nt, Artificial Sequence
  Description of Artificial Sequence: Synthetic oligonucleotide
  Antisense strand to SEQ ID NO: 512529
acaauuaaacuauaggacc

SEQ ID NO: 512531 - RNA, 19 nt, Artificial Sequence
  Description of Artificial Sequence: Synthetic oligonucleotide
  Sense strand starting at position 258 of SEQ ID NO: 317792
auacuugcauuauuaggaa

SEQ ID NO: 512532 - RNA, 19 nt, Artificial Sequence
  Description of Artificial Sequence: Synthetic oligonucleotide
  Antisense strand to SEQ ID NO: 512531
uuccuaauaaugcaaguau

SEQ ID NO: 512533 - RNA, 19 nt, Artificial Sequence
  Description of Artificial Sequence: Synthetic oligonucleotide
  Sense strand starting at position 495 of SEQ ID NO: 317792
uuugcugacuuaucacaga

SEQ ID NO: 512534 - RNA, 19 nt, Artificial Sequence
  Description of Artificial Sequence: Synthetic oligonucleotide
  Antisense strand to SEQ ID NO: 512533
ucugugauaagucagcaaa

SEQ ID NO: 512535 - RNA, 19 nt, Artificial Sequence
  Description of Artificial Sequence: Synthetic oligonucleotide
  Sense strand starting at position 520 of SEQ ID NO: 317792
uuuguucuuugauuagaag

SEQ ID NO: 512536 - RNA, 19 nt, Artificial Sequence
  Description of Artificial Sequence: Synthetic oligonucleotide
  Antisense strand to SEQ ID NO: 512535
cuucuaaucaaagaacaaa

SEQ ID NO: 512537 - RNA, 19 nt, Artificial Sequence
  Description of Artificial Sequence: Synthetic oligonucleotide
  Sense strand starting at position 637 of SEQ ID NO: 317792
gucacacaccauuagaguu

SEQ ID NO: 512538 - RNA, 19 nt, Artificial Sequence
  Description of Artificial Sequence: Synthetic oligonucleotide
  Antisense strand to SEQ ID NO: 512537
aacucuaauggugugugac

SEQ ID NO: 512539 - RNA, 19 nt, Artificial Sequence
  Description of Artificial Sequence: Synthetic oligonucleotide
  Sense strand starting at position 820 of SEQ ID NO: 317792
uauucuucccagcagagga

SEQ ID NO: 512540 - RNA, 19 nt, Artificial Sequence
  Description of Artificial Sequence: Synthetic oligonucleotide
  Antisense strand to SEQ ID NO: 512539
uccucugcugggaagaaua

SEQ ID NO: 512541 - RNA, 19 nt, Artificial Sequence
  Description of Artificial Sequence: Synthetic oligonucleotide
  Sense strand starting at position 834 of SEQ ID NO: 317792
gaggauuuaauaugcgcga

SEQ ID NO: 512542 - RNA, 19 nt, Artificial Sequence
  Description of Artificial Sequence: Synthetic oligonucleotide
  Antisense strand to SEQ ID NO: 512541
ucgcgcauauuaaauccuc

SEQ ID NO: 512543 - RNA, 19 nt, Artificial Sequence
  Description of Artificial Sequence: Synthetic oligonucleotide
  Sense strand starting at position 835 of SEQ ID NO: 317792
aggauuuaauaugcgcgaa

SEQ ID NO: 512544 - RNA, 19 nt, Artificial Sequence
  Description of Artificial Sequence: Synthetic oligonucleotide
  Antisense strand to SEQ ID NO: 512543
uucgcgcauauuaaauccu

SEQ ID NO: 512545 - RNA, 19 nt, Artificial Sequence
  Description of Artificial Sequence: Synthetic oligonucleotide
  Sense strand starting at position 836 of SEQ ID NO: 317792
ggauuuaauaugcgcgaag

SEQ ID NO: 512546 - RNA, 19 nt, Artificial Sequence
  Description of Artificial Sequence: Synthetic oligonucleotide
  Antisense strand to SEQ ID NO: 512545
cuucgcgcauauuaaaucc

SEQ ID NO: 512547 - RNA, 19 nt, Artificial Sequence
  Description of Artificial Sequence: Synthetic oligonucleotide
  Sense strand starting at position 837 of SEQ ID NO: 317792
gauuuaauaugcgcgaagu

SEQ ID NO: 512548 - RNA, 19 nt, Artificial Sequence
  Description of Artificial Sequence: Synthetic oligonucleotide
  Antisense strand to SEQ ID NO: 512547
acuucgcgcauauuaaauc

SEQ ID NO: 512549 - RNA, 19 nt, Artificial Sequence
  Description of Artificial Sequence: Synthetic oligonucleotide
  Sense strand starting at position 951 of SEQ ID NO: 317792
agcuaaacaucuccagagu

SEQ ID NO: 512550 - RNA, 19 nt, Artificial Sequence
  Description of Artificial Sequence: Synthetic oligonucleotide
  Antisense strand to SEQ ID NO: 512549
acucuggagauguuuagcu

SEQ ID NO: 512551 - RNA, 19 nt, Artificial Sequence
  Description of Artificial Sequence: Synthetic oligonucleotide
  Sense strand starting at position 968 of SEQ ID NO: 317792
gucacauuucuuugccuua

SEQ ID NO: 512552 - RNA, 19 nt, Artificial Sequence
  Description of Artificial Sequence: Synthetic oligonucleotide
  Antisense strand to SEQ ID NO: 512551
uaaggcaaagaaaugugac

SEQ ID NO: 512553 - RNA, 19 nt, Artificial Sequence
  Description of Artificial Sequence: Synthetic oligonucleotide
  Sense strand starting at position 1065 of SEQ ID NO: 317792
guuuguauugaagaguuaa

SEQ ID NO: 512554 - RNA, 19 nt, Artificial Sequence
  Description of Artificial Sequence: Synthetic oligonucleotide
  Antisense strand to SEQ ID NO: 512553
uuaacucuucaauacaaac

SEQ ID NO: 512555 - RNA, 19 nt, Artificial Sequence
  Description of Artificial Sequence: Synthetic oligonucleotide
  Sense strand starting at position 1222 of SEQ ID NO: 317792
uuaccaaaguaguuuaaca

SEQ ID NO: 512556 - RNA, 19 nt, Artificial Sequence
  Description of Artificial Sequence: Synthetic oligonucleotide
  Antisense strand to SEQ ID NO: 512555
uguuaaacuacuuugguaa

SEQ ID NO: 512557 - RNA, 19 nt, Artificial Sequence
  Description of Artificial Sequence: Synthetic oligonucleotide
  Sense strand starting at position 1332 of SEQ ID NO: 317792
gaguaucugcuacagaaac

SEQ ID NO: 512558 - RNA, 19 nt, Artificial Sequence
  Description of Artificial Sequence: Synthetic oligonucleotide
  Antisense strand to SEQ ID NO: 512557
guuucuguagcagauacuc

SEQ ID NO: 512559 - RNA, 19 nt, Artificial Sequence
  Description of Artificial Sequence: Synthetic oligonucleotide
  Sense strand starting at position 1382 of SEQ ID NO: 317792
aaaucuguaccuggagaua

SEQ ID NO: 512560 - RNA, 19 nt, Artificial Sequence
  Description of Artificial Sequence: Synthetic oligonucleotide
  Antisense strand to SEQ ID NO: 512559
uaucuccagguacagauuu

SEQ ID NO: 512561 - RNA, 19 nt, Artificial Sequence
  Description of Artificial Sequence: Synthetic oligonucleotide
  Sense strand starting at position 1674 of SEQ ID NO: 317792
gcuuuaaugaugcaggagu

SEQ ID NO: 512562 - RNA, 19 nt, Artificial Sequence
  Description of Artificial Sequence: Synthetic oligonucleotide
  Antisense strand to SEQ ID NO: 512561
acuccugcaucauuaaagc

SEQ ID NO: 512563 - RNA, 19 nt, Artificial Sequence
  Description of Artificial Sequence: Synthetic oligonucleotide
  Sense strand starting at position 1676 of SEQ ID NO: 317792
uuuaaugaugcaggaguaa

SEQ ID NO: 512564 - RNA, 19 nt, Artificial Sequence
  Description of Artificial Sequence: Synthetic oligonucleotide
  Antisense strand to SEQ ID NO: 512563
uuacuccugcaucauuaaa

SEQ ID NO: 512565 - RNA, 19 nt, Artificial Sequence
  Description of Artificial Sequence: Synthetic oligonucleotide
  Sense strand starting at position 1685 of SEQ ID NO: 317792
gcaggaguaagaugagcua

SEQ ID NO: 512566 - RNA, 19 nt, Artificial Sequence
  Description of Artificial Sequence: Synthetic oligonucleotide
  Antisense strand to SEQ ID NO: 512565
uagcucaucuuacuccugc

SEQ ID NO: 512567 - RNA, 19 nt, Artificial Sequence
  Description of Artificial Sequence: Synthetic oligonucleotide
  Sense strand starting at position 1688 of SEQ ID NO: 317792
ggaguaagaugagcuauuc

SEQ ID NO: 512568 - RNA, 19 nt, Artificial Sequence
  Description of Artificial Sequence: Synthetic oligonucleotide
  Antisense strand to SEQ ID NO: 512567
gaauagcucaucuuacucc

SEQ ID NO: 512569 - RNA, 19 nt, Artificial Sequence
  Description of Artificial Sequence: Synthetic oligonucleotide
  Sense strand starting at position 1698 of SEQ ID NO: 317792
gagcuauuccaaggugaag

SEQ ID NO: 512570 - RNA, 19 nt, Artificial Sequence
  Description of Artificial Sequence: Synthetic oligonucleotide
  Antisense strand to SEQ ID NO: 512569
cuucaccuuggaauagcuc

SEQ ID NO: 512571 - RNA, 19 nt, Artificial Sequence
  Description of Artificial Sequence: Synthetic oligonucleotide
  Sense strand starting at position 1802 of SEQ ID NO: 317792
agagcaagauuaucgggua

SEQ ID NO: 512572 - RNA, 19 nt, Artificial Sequence
  Description of Artificial Sequence: Synthetic oligonucleotide
  Antisense strand to SEQ ID NO: 512571
uacccgauaaucuugcucu

SEQ ID NO: 512573 - RNA, 19 nt, Artificial Sequence
  Description of Artificial Sequence: Synthetic oligonucleotide
  Sense strand starting at position 1817 of SEQ ID NO: 317792
gguacaagcagucacagua

SEQ ID NO: 512574 - RNA, 19 nt, Artificial Sequence
  Description of Artificial Sequence: Synthetic oligonucleotide
  Antisense strand to SEQ ID NO: 512573
uacugugacugcuuguacc

SEQ ID NO: 512575 - RNA, 19 nt, Artificial Sequence
  Description of Artificial Sequence: Synthetic oligonucleotide
  Sense strand starting at position 2283 of SEQ ID NO: 317792
uaaacauugcugcagagua

SEQ ID NO: 512576 - RNA, 19 nt, Artificial Sequence
  Description of Artificial Sequence: Synthetic oligonucleotide
  Antisense strand to SEQ ID NO: 512575
uacucugcagcaauguuua

SEQ ID NO: 512577 - RNA, 19 nt, Artificial Sequence
  Description of Artificial Sequence: Synthetic oligonucleotide
  Sense strand starting at position 2296 of SEQ ID NO: 317792
agaguagcaauguaugaua

SEQ ID NO: 512578 - RNA, 19 nt, Artificial Sequence
  Description of Artificial Sequence: Synthetic oligonucleotide
  Antisense strand to SEQ ID NO: 512577
uaucauacauugcuacucu

SEQ ID NO: 512579 - RNA, 19 nt, Artificial Sequence
  Description of Artificial Sequence: Synthetic oligonucleotide
  Sense strand starting at position 2309 of SEQ ID NO: 317792
augauagggucuuucucau

SEQ ID NO: 512580 - RNA, 19 nt, Artificial Sequence
  Description of Artificial Sequence: Synthetic oligonucleotide
  Antisense strand to SEQ ID NO: 512579
augagaaagacccuaucau

SEQ ID NO: 512581 - RNA, 19 nt, Artificial Sequence
  Description of Artificial Sequence: Synthetic oligonucleotide
  Sense strand starting at position 2521 of SEQ ID NO: 317792
agagguaauguuuguagau

SEQ ID NO: 512582 - RNA, 19 nt, Artificial Sequence
  Description of Artificial Sequence: Synthetic oligonucleotide
  Antisense strand to SEQ ID NO: 512581
aucuacaaacauuaccucu

SEQ ID NO: 512583 - RNA, 19 nt, Artificial Sequence
  Description of Artificial Sequence: Synthetic oligonucleotide
  Sense strand starting at position 2522 of SEQ ID NO: 317792
gagguaauguuuguagaua

SEQ ID NO: 512584 - RNA, 19 nt, Artificial Sequence
  Description of Artificial Sequence: Synthetic oligonucleotide
  Antisense strand to SEQ ID NO: 512583
uaucuacaaacauuaccuc

SEQ ID NO: 512585 - RNA, 19 nt, Artificial Sequence
  Description of Artificial Sequence: Synthetic oligonucleotide
  Sense strand starting at position 2550 of SEQ ID NO: 317792
cagggucugagucagacuu

SEQ ID NO: 512586 - RNA, 19 nt, Artificial Sequence
  Description of Artificial Sequence: Synthetic oligonucleotide
  Antisense strand to SEQ ID NO: 512585
aagucugacucagacccug

SEQ ID NO: 512587 - RNA, 19 nt, Artificial Sequence
  Description of Artificial Sequence: Synthetic oligonucleotide
  Sense strand starting at position 2767 of SEQ ID NO: 317792
gcugguuucucauuuccca

SEQ ID NO: 512588 - RNA, 19 nt, Artificial Sequence
  Description of Artificial Sequence: Synthetic oligonucleotide
  Antisense strand to SEQ ID NO: 512587
ugggaaaugagaaaccagc

SEQ ID NO: 512589 - RNA, 19 nt, Artificial Sequence
  Description of Artificial Sequence: Synthetic oligonucleotide
  Sense strand starting at position 2987 of SEQ ID NO: 317792
guauaagaaucuuuaacug

SEQ ID NO: 512590 - RNA, 19 nt, Artificial Sequence
  Description of Artificial Sequence: Synthetic oligonucleotide
  Antisense strand to SEQ ID NO: 512589
caguuaaagauucuuauac

SEQ ID NO: 512591 - RNA, 19 nt, Artificial Sequence
  Description of Artificial Sequence: Synthetic oligonucleotide
  Sense strand starting at position 3141 of SEQ ID NO: 317792
aggugugaucaugaaguua

SEQ ID NO: 512592 - RNA, 19 nt, Artificial Sequence
  Description of Artificial Sequence: Synthetic oligonucleotide
  Antisense strand to SEQ ID NO: 512591
uaacuucaugaucacaccu

SEQ ID NO: 512593 - RNA, 19 nt, Artificial Sequence
  Description of Artificial Sequence: Synthetic oligonucleotide
  Sense strand starting at position 3363 of SEQ ID NO: 317792
uacaaucugguagguaaau

SEQ ID NO: 512594 - RNA, 19 nt, Artificial Sequence
  Description of Artificial Sequence: Synthetic oligonucleotide
  Antisense strand to SEQ ID NO: 512593
auuuaccuaccagauugua

SEQ ID NO: 512595 - RNA, 19 nt, Artificial Sequence
  Description of Artificial Sequence: Synthetic oligonucleotide
  Sense strand starting at position 3384 of SEQ ID NO: 317792
ggaguucuuaaguaagcac

SEQ ID NO: 512596 - RNA, 19 nt, Artificial Sequence
  Description of Artificial Sequence: Synthetic oligonucleotide
  Antisense strand to SEQ ID NO: 512595
gugcuuacuuaagaacucc

SEQ ID NO: 512597 - RNA, 19 nt, Artificial Sequence
  Description of Artificial Sequence: Synthetic oligonucleotide
  Sense strand starting at position 3427 of SEQ ID NO: 317792
gugacaagucgucaagaua

SEQ ID NO: 512598 - RNA, 19 nt, Artificial Sequence
  Description of Artificial Sequence: Synthetic oligonucleotide
  Antisense strand to SEQ ID NO: 512597
uaucuugacgacuugucac

SEQ ID NO: 512599 - RNA, 19 nt, Artificial Sequence
  Description of Artificial Sequence: Synthetic oligonucleotide
  Sense strand starting at position 3430 of SEQ ID NO: 317792
acaagucgucaagauagau

SEQ ID NO: 512600 - RNA, 19 nt, Artificial Sequence
  Description of Artificial Sequence: Synthetic oligonucleotide
  Antisense strand to SEQ ID NO: 512599
aucuaucuugacgacuugu

SEQ ID NO: 512601 - RNA, 19 nt, Artificial Sequence
  Description of Artificial Sequence: Synthetic oligonucleotide
  Sense strand starting at position 3434 of SEQ ID NO: 317792
gucgucaagauagaucaua

SEQ ID NO: 512602 - RNA, 19 nt, Artificial Sequence
  Description of Artificial Sequence: Synthetic oligonucleotide
  Antisense strand to SEQ ID NO: 512601
uaugaucuaucuugacgac

SEQ ID NO: 512603 - RNA, 19 nt, Artificial Sequence
  Description of Artificial Sequence: Synthetic oligonucleotide
  Sense strand starting at position 3509 of SEQ ID NO: 317792
uacagauaaccuuguagug

SEQ ID NO: 512604 - RNA, 19 nt, Artificial Sequence
  Description of Artificial Sequence: Synthetic oligonucleotide
  Antisense strand to SEQ ID NO: 512603
cacuacaagguuaucugua

SEQ ID NO: 512605 - RNA, 19 nt, Artificial Sequence
  Description of Artificial Sequence: Synthetic oligonucleotide
  Sense strand starting at position 3521 of SEQ ID NO: 317792
uguagugauccuuaucaaa

SEQ ID NO: 512606 - RNA, 19 nt, Artificial Sequence
  Description of Artificial Sequence: Synthetic oligonucleotide
  Antisense strand to SEQ ID NO: 512605
uuugauaaggaucacuaca

SEQ ID NO: 512607 - RNA, 19 nt, Artificial Sequence
  Description of Artificial Sequence: Synthetic oligonucleotide
  Sense strand starting at position 3854 of SEQ ID NO: 317792
gugucacuuaaguacuaga

SEQ ID NO: 512608 - RNA, 19 nt, Artificial Sequence
  Description of Artificial Sequence: Synthetic oligonucleotide
  Antisense strand to SEQ ID NO: 512607
ucuaguacuuaagugacac

SEQ ID NO: 512609 - RNA, 19 nt, Artificial Sequence
  Description of Artificial Sequence: Synthetic oligonucleotide
  Sense strand starting at position 3906 of SEQ ID NO: 317792
gagggucucccuuaggagu

SEQ ID NO: 512610 - RNA, 19 nt, Artificial Sequence
  Description of Artificial Sequence: Synthetic oligonucleotide
  Antisense strand to SEQ ID NO: 512609
acuccuaagggagacccuc

SEQ ID NO: 512611 - RNA, 19 nt, Artificial Sequence
  Description of Artificial Sequence: Synthetic oligonucleotide
  Sense strand starting at position 55 of SEQ ID NO: 317793
ggaacagaaugagaacaau

SEQ ID NO: 512612 - RNA, 19 nt, Artificial Sequence
  Description of Artificial Sequence: Synthetic oligonucleotide
  Antisense strand to SEQ ID NO: 512611
auuguucucauucuguucc

SEQ ID NO: 512613 - RNA, 19 nt, Artificial Sequence
  Description of Artificial Sequence: Synthetic oligonucleotide
  Sense strand starting at position 429 of SEQ ID NO: 317793
aaaguauuggugugaauca

SEQ ID NO: 512614 - RNA, 19 nt, Artificial Sequence
  Description of Artificial Sequence: Synthetic oligonucleotide
  Antisense strand to SEQ ID NO: 512613
ugauucacaccaauacuuu

SEQ ID NO: 512615 - RNA, 19 nt, Artificial Sequence
  Description of Artificial Sequence: Synthetic oligonucleotide
  Sense strand starting at position 497 of SEQ ID NO: 317793
uuucuagaagcuuaaguaa

SEQ ID NO: 512616 - RNA, 19 nt, Artificial Sequence
  Description of Artificial Sequence: Synthetic oligonucleotide
  Antisense strand to SEQ ID NO: 512615
uuacuuaagcuucuagaaa

SEQ ID NO: 512617 - RNA, 19 nt, Artificial Sequence
  Description of Artificial Sequence: Synthetic oligonucleotide
  Sense strand starting at position 500 of SEQ ID NO: 317793
cuagaagcuuaaguaagaa

SEQ ID NO: 512618 - RNA, 19 nt, Artificial Sequence
  Description of Artificial Sequence: Synthetic oligonucleotide
  Antisense strand to SEQ ID NO: 512617
uucuuacuuaagcuucuag

SEQ ID NO: 512619 - RNA, 19 nt, Artificial Sequence
  Description of Artificial Sequence: Synthetic oligonucleotide
  Sense strand starting at position 572 of SEQ ID NO: 317793
acuaguaugauauguagua

SEQ ID NO: 512620 - RNA, 19 nt, Artificial Sequence
  Description of Artificial Sequence: Synthetic oligonucleotide
  Antisense strand to SEQ ID NO: 512619
uacuacauaucauacuagu

SEQ ID NO: 512621 - RNA, 19 nt, Artificial Sequence
  Description of Artificial Sequence: Synthetic oligonucleotide
  Sense strand starting at position 590 of SEQ ID NO: 317793
acagcaagguuaucaaaua

SEQ ID NO: 512622 - RNA, 19 nt, Artificial Sequence
  Description of Artificial Sequence: Synthetic oligonucleotide
  Antisense strand to SEQ ID NO: 512621
uauuugauaaccuugcugu

SEQ ID NO: 512623 - RNA, 19 nt, Artificial Sequence
  Description of Artificial Sequence: Synthetic oligonucleotide
  Sense strand starting at position 712 of SEQ ID NO: 317793
ugauauugguaguuugaga

SEQ ID NO: 512624 - RNA, 19 nt, Artificial Sequence
  Description of Artificial Sequence: Synthetic oligonucleotide
  Antisense strand to SEQ ID NO: 512623
ucucaaacuaccaauauca

SEQ ID NO: 512625 - RNA, 19 nt, Artificial Sequence
  Description of Artificial Sequence: Synthetic oligonucleotide
  Sense strand starting at position 813 of SEQ ID NO: 317793
uuccauauuaugggcgaaa

SEQ ID NO: 512626 - RNA, 19 nt, Artificial Sequence
  Description of Artificial Sequence: Synthetic oligonucleotide
  Antisense strand to SEQ ID NO: 512625
uuucgcccauaauauggaa

SEQ ID NO: 512627 - RNA, 19 nt, Artificial Sequence
  Description of Artificial Sequence: Synthetic oligonucleotide
  Sense strand starting at position 844 of SEQ ID NO: 317793
auuagauaacuuugugguu

SEQ ID NO: 512628 - RNA, 19 nt, Artificial Sequence
  Description of Artificial Sequence: Synthetic oligonucleotide
  Antisense strand to SEQ ID NO: 512627
aaccacaaaguuaucuaau

SEQ ID NO: 512629 - RNA, 19 nt, Artificial Sequence
  Description of Artificial Sequence: Synthetic oligonucleotide
  Sense strand starting at position 845 of SEQ ID NO: 317793
uuagauaacuuugugguua

SEQ ID NO: 512630 - RNA, 19 nt, Artificial Sequence
  Description of Artificial Sequence: Synthetic oligonucleotide
  Antisense strand to SEQ ID NO: 512629
uaaccacaaaguuaucuaa

SEQ ID NO: 512631 - RNA, 19 nt, Artificial Sequence
  Description of Artificial Sequence: Synthetic oligonucleotide
  Sense strand starting at position 850 of SEQ ID NO: 317793
uaacuuugugguuaaggga

SEQ ID NO: 512632 - RNA, 19 nt, Artificial Sequence
  Description of Artificial Sequence: Synthetic oligonucleotide
  Antisense strand to SEQ ID NO: 512631
ucccuuaaccacaaaguua

SEQ ID NO: 512633 - RNA, 19 nt, Artificial Sequence
  Description of Artificial Sequence: Synthetic oligonucleotide
  Sense strand starting at position 966 of SEQ ID NO: 317793
ucuuaacuuguacaaugua

SEQ ID NO: 512634 - RNA, 19 nt, Artificial Sequence
  Description of Artificial Sequence: Synthetic oligonucleotide
  Antisense strand to SEQ ID NO: 512633
uacauuguacaaguuaaga

SEQ ID NO: 512635 - RNA, 19 nt, Artificial Sequence
  Description of Artificial Sequence: Synthetic oligonucleotide
  Sense strand starting at position 1011 of SEQ ID NO: 317793
guuggugugaccguuaagu

SEQ ID NO: 512636 - RNA, 19 nt, Artificial Sequence
  Description of Artificial Sequence: Synthetic oligonucleotide
  Antisense strand to SEQ ID NO: 512635
acuuaacggucacaccaac

SEQ ID NO: 512637 - RNA, 19 nt, Artificial Sequence
  Description of Artificial Sequence: Synthetic oligonucleotide
  Sense strand starting at position 1053 of SEQ ID NO: 317793
aaaugcugucaagaguacu

SEQ ID NO: 512638 - RNA, 19 nt, Artificial Sequence
  Description of Artificial Sequence: Synthetic oligonucleotide
  Antisense strand to SEQ ID NO: 512637
aguacucuugacagcauuu

SEQ ID NO: 512639 - RNA, 19 nt, Artificial Sequence
  Description of Artificial Sequence: Synthetic oligonucleotide
  Sense strand starting at position 1129 of SEQ ID NO: 317793
gacaguaaaucuguaaugu

SEQ ID NO: 512640 - RNA, 19 nt, Artificial Sequence
  Description of Artificial Sequence: Synthetic oligonucleotide
  Antisense strand to SEQ ID NO: 512639
acauuacagauuuacuguc

SEQ ID NO: 512641 - RNA, 19 nt, Artificial Sequence
  Description of Artificial Sequence: Synthetic oligonucleotide
  Sense strand starting at position 1130 of SEQ ID NO: 317793
acaguaaaucuguaaugug

SEQ ID NO: 512642 - RNA, 19 nt, Artificial Sequence
  Description of Artificial Sequence: Synthetic oligonucleotide
  Antisense strand to SEQ ID NO: 512641
cacauuacagauuuacugu

SEQ ID NO: 512643 - RNA, 19 nt, Artificial Sequence
  Description of Artificial Sequence: Synthetic oligonucleotide
  Sense strand starting at position 1214 of SEQ ID NO: 317793
gcauuaacauuuguuguuu

SEQ ID NO: 512644 - RNA, 19 nt, Artificial Sequence
  Description of Artificial Sequence: Synthetic oligonucleotide
  Antisense strand to SEQ ID NO: 512643
aaacaacaaauguuaaugc

SEQ ID NO: 512645 - RNA, 19 nt, Artificial Sequence
  Description of Artificial Sequence: Synthetic oligonucleotide
  Sense strand starting at position 1579 of SEQ ID NO: 317793
aaaggaauguguuuacaau

SEQ ID NO: 512646 - RNA, 19 nt, Artificial Sequence
  Description of Artificial Sequence: Synthetic oligonucleotide
  Antisense strand to SEQ ID NO: 512645
auuguaaacacauuccuuu

SEQ ID NO: 512647 - RNA, 19 nt, Artificial Sequence
  Description of Artificial Sequence: Synthetic oligonucleotide
  Sense strand starting at position 1705 of SEQ ID NO: 317793
uugagaacuucuguaucau

SEQ ID NO: 512648 - RNA, 19 nt, Artificial Sequence
  Description of Artificial Sequence: Synthetic oligonucleotide
  Antisense strand to SEQ ID NO: 512647
augauacagaaguucucaa

SEQ ID NO: 512649 - RNA, 19 nt, Artificial Sequence
  Description of Artificial Sequence: Synthetic oligonucleotide
  Sense strand starting at position 1836 of SEQ ID NO: 317793
acauacuuugguugaagca

SEQ ID NO: 512650 - RNA, 19 nt, Artificial Sequence
  Description of Artificial Sequence: Synthetic oligonucleotide
  Antisense strand to SEQ ID NO: 512649
ugcuucaaccaaaguaugu

SEQ ID NO: 512651 - RNA, 19 nt, Artificial Sequence
  Description of Artificial Sequence: Synthetic oligonucleotide
  Sense strand starting at position 1837 of SEQ ID NO: 317793
cauacuuugguugaagcau

SEQ ID NO: 512652 - RNA, 19 nt, Artificial Sequence
  Description of Artificial Sequence: Synthetic oligonucleotide
  Antisense strand to SEQ ID NO: 512651
augcuucaaccaaaguaug

SEQ ID NO: 512653 - RNA, 19 nt, Artificial Sequence
  Description of Artificial Sequence: Synthetic oligonucleotide
  Sense strand starting at position 1886 of SEQ ID NO: 317793
acuugauacugggcucaga

SEQ ID NO: 512654 - RNA, 19 nt, Artificial Sequence
  Description of Artificial Sequence: Synthetic oligonucleotide
  Antisense strand to SEQ ID NO: 512653
ucugagcccaguaucaagu

SEQ ID NO: 512655 - RNA, 19 nt, Artificial Sequence
  Description of Artificial Sequence: Synthetic oligonucleotide
  Sense strand starting at position 1922 of SEQ ID NO: 317793
gccagcugacaauaaucuu

SEQ ID NO: 512656 - RNA, 19 nt, Artificial Sequence
  Description of Artificial Sequence: Synthetic oligonucleotide
  Antisense strand to SEQ ID NO: 512655
aagauuauugucagcuggc

SEQ ID NO: 512657 - RNA, 19 nt, Artificial Sequence
  Description of Artificial Sequence: Synthetic oligonucleotide
  Sense strand starting at position 1965 of SEQ ID NO: 317793
gcuggugaaguacauuaga

SEQ ID NO: 512658 - RNA, 19 nt, Artificial Sequence
  Description of Artificial Sequence: Synthetic oligonucleotide
  Antisense strand to SEQ ID NO: 512657
ucuaauguacuucaccagc

SEQ ID NO: 512659 - RNA, 19 nt, Artificial Sequence
  Description of Artificial Sequence: Synthetic oligonucleotide
  Sense strand starting at position 1976 of SEQ ID NO: 317793
acauuagaugacugcagua

SEQ ID NO: 512660 - RNA, 19 nt, Artificial Sequence
  Description of Artificial Sequence: Synthetic oligonucleotide
  Antisense strand to SEQ ID NO: 512659
uacugcagucaucuaaugu

SEQ ID NO: 512661 - RNA, 19 nt, Artificial Sequence
  Description of Artificial Sequence: Synthetic oligonucleotide
  Sense strand starting at position 1981 of SEQ ID NO: 317793
agaugacugcaguacuuaa

SEQ ID NO: 512662 - RNA, 19 nt, Artificial Sequence
  Description of Artificial Sequence: Synthetic oligonucleotide
  Antisense strand to SEQ ID NO: 512661
uuaaguacugcagucaucu

SEQ ID NO: 512663 - RNA, 19 nt, Artificial Sequence
  Description of Artificial Sequence: Synthetic oligonucleotide
  Sense strand starting at position 2022 of SEQ ID NO: 317793
gauuuagcuuucgugacau

SEQ ID NO: 512664 - RNA, 19 nt, Artificial Sequence
  Description of Artificial Sequence: Synthetic oligonucleotide
  Antisense strand to SEQ ID NO: 512663
augucacgaaagcuaaauc

SEQ ID NO: 512665 - RNA, 19 nt, Artificial Sequence
  Description of Artificial Sequence: Synthetic oligonucleotide
  Sense strand starting at position 2032 of SEQ ID NO: 317793
ucgugacauggugagucaa

SEQ ID NO: 512666 - RNA, 19 nt, Artificial Sequence
  Description of Artificial Sequence: Synthetic oligonucleotide
  Antisense strand to SEQ ID NO: 512665
uugacucaccaugucacga

SEQ ID NO: 512667 - RNA, 19 nt, Artificial Sequence
  Description of Artificial Sequence: Synthetic oligonucleotide
  Sense strand starting at position 2034 of SEQ ID NO: 317793
gugacauggugagucaaag

SEQ ID NO: 512668 - RNA, 19 nt, Artificial Sequence
  Description of Artificial Sequence: Synthetic oligonucleotide
  Antisense strand to SEQ ID NO: 512667
cuuugacucaccaugucac

SEQ ID NO: 512669 - RNA, 19 nt, Artificial Sequence
  Description of Artificial Sequence: Synthetic oligonucleotide
  Sense strand starting at position 2067 of SEQ ID NO: 317793
aaagcuaugcaguagagga

SEQ ID NO: 512670 - RNA, 19 nt, Artificial Sequence
  Description of Artificial Sequence: Synthetic oligonucleotide
  Antisense strand to SEQ ID NO: 512669
uccucuacugcauagcuuu

SEQ ID NO: 512671 - RNA, 19 nt, Artificial Sequence
  Description of Artificial Sequence: Synthetic oligonucleotide
  Sense strand starting at position 2090 of SEQ ID NO: 317793
gcaugaguaagcgaagaaa

SEQ ID NO: 512672 - RNA, 19 nt, Artificial Sequence
  Description of Artificial Sequence: Synthetic oligonucleotide
  Antisense strand to SEQ ID NO: 512671
uuucuucgcuuacucaugc

SEQ ID NO: 512673 - RNA, 19 nt, Artificial Sequence
  Description of Artificial Sequence: Synthetic oligonucleotide
  Sense strand starting at position 2266 of SEQ ID NO: 317793
uccugagauuugcuguguu

SEQ ID NO: 512674 - RNA, 19 nt, Artificial Sequence
  Description of Artificial Sequence: Synthetic oligonucleotide
  Antisense strand to SEQ ID NO: 512673
aacacagcaaaucucagga

SEQ ID NO: 512675 - RNA, 19 nt, Artificial Sequence
  Description of Artificial Sequence: Synthetic oligonucleotide
  Sense strand starting at position 2270 of SEQ ID NO: 317793
gagauuugcuguguuuccu

SEQ ID NO: 512676 - RNA, 19 nt, Artificial Sequence
  Description of Artificial Sequence: Synthetic oligonucleotide
  Antisense strand to SEQ ID NO: 512675
aggaaacacagcaaaucuc

SEQ ID NO: 512677 - RNA, 19 nt, Artificial Sequence
  Description of Artificial Sequence: Synthetic oligonucleotide
  Sense strand starting at position 2540 of SEQ ID NO: 317793
gcugucaauuaacuugaaa

SEQ ID NO: 512678 - RNA, 19 nt, Artificial Sequence
  Description of Artificial Sequence: Synthetic oligonucleotide
  Antisense strand to SEQ ID NO: 512677
uuucaaguuaauugacagc

SEQ ID NO: 512679 - RNA, 19 nt, Artificial Sequence
  Description of Artificial Sequence: Synthetic oligonucleotide
  Sense strand starting at position 2726 of SEQ ID NO: 317793
gauguauauuggguugauu

SEQ ID NO: 512680 - RNA, 19 nt, Artificial Sequence
  Description of Artificial Sequence: Synthetic oligonucleotide
  Antisense strand to SEQ ID NO: 512679
aaucaacccaauauacauc

SEQ ID NO: 512681 - RNA, 19 nt, Artificial Sequence
  Description of Artificial Sequence: Synthetic oligonucleotide
  Sense strand starting at position 3003 of SEQ ID NO: 317793
uguagcuauuucuccuuau

SEQ ID NO: 512682 - RNA, 19 nt, Artificial Sequence
  Description of Artificial Sequence: Synthetic oligonucleotide
  Antisense strand to SEQ ID NO: 512681
auaaggagaaauagcuaca

SEQ ID NO: 512683 - RNA, 19 nt, Artificial Sequence
  Description of Artificial Sequence: Synthetic oligonucleotide
  Sense strand starting at position 3004 of SEQ ID NO: 317793
guagcuauuucuccuuauc

SEQ ID NO: 512684 - RNA, 19 nt, Artificial Sequence
  Description of Artificial Sequence: Synthetic oligonucleotide
  Antisense strand to SEQ ID NO: 512683
gauaaggagaaauagcuac

SEQ ID NO: 512685 - RNA, 19 nt, Artificial Sequence
  Description of Artificial Sequence: Synthetic oligonucleotide
  Sense strand starting at position 3176 of SEQ ID NO: 317793
cuuuaauagugauuuacgu

SEQ ID NO: 512686 - RNA, 19 nt, Artificial Sequence
  Description of Artificial Sequence: Synthetic oligonucleotide
  Antisense strand to SEQ ID NO: 512685
acguaaaucacuauuaaag

SEQ ID NO: 512687 - RNA, 19 nt, Artificial Sequence
  Description of Artificial Sequence: Synthetic oligonucleotide
  Sense strand starting at position 3213 of SEQ ID NO: 317793
ucaugauguuauucucaug

SEQ ID NO: 512688 - RNA, 19 nt, Artificial Sequence
  Description of Artificial Sequence: Synthetic oligonucleotide
  Antisense strand to SEQ ID NO: 512687
caugagaauaacaucauga

SEQ ID NO: 512689 - RNA, 19 nt, Artificial Sequence
  Description of Artificial Sequence: Synthetic oligonucleotide
  Sense strand starting at position 3748 of SEQ ID NO: 317793
guauuuguauagguagguu

SEQ ID NO: 512690 - RNA, 19 nt, Artificial Sequence
  Description of Artificial Sequence: Synthetic oligonucleotide
  Antisense strand to SEQ ID NO: 512689
aaccuaccuauacaaauac

SEQ ID NO: 512691 - RNA, 19 nt, Artificial Sequence
  Description of Artificial Sequence: Synthetic oligonucleotide
  Sense strand starting at position 108 of SEQ ID NO: 317794
cuauuacacacgggaugau

SEQ ID NO: 512692 - RNA, 19 nt, Artificial Sequence
  Description of Artificial Sequence: Synthetic oligonucleotide
  Antisense strand to SEQ ID NO: 512691
aucaucccguguguaauag

SEQ ID NO: 512693 - RNA, 19 nt, Artificial Sequence
  Description of Artificial Sequence: Synthetic oligonucleotide
  Sense strand starting at position 118 of SEQ ID NO: 317794
cgggaugaugcucaagucu

SEQ ID NO: 512694 - RNA, 19 nt, Artificial Sequence
  Description of Artificial Sequence: Synthetic oligonucleotide
  Antisense strand to SEQ ID NO: 512693
agacuugagcaucaucccg

SEQ ID NO: 512695 - RNA, 19 nt, Artificial Sequence
  Description of Artificial Sequence: Synthetic oligonucleotide
  Sense strand starting at position 292 of SEQ ID NO: 317794
guacauuaacuaggcauau

SEQ ID NO: 512696 - RNA, 19 nt, Artificial Sequence
  Description of Artificial Sequence: Synthetic oligonucleotide
  Antisense strand to SEQ ID NO: 512695
auaugccuaguuaauguac

SEQ ID NO: 512697 - RNA, 19 nt, Artificial Sequence
  Description of Artificial Sequence: Synthetic oligonucleotide
  Sense strand starting at position 496 of SEQ ID NO: 317794
aagugaagauucgcagaga

SEQ ID NO: 512698 - RNA, 19 nt, Artificial Sequence
  Description of Artificial Sequence: Synthetic oligonucleotide
  Antisense strand to SEQ ID NO: 512697
ucucugcgaaucuucacuu

SEQ ID NO: 512699 - RNA, 19 nt, Artificial Sequence
  Description of Artificial Sequence: Synthetic oligonucleotide
  Sense strand starting at position 510 of SEQ ID NO: 317794
agagacacggucugauaca

SEQ ID NO: 512700 - RNA, 19 nt, Artificial Sequence
  Description of Artificial Sequence: Synthetic oligonucleotide
  Antisense strand to SEQ ID NO: 512699
uguaucagaccgugucucu

SEQ ID NO: 512701 - RNA, 19 nt, Artificial Sequence
  Description of Artificial Sequence: Synthetic oligonucleotide
  Sense strand starting at position 528 of SEQ ID NO: 317794
accucuauaguaugacuau

SEQ ID NO: 512702 - RNA, 19 nt, Artificial Sequence
  Description of Artificial Sequence: Synthetic oligonucleotide
  Antisense strand to SEQ ID NO: 512701
auagucauacuauagaggu

SEQ ID NO: 512703 - RNA, 19 nt, Artificial Sequence
  Description of Artificial Sequence: Synthetic oligonucleotide
  Sense strand starting at position 531 of SEQ ID NO: 317794
ucuauaguaugacuaucau

SEQ ID NO: 512704 - RNA, 19 nt, Artificial Sequence
  Description of Artificial Sequence: Synthetic oligonucleotide
  Antisense strand to SEQ ID NO: 512703
augauagucauacuauaga

SEQ ID NO: 512705 - RNA, 19 nt, Artificial Sequence
  Description of Artificial Sequence: Synthetic oligonucleotide
  Sense strand starting at position 596 of SEQ ID NO: 317794
guggcuauuccagaugauu

SEQ ID NO: 512706 - RNA, 19 nt, Artificial Sequence
  Description of Artificial Sequence: Synthetic oligonucleotide
  Antisense strand to SEQ ID NO: 512705
aaucaucuggaauagccac

SEQ ID NO: 512707 - RNA, 19 nt, Artificial Sequence
  Description of Artificial Sequence: Synthetic oligonucleotide
  Sense strand starting at position 610 of SEQ ID NO: 317794
ugauuaaacuucuugguuc

SEQ ID NO: 512708 - RNA, 19 nt, Artificial Sequence
  Description of Artificial Sequence: Synthetic oligonucleotide
  Antisense strand to SEQ ID NO: 512707
gaaccaagaaguuuaauca

SEQ ID NO: 512709 - RNA, 19 nt, Artificial Sequence
  Description of Artificial Sequence: Synthetic oligonucleotide
  Sense strand starting at position 773 of SEQ ID NO: 317794
cgagaucuacgguaacuca

SEQ ID NO: 512710 - RNA, 19 nt, Artificial Sequence
  Description of Artificial Sequence: Synthetic oligonucleotide
  Antisense strand to SEQ ID NO: 512709
ugaguuaccguagaucucg

SEQ ID NO: 512711 - RNA, 19 nt, Artificial Sequence
  Description of Artificial Sequence: Synthetic oligonucleotide
  Sense strand starting at position 1016 of SEQ ID NO: 317794
gcgaacugcgccuuccaua

SEQ ID NO: 512712 - RNA, 19 nt, Artificial Sequence
  Description of Artificial Sequence: Synthetic oligonucleotide
  Antisense strand to SEQ ID NO: 512711
uauggaaggcgcaguucgc

SEQ ID NO: 512713 - RNA, 19 nt, Artificial Sequence
  Description of Artificial Sequence: Synthetic oligonucleotide
  Sense strand starting at position 1046 of SEQ ID NO: 317794
uggacagugugcuccauuu

SEQ ID NO: 512714 - RNA, 19 nt, Artificial Sequence
  Description of Artificial Sequence: Synthetic oligonucleotide
  Antisense strand to SEQ ID NO: 512713
aaauggagcacacugucca

SEQ ID NO: 512715 - RNA, 19 nt, Artificial Sequence
  Description of Artificial Sequence: Synthetic oligonucleotide
  Sense strand starting at position 1314 of SEQ ID NO: 317794
cgggcagguggagauaaau

SEQ ID NO: 512716 - RNA, 19 nt, Artificial Sequence
  Description of Artificial Sequence: Synthetic oligonucleotide
  Antisense strand to SEQ ID NO: 512715
auuuaucuccaccugcccg

SEQ ID NO: 512717 - RNA, 19 nt, Artificial Sequence
  Description of Artificial Sequence: Synthetic oligonucleotide
  Sense strand starting at position 1377 of SEQ ID NO: 317794
uugguaauugaccagccaa

SEQ ID NO: 512718 - RNA, 19 nt, Artificial Sequence
  Description of Artificial Sequence: Synthetic oligonucleotide
  Antisense strand to SEQ ID NO: 512717
uuggcuggucaauuaccaa

SEQ ID NO: 512719 - RNA, 19 nt, Artificial Sequence
  Description of Artificial Sequence: Synthetic oligonucleotide
  Sense strand starting at position 1699 of SEQ ID NO: 317794
uucuaucaacgcuacagaa

SEQ ID NO: 512720 - RNA, 19 nt, Artificial Sequence
  Description of Artificial Sequence: Synthetic oligonucleotide
  Antisense strand to SEQ ID NO: 512719
uucuguagcguugauagaa

SEQ ID NO: 512721 - RNA, 19 nt, Artificial Sequence
  Description of Artificial Sequence: Synthetic oligonucleotide
  Sense strand starting at position 1701 of SEQ ID NO: 317794
cuaucaacgcuacagaauu

SEQ ID NO: 512722 - RNA, 19 nt, Artificial Sequence
  Description of Artificial Sequence: Synthetic oligonucleotide
  Antisense strand to SEQ ID NO: 512721
aauucuguagcguugauag

SEQ ID NO: 512723 - RNA, 19 nt, Artificial Sequence
  Description of Artificial Sequence: Synthetic oligonucleotide
  Sense strand starting at position 2056 of SEQ ID NO: 317794
guuugaaguccugagcaau

SEQ ID NO: 512724 - RNA, 19 nt, Artificial Sequence
  Description of Artificial Sequence: Synthetic oligonucleotide
  Antisense strand to SEQ ID NO: 512723
auugcucaggacuucaaac

SEQ ID NO: 512725 - RNA, 19 nt, Artificial Sequence
  Description of Artificial Sequence: Synthetic oligonucleotide
  Sense strand starting at position 2327 of SEQ ID NO: 317794
cuucgugugauagcacgua

SEQ ID NO: 512726 - RNA, 19 nt, Artificial Sequence
  Description of Artificial Sequence: Synthetic oligonucleotide
  Antisense strand to SEQ ID NO: 512725
uacgugcuaucacacgaag

SEQ ID NO: 512727 - RNA, 19 nt, Artificial Sequence
  Description of Artificial Sequence: Synthetic oligonucleotide
  Sense strand starting at position 2332 of SEQ ID NO: 317794
ugugauagcacguauaaca

SEQ ID NO: 512728 - RNA, 19 nt, Artificial Sequence
  Description of Artificial Sequence: Synthetic oligonucleotide
  Antisense strand to SEQ ID NO: 512727
uguuauacgugcuaucaca

SEQ ID NO: 512729 - RNA, 19 nt, Artificial Sequence
  Description of Artificial Sequence: Synthetic oligonucleotide
  Sense strand starting at position 2372 of SEQ ID NO: 317794
ggucuccugagaugacaau

SEQ ID NO: 512730 - RNA, 19 nt, Artificial Sequence
  Description of Artificial Sequence: Synthetic oligonucleotide
  Antisense strand to SEQ ID NO: 512729
auugucaucucaggagacc

SEQ ID NO: 512731 - RNA, 19 nt, Artificial Sequence
  Description of Artificial Sequence: Synthetic oligonucleotide
  Sense strand starting at position 2737 of SEQ ID NO: 317794
gccgaaguuggauaaccuu

SEQ ID NO: 512732 - RNA, 19 nt, Artificial Sequence
  Description of Artificial Sequence: Synthetic oligonucleotide
  Antisense strand to SEQ ID NO: 512731
aagguuauccaacuucggc

SEQ ID NO: 512733 - RNA, 19 nt, Artificial Sequence
  Description of Artificial Sequence: Synthetic oligonucleotide
  Sense strand starting at position 2774 of SEQ ID NO: 317794
acacauagcuguuugaaug

SEQ ID NO: 512734 - RNA, 19 nt, Artificial Sequence
  Description of Artificial Sequence: Synthetic oligonucleotide
  Antisense strand to SEQ ID NO: 512733
cauucaaacagcuaugugu

SEQ ID NO: 512735 - RNA, 19 nt, Artificial Sequence
  Description of Artificial Sequence: Synthetic oligonucleotide
  Sense strand starting at position 2915 of SEQ ID NO: 317794
gauggagucagccacuguu

SEQ ID NO: 512736 - RNA, 19 nt, Artificial Sequence
  Description of Artificial Sequence: Synthetic oligonucleotide
  Antisense strand to SEQ ID NO: 512735
aacaguggcugacuccauc

SEQ ID NO: 512737 - RNA, 19 nt, Artificial Sequence
  Description of Artificial Sequence: Synthetic oligonucleotide
  Sense strand starting at position 3015 of SEQ ID NO: 317794
gcaaguucucagggagauu

SEQ ID NO: 512738 - RNA, 19 nt, Artificial Sequence
  Description of Artificial Sequence: Synthetic oligonucleotide
  Antisense strand to SEQ ID NO: 512737
aaucucccugagaacuugc

SEQ ID NO: 512739 - RNA, 19 nt, Artificial Sequence
  Description of Artificial Sequence: Synthetic oligonucleotide
  Sense strand starting at position 3039 of SEQ ID NO: 317794
ugcacagagcucuaagaaa

SEQ ID NO: 512740 - RNA, 19 nt, Artificial Sequence
  Description of Artificial Sequence: Synthetic oligonucleotide
  Antisense strand to SEQ ID NO: 512739
uuucuuagagcucugugca

SEQ ID NO: 512741 - RNA, 19 nt, Artificial Sequence
  Description of Artificial Sequence: Synthetic oligonucleotide
  Sense strand starting at position 3063 of SEQ ID NO: 317794
ggcugcuuggccucugagu

SEQ ID NO: 512742 - RNA, 19 nt, Artificial Sequence
  Description of Artificial Sequence: Synthetic oligonucleotide
  Antisense strand to SEQ ID NO: 512741
acucagaggccaagcagcc

SEQ ID NO: 512743 - RNA, 19 nt, Artificial Sequence
  Description of Artificial Sequence: Synthetic oligonucleotide
  Sense strand starting at position 3064 of SEQ ID NO: 317794
gcugcuuggccucugagua

SEQ ID NO: 512744 - RNA, 19 nt, Artificial Sequence
  Description of Artificial Sequence: Synthetic oligonucleotide
  Antisense strand to SEQ ID NO: 512743
uacucagaggccaagcagc

SEQ ID NO: 512745 - RNA, 19 nt, Artificial Sequence
  Description of Artificial Sequence: Synthetic oligonucleotide
  Sense strand starting at position 3185 of SEQ ID NO: 317794
aaaguauuccuuuaggcag

SEQ ID NO: 512746 - RNA, 19 nt, Artificial Sequence
  Description of Artificial Sequence: Synthetic oligonucleotide
  Antisense strand to SEQ ID NO: 512745
cugccuaaaggaauacuuu

SEQ ID NO: 512747 - RNA, 19 nt, Artificial Sequence
  Description of Artificial Sequence: Synthetic oligonucleotide
  Sense strand starting at position 3244 of SEQ ID NO: 317794
agauguucugcacauggaa

SEQ ID NO: 512748 - RNA, 19 nt, Artificial Sequence
  Description of Artificial Sequence: Synthetic oligonucleotide
  Antisense strand to SEQ ID NO: 512747
uuccaugugcagaacaucu

SEQ ID NO: 512749 - RNA, 19 nt, Artificial Sequence
  Description of Artificial Sequence: Synthetic oligonucleotide
  Sense strand starting at position 3246 of SEQ ID NO: 317794
auguucugcacauggaaga

SEQ ID NO: 512750 - RNA, 19 nt, Artificial Sequence
  Description of Artificial Sequence: Synthetic oligonucleotide
  Antisense strand to SEQ ID NO: 512749
ucuuccaugugcagaacau

SEQ ID NO: 512751 - RNA, 19 nt, Artificial Sequence
  Description of Artificial Sequence: Synthetic oligonucleotide
  Sense strand starting at position 3317 of SEQ ID NO: 317794
cuaccaauuugugagaaga

SEQ ID NO: 512752 - RNA, 19 nt, Artificial Sequence
  Description of Artificial Sequence: Synthetic oligonucleotide
  Antisense strand to SEQ ID NO: 512751
ucuucucacaaauugguag

SEQ ID NO: 512753 - RNA, 19 nt, Artificial Sequence
  Description of Artificial Sequence: Synthetic oligonucleotide
  Sense strand starting at position 3327 of SEQ ID NO: 317794
gugagaagaggcugaacau

SEQ ID NO: 512754 - RNA, 19 nt, Artificial Sequence
  Description of Artificial Sequence: Synthetic oligonucleotide
  Antisense strand to SEQ ID NO: 512753
auguucagccucuucucac

SEQ ID NO: 512755 - RNA, 19 nt, Artificial Sequence
  Description of Artificial Sequence: Synthetic oligonucleotide
  Sense strand starting at position 3391 of SEQ ID NO: 317794
ggagaagaaagcugcuuua

SEQ ID NO: 512756 - RNA, 19 nt, Artificial Sequence
  Description of Artificial Sequence: Synthetic oligonucleotide
  Antisense strand to SEQ ID NO: 512755
uaaagcagcuuucuucucc

SEQ ID NO: 512757 - RNA, 19 nt, Artificial Sequence
  Description of Artificial Sequence: Synthetic oligonucleotide
  Sense strand starting at position 3394 of SEQ ID NO: 317794
gaagaaagcugcuuuagau

SEQ ID NO: 512758 - RNA, 19 nt, Artificial Sequence
  Description of Artificial Sequence: Synthetic oligonucleotide
  Antisense strand to SEQ ID NO: 512757
aucuaaagcagcuuucuuc

SEQ ID NO: 512759 - RNA, 19 nt, Artificial Sequence
  Description of Artificial Sequence: Synthetic oligonucleotide
  Sense strand starting at position 3416 of SEQ ID NO: 317794
uaguccauucgucagauua

SEQ ID NO: 512760 - RNA, 19 nt, Artificial Sequence
  Description of Artificial Sequence: Synthetic oligonucleotide
  Antisense strand to SEQ ID NO: 512759
uaaucugacgaauggacua

SEQ ID NO: 512761 - RNA, 19 nt, Artificial Sequence
  Description of Artificial Sequence: Synthetic oligonucleotide
  Sense strand starting at position 3648 of SEQ ID NO: 317794
gcagaaauauuauugguaa

SEQ ID NO: 512762 - RNA, 19 nt, Artificial Sequence
  Description of Artificial Sequence: Synthetic oligonucleotide
  Antisense strand to SEQ ID NO: 512761
uuaccaauaauauuucugc

SEQ ID NO: 512763 - RNA, 19 nt, Artificial Sequence
  Description of Artificial Sequence: Synthetic oligonucleotide
  Sense strand starting at position 3680 of SEQ ID NO: 317794
uguguaugcagacauagag

SEQ ID NO: 512764 - RNA, 19 nt, Artificial Sequence
  Description of Artificial Sequence: Synthetic oligonucleotide
  Antisense strand to SEQ ID NO: 512763
cucuaugucugcauacaca

SEQ ID NO: 512765 - RNA, 19 nt, Artificial Sequence
  Description of Artificial Sequence: Synthetic oligonucleotide
  Sense strand starting at position 3826 of SEQ ID NO: 317794
ugugcaaauuggcugauuu

SEQ ID NO: 512766 - RNA, 19 nt, Artificial Sequence
  Description of Artificial Sequence: Synthetic oligonucleotide
  Antisense strand to SEQ ID NO: 512765
aaaucagccaauuugcaca

SEQ ID NO: 512767 - RNA, 19 nt, Artificial Sequence
  Description of Artificial Sequence: Synthetic oligonucleotide
  Sense strand starting at position 3850 of SEQ ID NO: 317794
guagaagaggguugauagu

SEQ ID NO: 512768 - RNA, 19 nt, Artificial Sequence
  Description of Artificial Sequence: Synthetic oligonucleotide
  Antisense strand to SEQ ID NO: 512767
acuaucaacccucuucuac

SEQ ID NO: 512769 - RNA, 19 nt, Artificial Sequence
  Description of Artificial Sequence: Synthetic oligonucleotide
  Sense strand starting at position 3966 of SEQ ID NO: 317794
gucaaagguguuuagaaca

SEQ ID NO: 512770 - RNA, 19 nt, Artificial Sequence
  Description of Artificial Sequence: Synthetic oligonucleotide
  Antisense strand to SEQ ID NO: 512769
uguucuaaacaccuuugac

SEQ ID NO: 512771 - RNA, 19 nt, Artificial Sequence
  Description of Artificial Sequence: Synthetic oligonucleotide
  Sense strand starting at position 31 of SEQ ID NO: 317795
ucugucugacuuuagugaa

SEQ ID NO: 512772 - RNA, 19 nt, Artificial Sequence
  Description of Artificial Sequence: Synthetic oligonucleotide
  Antisense strand to SEQ ID NO: 512771
uucacuaaagucagacaga

SEQ ID NO: 512773 - RNA, 19 nt, Artificial Sequence
  Description of Artificial Sequence: Synthetic oligonucleotide
  Sense strand starting at position 195 of SEQ ID NO: 317795
guuggcauauaucuauuaa

SEQ ID NO: 512774 - RNA, 19 nt, Artificial Sequence
  Description of Artificial Sequence: Synthetic oligonucleotide
  Antisense strand to SEQ ID NO: 512773
uuaauagauauaugccaac

SEQ ID NO: 512775 - RNA, 19 nt, Artificial Sequence
  Description of Artificial Sequence: Synthetic oligonucleotide
  Sense strand starting at position 270 of SEQ ID NO: 317795
cauauuuggugacaagacu

SEQ ID NO: 512776 - RNA, 19 nt, Artificial Sequence
  Description of Artificial Sequence: Synthetic oligonucleotide
  Antisense strand to SEQ ID NO: 512775
agucuugucaccaaauaug

SEQ ID NO: 512777 - RNA, 19 nt, Artificial Sequence
  Description of Artificial Sequence: Synthetic oligonucleotide
  Sense strand starting at position 325 of SEQ ID NO: 317795
uggugcuaugugcuguaau

SEQ ID NO: 512778 - RNA, 19 nt, Artificial Sequence
  Description of Artificial Sequence: Synthetic oligonucleotide
  Antisense strand to SEQ ID NO: 512777
auuacagcacauagcacca

SEQ ID NO: 512779 - RNA, 19 nt, Artificial Sequence
  Description of Artificial Sequence: Synthetic oligonucleotide
  Sense strand starting at position 481 of SEQ ID NO: 317795
auaggauucuucuucugca

SEQ ID NO: 512780 - RNA, 19 nt, Artificial Sequence
  Description of Artificial Sequence: Synthetic oligonucleotide
  Antisense strand to SEQ ID NO: 512779
ugcagaagaagaauccuau

SEQ ID NO: 512781 - RNA, 19 nt, Artificial Sequence
  Description of Artificial Sequence: Synthetic oligonucleotide
  Sense strand starting at position 488 of SEQ ID NO: 317795
ucuucuucugcagaaugua

SEQ ID NO: 512782 - RNA, 19 nt, Artificial Sequence
  Description of Artificial Sequence: Synthetic oligonucleotide
  Antisense strand to SEQ ID NO: 512781
uacauucugcagaagaaga

SEQ ID NO: 512783 - RNA, 19 nt, Artificial Sequence
  Description of Artificial Sequence: Synthetic oligonucleotide
  Sense strand starting at position 575 of SEQ ID NO: 317795
auggguaacucuuccaaau

SEQ ID NO: 512784 - RNA, 19 nt, Artificial Sequence
  Description of Artificial Sequence: Synthetic oligonucleotide
  Antisense strand to SEQ ID NO: 512783
auuuggaagaguuacccau

SEQ ID NO: 512785 - RNA, 19 nt, Artificial Sequence
  Description of Artificial Sequence: Synthetic oligonucleotide
  Sense strand starting at position 618 of SEQ ID NO: 317795
aaggaagauucccuucugu

SEQ ID NO: 512786 - RNA, 19 nt, Artificial Sequence
  Description of Artificial Sequence: Synthetic oligonucleotide
  Antisense strand to SEQ ID NO: 512785
acagaagggaaucuuccuu

SEQ ID NO: 512787 - RNA, 19 nt, Artificial Sequence
  Description of Artificial Sequence: Synthetic oligonucleotide
  Sense strand starting at position 804 of SEQ ID NO: 317795
ucuguaguccauuauaucu

SEQ ID NO: 512788 - RNA, 19 nt, Artificial Sequence
  Description of Artificial Sequence: Synthetic oligonucleotide
  Antisense strand to SEQ ID NO: 512787
agauauaauggacuacaga

SEQ ID NO: 512789 - RNA, 19 nt, Artificial Sequence
  Description of Artificial Sequence: Synthetic oligonucleotide
  Sense strand starting at position 931 of SEQ ID NO: 317795
gguaacagucucuaacugu

SEQ ID NO: 512790 - RNA, 19 nt, Artificial Sequence
  Description of Artificial Sequence: Synthetic oligonucleotide
  Antisense strand to SEQ ID NO: 512789
acaguuagagacuguuacc

SEQ ID NO: 512791 - RNA, 19 nt, Artificial Sequence
  Description of Artificial Sequence: Synthetic oligonucleotide
  Sense strand starting at position 1031 of SEQ ID NO: 317795
ugugaauggugaucuugag

SEQ ID NO: 512792 - RNA, 19 nt, Artificial Sequence
  Description of Artificial Sequence: Synthetic oligonucleotide
  Antisense strand to SEQ ID NO: 512791
cucaagaucaccauucaca

SEQ ID NO: 512793 - RNA, 19 nt, Artificial Sequence
  Description of Artificial Sequence: Synthetic oligonucleotide
  Sense strand starting at position 1220 of SEQ ID NO: 317795
gcaauuauagcucacagau

SEQ ID NO: 512794 - RNA, 19 nt, Artificial Sequence
  Description of Artificial Sequence: Synthetic oligonucleotide
  Antisense strand to SEQ ID NO: 512793
aucugugagcuauaauugc

SEQ ID NO: 512795 - RNA, 19 nt, Artificial Sequence
  Description of Artificial Sequence: Synthetic oligonucleotide
  Sense strand starting at position 1270 of SEQ ID NO: 317795
gccacaaauacgugaagaa

SEQ ID NO: 512796 - RNA, 19 nt, Artificial Sequence
  Description of Artificial Sequence: Synthetic oligonucleotide
  Antisense strand to SEQ ID NO: 512795
uucuucacguauuuguggc

SEQ ID NO: 512797 - RNA, 19 nt, Artificial Sequence
  Description of Artificial Sequence: Synthetic oligonucleotide
  Sense strand starting at position 1300 of SEQ ID NO: 317795
cagguaaagugaucaccuu

SEQ ID NO: 512798 - RNA, 19 nt, Artificial Sequence
  Description of Artificial Sequence: Synthetic oligonucleotide
  Antisense strand to SEQ ID NO: 512797
aaggugaucacuuuaccug

SEQ ID NO: 512799 - RNA, 19 nt, Artificial Sequence
  Description of Artificial Sequence: Synthetic oligonucleotide
  Sense strand starting at position 1633 of SEQ ID NO: 317795
agagcuugaguagguauca

SEQ ID NO: 512800 - RNA, 19 nt, Artificial Sequence
  Description of Artificial Sequence: Synthetic oligonucleotide
  Antisense strand to SEQ ID NO: 512799
ugauaccuacucaagcucu

SEQ ID NO: 512801 - RNA, 19 nt, Artificial Sequence
  Description of Artificial Sequence: Synthetic oligonucleotide
  Sense strand starting at position 1812 of SEQ ID NO: 317795
guacuacuucguuauaaga

SEQ ID NO: 512802 - RNA, 19 nt, Artificial Sequence
  Description of Artificial Sequence: Synthetic oligonucleotide
  Antisense strand to SEQ ID NO: 512801
ucuuauaacgaaguaguac

SEQ ID NO: 512803 - RNA, 19 nt, Artificial Sequence
  Description of Artificial Sequence: Synthetic oligonucleotide
  Sense strand starting at position 2070 of SEQ ID NO: 317795
cuaucugauugguuuccau

SEQ ID NO: 512804 - RNA, 19 nt, Artificial Sequence
  Description of Artificial Sequence: Synthetic oligonucleotide
  Antisense strand to SEQ ID NO: 512803
auggaaaccaaucagauag

SEQ ID NO: 512805 - RNA, 19 nt, Artificial Sequence
  Description of Artificial Sequence: Synthetic oligonucleotide
  Sense strand starting at position 2091 of SEQ ID NO: 317795
agcguuucugauuaauaag

SEQ ID NO: 512806 - RNA, 19 nt, Artificial Sequence
  Description of Artificial Sequence: Synthetic oligonucleotide
  Antisense strand to SEQ ID NO: 512805
cuuauuaaucagaaacgcu

SEQ ID NO: 512807 - RNA, 19 nt, Artificial Sequence
  Description of Artificial Sequence: Synthetic oligonucleotide
  Sense strand starting at position 2183 of SEQ ID NO: 317795
ggacuucuuugggcacaau

SEQ ID NO: 512808 - RNA, 19 nt, Artificial Sequence
  Description of Artificial Sequence: Synthetic oligonucleotide
  Antisense strand to SEQ ID NO: 512807
auugugcccaaagaagucc

SEQ ID NO: 512809 - RNA, 19 nt, Artificial Sequence
  Description of Artificial Sequence: Synthetic oligonucleotide
  Sense strand starting at position 2186 of SEQ ID NO: 317795
cuucuuugggcacaaugau

SEQ ID NO: 512810 - RNA, 19 nt, Artificial Sequence
  Description of Artificial Sequence: Synthetic oligonucleotide
  Antisense strand to SEQ ID NO: 512809
aucauugugcccaaagaag

SEQ ID NO: 512811 - RNA, 19 nt, Artificial Sequence
  Description of Artificial Sequence: Synthetic oligonucleotide
  Sense strand starting at position 2234 of SEQ ID NO: 317795
aaaggagggcuuugucaaa

SEQ ID NO: 512812 - RNA, 19 nt, Artificial Sequence
  Description of Artificial Sequence: Synthetic oligonucleotide
  Antisense strand to SEQ ID NO: 512811
uuugacaaagcccuccuuu

SEQ ID NO: 512813 - RNA, 19 nt, Artificial Sequence
  Description of Artificial Sequence: Synthetic oligonucleotide
  Sense strand starting at position 2312 of SEQ ID NO: 317795
ucuguuugcaauugggaga

SEQ ID NO: 512814 - RNA, 19 nt, Artificial Sequence
  Description of Artificial Sequence: Synthetic oligonucleotide
  Antisense strand to SEQ ID NO: 512813
ucucccaauugcaaacaga

SEQ ID NO: 512815 - RNA, 19 nt, Artificial Sequence
  Description of Artificial Sequence: Synthetic oligonucleotide
  Sense strand starting at position 2346 of SEQ ID NO: 317795
gucuguaaccuguaaauca

SEQ ID NO: 512816 - RNA, 19 nt, Artificial Sequence
  Description of Artificial Sequence: Synthetic oligonucleotide
  Antisense strand to SEQ ID NO: 512815
ugauuuacagguuacagac

SEQ ID NO: 512817 - RNA, 19 nt, Artificial Sequence
  Description of Artificial Sequence: Synthetic oligonucleotide
  Sense strand starting at position 2356 of SEQ ID NO: 317795
uguaaaucaucuguagaaa

SEQ ID NO: 512818 - RNA, 19 nt, Artificial Sequence
  Description of Artificial Sequence: Synthetic oligonucleotide
  Antisense strand to SEQ ID NO: 512817
uuucuacagaugauuuaca

SEQ ID NO: 512819 - RNA, 19 nt, Artificial Sequence
  Description of Artificial Sequence: Synthetic oligonucleotide
  Sense strand starting at position 2546 of SEQ ID NO: 317795
ccucuacgaguuuauaauc

SEQ ID NO: 512820 - RNA, 19 nt, Artificial Sequence
  Description of Artificial Sequence: Synthetic oligonucleotide
  Antisense strand to SEQ ID NO: 512819
gauuauaaacucguagagg

SEQ ID NO: 512821 - RNA, 19 nt, Artificial Sequence
  Description of Artificial Sequence: Synthetic oligonucleotide
  Sense strand starting at position 2871 of SEQ ID NO: 317795
cagaaagaagucuguuuag

SEQ ID NO: 512822 - RNA, 19 nt, Artificial Sequence
  Description of Artificial Sequence: Synthetic oligonucleotide
  Antisense strand to SEQ ID NO: 512821
cuaaacagacuucuuucug

SEQ ID NO: 512823 - RNA, 19 nt, Artificial Sequence
  Description of Artificial Sequence: Synthetic oligonucleotide
  Sense strand starting at position 2874 of SEQ ID NO: 317795
aaagaagucuguuuaguau

SEQ ID NO: 512824 - RNA, 19 nt, Artificial Sequence
  Description of Artificial Sequence: Synthetic oligonucleotide
  Antisense strand to SEQ ID NO: 512823
auacuaaacagacuucuuu

SEQ ID NO: 512825 - RNA, 19 nt, Artificial Sequence
  Description of Artificial Sequence: Synthetic oligonucleotide
  Sense strand starting at position 2928 of SEQ ID NO: 317795
guagauaaauccuucugaa

SEQ ID NO: 512826 - RNA, 19 nt, Artificial Sequence
  Description of Artificial Sequence: Synthetic oligonucleotide
  Antisense strand to SEQ ID NO: 512825
uucagaaggauuuaucuac

SEQ ID NO: 512827 - RNA, 19 nt, Artificial Sequence
  Description of Artificial Sequence: Synthetic oligonucleotide
  Sense strand starting at position 2958 of SEQ ID NO: 317795
guaauaguuguaugaaaug

SEQ ID NO: 512828 - RNA, 19 nt, Artificial Sequence
  Description of Artificial Sequence: Synthetic oligonucleotide
  Antisense strand to SEQ ID NO: 512827
cauuucauacaacuauuac

SEQ ID NO: 512829 - RNA, 19 nt, Artificial Sequence
  Description of Artificial Sequence: Synthetic oligonucleotide
  Sense strand starting at position 2985 of SEQ ID NO: 317795
ggauauggcucacuuuaua

SEQ ID NO: 512830 - RNA, 19 nt, Artificial Sequence
  Description of Artificial Sequence: Synthetic oligonucleotide
  Antisense strand to SEQ ID NO: 512829
uauaaagugagccauaucc

SEQ ID NO: 512831 - RNA, 19 nt, Artificial Sequence
  Description of Artificial Sequence: Synthetic oligonucleotide
  Sense strand starting at position 3126 of SEQ ID NO: 317795
ugguaaagcuuauccauga

SEQ ID NO: 512832 - RNA, 19 nt, Artificial Sequence
  Description of Artificial Sequence: Synthetic oligonucleotide
  Antisense strand to SEQ ID NO: 512831
ucauggauaagcuuuacca

SEQ ID NO: 512833 - RNA, 19 nt, Artificial Sequence
  Description of Artificial Sequence: Synthetic oligonucleotide
  Sense strand starting at position 3127 of SEQ ID NO: 317795
gguaaagcuuauccaugaa

SEQ ID NO: 512834 - RNA, 19 nt, Artificial Sequence
  Description of Artificial Sequence: Synthetic oligonucleotide
  Antisense strand to SEQ ID NO: 512833
uucauggauaagcuuuacc

SEQ ID NO: 512835 - RNA, 19 nt, Artificial Sequence
  Description of Artificial Sequence: Synthetic oligonucleotide
  Sense strand starting at position 3150 of SEQ ID NO: 317795
agauaauagaggugcccau

SEQ ID NO: 512836 - RNA, 19 nt, Artificial Sequence
  Description of Artificial Sequence: Synthetic oligonucleotide
  Antisense strand to SEQ ID NO: 512835
augggcaccucuauuaucu

SEQ ID NO: 512837 - RNA, 19 nt, Artificial Sequence
  Description of Artificial Sequence: Synthetic oligonucleotide
  Sense strand starting at position 3172 of SEQ ID NO: 317795
aggcuugugcauuauggaa

SEQ ID NO: 512838 - RNA, 19 nt, Artificial Sequence
  Description of Artificial Sequence: Synthetic oligonucleotide
  Antisense strand to SEQ ID NO: 512837
uuccauaaugcacaagccu

SEQ ID NO: 512839 - RNA, 19 nt, Artificial Sequence
  Description of Artificial Sequence: Synthetic oligonucleotide
  Sense strand starting at position 3187 of SEQ ID NO: 317795
ggaaauucguuucuuuaaa

SEQ ID NO: 512840 - RNA, 19 nt, Artificial Sequence
  Description of Artificial Sequence: Synthetic oligonucleotide
  Antisense strand to SEQ ID NO: 512839
uuuaaagaaacgaauuucc

SEQ ID NO: 512841 - RNA, 19 nt, Artificial Sequence
  Description of Artificial Sequence: Synthetic oligonucleotide
  Sense strand starting at position 3273 of SEQ ID NO: 317795
aaacguggugauugaacau

SEQ ID NO: 512842 - RNA, 19 nt, Artificial Sequence
  Description of Artificial Sequence: Synthetic oligonucleotide
  Antisense strand to SEQ ID NO: 512841
auguucaaucaccacguuu

SEQ ID NO: 512843 - RNA, 19 nt, Artificial Sequence
  Description of Artificial Sequence: Synthetic oligonucleotide
  Sense strand starting at position 3280 of SEQ ID NO: 317795
gugauugaacauggaguga

SEQ ID NO: 512844 - RNA, 19 nt, Artificial Sequence
  Description of Artificial Sequence: Synthetic oligonucleotide
  Antisense strand to SEQ ID NO: 512843
ucacuccauguucaaucac

SEQ ID NO: 512845 - RNA, 19 nt, Artificial Sequence
  Description of Artificial Sequence: Synthetic oligonucleotide
  Sense strand starting at position 3394 of SEQ ID NO: 317795
gaaauaaagccuuaugcgu

SEQ ID NO: 512846 - RNA, 19 nt, Artificial Sequence
  Description of Artificial Sequence: Synthetic oligonucleotide
  Antisense strand to SEQ ID NO: 512845
acgcauaaggcuuuauuuc

SEQ ID NO: 512847 - RNA, 19 nt, Artificial Sequence
  Description of Artificial Sequence: Synthetic oligonucleotide
  Sense strand starting at position 3723 of SEQ ID NO: 317795
cugaaauccaacuguggga

SEQ ID NO: 512848 - RNA, 19 nt, Artificial Sequence
  Description of Artificial Sequence: Synthetic oligonucleotide
  Antisense strand to SEQ ID NO: 512847
ucccacaguuggauuucag

SEQ ID NO: 512849 - RNA, 19 nt, Artificial Sequence
  Description of Artificial Sequence: Synthetic oligonucleotide
  Sense strand starting at position 3978 of SEQ ID NO: 317795
aguagcauucuguaucaca

SEQ ID NO: 512850 - RNA, 19 nt, Artificial Sequence
  Description of Artificial Sequence: Synthetic oligonucleotide
  Antisense strand to SEQ ID NO: 512849
ugugauacagaaugcuacu

SEQ ID NO: 512851 - RNA, 19 nt, Artificial Sequence
  Description of Artificial Sequence: Synthetic oligonucleotide
  Sense strand starting at position 280 of SEQ ID NO: 317796
gguggcuguucugucaaca

SEQ ID NO: 512852 - RNA, 19 nt, Artificial Sequence
  Description of Artificial Sequence: Synthetic oligonucleotide
  Antisense strand to SEQ ID NO: 512851
uguugacagaacagccacc

SEQ ID NO: 512853 - RNA, 19 nt, Artificial Sequence
  Description of Artificial Sequence: Synthetic oligonucleotide
  Sense strand starting at position 367 of SEQ ID NO: 317796
ggagcuaaaccugggcuaa

SEQ ID NO: 512854 - RNA, 19 nt, Artificial Sequence
  Description of Artificial Sequence: Synthetic oligonucleotide
  Antisense strand to SEQ ID NO: 512853
uuagcccagguuuagcucc

SEQ ID NO: 512855 - RNA, 19 nt, Artificial Sequence
  Description of Artificial Sequence: Synthetic oligonucleotide
  Sense strand starting at position 578 of SEQ ID NO: 317796
ccagguuggcucuagcgau

SEQ ID NO: 512856 - RNA, 19 nt, Artificial Sequence
  Description of Artificial Sequence: Synthetic oligonucleotide
  Antisense strand to SEQ ID NO: 512855
aucgcuagagccaaccugg

SEQ ID NO: 512857 - RNA, 19 nt, Artificial Sequence
  Description of Artificial Sequence: Synthetic oligonucleotide
  Sense strand starting at position 688 of SEQ ID NO: 317796
ugaagaagguaucaucaau

SEQ ID NO: 512858 - RNA, 19 nt, Artificial Sequence
  Description of Artificial Sequence: Synthetic oligonucleotide
  Antisense strand to SEQ ID NO: 512857
auugaugauaccuucuuca

SEQ ID NO: 512859 - RNA, 19 nt, Artificial Sequence
  Description of Artificial Sequence: Synthetic oligonucleotide
  Sense strand starting at position 838 of SEQ ID NO: 317796
aagcgaagauucucugaac

SEQ ID NO: 512860 - RNA, 19 nt, Artificial Sequence
  Description of Artificial Sequence: Synthetic oligonucleotide
  Antisense strand to SEQ ID NO: 512859
guucagagaaucuucgcuu

SEQ ID NO: 512861 - RNA, 19 nt, Artificial Sequence
  Description of Artificial Sequence: Synthetic oligonucleotide
  Sense strand starting at position 841 of SEQ ID NO: 317796
cgaagauucucugaacgac

SEQ ID NO: 512862 - RNA, 19 nt, Artificial Sequence
  Description of Artificial Sequence: Synthetic oligonucleotide
  Antisense strand to SEQ ID NO: 512861
gucguucagagaaucuucg

SEQ ID NO: 512863 - RNA, 19 nt, Artificial Sequence
  Description of Artificial Sequence: Synthetic oligonucleotide
  Sense strand starting at position 865 of SEQ ID NO: 317796
ggucguauuguuucccuuu

SEQ ID NO: 512864 - RNA, 19 nt, Artificial Sequence
  Description of Artificial Sequence: Synthetic oligonucleotide
  Antisense strand to SEQ ID NO: 512863
aaagggaaacaauacgacc

SEQ ID NO: 512865 - RNA, 19 nt, Artificial Sequence
  Description of Artificial Sequence: Synthetic oligonucleotide
  Sense strand starting at position 1610 of SEQ ID NO: 317796
ucgccauguccguccuaaa

SEQ ID NO: 512866 - RNA, 19 nt, Artificial Sequence
  Description of Artificial Sequence: Synthetic oligonucleotide
  Antisense strand to SEQ ID NO: 512865
uuuaggacggacauggcga

SEQ ID NO: 512867 - RNA, 19 nt, Artificial Sequence
  Description of Artificial Sequence: Synthetic oligonucleotide
  Sense strand starting at position 1611 of SEQ ID NO: 317796
cgccauguccguccuaaac

SEQ ID NO: 512868 - RNA, 19 nt, Artificial Sequence
  Description of Artificial Sequence: Synthetic oligonucleotide
  Antisense strand to SEQ ID NO: 512867
guuuaggacggacauggcg

SEQ ID NO: 512869 - RNA, 19 nt, Artificial Sequence
  Description of Artificial Sequence: Synthetic oligonucleotide
  Sense strand starting at position 1613 of SEQ ID NO: 317796
ccauguccguccuaaacau

SEQ ID NO: 512870 - RNA, 19 nt, Artificial Sequence
  Description of Artificial Sequence: Synthetic oligonucleotide
  Antisense strand to SEQ ID NO: 512869
auguuuaggacggacaugg

SEQ ID NO: 512871 - RNA, 19 nt, Artificial Sequence
  Description of Artificial Sequence: Synthetic oligonucleotide
  Sense strand starting at position 2309 of SEQ ID NO: 317796
guggccuaguuauuaucga

SEQ ID NO: 512872 - RNA, 19 nt, Artificial Sequence
  Description of Artificial Sequence: Synthetic oligonucleotide
  Antisense strand to SEQ ID NO: 512871
ucgauaauaacuaggccac

SEQ ID NO: 512873 - RNA, 19 nt, Artificial Sequence
  Description of Artificial Sequence: Synthetic oligonucleotide
  Sense strand starting at position 2310 of SEQ ID NO: 317796
uggccuaguuauuaucgau

SEQ ID NO: 512874 - RNA, 19 nt, Artificial Sequence
  Description of Artificial Sequence: Synthetic oligonucleotide
  Antisense strand to SEQ ID NO: 512873
aucgauaauaacuaggcca

SEQ ID NO: 512875 - RNA, 19 nt, Artificial Sequence
  Description of Artificial Sequence: Synthetic oligonucleotide
  Sense strand starting at position 2313 of SEQ ID NO: 317796
ccuaguuauuaucgaucac

SEQ ID NO: 512876 - RNA, 19 nt, Artificial Sequence
  Description of Artificial Sequence: Synthetic oligonucleotide
  Antisense strand to SEQ ID NO: 512875
gugaucgauaauaacuagg

SEQ ID NO: 512877 - RNA, 19 nt, Artificial Sequence
  Description of Artificial Sequence: Synthetic oligonucleotide
  Sense strand starting at position 2317 of SEQ ID NO: 317796
guuauuaucgaucacccga

SEQ ID NO: 512878 - RNA, 19 nt, Artificial Sequence
  Description of Artificial Sequence: Synthetic oligonucleotide
  Antisense strand to SEQ ID NO: 512877
ucgggugaucgauaauaac

SEQ ID NO: 512879 - RNA, 19 nt, Artificial Sequence
  Description of Artificial Sequence: Synthetic oligonucleotide
  Sense strand starting at position 2319 of SEQ ID NO: 317796
uauuaucgaucacccgauu

SEQ ID NO: 512880 - RNA, 19 nt, Artificial Sequence
  Description of Artificial Sequence: Synthetic oligonucleotide
  Antisense strand to SEQ ID NO: 512879
aaucgggugaucgauaaua

SEQ ID NO: 512881 - RNA, 19 nt, Artificial Sequence
  Description of Artificial Sequence: Synthetic oligonucleotide
  Sense strand starting at position 2949 of SEQ ID NO: 317796
gugcuuugugcuggaagga

SEQ ID NO: 512882 - RNA, 19 nt, Artificial Sequence
  Description of Artificial Sequence: Synthetic oligonucleotide
  Antisense strand to SEQ ID NO: 512881
uccuuccagcacaaagcac

SEQ ID NO: 512883 - RNA, 19 nt, Artificial Sequence
  Description of Artificial Sequence: Synthetic oligonucleotide
  Sense strand starting at position 2950 of SEQ ID NO: 317796
ugcuuugugcuggaaggau

SEQ ID NO: 512884 - RNA, 19 nt, Artificial Sequence
  Description of Artificial Sequence: Synthetic oligonucleotide
  Antisense strand to SEQ ID NO: 512883
auccuuccagcacaaagca

SEQ ID NO: 512885 - RNA, 19 nt, Artificial Sequence
  Description of Artificial Sequence: Synthetic oligonucleotide
  Sense strand starting at position 3123 of SEQ ID NO: 317796
cacacuuaaugugagauga

SEQ ID NO: 512886 - RNA, 19 nt, Artificial Sequence
  Description of Artificial Sequence: Synthetic oligonucleotide
  Antisense strand to SEQ ID NO: 512885
ucaucucacauuaagugug

SEQ ID NO: 512887 - RNA, 19 nt, Artificial Sequence
  Description of Artificial Sequence: Synthetic oligonucleotide
  Sense strand starting at position 3125 of SEQ ID NO: 317796
cacuuaaugugagaugaga

SEQ ID NO: 512888 - RNA, 19 nt, Artificial Sequence
  Description of Artificial Sequence: Synthetic oligonucleotide
  Antisense strand to SEQ ID NO: 512887
ucucaucucacauuaagug

SEQ ID NO: 512889 - RNA, 19 nt, Artificial Sequence
  Description of Artificial Sequence: Synthetic oligonucleotide
  Sense strand starting at position 3163 of SEQ ID NO: 317796
ccuugauggcugcaugaca

SEQ ID NO: 512890 - RNA, 19 nt, Artificial Sequence
  Description of Artificial Sequence: Synthetic oligonucleotide
  Antisense strand to SEQ ID NO: 512889
ugucaugcagccaucaagg

SEQ ID NO: 512891 - RNA, 19 nt, Artificial Sequence
  Description of Artificial Sequence: Synthetic oligonucleotide
  Sense strand starting at position 3234 of SEQ ID NO: 317796
guggccagcucuuagaaca

SEQ ID NO: 512892 - RNA, 19 nt, Artificial Sequence
  Description of Artificial Sequence: Synthetic oligonucleotide
  Antisense strand to SEQ ID NO: 512891
uguucuaagagcuggccac

SEQ ID NO: 512893 - RNA, 19 nt, Artificial Sequence
  Description of Artificial Sequence: Synthetic oligonucleotide
  Sense strand starting at position 3279 of SEQ ID NO: 317796
uugcccagagcuuguagaa

SEQ ID NO: 512894 - RNA, 19 nt, Artificial Sequence
  Description of Artificial Sequence: Synthetic oligonucleotide
  Antisense strand to SEQ ID NO: 512893
uucuacaagcucugggcaa

SEQ ID NO: 512895 - RNA, 19 nt, Artificial Sequence
  Description of Artificial Sequence: Synthetic oligonucleotide
  Sense strand starting at position 3286 of SEQ ID NO: 317796
gagcuuguagaagacucua

SEQ ID NO: 512896 - RNA, 19 nt, Artificial Sequence
  Description of Artificial Sequence: Synthetic oligonucleotide
  Antisense strand to SEQ ID NO: 512895
uagagucuucuacaagcuc

SEQ ID NO: 512897 - RNA, 19 nt, Artificial Sequence
  Description of Artificial Sequence: Synthetic oligonucleotide
  Sense strand starting at position 3425 of SEQ ID NO: 317796
ccgcuuuccucugugcgau

SEQ ID NO: 512898 - RNA, 19 nt, Artificial Sequence
  Description of Artificial Sequence: Synthetic oligonucleotide
  Antisense strand to SEQ ID NO: 512897
aucgcacagaggaaagcgg

SEQ ID NO: 512899 - RNA, 19 nt, Artificial Sequence
  Description of Artificial Sequence: Synthetic oligonucleotide
  Sense strand starting at position 3428 of SEQ ID NO: 317796
cuuuccucugugcgaugaa

SEQ ID NO: 512900 - RNA, 19 nt, Artificial Sequence
  Description of Artificial Sequence: Synthetic oligonucleotide
  Antisense strand to SEQ ID NO: 512899
uucaucgcacagaggaaag

SEQ ID NO: 512901 - RNA, 19 nt, Artificial Sequence
  Description of Artificial Sequence: Synthetic oligonucleotide
  Sense strand starting at position 3429 of SEQ ID NO: 317796
uuuccucugugcgaugaaa

SEQ ID NO: 512902 - RNA, 19 nt, Artificial Sequence
  Description of Artificial Sequence: Synthetic oligonucleotide
  Antisense strand to SEQ ID NO: 512901
uuucaucgcacagaggaaa

SEQ ID NO: 512903 - RNA, 19 nt, Artificial Sequence
  Description of Artificial Sequence: Synthetic oligonucleotide
  Sense strand starting at position 3431 of SEQ ID NO: 317796
uccucugugcgaugaaagu

SEQ ID NO: 512904 - RNA, 19 nt, Artificial Sequence
  Description of Artificial Sequence: Synthetic oligonucleotide
  Antisense strand to SEQ ID NO: 512903
acuuucaucgcacagagga

SEQ ID NO: 512905 - RNA, 19 nt, Artificial Sequence
  Description of Artificial Sequence: Synthetic oligonucleotide
  Sense strand starting at position 3653 of SEQ ID NO: 317796
ccacuugcuccagagugau

SEQ ID NO: 512906 - RNA, 19 nt, Artificial Sequence
  Description of Artificial Sequence: Synthetic oligonucleotide
  Antisense strand to SEQ ID NO: 512905
aucacucuggagcaagugg

SEQ ID NO: 512907 - RNA, 19 nt, Artificial Sequence
  Description of Artificial Sequence: Synthetic oligonucleotide
  Sense strand starting at position 3706 of SEQ ID NO: 317796
ggagauguguuauuggucu

SEQ ID NO: 512908 - RNA, 19 nt, Artificial Sequence
  Description of Artificial Sequence: Synthetic oligonucleotide
  Antisense strand to SEQ ID NO: 512907
agaccaauaacacaucucc

SEQ ID NO: 512909 - RNA, 19 nt, Artificial Sequence
  Description of Artificial Sequence: Synthetic oligonucleotide
  Sense strand starting at position 3708 of SEQ ID NO: 317796
agauguguuauuggucucu

SEQ ID NO: 512910 - RNA, 19 nt, Artificial Sequence
  Description of Artificial Sequence: Synthetic oligonucleotide
  Antisense strand to SEQ ID NO: 512909
agagaccaauaacacaucu

SEQ ID NO: 512911 - RNA, 19 nt, Artificial Sequence
  Description of Artificial Sequence: Synthetic oligonucleotide
  Sense strand starting at position 3754 of SEQ ID NO: 317796
gggauuuacugaggguuuc

SEQ ID NO: 512912 - RNA, 19 nt, Artificial Sequence
  Description of Artificial Sequence: Synthetic oligonucleotide
  Antisense strand to SEQ ID NO: 512911
gaaacccucaguaaauccc

SEQ ID NO: 512913 - RNA, 19 nt, Artificial Sequence
  Description of Artificial Sequence: Synthetic oligonucleotide
  Sense strand starting at position 3908 of SEQ ID NO: 317796
gcagcagucacauggagau

SEQ ID NO: 512914 - RNA, 19 nt, Artificial Sequence
  Description of Artificial Sequence: Synthetic oligonucleotide
  Antisense strand to SEQ ID NO: 512913
aucuccaugugacugcugc

SEQ ID NO: 512915 - RNA, 19 nt, Artificial Sequence
  Description of Artificial Sequence: Synthetic oligonucleotide
  Sense strand starting at position 3931 of SEQ ID NO: 317796
uucugcucucaugaugcaa

SEQ ID NO: 512916 - RNA, 19 nt, Artificial Sequence
  Description of Artificial Sequence: Synthetic oligonucleotide
  Antisense strand to SEQ ID NO: 512915
uugcaucaugagagcagaa

SEQ ID NO: 512917 - RNA, 19 nt, Artificial Sequence
  Description of Artificial Sequence: Synthetic oligonucleotide
  Sense strand starting at position 3943 of SEQ ID NO: 317796
gaugcaaugugaugguaau

SEQ ID NO: 512918 - RNA, 19 nt, Artificial Sequence
  Description of Artificial Sequence: Synthetic oligonucleotide
  Antisense strand to SEQ ID NO: 512917
auuaccaucacauugcauc

SEQ ID NO: 512919 - RNA, 19 nt, Artificial Sequence
  Description of Artificial Sequence: Synthetic oligonucleotide
  Sense strand starting at position 3944 of SEQ ID NO: 317796
augcaaugugaugguaauc

SEQ ID NO: 512920 - RNA, 19 nt, Artificial Sequence
  Description of Artificial Sequence: Synthetic oligonucleotide
  Antisense strand to SEQ ID NO: 512919
gauuaccaucacauugcau

SEQ ID NO: 512921 - RNA, 19 nt, Artificial Sequence
  Description of Artificial Sequence: Synthetic oligonucleotide
  Sense strand starting at position 3949 of SEQ ID NO: 317796
augugaugguaauccuaac

SEQ ID NO: 512922 - RNA, 19 nt, Artificial Sequence
  Description of Artificial Sequence: Synthetic oligonucleotide
  Antisense strand to SEQ ID NO: 512921
guuaggauuaccaucacau

SEQ ID NO: 512923 - RNA, 19 nt, Artificial Sequence
  Description of Artificial Sequence: Synthetic oligonucleotide
  Sense strand starting at position 392 of SEQ ID NO: 317797
auguguagucuccaggaau

SEQ ID NO: 512924 - RNA, 19 nt, Artificial Sequence
  Description of Artificial Sequence: Synthetic oligonucleotide
  Antisense strand to SEQ ID NO: 512923
auuccuggagacuacacau

SEQ ID NO: 512925 - RNA, 19 nt, Artificial Sequence
  Description of Artificial Sequence: Synthetic oligonucleotide
  Sense strand starting at position 718 of SEQ ID NO: 317797
gcuguucccaagcaggaau

SEQ ID NO: 512926 - RNA, 19 nt, Artificial Sequence
  Description of Artificial Sequence: Synthetic oligonucleotide
  Antisense strand to SEQ ID NO: 512925
auuccugcuugggaacagc

SEQ ID NO: 512927 - RNA, 19 nt, Artificial Sequence
  Description of Artificial Sequence: Synthetic oligonucleotide
  Sense strand starting at position 768 of SEQ ID NO: 317797
gcucauagaugcccagaga

SEQ ID NO: 512928 - RNA, 19 nt, Artificial Sequence
  Description of Artificial Sequence: Synthetic oligonucleotide
  Antisense strand to SEQ ID NO: 512927
ucucugggcaucuaugagc

SEQ ID NO: 512929 - RNA, 19 nt, Artificial Sequence
  Description of Artificial Sequence: Synthetic oligonucleotide
  Sense strand starting at position 1054 of SEQ ID NO: 317797
ucacauauuuguugugcaa

SEQ ID NO: 512930 - RNA, 19 nt, Artificial Sequence
  Description of Artificial Sequence: Synthetic oligonucleotide
  Antisense strand to SEQ ID NO: 512929
uugcacaacaaauauguga

SEQ ID NO: 512931 - RNA, 19 nt, Artificial Sequence
  Description of Artificial Sequence: Synthetic oligonucleotide
  Sense strand starting at position 1121 of SEQ ID NO: 317797
gaagcagagugaggauaaa

SEQ ID NO: 512932 - RNA, 19 nt, Artificial Sequence
  Description of Artificial Sequence: Synthetic oligonucleotide
  Antisense strand to SEQ ID NO: 512931
uuuauccucacucugcuuc

SEQ ID NO: 512933 - RNA, 19 nt, Artificial Sequence
  Description of Artificial Sequence: Synthetic oligonucleotide
  Sense strand starting at position 1160 of SEQ ID NO: 317797
ggccaugacuuguuuccau

SEQ ID NO: 512934 - RNA, 19 nt, Artificial Sequence
  Description of Artificial Sequence: Synthetic oligonucleotide
  Antisense strand to SEQ ID NO: 512933
auggaaacaagucauggcc

SEQ ID NO: 512935 - RNA, 19 nt, Artificial Sequence
  Description of Artificial Sequence: Synthetic oligonucleotide
  Sense strand starting at position 1389 of SEQ ID NO: 317797
ggcacugggcucggucaua

SEQ ID NO: 512936 - RNA, 19 nt, Artificial Sequence
  Description of Artificial Sequence: Synthetic oligonucleotide
  Antisense strand to SEQ ID NO: 512935
uaugaccgagcccagugcc

SEQ ID NO: 512937 - RNA, 19 nt, Artificial Sequence
  Description of Artificial Sequence: Synthetic oligonucleotide
  Sense strand starting at position 1591 of SEQ ID NO: 317797
cccugagcauccuaugaag

SEQ ID NO: 512938 - RNA, 19 nt, Artificial Sequence
  Description of Artificial Sequence: Synthetic oligonucleotide
  Antisense strand to SEQ ID NO: 512937
cuucauaggaugcucaggg

SEQ ID NO: 512939 - RNA, 19 nt, Artificial Sequence
  Description of Artificial Sequence: Synthetic oligonucleotide
  Sense strand starting at position 1720 of SEQ ID NO: 317797
gagguauuauuaucccaug

SEQ ID NO: 512940 - RNA, 19 nt, Artificial Sequence
  Description of Artificial Sequence: Synthetic oligonucleotide
  Antisense strand to SEQ ID NO: 512939
caugggauaauaauaccuc

SEQ ID NO: 512941 - RNA, 19 nt, Artificial Sequence
  Description of Artificial Sequence: Synthetic oligonucleotide
  Sense strand starting at position 1851 of SEQ ID NO: 317797
uugccuuggcucuagggau

SEQ ID NO: 512942 - RNA, 19 nt, Artificial Sequence
  Description of Artificial Sequence: Synthetic oligonucleotide
  Antisense strand to SEQ ID NO: 512941
aucccuagagccaaggcaa

SEQ ID NO: 512943 - RNA, 19 nt, Artificial Sequence
  Description of Artificial Sequence: Synthetic oligonucleotide
  Sense strand starting at position 2100 of SEQ ID NO: 317797
cuccuaaugaggcagagua

SEQ ID NO: 512944 - RNA, 19 nt, Artificial Sequence
  Description of Artificial Sequence: Synthetic oligonucleotide
  Antisense strand to SEQ ID NO: 512943
uacucugccucauuaggag

SEQ ID NO: 512945 - RNA, 19 nt, Artificial Sequence
  Description of Artificial Sequence: Synthetic oligonucleotide
  Sense strand starting at position 2320 of SEQ ID NO: 317797
ugcuacgagucuucaguga

SEQ ID NO: 512946 - RNA, 19 nt, Artificial Sequence
  Description of Artificial Sequence: Synthetic oligonucleotide
  Antisense strand to SEQ ID NO: 512945
ucacugaagacucguagca

SEQ ID NO: 512947 - RNA, 19 nt, Artificial Sequence
  Description of Artificial Sequence: Synthetic oligonucleotide
  Sense strand starting at position 3004 of SEQ ID NO: 317797
gcacaacuuucuuaaggca

SEQ ID NO: 512948 - RNA, 19 nt, Artificial Sequence
  Description of Artificial Sequence: Synthetic oligonucleotide
  Antisense strand to SEQ ID NO: 512947
ugccuuaagaaaguugugc

SEQ ID NO: 512949 - RNA, 19 nt, Artificial Sequence
  Description of Artificial Sequence: Synthetic oligonucleotide
  Sense strand starting at position 3024 of SEQ ID NO: 317797
accacugagucgucaccau

SEQ ID NO: 512950 - RNA, 19 nt, Artificial Sequence
  Description of Artificial Sequence: Synthetic oligonucleotide
  Antisense strand to SEQ ID NO: 512949
auggugacgacucaguggu

SEQ ID NO: 512951 - RNA, 19 nt, Artificial Sequence
  Description of Artificial Sequence: Synthetic oligonucleotide
  Sense strand starting at position 3087 of SEQ ID NO: 317797
auagauauauagucaugca

SEQ ID NO: 512952 - RNA, 19 nt, Artificial Sequence
  Description of Artificial Sequence: Synthetic oligonucleotide
  Antisense strand to SEQ ID NO: 512951
ugcaugacuauauaucuau

SEQ ID NO: 512953 - RNA, 19 nt, Artificial Sequence
  Description of Artificial Sequence: Synthetic oligonucleotide
  Sense strand starting at position 3095 of SEQ ID NO: 317797
auagucaugcaccauauau

SEQ ID NO: 512954 - RNA, 19 nt, Artificial Sequence
  Description of Artificial Sequence: Synthetic oligonucleotide
  Antisense strand to SEQ ID NO: 512953
auauauggugcaugacuau

SEQ ID NO: 512955 - RNA, 19 nt, Artificial Sequence
  Description of Artificial Sequence: Synthetic oligonucleotide
  Sense strand starting at position 3183 of SEQ ID NO: 317797
ggcacccuuucuguguuua

SEQ ID NO: 512956 - RNA, 19 nt, Artificial Sequence
  Description of Artificial Sequence: Synthetic oligonucleotide
  Antisense strand to SEQ ID NO: 512955
uaaacacagaaagggugcc

SEQ ID NO: 512957 - RNA, 19 nt, Artificial Sequence
  Description of Artificial Sequence: Synthetic oligonucleotide
  Sense strand starting at position 3337 of SEQ ID NO: 317797
uguguaagucacuguguga

SEQ ID NO: 512958 - RNA, 19 nt, Artificial Sequence
  Description of Artificial Sequence: Synthetic oligonucleotide
  Antisense strand to SEQ ID NO: 512957
ucacacagugacuuacaca

SEQ ID NO: 512959 - RNA, 19 nt, Artificial Sequence
  Description of Artificial Sequence: Synthetic oligonucleotide
  Sense strand starting at position 3340 of SEQ ID NO: 317797
guaagucacugugugaugu

SEQ ID NO: 512960 - RNA, 19 nt, Artificial Sequence
  Description of Artificial Sequence: Synthetic oligonucleotide
  Antisense strand to SEQ ID NO: 512959
acaucacacagugacuuac

SEQ ID NO: 512961 - RNA, 19 nt, Artificial Sequence
  Description of Artificial Sequence: Synthetic oligonucleotide
  Sense strand starting at position 3341 of SEQ ID NO: 317797
uaagucacugugugauguu

SEQ ID NO: 512962 - RNA, 19 nt, Artificial Sequence
  Description of Artificial Sequence: Synthetic oligonucleotide
  Antisense strand to SEQ ID NO: 512961
aacaucacacagugacuua

SEQ ID NO: 512963 - RNA, 19 nt, Artificial Sequence
  Description of Artificial Sequence: Synthetic oligonucleotide
  Sense strand starting at position 3367 of SEQ ID NO: 317797
ugacgaaauugccugauga

SEQ ID NO: 512964 - RNA, 19 nt, Artificial Sequence
  Description of Artificial Sequence: Synthetic oligonucleotide
  Antisense strand to SEQ ID NO: 512963
ucaucaggcaauuucguca

SEQ ID NO: 512965 - RNA, 19 nt, Artificial Sequence
  Description of Artificial Sequence: Synthetic oligonucleotide
  Sense strand starting at position 3368 of SEQ ID NO: 317797
gacgaaauugccugaugac

SEQ ID NO: 512966 - RNA, 19 nt, Artificial Sequence
  Description of Artificial Sequence: Synthetic oligonucleotide
  Antisense strand to SEQ ID NO: 512965
gucaucaggcaauuucguc

SEQ ID NO: 512967 - RNA, 19 nt, Artificial Sequence
  Description of Artificial Sequence: Synthetic oligonucleotide
  Sense strand starting at position 3369 of SEQ ID NO: 317797
acgaaauugccugaugaca

SEQ ID NO: 512968 - RNA, 19 nt, Artificial Sequence
  Description of Artificial Sequence: Synthetic oligonucleotide
  Antisense strand to SEQ ID NO: 512967
ugucaucaggcaauuucgu

SEQ ID NO: 512969 - RNA, 19 nt, Artificial Sequence
  Description of Artificial Sequence: Synthetic oligonucleotide
  Sense strand starting at position 3415 of SEQ ID NO: 317797
aaggguuguguugacugua

SEQ ID NO: 512970 - RNA, 19 nt, Artificial Sequence
  Description of Artificial Sequence: Synthetic oligonucleotide
  Antisense strand to SEQ ID NO: 512969
uacagucaacacaacccuu

SEQ ID NO: 512971 - RNA, 19 nt, Artificial Sequence
  Description of Artificial Sequence: Synthetic oligonucleotide
  Sense strand starting at position 3418 of SEQ ID NO: 317797
gguuguguugacuguauau

SEQ ID NO: 512972 - RNA, 19 nt, Artificial Sequence
  Description of Artificial Sequence: Synthetic oligonucleotide
  Antisense strand to SEQ ID NO: 512971
auauacagucaacacaacc

SEQ ID NO: 512973 - RNA, 19 nt, Artificial Sequence
  Description of Artificial Sequence: Synthetic oligonucleotide
  Sense strand starting at position 3420 of SEQ ID NO: 317797
uuguguugacuguauauca

SEQ ID NO: 512974 - RNA, 19 nt, Artificial Sequence
  Description of Artificial Sequence: Synthetic oligonucleotide
  Antisense strand to SEQ ID NO: 512973
ugauauacagucaacacaa

SEQ ID NO: 512975 - RNA, 19 nt, Artificial Sequence
  Description of Artificial Sequence: Synthetic oligonucleotide
  Sense strand starting at position 3444 of SEQ ID NO: 317797
uugcuauagucaggcauuu

SEQ ID NO: 512976 - RNA, 19 nt, Artificial Sequence
  Description of Artificial Sequence: Synthetic oligonucleotide
  Antisense strand to SEQ ID NO: 512975
aaaugccugacuauagcaa

SEQ ID NO: 512977 - RNA, 19 nt, Artificial Sequence
  Description of Artificial Sequence: Synthetic oligonucleotide
  Sense strand starting at position 3571 of SEQ ID NO: 317797
aaggguaaucuacgccuga

SEQ ID NO: 512978 - RNA, 19 nt, Artificial Sequence
  Description of Artificial Sequence: Synthetic oligonucleotide
  Antisense strand to SEQ ID NO: 512977
ucaggcguagauuacccuu

SEQ ID NO: 512979 - RNA, 19 nt, Artificial Sequence
  Description of Artificial Sequence: Synthetic oligonucleotide
  Sense strand starting at position 3572 of SEQ ID NO: 317797
aggguaaucuacgccugaa

SEQ ID NO: 512980 - RNA, 19 nt, Artificial Sequence
  Description of Artificial Sequence: Synthetic oligonucleotide
  Antisense strand to SEQ ID NO: 512979
uucaggcguagauuacccu

SEQ ID NO: 512981 - RNA, 19 nt, Artificial Sequence
  Description of Artificial Sequence: Synthetic oligonucleotide
  Sense strand starting at position 3575 of SEQ ID NO: 317797
guaaucuacgccugaauug

SEQ ID NO: 512982 - RNA, 19 nt, Artificial Sequence
  Description of Artificial Sequence: Synthetic oligonucleotide
  Antisense strand to SEQ ID NO: 512981
caauucaggcguagauuac

SEQ ID NO: 512983 - RNA, 19 nt, Artificial Sequence
  Description of Artificial Sequence: Synthetic oligonucleotide
  Sense strand starting at position 3686 of SEQ ID NO: 317797
ccaggauuucugugcugua

SEQ ID NO: 512984 - RNA, 19 nt, Artificial Sequence
  Description of Artificial Sequence: Synthetic oligonucleotide
  Antisense strand to SEQ ID NO: 512983
uacagcacagaaauccugg

SEQ ID NO: 512985 - RNA, 19 nt, Artificial Sequence
  Description of Artificial Sequence: Synthetic oligonucleotide
  Sense strand starting at position 3687 of SEQ ID NO: 317797
caggauuucugugcuguag

SEQ ID NO: 512986 - RNA, 19 nt, Artificial Sequence
  Description of Artificial Sequence: Synthetic oligonucleotide
  Antisense strand to SEQ ID NO: 512985
cuacagcacagaaauccug

SEQ ID NO: 512987 - RNA, 19 nt, Artificial Sequence
  Description of Artificial Sequence: Synthetic oligonucleotide
  Sense strand starting at position 3721 of SEQ ID NO: 317797
ggguguccacacuaaauuc

SEQ ID NO: 512988 - RNA, 19 nt, Artificial Sequence
  Description of Artificial Sequence: Synthetic oligonucleotide
  Antisense strand to SEQ ID NO: 512987
gaauuuaguguggacaccc

SEQ ID NO: 512989 - RNA, 19 nt, Artificial Sequence
  Description of Artificial Sequence: Synthetic oligonucleotide
  Sense strand starting at position 3836 of SEQ ID NO: 317797
aggugcugaucaguaguga

SEQ ID NO: 512990 - RNA, 19 nt, Artificial Sequence
  Description of Artificial Sequence: Synthetic oligonucleotide
  Antisense strand to SEQ ID NO: 512989
ucacuacugaucagcaccu

SEQ ID NO: 512991 - RNA, 19 nt, Artificial Sequence
  Description of Artificial Sequence: Synthetic oligonucleotide
  Sense strand starting at position 3851 of SEQ ID NO: 317797
gugagacugugccuaugaa

SEQ ID NO: 512992 - RNA, 19 nt, Artificial Sequence
  Description of Artificial Sequence: Synthetic oligonucleotide
  Antisense strand to SEQ ID NO: 512991
uucauaggcacagucucac

SEQ ID NO: 512993 - RNA, 19 nt, Artificial Sequence
  Description of Artificial Sequence: Synthetic oligonucleotide
  Sense strand starting at position 3852 of SEQ ID NO: 317797
ugagacugugccuaugaau

SEQ ID NO: 512994 - RNA, 19 nt, Artificial Sequence
  Description of Artificial Sequence: Synthetic oligonucleotide
  Antisense strand to SEQ ID NO: 512993
auucauaggcacagucuca

SEQ ID NO: 512995 - RNA, 19 nt, Artificial Sequence
  Description of Artificial Sequence: Synthetic oligonucleotide
  Sense strand starting at position 3950 of SEQ ID NO: 317797
ucaaguucuggguaauugu

SEQ ID NO: 512996 - RNA, 19 nt, Artificial Sequence
  Description of Artificial Sequence: Synthetic oligonucleotide
  Antisense strand to SEQ ID NO: 512995
acaauuacccagaacuuga

SEQ ID NO: 512997 - RNA, 19 nt, Artificial Sequence
  Description of Artificial Sequence: Synthetic oligonucleotide
  Sense strand starting at position 3953 of SEQ ID NO: 317797
aguucuggguaauuguaga

SEQ ID NO: 512998 - RNA, 19 nt, Artificial Sequence
  Description of Artificial Sequence: Synthetic oligonucleotide
  Antisense strand to SEQ ID NO: 512997
ucuacaauuacccagaacu

SEQ ID NO: 512999 - RNA, 19 nt, Artificial Sequence
  Description of Artificial Sequence: Synthetic oligonucleotide
  Sense strand starting at position 3960 of SEQ ID NO: 317797
gguaauuguagagaugggu

SEQ ID NO: 513000 - RNA, 19 nt, Artificial Sequence
  Description of Artificial Sequence: Synthetic oligonucleotide
  Antisense strand to SEQ ID NO: 512999
acccaucucuacaauuacc

SEQ ID NO: 513001 - RNA, 19 nt, Artificial Sequence
  Description of Artificial Sequence: Synthetic oligonucleotide
  Sense strand starting at position 3969 of SEQ ID NO: 317797
agagaugggucaugaauca

SEQ ID NO: 513002 - RNA, 19 nt, Artificial Sequence
  Description of Artificial Sequence: Synthetic oligonucleotide
  Antisense strand to SEQ ID NO: 513001
ugauucaugacccaucucu

SEQ ID NO: 513003 - RNA, 19 nt, Artificial Sequence
  Description of Artificial Sequence: Synthetic oligonucleotide
  Sense strand starting at position 277 of SEQ ID NO: 317798
gauaacuuccaaggaguua

SEQ ID NO: 513004 - RNA, 19 nt, Artificial Sequence
  Description of Artificial Sequence: Synthetic oligonucleotide
  Antisense strand to SEQ ID NO: 513003
uaacuccuuggaaguuauc

SEQ ID NO: 513005 - RNA, 19 nt, Artificial Sequence
  Description of Artificial Sequence: Synthetic oligonucleotide
  Sense strand starting at position 511 of SEQ ID NO: 317798
acgugaguuauguaauuau

SEQ ID NO: 513006 - RNA, 19 nt, Artificial Sequence
  Description of Artificial Sequence: Synthetic oligonucleotide
  Antisense strand to SEQ ID NO: 513005
auaauuacauaacucacgu

SEQ ID NO: 513007 - RNA, 19 nt, Artificial Sequence
  Description of Artificial Sequence: Synthetic oligonucleotide
  Sense strand starting at position 514 of SEQ ID NO: 317798
ugaguuauguaauuaugac

SEQ ID NO: 513008 - RNA, 19 nt, Artificial Sequence
  Description of Artificial Sequence: Synthetic oligonucleotide
  Antisense strand to SEQ ID NO: 513007
gucauaauuacauaacuca

SEQ ID NO: 513009 - RNA, 19 nt, Artificial Sequence
  Description of Artificial Sequence: Synthetic oligonucleotide
  Sense strand starting at position 967 of SEQ ID NO: 317798
augguaaauccguacacag

SEQ ID NO: 513010 - RNA, 19 nt, Artificial Sequence
  Description of Artificial Sequence: Synthetic oligonucleotide
  Antisense strand to SEQ ID NO: 513009
cuguguacggauuuaccau

SEQ ID NO: 513011 - RNA, 19 nt, Artificial Sequence
  Description of Artificial Sequence: Synthetic oligonucleotide
  Sense strand starting at position 969 of SEQ ID NO: 317798
gguaaauccguacacagaa

SEQ ID NO: 513012 - RNA, 19 nt, Artificial Sequence
  Description of Artificial Sequence: Synthetic oligonucleotide
  Antisense strand to SEQ ID NO: 513011
uucuguguacggauuuacc

SEQ ID NO: 513013 - RNA, 19 nt, Artificial Sequence
  Description of Artificial Sequence: Synthetic oligonucleotide
  Sense strand starting at position 1022 of SEQ ID NO: 317798
agguauaaacagugaccua

SEQ ID NO: 513014 - RNA, 19 nt, Artificial Sequence
  Description of Artificial Sequence: Synthetic oligonucleotide
  Antisense strand to SEQ ID NO: 513013
uaggucacuguuuauaccu

SEQ ID NO: 513015 - RNA, 19 nt, Artificial Sequence
  Description of Artificial Sequence: Synthetic oligonucleotide
  Sense strand starting at position 1163 of SEQ ID NO: 317798
cggguucaacccuagaguu

SEQ ID NO: 513016 - RNA, 19 nt, Artificial Sequence
  Description of Artificial Sequence: Synthetic oligonucleotide
  Antisense strand to SEQ ID NO: 513015
aacucuaggguugaacccg

SEQ ID NO: 513017 - RNA, 19 nt, Artificial Sequence
  Description of Artificial Sequence: Synthetic oligonucleotide
  Sense strand starting at position 1228 of SEQ ID NO: 317798
ugacaugaguaacucauua

SEQ ID NO: 513018 - RNA, 19 nt, Artificial Sequence
  Description of Artificial Sequence: Synthetic oligonucleotide
  Antisense strand to SEQ ID NO: 513017
uaaugaguuacucauguca

SEQ ID NO: 513019 - RNA, 19 nt, Artificial Sequence
  Description of Artificial Sequence: Synthetic oligonucleotide
  Sense strand starting at position 1232 of SEQ ID NO: 317798
augaguaacucauuaucag

SEQ ID NO: 513020 - RNA, 19 nt, Artificial Sequence
  Description of Artificial Sequence: Synthetic oligonucleotide
  Antisense strand to SEQ ID NO: 513019
cugauaaugaguuacucau

SEQ ID NO: 513021 - RNA, 19 nt, Artificial Sequence
  Description of Artificial Sequence: Synthetic oligonucleotide
  Sense strand starting at position 1235 of SEQ ID NO: 317798
aguaacucauuaucagagu

SEQ ID NO: 513022 - RNA, 19 nt, Artificial Sequence
  Description of Artificial Sequence: Synthetic oligonucleotide
  Antisense strand to SEQ ID NO: 513021
acucugauaaugaguuacu

SEQ ID NO: 513023 - RNA, 19 nt, Artificial Sequence
  Description of Artificial Sequence: Synthetic oligonucleotide
  Sense strand starting at position 1241 of SEQ ID NO: 317798
ucauuaucagaguaugguc

SEQ ID NO: 513024 - RNA, 19 nt, Artificial Sequence
  Description of Artificial Sequence: Synthetic oligonucleotide
  Antisense strand to SEQ ID NO: 513023
gaccauacucugauaauga

SEQ ID NO: 513025 - RNA, 19 nt, Artificial Sequence
  Description of Artificial Sequence: Synthetic oligonucleotide
  Sense strand starting at position 1243 of SEQ ID NO: 317798
auuaucagaguauggucaa

SEQ ID NO: 513026 - RNA, 19 nt, Artificial Sequence
  Description of Artificial Sequence: Synthetic oligonucleotide
  Antisense strand to SEQ ID NO: 513025
uugaccauacucugauaau

SEQ ID NO: 513027 - RNA, 19 nt, Artificial Sequence
  Description of Artificial Sequence: Synthetic oligonucleotide
  Sense strand starting at position 1246 of SEQ ID NO: 317798
aucagaguauggucaagac

SEQ ID NO: 513028 - RNA, 19 nt, Artificial Sequence
  Description of Artificial Sequence: Synthetic oligonucleotide
  Antisense strand to SEQ ID NO: 513027
gucuugaccauacucugau

SEQ ID NO: 513029 - RNA, 19 nt, Artificial Sequence
  Description of Artificial Sequence: Synthetic oligonucleotide
  Sense strand starting at position 1465 of SEQ ID NO: 317798
uuuacauuucgcgaagcaa

SEQ ID NO: 513030 - RNA, 19 nt, Artificial Sequence
  Description of Artificial Sequence: Synthetic oligonucleotide
  Antisense strand to SEQ ID NO: 513029
uugcuucgcgaaauguaaa

SEQ ID NO: 513031 - RNA, 19 nt, Artificial Sequence
  Description of Artificial Sequence: Synthetic oligonucleotide
  Sense strand starting at position 1488 of SEQ ID NO: 317798
cccagaguuccugagcaga

SEQ ID NO: 513032 - RNA, 19 nt, Artificial Sequence
  Description of Artificial Sequence: Synthetic oligonucleotide
  Antisense strand to SEQ ID NO: 513031
ucugcucaggaacucuggg

SEQ ID NO: 513033 - RNA, 19 nt, Artificial Sequence
  Description of Artificial Sequence: Synthetic oligonucleotide
  Sense strand starting at position 1490 of SEQ ID NO: 317798
cagaguuccugagcagacu

SEQ ID NO: 513034 - RNA, 19 nt, Artificial Sequence
  Description of Artificial Sequence: Synthetic oligonucleotide
  Antisense strand to SEQ ID NO: 513033
agucugcucaggaacucug

SEQ ID NO: 513035 - RNA, 19 nt, Artificial Sequence
  Description of Artificial Sequence: Synthetic oligonucleotide
  Sense strand starting at position 2120 of SEQ ID NO: 317798
cuaauuugguguuccaugu

SEQ ID NO: 513036 - RNA, 19 nt, Artificial Sequence
  Description of Artificial Sequence: Synthetic oligonucleotide
  Antisense strand to SEQ ID NO: 513035
acauggaacaccaaauuag

SEQ ID NO: 513037 - RNA, 19 nt, Artificial Sequence
  Description of Artificial Sequence: Synthetic oligonucleotide
  Sense strand starting at position 2452 of SEQ ID NO: 317798
guggguauuaaaugaaaca

SEQ ID NO: 513038 - RNA, 19 nt, Artificial Sequence
  Description of Artificial Sequence: Synthetic oligonucleotide
  Antisense strand to SEQ ID NO: 513037
uguuucauuuaauacccac

SEQ ID NO: 513039 - RNA, 19 nt, Artificial Sequence
  Description of Artificial Sequence: Synthetic oligonucleotide
  Sense strand starting at position 2501 of SEQ ID NO: 317798
uugagacagugcucaauua

SEQ ID NO: 513040 - RNA, 19 nt, Artificial Sequence
  Description of Artificial Sequence: Synthetic oligonucleotide
  Antisense strand to SEQ ID NO: 513039
uaauugagcacugucucaa

SEQ ID NO: 513041 - RNA, 19 nt, Artificial Sequence
  Description of Artificial Sequence: Synthetic oligonucleotide
  Sense strand starting at position 2502 of SEQ ID NO: 317798
ugagacagugcucaauuaa

SEQ ID NO: 513042 - RNA, 19 nt, Artificial Sequence
  Description of Artificial Sequence: Synthetic oligonucleotide
  Antisense strand to SEQ ID NO: 513041
uuaauugagcacugucuca

SEQ ID NO: 513043 - RNA, 19 nt, Artificial Sequence
  Description of Artificial Sequence: Synthetic oligonucleotide
  Sense strand starting at position 2524 of SEQ ID NO: 317798
agcaguaaugaguacccaa

SEQ ID NO: 513044 - RNA, 19 nt, Artificial Sequence
  Description of Artificial Sequence: Synthetic oligonucleotide
  Antisense strand to SEQ ID NO: 513043
uuggguacucauuacugcu

SEQ ID NO: 513045 - RNA, 19 nt, Artificial Sequence
  Description of Artificial Sequence: Synthetic oligonucleotide
  Sense strand starting at position 2742 of SEQ ID NO: 317798
agucaaauauguguuauga

SEQ ID NO: 513046 - RNA, 19 nt, Artificial Sequence
  Description of Artificial Sequence: Synthetic oligonucleotide
  Antisense strand to SEQ ID NO: 513045
ucauaacacauauuugacu

SEQ ID NO: 513047 - RNA, 19 nt, Artificial Sequence
  Description of Artificial Sequence: Synthetic oligonucleotide
  Sense strand starting at position 2751 of SEQ ID NO: 317798
uguguuaugauacauaggu

SEQ ID NO: 513048 - RNA, 19 nt, Artificial Sequence
  Description of Artificial Sequence: Synthetic oligonucleotide
  Antisense strand to SEQ ID NO: 513047
accuauguaucauaacaca

SEQ ID NO: 513049 - RNA, 19 nt, Artificial Sequence
  Description of Artificial Sequence: Synthetic oligonucleotide
  Sense strand starting at position 2764 of SEQ ID NO: 317798
auaggugauaagugcuaua

SEQ ID NO: 513050 - RNA, 19 nt, Artificial Sequence
  Description of Artificial Sequence: Synthetic oligonucleotide
  Antisense strand to SEQ ID NO: 513049
uauagcacuuaucaccuau

SEQ ID NO: 513051 - RNA, 19 nt, Artificial Sequence
  Description of Artificial Sequence: Synthetic oligonucleotide
  Sense strand starting at position 2890 of SEQ ID NO: 317798
ggagcagacaagugauaug

SEQ ID NO: 513052 - RNA, 19 nt, Artificial Sequence
  Description of Artificial Sequence: Synthetic oligonucleotide
  Antisense strand to SEQ ID NO: 513051
cauaucacuugucugcucc

SEQ ID NO: 513053 - RNA, 19 nt, Artificial Sequence
  Description of Artificial Sequence: Synthetic oligonucleotide
  Sense strand starting at position 3007 of SEQ ID NO: 317798
ugcaguaauccagauggcu

SEQ ID NO: 513054 - RNA, 19 nt, Artificial Sequence
  Description of Artificial Sequence: Synthetic oligonucleotide
  Antisense strand to SEQ ID NO: 513053
agccaucuggauuacugca

SEQ ID NO: 513055 - RNA, 19 nt, Artificial Sequence
  Description of Artificial Sequence: Synthetic oligonucleotide
  Sense strand starting at position 3015 of SEQ ID NO: 317798
uccagauggcucuacuagu

SEQ ID NO: 513056 - RNA, 19 nt, Artificial Sequence
  Description of Artificial Sequence: Synthetic oligonucleotide
  Antisense strand to SEQ ID NO: 513055
acuaguagagccaucugga

SEQ ID NO: 513057 - RNA, 19 nt, Artificial Sequence
  Description of Artificial Sequence: Synthetic oligonucleotide
  Sense strand starting at position 3022 of SEQ ID NO: 317798
ggcucuacuaguggauaau

SEQ ID NO: 513058 - RNA, 19 nt, Artificial Sequence
  Description of Artificial Sequence: Synthetic oligonucleotide
  Antisense strand to SEQ ID NO: 513057
auuauccacuaguagagcc

SEQ ID NO: 513059 - RNA, 19 nt, Artificial Sequence
  Description of Artificial Sequence: Synthetic oligonucleotide
  Sense strand starting at position 3023 of SEQ ID NO: 317798
gcucuacuaguggauaauu

SEQ ID NO: 513060 - RNA, 19 nt, Artificial Sequence
  Description of Artificial Sequence: Synthetic oligonucleotide
  Antisense strand to SEQ ID NO: 513059
aauuauccacuaguagagc

SEQ ID NO: 513061 - RNA, 19 nt, Artificial Sequence
  Description of Artificial Sequence: Synthetic oligonucleotide
  Sense strand starting at position 3063 of SEQ ID NO: 317798
gcugucaacauggaaaugu

SEQ ID NO: 513062 - RNA, 19 nt, Artificial Sequence
  Description of Artificial Sequence: Synthetic oligonucleotide
  Antisense strand to SEQ ID NO: 513061
acauuuccauguugacagc

SEQ ID NO: 513063 - RNA, 19 nt, Artificial Sequence
  Description of Artificial Sequence: Synthetic oligonucleotide
  Sense strand starting at position 3362 of SEQ ID NO: 317798
agugcugguauuuguaagu

SEQ ID NO: 513064 - RNA, 19 nt, Artificial Sequence
  Description of Artificial Sequence: Synthetic oligonucleotide
  Antisense strand to SEQ ID NO: 513063
acuuacaaauaccagcacu

SEQ ID NO: 513065 - RNA, 19 nt, Artificial Sequence
  Description of Artificial Sequence: Synthetic oligonucleotide
  Sense strand starting at position 3367 of SEQ ID NO: 317798
ugguauuuguaaguguaag

SEQ ID NO: 513066 - RNA, 19 nt, Artificial Sequence
  Description of Artificial Sequence: Synthetic oligonucleotide
  Antisense strand to SEQ ID NO: 513065
cuuacacuuacaaauacca

SEQ ID NO: 513067 - RNA, 19 nt, Artificial Sequence
  Description of Artificial Sequence: Synthetic oligonucleotide
  Sense strand starting at position 3368 of SEQ ID NO: 317798
gguauuuguaaguguaagc

SEQ ID NO: 513068 - RNA, 19 nt, Artificial Sequence
  Description of Artificial Sequence: Synthetic oligonucleotide
  Antisense strand to SEQ ID NO: 513067
gcuuacacuuacaaauacc

SEQ ID NO: 513069 - RNA, 19 nt, Artificial Sequence
  Description of Artificial Sequence: Synthetic oligonucleotide
  Sense strand starting at position 3398 of SEQ ID NO: 317798
gccuauauuuguuauuucu

SEQ ID NO: 513070 - RNA, 19 nt, Artificial Sequence
  Description of Artificial Sequence: Synthetic oligonucleotide
  Antisense strand to SEQ ID NO: 513069
agaaauaacaaauauaggc

SEQ ID NO: 513071 - RNA, 19 nt, Artificial Sequence
  Description of Artificial Sequence: Synthetic oligonucleotide
  Sense strand starting at position 3565 of SEQ ID NO: 317798
agggcaaauuacuuacuuu

SEQ ID NO: 513072 - RNA, 19 nt, Artificial Sequence
  Description of Artificial Sequence: Synthetic oligonucleotide
  Antisense strand to SEQ ID NO: 513071
aaaguaaguaauuugcccu

SEQ ID NO: 513073 - RNA, 19 nt, Artificial Sequence
  Description of Artificial Sequence: Synthetic oligonucleotide
  Sense strand starting at position 3633 of SEQ ID NO: 317798
aggcuuaaaugaccucaca

SEQ ID NO: 513074 - RNA, 19 nt, Artificial Sequence
  Description of Artificial Sequence: Synthetic oligonucleotide
  Antisense strand to SEQ ID NO: 513073
ugugaggucauuuaagccu

SEQ ID NO: 513075 - RNA, 19 nt, Artificial Sequence
  Description of Artificial Sequence: Synthetic oligonucleotide
  Sense strand starting at position 3653 of SEQ ID NO: 317798
cugcaaagcccuuagaaua

SEQ ID NO: 513076 - RNA, 19 nt, Artificial Sequence
  Description of Artificial Sequence: Synthetic oligonucleotide
  Antisense strand to SEQ ID NO: 513075
uauucuaagggcuuugcag

SEQ ID NO: 513077 - RNA, 19 nt, Artificial Sequence
  Description of Artificial Sequence: Synthetic oligonucleotide
  Sense strand starting at position 3664 of SEQ ID NO: 317798
uuagaauaauguuugacag

SEQ ID NO: 513078 - RNA, 19 nt, Artificial Sequence
  Description of Artificial Sequence: Synthetic oligonucleotide
  Antisense strand to SEQ ID NO: 513077
cugucaaacauuauucuaa

SEQ ID NO: 513079 - RNA, 19 nt, Artificial Sequence
  Description of Artificial Sequence: Synthetic oligonucleotide
  Sense strand starting at position 3665 of SEQ ID NO: 317798
uagaauaauguuugacagu

SEQ ID NO: 513080 - RNA, 19 nt, Artificial Sequence
  Description of Artificial Sequence: Synthetic oligonucleotide
  Antisense strand to SEQ ID NO: 513079
acugucaaacauuauucua

SEQ ID NO: 513081 - RNA, 19 nt, Artificial Sequence
  Description of Artificial Sequence: Synthetic oligonucleotide
  Sense strand starting at position 3804 of SEQ ID NO: 317798
gcuguugucauaguuucuu

SEQ ID NO: 513082 - RNA, 19 nt, Artificial Sequence
  Description of Artificial Sequence: Synthetic oligonucleotide
  Antisense strand to SEQ ID NO: 513081
aagaaacuaugacaacagc

SEQ ID NO: 513083 - RNA, 19 nt, Artificial Sequence
  Description of Artificial Sequence: Synthetic oligonucleotide
  Sense strand starting at position 418 of SEQ ID NO: 317799
uagcaaggguccucagaca

SEQ ID NO: 513084 - RNA, 19 nt, Artificial Sequence
  Description of Artificial Sequence: Synthetic oligonucleotide
  Antisense strand to SEQ ID NO: 513083
ugucugaggacccuugcua

SEQ ID NO: 513085 - RNA, 19 nt, Artificial Sequence
  Description of Artificial Sequence: Synthetic oligonucleotide
  Sense strand starting at position 862 of SEQ ID NO: 317799
gggaaaggacuuuguguug

SEQ ID NO: 513086 - RNA, 19 nt, Artificial Sequence
  Description of Artificial Sequence: Synthetic oligonucleotide
  Antisense strand to SEQ ID NO: 513085
caacacaaaguccuuuccc

SEQ ID NO: 513087 - RNA, 19 nt, Artificial Sequence
  Description of Artificial Sequence: Synthetic oligonucleotide
  Sense strand starting at position 876 of SEQ ID NO: 317799
uguugauuccuuggcauuu

SEQ ID NO: 513088 - RNA, 19 nt, Artificial Sequence
  Description of Artificial Sequence: Synthetic oligonucleotide
  Antisense strand to SEQ ID NO: 513087
aaaugccaaggaaucaaca

SEQ ID NO: 513089 - RNA, 19 nt, Artificial Sequence
  Description of Artificial Sequence: Synthetic oligonucleotide
  Sense strand starting at position 877 of SEQ ID NO: 317799
guugauuccuuggcauuua

SEQ ID NO: 513090 - RNA, 19 nt, Artificial Sequence
  Description of Artificial Sequence: Synthetic oligonucleotide
  Antisense strand to SEQ ID NO: 513089
uaaaugccaaggaaucaac

SEQ ID NO: 513091 - RNA, 19 nt, Artificial Sequence
  Description of Artificial Sequence: Synthetic oligonucleotide
  Sense strand starting at position 878 of SEQ ID NO: 317799
uugauuccuuggcauuuau

SEQ ID NO: 513092 - RNA, 19 nt, Artificial Sequence
  Description of Artificial Sequence: Synthetic oligonucleotide
  Antisense strand to SEQ ID NO: 513091
auaaaugccaaggaaucaa

SEQ ID NO: 513093 - RNA, 19 nt, Artificial Sequence
  Description of Artificial Sequence: Synthetic oligonucleotide
  Sense strand starting at position 990 of SEQ ID NO: 317799
cuuauagucucaguaccua

SEQ ID NO: 513094 - RNA, 19 nt, Artificial Sequence
  Description of Artificial Sequence: Synthetic oligonucleotide
  Antisense strand to SEQ ID NO: 513093
uagguacugagacuauaag

SEQ ID NO: 513095 - RNA, 19 nt, Artificial Sequence
  Description of Artificial Sequence: Synthetic oligonucleotide
  Sense strand starting at position 1187 of SEQ ID NO: 317799
uaugaaucaguacguguga

SEQ ID NO: 513096 - RNA, 19 nt, Artificial Sequence
  Description of Artificial Sequence: Synthetic oligonucleotide
  Antisense strand to SEQ ID NO: 513095
ucacacguacugauucaua

SEQ ID NO: 513097 - RNA, 19 nt, Artificial Sequence
  Description of Artificial Sequence: Synthetic oligonucleotide
  Sense strand starting at position 1188 of SEQ ID NO: 317799
augaaucaguacgugugaa

SEQ ID NO: 513098 - RNA, 19 nt, Artificial Sequence
  Description of Artificial Sequence: Synthetic oligonucleotide
  Antisense strand to SEQ ID NO: 513097
uucacacguacugauucau

SEQ ID NO: 513099 - RNA, 19 nt, Artificial Sequence
  Description of Artificial Sequence: Synthetic oligonucleotide
  Sense strand starting at position 1189 of SEQ ID NO: 317799
ugaaucaguacgugugaac

SEQ ID NO: 513100 - RNA, 19 nt, Artificial Sequence
  Description of Artificial Sequence: Synthetic oligonucleotide
  Antisense strand to SEQ ID NO: 513099
guucacacguacugauuca

SEQ ID NO: 513101 - RNA, 19 nt, Artificial Sequence
  Description of Artificial Sequence: Synthetic oligonucleotide
  Sense strand starting at position 1327 of SEQ ID NO: 317799
uuguucuggucucucauaa

SEQ ID NO: 513102 - RNA, 19 nt, Artificial Sequence
  Description of Artificial Sequence: Synthetic oligonucleotide
  Antisense strand to SEQ ID NO: 513101
uuaugagagaccagaacaa

SEQ ID NO: 513103 - RNA, 19 nt, Artificial Sequence
  Description of Artificial Sequence: Synthetic oligonucleotide
  Sense strand starting at position 1359 of SEQ ID NO: 317799
ccacuaucugcccaguauu

SEQ ID NO: 513104 - RNA, 19 nt, Artificial Sequence
  Description of Artificial Sequence: Synthetic oligonucleotide
  Antisense strand to SEQ ID NO: 513103
aauacugggcagauagugg

SEQ ID NO: 513105 - RNA, 19 nt, Artificial Sequence
  Description of Artificial Sequence: Synthetic oligonucleotide
  Sense strand starting at position 1362 of SEQ ID NO: 317799
cuaucugcccaguauucuu

SEQ ID NO: 513106 - RNA, 19 nt, Artificial Sequence
  Description of Artificial Sequence: Synthetic oligonucleotide
  Antisense strand to SEQ ID NO: 513105
aagaauacugggcagauag

SEQ ID NO: 513107 - RNA, 19 nt, Artificial Sequence
  Description of Artificial Sequence: Synthetic oligonucleotide
  Sense strand starting at position 1393 of SEQ ID NO: 317799
caugacuguuccguaacuu

SEQ ID NO: 513108 - RNA, 19 nt, Artificial Sequence
  Description of Artificial Sequence: Synthetic oligonucleotide
  Antisense strand to SEQ ID NO: 513107
aaguuacggaacagucaug

SEQ ID NO: 513109 - RNA, 19 nt, Artificial Sequence
  Description of Artificial Sequence: Synthetic oligonucleotide
  Sense strand starting at position 1394 of SEQ ID NO: 317799
augacuguuccguaacuuc

SEQ ID NO: 513110 - RNA, 19 nt, Artificial Sequence
  Description of Artificial Sequence: Synthetic oligonucleotide
  Antisense strand to SEQ ID NO: 513109
gaaguuacggaacagucau

SEQ ID NO: 513111 - RNA, 19 nt, Artificial Sequence
  Description of Artificial Sequence: Synthetic oligonucleotide
  Sense strand starting at position 1778 of SEQ ID NO: 317799
ccugucauguuccugucaa

SEQ ID NO: 513112 - RNA, 19 nt, Artificial Sequence
  Description of Artificial Sequence: Synthetic oligonucleotide
  Antisense strand to SEQ ID NO: 513111
uugacaggaacaugacagg

SEQ ID NO: 513113 - RNA, 19 nt, Artificial Sequence
  Description of Artificial Sequence: Synthetic oligonucleotide
  Sense strand starting at position 1923 of SEQ ID NO: 317799
cgcuguugacuuuauccaa

SEQ ID NO: 513114 - RNA, 19 nt, Artificial Sequence
  Description of Artificial Sequence: Synthetic oligonucleotide
  Antisense strand to SEQ ID NO: 513113
uuggauaaagucaacagcg

SEQ ID NO: 513115 - RNA, 19 nt, Artificial Sequence
  Description of Artificial Sequence: Synthetic oligonucleotide
  Sense strand starting at position 2595 of SEQ ID NO: 317799
cggucaagaugguucuuaa

SEQ ID NO: 513116 - RNA, 19 nt, Artificial Sequence
  Description of Artificial Sequence: Synthetic oligonucleotide
  Antisense strand to SEQ ID NO: 513115
uuaagaaccaucuugaccg

SEQ ID NO: 513117 - RNA, 19 nt, Artificial Sequence
  Description of Artificial Sequence: Synthetic oligonucleotide
  Sense strand starting at position 2598 of SEQ ID NO: 317799
ucaagaugguucuuaaauc

SEQ ID NO: 513118 - RNA, 19 nt, Artificial Sequence
  Description of Artificial Sequence: Synthetic oligonucleotide
  Antisense strand to SEQ ID NO: 513117
gauuuaagaaccaucuuga

SEQ ID NO: 513119 - RNA, 19 nt, Artificial Sequence
  Description of Artificial Sequence: Synthetic oligonucleotide
  Sense strand starting at position 2738 of SEQ ID NO: 317799
agaguuccaccauauacga

SEQ ID NO: 513120 - RNA, 19 nt, Artificial Sequence
  Description of Artificial Sequence: Synthetic oligonucleotide
  Antisense strand to SEQ ID NO: 513119
ucguauaugguggaacucu

SEQ ID NO: 513121 - RNA, 19 nt, Artificial Sequence
  Description of Artificial Sequence: Synthetic oligonucleotide
  Sense strand starting at position 2763 of SEQ ID NO: 317799
guacaagagcacggaaaua

SEQ ID NO: 513122 - RNA, 19 nt, Artificial Sequence
  Description of Artificial Sequence: Synthetic oligonucleotide
  Antisense strand to SEQ ID NO: 513121
uauuuccgugcucuuguac

SEQ ID NO: 513123 - RNA, 19 nt, Artificial Sequence
  Description of Artificial Sequence: Synthetic oligonucleotide
  Sense strand starting at position 2780 of SEQ ID NO: 317799
uaaagaggccagugucuaa

SEQ ID NO: 513124 - RNA, 19 nt, Artificial Sequence
  Description of Artificial Sequence: Synthetic oligonucleotide
  Antisense strand to SEQ ID NO: 513123
uuagacacuggccucuuua

SEQ ID NO: 513125 - RNA, 19 nt, Artificial Sequence
  Description of Artificial Sequence: Synthetic oligonucleotide
  Sense strand starting at position 2792 of SEQ ID NO: 317799
ugucuaacugcuuaaguag

SEQ ID NO: 513126 - RNA, 19 nt, Artificial Sequence
  Description of Artificial Sequence: Synthetic oligonucleotide
  Antisense strand to SEQ ID NO: 513125
cuacuuaagcaguuagaca

SEQ ID NO: 513127 - RNA, 19 nt, Artificial Sequence
  Description of Artificial Sequence: Synthetic oligonucleotide
  Sense strand starting at position 2827 of SEQ ID NO: 317799
gaaugacagucccuaauga

SEQ ID NO: 513128 - RNA, 19 nt, Artificial Sequence
  Description of Artificial Sequence: Synthetic oligonucleotide
  Antisense strand to SEQ ID NO: 513127
ucauuagggacugucauuc

SEQ ID NO: 513129 - RNA, 19 nt, Artificial Sequence
  Description of Artificial Sequence: Synthetic oligonucleotide
  Sense strand starting at position 2877 of SEQ ID NO: 317799
gggagugcuuucuuuauug

SEQ ID NO: 513130 - RNA, 19 nt, Artificial Sequence
  Description of Artificial Sequence: Synthetic oligonucleotide
  Antisense strand to SEQ ID NO: 513129
caauaaagaaagcacuccc

SEQ ID NO: 513131 - RNA, 19 nt, Artificial Sequence
  Description of Artificial Sequence: Synthetic oligonucleotide
  Sense strand starting at position 2879 of SEQ ID NO: 317799
gagugcuuucuuuauugaa

SEQ ID NO: 513132 - RNA, 19 nt, Artificial Sequence
  Description of Artificial Sequence: Synthetic oligonucleotide
  Antisense strand to SEQ ID NO: 513131
uucaauaaagaaagcacuc

SEQ ID NO: 513133 - RNA, 19 nt, Artificial Sequence
  Description of Artificial Sequence: Synthetic oligonucleotide
  Sense strand starting at position 2881 of SEQ ID NO: 317799
gugcuuucuuuauugaaua

SEQ ID NO: 513134 - RNA, 19 nt, Artificial Sequence
  Description of Artificial Sequence: Synthetic oligonucleotide
  Antisense strand to SEQ ID NO: 513133
uauucaauaaagaaagcac

SEQ ID NO: 513135 - RNA, 19 nt, Artificial Sequence
  Description of Artificial Sequence: Synthetic oligonucleotide
  Sense strand starting at position 2952 of SEQ ID NO: 317799
cucgcuaugcuuccgcuaa

SEQ ID NO: 513136 - RNA, 19 nt, Artificial Sequence
  Description of Artificial Sequence: Synthetic oligonucleotide
  Antisense strand to SEQ ID NO: 513135
uuagcggaagcauagcgag

SEQ ID NO: 513137 - RNA, 19 nt, Artificial Sequence
  Description of Artificial Sequence: Synthetic oligonucleotide
  Sense strand starting at position 2956 of SEQ ID NO: 317799
cuaugcuuccgcuaaauaa

SEQ ID NO: 513138 - RNA, 19 nt, Artificial Sequence
  Description of Artificial Sequence: Synthetic oligonucleotide
  Antisense strand to SEQ ID NO: 513137
uuauuuagcggaagcauag

SEQ ID NO: 513139 - RNA, 19 nt, Artificial Sequence
  Description of Artificial Sequence: Synthetic oligonucleotide
  Sense strand starting at position 2991 of SEQ ID NO: 317799
uaauaaaucuagucuggug

SEQ ID NO: 513140 - RNA, 19 nt, Artificial Sequence
  Description of Artificial Sequence: Synthetic oligonucleotide
  Antisense strand to SEQ ID NO: 513139
caccagacuagauuuauua

SEQ ID NO: 513141 - RNA, 19 nt, Artificial Sequence
  Description of Artificial Sequence: Synthetic oligonucleotide
  Sense strand starting at position 3176 of SEQ ID NO: 317799
gguuuauauugagagaaag

SEQ ID NO: 513142 - RNA, 19 nt, Artificial Sequence
  Description of Artificial Sequence: Synthetic oligonucleotide
  Antisense strand to SEQ ID NO: 513141
cuuucucucaauauaaacc

SEQ ID NO: 513143 - RNA, 19 nt, Artificial Sequence
  Description of Artificial Sequence: Synthetic oligonucleotide
  Sense strand starting at position 3193 of SEQ ID NO: 317799
aggagaaguggucaucguu

SEQ ID NO: 513144 - RNA, 19 nt, Artificial Sequence
  Description of Artificial Sequence: Synthetic oligonucleotide
  Antisense strand to SEQ ID NO: 513143
aacgaugaccacuucuccu

SEQ ID NO: 513145 - RNA, 19 nt, Artificial Sequence
  Description of Artificial Sequence: Synthetic oligonucleotide
  Sense strand starting at position 3623 of SEQ ID NO: 317799
aaucuuauagugggcucaa

SEQ ID NO: 513146 - RNA, 19 nt, Artificial Sequence
  Description of Artificial Sequence: Synthetic oligonucleotide
  Antisense strand to SEQ ID NO: 513145
uugagcccacuauaagauu

SEQ ID NO: 513147 - RNA, 19 nt, Artificial Sequence
  Description of Artificial Sequence: Synthetic oligonucleotide
  Sense strand starting at position 3624 of SEQ ID NO: 317799
aucuuauagugggcucaaa

SEQ ID NO: 513148 - RNA, 19 nt, Artificial Sequence
  Description of Artificial Sequence: Synthetic oligonucleotide
  Antisense strand to SEQ ID NO: 513147
uuugagcccacuauaagau

SEQ ID NO: 513149 - RNA, 19 nt, Artificial Sequence
  Description of Artificial Sequence: Synthetic oligonucleotide
  Sense strand starting at position 3634 of SEQ ID NO: 317799
gggcucaaacuugguguaa

SEQ ID NO: 513150 - RNA, 19 nt, Artificial Sequence
  Description of Artificial Sequence: Synthetic oligonucleotide
  Antisense strand to SEQ ID NO: 513149
uuacaccaaguuugagccc

SEQ ID NO: 513151 - RNA, 19 nt, Artificial Sequence
  Description of Artificial Sequence: Synthetic oligonucleotide
  Sense strand starting at position 3635 of SEQ ID NO: 317799
ggcucaaacuugguguaag

SEQ ID NO: 513152 - RNA, 19 nt, Artificial Sequence
  Description of Artificial Sequence: Synthetic oligonucleotide
  Antisense strand to SEQ ID NO: 513151
cuuacaccaaguuugagcc

SEQ ID NO: 513153 - RNA, 19 nt, Artificial Sequence
  Description of Artificial Sequence: Synthetic oligonucleotide
  Sense strand starting at position 3638 of SEQ ID NO: 317799
ucaaacuugguguaagcau

SEQ ID NO: 513154 - RNA, 19 nt, Artificial Sequence
  Description of Artificial Sequence: Synthetic oligonucleotide
  Antisense strand to SEQ ID NO: 513153
augcuuacaccaaguuuga

SEQ ID NO: 513155 - RNA, 19 nt, Artificial Sequence
  Description of Artificial Sequence: Synthetic oligonucleotide
  Sense strand starting at position 3658 of SEQ ID NO: 317799
uuauuuguugugggcuaaa

SEQ ID NO: 513156 - RNA, 19 nt, Artificial Sequence
  Description of Artificial Sequence: Synthetic oligonucleotide
  Antisense strand to SEQ ID NO: 513155
uuuagcccacaacaaauaa

SEQ ID NO: 513157 - RNA, 19 nt, Artificial Sequence
  Description of Artificial Sequence: Synthetic oligonucleotide
  Sense strand starting at position 3661 of SEQ ID NO: 317799
uuuguugugggcuaaauau

SEQ ID NO: 513158 - RNA, 19 nt, Artificial Sequence
  Description of Artificial Sequence: Synthetic oligonucleotide
  Antisense strand to SEQ ID NO: 513157
auauuuagcccacaacaaa

SEQ ID NO: 513159 - RNA, 19 nt, Artificial Sequence
  Description of Artificial Sequence: Synthetic oligonucleotide
  Sense strand starting at position 3671 of SEQ ID NO: 317799
gcuaaauauuugcaaggag

SEQ ID NO: 513160 - RNA, 19 nt, Artificial Sequence
  Description of Artificial Sequence: Synthetic oligonucleotide
  Antisense strand to SEQ ID NO: 513159
cuccuugcaaauauuuagc

SEQ ID NO: 513161 - RNA, 19 nt, Artificial Sequence
  Description of Artificial Sequence: Synthetic oligonucleotide
  Sense strand starting at position 3849 of SEQ ID NO: 317799
gggcgucugaaggagaauu

SEQ ID NO: 513162 - RNA, 19 nt, Artificial Sequence
  Description of Artificial Sequence: Synthetic oligonucleotide
  Antisense strand to SEQ ID NO: 513161
aauucuccuucagacgccc

SEQ ID NO: 513163 - RNA, 19 nt, Artificial Sequence
  Description of Artificial Sequence: Synthetic oligonucleotide
  Sense strand starting at position 137 of SEQ ID NO: 317800
aggacagccagugauucuu

SEQ ID NO: 513164 - RNA, 19 nt, Artificial Sequence
  Description of Artificial Sequence: Synthetic oligonucleotide
  Antisense strand to SEQ ID NO: 513163
aagaaucacuggcuguccu

SEQ ID NO: 513165 - RNA, 19 nt, Artificial Sequence
  Description of Artificial Sequence: Synthetic oligonucleotide
  Sense strand starting at position 167 of SEQ ID NO: 317800
gcuguaagacuuuaugaug

SEQ ID NO: 513166 - RNA, 19 nt, Artificial Sequence
  Description of Artificial Sequence: Synthetic oligonucleotide
  Antisense strand to SEQ ID NO: 513165
caucauaaagucuuacagc

SEQ ID NO: 513167 - RNA, 19 nt, Artificial Sequence
  Description of Artificial Sequence: Synthetic oligonucleotide
  Sense strand starting at position 260 of SEQ ID NO: 317800
cccuguagucucugaauuc

SEQ ID NO: 513168 - RNA, 19 nt, Artificial Sequence
  Description of Artificial Sequence: Synthetic oligonucleotide
  Antisense strand to SEQ ID NO: 513167
gaauucagagacuacaggg

SEQ ID NO: 513169 - RNA, 19 nt, Artificial Sequence
  Description of Artificial Sequence: Synthetic oligonucleotide
  Sense strand starting at position 330 of SEQ ID NO: 317800
ggaggacucugagcacuuu

SEQ ID NO: 513170 - RNA, 19 nt, Artificial Sequence
  Description of Artificial Sequence: Synthetic oligonucleotide
  Antisense strand to SEQ ID NO: 513169
aaagugcucagaguccucc

SEQ ID NO: 513171 - RNA, 19 nt, Artificial Sequence
  Description of Artificial Sequence: Synthetic oligonucleotide
  Sense strand starting at position 507 of SEQ ID NO: 317800
cagugacugccuugacuga

SEQ ID NO: 513172 - RNA, 19 nt, Artificial Sequence
  Description of Artificial Sequence: Synthetic oligonucleotide
  Antisense strand to SEQ ID NO: 513171
ucagucaaggcagucacug

SEQ ID NO: 513173 - RNA, 19 nt, Artificial Sequence
  Description of Artificial Sequence: Synthetic oligonucleotide
  Sense strand starting at position 574 of SEQ ID NO: 317800
gucucaguggcaugaugau

SEQ ID NO: 513174 - RNA, 19 nt, Artificial Sequence
  Description of Artificial Sequence: Synthetic oligonucleotide
  Antisense strand to SEQ ID NO: 513173
aucaucaugccacugagac

SEQ ID NO: 513175 - RNA, 19 nt, Artificial Sequence
  Description of Artificial Sequence: Synthetic oligonucleotide
  Sense strand starting at position 789 of SEQ ID NO: 317800
ccagcucaugagggauauu

SEQ ID NO: 513176 - RNA, 19 nt, Artificial Sequence
  Description of Artificial Sequence: Synthetic oligonucleotide
  Antisense strand to SEQ ID NO: 513175
aauaucccucaugagcugg

SEQ ID NO: 513177 - RNA, 19 nt, Artificial Sequence
  Description of Artificial Sequence: Synthetic oligonucleotide
  Sense strand starting at position 812 of SEQ ID NO: 317800
agauauaguuucucuuuac

SEQ ID NO: 513178 - RNA, 19 nt, Artificial Sequence
  Description of Artificial Sequence: Synthetic oligonucleotide
  Antisense strand to SEQ ID NO: 513177
guaaagagaaacuauaucu

SEQ ID NO: 513179 - RNA, 19 nt, Artificial Sequence
  Description of Artificial Sequence: Synthetic oligonucleotide
  Sense strand starting at position 946 of SEQ ID NO: 317800
acacauugcgaaugucuaa

SEQ ID NO: 513180 - RNA, 19 nt, Artificial Sequence
  Description of Artificial Sequence: Synthetic oligonucleotide
  Antisense strand to SEQ ID NO: 513179
uuagacauucgcaaugugu

SEQ ID NO: 513181 - RNA, 19 nt, Artificial Sequence
  Description of Artificial Sequence: Synthetic oligonucleotide
  Sense strand starting at position 976 of SEQ ID NO: 317800
aagaguuaggccuggcuaa

SEQ ID NO: 513182 - RNA, 19 nt, Artificial Sequence
  Description of Artificial Sequence: Synthetic oligonucleotide
  Antisense strand to SEQ ID NO: 513181
uuagccaggccuaacucuu

SEQ ID NO: 513183 - RNA, 19 nt, Artificial Sequence
  Description of Artificial Sequence: Synthetic oligonucleotide
  Sense strand starting at position 988 of SEQ ID NO: 317800
uggcuaaccugaucaccaa

SEQ ID NO: 513184 - RNA, 19 nt, Artificial Sequence
  Description of Artificial Sequence: Synthetic oligonucleotide
  Antisense strand to SEQ ID NO: 513183
uuggugaucagguuagcca

SEQ ID NO: 513185 - RNA, 19 nt, Artificial Sequence
  Description of Artificial Sequence: Synthetic oligonucleotide
  Sense strand starting at position 1072 of SEQ ID NO: 317800
aguuaacucugcuuccaug

SEQ ID NO: 513186 - RNA, 19 nt, Artificial Sequence
  Description of Artificial Sequence: Synthetic oligonucleotide
  Antisense strand to SEQ ID NO: 513185
cauggaagcagaguuaacu

SEQ ID NO: 513187 - RNA, 19 nt, Artificial Sequence
  Description of Artificial Sequence: Synthetic oligonucleotide
  Sense strand starting at position 1361 of SEQ ID NO: 317800
guuaucucaggcuagauau

SEQ ID NO: 513188 - RNA, 19 nt, Artificial Sequence
  Description of Artificial Sequence: Synthetic oligonucleotide
  Antisense strand to SEQ ID NO: 513187
auaucuagccugagauaac

SEQ ID NO: 513189 - RNA, 19 nt, Artificial Sequence
  Description of Artificial Sequence: Synthetic oligonucleotide
  Sense strand starting at position 1422 of SEQ ID NO: 317800
gaaucauauuuguagguuu

SEQ ID NO: 513190 - RNA, 19 nt, Artificial Sequence
  Description of Artificial Sequence: Synthetic oligonucleotide
  Antisense strand to SEQ ID NO: 513189
aaaccuacaaauaugauuc

SEQ ID NO: 513191 - RNA, 19 nt, Artificial Sequence
  Description of Artificial Sequence: Synthetic oligonucleotide
  Sense strand starting at position 1430 of SEQ ID NO: 317800
uuuguagguuucuuugaca

SEQ ID NO: 513192 - RNA, 19 nt, Artificial Sequence
  Description of Artificial Sequence: Synthetic oligonucleotide
  Antisense strand to SEQ ID NO: 513191
ugucaaagaaaccuacaaa

SEQ ID NO: 513193 - RNA, 19 nt, Artificial Sequence
  Description of Artificial Sequence: Synthetic oligonucleotide
  Sense strand starting at position 1459 of SEQ ID NO: 317800
cauugauaugcuuggaaga

SEQ ID NO: 513194 - RNA, 19 nt, Artificial Sequence
  Description of Artificial Sequence: Synthetic oligonucleotide
  Antisense strand to SEQ ID NO: 513193
ucuuccaagcauaucaaug

SEQ ID NO: 513195 - RNA, 19 nt, Artificial Sequence
  Description of Artificial Sequence: Synthetic oligonucleotide
  Sense strand starting at position 1460 of SEQ ID NO: 317800
auugauaugcuuggaagac

SEQ ID NO: 513196 - RNA, 19 nt, Artificial Sequence
  Description of Artificial Sequence: Synthetic oligonucleotide
  Antisense strand to SEQ ID NO: 513195
gucuuccaagcauaucaau

SEQ ID NO: 513197 - RNA, 19 nt, Artificial Sequence
  Description of Artificial Sequence: Synthetic oligonucleotide
  Sense strand starting at position 1692 of SEQ ID NO: 317800
uguugugugggccucagua

SEQ ID NO: 513198 - RNA, 19 nt, Artificial Sequence
  Description of Artificial Sequence: Synthetic oligonucleotide
  Antisense strand to SEQ ID NO: 513197
uacugaggcccacacaaca

SEQ ID NO: 513199 - RNA, 19 nt, Artificial Sequence
  Description of Artificial Sequence: Synthetic oligonucleotide
  Sense strand starting at position 1850 of SEQ ID NO: 317800
ccaugaccucuuggguaau

SEQ ID NO: 513200 - RNA, 19 nt, Artificial Sequence
  Description of Artificial Sequence: Synthetic oligonucleotide
  Antisense strand to SEQ ID NO: 513199
auuacccaagaggucaugg

SEQ ID NO: 513201 - RNA, 19 nt, Artificial Sequence
  Description of Artificial Sequence: Synthetic oligonucleotide
  Sense strand starting at position 1853 of SEQ ID NO: 317800
ugaccucuuggguaauguu

SEQ ID NO: 513202 - RNA, 19 nt, Artificial Sequence
  Description of Artificial Sequence: Synthetic oligonucleotide
  Antisense strand to SEQ ID NO: 513201
aacauuacccaagagguca

SEQ ID NO: 513203 - RNA, 19 nt, Artificial Sequence
  Description of Artificial Sequence: Synthetic oligonucleotide
  Sense strand starting at position 1862 of SEQ ID NO: 317800
ggguaauguugucucuaua

SEQ ID NO: 513204 - RNA, 19 nt, Artificial Sequence
  Description of Artificial Sequence: Synthetic oligonucleotide
  Antisense strand to SEQ ID NO: 513203
uauagagacaacauuaccc

SEQ ID NO: 513205 - RNA, 19 nt, Artificial Sequence
  Description of Artificial Sequence: Synthetic oligonucleotide
  Sense strand starting at position 2015 of SEQ ID NO: 317800
cgugguucuagauacuucu

SEQ ID NO: 513206 - RNA, 19 nt, Artificial Sequence
  Description of Artificial Sequence: Synthetic oligonucleotide
  Antisense strand to SEQ ID NO: 513205
agaaguaucuagaaccacg

SEQ ID NO: 513207 - RNA, 19 nt, Artificial Sequence
  Description of Artificial Sequence: Synthetic oligonucleotide
  Sense strand starting at position 2112 of SEQ ID NO: 317800
ugaaaucucuggcccggau

SEQ ID NO: 513208 - RNA, 19 nt, Artificial Sequence
  Description of Artificial Sequence: Synthetic oligonucleotide
  Antisense strand to SEQ ID NO: 513207
auccgggccagagauuuca

SEQ ID NO: 513209 - RNA, 19 nt, Artificial Sequence
  Description of Artificial Sequence: Synthetic oligonucleotide
  Sense strand starting at position 2579 of SEQ ID NO: 317800
cgggauuucaagcgguaag

SEQ ID NO: 513210 - RNA, 19 nt, Artificial Sequence
  Description of Artificial Sequence: Synthetic oligonucleotide
  Antisense strand to SEQ ID NO: 513209
cuuaccgcuugaaaucccg

SEQ ID NO: 513211 - RNA, 19 nt, Artificial Sequence
  Description of Artificial Sequence: Synthetic oligonucleotide
  Sense strand starting at position 2827 of SEQ ID NO: 317800
gaucgacuggucuaggguu

SEQ ID NO: 513212 - RNA, 19 nt, Artificial Sequence
  Description of Artificial Sequence: Synthetic oligonucleotide
  Antisense strand to SEQ ID NO: 513211
aacccuagaccagucgauc

SEQ ID NO: 513213 - RNA, 19 nt, Artificial Sequence
  Description of Artificial Sequence: Synthetic oligonucleotide
  Sense strand starting at position 3072 of SEQ ID NO: 317800
ccauuugugcccugagggu

SEQ ID NO: 513214 - RNA, 19 nt, Artificial Sequence
  Description of Artificial Sequence: Synthetic oligonucleotide
  Antisense strand to SEQ ID NO: 513213
acccucagggcacaaaugg

SEQ ID NO: 513215 - RNA, 19 nt, Artificial Sequence
  Description of Artificial Sequence: Synthetic oligonucleotide
  Sense strand starting at position 3178 of SEQ ID NO: 317800
cuuagagaucugggaccuu

SEQ ID NO: 513216 - RNA, 19 nt, Artificial Sequence
  Description of Artificial Sequence: Synthetic oligonucleotide
  Antisense strand to SEQ ID NO: 513215
aaggucccagaucucuaag

SEQ ID NO: 513217 - RNA, 19 nt, Artificial Sequence
  Description of Artificial Sequence: Synthetic oligonucleotide
  Sense strand starting at position 3324 of SEQ ID NO: 317800
cugggccuccuuugguaaa

SEQ ID NO: 513218 - RNA, 19 nt, Artificial Sequence
  Description of Artificial Sequence: Synthetic oligonucleotide
  Antisense strand to SEQ ID NO: 513217
uuuaccaaaggaggcccag

SEQ ID NO: 513219 - RNA, 19 nt, Artificial Sequence
  Description of Artificial Sequence: Synthetic oligonucleotide
  Sense strand starting at position 3326 of SEQ ID NO: 317800
gggccuccuuugguaaaua

SEQ ID NO: 513220 - RNA, 19 nt, Artificial Sequence
  Description of Artificial Sequence: Synthetic oligonucleotide
  Antisense strand to SEQ ID NO: 513219
uauuuaccaaaggaggccc

SEQ ID NO: 513221 - RNA, 19 nt, Artificial Sequence
  Description of Artificial Sequence: Synthetic oligonucleotide
  Sense strand starting at position 3496 of SEQ ID NO: 317800
ggacaccugcccuaauuga

SEQ ID NO: 513222 - RNA, 19 nt, Artificial Sequence
  Description of Artificial Sequence: Synthetic oligonucleotide
  Antisense strand to SEQ ID NO: 513221
ucaauuagggcaggugucc

SEQ ID NO: 513223 - RNA, 19 nt, Artificial Sequence
  Description of Artificial Sequence: Synthetic oligonucleotide
  Sense strand starting at position 3534 of SEQ ID NO: 317800
aacuuagauuugucgcuca

SEQ ID NO: 513224 - RNA, 19 nt, Artificial Sequence
  Description of Artificial Sequence: Synthetic oligonucleotide
  Antisense strand to SEQ ID NO: 513223
ugagcgacaaaucuaaguu

SEQ ID NO: 513225 - RNA, 19 nt, Artificial Sequence
  Description of Artificial Sequence: Synthetic oligonucleotide
  Sense strand starting at position 3537 of SEQ ID NO: 317800
uuagauuugucgcucagga

SEQ ID NO: 513226 - RNA, 19 nt, Artificial Sequence
  Description of Artificial Sequence: Synthetic oligonucleotide
  Antisense strand to SEQ ID NO: 513225
uccugagcgacaaaucuaa

SEQ ID NO: 513227 - RNA, 19 nt, Artificial Sequence
  Description of Artificial Sequence: Synthetic oligonucleotide
  Sense strand starting at position 3556 of SEQ ID NO: 317800
agucaccucucagcuauua

SEQ ID NO: 513228 - RNA, 19 nt, Artificial Sequence
  Description of Artificial Sequence: Synthetic oligonucleotide
  Antisense strand to SEQ ID NO: 513227
uaauagcugagaggugacu

SEQ ID NO: 513229 - RNA, 19 nt, Artificial Sequence
  Description of Artificial Sequence: Synthetic oligonucleotide
  Sense strand starting at position 3694 of SEQ ID NO: 317800
gccuaauuugcuugagauu

SEQ ID NO: 513230 - RNA, 19 nt, Artificial Sequence
  Description of Artificial Sequence: Synthetic oligonucleotide
  Antisense strand to SEQ ID NO: 513229
aaucucaagcaaauuaggc

SEQ ID NO: 513231 - RNA, 19 nt, Artificial Sequence
  Description of Artificial Sequence: Synthetic oligonucleotide
  Sense strand starting at position 3700 of SEQ ID NO: 317800
uuugcuugagauugacuaa

SEQ ID NO: 513232 - RNA, 19 nt, Artificial Sequence
  Description of Artificial Sequence: Synthetic oligonucleotide
  Antisense strand to SEQ ID NO: 513231
uuagucaaucucaagcaaa

SEQ ID NO: 513233 - RNA, 19 nt, Artificial Sequence
  Description of Artificial Sequence: Synthetic oligonucleotide
  Sense strand starting at position 3819 of SEQ ID NO: 317800
agguuacagucucugaaag

SEQ ID NO: 513234 - RNA, 19 nt, Artificial Sequence
  Description of Artificial Sequence: Synthetic oligonucleotide
  Antisense strand to SEQ ID NO: 513233
cuuucagagacuguaaccu

SEQ ID NO: 513235 - RNA, 19 nt, Artificial Sequence
  Description of Artificial Sequence: Synthetic oligonucleotide
  Sense strand starting at position 3875 of SEQ ID NO: 317800
gcuugaaaucagcguauuu

SEQ ID NO: 513236 - RNA, 19 nt, Artificial Sequence
  Description of Artificial Sequence: Synthetic oligonucleotide
  Antisense strand to SEQ ID NO: 513235
aaauacgcugauuucaagc

SEQ ID NO: 513237 - RNA, 19 nt, Artificial Sequence
  Description of Artificial Sequence: Synthetic oligonucleotide
  Sense strand starting at position 3885 of SEQ ID NO: 317800
agcguauuugauuagcacu

SEQ ID NO: 513238 - RNA, 19 nt, Artificial Sequence
  Description of Artificial Sequence: Synthetic oligonucleotide
  Antisense strand to SEQ ID NO: 513237
agugcuaaucaaauacgcu

SEQ ID NO: 513239 - RNA, 19 nt, Artificial Sequence
  Description of Artificial Sequence: Synthetic oligonucleotide
  Sense strand starting at position 3887 of SEQ ID NO: 317800
cguauuugauuagcacuca

SEQ ID NO: 513240 - RNA, 19 nt, Artificial Sequence
  Description of Artificial Sequence: Synthetic oligonucleotide
  Antisense strand to SEQ ID NO: 513239
ugagugcuaaucaaauacg

SEQ ID NO: 513241 - RNA, 19 nt, Artificial Sequence
  Description of Artificial Sequence: Synthetic oligonucleotide
  Sense strand starting at position 3970 of SEQ ID NO: 317800
gcuuaauucugaguugaau

SEQ ID NO: 513242 - RNA, 19 nt, Artificial Sequence
  Description of Artificial Sequence: Synthetic oligonucleotide
  Antisense strand to SEQ ID NO: 513241
auucaacucagaauuaagc

SEQ ID NO: 513243 - RNA, 19 nt, Artificial Sequence
  Description of Artificial Sequence: Synthetic oligonucleotide
  Sense strand starting at position 135 of SEQ ID NO: 317801
auugucacuguggauuaau

SEQ ID NO: 513244 - RNA, 19 nt, Artificial Sequence
  Description of Artificial Sequence: Synthetic oligonucleotide
  Antisense strand to SEQ ID NO: 513243
auuaauccacagugacaau

SEQ ID NO: 513245 - RNA, 19 nt, Artificial Sequence
  Description of Artificial Sequence: Synthetic oligonucleotide
  Sense strand starting at position 524 of SEQ ID NO: 317801
acacuucuugcuuguagau

SEQ ID NO: 513246 - RNA, 19 nt, Artificial Sequence
  Description of Artificial Sequence: Synthetic oligonucleotide
  Antisense strand to SEQ ID NO: 513245
aucuacaagcaagaagugu

SEQ ID NO: 513247 - RNA, 19 nt, Artificial Sequence
  Description of Artificial Sequence: Synthetic oligonucleotide
  Sense strand starting at position 616 of SEQ ID NO: 317801
agcaacagauauucucaga

SEQ ID NO: 513248 - RNA, 19 nt, Artificial Sequence
  Description of Artificial Sequence: Synthetic oligonucleotide
  Antisense strand to SEQ ID NO: 513247
ucugagaauaucuguugcu

SEQ ID NO: 513249 - RNA, 19 nt, Artificial Sequence
  Description of Artificial Sequence: Synthetic oligonucleotide
  Sense strand starting at position 673 of SEQ ID NO: 317801
cauggaauguuagucuaac

SEQ ID NO: 513250 - RNA, 19 nt, Artificial Sequence
  Description of Artificial Sequence: Synthetic oligonucleotide
  Antisense strand to SEQ ID NO: 513249
guuagacuaacauuccaug

SEQ ID NO: 513251 - RNA, 19 nt, Artificial Sequence
  Description of Artificial Sequence: Synthetic oligonucleotide
  Sense strand starting at position 674 of SEQ ID NO: 317801
auggaauguuagucuaaca

SEQ ID NO: 513252 - RNA, 19 nt, Artificial Sequence
  Description of Artificial Sequence: Synthetic oligonucleotide
  Antisense strand to SEQ ID NO: 513251
uguuagacuaacauuccau

SEQ ID NO: 513253 - RNA, 19 nt, Artificial Sequence
  Description of Artificial Sequence: Synthetic oligonucleotide
  Sense strand starting at position 891 of SEQ ID NO: 317801
cagccauaauagguauaga

SEQ ID NO: 513254 - RNA, 19 nt, Artificial Sequence
  Description of Artificial Sequence: Synthetic oligonucleotide
  Antisense strand to SEQ ID NO: 513253
ucuauaccuauuauggcug

SEQ ID NO: 513255 - RNA, 19 nt, Artificial Sequence
  Description of Artificial Sequence: Synthetic oligonucleotide
  Sense strand starting at position 1011 of SEQ ID NO: 317801
gggugaaaggaaugccuua

SEQ ID NO: 513256 - RNA, 19 nt, Artificial Sequence
  Description of Artificial Sequence: Synthetic oligonucleotide
  Antisense strand to SEQ ID NO: 513255
uaaggcauuccuuucaccc

SEQ ID NO: 513257 - RNA, 19 nt, Artificial Sequence
  Description of Artificial Sequence: Synthetic oligonucleotide
  Sense strand starting at position 1213 of SEQ ID NO: 317801
acauccucucauuagugau

SEQ ID NO: 513258 - RNA, 19 nt, Artificial Sequence
  Description of Artificial Sequence: Synthetic oligonucleotide
  Antisense strand to SEQ ID NO: 513257
aucacuaaugagaggaugu

SEQ ID NO: 513259 - RNA, 19 nt, Artificial Sequence
  Description of Artificial Sequence: Synthetic oligonucleotide
  Sense strand starting at position 1215 of SEQ ID NO: 317801
auccucucauuagugauua

SEQ ID NO: 513260 - RNA, 19 nt, Artificial Sequence
  Description of Artificial Sequence: Synthetic oligonucleotide
  Antisense strand to SEQ ID NO: 513259
uaaucacuaaugagaggau

SEQ ID NO: 513261 - RNA, 19 nt, Artificial Sequence
  Description of Artificial Sequence: Synthetic oligonucleotide
  Sense strand starting at position 1267 of SEQ ID NO: 317801
ccagguauaucacuucucu

SEQ ID NO: 513262 - RNA, 19 nt, Artificial Sequence
  Description of Artificial Sequence: Synthetic oligonucleotide
  Antisense strand to SEQ ID NO: 513261
agagaagugauauaccugg

SEQ ID NO: 513263 - RNA, 19 nt, Artificial Sequence
  Description of Artificial Sequence: Synthetic oligonucleotide
  Sense strand starting at position 1437 of SEQ ID NO: 317801
cuuugaacccgccauguau

SEQ ID NO: 513264 - RNA, 19 nt, Artificial Sequence
  Description of Artificial Sequence: Synthetic oligonucleotide
  Antisense strand to SEQ ID NO: 513263
auacauggcggguucaaag

SEQ ID NO: 513265 - RNA, 19 nt, Artificial Sequence
  Description of Artificial Sequence: Synthetic oligonucleotide
  Sense strand starting at position 2037 of SEQ ID NO: 317801
gcacgacugcuccagaaga

SEQ ID NO: 513266 - RNA, 19 nt, Artificial Sequence
  Description of Artificial Sequence: Synthetic oligonucleotide
  Antisense strand to SEQ ID NO: 513265
ucuucuggagcagucgugc

SEQ ID NO: 513267 - RNA, 19 nt, Artificial Sequence
  Description of Artificial Sequence: Synthetic oligonucleotide
  Sense strand starting at position 2283 of SEQ ID NO: 317801
ugcccuugcccugagaguu

SEQ ID NO: 513268 - RNA, 19 nt, Artificial Sequence
  Description of Artificial Sequence: Synthetic oligonucleotide
  Antisense strand to SEQ ID NO: 513267
aacucucagggcaagggca

SEQ ID NO: 513269 - RNA, 19 nt, Artificial Sequence
  Description of Artificial Sequence: Synthetic oligonucleotide
  Sense strand starting at position 2313 of SEQ ID NO: 317801
gccucauccugagcgacau

SEQ ID NO: 513270 - RNA, 19 nt, Artificial Sequence
  Description of Artificial Sequence: Synthetic oligonucleotide
  Antisense strand to SEQ ID NO: 513269
augucgcucaggaugaggc

SEQ ID NO: 513271 - RNA, 19 nt, Artificial Sequence
  Description of Artificial Sequence: Synthetic oligonucleotide
  Sense strand starting at position 2393 of SEQ ID NO: 317801
ccuuccuggagcgaguaau

SEQ ID NO: 513272 - RNA, 19 nt, Artificial Sequence
  Description of Artificial Sequence: Synthetic oligonucleotide
  Antisense strand to SEQ ID NO: 513271
auuacucgcuccaggaagg

SEQ ID NO: 513273 - RNA, 19 nt, Artificial Sequence
  Description of Artificial Sequence: Synthetic oligonucleotide
  Sense strand starting at position 2412 of SEQ ID NO: 317801
ccauccaucccgugaauac

SEQ ID NO: 513274 - RNA, 19 nt, Artificial Sequence
  Description of Artificial Sequence: Synthetic oligonucleotide
  Antisense strand to SEQ ID NO: 513273
guauucacgggauggaugg

SEQ ID NO: 513275 - RNA, 19 nt, Artificial Sequence
  Description of Artificial Sequence: Synthetic oligonucleotide
  Sense strand starting at position 2490 of SEQ ID NO: 317801
gccugaacuuuaccaugga

SEQ ID NO: 513276 - RNA, 19 nt, Artificial Sequence
  Description of Artificial Sequence: Synthetic oligonucleotide
  Antisense strand to SEQ ID NO: 513275
uccaugguaaaguucaggc

SEQ ID NO: 513277 - RNA, 19 nt, Artificial Sequence
  Description of Artificial Sequence: Synthetic oligonucleotide
  Sense strand starting at position 2493 of SEQ ID NO: 317801
ugaacuuuaccauggagug

SEQ ID NO: 513278 - RNA, 19 nt, Artificial Sequence
  Description of Artificial Sequence: Synthetic oligonucleotide
  Antisense strand to SEQ ID NO: 513277
cacuccaugguaaaguuca

SEQ ID NO: 513279 - RNA, 19 nt, Artificial Sequence
  Description of Artificial Sequence: Synthetic oligonucleotide
  Sense strand starting at position 2527 of SEQ ID NO: 317801
gugacauaauugcucaagu

SEQ ID NO: 513280 - RNA, 19 nt, Artificial Sequence
  Description of Artificial Sequence: Synthetic oligonucleotide
  Antisense strand to SEQ ID NO: 513279
acuugagcaauuaugucac

SEQ ID NO: 513281 - RNA, 19 nt, Artificial Sequence
  Description of Artificial Sequence: Synthetic oligonucleotide
  Sense strand starting at position 2528 of SEQ ID NO: 317801
ugacauaauugcucaagua

SEQ ID NO: 513282 - RNA, 19 nt, Artificial Sequence
  Description of Artificial Sequence: Synthetic oligonucleotide
  Antisense strand to SEQ ID NO: 513281
uacuugagcaauuauguca

SEQ ID NO: 513283 - RNA, 19 nt, Artificial Sequence
  Description of Artificial Sequence: Synthetic oligonucleotide
  Sense strand starting at position 2538 of SEQ ID NO: 317801
gcucaaguaaauggagaau

SEQ ID NO: 513284 - RNA, 19 nt, Artificial Sequence
  Description of Artificial Sequence: Synthetic oligonucleotide
  Antisense strand to SEQ ID NO: 513283
auucuccauuuacuugagc

SEQ ID NO: 513285 - RNA, 19 nt, Artificial Sequence
  Description of Artificial Sequence: Synthetic oligonucleotide
  Sense strand starting at position 2560 of SEQ ID NO: 317801
agcguugacaaguauuagu

SEQ ID NO: 513286 - RNA, 19 nt, Artificial Sequence
  Description of Artificial Sequence: Synthetic oligonucleotide
  Antisense strand to SEQ ID NO: 513285
acuaauacuugucaacgcu

SEQ ID NO: 513287 - RNA, 19 nt, Artificial Sequence
  Description of Artificial Sequence: Synthetic oligonucleotide
  Sense strand starting at position 2592 of SEQ ID NO: 317801
gcgugcuacaaccaugaau

SEQ ID NO: 513288 - RNA, 19 nt, Artificial Sequence
  Description of Artificial Sequence: Synthetic oligonucleotide
  Antisense strand to SEQ ID NO: 513287
auucaugguuguagcacgc

SEQ ID NO: 513289 - RNA, 19 nt, Artificial Sequence
  Description of Artificial Sequence: Synthetic oligonucleotide
  Sense strand starting at position 2594 of SEQ ID NO: 317801
gugcuacaaccaugaauaa

SEQ ID NO: 513290 - RNA, 19 nt, Artificial Sequence
  Description of Artificial Sequence: Synthetic oligonucleotide
  Antisense strand to SEQ ID NO: 513289
uuauucaugguuguagcac

SEQ ID NO: 513291 - RNA, 19 nt, Artificial Sequence
  Description of Artificial Sequence: Synthetic oligonucleotide
  Sense strand starting at position 2711 of SEQ ID NO: 317801
agagcauggccugguaaga

SEQ ID NO: 513292 - RNA, 19 nt, Artificial Sequence
  Description of Artificial Sequence: Synthetic oligonucleotide
  Antisense strand to SEQ ID NO: 513291
ucuuaccaggccaugcucu

SEQ ID NO: 513293 - RNA, 19 nt, Artificial Sequence
  Description of Artificial Sequence: Synthetic oligonucleotide
  Sense strand starting at position 2722 of SEQ ID NO: 317801
ugguaagagaauugcaaga

SEQ ID NO: 513294 - RNA, 19 nt, Artificial Sequence
  Description of Artificial Sequence: Synthetic oligonucleotide
  Antisense strand to SEQ ID NO: 513293
ucuugcaauucucuuacca

SEQ ID NO: 513295 - RNA, 19 nt, Artificial Sequence
  Description of Artificial Sequence: Synthetic oligonucleotide
  Sense strand starting at position 2831 of SEQ ID NO: 317801
cagggauccuggcuagauc

SEQ ID NO: 513296 - RNA, 19 nt, Artificial Sequence
  Description of Artificial Sequence: Synthetic oligonucleotide
  Antisense strand to SEQ ID NO: 513295
gaucuagccaggaucccug

SEQ ID NO: 513297 - RNA, 19 nt, Artificial Sequence
  Description of Artificial Sequence: Synthetic oligonucleotide
  Sense strand starting at position 2887 of SEQ ID NO: 317801
cagugacaccuguguuuac

SEQ ID NO: 513298 - RNA, 19 nt, Artificial Sequence
  Description of Artificial Sequence: Synthetic oligonucleotide
  Antisense strand to SEQ ID NO: 513297
guaaacacaggugucacug

SEQ ID NO: 513299 - RNA, 19 nt, Artificial Sequence
  Description of Artificial Sequence: Synthetic oligonucleotide
  Sense strand starting at position 2888 of SEQ ID NO: 317801
agugacaccuguguuuaca

SEQ ID NO: 513300 - RNA, 19 nt, Artificial Sequence
  Description of Artificial Sequence: Synthetic oligonucleotide
  Antisense strand to SEQ ID NO: 513299
uguaaacacaggugucacu

SEQ ID NO: 513301 - RNA, 19 nt, Artificial Sequence
  Description of Artificial Sequence: Synthetic oligonucleotide
  Sense strand starting at position 2890 of SEQ ID NO: 317801
ugacaccuguguuuacaaa

SEQ ID NO: 513302 - RNA, 19 nt, Artificial Sequence
  Description of Artificial Sequence: Synthetic oligonucleotide
  Antisense strand to SEQ ID NO: 513301
uuuguaaacacagguguca

SEQ ID NO: 513303 - RNA, 19 nt, Artificial Sequence
  Description of Artificial Sequence: Synthetic oligonucleotide
  Sense strand starting at position 3087 of SEQ ID NO: 317801
cuggcuggaccugaaaguu

SEQ ID NO: 513304 - RNA, 19 nt, Artificial Sequence
  Description of Artificial Sequence: Synthetic oligonucleotide
  Antisense strand to SEQ ID NO: 513303
aacuuucagguccagccag

SEQ ID NO: 513305 - RNA, 19 nt, Artificial Sequence
  Description of Artificial Sequence: Synthetic oligonucleotide
  Sense strand starting at position 3137 of SEQ ID NO: 317801
ucgagucucagguagcaga

SEQ ID NO: 513306 - RNA, 19 nt, Artificial Sequence
  Description of Artificial Sequence: Synthetic oligonucleotide
  Antisense strand to SEQ ID NO: 513305
ucugcuaccugagacucga

SEQ ID NO: 513307 - RNA, 19 nt, Artificial Sequence
  Description of Artificial Sequence: Synthetic oligonucleotide
  Sense strand starting at position 3196 of SEQ ID NO: 317801
uuuccaucccuggaagcau

SEQ ID NO: 513308 - RNA, 19 nt, Artificial Sequence
  Description of Artificial Sequence: Synthetic oligonucleotide
  Antisense strand to SEQ ID NO: 513307
augcuuccagggauggaaa

SEQ ID NO: 513309 - RNA, 19 nt, Artificial Sequence
  Description of Artificial Sequence: Synthetic oligonucleotide
  Sense strand starting at position 3327 of SEQ ID NO: 317801
acacuccugucugucaauu

SEQ ID NO: 513310 - RNA, 19 nt, Artificial Sequence
  Description of Artificial Sequence: Synthetic oligonucleotide
  Antisense strand to SEQ ID NO: 513309
aauugacagacaggagugu

SEQ ID NO: 513311 - RNA, 19 nt, Artificial Sequence
  Description of Artificial Sequence: Synthetic oligonucleotide
  Sense strand starting at position 3367 of SEQ ID NO: 317801
agaugaaguuguucccuua

SEQ ID NO: 513312 - RNA, 19 nt, Artificial Sequence
  Description of Artificial Sequence: Synthetic oligonucleotide
  Antisense strand to SEQ ID NO: 513311
uaagggaacaacuucaucu

SEQ ID NO: 513313 - RNA, 19 nt, Artificial Sequence
  Description of Artificial Sequence: Synthetic oligonucleotide
  Sense strand starting at position 3370 of SEQ ID NO: 317801
ugaaguuguucccuuaucu

SEQ ID NO: 513314 - RNA, 19 nt, Artificial Sequence
  Description of Artificial Sequence: Synthetic oligonucleotide
  Antisense strand to SEQ ID NO: 513313
agauaagggaacaacuuca

SEQ ID NO: 513315 - RNA, 19 nt, Artificial Sequence
  Description of Artificial Sequence: Synthetic oligonucleotide
  Sense strand starting at position 3646 of SEQ ID NO: 317801
gguaaucacucugugauua

SEQ ID NO: 513316 - RNA, 19 nt, Artificial Sequence
  Description of Artificial Sequence: Synthetic oligonucleotide
  Antisense strand to SEQ ID NO: 513315
uaaucacagagugauuacc

SEQ ID NO: 513317 - RNA, 19 nt, Artificial Sequence
  Description of Artificial Sequence: Synthetic oligonucleotide
  Sense strand starting at position 3647 of SEQ ID NO: 317801
guaaucacucugugauuaa

SEQ ID NO: 513318 - RNA, 19 nt, Artificial Sequence
  Description of Artificial Sequence: Synthetic oligonucleotide
  Antisense strand to SEQ ID NO: 513317
uuaaucacagagugauuac

SEQ ID NO: 513319 - RNA, 19 nt, Artificial Sequence
  Description of Artificial Sequence: Synthetic oligonucleotide
  Sense strand starting at position 3654 of SEQ ID NO: 317801
cucugugauuaacuaugca

SEQ ID NO: 513320 - RNA, 19 nt, Artificial Sequence
  Description of Artificial Sequence: Synthetic oligonucleotide
  Antisense strand to SEQ ID NO: 513319
ugcauaguuaaucacagag

SEQ ID NO: 513321 - RNA, 19 nt, Artificial Sequence
  Description of Artificial Sequence: Synthetic oligonucleotide
  Sense strand starting at position 3658 of SEQ ID NO: 317801
gugauuaacuaugcacauu

SEQ ID NO: 513322 - RNA, 19 nt, Artificial Sequence
  Description of Artificial Sequence: Synthetic oligonucleotide
  Antisense strand to SEQ ID NO: 513321
aaugugcauaguuaaucac

SEQ ID NO: 513323 - RNA, 19 nt, Artificial Sequence
  Description of Artificial Sequence: Synthetic oligonucleotide
  Sense strand starting at position 9 of SEQ ID NO: 317802
acaaccuguccugguuuaa

SEQ ID NO: 513324 - RNA, 19 nt, Artificial Sequence
  Description of Artificial Sequence: Synthetic oligonucleotide
  Antisense strand to SEQ ID NO: 513323
uuaaaccaggacagguugu

SEQ ID NO: 513325 - RNA, 19 nt, Artificial Sequence
  Description of Artificial Sequence: Synthetic oligonucleotide
  Sense strand starting at position 22 of SEQ ID NO: 317802
guuuaacagugguuuagag

SEQ ID NO: 513326 - RNA, 19 nt, Artificial Sequence
  Description of Artificial Sequence: Synthetic oligonucleotide
  Antisense strand to SEQ ID NO: 513325
cucuaaaccacuguuaaac

SEQ ID NO: 513327 - RNA, 19 nt, Artificial Sequence
  Description of Artificial Sequence: Synthetic oligonucleotide
  Sense strand starting at position 38 of SEQ ID NO: 317802
gaguguaggcucuggaaca

SEQ ID NO: 513328 - RNA, 19 nt, Artificial Sequence
  Description of Artificial Sequence: Synthetic oligonucleotide
  Antisense strand to SEQ ID NO: 513327
uguuccagagccuacacuc

SEQ ID NO: 513329 - RNA, 19 nt, Artificial Sequence
  Description of Artificial Sequence: Synthetic oligonucleotide
  Sense strand starting at position 79 of SEQ ID NO: 317802
ggagccgcuaucgauagaa

SEQ ID NO: 513330 - RNA, 19 nt, Artificial Sequence
  Description of Artificial Sequence: Synthetic oligonucleotide
  Antisense strand to SEQ ID NO: 513329
uucuaucgauagcggcucc

SEQ ID NO: 513331 - RNA, 19 nt, Artificial Sequence
  Description of Artificial Sequence: Synthetic oligonucleotide
  Sense strand starting at position 81 of SEQ ID NO: 317802
agccgcuaucgauagaaga

SEQ ID NO: 513332 - RNA, 19 nt, Artificial Sequence
  Description of Artificial Sequence: Synthetic oligonucleotide
  Antisense strand to SEQ ID NO: 513331
ucuucuaucgauagcggcu

SEQ ID NO: 513333 - RNA, 19 nt, Artificial Sequence
  Description of Artificial Sequence: Synthetic oligonucleotide
  Sense strand starting at position 147 of SEQ ID NO: 317802
gugucaagugucuggaaga

SEQ ID NO: 513334 - RNA, 19 nt, Artificial Sequence
  Description of Artificial Sequence: Synthetic oligonucleotide
  Antisense strand to SEQ ID NO: 513333
ucuuccagacacuugacac

SEQ ID NO: 513335 - RNA, 19 nt, Artificial Sequence
  Description of Artificial Sequence: Synthetic oligonucleotide
  Sense strand starting at position 166 of SEQ ID NO: 317802
guaccugucccauaacaag

SEQ ID NO: 513336 - RNA, 19 nt, Artificial Sequence
  Description of Artificial Sequence: Synthetic oligonucleotide
  Antisense strand to SEQ ID NO: 513335
cuuguuaugggacagguac

SEQ ID NO: 513337 - RNA, 19 nt, Artificial Sequence
  Description of Artificial Sequence: Synthetic oligonucleotide
  Sense strand starting at position 256 of SEQ ID NO: 317802
agggcucuaccaugaacua

SEQ ID NO: 513338 - RNA, 19 nt, Artificial Sequence
  Description of Artificial Sequence: Synthetic oligonucleotide
  Antisense strand to SEQ ID NO: 513337
uaguucaugguagagcccu

SEQ ID NO: 513339 - RNA, 19 nt, Artificial Sequence
  Description of Artificial Sequence: Synthetic oligonucleotide
  Sense strand starting at position 415 of SEQ ID NO: 317802
cauguugaagagugacuaa

SEQ ID NO: 513340 - RNA, 19 nt, Artificial Sequence
  Description of Artificial Sequence: Synthetic oligonucleotide
  Antisense strand to SEQ ID NO: 513339
uuagucacucuucaacaug

SEQ ID NO: 513341 - RNA, 19 nt, Artificial Sequence
  Description of Artificial Sequence: Synthetic oligonucleotide
  Sense strand starting at position 601 of SEQ ID NO: 317802
cccggaggauugguagaga

SEQ ID NO: 513342 - RNA, 19 nt, Artificial Sequence
  Description of Artificial Sequence: Synthetic oligonucleotide
  Antisense strand to SEQ ID NO: 513341
ucucuaccaauccuccggg

SEQ ID NO: 513343 - RNA, 19 nt, Artificial Sequence
  Description of Artificial Sequence: Synthetic oligonucleotide
  Sense strand starting at position 612 of SEQ ID NO: 317802
gguagagagauucgacuua

SEQ ID NO: 513344 - RNA, 19 nt, Artificial Sequence
  Description of Artificial Sequence: Synthetic oligonucleotide
  Antisense strand to SEQ ID NO: 513343
uaagucgaaucucucuacc

SEQ ID NO: 513345 - RNA, 19 nt, Artificial Sequence
  Description of Artificial Sequence: Synthetic oligonucleotide
  Sense strand starting at position 680 of SEQ ID NO: 317802
caaguacaucugggaagua

SEQ ID NO: 513346 - RNA, 19 nt, Artificial Sequence
  Description of Artificial Sequence: Synthetic oligonucleotide
  Antisense strand to SEQ ID NO: 513345
uacuucccagauguacuug

SEQ ID NO: 513347 - RNA, 19 nt, Artificial Sequence
  Description of Artificial Sequence: Synthetic oligonucleotide
  Sense strand starting at position 712 of SEQ ID NO: 317802
uacauuacagaucgucaga

SEQ ID NO: 513348 - RNA, 19 nt, Artificial Sequence
  Description of Artificial Sequence: Synthetic oligonucleotide
  Antisense strand to SEQ ID NO: 513347
ucugacgaucuguaaugua

SEQ ID NO: 513349 - RNA, 19 nt, Artificial Sequence
  Description of Artificial Sequence: Synthetic oligonucleotide
  Sense strand starting at position 714 of SEQ ID NO: 317802
cauuacagaucgucagaag

SEQ ID NO: 513350 - RNA, 19 nt, Artificial Sequence
  Description of Artificial Sequence: Synthetic oligonucleotide
  Antisense strand to SEQ ID NO: 513349
cuucugacgaucuguaaug

SEQ ID NO: 513351 - RNA, 19 nt, Artificial Sequence
  Description of Artificial Sequence: Synthetic oligonucleotide
  Sense strand starting at position 804 of SEQ ID NO: 317802
ggcaguggauuugaauaaa

SEQ ID NO: 513352 - RNA, 19 nt, Artificial Sequence
  Description of Artificial Sequence: Synthetic oligonucleotide
  Antisense strand to SEQ ID NO: 513351
uuuauucaaauccacugcc

SEQ ID NO: 513353 - RNA, 19 nt, Artificial Sequence
  Description of Artificial Sequence: Synthetic oligonucleotide
  Sense strand starting at position 840 of SEQ ID NO: 317802
uaguuaaauugguuuggga

SEQ ID NO: 513354 - RNA, 19 nt, Artificial Sequence
  Description of Artificial Sequence: Synthetic oligonucleotide
  Antisense strand to SEQ ID NO: 513353
ucccaaaccaauuuaacua

SEQ ID NO: 513355 - RNA, 19 nt, Artificial Sequence
  Description of Artificial Sequence: Synthetic oligonucleotide
  Sense strand starting at position 842 of SEQ ID NO: 317802
guuaaauugguuugggaaa

SEQ ID NO: 513356 - RNA, 19 nt, Artificial Sequence
  Description of Artificial Sequence: Synthetic oligonucleotide
  Antisense strand to SEQ ID NO: 513355
uuucccaaaccaauuuaac

SEQ ID NO: 513357 - RNA, 19 nt, Artificial Sequence
  Description of Artificial Sequence: Synthetic oligonucleotide
  Sense strand starting at position 964 of SEQ ID NO: 317802
cgcagugauggagaacuga

SEQ ID NO: 513358 - RNA, 19 nt, Artificial Sequence
  Description of Artificial Sequence: Synthetic oligonucleotide
  Antisense strand to SEQ ID NO: 513357
ucaguucuccaucacugcg

SEQ ID NO: 513359 - RNA, 19 nt, Artificial Sequence
  Description of Artificial Sequence: Synthetic oligonucleotide
  Sense strand starting at position 1188 of SEQ ID NO: 317802
gaggacuggugguuuagaa

SEQ ID NO: 513360 - RNA, 19 nt, Artificial Sequence
  Description of Artificial Sequence: Synthetic oligonucleotide
  Antisense strand to SEQ ID NO: 513359
uucuaaaccaccaguccuc

SEQ ID NO: 513361 - RNA, 19 nt, Artificial Sequence
  Description of Artificial Sequence: Synthetic oligonucleotide
  Sense strand starting at position 1811 of SEQ ID NO: 317802
gcacaaacccagcauuaga

SEQ ID NO: 513362 - RNA, 19 nt, Artificial Sequence
  Description of Artificial Sequence: Synthetic oligonucleotide
  Antisense strand to SEQ ID NO: 513361
ucuaaugcuggguuugugc

SEQ ID NO: 513363 - RNA, 19 nt, Artificial Sequence
  Description of Artificial Sequence: Synthetic oligonucleotide
  Sense strand starting at position 1844 of SEQ ID NO: 317802
ggaugucgucgcagagaca

SEQ ID NO: 513364 - RNA, 19 nt, Artificial Sequence
  Description of Artificial Sequence: Synthetic oligonucleotide
  Antisense strand to SEQ ID NO: 513363
ugucucugcgacgacaucc

SEQ ID NO: 513365 - RNA, 19 nt, Artificial Sequence
  Description of Artificial Sequence: Synthetic oligonucleotide
  Sense strand starting at position 2299 of SEQ ID NO: 317802
gggacugacgcugaguaaa

SEQ ID NO: 513366 - RNA, 19 nt, Artificial Sequence
  Description of Artificial Sequence: Synthetic oligonucleotide
  Antisense strand to SEQ ID NO: 513365
uuuacucagcgucaguccc

SEQ ID NO: 513367 - RNA, 19 nt, Artificial Sequence
  Description of Artificial Sequence: Synthetic oligonucleotide
  Sense strand starting at position 2434 of SEQ ID NO: 317802
ugaaacuauccacgauaug

SEQ ID NO: 513368 - RNA, 19 nt, Artificial Sequence
  Description of Artificial Sequence: Synthetic oligonucleotide
  Antisense strand to SEQ ID NO: 513367
cauaucguggauaguuuca

SEQ ID NO: 513369 - RNA, 19 nt, Artificial Sequence
  Description of Artificial Sequence: Synthetic oligonucleotide
  Sense strand starting at position 2559 of SEQ ID NO: 317802
agacucgggucucuaguaa

SEQ ID NO: 513370 - RNA, 19 nt, Artificial Sequence
  Description of Artificial Sequence: Synthetic oligonucleotide
  Antisense strand to SEQ ID NO: 513369
uuacuagagacccgagucu

SEQ ID NO: 513371 - RNA, 19 nt, Artificial Sequence
  Description of Artificial Sequence: Synthetic oligonucleotide
  Sense strand starting at position 2770 of SEQ ID NO: 317802
uaggcaugugcuugaagga

SEQ ID NO: 513372 - RNA, 19 nt, Artificial Sequence
  Description of Artificial Sequence: Synthetic oligonucleotide
  Antisense strand to SEQ ID NO: 513371
uccuucaagcacaugccua

SEQ ID NO: 513373 - RNA, 19 nt, Artificial Sequence
  Description of Artificial Sequence: Synthetic oligonucleotide
  Sense strand starting at position 2866 of SEQ ID NO: 317802
caaguacaguaggauuuaa

SEQ ID NO: 513374 - RNA, 19 nt, Artificial Sequence
  Description of Artificial Sequence: Synthetic oligonucleotide
  Antisense strand to SEQ ID NO: 513373
uuaaauccuacuguacuug

SEQ ID NO: 513375 - RNA, 19 nt, Artificial Sequence
  Description of Artificial Sequence: Synthetic oligonucleotide
  Sense strand starting at position 3132 of SEQ ID NO: 317802
agcggaaucaccuauuguu

SEQ ID NO: 513376 - RNA, 19 nt, Artificial Sequence
  Description of Artificial Sequence: Synthetic oligonucleotide
  Antisense strand to SEQ ID NO: 513375
aacaauaggugauuccgcu

SEQ ID NO: 513377 - RNA, 19 nt, Artificial Sequence
  Description of Artificial Sequence: Synthetic oligonucleotide
  Sense strand starting at position 3237 of SEQ ID NO: 317802
gugacagaguaaccuguaa

SEQ ID NO: 513378 - RNA, 19 nt, Artificial Sequence
  Description of Artificial Sequence: Synthetic oligonucleotide
  Antisense strand to SEQ ID NO: 513377
uuacagguuacucugucac

SEQ ID NO: 513379 - RNA, 19 nt, Artificial Sequence
  Description of Artificial Sequence: Synthetic oligonucleotide
  Sense strand starting at position 3341 of SEQ ID NO: 317802
auccauaaauguuuggaau

SEQ ID NO: 513380 - RNA, 19 nt, Artificial Sequence
  Description of Artificial Sequence: Synthetic oligonucleotide
  Antisense strand to SEQ ID NO: 513379
auuccaaacauuuauggau

SEQ ID NO: 513381 - RNA, 19 nt, Artificial Sequence
  Description of Artificial Sequence: Synthetic oligonucleotide
  Sense strand starting at position 3342 of SEQ ID NO: 317802
uccauaaauguuuggaaug

SEQ ID NO: 513382 - RNA, 19 nt, Artificial Sequence
  Description of Artificial Sequence: Synthetic oligonucleotide
  Antisense strand to SEQ ID NO: 513381
cauuccaaacauuuaugga

SEQ ID NO: 513383 - RNA, 19 nt, Artificial Sequence
  Description of Artificial Sequence: Synthetic oligonucleotide
  Sense strand starting at position 3517 of SEQ ID NO: 317802
auaguacuggaaggucaau

SEQ ID NO: 513384 - RNA, 19 nt, Artificial Sequence
  Description of Artificial Sequence: Synthetic oligonucleotide
  Antisense strand to SEQ ID NO: 513383
auugaccuuccaguacuau

SEQ ID NO: 513385 - RNA, 19 nt, Artificial Sequence
  Description of Artificial Sequence: Synthetic oligonucleotide
  Sense strand starting at position 3582 of SEQ ID NO: 317802
cuuaaagagucagucucuu

SEQ ID NO: 513386 - RNA, 19 nt, Artificial Sequence
  Description of Artificial Sequence: Synthetic oligonucleotide
  Antisense strand to SEQ ID NO: 513385
aagagacugacucuuuaag

SEQ ID NO: 513387 - RNA, 19 nt, Artificial Sequence
  Description of Artificial Sequence: Synthetic oligonucleotide
  Sense strand starting at position 3608 of SEQ ID NO: 317802
cuaacuauuccuuguggua

SEQ ID NO: 513388 - RNA, 19 nt, Artificial Sequence
  Description of Artificial Sequence: Synthetic oligonucleotide
  Antisense strand to SEQ ID NO: 513387
uaccacaaggaauaguuag

SEQ ID NO: 513389 - RNA, 19 nt, Artificial Sequence
  Description of Artificial Sequence: Synthetic oligonucleotide
  Sense strand starting at position 3704 of SEQ ID NO: 317802
uuaugauagcuccauucgu

SEQ ID NO: 513390 - RNA, 19 nt, Artificial Sequence
  Description of Artificial Sequence: Synthetic oligonucleotide
  Antisense strand to SEQ ID NO: 513389
acgaauggagcuaucauaa

SEQ ID NO: 513391 - RNA, 19 nt, Artificial Sequence
  Description of Artificial Sequence: Synthetic oligonucleotide
  Sense strand starting at position 3817 of SEQ ID NO: 317802
gggccauuuagucagugca

SEQ ID NO: 513392 - RNA, 19 nt, Artificial Sequence
  Description of Artificial Sequence: Synthetic oligonucleotide
  Antisense strand to SEQ ID NO: 513391
ugcacugacuaaauggccc

SEQ ID NO: 513393 - RNA, 19 nt, Artificial Sequence
  Description of Artificial Sequence: Synthetic oligonucleotide
  Sense strand starting at position 3819 of SEQ ID NO: 317802
gccauuuagucagugcaug

SEQ ID NO: 513394 - RNA, 19 nt, Artificial Sequence
  Description of Artificial Sequence: Synthetic oligonucleotide
  Antisense strand to SEQ ID NO: 513393
caugcacugacuaaauggc

SEQ ID NO: 513395 - RNA, 19 nt, Artificial Sequence
  Description of Artificial Sequence: Synthetic oligonucleotide
  Sense strand starting at position 3820 of SEQ ID NO: 317802
ccauuuagucagugcaugu

SEQ ID NO: 513396 - RNA, 19 nt, Artificial Sequence
  Description of Artificial Sequence: Synthetic oligonucleotide
  Antisense strand to SEQ ID NO: 513395
acaugcacugacuaaaugg

SEQ ID NO: 513397 - RNA, 19 nt, Artificial Sequence
  Description of Artificial Sequence: Synthetic oligonucleotide
  Sense strand starting at position 3897 of SEQ ID NO: 317802
ucaacagugauguaugagu

SEQ ID NO: 513398 - RNA, 19 nt, Artificial Sequence
  Description of Artificial Sequence: Synthetic oligonucleotide
  Antisense strand to SEQ ID NO: 513397
acucauacaucacuguuga

SEQ ID NO: 513399 - RNA, 19 nt, Artificial Sequence
  Description of Artificial Sequence: Synthetic oligonucleotide
  Sense strand starting at position 3902 of SEQ ID NO: 317802
agugauguaugaguucuag

SEQ ID NO: 513400 - RNA, 19 nt, Artificial Sequence
  Description of Artificial Sequence: Synthetic oligonucleotide
  Antisense strand to SEQ ID NO: 513399
cuagaacucauacaucacu

SEQ ID NO: 513401 - RNA, 19 nt, Artificial Sequence
  Description of Artificial Sequence: Synthetic oligonucleotide
  Sense strand starting at position 3967 of SEQ ID NO: 317802
caaauagaggugugcugau

SEQ ID NO: 513402 - RNA, 19 nt, Artificial Sequence
  Description of Artificial Sequence: Synthetic oligonucleotide
  Antisense strand to SEQ ID NO: 513401
aucagcacaccucuauuug

SEQ ID NO: 513403 - RNA, 19 nt, Artificial Sequence
  Description of Artificial Sequence: Synthetic oligonucleotide
  Sense strand starting at position 25 of SEQ ID NO: 317803
aggagcuguuguguagaga

SEQ ID NO: 513404 - RNA, 19 nt, Artificial Sequence
  Description of Artificial Sequence: Synthetic oligonucleotide
  Antisense strand to SEQ ID NO: 513403
ucucuacacaacagcuccu

SEQ ID NO: 513405 - RNA, 19 nt, Artificial Sequence
  Description of Artificial Sequence: Synthetic oligonucleotide
  Sense strand starting at position 26 of SEQ ID NO: 317803
ggagcuguuguguagagaa

SEQ ID NO: 513406 - RNA, 19 nt, Artificial Sequence
  Description of Artificial Sequence: Synthetic oligonucleotide
  Antisense strand to SEQ ID NO: 513405
uucucuacacaacagcucc

SEQ ID NO: 513407 - RNA, 19 nt, Artificial Sequence
  Description of Artificial Sequence: Synthetic oligonucleotide
  Sense strand starting at position 28 of SEQ ID NO: 317803
agcuguuguguagagaauu

SEQ ID NO: 513408 - RNA, 19 nt, Artificial Sequence
  Description of Artificial Sequence: Synthetic oligonucleotide
  Antisense strand to SEQ ID NO: 513407
aauucucuacacaacagcu

SEQ ID NO: 513409 - RNA, 19 nt, Artificial Sequence
  Description of Artificial Sequence: Synthetic oligonucleotide
  Sense strand starting at position 49 of SEQ ID NO: 317803
agcacagacuuagugguua

SEQ ID NO: 513410 - RNA, 19 nt, Artificial Sequence
  Description of Artificial Sequence: Synthetic oligonucleotide
  Antisense strand to SEQ ID NO: 513409
uaaccacuaagucugugcu

SEQ ID NO: 513411 - RNA, 19 nt, Artificial Sequence
  Description of Artificial Sequence: Synthetic oligonucleotide
  Sense strand starting at position 54 of SEQ ID NO: 317803
agacuuagugguuagucca

SEQ ID NO: 513412 - RNA, 19 nt, Artificial Sequence
  Description of Artificial Sequence: Synthetic oligonucleotide
  Antisense strand to SEQ ID NO: 513411
uggacuaaccacuaagucu

SEQ ID NO: 513413 - RNA, 19 nt, Artificial Sequence
  Description of Artificial Sequence: Synthetic oligonucleotide
  Sense strand starting at position 171 of SEQ ID NO: 317803
ugauaauaguaccuacgau

SEQ ID NO: 513414 - RNA, 19 nt, Artificial Sequence
  Description of Artificial Sequence: Synthetic oligonucleotide
  Antisense strand to SEQ ID NO: 513413
aucguagguacuauuauca

SEQ ID NO: 513415 - RNA, 19 nt, Artificial Sequence
  Description of Artificial Sequence: Synthetic oligonucleotide
  Sense strand starting at position 196 of SEQ ID NO: 317803
uuaagaguuaaaggaguua

SEQ ID NO: 513416 - RNA, 19 nt, Artificial Sequence
  Description of Artificial Sequence: Synthetic oligonucleotide
  Antisense strand to SEQ ID NO: 513415
uaacuccuuuaacucuuaa

SEQ ID NO: 513417 - RNA, 19 nt, Artificial Sequence
  Description of Artificial Sequence: Synthetic oligonucleotide
  Sense strand starting at position 201 of SEQ ID NO: 317803
aguuaaaggaguuaaugca

SEQ ID NO: 513418 - RNA, 19 nt, Artificial Sequence
  Description of Artificial Sequence: Synthetic oligonucleotide
  Antisense strand to SEQ ID NO: 513417
ugcauuaacuccuuuaacu

SEQ ID NO: 513419 - RNA, 19 nt, Artificial Sequence
  Description of Artificial Sequence: Synthetic oligonucleotide
  Sense strand starting at position 208 of SEQ ID NO: 317803
ggaguuaaugcaugcaaga

SEQ ID NO: 513420 - RNA, 19 nt, Artificial Sequence
  Description of Artificial Sequence: Synthetic oligonucleotide
  Antisense strand to SEQ ID NO: 513419
ucuugcaugcauuaacucc

SEQ ID NO: 513421 - RNA, 19 nt, Artificial Sequence
  Description of Artificial Sequence: Synthetic oligonucleotide
  Sense strand starting at position 221 of SEQ ID NO: 317803
gcaagaucuuacuuagguc

SEQ ID NO: 513422 - RNA, 19 nt, Artificial Sequence
  Description of Artificial Sequence: Synthetic oligonucleotide
  Antisense strand to SEQ ID NO: 513421
gaccuaaguaagaucuugc

SEQ ID NO: 513423 - RNA, 19 nt, Artificial Sequence
  Description of Artificial Sequence: Synthetic oligonucleotide
  Sense strand starting at position 236 of SEQ ID NO: 317803
ggucaugccugguccguua

SEQ ID NO: 513424 - RNA, 19 nt, Artificial Sequence
  Description of Artificial Sequence: Synthetic oligonucleotide
  Antisense strand to SEQ ID NO: 513423
uaacggaccaggcaugacc

SEQ ID NO: 513425 - RNA, 19 nt, Artificial Sequence
  Description of Artificial Sequence: Synthetic oligonucleotide
  Sense strand starting at position 240 of SEQ ID NO: 317803
augccugguccguuaguua

SEQ ID NO: 513426 - RNA, 19 nt, Artificial Sequence
  Description of Artificial Sequence: Synthetic oligonucleotide
  Antisense strand to SEQ ID NO: 513425
uaacuaacggaccaggcau

SEQ ID NO: 513427 - RNA, 19 nt, Artificial Sequence
  Description of Artificial Sequence: Synthetic oligonucleotide
  Sense strand starting at position 243 of SEQ ID NO: 317803
ccugguccguuaguuaagu

SEQ ID NO: 513428 - RNA, 19 nt, Artificial Sequence
  Description of Artificial Sequence: Synthetic oligonucleotide
  Antisense strand to SEQ ID NO: 513427
acuuaacuaacggaccagg

SEQ ID NO: 513429 - RNA, 19 nt, Artificial Sequence
  Description of Artificial Sequence: Synthetic oligonucleotide
  Sense strand starting at position 249 of SEQ ID NO: 317803
ccguuaguuaaguguucca

SEQ ID NO: 513430 - RNA, 19 nt, Artificial Sequence
  Description of Artificial Sequence: Synthetic oligonucleotide
  Antisense strand to SEQ ID NO: 513429
uggaacacuuaacuaacgg

SEQ ID NO: 513431 - RNA, 19 nt, Artificial Sequence
  Description of Artificial Sequence: Synthetic oligonucleotide
  Sense strand starting at position 380 of SEQ ID NO: 317803
ggauaugauuauggccaga

SEQ ID NO: 513432 - RNA, 19 nt, Artificial Sequence
  Description of Artificial Sequence: Synthetic oligonucleotide
  Antisense strand to SEQ ID NO: 513431
ucuggccauaaucauaucc

SEQ ID NO: 513433 - RNA, 19 nt, Artificial Sequence
  Description of Artificial Sequence: Synthetic oligonucleotide
  Sense strand starting at position 382 of SEQ ID NO: 317803
auaugauuauggccagaac

SEQ ID NO: 513434 - RNA, 19 nt, Artificial Sequence
  Description of Artificial Sequence: Synthetic oligonucleotide
  Antisense strand to SEQ ID NO: 513433
guucuggccauaaucauau

SEQ ID NO: 513435 - RNA, 19 nt, Artificial Sequence
  Description of Artificial Sequence: Synthetic oligonucleotide
  Sense strand starting at position 676 of SEQ ID NO: 317803
gagccaguugcaugacaaa

SEQ ID NO: 513436 - RNA, 19 nt, Artificial Sequence
  Description of Artificial Sequence: Synthetic oligonucleotide
  Antisense strand to SEQ ID NO: 513435
uuugucaugcaacuggcuc

SEQ ID NO: 513437 - RNA, 19 nt, Artificial Sequence
  Description of Artificial Sequence: Synthetic oligonucleotide
  Sense strand starting at position 973 of SEQ ID NO: 317803
caaugucuugacuguguga

SEQ ID NO: 513438 - RNA, 19 nt, Artificial Sequence
  Description of Artificial Sequence: Synthetic oligonucleotide
  Antisense strand to SEQ ID NO: 513437
ucacacagucaagacauug

SEQ ID NO: 513439 - RNA, 19 nt, Artificial Sequence
  Description of Artificial Sequence: Synthetic oligonucleotide
  Sense strand starting at position 975 of SEQ ID NO: 317803
augucuugacugugugaug

SEQ ID NO: 513440 - RNA, 19 nt, Artificial Sequence
  Description of Artificial Sequence: Synthetic oligonucleotide
  Antisense strand to SEQ ID NO: 513439
caucacacagucaagacau

SEQ ID NO: 513441 - RNA, 19 nt, Artificial Sequence
  Description of Artificial Sequence: Synthetic oligonucleotide
  Sense strand starting at position 1088 of SEQ ID NO: 317803
cuggguuaggaguggaaga

SEQ ID NO: 513442 - RNA, 19 nt, Artificial Sequence
  Description of Artificial Sequence: Synthetic oligonucleotide
  Antisense strand to SEQ ID NO: 513441
ucuuccacuccuaacccag

SEQ ID NO: 513443 - RNA, 19 nt, Artificial Sequence
  Description of Artificial Sequence: Synthetic oligonucleotide
  Sense strand starting at position 1129 of SEQ ID NO: 317803
gguguugcuaaaugagugu

SEQ ID NO: 513444 - RNA, 19 nt, Artificial Sequence
  Description of Artificial Sequence: Synthetic oligonucleotide
  Antisense strand to SEQ ID NO: 513443
acacucauuuagcaacacc

SEQ ID NO: 513445 - RNA, 19 nt, Artificial Sequence
  Description of Artificial Sequence: Synthetic oligonucleotide
  Sense strand starting at position 1133 of SEQ ID NO: 317803
uugcuaaaugaguguggga

SEQ ID NO: 513446 - RNA, 19 nt, Artificial Sequence
  Description of Artificial Sequence: Synthetic oligonucleotide
  Antisense strand to SEQ ID NO: 513445
ucccacacucauuuagcaa

SEQ ID NO: 513447 - RNA, 19 nt, Artificial Sequence
  Description of Artificial Sequence: Synthetic oligonucleotide
  Sense strand starting at position 1135 of SEQ ID NO: 317803
gcuaaaugagugugggaca

SEQ ID NO: 513448 - RNA, 19 nt, Artificial Sequence
  Description of Artificial Sequence: Synthetic oligonucleotide
  Antisense strand to SEQ ID NO: 513447
ugucccacacucauuuagc

SEQ ID NO: 513449 - RNA, 19 nt, Artificial Sequence
  Description of Artificial Sequence: Synthetic oligonucleotide
  Sense strand starting at position 1161 of SEQ ID NO: 317803
gggagccugcguucuaguu

SEQ ID NO: 513450 - RNA, 19 nt, Artificial Sequence
  Description of Artificial Sequence: Synthetic oligonucleotide
  Antisense strand to SEQ ID NO: 513449
aacuagaacgcaggcuccc

SEQ ID NO: 513451 - RNA, 19 nt, Artificial Sequence
  Description of Artificial Sequence: Synthetic oligonucleotide
  Sense strand starting at position 2447 of SEQ ID NO: 317803
gaucgcagguccuuaaucu

SEQ ID NO: 513452 - RNA, 19 nt, Artificial Sequence
  Description of Artificial Sequence: Synthetic oligonucleotide
  Antisense strand to SEQ ID NO: 513451
agauuaaggaccugcgauc

SEQ ID NO: 513453 - RNA, 19 nt, Artificial Sequence
  Description of Artificial Sequence: Synthetic oligonucleotide
  Sense strand starting at position 2448 of SEQ ID NO: 317803
aucgcagguccuuaaucuu

SEQ ID NO: 513454 - RNA, 19 nt, Artificial Sequence
  Description of Artificial Sequence: Synthetic oligonucleotide
  Antisense strand to SEQ ID NO: 513453
aagauuaaggaccugcgau

SEQ ID NO: 513455 - RNA, 19 nt, Artificial Sequence
  Description of Artificial Sequence: Synthetic oligonucleotide
  Sense strand starting at position 2549 of SEQ ID NO: 317803
acacgagucuuccuuacag

SEQ ID NO: 513456 - RNA, 19 nt, Artificial Sequence
  Description of Artificial Sequence: Synthetic oligonucleotide
  Antisense strand to SEQ ID NO: 513455
cuguaaggaagacucgugu

SEQ ID NO: 513457 - RNA, 19 nt, Artificial Sequence
  Description of Artificial Sequence: Synthetic oligonucleotide
  Sense strand starting at position 2551 of SEQ ID NO: 317803
acgagucuuccuuacaguu

SEQ ID NO: 513458 - RNA, 19 nt, Artificial Sequence
  Description of Artificial Sequence: Synthetic oligonucleotide
  Antisense strand to SEQ ID NO: 513457
aacuguaaggaagacucgu

SEQ ID NO: 513459 - RNA, 19 nt, Artificial Sequence
  Description of Artificial Sequence: Synthetic oligonucleotide
  Sense strand starting at position 2586 of SEQ ID NO: 317803
uggccuucuagagaaaguu

SEQ ID NO: 513460 - RNA, 19 nt, Artificial Sequence
  Description of Artificial Sequence: Synthetic oligonucleotide
  Antisense strand to SEQ ID NO: 513459
aacuuucucuagaaggcca

SEQ ID NO: 513461 - RNA, 19 nt, Artificial Sequence
  Description of Artificial Sequence: Synthetic oligonucleotide
  Sense strand starting at position 2964 of SEQ ID NO: 317803
acacaaauuccuggguauu

SEQ ID NO: 513462 - RNA, 19 nt, Artificial Sequence
  Description of Artificial Sequence: Synthetic oligonucleotide
  Antisense strand to SEQ ID NO: 513461
aauacccaggaauuugugu

SEQ ID NO: 513463 - RNA, 19 nt, Artificial Sequence
  Description of Artificial Sequence: Synthetic oligonucleotide
  Sense strand starting at position 2966 of SEQ ID NO: 317803
acaaauuccuggguauuac

SEQ ID NO: 513464 - RNA, 19 nt, Artificial Sequence
  Description of Artificial Sequence: Synthetic oligonucleotide
  Antisense strand to SEQ ID NO: 513463
guaauacccaggaauuugu

SEQ ID NO: 513465 - RNA, 19 nt, Artificial Sequence
  Description of Artificial Sequence: Synthetic oligonucleotide
  Sense strand starting at position 3038 of SEQ ID NO: 317803
agcagucuguuugugugaa

SEQ ID NO: 513466 - RNA, 19 nt, Artificial Sequence
  Description of Artificial Sequence: Synthetic oligonucleotide
  Antisense strand to SEQ ID NO: 513465
uucacacaaacagacugcu

SEQ ID NO: 513467 - RNA, 19 nt, Artificial Sequence
  Description of Artificial Sequence: Synthetic oligonucleotide
  Sense strand starting at position 3040 of SEQ ID NO: 317803
cagucuguuugugugaauc

SEQ ID NO: 513468 - RNA, 19 nt, Artificial Sequence
  Description of Artificial Sequence: Synthetic oligonucleotide
  Antisense strand to SEQ ID NO: 513467
gauucacacaaacagacug

SEQ ID NO: 513469 - RNA, 19 nt, Artificial Sequence
  Description of Artificial Sequence: Synthetic oligonucleotide
  Sense strand starting at position 3375 of SEQ ID NO: 317803
ccucucauugugcagggau

SEQ ID NO: 513470 - RNA, 19 nt, Artificial Sequence
  Description of Artificial Sequence: Synthetic oligonucleotide
  Antisense strand to SEQ ID NO: 513469
aucccugcacaaugagagg

SEQ ID NO: 513471 - RNA, 19 nt, Artificial Sequence
  Description of Artificial Sequence: Synthetic oligonucleotide
  Sense strand starting at position 3448 of SEQ ID NO: 317803
ucucuugggucaccauauu

SEQ ID NO: 513472 - RNA, 19 nt, Artificial Sequence
  Description of Artificial Sequence: Synthetic oligonucleotide
  Antisense strand to SEQ ID NO: 513471
aauauggugacccaagaga

SEQ ID NO: 513473 - RNA, 19 nt, Artificial Sequence
  Description of Artificial Sequence: Synthetic oligonucleotide
  Sense strand starting at position 3643 of SEQ ID NO: 317803
ggcucugugugacugcaau

SEQ ID NO: 513474 - RNA, 19 nt, Artificial Sequence
  Description of Artificial Sequence: Synthetic oligonucleotide
  Antisense strand to SEQ ID NO: 513473
auugcagucacacagagcc

SEQ ID NO: 513475 - RNA, 19 nt, Artificial Sequence
  Description of Artificial Sequence: Synthetic oligonucleotide
  Sense strand starting at position 3710 of SEQ ID NO: 317803
ggcucugauaugugauaga

SEQ ID NO: 513476 - RNA, 19 nt, Artificial Sequence
  Description of Artificial Sequence: Synthetic oligonucleotide
  Antisense strand to SEQ ID NO: 513475
ucuaucacauaucagagcc

SEQ ID NO: 513477 - RNA, 19 nt, Artificial Sequence
  Description of Artificial Sequence: Synthetic oligonucleotide
  Sense strand starting at position 3823 of SEQ ID NO: 317803
aggaguaaugcccaguguu

SEQ ID NO: 513478 - RNA, 19 nt, Artificial Sequence
  Description of Artificial Sequence: Synthetic oligonucleotide
  Antisense strand to SEQ ID NO: 513477
aacacugggcauuacuccu

SEQ ID NO: 513479 - RNA, 19 nt, Artificial Sequence
  Description of Artificial Sequence: Synthetic oligonucleotide
  Sense strand starting at position 3835 of SEQ ID NO: 317803
caguguuugcugcaacaug

SEQ ID NO: 513480 - RNA, 19 nt, Artificial Sequence
  Description of Artificial Sequence: Synthetic oligonucleotide
  Antisense strand to SEQ ID NO: 513479
cauguugcagcaaacacug

SEQ ID NO: 513481 - RNA, 19 nt, Artificial Sequence
  Description of Artificial Sequence: Synthetic oligonucleotide
  Sense strand starting at position 3876 of SEQ ID NO: 317803
aagggaaauccuggcuguu

SEQ ID NO: 513482 - RNA, 19 nt, Artificial Sequence
  Description of Artificial Sequence: Synthetic oligonucleotide
  Antisense strand to SEQ ID NO: 513481
aacagccaggauuucccuu

SEQ ID NO: 513483 - RNA, 19 nt, Artificial Sequence
  Description of Artificial Sequence: Synthetic oligonucleotide
  Sense strand starting at position 346 of SEQ ID NO: 317804
cugaacugaggaugcuaua

SEQ ID NO: 513484 - RNA, 19 nt, Artificial Sequence
  Description of Artificial Sequence: Synthetic oligonucleotide
  Antisense strand to SEQ ID NO: 513483
uauagcauccucaguucag

SEQ ID NO: 513485 - RNA, 19 nt, Artificial Sequence
  Description of Artificial Sequence: Synthetic oligonucleotide
  Sense strand starting at position 531 of SEQ ID NO: 317804
augagcaaaugguaauuua

SEQ ID NO: 513486 - RNA, 19 nt, Artificial Sequence
  Description of Artificial Sequence: Synthetic oligonucleotide
  Antisense strand to SEQ ID NO: 513485
uaaauuaccauuugcucau

SEQ ID NO: 513487 - RNA, 19 nt, Artificial Sequence
  Description of Artificial Sequence: Synthetic oligonucleotide
  Sense strand starting at position 539 of SEQ ID NO: 317804
augguaauuuaagaugaca

SEQ ID NO: 513488 - RNA, 19 nt, Artificial Sequence
  Description of Artificial Sequence: Synthetic oligonucleotide
  Antisense strand to SEQ ID NO: 513487
ugucaucuuaaauuaccau

SEQ ID NO: 513489 - RNA, 19 nt, Artificial Sequence
  Description of Artificial Sequence: Synthetic oligonucleotide
  Sense strand starting at position 661 of SEQ ID NO: 317804
ucaagagucuugcucuauu

SEQ ID NO: 513490 - RNA, 19 nt, Artificial Sequence
  Description of Artificial Sequence: Synthetic oligonucleotide
  Antisense strand to SEQ ID NO: 513489
aauagagcaagacucuuga

SEQ ID NO: 513491 - RNA, 19 nt, Artificial Sequence
  Description of Artificial Sequence: Synthetic oligonucleotide
  Sense strand starting at position 880 of SEQ ID NO: 317804
gacuuaaggugauccgucu

SEQ ID NO: 513492 - RNA, 19 nt, Artificial Sequence
  Description of Artificial Sequence: Synthetic oligonucleotide
  Antisense strand to SEQ ID NO: 513491
agacggaucaccuuaaguc

SEQ ID NO: 513493 - RNA, 19 nt, Artificial Sequence
  Description of Artificial Sequence: Synthetic oligonucleotide
  Sense strand starting at position 942 of SEQ ID NO: 317804
gcgcucagccaauaaugau

SEQ ID NO: 513494 - RNA, 19 nt, Artificial Sequence
  Description of Artificial Sequence: Synthetic oligonucleotide
  Antisense strand to SEQ ID NO: 513493
aucauuauuggcugagcgc

SEQ ID NO: 513495 - RNA, 19 nt, Artificial Sequence
  Description of Artificial Sequence: Synthetic oligonucleotide
  Sense strand starting at position 1020 of SEQ ID NO: 317804
aggaccugauaguaaauuu

SEQ ID NO: 513496 - RNA, 19 nt, Artificial Sequence
  Description of Artificial Sequence: Synthetic oligonucleotide
  Antisense strand to SEQ ID NO: 513495
aaauuuacuaucagguccu

SEQ ID NO: 513497 - RNA, 19 nt, Artificial Sequence
  Description of Artificial Sequence: Synthetic oligonucleotide
  Sense strand starting at position 1219 of SEQ ID NO: 317804
cuuagcuugaguggucaca

SEQ ID NO: 513498 - RNA, 19 nt, Artificial Sequence
  Description of Artificial Sequence: Synthetic oligonucleotide
  Antisense strand to SEQ ID NO: 513497
ugugaccacucaagcuaag

SEQ ID NO: 513499 - RNA, 19 nt, Artificial Sequence
  Description of Artificial Sequence: Synthetic oligonucleotide
  Sense strand starting at position 1221 of SEQ ID NO: 317804
uagcuugaguggucacaca

SEQ ID NO: 513500 - RNA, 19 nt, Artificial Sequence
  Description of Artificial Sequence: Synthetic oligonucleotide
  Antisense strand to SEQ ID NO: 513499
ugugugaccacucaagcua

SEQ ID NO: 513501 - RNA, 19 nt, Artificial Sequence
  Description of Artificial Sequence: Synthetic oligonucleotide
  Sense strand starting at position 1275 of SEQ ID NO: 317804
ucuccugcucacuaguuua

SEQ ID NO: 513502 - RNA, 19 nt, Artificial Sequence
  Description of Artificial Sequence: Synthetic oligonucleotide
  Antisense strand to SEQ ID NO: 513501
uaaacuagugagcaggaga

SEQ ID NO: 513503 - RNA, 19 nt, Artificial Sequence
  Description of Artificial Sequence: Synthetic oligonucleotide
  Sense strand starting at position 1278 of SEQ ID NO: 317804
ccugcucacuaguuuagaa

SEQ ID NO: 513504 - RNA, 19 nt, Artificial Sequence
  Description of Artificial Sequence: Synthetic oligonucleotide
  Antisense strand to SEQ ID NO: 513503
uucuaaacuagugagcagg

SEQ ID NO: 513505 - RNA, 19 nt, Artificial Sequence
  Description of Artificial Sequence: Synthetic oligonucleotide
  Sense strand starting at position 1280 of SEQ ID NO: 317804
ugcucacuaguuuagaaga

SEQ ID NO: 513506 - RNA, 19 nt, Artificial Sequence
  Description of Artificial Sequence: Synthetic oligonucleotide
  Antisense strand to SEQ ID NO: 513505
ucuucuaaacuagugagca

SEQ ID NO: 513507 - RNA, 19 nt, Artificial Sequence
  Description of Artificial Sequence: Synthetic oligonucleotide
  Sense strand starting at position 1296 of SEQ ID NO: 317804
agacgaaugucccuucuca

SEQ ID NO: 513508 - RNA, 19 nt, Artificial Sequence
  Description of Artificial Sequence: Synthetic oligonucleotide
  Antisense strand to SEQ ID NO: 513507
ugagaagggacauucgucu

SEQ ID NO: 513509 - RNA, 19 nt, Artificial Sequence
  Description of Artificial Sequence: Synthetic oligonucleotide
  Sense strand starting at position 1300 of SEQ ID NO: 317804
gaaugucccuucucaucga

SEQ ID NO: 513510 - RNA, 19 nt, Artificial Sequence
  Description of Artificial Sequence: Synthetic oligonucleotide
  Antisense strand to SEQ ID NO: 513509
ucgaugagaagggacauuc

SEQ ID NO: 513511 - RNA, 19 nt, Artificial Sequence
  Description of Artificial Sequence: Synthetic oligonucleotide
  Sense strand starting at position 1304 of SEQ ID NO: 317804
gucccuucucaucgaaucu

SEQ ID NO: 513512 - RNA, 19 nt, Artificial Sequence
  Description of Artificial Sequence: Synthetic oligonucleotide
  Antisense strand to SEQ ID NO: 513511
agauucgaugagaagggac

SEQ ID NO: 513513 - RNA, 19 nt, Artificial Sequence
  Description of Artificial Sequence: Synthetic oligonucleotide
  Sense strand starting at position 1385 of SEQ ID NO: 317804
uaaagcuucuggguuacaa

SEQ ID NO: 513514 - RNA, 19 nt, Artificial Sequence
  Description of Artificial Sequence: Synthetic oligonucleotide
  Antisense strand to SEQ ID NO: 513513
uuguaacccagaagcuuua

SEQ ID NO: 513515 - RNA, 19 nt, Artificial Sequence
  Description of Artificial Sequence: Synthetic oligonucleotide
  Sense strand starting at position 1397 of SEQ ID NO: 317804
guuacaaagggucguaguu

SEQ ID NO: 513516 - RNA, 19 nt, Artificial Sequence
  Description of Artificial Sequence: Synthetic oligonucleotide
  Antisense strand to SEQ ID NO: 513515
aacuacgacccuuuguaac

SEQ ID NO: 513517 - RNA, 19 nt, Artificial Sequence
  Description of Artificial Sequence: Synthetic oligonucleotide
  Sense strand starting at position 1470 of SEQ ID NO: 317804
gucuguaaaccagagaggu

SEQ ID NO: 513518 - RNA, 19 nt, Artificial Sequence
  Description of Artificial Sequence: Synthetic oligonucleotide
  Antisense strand to SEQ ID NO: 513517
accucucugguuuacagac

SEQ ID NO: 513519 - RNA, 19 nt, Artificial Sequence
  Description of Artificial Sequence: Synthetic oligonucleotide
  Sense strand starting at position 1539 of SEQ ID NO: 317804
gggcacugugcucaacacu

SEQ ID NO: 513520 - RNA, 19 nt, Artificial Sequence
  Description of Artificial Sequence: Synthetic oligonucleotide
  Antisense strand to SEQ ID NO: 513519
aguguugagcacagugccc

SEQ ID NO: 513521 - RNA, 19 nt, Artificial Sequence
  Description of Artificial Sequence: Synthetic oligonucleotide
  Sense strand starting at position 1645 of SEQ ID NO: 317804
aguuuaagugaaugaggca

SEQ ID NO: 513522 - RNA, 19 nt, Artificial Sequence
  Description of Artificial Sequence: Synthetic oligonucleotide
  Antisense strand to SEQ ID NO: 513521
ugccucauucacuuaaacu

SEQ ID NO: 513523 - RNA, 19 nt, Artificial Sequence
  Description of Artificial Sequence: Synthetic oligonucleotide
  Sense strand starting at position 1646 of SEQ ID NO: 317804
guuuaagugaaugaggcaa

SEQ ID NO: 513524 - RNA, 19 nt, Artificial Sequence
  Description of Artificial Sequence: Synthetic oligonucleotide
  Antisense strand to SEQ ID NO: 513523
uugccucauucacuuaaac

SEQ ID NO: 513525 - RNA, 19 nt, Artificial Sequence
  Description of Artificial Sequence: Synthetic oligonucleotide
  Sense strand starting at position 2092 of SEQ ID NO: 317804
ccgggcucuacuggugaaa

SEQ ID NO: 513526 - RNA, 19 nt, Artificial Sequence
  Description of Artificial Sequence: Synthetic oligonucleotide
  Antisense strand to SEQ ID NO: 513525
uuucaccaguagagcccgg

SEQ ID NO: 513527 - RNA, 19 nt, Artificial Sequence
  Description of Artificial Sequence: Synthetic oligonucleotide
  Sense strand starting at position 2190 of SEQ ID NO: 317804
acuagagacguugggacau

SEQ ID NO: 513528 - RNA, 19 nt, Artificial Sequence
  Description of Artificial Sequence: Synthetic oligonucleotide
  Antisense strand to SEQ ID NO: 513527
augucccaacgucucuagu

SEQ ID NO: 513529 - RNA, 19 nt, Artificial Sequence
  Description of Artificial Sequence: Synthetic oligonucleotide
  Sense strand starting at position 2202 of SEQ ID NO: 317804
gggacaucucccgggaaca

SEQ ID NO: 513530 - RNA, 19 nt, Artificial Sequence
  Description of Artificial Sequence: Synthetic oligonucleotide
  Antisense strand to SEQ ID NO: 513529
uguucccgggagauguccc

SEQ ID NO: 513531 - RNA, 19 nt, Artificial Sequence
  Description of Artificial Sequence: Synthetic oligonucleotide
  Sense strand starting at position 2203 of SEQ ID NO: 317804
ggacaucucccgggaacag

SEQ ID NO: 513532 - RNA, 19 nt, Artificial Sequence
  Description of Artificial Sequence: Synthetic oligonucleotide
  Antisense strand to SEQ ID NO: 513531
cuguucccgggagaugucc

SEQ ID NO: 513533 - RNA, 19 nt, Artificial Sequence
  Description of Artificial Sequence: Synthetic oligonucleotide
  Sense strand starting at position 2373 of SEQ ID NO: 317804
uaaacauuagaggguuguu

SEQ ID NO: 513534 - RNA, 19 nt, Artificial Sequence
  Description of Artificial Sequence: Synthetic oligonucleotide
  Antisense strand to SEQ ID NO: 513533
aacaacccucuaauguuua

SEQ ID NO: 513535 - RNA, 19 nt, Artificial Sequence
  Description of Artificial Sequence: Synthetic oligonucleotide
  Sense strand starting at position 2376 of SEQ ID NO: 317804
acauuagaggguuguuuag

SEQ ID NO: 513536 - RNA, 19 nt, Artificial Sequence
  Description of Artificial Sequence: Synthetic oligonucleotide
  Antisense strand to SEQ ID NO: 513535
cuaaacaacccucuaaugu

SEQ ID NO: 513537 - RNA, 19 nt, Artificial Sequence
  Description of Artificial Sequence: Synthetic oligonucleotide
  Sense strand starting at position 2378 of SEQ ID NO: 317804
auuagaggguuguuuagaa

SEQ ID NO: 513538 - RNA, 19 nt, Artificial Sequence
  Description of Artificial Sequence: Synthetic oligonucleotide
  Antisense strand to SEQ ID NO: 513537
uucuaaacaacccucuaau

SEQ ID NO: 513539 - RNA, 19 nt, Artificial Sequence
  Description of Artificial Sequence: Synthetic oligonucleotide
  Sense strand starting at position 2428 of SEQ ID NO: 317804
acccuuuguuuggcggaga

SEQ ID NO: 513540 - RNA, 19 nt, Artificial Sequence
  Description of Artificial Sequence: Synthetic oligonucleotide
  Antisense strand to SEQ ID NO: 513539
ucuccgccaaacaaagggu

SEQ ID NO: 513541 - RNA, 19 nt, Artificial Sequence
  Description of Artificial Sequence: Synthetic oligonucleotide
  Sense strand starting at position 2431 of SEQ ID NO: 317804
cuuuguuuggcggagaaac

SEQ ID NO: 513542 - RNA, 19 nt, Artificial Sequence
  Description of Artificial Sequence: Synthetic oligonucleotide
  Antisense strand to SEQ ID NO: 513541
guuucuccgccaaacaaag

SEQ ID NO: 513543 - RNA, 19 nt, Artificial Sequence
  Description of Artificial Sequence: Synthetic oligonucleotide
  Sense strand starting at position 2524 of SEQ ID NO: 317804
uggagacauccacacgcuu

SEQ ID NO: 513544 - RNA, 19 nt, Artificial Sequence
  Description of Artificial Sequence: Synthetic oligonucleotide
  Antisense strand to SEQ ID NO: 513543
aagcguguggaugucucca

SEQ ID NO: 513545 - RNA, 19 nt, Artificial Sequence
  Description of Artificial Sequence: Synthetic oligonucleotide
  Sense strand starting at position 2564 of SEQ ID NO: 317804
ucauucugucauuaugauu

SEQ ID NO: 513546 - RNA, 19 nt, Artificial Sequence
  Description of Artificial Sequence: Synthetic oligonucleotide
  Antisense strand to SEQ ID NO: 513545
aaucauaaugacagaauga

SEQ ID NO: 513547 - RNA, 19 nt, Artificial Sequence
  Description of Artificial Sequence: Synthetic oligonucleotide
  Sense strand starting at position 2587 of SEQ ID NO: 317804
ccacucguaacugagaguu

SEQ ID NO: 513548 - RNA, 19 nt, Artificial Sequence
  Description of Artificial Sequence: Synthetic oligonucleotide
  Antisense strand to SEQ ID NO: 513547
aacucucaguuacgagugg

SEQ ID NO: 513549 - RNA, 19 nt, Artificial Sequence
  Description of Artificial Sequence: Synthetic oligonucleotide
  Sense strand starting at position 2602 of SEQ ID NO: 317804
aguugcgugcccucaaguu

SEQ ID NO: 513550 - RNA, 19 nt, Artificial Sequence
  Description of Artificial Sequence: Synthetic oligonucleotide
  Antisense strand to SEQ ID NO: 513549
aacuugagggcacgcaacu

SEQ ID NO: 513551 - RNA, 19 nt, Artificial Sequence
  Description of Artificial Sequence: Synthetic oligonucleotide
  Sense strand starting at position 2646 of SEQ ID NO: 317804
gcuuucuuagcuguguagu

SEQ ID NO: 513552 - RNA, 19 nt, Artificial Sequence
  Description of Artificial Sequence: Synthetic oligonucleotide
  Antisense strand to SEQ ID NO: 513551
acuacacagcuaagaaagc

SEQ ID NO: 513553 - RNA, 19 nt, Artificial Sequence
  Description of Artificial Sequence: Synthetic oligonucleotide
  Sense strand starting at position 2751 of SEQ ID NO: 317804
gcuugaaccucuuugaaca

SEQ ID NO: 513554 - RNA, 19 nt, Artificial Sequence
  Description of Artificial Sequence: Synthetic oligonucleotide
  Antisense strand to SEQ ID NO: 513553
uguucaaagagguucaagc

SEQ ID NO: 513555 - RNA, 19 nt, Artificial Sequence
  Description of Artificial Sequence: Synthetic oligonucleotide
  Sense strand starting at position 2764 of SEQ ID NO: 317804
ugaacaagagucgagaguu

SEQ ID NO: 513556 - RNA, 19 nt, Artificial Sequence
  Description of Artificial Sequence: Synthetic oligonucleotide
  Antisense strand to SEQ ID NO: 513555
aacucucgacucuuguuca

SEQ ID NO: 513557 - RNA, 19 nt, Artificial Sequence
  Description of Artificial Sequence: Synthetic oligonucleotide
  Sense strand starting at position 2840 of SEQ ID NO: 317804
cuccauugucaauguaaua

SEQ ID NO: 513558 - RNA, 19 nt, Artificial Sequence
  Description of Artificial Sequence: Synthetic oligonucleotide
  Antisense strand to SEQ ID NO: 513557
uauuacauugacaauggag

SEQ ID NO: 513559 - RNA, 19 nt, Artificial Sequence
  Description of Artificial Sequence: Synthetic oligonucleotide
  Sense strand starting at position 3832 of SEQ ID NO: 317804
aggcauuagguuugcuauu

SEQ ID NO: 513560 - RNA, 19 nt, Artificial Sequence
  Description of Artificial Sequence: Synthetic oligonucleotide
  Antisense strand to SEQ ID NO: 513559
aauagcaaaccuaaugccu

SEQ ID NO: 513561 - RNA, 19 nt, Artificial Sequence
  Description of Artificial Sequence: Synthetic oligonucleotide
  Sense strand starting at position 3908 of SEQ ID NO: 317804
ggaugaucccauuguuaac

SEQ ID NO: 513562 - RNA, 19 nt, Artificial Sequence
  Description of Artificial Sequence: Synthetic oligonucleotide
  Antisense strand to SEQ ID NO: 513561
guuaacaaugggaucaucc

SEQ ID NO: 513563 - RNA, 19 nt, Artificial Sequence
  Description of Artificial Sequence: Synthetic oligonucleotide
  Sense strand starting at position 234 of SEQ ID NO: 317805
ggcgauuuaauguggcagu

SEQ ID NO: 513564 - RNA, 19 nt, Artificial Sequence
  Description of Artificial Sequence: Synthetic oligonucleotide
  Antisense strand to SEQ ID NO: 513563
acugccacauuaaaucgcc

SEQ ID NO: 513565 - RNA, 19 nt, Artificial Sequence
  Description of Artificial Sequence: Synthetic oligonucleotide
  Sense strand starting at position 309 of SEQ ID NO: 317805
agauguaagcuguauguaa

SEQ ID NO: 513566 - RNA, 19 nt, Artificial Sequence
  Description of Artificial Sequence: Synthetic oligonucleotide
  Antisense strand to SEQ ID NO: 513565
uuacauacagcuuacaucu

SEQ ID NO: 513567 - RNA, 19 nt, Artificial Sequence
  Description of Artificial Sequence: Synthetic oligonucleotide
  Sense strand starting at position 318 of SEQ ID NO: 317805
cuguauguaaccuggaaga

SEQ ID NO: 513568 - RNA, 19 nt, Artificial Sequence
  Description of Artificial Sequence: Synthetic oligonucleotide
  Antisense strand to SEQ ID NO: 513567
ucuuccagguuacauacag

SEQ ID NO: 513569 - RNA, 19 nt, Artificial Sequence
  Description of Artificial Sequence: Synthetic oligonucleotide
  Sense strand starting at position 621 of SEQ ID NO: 317805
ucguacuauuaauugggaa

SEQ ID NO: 513570 - RNA, 19 nt, Artificial Sequence
  Description of Artificial Sequence: Synthetic oligonucleotide
  Antisense strand to SEQ ID NO: 513569
uucccaauuaauaguacga

SEQ ID NO: 513571 - RNA, 19 nt, Artificial Sequence
  Description of Artificial Sequence: Synthetic oligonucleotide
  Sense strand starting at position 622 of SEQ ID NO: 317805
cguacuauuaauugggaaa

SEQ ID NO: 513572 - RNA, 19 nt, Artificial Sequence
  Description of Artificial Sequence: Synthetic oligonucleotide
  Antisense strand to SEQ ID NO: 513571
uuucccaauuaauaguacg

SEQ ID NO: 513573 - RNA, 19 nt, Artificial Sequence
  Description of Artificial Sequence: Synthetic oligonucleotide
  Sense strand starting at position 743 of SEQ ID NO: 317805
uuuagcuguguagaugaaa

SEQ ID NO: 513574 - RNA, 19 nt, Artificial Sequence
  Description of Artificial Sequence: Synthetic oligonucleotide
  Antisense strand to SEQ ID NO: 513573
uuucaucuacacagcuaaa

SEQ ID NO: 513575 - RNA, 19 nt, Artificial Sequence
  Description of Artificial Sequence: Synthetic oligonucleotide
  Sense strand starting at position 847 of SEQ ID NO: 317805
ucagaagugcuaugaaaug

SEQ ID NO: 513576 - RNA, 19 nt, Artificial Sequence
  Description of Artificial Sequence: Synthetic oligonucleotide
  Antisense strand to SEQ ID NO: 513575
cauuucauagcacuucuga

SEQ ID NO: 513577 - RNA, 19 nt, Artificial Sequence
  Description of Artificial Sequence: Synthetic oligonucleotide
  Sense strand starting at position 852 of SEQ ID NO: 317805
agugcuaugaaaugguaaa

SEQ ID NO: 513578 - RNA, 19 nt, Artificial Sequence
  Description of Artificial Sequence: Synthetic oligonucleotide
  Antisense strand to SEQ ID NO: 513577
uuuaccauuucauagcacu

SEQ ID NO: 513579 - RNA, 19 nt, Artificial Sequence
  Description of Artificial Sequence: Synthetic oligonucleotide
  Sense strand starting at position 853 of SEQ ID NO: 317805
gugcuaugaaaugguaaag

SEQ ID NO: 513580 - RNA, 19 nt, Artificial Sequence
  Description of Artificial Sequence: Synthetic oligonucleotide
  Antisense strand to SEQ ID NO: 513579
cuuuaccauuucauagcac

SEQ ID NO: 513581 - RNA, 19 nt, Artificial Sequence
  Description of Artificial Sequence: Synthetic oligonucleotide
  Sense strand starting at position 1023 of SEQ ID NO: 317805
ugcauuggucucugaaaga

SEQ ID NO: 513582 - RNA, 19 nt, Artificial Sequence
  Description of Artificial Sequence: Synthetic oligonucleotide
  Antisense strand to SEQ ID NO: 513581
ucuuucagagaccaaugca

SEQ ID NO: 513583 - RNA, 19 nt, Artificial Sequence
  Description of Artificial Sequence: Synthetic oligonucleotide
  Sense strand starting at position 1125 of SEQ ID NO: 317805
aagggaaauuugugagaca

SEQ ID NO: 513584 - RNA, 19 nt, Artificial Sequence
  Description of Artificial Sequence: Synthetic oligonucleotide
  Antisense strand to SEQ ID NO: 513583
ugucucacaaauuucccuu

SEQ ID NO: 513585 - RNA, 19 nt, Artificial Sequence
  Description of Artificial Sequence: Synthetic oligonucleotide
  Sense strand starting at position 1128 of SEQ ID NO: 317805
ggaaauuugugagacacaa

SEQ ID NO: 513586 - RNA, 19 nt, Artificial Sequence
  Description of Artificial Sequence: Synthetic oligonucleotide
  Antisense strand to SEQ ID NO: 513585
uugugucucacaaauuucc

SEQ ID NO: 513587 - RNA, 19 nt, Artificial Sequence
  Description of Artificial Sequence: Synthetic oligonucleotide
  Sense strand starting at position 1183 of SEQ ID NO: 317805
aaaugagacuugcuaggua

SEQ ID NO: 513588 - RNA, 19 nt, Artificial Sequence
  Description of Artificial Sequence: Synthetic oligonucleotide
  Antisense strand to SEQ ID NO: 513587
uaccuagcaagucucauuu

SEQ ID NO: 513589 - RNA, 19 nt, Artificial Sequence
  Description of Artificial Sequence: Synthetic oligonucleotide
  Sense strand starting at position 1186 of SEQ ID NO: 317805
ugagacuugcuagguagaa

SEQ ID NO: 513590 - RNA, 19 nt, Artificial Sequence
  Description of Artificial Sequence: Synthetic oligonucleotide
  Antisense strand to SEQ ID NO: 513589
uucuaccuagcaagucuca

SEQ ID NO: 513591 - RNA, 19 nt, Artificial Sequence
  Description of Artificial Sequence: Synthetic oligonucleotide
  Sense strand starting at position 1187 of SEQ ID NO: 317805
gagacuugcuagguagaau

SEQ ID NO: 513592 - RNA, 19 nt, Artificial Sequence
  Description of Artificial Sequence: Synthetic oligonucleotide
  Antisense strand to SEQ ID NO: 513591
auucuaccuagcaagucuc

SEQ ID NO: 513593 - RNA, 19 nt, Artificial Sequence
  Description of Artificial Sequence: Synthetic oligonucleotide
  Sense strand starting at position 1196 of SEQ ID NO: 317805
uagguagaauggucaaaua

SEQ ID NO: 513594 - RNA, 19 nt, Artificial Sequence
  Description of Artificial Sequence: Synthetic oligonucleotide
  Antisense strand to SEQ ID NO: 513593
uauuugaccauucuaccua

SEQ ID NO: 513595 - RNA, 19 nt, Artificial Sequence
  Description of Artificial Sequence: Synthetic oligonucleotide
  Sense strand starting at position 1503 of SEQ ID NO: 317805
agaugacugcuaggagaug

SEQ ID NO: 513596 - RNA, 19 nt, Artificial Sequence
  Description of Artificial Sequence: Synthetic oligonucleotide
  Antisense strand to SEQ ID NO: 513595
caucuccuagcagucaucu

SEQ ID NO: 513597 - RNA, 19 nt, Artificial Sequence
  Description of Artificial Sequence: Synthetic oligonucleotide
  Sense strand starting at position 1681 of SEQ ID NO: 317805
acauguuuagugcaucuga

SEQ ID NO: 513598 - RNA, 19 nt, Artificial Sequence
  Description of Artificial Sequence: Synthetic oligonucleotide
  Antisense strand to SEQ ID NO: 513597
ucagaugcacuaaacaugu

SEQ ID NO: 513599 - RNA, 19 nt, Artificial Sequence
  Description of Artificial Sequence: Synthetic oligonucleotide
  Sense strand starting at position 1700 of SEQ ID NO: 317805
aaggaaacccgcgaguuaa

SEQ ID NO: 513600 - RNA, 19 nt, Artificial Sequence
  Description of Artificial Sequence: Synthetic oligonucleotide
  Antisense strand to SEQ ID NO: 513599
uuaacucgcggguuuccuu

SEQ ID NO: 513601 - RNA, 19 nt, Artificial Sequence
  Description of Artificial Sequence: Synthetic oligonucleotide
  Sense strand starting at position 2338 of SEQ ID NO: 317805
gguagcugcagacauagua

SEQ ID NO: 513602 - RNA, 19 nt, Artificial Sequence
  Description of Artificial Sequence: Synthetic oligonucleotide
  Antisense strand to SEQ ID NO: 513601
uacuaugucugcagcuacc

SEQ ID NO: 513603 - RNA, 19 nt, Artificial Sequence
  Description of Artificial Sequence: Synthetic oligonucleotide
  Sense strand starting at position 2414 of SEQ ID NO: 317805
gagggaugauguguggagu

SEQ ID NO: 513604 - RNA, 19 nt, Artificial Sequence
  Description of Artificial Sequence: Synthetic oligonucleotide
  Antisense strand to SEQ ID NO: 513603
acuccacacaucaucccuc

SEQ ID NO: 513605 - RNA, 19 nt, Artificial Sequence
  Description of Artificial Sequence: Synthetic oligonucleotide
  Sense strand starting at position 2415 of SEQ ID NO: 317805
agggaugauguguggaguu

SEQ ID NO: 513606 - RNA, 19 nt, Artificial Sequence
  Description of Artificial Sequence: Synthetic oligonucleotide
  Antisense strand to SEQ ID NO: 513605
aacuccacacaucaucccu

SEQ ID NO: 513607 - RNA, 19 nt, Artificial Sequence
  Description of Artificial Sequence: Synthetic oligonucleotide
  Sense strand starting at position 2486 of SEQ ID NO: 317805
gcaugucuuaacgaaauag

SEQ ID NO: 513608 - RNA, 19 nt, Artificial Sequence
  Description of Artificial Sequence: Synthetic oligonucleotide
  Antisense strand to SEQ ID NO: 513607
cuauuucguuaagacaugc

SEQ ID NO: 513609 - RNA, 19 nt, Artificial Sequence
  Description of Artificial Sequence: Synthetic oligonucleotide
  Sense strand starting at position 2490 of SEQ ID NO: 317805
gucuuaacgaaauagugau

SEQ ID NO: 513610 - RNA, 19 nt, Artificial Sequence
  Description of Artificial Sequence: Synthetic oligonucleotide
  Antisense strand to SEQ ID NO: 513609
aucacuauuucguuaagac

SEQ ID NO: 513611 - RNA, 19 nt, Artificial Sequence
  Description of Artificial Sequence: Synthetic oligonucleotide
  Sense strand starting at position 2502 of SEQ ID NO: 317805
uagugauuuaagcguagua

SEQ ID NO: 513612 - RNA, 19 nt, Artificial Sequence
  Description of Artificial Sequence: Synthetic oligonucleotide
  Antisense strand to SEQ ID NO: 513611
uacuacgcuuaaaucacua

SEQ ID NO: 513613 - RNA, 19 nt, Artificial Sequence
  Description of Artificial Sequence: Synthetic oligonucleotide
  Sense strand starting at position 2504 of SEQ ID NO: 317805
gugauuuaagcguaguaca

SEQ ID NO: 513614 - RNA, 19 nt, Artificial Sequence
  Description of Artificial Sequence: Synthetic oligonucleotide
  Antisense strand to SEQ ID NO: 513613
uguacuacgcuuaaaucac

SEQ ID NO: 513615 - RNA, 19 nt, Artificial Sequence
  Description of Artificial Sequence: Synthetic oligonucleotide
  Sense strand starting at position 2557 of SEQ ID NO: 317805
uugauuuguuaugacagau

SEQ ID NO: 513616 - RNA, 19 nt, Artificial Sequence
  Description of Artificial Sequence: Synthetic oligonucleotide
  Antisense strand to SEQ ID NO: 513615
aucugucauaacaaaucaa

SEQ ID NO: 513617 - RNA, 19 nt, Artificial Sequence
  Description of Artificial Sequence: Synthetic oligonucleotide
  Sense strand starting at position 2682 of SEQ ID NO: 317805
ggguaccaguucucuuuaa

SEQ ID NO: 513618 - RNA, 19 nt, Artificial Sequence
  Description of Artificial Sequence: Synthetic oligonucleotide
  Antisense strand to SEQ ID NO: 513617
uuaaagagaacugguaccc

SEQ ID NO: 513619 - RNA, 19 nt, Artificial Sequence
  Description of Artificial Sequence: Synthetic oligonucleotide
  Sense strand starting at position 2686 of SEQ ID NO: 317805
accaguucucuuuaaggcu

SEQ ID NO: 513620 - RNA, 19 nt, Artificial Sequence
  Description of Artificial Sequence: Synthetic oligonucleotide
  Antisense strand to SEQ ID NO: 513619
agccuuaaagagaacuggu

SEQ ID NO: 513621 - RNA, 19 nt, Artificial Sequence
  Description of Artificial Sequence: Synthetic oligonucleotide
  Sense strand starting at position 2843 of SEQ ID NO: 317805
guaagcuuccuagaucaca

SEQ ID NO: 513622 - RNA, 19 nt, Artificial Sequence
  Description of Artificial Sequence: Synthetic oligonucleotide
  Antisense strand to SEQ ID NO: 513621
ugugaucuaggaagcuuac

SEQ ID NO: 513623 - RNA, 19 nt, Artificial Sequence
  Description of Artificial Sequence: Synthetic oligonucleotide
  Sense strand starting at position 2933 of SEQ ID NO: 317805
uuugucacuaacgaggaau

SEQ ID NO: 513624 - RNA, 19 nt, Artificial Sequence
  Description of Artificial Sequence: Synthetic oligonucleotide
  Antisense strand to SEQ ID NO: 513623
auuccucguuagugacaaa

SEQ ID NO: 513625 - RNA, 19 nt, Artificial Sequence
  Description of Artificial Sequence: Synthetic oligonucleotide
  Sense strand starting at position 2935 of SEQ ID NO: 317805
ugucacuaacgaggaauaa

SEQ ID NO: 513626 - RNA, 19 nt, Artificial Sequence
  Description of Artificial Sequence: Synthetic oligonucleotide
  Antisense strand to SEQ ID NO: 513625
uuauuccucguuagugaca

SEQ ID NO: 513627 - RNA, 19 nt, Artificial Sequence
  Description of Artificial Sequence: Synthetic oligonucleotide
  Sense strand starting at position 3624 of SEQ ID NO: 317805
cuggauuccuacccagaua

SEQ ID NO: 513628 - RNA, 19 nt, Artificial Sequence
  Description of Artificial Sequence: Synthetic oligonucleotide
  Antisense strand to SEQ ID NO: 513627
uaucuggguaggaauccag

SEQ ID NO: 513629 - RNA, 19 nt, Artificial Sequence
  Description of Artificial Sequence: Synthetic oligonucleotide
  Sense strand starting at position 3646 of SEQ ID NO: 317805
uguuucuaccgggaauaau

SEQ ID NO: 513630 - RNA, 19 nt, Artificial Sequence
  Description of Artificial Sequence: Synthetic oligonucleotide
  Antisense strand to SEQ ID NO: 513629
auuauucccgguagaaaca

SEQ ID NO: 513631 - RNA, 19 nt, Artificial Sequence
  Description of Artificial Sequence: Synthetic oligonucleotide
  Sense strand starting at position 3715 of SEQ ID NO: 317805
gcuaucaucuucucuggga

SEQ ID NO: 513632 - RNA, 19 nt, Artificial Sequence
  Description of Artificial Sequence: Synthetic oligonucleotide
  Antisense strand to SEQ ID NO: 513631
ucccagagaagaugauagc

SEQ ID NO: 513633 - RNA, 19 nt, Artificial Sequence
  Description of Artificial Sequence: Synthetic oligonucleotide
  Sense strand starting at position 3716 of SEQ ID NO: 317805
cuaucaucuucucugggaa

SEQ ID NO: 513634 - RNA, 19 nt, Artificial Sequence
  Description of Artificial Sequence: Synthetic oligonucleotide
  Antisense strand to SEQ ID NO: 513633
uucccagagaagaugauag

SEQ ID NO: 513635 - RNA, 19 nt, Artificial Sequence
  Description of Artificial Sequence: Synthetic oligonucleotide
  Sense strand starting at position 3765 of SEQ ID NO: 317805
ucugaagcacuuugaucau

SEQ ID NO: 513636 - RNA, 19 nt, Artificial Sequence
  Description of Artificial Sequence: Synthetic oligonucleotide
  Antisense strand to SEQ ID NO: 513635
augaucaaagugcuucaga

SEQ ID NO: 513637 - RNA, 19 nt, Artificial Sequence
  Description of Artificial Sequence: Synthetic oligonucleotide
  Sense strand starting at position 3777 of SEQ ID NO: 317805
ugaucauaacucugaggua

SEQ ID NO: 513638 - RNA, 19 nt, Artificial Sequence
  Description of Artificial Sequence: Synthetic oligonucleotide
  Antisense strand to SEQ ID NO: 513637
uaccucagaguuaugauca

SEQ ID NO: 513639 - RNA, 19 nt, Artificial Sequence
  Description of Artificial Sequence: Synthetic oligonucleotide
  Sense strand starting at position 3890 of SEQ ID NO: 317805
cuuacagugcauuaucauu

SEQ ID NO: 513640 - RNA, 19 nt, Artificial Sequence
  Description of Artificial Sequence: Synthetic oligonucleotide
  Antisense strand to SEQ ID NO: 513639
aaugauaaugcacuguaag

SEQ ID NO: 513641 - RNA, 19 nt, Artificial Sequence
  Description of Artificial Sequence: Synthetic oligonucleotide
  Sense strand starting at position 3917 of SEQ ID NO: 317805
cugguccucuuauuaaaug

SEQ ID NO: 513642 - RNA, 19 nt, Artificial Sequence
  Description of Artificial Sequence: Synthetic oligonucleotide
  Antisense strand to SEQ ID NO: 513641
cauuuaauaagaggaccag

SEQ ID NO: 513643 - RNA, 19 nt, Artificial Sequence
  Description of Artificial Sequence: Synthetic oligonucleotide
  Sense strand starting at position 68 of SEQ ID NO: 317806
aacauauuguguccuguga

SEQ ID NO: 513644 - RNA, 19 nt, Artificial Sequence
  Description of Artificial Sequence: Synthetic oligonucleotide
  Antisense strand to SEQ ID NO: 513643
ucacaggacacaauauguu

SEQ ID NO: 513645 - RNA, 19 nt, Artificial Sequence
  Description of Artificial Sequence: Synthetic oligonucleotide
  Sense strand starting at position 107 of SEQ ID NO: 317806
ucuacauccuuggagggaa

SEQ ID NO: 513646 - RNA, 19 nt, Artificial Sequence
  Description of Artificial Sequence: Synthetic oligonucleotide
  Antisense strand to SEQ ID NO: 513645
uucccuccaaggauguaga

SEQ ID NO: 513647 - RNA, 19 nt, Artificial Sequence
  Description of Artificial Sequence: Synthetic oligonucleotide
  Sense strand starting at position 131 of SEQ ID NO: 317806
guauuuguuuccucauagc

SEQ ID NO: 513648 - RNA, 19 nt, Artificial Sequence
  Description of Artificial Sequence: Synthetic oligonucleotide
  Antisense strand to SEQ ID NO: 513647
gcuaugaggaaacaaauac

SEQ ID NO: 513649 - RNA, 19 nt, Artificial Sequence
  Description of Artificial Sequence: Synthetic oligonucleotide
  Sense strand starting at position 142 of SEQ ID NO: 317806
cucauagcauggucaguua

SEQ ID NO: 513650 - RNA, 19 nt, Artificial Sequence
  Description of Artificial Sequence: Synthetic oligonucleotide
  Antisense strand to SEQ ID NO: 513649
uaacugaccaugcuaugag

SEQ ID NO: 513651 - RNA, 19 nt, Artificial Sequence
  Description of Artificial Sequence: Synthetic oligonucleotide
  Sense strand starting at position 145 of SEQ ID NO: 317806
auagcauggucaguuauaa

SEQ ID NO: 513652 - RNA, 19 nt, Artificial Sequence
  Description of Artificial Sequence: Synthetic oligonucleotide
  Antisense strand to SEQ ID NO: 513651
uuauaacugaccaugcuau

SEQ ID NO: 513653 - RNA, 19 nt, Artificial Sequence
  Description of Artificial Sequence: Synthetic oligonucleotide
  Sense strand starting at position 236 of SEQ ID NO: 317806
aguuaauagugcuccaaau

SEQ ID NO: 513654 - RNA, 19 nt, Artificial Sequence
  Description of Artificial Sequence: Synthetic oligonucleotide
  Antisense strand to SEQ ID NO: 513653
auuuggagcacuauuaacu

SEQ ID NO: 513655 - RNA, 19 nt, Artificial Sequence
  Description of Artificial Sequence: Synthetic oligonucleotide
  Sense strand starting at position 246 of SEQ ID NO: 317806
gcuccaaaucuuuauggcu

SEQ ID NO: 513656 - RNA, 19 nt, Artificial Sequence
  Description of Artificial Sequence: Synthetic oligonucleotide
  Antisense strand to SEQ ID NO: 513655
agccauaaagauuuggagc

SEQ ID NO: 513657 - RNA, 19 nt, Artificial Sequence
  Description of Artificial Sequence: Synthetic oligonucleotide
  Sense strand starting at position 302 of SEQ ID NO: 317806
ggauuacaauguuuccuuu

SEQ ID NO: 513658 - RNA, 19 nt, Artificial Sequence
  Description of Artificial Sequence: Synthetic oligonucleotide
  Antisense strand to SEQ ID NO: 513657
aaaggaaacauuguaaucc

SEQ ID NO: 513659 - RNA, 19 nt, Artificial Sequence
  Description of Artificial Sequence: Synthetic oligonucleotide
  Sense strand starting at position 430 of SEQ ID NO: 317806
uucguaaaguguccucaau

SEQ ID NO: 513660 - RNA, 19 nt, Artificial Sequence
  Description of Artificial Sequence: Synthetic oligonucleotide
  Antisense strand to SEQ ID NO: 513659
auugaggacacuuuacgaa

SEQ ID NO: 513661 - RNA, 19 nt, Artificial Sequence
  Description of Artificial Sequence: Synthetic oligonucleotide
  Sense strand starting at position 676 of SEQ ID NO: 317806
gugaaacuuccgcaguuuc

SEQ ID NO: 513662 - RNA, 19 nt, Artificial Sequence
  Description of Artificial Sequence: Synthetic oligonucleotide
  Antisense strand to SEQ ID NO: 513661
gaaacugcggaaguuucac

SEQ ID NO: 513663 - RNA, 19 nt, Artificial Sequence
  Description of Artificial Sequence: Synthetic oligonucleotide
  Sense strand starting at position 684 of SEQ ID NO: 317806
uccgcaguuuccuuagaca

SEQ ID NO: 513664 - RNA, 19 nt, Artificial Sequence
  Description of Artificial Sequence: Synthetic oligonucleotide
  Antisense strand to SEQ ID NO: 513663
ugucuaaggaaacugcgga

SEQ ID NO: 513665 - RNA, 19 nt, Artificial Sequence
  Description of Artificial Sequence: Synthetic oligonucleotide
  Sense strand starting at position 705 of SEQ ID NO: 317806
gguggucauucauuagggu

SEQ ID NO: 513666 - RNA, 19 nt, Artificial Sequence
  Description of Artificial Sequence: Synthetic oligonucleotide
  Antisense strand to SEQ ID NO: 513665
acccuaaugaaugaccacc

SEQ ID NO: 513667 - RNA, 19 nt, Artificial Sequence
  Description of Artificial Sequence: Synthetic oligonucleotide
  Sense strand starting at position 714 of SEQ ID NO: 317806
ucauuagggucuuccacau

SEQ ID NO: 513668 - RNA, 19 nt, Artificial Sequence
  Description of Artificial Sequence: Synthetic oligonucleotide
  Antisense strand to SEQ ID NO: 513667
auguggaagacccuaauga

SEQ ID NO: 513669 - RNA, 19 nt, Artificial Sequence
  Description of Artificial Sequence: Synthetic oligonucleotide
  Sense strand starting at position 945 of SEQ ID NO: 317806
gggaauugccuccggaaca

SEQ ID NO: 513670 - RNA, 19 nt, Artificial Sequence
  Description of Artificial Sequence: Synthetic oligonucleotide
  Antisense strand to SEQ ID NO: 513669
uguuccggaggcaauuccc

SEQ ID NO: 513671 - RNA, 19 nt, Artificial Sequence
  Description of Artificial Sequence: Synthetic oligonucleotide
  Sense strand starting at position 1019 of SEQ ID NO: 317806
uugggaaccgcugaucaga

SEQ ID NO: 513672 - RNA, 19 nt, Artificial Sequence
  Description of Artificial Sequence: Synthetic oligonucleotide
  Antisense strand to SEQ ID NO: 513671
ucugaucagcgguucccaa

SEQ ID NO: 513673 - RNA, 19 nt, Artificial Sequence
  Description of Artificial Sequence: Synthetic oligonucleotide
  Sense strand starting at position 1166 of SEQ ID NO: 317806
gcgcucauaucccuggaga

SEQ ID NO: 513674 - RNA, 19 nt, Artificial Sequence
  Description of Artificial Sequence: Synthetic oligonucleotide
  Antisense strand to SEQ ID NO: 513673
ucuccagggauaugagcgc

SEQ ID NO: 513675 - RNA, 19 nt, Artificial Sequence
  Description of Artificial Sequence: Synthetic oligonucleotide
  Sense strand starting at position 1167 of SEQ ID NO: 317806
cgcucauaucccuggagag

SEQ ID NO: 513676 - RNA, 19 nt, Artificial Sequence
  Description of Artificial Sequence: Synthetic oligonucleotide
  Antisense strand to SEQ ID NO: 513675
cucuccagggauaugagcg

SEQ ID NO: 513677 - RNA, 19 nt, Artificial Sequence
  Description of Artificial Sequence: Synthetic oligonucleotide
  Sense strand starting at position 1168 of SEQ ID NO: 317806
gcucauaucccuggagaga

SEQ ID NO: 513678 - RNA, 19 nt, Artificial Sequence
  Description of Artificial Sequence: Synthetic oligonucleotide
  Antisense strand to SEQ ID NO: 513677
ucucuccagggauaugagc

SEQ ID NO: 513679 - RNA, 19 nt, Artificial Sequence
  Description of Artificial Sequence: Synthetic oligonucleotide
  Sense strand starting at position 1378 of SEQ ID NO: 317806
augagcaauuggucggauu

SEQ ID NO: 513680 - RNA, 19 nt, Artificial Sequence
  Description of Artificial Sequence: Synthetic oligonucleotide
  Antisense strand to SEQ ID NO: 513679
aauccgaccaauugcucau

SEQ ID NO: 513681 - RNA, 19 nt, Artificial Sequence
  Description of Artificial Sequence: Synthetic oligonucleotide
  Sense strand starting at position 1379 of SEQ ID NO: 317806
ugagcaauuggucggauuu

SEQ ID NO: 513682 - RNA, 19 nt, Artificial Sequence
  Description of Artificial Sequence: Synthetic oligonucleotide
  Antisense strand to SEQ ID NO: 513681
aaauccgaccaauugcuca

SEQ ID NO: 513683 - RNA, 19 nt, Artificial Sequence
  Description of Artificial Sequence: Synthetic oligonucleotide
  Sense strand starting at position 1445 of SEQ ID NO: 317806
ggaagugagguccaguuga

SEQ ID NO: 513684 - RNA, 19 nt, Artificial Sequence
  Description of Artificial Sequence: Synthetic oligonucleotide
  Antisense strand to SEQ ID NO: 513683
ucaacuggaccucacuucc

SEQ ID NO: 513685 - RNA, 19 nt, Artificial Sequence
  Description of Artificial Sequence: Synthetic oligonucleotide
  Sense strand starting at position 2042 of SEQ ID NO: 317806
gcguauuaccugcuuuaug

SEQ ID NO: 513686 - RNA, 19 nt, Artificial Sequence
  Description of Artificial Sequence: Synthetic oligonucleotide
  Antisense strand to SEQ ID NO: 513685
cauaaagcagguaauacgc

SEQ ID NO: 513687 - RNA, 19 nt, Artificial Sequence
  Description of Artificial Sequence: Synthetic oligonucleotide
  Sense strand starting at position 2261 of SEQ ID NO: 317806
cgguaauuacuguacuugu

SEQ ID NO: 513688 - RNA, 19 nt, Artificial Sequence
  Description of Artificial Sequence: Synthetic oligonucleotide
  Antisense strand to SEQ ID NO: 513687
acaaguacaguaauuaccg

SEQ ID NO: 513689 - RNA, 19 nt, Artificial Sequence
  Description of Artificial Sequence: Synthetic oligonucleotide
  Sense strand starting at position 2274 of SEQ ID NO: 317806
acuuguuaaagcugacgua

SEQ ID NO: 513690 - RNA, 19 nt, Artificial Sequence
  Description of Artificial Sequence: Synthetic oligonucleotide
  Antisense strand to SEQ ID NO: 513689
uacgucagcuuuaacaagu

SEQ ID NO: 513691 - RNA, 19 nt, Artificial Sequence
  Description of Artificial Sequence: Synthetic oligonucleotide
  Sense strand starting at position 2275 of SEQ ID NO: 317806
cuuguuaaagcugacguaa

SEQ ID NO: 513692 - RNA, 19 nt, Artificial Sequence
  Description of Artificial Sequence: Synthetic oligonucleotide
  Antisense strand to SEQ ID NO: 513691
uuacgucagcuuuaacaag

SEQ ID NO: 513693 - RNA, 19 nt, Artificial Sequence
  Description of Artificial Sequence: Synthetic oligonucleotide
  Sense strand starting at position 2347 of SEQ ID NO: 317806
ucacgugggcaaugaaaua

SEQ ID NO: 513694 - RNA, 19 nt, Artificial Sequence
  Description of Artificial Sequence: Synthetic oligonucleotide
  Antisense strand to SEQ ID NO: 513693
uauuucauugcccacguga

SEQ ID NO: 513695 - RNA, 19 nt, Artificial Sequence
  Description of Artificial Sequence: Synthetic oligonucleotide
  Sense strand starting at position 2386 of SEQ ID NO: 317806
augacaaaguuauuagcaa

SEQ ID NO: 513696 - RNA, 19 nt, Artificial Sequence
  Description of Artificial Sequence: Synthetic oligonucleotide
  Antisense strand to SEQ ID NO: 513695
uugcuaauaacuuugucau

SEQ ID NO: 513697 - RNA, 19 nt, Artificial Sequence
  Description of Artificial Sequence: Synthetic oligonucleotide
  Sense strand starting at position 2530 of SEQ ID NO: 317806
cucaaauugcaagaagcau

SEQ ID NO: 513698 - RNA, 19 nt, Artificial Sequence
  Description of Artificial Sequence: Synthetic oligonucleotide
  Antisense strand to SEQ ID NO: 513697
augcuucuugcaauuugag

SEQ ID NO: 513699 - RNA, 19 nt, Artificial Sequence
  Description of Artificial Sequence: Synthetic oligonucleotide
  Sense strand starting at position 2536 of SEQ ID NO: 317806
uugcaagaagcauguauuc

SEQ ID NO: 513700 - RNA, 19 nt, Artificial Sequence
  Description of Artificial Sequence: Synthetic oligonucleotide
  Antisense strand to SEQ ID NO: 513699
gaauacaugcuucuugcaa

SEQ ID NO: 513701 - RNA, 19 nt, Artificial Sequence
  Description of Artificial Sequence: Synthetic oligonucleotide
  Sense strand starting at position 2578 of SEQ ID NO: 317806
gagguuaucuagcuugaaa

SEQ ID NO: 513702 - RNA, 19 nt, Artificial Sequence
  Description of Artificial Sequence: Synthetic oligonucleotide
  Antisense strand to SEQ ID NO: 513701
uuucaagcuagauaaccuc

SEQ ID NO: 513703 - RNA, 19 nt, Artificial Sequence
  Description of Artificial Sequence: Synthetic oligonucleotide
  Sense strand starting at position 2580 of SEQ ID NO: 317806
gguuaucuagcuugaaacu

SEQ ID NO: 513704 - RNA, 19 nt, Artificial Sequence
  Description of Artificial Sequence: Synthetic oligonucleotide
  Antisense strand to SEQ ID NO: 513703
aguuucaagcuagauaacc

SEQ ID NO: 513705 - RNA, 19 nt, Artificial Sequence
  Description of Artificial Sequence: Synthetic oligonucleotide
  Sense strand starting at position 2581 of SEQ ID NO: 317806
guuaucuagcuugaaacuu

SEQ ID NO: 513706 - RNA, 19 nt, Artificial Sequence
  Description of Artificial Sequence: Synthetic oligonucleotide
  Antisense strand to SEQ ID NO: 513705
aaguuucaagcuagauaac

SEQ ID NO: 513707 - RNA, 19 nt, Artificial Sequence
  Description of Artificial Sequence: Synthetic oligonucleotide
  Sense strand starting at position 2707 of SEQ ID NO: 317806
cuagguaguggacauaagu

SEQ ID NO: 513708 - RNA, 19 nt, Artificial Sequence
  Description of Artificial Sequence: Synthetic oligonucleotide
  Antisense strand to SEQ ID NO: 513707
acuuauguccacuaccuag

SEQ ID NO: 513709 - RNA, 19 nt, Artificial Sequence
  Description of Artificial Sequence: Synthetic oligonucleotide
  Sense strand starting at position 2734 of SEQ ID NO: 317806
uccuauuacuuucugguuu

SEQ ID NO: 513710 - RNA, 19 nt, Artificial Sequence
  Description of Artificial Sequence: Synthetic oligonucleotide
  Antisense strand to SEQ ID NO: 513709
aaaccagaaaguaauagga

SEQ ID NO: 513711 - RNA, 19 nt, Artificial Sequence
  Description of Artificial Sequence: Synthetic oligonucleotide
  Sense strand starting at position 3231 of SEQ ID NO: 317806
uuggauacguacuucuaaa

SEQ ID NO: 513712 - RNA, 19 nt, Artificial Sequence
  Description of Artificial Sequence: Synthetic oligonucleotide
  Antisense strand to SEQ ID NO: 513711
uuuagaaguacguauccaa

SEQ ID NO: 513713 - RNA, 19 nt, Artificial Sequence
  Description of Artificial Sequence: Synthetic oligonucleotide
  Sense strand starting at position 3472 of SEQ ID NO: 317806
cgagaaucgcuugaaauca

SEQ ID NO: 513714 - RNA, 19 nt, Artificial Sequence
  Description of Artificial Sequence: Synthetic oligonucleotide
  Antisense strand to SEQ ID NO: 513713
ugauuucaagcgauucucg

SEQ ID NO: 513715 - RNA, 19 nt, Artificial Sequence
  Description of Artificial Sequence: Synthetic oligonucleotide
  Sense strand starting at position 3703 of SEQ ID NO: 317806
cugauugucuaauaauuug

SEQ ID NO: 513716 - RNA, 19 nt, Artificial Sequence
  Description of Artificial Sequence: Synthetic oligonucleotide
  Antisense strand to SEQ ID NO: 513715
caaauuauuagacaaucag

SEQ ID NO: 513717 - RNA, 19 nt, Artificial Sequence
  Description of Artificial Sequence: Synthetic oligonucleotide
  Sense strand starting at position 3709 of SEQ ID NO: 317806
gucuaauaauuuguuugca

SEQ ID NO: 513718 - RNA, 19 nt, Artificial Sequence
  Description of Artificial Sequence: Synthetic oligonucleotide
  Antisense strand to SEQ ID NO: 513717
ugcaaacaaauuauuagac

SEQ ID NO: 513719 - RNA, 19 nt, Artificial Sequence
  Description of Artificial Sequence: Synthetic oligonucleotide
  Sense strand starting at position 3711 of SEQ ID NO: 317806
cuaauaauuuguuugcagu

SEQ ID NO: 513720 - RNA, 19 nt, Artificial Sequence
  Description of Artificial Sequence: Synthetic oligonucleotide
  Antisense strand to SEQ ID NO: 513719
acugcaaacaaauuauuag

SEQ ID NO: 513721 - RNA, 19 nt, Artificial Sequence
  Description of Artificial Sequence: Synthetic oligonucleotide
  Sense strand starting at position 3922 of SEQ ID NO: 317806
ugcuauucuccugauaguc

SEQ ID NO: 513722 - RNA, 19 nt, Artificial Sequence
  Description of Artificial Sequence: Synthetic oligonucleotide
  Antisense strand to SEQ ID NO: 513721
gacuaucaggagaauagca

SEQ ID NO: 513723 - RNA, 19 nt, Artificial Sequence
  Description of Artificial Sequence: Synthetic oligonucleotide
  Sense strand starting at position 141 of SEQ ID NO: 317807
caaagucgguucuuugaaa

SEQ ID NO: 513724 - RNA, 19 nt, Artificial Sequence
  Description of Artificial Sequence: Synthetic oligonucleotide
  Antisense strand to SEQ ID NO: 513723
uuucaaagaaccgacuuug

SEQ ID NO: 513725 - RNA, 19 nt, Artificial Sequence
  Description of Artificial Sequence: Synthetic oligonucleotide
  Sense strand starting at position 142 of SEQ ID NO: 317807
aaagucgguucuuugaaac

SEQ ID NO: 513726 - RNA, 19 nt, Artificial Sequence
  Description of Artificial Sequence: Synthetic oligonucleotide
  Antisense strand to SEQ ID NO: 513725
guuucaaagaaccgacuuu

SEQ ID NO: 513727 - RNA, 19 nt, Artificial Sequence
  Description of Artificial Sequence: Synthetic oligonucleotide
  Sense strand starting at position 178 of SEQ ID NO: 317807
agccucuagcaagacuaaa

SEQ ID NO: 513728 - RNA, 19 nt, Artificial Sequence
  Description of Artificial Sequence: Synthetic oligonucleotide
  Antisense strand to SEQ ID NO: 513727
uuuagucuugcuagaggcu

SEQ ID NO: 513729 - RNA, 19 nt, Artificial Sequence
  Description of Artificial Sequence: Synthetic oligonucleotide
  Sense strand starting at position 236 of SEQ ID NO: 317807
aagggauaucccuguaaac

SEQ ID NO: 513730 - RNA, 19 nt, Artificial Sequence
  Description of Artificial Sequence: Synthetic oligonucleotide
  Antisense strand to SEQ ID NO: 513729
guuuacagggauaucccuu

SEQ ID NO: 513731 - RNA, 19 nt, Artificial Sequence
  Description of Artificial Sequence: Synthetic oligonucleotide
  Sense strand starting at position 245 of SEQ ID NO: 317807
cccuguaaaccuuguagca

SEQ ID NO: 513732 - RNA, 19 nt, Artificial Sequence
  Description of Artificial Sequence: Synthetic oligonucleotide
  Antisense strand to SEQ ID NO: 513731
ugcuacaagguuuacaggg

SEQ ID NO: 513733 - RNA, 19 nt, Artificial Sequence
  Description of Artificial Sequence: Synthetic oligonucleotide
  Sense strand starting at position 247 of SEQ ID NO: 317807
cuguaaaccuuguagcacu

SEQ ID NO: 513734 - RNA, 19 nt, Artificial Sequence
  Description of Artificial Sequence: Synthetic oligonucleotide
  Antisense strand to SEQ ID NO: 513733
agugcuacaagguuuacag

SEQ ID NO: 513735 - RNA, 19 nt, Artificial Sequence
  Description of Artificial Sequence: Synthetic oligonucleotide
  Sense strand starting at position 259 of SEQ ID NO: 317807
uagcacuaaucagggaaga

SEQ ID NO: 513736 - RNA, 19 nt, Artificial Sequence
  Description of Artificial Sequence: Synthetic oligonucleotide
  Antisense strand to SEQ ID NO: 513735
ucuucccugauuagugcua

SEQ ID NO: 513737 - RNA, 19 nt, Artificial Sequence
  Description of Artificial Sequence: Synthetic oligonucleotide
  Sense strand starting at position 535 of SEQ ID NO: 317807
cugauaauuccauggcccu

SEQ ID NO: 513738 - RNA, 19 nt, Artificial Sequence
  Description of Artificial Sequence: Synthetic oligonucleotide
  Antisense strand to SEQ ID NO: 513737
agggccauggaauuaucag

SEQ ID NO: 513739 - RNA, 19 nt, Artificial Sequence
  Description of Artificial Sequence: Synthetic oligonucleotide
  Sense strand starting at position 536 of SEQ ID NO: 317807
ugauaauuccauggcccuu

SEQ ID NO: 513740 - RNA, 19 nt, Artificial Sequence
  Description of Artificial Sequence: Synthetic oligonucleotide
  Antisense strand to SEQ ID NO: 513739
aagggccauggaauuauca

SEQ ID NO: 513741 - RNA, 19 nt, Artificial Sequence
  Description of Artificial Sequence: Synthetic oligonucleotide
  Sense strand starting at position 593 of SEQ ID NO: 317807
acaguccuguuccucuaaa

SEQ ID NO: 513742 - RNA, 19 nt, Artificial Sequence
  Description of Artificial Sequence: Synthetic oligonucleotide
  Antisense strand to SEQ ID NO: 513741
uuuagaggaacaggacugu

SEQ ID NO: 513743 - RNA, 19 nt, Artificial Sequence
  Description of Artificial Sequence: Synthetic oligonucleotide
  Sense strand starting at position 805 of SEQ ID NO: 317807
ggcugagugaaucacuuga

SEQ ID NO: 513744 - RNA, 19 nt, Artificial Sequence
  Description of Artificial Sequence: Synthetic oligonucleotide
  Antisense strand to SEQ ID NO: 513743
ucaagugauucacucagcc

SEQ ID NO: 513745 - RNA, 19 nt, Artificial Sequence
  Description of Artificial Sequence: Synthetic oligonucleotide
  Sense strand starting at position 807 of SEQ ID NO: 317807
cugagugaaucacuugaac

SEQ ID NO: 513746 - RNA, 19 nt, Artificial Sequence
  Description of Artificial Sequence: Synthetic oligonucleotide
  Antisense strand to SEQ ID NO: 513745
guucaagugauucacucag

SEQ ID NO: 513747 - RNA, 19 nt, Artificial Sequence
  Description of Artificial Sequence: Synthetic oligonucleotide
  Sense strand starting at position 1187 of SEQ ID NO: 317807
caagacucgcggugaacua

SEQ ID NO: 513748 - RNA, 19 nt, Artificial Sequence
  Description of Artificial Sequence: Synthetic oligonucleotide
  Antisense strand to SEQ ID NO: 513747
uaguucaccgcgagucuug

SEQ ID NO: 513749 - RNA, 19 nt, Artificial Sequence
  Description of Artificial Sequence: Synthetic oligonucleotide
  Sense strand starting at position 1207 of SEQ ID NO: 317807
uaugaacgguucucuaaca

SEQ ID NO: 513750 - RNA, 19 nt, Artificial Sequence
  Description of Artificial Sequence: Synthetic oligonucleotide
  Antisense strand to SEQ ID NO: 513749
uguuagagaaccguucaua

SEQ ID NO: 513751 - RNA, 19 nt, Artificial Sequence
  Description of Artificial Sequence: Synthetic oligonucleotide
  Sense strand starting at position 1208 of SEQ ID NO: 317807
augaacgguucucuaacaa

SEQ ID NO: 513752 - RNA, 19 nt, Artificial Sequence
  Description of Artificial Sequence: Synthetic oligonucleotide
  Antisense strand to SEQ ID NO: 513751
uuguuagagaaccguucau

SEQ ID NO: 513753 - RNA, 19 nt, Artificial Sequence
  Description of Artificial Sequence: Synthetic oligonucleotide
  Sense strand starting at position 1271 of SEQ ID NO: 317807
uugacauguccauaugguu

SEQ ID NO: 513754 - RNA, 19 nt, Artificial Sequence
  Description of Artificial Sequence: Synthetic oligonucleotide
  Antisense strand to SEQ ID NO: 513753
aaccauauggacaugucaa

SEQ ID NO: 513755 - RNA, 19 nt, Artificial Sequence
  Description of Artificial Sequence: Synthetic oligonucleotide
  Sense strand starting at position 1380 of SEQ ID NO: 317807
guuuaugagcucggcuuca

SEQ ID NO: 513756 - RNA, 19 nt, Artificial Sequence
  Description of Artificial Sequence: Synthetic oligonucleotide
  Antisense strand to SEQ ID NO: 513755
ugaagccgagcucauaaac

SEQ ID NO: 513757 - RNA, 19 nt, Artificial Sequence
  Description of Artificial Sequence: Synthetic oligonucleotide
  Sense strand starting at position 2169 of SEQ ID NO: 317807
ccagauagcucccugucaa

SEQ ID NO: 513758 - RNA, 19 nt, Artificial Sequence
  Description of Artificial Sequence: Synthetic oligonucleotide
  Antisense strand to SEQ ID NO: 513757
uugacagggagcuaucugg

SEQ ID NO: 513759 - RNA, 19 nt, Artificial Sequence
  Description of Artificial Sequence: Synthetic oligonucleotide
  Sense strand starting at position 2170 of SEQ ID NO: 317807
cagauagcucccugucaag

SEQ ID NO: 513760 - RNA, 19 nt, Artificial Sequence
  Description of Artificial Sequence: Synthetic oligonucleotide
  Antisense strand to SEQ ID NO: 513759
cuugacagggagcuaucug

SEQ ID NO: 513761 - RNA, 19 nt, Artificial Sequence
  Description of Artificial Sequence: Synthetic oligonucleotide
  Sense strand starting at position 2592 of SEQ ID NO: 317807
ggagggucucgcuguguuu

SEQ ID NO: 513762 - RNA, 19 nt, Artificial Sequence
  Description of Artificial Sequence: Synthetic oligonucleotide
  Antisense strand to SEQ ID NO: 513761
aaacacagcgagacccucc

SEQ ID NO: 513763 - RNA, 19 nt, Artificial Sequence
  Description of Artificial Sequence: Synthetic oligonucleotide
  Sense strand starting at position 2593 of SEQ ID NO: 317807
gagggucucgcuguguuua

SEQ ID NO: 513764 - RNA, 19 nt, Artificial Sequence
  Description of Artificial Sequence: Synthetic oligonucleotide
  Antisense strand to SEQ ID NO: 513763
uaaacacagcgagacccuc

SEQ ID NO: 513765 - RNA, 19 nt, Artificial Sequence
  Description of Artificial Sequence: Synthetic oligonucleotide
  Sense strand starting at position 2594 of SEQ ID NO: 317807
agggucucgcuguguuuau

SEQ ID NO: 513766 - RNA, 19 nt, Artificial Sequence
  Description of Artificial Sequence: Synthetic oligonucleotide
  Antisense strand to SEQ ID NO: 513765
auaaacacagcgagacccu

SEQ ID NO: 513767 - RNA, 19 nt, Artificial Sequence
  Description of Artificial Sequence: Synthetic oligonucleotide
  Sense strand starting at position 2603 of SEQ ID NO: 317807
cuguguuuauccuugugag

SEQ ID NO: 513768 - RNA, 19 nt, Artificial Sequence
  Description of Artificial Sequence: Synthetic oligonucleotide
  Antisense strand to SEQ ID NO: 513767
cucacaaggauaaacacag

SEQ ID NO: 513769 - RNA, 19 nt, Artificial Sequence
  Description of Artificial Sequence: Synthetic oligonucleotide
  Sense strand starting at position 2604 of SEQ ID NO: 317807
uguguuuauccuugugagg

SEQ ID NO: 513770 - RNA, 19 nt, Artificial Sequence
  Description of Artificial Sequence: Synthetic oligonucleotide
  Antisense strand to SEQ ID NO: 513769
ccucacaaggauaaacaca

SEQ ID NO: 513771 - RNA, 19 nt, Artificial Sequence
  Description of Artificial Sequence: Synthetic oligonucleotide
  Sense strand starting at position 2658 of SEQ ID NO: 317807
gccuguuuauugggaagac

SEQ ID NO: 513772 - RNA, 19 nt, Artificial Sequence
  Description of Artificial Sequence: Synthetic oligonucleotide
  Antisense strand to SEQ ID NO: 513771
gucuucccaauaaacaggc

SEQ ID NO: 513773 - RNA, 19 nt, Artificial Sequence
  Description of Artificial Sequence: Synthetic oligonucleotide
  Sense strand starting at position 2659 of SEQ ID NO: 317807
ccuguuuauugggaagacu

SEQ ID NO: 513774 - RNA, 19 nt, Artificial Sequence
  Description of Artificial Sequence: Synthetic oligonucleotide
  Antisense strand to SEQ ID NO: 513773
agucuucccaauaaacagg

SEQ ID NO: 513775 - RNA, 19 nt, Artificial Sequence
  Description of Artificial Sequence: Synthetic oligonucleotide
  Sense strand starting at position 2670 of SEQ ID NO: 317807
ggaagacuuuaauccugcu

SEQ ID NO: 513776 - RNA, 19 nt, Artificial Sequence
  Description of Artificial Sequence: Synthetic oligonucleotide
  Antisense strand to SEQ ID NO: 513775
agcaggauuaaagucuucc

SEQ ID NO: 513777 - RNA, 19 nt, Artificial Sequence
  Description of Artificial Sequence: Synthetic oligonucleotide
  Sense strand starting at position 2832 of SEQ ID NO: 317807
ggcaacaucccugguaugu

SEQ ID NO: 513778 - RNA, 19 nt, Artificial Sequence
  Description of Artificial Sequence: Synthetic oligonucleotide
  Antisense strand to SEQ ID NO: 513777
acauaccagggauguugcc

SEQ ID NO: 513779 - RNA, 19 nt, Artificial Sequence
  Description of Artificial Sequence: Synthetic oligonucleotide
  Sense strand starting at position 2893 of SEQ ID NO: 317807
gguacguauggugguagua

SEQ ID NO: 513780 - RNA, 19 nt, Artificial Sequence
  Description of Artificial Sequence: Synthetic oligonucleotide
  Antisense strand to SEQ ID NO: 513779
uacuaccaccauacguacc

SEQ ID NO: 513781 - RNA, 19 nt, Artificial Sequence
  Description of Artificial Sequence: Synthetic oligonucleotide
  Sense strand starting at position 2905 of SEQ ID NO: 317807
gguaguagacgaggguaua

SEQ ID NO: 513782 - RNA, 19 nt, Artificial Sequence
  Description of Artificial Sequence: Synthetic oligonucleotide
  Antisense strand to SEQ ID NO: 513781
uauacccucgucuacuacc

SEQ ID NO: 513783 - RNA, 19 nt, Artificial Sequence
  Description of Artificial Sequence: Synthetic oligonucleotide
  Sense strand starting at position 3061 of SEQ ID NO: 317807
cucagaauguguucaggga

SEQ ID NO: 513784 - RNA, 19 nt, Artificial Sequence
  Description of Artificial Sequence: Synthetic oligonucleotide
  Antisense strand to SEQ ID NO: 513783
ucccugaacacauucugag

SEQ ID NO: 513785 - RNA, 19 nt, Artificial Sequence
  Description of Artificial Sequence: Synthetic oligonucleotide
  Sense strand starting at position 3065 of SEQ ID NO: 317807
gaauguguucagggagugu

SEQ ID NO: 513786 - RNA, 19 nt, Artificial Sequence
  Description of Artificial Sequence: Synthetic oligonucleotide
  Antisense strand to SEQ ID NO: 513785
acacucccugaacacauuc

SEQ ID NO: 513787 - RNA, 19 nt, Artificial Sequence
  Description of Artificial Sequence: Synthetic oligonucleotide
  Sense strand starting at position 3206 of SEQ ID NO: 317807
gaguaugugcagugcugua

SEQ ID NO: 513788 - RNA, 19 nt, Artificial Sequence
  Description of Artificial Sequence: Synthetic oligonucleotide
  Antisense strand to SEQ ID NO: 513787
uacagcacugcacauacuc

SEQ ID NO: 513789 - RNA, 19 nt, Artificial Sequence
  Description of Artificial Sequence: Synthetic oligonucleotide
  Sense strand starting at position 3211 of SEQ ID NO: 317807
ugugcagugcuguacauaa

SEQ ID NO: 513790 - RNA, 19 nt, Artificial Sequence
  Description of Artificial Sequence: Synthetic oligonucleotide
  Antisense strand to SEQ ID NO: 513789
uuauguacagcacugcaca

SEQ ID NO: 513791 - RNA, 19 nt, Artificial Sequence
  Description of Artificial Sequence: Synthetic oligonucleotide
  Sense strand starting at position 3698 of SEQ ID NO: 317807
gaggugugugcaggaggua

SEQ ID NO: 513792 - RNA, 19 nt, Artificial Sequence
  Description of Artificial Sequence: Synthetic oligonucleotide
  Antisense strand to SEQ ID NO: 513791
uaccuccugcacacaccuc

SEQ ID NO: 513793 - RNA, 19 nt, Artificial Sequence
  Description of Artificial Sequence: Synthetic oligonucleotide
  Sense strand starting at position 3703 of SEQ ID NO: 317807
gugugcaggagguauacau

SEQ ID NO: 513794 - RNA, 19 nt, Artificial Sequence
  Description of Artificial Sequence: Synthetic oligonucleotide
  Antisense strand to SEQ ID NO: 513793
auguauaccuccugcacac

SEQ ID NO: 513795 - RNA, 19 nt, Artificial Sequence
  Description of Artificial Sequence: Synthetic oligonucleotide
  Sense strand starting at position 3710 of SEQ ID NO: 317807
ggagguauacauggugugu

SEQ ID NO: 513796 - RNA, 19 nt, Artificial Sequence
  Description of Artificial Sequence: Synthetic oligonucleotide
  Antisense strand to SEQ ID NO: 513795
acacaccauguauaccucc

SEQ ID NO: 513797 - RNA, 19 nt, Artificial Sequence
  Description of Artificial Sequence: Synthetic oligonucleotide
  Sense strand starting at position 3714 of SEQ ID NO: 317807
guauacauggugugugaag

SEQ ID NO: 513798 - RNA, 19 nt, Artificial Sequence
  Description of Artificial Sequence: Synthetic oligonucleotide
  Antisense strand to SEQ ID NO: 513797
cuucacacaccauguauac

SEQ ID NO: 513799 - RNA, 19 nt, Artificial Sequence
  Description of Artificial Sequence: Synthetic oligonucleotide
  Sense strand starting at position 3725 of SEQ ID NO: 317807
gugugaagguauguguaga

SEQ ID NO: 513800 - RNA, 19 nt, Artificial Sequence
  Description of Artificial Sequence: Synthetic oligonucleotide
  Antisense strand to SEQ ID NO: 513799
ucuacacauaccuucacac

SEQ ID NO: 513801 - RNA, 19 nt, Artificial Sequence
  Description of Artificial Sequence: Synthetic oligonucleotide
  Sense strand starting at position 3778 of SEQ ID NO: 317807
gaggaugugugagggaguu

SEQ ID NO: 513802 - RNA, 19 nt, Artificial Sequence
  Description of Artificial Sequence: Synthetic oligonucleotide
  Antisense strand to SEQ ID NO: 513801
aacucccucacacauccuc

SEQ ID NO: 513803 - RNA, 19 nt, Artificial Sequence
  Description of Artificial Sequence: Synthetic oligonucleotide
  Sense strand starting at position 40 of SEQ ID NO: 317808
agcucacuucuaugaaaug

SEQ ID NO: 513804 - RNA, 19 nt, Artificial Sequence
  Description of Artificial Sequence: Synthetic oligonucleotide
  Antisense strand to SEQ ID NO: 513803
cauuucauagaagugagcu

SEQ ID NO: 513805 - RNA, 19 nt, Artificial Sequence
  Description of Artificial Sequence: Synthetic oligonucleotide
  Sense strand starting at position 160 of SEQ ID NO: 317808
agggaaacuuucccuuuau

SEQ ID NO: 513806 - RNA, 19 nt, Artificial Sequence
  Description of Artificial Sequence: Synthetic oligonucleotide
  Antisense strand to SEQ ID NO: 513805
auaaagggaaaguuucccu

SEQ ID NO: 513807 - RNA, 19 nt, Artificial Sequence
  Description of Artificial Sequence: Synthetic oligonucleotide
  Sense strand starting at position 161 of SEQ ID NO: 317808
gggaaacuuucccuuuaug

SEQ ID NO: 513808 - RNA, 19 nt, Artificial Sequence
  Description of Artificial Sequence: Synthetic oligonucleotide
  Antisense strand to SEQ ID NO: 513807
cauaaagggaaaguuuccc

SEQ ID NO: 513809 - RNA, 19 nt, Artificial Sequence
  Description of Artificial Sequence: Synthetic oligonucleotide
  Sense strand starting at position 177 of SEQ ID NO: 317808
augagucaaugaccuguuu

SEQ ID NO: 513810 - RNA, 19 nt, Artificial Sequence
  Description of Artificial Sequence: Synthetic oligonucleotide
  Antisense strand to SEQ ID NO: 513809
aaacaggucauugacucau

SEQ ID NO: 513811 - RNA, 19 nt, Artificial Sequence
  Description of Artificial Sequence: Synthetic oligonucleotide
  Sense strand starting at position 185 of SEQ ID NO: 317808
augaccuguuuauuccaua

SEQ ID NO: 513812 - RNA, 19 nt, Artificial Sequence
  Description of Artificial Sequence: Synthetic oligonucleotide
  Antisense strand to SEQ ID NO: 513811
uauggaauaaacaggucau

SEQ ID NO: 513813 - RNA, 19 nt, Artificial Sequence
  Description of Artificial Sequence: Synthetic oligonucleotide
  Sense strand starting at position 190 of SEQ ID NO: 317808
cuguuuauuccauagucua

SEQ ID NO: 513814 - RNA, 19 nt, Artificial Sequence
  Description of Artificial Sequence: Synthetic oligonucleotide
  Antisense strand to SEQ ID NO: 513813
uagacuauggaauaaacag

SEQ ID NO: 513815 - RNA, 19 nt, Artificial Sequence
  Description of Artificial Sequence: Synthetic oligonucleotide
  Sense strand starting at position 406 of SEQ ID NO: 317808
guuauccuacaagaauguu

SEQ ID NO: 513816 - RNA, 19 nt, Artificial Sequence
  Description of Artificial Sequence: Synthetic oligonucleotide
  Antisense strand to SEQ ID NO: 513815
aacauucuuguaggauaac

SEQ ID NO: 513817 - RNA, 19 nt, Artificial Sequence
  Description of Artificial Sequence: Synthetic oligonucleotide
  Sense strand starting at position 609 of SEQ ID NO: 317808
uuggcaauuuaugugucau

SEQ ID NO: 513818 - RNA, 19 nt, Artificial Sequence
  Description of Artificial Sequence: Synthetic oligonucleotide
  Antisense strand to SEQ ID NO: 513817
augacacauaaauugccaa

SEQ ID NO: 513819 - RNA, 19 nt, Artificial Sequence
  Description of Artificial Sequence: Synthetic oligonucleotide
  Sense strand starting at position 619 of SEQ ID NO: 317808
augugucauuuccuccauu

SEQ ID NO: 513820 - RNA, 19 nt, Artificial Sequence
  Description of Artificial Sequence: Synthetic oligonucleotide
  Antisense strand to SEQ ID NO: 513819
aauggaggaaaugacacau

SEQ ID NO: 513821 - RNA, 19 nt, Artificial Sequence
  Description of Artificial Sequence: Synthetic oligonucleotide
  Sense strand starting at position 756 of SEQ ID NO: 317808
acauguaaaccggagguua

SEQ ID NO: 513822 - RNA, 19 nt, Artificial Sequence
  Description of Artificial Sequence: Synthetic oligonucleotide
  Antisense strand to SEQ ID NO: 513821
uaaccuccgguuuacaugu

SEQ ID NO: 513823 - RNA, 19 nt, Artificial Sequence
  Description of Artificial Sequence: Synthetic oligonucleotide
  Sense strand starting at position 845 of SEQ ID NO: 317808
uuaagagcugcccaucuaa

SEQ ID NO: 513824 - RNA, 19 nt, Artificial Sequence
  Description of Artificial Sequence: Synthetic oligonucleotide
  Antisense strand to SEQ ID NO: 513823
uuagaugggcagcucuuaa

SEQ ID NO: 513825 - RNA, 19 nt, Artificial Sequence
  Description of Artificial Sequence: Synthetic oligonucleotide
  Sense strand starting at position 947 of SEQ ID NO: 317808
accaguugacuguacuuaa

SEQ ID NO: 513826 - RNA, 19 nt, Artificial Sequence
  Description of Artificial Sequence: Synthetic oligonucleotide
  Antisense strand to SEQ ID NO: 513825
uuaaguacagucaacuggu

SEQ ID NO: 513827 - RNA, 19 nt, Artificial Sequence
  Description of Artificial Sequence: Synthetic oligonucleotide
  Sense strand starting at position 1047 of SEQ ID NO: 317808
guaggugcaguauaacaaa

SEQ ID NO: 513828 - RNA, 19 nt, Artificial Sequence
  Description of Artificial Sequence: Synthetic oligonucleotide
  Antisense strand to SEQ ID NO: 513827
uuuguuauacugcaccuac

SEQ ID NO: 513829 - RNA, 19 nt, Artificial Sequence
  Description of Artificial Sequence: Synthetic oligonucleotide
  Sense strand starting at position 1056 of SEQ ID NO: 317808
guauaacaaagcugaggaa

SEQ ID NO: 513830 - RNA, 19 nt, Artificial Sequence
  Description of Artificial Sequence: Synthetic oligonucleotide
  Antisense strand to SEQ ID NO: 513829
uuccucagcuuuguuauac

SEQ ID NO: 513831 - RNA, 19 nt, Artificial Sequence
  Description of Artificial Sequence: Synthetic oligonucleotide
  Sense strand starting at position 1196 of SEQ ID NO: 317808
guaccaugauuaucccuua

SEQ ID NO: 513832 - RNA, 19 nt, Artificial Sequence
  Description of Artificial Sequence: Synthetic oligonucleotide
  Antisense strand to SEQ ID NO: 513831
uaagggauaaucaugguac

SEQ ID NO: 513833 - RNA, 19 nt, Artificial Sequence
  Description of Artificial Sequence: Synthetic oligonucleotide
  Sense strand starting at position 1201 of SEQ ID NO: 317808
augauuaucccuuagcaga

SEQ ID NO: 513834 - RNA, 19 nt, Artificial Sequence
  Description of Artificial Sequence: Synthetic oligonucleotide
  Antisense strand to SEQ ID NO: 513833
ucugcuaagggauaaucau

SEQ ID NO: 513835 - RNA, 19 nt, Artificial Sequence
  Description of Artificial Sequence: Synthetic oligonucleotide
  Sense strand starting at position 1239 of SEQ ID NO: 317808
ugucguaaguguauggaua

SEQ ID NO: 513836 - RNA, 19 nt, Artificial Sequence
  Description of Artificial Sequence: Synthetic oligonucleotide
  Antisense strand to SEQ ID NO: 513835
uauccauacacuuacgaca

SEQ ID NO: 513837 - RNA, 19 nt, Artificial Sequence
  Description of Artificial Sequence: Synthetic oligonucleotide
  Sense strand starting at position 1333 of SEQ ID NO: 317808
gcaagaaauuuaggaaauc

SEQ ID NO: 513838 - RNA, 19 nt, Artificial Sequence
  Description of Artificial Sequence: Synthetic oligonucleotide
  Antisense strand to SEQ ID NO: 513837
gauuuccuaaauuucuugc

SEQ ID NO: 513839 - RNA, 19 nt, Artificial Sequence
  Description of Artificial Sequence: Synthetic oligonucleotide
  Sense strand starting at position 1392 of SEQ ID NO: 317808
ccaauuacaccguaaagca

SEQ ID NO: 513840 - RNA, 19 nt, Artificial Sequence
  Description of Artificial Sequence: Synthetic oligonucleotide
  Antisense strand to SEQ ID NO: 513839
ugcuuuacgguguaauugg

SEQ ID NO: 513841 - RNA, 19 nt, Artificial Sequence
  Description of Artificial Sequence: Synthetic oligonucleotide
  Sense strand starting at position 1888 of SEQ ID NO: 317808
cagagacguuccucucaag

SEQ ID NO: 513842 - RNA, 19 nt, Artificial Sequence
  Description of Artificial Sequence: Synthetic oligonucleotide
  Antisense strand to SEQ ID NO: 513841
cuugagaggaacgucucug

SEQ ID NO: 513843 - RNA, 19 nt, Artificial Sequence
  Description of Artificial Sequence: Synthetic oligonucleotide
  Sense strand starting at position 1894 of SEQ ID NO: 317808
cguuccucucaagaacgau

SEQ ID NO: 513844 - RNA, 19 nt, Artificial Sequence
  Description of Artificial Sequence: Synthetic oligonucleotide
  Antisense strand to SEQ ID NO: 513843
aucguucuugagaggaacg

SEQ ID NO: 513845 - RNA, 19 nt, Artificial Sequence
  Description of Artificial Sequence: Synthetic oligonucleotide
  Sense strand starting at position 2013 of SEQ ID NO: 317808
gcuggauugguugaaaugu

SEQ ID NO: 513846 - RNA, 19 nt, Artificial Sequence
  Description of Artificial Sequence: Synthetic oligonucleotide
  Antisense strand to SEQ ID NO: 513845
acauuucaaccaauccagc

SEQ ID NO: 513847 - RNA, 19 nt, Artificial Sequence
  Description of Artificial Sequence: Synthetic oligonucleotide
  Sense strand starting at position 2581 of SEQ ID NO: 317808
cuguacuuggauuaucaca

SEQ ID NO: 513848 - RNA, 19 nt, Artificial Sequence
  Description of Artificial Sequence: Synthetic oligonucleotide
  Antisense strand to SEQ ID NO: 513847
ugugauaauccaaguacag

SEQ ID NO: 513849 - RNA, 19 nt, Artificial Sequence
  Description of Artificial Sequence: Synthetic oligonucleotide
  Sense strand starting at position 2588 of SEQ ID NO: 317808
uggauuaucacaggguuag

SEQ ID NO: 513850 - RNA, 19 nt, Artificial Sequence
  Description of Artificial Sequence: Synthetic oligonucleotide
  Antisense strand to SEQ ID NO: 513849
cuaacccugugauaaucca

SEQ ID NO: 513851 - RNA, 19 nt, Artificial Sequence
  Description of Artificial Sequence: Synthetic oligonucleotide
  Sense strand starting at position 2611 of SEQ ID NO: 317808
ucaggcuauuuaugauuua

SEQ ID NO: 513852 - RNA, 19 nt, Artificial Sequence
  Description of Artificial Sequence: Synthetic oligonucleotide
  Antisense strand to SEQ ID NO: 513851
uaaaucauaaauagccuga

SEQ ID NO: 513853 - RNA, 19 nt, Artificial Sequence
  Description of Artificial Sequence: Synthetic oligonucleotide
  Sense strand starting at position 2681 of SEQ ID NO: 317808
cggauuuguucccuucugu

SEQ ID NO: 513854 - RNA, 19 nt, Artificial Sequence
  Description of Artificial Sequence: Synthetic oligonucleotide
  Antisense strand to SEQ ID NO: 513853
acagaagggaacaaauccg

SEQ ID NO: 513855 - RNA, 19 nt, Artificial Sequence
  Description of Artificial Sequence: Synthetic oligonucleotide
  Sense strand starting at position 2884 of SEQ ID NO: 317808
ggugcucgguaaauugagu

SEQ ID NO: 513856 - RNA, 19 nt, Artificial Sequence
  Description of Artificial Sequence: Synthetic oligonucleotide
  Antisense strand to SEQ ID NO: 513855
acucaauuuaccgagcacc

SEQ ID NO: 513857 - RNA, 19 nt, Artificial Sequence
  Description of Artificial Sequence: Synthetic oligonucleotide
  Sense strand starting at position 2889 of SEQ ID NO: 317808
ucgguaaauugaguggaau

SEQ ID NO: 513858 - RNA, 19 nt, Artificial Sequence
  Description of Artificial Sequence: Synthetic oligonucleotide
  Antisense strand to SEQ ID NO: 513857
auuccacucaauuuaccga

SEQ ID NO: 513859 - RNA, 19 nt, Artificial Sequence
  Description of Artificial Sequence: Synthetic oligonucleotide
  Sense strand starting at position 2890 of SEQ ID NO: 317808
cgguaaauugaguggaauc

SEQ ID NO: 513860 - RNA, 19 nt, Artificial Sequence
  Description of Artificial Sequence: Synthetic oligonucleotide
  Antisense strand to SEQ ID NO: 513859
gauuccacucaauuuaccg

SEQ ID NO: 513861 - RNA, 19 nt, Artificial Sequence
  Description of Artificial Sequence: Synthetic oligonucleotide
  Sense strand starting at position 2891 of SEQ ID NO: 317808
gguaaauugaguggaaucu

SEQ ID NO: 513862 - RNA, 19 nt, Artificial Sequence
  Description of Artificial Sequence: Synthetic oligonucleotide
  Antisense strand to SEQ ID NO: 513861
agauuccacucaauuuacc

SEQ ID NO: 513863 - RNA, 19 nt, Artificial Sequence
  Description of Artificial Sequence: Synthetic oligonucleotide
  Sense strand starting at position 2979 of SEQ ID NO: 317808
ggaguugaaggcggagaau

SEQ ID NO: 513864 - RNA, 19 nt, Artificial Sequence
  Description of Artificial Sequence: Synthetic oligonucleotide
  Antisense strand to SEQ ID NO: 513863
auucuccgccuucaacucc

SEQ ID NO: 513865 - RNA, 19 nt, Artificial Sequence
  Description of Artificial Sequence: Synthetic oligonucleotide
  Sense strand starting at position 2982 of SEQ ID NO: 317808
guugaaggcggagaauaua

SEQ ID NO: 513866 - RNA, 19 nt, Artificial Sequence
  Description of Artificial Sequence: Synthetic oligonucleotide
  Antisense strand to SEQ ID NO: 513865
uauauucuccgccuucaac

SEQ ID NO: 513867 - RNA, 19 nt, Artificial Sequence
  Description of Artificial Sequence: Synthetic oligonucleotide
  Sense strand starting at position 3011 of SEQ ID NO: 317808
auguuuaagggauguauau

SEQ ID NO: 513868 - RNA, 19 nt, Artificial Sequence
  Description of Artificial Sequence: Synthetic oligonucleotide
  Antisense strand to SEQ ID NO: 513867
auauacaucccuuaaacau

SEQ ID NO: 513869 - RNA, 19 nt, Artificial Sequence
  Description of Artificial Sequence: Synthetic oligonucleotide
  Sense strand starting at position 3075 of SEQ ID NO: 317808
aggugacauaaacguuaga

SEQ ID NO: 513870 - RNA, 19 nt, Artificial Sequence
  Description of Artificial Sequence: Synthetic oligonucleotide
  Antisense strand to SEQ ID NO: 513869
ucuaacguuuaugucaccu

SEQ ID NO: 513871 - RNA, 19 nt, Artificial Sequence
  Description of Artificial Sequence: Synthetic oligonucleotide
  Sense strand starting at position 3259 of SEQ ID NO: 317808
gagaaauuguaguuacuag

SEQ ID NO: 513872 - RNA, 19 nt, Artificial Sequence
  Description of Artificial Sequence: Synthetic oligonucleotide
  Antisense strand to SEQ ID NO: 513871
cuaguaacuacaauuucuc

SEQ ID NO: 513873 - RNA, 19 nt, Artificial Sequence
  Description of Artificial Sequence: Synthetic oligonucleotide
  Sense strand starting at position 3385 of SEQ ID NO: 317808
auuugaagauguuagaaac

SEQ ID NO: 513874 - RNA, 19 nt, Artificial Sequence
  Description of Artificial Sequence: Synthetic oligonucleotide
  Antisense strand to SEQ ID NO: 513873
guuucuaacaucuucaaau

SEQ ID NO: 513875 - RNA, 19 nt, Artificial Sequence
  Description of Artificial Sequence: Synthetic oligonucleotide
  Sense strand starting at position 3453 of SEQ ID NO: 317808
aaaguuugagaacaguguu

SEQ ID NO: 513876 - RNA, 19 nt, Artificial Sequence
  Description of Artificial Sequence: Synthetic oligonucleotide
  Antisense strand to SEQ ID NO: 513875
aacacuguucucaaacuuu

SEQ ID NO: 513877 - RNA, 19 nt, Artificial Sequence
  Description of Artificial Sequence: Synthetic oligonucleotide
  Sense strand starting at position 3530 of SEQ ID NO: 317808
uggcaauaccagugaaauu

SEQ ID NO: 513878 - RNA, 19 nt, Artificial Sequence
  Description of Artificial Sequence: Synthetic oligonucleotide
  Antisense strand to SEQ ID NO: 513877
aauuucacugguauugcca

SEQ ID NO: 513879 - RNA, 19 nt, Artificial Sequence
  Description of Artificial Sequence: Synthetic oligonucleotide
  Sense strand starting at position 3590 of SEQ ID NO: 317808
acuaguaagguugguaauu

SEQ ID NO: 513880 - RNA, 19 nt, Artificial Sequence
  Description of Artificial Sequence: Synthetic oligonucleotide
  Antisense strand to SEQ ID NO: 513879
aauuaccaaccuuacuagu

SEQ ID NO: 513881 - RNA, 19 nt, Artificial Sequence
  Description of Artificial Sequence: Synthetic oligonucleotide
  Sense strand starting at position 3967 of SEQ ID NO: 317808
gaugaugaaggcuaugcau

SEQ ID NO: 513882 - RNA, 19 nt, Artificial Sequence
  Description of Artificial Sequence: Synthetic oligonucleotide
  Antisense strand to SEQ ID NO: 513881
augcauagccuucaucauc

SEQ ID NO: 513883 - RNA, 19 nt, Artificial Sequence
  Description of Artificial Sequence: Synthetic oligonucleotide
  Sense strand starting at position 571 of SEQ ID NO: 317809
ccaugucuccaucacugua

SEQ ID NO: 513884 - RNA, 19 nt, Artificial Sequence
  Description of Artificial Sequence: Synthetic oligonucleotide
  Antisense strand to SEQ ID NO: 513883
uacagugauggagacaugg

SEQ ID NO: 513885 - RNA, 19 nt, Artificial Sequence
  Description of Artificial Sequence: Synthetic oligonucleotide
  Sense strand starting at position 573 of SEQ ID NO: 317809
augucuccaucacuguaau

SEQ ID NO: 513886 - RNA, 19 nt, Artificial Sequence
  Description of Artificial Sequence: Synthetic oligonucleotide
  Antisense strand to SEQ ID NO: 513885
auuacagugauggagacau

SEQ ID NO: 513887 - RNA, 19 nt, Artificial Sequence
  Description of Artificial Sequence: Synthetic oligonucleotide
  Sense strand starting at position 579 of SEQ ID NO: 317809
ccaucacuguaauuaaugu

SEQ ID NO: 513888 - RNA, 19 nt, Artificial Sequence
  Description of Artificial Sequence: Synthetic oligonucleotide
  Antisense strand to SEQ ID NO: 513887
acauuaauuacagugaugg

SEQ ID NO: 513889 - RNA, 19 nt, Artificial Sequence
  Description of Artificial Sequence: Synthetic oligonucleotide
  Sense strand starting at position 657 of SEQ ID NO: 317809
agugcucauuaucucagaa

SEQ ID NO: 513890 - RNA, 19 nt, Artificial Sequence
  Description of Artificial Sequence: Synthetic oligonucleotide
  Antisense strand to SEQ ID NO: 513889
uucugagauaaugagcacu

SEQ ID NO: 513891 - RNA, 19 nt, Artificial Sequence
  Description of Artificial Sequence: Synthetic oligonucleotide
  Sense strand starting at position 685 of SEQ ID NO: 317809
agcccuuuacaugaagcau

SEQ ID NO: 513892 - RNA, 19 nt, Artificial Sequence
  Description of Artificial Sequence: Synthetic oligonucleotide
  Antisense strand to SEQ ID NO: 513891
augcuucauguaaagggcu

SEQ ID NO: 513893 - RNA, 19 nt, Artificial Sequence
  Description of Artificial Sequence: Synthetic oligonucleotide
  Sense strand starting at position 859 of SEQ ID NO: 317809
agccgugaacuuuaaauaa

SEQ ID NO: 513894 - RNA, 19 nt, Artificial Sequence
  Description of Artificial Sequence: Synthetic oligonucleotide
  Antisense strand to SEQ ID NO: 513893
uuauuuaaaguucacggcu

SEQ ID NO: 513895 - RNA, 19 nt, Artificial Sequence
  Description of Artificial Sequence: Synthetic oligonucleotide
  Sense strand starting at position 1054 of SEQ ID NO: 317809
guaaacuaaugugcagaua

SEQ ID NO: 513896 - RNA, 19 nt, Artificial Sequence
  Description of Artificial Sequence: Synthetic oligonucleotide
  Antisense strand to SEQ ID NO: 513895
uaucugcacauuaguuuac

SEQ ID NO: 513897 - RNA, 19 nt, Artificial Sequence
  Description of Artificial Sequence: Synthetic oligonucleotide
  Sense strand starting at position 1203 of SEQ ID NO: 317809
ucaacaaaugucuggcuca

SEQ ID NO: 513898 - RNA, 19 nt, Artificial Sequence
  Description of Artificial Sequence: Synthetic oligonucleotide
  Antisense strand to SEQ ID NO: 513897
ugagccagacauuuguuga

SEQ ID NO: 513899 - RNA, 19 nt, Artificial Sequence
  Description of Artificial Sequence: Synthetic oligonucleotide
  Sense strand starting at position 1259 of SEQ ID NO: 317809
cuaugugcuguccaauaug

SEQ ID NO: 513900 - RNA, 19 nt, Artificial Sequence
  Description of Artificial Sequence: Synthetic oligonucleotide
  Antisense strand to SEQ ID NO: 513899
cauauuggacagcacauag

SEQ ID NO: 513901 - RNA, 19 nt, Artificial Sequence
  Description of Artificial Sequence: Synthetic oligonucleotide
  Sense strand starting at position 1582 of SEQ ID NO: 317809
agaucuacuguguaucuga

SEQ ID NO: 513902 - RNA, 19 nt, Artificial Sequence
  Description of Artificial Sequence: Synthetic oligonucleotide
  Antisense strand to SEQ ID NO: 513901
ucagauacacaguagaucu

SEQ ID NO: 513903 - RNA, 19 nt, Artificial Sequence
  Description of Artificial Sequence: Synthetic oligonucleotide
  Sense strand starting at position 1693 of SEQ ID NO: 317809
cucugcuaccuaugaggaa

SEQ ID NO: 513904 - RNA, 19 nt, Artificial Sequence
  Description of Artificial Sequence: Synthetic oligonucleotide
  Antisense strand to SEQ ID NO: 513903
uuccucauagguagcagag

SEQ ID NO: 513905 - RNA, 19 nt, Artificial Sequence
  Description of Artificial Sequence: Synthetic oligonucleotide
  Sense strand starting at position 1801 of SEQ ID NO: 317809
uugauucuccacuacuguu

SEQ ID NO: 513906 - RNA, 19 nt, Artificial Sequence
  Description of Artificial Sequence: Synthetic oligonucleotide
  Antisense strand to SEQ ID NO: 513905
aacaguaguggagaaucaa

SEQ ID NO: 513907 - RNA, 19 nt, Artificial Sequence
  Description of Artificial Sequence: Synthetic oligonucleotide
  Sense strand starting at position 1979 of SEQ ID NO: 317809
cugggacucuccuuugauu

SEQ ID NO: 513908 - RNA, 19 nt, Artificial Sequence
  Description of Artificial Sequence: Synthetic oligonucleotide
  Antisense strand to SEQ ID NO: 513907
aaucaaaggagagucccag

SEQ ID NO: 513909 - RNA, 19 nt, Artificial Sequence
  Description of Artificial Sequence: Synthetic oligonucleotide
  Sense strand starting at position 2171 of SEQ ID NO: 317809
ccugacugcuaacuagaau

SEQ ID NO: 513910 - RNA, 19 nt, Artificial Sequence
  Description of Artificial Sequence: Synthetic oligonucleotide
  Antisense strand to SEQ ID NO: 513909
auucuaguuagcagucagg

SEQ ID NO: 513911 - RNA, 19 nt, Artificial Sequence
  Description of Artificial Sequence: Synthetic oligonucleotide
  Sense strand starting at position 2292 of SEQ ID NO: 317809
cuccuaaagcaaggugaua

SEQ ID NO: 513912 - RNA, 19 nt, Artificial Sequence
  Description of Artificial Sequence: Synthetic oligonucleotide
  Antisense strand to SEQ ID NO: 513911
uaucaccuugcuuuaggag

SEQ ID NO: 513913 - RNA, 19 nt, Artificial Sequence
  Description of Artificial Sequence: Synthetic oligonucleotide
  Sense strand starting at position 2304 of SEQ ID NO: 317809
ggugauacgauguaacaua

SEQ ID NO: 513914 - RNA, 19 nt, Artificial Sequence
  Description of Artificial Sequence: Synthetic oligonucleotide
  Antisense strand to SEQ ID NO: 513913
uauguuacaucguaucacc

SEQ ID NO: 513915 - RNA, 19 nt, Artificial Sequence
  Description of Artificial Sequence: Synthetic oligonucleotide
  Sense strand starting at position 2345 of SEQ ID NO: 317809
aacggagucuuauuagaua

SEQ ID NO: 513916 - RNA, 19 nt, Artificial Sequence
  Description of Artificial Sequence: Synthetic oligonucleotide
  Antisense strand to SEQ ID NO: 513915
uaucuaauaagacuccguu

SEQ ID NO: 513917 - RNA, 19 nt, Artificial Sequence
  Description of Artificial Sequence: Synthetic oligonucleotide
  Sense strand starting at position 2356 of SEQ ID NO: 317809
auuagauaacuuggucgaa

SEQ ID NO: 513918 - RNA, 19 nt, Artificial Sequence
  Description of Artificial Sequence: Synthetic oligonucleotide
  Antisense strand to SEQ ID NO: 513917
uucgaccaaguuaucuaau

SEQ ID NO: 513919 - RNA, 19 nt, Artificial Sequence
  Description of Artificial Sequence: Synthetic oligonucleotide
  Sense strand starting at position 2357 of SEQ ID NO: 317809
uuagauaacuuggucgaau

SEQ ID NO: 513920 - RNA, 19 nt, Artificial Sequence
  Description of Artificial Sequence: Synthetic oligonucleotide
  Antisense strand to SEQ ID NO: 513919
auucgaccaaguuaucuaa

SEQ ID NO: 513921 - RNA, 19 nt, Artificial Sequence
  Description of Artificial Sequence: Synthetic oligonucleotide
  Sense strand starting at position 2358 of SEQ ID NO: 317809
uagauaacuuggucgaaua

SEQ ID NO: 513922 - RNA, 19 nt, Artificial Sequence
  Description of Artificial Sequence: Synthetic oligonucleotide
  Antisense strand to SEQ ID NO: 513921
uauucgaccaaguuaucua

SEQ ID NO: 513923 - RNA, 19 nt, Artificial Sequence
  Description of Artificial Sequence: Synthetic oligonucleotide
  Sense strand starting at position 2359 of SEQ ID NO: 317809
agauaacuuggucgaauaa

SEQ ID NO: 513924 - RNA, 19 nt, Artificial Sequence
  Description of Artificial Sequence: Synthetic oligonucleotide
  Antisense strand to SEQ ID NO: 513923
uuauucgaccaaguuaucu

SEQ ID NO: 513925 - RNA, 19 nt, Artificial Sequence
  Description of Artificial Sequence: Synthetic oligonucleotide
  Sense strand starting at position 2398 of SEQ ID NO: 317809
ggaggagguuaccuuuaau

SEQ ID NO: 513926 - RNA, 19 nt, Artificial Sequence
  Description of Artificial Sequence: Synthetic oligonucleotide
  Antisense strand to SEQ ID NO: 513925
auuaaagguaaccuccucc

SEQ ID NO: 513927 - RNA, 19 nt, Artificial Sequence
  Description of Artificial Sequence: Synthetic oligonucleotide
  Sense strand starting at position 2445 of SEQ ID NO: 317809
ucauacacuugagugagaa

SEQ ID NO: 513928 - RNA, 19 nt, Artificial Sequence
  Description of Artificial Sequence: Synthetic oligonucleotide
  Antisense strand to SEQ ID NO: 513927
uucucacucaaguguauga

SEQ ID NO: 513929 - RNA, 19 nt, Artificial Sequence
  Description of Artificial Sequence: Synthetic oligonucleotide
  Sense strand starting at position 2567 of SEQ ID NO: 317809
cggauagugggaugauaac

SEQ ID NO: 513930 - RNA, 19 nt, Artificial Sequence
  Description of Artificial Sequence: Synthetic oligonucleotide
  Antisense strand to SEQ ID NO: 513929
guuaucaucccacuauccg

SEQ ID NO: 513931 - RNA, 19 nt, Artificial Sequence
  Description of Artificial Sequence: Synthetic oligonucleotide
  Sense strand starting at position 2573 of SEQ ID NO: 317809
gugggaugauaacauuuaa

SEQ ID NO: 513932 - RNA, 19 nt, Artificial Sequence
  Description of Artificial Sequence: Synthetic oligonucleotide
  Antisense strand to SEQ ID NO: 513931
uuaaauguuaucaucccac

SEQ ID NO: 513933 - RNA, 19 nt, Artificial Sequence
  Description of Artificial Sequence: Synthetic oligonucleotide
  Sense strand starting at position 2763 of SEQ ID NO: 317809
acaagccauccacgaauaa

SEQ ID NO: 513934 - RNA, 19 nt, Artificial Sequence
  Description of Artificial Sequence: Synthetic oligonucleotide
  Antisense strand to SEQ ID NO: 513933
uuauucguggauggcuugu

SEQ ID NO: 513935 - RNA, 19 nt, Artificial Sequence
  Description of Artificial Sequence: Synthetic oligonucleotide
  Sense strand starting at position 2992 of SEQ ID NO: 317809
ucuggaucaggauguuaau

SEQ ID NO: 513936 - RNA, 19 nt, Artificial Sequence
  Description of Artificial Sequence: Synthetic oligonucleotide
  Antisense strand to SEQ ID NO: 513935
auuaacauccugauccaga

SEQ ID NO: 513937 - RNA, 19 nt, Artificial Sequence
  Description of Artificial Sequence: Synthetic oligonucleotide
  Sense strand starting at position 2998 of SEQ ID NO: 317809
ucaggauguuaauucucua

SEQ ID NO: 513938 - RNA, 19 nt, Artificial Sequence
  Description of Artificial Sequence: Synthetic oligonucleotide
  Antisense strand to SEQ ID NO: 513937
uagagaauuaacauccuga

SEQ ID NO: 513939 - RNA, 19 nt, Artificial Sequence
  Description of Artificial Sequence: Synthetic oligonucleotide
  Sense strand starting at position 3001 of SEQ ID NO: 317809
ggauguuaauucucuagac

SEQ ID NO: 513940 - RNA, 19 nt, Artificial Sequence
  Description of Artificial Sequence: Synthetic oligonucleotide
  Antisense strand to SEQ ID NO: 513939
gucuagagaauuaacaucc

SEQ ID NO: 513941 - RNA, 19 nt, Artificial Sequence
  Description of Artificial Sequence: Synthetic oligonucleotide
  Sense strand starting at position 3015 of SEQ ID NO: 317809
uagacuacuguccaguaga

SEQ ID NO: 513942 - RNA, 19 nt, Artificial Sequence
  Description of Artificial Sequence: Synthetic oligonucleotide
  Antisense strand to SEQ ID NO: 513941
ucuacuggacaguagucua

SEQ ID NO: 513943 - RNA, 19 nt, Artificial Sequence
  Description of Artificial Sequence: Synthetic oligonucleotide
  Sense strand starting at position 3025 of SEQ ID NO: 317809
uccaguagacucugcaaga

SEQ ID NO: 513944 - RNA, 19 nt, Artificial Sequence
  Description of Artificial Sequence: Synthetic oligonucleotide
  Antisense strand to SEQ ID NO: 513943
ucuugcagagucuacugga

SEQ ID NO: 513945 - RNA, 19 nt, Artificial Sequence
  Description of Artificial Sequence: Synthetic oligonucleotide
  Sense strand starting at position 3026 of SEQ ID NO: 317809
ccaguagacucugcaagaa

SEQ ID NO: 513946 - RNA, 19 nt, Artificial Sequence
  Description of Artificial Sequence: Synthetic oligonucleotide
  Antisense strand to SEQ ID NO: 513945
uucuugcagagucuacugg

SEQ ID NO: 513947 - RNA, 19 nt, Artificial Sequence
  Description of Artificial Sequence: Synthetic oligonucleotide
  Sense strand starting at position 3103 of SEQ ID NO: 317809
ucucaacccuagucaaagu

SEQ ID NO: 513948 - RNA, 19 nt, Artificial Sequence
  Description of Artificial Sequence: Synthetic oligonucleotide
  Antisense strand to SEQ ID NO: 513947
acuuugacuaggguugaga

SEQ ID NO: 513949 - RNA, 19 nt, Artificial Sequence
  Description of Artificial Sequence: Synthetic oligonucleotide
  Sense strand starting at position 3114 of SEQ ID NO: 317809
gucaaagugccuuacugaa

SEQ ID NO: 513950 - RNA, 19 nt, Artificial Sequence
  Description of Artificial Sequence: Synthetic oligonucleotide
  Antisense strand to SEQ ID NO: 513949
uucaguaaggcacuuugac

SEQ ID NO: 513951 - RNA, 19 nt, Artificial Sequence
  Description of Artificial Sequence: Synthetic oligonucleotide
  Sense strand starting at position 3297 of SEQ ID NO: 317809
ccgaauaaguccucugaga

SEQ ID NO: 513952 - RNA, 19 nt, Artificial Sequence
  Description of Artificial Sequence: Synthetic oligonucleotide
  Antisense strand to SEQ ID NO: 513951
ucucagaggacuuauucgg

SEQ ID NO: 513953 - RNA, 19 nt, Artificial Sequence
  Description of Artificial Sequence: Synthetic oligonucleotide
  Sense strand starting at position 3299 of SEQ ID NO: 317809
gaauaaguccucugagacc

SEQ ID NO: 513954 - RNA, 19 nt, Artificial Sequence
  Description of Artificial Sequence: Synthetic oligonucleotide
  Antisense strand to SEQ ID NO: 513953
ggucucagaggacuuauuc

SEQ ID NO: 513955 - RNA, 19 nt, Artificial Sequence
  Description of Artificial Sequence: Synthetic oligonucleotide
  Sense strand starting at position 3434 of SEQ ID NO: 317809
guugcuuugcuccugcuaa

SEQ ID NO: 513956 - RNA, 19 nt, Artificial Sequence
  Description of Artificial Sequence: Synthetic oligonucleotide
  Antisense strand to SEQ ID NO: 513955
uuagcaggagcaaagcaac

SEQ ID NO: 513957 - RNA, 19 nt, Artificial Sequence
  Description of Artificial Sequence: Synthetic oligonucleotide
  Sense strand starting at position 3436 of SEQ ID NO: 317809
ugcuuugcuccugcuaagu

SEQ ID NO: 513958 - RNA, 19 nt, Artificial Sequence
  Description of Artificial Sequence: Synthetic oligonucleotide
  Antisense strand to SEQ ID NO: 513957
acuuagcaggagcaaagca

SEQ ID NO: 513959 - RNA, 19 nt, Artificial Sequence
  Description of Artificial Sequence: Synthetic oligonucleotide
  Sense strand starting at position 3462 of SEQ ID NO: 317809
gcggcacucgaaagagguu

SEQ ID NO: 513960 - RNA, 19 nt, Artificial Sequence
  Description of Artificial Sequence: Synthetic oligonucleotide
  Antisense strand to SEQ ID NO: 513959
aaccucuuucgagugccgc

SEQ ID NO: 513961 - RNA, 19 nt, Artificial Sequence
  Description of Artificial Sequence: Synthetic oligonucleotide
  Sense strand starting at position 3469 of SEQ ID NO: 317809
ucgaaagagguuuggaaac

SEQ ID NO: 513962 - RNA, 19 nt, Artificial Sequence
  Description of Artificial Sequence: Synthetic oligonucleotide
  Antisense strand to SEQ ID NO: 513961
guuuccaaaccucuuucga

SEQ ID NO: 513963 - RNA, 19 nt, Artificial Sequence
  Description of Artificial Sequence: Synthetic oligonucleotide
  Sense strand starting at position 7 of SEQ ID NO: 317810
aaaguacuauccgaaucag

SEQ ID NO: 513964 - RNA, 19 nt, Artificial Sequence
  Description of Artificial Sequence: Synthetic oligonucleotide
  Antisense strand to SEQ ID NO: 513963
cugauucggauaguacuuu

SEQ ID NO: 513965 - RNA, 19 nt, Artificial Sequence
  Description of Artificial Sequence: Synthetic oligonucleotide
  Sense strand starting at position 79 of SEQ ID NO: 317810
cccuuugaccgggaagcaa

SEQ ID NO: 513966 - RNA, 19 nt, Artificial Sequence
  Description of Artificial Sequence: Synthetic oligonucleotide
  Antisense strand to SEQ ID NO: 513965
uugcuucccggucaaaggg

SEQ ID NO: 513967 - RNA, 19 nt, Artificial Sequence
  Description of Artificial Sequence: Synthetic oligonucleotide
  Sense strand starting at position 115 of SEQ ID NO: 317810
agagaaaccucauucggua

SEQ ID NO: 513968 - RNA, 19 nt, Artificial Sequence
  Description of Artificial Sequence: Synthetic oligonucleotide
  Antisense strand to SEQ ID NO: 513967
uaccgaaugagguuucucu

SEQ ID NO: 513969 - RNA, 19 nt, Artificial Sequence
  Description of Artificial Sequence: Synthetic oligonucleotide
  Sense strand starting at position 212 of SEQ ID NO: 317810
gaacuuugauccgcugagu

SEQ ID NO: 513970 - RNA, 19 nt, Artificial Sequence
  Description of Artificial Sequence: Synthetic oligonucleotide
  Antisense strand to SEQ ID NO: 513969
acucagcggaucaaaguuc

SEQ ID NO: 513971 - RNA, 19 nt, Artificial Sequence
  Description of Artificial Sequence: Synthetic oligonucleotide
  Sense strand starting at position 215 of SEQ ID NO: 317810
cuuugauccgcugaguuua

SEQ ID NO: 513972 - RNA, 19 nt, Artificial Sequence
  Description of Artificial Sequence: Synthetic oligonucleotide
  Antisense strand to SEQ ID NO: 513971
uaaacucagcggaucaaag

SEQ ID NO: 513973 - RNA, 19 nt, Artificial Sequence
  Description of Artificial Sequence: Synthetic oligonucleotide
  Sense strand starting at position 220 of SEQ ID NO: 317810
auccgcugaguuuagaaau

SEQ ID NO: 513974 - RNA, 19 nt, Artificial Sequence
  Description of Artificial Sequence: Synthetic oligonucleotide
  Antisense strand to SEQ ID NO: 513973
auuucuaaacucagcggau

SEQ ID NO: 513975 - RNA, 19 nt, Artificial Sequence
  Description of Artificial Sequence: Synthetic oligonucleotide
  Sense strand starting at position 231 of SEQ ID NO: 317810
uuagaaauucucuguccag

SEQ ID NO: 513976 - RNA, 19 nt, Artificial Sequence
  Description of Artificial Sequence: Synthetic oligonucleotide
  Antisense strand to SEQ ID NO: 513975
cuggacagagaauuucuaa

SEQ ID NO: 513977 - RNA, 19 nt, Artificial Sequence
  Description of Artificial Sequence: Synthetic oligonucleotide
  Sense strand starting at position 392 of SEQ ID NO: 317810
ccaauacuagugugugcua

SEQ ID NO: 513978 - RNA, 19 nt, Artificial Sequence
  Description of Artificial Sequence: Synthetic oligonucleotide
  Antisense strand to SEQ ID NO: 513977
uagcacacacuaguauugg

SEQ ID NO: 513979 - RNA, 19 nt, Artificial Sequence
  Description of Artificial Sequence: Synthetic oligonucleotide
  Sense strand starting at position 395 of SEQ ID NO: 317810
auacuagugugugcuagua

SEQ ID NO: 513980 - RNA, 19 nt, Artificial Sequence
  Description of Artificial Sequence: Synthetic oligonucleotide
  Antisense strand to SEQ ID NO: 513979
uacuagcacacacuaguau

SEQ ID NO: 513981 - RNA, 19 nt, Artificial Sequence
  Description of Artificial Sequence: Synthetic oligonucleotide
  Sense strand starting at position 399 of SEQ ID NO: 317810
uagugugugcuaguacagu

SEQ ID NO: 513982 - RNA, 19 nt, Artificial Sequence
  Description of Artificial Sequence: Synthetic oligonucleotide
  Antisense strand to SEQ ID NO: 513981
acuguacuagcacacacua

SEQ ID NO: 513983 - RNA, 19 nt, Artificial Sequence
  Description of Artificial Sequence: Synthetic oligonucleotide
  Sense strand starting at position 607 of SEQ ID NO: 317810
ccaguauguggagaguuga

SEQ ID NO: 513984 - RNA, 19 nt, Artificial Sequence
  Description of Artificial Sequence: Synthetic oligonucleotide
  Antisense strand to SEQ ID NO: 513983
ucaacucuccacauacugg

SEQ ID NO: 513985 - RNA, 19 nt, Artificial Sequence
  Description of Artificial Sequence: Synthetic oligonucleotide
  Sense strand starting at position 700 of SEQ ID NO: 317810
gugcgcuagauccaguuua

SEQ ID NO: 513986 - RNA, 19 nt, Artificial Sequence
  Description of Artificial Sequence: Synthetic oligonucleotide
  Antisense strand to SEQ ID NO: 513985
uaaacuggaucuagcgcac

SEQ ID NO: 513987 - RNA, 19 nt, Artificial Sequence
  Description of Artificial Sequence: Synthetic oligonucleotide
  Sense strand starting at position 783 of SEQ ID NO: 317810
cgucuucccuuccugaaga

SEQ ID NO: 513988 - RNA, 19 nt, Artificial Sequence
  Description of Artificial Sequence: Synthetic oligonucleotide
  Antisense strand to SEQ ID NO: 513987
ucuucaggaagggaagacg

SEQ ID NO: 513989 - RNA, 19 nt, Artificial Sequence
  Description of Artificial Sequence: Synthetic oligonucleotide
  Sense strand starting at position 866 of SEQ ID NO: 317810
gggaauggccuuugguuua

SEQ ID NO: 513990 - RNA, 19 nt, Artificial Sequence
  Description of Artificial Sequence: Synthetic oligonucleotide
  Antisense strand to SEQ ID NO: 513989
uaaaccaaaggccauuccc

SEQ ID NO: 513991 - RNA, 19 nt, Artificial Sequence
  Description of Artificial Sequence: Synthetic oligonucleotide
  Sense strand starting at position 873 of SEQ ID NO: 317810
gccuuugguuuagcucuaa

SEQ ID NO: 513992 - RNA, 19 nt, Artificial Sequence
  Description of Artificial Sequence: Synthetic oligonucleotide
  Antisense strand to SEQ ID NO: 513991
uuagagcuaaaccaaaggc

SEQ ID NO: 513993 - RNA, 19 nt, Artificial Sequence
  Description of Artificial Sequence: Synthetic oligonucleotide
  Sense strand starting at position 877 of SEQ ID NO: 317810
uugguuuagcucuaagguu

SEQ ID NO: 513994 - RNA, 19 nt, Artificial Sequence
  Description of Artificial Sequence: Synthetic oligonucleotide
  Antisense strand to SEQ ID NO: 513993
aaccuuagagcuaaaccaa

SEQ ID NO: 513995 - RNA, 19 nt, Artificial Sequence
  Description of Artificial Sequence: Synthetic oligonucleotide
  Sense strand starting at position 903 of SEQ ID NO: 317810
uaaccucuccgacgaggua

SEQ ID NO: 513996 - RNA, 19 nt, Artificial Sequence
  Description of Artificial Sequence: Synthetic oligonucleotide
  Antisense strand to SEQ ID NO: 513995
uaccucgucggagagguua

SEQ ID NO: 513997 - RNA, 19 nt, Artificial Sequence
  Description of Artificial Sequence: Synthetic oligonucleotide
  Sense strand starting at position 1029 of SEQ ID NO: 317810
cuacgaauugugggcggau

SEQ ID NO: 513998 - RNA, 19 nt, Artificial Sequence
  Description of Artificial Sequence: Synthetic oligonucleotide
  Antisense strand to SEQ ID NO: 513997
auccgcccacaauucguag

SEQ ID NO: 513999 - RNA, 19 nt, Artificial Sequence
  Description of Artificial Sequence: Synthetic oligonucleotide
  Sense strand starting at position 1191 of SEQ ID NO: 317810
ggaggucaccuuugaugua

SEQ ID NO: 514000 - RNA, 19 nt, Artificial Sequence
  Description of Artificial Sequence: Synthetic oligonucleotide
  Antisense strand to SEQ ID NO: 513999
uacaucaaaggugaccucc

SEQ ID NO: 514001 - RNA, 19 nt, Artificial Sequence
  Description of Artificial Sequence: Synthetic oligonucleotide
  Sense strand starting at position 2571 of SEQ ID NO: 317810
gccuccucuccggaaggaa

SEQ ID NO: 514002 - RNA, 19 nt, Artificial Sequence
  Description of Artificial Sequence: Synthetic oligonucleotide
  Antisense strand to SEQ ID NO: 514001
uuccuuccggagaggaggc

SEQ ID NO: 514003 - RNA, 19 nt, Artificial Sequence
  Description of Artificial Sequence: Synthetic oligonucleotide
  Sense strand starting at position 2967 of SEQ ID NO: 317810
gucggucacuugucaggaa

SEQ ID NO: 514004 - RNA, 19 nt, Artificial Sequence
  Description of Artificial Sequence: Synthetic oligonucleotide
  Antisense strand to SEQ ID NO: 514003
uuccugacaagugaccgac

SEQ ID NO: 514005 - RNA, 19 nt, Artificial Sequence
  Description of Artificial Sequence: Synthetic oligonucleotide
  Sense strand starting at position 2971 of SEQ ID NO: 317810
gucacuugucaggaaacca

SEQ ID NO: 514006 - RNA, 19 nt, Artificial Sequence
  Description of Artificial Sequence: Synthetic oligonucleotide
  Antisense strand to SEQ ID NO: 514005
ugguuuccugacaagugac

SEQ ID NO: 514007 - RNA, 19 nt, Artificial Sequence
  Description of Artificial Sequence: Synthetic oligonucleotide
  Sense strand starting at position 3084 of SEQ ID NO: 317810
ucguuagggucucuccuaa

SEQ ID NO: 514008 - RNA, 19 nt, Artificial Sequence
  Description of Artificial Sequence: Synthetic oligonucleotide
  Antisense strand to SEQ ID NO: 514007
uuaggagagacccuaacga

SEQ ID NO: 514009 - RNA, 19 nt, Artificial Sequence
  Description of Artificial Sequence: Synthetic oligonucleotide
  Sense strand starting at position 3088 of SEQ ID NO: 317810
uagggucucuccuaagaaa

SEQ ID NO: 514010 - RNA, 19 nt, Artificial Sequence
  Description of Artificial Sequence: Synthetic oligonucleotide
  Antisense strand to SEQ ID NO: 514009
uuucuuaggagagacccua

SEQ ID NO: 514011 - RNA, 19 nt, Artificial Sequence
  Description of Artificial Sequence: Synthetic oligonucleotide
  Sense strand starting at position 3248 of SEQ ID NO: 317810
cucggcucuccugaugaua

SEQ ID NO: 514012 - RNA, 19 nt, Artificial Sequence
  Description of Artificial Sequence: Synthetic oligonucleotide
  Antisense strand to SEQ ID NO: 514011
uaucaucaggagagccgag

SEQ ID NO: 514013 - RNA, 19 nt, Artificial Sequence
  Description of Artificial Sequence: Synthetic oligonucleotide
  Sense strand starting at position 3299 of SEQ ID NO: 317810
ucagucuugguagaagauu

SEQ ID NO: 514014 - RNA, 19 nt, Artificial Sequence
  Description of Artificial Sequence: Synthetic oligonucleotide
  Antisense strand to SEQ ID NO: 514013
aaucuucuaccaagacuga

SEQ ID NO: 514015 - RNA, 19 nt, Artificial Sequence
  Description of Artificial Sequence: Synthetic oligonucleotide
  Sense strand starting at position 3307 of SEQ ID NO: 317810
gguagaagauuggcucagu

SEQ ID NO: 514016 - RNA, 19 nt, Artificial Sequence
  Description of Artificial Sequence: Synthetic oligonucleotide
  Antisense strand to SEQ ID NO: 514015
acugagccaaucuucuacc

SEQ ID NO: 514017 - RNA, 19 nt, Artificial Sequence
  Description of Artificial Sequence: Synthetic oligonucleotide
  Sense strand starting at position 3330 of SEQ ID NO: 317810
cuggcaaauaguggagaaa

SEQ ID NO: 514018 - RNA, 19 nt, Artificial Sequence
  Description of Artificial Sequence: Synthetic oligonucleotide
  Antisense strand to SEQ ID NO: 514017
uuucuccacuauuugccag

SEQ ID NO: 514019 - RNA, 19 nt, Artificial Sequence
  Description of Artificial Sequence: Synthetic oligonucleotide
  Sense strand starting at position 3365 of SEQ ID NO: 317810
gggccaauacccugaagau

SEQ ID NO: 514020 - RNA, 19 nt, Artificial Sequence
  Description of Artificial Sequence: Synthetic oligonucleotide
  Antisense strand to SEQ ID NO: 514019
aucuucaggguauuggccc

SEQ ID NO: 514021 - RNA, 19 nt, Artificial Sequence
  Description of Artificial Sequence: Synthetic oligonucleotide
  Sense strand starting at position 3507 of SEQ ID NO: 317810
uuaccucuccaaugaggga

SEQ ID NO: 514022 - RNA, 19 nt, Artificial Sequence
  Description of Artificial Sequence: Synthetic oligonucleotide
  Antisense strand to SEQ ID NO: 514021
ucccucauuggagagguaa

SEQ ID NO: 514023 - RNA, 19 nt, Artificial Sequence
  Description of Artificial Sequence: Synthetic oligonucleotide
  Sense strand starting at position 3586 of SEQ ID NO: 317810
ugccuuaguuacguuagga

SEQ ID NO: 514024 - RNA, 19 nt, Artificial Sequence
  Description of Artificial Sequence: Synthetic oligonucleotide
  Antisense strand to SEQ ID NO: 514023
uccuaacguaacuaaggca

SEQ ID NO: 514025 - RNA, 19 nt, Artificial Sequence
  Description of Artificial Sequence: Synthetic oligonucleotide
  Sense strand starting at position 3591 of SEQ ID NO: 317810
uaguuacguuaggaagaaa

SEQ ID NO: 514026 - RNA, 19 nt, Artificial Sequence
  Description of Artificial Sequence: Synthetic oligonucleotide
  Antisense strand to SEQ ID NO: 514025
uuucuuccuaacguaacua

SEQ ID NO: 514027 - RNA, 19 nt, Artificial Sequence
  Description of Artificial Sequence: Synthetic oligonucleotide
  Sense strand starting at position 3660 of SEQ ID NO: 317810
ucuaaagguugugcauaaa

SEQ ID NO: 514028 - RNA, 19 nt, Artificial Sequence
  Description of Artificial Sequence: Synthetic oligonucleotide
  Antisense strand to SEQ ID NO: 514027
uuuaugcacaaccuuuaga

SEQ ID NO: 514029 - RNA, 19 nt, Artificial Sequence
  Description of Artificial Sequence: Synthetic oligonucleotide
  Sense strand starting at position 3754 of SEQ ID NO: 317810
aacgcaaagggaugguauu

SEQ ID NO: 514030 - RNA, 19 nt, Artificial Sequence
  Description of Artificial Sequence: Synthetic oligonucleotide
  Antisense strand to SEQ ID NO: 514029
aauaccaucccuuugcguu

SEQ ID NO: 514031 - RNA, 19 nt, Artificial Sequence
  Description of Artificial Sequence: Synthetic oligonucleotide
  Sense strand starting at position 3764 of SEQ ID NO: 317810
gaugguauugaauggcauu

SEQ ID NO: 514032 - RNA, 19 nt, Artificial Sequence
  Description of Artificial Sequence: Synthetic oligonucleotide
  Antisense strand to SEQ ID NO: 514031
aaugccauucaauaccauc

SEQ ID NO: 514033 - RNA, 19 nt, Artificial Sequence
  Description of Artificial Sequence: Synthetic oligonucleotide
  Sense strand starting at position 3765 of SEQ ID NO: 317810
augguauugaauggcauua

SEQ ID NO: 514034 - RNA, 19 nt, Artificial Sequence
  Description of Artificial Sequence: Synthetic oligonucleotide
  Antisense strand to SEQ ID NO: 514033
uaaugccauucaauaccau

SEQ ID NO: 514035 - RNA, 19 nt, Artificial Sequence
  Description of Artificial Sequence: Synthetic oligonucleotide
  Sense strand starting at position 3784 of SEQ ID NO: 317810
gacauaauggcucgaucca

SEQ ID NO: 514036 - RNA, 19 nt, Artificial Sequence
  Description of Artificial Sequence: Synthetic oligonucleotide
  Antisense strand to SEQ ID NO: 514035
uggaucgagccauuauguc

SEQ ID NO: 514037 - RNA, 19 nt, Artificial Sequence
  Description of Artificial Sequence: Synthetic oligonucleotide
  Sense strand starting at position 3853 of SEQ ID NO: 317810
gaggaaugguucuuuccac

SEQ ID NO: 514038 - RNA, 19 nt, Artificial Sequence
  Description of Artificial Sequence: Synthetic oligonucleotide
  Antisense strand to SEQ ID NO: 514037
guggaaagaaccauuccuc

SEQ ID NO: 514039 - RNA, 19 nt, Artificial Sequence
  Description of Artificial Sequence: Synthetic oligonucleotide
  Sense strand starting at position 3854 of SEQ ID NO: 317810
aggaaugguucuuuccaca

SEQ ID NO: 514040 - RNA, 19 nt, Artificial Sequence
  Description of Artificial Sequence: Synthetic oligonucleotide
  Antisense strand to SEQ ID NO: 514039
uguggaaagaaccauuccu

SEQ ID NO: 514041 - RNA, 19 nt, Artificial Sequence
  Description of Artificial Sequence: Synthetic oligonucleotide
  Sense strand starting at position 3892 of SEQ ID NO: 317810
gagcacgucugacuaaaug

SEQ ID NO: 514042 - RNA, 19 nt, Artificial Sequence
  Description of Artificial Sequence: Synthetic oligonucleotide
  Antisense strand to SEQ ID NO: 514041
cauuuagucagacgugcuc

SEQ ID NO: 514043 - RNA, 19 nt, Artificial Sequence
  Description of Artificial Sequence: Synthetic oligonucleotide
  Sense strand starting at position 116 of SEQ ID NO: 317811
aggagauauuuagaauccu

SEQ ID NO: 514044 - RNA, 19 nt, Artificial Sequence
  Description of Artificial Sequence: Synthetic oligonucleotide
  Antisense strand to SEQ ID NO: 514043
aggauucuaaauaucuccu

SEQ ID NO: 514045 - RNA, 19 nt, Artificial Sequence
  Description of Artificial Sequence: Synthetic oligonucleotide
  Sense strand starting at position 158 of SEQ ID NO: 317811
cuaggccuccugugaugaa

SEQ ID NO: 514046 - RNA, 19 nt, Artificial Sequence
  Description of Artificial Sequence: Synthetic oligonucleotide
  Antisense strand to SEQ ID NO: 514045
uucaucacaggaggccuag

SEQ ID NO: 514047 - RNA, 19 nt, Artificial Sequence
  Description of Artificial Sequence: Synthetic oligonucleotide
  Sense strand starting at position 195 of SEQ ID NO: 317811
gacuuugucccucaagggu

SEQ ID NO: 514048 - RNA, 19 nt, Artificial Sequence
  Description of Artificial Sequence: Synthetic oligonucleotide
  Antisense strand to SEQ ID NO: 514047
acccuugagggacaaaguc

SEQ ID NO: 514049 - RNA, 19 nt, Artificial Sequence
  Description of Artificial Sequence: Synthetic oligonucleotide
  Sense strand starting at position 245 of SEQ ID NO: 317811
gccaucuaguccuuugaag

SEQ ID NO: 514050 - RNA, 19 nt, Artificial Sequence
  Description of Artificial Sequence: Synthetic oligonucleotide
  Antisense strand to SEQ ID NO: 514049
cuucaaaggacuagauggc

SEQ ID NO: 514051 - RNA, 19 nt, Artificial Sequence
  Description of Artificial Sequence: Synthetic oligonucleotide
  Sense strand starting at position 247 of SEQ ID NO: 317811
caucuaguccuuugaagug

SEQ ID NO: 514052 - RNA, 19 nt, Artificial Sequence
  Description of Artificial Sequence: Synthetic oligonucleotide
  Antisense strand to SEQ ID NO: 514051
cacuucaaaggacuagaug

SEQ ID NO: 514053 - RNA, 19 nt, Artificial Sequence
  Description of Artificial Sequence: Synthetic oligonucleotide
  Sense strand starting at position 331 of SEQ ID NO: 317811
uagugugaccuccagcagu

SEQ ID NO: 514054 - RNA, 19 nt, Artificial Sequence
  Description of Artificial Sequence: Synthetic oligonucleotide
  Antisense strand to SEQ ID NO: 514053
acugcuggaggucacacua

SEQ ID NO: 514055 - RNA, 19 nt, Artificial Sequence
  Description of Artificial Sequence: Synthetic oligonucleotide
  Sense strand starting at position 576 of SEQ ID NO: 317811
cccacaguuuccuuaggaa

SEQ ID NO: 514056 - RNA, 19 nt, Artificial Sequence
  Description of Artificial Sequence: Synthetic oligonucleotide
  Antisense strand to SEQ ID NO: 514055
uuccuaaggaaacuguggg

SEQ ID NO: 514057 - RNA, 19 nt, Artificial Sequence
  Description of Artificial Sequence: Synthetic oligonucleotide
  Sense strand starting at position 609 of SEQ ID NO: 317811
uggcccauuuccuaaugau

SEQ ID NO: 514058 - RNA, 19 nt, Artificial Sequence
  Description of Artificial Sequence: Synthetic oligonucleotide
  Antisense strand to SEQ ID NO: 514057
aucauuaggaaaugggcca

SEQ ID NO: 514059 - RNA, 19 nt, Artificial Sequence
  Description of Artificial Sequence: Synthetic oligonucleotide
  Sense strand starting at position 623 of SEQ ID NO: 317811
augauaugauuuggucaug

SEQ ID NO: 514060 - RNA, 19 nt, Artificial Sequence
  Description of Artificial Sequence: Synthetic oligonucleotide
  Antisense strand to SEQ ID NO: 514059
caugaccaaaucauaucau

SEQ ID NO: 514061 - RNA, 19 nt, Artificial Sequence
  Description of Artificial Sequence: Synthetic oligonucleotide
  Sense strand starting at position 702 of SEQ ID NO: 317811
aacccacaggcgugauuaa

SEQ ID NO: 514062 - RNA, 19 nt, Artificial Sequence
  Description of Artificial Sequence: Synthetic oligonucleotide
  Antisense strand to SEQ ID NO: 514061
uuaaucacgccuguggguu

SEQ ID NO: 514063 - RNA, 19 nt, Artificial Sequence
  Description of Artificial Sequence: Synthetic oligonucleotide
  Sense strand starting at position 709 of SEQ ID NO: 317811
aggcgugauuaacuccaaa

SEQ ID NO: 514064 - RNA, 19 nt, Artificial Sequence
  Description of Artificial Sequence: Synthetic oligonucleotide
  Antisense strand to SEQ ID NO: 514063
uuuggaguuaaucacgccu

SEQ ID NO: 514065 - RNA, 19 nt, Artificial Sequence
  Description of Artificial Sequence: Synthetic oligonucleotide
  Sense strand starting at position 712 of SEQ ID NO: 317811
cgugauuaacuccaaaguc

SEQ ID NO: 514066 - RNA, 19 nt, Artificial Sequence
  Description of Artificial Sequence: Synthetic oligonucleotide
  Antisense strand to SEQ ID NO: 514065
gacuuuggaguuaaucacg

SEQ ID NO: 514067 - RNA, 19 nt, Artificial Sequence
  Description of Artificial Sequence: Synthetic oligonucleotide
  Sense strand starting at position 827 of SEQ ID NO: 317811
ggaagucucuggccacaug

SEQ ID NO: 514068 - RNA, 19 nt, Artificial Sequence
  Description of Artificial Sequence: Synthetic oligonucleotide
  Antisense strand to SEQ ID NO: 514067
cauguggccagagacuucc

SEQ ID NO: 514069 - RNA, 19 nt, Artificial Sequence
  Description of Artificial Sequence: Synthetic oligonucleotide
  Sense strand starting at position 853 of SEQ ID NO: 317811
caugcucgccucuaugaga

SEQ ID NO: 514070 - RNA, 19 nt, Artificial Sequence
  Description of Artificial Sequence: Synthetic oligonucleotide
  Antisense strand to SEQ ID NO: 514069
ucucauagaggcgagcaug

SEQ ID NO: 514071 - RNA, 19 nt, Artificial Sequence
  Description of Artificial Sequence: Synthetic oligonucleotide
  Sense strand starting at position 860 of SEQ ID NO: 317811
gccucuaugagaggacaga

SEQ ID NO: 514072 - RNA, 19 nt, Artificial Sequence
  Description of Artificial Sequence: Synthetic oligonucleotide
  Antisense strand to SEQ ID NO: 514071
ucuguccucucauagaggc

SEQ ID NO: 514073 - RNA, 19 nt, Artificial Sequence
  Description of Artificial Sequence: Synthetic oligonucleotide
  Sense strand starting at position 1009 of SEQ ID NO: 317811
ucacuugacucagcugaca

SEQ ID NO: 514074 - RNA, 19 nt, Artificial Sequence
  Description of Artificial Sequence: Synthetic oligonucleotide
  Antisense strand to SEQ ID NO: 514073
ugucagcugagucaaguga

SEQ ID NO: 514075 - RNA, 19 nt, Artificial Sequence
  Description of Artificial Sequence: Synthetic oligonucleotide
  Sense strand starting at position 1053 of SEQ ID NO: 317811
cacuuucuggaaggucuaa

SEQ ID NO: 514076 - RNA, 19 nt, Artificial Sequence
  Description of Artificial Sequence: Synthetic oligonucleotide
  Antisense strand to SEQ ID NO: 514075
uuagaccuuccagaaagug

SEQ ID NO: 514077 - RNA, 19 nt, Artificial Sequence
  Description of Artificial Sequence: Synthetic oligonucleotide
  Sense strand starting at position 1100 of SEQ ID NO: 317811
uuggucuguuugucaaaug

SEQ ID NO: 514078 - RNA, 19 nt, Artificial Sequence
  Description of Artificial Sequence: Synthetic oligonucleotide
  Antisense strand to SEQ ID NO: 514077
cauuugacaaacagaccaa

SEQ ID NO: 514079 - RNA, 19 nt, Artificial Sequence
  Description of Artificial Sequence: Synthetic oligonucleotide
  Sense strand starting at position 1259 of SEQ ID NO: 317811
gggccaauuccauagguuu

SEQ ID NO: 514080 - RNA, 19 nt, Artificial Sequence
  Description of Artificial Sequence: Synthetic oligonucleotide
  Antisense strand to SEQ ID NO: 514079
aaaccuauggaauuggccc

SEQ ID NO: 514081 - RNA, 19 nt, Artificial Sequence
  Description of Artificial Sequence: Synthetic oligonucleotide
  Sense strand starting at position 1354 of SEQ ID NO: 317811
ucucauuaucaauguguua

SEQ ID NO: 514082 - RNA, 19 nt, Artificial Sequence
  Description of Artificial Sequence: Synthetic oligonucleotide
  Antisense strand to SEQ ID NO: 514081
uaacacauugauaaugaga

SEQ ID NO: 514083 - RNA, 19 nt, Artificial Sequence
  Description of Artificial Sequence: Synthetic oligonucleotide
  Sense strand starting at position 1369 of SEQ ID NO: 317811
guuaguauuagugacggca

SEQ ID NO: 514084 - RNA, 19 nt, Artificial Sequence
  Description of Artificial Sequence: Synthetic oligonucleotide
  Antisense strand to SEQ ID NO: 514083
ugccgucacuaauacuaac

SEQ ID NO: 514085 - RNA, 19 nt, Artificial Sequence
  Description of Artificial Sequence: Synthetic oligonucleotide
  Sense strand starting at position 1405 of SEQ ID NO: 317811
auacuauuugcccguuuaa

SEQ ID NO: 514086 - RNA, 19 nt, Artificial Sequence
  Description of Artificial Sequence: Synthetic oligonucleotide
  Antisense strand to SEQ ID NO: 514085
uuaaacgggcaaauaguau

SEQ ID NO: 514087 - RNA, 19 nt, Artificial Sequence
  Description of Artificial Sequence: Synthetic oligonucleotide
  Sense strand starting at position 1438 of SEQ ID NO: 317811
uugggcuuaugagcaaaua

SEQ ID NO: 514088 - RNA, 19 nt, Artificial Sequence
  Description of Artificial Sequence: Synthetic oligonucleotide
  Antisense strand to SEQ ID NO: 514087
uauuugcucauaagcccaa

SEQ ID NO: 514089 - RNA, 19 nt, Artificial Sequence
  Description of Artificial Sequence: Synthetic oligonucleotide
  Sense strand starting at position 1558 of SEQ ID NO: 317811
uggauuagacucugugaau

SEQ ID NO: 514090 - RNA, 19 nt, Artificial Sequence
  Description of Artificial Sequence: Synthetic oligonucleotide
  Antisense strand to SEQ ID NO: 514089
auucacagagucuaaucca

SEQ ID NO: 514091 - RNA, 19 nt, Artificial Sequence
  Description of Artificial Sequence: Synthetic oligonucleotide
  Sense strand starting at position 1559 of SEQ ID NO: 317811
ggauuagacucugugaauu

SEQ ID NO: 514092 - RNA, 19 nt, Artificial Sequence
  Description of Artificial Sequence: Synthetic oligonucleotide
  Antisense strand to SEQ ID NO: 514091
aauucacagagucuaaucc

SEQ ID NO: 514093 - RNA, 19 nt, Artificial Sequence
  Description of Artificial Sequence: Synthetic oligonucleotide
  Sense strand starting at position 1597 of SEQ ID NO: 317811
aguuuaaaguugucccaaa

SEQ ID NO: 514094 - RNA, 19 nt, Artificial Sequence
  Description of Artificial Sequence: Synthetic oligonucleotide
  Antisense strand to SEQ ID NO: 514093
uuugggacaacuuuaaacu

SEQ ID NO: 514095 - RNA, 19 nt, Artificial Sequence
  Description of Artificial Sequence: Synthetic oligonucleotide
  Sense strand starting at position 1598 of SEQ ID NO: 317811
guuuaaaguugucccaaac

SEQ ID NO: 514096 - RNA, 19 nt, Artificial Sequence
  Description of Artificial Sequence: Synthetic oligonucleotide
  Antisense strand to SEQ ID NO: 514095
guuugggacaacuuuaaac

SEQ ID NO: 514097 - RNA, 19 nt, Artificial Sequence
  Description of Artificial Sequence: Synthetic oligonucleotide
  Sense strand starting at position 2256 of SEQ ID NO: 317811
ggugaaauugcacaucugu

SEQ ID NO: 514098 - RNA, 19 nt, Artificial Sequence
  Description of Artificial Sequence: Synthetic oligonucleotide
  Antisense strand to SEQ ID NO: 514097
acagaugugcaauuucacc

SEQ ID NO: 514099 - RNA, 19 nt, Artificial Sequence
  Description of Artificial Sequence: Synthetic oligonucleotide
  Sense strand starting at position 2279 of SEQ ID NO: 317811
ggauuuguuucucucuucu

SEQ ID NO: 514100 - RNA, 19 nt, Artificial Sequence
  Description of Artificial Sequence: Synthetic oligonucleotide
  Antisense strand to SEQ ID NO: 514099
agaagagagaaacaaaucc

SEQ ID NO: 514101 - RNA, 19 nt, Artificial Sequence
  Description of Artificial Sequence: Synthetic oligonucleotide
  Sense strand starting at position 2321 of SEQ ID NO: 317811
ccuggugagcucuggagga

SEQ ID NO: 514102 - RNA, 19 nt, Artificial Sequence
  Description of Artificial Sequence: Synthetic oligonucleotide
  Antisense strand to SEQ ID NO: 514101
uccuccagagcucaccagg

SEQ ID NO: 514103 - RNA, 19 nt, Artificial Sequence
  Description of Artificial Sequence: Synthetic oligonucleotide
  Sense strand starting at position 2325 of SEQ ID NO: 317811
gugagcucuggaggaugaa

SEQ ID NO: 514104 - RNA, 19 nt, Artificial Sequence
  Description of Artificial Sequence: Synthetic oligonucleotide
  Antisense strand to SEQ ID NO: 514103
uucauccuccagagcucac

SEQ ID NO: 514105 - RNA, 19 nt, Artificial Sequence
  Description of Artificial Sequence: Synthetic oligonucleotide
  Sense strand starting at position 2508 of SEQ ID NO: 317811
gcaguagauggcuagauca

SEQ ID NO: 514106 - RNA, 19 nt, Artificial Sequence
  Description of Artificial Sequence: Synthetic oligonucleotide
  Antisense strand to SEQ ID NO: 514105
ugaucuagccaucuacugc

SEQ ID NO: 514107 - RNA, 19 nt, Artificial Sequence
  Description of Artificial Sequence: Synthetic oligonucleotide
  Sense strand starting at position 2510 of SEQ ID NO: 317811
aguagauggcuagaucauc

SEQ ID NO: 514108 - RNA, 19 nt, Artificial Sequence
  Description of Artificial Sequence: Synthetic oligonucleotide
  Antisense strand to SEQ ID NO: 514107
gaugaucuagccaucuacu

SEQ ID NO: 514109 - RNA, 19 nt, Artificial Sequence
  Description of Artificial Sequence: Synthetic oligonucleotide
  Sense strand starting at position 2613 of SEQ ID NO: 317811
cgggaaggcugccuguaaa

SEQ ID NO: 514110 - RNA, 19 nt, Artificial Sequence
  Description of Artificial Sequence: Synthetic oligonucleotide
  Antisense strand to SEQ ID NO: 514109
uuuacaggcagccuucccg

SEQ ID NO: 514111 - RNA, 19 nt, Artificial Sequence
  Description of Artificial Sequence: Synthetic oligonucleotide
  Sense strand starting at position 2616 of SEQ ID NO: 317811
gaaggcugccuguaaauag

SEQ ID NO: 514112 - RNA, 19 nt, Artificial Sequence
  Description of Artificial Sequence: Synthetic oligonucleotide
  Antisense strand to SEQ ID NO: 514111
cuauuuacaggcagccuuc

SEQ ID NO: 514113 - RNA, 19 nt, Artificial Sequence
  Description of Artificial Sequence: Synthetic oligonucleotide
  Sense strand starting at position 2850 of SEQ ID NO: 317811
ucauucucugaaggaguuu

SEQ ID NO: 514114 - RNA, 19 nt, Artificial Sequence
  Description of Artificial Sequence: Synthetic oligonucleotide
  Antisense strand to SEQ ID NO: 514113
aaacuccuucagagaauga

SEQ ID NO: 514115 - RNA, 19 nt, Artificial Sequence
  Description of Artificial Sequence: Synthetic oligonucleotide
  Sense strand starting at position 2968 of SEQ ID NO: 317811
augggaaguuuccugauug

SEQ ID NO: 514116 - RNA, 19 nt, Artificial Sequence
  Description of Artificial Sequence: Synthetic oligonucleotide
  Antisense strand to SEQ ID NO: 514115
caaucaggaaacuucccau

SEQ ID NO: 514117 - RNA, 19 nt, Artificial Sequence
  Description of Artificial Sequence: Synthetic oligonucleotide
  Sense strand starting at position 3084 of SEQ ID NO: 317811
ucgguuuauuccuucucaa

SEQ ID NO: 514118 - RNA, 19 nt, Artificial Sequence
  Description of Artificial Sequence: Synthetic oligonucleotide
  Antisense strand to SEQ ID NO: 514117
uugagaaggaauaaaccga

SEQ ID NO: 514119 - RNA, 19 nt, Artificial Sequence
  Description of Artificial Sequence: Synthetic oligonucleotide
  Sense strand starting at position 3217 of SEQ ID NO: 317811
agagcauggaauuguagau

SEQ ID NO: 514120 - RNA, 19 nt, Artificial Sequence
  Description of Artificial Sequence: Synthetic oligonucleotide
  Antisense strand to SEQ ID NO: 514119
aucuacaauuccaugcucu

SEQ ID NO: 514121 - RNA, 19 nt, Artificial Sequence
  Description of Artificial Sequence: Synthetic oligonucleotide
  Sense strand starting at position 3639 of SEQ ID NO: 317811
acagaauugaagugugcga

SEQ ID NO: 514122 - RNA, 19 nt, Artificial Sequence
  Description of Artificial Sequence: Synthetic oligonucleotide
  Antisense strand to SEQ ID NO: 514121
ucgcacacuucaauucugu

SEQ ID NO: 514123 - RNA, 19 nt, Artificial Sequence
  Description of Artificial Sequence: Synthetic oligonucleotide
  Sense strand starting at position 8 of SEQ ID NO: 317812
ggugcagugaguuaugaac

SEQ ID NO: 514124 - RNA, 19 nt, Artificial Sequence
  Description of Artificial Sequence: Synthetic oligonucleotide
  Antisense strand to SEQ ID NO: 514123
guucauaacucacugcacc

SEQ ID NO: 514125 - RNA, 19 nt, Artificial Sequence
  Description of Artificial Sequence: Synthetic oligonucleotide
  Sense strand starting at position 219 of SEQ ID NO: 317812
auagcuaaauaguccgaaa

SEQ ID NO: 514126 - RNA, 19 nt, Artificial Sequence
  Description of Artificial Sequence: Synthetic oligonucleotide
  Antisense strand to SEQ ID NO: 514125
uuucggacuauuuagcuau

SEQ ID NO: 514127 - RNA, 19 nt, Artificial Sequence
  Description of Artificial Sequence: Synthetic oligonucleotide
  Sense strand starting at position 221 of SEQ ID NO: 317812
agcuaaauaguccgaaaua

SEQ ID NO: 514128 - RNA, 19 nt, Artificial Sequence
  Description of Artificial Sequence: Synthetic oligonucleotide
  Antisense strand to SEQ ID NO: 514127
uauuucggacuauuuagcu

SEQ ID NO: 514129 - RNA, 19 nt, Artificial Sequence
  Description of Artificial Sequence: Synthetic oligonucleotide
  Sense strand starting at position 230 of SEQ ID NO: 317812
guccgaaauaaauagcuga

SEQ ID NO: 514130 - RNA, 19 nt, Artificial Sequence
  Description of Artificial Sequence: Synthetic oligonucleotide
  Antisense strand to SEQ ID NO: 514129
ucagcuauuuauuucggac

SEQ ID NO: 514131 - RNA, 19 nt, Artificial Sequence
  Description of Artificial Sequence: Synthetic oligonucleotide
  Sense strand starting at position 260 of SEQ ID NO: 317812
ccaaaugaguuguuauaaa

SEQ ID NO: 514132 - RNA, 19 nt, Artificial Sequence
  Description of Artificial Sequence: Synthetic oligonucleotide
  Antisense strand to SEQ ID NO: 514131
uuuauaacaacucauuugg

SEQ ID NO: 514133 - RNA, 19 nt, Artificial Sequence
  Description of Artificial Sequence: Synthetic oligonucleotide
  Sense strand starting at position 312 of SEQ ID NO: 317812
ugaagcuucuuucuuaaag

SEQ ID NO: 514134 - RNA, 19 nt, Artificial Sequence
  Description of Artificial Sequence: Synthetic oligonucleotide
  Antisense strand to SEQ ID NO: 514133
cuuuaagaaagaagcuuca

SEQ ID NO: 514135 - RNA, 19 nt, Artificial Sequence
  Description of Artificial Sequence: Synthetic oligonucleotide
  Sense strand starting at position 500 of SEQ ID NO: 317812
gggcacugugaggauaagu

SEQ ID NO: 514136 - RNA, 19 nt, Artificial Sequence
  Description of Artificial Sequence: Synthetic oligonucleotide
  Antisense strand to SEQ ID NO: 514135
acuuauccucacagugccc

SEQ ID NO: 514137 - RNA, 19 nt, Artificial Sequence
  Description of Artificial Sequence: Synthetic oligonucleotide
  Sense strand starting at position 531 of SEQ ID NO: 317812
guuauaaagcuugaaccca

SEQ ID NO: 514138 - RNA, 19 nt, Artificial Sequence
  Description of Artificial Sequence: Synthetic oligonucleotide
  Antisense strand to SEQ ID NO: 514137
uggguucaagcuuuauaac

SEQ ID NO: 514139 - RNA, 19 nt, Artificial Sequence
  Description of Artificial Sequence: Synthetic oligonucleotide
  Sense strand starting at position 664 of SEQ ID NO: 317812
acuggaaauuacuuuguuu

SEQ ID NO: 514140 - RNA, 19 nt, Artificial Sequence
  Description of Artificial Sequence: Synthetic oligonucleotide
  Antisense strand to SEQ ID NO: 514139
aaacaaaguaauuuccagu

SEQ ID NO: 514141 - RNA, 19 nt, Artificial Sequence
  Description of Artificial Sequence: Synthetic oligonucleotide
  Sense strand starting at position 667 of SEQ ID NO: 317812
ggaaauuacuuuguuuccu

SEQ ID NO: 514142 - RNA, 19 nt, Artificial Sequence
  Description of Artificial Sequence: Synthetic oligonucleotide
  Antisense strand to SEQ ID NO: 514141
aggaaacaaaguaauuucc

SEQ ID NO: 514143 - RNA, 19 nt, Artificial Sequence
  Description of Artificial Sequence: Synthetic oligonucleotide
  Sense strand starting at position 993 of SEQ ID NO: 317812
ggauauaaaccuggguugu

SEQ ID NO: 514144 - RNA, 19 nt, Artificial Sequence
  Description of Artificial Sequence: Synthetic oligonucleotide
  Antisense strand to SEQ ID NO: 514143
acaacccagguuuauaucc

SEQ ID NO: 514145 - RNA, 19 nt, Artificial Sequence
  Description of Artificial Sequence: Synthetic oligonucleotide
  Sense strand starting at position 994 of SEQ ID NO: 317812
gauauaaaccuggguuguu

SEQ ID NO: 514146 - RNA, 19 nt, Artificial Sequence
  Description of Artificial Sequence: Synthetic oligonucleotide
  Antisense strand to SEQ ID NO: 514145
aacaacccagguuuauauc

SEQ ID NO: 514147 - RNA, 19 nt, Artificial Sequence
  Description of Artificial Sequence: Synthetic oligonucleotide
  Sense strand starting at position 995 of SEQ ID NO: 317812
auauaaaccuggguuguuu

SEQ ID NO: 514148 - RNA, 19 nt, Artificial Sequence
  Description of Artificial Sequence: Synthetic oligonucleotide
  Antisense strand to SEQ ID NO: 514147
aaacaacccagguuuauau

SEQ ID NO: 514149 - RNA, 19 nt, Artificial Sequence
  Description of Artificial Sequence: Synthetic oligonucleotide
  Sense strand starting at position 1126 of SEQ ID NO: 317812
gucauauagugaucuacuu

SEQ ID NO: 514150 - RNA, 19 nt, Artificial Sequence
  Description of Artificial Sequence: Synthetic oligonucleotide
  Antisense strand to SEQ ID NO: 514149
aaguagaucacuauaugac

SEQ ID NO: 514151 - RNA, 19 nt, Artificial Sequence
  Description of Artificial Sequence: Synthetic oligonucleotide
  Sense strand starting at position 1167 of SEQ ID NO: 317812
ggaugagugucuucuugag

SEQ ID NO: 514152 - RNA, 19 nt, Artificial Sequence
  Description of Artificial Sequence: Synthetic oligonucleotide
  Antisense strand to SEQ ID NO: 514151
cucaagaagacacucaucc

SEQ ID NO: 514153 - RNA, 19 nt, Artificial Sequence
  Description of Artificial Sequence: Synthetic oligonucleotide
  Sense strand starting at position 1171 of SEQ ID NO: 317812
gagugucuucuugaguaac

SEQ ID NO: 514154 - RNA, 19 nt, Artificial Sequence
  Description of Artificial Sequence: Synthetic oligonucleotide
  Antisense strand to SEQ ID NO: 514153
guuacucaagaagacacuc

SEQ ID NO: 514155 - RNA, 19 nt, Artificial Sequence
  Description of Artificial Sequence: Synthetic oligonucleotide
  Sense strand starting at position 1174 of SEQ ID NO: 317812
ugucuucuugaguaacuuc

SEQ ID NO: 514156 - RNA, 19 nt, Artificial Sequence
  Description of Artificial Sequence: Synthetic oligonucleotide
  Antisense strand to SEQ ID NO: 514155
gaaguuacucaagaagaca

SEQ ID NO: 514157 - RNA, 19 nt, Artificial Sequence
  Description of Artificial Sequence: Synthetic oligonucleotide
  Sense strand starting at position 1305 of SEQ ID NO: 317812
aaggucucuccguacuaca

SEQ ID NO: 514158 - RNA, 19 nt, Artificial Sequence
  Description of Artificial Sequence: Synthetic oligonucleotide
  Antisense strand to SEQ ID NO: 514157
uguaguacggagagaccuu

SEQ ID NO: 514159 - RNA, 19 nt, Artificial Sequence
  Description of Artificial Sequence: Synthetic oligonucleotide
  Sense strand starting at position 2119 of SEQ ID NO: 317812
uugggaugguuucucuuaa

SEQ ID NO: 514160 - RNA, 19 nt, Artificial Sequence
  Description of Artificial Sequence: Synthetic oligonucleotide
  Antisense strand to SEQ ID NO: 514159
uuaagagaaaccaucccaa

SEQ ID NO: 514161 - RNA, 19 nt, Artificial Sequence
  Description of Artificial Sequence: Synthetic oligonucleotide
  Sense strand starting at position 2120 of SEQ ID NO: 317812
ugggaugguuucucuuaag

SEQ ID NO: 514162 - RNA, 19 nt, Artificial Sequence
  Description of Artificial Sequence: Synthetic oligonucleotide
  Antisense strand to SEQ ID NO: 514161
cuuaagagaaaccauccca

SEQ ID NO: 514163 - RNA, 19 nt, Artificial Sequence
  Description of Artificial Sequence: Synthetic oligonucleotide
  Sense strand starting at position 2229 of SEQ ID NO: 317812
ucugaucacgcucaaguuu

SEQ ID NO: 514164 - RNA, 19 nt, Artificial Sequence
  Description of Artificial Sequence: Synthetic oligonucleotide
  Antisense strand to SEQ ID NO: 514163
aaacuugagcgugaucaga

SEQ ID NO: 514165 - RNA, 19 nt, Artificial Sequence
  Description of Artificial Sequence: Synthetic oligonucleotide
  Sense strand starting at position 2292 of SEQ ID NO: 317812
aauguaaggcaguauuacu

SEQ ID NO: 514166 - RNA, 19 nt, Artificial Sequence
  Description of Artificial Sequence: Synthetic oligonucleotide
  Antisense strand to SEQ ID NO: 514165
aguaauacugccuuacauu

SEQ ID NO: 514167 - RNA, 19 nt, Artificial Sequence
  Description of Artificial Sequence: Synthetic oligonucleotide
  Sense strand starting at position 2331 of SEQ ID NO: 317812
acagaaguaugauuggcau

SEQ ID NO: 514168 - RNA, 19 nt, Artificial Sequence
  Description of Artificial Sequence: Synthetic oligonucleotide
  Antisense strand to SEQ ID NO: 514167
augccaaucauacuucugu

SEQ ID NO: 514169 - RNA, 19 nt, Artificial Sequence
  Description of Artificial Sequence: Synthetic oligonucleotide
  Sense strand starting at position 2366 of SEQ ID NO: 317812
cagacacaucgcuguauuu

SEQ ID NO: 514170 - RNA, 19 nt, Artificial Sequence
  Description of Artificial Sequence: Synthetic oligonucleotide
  Antisense strand to SEQ ID NO: 514169
aaauacagcgaugugucug

SEQ ID NO: 514171 - RNA, 19 nt, Artificial Sequence
  Description of Artificial Sequence: Synthetic oligonucleotide
  Sense strand starting at position 2406 of SEQ ID NO: 317812
cuuagaucucuaggccuua

SEQ ID NO: 514172 - RNA, 19 nt, Artificial Sequence
  Description of Artificial Sequence: Synthetic oligonucleotide
  Antisense strand to SEQ ID NO: 514171
uaaggccuagagaucuaag

SEQ ID NO: 514173 - RNA, 19 nt, Artificial Sequence
  Description of Artificial Sequence: Synthetic oligonucleotide
  Sense strand starting at position 2515 of SEQ ID NO: 317812
cugaaauccuuguuaaaug

SEQ ID NO: 514174 - RNA, 19 nt, Artificial Sequence
  Description of Artificial Sequence: Synthetic oligonucleotide
  Antisense strand to SEQ ID NO: 514173
cauuuaacaaggauuucag

SEQ ID NO: 514175 - RNA, 19 nt, Artificial Sequence
  Description of Artificial Sequence: Synthetic oligonucleotide
  Sense strand starting at position 2729 of SEQ ID NO: 317812
auguuaaagcuacaagcaa

SEQ ID NO: 514176 - RNA, 19 nt, Artificial Sequence
  Description of Artificial Sequence: Synthetic oligonucleotide
  Antisense strand to SEQ ID NO: 514175
uugcuuguagcuuuaacau

SEQ ID NO: 514177 - RNA, 19 nt, Artificial Sequence
  Description of Artificial Sequence: Synthetic oligonucleotide
  Sense strand starting at position 2760 of SEQ ID NO: 317812
uuugauccaucugcugaaa

SEQ ID NO: 514178 - RNA, 19 nt, Artificial Sequence
  Description of Artificial Sequence: Synthetic oligonucleotide
  Antisense strand to SEQ ID NO: 514177
uuucagcagauggaucaaa

SEQ ID NO: 514179 - RNA, 19 nt, Artificial Sequence
  Description of Artificial Sequence: Synthetic oligonucleotide
  Sense strand starting at position 2932 of SEQ ID NO: 317812
guguaauugcuuagcgggu

SEQ ID NO: 514180 - RNA, 19 nt, Artificial Sequence
  Description of Artificial Sequence: Synthetic oligonucleotide
  Antisense strand to SEQ ID NO: 514179
acccgcuaagcaauuacac

SEQ ID NO: 514181 - RNA, 19 nt, Artificial Sequence
  Description of Artificial Sequence: Synthetic oligonucleotide
  Sense strand starting at position 3002 of SEQ ID NO: 317812
cagugaagaguuugacaug

SEQ ID NO: 514182 - RNA, 19 nt, Artificial Sequence
  Description of Artificial Sequence: Synthetic oligonucleotide
  Antisense strand to SEQ ID NO: 514181
caugucaaacucuucacug

SEQ ID NO: 514183 - RNA, 19 nt, Artificial Sequence
  Description of Artificial Sequence: Synthetic oligonucleotide
  Sense strand starting at position 3026 of SEQ ID NO: 317812
ggccaugccacuugagaga

SEQ ID NO: 514184 - RNA, 19 nt, Artificial Sequence
  Description of Artificial Sequence: Synthetic oligonucleotide
  Antisense strand to SEQ ID NO: 514183
ucucucaaguggcauggcc

SEQ ID NO: 514185 - RNA, 19 nt, Artificial Sequence
  Description of Artificial Sequence: Synthetic oligonucleotide
  Sense strand starting at position 3589 of SEQ ID NO: 317812
gaaauugaugguugcuagu

SEQ ID NO: 514186 - RNA, 19 nt, Artificial Sequence
  Description of Artificial Sequence: Synthetic oligonucleotide
  Antisense strand to SEQ ID NO: 514185
acuagcaaccaucaauuuc

SEQ ID NO: 514187 - RNA, 19 nt, Artificial Sequence
  Description of Artificial Sequence: Synthetic oligonucleotide
  Sense strand starting at position 3591 of SEQ ID NO: 317812
aauugaugguugcuaguca

SEQ ID NO: 514188 - RNA, 19 nt, Artificial Sequence
  Description of Artificial Sequence: Synthetic oligonucleotide
  Antisense strand to SEQ ID NO: 514187
ugacuagcaaccaucaauu

SEQ ID NO: 514189 - RNA, 19 nt, Artificial Sequence
  Description of Artificial Sequence: Synthetic oligonucleotide
  Sense strand starting at position 3595 of SEQ ID NO: 317812
gaugguugcuagucaugaa

SEQ ID NO: 514190 - RNA, 19 nt, Artificial Sequence
  Description of Artificial Sequence: Synthetic oligonucleotide
  Antisense strand to SEQ ID NO: 514189
uucaugacuagcaaccauc

SEQ ID NO: 514191 - RNA, 19 nt, Artificial Sequence
  Description of Artificial Sequence: Synthetic oligonucleotide
  Sense strand starting at position 3596 of SEQ ID NO: 317812
augguugcuagucaugaag

SEQ ID NO: 514192 - RNA, 19 nt, Artificial Sequence
  Description of Artificial Sequence: Synthetic oligonucleotide
  Antisense strand to SEQ ID NO: 514191
cuucaugacuagcaaccau

SEQ ID NO: 514193 - RNA, 19 nt, Artificial Sequence
  Description of Artificial Sequence: Synthetic oligonucleotide
  Sense strand starting at position 3809 of SEQ ID NO: 317812
aggaaacccucuccaaguu

SEQ ID NO: 514194 - RNA, 19 nt, Artificial Sequence
  Description of Artificial Sequence: Synthetic oligonucleotide
  Antisense strand to SEQ ID NO: 514193
aacuuggagaggguuuccu

SEQ ID NO: 514195 - RNA, 19 nt, Artificial Sequence
  Description of Artificial Sequence: Synthetic oligonucleotide
  Sense strand starting at position 3960 of SEQ ID NO: 317812
aucucagagcuuuguaaug

SEQ ID NO: 514196 - RNA, 19 nt, Artificial Sequence
  Description of Artificial Sequence: Synthetic oligonucleotide
  Antisense strand to SEQ ID NO: 514195
cauuacaaagcucugagau

SEQ ID NO: 514197 - RNA, 19 nt, Artificial Sequence
  Description of Artificial Sequence: Synthetic oligonucleotide
  Sense strand starting at position 3966 of SEQ ID NO: 317812
gagcuuuguaaugguagga

SEQ ID NO: 514198 - RNA, 19 nt, Artificial Sequence
  Description of Artificial Sequence: Synthetic oligonucleotide
  Antisense strand to SEQ ID NO: 514197
uccuaccauuacaaagcuc

SEQ ID NO: 514199 - RNA, 19 nt, Artificial Sequence
  Description of Artificial Sequence: Synthetic oligonucleotide
  Sense strand starting at position 3981 of SEQ ID NO: 317812
aggaguacuugggcugaua

SEQ ID NO: 514200 - RNA, 19 nt, Artificial Sequence
  Description of Artificial Sequence: Synthetic oligonucleotide
  Antisense strand to SEQ ID NO: 514199
uaucagcccaaguacuccu

SEQ ID NO: 514201 - RNA, 19 nt, Artificial Sequence
  Description of Artificial Sequence: Synthetic oligonucleotide
  Sense strand starting at position 3983 of SEQ ID NO: 317812
gaguacuugggcugauaug

SEQ ID NO: 514202 - RNA, 19 nt, Artificial Sequence
  Description of Artificial Sequence: Synthetic oligonucleotide
  Antisense strand to SEQ ID NO: 514201
cauaucagcccaaguacuc

SEQ ID NO: 514203 - RNA, 19 nt, Artificial Sequence
  Description of Artificial Sequence: Synthetic oligonucleotide
  Sense strand starting at position 20 of SEQ ID NO: 317813
guuugauacaaauggaguc

SEQ ID NO: 514204 - RNA, 19 nt, Artificial Sequence
  Description of Artificial Sequence: Synthetic oligonucleotide
  Antisense strand to SEQ ID NO: 514203
gacuccauuuguaucaaac

SEQ ID NO: 514205 - RNA, 19 nt, Artificial Sequence
  Description of Artificial Sequence: Synthetic oligonucleotide
  Sense strand starting at position 419 of SEQ ID NO: 317813
uucugaagcguuccgucaa

SEQ ID NO: 514206 - RNA, 19 nt, Artificial Sequence
  Description of Artificial Sequence: Synthetic oligonucleotide
  Antisense strand to SEQ ID NO: 514205
uugacggaacgcuucagaa

SEQ ID NO: 514207 - RNA, 19 nt, Artificial Sequence
  Description of Artificial Sequence: Synthetic oligonucleotide
  Sense strand starting at position 465 of SEQ ID NO: 317813
aggaacucagcuugguuaa

SEQ ID NO: 514208 - RNA, 19 nt, Artificial Sequence
  Description of Artificial Sequence: Synthetic oligonucleotide
  Antisense strand to SEQ ID NO: 514207
uuaaccaagcugaguuccu

SEQ ID NO: 514209 - RNA, 19 nt, Artificial Sequence
  Description of Artificial Sequence: Synthetic oligonucleotide
  Sense strand starting at position 519 of SEQ ID NO: 317813
augaccgagcguuauuauu

SEQ ID NO: 514210 - RNA, 19 nt, Artificial Sequence
  Description of Artificial Sequence: Synthetic oligonucleotide
  Antisense strand to SEQ ID NO: 514209
aauaauaacgcucggucau

SEQ ID NO: 514211 - RNA, 19 nt, Artificial Sequence
  Description of Artificial Sequence: Synthetic oligonucleotide
  Sense strand starting at position 855 of SEQ ID NO: 317813
gguuccuucgcauacauaa

SEQ ID NO: 514212 - RNA, 19 nt, Artificial Sequence
  Description of Artificial Sequence: Synthetic oligonucleotide
  Antisense strand to SEQ ID NO: 514211
uuauguaugcgaaggaacc

SEQ ID NO: 514213 - RNA, 19 nt, Artificial Sequence
  Description of Artificial Sequence: Synthetic oligonucleotide
  Sense strand starting at position 925 of SEQ ID NO: 317813
augcuagaguagguaucuu

SEQ ID NO: 514214 - RNA, 19 nt, Artificial Sequence
  Description of Artificial Sequence: Synthetic oligonucleotide
  Antisense strand to SEQ ID NO: 514213
aagauaccuacucuagcau

SEQ ID NO: 514215 - RNA, 19 nt, Artificial Sequence
  Description of Artificial Sequence: Synthetic oligonucleotide
  Sense strand starting at position 1003 of SEQ ID NO: 317813
ccuguaguucuugacaacu

SEQ ID NO: 514216 - RNA, 19 nt, Artificial Sequence
  Description of Artificial Sequence: Synthetic oligonucleotide
  Antisense strand to SEQ ID NO: 514215
aguugucaagaacuacagg

SEQ ID NO: 514217 - RNA, 19 nt, Artificial Sequence
  Description of Artificial Sequence: Synthetic oligonucleotide
  Sense strand starting at position 1198 of SEQ ID NO: 317813
uuuccuaaggaucggauaa

SEQ ID NO: 514218 - RNA, 19 nt, Artificial Sequence
  Description of Artificial Sequence: Synthetic oligonucleotide
  Antisense strand to SEQ ID NO: 514217
uuauccgauccuuaggaaa

SEQ ID NO: 514219 - RNA, 19 nt, Artificial Sequence
  Description of Artificial Sequence: Synthetic oligonucleotide
  Sense strand starting at position 1211 of SEQ ID NO: 317813
ggauaagccuaucuggacu

SEQ ID NO: 514220 - RNA, 19 nt, Artificial Sequence
  Description of Artificial Sequence: Synthetic oligonucleotide
  Antisense strand to SEQ ID NO: 514219
aguccagauaggcuuaucc

SEQ ID NO: 514221 - RNA, 19 nt, Artificial Sequence
  Description of Artificial Sequence: Synthetic oligonucleotide
  Sense strand starting at position 1232 of SEQ ID NO: 317813
uuaggcaaccagggauaau

SEQ ID NO: 514222 - RNA, 19 nt, Artificial Sequence
  Description of Artificial Sequence: Synthetic oligonucleotide
  Antisense strand to SEQ ID NO: 514221
auuaucccugguugccuaa

SEQ ID NO: 514223 - RNA, 19 nt, Artificial Sequence
  Description of Artificial Sequence: Synthetic oligonucleotide
  Sense strand starting at position 1513 of SEQ ID NO: 317813
agacuugaucuccgacaac

SEQ ID NO: 514224 - RNA, 19 nt, Artificial Sequence
  Description of Artificial Sequence: Synthetic oligonucleotide
  Antisense strand to SEQ ID NO: 514223
guugucggagaucaagucu

SEQ ID NO: 514225 - RNA, 19 nt, Artificial Sequence
  Description of Artificial Sequence: Synthetic oligonucleotide
  Sense strand starting at position 1920 of SEQ ID NO: 317813
cgagaaaugucgccaaacu

SEQ ID NO: 514226 - RNA, 19 nt, Artificial Sequence
  Description of Artificial Sequence: Synthetic oligonucleotide
  Antisense strand to SEQ ID NO: 514225
aguuuggcgacauuucucg

SEQ ID NO: 514227 - RNA, 19 nt, Artificial Sequence
  Description of Artificial Sequence: Synthetic oligonucleotide
  Sense strand starting at position 1921 of SEQ ID NO: 317813
gagaaaugucgccaaacug

SEQ ID NO: 514228 - RNA, 19 nt, Artificial Sequence
  Description of Artificial Sequence: Synthetic oligonucleotide
  Antisense strand to SEQ ID NO: 514227
caguuuggcgacauuucuc

SEQ ID NO: 514229 - RNA, 19 nt, Artificial Sequence
  Description of Artificial Sequence: Synthetic oligonucleotide
  Sense strand starting at position 2441 of SEQ ID NO: 317813
caaagaggcugucucagaa

SEQ ID NO: 514230 - RNA, 19 nt, Artificial Sequence
  Description of Artificial Sequence: Synthetic oligonucleotide
  Antisense strand to SEQ ID NO: 514229
uucugagacagccucuuug

SEQ ID NO: 514231 - RNA, 19 nt, Artificial Sequence
  Description of Artificial Sequence: Synthetic oligonucleotide
  Sense strand starting at position 2595 of SEQ ID NO: 317813
cuggaaguuucccuaacga

SEQ ID NO: 514232 - RNA, 19 nt, Artificial Sequence
  Description of Artificial Sequence: Synthetic oligonucleotide
  Antisense strand to SEQ ID NO: 514231
ucguuagggaaacuuccag

SEQ ID NO: 514233 - RNA, 19 nt, Artificial Sequence
  Description of Artificial Sequence: Synthetic oligonucleotide
  Sense strand starting at position 2668 of SEQ ID NO: 317813
augucucugagcuagugau

SEQ ID NO: 514234 - RNA, 19 nt, Artificial Sequence
  Description of Artificial Sequence: Synthetic oligonucleotide
  Antisense strand to SEQ ID NO: 514233
aucacuagcucagagacau

SEQ ID NO: 514235 - RNA, 19 nt, Artificial Sequence
  Description of Artificial Sequence: Synthetic oligonucleotide
  Sense strand starting at position 2698 of SEQ ID NO: 317813
gggcuugcuuaccucaaau

SEQ ID NO: 514236 - RNA, 19 nt, Artificial Sequence
  Description of Artificial Sequence: Synthetic oligonucleotide
  Antisense strand to SEQ ID NO: 514235
auuugagguaagcaagccc

SEQ ID NO: 514237 - RNA, 19 nt, Artificial Sequence
  Description of Artificial Sequence: Synthetic oligonucleotide
  Sense strand starting at position 2757 of SEQ ID NO: 317813
cguguaaguauguaacaug

SEQ ID NO: 514238 - RNA, 19 nt, Artificial Sequence
  Description of Artificial Sequence: Synthetic oligonucleotide
  Antisense strand to SEQ ID NO: 514237
cauguuacauacuuacacg

SEQ ID NO: 514239 - RNA, 19 nt, Artificial Sequence
  Description of Artificial Sequence: Synthetic oligonucleotide
  Sense strand starting at position 2870 of SEQ ID NO: 317813
ccaagaauagggugucaaa

SEQ ID NO: 514240 - RNA, 19 nt, Artificial Sequence
  Description of Artificial Sequence: Synthetic oligonucleotide
  Antisense strand to SEQ ID NO: 514239
uuugacacccuauucuugg

SEQ ID NO: 514241 - RNA, 19 nt, Artificial Sequence
  Description of Artificial Sequence: Synthetic oligonucleotide
  Sense strand starting at position 3017 of SEQ ID NO: 317813
aaucaaauuugggagggua

SEQ ID NO: 514242 - RNA, 19 nt, Artificial Sequence
  Description of Artificial Sequence: Synthetic oligonucleotide
  Antisense strand to SEQ ID NO: 514241
uacccucccaaauuugauu

SEQ ID NO: 514243 - RNA, 19 nt, Artificial Sequence
  Description of Artificial Sequence: Synthetic oligonucleotide
  Sense strand starting at position 3074 of SEQ ID NO: 317813
ggagaccuguuauccuguu

SEQ ID NO: 514244 - RNA, 19 nt, Artificial Sequence
  Description of Artificial Sequence: Synthetic oligonucleotide
  Antisense strand to SEQ ID NO: 514243
aacaggauaacaggucucc

SEQ ID NO: 514245 - RNA, 19 nt, Artificial Sequence
  Description of Artificial Sequence: Synthetic oligonucleotide
  Sense strand starting at position 3075 of SEQ ID NO: 317813
gagaccuguuauccuguua

SEQ ID NO: 514246 - RNA, 19 nt, Artificial Sequence
  Description of Artificial Sequence: Synthetic oligonucleotide
  Antisense strand to SEQ ID NO: 514245
uaacaggauaacaggucuc

SEQ ID NO: 514247 - RNA, 19 nt, Artificial Sequence
  Description of Artificial Sequence: Synthetic oligonucleotide
  Sense strand starting at position 3109 of SEQ ID NO: 317813
cggaaauaccuuuagugau

SEQ ID NO: 514248 - RNA, 19 nt, Artificial Sequence
  Description of Artificial Sequence: Synthetic oligonucleotide
  Antisense strand to SEQ ID NO: 514247
aucacuaaagguauuuccg

SEQ ID NO: 514249 - RNA, 19 nt, Artificial Sequence
  Description of Artificial Sequence: Synthetic oligonucleotide
  Sense strand starting at position 3178 of SEQ ID NO: 317813
uagauaaaucucggagauu

SEQ ID NO: 514250 - RNA, 19 nt, Artificial Sequence
  Description of Artificial Sequence: Synthetic oligonucleotide
  Antisense strand to SEQ ID NO: 514249
aaucuccgagauuuaucua

SEQ ID NO: 514251 - RNA, 19 nt, Artificial Sequence
  Description of Artificial Sequence: Synthetic oligonucleotide
  Sense strand starting at position 3281 of SEQ ID NO: 317813
aggguaaacucuuuaugcu

SEQ ID NO: 514252 - RNA, 19 nt, Artificial Sequence
  Description of Artificial Sequence: Synthetic oligonucleotide
  Antisense strand to SEQ ID NO: 514251
agcauaaagaguuuacccu

SEQ ID NO: 514253 - RNA, 19 nt, Artificial Sequence
  Description of Artificial Sequence: Synthetic oligonucleotide
  Sense strand starting at position 3282 of SEQ ID NO: 317813
ggguaaacucuuuaugcua

SEQ ID NO: 514254 - RNA, 19 nt, Artificial Sequence
  Description of Artificial Sequence: Synthetic oligonucleotide
  Antisense strand to SEQ ID NO: 514253
uagcauaaagaguuuaccc

SEQ ID NO: 514255 - RNA, 19 nt, Artificial Sequence
  Description of Artificial Sequence: Synthetic oligonucleotide
  Sense strand starting at position 3289 of SEQ ID NO: 317813
cucuuuaugcuacagaaug

SEQ ID NO: 514256 - RNA, 19 nt, Artificial Sequence
  Description of Artificial Sequence: Synthetic oligonucleotide
  Antisense strand to SEQ ID NO: 514255
cauucuguagcauaaagag

SEQ ID NO: 514257 - RNA, 19 nt, Artificial Sequence
  Description of Artificial Sequence: Synthetic oligonucleotide
  Sense strand starting at position 3368 of SEQ ID NO: 317813
cuuacucauccuugaaagg

SEQ ID NO: 514258 - RNA, 19 nt, Artificial Sequence
  Description of Artificial Sequence: Synthetic oligonucleotide
  Antisense strand to SEQ ID NO: 514257
ccuuucaaggaugaguaag

SEQ ID NO: 514259 - RNA, 19 nt, Artificial Sequence
  Description of Artificial Sequence: Synthetic oligonucleotide
  Sense strand starting at position 3446 of SEQ ID NO: 317813
acuccaguuagaugugaag

SEQ ID NO: 514260 - RNA, 19 nt, Artificial Sequence
  Description of Artificial Sequence: Synthetic oligonucleotide
  Antisense strand to SEQ ID NO: 514259
cuucacaucuaacuggagu

SEQ ID NO: 514261 - RNA, 19 nt, Artificial Sequence
  Description of Artificial Sequence: Synthetic oligonucleotide
  Sense strand starting at position 3448 of SEQ ID NO: 317813
uccaguuagaugugaaguc

SEQ ID NO: 514262 - RNA, 19 nt, Artificial Sequence
  Description of Artificial Sequence: Synthetic oligonucleotide
  Antisense strand to SEQ ID NO: 514261
gacuucacaucuaacugga

SEQ ID NO: 514263 - RNA, 19 nt, Artificial Sequence
  Description of Artificial Sequence: Synthetic oligonucleotide
  Sense strand starting at position 3466 of SEQ ID NO: 317813
ccucaaauaguggaguauu

SEQ ID NO: 514264 - RNA, 19 nt, Artificial Sequence
  Description of Artificial Sequence: Synthetic oligonucleotide
  Antisense strand to SEQ ID NO: 514263
aauacuccacuauuugagg

SEQ ID NO: 514265 - RNA, 19 nt, Artificial Sequence
  Description of Artificial Sequence: Synthetic oligonucleotide
  Sense strand starting at position 3523 of SEQ ID NO: 317813
gugaaauguauugguucua

SEQ ID NO: 514266 - RNA, 19 nt, Artificial Sequence
  Description of Artificial Sequence: Synthetic oligonucleotide
  Antisense strand to SEQ ID NO: 514265
uagaaccaauacauuucac

SEQ ID NO: 514267 - RNA, 19 nt, Artificial Sequence
  Description of Artificial Sequence: Synthetic oligonucleotide
  Sense strand starting at position 3565 of SEQ ID NO: 317813
aagggaaucuauuagauag

SEQ ID NO: 514268 - RNA, 19 nt, Artificial Sequence
  Description of Artificial Sequence: Synthetic oligonucleotide
  Antisense strand to SEQ ID NO: 514267
cuaucuaauagauucccuu

SEQ ID NO: 514269 - RNA, 19 nt, Artificial Sequence
  Description of Artificial Sequence: Synthetic oligonucleotide
  Sense strand starting at position 3567 of SEQ ID NO: 317813
gggaaucuauuagauagaa

SEQ ID NO: 514270 - RNA, 19 nt, Artificial Sequence
  Description of Artificial Sequence: Synthetic oligonucleotide
  Antisense strand to SEQ ID NO: 514269
uucuaucuaauagauuccc

SEQ ID NO: 514271 - RNA, 19 nt, Artificial Sequence
  Description of Artificial Sequence: Synthetic oligonucleotide
  Sense strand starting at position 3580 of SEQ ID NO: 317813
auagaauguugagcugacu

SEQ ID NO: 514272 - RNA, 19 nt, Artificial Sequence
  Description of Artificial Sequence: Synthetic oligonucleotide
  Antisense strand to SEQ ID NO: 514271
agucagcucaacauucuau

SEQ ID NO: 514273 - RNA, 19 nt, Artificial Sequence
  Description of Artificial Sequence: Synthetic oligonucleotide
  Sense strand starting at position 3596 of SEQ ID NO: 317813
acuggucugggcgauaaua

SEQ ID NO: 514274 - RNA, 19 nt, Artificial Sequence
  Description of Artificial Sequence: Synthetic oligonucleotide
  Antisense strand to SEQ ID NO: 514273
uauuaucgcccagaccagu

SEQ ID NO: 514275 - RNA, 19 nt, Artificial Sequence
  Description of Artificial Sequence: Synthetic oligonucleotide
  Sense strand starting at position 3598 of SEQ ID NO: 317813
uggucugggcgauaauaca

SEQ ID NO: 514276 - RNA, 19 nt, Artificial Sequence
  Description of Artificial Sequence: Synthetic oligonucleotide
  Antisense strand to SEQ ID NO: 514275
uguauuaucgcccagacca

SEQ ID NO: 514277 - RNA, 19 nt, Artificial Sequence
  Description of Artificial Sequence: Synthetic oligonucleotide
  Sense strand starting at position 3630 of SEQ ID NO: 317813
cucaaauugcagcauauga

SEQ ID NO: 514278 - RNA, 19 nt, Artificial Sequence
  Description of Artificial Sequence: Synthetic oligonucleotide
  Antisense strand to SEQ ID NO: 514277
ucauaugcugcaauuugag

SEQ ID NO: 514279 - RNA, 19 nt, Artificial Sequence
  Description of Artificial Sequence: Synthetic oligonucleotide
  Sense strand starting at position 3640 of SEQ ID NO: 317813
agcauaugagaauguaaau

SEQ ID NO: 514280 - RNA, 19 nt, Artificial Sequence
  Description of Artificial Sequence: Synthetic oligonucleotide
  Antisense strand to SEQ ID NO: 514279
auuuacauucucauaugcu

SEQ ID NO: 514281 - RNA, 19 nt, Artificial Sequence
  Description of Artificial Sequence: Synthetic oligonucleotide
  Sense strand starting at position 3840 of SEQ ID NO: 317813
acuguuacccaauaguaga

SEQ ID NO: 514282 - RNA, 19 nt, Artificial Sequence
  Description of Artificial Sequence: Synthetic oligonucleotide
  Antisense strand to SEQ ID NO: 514281
ucuacuauuggguaacagu

SEQ ID NO: 514283 - RNA, 19 nt, Artificial Sequence
  Description of Artificial Sequence: Synthetic oligonucleotide
  Sense strand starting at position 315 of SEQ ID NO: 317814
aaaucuuacggccaaaguu

SEQ ID NO: 514284 - RNA, 19 nt, Artificial Sequence
  Description of Artificial Sequence: Synthetic oligonucleotide
  Antisense strand to SEQ ID NO: 514283
aacuuuggccguaagauuu

SEQ ID NO: 514285 - RNA, 19 nt, Artificial Sequence
  Description of Artificial Sequence: Synthetic oligonucleotide
  Sense strand starting at position 323 of SEQ ID NO: 317814
cggccaaaguuguaaugaa

SEQ ID NO: 514286 - RNA, 19 nt, Artificial Sequence
  Description of Artificial Sequence: Synthetic oligonucleotide
  Antisense strand to SEQ ID NO: 514285
uucauuacaacuuuggccg

SEQ ID NO: 514287 - RNA, 19 nt, Artificial Sequence
  Description of Artificial Sequence: Synthetic oligonucleotide
  Sense strand starting at position 383 of SEQ ID NO: 317814
guaugucuccaccaggaca

SEQ ID NO: 514288 - RNA, 19 nt, Artificial Sequence
  Description of Artificial Sequence: Synthetic oligonucleotide
  Antisense strand to SEQ ID NO: 514287
uguccugguggagacauac

SEQ ID NO: 514289 - RNA, 19 nt, Artificial Sequence
  Description of Artificial Sequence: Synthetic oligonucleotide
  Sense strand starting at position 428 of SEQ ID NO: 317814
ggugcagggcuguguauuu

SEQ ID NO: 514290 - RNA, 19 nt, Artificial Sequence
  Description of Artificial Sequence: Synthetic oligonucleotide
  Antisense strand to SEQ ID NO: 514289
aaauacacagcccugcacc

SEQ ID NO: 514291 - RNA, 19 nt, Artificial Sequence
  Description of Artificial Sequence: Synthetic oligonucleotide
  Sense strand starting at position 453 of SEQ ID NO: 317814
gaaugugcacuuggagaca

SEQ ID NO: 514292 - RNA, 19 nt, Artificial Sequence
  Description of Artificial Sequence: Synthetic oligonucleotide
  Antisense strand to SEQ ID NO: 514291
ugucuccaagugcacauuc

SEQ ID NO: 514293 - RNA, 19 nt, Artificial Sequence
  Description of Artificial Sequence: Synthetic oligonucleotide
  Sense strand starting at position 476 of SEQ ID NO: 317814
aggcggagcuguguuaaga

SEQ ID NO: 514294 - RNA, 19 nt, Artificial Sequence
  Description of Artificial Sequence: Synthetic oligonucleotide
  Antisense strand to SEQ ID NO: 514293
ucuuaacacagcuccgccu

SEQ ID NO: 514295 - RNA, 19 nt, Artificial Sequence
  Description of Artificial Sequence: Synthetic oligonucleotide
  Sense strand starting at position 484 of SEQ ID NO: 317814
cuguguuaagagugcucau

SEQ ID NO: 514296 - RNA, 19 nt, Artificial Sequence
  Description of Artificial Sequence: Synthetic oligonucleotide
  Antisense strand to SEQ ID NO: 514295
augagcacucuuaacacag

SEQ ID NO: 514297 - RNA, 19 nt, Artificial Sequence
  Description of Artificial Sequence: Synthetic oligonucleotide
  Sense strand starting at position 487 of SEQ ID NO: 317814
uguuaagagugcucauucu

SEQ ID NO: 514298 - RNA, 19 nt, Artificial Sequence
  Description of Artificial Sequence: Synthetic oligonucleotide
  Antisense strand to SEQ ID NO: 514297
agaaugagcacucuuaaca

SEQ ID NO: 514299 - RNA, 19 nt, Artificial Sequence
  Description of Artificial Sequence: Synthetic oligonucleotide
  Sense strand starting at position 524 of SEQ ID NO: 317814
gacacugugccaggucaaa

SEQ ID NO: 514300 - RNA, 19 nt, Artificial Sequence
  Description of Artificial Sequence: Synthetic oligonucleotide
  Antisense strand to SEQ ID NO: 514299
uuugaccuggcacaguguc

SEQ ID NO: 514301 - RNA, 19 nt, Artificial Sequence
  Description of Artificial Sequence: Synthetic oligonucleotide
  Sense strand starting at position 555 of SEQ ID NO: 317814
cuagcuguccuugguaacu

SEQ ID NO: 514302 - RNA, 19 nt, Artificial Sequence
  Description of Artificial Sequence: Synthetic oligonucleotide
  Antisense strand to SEQ ID NO: 514301
aguuaccaaggacagcuag

SEQ ID NO: 514303 - RNA, 19 nt, Artificial Sequence
  Description of Artificial Sequence: Synthetic oligonucleotide
  Sense strand starting at position 630 of SEQ ID NO: 317814
gcagaugaauccugagcau

SEQ ID NO: 514304 - RNA, 19 nt, Artificial Sequence
  Description of Artificial Sequence: Synthetic oligonucleotide
  Antisense strand to SEQ ID NO: 514303
augcucaggauucaucugc

SEQ ID NO: 514305 - RNA, 19 nt, Artificial Sequence
  Description of Artificial Sequence: Synthetic oligonucleotide
  Sense strand starting at position 830 of SEQ ID NO: 317814
cguggaguccagcaugagu

SEQ ID NO: 514306 - RNA, 19 nt, Artificial Sequence
  Description of Artificial Sequence: Synthetic oligonucleotide
  Antisense strand to SEQ ID NO: 514305
acucaugcuggacuccacg

SEQ ID NO: 514307 - RNA, 19 nt, Artificial Sequence
  Description of Artificial Sequence: Synthetic oligonucleotide
  Sense strand starting at position 872 of SEQ ID NO: 317814
ucagauaccucccaggcaa

SEQ ID NO: 514308 - RNA, 19 nt, Artificial Sequence
  Description of Artificial Sequence: Synthetic oligonucleotide
  Antisense strand to SEQ ID NO: 514307
uugccugggagguaucuga

SEQ ID NO: 514309 - RNA, 19 nt, Artificial Sequence
  Description of Artificial Sequence: Synthetic oligonucleotide
  Sense strand starting at position 896 of SEQ ID NO: 317814
ggaaaugguugacuuguga

SEQ ID NO: 514310 - RNA, 19 nt, Artificial Sequence
  Description of Artificial Sequence: Synthetic oligonucleotide
  Antisense strand to SEQ ID NO: 514309
ucacaagucaaccauuucc

SEQ ID NO: 514311 - RNA, 19 nt, Artificial Sequence
  Description of Artificial Sequence: Synthetic oligonucleotide
  Sense strand starting at position 900 of SEQ ID NO: 317814
augguugacuugugagaag

SEQ ID NO: 514312 - RNA, 19 nt, Artificial Sequence
  Description of Artificial Sequence: Synthetic oligonucleotide
  Antisense strand to SEQ ID NO: 514311
cuucucacaagucaaccau

SEQ ID NO: 514313 - RNA, 19 nt, Artificial Sequence
  Description of Artificial Sequence: Synthetic oligonucleotide
  Sense strand starting at position 903 of SEQ ID NO: 317814
guugacuugugagaagcaa

SEQ ID NO: 514314 - RNA, 19 nt, Artificial Sequence
  Description of Artificial Sequence: Synthetic oligonucleotide
  Antisense strand to SEQ ID NO: 514313
uugcuucucacaagucaac

SEQ ID NO: 514315 - RNA, 19 nt, Artificial Sequence
  Description of Artificial Sequence: Synthetic oligonucleotide
  Sense strand starting at position 960 of SEQ ID NO: 317814
uaggccaugucagauguaa

SEQ ID NO: 514316 - RNA, 19 nt, Artificial Sequence
  Description of Artificial Sequence: Synthetic oligonucleotide
  Antisense strand to SEQ ID NO: 514315
uuacaucugacauggccua

SEQ ID NO: 514317 - RNA, 19 nt, Artificial Sequence
  Description of Artificial Sequence: Synthetic oligonucleotide
  Sense strand starting at position 962 of SEQ ID NO: 317814
ggccaugucagauguaauu

SEQ ID NO: 514318 - RNA, 19 nt, Artificial Sequence
  Description of Artificial Sequence: Synthetic oligonucleotide
  Antisense strand to SEQ ID NO: 514317
aauuacaucugacauggcc

SEQ ID NO: 514319 - RNA, 19 nt, Artificial Sequence
  Description of Artificial Sequence: Synthetic oligonucleotide
  Sense strand starting at position 1021 of SEQ ID NO: 317814
cgucacaugucacuuauuu

SEQ ID NO: 514320 - RNA, 19 nt, Artificial Sequence
  Description of Artificial Sequence: Synthetic oligonucleotide
  Antisense strand to SEQ ID NO: 514319
aaauaagugacaugugacg

SEQ ID NO: 514321 - RNA, 19 nt, Artificial Sequence
  Description of Artificial Sequence: Synthetic oligonucleotide
  Sense strand starting at position 1152 of SEQ ID NO: 317814
agaguugucugcucuccac

SEQ ID NO: 514322 - RNA, 19 nt, Artificial Sequence
  Description of Artificial Sequence: Synthetic oligonucleotide
  Antisense strand to SEQ ID NO: 514321
guggagagcagacaacucu

SEQ ID NO: 514323 - RNA, 19 nt, Artificial Sequence
  Description of Artificial Sequence: Synthetic oligonucleotide
  Sense strand starting at position 1233 of SEQ ID NO: 317814
ucacacucugcugagaacu

SEQ ID NO: 514324 - RNA, 19 nt, Artificial Sequence
  Description of Artificial Sequence: Synthetic oligonucleotide
  Antisense strand to SEQ ID NO: 514323
aguucucagcagaguguga

SEQ ID NO: 514325 - RNA, 19 nt, Artificial Sequence
  Description of Artificial Sequence: Synthetic oligonucleotide
  Sense strand starting at position 1246 of SEQ ID NO: 317814
agaacuacuucuuaaacga

SEQ ID NO: 514326 - RNA, 19 nt, Artificial Sequence
  Description of Artificial Sequence: Synthetic oligonucleotide
  Antisense strand to SEQ ID NO: 514325
ucguuuaagaaguaguucu

SEQ ID NO: 514327 - RNA, 19 nt, Artificial Sequence
  Description of Artificial Sequence: Synthetic oligonucleotide
  Sense strand starting at position 1314 of SEQ ID NO: 317814
ggccuccaguuaggauauu

SEQ ID NO: 514328 - RNA, 19 nt, Artificial Sequence
  Description of Artificial Sequence: Synthetic oligonucleotide
  Antisense strand to SEQ ID NO: 514327
aauauccuaacuggaggcc

SEQ ID NO: 514329 - RNA, 19 nt, Artificial Sequence
  Description of Artificial Sequence: Synthetic oligonucleotide
  Sense strand starting at position 1341 of SEQ ID NO: 317814
ucaagacauucgguaagac

SEQ ID NO: 514330 - RNA, 19 nt, Artificial Sequence
  Description of Artificial Sequence: Synthetic oligonucleotide
  Antisense strand to SEQ ID NO: 514329
gucuuaccgaaugucuuga

SEQ ID NO: 514331 - RNA, 19 nt, Artificial Sequence
  Description of Artificial Sequence: Synthetic oligonucleotide
  Sense strand starting at position 1351 of SEQ ID NO: 317814
cgguaagacuaguucucua

SEQ ID NO: 514332 - RNA, 19 nt, Artificial Sequence
  Description of Artificial Sequence: Synthetic oligonucleotide
  Antisense strand to SEQ ID NO: 514331
uagagaacuagucuuaccg

SEQ ID NO: 514333 - RNA, 19 nt, Artificial Sequence
  Description of Artificial Sequence: Synthetic oligonucleotide
  Sense strand starting at position 1409 of SEQ ID NO: 317814
aucugaacaugaguaaugu

SEQ ID NO: 514334 - RNA, 19 nt, Artificial Sequence
  Description of Artificial Sequence: Synthetic oligonucleotide
  Antisense strand to SEQ ID NO: 514333
acauuacucauguucagau

SEQ ID NO: 514335 - RNA, 19 nt, Artificial Sequence
  Description of Artificial Sequence: Synthetic oligonucleotide
  Sense strand starting at position 1410 of SEQ ID NO: 317814
ucugaacaugaguaauguu

SEQ ID NO: 514336 - RNA, 19 nt, Artificial Sequence
  Description of Artificial Sequence: Synthetic oligonucleotide
  Antisense strand to SEQ ID NO: 514335
aacauuacucauguucaga

SEQ ID NO: 514337 - RNA, 19 nt, Artificial Sequence
  Description of Artificial Sequence: Synthetic oligonucleotide
  Sense strand starting at position 2454 of SEQ ID NO: 317814
gggccaugucgacguguga

SEQ ID NO: 514338 - RNA, 19 nt, Artificial Sequence
  Description of Artificial Sequence: Synthetic oligonucleotide
  Antisense strand to SEQ ID NO: 514337
ucacacgucgacauggccc

SEQ ID NO: 514339 - RNA, 19 nt, Artificial Sequence
  Description of Artificial Sequence: Synthetic oligonucleotide
  Sense strand starting at position 2525 of SEQ ID NO: 317814
uuaguccacaguugucaga

SEQ ID NO: 514340 - RNA, 19 nt, Artificial Sequence
  Description of Artificial Sequence: Synthetic oligonucleotide
  Antisense strand to SEQ ID NO: 514339
ucugacaacuguggacuaa

SEQ ID NO: 514341 - RNA, 19 nt, Artificial Sequence
  Description of Artificial Sequence: Synthetic oligonucleotide
  Sense strand starting at position 2527 of SEQ ID NO: 317814
aguccacaguugucagaau

SEQ ID NO: 514342 - RNA, 19 nt, Artificial Sequence
  Description of Artificial Sequence: Synthetic oligonucleotide
  Antisense strand to SEQ ID NO: 514341
auucugacaacuguggacu

SEQ ID NO: 514343 - RNA, 19 nt, Artificial Sequence
  Description of Artificial Sequence: Synthetic oligonucleotide
  Sense strand starting at position 2964 of SEQ ID NO: 317814
guucgacauuucuagaaag

SEQ ID NO: 514344 - RNA, 19 nt, Artificial Sequence
  Description of Artificial Sequence: Synthetic oligonucleotide
  Antisense strand to SEQ ID NO: 514343
cuuucuagaaaugucgaac

SEQ ID NO: 514345 - RNA, 19 nt, Artificial Sequence
  Description of Artificial Sequence: Synthetic oligonucleotide
  Sense strand starting at position 2980 of SEQ ID NO: 317814
aagaguagaugcuacugaa

SEQ ID NO: 514346 - RNA, 19 nt, Artificial Sequence
  Description of Artificial Sequence: Synthetic oligonucleotide
  Antisense strand to SEQ ID NO: 514345
uucaguagcaucuacucuu

SEQ ID NO: 514347 - RNA, 19 nt, Artificial Sequence
  Description of Artificial Sequence: Synthetic oligonucleotide
  Sense strand starting at position 3002 of SEQ ID NO: 317814
ccaauagauugcugagggu

SEQ ID NO: 514348 - RNA, 19 nt, Artificial Sequence
  Description of Artificial Sequence: Synthetic oligonucleotide
  Antisense strand to SEQ ID NO: 514347
acccucagcaaucuauugg

SEQ ID NO: 514349 - RNA, 19 nt, Artificial Sequence
  Description of Artificial Sequence: Synthetic oligonucleotide
  Sense strand starting at position 3101 of SEQ ID NO: 317814
gugauuggugccgagaaug

SEQ ID NO: 514350 - RNA, 19 nt, Artificial Sequence
  Description of Artificial Sequence: Synthetic oligonucleotide
  Antisense strand to SEQ ID NO: 514349
cauucucggcaccaaucac

SEQ ID NO: 514351 - RNA, 19 nt, Artificial Sequence
  Description of Artificial Sequence: Synthetic oligonucleotide
  Sense strand starting at position 3374 of SEQ ID NO: 317814
gcaaaccuguccuuggaaa

SEQ ID NO: 514352 - RNA, 19 nt, Artificial Sequence
  Description of Artificial Sequence: Synthetic oligonucleotide
  Antisense strand to SEQ ID NO: 514351
uuuccaaggacagguuugc

SEQ ID NO: 514353 - RNA, 19 nt, Artificial Sequence
  Description of Artificial Sequence: Synthetic oligonucleotide
  Sense strand starting at position 3375 of SEQ ID NO: 317814
caaaccuguccuuggaaag

SEQ ID NO: 514354 - RNA, 19 nt, Artificial Sequence
  Description of Artificial Sequence: Synthetic oligonucleotide
  Antisense strand to SEQ ID NO: 514353
cuuuccaaggacagguuug

SEQ ID NO: 514355 - RNA, 19 nt, Artificial Sequence
  Description of Artificial Sequence: Synthetic oligonucleotide
  Sense strand starting at position 3408 of SEQ ID NO: 317814
cuguuacccugaucaaaug

SEQ ID NO: 514356 - RNA, 19 nt, Artificial Sequence
  Description of Artificial Sequence: Synthetic oligonucleotide
  Antisense strand to SEQ ID NO: 514355
cauuugaucaggguaacag

SEQ ID NO: 514357 - RNA, 19 nt, Artificial Sequence
  Description of Artificial Sequence: Synthetic oligonucleotide
  Sense strand starting at position 3560 of SEQ ID NO: 317814
gucugugcgacacgugaau

SEQ ID NO: 514358 - RNA, 19 nt, Artificial Sequence
  Description of Artificial Sequence: Synthetic oligonucleotide
  Antisense strand to SEQ ID NO: 514357
auucacgugucgcacagac

SEQ ID NO: 514359 - RNA, 19 nt, Artificial Sequence
  Description of Artificial Sequence: Synthetic oligonucleotide
  Sense strand starting at position 3659 of SEQ ID NO: 317814
gguggauugucucacggca

SEQ ID NO: 514360 - RNA, 19 nt, Artificial Sequence
  Description of Artificial Sequence: Synthetic oligonucleotide
  Antisense strand to SEQ ID NO: 514359
ugccgugagacaauccacc

SEQ ID NO: 514361 - RNA, 19 nt, Artificial Sequence
  Description of Artificial Sequence: Synthetic oligonucleotide
  Sense strand starting at position 3939 of SEQ ID NO: 317814
uuggccaucuugggaaaga

SEQ ID NO: 514362 - RNA, 19 nt, Artificial Sequence
  Description of Artificial Sequence: Synthetic oligonucleotide
  Antisense strand to SEQ ID NO: 514361
ucuuucccaagauggccaa

SEQ ID NO: 514363 - RNA, 19 nt, Artificial Sequence
  Description of Artificial Sequence: Synthetic oligonucleotide
  Sense strand starting at position 131 of SEQ ID NO: 317815
gggaucaaguccuagauug

SEQ ID NO: 514364 - RNA, 19 nt, Artificial Sequence
  Description of Artificial Sequence: Synthetic oligonucleotide
  Antisense strand to SEQ ID NO: 514363
caaucuaggacuugauccc

SEQ ID NO: 514365 - RNA, 19 nt, Artificial Sequence
  Description of Artificial Sequence: Synthetic oligonucleotide
  Sense strand starting at position 133 of SEQ ID NO: 317815
gaucaaguccuagauuggu

SEQ ID NO: 514366 - RNA, 19 nt, Artificial Sequence
  Description of Artificial Sequence: Synthetic oligonucleotide
  Antisense strand to SEQ ID NO: 514365
accaaucuaggacuugauc

SEQ ID NO: 514367 - RNA, 19 nt, Artificial Sequence
  Description of Artificial Sequence: Synthetic oligonucleotide
  Sense strand starting at position 172 of SEQ ID NO: 317815
ugggcaagauacucagauu

SEQ ID NO: 514368 - RNA, 19 nt, Artificial Sequence
  Description of Artificial Sequence: Synthetic oligonucleotide
  Antisense strand to SEQ ID NO: 514367
aaucugaguaucuugccca

SEQ ID NO: 514369 - RNA, 19 nt, Artificial Sequence
  Description of Artificial Sequence: Synthetic oligonucleotide
  Sense strand starting at position 228 of SEQ ID NO: 317815
gguuacauuucucauauca

SEQ ID NO: 514370 - RNA, 19 nt, Artificial Sequence
  Description of Artificial Sequence: Synthetic oligonucleotide
  Antisense strand to SEQ ID NO: 514369
ugauaugagaaauguaacc

SEQ ID NO: 514371 - RNA, 19 nt, Artificial Sequence
  Description of Artificial Sequence: Synthetic oligonucleotide
  Sense strand starting at position 332 of SEQ ID NO: 317815
gugcucaguaaacguugaa

SEQ ID NO: 514372 - RNA, 19 nt, Artificial Sequence
  Description of Artificial Sequence: Synthetic oligonucleotide
  Antisense strand to SEQ ID NO: 514371
uucaacguuuacugagcac

SEQ ID NO: 514373 - RNA, 19 nt, Artificial Sequence
  Description of Artificial Sequence: Synthetic oligonucleotide
  Sense strand starting at position 336 of SEQ ID NO: 317815
ucaguaaacguugaaugga

SEQ ID NO: 514374 - RNA, 19 nt, Artificial Sequence
  Description of Artificial Sequence: Synthetic oligonucleotide
  Antisense strand to SEQ ID NO: 514373
uccauucaacguuuacuga

SEQ ID NO: 514375 - RNA, 19 nt, Artificial Sequence
  Description of Artificial Sequence: Synthetic oligonucleotide
  Sense strand starting at position 367 of SEQ ID NO: 317815
ugugaagagccuuguaaac

SEQ ID NO: 514376 - RNA, 19 nt, Artificial Sequence
  Description of Artificial Sequence: Synthetic oligonucleotide
  Antisense strand to SEQ ID NO: 514375
guuuacaaggcucuucaca

SEQ ID NO: 514377 - RNA, 19 nt, Artificial Sequence
  Description of Artificial Sequence: Synthetic oligonucleotide
  Sense strand starting at position 411 of SEQ ID NO: 317815
guauauauguuagcacuua

SEQ ID NO: 514378 - RNA, 19 nt, Artificial Sequence
  Description of Artificial Sequence: Synthetic oligonucleotide
  Antisense strand to SEQ ID NO: 514377
uaagugcuaacauauauac

SEQ ID NO: 514379 - RNA, 19 nt, Artificial Sequence
  Description of Artificial Sequence: Synthetic oligonucleotide
  Sense strand starting at position 496 of SEQ ID NO: 317815
ccaugaaggugauaucuac

SEQ ID NO: 514380 - RNA, 19 nt, Artificial Sequence
  Description of Artificial Sequence: Synthetic oligonucleotide
  Antisense strand to SEQ ID NO: 514379
guagauaucaccuucaugg

SEQ ID NO: 514381 - RNA, 19 nt, Artificial Sequence
  Description of Artificial Sequence: Synthetic oligonucleotide
  Sense strand starting at position 670 of SEQ ID NO: 317815
ccauuaagucgacaacuac

SEQ ID NO: 514382 - RNA, 19 nt, Artificial Sequence
  Description of Artificial Sequence: Synthetic oligonucleotide
  Antisense strand to SEQ ID NO: 514381
guaguugucgacuuaaugg

SEQ ID NO: 514383 - RNA, 19 nt, Artificial Sequence
  Description of Artificial Sequence: Synthetic oligonucleotide
  Sense strand starting at position 735 of SEQ ID NO: 317815
cccacacuccggugucuaa

SEQ ID NO: 514384 - RNA, 19 nt, Artificial Sequence
  Description of Artificial Sequence: Synthetic oligonucleotide
  Antisense strand to SEQ ID NO: 514383
uuagacaccggaguguggg

SEQ ID NO: 514385 - RNA, 19 nt, Artificial Sequence
  Description of Artificial Sequence: Synthetic oligonucleotide
  Sense strand starting at position 992 of SEQ ID NO: 317815
agguuuaaauucuugaucu

SEQ ID NO: 514386 - RNA, 19 nt, Artificial Sequence
  Description of Artificial Sequence: Synthetic oligonucleotide
  Antisense strand to SEQ ID NO: 514385
agaucaagaauuuaaaccu

SEQ ID NO: 514387 - RNA, 19 nt, Artificial Sequence
  Description of Artificial Sequence: Synthetic oligonucleotide
  Sense strand starting at position 1011 of SEQ ID NO: 317815
gccacuuacuaguuauuuc

SEQ ID NO: 514388 - RNA, 19 nt, Artificial Sequence
  Description of Artificial Sequence: Synthetic oligonucleotide
  Antisense strand to SEQ ID NO: 514387
gaaauaacuaguaaguggc

SEQ ID NO: 514389 - RNA, 19 nt, Artificial Sequence
  Description of Artificial Sequence: Synthetic oligonucleotide
  Sense strand starting at position 1083 of SEQ ID NO: 317815
acguguaugaagugauuaa

SEQ ID NO: 514390 - RNA, 19 nt, Artificial Sequence
  Description of Artificial Sequence: Synthetic oligonucleotide
  Antisense strand to SEQ ID NO: 514389
uuaaucacuucauacacgu

SEQ ID NO: 514391 - RNA, 19 nt, Artificial Sequence
  Description of Artificial Sequence: Synthetic oligonucleotide
  Sense strand starting at position 1084 of SEQ ID NO: 317815
cguguaugaagugauuaaa

SEQ ID NO: 514392 - RNA, 19 nt, Artificial Sequence
  Description of Artificial Sequence: Synthetic oligonucleotide
  Antisense strand to SEQ ID NO: 514391
uuuaaucacuucauacacg

SEQ ID NO: 514393 - RNA, 19 nt, Artificial Sequence
  Description of Artificial Sequence: Synthetic oligonucleotide
  Sense strand starting at position 1087 of SEQ ID NO: 317815
guaugaagugauuaaaugu

SEQ ID NO: 514394 - RNA, 19 nt, Artificial Sequence
  Description of Artificial Sequence: Synthetic oligonucleotide
  Antisense strand to SEQ ID NO: 514393
acauuuaaucacuucauac

SEQ ID NO: 514395 - RNA, 19 nt, Artificial Sequence
  Description of Artificial Sequence: Synthetic oligonucleotide
  Sense strand starting at position 1161 of SEQ ID NO: 317815
uagugaguuccuggagcac

SEQ ID NO: 514396 - RNA, 19 nt, Artificial Sequence
  Description of Artificial Sequence: Synthetic oligonucleotide
  Antisense strand to SEQ ID NO: 514395
gugcuccaggaacucacua

SEQ ID NO: 514397 - RNA, 19 nt, Artificial Sequence
  Description of Artificial Sequence: Synthetic oligonucleotide
  Sense strand starting at position 1374 of SEQ ID NO: 317815
aaaugucaugaccgaauuc

SEQ ID NO: 514398 - RNA, 19 nt, Artificial Sequence
  Description of Artificial Sequence: Synthetic oligonucleotide
  Antisense strand to SEQ ID NO: 514397
gaauucggucaugacauuu

SEQ ID NO: 514399 - RNA, 19 nt, Artificial Sequence
  Description of Artificial Sequence: Synthetic oligonucleotide
  Sense strand starting at position 1776 of SEQ ID NO: 317815
agccaaagucaucagccau

SEQ ID NO: 514400 - RNA, 19 nt, Artificial Sequence
  Description of Artificial Sequence: Synthetic oligonucleotide
  Antisense strand to SEQ ID NO: 514399
auggcugaugacuuuggcu

SEQ ID NO: 514401 - RNA, 19 nt, Artificial Sequence
  Description of Artificial Sequence: Synthetic oligonucleotide
  Sense strand starting at position 2299 of SEQ ID NO: 317815
gcagaaguuucuucuccua

SEQ ID NO: 514402 - RNA, 19 nt, Artificial Sequence
  Description of Artificial Sequence: Synthetic oligonucleotide
  Antisense strand to SEQ ID NO: 514401
uaggagaagaaacuucugc

SEQ ID NO: 514403 - RNA, 19 nt, Artificial Sequence
  Description of Artificial Sequence: Synthetic oligonucleotide
  Sense strand starting at position 2302 of SEQ ID NO: 317815
gaaguuucuucuccuaggu

SEQ ID NO: 514404 - RNA, 19 nt, Artificial Sequence
  Description of Artificial Sequence: Synthetic oligonucleotide
  Antisense strand to SEQ ID NO: 514403
accuaggagaagaaacuuc

SEQ ID NO: 514405 - RNA, 19 nt, Artificial Sequence
  Description of Artificial Sequence: Synthetic oligonucleotide
  Sense strand starting at position 2460 of SEQ ID NO: 317815
guguaucucccuugaggag

SEQ ID NO: 514406 - RNA, 19 nt, Artificial Sequence
  Description of Artificial Sequence: Synthetic oligonucleotide
  Antisense strand to SEQ ID NO: 514405
cuccucaagggagauacac

SEQ ID NO: 514407 - RNA, 19 nt, Artificial Sequence
  Description of Artificial Sequence: Synthetic oligonucleotide
  Sense strand starting at position 2521 of SEQ ID NO: 317815
ccuuaaauguccuuuaggu

SEQ ID NO: 514408 - RNA, 19 nt, Artificial Sequence
  Description of Artificial Sequence: Synthetic oligonucleotide
  Antisense strand to SEQ ID NO: 514407
accuaaaggacauuuaagg

SEQ ID NO: 514409 - RNA, 19 nt, Artificial Sequence
  Description of Artificial Sequence: Synthetic oligonucleotide
  Sense strand starting at position 2523 of SEQ ID NO: 317815
uuaaauguccuuuagguau

SEQ ID NO: 514410 - RNA, 19 nt, Artificial Sequence
  Description of Artificial Sequence: Synthetic oligonucleotide
  Antisense strand to SEQ ID NO: 514409
auaccuaaaggacauuuaa

SEQ ID NO: 514411 - RNA, 19 nt, Artificial Sequence
  Description of Artificial Sequence: Synthetic oligonucleotide
  Sense strand starting at position 2526 of SEQ ID NO: 317815
aauguccuuuagguaugaa

SEQ ID NO: 514412 - RNA, 19 nt, Artificial Sequence
  Description of Artificial Sequence: Synthetic oligonucleotide
  Antisense strand to SEQ ID NO: 514411
uucauaccuaaaggacauu

SEQ ID NO: 514413 - RNA, 19 nt, Artificial Sequence
  Description of Artificial Sequence: Synthetic oligonucleotide
  Sense strand starting at position 2529 of SEQ ID NO: 317815
guccuuuagguaugaacca

SEQ ID NO: 514414 - RNA, 19 nt, Artificial Sequence
  Description of Artificial Sequence: Synthetic oligonucleotide
  Antisense strand to SEQ ID NO: 514413
ugguucauaccuaaaggac

SEQ ID NO: 514415 - RNA, 19 nt, Artificial Sequence
  Description of Artificial Sequence: Synthetic oligonucleotide
  Sense strand starting at position 2731 of SEQ ID NO: 317815
uggcaaauggccugucaaa

SEQ ID NO: 514416 - RNA, 19 nt, Artificial Sequence
  Description of Artificial Sequence: Synthetic oligonucleotide
  Antisense strand to SEQ ID NO: 514415
uuugacaggccauuugcca

SEQ ID NO: 514417 - RNA, 19 nt, Artificial Sequence
  Description of Artificial Sequence: Synthetic oligonucleotide
  Sense strand starting at position 2757 of SEQ ID NO: 317815
gugugaggcgcugugacau

SEQ ID NO: 514418 - RNA, 19 nt, Artificial Sequence
  Description of Artificial Sequence: Synthetic oligonucleotide
  Antisense strand to SEQ ID NO: 514417
augucacagcgccucacac

SEQ ID NO: 514419 - RNA, 19 nt, Artificial Sequence
  Description of Artificial Sequence: Synthetic oligonucleotide
  Sense strand starting at position 2826 of SEQ ID NO: 317815
gcugucugcuauuucuaau

SEQ ID NO: 514420 - RNA, 19 nt, Artificial Sequence
  Description of Artificial Sequence: Synthetic oligonucleotide
  Antisense strand to SEQ ID NO: 514419
auuagaaauagcagacagc

SEQ ID NO: 514421 - RNA, 19 nt, Artificial Sequence
  Description of Artificial Sequence: Synthetic oligonucleotide
  Sense strand starting at position 2986 of SEQ ID NO: 317815
gagacagggccucgcuaua

SEQ ID NO: 514422 - RNA, 19 nt, Artificial Sequence
  Description of Artificial Sequence: Synthetic oligonucleotide
  Antisense strand to SEQ ID NO: 514421
uauagcgaggcccugucuc

SEQ ID NO: 514423 - RNA, 19 nt, Artificial Sequence
  Description of Artificial Sequence: Synthetic oligonucleotide
  Sense strand starting at position 3109 of SEQ ID NO: 317815
ucaguuuaauugguaacaa

SEQ ID NO: 514424 - RNA, 19 nt, Artificial Sequence
  Description of Artificial Sequence: Synthetic oligonucleotide
  Antisense strand to SEQ ID NO: 514423
uuguuaccaauuaaacuga

SEQ ID NO: 514425 - RNA, 19 nt, Artificial Sequence
  Description of Artificial Sequence: Synthetic oligonucleotide
  Sense strand starting at position 3286 of SEQ ID NO: 317815
aguguagugguacgauuau

SEQ ID NO: 514426 - RNA, 19 nt, Artificial Sequence
  Description of Artificial Sequence: Synthetic oligonucleotide
  Antisense strand to SEQ ID NO: 514425
auaaucguaccacuacacu

SEQ ID NO: 514427 - RNA, 19 nt, Artificial Sequence
  Description of Artificial Sequence: Synthetic oligonucleotide
  Sense strand starting at position 3407 of SEQ ID NO: 317815
auguuauuguaaguggaag

SEQ ID NO: 514428 - RNA, 19 nt, Artificial Sequence
  Description of Artificial Sequence: Synthetic oligonucleotide
  Antisense strand to SEQ ID NO: 514427
cuuccacuuacaauaacau

SEQ ID NO: 514429 - RNA, 19 nt, Artificial Sequence
  Description of Artificial Sequence: Synthetic oligonucleotide
  Sense strand starting at position 3408 of SEQ ID NO: 317815
uguuauuguaaguggaagu

SEQ ID NO: 514430 - RNA, 19 nt, Artificial Sequence
  Description of Artificial Sequence: Synthetic oligonucleotide
  Antisense strand to SEQ ID NO: 514429
acuuccacuuacaauaaca

SEQ ID NO: 514431 - RNA, 19 nt, Artificial Sequence
  Description of Artificial Sequence: Synthetic oligonucleotide
  Sense strand starting at position 3409 of SEQ ID NO: 317815
guuauuguaaguggaaguu

SEQ ID NO: 514432 - RNA, 19 nt, Artificial Sequence
  Description of Artificial Sequence: Synthetic oligonucleotide
  Antisense strand to SEQ ID NO: 514431
aacuuccacuuacaauaac

SEQ ID NO: 514433 - RNA, 19 nt, Artificial Sequence
  Description of Artificial Sequence: Synthetic oligonucleotide
  Sense strand starting at position 3813 of SEQ ID NO: 317815
agcuaugauugugucagag

SEQ ID NO: 514434 - RNA, 19 nt, Artificial Sequence
  Description of Artificial Sequence: Synthetic oligonucleotide
  Antisense strand to SEQ ID NO: 514433
cucugacacaaucauagcu

SEQ ID NO: 514435 - RNA, 19 nt, Artificial Sequence
  Description of Artificial Sequence: Synthetic oligonucleotide
  Sense strand starting at position 3819 of SEQ ID NO: 317815
gauugugucagaggugugu

SEQ ID NO: 514436 - RNA, 19 nt, Artificial Sequence
  Description of Artificial Sequence: Synthetic oligonucleotide
  Antisense strand to SEQ ID NO: 514435
acacaccucugacacaauc

SEQ ID NO: 514437 - RNA, 19 nt, Artificial Sequence
  Description of Artificial Sequence: Synthetic oligonucleotide
  Sense strand starting at position 3821 of SEQ ID NO: 317815
uugugucagagguguguga

SEQ ID NO: 514438 - RNA, 19 nt, Artificial Sequence
  Description of Artificial Sequence: Synthetic oligonucleotide
  Antisense strand to SEQ ID NO: 514437
ucacacaccucugacacaa

SEQ ID NO: 514439 - RNA, 19 nt, Artificial Sequence
  Description of Artificial Sequence: Synthetic oligonucleotide
  Sense strand starting at position 3823 of SEQ ID NO: 317815
gugucagaggugugugaau

SEQ ID NO: 514440 - RNA, 19 nt, Artificial Sequence
  Description of Artificial Sequence: Synthetic oligonucleotide
  Antisense strand to SEQ ID NO: 514439
auucacacaccucugacac

SEQ ID NO: 514441 - RNA, 19 nt, Artificial Sequence
  Description of Artificial Sequence: Synthetic oligonucleotide
  Sense strand starting at position 3858 of SEQ ID NO: 317815
uaaacaggaucuggguaaa

SEQ ID NO: 514442 - RNA, 19 nt, Artificial Sequence
  Description of Artificial Sequence: Synthetic oligonucleotide
  Antisense strand to SEQ ID NO: 514441
uuuacccagauccuguuua

SEQ ID NO: 514443 - RNA, 19 nt, Artificial Sequence
  Description of Artificial Sequence: Synthetic oligonucleotide
  Sense strand starting at position 71 of SEQ ID NO: 317816
ggcagucagacagguaaga

SEQ ID NO: 514444 - RNA, 19 nt, Artificial Sequence
  Description of Artificial Sequence: Synthetic oligonucleotide
  Antisense strand to SEQ ID NO: 514443
ucuuaccugucugacugcc

SEQ ID NO: 514445 - RNA, 19 nt, Artificial Sequence
  Description of Artificial Sequence: Synthetic oligonucleotide
  Sense strand starting at position 176 of SEQ ID NO: 317816
aacgcaguucuccaacaga

SEQ ID NO: 514446 - RNA, 19 nt, Artificial Sequence
  Description of Artificial Sequence: Synthetic oligonucleotide
  Antisense strand to SEQ ID NO: 514445
ucuguuggagaacugcguu

SEQ ID NO: 514447 - RNA, 19 nt, Artificial Sequence
  Description of Artificial Sequence: Synthetic oligonucleotide
  Sense strand starting at position 233 of SEQ ID NO: 317816
ugcaguugggauuauaaca

SEQ ID NO: 514448 - RNA, 19 nt, Artificial Sequence
  Description of Artificial Sequence: Synthetic oligonucleotide
  Antisense strand to SEQ ID NO: 514447
uguuauaaucccaacugca

SEQ ID NO: 514449 - RNA, 19 nt, Artificial Sequence
  Description of Artificial Sequence: Synthetic oligonucleotide
  Sense strand starting at position 255 of SEQ ID NO: 317816
agggaagucuaggaauaca

SEQ ID NO: 514450 - RNA, 19 nt, Artificial Sequence
  Description of Artificial Sequence: Synthetic oligonucleotide
  Antisense strand to SEQ ID NO: 514449
uguauuccuagacuucccu

SEQ ID NO: 514451 - RNA, 19 nt, Artificial Sequence
  Description of Artificial Sequence: Synthetic oligonucleotide
  Sense strand starting at position 338 of SEQ ID NO: 317816
ggaagagaggucugcaaag

SEQ ID NO: 514452 - RNA, 19 nt, Artificial Sequence
  Description of Artificial Sequence: Synthetic oligonucleotide
  Antisense strand to SEQ ID NO: 514451
cuuugcagaccucucuucc

SEQ ID NO: 514453 - RNA, 19 nt, Artificial Sequence
  Description of Artificial Sequence: Synthetic oligonucleotide
  Sense strand starting at position 427 of SEQ ID NO: 317816
cuggaagcuuuagaaauuu

SEQ ID NO: 514454 - RNA, 19 nt, Artificial Sequence
  Description of Artificial Sequence: Synthetic oligonucleotide
  Antisense strand to SEQ ID NO: 514453
aaauuucuaaagcuuccag

SEQ ID NO: 514455 - RNA, 19 nt, Artificial Sequence
  Description of Artificial Sequence: Synthetic oligonucleotide
  Sense strand starting at position 535 of SEQ ID NO: 317816
gcaggagguuucuccuuua

SEQ ID NO: 514456 - RNA, 19 nt, Artificial Sequence
  Description of Artificial Sequence: Synthetic oligonucleotide
  Antisense strand to SEQ ID NO: 514455
uaaaggagaaaccuccugc

SEQ ID NO: 514457 - RNA, 19 nt, Artificial Sequence
  Description of Artificial Sequence: Synthetic oligonucleotide
  Sense strand starting at position 538 of SEQ ID NO: 317816
ggagguuucuccuuuacug

SEQ ID NO: 514458 - RNA, 19 nt, Artificial Sequence
  Description of Artificial Sequence: Synthetic oligonucleotide
  Antisense strand to SEQ ID NO: 514457
caguaaaggagaaaccucc

SEQ ID NO: 514459 - RNA, 19 nt, Artificial Sequence
  Description of Artificial Sequence: Synthetic oligonucleotide
  Sense strand starting at position 554 of SEQ ID NO: 317816
cugcuuaaacauuguagga

SEQ ID NO: 514460 - RNA, 19 nt, Artificial Sequence
  Description of Artificial Sequence: Synthetic oligonucleotide
  Antisense strand to SEQ ID NO: 514459
uccuacaauguuuaagcag

SEQ ID NO: 514461 - RNA, 19 nt, Artificial Sequence
  Description of Artificial Sequence: Synthetic oligonucleotide
  Sense strand starting at position 618 of SEQ ID NO: 317816
gccaguacuuauccuuaga

SEQ ID NO: 514462 - RNA, 19 nt, Artificial Sequence
  Description of Artificial Sequence: Synthetic oligonucleotide
  Antisense strand to SEQ ID NO: 514461
ucuaaggauaaguacuggc

SEQ ID NO: 514463 - RNA, 19 nt, Artificial Sequence
  Description of Artificial Sequence: Synthetic oligonucleotide
  Sense strand starting at position 700 of SEQ ID NO: 317816
aagugucuauggucgagau

SEQ ID NO: 514464 - RNA, 19 nt, Artificial Sequence
  Description of Artificial Sequence: Synthetic oligonucleotide
  Antisense strand to SEQ ID NO: 514463
aucucgaccauagacacuu

SEQ ID NO: 514465 - RNA, 19 nt, Artificial Sequence
  Description of Artificial Sequence: Synthetic oligonucleotide
  Sense strand starting at position 701 of SEQ ID NO: 317816
agugucuauggucgagaua

SEQ ID NO: 514466 - RNA, 19 nt, Artificial Sequence
  Description of Artificial Sequence: Synthetic oligonucleotide
  Antisense strand to SEQ ID NO: 514465
uaucucgaccauagacacu

SEQ ID NO: 514467 - RNA, 19 nt, Artificial Sequence
  Description of Artificial Sequence: Synthetic oligonucleotide
  Sense strand starting at position 702 of SEQ ID NO: 317816
gugucuauggucgagauag

SEQ ID NO: 514468 - RNA, 19 nt, Artificial Sequence
  Description of Artificial Sequence: Synthetic oligonucleotide
  Antisense strand to SEQ ID NO: 514467
cuaucucgaccauagacac

SEQ ID NO: 514469 - RNA, 19 nt, Artificial Sequence
  Description of Artificial Sequence: Synthetic oligonucleotide
  Sense strand starting at position 704 of SEQ ID NO: 317816
gucuauggucgagauagca

SEQ ID NO: 514470 - RNA, 19 nt, Artificial Sequence
  Description of Artificial Sequence: Synthetic oligonucleotide
  Antisense strand to SEQ ID NO: 514469
ugcuaucucgaccauagac

SEQ ID NO: 514471 - RNA, 19 nt, Artificial Sequence
  Description of Artificial Sequence: Synthetic oligonucleotide
  Sense strand starting at position 861 of SEQ ID NO: 317816
cggcgaggcucauuacuaa

SEQ ID NO: 514472 - RNA, 19 nt, Artificial Sequence
  Description of Artificial Sequence: Synthetic oligonucleotide
  Antisense strand to SEQ ID NO: 514471
uuaguaaugagccucgccg

SEQ ID NO: 514473 - RNA, 19 nt, Artificial Sequence
  Description of Artificial Sequence: Synthetic oligonucleotide
  Sense strand starting at position 1099 of SEQ ID NO: 317816
aaagcugucgaauguggau

SEQ ID NO: 514474 - RNA, 19 nt, Artificial Sequence
  Description of Artificial Sequence: Synthetic oligonucleotide
  Antisense strand to SEQ ID NO: 514473
auccacauucgacagcuuu

SEQ ID NO: 514475 - RNA, 19 nt, Artificial Sequence
  Description of Artificial Sequence: Synthetic oligonucleotide
  Sense strand starting at position 1108 of SEQ ID NO: 317816
gaauguggaugcugauuua

SEQ ID NO: 514476 - RNA, 19 nt, Artificial Sequence
  Description of Artificial Sequence: Synthetic oligonucleotide
  Antisense strand to SEQ ID NO: 514475
uaaaucagcauccacauuc

SEQ ID NO: 514477 - RNA, 19 nt, Artificial Sequence
  Description of Artificial Sequence: Synthetic oligonucleotide
  Sense strand starting at position 1111 of SEQ ID NO: 317816
uguggaugcugauuuaguu

SEQ ID NO: 514478 - RNA, 19 nt, Artificial Sequence
  Description of Artificial Sequence: Synthetic oligonucleotide
  Antisense strand to SEQ ID NO: 514477
aacuaaaucagcauccaca

SEQ ID NO: 514479 - RNA, 19 nt, Artificial Sequence
  Description of Artificial Sequence: Synthetic oligonucleotide
  Sense strand starting at position 1115 of SEQ ID NO: 317816
gaugcugauuuaguugcaa

SEQ ID NO: 514480 - RNA, 19 nt, Artificial Sequence
  Description of Artificial Sequence: Synthetic oligonucleotide
  Antisense strand to SEQ ID NO: 514479
uugcaacuaaaucagcauc

SEQ ID NO: 514481 - RNA, 19 nt, Artificial Sequence
  Description of Artificial Sequence: Synthetic oligonucleotide
  Sense strand starting at position 1119 of SEQ ID NO: 317816
cugauuuaguugcaaauau

SEQ ID NO: 514482 - RNA, 19 nt, Artificial Sequence
  Description of Artificial Sequence: Synthetic oligonucleotide
  Antisense strand to SEQ ID NO: 514481
auauuugcaacuaaaucag

SEQ ID NO: 514483 - RNA, 19 nt, Artificial Sequence
  Description of Artificial Sequence: Synthetic oligonucleotide
  Sense strand starting at position 1128 of SEQ ID NO: 317816
uugcaaauaugcucaguuu

SEQ ID NO: 514484 - RNA, 19 nt, Artificial Sequence
  Description of Artificial Sequence: Synthetic oligonucleotide
  Antisense strand to SEQ ID NO: 514483
aaacugagcauauuugcaa

SEQ ID NO: 514485 - RNA, 19 nt, Artificial Sequence
  Description of Artificial Sequence: Synthetic oligonucleotide
  Sense strand starting at position 1474 of SEQ ID NO: 317816
agaccuucuuugccauagu

SEQ ID NO: 514486 - RNA, 19 nt, Artificial Sequence
  Description of Artificial Sequence: Synthetic oligonucleotide
  Antisense strand to SEQ ID NO: 514485
acuauggcaaagaaggucu

SEQ ID NO: 514487 - RNA, 19 nt, Artificial Sequence
  Description of Artificial Sequence: Synthetic oligonucleotide
  Sense strand starting at position 2057 of SEQ ID NO: 317816
gccagccuucugugagauu

SEQ ID NO: 514488 - RNA, 19 nt, Artificial Sequence
  Description of Artificial Sequence: Synthetic oligonucleotide
  Antisense strand to SEQ ID NO: 514487
aaucucacagaaggcuggc

SEQ ID NO: 514489 - RNA, 19 nt, Artificial Sequence
  Description of Artificial Sequence: Synthetic oligonucleotide
  Sense strand starting at position 2058 of SEQ ID NO: 317816
ccagccuucugugagauuu

SEQ ID NO: 514490 - RNA, 19 nt, Artificial Sequence
  Description of Artificial Sequence: Synthetic oligonucleotide
  Antisense strand to SEQ ID NO: 514489
aaaucucacagaaggcugg

SEQ ID NO: 514491 - RNA, 19 nt, Artificial Sequence
  Description of Artificial Sequence: Synthetic oligonucleotide
  Sense strand starting at position 2060 of SEQ ID NO: 317816
agccuucugugagauuuac

SEQ ID NO: 514492 - RNA, 19 nt, Artificial Sequence
  Description of Artificial Sequence: Synthetic oligonucleotide
  Antisense strand to SEQ ID NO: 514491
guaaaucucacagaaggcu

SEQ ID NO: 514493 - RNA, 19 nt, Artificial Sequence
  Description of Artificial Sequence: Synthetic oligonucleotide
  Sense strand starting at position 2086 of SEQ ID NO: 317816
ccuggcuuccaagacaagu

SEQ ID NO: 514494 - RNA, 19 nt, Artificial Sequence
  Description of Artificial Sequence: Synthetic oligonucleotide
  Antisense strand to SEQ ID NO: 514493
acuugucuuggaagccagg

SEQ ID NO: 514495 - RNA, 19 nt, Artificial Sequence
  Description of Artificial Sequence: Synthetic oligonucleotide
  Sense strand starting at position 2223 of SEQ ID NO: 317816
gugacacaaucauagauca

SEQ ID NO: 514496 - RNA, 19 nt, Artificial Sequence
  Description of Artificial Sequence: Synthetic oligonucleotide
  Antisense strand to SEQ ID NO: 514495
ugaucuaugauugugucac

SEQ ID NO: 514497 - RNA, 19 nt, Artificial Sequence
  Description of Artificial Sequence: Synthetic oligonucleotide
  Sense strand starting at position 2724 of SEQ ID NO: 317816
uggucaucugcccaagguu

SEQ ID NO: 514498 - RNA, 19 nt, Artificial Sequence
  Description of Artificial Sequence: Synthetic oligonucleotide
  Antisense strand to SEQ ID NO: 514497
aaccuugggcagaugacca

SEQ ID NO: 514499 - RNA, 19 nt, Artificial Sequence
  Description of Artificial Sequence: Synthetic oligonucleotide
  Sense strand starting at position 2814 of SEQ ID NO: 317816
agggaauucuaggaauaua

SEQ ID NO: 514500 - RNA, 19 nt, Artificial Sequence
  Description of Artificial Sequence: Synthetic oligonucleotide
  Antisense strand to SEQ ID NO: 514499
uauauuccuagaauucccu

SEQ ID NO: 514501 - RNA, 19 nt, Artificial Sequence
  Description of Artificial Sequence: Synthetic oligonucleotide
  Sense strand starting at position 2826 of SEQ ID NO: 317816
gaauauagcucagccugga

SEQ ID NO: 514502 - RNA, 19 nt, Artificial Sequence
  Description of Artificial Sequence: Synthetic oligonucleotide
  Antisense strand to SEQ ID NO: 514501
uccaggcugagcuauauuc

SEQ ID NO: 514503 - RNA, 19 nt, Artificial Sequence
  Description of Artificial Sequence: Synthetic oligonucleotide
  Sense strand starting at position 2830 of SEQ ID NO: 317816
auagcucagccuggacaaa

SEQ ID NO: 514504 - RNA, 19 nt, Artificial Sequence
  Description of Artificial Sequence: Synthetic oligonucleotide
  Antisense strand to SEQ ID NO: 514503
uuuguccaggcugagcuau

SEQ ID NO: 514505 - RNA, 19 nt, Artificial Sequence
  Description of Artificial Sequence: Synthetic oligonucleotide
  Sense strand starting at position 2910 of SEQ ID NO: 317816
gguguuguuauggacugaa

SEQ ID NO: 514506 - RNA, 19 nt, Artificial Sequence
  Description of Artificial Sequence: Synthetic oligonucleotide
  Antisense strand to SEQ ID NO: 514505
uucaguccauaacaacacc

SEQ ID NO: 514507 - RNA, 19 nt, Artificial Sequence
  Description of Artificial Sequence: Synthetic oligonucleotide
  Sense strand starting at position 3005 of SEQ ID NO: 317816
uugggagaugcuuagguca

SEQ ID NO: 514508 - RNA, 19 nt, Artificial Sequence
  Description of Artificial Sequence: Synthetic oligonucleotide
  Antisense strand to SEQ ID NO: 514507
ugaccuaagcaucucccaa

SEQ ID NO: 514509 - RNA, 19 nt, Artificial Sequence
  Description of Artificial Sequence: Synthetic oligonucleotide
  Sense strand starting at position 3008 of SEQ ID NO: 317816
ggagaugcuuaggucauga

SEQ ID NO: 514510 - RNA, 19 nt, Artificial Sequence
  Description of Artificial Sequence: Synthetic oligonucleotide
  Antisense strand to SEQ ID NO: 514509
ucaugaccuaagcaucucc

SEQ ID NO: 514511 - RNA, 19 nt, Artificial Sequence
  Description of Artificial Sequence: Synthetic oligonucleotide
  Sense strand starting at position 3080 of SEQ ID NO: 317816
cuugcuuccucaucuguau

SEQ ID NO: 514512 - RNA, 19 nt, Artificial Sequence
  Description of Artificial Sequence: Synthetic oligonucleotide
  Antisense strand to SEQ ID NO: 514511
auacagaugaggaagcaag

SEQ ID NO: 514513 - RNA, 19 nt, Artificial Sequence
  Description of Artificial Sequence: Synthetic oligonucleotide
  Sense strand starting at position 3431 of SEQ ID NO: 317816
ugguaaggauggucucaaa

SEQ ID NO: 514514 - RNA, 19 nt, Artificial Sequence
  Description of Artificial Sequence: Synthetic oligonucleotide
  Antisense strand to SEQ ID NO: 514513
uuugagaccauccuuacca

SEQ ID NO: 514515 - RNA, 19 nt, Artificial Sequence
  Description of Artificial Sequence: Synthetic oligonucleotide
  Sense strand starting at position 3434 of SEQ ID NO: 317816
uaaggauggucucaaacac

SEQ ID NO: 514516 - RNA, 19 nt, Artificial Sequence
  Description of Artificial Sequence: Synthetic oligonucleotide
  Antisense strand to SEQ ID NO: 514515
guguuugagaccauccuua

SEQ ID NO: 514517 - RNA, 19 nt, Artificial Sequence
  Description of Artificial Sequence: Synthetic oligonucleotide
  Sense strand starting at position 3624 of SEQ ID NO: 317816
cugaaacaucugcaguuga

SEQ ID NO: 514518 - RNA, 19 nt, Artificial Sequence
  Description of Artificial Sequence: Synthetic oligonucleotide
  Antisense strand to SEQ ID NO: 514517
ucaacugcagauguuucag

SEQ ID NO: 514519 - RNA, 19 nt, Artificial Sequence
  Description of Artificial Sequence: Synthetic oligonucleotide
  Sense strand starting at position 3629 of SEQ ID NO: 317816
acaucugcaguugaauuau

SEQ ID NO: 514520 - RNA, 19 nt, Artificial Sequence
  Description of Artificial Sequence: Synthetic oligonucleotide
  Antisense strand to SEQ ID NO: 514519
auaauucaacugcagaugu

SEQ ID NO: 514521 - RNA, 19 nt, Artificial Sequence
  Description of Artificial Sequence: Synthetic oligonucleotide
  Sense strand starting at position 3908 of SEQ ID NO: 317816
acaggcaugucacccaauu

SEQ ID NO: 514522 - RNA, 19 nt, Artificial Sequence
  Description of Artificial Sequence: Synthetic oligonucleotide
  Antisense strand to SEQ ID NO: 514521
aauugggugacaugccugu

SEQ ID NO: 514523 - RNA, 19 nt, Artificial Sequence
  Description of Artificial Sequence: Synthetic oligonucleotide
  Sense strand starting at position 88 of SEQ ID NO: 317817
auauuuggcucagaaccaa

SEQ ID NO: 514524 - RNA, 19 nt, Artificial Sequence
  Description of Artificial Sequence: Synthetic oligonucleotide
  Antisense strand to SEQ ID NO: 514523
uugguucugagccaaauau

SEQ ID NO: 514525 - RNA, 19 nt, Artificial Sequence
  Description of Artificial Sequence: Synthetic oligonucleotide
  Sense strand starting at position 244 of SEQ ID NO: 317817
uccauauucccucaugugu

SEQ ID NO: 514526 - RNA, 19 nt, Artificial Sequence
  Description of Artificial Sequence: Synthetic oligonucleotide
  Antisense strand to SEQ ID NO: 514525
acacaugagggaauaugga

SEQ ID NO: 514527 - RNA, 19 nt, Artificial Sequence
  Description of Artificial Sequence: Synthetic oligonucleotide
  Sense strand starting at position 308 of SEQ ID NO: 317817
acugucuguagucagaaca

SEQ ID NO: 514528 - RNA, 19 nt, Artificial Sequence
  Description of Artificial Sequence: Synthetic oligonucleotide
  Antisense strand to SEQ ID NO: 514527
uguucugacuacagacagu

SEQ ID NO: 514529 - RNA, 19 nt, Artificial Sequence
  Description of Artificial Sequence: Synthetic oligonucleotide
  Sense strand starting at position 330 of SEQ ID NO: 317817
ugaaguuuacugcagacaa

SEQ ID NO: 514530 - RNA, 19 nt, Artificial Sequence
  Description of Artificial Sequence: Synthetic oligonucleotide
  Antisense strand to SEQ ID NO: 514529
uugucugcaguaaacuuca

SEQ ID NO: 514531 - RNA, 19 nt, Artificial Sequence
  Description of Artificial Sequence: Synthetic oligonucleotide
  Sense strand starting at position 369 of SEQ ID NO: 317817
ccuugaccuuugucaaaug

SEQ ID NO: 514532 - RNA, 19 nt, Artificial Sequence
  Description of Artificial Sequence: Synthetic oligonucleotide
  Antisense strand to SEQ ID NO: 514531
cauuugacaaaggucaagg

SEQ ID NO: 514533 - RNA, 19 nt, Artificial Sequence
  Description of Artificial Sequence: Synthetic oligonucleotide
  Sense strand starting at position 445 of SEQ ID NO: 317817
cagauucucuugguuguaa

SEQ ID NO: 514534 - RNA, 19 nt, Artificial Sequence
  Description of Artificial Sequence: Synthetic oligonucleotide
  Antisense strand to SEQ ID NO: 514533
uuacaaccaagagaaucug

SEQ ID NO: 514535 - RNA, 19 nt, Artificial Sequence
  Description of Artificial Sequence: Synthetic oligonucleotide
  Sense strand starting at position 446 of SEQ ID NO: 317817
agauucucuugguuguaaa

SEQ ID NO: 514536 - RNA, 19 nt, Artificial Sequence
  Description of Artificial Sequence: Synthetic oligonucleotide
  Antisense strand to SEQ ID NO: 514535
uuuacaaccaagagaaucu

SEQ ID NO: 514537 - RNA, 19 nt, Artificial Sequence
  Description of Artificial Sequence: Synthetic oligonucleotide
  Sense strand starting at position 834 of SEQ ID NO: 317817
guuugauaaacaggugaca

SEQ ID NO: 514538 - RNA, 19 nt, Artificial Sequence
  Description of Artificial Sequence: Synthetic oligonucleotide
  Antisense strand to SEQ ID NO: 514537
ugucaccuguuuaucaaac

SEQ ID NO: 514539 - RNA, 19 nt, Artificial Sequence
  Description of Artificial Sequence: Synthetic oligonucleotide
  Sense strand starting at position 860 of SEQ ID NO: 317817
aggacuucuugucugacca

SEQ ID NO: 514540 - RNA, 19 nt, Artificial Sequence
  Description of Artificial Sequence: Synthetic oligonucleotide
  Antisense strand to SEQ ID NO: 514539
uggucagacaagaaguccu

SEQ ID NO: 514541 - RNA, 19 nt, Artificial Sequence
  Description of Artificial Sequence: Synthetic oligonucleotide
  Sense strand starting at position 861 of SEQ ID NO: 317817
ggacuucuugucugaccau

SEQ ID NO: 514542 - RNA, 19 nt, Artificial Sequence
  Description of Artificial Sequence: Synthetic oligonucleotide
  Antisense strand to SEQ ID NO: 514541
auggucagacaagaagucc

SEQ ID NO: 514543 - RNA, 19 nt, Artificial Sequence
  Description of Artificial Sequence: Synthetic oligonucleotide
  Sense strand starting at position 929 of SEQ ID NO: 317817
gcuggcuuugauuagguaa

SEQ ID NO: 514544 - RNA, 19 nt, Artificial Sequence
  Description of Artificial Sequence: Synthetic oligonucleotide
  Antisense strand to SEQ ID NO: 514543
uuaccuaaucaaagccagc

SEQ ID NO: 514545 - RNA, 19 nt, Artificial Sequence
  Description of Artificial Sequence: Synthetic oligonucleotide
  Sense strand starting at position 1090 of SEQ ID NO: 317817
gguagaagcuaauccaaau

SEQ ID NO: 514546 - RNA, 19 nt, Artificial Sequence
  Description of Artificial Sequence: Synthetic oligonucleotide
  Antisense strand to SEQ ID NO: 514545
auuuggauuagcuucuacc

SEQ ID NO: 514547 - RNA, 19 nt, Artificial Sequence
  Description of Artificial Sequence: Synthetic oligonucleotide
  Sense strand starting at position 1441 of SEQ ID NO: 317817
gcaggauuucgcgauuguu

SEQ ID NO: 514548 - RNA, 19 nt, Artificial Sequence
  Description of Artificial Sequence: Synthetic oligonucleotide
  Antisense strand to SEQ ID NO: 514547
aacaaucgcgaaauccugc

SEQ ID NO: 514549 - RNA, 19 nt, Artificial Sequence
  Description of Artificial Sequence: Synthetic oligonucleotide
  Sense strand starting at position 1444 of SEQ ID NO: 317817
ggauuucgcgauuguuccu

SEQ ID NO: 514550 - RNA, 19 nt, Artificial Sequence
  Description of Artificial Sequence: Synthetic oligonucleotide
  Antisense strand to SEQ ID NO: 514549
aggaacaaucgcgaaaucc

SEQ ID NO: 514551 - RNA, 19 nt, Artificial Sequence
  Description of Artificial Sequence: Synthetic oligonucleotide
  Sense strand starting at position 1463 of SEQ ID NO: 317817
gugccucgggccagaugua

SEQ ID NO: 514552 - RNA, 19 nt, Artificial Sequence
  Description of Artificial Sequence: Synthetic oligonucleotide
  Antisense strand to SEQ ID NO: 514551
uacaucuggcccgaggcac

SEQ ID NO: 514553 - RNA, 19 nt, Artificial Sequence
  Description of Artificial Sequence: Synthetic oligonucleotide
  Sense strand starting at position 1479 of SEQ ID NO: 317817
guacguguuccagcacauu

SEQ ID NO: 514554 - RNA, 19 nt, Artificial Sequence
  Description of Artificial Sequence: Synthetic oligonucleotide
  Antisense strand to SEQ ID NO: 514553
aaugugcuggaacacguac

SEQ ID NO: 514555 - RNA, 19 nt, Artificial Sequence
  Description of Artificial Sequence: Synthetic oligonucleotide
  Sense strand starting at position 1489 of SEQ ID NO: 317817
cagcacauuucggcaguua

SEQ ID NO: 514556 - RNA, 19 nt, Artificial Sequence
  Description of Artificial Sequence: Synthetic oligonucleotide
  Antisense strand to SEQ ID NO: 514555
uaacugccgaaaugugcug

SEQ ID NO: 514557 - RNA, 19 nt, Artificial Sequence
  Description of Artificial Sequence: Synthetic oligonucleotide
  Sense strand starting at position 1490 of SEQ ID NO: 317817
agcacauuucggcaguuau

SEQ ID NO: 514558 - RNA, 19 nt, Artificial Sequence
  Description of Artificial Sequence: Synthetic oligonucleotide
  Antisense strand to SEQ ID NO: 514557
auaacugccgaaaugugcu

SEQ ID NO: 514559 - RNA, 19 nt, Artificial Sequence
  Description of Artificial Sequence: Synthetic oligonucleotide
  Sense strand starting at position 1501 of SEQ ID NO: 317817
gcaguuaugcaggaccuaa

SEQ ID NO: 514560 - RNA, 19 nt, Artificial Sequence
  Description of Artificial Sequence: Synthetic oligonucleotide
  Antisense strand to SEQ ID NO: 514559
uuagguccugcauaacugc

SEQ ID NO: 514561 - RNA, 19 nt, Artificial Sequence
  Description of Artificial Sequence: Synthetic oligonucleotide
  Sense strand starting at position 2085 of SEQ ID NO: 317817
uuaaauagaaggcgucaaa

SEQ ID NO: 514562 - RNA, 19 nt, Artificial Sequence
  Description of Artificial Sequence: Synthetic oligonucleotide
  Antisense strand to SEQ ID NO: 514561
uuugacgccuucuauuuaa

SEQ ID NO: 514563 - RNA, 19 nt, Artificial Sequence
  Description of Artificial Sequence: Synthetic oligonucleotide
  Sense strand starting at position 2088 of SEQ ID NO: 317817
aauagaaggcgucaaaguu

SEQ ID NO: 514564 - RNA, 19 nt, Artificial Sequence
  Description of Artificial Sequence: Synthetic oligonucleotide
  Antisense strand to SEQ ID NO: 514563
aacuuugacgccuucuauu

SEQ ID NO: 514565 - RNA, 19 nt, Artificial Sequence
  Description of Artificial Sequence: Synthetic oligonucleotide
  Sense strand starting at position 2422 of SEQ ID NO: 317817
gugguaccuguagaagguu

SEQ ID NO: 514566 - RNA, 19 nt, Artificial Sequence
  Description of Artificial Sequence: Synthetic oligonucleotide
  Antisense strand to SEQ ID NO: 514565
aaccuucuacagguaccac

SEQ ID NO: 514567 - RNA, 19 nt, Artificial Sequence
  Description of Artificial Sequence: Synthetic oligonucleotide
  Sense strand starting at position 2451 of SEQ ID NO: 317817
gcugguuucccagaugagg

SEQ ID NO: 514568 - RNA, 19 nt, Artificial Sequence
  Description of Artificial Sequence: Synthetic oligonucleotide
  Antisense strand to SEQ ID NO: 514567
ccucaucugggaaaccagc

SEQ ID NO: 514569 - RNA, 19 nt, Artificial Sequence
  Description of Artificial Sequence: Synthetic oligonucleotide
  Sense strand starting at position 2453 of SEQ ID NO: 317817
ugguuucccagaugaggaa

SEQ ID NO: 514570 - RNA, 19 nt, Artificial Sequence
  Description of Artificial Sequence: Synthetic oligonucleotide
  Antisense strand to SEQ ID NO: 514569
uuccucaucugggaaacca

SEQ ID NO: 514571 - RNA, 19 nt, Artificial Sequence
  Description of Artificial Sequence: Synthetic oligonucleotide
  Sense strand starting at position 2610 of SEQ ID NO: 317817
gucaauauacuguguauuu

SEQ ID NO: 514572 - RNA, 19 nt, Artificial Sequence
  Description of Artificial Sequence: Synthetic oligonucleotide
  Antisense strand to SEQ ID NO: 514571
aaauacacaguauauugac

SEQ ID NO: 514573 - RNA, 19 nt, Artificial Sequence
  Description of Artificial Sequence: Synthetic oligonucleotide
  Sense strand starting at position 2643 of SEQ ID NO: 317817
cccuguuauugagccagga

SEQ ID NO: 514574 - RNA, 19 nt, Artificial Sequence
  Description of Artificial Sequence: Synthetic oligonucleotide
  Antisense strand to SEQ ID NO: 514573
uccuggcucaauaacaggg

SEQ ID NO: 514575 - RNA, 19 nt, Artificial Sequence
  Description of Artificial Sequence: Synthetic oligonucleotide
  Sense strand starting at position 2645 of SEQ ID NO: 317817
cuguuauugagccaggaaa

SEQ ID NO: 514576 - RNA, 19 nt, Artificial Sequence
  Description of Artificial Sequence: Synthetic oligonucleotide
  Antisense strand to SEQ ID NO: 514575
uuuccuggcucaauaacag

SEQ ID NO: 514577 - RNA, 19 nt, Artificial Sequence
  Description of Artificial Sequence: Synthetic oligonucleotide
  Sense strand starting at position 2647 of SEQ ID NO: 317817
guuauugagccaggaaacu

SEQ ID NO: 514578 - RNA, 19 nt, Artificial Sequence
  Description of Artificial Sequence: Synthetic oligonucleotide
  Antisense strand to SEQ ID NO: 514577
aguuuccuggcucaauaac

SEQ ID NO: 514579 - RNA, 19 nt, Artificial Sequence
  Description of Artificial Sequence: Synthetic oligonucleotide
  Sense strand starting at position 2733 of SEQ ID NO: 317817
gucugaaacuggcccaaau

SEQ ID NO: 514580 - RNA, 19 nt, Artificial Sequence
  Description of Artificial Sequence: Synthetic oligonucleotide
  Antisense strand to SEQ ID NO: 514579
auuugggccaguuucagac

SEQ ID NO: 514581 - RNA, 19 nt, Artificial Sequence
  Description of Artificial Sequence: Synthetic oligonucleotide
  Sense strand starting at position 3186 of SEQ ID NO: 317817
gucuuuagaagucaggagu

SEQ ID NO: 514582 - RNA, 19 nt, Artificial Sequence
  Description of Artificial Sequence: Synthetic oligonucleotide
  Antisense strand to SEQ ID NO: 514581
acuccugacuucuaaagac

SEQ ID NO: 514583 - RNA, 19 nt, Artificial Sequence
  Description of Artificial Sequence: Synthetic oligonucleotide
  Sense strand starting at position 3259 of SEQ ID NO: 317817
cucaaagguuggucccauu

SEQ ID NO: 514584 - RNA, 19 nt, Artificial Sequence
  Description of Artificial Sequence: Synthetic oligonucleotide
  Antisense strand to SEQ ID NO: 514583
aaugggaccaaccuuugag

SEQ ID NO: 514585 - RNA, 19 nt, Artificial Sequence
  Description of Artificial Sequence: Synthetic oligonucleotide
  Sense strand starting at position 3501 of SEQ ID NO: 317817
aauggaugcucccugaaga

SEQ ID NO: 514586 - RNA, 19 nt, Artificial Sequence
  Description of Artificial Sequence: Synthetic oligonucleotide
  Antisense strand to SEQ ID NO: 514585
ucuucagggagcauccauu

SEQ ID NO: 514587 - RNA, 19 nt, Artificial Sequence
  Description of Artificial Sequence: Synthetic oligonucleotide
  Sense strand starting at position 3502 of SEQ ID NO: 317817
auggaugcucccugaagag

SEQ ID NO: 514588 - RNA, 19 nt, Artificial Sequence
  Description of Artificial Sequence: Synthetic oligonucleotide
  Antisense strand to SEQ ID NO: 514587
cucuucagggagcauccau

SEQ ID NO: 514589 - RNA, 19 nt, Artificial Sequence
  Description of Artificial Sequence: Synthetic oligonucleotide
  Sense strand starting at position 3528 of SEQ ID NO: 317817
ccagaacugcuauguacaa

SEQ ID NO: 514590 - RNA, 19 nt, Artificial Sequence
  Description of Artificial Sequence: Synthetic oligonucleotide
  Antisense strand to SEQ ID NO: 514589
uuguacauagcaguucugg

SEQ ID NO: 514591 - RNA, 19 nt, Artificial Sequence
  Description of Artificial Sequence: Synthetic oligonucleotide
  Sense strand starting at position 3634 of SEQ ID NO: 317817
gucacagaguuguuaaaua

SEQ ID NO: 514592 - RNA, 19 nt, Artificial Sequence
  Description of Artificial Sequence: Synthetic oligonucleotide
  Antisense strand to SEQ ID NO: 514591
uauuuaacaacucugugac

SEQ ID NO: 514593 - RNA, 19 nt, Artificial Sequence
  Description of Artificial Sequence: Synthetic oligonucleotide
  Sense strand starting at position 3641 of SEQ ID NO: 317817
aguuguuaaauaugacugu

SEQ ID NO: 514594 - RNA, 19 nt, Artificial Sequence
  Description of Artificial Sequence: Synthetic oligonucleotide
  Antisense strand to SEQ ID NO: 514593
acagucauauuuaacaacu

SEQ ID NO: 514595 - RNA, 19 nt, Artificial Sequence
  Description of Artificial Sequence: Synthetic oligonucleotide
  Sense strand starting at position 3644 of SEQ ID NO: 317817
uguuaaauaugacuguaag

SEQ ID NO: 514596 - RNA, 19 nt, Artificial Sequence
  Description of Artificial Sequence: Synthetic oligonucleotide
  Antisense strand to SEQ ID NO: 514595
cuuacagucauauuuaaca

SEQ ID NO: 514597 - RNA, 19 nt, Artificial Sequence
  Description of Artificial Sequence: Synthetic oligonucleotide
  Sense strand starting at position 3645 of SEQ ID NO: 317817
guuaaauaugacuguaagc

SEQ ID NO: 514598 - RNA, 19 nt, Artificial Sequence
  Description of Artificial Sequence: Synthetic oligonucleotide
  Antisense strand to SEQ ID NO: 514597
gcuuacagucauauuuaac

SEQ ID NO: 514599 - RNA, 19 nt, Artificial Sequence
  Description of Artificial Sequence: Synthetic oligonucleotide
  Sense strand starting at position 3701 of SEQ ID NO: 317817
gcauuaugucuggagguaa

SEQ ID NO: 514600 - RNA, 19 nt, Artificial Sequence
  Description of Artificial Sequence: Synthetic oligonucleotide
  Antisense strand to SEQ ID NO: 514599
uuaccuccagacauaaugc

SEQ ID NO: 514601 - RNA, 19 nt, Artificial Sequence
  Description of Artificial Sequence: Synthetic oligonucleotide
  Sense strand starting at position 3816 of SEQ ID NO: 317817
cagguuuagcaucagcaau

SEQ ID NO: 514602 - RNA, 19 nt, Artificial Sequence
  Description of Artificial Sequence: Synthetic oligonucleotide
  Antisense strand to SEQ ID NO: 514601
auugcugaugcuaaaccug

SEQ ID NO: 514603 - RNA, 19 nt, Artificial Sequence
  Description of Artificial Sequence: Synthetic oligonucleotide
  Sense strand starting at position 70 of SEQ ID NO: 317818
ccuagaaaggucugucuuc

SEQ ID NO: 514604 - RNA, 19 nt, Artificial Sequence
  Description of Artificial Sequence: Synthetic oligonucleotide
  Antisense strand to SEQ ID NO: 514603
gaagacagaccuuucuagg

SEQ ID NO: 514605 - RNA, 19 nt, Artificial Sequence
  Description of Artificial Sequence: Synthetic oligonucleotide
  Sense strand starting at position 71 of SEQ ID NO: 317818
cuagaaaggucugucuucu

SEQ ID NO: 514606 - RNA, 19 nt, Artificial Sequence
  Description of Artificial Sequence: Synthetic oligonucleotide
  Antisense strand to SEQ ID NO: 514605
agaagacagaccuuucuag

SEQ ID NO: 514607 - RNA, 19 nt, Artificial Sequence
  Description of Artificial Sequence: Synthetic oligonucleotide
  Sense strand starting at position 131 of SEQ ID NO: 317818
uggaguagaucacagaucu

SEQ ID NO: 514608 - RNA, 19 nt, Artificial Sequence
  Description of Artificial Sequence: Synthetic oligonucleotide
  Antisense strand to SEQ ID NO: 514607
agaucugugaucuacucca

SEQ ID NO: 514609 - RNA, 19 nt, Artificial Sequence
  Description of Artificial Sequence: Synthetic oligonucleotide
  Sense strand starting at position 510 of SEQ ID NO: 317818
uaaagacugugauaaaugu

SEQ ID NO: 514610 - RNA, 19 nt, Artificial Sequence
  Description of Artificial Sequence: Synthetic oligonucleotide
  Antisense strand to SEQ ID NO: 514609
acauuuaucacagucuuua

SEQ ID NO: 514611 - RNA, 19 nt, Artificial Sequence
  Description of Artificial Sequence: Synthetic oligonucleotide
  Sense strand starting at position 519 of SEQ ID NO: 317818
ugauaaaugucuuaacagc

SEQ ID NO: 514612 - RNA, 19 nt, Artificial Sequence
  Description of Artificial Sequence: Synthetic oligonucleotide
  Antisense strand to SEQ ID NO: 514611
gcuguuaagacauuuauca

SEQ ID NO: 514613 - RNA, 19 nt, Artificial Sequence
  Description of Artificial Sequence: Synthetic oligonucleotide
  Sense strand starting at position 597 of SEQ ID NO: 317818
cuacuaaucuguucuagag

SEQ ID NO: 514614 - RNA, 19 nt, Artificial Sequence
  Description of Artificial Sequence: Synthetic oligonucleotide
  Antisense strand to SEQ ID NO: 514613
cucuagaacagauuaguag

SEQ ID NO: 514615 - RNA, 19 nt, Artificial Sequence
  Description of Artificial Sequence: Synthetic oligonucleotide
  Sense strand starting at position 599 of SEQ ID NO: 317818
acuaaucuguucuagagua

SEQ ID NO: 514616 - RNA, 19 nt, Artificial Sequence
  Description of Artificial Sequence: Synthetic oligonucleotide
  Antisense strand to SEQ ID NO: 514615
uacucuagaacagauuagu

SEQ ID NO: 514617 - RNA, 19 nt, Artificial Sequence
  Description of Artificial Sequence: Synthetic oligonucleotide
  Sense strand starting at position 601 of SEQ ID NO: 317818
uaaucuguucuagaguagu

SEQ ID NO: 514618 - RNA, 19 nt, Artificial Sequence
  Description of Artificial Sequence: Synthetic oligonucleotide
  Antisense strand to SEQ ID NO: 514617
acuacucuagaacagauua

SEQ ID NO: 514619 - RNA, 19 nt, Artificial Sequence
  Description of Artificial Sequence: Synthetic oligonucleotide
  Sense strand starting at position 604 of SEQ ID NO: 317818
ucuguucuagaguaguaaa

SEQ ID NO: 514620 - RNA, 19 nt, Artificial Sequence
  Description of Artificial Sequence: Synthetic oligonucleotide
  Antisense strand to SEQ ID NO: 514619
uuuacuacucuagaacaga

SEQ ID NO: 514621 - RNA, 19 nt, Artificial Sequence
  Description of Artificial Sequence: Synthetic oligonucleotide
  Sense strand starting at position 607 of SEQ ID NO: 317818
guucuagaguaguaaauuc

SEQ ID NO: 514622 - RNA, 19 nt, Artificial Sequence
  Description of Artificial Sequence: Synthetic oligonucleotide
  Antisense strand to SEQ ID NO: 514621
gaauuuacuacucuagaac

SEQ ID NO: 514623 - RNA, 19 nt, Artificial Sequence
  Description of Artificial Sequence: Synthetic oligonucleotide
  Sense strand starting at position 1058 of SEQ ID NO: 317818
aguacaaucuccgaauccu

SEQ ID NO: 514624 - RNA, 19 nt, Artificial Sequence
  Description of Artificial Sequence: Synthetic oligonucleotide
  Antisense strand to SEQ ID NO: 514623
aggauucggagauuguacu

SEQ ID NO: 514625 - RNA, 19 nt, Artificial Sequence
  Description of Artificial Sequence: Synthetic oligonucleotide
  Sense strand starting at position 1066 of SEQ ID NO: 317818
cuccgaauccuucgcaaua

SEQ ID NO: 514626 - RNA, 19 nt, Artificial Sequence
  Description of Artificial Sequence: Synthetic oligonucleotide
  Antisense strand to SEQ ID NO: 514625
uauugcgaaggauucggag

SEQ ID NO: 514627 - RNA, 19 nt, Artificial Sequence
  Description of Artificial Sequence: Synthetic oligonucleotide
  Sense strand starting at position 1067 of SEQ ID NO: 317818
uccgaauccuucgcaauac

SEQ ID NO: 514628 - RNA, 19 nt, Artificial Sequence
  Description of Artificial Sequence: Synthetic oligonucleotide
  Antisense strand to SEQ ID NO: 514627
guauugcgaaggauucgga

SEQ ID NO: 514629 - RNA, 19 nt, Artificial Sequence
  Description of Artificial Sequence: Synthetic oligonucleotide
  Sense strand starting at position 1116 of SEQ ID NO: 317818
gugcuucuuuaaccuguaa

SEQ ID NO: 514630 - RNA, 19 nt, Artificial Sequence
  Description of Artificial Sequence: Synthetic oligonucleotide
  Antisense strand to SEQ ID NO: 514629
uuacagguuaaagaagcac

SEQ ID NO: 514631 - RNA, 19 nt, Artificial Sequence
  Description of Artificial Sequence: Synthetic oligonucleotide
  Sense strand starting at position 1209 of SEQ ID NO: 317818
ugguuucccgcuugacagu

SEQ ID NO: 514632 - RNA, 19 nt, Artificial Sequence
  Description of Artificial Sequence: Synthetic oligonucleotide
  Antisense strand to SEQ ID NO: 514631
acugucaagcgggaaacca

SEQ ID NO: 514633 - RNA, 19 nt, Artificial Sequence
  Description of Artificial Sequence: Synthetic oligonucleotide
  Sense strand starting at position 1215 of SEQ ID NO: 317818
cccgcuugacaguaauugu

SEQ ID NO: 514634 - RNA, 19 nt, Artificial Sequence
  Description of Artificial Sequence: Synthetic oligonucleotide
  Antisense strand to SEQ ID NO: 514633
acaauuacugucaagcggg

SEQ ID NO: 514635 - RNA, 19 nt, Artificial Sequence
  Description of Artificial Sequence: Synthetic oligonucleotide
  Sense strand starting at position 1224 of SEQ ID NO: 317818
caguaauuguggccacgga

SEQ ID NO: 514636 - RNA, 19 nt, Artificial Sequence
  Description of Artificial Sequence: Synthetic oligonucleotide
  Antisense strand to SEQ ID NO: 514635
uccguggccacaauuacug

SEQ ID NO: 514637 - RNA, 19 nt, Artificial Sequence
  Description of Artificial Sequence: Synthetic oligonucleotide
  Sense strand starting at position 1555 of SEQ ID NO: 317818
gaaaguugcccgcgaccga

SEQ ID NO: 514638 - RNA, 19 nt, Artificial Sequence
  Description of Artificial Sequence: Synthetic oligonucleotide
  Antisense strand to SEQ ID NO: 514637
ucggucgcgggcaacuuuc

SEQ ID NO: 514639 - RNA, 19 nt, Artificial Sequence
  Description of Artificial Sequence: Synthetic oligonucleotide
  Sense strand starting at position 2751 of SEQ ID NO: 317818
uaagccuucgccugucaau

SEQ ID NO: 514640 - RNA, 19 nt, Artificial Sequence
  Description of Artificial Sequence: Synthetic oligonucleotide
  Antisense strand to SEQ ID NO: 514639
auugacaggcgaaggcuua

SEQ ID NO: 514641 - RNA, 19 nt, Artificial Sequence
  Description of Artificial Sequence: Synthetic oligonucleotide
  Sense strand starting at position 2763 of SEQ ID NO: 317818
ugucaaucacgucgaaaca

SEQ ID NO: 514642 - RNA, 19 nt, Artificial Sequence
  Description of Artificial Sequence: Synthetic oligonucleotide
  Antisense strand to SEQ ID NO: 514641
uguuucgacgugauugaca

SEQ ID NO: 514643 - RNA, 19 nt, Artificial Sequence
  Description of Artificial Sequence: Synthetic oligonucleotide
  Sense strand starting at position 2801 of SEQ ID NO: 317818
guaucuugaucugccuaaa

SEQ ID NO: 514644 - RNA, 19 nt, Artificial Sequence
  Description of Artificial Sequence: Synthetic oligonucleotide
  Antisense strand to SEQ ID NO: 514643
uuuaggcagaucaagauac

SEQ ID NO: 514645 - RNA, 19 nt, Artificial Sequence
  Description of Artificial Sequence: Synthetic oligonucleotide
  Sense strand starting at position 2804 of SEQ ID NO: 317818
ucuugaucugccuaaagac

SEQ ID NO: 514646 - RNA, 19 nt, Artificial Sequence
  Description of Artificial Sequence: Synthetic oligonucleotide
  Antisense strand to SEQ ID NO: 514645
gucuuuaggcagaucaaga

SEQ ID NO: 514647 - RNA, 19 nt, Artificial Sequence
  Description of Artificial Sequence: Synthetic oligonucleotide
  Sense strand starting at position 2834 of SEQ ID NO: 317818
ucgugaacagucgaauauu

SEQ ID NO: 514648 - RNA, 19 nt, Artificial Sequence
  Description of Artificial Sequence: Synthetic oligonucleotide
  Antisense strand to SEQ ID NO: 514647
aauauucgacuguucacga

SEQ ID NO: 514649 - RNA, 19 nt, Artificial Sequence
  Description of Artificial Sequence: Synthetic oligonucleotide
  Sense strand starting at position 2837 of SEQ ID NO: 317818
ugaacagucgaauauuauu

SEQ ID NO: 514650 - RNA, 19 nt, Artificial Sequence
  Description of Artificial Sequence: Synthetic oligonucleotide
  Antisense strand to SEQ ID NO: 514649
aauaauauucgacuguuca

SEQ ID NO: 514651 - RNA, 19 nt, Artificial Sequence
  Description of Artificial Sequence: Synthetic oligonucleotide
  Sense strand starting at position 2877 of SEQ ID NO: 317818
agaguaaguuaacauacca

SEQ ID NO: 514652 - RNA, 19 nt, Artificial Sequence
  Description of Artificial Sequence: Synthetic oligonucleotide
  Antisense strand to SEQ ID NO: 514651
ugguauguuaacuuacucu

SEQ ID NO: 514653 - RNA, 19 nt, Artificial Sequence
  Description of Artificial Sequence: Synthetic oligonucleotide
  Sense strand starting at position 2898 of SEQ ID NO: 317818
ucagccuauuaaugguaau

SEQ ID NO: 514654 - RNA, 19 nt, Artificial Sequence
  Description of Artificial Sequence: Synthetic oligonucleotide
  Antisense strand to SEQ ID NO: 514653
auuaccauuaauaggcuga

SEQ ID NO: 514655 - RNA, 19 nt, Artificial Sequence
  Description of Artificial Sequence: Synthetic oligonucleotide
  Sense strand starting at position 2979 of SEQ ID NO: 317818
gcugcugugcuccaagauc

SEQ ID NO: 514656 - RNA, 19 nt, Artificial Sequence
  Description of Artificial Sequence: Synthetic oligonucleotide
  Antisense strand to SEQ ID NO: 514655
gaucuuggagcacagcagc

SEQ ID NO: 514657 - RNA, 19 nt, Artificial Sequence
  Description of Artificial Sequence: Synthetic oligonucleotide
  Sense strand starting at position 3039 of SEQ ID NO: 317818
gagaaaugacugggcugau

SEQ ID NO: 514658 - RNA, 19 nt, Artificial Sequence
  Description of Artificial Sequence: Synthetic oligonucleotide
  Antisense strand to SEQ ID NO: 514657
aucagcccagucauuucuc

SEQ ID NO: 514659 - RNA, 19 nt, Artificial Sequence
  Description of Artificial Sequence: Synthetic oligonucleotide
  Sense strand starting at position 3040 of SEQ ID NO: 317818
agaaaugacugggcugauu

SEQ ID NO: 514660 - RNA, 19 nt, Artificial Sequence
  Description of Artificial Sequence: Synthetic oligonucleotide
  Antisense strand to SEQ ID NO: 514659
aaucagcccagucauuucu

SEQ ID NO: 514661 - RNA, 19 nt, Artificial Sequence
  Description of Artificial Sequence: Synthetic oligonucleotide
  Sense strand starting at position 3058 of SEQ ID NO: 317818
ucaugaugcuuacaucaag

SEQ ID NO: 514662 - RNA, 19 nt, Artificial Sequence
  Description of Artificial Sequence: Synthetic oligonucleotide
  Antisense strand to SEQ ID NO: 514661
cuugauguaagcaucauga

SEQ ID NO: 514663 - RNA, 19 nt, Artificial Sequence
  Description of Artificial Sequence: Synthetic oligonucleotide
  Sense strand starting at position 3079 of SEQ ID NO: 317818
auauuaguugacugauggu

SEQ ID NO: 514664 - RNA, 19 nt, Artificial Sequence
  Description of Artificial Sequence: Synthetic oligonucleotide
  Antisense strand to SEQ ID NO: 514663
accaucagucaacuaauau

SEQ ID NO: 514665 - RNA, 19 nt, Artificial Sequence
  Description of Artificial Sequence: Synthetic oligonucleotide
  Sense strand starting at position 3133 of SEQ ID NO: 317818
ugaguaagcucacagucua

SEQ ID NO: 514666 - RNA, 19 nt, Artificial Sequence
  Description of Artificial Sequence: Synthetic oligonucleotide
  Antisense strand to SEQ ID NO: 514665
uagacugugagcuuacuca

SEQ ID NO: 514667 - RNA, 19 nt, Artificial Sequence
  Description of Artificial Sequence: Synthetic oligonucleotide
  Sense strand starting at position 3174 of SEQ ID NO: 317818
gacuuaauauuggagguau

SEQ ID NO: 514668 - RNA, 19 nt, Artificial Sequence
  Description of Artificial Sequence: Synthetic oligonucleotide
  Antisense strand to SEQ ID NO: 514667
auaccuccaauauuaaguc

SEQ ID NO: 514669 - RNA, 19 nt, Artificial Sequence
  Description of Artificial Sequence: Synthetic oligonucleotide
  Sense strand starting at position 3176 of SEQ ID NO: 317818
cuuaauauuggagguauau

SEQ ID NO: 514670 - RNA, 19 nt, Artificial Sequence
  Description of Artificial Sequence: Synthetic oligonucleotide
  Antisense strand to SEQ ID NO: 514669
auauaccuccaauauuaag

SEQ ID NO: 514671 - RNA, 19 nt, Artificial Sequence
  Description of Artificial Sequence: Synthetic oligonucleotide
  Sense strand starting at position 3295 of SEQ ID NO: 317818
uggcgaaacuucgucccua

SEQ ID NO: 514672 - RNA, 19 nt, Artificial Sequence
  Description of Artificial Sequence: Synthetic oligonucleotide
  Antisense strand to SEQ ID NO: 514671
uagggacgaaguuucgcca

SEQ ID NO: 514673 - RNA, 19 nt, Artificial Sequence
  Description of Artificial Sequence: Synthetic oligonucleotide
  Sense strand starting at position 3296 of SEQ ID NO: 317818
ggcgaaacuucgucccuac

SEQ ID NO: 514674 - RNA, 19 nt, Artificial Sequence
  Description of Artificial Sequence: Synthetic oligonucleotide
  Antisense strand to SEQ ID NO: 514673
guagggacgaaguuucgcc

SEQ ID NO: 514675 - RNA, 19 nt, Artificial Sequence
  Description of Artificial Sequence: Synthetic oligonucleotide
  Sense strand starting at position 3546 of SEQ ID NO: 317818
ccaccuauguggcaaacua

SEQ ID NO: 514676 - RNA, 19 nt, Artificial Sequence
  Description of Artificial Sequence: Synthetic oligonucleotide
  Antisense strand to SEQ ID NO: 514675
uaguuugccacauaggugg

SEQ ID NO: 514677 - RNA, 19 nt, Artificial Sequence
  Description of Artificial Sequence: Synthetic oligonucleotide
  Sense strand starting at position 3574 of SEQ ID NO: 317818
gcuaacugcuuccuggaaa

SEQ ID NO: 514678 - RNA, 19 nt, Artificial Sequence
  Description of Artificial Sequence: Synthetic oligonucleotide
  Antisense strand to SEQ ID NO: 514677
uuuccaggaagcaguuagc

SEQ ID NO: 514679 - RNA, 19 nt, Artificial Sequence
  Description of Artificial Sequence: Synthetic oligonucleotide
  Sense strand starting at position 3693 of SEQ ID NO: 317818
ugggaaauggguugcuguu

SEQ ID NO: 514680 - RNA, 19 nt, Artificial Sequence
  Description of Artificial Sequence: Synthetic oligonucleotide
  Antisense strand to SEQ ID NO: 514679
aacagcaacccauuuccca

SEQ ID NO: 514681 - RNA, 19 nt, Artificial Sequence
  Description of Artificial Sequence: Synthetic oligonucleotide
  Sense strand starting at position 3899 of SEQ ID NO: 317818
ugcagaaguuuaggaguca

SEQ ID NO: 514682 - RNA, 19 nt, Artificial Sequence
  Description of Artificial Sequence: Synthetic oligonucleotide
  Antisense strand to SEQ ID NO: 514681
ugacuccuaaacuucugca

SEQ ID NO: 514683 - RNA, 19 nt, Artificial Sequence
  Description of Artificial Sequence: Synthetic oligonucleotide
  Sense strand starting at position 406 of SEQ ID NO: 317819
auuacuuaucuggguuaca

SEQ ID NO: 514684 - RNA, 19 nt, Artificial Sequence
  Description of Artificial Sequence: Synthetic oligonucleotide
  Antisense strand to SEQ ID NO: 514683
uguaacccagauaaguaau

SEQ ID NO: 514685 - RNA, 19 nt, Artificial Sequence
  Description of Artificial Sequence: Synthetic oligonucleotide
  Sense strand starting at position 407 of SEQ ID NO: 317819
uuacuuaucuggguuacaa

SEQ ID NO: 514686 - RNA, 19 nt, Artificial Sequence
  Description of Artificial Sequence: Synthetic oligonucleotide
  Antisense strand to SEQ ID NO: 514685
uuguaacccagauaaguaa

SEQ ID NO: 514687 - RNA, 19 nt, Artificial Sequence
  Description of Artificial Sequence: Synthetic oligonucleotide
  Sense strand starting at position 486 of SEQ ID NO: 317819
acaggaugcuaaucucaag

SEQ ID NO: 514688 - RNA, 19 nt, Artificial Sequence
  Description of Artificial Sequence: Synthetic oligonucleotide
  Antisense strand to SEQ ID NO: 514687
cuugagauuagcauccugu

SEQ ID NO: 514689 - RNA, 19 nt, Artificial Sequence
  Description of Artificial Sequence: Synthetic oligonucleotide
  Sense strand starting at position 714 of SEQ ID NO: 317819
ucaucuacgguguaaacuu

SEQ ID NO: 514690 - RNA, 19 nt, Artificial Sequence
  Description of Artificial Sequence: Synthetic oligonucleotide
  Antisense strand to SEQ ID NO: 514689
aaguuuacaccguagauga

SEQ ID NO: 514691 - RNA, 19 nt, Artificial Sequence
  Description of Artificial Sequence: Synthetic oligonucleotide
  Sense strand starting at position 745 of SEQ ID NO: 317819
gcuucuuauuuacacagga

SEQ ID NO: 514692 - RNA, 19 nt, Artificial Sequence
  Description of Artificial Sequence: Synthetic oligonucleotide
  Antisense strand to SEQ ID NO: 514691
uccuguguaaauaagaagc

SEQ ID NO: 514693 - RNA, 19 nt, Artificial Sequence
  Description of Artificial Sequence: Synthetic oligonucleotide
  Sense strand starting at position 838 of SEQ ID NO: 317819
aagaaacguugagucugau

SEQ ID NO: 514694 - RNA, 19 nt, Artificial Sequence
  Description of Artificial Sequence: Synthetic oligonucleotide
  Antisense strand to SEQ ID NO: 514693
aucagacucaacguuucuu

SEQ ID NO: 514695 - RNA, 19 nt, Artificial Sequence
  Description of Artificial Sequence: Synthetic oligonucleotide
  Sense strand starting at position 872 of SEQ ID NO: 317819
ccaaguguacaaggaaaca

SEQ ID NO: 514696 - RNA, 19 nt, Artificial Sequence
  Description of Artificial Sequence: Synthetic oligonucleotide
  Antisense strand to SEQ ID NO: 514695
uguuuccuuguacacuugg

SEQ ID NO: 514697 - RNA, 19 nt, Artificial Sequence
  Description of Artificial Sequence: Synthetic oligonucleotide
  Sense strand starting at position 925 of SEQ ID NO: 317819
aaaggcuuugccgugcaua

SEQ ID NO: 514698 - RNA, 19 nt, Artificial Sequence
  Description of Artificial Sequence: Synthetic oligonucleotide
  Antisense strand to SEQ ID NO: 514697
uaugcacggcaaagccuuu

SEQ ID NO: 514699 - RNA, 19 nt, Artificial Sequence
  Description of Artificial Sequence: Synthetic oligonucleotide
  Sense strand starting at position 927 of SEQ ID NO: 317819
aggcuuugccgugcauaga

SEQ ID NO: 514700 - RNA, 19 nt, Artificial Sequence
  Description of Artificial Sequence: Synthetic oligonucleotide
  Antisense strand to SEQ ID NO: 514699
ucuaugcacggcaaagccu

SEQ ID NO: 514701 - RNA, 19 nt, Artificial Sequence
  Description of Artificial Sequence: Synthetic oligonucleotide
  Sense strand starting at position 930 of SEQ ID NO: 317819
cuuugccgugcauagauau

SEQ ID NO: 514702 - RNA, 19 nt, Artificial Sequence
  Description of Artificial Sequence: Synthetic oligonucleotide
  Antisense strand to SEQ ID NO: 514701
auaucuaugcacggcaaag

SEQ ID NO: 514703 - RNA, 19 nt, Artificial Sequence
  Description of Artificial Sequence: Synthetic oligonucleotide
  Sense strand starting at position 936 of SEQ ID NO: 317819
cgugcauagauaugauaga

SEQ ID NO: 514704 - RNA, 19 nt, Artificial Sequence
  Description of Artificial Sequence: Synthetic oligonucleotide
  Antisense strand to SEQ ID NO: 514703
ucuaucauaucuaugcacg

SEQ ID NO: 514705 - RNA, 19 nt, Artificial Sequence
  Description of Artificial Sequence: Synthetic oligonucleotide
  Sense strand starting at position 1042 of SEQ ID NO: 317819
ggcacugcccuggauugaa

SEQ ID NO: 514706 - RNA, 19 nt, Artificial Sequence
  Description of Artificial Sequence: Synthetic oligonucleotide
  Antisense strand to SEQ ID NO: 514705
uucaauccagggcagugcc

SEQ ID NO: 514707 - RNA, 19 nt, Artificial Sequence
  Description of Artificial Sequence: Synthetic oligonucleotide
  Sense strand starting at position 1250 of SEQ ID NO: 317819
ucaucauucucuucucguu

SEQ ID NO: 514708 - RNA, 19 nt, Artificial Sequence
  Description of Artificial Sequence: Synthetic oligonucleotide
  Antisense strand to SEQ ID NO: 514707
aacgagaagagaaugauga

SEQ ID NO: 514709 - RNA, 19 nt, Artificial Sequence
  Description of Artificial Sequence: Synthetic oligonucleotide
  Sense strand starting at position 1252 of SEQ ID NO: 317819
aucauucucuucucguuua

SEQ ID NO: 514710 - RNA, 19 nt, Artificial Sequence
  Description of Artificial Sequence: Synthetic oligonucleotide
  Antisense strand to SEQ ID NO: 514709
uaaacgagaagagaaugau

SEQ ID NO: 514711 - RNA, 19 nt, Artificial Sequence
  Description of Artificial Sequence: Synthetic oligonucleotide
  Sense strand starting at position 1255 of SEQ ID NO: 317819
auucucuucucguuuauca

SEQ ID NO: 514712 - RNA, 19 nt, Artificial Sequence
  Description of Artificial Sequence: Synthetic oligonucleotide
  Antisense strand to SEQ ID NO: 514711
ugauaaacgagaagagaau

SEQ ID NO: 514713 - RNA, 19 nt, Artificial Sequence
  Description of Artificial Sequence: Synthetic oligonucleotide
  Sense strand starting at position 1419 of SEQ ID NO: 317819
ucguguguccuugcauaag

SEQ ID NO: 514714 - RNA, 19 nt, Artificial Sequence
  Description of Artificial Sequence: Synthetic oligonucleotide
  Antisense strand to SEQ ID NO: 514713
cuuaugcaaggacacacga

SEQ ID NO: 514715 - RNA, 19 nt, Artificial Sequence
  Description of Artificial Sequence: Synthetic oligonucleotide
  Sense strand starting at position 1538 of SEQ ID NO: 317819
augagaugcuuuguaaagu

SEQ ID NO: 514716 - RNA, 19 nt, Artificial Sequence
  Description of Artificial Sequence: Synthetic oligonucleotide
  Antisense strand to SEQ ID NO: 514715
acuuuacaaagcaucucau

SEQ ID NO: 514717 - RNA, 19 nt, Artificial Sequence
  Description of Artificial Sequence: Synthetic oligonucleotide
  Sense strand starting at position 1560 of SEQ ID NO: 317819
cgcacauauuacucgaaua

SEQ ID NO: 514718 - RNA, 19 nt, Artificial Sequence
  Description of Artificial Sequence: Synthetic oligonucleotide
  Antisense strand to SEQ ID NO: 514717
uauucgaguaauaugugcg

SEQ ID NO: 514719 - RNA, 19 nt, Artificial Sequence
  Description of Artificial Sequence: Synthetic oligonucleotide
  Sense strand starting at position 1588 of SEQ ID NO: 317819
gacgguggccauuauuauu

SEQ ID NO: 514720 - RNA, 19 nt, Artificial Sequence
  Description of Artificial Sequence: Synthetic oligonucleotide
  Antisense strand to SEQ ID NO: 514719
aauaauaauggccaccguc

SEQ ID NO: 514721 - RNA, 19 nt, Artificial Sequence
  Description of Artificial Sequence: Synthetic oligonucleotide
  Sense strand starting at position 2265 of SEQ ID NO: 317819
ccucuuuccgagcgaacaa

SEQ ID NO: 514722 - RNA, 19 nt, Artificial Sequence
  Description of Artificial Sequence: Synthetic oligonucleotide
  Antisense strand to SEQ ID NO: 514721
uuguucgcucggaaagagg

SEQ ID NO: 514723 - RNA, 19 nt, Artificial Sequence
  Description of Artificial Sequence: Synthetic oligonucleotide
  Sense strand starting at position 2488 of SEQ ID NO: 317819
gcgacuuucuguucuaaca

SEQ ID NO: 514724 - RNA, 19 nt, Artificial Sequence
  Description of Artificial Sequence: Synthetic oligonucleotide
  Antisense strand to SEQ ID NO: 514723
uguuagaacagaaagucgc

SEQ ID NO: 514725 - RNA, 19 nt, Artificial Sequence
  Description of Artificial Sequence: Synthetic oligonucleotide
  Sense strand starting at position 2652 of SEQ ID NO: 317819
ggaacauugccauagcaac

SEQ ID NO: 514726 - RNA, 19 nt, Artificial Sequence
  Description of Artificial Sequence: Synthetic oligonucleotide
  Antisense strand to SEQ ID NO: 514725
guugcuauggcaauguucc

SEQ ID NO: 514727 - RNA, 19 nt, Artificial Sequence
  Description of Artificial Sequence: Synthetic oligonucleotide
  Sense strand starting at position 2683 of SEQ ID NO: 317819
gucugcucgaguuacaaag

SEQ ID NO: 514728 - RNA, 19 nt, Artificial Sequence
  Description of Artificial Sequence: Synthetic oligonucleotide
  Antisense strand to SEQ ID NO: 514727
cuuuguaacucgagcagac

SEQ ID NO: 514729 - RNA, 19 nt, Artificial Sequence
  Description of Artificial Sequence: Synthetic oligonucleotide
  Sense strand starting at position 2877 of SEQ ID NO: 317819
ucuuaauccugcuugaaga

SEQ ID NO: 514730 - RNA, 19 nt, Artificial Sequence
  Description of Artificial Sequence: Synthetic oligonucleotide
  Antisense strand to SEQ ID NO: 514729
ucuucaagcaggauuaaga

SEQ ID NO: 514731 - RNA, 19 nt, Artificial Sequence
  Description of Artificial Sequence: Synthetic oligonucleotide
  Sense strand starting at position 3094 of SEQ ID NO: 317819
ucuaguucuugucccagau

SEQ ID NO: 514732 - RNA, 19 nt, Artificial Sequence
  Description of Artificial Sequence: Synthetic oligonucleotide
  Antisense strand to SEQ ID NO: 514731
aucugggacaagaacuaga

SEQ ID NO: 514733 - RNA, 19 nt, Artificial Sequence
  Description of Artificial Sequence: Synthetic oligonucleotide
  Sense strand starting at position 3098 of SEQ ID NO: 317819
guucuugucccagaugcuu

SEQ ID NO: 514734 - RNA, 19 nt, Artificial Sequence
  Description of Artificial Sequence: Synthetic oligonucleotide
  Antisense strand to SEQ ID NO: 514733
aagcaucugggacaagaac

SEQ ID NO: 514735 - RNA, 19 nt, Artificial Sequence
  Description of Artificial Sequence: Synthetic oligonucleotide
  Sense strand starting at position 3104 of SEQ ID NO: 317819
gucccagaugcuuguacuu

SEQ ID NO: 514736 - RNA, 19 nt, Artificial Sequence
  Description of Artificial Sequence: Synthetic oligonucleotide
  Antisense strand to SEQ ID NO: 514735
aaguacaagcaucugggac

SEQ ID NO: 514737 - RNA, 19 nt, Artificial Sequence
  Description of Artificial Sequence: Synthetic oligonucleotide
  Sense strand starting at position 3124 of SEQ ID NO: 317819
agaggcuguugauaagaaa

SEQ ID NO: 514738 - RNA, 19 nt, Artificial Sequence
  Description of Artificial Sequence: Synthetic oligonucleotide
  Antisense strand to SEQ ID NO: 514737
uuucuuaucaacagccucu

SEQ ID NO: 514739 - RNA, 19 nt, Artificial Sequence
  Description of Artificial Sequence: Synthetic oligonucleotide
  Sense strand starting at position 3392 of SEQ ID NO: 317819
augagugucuagcuccuua

SEQ ID NO: 514740 - RNA, 19 nt, Artificial Sequence
  Description of Artificial Sequence: Synthetic oligonucleotide
  Antisense strand to SEQ ID NO: 514739
uaaggagcuagacacucau

SEQ ID NO: 514741 - RNA, 19 nt, Artificial Sequence
  Description of Artificial Sequence: Synthetic oligonucleotide
  Sense strand starting at position 3433 of SEQ ID NO: 317819
ggcugucgugagcuuguga

SEQ ID NO: 514742 - RNA, 19 nt, Artificial Sequence
  Description of Artificial Sequence: Synthetic oligonucleotide
  Antisense strand to SEQ ID NO: 514741
ucacaagcucacgacagcc

SEQ ID NO: 514743 - RNA, 19 nt, Artificial Sequence
  Description of Artificial Sequence: Synthetic oligonucleotide
  Sense strand starting at position 3434 of SEQ ID NO: 317819
gcugucgugagcuugugaa

SEQ ID NO: 514744 - RNA, 19 nt, Artificial Sequence
  Description of Artificial Sequence: Synthetic oligonucleotide
  Antisense strand to SEQ ID NO: 514743
uucacaagcucacgacagc

SEQ ID NO: 514745 - RNA, 19 nt, Artificial Sequence
  Description of Artificial Sequence: Synthetic oligonucleotide
  Sense strand starting at position 3574 of SEQ ID NO: 317819
gcucacugagccuguaauc

SEQ ID NO: 514746 - RNA, 19 nt, Artificial Sequence
  Description of Artificial Sequence: Synthetic oligonucleotide
  Antisense strand to SEQ ID NO: 514745
gauuacaggcucagugagc

SEQ ID NO: 514747 - RNA, 19 nt, Artificial Sequence
  Description of Artificial Sequence: Synthetic oligonucleotide
  Sense strand starting at position 3865 of SEQ ID NO: 317819
cagugauuccguugaggga

SEQ ID NO: 514748 - RNA, 19 nt, Artificial Sequence
  Description of Artificial Sequence: Synthetic oligonucleotide
  Antisense strand to SEQ ID NO: 514747
ucccucaacggaaucacug

SEQ ID NO: 514749 - RNA, 19 nt, Artificial Sequence
  Description of Artificial Sequence: Synthetic oligonucleotide
  Sense strand starting at position 3866 of SEQ ID NO: 317819
agugauuccguugagggau

SEQ ID NO: 514750 - RNA, 19 nt, Artificial Sequence
  Description of Artificial Sequence: Synthetic oligonucleotide
  Antisense strand to SEQ ID NO: 514749
aucccucaacggaaucacu

SEQ ID NO: 514751 - RNA, 19 nt, Artificial Sequence
  Description of Artificial Sequence: Synthetic oligonucleotide
  Sense strand starting at position 3867 of SEQ ID NO: 317819
gugauuccguugagggaua

SEQ ID NO: 514752 - RNA, 19 nt, Artificial Sequence
  Description of Artificial Sequence: Synthetic oligonucleotide
  Antisense strand to SEQ ID NO: 514751
uaucccucaacggaaucac

SEQ ID NO: 514753 - RNA, 19 nt, Artificial Sequence
  Description of Artificial Sequence: Synthetic oligonucleotide
  Sense strand starting at position 3869 of SEQ ID NO: 317819
gauuccguugagggauaca

SEQ ID NO: 514754 - RNA, 19 nt, Artificial Sequence
  Description of Artificial Sequence: Synthetic oligonucleotide
  Antisense strand to SEQ ID NO: 514753
uguaucccucaacggaauc

SEQ ID NO: 514755 - RNA, 19 nt, Artificial Sequence
  Description of Artificial Sequence: Synthetic oligonucleotide
  Sense strand starting at position 3874 of SEQ ID NO: 317819
cguugagggauacacugau

SEQ ID NO: 514756 - RNA, 19 nt, Artificial Sequence
  Description of Artificial Sequence: Synthetic oligonucleotide
  Antisense strand to SEQ ID NO: 514755
aucaguguaucccucaacg

SEQ ID NO: 514757 - RNA, 19 nt, Artificial Sequence
  Description of Artificial Sequence: Synthetic oligonucleotide
  Sense strand starting at position 3880 of SEQ ID NO: 317819
gggauacacugauaaagaa

SEQ ID NO: 514758 - RNA, 19 nt, Artificial Sequence
  Description of Artificial Sequence: Synthetic oligonucleotide
  Antisense strand to SEQ ID NO: 514757
uucuuuaucaguguauccc

SEQ ID NO: 514759 - RNA, 19 nt, Artificial Sequence
  Description of Artificial Sequence: Synthetic oligonucleotide
  Sense strand starting at position 3921 of SEQ ID NO: 317819
cagucaguucuauggguuu

SEQ ID NO: 514760 - RNA, 19 nt, Artificial Sequence
  Description of Artificial Sequence: Synthetic oligonucleotide
  Antisense strand to SEQ ID NO: 514759
aaacccauagaacugacug

SEQ ID NO: 514761 - RNA, 19 nt, Artificial Sequence
  Description of Artificial Sequence: Synthetic oligonucleotide
  Sense strand starting at position 3923 of SEQ ID NO: 317819
gucaguucuauggguuucu

SEQ ID NO: 514762 - RNA, 19 nt, Artificial Sequence
  Description of Artificial Sequence: Synthetic oligonucleotide
  Antisense strand to SEQ ID NO: 514761
agaaacccauagaacugac

SEQ ID NO: 514763 - RNA, 19 nt, Artificial Sequence
  Description of Artificial Sequence: Synthetic oligonucleotide
  Sense strand starting at position 404 of SEQ ID NO: 317820
auuacuuaucuggguuaca

SEQ ID NO: 514764 - RNA, 19 nt, Artificial Sequence
  Description of Artificial Sequence: Synthetic oligonucleotide
  Antisense strand to SEQ ID NO: 514763
uguaacccagauaaguaau

SEQ ID NO: 514765 - RNA, 19 nt, Artificial Sequence
  Description of Artificial Sequence: Synthetic oligonucleotide
  Sense strand starting at position 405 of SEQ ID NO: 317820
uuacuuaucuggguuacaa

SEQ ID NO: 514766 - RNA, 19 nt, Artificial Sequence
  Description of Artificial Sequence: Synthetic oligonucleotide
  Antisense strand to SEQ ID NO: 514765
uuguaacccagauaaguaa

SEQ ID NO: 514767 - RNA, 19 nt, Artificial Sequence
  Description of Artificial Sequence: Synthetic oligonucleotide
  Sense strand starting at position 484 of SEQ ID NO: 317820
acaggaugcuaaucucaag

SEQ ID NO: 514768 - RNA, 19 nt, Artificial Sequence
  Description of Artificial Sequence: Synthetic oligonucleotide
  Antisense strand to SEQ ID NO: 514767
cuugagauuagcauccugu

SEQ ID NO: 514769 - RNA, 19 nt, Artificial Sequence
  Description of Artificial Sequence: Synthetic oligonucleotide
  Sense strand starting at position 712 of SEQ ID NO: 317820
ucaucuacgguguaaacuu

SEQ ID NO: 514770 - RNA, 19 nt, Artificial Sequence
  Description of Artificial Sequence: Synthetic oligonucleotide
  Antisense strand to SEQ ID NO: 514769
aaguuuacaccguagauga

SEQ ID NO: 514771 - RNA, 19 nt, Artificial Sequence
  Description of Artificial Sequence: Synthetic oligonucleotide
  Sense strand starting at position 743 of SEQ ID NO: 317820
gcuucuuauuuacacagga

SEQ ID NO: 514772 - RNA, 19 nt, Artificial Sequence
  Description of Artificial Sequence: Synthetic oligonucleotide
  Antisense strand to SEQ ID NO: 514771
uccuguguaaauaagaagc

SEQ ID NO: 514773 - RNA, 19 nt, Artificial Sequence
  Description of Artificial Sequence: Synthetic oligonucleotide
  Sense strand starting at position 836 of SEQ ID NO: 317820
aagaaacguugagucugau

SEQ ID NO: 514774 - RNA, 19 nt, Artificial Sequence
  Description of Artificial Sequence: Synthetic oligonucleotide
  Antisense strand to SEQ ID NO: 514773
aucagacucaacguuucuu

SEQ ID NO: 514775 - RNA, 19 nt, Artificial Sequence
  Description of Artificial Sequence: Synthetic oligonucleotide
  Sense strand starting at position 870 of SEQ ID NO: 317820
ccaaguguacaaggaaaca

SEQ ID NO: 514776 - RNA, 19 nt, Artificial Sequence
  Description of Artificial Sequence: Synthetic oligonucleotide
  Antisense strand to SEQ ID NO: 514775
uguuuccuuguacacuugg

SEQ ID NO: 514777 - RNA, 19 nt, Artificial Sequence
  Description of Artificial Sequence: Synthetic oligonucleotide
  Sense strand starting at position 923 of SEQ ID NO: 317820
aaaggcuuugccgugcaua

SEQ ID NO: 514778 - RNA, 19 nt, Artificial Sequence
  Description of Artificial Sequence: Synthetic oligonucleotide
  Antisense strand to SEQ ID NO: 514777
uaugcacggcaaagccuuu

SEQ ID NO: 514779 - RNA, 19 nt, Artificial Sequence
  Description of Artificial Sequence: Synthetic oligonucleotide
  Sense strand starting at position 925 of SEQ ID NO: 317820
aggcuuugccgugcauaga

SEQ ID NO: 514780 - RNA, 19 nt, Artificial Sequence
  Description of Artificial Sequence: Synthetic oligonucleotide
  Antisense strand to SEQ ID NO: 514779
ucuaugcacggcaaagccu

SEQ ID NO: 514781 - RNA, 19 nt, Artificial Sequence
  Description of Artificial Sequence: Synthetic oligonucleotide
  Sense strand starting at position 928 of SEQ ID NO: 317820
cuuugccgugcauagauau

SEQ ID NO: 514782 - RNA, 19 nt, Artificial Sequence
  Description of Artificial Sequence: Synthetic oligonucleotide
  Antisense strand to SEQ ID NO: 514781
auaucuaugcacggcaaag

SEQ ID NO: 514783 - RNA, 19 nt, Artificial Sequence
  Description of Artificial Sequence: Synthetic oligonucleotide
  Sense strand starting at position 934 of SEQ ID NO: 317820
cgugcauagauaugauaga

SEQ ID NO: 514784 - RNA, 19 nt, Artificial Sequence
  Description of Artificial Sequence: Synthetic oligonucleotide
  Antisense strand to SEQ ID NO: 514783
ucuaucauaucuaugcacg

SEQ ID NO: 514785 - RNA, 19 nt, Artificial Sequence
  Description of Artificial Sequence: Synthetic oligonucleotide
  Sense strand starting at position 1040 of SEQ ID NO: 317820
ggcacugcccuggauugaa

SEQ ID NO: 514786 - RNA, 19 nt, Artificial Sequence
  Description of Artificial Sequence: Synthetic oligonucleotide
  Antisense strand to SEQ ID NO: 514785
uucaauccagggcagugcc

SEQ ID NO: 514787 - RNA, 19 nt, Artificial Sequence
  Description of Artificial Sequence: Synthetic oligonucleotide
  Sense strand starting at position 1248 of SEQ ID NO: 317820
ucaucauucucuucucguu

SEQ ID NO: 514788 - RNA, 19 nt, Artificial Sequence
  Description of Artificial Sequence: Synthetic oligonucleotide
  Antisense strand to SEQ ID NO: 514787
aacgagaagagaaugauga

SEQ ID NO: 514789 - RNA, 19 nt, Artificial Sequence
  Description of Artificial Sequence: Synthetic oligonucleotide
  Sense strand starting at position 1250 of SEQ ID NO: 317820
aucauucucuucucguuua

SEQ ID NO: 514790 - RNA, 19 nt, Artificial Sequence
  Description of Artificial Sequence: Synthetic oligonucleotide
  Antisense strand to SEQ ID NO: 514789
uaaacgagaagagaaugau

SEQ ID NO: 514791 - RNA, 19 nt, Artificial Sequence
  Description of Artificial Sequence: Synthetic oligonucleotide
  Sense strand starting at position 1253 of SEQ ID NO: 317820
auucucuucucguuuauca

SEQ ID NO: 514792 - RNA, 19 nt, Artificial Sequence
  Description of Artificial Sequence: Synthetic oligonucleotide
  Antisense strand to SEQ ID NO: 514791
ugauaaacgagaagagaau

SEQ ID NO: 514793 - RNA, 19 nt, Artificial Sequence
  Description of Artificial Sequence: Synthetic oligonucleotide
  Sense strand starting at position 1417 of SEQ ID NO: 317820
ucguguguccuugcauaag

SEQ ID NO: 514794 - RNA, 19 nt, Artificial Sequence
  Description of Artificial Sequence: Synthetic oligonucleotide
  Antisense strand to SEQ ID NO: 514793
cuuaugcaaggacacacga

SEQ ID NO: 514795 - RNA, 19 nt, Artificial Sequence
  Description of Artificial Sequence: Synthetic oligonucleotide
  Sense strand starting at position 1536 of SEQ ID NO: 317820
augagaugcuuuguaaagu

SEQ ID NO: 514796 - RNA, 19 nt, Artificial Sequence
  Description of Artificial Sequence: Synthetic oligonucleotide
  Antisense strand to SEQ ID NO: 514795
acuuuacaaagcaucucau

SEQ ID NO: 514797 - RNA, 19 nt, Artificial Sequence
  Description of Artificial Sequence: Synthetic oligonucleotide
  Sense strand starting at position 1558 of SEQ ID NO: 317820
cgcacauauuacucgaaua

SEQ ID NO: 514798 - RNA, 19 nt, Artificial Sequence
  Description of Artificial Sequence: Synthetic oligonucleotide
  Antisense strand to SEQ ID NO: 514797
uauucgaguaauaugugcg

SEQ ID NO: 514799 - RNA, 19 nt, Artificial Sequence
  Description of Artificial Sequence: Synthetic oligonucleotide
  Sense strand starting at position 1586 of SEQ ID NO: 317820
gacgguggccauuauuauu

SEQ ID NO: 514800 - RNA, 19 nt, Artificial Sequence
  Description of Artificial Sequence: Synthetic oligonucleotide
  Antisense strand to SEQ ID NO: 514799
aauaauaauggccaccguc

SEQ ID NO: 514801 - RNA, 19 nt, Artificial Sequence
  Description of Artificial Sequence: Synthetic oligonucleotide
  Sense strand starting at position 2263 of SEQ ID NO: 317820
ccucuuuccgagcgaacaa

SEQ ID NO: 514802 - RNA, 19 nt, Artificial Sequence
  Description of Artificial Sequence: Synthetic oligonucleotide
  Antisense strand to SEQ ID NO: 514801
uuguucgcucggaaagagg

SEQ ID NO: 514803 - RNA, 19 nt, Artificial Sequence
  Description of Artificial Sequence: Synthetic oligonucleotide
  Sense strand starting at position 2486 of SEQ ID NO: 317820
gcgacuuucuguucuaaca

SEQ ID NO: 514804 - RNA, 19 nt, Artificial Sequence
  Description of Artificial Sequence: Synthetic oligonucleotide
  Antisense strand to SEQ ID NO: 514803
uguuagaacagaaagucgc

SEQ ID NO: 514805 - RNA, 19 nt, Artificial Sequence
  Description of Artificial Sequence: Synthetic oligonucleotide
  Sense strand starting at position 2650 of SEQ ID NO: 317820
ggaacauugccauagcaac

SEQ ID NO: 514806 - RNA, 19 nt, Artificial Sequence
  Description of Artificial Sequence: Synthetic oligonucleotide
  Antisense strand to SEQ ID NO: 514805
guugcuauggcaauguucc

SEQ ID NO: 514807 - RNA, 19 nt, Artificial Sequence
  Description of Artificial Sequence: Synthetic oligonucleotide
  Sense strand starting at position 2681 of SEQ ID NO: 317820
gucugcucgaguuacaaag

SEQ ID NO: 514808 - RNA, 19 nt, Artificial Sequence
  Description of Artificial Sequence: Synthetic oligonucleotide
  Antisense strand to SEQ ID NO: 514807
cuuuguaacucgagcagac

SEQ ID NO: 514809 - RNA, 19 nt, Artificial Sequence
  Description of Artificial Sequence: Synthetic oligonucleotide
  Sense strand starting at position 2875 of SEQ ID NO: 317820
ucuuaauccugcuugaaga

SEQ ID NO: 514810 - RNA, 19 nt, Artificial Sequence
  Description of Artificial Sequence: Synthetic oligonucleotide
  Antisense strand to SEQ ID NO: 514809
ucuucaagcaggauuaaga

SEQ ID NO: 514811 - RNA, 19 nt, Artificial Sequence
  Description of Artificial Sequence: Synthetic oligonucleotide
  Sense strand starting at position 3092 of SEQ ID NO: 317820
ucuaguucuugucccagau

SEQ ID NO: 514812 - RNA, 19 nt, Artificial Sequence
  Description of Artificial Sequence: Synthetic oligonucleotide
  Antisense strand to SEQ ID NO: 514811
aucugggacaagaacuaga

SEQ ID NO: 514813 - RNA, 19 nt, Artificial Sequence
  Description of Artificial Sequence: Synthetic oligonucleotide
  Sense strand starting at position 3096 of SEQ ID NO: 317820
guucuugucccagaugcuu

SEQ ID NO: 514814 - RNA, 19 nt, Artificial Sequence
  Description of Artificial Sequence: Synthetic oligonucleotide
  Antisense strand to SEQ ID NO: 514813
aagcaucugggacaagaac

SEQ ID NO: 514815 - RNA, 19 nt, Artificial Sequence
  Description of Artificial Sequence: Synthetic oligonucleotide
  Sense strand starting at position 3102 of SEQ ID NO: 317820
gucccagaugcuuguacuu

SEQ ID NO: 514816 - RNA, 19 nt, Artificial Sequence
  Description of Artificial Sequence: Synthetic oligonucleotide
  Antisense strand to SEQ ID NO: 514815
aaguacaagcaucugggac

SEQ ID NO: 514817 - RNA, 19 nt, Artificial Sequence
  Description of Artificial Sequence: Synthetic oligonucleotide
  Sense strand starting at position 3122 of SEQ ID NO: 317820
agaggcuguugauaagaaa

SEQ ID NO: 514818 - RNA, 19 nt, Artificial Sequence
  Description of Artificial Sequence: Synthetic oligonucleotide
  Antisense strand to SEQ ID NO: 514817
uuucuuaucaacagccucu

SEQ ID NO: 514819 - RNA, 19 nt, Artificial Sequence
  Description of Artificial Sequence: Synthetic oligonucleotide
  Sense strand starting at position 3390 of SEQ ID NO: 317820
augagugucuagcuccuua

SEQ ID NO: 514820 - RNA, 19 nt, Artificial Sequence
  Description of Artificial Sequence: Synthetic oligonucleotide
  Antisense strand to SEQ ID NO: 514819
uaaggagcuagacacucau

SEQ ID NO: 514821 - RNA, 19 nt, Artificial Sequence
  Description of Artificial Sequence: Synthetic oligonucleotide
  Sense strand starting at position 3431 of SEQ ID NO: 317820
ggcugucgugagcuuguga

SEQ ID NO: 514822 - RNA, 19 nt, Artificial Sequence
  Description of Artificial Sequence: Synthetic oligonucleotide
  Antisense strand to SEQ ID NO: 514821
ucacaagcucacgacagcc

SEQ ID NO: 514823 - RNA, 19 nt, Artificial Sequence
  Description of Artificial Sequence: Synthetic oligonucleotide
  Sense strand starting at position 3432 of SEQ ID NO: 317820
gcugucgugagcuugugaa

SEQ ID NO: 514824 - RNA, 19 nt, Artificial Sequence
  Description of Artificial Sequence: Synthetic oligonucleotide
  Antisense strand to SEQ ID NO: 514823
uucacaagcucacgacagc

SEQ ID NO: 514825 - RNA, 19 nt, Artificial Sequence
  Description of Artificial Sequence: Synthetic oligonucleotide
  Sense strand starting at position 3572 of SEQ ID NO: 317820
gcucacugagccuguaauc

SEQ ID NO: 514826 - RNA, 19 nt, Artificial Sequence
  Description of Artificial Sequence: Synthetic oligonucleotide
  Antisense strand to SEQ ID NO: 514825
gauuacaggcucagugagc

SEQ ID NO: 514827 - RNA, 19 nt, Artificial Sequence
  Description of Artificial Sequence: Synthetic oligonucleotide
  Sense strand starting at position 3863 of SEQ ID NO: 317820
cagugauuccguugaggga

SEQ ID NO: 514828 - RNA, 19 nt, Artificial Sequence
  Description of Artificial Sequence: Synthetic oligonucleotide
  Antisense strand to SEQ ID NO: 514827
ucccucaacggaaucacug

SEQ ID NO: 514829 - RNA, 19 nt, Artificial Sequence
  Description of Artificial Sequence: Synthetic oligonucleotide
  Sense strand starting at position 3864 of SEQ ID NO: 317820
agugauuccguugagggau

SEQ ID NO: 514830 - RNA, 19 nt, Artificial Sequence
  Description of Artificial Sequence: Synthetic oligonucleotide
  Antisense strand to SEQ ID NO: 514829
aucccucaacggaaucacu

SEQ ID NO: 514831 - RNA, 19 nt, Artificial Sequence
  Description of Artificial Sequence: Synthetic oligonucleotide
  Sense strand starting at position 3865 of SEQ ID NO: 317820
gugauuccguugagggaua

SEQ ID NO: 514832 - RNA, 19 nt, Artificial Sequence
  Description of Artificial Sequence: Synthetic oligonucleotide
  Antisense strand to SEQ ID NO: 514831
uaucccucaacggaaucac

SEQ ID NO: 514833 - RNA, 19 nt, Artificial Sequence
  Description of Artificial Sequence: Synthetic oligonucleotide
  Sense strand starting at position 3867 of SEQ ID NO: 317820
gauuccguugagggauaca

SEQ ID NO: 514834 - RNA, 19 nt, Artificial Sequence
  Description of Artificial Sequence: Synthetic oligonucleotide
  Antisense strand to SEQ ID NO: 514833
uguaucccucaacggaauc

SEQ ID NO: 514835 - RNA, 19 nt, Artificial Sequence
  Description of Artificial Sequence: Synthetic oligonucleotide
  Sense strand starting at position 3872 of SEQ ID NO: 317820
cguugagggauacacugau

SEQ ID NO: 514836 - RNA, 19 nt, Artificial Sequence
  Description of Artificial Sequence: Synthetic oligonucleotide
  Antisense strand to SEQ ID NO: 514835
aucaguguaucccucaacg

SEQ ID NO: 514837 - RNA, 19 nt, Artificial Sequence
  Description of Artificial Sequence: Synthetic oligonucleotide
  Sense strand starting at position 3878 of SEQ ID NO: 317820
gggauacacugauaaagaa

SEQ ID NO: 514838 - RNA, 19 nt, Artificial Sequence
  Description of Artificial Sequence: Synthetic oligonucleotide
  Antisense strand to SEQ ID NO: 514837
uucuuuaucaguguauccc

SEQ ID NO: 514839 - RNA, 19 nt, Artificial Sequence
  Description of Artificial Sequence: Synthetic oligonucleotide
  Sense strand starting at position 3919 of SEQ ID NO: 317820
cagucaguucuauggguuu

SEQ ID NO: 514840 - RNA, 19 nt, Artificial Sequence
  Description of Artificial Sequence: Synthetic oligonucleotide
  Antisense strand to SEQ ID NO: 514839
aaacccauagaacugacug

SEQ ID NO: 514841 - RNA, 19 nt, Artificial Sequence
  Description of Artificial Sequence: Synthetic oligonucleotide
  Sense strand starting at position 3921 of SEQ ID NO: 317820
gucaguucuauggguuucu

SEQ ID NO: 514842 - RNA, 19 nt, Artificial Sequence
  Description of Artificial Sequence: Synthetic oligonucleotide
  Antisense strand to SEQ ID NO: 514841
agaaacccauagaacugac

SEQ ID NO: 514843 - RNA, 19 nt, Artificial Sequence
  Description of Artificial Sequence: Synthetic oligonucleotide
  Sense strand starting at position 136 of SEQ ID NO: 317821
auuacuuaucuggguuaca

SEQ ID NO: 514844 - RNA, 19 nt, Artificial Sequence
  Description of Artificial Sequence: Synthetic oligonucleotide
  Antisense strand to SEQ ID NO: 514843
uguaacccagauaaguaau

SEQ ID NO: 514845 - RNA, 19 nt, Artificial Sequence
  Description of Artificial Sequence: Synthetic oligonucleotide
  Sense strand starting at position 137 of SEQ ID NO: 317821
uuacuuaucuggguuacaa

SEQ ID NO: 514846 - RNA, 19 nt, Artificial Sequence
  Description of Artificial Sequence: Synthetic oligonucleotide
  Antisense strand to SEQ ID NO: 514845
uuguaacccagauaaguaa

SEQ ID NO: 514847 - RNA, 19 nt, Artificial Sequence
  Description of Artificial Sequence: Synthetic oligonucleotide
  Sense strand starting at position 216 of SEQ ID NO: 317821
acaggaugcuaaucucaag

SEQ ID NO: 514848 - RNA, 19 nt, Artificial Sequence
  Description of Artificial Sequence: Synthetic oligonucleotide
  Antisense strand to SEQ ID NO: 514847
cuugagauuagcauccugu

SEQ ID NO: 514849 - RNA, 19 nt, Artificial Sequence
  Description of Artificial Sequence: Synthetic oligonucleotide
  Sense strand starting at position 444 of SEQ ID NO: 317821
ucaucuacgguguaaacuu

SEQ ID NO: 514850 - RNA, 19 nt, Artificial Sequence
  Description of Artificial Sequence: Synthetic oligonucleotide
  Antisense strand to SEQ ID NO: 514849
aaguuuacaccguagauga

SEQ ID NO: 514851 - RNA, 19 nt, Artificial Sequence
  Description of Artificial Sequence: Synthetic oligonucleotide
  Sense strand starting at position 475 of SEQ ID NO: 317821
gcuucuuauuuacacagga

SEQ ID NO: 514852 - RNA, 19 nt, Artificial Sequence
  Description of Artificial Sequence: Synthetic oligonucleotide
  Antisense strand to SEQ ID NO: 514851
uccuguguaaauaagaagc

SEQ ID NO: 514853 - RNA, 19 nt, Artificial Sequence
  Description of Artificial Sequence: Synthetic oligonucleotide
  Sense strand starting at position 568 of SEQ ID NO: 317821
aagaaacguugagucugau

SEQ ID NO: 514854 - RNA, 19 nt, Artificial Sequence
  Description of Artificial Sequence: Synthetic oligonucleotide
  Antisense strand to SEQ ID NO: 514853
aucagacucaacguuucuu

SEQ ID NO: 514855 - RNA, 19 nt, Artificial Sequence
  Description of Artificial Sequence: Synthetic oligonucleotide
  Sense strand starting at position 602 of SEQ ID NO: 317821
ccaaguguacaaggaaaca

SEQ ID NO: 514856 - RNA, 19 nt, Artificial Sequence
  Description of Artificial Sequence: Synthetic oligonucleotide
  Antisense strand to SEQ ID NO: 514855
uguuuccuuguacacuugg

SEQ ID NO: 514857 - RNA, 19 nt, Artificial Sequence
  Description of Artificial Sequence: Synthetic oligonucleotide
  Sense strand starting at position 655 of SEQ ID NO: 317821
aaaggcuuugccgugcaua

SEQ ID NO: 514858 - RNA, 19 nt, Artificial Sequence
  Description of Artificial Sequence: Synthetic oligonucleotide
  Antisense strand to SEQ ID NO: 514857
uaugcacggcaaagccuuu

SEQ ID NO: 514859 - RNA, 19 nt, Artificial Sequence
  Description of Artificial Sequence: Synthetic oligonucleotide
  Sense strand starting at position 657 of SEQ ID NO: 317821
aggcuuugccgugcauaga

SEQ ID NO: 514860 - RNA, 19 nt, Artificial Sequence
  Description of Artificial Sequence: Synthetic oligonucleotide
  Antisense strand to SEQ ID NO: 514859
ucuaugcacggcaaagccu

SEQ ID NO: 514861 - RNA, 19 nt, Artificial Sequence
  Description of Artificial Sequence: Synthetic oligonucleotide
  Sense strand starting at position 660 of SEQ ID NO: 317821
cuuugccgugcauagauau

SEQ ID NO: 514862 - RNA, 19 nt, Artificial Sequence
  Description of Artificial Sequence: Synthetic oligonucleotide
  Antisense strand to SEQ ID NO: 514861
auaucuaugcacggcaaag

SEQ ID NO: 514863 - RNA, 19 nt, Artificial Sequence
  Description of Artificial Sequence: Synthetic oligonucleotide
  Sense strand starting at position 666 of SEQ ID NO: 317821
cgugcauagauaugauaga

SEQ ID NO: 514864 - RNA, 19 nt, Artificial Sequence
  Description of Artificial Sequence: Synthetic oligonucleotide
  Antisense strand to SEQ ID NO: 514863
ucuaucauaucuaugcacg

SEQ ID NO: 514865 - RNA, 19 nt, Artificial Sequence
  Description of Artificial Sequence: Synthetic oligonucleotide
  Sense strand starting at position 772 of SEQ ID NO: 317821
ggcacugcccuggauugaa

SEQ ID NO: 514866 - RNA, 19 nt, Artificial Sequence
  Description of Artificial Sequence: Synthetic oligonucleotide
  Antisense strand to SEQ ID NO: 514865
uucaauccagggcagugcc

SEQ ID NO: 514867 - RNA, 19 nt, Artificial Sequence
  Description of Artificial Sequence: Synthetic oligonucleotide
  Sense strand starting at position 980 of SEQ ID NO: 317821
ucaucauucucuucucguu

SEQ ID NO: 514868 - RNA, 19 nt, Artificial Sequence
  Description of Artificial Sequence: Synthetic oligonucleotide
  Antisense strand to SEQ ID NO: 514867
aacgagaagagaaugauga

SEQ ID NO: 514869 - RNA, 19 nt, Artificial Sequence
  Description of Artificial Sequence: Synthetic oligonucleotide
  Sense strand starting at position 982 of SEQ ID NO: 317821
aucauucucuucucguuua

SEQ ID NO: 514870 - RNA, 19 nt, Artificial Sequence
  Description of Artificial Sequence: Synthetic oligonucleotide
  Antisense strand to SEQ ID NO: 514869
uaaacgagaagagaaugau

SEQ ID NO: 514871 - RNA, 19 nt, Artificial Sequence
  Description of Artificial Sequence: Synthetic oligonucleotide
  Sense strand starting at position 985 of SEQ ID NO: 317821
auucucuucucguuuauca

SEQ ID NO: 514872 - RNA, 19 nt, Artificial Sequence
  Description of Artificial Sequence: Synthetic oligonucleotide
  Antisense strand to SEQ ID NO: 514871
ugauaaacgagaagagaau

SEQ ID NO: 514873 - RNA, 19 nt, Artificial Sequence
  Description of Artificial Sequence: Synthetic oligonucleotide
  Sense strand starting at position 1149 of SEQ ID NO: 317821
ucguguguccuugcauaag

SEQ ID NO: 514874 - RNA, 19 nt, Artificial Sequence
  Description of Artificial Sequence: Synthetic oligonucleotide
  Antisense strand to SEQ ID NO: 514873
cuuaugcaaggacacacga

SEQ ID NO: 514875 - RNA, 19 nt, Artificial Sequence
  Description of Artificial Sequence: Synthetic oligonucleotide
  Sense strand starting at position 1268 of SEQ ID NO: 317821
augagaugcuuuguaaagu

SEQ ID NO: 514876 - RNA, 19 nt, Artificial Sequence
  Description of Artificial Sequence: Synthetic oligonucleotide
  Antisense strand to SEQ ID NO: 514875
acuuuacaaagcaucucau

SEQ ID NO: 514877 - RNA, 19 nt, Artificial Sequence
  Description of Artificial Sequence: Synthetic oligonucleotide
  Sense strand starting at position 1290 of SEQ ID NO: 317821
cgcacauauuacucgaaua

SEQ ID NO: 514878 - RNA, 19 nt, Artificial Sequence
  Description of Artificial Sequence: Synthetic oligonucleotide
  Antisense strand to SEQ ID NO: 514877
uauucgaguaauaugugcg

SEQ ID NO: 514879 - RNA, 19 nt, Artificial Sequence
  Description of Artificial Sequence: Synthetic oligonucleotide
  Sense strand starting at position 1318 of SEQ ID NO: 317821
gacgguggccauuauuauu

SEQ ID NO: 514880 - RNA, 19 nt, Artificial Sequence
  Description of Artificial Sequence: Synthetic oligonucleotide
  Antisense strand to SEQ ID NO: 514879
aauaauaauggccaccguc

SEQ ID NO: 514881 - RNA, 19 nt, Artificial Sequence
  Description of Artificial Sequence: Synthetic oligonucleotide
  Sense strand starting at position 1995 of SEQ ID NO: 317821
ccucuuuccgagcgaacaa

SEQ ID NO: 514882 - RNA, 19 nt, Artificial Sequence
  Description of Artificial Sequence: Synthetic oligonucleotide
  Antisense strand to SEQ ID NO: 514881
uuguucgcucggaaagagg

SEQ ID NO: 514883 - RNA, 19 nt, Artificial Sequence
  Description of Artificial Sequence: Synthetic oligonucleotide
  Sense strand starting at position 2218 of SEQ ID NO: 317821
gcgacuuucuguucuaaca

SEQ ID NO: 514884 - RNA, 19 nt, Artificial Sequence
  Description of Artificial Sequence: Synthetic oligonucleotide
  Antisense strand to SEQ ID NO: 514883
uguuagaacagaaagucgc

SEQ ID NO: 514885 - RNA, 19 nt, Artificial Sequence
  Description of Artificial Sequence: Synthetic oligonucleotide
  Sense strand starting at position 2382 of SEQ ID NO: 317821
ggaacauugccauagcaac

SEQ ID NO: 514886 - RNA, 19 nt, Artificial Sequence
  Description of Artificial Sequence: Synthetic oligonucleotide
  Antisense strand to SEQ ID NO: 514885
guugcuauggcaauguucc

SEQ ID NO: 514887 - RNA, 19 nt, Artificial Sequence
  Description of Artificial Sequence: Synthetic oligonucleotide
  Sense strand starting at position 2413 of SEQ ID NO: 317821
gucugcucgaguuacaaag

SEQ ID NO: 514888 - RNA, 19 nt, Artificial Sequence
  Description of Artificial Sequence: Synthetic oligonucleotide
  Antisense strand to SEQ ID NO: 514887
cuuuguaacucgagcagac

SEQ ID NO: 514889 - RNA, 19 nt, Artificial Sequence
  Description of Artificial Sequence: Synthetic oligonucleotide
  Sense strand starting at position 2607 of SEQ ID NO: 317821
ucuuaauccugcuugaaga

SEQ ID NO: 514890 - RNA, 19 nt, Artificial Sequence
  Description of Artificial Sequence: Synthetic oligonucleotide
  Antisense strand to SEQ ID NO: 514889
ucuucaagcaggauuaaga

SEQ ID NO: 514891 - RNA, 19 nt, Artificial Sequence
  Description of Artificial Sequence: Synthetic oligonucleotide
  Sense strand starting at position 2824 of SEQ ID NO: 317821
ucuaguucuugucccagau

SEQ ID NO: 514892 - RNA, 19 nt, Artificial Sequence
  Description of Artificial Sequence: Synthetic oligonucleotide
  Antisense strand to SEQ ID NO: 514891
aucugggacaagaacuaga

SEQ ID NO: 514893 - RNA, 19 nt, Artificial Sequence
  Description of Artificial Sequence: Synthetic oligonucleotide
  Sense strand starting at position 2828 of SEQ ID NO: 317821
guucuugucccagaugcuu

SEQ ID NO: 514894 - RNA, 19 nt, Artificial Sequence
  Description of Artificial Sequence: Synthetic oligonucleotide
  Antisense strand to SEQ ID NO: 514893
aagcaucugggacaagaac

SEQ ID NO: 514895 - RNA, 19 nt, Artificial Sequence
  Description of Artificial Sequence: Synthetic oligonucleotide
  Sense strand starting at position 2834 of SEQ ID NO: 317821
gucccagaugcuuguacuu

SEQ ID NO: 514896 - RNA, 19 nt, Artificial Sequence
  Description of Artificial Sequence: Synthetic oligonucleotide
  Antisense strand to SEQ ID NO: 514895
aaguacaagcaucugggac

SEQ ID NO: 514897 - RNA, 19 nt, Artificial Sequence
  Description of Artificial Sequence: Synthetic oligonucleotide
  Sense strand starting at position 3122 of SEQ ID NO: 317821
augagugucuagcuccuua

SEQ ID NO: 514898 - RNA, 19 nt, Artificial Sequence
  Description of Artificial Sequence: Synthetic oligonucleotide
  Antisense strand to SEQ ID NO: 514897
uaaggagcuagacacucau

SEQ ID NO: 514899 - RNA, 19 nt, Artificial Sequence
  Description of Artificial Sequence: Synthetic oligonucleotide
  Sense strand starting at position 3163 of SEQ ID NO: 317821
ggcugucgugagcuuguga

SEQ ID NO: 514900 - RNA, 19 nt, Artificial Sequence
  Description of Artificial Sequence: Synthetic oligonucleotide
  Antisense strand to SEQ ID NO: 514899
ucacaagcucacgacagcc

SEQ ID NO: 514901 - RNA, 19 nt, Artificial Sequence
  Description of Artificial Sequence: Synthetic oligonucleotide
  Sense strand starting at position 3164 of SEQ ID NO: 317821
gcugucgugagcuugugaa

SEQ ID NO: 514902 - RNA, 19 nt, Artificial Sequence
  Description of Artificial Sequence: Synthetic oligonucleotide
  Antisense strand to SEQ ID NO: 514901
uucacaagcucacgacagc

SEQ ID NO: 514903 - RNA, 19 nt, Artificial Sequence
  Description of Artificial Sequence: Synthetic oligonucleotide
  Sense strand starting at position 3304 of SEQ ID NO: 317821
gcucacugagccuguaauc

SEQ ID NO: 514904 - RNA, 19 nt, Artificial Sequence
  Description of Artificial Sequence: Synthetic oligonucleotide
  Antisense strand to SEQ ID NO: 514903
gauuacaggcucagugagc

SEQ ID NO: 514905 - RNA, 19 nt, Artificial Sequence
  Description of Artificial Sequence: Synthetic oligonucleotide
  Sense strand starting at position 3595 of SEQ ID NO: 317821
cagugauuccguugaggga

SEQ ID NO: 514906 - RNA, 19 nt, Artificial Sequence
  Description of Artificial Sequence: Synthetic oligonucleotide
  Antisense strand to SEQ ID NO: 514905
ucccucaacggaaucacug

SEQ ID NO: 514907 - RNA, 19 nt, Artificial Sequence
  Description of Artificial Sequence: Synthetic oligonucleotide
  Sense strand starting at position 3596 of SEQ ID NO: 317821
agugauuccguugagggau

SEQ ID NO: 514908 - RNA, 19 nt, Artificial Sequence
  Description of Artificial Sequence: Synthetic oligonucleotide
  Antisense strand to SEQ ID NO: 514907
aucccucaacggaaucacu

SEQ ID NO: 514909 - RNA, 19 nt, Artificial Sequence
  Description of Artificial Sequence: Synthetic oligonucleotide
  Sense strand starting at position 3597 of SEQ ID NO: 317821
gugauuccguugagggaua

SEQ ID NO: 514910 - RNA, 19 nt, Artificial Sequence
  Description of Artificial Sequence: Synthetic oligonucleotide
  Antisense strand to SEQ ID NO: 514909
uaucccucaacggaaucac

SEQ ID NO: 514911 - RNA, 19 nt, Artificial Sequence
  Description of Artificial Sequence: Synthetic oligonucleotide
  Sense strand starting at position 3599 of SEQ ID NO: 317821
gauuccguugagggauaca

SEQ ID NO: 514912 - RNA, 19 nt, Artificial Sequence
  Description of Artificial Sequence: Synthetic oligonucleotide
  Antisense strand to SEQ ID NO: 514911
uguaucccucaacggaauc

SEQ ID NO: 514913 - RNA, 19 nt, Artificial Sequence
  Description of Artificial Sequence: Synthetic oligonucleotide
  Sense strand starting at position 3604 of SEQ ID NO: 317821
cguugagggauacacugau

SEQ ID NO: 514914 - RNA, 19 nt, Artificial Sequence
  Description of Artificial Sequence: Synthetic oligonucleotide
  Antisense strand to SEQ ID NO: 514913
aucaguguaucccucaacg

SEQ ID NO: 514915 - RNA, 19 nt, Artificial Sequence
  Description of Artificial Sequence: Synthetic oligonucleotide
  Sense strand starting at position 3610 of SEQ ID NO: 317821
gggauacacugauaaagaa

SEQ ID NO: 514916 - RNA, 19 nt, Artificial Sequence
  Description of Artificial Sequence: Synthetic oligonucleotide
  Antisense strand to SEQ ID NO: 514915
uucuuuaucaguguauccc

SEQ ID NO: 514917 - RNA, 19 nt, Artificial Sequence
  Description of Artificial Sequence: Synthetic oligonucleotide
  Sense strand starting at position 3651 of SEQ ID NO: 317821
cagucaguucuauggguuu

SEQ ID NO: 514918 - RNA, 19 nt, Artificial Sequence
  Description of Artificial Sequence: Synthetic oligonucleotide
  Antisense strand to SEQ ID NO: 514917
aaacccauagaacugacug

SEQ ID NO: 514919 - RNA, 19 nt, Artificial Sequence
  Description of Artificial Sequence: Synthetic oligonucleotide
  Sense strand starting at position 3653 of SEQ ID NO: 317821
gucaguucuauggguuucu

SEQ ID NO: 514920 - RNA, 19 nt, Artificial Sequence
  Description of Artificial Sequence: Synthetic oligonucleotide
  Antisense strand to SEQ ID NO: 514919
agaaacccauagaacugac

SEQ ID NO: 514921 - RNA, 19 nt, Artificial Sequence
  Description of Artificial Sequence: Synthetic oligonucleotide
  Sense strand starting at position 3981 of SEQ ID NO: 317821
ccaguucuguggguuucua

SEQ ID NO: 514922 - RNA, 19 nt, Artificial Sequence
  Description of Artificial Sequence: Synthetic oligonucleotide
  Antisense strand to SEQ ID NO: 514921
uagaaacccacagaacugg

SEQ ID NO: 514923 - RNA, 19 nt, Artificial Sequence
  Description of Artificial Sequence: Synthetic oligonucleotide
  Sense strand starting at position 104 of SEQ ID NO: 317822
cuagaagagaugugauccu

SEQ ID NO: 514924 - RNA, 19 nt, Artificial Sequence
  Description of Artificial Sequence: Synthetic oligonucleotide
  Antisense strand to SEQ ID NO: 514923
aggaucacaucucuucuag

SEQ ID NO: 514925 - RNA, 19 nt, Artificial Sequence
  Description of Artificial Sequence: Synthetic oligonucleotide
  Sense strand starting at position 113 of SEQ ID NO: 317822
augugauccuagcuuaaau

SEQ ID NO: 514926 - RNA, 19 nt, Artificial Sequence
  Description of Artificial Sequence: Synthetic oligonucleotide
  Antisense strand to SEQ ID NO: 514925
auuuaagcuaggaucacau

SEQ ID NO: 514927 - RNA, 19 nt, Artificial Sequence
  Description of Artificial Sequence: Synthetic oligonucleotide
  Sense strand starting at position 115 of SEQ ID NO: 317822
gugauccuagcuuaaauua

SEQ ID NO: 514928 - RNA, 19 nt, Artificial Sequence
  Description of Artificial Sequence: Synthetic oligonucleotide
  Antisense strand to SEQ ID NO: 514927
uaauuuaagcuaggaucac

SEQ ID NO: 514929 - RNA, 19 nt, Artificial Sequence
  Description of Artificial Sequence: Synthetic oligonucleotide
  Sense strand starting at position 233 of SEQ ID NO: 317822
acagcuggauacguuaaua

SEQ ID NO: 514930 - RNA, 19 nt, Artificial Sequence
  Description of Artificial Sequence: Synthetic oligonucleotide
  Antisense strand to SEQ ID NO: 514929
uauuaacguauccagcugu

SEQ ID NO: 514931 - RNA, 19 nt, Artificial Sequence
  Description of Artificial Sequence: Synthetic oligonucleotide
  Sense strand starting at position 262 of SEQ ID NO: 317822
cugggcagucuagggaauu

SEQ ID NO: 514932 - RNA, 19 nt, Artificial Sequence
  Description of Artificial Sequence: Synthetic oligonucleotide
  Antisense strand to SEQ ID NO: 514931
aauucccuagacugcccag

SEQ ID NO: 514933 - RNA, 19 nt, Artificial Sequence
  Description of Artificial Sequence: Synthetic oligonucleotide
  Sense strand starting at position 548 of SEQ ID NO: 317822
guggcucuuucuuugaaga

SEQ ID NO: 514934 - RNA, 19 nt, Artificial Sequence
  Description of Artificial Sequence: Synthetic oligonucleotide
  Antisense strand to SEQ ID NO: 514933
ucuucaaagaaagagccac

SEQ ID NO: 514935 - RNA, 19 nt, Artificial Sequence
  Description of Artificial Sequence: Synthetic oligonucleotide
  Sense strand starting at position 549 of SEQ ID NO: 317822
uggcucuuucuuugaagac

SEQ ID NO: 514936 - RNA, 19 nt, Artificial Sequence
  Description of Artificial Sequence: Synthetic oligonucleotide
  Antisense strand to SEQ ID NO: 514935
gucuucaaagaaagagcca

SEQ ID NO: 514937 - RNA, 19 nt, Artificial Sequence
  Description of Artificial Sequence: Synthetic oligonucleotide
  Sense strand starting at position 597 of SEQ ID NO: 317822
gucacagagccucauauga

SEQ ID NO: 514938 - RNA, 19 nt, Artificial Sequence
  Description of Artificial Sequence: Synthetic oligonucleotide
  Antisense strand to SEQ ID NO: 514937
ucauaugaggcucugugac

SEQ ID NO: 514939 - RNA, 19 nt, Artificial Sequence
  Description of Artificial Sequence: Synthetic oligonucleotide
  Sense strand starting at position 620 of SEQ ID NO: 317822
ucaaguaagcuguggaagu

SEQ ID NO: 514940 - RNA, 19 nt, Artificial Sequence
  Description of Artificial Sequence: Synthetic oligonucleotide
  Antisense strand to SEQ ID NO: 514939
acuuccacagcuuacuuga

SEQ ID NO: 514941 - RNA, 19 nt, Artificial Sequence
  Description of Artificial Sequence: Synthetic oligonucleotide
  Sense strand starting at position 640 of SEQ ID NO: 317822
gcgauucccagguaaggga

SEQ ID NO: 514942 - RNA, 19 nt, Artificial Sequence
  Description of Artificial Sequence: Synthetic oligonucleotide
  Antisense strand to SEQ ID NO: 514941
ucccuuaccugggaaucgc

SEQ ID NO: 514943 - RNA, 19 nt, Artificial Sequence
  Description of Artificial Sequence: Synthetic oligonucleotide
  Sense strand starting at position 922 of SEQ ID NO: 317822
gguguaccagcguugguua

SEQ ID NO: 514944 - RNA, 19 nt, Artificial Sequence
  Description of Artificial Sequence: Synthetic oligonucleotide
  Antisense strand to SEQ ID NO: 514943
uaaccaacgcugguacacc

SEQ ID NO: 514945 - RNA, 19 nt, Artificial Sequence
  Description of Artificial Sequence: Synthetic oligonucleotide
  Sense strand starting at position 958 of SEQ ID NO: 317822
uggucacagucaccagaua

SEQ ID NO: 514946 - RNA, 19 nt, Artificial Sequence
  Description of Artificial Sequence: Synthetic oligonucleotide
  Antisense strand to SEQ ID NO: 514945
uaucuggugacugugacca

SEQ ID NO: 514947 - RNA, 19 nt, Artificial Sequence
  Description of Artificial Sequence: Synthetic oligonucleotide
  Sense strand starting at position 981 of SEQ ID NO: 317822
ccacgagccucaucuuuau

SEQ ID NO: 514948 - RNA, 19 nt, Artificial Sequence
  Description of Artificial Sequence: Synthetic oligonucleotide
  Antisense strand to SEQ ID NO: 514947
auaaagaugaggcucgugg

SEQ ID NO: 514949 - RNA, 19 nt, Artificial Sequence
  Description of Artificial Sequence: Synthetic oligonucleotide
  Sense strand starting at position 1062 of SEQ ID NO: 317822
cuaggucuguuacuccaaa

SEQ ID NO: 514950 - RNA, 19 nt, Artificial Sequence
  Description of Artificial Sequence: Synthetic oligonucleotide
  Antisense strand to SEQ ID NO: 514949
uuuggaguaacagaccuag

SEQ ID NO: 514951 - RNA, 19 nt, Artificial Sequence
  Description of Artificial Sequence: Synthetic oligonucleotide
  Sense strand starting at position 1831 of SEQ ID NO: 317822
ggcaguuuccucuaugcaa

SEQ ID NO: 514952 - RNA, 19 nt, Artificial Sequence
  Description of Artificial Sequence: Synthetic oligonucleotide
  Antisense strand to SEQ ID NO: 514951
uugcauagaggaaacugcc

SEQ ID NO: 514953 - RNA, 19 nt, Artificial Sequence
  Description of Artificial Sequence: Synthetic oligonucleotide
  Sense strand starting at position 1846 of SEQ ID NO: 317822
gcaaauagacccugccaga

SEQ ID NO: 514954 - RNA, 19 nt, Artificial Sequence
  Description of Artificial Sequence: Synthetic oligonucleotide
  Antisense strand to SEQ ID NO: 514953
ucuggcagggucuauuugc

SEQ ID NO: 514955 - RNA, 19 nt, Artificial Sequence
  Description of Artificial Sequence: Synthetic oligonucleotide
  Sense strand starting at position 2322 of SEQ ID NO: 317822
ucgagauugcgccaaacag

SEQ ID NO: 514956 - RNA, 19 nt, Artificial Sequence
  Description of Artificial Sequence: Synthetic oligonucleotide
  Antisense strand to SEQ ID NO: 514955
cuguuuggcgcaaucucga

SEQ ID NO: 514957 - RNA, 19 nt, Artificial Sequence
  Description of Artificial Sequence: Synthetic oligonucleotide
  Sense strand starting at position 2351 of SEQ ID NO: 317822
cuuagaaucuucucacgag

SEQ ID NO: 514958 - RNA, 19 nt, Artificial Sequence
  Description of Artificial Sequence: Synthetic oligonucleotide
  Antisense strand to SEQ ID NO: 514957
cucgugagaagauucuaag

SEQ ID NO: 514959 - RNA, 19 nt, Artificial Sequence
  Description of Artificial Sequence: Synthetic oligonucleotide
  Sense strand starting at position 2355 of SEQ ID NO: 317822
gaaucuucucacgaguucu

SEQ ID NO: 514960 - RNA, 19 nt, Artificial Sequence
  Description of Artificial Sequence: Synthetic oligonucleotide
  Antisense strand to SEQ ID NO: 514959
agaacucgugagaagauuc

SEQ ID NO: 514961 - RNA, 19 nt, Artificial Sequence
  Description of Artificial Sequence: Synthetic oligonucleotide
  Sense strand starting at position 2506 of SEQ ID NO: 317822
ugacuuaauucuguauuag

SEQ ID NO: 514962 - RNA, 19 nt, Artificial Sequence
  Description of Artificial Sequence: Synthetic oligonucleotide
  Antisense strand to SEQ ID NO: 514961
cuaauacagaauuaaguca

SEQ ID NO: 514963 - RNA, 19 nt, Artificial Sequence
  Description of Artificial Sequence: Synthetic oligonucleotide
  Sense strand starting at position 2580 of SEQ ID NO: 317822
gcgauucugcugcaaauuu

SEQ ID NO: 514964 - RNA, 19 nt, Artificial Sequence
  Description of Artificial Sequence: Synthetic oligonucleotide
  Antisense strand to SEQ ID NO: 514963
aaauuugcagcagaaucgc

SEQ ID NO: 514965 - RNA, 19 nt, Artificial Sequence
  Description of Artificial Sequence: Synthetic oligonucleotide
  Sense strand starting at position 2667 of SEQ ID NO: 317822
uaacaagucuuggcaggaa

SEQ ID NO: 514966 - RNA, 19 nt, Artificial Sequence
  Description of Artificial Sequence: Synthetic oligonucleotide
  Antisense strand to SEQ ID NO: 514965
uuccugccaagacuuguua

SEQ ID NO: 514967 - RNA, 19 nt, Artificial Sequence
  Description of Artificial Sequence: Synthetic oligonucleotide
  Sense strand starting at position 2718 of SEQ ID NO: 317822
agauuccuaccaggcauau

SEQ ID NO: 514968 - RNA, 19 nt, Artificial Sequence
  Description of Artificial Sequence: Synthetic oligonucleotide
  Antisense strand to SEQ ID NO: 514967
auaugccugguaggaaucu

SEQ ID NO: 514969 - RNA, 19 nt, Artificial Sequence
  Description of Artificial Sequence: Synthetic oligonucleotide
  Sense strand starting at position 2758 of SEQ ID NO: 317822
aguaacucuuucgcuaacu

SEQ ID NO: 514970 - RNA, 19 nt, Artificial Sequence
  Description of Artificial Sequence: Synthetic oligonucleotide
  Antisense strand to SEQ ID NO: 514969
aguuagcgaaagaguuacu

SEQ ID NO: 514971 - RNA, 19 nt, Artificial Sequence
  Description of Artificial Sequence: Synthetic oligonucleotide
  Sense strand starting at position 2769 of SEQ ID NO: 317822
cgcuaacuccuguaauacc

SEQ ID NO: 514972 - RNA, 19 nt, Artificial Sequence
  Description of Artificial Sequence: Synthetic oligonucleotide
  Antisense strand to SEQ ID NO: 514971
gguauuacaggaguuagcg

SEQ ID NO: 514973 - RNA, 19 nt, Artificial Sequence
  Description of Artificial Sequence: Synthetic oligonucleotide
  Sense strand starting at position 2812 of SEQ ID NO: 317822
ucagaucuuugugauuuga

SEQ ID NO: 514974 - RNA, 19 nt, Artificial Sequence
  Description of Artificial Sequence: Synthetic oligonucleotide
  Antisense strand to SEQ ID NO: 514973
ucaaaucacaaagaucuga

SEQ ID NO: 514975 - RNA, 19 nt, Artificial Sequence
  Description of Artificial Sequence: Synthetic oligonucleotide
  Sense strand starting at position 2895 of SEQ ID NO: 317822
auaucuucugguugucuca

SEQ ID NO: 514976 - RNA, 19 nt, Artificial Sequence
  Description of Artificial Sequence: Synthetic oligonucleotide
  Antisense strand to SEQ ID NO: 514975
ugagacaaccagaagauau

SEQ ID NO: 514977 - RNA, 19 nt, Artificial Sequence
  Description of Artificial Sequence: Synthetic oligonucleotide
  Sense strand starting at position 2945 of SEQ ID NO: 317822
gagugccucuggcuaacau

SEQ ID NO: 514978 - RNA, 19 nt, Artificial Sequence
  Description of Artificial Sequence: Synthetic oligonucleotide
  Antisense strand to SEQ ID NO: 514977
auguuagccagaggcacuc

SEQ ID NO: 514979 - RNA, 19 nt, Artificial Sequence
  Description of Artificial Sequence: Synthetic oligonucleotide
  Sense strand starting at position 3019 of SEQ ID NO: 317822
gguugauagacuuggcucu

SEQ ID NO: 514980 - RNA, 19 nt, Artificial Sequence
  Description of Artificial Sequence: Synthetic oligonucleotide
  Antisense strand to SEQ ID NO: 514979
agagccaagucuaucaacc

SEQ ID NO: 514981 - RNA, 19 nt, Artificial Sequence
  Description of Artificial Sequence: Synthetic oligonucleotide
  Sense strand starting at position 3026 of SEQ ID NO: 317822
agacuuggcucugugcuaa

SEQ ID NO: 514982 - RNA, 19 nt, Artificial Sequence
  Description of Artificial Sequence: Synthetic oligonucleotide
  Antisense strand to SEQ ID NO: 514981
uuagcacagagccaagucu

SEQ ID NO: 514983 - RNA, 19 nt, Artificial Sequence
  Description of Artificial Sequence: Synthetic oligonucleotide
  Sense strand starting at position 3051 of SEQ ID NO: 317822
guguaugcccaauagaaug

SEQ ID NO: 514984 - RNA, 19 nt, Artificial Sequence
  Description of Artificial Sequence: Synthetic oligonucleotide
  Antisense strand to SEQ ID NO: 514983
cauucuauugggcauacac

SEQ ID NO: 514985 - RNA, 19 nt, Artificial Sequence
  Description of Artificial Sequence: Synthetic oligonucleotide
  Sense strand starting at position 3188 of SEQ ID NO: 317822
ugccauguuccugaagcuu

SEQ ID NO: 514986 - RNA, 19 nt, Artificial Sequence
  Description of Artificial Sequence: Synthetic oligonucleotide
  Antisense strand to SEQ ID NO: 514985
aagcuucaggaacauggca

SEQ ID NO: 514987 - RNA, 19 nt, Artificial Sequence
  Description of Artificial Sequence: Synthetic oligonucleotide
  Sense strand starting at position 3199 of SEQ ID NO: 317822
ugaagcuucuguguauuga

SEQ ID NO: 514988 - RNA, 19 nt, Artificial Sequence
  Description of Artificial Sequence: Synthetic oligonucleotide
  Antisense strand to SEQ ID NO: 514987
ucaauacacagaagcuuca

SEQ ID NO: 514989 - RNA, 19 nt, Artificial Sequence
  Description of Artificial Sequence: Synthetic oligonucleotide
  Sense strand starting at position 3200 of SEQ ID NO: 317822
gaagcuucuguguauugaa

SEQ ID NO: 514990 - RNA, 19 nt, Artificial Sequence
  Description of Artificial Sequence: Synthetic oligonucleotide
  Antisense strand to SEQ ID NO: 514989
uucaauacacagaagcuuc

SEQ ID NO: 514991 - RNA, 19 nt, Artificial Sequence
  Description of Artificial Sequence: Synthetic oligonucleotide
  Sense strand starting at position 3280 of SEQ ID NO: 317822
cugcucucagaucguuaaa

SEQ ID NO: 514992 - RNA, 19 nt, Artificial Sequence
  Description of Artificial Sequence: Synthetic oligonucleotide
  Antisense strand to SEQ ID NO: 514991
uuuaacgaucugagagcag

SEQ ID NO: 514993 - RNA, 19 nt, Artificial Sequence
  Description of Artificial Sequence: Synthetic oligonucleotide
  Sense strand starting at position 3377 of SEQ ID NO: 317822
uaagguggcccacaagauu

SEQ ID NO: 514994 - RNA, 19 nt, Artificial Sequence
  Description of Artificial Sequence: Synthetic oligonucleotide
  Antisense strand to SEQ ID NO: 514993
aaucuugugggccaccuua

SEQ ID NO: 514995 - RNA, 19 nt, Artificial Sequence
  Description of Artificial Sequence: Synthetic oligonucleotide
  Sense strand starting at position 3426 of SEQ ID NO: 317822
uggaaauacugucugcaac

SEQ ID NO: 514996 - RNA, 19 nt, Artificial Sequence
  Description of Artificial Sequence: Synthetic oligonucleotide
  Antisense strand to SEQ ID NO: 514995
guugcagacaguauuucca

SEQ ID NO: 514997 - RNA, 19 nt, Artificial Sequence
  Description of Artificial Sequence: Synthetic oligonucleotide
  Sense strand starting at position 3427 of SEQ ID NO: 317822
ggaaauacugucugcaacu

SEQ ID NO: 514998 - RNA, 19 nt, Artificial Sequence
  Description of Artificial Sequence: Synthetic oligonucleotide
  Antisense strand to SEQ ID NO: 514997
aguugcagacaguauuucc

SEQ ID NO: 514999 - RNA, 19 nt, Artificial Sequence
  Description of Artificial Sequence: Synthetic oligonucleotide
  Sense strand starting at position 3470 of SEQ ID NO: 317822
ugacuuacuuguguccauu

SEQ ID NO: 515000 - RNA, 19 nt, Artificial Sequence
  Description of Artificial Sequence: Synthetic oligonucleotide
  Antisense strand to SEQ ID NO: 514999
aauggacacaaguaaguca

SEQ ID NO: 515001 - RNA, 19 nt, Artificial Sequence
  Description of Artificial Sequence: Synthetic oligonucleotide
  Sense strand starting at position 3530 of SEQ ID NO: 317822
ucaagacagccugaaugua

SEQ ID NO: 515002 - RNA, 19 nt, Artificial Sequence
  Description of Artificial Sequence: Synthetic oligonucleotide
  Antisense strand to SEQ ID NO: 515001
uacauucaggcugucuuga

SEQ ID NO: 515003 - RNA, 19 nt, Artificial Sequence
  Description of Artificial Sequence: Synthetic oligonucleotide
  Sense strand starting at position 158 of SEQ ID NO: 317823
augacauaguaucuuauga

SEQ ID NO: 515004 - RNA, 19 nt, Artificial Sequence
  Description of Artificial Sequence: Synthetic oligonucleotide
  Antisense strand to SEQ ID NO: 515003
ucauaagauacuaugucau

SEQ ID NO: 515005 - RNA, 19 nt, Artificial Sequence
  Description of Artificial Sequence: Synthetic oligonucleotide
  Sense strand starting at position 281 of SEQ ID NO: 317823
cuacgugaaucuucuuaca

SEQ ID NO: 515006 - RNA, 19 nt, Artificial Sequence
  Description of Artificial Sequence: Synthetic oligonucleotide
  Antisense strand to SEQ ID NO: 515005
uguaagaagauucacguag

SEQ ID NO: 515007 - RNA, 19 nt, Artificial Sequence
  Description of Artificial Sequence: Synthetic oligonucleotide
  Sense strand starting at position 354 of SEQ ID NO: 317823
ccugcaguccuauaaugac

SEQ ID NO: 515008 - RNA, 19 nt, Artificial Sequence
  Description of Artificial Sequence: Synthetic oligonucleotide
  Antisense strand to SEQ ID NO: 515007
gucauuauaggacugcagg

SEQ ID NO: 515009 - RNA, 19 nt, Artificial Sequence
  Description of Artificial Sequence: Synthetic oligonucleotide
  Sense strand starting at position 474 of SEQ ID NO: 317823
aaguaaugcucuuccugga

SEQ ID NO: 515010 - RNA, 19 nt, Artificial Sequence
  Description of Artificial Sequence: Synthetic oligonucleotide
  Antisense strand to SEQ ID NO: 515009
uccaggaagagcauuacuu

SEQ ID NO: 515011 - RNA, 19 nt, Artificial Sequence
  Description of Artificial Sequence: Synthetic oligonucleotide
  Sense strand starting at position 479 of SEQ ID NO: 317823
augcucuuccuggacuaaa

SEQ ID NO: 515012 - RNA, 19 nt, Artificial Sequence
  Description of Artificial Sequence: Synthetic oligonucleotide
  Antisense strand to SEQ ID NO: 515011
uuuaguccaggaagagcau

SEQ ID NO: 515013 - RNA, 19 nt, Artificial Sequence
  Description of Artificial Sequence: Synthetic oligonucleotide
  Sense strand starting at position 599 of SEQ ID NO: 317823
gggagaaaguccuccacau

SEQ ID NO: 515014 - RNA, 19 nt, Artificial Sequence
  Description of Artificial Sequence: Synthetic oligonucleotide
  Antisense strand to SEQ ID NO: 515013
auguggaggacuuucuccc

SEQ ID NO: 515015 - RNA, 19 nt, Artificial Sequence
  Description of Artificial Sequence: Synthetic oligonucleotide
  Sense strand starting at position 1208 of SEQ ID NO: 317823
agcucugauuauccgacau

SEQ ID NO: 515016 - RNA, 19 nt, Artificial Sequence
  Description of Artificial Sequence: Synthetic oligonucleotide
  Antisense strand to SEQ ID NO: 515015
augucggauaaucagagcu

SEQ ID NO: 515017 - RNA, 19 nt, Artificial Sequence
  Description of Artificial Sequence: Synthetic oligonucleotide
  Sense strand starting at position 1923 of SEQ ID NO: 317823
ugagguaacgggugaguau

SEQ ID NO: 515018 - RNA, 19 nt, Artificial Sequence
  Description of Artificial Sequence: Synthetic oligonucleotide
  Antisense strand to SEQ ID NO: 515017
auacucacccguuaccuca

SEQ ID NO: 515019 - RNA, 19 nt, Artificial Sequence
  Description of Artificial Sequence: Synthetic oligonucleotide
  Sense strand starting at position 2093 of SEQ ID NO: 317823
gagcuuuccgcugaagaug

SEQ ID NO: 515020 - RNA, 19 nt, Artificial Sequence
  Description of Artificial Sequence: Synthetic oligonucleotide
  Antisense strand to SEQ ID NO: 515019
caucuucagcggaaagcuc

SEQ ID NO: 515021 - RNA, 19 nt, Artificial Sequence
  Description of Artificial Sequence: Synthetic oligonucleotide
  Sense strand starting at position 2237 of SEQ ID NO: 317823
guaaaucucgagggucuua

SEQ ID NO: 515022 - RNA, 19 nt, Artificial Sequence
  Description of Artificial Sequence: Synthetic oligonucleotide
  Antisense strand to SEQ ID NO: 515021
uaagacccucgagauuuac

SEQ ID NO: 515023 - RNA, 19 nt, Artificial Sequence
  Description of Artificial Sequence: Synthetic oligonucleotide
  Sense strand starting at position 2248 of SEQ ID NO: 317823
gggucuuacucauuagaag

SEQ ID NO: 515024 - RNA, 19 nt, Artificial Sequence
  Description of Artificial Sequence: Synthetic oligonucleotide
  Antisense strand to SEQ ID NO: 515023
cuucuaaugaguaagaccc

SEQ ID NO: 515025 - RNA, 19 nt, Artificial Sequence
  Description of Artificial Sequence: Synthetic oligonucleotide
  Sense strand starting at position 2249 of SEQ ID NO: 317823
ggucuuacucauuagaagu

SEQ ID NO: 515026 - RNA, 19 nt, Artificial Sequence
  Description of Artificial Sequence: Synthetic oligonucleotide
  Antisense strand to SEQ ID NO: 515025
acuucuaaugaguaagacc

SEQ ID NO: 515027 - RNA, 19 nt, Artificial Sequence
  Description of Artificial Sequence: Synthetic oligonucleotide
  Sense strand starting at position 2348 of SEQ ID NO: 317823
agaguuugcuuuguagaaa

SEQ ID NO: 515028 - RNA, 19 nt, Artificial Sequence
  Description of Artificial Sequence: Synthetic oligonucleotide
  Antisense strand to SEQ ID NO: 515027
uuucuacaaagcaaacucu

SEQ ID NO: 515029 - RNA, 19 nt, Artificial Sequence
  Description of Artificial Sequence: Synthetic oligonucleotide
  Sense strand starting at position 2478 of SEQ ID NO: 317823
ugagaaccacguuaaccau

SEQ ID NO: 515030 - RNA, 19 nt, Artificial Sequence
  Description of Artificial Sequence: Synthetic oligonucleotide
  Antisense strand to SEQ ID NO: 515029
augguuaacgugguucuca

SEQ ID NO: 515031 - RNA, 19 nt, Artificial Sequence
  Description of Artificial Sequence: Synthetic oligonucleotide
  Sense strand starting at position 2530 of SEQ ID NO: 317823
auagaaacuuucucguauu

SEQ ID NO: 515032 - RNA, 19 nt, Artificial Sequence
  Description of Artificial Sequence: Synthetic oligonucleotide
  Antisense strand to SEQ ID NO: 515031
aauacgagaaaguuucuau

SEQ ID NO: 515033 - RNA, 19 nt, Artificial Sequence
  Description of Artificial Sequence: Synthetic oligonucleotide
  Sense strand starting at position 2542 of SEQ ID NO: 317823
ucguauuagaaauaccgaa

SEQ ID NO: 515034 - RNA, 19 nt, Artificial Sequence
  Description of Artificial Sequence: Synthetic oligonucleotide
  Antisense strand to SEQ ID NO: 515033
uucgguauuucuaauacga

SEQ ID NO: 515035 - RNA, 19 nt, Artificial Sequence
  Description of Artificial Sequence: Synthetic oligonucleotide
  Sense strand starting at position 2572 of SEQ ID NO: 317823
uuguguguacaagggauua

SEQ ID NO: 515036 - RNA, 19 nt, Artificial Sequence
  Description of Artificial Sequence: Synthetic oligonucleotide
  Antisense strand to SEQ ID NO: 515035
uaaucccuuguacacacaa

SEQ ID NO: 515037 - RNA, 19 nt, Artificial Sequence
  Description of Artificial Sequence: Synthetic oligonucleotide
  Sense strand starting at position 2622 of SEQ ID NO: 317823
aggguugaauuagcagaaa

SEQ ID NO: 515038 - RNA, 19 nt, Artificial Sequence
  Description of Artificial Sequence: Synthetic oligonucleotide
  Antisense strand to SEQ ID NO: 515037
uuucugcuaauucaacccu

SEQ ID NO: 515039 - RNA, 19 nt, Artificial Sequence
  Description of Artificial Sequence: Synthetic oligonucleotide
  Sense strand starting at position 2667 of SEQ ID NO: 317823
gucaguugucaaggauaac

SEQ ID NO: 515040 - RNA, 19 nt, Artificial Sequence
  Description of Artificial Sequence: Synthetic oligonucleotide
  Antisense strand to SEQ ID NO: 515039
guuauccuugacaacugac

SEQ ID NO: 515041 - RNA, 19 nt, Artificial Sequence
  Description of Artificial Sequence: Synthetic oligonucleotide
  Sense strand starting at position 2670 of SEQ ID NO: 317823
aguugucaaggauaacuuu

SEQ ID NO: 515042 - RNA, 19 nt, Artificial Sequence
  Description of Artificial Sequence: Synthetic oligonucleotide
  Antisense strand to SEQ ID NO: 515041
aaaguuauccuugacaacu

SEQ ID NO: 515043 - RNA, 19 nt, Artificial Sequence
  Description of Artificial Sequence: Synthetic oligonucleotide
  Sense strand starting at position 2693 of SEQ ID NO: 317823
augagacuuugacuuugua

SEQ ID NO: 515044 - RNA, 19 nt, Artificial Sequence
  Description of Artificial Sequence: Synthetic oligonucleotide
  Antisense strand to SEQ ID NO: 515043
uacaaagucaaagucucau

SEQ ID NO: 515045 - RNA, 19 nt, Artificial Sequence
  Description of Artificial Sequence: Synthetic oligonucleotide
  Sense strand starting at position 2715 of SEQ ID NO: 317823
ucaguaauuuccucucguu

SEQ ID NO: 515046 - RNA, 19 nt, Artificial Sequence
  Description of Artificial Sequence: Synthetic oligonucleotide
  Antisense strand to SEQ ID NO: 515045
aacgagaggaaauuacuga

SEQ ID NO: 515047 - RNA, 19 nt, Artificial Sequence
  Description of Artificial Sequence: Synthetic oligonucleotide
  Sense strand starting at position 2721 of SEQ ID NO: 317823
auuuccucucguuagcuau

SEQ ID NO: 515048 - RNA, 19 nt, Artificial Sequence
  Description of Artificial Sequence: Synthetic oligonucleotide
  Antisense strand to SEQ ID NO: 515047
auagcuaacgagaggaaau

SEQ ID NO: 515049 - RNA, 19 nt, Artificial Sequence
  Description of Artificial Sequence: Synthetic oligonucleotide
  Sense strand starting at position 2746 of SEQ ID NO: 317823
auagucgauuuccuuguaa

SEQ ID NO: 515050 - RNA, 19 nt, Artificial Sequence
  Description of Artificial Sequence: Synthetic oligonucleotide
  Antisense strand to SEQ ID NO: 515049
uuacaaggaaaucgacuau

SEQ ID NO: 515051 - RNA, 19 nt, Artificial Sequence
  Description of Artificial Sequence: Synthetic oligonucleotide
  Sense strand starting at position 2748 of SEQ ID NO: 317823
agucgauuuccuuguaauu

SEQ ID NO: 515052 - RNA, 19 nt, Artificial Sequence
  Description of Artificial Sequence: Synthetic oligonucleotide
  Antisense strand to SEQ ID NO: 515051
aauuacaaggaaaucgacu

SEQ ID NO: 515053 - RNA, 19 nt, Artificial Sequence
  Description of Artificial Sequence: Synthetic oligonucleotide
  Sense strand starting at position 2760 of SEQ ID NO: 317823
uguaauugccaagaguaaa

SEQ ID NO: 515054 - RNA, 19 nt, Artificial Sequence
  Description of Artificial Sequence: Synthetic oligonucleotide
  Antisense strand to SEQ ID NO: 515053
uuuacucuuggcaauuaca

SEQ ID NO: 515055 - RNA, 19 nt, Artificial Sequence
  Description of Artificial Sequence: Synthetic oligonucleotide
  Sense strand starting at position 2825 of SEQ ID NO: 317823
ggacgauaggagcgaaauu

SEQ ID NO: 515056 - RNA, 19 nt, Artificial Sequence
  Description of Artificial Sequence: Synthetic oligonucleotide
  Antisense strand to SEQ ID NO: 515055
aauuucgcuccuaucgucc

SEQ ID NO: 515057 - RNA, 19 nt, Artificial Sequence
  Description of Artificial Sequence: Synthetic oligonucleotide
  Sense strand starting at position 3141 of SEQ ID NO: 317823
guagcaugaagcuagguua

SEQ ID NO: 515058 - RNA, 19 nt, Artificial Sequence
  Description of Artificial Sequence: Synthetic oligonucleotide
  Antisense strand to SEQ ID NO: 515057
uaaccuagcuucaugcuac

SEQ ID NO: 515059 - RNA, 19 nt, Artificial Sequence
  Description of Artificial Sequence: Synthetic oligonucleotide
  Sense strand starting at position 3148 of SEQ ID NO: 317823
gaagcuagguuaucccuau

SEQ ID NO: 515060 - RNA, 19 nt, Artificial Sequence
  Description of Artificial Sequence: Synthetic oligonucleotide
  Antisense strand to SEQ ID NO: 515059
auagggauaaccuagcuuc

SEQ ID NO: 515061 - RNA, 19 nt, Artificial Sequence
  Description of Artificial Sequence: Synthetic oligonucleotide
  Sense strand starting at position 3152 of SEQ ID NO: 317823
cuagguuaucccuaucgug

SEQ ID NO: 515062 - RNA, 19 nt, Artificial Sequence
  Description of Artificial Sequence: Synthetic oligonucleotide
  Antisense strand to SEQ ID NO: 515061
cacgauagggauaaccuag

SEQ ID NO: 515063 - RNA, 19 nt, Artificial Sequence
  Description of Artificial Sequence: Synthetic oligonucleotide
  Sense strand starting at position 3325 of SEQ ID NO: 317823
agcuuugauccuuaaggug

SEQ ID NO: 515064 - RNA, 19 nt, Artificial Sequence
  Description of Artificial Sequence: Synthetic oligonucleotide
  Antisense strand to SEQ ID NO: 515063
caccuuaaggaucaaagcu

SEQ ID NO: 515065 - RNA, 19 nt, Artificial Sequence
  Description of Artificial Sequence: Synthetic oligonucleotide
  Sense strand starting at position 3348 of SEQ ID NO: 317823
ugcauaucugucuaggacu

SEQ ID NO: 515066 - RNA, 19 nt, Artificial Sequence
  Description of Artificial Sequence: Synthetic oligonucleotide
  Antisense strand to SEQ ID NO: 515065
aguccuagacagauaugca

SEQ ID NO: 515067 - RNA, 19 nt, Artificial Sequence
  Description of Artificial Sequence: Synthetic oligonucleotide
  Sense strand starting at position 3359 of SEQ ID NO: 317823
cuaggacuccuuuaucugu

SEQ ID NO: 515068 - RNA, 19 nt, Artificial Sequence
  Description of Artificial Sequence: Synthetic oligonucleotide
  Antisense strand to SEQ ID NO: 515067
acagauaaaggaguccuag

SEQ ID NO: 515069 - RNA, 19 nt, Artificial Sequence
  Description of Artificial Sequence: Synthetic oligonucleotide
  Sense strand starting at position 3364 of SEQ ID NO: 317823
acuccuuuaucuguugauu

SEQ ID NO: 515070 - RNA, 19 nt, Artificial Sequence
  Description of Artificial Sequence: Synthetic oligonucleotide
  Antisense strand to SEQ ID NO: 515069
aaucaacagauaaaggagu

SEQ ID NO: 515071 - RNA, 19 nt, Artificial Sequence
  Description of Artificial Sequence: Synthetic oligonucleotide
  Sense strand starting at position 3479 of SEQ ID NO: 317823
gcugcuugagaauauguca

SEQ ID NO: 515072 - RNA, 19 nt, Artificial Sequence
  Description of Artificial Sequence: Synthetic oligonucleotide
  Antisense strand to SEQ ID NO: 515071
ugacauauucucaagcagc

SEQ ID NO: 515073 - RNA, 19 nt, Artificial Sequence
  Description of Artificial Sequence: Synthetic oligonucleotide
  Sense strand starting at position 3482 of SEQ ID NO: 317823
gcuugagaauaugucagau

SEQ ID NO: 515074 - RNA, 19 nt, Artificial Sequence
  Description of Artificial Sequence: Synthetic oligonucleotide
  Antisense strand to SEQ ID NO: 515073
aucugacauauucucaagc

SEQ ID NO: 515075 - RNA, 19 nt, Artificial Sequence
  Description of Artificial Sequence: Synthetic oligonucleotide
  Sense strand starting at position 3717 of SEQ ID NO: 317823
guuagaguaguugguauuu

SEQ ID NO: 515076 - RNA, 19 nt, Artificial Sequence
  Description of Artificial Sequence: Synthetic oligonucleotide
  Antisense strand to SEQ ID NO: 515075
aaauaccaacuacucuaac

SEQ ID NO: 515077 - RNA, 19 nt, Artificial Sequence
  Description of Artificial Sequence: Synthetic oligonucleotide
  Sense strand starting at position 3941 of SEQ ID NO: 317823
gugguauauuagguaucag

SEQ ID NO: 515078 - RNA, 19 nt, Artificial Sequence
  Description of Artificial Sequence: Synthetic oligonucleotide
  Antisense strand to SEQ ID NO: 515077
cugauaccuaauauaccac

SEQ ID NO: 515079 - RNA, 19 nt, Artificial Sequence
  Description of Artificial Sequence: Synthetic oligonucleotide
  Sense strand starting at position 3942 of SEQ ID NO: 317823
ugguauauuagguaucagu

SEQ ID NO: 515080 - RNA, 19 nt, Artificial Sequence
  Description of Artificial Sequence: Synthetic oligonucleotide
  Antisense strand to SEQ ID NO: 515079
acugauaccuaauauacca

SEQ ID NO: 515081 - RNA, 19 nt, Artificial Sequence
  Description of Artificial Sequence: Synthetic oligonucleotide
  Sense strand starting at position 3956 of SEQ ID NO: 317823
ucaguagaauccucuugau

SEQ ID NO: 515082 - RNA, 19 nt, Artificial Sequence
  Description of Artificial Sequence: Synthetic oligonucleotide
  Antisense strand to SEQ ID NO: 515081
aucaagaggauucuacuga

SEQ ID NO: 515083 - RNA, 19 nt, Artificial Sequence
  Description of Artificial Sequence: Synthetic oligonucleotide
  Sense strand starting at position 12 of SEQ ID NO: 317824
aaguaauuaucaguagguc

SEQ ID NO: 515084 - RNA, 19 nt, Artificial Sequence
  Description of Artificial Sequence: Synthetic oligonucleotide
  Antisense strand to SEQ ID NO: 515083
gaccuacugauaauuacuu

SEQ ID NO: 515085 - RNA, 19 nt, Artificial Sequence
  Description of Artificial Sequence: Synthetic oligonucleotide
  Sense strand starting at position 13 of SEQ ID NO: 317824
aguaauuaucaguagguca

SEQ ID NO: 515086 - RNA, 19 nt, Artificial Sequence
  Description of Artificial Sequence: Synthetic oligonucleotide
  Antisense strand to SEQ ID NO: 515085
ugaccuacugauaauuacu

SEQ ID NO: 515087 - RNA, 19 nt, Artificial Sequence
  Description of Artificial Sequence: Synthetic oligonucleotide
  Sense strand starting at position 33 of SEQ ID NO: 317824
aaguacaauuuguuucgua

SEQ ID NO: 515088 - RNA, 19 nt, Artificial Sequence
  Description of Artificial Sequence: Synthetic oligonucleotide
  Antisense strand to SEQ ID NO: 515087
uacgaaacaaauuguacuu

SEQ ID NO: 515089 - RNA, 19 nt, Artificial Sequence
  Description of Artificial Sequence: Synthetic oligonucleotide
  Sense strand starting at position 34 of SEQ ID NO: 317824
aguacaauuuguuucguaa

SEQ ID NO: 515090 - RNA, 19 nt, Artificial Sequence
  Description of Artificial Sequence: Synthetic oligonucleotide
  Antisense strand to SEQ ID NO: 515089
uuacgaaacaaauuguacu

SEQ ID NO: 515091 - RNA, 19 nt, Artificial Sequence
  Description of Artificial Sequence: Synthetic oligonucleotide
  Sense strand starting at position 94 of SEQ ID NO: 317824
ccaucuuaugagcagugau

SEQ ID NO: 515092 - RNA, 19 nt, Artificial Sequence
  Description of Artificial Sequence: Synthetic oligonucleotide
  Antisense strand to SEQ ID NO: 515091
aucacugcucauaagaugg

SEQ ID NO: 515093 - RNA, 19 nt, Artificial Sequence
  Description of Artificial Sequence: Synthetic oligonucleotide
  Sense strand starting at position 97 of SEQ ID NO: 317824
ucuuaugagcagugaugaa

SEQ ID NO: 515094 - RNA, 19 nt, Artificial Sequence
  Description of Artificial Sequence: Synthetic oligonucleotide
  Antisense strand to SEQ ID NO: 515093
uucaucacugcucauaaga

SEQ ID NO: 515095 - RNA, 19 nt, Artificial Sequence
  Description of Artificial Sequence: Synthetic oligonucleotide
  Sense strand starting at position 243 of SEQ ID NO: 317824
ggagcuucucguuacugaa

SEQ ID NO: 515096 - RNA, 19 nt, Artificial Sequence
  Description of Artificial Sequence: Synthetic oligonucleotide
  Antisense strand to SEQ ID NO: 515095
uucaguaacgagaagcucc

SEQ ID NO: 515097 - RNA, 19 nt, Artificial Sequence
  Description of Artificial Sequence: Synthetic oligonucleotide
  Sense strand starting at position 351 of SEQ ID NO: 317824
cuuaguucugacuacucau

SEQ ID NO: 515098 - RNA, 19 nt, Artificial Sequence
  Description of Artificial Sequence: Synthetic oligonucleotide
  Antisense strand to SEQ ID NO: 515097
augaguagucagaacuaag

SEQ ID NO: 515099 - RNA, 19 nt, Artificial Sequence
  Description of Artificial Sequence: Synthetic oligonucleotide
  Sense strand starting at position 510 of SEQ ID NO: 317824
augacauaguaucuuauga

SEQ ID NO: 515100 - RNA, 19 nt, Artificial Sequence
  Description of Artificial Sequence: Synthetic oligonucleotide
  Antisense strand to SEQ ID NO: 515099
ucauaagauacuaugucau

SEQ ID NO: 515101 - RNA, 19 nt, Artificial Sequence
  Description of Artificial Sequence: Synthetic oligonucleotide
  Sense strand starting at position 633 of SEQ ID NO: 317824
cuacgugaaucuucuuaca

SEQ ID NO: 515102 - RNA, 19 nt, Artificial Sequence
  Description of Artificial Sequence: Synthetic oligonucleotide
  Antisense strand to SEQ ID NO: 515101
uguaagaagauucacguag

SEQ ID NO: 515103 - RNA, 19 nt, Artificial Sequence
  Description of Artificial Sequence: Synthetic oligonucleotide
  Sense strand starting at position 706 of SEQ ID NO: 317824
ccugcaguccuauaaugac

SEQ ID NO: 515104 - RNA, 19 nt, Artificial Sequence
  Description of Artificial Sequence: Synthetic oligonucleotide
  Antisense strand to SEQ ID NO: 515103
gucauuauaggacugcagg

SEQ ID NO: 515105 - RNA, 19 nt, Artificial Sequence
  Description of Artificial Sequence: Synthetic oligonucleotide
  Sense strand starting at position 826 of SEQ ID NO: 317824
aaguaaugcucuuccugga

SEQ ID NO: 515106 - RNA, 19 nt, Artificial Sequence
  Description of Artificial Sequence: Synthetic oligonucleotide
  Antisense strand to SEQ ID NO: 515105
uccaggaagagcauuacuu

SEQ ID NO: 515107 - RNA, 19 nt, Artificial Sequence
  Description of Artificial Sequence: Synthetic oligonucleotide
  Sense strand starting at position 831 of SEQ ID NO: 317824
augcucuuccuggacuaaa

SEQ ID NO: 515108 - RNA, 19 nt, Artificial Sequence
  Description of Artificial Sequence: Synthetic oligonucleotide
  Antisense strand to SEQ ID NO: 515107
uuuaguccaggaagagcau

SEQ ID NO: 515109 - RNA, 19 nt, Artificial Sequence
  Description of Artificial Sequence: Synthetic oligonucleotide
  Sense strand starting at position 951 of SEQ ID NO: 317824
gggagaaaguccuccacau

SEQ ID NO: 515110 - RNA, 19 nt, Artificial Sequence
  Description of Artificial Sequence: Synthetic oligonucleotide
  Antisense strand to SEQ ID NO: 515109
auguggaggacuuucuccc

SEQ ID NO: 515111 - RNA, 19 nt, Artificial Sequence
  Description of Artificial Sequence: Synthetic oligonucleotide
  Sense strand starting at position 2275 of SEQ ID NO: 317824
ugagguaacgggugaguau

SEQ ID NO: 515112 - RNA, 19 nt, Artificial Sequence
  Description of Artificial Sequence: Synthetic oligonucleotide
  Antisense strand to SEQ ID NO: 515111
auacucacccguuaccuca

SEQ ID NO: 515113 - RNA, 19 nt, Artificial Sequence
  Description of Artificial Sequence: Synthetic oligonucleotide
  Sense strand starting at position 2445 of SEQ ID NO: 317824
gagcuuuccgcugaagaug

SEQ ID NO: 515114 - RNA, 19 nt, Artificial Sequence
  Description of Artificial Sequence: Synthetic oligonucleotide
  Antisense strand to SEQ ID NO: 515113
caucuucagcggaaagcuc

SEQ ID NO: 515115 - RNA, 19 nt, Artificial Sequence
  Description of Artificial Sequence: Synthetic oligonucleotide
  Sense strand starting at position 2600 of SEQ ID NO: 317824
gggucuuacucauuagaag

SEQ ID NO: 515116 - RNA, 19 nt, Artificial Sequence
  Description of Artificial Sequence: Synthetic oligonucleotide
  Antisense strand to SEQ ID NO: 515115
cuucuaaugaguaagaccc

SEQ ID NO: 515117 - RNA, 19 nt, Artificial Sequence
  Description of Artificial Sequence: Synthetic oligonucleotide
  Sense strand starting at position 2601 of SEQ ID NO: 317824
ggucuuacucauuagaagu

SEQ ID NO: 515118 - RNA, 19 nt, Artificial Sequence
  Description of Artificial Sequence: Synthetic oligonucleotide
  Antisense strand to SEQ ID NO: 515117
acuucuaaugaguaagacc

SEQ ID NO: 515119 - RNA, 19 nt, Artificial Sequence
  Description of Artificial Sequence: Synthetic oligonucleotide
  Sense strand starting at position 2700 of SEQ ID NO: 317824
agaguuugcuuuguagaaa

SEQ ID NO: 515120 - RNA, 19 nt, Artificial Sequence
  Description of Artificial Sequence: Synthetic oligonucleotide
  Antisense strand to SEQ ID NO: 515119
uuucuacaaagcaaacucu

SEQ ID NO: 515121 - RNA, 19 nt, Artificial Sequence
  Description of Artificial Sequence: Synthetic oligonucleotide
  Sense strand starting at position 2830 of SEQ ID NO: 317824
ugagaaccacguuaaccau

SEQ ID NO: 515122 - RNA, 19 nt, Artificial Sequence
  Description of Artificial Sequence: Synthetic oligonucleotide
  Antisense strand to SEQ ID NO: 515121
augguuaacgugguucuca

SEQ ID NO: 515123 - RNA, 19 nt, Artificial Sequence
  Description of Artificial Sequence: Synthetic oligonucleotide
  Sense strand starting at position 2882 of SEQ ID NO: 317824
auagaaacuuucucguauu

SEQ ID NO: 515124 - RNA, 19 nt, Artificial Sequence
  Description of Artificial Sequence: Synthetic oligonucleotide
  Antisense strand to SEQ ID NO: 515123
aauacgagaaaguuucuau

SEQ ID NO: 515125 - RNA, 19 nt, Artificial Sequence
  Description of Artificial Sequence: Synthetic oligonucleotide
  Sense strand starting at position 2894 of SEQ ID NO: 317824
ucguauuagaaauaccgaa

SEQ ID NO: 515126 - RNA, 19 nt, Artificial Sequence
  Description of Artificial Sequence: Synthetic oligonucleotide
  Antisense strand to SEQ ID NO: 515125
uucgguauuucuaauacga

SEQ ID NO: 515127 - RNA, 19 nt, Artificial Sequence
  Description of Artificial Sequence: Synthetic oligonucleotide
  Sense strand starting at position 2924 of SEQ ID NO: 317824
uuguguguacaagggauua

SEQ ID NO: 515128 - RNA, 19 nt, Artificial Sequence
  Description of Artificial Sequence: Synthetic oligonucleotide
  Antisense strand to SEQ ID NO: 515127
uaaucccuuguacacacaa

SEQ ID NO: 515129 - RNA, 19 nt, Artificial Sequence
  Description of Artificial Sequence: Synthetic oligonucleotide
  Sense strand starting at position 2974 of SEQ ID NO: 317824
aggguugaauuagcagaaa

SEQ ID NO: 515130 - RNA, 19 nt, Artificial Sequence
  Description of Artificial Sequence: Synthetic oligonucleotide
  Antisense strand to SEQ ID NO: 515129
uuucugcuaauucaacccu

SEQ ID NO: 515131 - RNA, 19 nt, Artificial Sequence
  Description of Artificial Sequence: Synthetic oligonucleotide
  Sense strand starting at position 3019 of SEQ ID NO: 317824
gucaguugucaaggauaac

SEQ ID NO: 515132 - RNA, 19 nt, Artificial Sequence
  Description of Artificial Sequence: Synthetic oligonucleotide
  Antisense strand to SEQ ID NO: 515131
guuauccuugacaacugac

SEQ ID NO: 515133 - RNA, 19 nt, Artificial Sequence
  Description of Artificial Sequence: Synthetic oligonucleotide
  Sense strand starting at position 3022 of SEQ ID NO: 317824
aguugucaaggauaacuuu

SEQ ID NO: 515134 - RNA, 19 nt, Artificial Sequence
  Description of Artificial Sequence: Synthetic oligonucleotide
  Antisense strand to SEQ ID NO: 515133
aaaguuauccuugacaacu

SEQ ID NO: 515135 - RNA, 19 nt, Artificial Sequence
  Description of Artificial Sequence: Synthetic oligonucleotide
  Sense strand starting at position 3045 of SEQ ID NO: 317824
augagacuuugacuuugua

SEQ ID NO: 515136 - RNA, 19 nt, Artificial Sequence
  Description of Artificial Sequence: Synthetic oligonucleotide
  Antisense strand to SEQ ID NO: 515135
uacaaagucaaagucucau

SEQ ID NO: 515137 - RNA, 19 nt, Artificial Sequence
  Description of Artificial Sequence: Synthetic oligonucleotide
  Sense strand starting at position 3067 of SEQ ID NO: 317824
ucaguaauuuccucucguu

SEQ ID NO: 515138 - RNA, 19 nt, Artificial Sequence
  Description of Artificial Sequence: Synthetic oligonucleotide
  Antisense strand to SEQ ID NO: 515137
aacgagaggaaauuacuga

SEQ ID NO: 515139 - RNA, 19 nt, Artificial Sequence
  Description of Artificial Sequence: Synthetic oligonucleotide
  Sense strand starting at position 3073 of SEQ ID NO: 317824
auuuccucucguuagcuau

SEQ ID NO: 515140 - RNA, 19 nt, Artificial Sequence
  Description of Artificial Sequence: Synthetic oligonucleotide
  Antisense strand to SEQ ID NO: 515139
auagcuaacgagaggaaau

SEQ ID NO: 515141 - RNA, 19 nt, Artificial Sequence
  Description of Artificial Sequence: Synthetic oligonucleotide
  Sense strand starting at position 3098 of SEQ ID NO: 317824
auagucgauuuccuuguaa

SEQ ID NO: 515142 - RNA, 19 nt, Artificial Sequence
  Description of Artificial Sequence: Synthetic oligonucleotide
  Antisense strand to SEQ ID NO: 515141
uuacaaggaaaucgacuau

SEQ ID NO: 515143 - RNA, 19 nt, Artificial Sequence
  Description of Artificial Sequence: Synthetic oligonucleotide
  Sense strand starting at position 3100 of SEQ ID NO: 317824
agucgauuuccuuguaauu

SEQ ID NO: 515144 - RNA, 19 nt, Artificial Sequence
  Description of Artificial Sequence: Synthetic oligonucleotide
  Antisense strand to SEQ ID NO: 515143
aauuacaaggaaaucgacu

SEQ ID NO: 515145 - RNA, 19 nt, Artificial Sequence
  Description of Artificial Sequence: Synthetic oligonucleotide
  Sense strand starting at position 3112 of SEQ ID NO: 317824
uguaauugccaagaguaaa

SEQ ID NO: 515146 - RNA, 19 nt, Artificial Sequence
  Description of Artificial Sequence: Synthetic oligonucleotide
  Antisense strand to SEQ ID NO: 515145
uuuacucuuggcaauuaca

SEQ ID NO: 515147 - RNA, 19 nt, Artificial Sequence
  Description of Artificial Sequence: Synthetic oligonucleotide
  Sense strand starting at position 3177 of SEQ ID NO: 317824
ggacgauaggagcgaaauu

SEQ ID NO: 515148 - RNA, 19 nt, Artificial Sequence
  Description of Artificial Sequence: Synthetic oligonucleotide
  Antisense strand to SEQ ID NO: 515147
aauuucgcuccuaucgucc

SEQ ID NO: 515149 - RNA, 19 nt, Artificial Sequence
  Description of Artificial Sequence: Synthetic oligonucleotide
  Sense strand starting at position 3493 of SEQ ID NO: 317824
guagcaugaagcuagguua

SEQ ID NO: 515150 - RNA, 19 nt, Artificial Sequence
  Description of Artificial Sequence: Synthetic oligonucleotide
  Antisense strand to SEQ ID NO: 515149
uaaccuagcuucaugcuac

SEQ ID NO: 515151 - RNA, 19 nt, Artificial Sequence
  Description of Artificial Sequence: Synthetic oligonucleotide
  Sense strand starting at position 3500 of SEQ ID NO: 317824
gaagcuagguuaucccuau

SEQ ID NO: 515152 - RNA, 19 nt, Artificial Sequence
  Description of Artificial Sequence: Synthetic oligonucleotide
  Antisense strand to SEQ ID NO: 515151
auagggauaaccuagcuuc

SEQ ID NO: 515153 - RNA, 19 nt, Artificial Sequence
  Description of Artificial Sequence: Synthetic oligonucleotide
  Sense strand starting at position 3677 of SEQ ID NO: 317824
agcuuugauccuuaaggug

SEQ ID NO: 515154 - RNA, 19 nt, Artificial Sequence
  Description of Artificial Sequence: Synthetic oligonucleotide
  Antisense strand to SEQ ID NO: 515153
caccuuaaggaucaaagcu

SEQ ID NO: 515155 - RNA, 19 nt, Artificial Sequence
  Description of Artificial Sequence: Synthetic oligonucleotide
  Sense strand starting at position 3700 of SEQ ID NO: 317824
ugcauaucugucuaggacu

SEQ ID NO: 515156 - RNA, 19 nt, Artificial Sequence
  Description of Artificial Sequence: Synthetic oligonucleotide
  Antisense strand to SEQ ID NO: 515155
aguccuagacagauaugca

SEQ ID NO: 515157 - RNA, 19 nt, Artificial Sequence
  Description of Artificial Sequence: Synthetic oligonucleotide
  Sense strand starting at position 3711 of SEQ ID NO: 317824
cuaggacuccuuuaucugu

SEQ ID NO: 515158 - RNA, 19 nt, Artificial Sequence
  Description of Artificial Sequence: Synthetic oligonucleotide
  Antisense strand to SEQ ID NO: 515157
acagauaaaggaguccuag

SEQ ID NO: 515159 - RNA, 19 nt, Artificial Sequence
  Description of Artificial Sequence: Synthetic oligonucleotide
  Sense strand starting at position 3831 of SEQ ID NO: 317824
gcugcuugagaauauguca

SEQ ID NO: 515160 - RNA, 19 nt, Artificial Sequence
  Description of Artificial Sequence: Synthetic oligonucleotide
  Antisense strand to SEQ ID NO: 515159
ugacauauucucaagcagc

SEQ ID NO: 515161 - RNA, 19 nt, Artificial Sequence
  Description of Artificial Sequence: Synthetic oligonucleotide
  Sense strand starting at position 3834 of SEQ ID NO: 317824
gcuugagaauaugucagau

SEQ ID NO: 515162 - RNA, 19 nt, Artificial Sequence
  Description of Artificial Sequence: Synthetic oligonucleotide
  Antisense strand to SEQ ID NO: 515161
aucugacauauucucaagc

SEQ ID NO: 515163 - RNA, 19 nt, Artificial Sequence
  Description of Artificial Sequence: Synthetic oligonucleotide
  Sense strand starting at position 326 of SEQ ID NO: 317825
gacagaucacccgaagcca

SEQ ID NO: 515164 - RNA, 19 nt, Artificial Sequence
  Description of Artificial Sequence: Synthetic oligonucleotide
  Antisense strand to SEQ ID NO: 515163
uggcuucgggugaucuguc

SEQ ID NO: 515165 - RNA, 19 nt, Artificial Sequence
  Description of Artificial Sequence: Synthetic oligonucleotide
  Sense strand starting at position 650 of SEQ ID NO: 317825
cuuuaaaugaugugaugag

SEQ ID NO: 515166 - RNA, 19 nt, Artificial Sequence
  Description of Artificial Sequence: Synthetic oligonucleotide
  Antisense strand to SEQ ID NO: 515165
cucaucacaucauuuaaag

SEQ ID NO: 515167 - RNA, 19 nt, Artificial Sequence
  Description of Artificial Sequence: Synthetic oligonucleotide
  Sense strand starting at position 1007 of SEQ ID NO: 317825
uguggaggguaguuucauu

SEQ ID NO: 515168 - RNA, 19 nt, Artificial Sequence
  Description of Artificial Sequence: Synthetic oligonucleotide
  Antisense strand to SEQ ID NO: 515167
aaugaaacuacccuccaca

SEQ ID NO: 515169 - RNA, 19 nt, Artificial Sequence
  Description of Artificial Sequence: Synthetic oligonucleotide
  Sense strand starting at position 1067 of SEQ ID NO: 317825
gcgucuucuccaguucuuu

SEQ ID NO: 515170 - RNA, 19 nt, Artificial Sequence
  Description of Artificial Sequence: Synthetic oligonucleotide
  Antisense strand to SEQ ID NO: 515169
aaagaacuggagaagacgc

SEQ ID NO: 515171 - RNA, 19 nt, Artificial Sequence
  Description of Artificial Sequence: Synthetic oligonucleotide
  Sense strand starting at position 1432 of SEQ ID NO: 317825
aggcuagauucuucuacca

SEQ ID NO: 515172 - RNA, 19 nt, Artificial Sequence
  Description of Artificial Sequence: Synthetic oligonucleotide
  Antisense strand to SEQ ID NO: 515171
ugguagaagaaucuagccu

SEQ ID NO: 515173 - RNA, 19 nt, Artificial Sequence
  Description of Artificial Sequence: Synthetic oligonucleotide
  Sense strand starting at position 1498 of SEQ ID NO: 317825
acacauguuggcuauuaaa

SEQ ID NO: 515174 - RNA, 19 nt, Artificial Sequence
  Description of Artificial Sequence: Synthetic oligonucleotide
  Antisense strand to SEQ ID NO: 515173
uuuaauagccaacaugugu

SEQ ID NO: 515175 - RNA, 19 nt, Artificial Sequence
  Description of Artificial Sequence: Synthetic oligonucleotide
  Sense strand starting at position 1597 of SEQ ID NO: 317825
gugauucggcagcacugaa

SEQ ID NO: 515176 - RNA, 19 nt, Artificial Sequence
  Description of Artificial Sequence: Synthetic oligonucleotide
  Antisense strand to SEQ ID NO: 515175
uucagugcugccgaaucac

SEQ ID NO: 515177 - RNA, 19 nt, Artificial Sequence
  Description of Artificial Sequence: Synthetic oligonucleotide
  Sense strand starting at position 2238 of SEQ ID NO: 317825
guauguacauaccuggaua

SEQ ID NO: 515178 - RNA, 19 nt, Artificial Sequence
  Description of Artificial Sequence: Synthetic oligonucleotide
  Antisense strand to SEQ ID NO: 515177
uauccagguauguacauac

SEQ ID NO: 515179 - RNA, 19 nt, Artificial Sequence
  Description of Artificial Sequence: Synthetic oligonucleotide
  Sense strand starting at position 2262 of SEQ ID NO: 317825
gugugucuguauuuaauag

SEQ ID NO: 515180 - RNA, 19 nt, Artificial Sequence
  Description of Artificial Sequence: Synthetic oligonucleotide
  Antisense strand to SEQ ID NO: 515179
cuauuaaauacagacacac

SEQ ID NO: 515181 - RNA, 19 nt, Artificial Sequence
  Description of Artificial Sequence: Synthetic oligonucleotide
  Sense strand starting at position 2273 of SEQ ID NO: 317825
uuuaauagggcagguuuaa

SEQ ID NO: 515182 - RNA, 19 nt, Artificial Sequence
  Description of Artificial Sequence: Synthetic oligonucleotide
  Antisense strand to SEQ ID NO: 515181
uuaaaccugcccuauuaaa

SEQ ID NO: 515183 - RNA, 19 nt, Artificial Sequence
  Description of Artificial Sequence: Synthetic oligonucleotide
  Sense strand starting at position 2290 of SEQ ID NO: 317825
aagcaagucuauguacaga

SEQ ID NO: 515184 - RNA, 19 nt, Artificial Sequence
  Description of Artificial Sequence: Synthetic oligonucleotide
  Antisense strand to SEQ ID NO: 515183
ucuguacauagacuugcuu

SEQ ID NO: 515185 - RNA, 19 nt, Artificial Sequence
  Description of Artificial Sequence: Synthetic oligonucleotide
  Sense strand starting at position 2301 of SEQ ID NO: 317825
uguacagaccuguauagau

SEQ ID NO: 515186 - RNA, 19 nt, Artificial Sequence
  Description of Artificial Sequence: Synthetic oligonucleotide
  Antisense strand to SEQ ID NO: 515185
aucuauacaggucuguaca

SEQ ID NO: 515187 - RNA, 19 nt, Artificial Sequence
  Description of Artificial Sequence: Synthetic oligonucleotide
  Sense strand starting at position 2317 of SEQ ID NO: 317825
gauauauguguguauguuc

SEQ ID NO: 515188 - RNA, 19 nt, Artificial Sequence
  Description of Artificial Sequence: Synthetic oligonucleotide
  Antisense strand to SEQ ID NO: 515187
gaacauacacacauauauc

SEQ ID NO: 515189 - RNA, 19 nt, Artificial Sequence
  Description of Artificial Sequence: Synthetic oligonucleotide
  Sense strand starting at position 2326 of SEQ ID NO: 317825
guguauguucgugcauaaa

SEQ ID NO: 515190 - RNA, 19 nt, Artificial Sequence
  Description of Artificial Sequence: Synthetic oligonucleotide
  Antisense strand to SEQ ID NO: 515189
uuuaugcacgaacauacac

SEQ ID NO: 515191 - RNA, 19 nt, Artificial Sequence
  Description of Artificial Sequence: Synthetic oligonucleotide
  Sense strand starting at position 2388 of SEQ ID NO: 317825
guguauacauacuuggaua

SEQ ID NO: 515192 - RNA, 19 nt, Artificial Sequence
  Description of Artificial Sequence: Synthetic oligonucleotide
  Antisense strand to SEQ ID NO: 515191
uauccaaguauguauacac

SEQ ID NO: 515193 - RNA, 19 nt, Artificial Sequence
  Description of Artificial Sequence: Synthetic oligonucleotide
  Sense strand starting at position 2409 of SEQ ID NO: 317825
uggugugugcguguguaua

SEQ ID NO: 515194 - RNA, 19 nt, Artificial Sequence
  Description of Artificial Sequence: Synthetic oligonucleotide
  Antisense strand to SEQ ID NO: 515193
uauacacacgcacacacca

SEQ ID NO: 515195 - RNA, 19 nt, Artificial Sequence
  Description of Artificial Sequence: Synthetic oligonucleotide
  Sense strand starting at position 2432 of SEQ ID NO: 317825
uuuaauagggcggguuuaa

SEQ ID NO: 515196 - RNA, 19 nt, Artificial Sequence
  Description of Artificial Sequence: Synthetic oligonucleotide
  Antisense strand to SEQ ID NO: 515195
uuaaacccgcccuauuaaa

SEQ ID NO: 515197 - RNA, 19 nt, Artificial Sequence
  Description of Artificial Sequence: Synthetic oligonucleotide
  Sense strand starting at position 2459 of SEQ ID NO: 317825
guguguacauacuuggaua

SEQ ID NO: 515198 - RNA, 19 nt, Artificial Sequence
  Description of Artificial Sequence: Synthetic oligonucleotide
  Antisense strand to SEQ ID NO: 515197
uauccaaguauguacacac

SEQ ID NO: 515199 - RNA, 19 nt, Artificial Sequence
  Description of Artificial Sequence: Synthetic oligonucleotide
  Sense strand starting at position 2765 of SEQ ID NO: 317825
ggguuugccggcagucuaa

SEQ ID NO: 515200 - RNA, 19 nt, Artificial Sequence
  Description of Artificial Sequence: Synthetic oligonucleotide
  Antisense strand to SEQ ID NO: 515199
uuagacugccggcaaaccc

SEQ ID NO: 515201 - RNA, 19 nt, Artificial Sequence
  Description of Artificial Sequence: Synthetic oligonucleotide
  Sense strand starting at position 2767 of SEQ ID NO: 317825
guuugccggcagucuaaau

SEQ ID NO: 515202 - RNA, 19 nt, Artificial Sequence
  Description of Artificial Sequence: Synthetic oligonucleotide
  Antisense strand to SEQ ID NO: 515201
auuuagacugccggcaaac

SEQ ID NO: 515203 - RNA, 19 nt, Artificial Sequence
  Description of Artificial Sequence: Synthetic oligonucleotide
  Sense strand starting at position 2807 of SEQ ID NO: 317825
uucuuuagagucugacagu

SEQ ID NO: 515204 - RNA, 19 nt, Artificial Sequence
  Description of Artificial Sequence: Synthetic oligonucleotide
  Antisense strand to SEQ ID NO: 515203
acugucagacucuaaagaa

SEQ ID NO: 515205 - RNA, 19 nt, Artificial Sequence
  Description of Artificial Sequence: Synthetic oligonucleotide
  Sense strand starting at position 2887 of SEQ ID NO: 317825
gagacaccauguuugcaua

SEQ ID NO: 515206 - RNA, 19 nt, Artificial Sequence
  Description of Artificial Sequence: Synthetic oligonucleotide
  Antisense strand to SEQ ID NO: 515205
uaugcaaacauggugucuc

SEQ ID NO: 515207 - RNA, 19 nt, Artificial Sequence
  Description of Artificial Sequence: Synthetic oligonucleotide
  Sense strand starting at position 2888 of SEQ ID NO: 317825
agacaccauguuugcauaa

SEQ ID NO: 515208 - RNA, 19 nt, Artificial Sequence
  Description of Artificial Sequence: Synthetic oligonucleotide
  Antisense strand to SEQ ID NO: 515207
uuaugcaaacauggugucu

SEQ ID NO: 515209 - RNA, 19 nt, Artificial Sequence
  Description of Artificial Sequence: Synthetic oligonucleotide
  Sense strand starting at position 2912 of SEQ ID NO: 317825
uuggucugccuuugagaaa

SEQ ID NO: 515210 - RNA, 19 nt, Artificial Sequence
  Description of Artificial Sequence: Synthetic oligonucleotide
  Antisense strand to SEQ ID NO: 515209
uuucucaaaggcagaccaa

SEQ ID NO: 515211 - RNA, 19 nt, Artificial Sequence
  Description of Artificial Sequence: Synthetic oligonucleotide
  Sense strand starting at position 2972 of SEQ ID NO: 317825
aaaggcauccgagguaaga

SEQ ID NO: 515212 - RNA, 19 nt, Artificial Sequence
  Description of Artificial Sequence: Synthetic oligonucleotide
  Antisense strand to SEQ ID NO: 515211
ucuuaccucggaugccuuu

SEQ ID NO: 515213 - RNA, 19 nt, Artificial Sequence
  Description of Artificial Sequence: Synthetic oligonucleotide
  Sense strand starting at position 3025 of SEQ ID NO: 317825
ggugggucugcagagaugu

SEQ ID NO: 515214 - RNA, 19 nt, Artificial Sequence
  Description of Artificial Sequence: Synthetic oligonucleotide
  Antisense strand to SEQ ID NO: 515213
acaucucugcagacccacc

SEQ ID NO: 515215 - RNA, 19 nt, Artificial Sequence
  Description of Artificial Sequence: Synthetic oligonucleotide
  Sense strand starting at position 3058 of SEQ ID NO: 317825
uguguuucaggucaguaga

SEQ ID NO: 515216 - RNA, 19 nt, Artificial Sequence
  Description of Artificial Sequence: Synthetic oligonucleotide
  Antisense strand to SEQ ID NO: 515215
ucuacugaccugaaacaca

SEQ ID NO: 515217 - RNA, 19 nt, Artificial Sequence
  Description of Artificial Sequence: Synthetic oligonucleotide
  Sense strand starting at position 3061 of SEQ ID NO: 317825
guuucaggucaguagagua

SEQ ID NO: 515218 - RNA, 19 nt, Artificial Sequence
  Description of Artificial Sequence: Synthetic oligonucleotide
  Antisense strand to SEQ ID NO: 515217
uacucuacugaccugaaac

SEQ ID NO: 515219 - RNA, 19 nt, Artificial Sequence
  Description of Artificial Sequence: Synthetic oligonucleotide
  Sense strand starting at position 3160 of SEQ ID NO: 317825
ucuggugagaaauggguaa

SEQ ID NO: 515220 - RNA, 19 nt, Artificial Sequence
  Description of Artificial Sequence: Synthetic oligonucleotide
  Antisense strand to SEQ ID NO: 515219
uuacccauuucucaccaga

SEQ ID NO: 515221 - RNA, 19 nt, Artificial Sequence
  Description of Artificial Sequence: Synthetic oligonucleotide
  Sense strand starting at position 3164 of SEQ ID NO: 317825
gugagaaauggguaagcau

SEQ ID NO: 515222 - RNA, 19 nt, Artificial Sequence
  Description of Artificial Sequence: Synthetic oligonucleotide
  Antisense strand to SEQ ID NO: 515221
augcuuacccauuucucac

SEQ ID NO: 515223 - RNA, 19 nt, Artificial Sequence
  Description of Artificial Sequence: Synthetic oligonucleotide
  Sense strand starting at position 3167 of SEQ ID NO: 317825
agaaauggguaagcauuaa

SEQ ID NO: 515224 - RNA, 19 nt, Artificial Sequence
  Description of Artificial Sequence: Synthetic oligonucleotide
  Antisense strand to SEQ ID NO: 515223
uuaaugcuuacccauuucu

SEQ ID NO: 515225 - RNA, 19 nt, Artificial Sequence
  Description of Artificial Sequence: Synthetic oligonucleotide
  Sense strand starting at position 3171 of SEQ ID NO: 317825
auggguaagcauuaaaugu

SEQ ID NO: 515226 - RNA, 19 nt, Artificial Sequence
  Description of Artificial Sequence: Synthetic oligonucleotide
  Antisense strand to SEQ ID NO: 515225
acauuuaaugcuuacccau

SEQ ID NO: 515227 - RNA, 19 nt, Artificial Sequence
  Description of Artificial Sequence: Synthetic oligonucleotide
  Sense strand starting at position 3257 of SEQ ID NO: 317825
cugucagcagaaugaugau

SEQ ID NO: 515228 - RNA, 19 nt, Artificial Sequence
  Description of Artificial Sequence: Synthetic oligonucleotide
  Antisense strand to SEQ ID NO: 515227
aucaucauucugcugacag

SEQ ID NO: 515229 - RNA, 19 nt, Artificial Sequence
  Description of Artificial Sequence: Synthetic oligonucleotide
  Sense strand starting at position 3572 of SEQ ID NO: 317825
auggauaauugagucaauu

SEQ ID NO: 515230 - RNA, 19 nt, Artificial Sequence
  Description of Artificial Sequence: Synthetic oligonucleotide
  Antisense strand to SEQ ID NO: 515229
aauugacucaauuauccau

SEQ ID NO: 515231 - RNA, 19 nt, Artificial Sequence
  Description of Artificial Sequence: Synthetic oligonucleotide
  Sense strand starting at position 3587 of SEQ ID NO: 317825
aauuauacaguguguugaa

SEQ ID NO: 515232 - RNA, 19 nt, Artificial Sequence
  Description of Artificial Sequence: Synthetic oligonucleotide
  Antisense strand to SEQ ID NO: 515231
uucaacacacuguauaauu

SEQ ID NO: 515233 - RNA, 19 nt, Artificial Sequence
  Description of Artificial Sequence: Synthetic oligonucleotide
  Sense strand starting at position 3690 of SEQ ID NO: 317825
auuauaggucucugaucca

SEQ ID NO: 515234 - RNA, 19 nt, Artificial Sequence
  Description of Artificial Sequence: Synthetic oligonucleotide
  Antisense strand to SEQ ID NO: 515233
uggaucagagaccuauaau

SEQ ID NO: 515235 - RNA, 19 nt, Artificial Sequence
  Description of Artificial Sequence: Synthetic oligonucleotide
  Sense strand starting at position 3693 of SEQ ID NO: 317825
auaggucucugauccaaac

SEQ ID NO: 515236 - RNA, 19 nt, Artificial Sequence
  Description of Artificial Sequence: Synthetic oligonucleotide
  Antisense strand to SEQ ID NO: 515235
guuuggaucagagaccuau

SEQ ID NO: 515237 - RNA, 19 nt, Artificial Sequence
  Description of Artificial Sequence: Synthetic oligonucleotide
  Sense strand starting at position 3780 of SEQ ID NO: 317825
cuugauuccuuaccugaag

SEQ ID NO: 515238 - RNA, 19 nt, Artificial Sequence
  Description of Artificial Sequence: Synthetic oligonucleotide
  Antisense strand to SEQ ID NO: 515237
cuucagguaaggaaucaag

SEQ ID NO: 515239 - RNA, 19 nt, Artificial Sequence
  Description of Artificial Sequence: Synthetic oligonucleotide
  Sense strand starting at position 3781 of SEQ ID NO: 317825
uugauuccuuaccugaagu

SEQ ID NO: 515240 - RNA, 19 nt, Artificial Sequence
  Description of Artificial Sequence: Synthetic oligonucleotide
  Antisense strand to SEQ ID NO: 515239
acuucagguaaggaaucaa

SEQ ID NO: 515241 - RNA, 19 nt, Artificial Sequence
  Description of Artificial Sequence: Synthetic oligonucleotide
  Sense strand starting at position 3894 of SEQ ID NO: 317825
gcaucaagauggcucaaau

SEQ ID NO: 515242 - RNA, 19 nt, Artificial Sequence
  Description of Artificial Sequence: Synthetic oligonucleotide
  Antisense strand to SEQ ID NO: 515241
auuugagccaucuugaugc

SEQ ID NO: 515243 - RNA, 19 nt, Artificial Sequence
  Description of Artificial Sequence: Synthetic oligonucleotide
  Sense strand starting at position 100 of SEQ ID NO: 317826
gugugaguucugcaacaag

SEQ ID NO: 515244 - RNA, 19 nt, Artificial Sequence
  Description of Artificial Sequence: Synthetic oligonucleotide
  Antisense strand to SEQ ID NO: 515243
cuuguugcagaacucacac

SEQ ID NO: 515245 - RNA, 19 nt, Artificial Sequence
  Description of Artificial Sequence: Synthetic oligonucleotide
  Sense strand starting at position 147 of SEQ ID NO: 317826
ccauuauacuaguuaugag

SEQ ID NO: 515246 - RNA, 19 nt, Artificial Sequence
  Description of Artificial Sequence: Synthetic oligonucleotide
  Antisense strand to SEQ ID NO: 515245
cucauaacuaguauaaugg

SEQ ID NO: 515247 - RNA, 19 nt, Artificial Sequence
  Description of Artificial Sequence: Synthetic oligonucleotide
  Sense strand starting at position 218 of SEQ ID NO: 317826
cucacaagcuugcuagaga

SEQ ID NO: 515248 - RNA, 19 nt, Artificial Sequence
  Description of Artificial Sequence: Synthetic oligonucleotide
  Antisense strand to SEQ ID NO: 515247
ucucuagcaagcuugugag

SEQ ID NO: 515249 - RNA, 19 nt, Artificial Sequence
  Description of Artificial Sequence: Synthetic oligonucleotide
  Sense strand starting at position 221 of SEQ ID NO: 317826
acaagcuugcuagagaaca

SEQ ID NO: 515250 - RNA, 19 nt, Artificial Sequence
  Description of Artificial Sequence: Synthetic oligonucleotide
  Antisense strand to SEQ ID NO: 515249
uguucucuagcaagcuugu

SEQ ID NO: 515251 - RNA, 19 nt, Artificial Sequence
  Description of Artificial Sequence: Synthetic oligonucleotide
  Sense strand starting at position 239 of SEQ ID NO: 317826
augagauaucgauguaaag

SEQ ID NO: 515252 - RNA, 19 nt, Artificial Sequence
  Description of Artificial Sequence: Synthetic oligonucleotide
  Antisense strand to SEQ ID NO: 515251
cuuuacaucgauaucucau

SEQ ID NO: 515253 - RNA, 19 nt, Artificial Sequence
  Description of Artificial Sequence: Synthetic oligonucleotide
  Sense strand starting at position 241 of SEQ ID NO: 317826
gagauaucgauguaaagug

SEQ ID NO: 515254 - RNA, 19 nt, Artificial Sequence
  Description of Artificial Sequence: Synthetic oligonucleotide
  Antisense strand to SEQ ID NO: 515253
cacuuuacaucgauaucuc

SEQ ID NO: 515255 - RNA, 19 nt, Artificial Sequence
  Description of Artificial Sequence: Synthetic oligonucleotide
  Sense strand starting at position 248 of SEQ ID NO: 317826
cgauguaaaguguaccuga

SEQ ID NO: 515256 - RNA, 19 nt, Artificial Sequence
  Description of Artificial Sequence: Synthetic oligonucleotide
  Antisense strand to SEQ ID NO: 515255
ucagguacacuuuacaucg

SEQ ID NO: 515257 - RNA, 19 nt, Artificial Sequence
  Description of Artificial Sequence: Synthetic oligonucleotide
  Sense strand starting at position 251 of SEQ ID NO: 317826
uguaaaguguaccugauaa

SEQ ID NO: 515258 - RNA, 19 nt, Artificial Sequence
  Description of Artificial Sequence: Synthetic oligonucleotide
  Antisense strand to SEQ ID NO: 515257
uuaucagguacacuuuaca

SEQ ID NO: 515259 - RNA, 19 nt, Artificial Sequence
  Description of Artificial Sequence: Synthetic oligonucleotide
  Sense strand starting at position 262 of SEQ ID NO: 317826
ccugauaagcaguaguauu

SEQ ID NO: 515260 - RNA, 19 nt, Artificial Sequence
  Description of Artificial Sequence: Synthetic oligonucleotide
  Antisense strand to SEQ ID NO: 515259
aauacuacugcuuaucagg

SEQ ID NO: 515261 - RNA, 19 nt, Artificial Sequence
  Description of Artificial Sequence: Synthetic oligonucleotide
  Sense strand starting at position 439 of SEQ ID NO: 317826
cugcuuuaacaugauuaga

SEQ ID NO: 515262 - RNA, 19 nt, Artificial Sequence
  Description of Artificial Sequence: Synthetic oligonucleotide
  Antisense strand to SEQ ID NO: 515261
ucuaaucauguuaaagcag

SEQ ID NO: 515263 - RNA, 19 nt, Artificial Sequence
  Description of Artificial Sequence: Synthetic oligonucleotide
  Sense strand starting at position 441 of SEQ ID NO: 317826
gcuuuaacaugauuagaaa

SEQ ID NO: 515264 - RNA, 19 nt, Artificial Sequence
  Description of Artificial Sequence: Synthetic oligonucleotide
  Antisense strand to SEQ ID NO: 515263
uuucuaaucauguuaaagc

SEQ ID NO: 515265 - RNA, 19 nt, Artificial Sequence
  Description of Artificial Sequence: Synthetic oligonucleotide
  Sense strand starting at position 606 of SEQ ID NO: 317826
auggcaaauucuguuggaa

SEQ ID NO: 515266 - RNA, 19 nt, Artificial Sequence
  Description of Artificial Sequence: Synthetic oligonucleotide
  Antisense strand to SEQ ID NO: 515265
uuccaacagaauuugccau

SEQ ID NO: 515267 - RNA, 19 nt, Artificial Sequence
  Description of Artificial Sequence: Synthetic oligonucleotide
  Sense strand starting at position 692 of SEQ ID NO: 317826
aggaaaugcuaguuauauu

SEQ ID NO: 515268 - RNA, 19 nt, Artificial Sequence
  Description of Artificial Sequence: Synthetic oligonucleotide
  Antisense strand to SEQ ID NO: 515267
aauauaacuagcauuuccu

SEQ ID NO: 515269 - RNA, 19 nt, Artificial Sequence
  Description of Artificial Sequence: Synthetic oligonucleotide
  Sense strand starting at position 721 of SEQ ID NO: 317826
agguuaacauaugccauaa

SEQ ID NO: 515270 - RNA, 19 nt, Artificial Sequence
  Description of Artificial Sequence: Synthetic oligonucleotide
  Antisense strand to SEQ ID NO: 515269
uuauggcauauguuaaccu

SEQ ID NO: 515271 - RNA, 19 nt, Artificial Sequence
  Description of Artificial Sequence: Synthetic oligonucleotide
  Sense strand starting at position 851 of SEQ ID NO: 317826
ugaggacucaaacgucaaa

SEQ ID NO: 515272 - RNA, 19 nt, Artificial Sequence
  Description of Artificial Sequence: Synthetic oligonucleotide
  Antisense strand to SEQ ID NO: 515271
uuugacguuugaguccuca

SEQ ID NO: 515273 - RNA, 19 nt, Artificial Sequence
  Description of Artificial Sequence: Synthetic oligonucleotide
  Sense strand starting at position 862 of SEQ ID NO: 317826
acgucaaauagugagaagu

SEQ ID NO: 515274 - RNA, 19 nt, Artificial Sequence
  Description of Artificial Sequence: Synthetic oligonucleotide
  Antisense strand to SEQ ID NO: 515273
acuucucacuauuugacgu

SEQ ID NO: 515275 - RNA, 19 nt, Artificial Sequence
  Description of Artificial Sequence: Synthetic oligonucleotide
  Sense strand starting at position 875 of SEQ ID NO: 317826
agaaguuucuuacuuuaga

SEQ ID NO: 515276 - RNA, 19 nt, Artificial Sequence
  Description of Artificial Sequence: Synthetic oligonucleotide
  Antisense strand to SEQ ID NO: 515275
ucuaaaguaagaaacuucu

SEQ ID NO: 515277 - RNA, 19 nt, Artificial Sequence
  Description of Artificial Sequence: Synthetic oligonucleotide
  Sense strand starting at position 933 of SEQ ID NO: 317826
gauacauggcaauguuaag

SEQ ID NO: 515278 - RNA, 19 nt, Artificial Sequence
  Description of Artificial Sequence: Synthetic oligonucleotide
  Antisense strand to SEQ ID NO: 515277
cuuaacauugccauguauc

SEQ ID NO: 515279 - RNA, 19 nt, Artificial Sequence
  Description of Artificial Sequence: Synthetic oligonucleotide
  Sense strand starting at position 1218 of SEQ ID NO: 317826
cgccuuagccucccgauua

SEQ ID NO: 515280 - RNA, 19 nt, Artificial Sequence
  Description of Artificial Sequence: Synthetic oligonucleotide
  Antisense strand to SEQ ID NO: 515279
uaaucgggaggcuaaggcg

SEQ ID NO: 515281 - RNA, 19 nt, Artificial Sequence
  Description of Artificial Sequence: Synthetic oligonucleotide
  Sense strand starting at position 1331 of SEQ ID NO: 317826
gugacccuccgagauuguu

SEQ ID NO: 515282 - RNA, 19 nt, Artificial Sequence
  Description of Artificial Sequence: Synthetic oligonucleotide
  Antisense strand to SEQ ID NO: 515281
aacaaucucggagggucac

SEQ ID NO: 515283 - RNA, 19 nt, Artificial Sequence
  Description of Artificial Sequence: Synthetic oligonucleotide
  Sense strand starting at position 1408 of SEQ ID NO: 317826
aaggguuaguacuucuaac

SEQ ID NO: 515284 - RNA, 19 nt, Artificial Sequence
  Description of Artificial Sequence: Synthetic oligonucleotide
  Antisense strand to SEQ ID NO: 515283
guuagaaguacuaacccuu

SEQ ID NO: 515285 - RNA, 19 nt, Artificial Sequence
  Description of Artificial Sequence: Synthetic oligonucleotide
  Sense strand starting at position 2042 of SEQ ID NO: 317826
gggcggagccuugaggaaa

SEQ ID NO: 515286 - RNA, 19 nt, Artificial Sequence
  Description of Artificial Sequence: Synthetic oligonucleotide
  Antisense strand to SEQ ID NO: 515285
uuuccucaaggcuccgccc

SEQ ID NO: 515287 - RNA, 19 nt, Artificial Sequence
  Description of Artificial Sequence: Synthetic oligonucleotide
  Sense strand starting at position 2090 of SEQ ID NO: 317826
ugggaauuguaguucagac

SEQ ID NO: 515288 - RNA, 19 nt, Artificial Sequence
  Description of Artificial Sequence: Synthetic oligonucleotide
  Antisense strand to SEQ ID NO: 515287
gucugaacuacaauuccca

SEQ ID NO: 515289 - RNA, 19 nt, Artificial Sequence
  Description of Artificial Sequence: Synthetic oligonucleotide
  Sense strand starting at position 2162 of SEQ ID NO: 317826
caggcuuaggucuaggauu

SEQ ID NO: 515290 - RNA, 19 nt, Artificial Sequence
  Description of Artificial Sequence: Synthetic oligonucleotide
  Antisense strand to SEQ ID NO: 515289
aauccuagaccuaagccug

SEQ ID NO: 515291 - RNA, 19 nt, Artificial Sequence
  Description of Artificial Sequence: Synthetic oligonucleotide
  Sense strand starting at position 2239 of SEQ ID NO: 317826
auacucuagucuguugaaa

SEQ ID NO: 515292 - RNA, 19 nt, Artificial Sequence
  Description of Artificial Sequence: Synthetic oligonucleotide
  Antisense strand to SEQ ID NO: 515291
uuucaacagacuagaguau

SEQ ID NO: 515293 - RNA, 19 nt, Artificial Sequence
  Description of Artificial Sequence: Synthetic oligonucleotide
  Sense strand starting at position 2342 of SEQ ID NO: 317826
uuugccaaugcugagagau

SEQ ID NO: 515294 - RNA, 19 nt, Artificial Sequence
  Description of Artificial Sequence: Synthetic oligonucleotide
  Antisense strand to SEQ ID NO: 515293
aucucucagcauuggcaaa

SEQ ID NO: 515295 - RNA, 19 nt, Artificial Sequence
  Description of Artificial Sequence: Synthetic oligonucleotide
  Sense strand starting at position 2352 of SEQ ID NO: 317826
cugagagauaugugcuaau

SEQ ID NO: 515296 - RNA, 19 nt, Artificial Sequence
  Description of Artificial Sequence: Synthetic oligonucleotide
  Antisense strand to SEQ ID NO: 515295
auuagcacauaucucucag

SEQ ID NO: 515297 - RNA, 19 nt, Artificial Sequence
  Description of Artificial Sequence: Synthetic oligonucleotide
  Sense strand starting at position 2616 of SEQ ID NO: 317826
gccugaugaacguacacaa

SEQ ID NO: 515298 - RNA, 19 nt, Artificial Sequence
  Description of Artificial Sequence: Synthetic oligonucleotide
  Antisense strand to SEQ ID NO: 515297
uuguguacguucaucaggc

SEQ ID NO: 515299 - RNA, 19 nt, Artificial Sequence
  Description of Artificial Sequence: Synthetic oligonucleotide
  Sense strand starting at position 2689 of SEQ ID NO: 317826
agaauaugaucacugugua

SEQ ID NO: 515300 - RNA, 19 nt, Artificial Sequence
  Description of Artificial Sequence: Synthetic oligonucleotide
  Antisense strand to SEQ ID NO: 515299
uacacagugaucauauucu

SEQ ID NO: 515301 - RNA, 19 nt, Artificial Sequence
  Description of Artificial Sequence: Synthetic oligonucleotide
  Sense strand starting at position 2690 of SEQ ID NO: 317826
gaauaugaucacuguguaa

SEQ ID NO: 515302 - RNA, 19 nt, Artificial Sequence
  Description of Artificial Sequence: Synthetic oligonucleotide
  Antisense strand to SEQ ID NO: 515301
uuacacagugaucauauuc

SEQ ID NO: 515303 - RNA, 19 nt, Artificial Sequence
  Description of Artificial Sequence: Synthetic oligonucleotide
  Sense strand starting at position 2692 of SEQ ID NO: 317826
auaugaucacuguguaauc

SEQ ID NO: 515304 - RNA, 19 nt, Artificial Sequence
  Description of Artificial Sequence: Synthetic oligonucleotide
  Antisense strand to SEQ ID NO: 515303
gauuacacagugaucauau

SEQ ID NO: 515305 - RNA, 19 nt, Artificial Sequence
  Description of Artificial Sequence: Synthetic oligonucleotide
  Sense strand starting at position 2848 of SEQ ID NO: 317826
ugguaagguagccaauauu

SEQ ID NO: 515306 - RNA, 19 nt, Artificial Sequence
  Description of Artificial Sequence: Synthetic oligonucleotide
  Antisense strand to SEQ ID NO: 515305
aauauuggcuaccuuacca

SEQ ID NO: 515307 - RNA, 19 nt, Artificial Sequence
  Description of Artificial Sequence: Synthetic oligonucleotide
  Sense strand starting at position 2913 of SEQ ID NO: 317826
agagaacccuuacugcaau

SEQ ID NO: 515308 - RNA, 19 nt, Artificial Sequence
  Description of Artificial Sequence: Synthetic oligonucleotide
  Antisense strand to SEQ ID NO: 515307
auugcaguaaggguucucu

SEQ ID NO: 515309 - RNA, 19 nt, Artificial Sequence
  Description of Artificial Sequence: Synthetic oligonucleotide
  Sense strand starting at position 2974 of SEQ ID NO: 317826
ggucuuugaccagaaggua

SEQ ID NO: 515310 - RNA, 19 nt, Artificial Sequence
  Description of Artificial Sequence: Synthetic oligonucleotide
  Antisense strand to SEQ ID NO: 515309
uaccuucuggucaaagacc

SEQ ID NO: 515311 - RNA, 19 nt, Artificial Sequence
  Description of Artificial Sequence: Synthetic oligonucleotide
  Sense strand starting at position 3029 of SEQ ID NO: 317826
ugguguuagguuagauugu

SEQ ID NO: 515312 - RNA, 19 nt, Artificial Sequence
  Description of Artificial Sequence: Synthetic oligonucleotide
  Antisense strand to SEQ ID NO: 515311
acaaucuaaccuaacacca

SEQ ID NO: 515313 - RNA, 19 nt, Artificial Sequence
  Description of Artificial Sequence: Synthetic oligonucleotide
  Sense strand starting at position 3106 of SEQ ID NO: 317826
ucacgugucucauuuauau

SEQ ID NO: 515314 - RNA, 19 nt, Artificial Sequence
  Description of Artificial Sequence: Synthetic oligonucleotide
  Antisense strand to SEQ ID NO: 515313
auauaaaugagacacguga

SEQ ID NO: 515315 - RNA, 19 nt, Artificial Sequence
  Description of Artificial Sequence: Synthetic oligonucleotide
  Sense strand starting at position 3150 of SEQ ID NO: 317826
accuaagguuugcuuugaa

SEQ ID NO: 515316 - RNA, 19 nt, Artificial Sequence
  Description of Artificial Sequence: Synthetic oligonucleotide
  Antisense strand to SEQ ID NO: 515315
uucaaagcaaaccuuaggu

SEQ ID NO: 515317 - RNA, 19 nt, Artificial Sequence
  Description of Artificial Sequence: Synthetic oligonucleotide
  Sense strand starting at position 3367 of SEQ ID NO: 317826
uauagaaguuaugugacau

SEQ ID NO: 515318 - RNA, 19 nt, Artificial Sequence
  Description of Artificial Sequence: Synthetic oligonucleotide
  Antisense strand to SEQ ID NO: 515317
augucacauaacuucuaua

SEQ ID NO: 515319 - RNA, 19 nt, Artificial Sequence
  Description of Artificial Sequence: Synthetic oligonucleotide
  Sense strand starting at position 3504 of SEQ ID NO: 317826
gaguaauguuaucugugga

SEQ ID NO: 515320 - RNA, 19 nt, Artificial Sequence
  Description of Artificial Sequence: Synthetic oligonucleotide
  Antisense strand to SEQ ID NO: 515319
uccacagauaacauuacuc

SEQ ID NO: 515321 - RNA, 19 nt, Artificial Sequence
  Description of Artificial Sequence: Synthetic oligonucleotide
  Sense strand starting at position 3581 of SEQ ID NO: 317826
ugaguuaacucuuuaggga

SEQ ID NO: 515322 - RNA, 19 nt, Artificial Sequence
  Description of Artificial Sequence: Synthetic oligonucleotide
  Antisense strand to SEQ ID NO: 515321
ucccuaaagaguuaacuca

SEQ ID NO: 515323 - RNA, 19 nt, Artificial Sequence
  Description of Artificial Sequence: Synthetic oligonucleotide
  Sense strand starting at position 2260 of SEQ ID NO: 317827
agggacuccuuugauauuu

SEQ ID NO: 515324 - RNA, 19 nt, Artificial Sequence
  Description of Artificial Sequence: Synthetic oligonucleotide
  Antisense strand to SEQ ID NO: 515323
aaauaucaaaggagucccu

SEQ ID NO: 515325 - RNA, 19 nt, Artificial Sequence
  Description of Artificial Sequence: Synthetic oligonucleotide
  Sense strand starting at position 2308 of SEQ ID NO: 317827
gcaauagggacgugucaag

SEQ ID NO: 515326 - RNA, 19 nt, Artificial Sequence
  Description of Artificial Sequence: Synthetic oligonucleotide
  Antisense strand to SEQ ID NO: 515325
cuugacacgucccuauugc

SEQ ID NO: 515327 - RNA, 19 nt, Artificial Sequence
  Description of Artificial Sequence: Synthetic oligonucleotide
  Sense strand starting at position 2313 of SEQ ID NO: 317827
agggacgugucaaggagaa

SEQ ID NO: 515328 - RNA, 19 nt, Artificial Sequence
  Description of Artificial Sequence: Synthetic oligonucleotide
  Antisense strand to SEQ ID NO: 515327
uucuccuugacacgucccu

SEQ ID NO: 515329 - RNA, 19 nt, Artificial Sequence
  Description of Artificial Sequence: Synthetic oligonucleotide
  Sense strand starting at position 2361 of SEQ ID NO: 317827
caagguguuggagaucgaa

SEQ ID NO: 515330 - RNA, 19 nt, Artificial Sequence
  Description of Artificial Sequence: Synthetic oligonucleotide
  Antisense strand to SEQ ID NO: 515329
uucgaucuccaacaccuug

SEQ ID NO: 515331 - RNA, 19 nt, Artificial Sequence
  Description of Artificial Sequence: Synthetic oligonucleotide
  Sense strand starting at position 2389 of SEQ ID NO: 317827
cgugaaaccgcggaugaau

SEQ ID NO: 515332 - RNA, 19 nt, Artificial Sequence
  Description of Artificial Sequence: Synthetic oligonucleotide
  Antisense strand to SEQ ID NO: 515331
auucauccgcgguuucacg

SEQ ID NO: 515333 - RNA, 19 nt, Artificial Sequence
  Description of Artificial Sequence: Synthetic oligonucleotide
  Sense strand starting at position 2534 of SEQ ID NO: 317827
ugcccuugcccagaaugua

SEQ ID NO: 515334 - RNA, 19 nt, Artificial Sequence
  Description of Artificial Sequence: Synthetic oligonucleotide
  Antisense strand to SEQ ID NO: 515333
uacauucugggcaagggca

SEQ ID NO: 515335 - RNA, 19 nt, Artificial Sequence
  Description of Artificial Sequence: Synthetic oligonucleotide
  Sense strand starting at position 2563 of SEQ ID NO: 317827
gggacucucccuuaaccuu

SEQ ID NO: 515336 - RNA, 19 nt, Artificial Sequence
  Description of Artificial Sequence: Synthetic oligonucleotide
  Antisense strand to SEQ ID NO: 515335
aagguuaagggagaguccc

SEQ ID NO: 515337 - RNA, 19 nt, Artificial Sequence
  Description of Artificial Sequence: Synthetic oligonucleotide
  Sense strand starting at position 2778 of SEQ ID NO: 317827
cuucuaugguugcccauua

SEQ ID NO: 515338 - RNA, 19 nt, Artificial Sequence
  Description of Artificial Sequence: Synthetic oligonucleotide
  Antisense strand to SEQ ID NO: 515337
uaaugggcaaccauagaag

SEQ ID NO: 515339 - RNA, 19 nt, Artificial Sequence
  Description of Artificial Sequence: Synthetic oligonucleotide
  Sense strand starting at position 2779 of SEQ ID NO: 317827
uucuaugguugcccauuau

SEQ ID NO: 515340 - RNA, 19 nt, Artificial Sequence
  Description of Artificial Sequence: Synthetic oligonucleotide
  Antisense strand to SEQ ID NO: 515339
auaaugggcaaccauagaa

SEQ ID NO: 515341 - RNA, 19 nt, Artificial Sequence
  Description of Artificial Sequence: Synthetic oligonucleotide
  Sense strand starting at position 2789 of SEQ ID NO: 317827
gcccauuauuucgaagaua

SEQ ID NO: 515342 - RNA, 19 nt, Artificial Sequence
  Description of Artificial Sequence: Synthetic oligonucleotide
  Antisense strand to SEQ ID NO: 515341
uaucuucgaaauaaugggc

SEQ ID NO: 515343 - RNA, 19 nt, Artificial Sequence
  Description of Artificial Sequence: Synthetic oligonucleotide
  Sense strand starting at position 2809 of SEQ ID NO: 317827
aggccaaacuuguuagucu

SEQ ID NO: 515344 - RNA, 19 nt, Artificial Sequence
  Description of Artificial Sequence: Synthetic oligonucleotide
  Antisense strand to SEQ ID NO: 515343
agacuaacaaguuuggccu

SEQ ID NO: 515345 - RNA, 19 nt, Artificial Sequence
  Description of Artificial Sequence: Synthetic oligonucleotide
  Sense strand starting at position 2813 of SEQ ID NO: 317827
caaacuuguuagucuggua

SEQ ID NO: 515346 - RNA, 19 nt, Artificial Sequence
  Description of Artificial Sequence: Synthetic oligonucleotide
  Antisense strand to SEQ ID NO: 515345
uaccagacuaacaaguuug

SEQ ID NO: 515347 - RNA, 19 nt, Artificial Sequence
  Description of Artificial Sequence: Synthetic oligonucleotide
  Sense strand starting at position 2843 of SEQ ID NO: 317827
cuaccuaaugggugguaua

SEQ ID NO: 515348 - RNA, 19 nt, Artificial Sequence
  Description of Artificial Sequence: Synthetic oligonucleotide
  Antisense strand to SEQ ID NO: 515347
uauaccacccauuagguag

SEQ ID NO: 515349 - RNA, 19 nt, Artificial Sequence
  Description of Artificial Sequence: Synthetic oligonucleotide
  Sense strand starting at position 2844 of SEQ ID NO: 317827
uaccuaaugggugguauau

SEQ ID NO: 515350 - RNA, 19 nt, Artificial Sequence
  Description of Artificial Sequence: Synthetic oligonucleotide
  Antisense strand to SEQ ID NO: 515349
auauaccacccauuaggua

SEQ ID NO: 515351 - RNA, 19 nt, Artificial Sequence
  Description of Artificial Sequence: Synthetic oligonucleotide
  Sense strand starting at position 2918 of SEQ ID NO: 317827
ccacucuucuccuuuggua

SEQ ID NO: 515352 - RNA, 19 nt, Artificial Sequence
  Description of Artificial Sequence: Synthetic oligonucleotide
  Antisense strand to SEQ ID NO: 515351
uaccaaaggagaagagugg

SEQ ID NO: 515353 - RNA, 19 nt, Artificial Sequence
  Description of Artificial Sequence: Synthetic oligonucleotide
  Sense strand starting at position 3046 of SEQ ID NO: 317827
cuauauugugaugguuuau

SEQ ID NO: 515354 - RNA, 19 nt, Artificial Sequence
  Description of Artificial Sequence: Synthetic oligonucleotide
  Antisense strand to SEQ ID NO: 515353
auaaaccaucacaauauag

SEQ ID NO: 515355 - RNA, 19 nt, Artificial Sequence
  Description of Artificial Sequence: Synthetic oligonucleotide
  Sense strand starting at position 3057 of SEQ ID NO: 317827
ugguuuaugucuuccagac

SEQ ID NO: 515356 - RNA, 19 nt, Artificial Sequence
  Description of Artificial Sequence: Synthetic oligonucleotide
  Antisense strand to SEQ ID NO: 515355
gucuggaagacauaaacca

SEQ ID NO: 515357 - RNA, 19 nt, Artificial Sequence
  Description of Artificial Sequence: Synthetic oligonucleotide
  Sense strand starting at position 3061 of SEQ ID NO: 317827
uuaugucuuccagaccugu

SEQ ID NO: 515358 - RNA, 19 nt, Artificial Sequence
  Description of Artificial Sequence: Synthetic oligonucleotide
  Antisense strand to SEQ ID NO: 515357
acaggucuggaagacauaa

SEQ ID NO: 515359 - RNA, 19 nt, Artificial Sequence
  Description of Artificial Sequence: Synthetic oligonucleotide
  Sense strand starting at position 3090 of SEQ ID NO: 317827
gggcucuuucaggagcaga

SEQ ID NO: 515360 - RNA, 19 nt, Artificial Sequence
  Description of Artificial Sequence: Synthetic oligonucleotide
  Antisense strand to SEQ ID NO: 515359
ucugcuccugaaagagccc

SEQ ID NO: 515361 - RNA, 19 nt, Artificial Sequence
  Description of Artificial Sequence: Synthetic oligonucleotide
  Sense strand starting at position 3100 of SEQ ID NO: 317827
aggagcagacauuguagau

SEQ ID NO: 515362 - RNA, 19 nt, Artificial Sequence
  Description of Artificial Sequence: Synthetic oligonucleotide
  Antisense strand to SEQ ID NO: 515361
aucuacaaugucugcuccu

SEQ ID NO: 515363 - RNA, 19 nt, Artificial Sequence
  Description of Artificial Sequence: Synthetic oligonucleotide
  Sense strand starting at position 3170 of SEQ ID NO: 317827
aaugaagucuucccugagu

SEQ ID NO: 515364 - RNA, 19 nt, Artificial Sequence
  Description of Artificial Sequence: Synthetic oligonucleotide
  Antisense strand to SEQ ID NO: 515363
acucagggaagacuucauu

SEQ ID NO: 515365 - RNA, 19 nt, Artificial Sequence
  Description of Artificial Sequence: Synthetic oligonucleotide
  Sense strand starting at position 3172 of SEQ ID NO: 317827
ugaagucuucccugaguga

SEQ ID NO: 515366 - RNA, 19 nt, Artificial Sequence
  Description of Artificial Sequence: Synthetic oligonucleotide
  Antisense strand to SEQ ID NO: 515365
ucacucagggaagacuuca

SEQ ID NO: 515367 - RNA, 19 nt, Artificial Sequence
  Description of Artificial Sequence: Synthetic oligonucleotide
  Sense strand starting at position 3173 of SEQ ID NO: 317827
gaagucuucccugagugac

SEQ ID NO: 515368 - RNA, 19 nt, Artificial Sequence
  Description of Artificial Sequence: Synthetic oligonucleotide
  Antisense strand to SEQ ID NO: 515367
gucacucagggaagacuuc

SEQ ID NO: 515369 - RNA, 19 nt, Artificial Sequence
  Description of Artificial Sequence: Synthetic oligonucleotide
  Sense strand starting at position 3250 of SEQ ID NO: 317827
uguuuccaagucugaauua

SEQ ID NO: 515370 - RNA, 19 nt, Artificial Sequence
  Description of Artificial Sequence: Synthetic oligonucleotide
  Antisense strand to SEQ ID NO: 515369
uaauucagacuuggaaaca

SEQ ID NO: 515371 - RNA, 19 nt, Artificial Sequence
  Description of Artificial Sequence: Synthetic oligonucleotide
  Sense strand starting at position 3292 of SEQ ID NO: 317827
ugguuuggagcucacauau

SEQ ID NO: 515372 - RNA, 19 nt, Artificial Sequence
  Description of Artificial Sequence: Synthetic oligonucleotide
  Antisense strand to SEQ ID NO: 515371
auaugugagcuccaaacca

SEQ ID NO: 515373 - RNA, 19 nt, Artificial Sequence
  Description of Artificial Sequence: Synthetic oligonucleotide
  Sense strand starting at position 3319 of SEQ ID NO: 317827
ucauuauguuugguacuca

SEQ ID NO: 515374 - RNA, 19 nt, Artificial Sequence
  Description of Artificial Sequence: Synthetic oligonucleotide
  Antisense strand to SEQ ID NO: 515373
ugaguaccaaacauaauga

SEQ ID NO: 515375 - RNA, 19 nt, Artificial Sequence
  Description of Artificial Sequence: Synthetic oligonucleotide
  Sense strand starting at position 3350 of SEQ ID NO: 317827
uccuguuuaucuuuguaca

SEQ ID NO: 515376 - RNA, 19 nt, Artificial Sequence
  Description of Artificial Sequence: Synthetic oligonucleotide
  Antisense strand to SEQ ID NO: 515375
uguacaaagauaaacagga

SEQ ID NO: 515377 - RNA, 19 nt, Artificial Sequence
  Description of Artificial Sequence: Synthetic oligonucleotide
  Sense strand starting at position 3400 of SEQ ID NO: 317827
ggauaaugcuuugcucuca

SEQ ID NO: 515378 - RNA, 19 nt, Artificial Sequence
  Description of Artificial Sequence: Synthetic oligonucleotide
  Antisense strand to SEQ ID NO: 515377
ugagagcaaagcauuaucc

SEQ ID NO: 515379 - RNA, 19 nt, Artificial Sequence
  Description of Artificial Sequence: Synthetic oligonucleotide
  Sense strand starting at position 3452 of SEQ ID NO: 317827
uuuccuuuagcaggaagaa

SEQ ID NO: 515380 - RNA, 19 nt, Artificial Sequence
  Description of Artificial Sequence: Synthetic oligonucleotide
  Antisense strand to SEQ ID NO: 515379
uucuuccugcuaaaggaaa

SEQ ID NO: 515381 - RNA, 19 nt, Artificial Sequence
  Description of Artificial Sequence: Synthetic oligonucleotide
  Sense strand starting at position 3496 of SEQ ID NO: 317827
gccagaaguaacuggcaca

SEQ ID NO: 515382 - RNA, 19 nt, Artificial Sequence
  Description of Artificial Sequence: Synthetic oligonucleotide
  Antisense strand to SEQ ID NO: 515381
ugugccaguuacuucuggc

SEQ ID NO: 515383 - RNA, 19 nt, Artificial Sequence
  Description of Artificial Sequence: Synthetic oligonucleotide
  Sense strand starting at position 3622 of SEQ ID NO: 317827
gucugucaauccuccauca

SEQ ID NO: 515384 - RNA, 19 nt, Artificial Sequence
  Description of Artificial Sequence: Synthetic oligonucleotide
  Antisense strand to SEQ ID NO: 515383
ugauggaggauugacagac

SEQ ID NO: 515385 - RNA, 19 nt, Artificial Sequence
  Description of Artificial Sequence: Synthetic oligonucleotide
  Sense strand starting at position 3634 of SEQ ID NO: 317827
uccaucacuuccguguaga

SEQ ID NO: 515386 - RNA, 19 nt, Artificial Sequence
  Description of Artificial Sequence: Synthetic oligonucleotide
  Antisense strand to SEQ ID NO: 515385
ucuacacggaagugaugga

SEQ ID NO: 515387 - RNA, 19 nt, Artificial Sequence
  Description of Artificial Sequence: Synthetic oligonucleotide
  Sense strand starting at position 3635 of SEQ ID NO: 317827
ccaucacuuccguguagaa

SEQ ID NO: 515388 - RNA, 19 nt, Artificial Sequence
  Description of Artificial Sequence: Synthetic oligonucleotide
  Antisense strand to SEQ ID NO: 515387
uucuacacggaagugaugg

SEQ ID NO: 515389 - RNA, 19 nt, Artificial Sequence
  Description of Artificial Sequence: Synthetic oligonucleotide
  Sense strand starting at position 3637 of SEQ ID NO: 317827
aucacuuccguguagaaca

SEQ ID NO: 515390 - RNA, 19 nt, Artificial Sequence
  Description of Artificial Sequence: Synthetic oligonucleotide
  Antisense strand to SEQ ID NO: 515389
uguucuacacggaagugau

SEQ ID NO: 515391 - RNA, 19 nt, Artificial Sequence
  Description of Artificial Sequence: Synthetic oligonucleotide
  Sense strand starting at position 3662 of SEQ ID NO: 317827
ggccuucaaucggugauuu

SEQ ID NO: 515392 - RNA, 19 nt, Artificial Sequence
  Description of Artificial Sequence: Synthetic oligonucleotide
  Antisense strand to SEQ ID NO: 515391
aaaucaccgauugaaggcc

SEQ ID NO: 515393 - RNA, 19 nt, Artificial Sequence
  Description of Artificial Sequence: Synthetic oligonucleotide
  Sense strand starting at position 3733 of SEQ ID NO: 317827
uggauucuuugagcauaga

SEQ ID NO: 515394 - RNA, 19 nt, Artificial Sequence
  Description of Artificial Sequence: Synthetic oligonucleotide
  Antisense strand to SEQ ID NO: 515393
ucuaugcucaaagaaucca

SEQ ID NO: 515395 - RNA, 19 nt, Artificial Sequence
  Description of Artificial Sequence: Synthetic oligonucleotide
  Sense strand starting at position 3832 of SEQ ID NO: 317827
ccagaaugguuuccuugac

SEQ ID NO: 515396 - RNA, 19 nt, Artificial Sequence
  Description of Artificial Sequence: Synthetic oligonucleotide
  Antisense strand to SEQ ID NO: 515395
gucaaggaaaccauucugg

SEQ ID NO: 515397 - RNA, 19 nt, Artificial Sequence
  Description of Artificial Sequence: Synthetic oligonucleotide
  Sense strand starting at position 3833 of SEQ ID NO: 317827
cagaaugguuuccuugacu

SEQ ID NO: 515398 - RNA, 19 nt, Artificial Sequence
  Description of Artificial Sequence: Synthetic oligonucleotide
  Antisense strand to SEQ ID NO: 515397
agucaaggaaaccauucug

SEQ ID NO: 515399 - RNA, 19 nt, Artificial Sequence
  Description of Artificial Sequence: Synthetic oligonucleotide
  Sense strand starting at position 3931 of SEQ ID NO: 317827
gguugugucugauuuaucu

SEQ ID NO: 515400 - RNA, 19 nt, Artificial Sequence
  Description of Artificial Sequence: Synthetic oligonucleotide
  Antisense strand to SEQ ID NO: 515399
agauaaaucagacacaacc

SEQ ID NO: 515401 - RNA, 19 nt, Artificial Sequence
  Description of Artificial Sequence: Synthetic oligonucleotide
  Sense strand starting at position 3935 of SEQ ID NO: 317827
gugucugauuuaucuuuau

SEQ ID NO: 515402 - RNA, 19 nt, Artificial Sequence
  Description of Artificial Sequence: Synthetic oligonucleotide
  Antisense strand to SEQ ID NO: 515401
auaaagauaaaucagacac

SEQ ID NO: 515403 - RNA, 19 nt, Artificial Sequence
  Description of Artificial Sequence: Synthetic oligonucleotide
  Sense strand starting at position 59 of SEQ ID NO: 317828
cccagaauuggcuacaugu

SEQ ID NO: 515404 - RNA, 19 nt, Artificial Sequence
  Description of Artificial Sequence: Synthetic oligonucleotide
  Antisense strand to SEQ ID NO: 515403
acauguagccaauucuggg

SEQ ID NO: 515405 - RNA, 19 nt, Artificial Sequence
  Description of Artificial Sequence: Synthetic oligonucleotide
  Sense strand starting at position 103 of SEQ ID NO: 317828
cgugugugccggguugaau

SEQ ID NO: 515406 - RNA, 19 nt, Artificial Sequence
  Description of Artificial Sequence: Synthetic oligonucleotide
  Antisense strand to SEQ ID NO: 515405
auucaacccggcacacacg

SEQ ID NO: 515407 - RNA, 19 nt, Artificial Sequence
  Description of Artificial Sequence: Synthetic oligonucleotide
  Sense strand starting at position 104 of SEQ ID NO: 317828
gugugugccggguugaauu

SEQ ID NO: 515408 - RNA, 19 nt, Artificial Sequence
  Description of Artificial Sequence: Synthetic oligonucleotide
  Antisense strand to SEQ ID NO: 515407
aauucaacccggcacacac

SEQ ID NO: 515409 - RNA, 19 nt, Artificial Sequence
  Description of Artificial Sequence: Synthetic oligonucleotide
  Sense strand starting at position 149 of SEQ ID NO: 317828
gugugcguugaaaguauga

SEQ ID NO: 515410 - RNA, 19 nt, Artificial Sequence
  Description of Artificial Sequence: Synthetic oligonucleotide
  Antisense strand to SEQ ID NO: 515409
ucauacuuucaacgcacac

SEQ ID NO: 515411 - RNA, 19 nt, Artificial Sequence
  Description of Artificial Sequence: Synthetic oligonucleotide
  Sense strand starting at position 186 of SEQ ID NO: 317828
ggacuuagacaucguguga

SEQ ID NO: 515412 - RNA, 19 nt, Artificial Sequence
  Description of Artificial Sequence: Synthetic oligonucleotide
  Antisense strand to SEQ ID NO: 515411
ucacacgaugucuaagucc

SEQ ID NO: 515413 - RNA, 19 nt, Artificial Sequence
  Description of Artificial Sequence: Synthetic oligonucleotide
  Sense strand starting at position 913 of SEQ ID NO: 317828
ccguuucccggccagaaga

SEQ ID NO: 515414 - RNA, 19 nt, Artificial Sequence
  Description of Artificial Sequence: Synthetic oligonucleotide
  Antisense strand to SEQ ID NO: 515413
ucuucuggccgggaaacgg

SEQ ID NO: 515415 - RNA, 19 nt, Artificial Sequence
  Description of Artificial Sequence: Synthetic oligonucleotide
  Sense strand starting at position 1424 of SEQ ID NO: 317828
caaaguuguucucuggguu

SEQ ID NO: 515416 - RNA, 19 nt, Artificial Sequence
  Description of Artificial Sequence: Synthetic oligonucleotide
  Antisense strand to SEQ ID NO: 515415
aacccagagaacaacuuug

SEQ ID NO: 515417 - RNA, 19 nt, Artificial Sequence
  Description of Artificial Sequence: Synthetic oligonucleotide
  Sense strand starting at position 1428 of SEQ ID NO: 317828
guuguucucuggguucaga

SEQ ID NO: 515418 - RNA, 19 nt, Artificial Sequence
  Description of Artificial Sequence: Synthetic oligonucleotide
  Antisense strand to SEQ ID NO: 515417
ucugaacccagagaacaac

SEQ ID NO: 515419 - RNA, 19 nt, Artificial Sequence
  Description of Artificial Sequence: Synthetic oligonucleotide
  Sense strand starting at position 2689 of SEQ ID NO: 317828
cgccaaucccuuugagauc

SEQ ID NO: 515420 - RNA, 19 nt, Artificial Sequence
  Description of Artificial Sequence: Synthetic oligonucleotide
  Antisense strand to SEQ ID NO: 515419
gaucucaaagggauuggcg

SEQ ID NO: 515421 - RNA, 19 nt, Artificial Sequence
  Description of Artificial Sequence: Synthetic oligonucleotide
  Sense strand starting at position 2702 of SEQ ID NO: 317828
gagaucugauauccuguga

SEQ ID NO: 515422 - RNA, 19 nt, Artificial Sequence
  Description of Artificial Sequence: Synthetic oligonucleotide
  Antisense strand to SEQ ID NO: 515421
ucacaggauaucagaucuc

SEQ ID NO: 515423 - RNA, 19 nt, Artificial Sequence
  Description of Artificial Sequence: Synthetic oligonucleotide
  Sense strand starting at position 2706 of SEQ ID NO: 317828
ucugauauccugugaagaa

SEQ ID NO: 515424 - RNA, 19 nt, Artificial Sequence
  Description of Artificial Sequence: Synthetic oligonucleotide
  Antisense strand to SEQ ID NO: 515423
uucuucacaggauaucaga

SEQ ID NO: 515425 - RNA, 19 nt, Artificial Sequence
  Description of Artificial Sequence: Synthetic oligonucleotide
  Sense strand starting at position 2772 of SEQ ID NO: 317828
uccuaugcccaagaaagua

SEQ ID NO: 515426 - RNA, 19 nt, Artificial Sequence
  Description of Artificial Sequence: Synthetic oligonucleotide
  Antisense strand to SEQ ID NO: 515425
uacuuucuugggcauagga

SEQ ID NO: 515427 - RNA, 19 nt, Artificial Sequence
  Description of Artificial Sequence: Synthetic oligonucleotide
  Sense strand starting at position 2944 of SEQ ID NO: 317828
cagcccgauguguaggaaa

SEQ ID NO: 515428 - RNA, 19 nt, Artificial Sequence
  Description of Artificial Sequence: Synthetic oligonucleotide
  Antisense strand to SEQ ID NO: 515427
uuuccuacacaucgggcug

SEQ ID NO: 515429 - RNA, 19 nt, Artificial Sequence
  Description of Artificial Sequence: Synthetic oligonucleotide
  Sense strand starting at position 2985 of SEQ ID NO: 317828
uugcacaaggccugugaaa

SEQ ID NO: 515430 - RNA, 19 nt, Artificial Sequence
  Description of Artificial Sequence: Synthetic oligonucleotide
  Antisense strand to SEQ ID NO: 515429
uuucacaggccuugugcaa

SEQ ID NO: 515431 - RNA, 19 nt, Artificial Sequence
  Description of Artificial Sequence: Synthetic oligonucleotide
  Sense strand starting at position 2987 of SEQ ID NO: 317828
gcacaaggccugugaaaga

SEQ ID NO: 515432 - RNA, 19 nt, Artificial Sequence
  Description of Artificial Sequence: Synthetic oligonucleotide
  Antisense strand to SEQ ID NO: 515431
ucuuucacaggccuugugc

SEQ ID NO: 515433 - RNA, 19 nt, Artificial Sequence
  Description of Artificial Sequence: Synthetic oligonucleotide
  Sense strand starting at position 2996 of SEQ ID NO: 317828
cugugaaagaucugcagga

SEQ ID NO: 515434 - RNA, 19 nt, Artificial Sequence
  Description of Artificial Sequence: Synthetic oligonucleotide
  Antisense strand to SEQ ID NO: 515433
uccugcagaucuuucacag

SEQ ID NO: 515435 - RNA, 19 nt, Artificial Sequence
  Description of Artificial Sequence: Synthetic oligonucleotide
  Sense strand starting at position 2998 of SEQ ID NO: 317828
gugaaagaucugcaggagu

SEQ ID NO: 515436 - RNA, 19 nt, Artificial Sequence
  Description of Artificial Sequence: Synthetic oligonucleotide
  Antisense strand to SEQ ID NO: 515435
acuccugcagaucuuucac

SEQ ID NO: 515437 - RNA, 19 nt, Artificial Sequence
  Description of Artificial Sequence: Synthetic oligonucleotide
  Sense strand starting at position 3000 of SEQ ID NO: 317828
gaaagaucugcaggaguuu

SEQ ID NO: 515438 - RNA, 19 nt, Artificial Sequence
  Description of Artificial Sequence: Synthetic oligonucleotide
  Antisense strand to SEQ ID NO: 515437
aaacuccugcagaucuuuc

SEQ ID NO: 515439 - RNA, 19 nt, Artificial Sequence
  Description of Artificial Sequence: Synthetic oligonucleotide
  Sense strand starting at position 3193 of SEQ ID NO: 317828
gucagaggccauuggugaa

SEQ ID NO: 515440 - RNA, 19 nt, Artificial Sequence
  Description of Artificial Sequence: Synthetic oligonucleotide
  Antisense strand to SEQ ID NO: 515439
uucaccaauggccucugac

SEQ ID NO: 515441 - RNA, 19 nt, Artificial Sequence
  Description of Artificial Sequence: Synthetic oligonucleotide
  Sense strand starting at position 3215 of SEQ ID NO: 317828
auccucgucaccuggagaa

SEQ ID NO: 515442 - RNA, 19 nt, Artificial Sequence
  Description of Artificial Sequence: Synthetic oligonucleotide
  Antisense strand to SEQ ID NO: 515441
uucuccaggugacgaggau

SEQ ID NO: 515443 - RNA, 19 nt, Artificial Sequence
  Description of Artificial Sequence: Synthetic oligonucleotide
  Sense strand starting at position 3262 of SEQ ID NO: 317828
cccuuacaggcuuguguaa

SEQ ID NO: 515444 - RNA, 19 nt, Artificial Sequence
  Description of Artificial Sequence: Synthetic oligonucleotide
  Antisense strand to SEQ ID NO: 515443
uuacacaagccuguaaggg

SEQ ID NO: 515445 - RNA, 19 nt, Artificial Sequence
  Description of Artificial Sequence: Synthetic oligonucleotide
  Sense strand starting at position 3299 of SEQ ID NO: 317828
ggcugaguuccauguuuag

SEQ ID NO: 515446 - RNA, 19 nt, Artificial Sequence
  Description of Artificial Sequence: Synthetic oligonucleotide
  Antisense strand to SEQ ID NO: 515445
cuaaacauggaacucagcc

SEQ ID NO: 515447 - RNA, 19 nt, Artificial Sequence
  Description of Artificial Sequence: Synthetic oligonucleotide
  Sense strand starting at position 3327 of SEQ ID NO: 317828
gggccaucagcauagaaug

SEQ ID NO: 515448 - RNA, 19 nt, Artificial Sequence
  Description of Artificial Sequence: Synthetic oligonucleotide
  Antisense strand to SEQ ID NO: 515447
cauucuaugcugauggccc

SEQ ID NO: 515449 - RNA, 19 nt, Artificial Sequence
  Description of Artificial Sequence: Synthetic oligonucleotide
  Sense strand starting at position 3405 of SEQ ID NO: 317828
cagggaggcucuuugauua

SEQ ID NO: 515450 - RNA, 19 nt, Artificial Sequence
  Description of Artificial Sequence: Synthetic oligonucleotide
  Antisense strand to SEQ ID NO: 515449
uaaucaaagagccucccug

SEQ ID NO: 515451 - RNA, 19 nt, Artificial Sequence
  Description of Artificial Sequence: Synthetic oligonucleotide
  Sense strand starting at position 3409 of SEQ ID NO: 317828
gaggcucuuugauuagagu

SEQ ID NO: 515452 - RNA, 19 nt, Artificial Sequence
  Description of Artificial Sequence: Synthetic oligonucleotide
  Antisense strand to SEQ ID NO: 515451
acucuaaucaaagagccuc

SEQ ID NO: 515453 - RNA, 19 nt, Artificial Sequence
  Description of Artificial Sequence: Synthetic oligonucleotide
  Sense strand starting at position 3415 of SEQ ID NO: 317828
cuuugauuagagugacuua

SEQ ID NO: 515454 - RNA, 19 nt, Artificial Sequence
  Description of Artificial Sequence: Synthetic oligonucleotide
  Antisense strand to SEQ ID NO: 515453
uaagucacucuaaucaaag

SEQ ID NO: 515455 - RNA, 19 nt, Artificial Sequence
  Description of Artificial Sequence: Synthetic oligonucleotide
  Sense strand starting at position 3418 of SEQ ID NO: 317828
ugauuagagugacuuagac

SEQ ID NO: 515456 - RNA, 19 nt, Artificial Sequence
  Description of Artificial Sequence: Synthetic oligonucleotide
  Antisense strand to SEQ ID NO: 515455
gucuaagucacucuaauca

SEQ ID NO: 515457 - RNA, 19 nt, Artificial Sequence
  Description of Artificial Sequence: Synthetic oligonucleotide
  Sense strand starting at position 3457 of SEQ ID NO: 317828
gaauucugggcagggagau

SEQ ID NO: 515458 - RNA, 19 nt, Artificial Sequence
  Description of Artificial Sequence: Synthetic oligonucleotide
  Antisense strand to SEQ ID NO: 515457
aucucccugcccagaauuc

SEQ ID NO: 515459 - RNA, 19 nt, Artificial Sequence
  Description of Artificial Sequence: Synthetic oligonucleotide
  Sense strand starting at position 3567 of SEQ ID NO: 317828
gcagcacucugguuacaau

SEQ ID NO: 515460 - RNA, 19 nt, Artificial Sequence
  Description of Artificial Sequence: Synthetic oligonucleotide
  Antisense strand to SEQ ID NO: 515459
auuguaaccagagugcugc

SEQ ID NO: 515461 - RNA, 19 nt, Artificial Sequence
  Description of Artificial Sequence: Synthetic oligonucleotide
  Sense strand starting at position 3574 of SEQ ID NO: 317828
ucugguuacaauuggaguu

SEQ ID NO: 515462 - RNA, 19 nt, Artificial Sequence
  Description of Artificial Sequence: Synthetic oligonucleotide
  Antisense strand to SEQ ID NO: 515461
aacuccaauuguaaccaga

SEQ ID NO: 515463 - RNA, 19 nt, Artificial Sequence
  Description of Artificial Sequence: Synthetic oligonucleotide
  Sense strand starting at position 3637 of SEQ ID NO: 317828
gggcuacaaaucuaguuga

SEQ ID NO: 515464 - RNA, 19 nt, Artificial Sequence
  Description of Artificial Sequence: Synthetic oligonucleotide
  Antisense strand to SEQ ID NO: 515463
ucaacuagauuuguagccc

SEQ ID NO: 515465 - RNA, 19 nt, Artificial Sequence
  Description of Artificial Sequence: Synthetic oligonucleotide
  Sense strand starting at position 3705 of SEQ ID NO: 317828
gacuuugacaaacgugagu

SEQ ID NO: 515466 - RNA, 19 nt, Artificial Sequence
  Description of Artificial Sequence: Synthetic oligonucleotide
  Antisense strand to SEQ ID NO: 515465
acucacguuugucaaaguc

SEQ ID NO: 515467 - RNA, 19 nt, Artificial Sequence
  Description of Artificial Sequence: Synthetic oligonucleotide
  Sense strand starting at position 3707 of SEQ ID NO: 317828
cuuugacaaacgugaguau

SEQ ID NO: 515468 - RNA, 19 nt, Artificial Sequence
  Description of Artificial Sequence: Synthetic oligonucleotide
  Antisense strand to SEQ ID NO: 515467
auacucacguuugucaaag

SEQ ID NO: 515469 - RNA, 19 nt, Artificial Sequence
  Description of Artificial Sequence: Synthetic oligonucleotide
  Sense strand starting at position 3711 of SEQ ID NO: 317828
gacaaacgugaguauguca

SEQ ID NO: 515470 - RNA, 19 nt, Artificial Sequence
  Description of Artificial Sequence: Synthetic oligonucleotide
  Antisense strand to SEQ ID NO: 515469
ugacauacucacguuuguc

SEQ ID NO: 515471 - RNA, 19 nt, Artificial Sequence
  Description of Artificial Sequence: Synthetic oligonucleotide
  Sense strand starting at position 3722 of SEQ ID NO: 317828
guaugucaagcucgagaag

SEQ ID NO: 515472 - RNA, 19 nt, Artificial Sequence
  Description of Artificial Sequence: Synthetic oligonucleotide
  Antisense strand to SEQ ID NO: 515471
cuucucgagcuugacauac

SEQ ID NO: 515473 - RNA, 19 nt, Artificial Sequence
  Description of Artificial Sequence: Synthetic oligonucleotide
  Sense strand starting at position 3845 of SEQ ID NO: 317828
ccuuuaagggcuggcaauu

SEQ ID NO: 515474 - RNA, 19 nt, Artificial Sequence
  Description of Artificial Sequence: Synthetic oligonucleotide
  Antisense strand to SEQ ID NO: 515473
aauugccagcccuuaaagg

SEQ ID NO: 515475 - RNA, 19 nt, Artificial Sequence
  Description of Artificial Sequence: Synthetic oligonucleotide
  Sense strand starting at position 3857 of SEQ ID NO: 317828
ggcaauuccugcuuaauuu

SEQ ID NO: 515476 - RNA, 19 nt, Artificial Sequence
  Description of Artificial Sequence: Synthetic oligonucleotide
  Antisense strand to SEQ ID NO: 515475
aaauuaagcaggaauugcc

SEQ ID NO: 515477 - RNA, 19 nt, Artificial Sequence
  Description of Artificial Sequence: Synthetic oligonucleotide
  Sense strand starting at position 3943 of SEQ ID NO: 317828
acuguuguagcggaagagu

SEQ ID NO: 515478 - RNA, 19 nt, Artificial Sequence
  Description of Artificial Sequence: Synthetic oligonucleotide
  Antisense strand to SEQ ID NO: 515477
acucuuccgcuacaacagu

SEQ ID NO: 515479 - RNA, 19 nt, Artificial Sequence
  Description of Artificial Sequence: Synthetic oligonucleotide
  Sense strand starting at position 3977 of SEQ ID NO: 317828
ucuauugcuggcgauagaa

SEQ ID NO: 515480 - RNA, 19 nt, Artificial Sequence
  Description of Artificial Sequence: Synthetic oligonucleotide
  Antisense strand to SEQ ID NO: 515479
uucuaucgccagcaauaga

SEQ ID NO: 515481 - RNA, 19 nt, Artificial Sequence
  Description of Artificial Sequence: Synthetic oligonucleotide
  Sense strand starting at position 3979 of SEQ ID NO: 317828
uauugcuggcgauagaauu

SEQ ID NO: 515482 - RNA, 19 nt, Artificial Sequence
  Description of Artificial Sequence: Synthetic oligonucleotide
  Antisense strand to SEQ ID NO: 515481
aauucuaucgccagcaaua

SEQ ID NO: 515483 - RNA, 19 nt, Artificial Sequence
  Description of Artificial Sequence: Synthetic oligonucleotide
  Sense strand starting at position 39 of SEQ ID NO: 317829
aucucuuggccuugacaca

SEQ ID NO: 515484 - RNA, 19 nt, Artificial Sequence
  Description of Artificial Sequence: Synthetic oligonucleotide
  Antisense strand to SEQ ID NO: 515483
ugugucaaggccaagagau

SEQ ID NO: 515485 - RNA, 19 nt, Artificial Sequence
  Description of Artificial Sequence: Synthetic oligonucleotide
  Sense strand starting at position 132 of SEQ ID NO: 317829
cccaguugccuugauacuu

SEQ ID NO: 515486 - RNA, 19 nt, Artificial Sequence
  Description of Artificial Sequence: Synthetic oligonucleotide
  Antisense strand to SEQ ID NO: 515485
aaguaucaaggcaacuggg

SEQ ID NO: 515487 - RNA, 19 nt, Artificial Sequence
  Description of Artificial Sequence: Synthetic oligonucleotide
  Sense strand starting at position 189 of SEQ ID NO: 317829
cugugaccuccucaagcua

SEQ ID NO: 515488 - RNA, 19 nt, Artificial Sequence
  Description of Artificial Sequence: Synthetic oligonucleotide
  Antisense strand to SEQ ID NO: 515487
uagcuugaggaggucacag

SEQ ID NO: 515489 - RNA, 19 nt, Artificial Sequence
  Description of Artificial Sequence: Synthetic oligonucleotide
  Sense strand starting at position 282 of SEQ ID NO: 317829
auagcagucaugggaucua

SEQ ID NO: 515490 - RNA, 19 nt, Artificial Sequence
  Description of Artificial Sequence: Synthetic oligonucleotide
  Antisense strand to SEQ ID NO: 515489
uagaucccaugacugcuau

SEQ ID NO: 515491 - RNA, 19 nt, Artificial Sequence
  Description of Artificial Sequence: Synthetic oligonucleotide
  Sense strand starting at position 353 of SEQ ID NO: 317829
auuaaauucucaucgaagu

SEQ ID NO: 515492 - RNA, 19 nt, Artificial Sequence
  Description of Artificial Sequence: Synthetic oligonucleotide
  Antisense strand to SEQ ID NO: 515491
acuucgaugagaauuuaau

SEQ ID NO: 515493 - RNA, 19 nt, Artificial Sequence
  Description of Artificial Sequence: Synthetic oligonucleotide
  Sense strand starting at position 354 of SEQ ID NO: 317829
uuaaauucucaucgaagug

SEQ ID NO: 515494 - RNA, 19 nt, Artificial Sequence
  Description of Artificial Sequence: Synthetic oligonucleotide
  Antisense strand to SEQ ID NO: 515493
cacuucgaugagaauuuaa

SEQ ID NO: 515495 - RNA, 19 nt, Artificial Sequence
  Description of Artificial Sequence: Synthetic oligonucleotide
  Sense strand starting at position 363 of SEQ ID NO: 317829
caucgaaguggguauuauu

SEQ ID NO: 515496 - RNA, 19 nt, Artificial Sequence
  Description of Artificial Sequence: Synthetic oligonucleotide
  Antisense strand to SEQ ID NO: 515495
aauaauacccacuucgaug

SEQ ID NO: 515497 - RNA, 19 nt, Artificial Sequence
  Description of Artificial Sequence: Synthetic oligonucleotide
  Sense strand starting at position 372 of SEQ ID NO: 317829
ggguauuauugaucuucuc

SEQ ID NO: 515498 - RNA, 19 nt, Artificial Sequence
  Description of Artificial Sequence: Synthetic oligonucleotide
  Antisense strand to SEQ ID NO: 515497
gagaagaucaauaauaccc

SEQ ID NO: 515499 - RNA, 19 nt, Artificial Sequence
  Description of Artificial Sequence: Synthetic oligonucleotide
  Sense strand starting at position 394 of SEQ ID NO: 317829
ccucuuuaauagcugaaga

SEQ ID NO: 515500 - RNA, 19 nt, Artificial Sequence
  Description of Artificial Sequence: Synthetic oligonucleotide
  Antisense strand to SEQ ID NO: 515499
ucuucagcuauuaaagagg

SEQ ID NO: 515501 - RNA, 19 nt, Artificial Sequence
  Description of Artificial Sequence: Synthetic oligonucleotide
  Sense strand starting at position 404 of SEQ ID NO: 317829
agcugaagauagucucaga

SEQ ID NO: 515502 - RNA, 19 nt, Artificial Sequence
  Description of Artificial Sequence: Synthetic oligonucleotide
  Antisense strand to SEQ ID NO: 515501
ucugagacuaucuucagcu

SEQ ID NO: 515503 - RNA, 19 nt, Artificial Sequence
  Description of Artificial Sequence: Synthetic oligonucleotide
  Sense strand starting at position 567 of SEQ ID NO: 317829
uaaauugcugagugaccuu

SEQ ID NO: 515504 - RNA, 19 nt, Artificial Sequence
  Description of Artificial Sequence: Synthetic oligonucleotide
  Antisense strand to SEQ ID NO: 515503
aaggucacucagcaauuua

SEQ ID NO: 515505 - RNA, 19 nt, Artificial Sequence
  Description of Artificial Sequence: Synthetic oligonucleotide
  Sense strand starting at position 621 of SEQ ID NO: 317829
cgcggagacaaucagugau

SEQ ID NO: 515506 - RNA, 19 nt, Artificial Sequence
  Description of Artificial Sequence: Synthetic oligonucleotide
  Antisense strand to SEQ ID NO: 515505
aucacugauugucuccgcg

SEQ ID NO: 515507 - RNA, 19 nt, Artificial Sequence
  Description of Artificial Sequence: Synthetic oligonucleotide
  Sense strand starting at position 922 of SEQ ID NO: 317829
ggagcugucccguucguga

SEQ ID NO: 515508 - RNA, 19 nt, Artificial Sequence
  Description of Artificial Sequence: Synthetic oligonucleotide
  Antisense strand to SEQ ID NO: 515507
ucacgaacgggacagcucc

SEQ ID NO: 515509 - RNA, 19 nt, Artificial Sequence
  Description of Artificial Sequence: Synthetic oligonucleotide
  Sense strand starting at position 1321 of SEQ ID NO: 317829
gugacaccucucugggaga

SEQ ID NO: 515510 - RNA, 19 nt, Artificial Sequence
  Description of Artificial Sequence: Synthetic oligonucleotide
  Antisense strand to SEQ ID NO: 515509
ucucccagagaggugucac

SEQ ID NO: 515511 - RNA, 19 nt, Artificial Sequence
  Description of Artificial Sequence: Synthetic oligonucleotide
  Sense strand starting at position 2059 of SEQ ID NO: 317829
gacccaagcuucccgagaa

SEQ ID NO: 515512 - RNA, 19 nt, Artificial Sequence
  Description of Artificial Sequence: Synthetic oligonucleotide
  Antisense strand to SEQ ID NO: 515511
uucucgggaagcuuggguc

SEQ ID NO: 515513 - RNA, 19 nt, Artificial Sequence
  Description of Artificial Sequence: Synthetic oligonucleotide
  Sense strand starting at position 2120 of SEQ ID NO: 317829
agagguggcagugaaauca

SEQ ID NO: 515514 - RNA, 19 nt, Artificial Sequence
  Description of Artificial Sequence: Synthetic oligonucleotide
  Antisense strand to SEQ ID NO: 515513
ugauuucacugccaccucu

SEQ ID NO: 515515 - RNA, 19 nt, Artificial Sequence
  Description of Artificial Sequence: Synthetic oligonucleotide
  Sense strand starting at position 2208 of SEQ ID NO: 317829
agggcauccugacuuagaa

SEQ ID NO: 515516 - RNA, 19 nt, Artificial Sequence
  Description of Artificial Sequence: Synthetic oligonucleotide
  Antisense strand to SEQ ID NO: 515515
uucuaagucaggaugcccu

SEQ ID NO: 515517 - RNA, 19 nt, Artificial Sequence
  Description of Artificial Sequence: Synthetic oligonucleotide
  Sense strand starting at position 2356 of SEQ ID NO: 317829
agagaaagcucucuaaacu

SEQ ID NO: 515518 - RNA, 19 nt, Artificial Sequence
  Description of Artificial Sequence: Synthetic oligonucleotide
  Antisense strand to SEQ ID NO: 515517
aguuuagagagcuuucucu

SEQ ID NO: 515519 - RNA, 19 nt, Artificial Sequence
  Description of Artificial Sequence: Synthetic oligonucleotide
  Sense strand starting at position 2407 of SEQ ID NO: 317829
aagcuaugugcccaucaug

SEQ ID NO: 515520 - RNA, 19 nt, Artificial Sequence
  Description of Artificial Sequence: Synthetic oligonucleotide
  Antisense strand to SEQ ID NO: 515519
caugaugggcacauagcuu

SEQ ID NO: 515521 - RNA, 19 nt, Artificial Sequence
  Description of Artificial Sequence: Synthetic oligonucleotide
  Sense strand starting at position 2410 of SEQ ID NO: 317829
cuaugugcccaucaugaca

SEQ ID NO: 515522 - RNA, 19 nt, Artificial Sequence
  Description of Artificial Sequence: Synthetic oligonucleotide
  Antisense strand to SEQ ID NO: 515521
ugucaugaugggcacauag

SEQ ID NO: 515523 - RNA, 19 nt, Artificial Sequence
  Description of Artificial Sequence: Synthetic oligonucleotide
  Sense strand starting at position 2479 of SEQ ID NO: 317829
uucccuuuggcugagacuu

SEQ ID NO: 515524 - RNA, 19 nt, Artificial Sequence
  Description of Artificial Sequence: Synthetic oligonucleotide
  Antisense strand to SEQ ID NO: 515523
aagucucagccaaagggaa

SEQ ID NO: 515525 - RNA, 19 nt, Artificial Sequence
  Description of Artificial Sequence: Synthetic oligonucleotide
  Sense strand starting at position 2517 of SEQ ID NO: 317829
augcuuuaucugcaaguga

SEQ ID NO: 515526 - RNA, 19 nt, Artificial Sequence
  Description of Artificial Sequence: Synthetic oligonucleotide
  Antisense strand to SEQ ID NO: 515525
ucacuugcagauaaagcau

SEQ ID NO: 515527 - RNA, 19 nt, Artificial Sequence
  Description of Artificial Sequence: Synthetic oligonucleotide
  Sense strand starting at position 2749 of SEQ ID NO: 317829
cacaauagagguugaguua

SEQ ID NO: 515528 - RNA, 19 nt, Artificial Sequence
  Description of Artificial Sequence: Synthetic oligonucleotide
  Antisense strand to SEQ ID NO: 515527
uaacucaaccucuauugug

SEQ ID NO: 515529 - RNA, 19 nt, Artificial Sequence
  Description of Artificial Sequence: Synthetic oligonucleotide
  Sense strand starting at position 2752 of SEQ ID NO: 317829
aauagagguugaguuauau

SEQ ID NO: 515530 - RNA, 19 nt, Artificial Sequence
  Description of Artificial Sequence: Synthetic oligonucleotide
  Antisense strand to SEQ ID NO: 515529
auauaacucaaccucuauu

SEQ ID NO: 515531 - RNA, 19 nt, Artificial Sequence
  Description of Artificial Sequence: Synthetic oligonucleotide
  Sense strand starting at position 2761 of SEQ ID NO: 317829
ugaguuauaucugcugaau

SEQ ID NO: 515532 - RNA, 19 nt, Artificial Sequence
  Description of Artificial Sequence: Synthetic oligonucleotide
  Antisense strand to SEQ ID NO: 515531
auucagcagauauaacuca

SEQ ID NO: 515533 - RNA, 19 nt, Artificial Sequence
  Description of Artificial Sequence: Synthetic oligonucleotide
  Sense strand starting at position 2764 of SEQ ID NO: 317829
guuauaucugcugaaugaa

SEQ ID NO: 515534 - RNA, 19 nt, Artificial Sequence
  Description of Artificial Sequence: Synthetic oligonucleotide
  Antisense strand to SEQ ID NO: 515533
uucauucagcagauauaac

SEQ ID NO: 515535 - RNA, 19 nt, Artificial Sequence
  Description of Artificial Sequence: Synthetic oligonucleotide
  Sense strand starting at position 2824 of SEQ ID NO: 317829
ucauguaauugcucauuug

SEQ ID NO: 515536 - RNA, 19 nt, Artificial Sequence
  Description of Artificial Sequence: Synthetic oligonucleotide
  Antisense strand to SEQ ID NO: 515535
caaaugagcaauuacauga

SEQ ID NO: 515537 - RNA, 19 nt, Artificial Sequence
  Description of Artificial Sequence: Synthetic oligonucleotide
  Sense strand starting at position 2827 of SEQ ID NO: 317829
uguaauugcucauuugauu

SEQ ID NO: 515538 - RNA, 19 nt, Artificial Sequence
  Description of Artificial Sequence: Synthetic oligonucleotide
  Antisense strand to SEQ ID NO: 515537
aaucaaaugagcaauuaca

SEQ ID NO: 515539 - RNA, 19 nt, Artificial Sequence
  Description of Artificial Sequence: Synthetic oligonucleotide
  Sense strand starting at position 3353 of SEQ ID NO: 317829
aucuuuauauggcugaaua

SEQ ID NO: 515540 - RNA, 19 nt, Artificial Sequence
  Description of Artificial Sequence: Synthetic oligonucleotide
  Antisense strand to SEQ ID NO: 515539
uauucagccauauaaagau

SEQ ID NO: 515541 - RNA, 19 nt, Artificial Sequence
  Description of Artificial Sequence: Synthetic oligonucleotide
  Sense strand starting at position 3354 of SEQ ID NO: 317829
ucuuuauauggcugaauac

SEQ ID NO: 515542 - RNA, 19 nt, Artificial Sequence
  Description of Artificial Sequence: Synthetic oligonucleotide
  Antisense strand to SEQ ID NO: 515541
guauucagccauauaaaga

SEQ ID NO: 515543 - RNA, 19 nt, Artificial Sequence
  Description of Artificial Sequence: Synthetic oligonucleotide
  Sense strand starting at position 3355 of SEQ ID NO: 317829
cuuuauauggcugaauacu

SEQ ID NO: 515544 - RNA, 19 nt, Artificial Sequence
  Description of Artificial Sequence: Synthetic oligonucleotide
  Antisense strand to SEQ ID NO: 515543
aguauucagccauauaaag

SEQ ID NO: 515545 - RNA, 19 nt, Artificial Sequence
  Description of Artificial Sequence: Synthetic oligonucleotide
  Sense strand starting at position 3594 of SEQ ID NO: 317829
caaggauccugucugucaa

SEQ ID NO: 515546 - RNA, 19 nt, Artificial Sequence
  Description of Artificial Sequence: Synthetic oligonucleotide
  Antisense strand to SEQ ID NO: 515545
uugacagacaggauccuug

SEQ ID NO: 515547 - RNA, 19 nt, Artificial Sequence
  Description of Artificial Sequence: Synthetic oligonucleotide
  Sense strand starting at position 3679 of SEQ ID NO: 317829
gucccuuucuccuuggaaa

SEQ ID NO: 515548 - RNA, 19 nt, Artificial Sequence
  Description of Artificial Sequence: Synthetic oligonucleotide
  Antisense strand to SEQ ID NO: 515547
uuuccaaggagaaagggac

SEQ ID NO: 515549 - RNA, 19 nt, Artificial Sequence
  Description of Artificial Sequence: Synthetic oligonucleotide
  Sense strand starting at position 3680 of SEQ ID NO: 317829
ucccuuucuccuuggaaag

SEQ ID NO: 515550 - RNA, 19 nt, Artificial Sequence
  Description of Artificial Sequence: Synthetic oligonucleotide
  Antisense strand to SEQ ID NO: 515549
cuuuccaaggagaaaggga

SEQ ID NO: 515551 - RNA, 19 nt, Artificial Sequence
  Description of Artificial Sequence: Synthetic oligonucleotide
  Sense strand starting at position 3728 of SEQ ID NO: 317829
gucuucuauuaggcacaaa

SEQ ID NO: 515552 - RNA, 19 nt, Artificial Sequence
  Description of Artificial Sequence: Synthetic oligonucleotide
  Antisense strand to SEQ ID NO: 515551
uuugugccuaauagaagac

SEQ ID NO: 515553 - RNA, 19 nt, Artificial Sequence
  Description of Artificial Sequence: Synthetic oligonucleotide
  Sense strand starting at position 3742 of SEQ ID NO: 317829
acaaaucaucuacgaaugu

SEQ ID NO: 515554 - RNA, 19 nt, Artificial Sequence
  Description of Artificial Sequence: Synthetic oligonucleotide
  Antisense strand to SEQ ID NO: 515553
acauucguagaugauuugu

SEQ ID NO: 515555 - RNA, 19 nt, Artificial Sequence
  Description of Artificial Sequence: Synthetic oligonucleotide
  Sense strand starting at position 3746 of SEQ ID NO: 317829
aucaucuacgaauguuuaa

SEQ ID NO: 515556 - RNA, 19 nt, Artificial Sequence
  Description of Artificial Sequence: Synthetic oligonucleotide
  Antisense strand to SEQ ID NO: 515555
uuaaacauucguagaugau

SEQ ID NO: 515557 - RNA, 19 nt, Artificial Sequence
  Description of Artificial Sequence: Synthetic oligonucleotide
  Sense strand starting at position 3887 of SEQ ID NO: 317829
auggcagaagcauagcaau

SEQ ID NO: 515558 - RNA, 19 nt, Artificial Sequence
  Description of Artificial Sequence: Synthetic oligonucleotide
  Antisense strand to SEQ ID NO: 515557
auugcuaugcuucugccau

SEQ ID NO: 515559 - RNA, 19 nt, Artificial Sequence
  Description of Artificial Sequence: Synthetic oligonucleotide
  Sense strand starting at position 3961 of SEQ ID NO: 317829
cugacaaccuuaucuggua

SEQ ID NO: 515560 - RNA, 19 nt, Artificial Sequence
  Description of Artificial Sequence: Synthetic oligonucleotide
  Antisense strand to SEQ ID NO: 515559
uaccagauaagguugucag

SEQ ID NO: 515561 - RNA, 19 nt, Artificial Sequence
  Description of Artificial Sequence: Synthetic oligonucleotide
  Sense strand starting at position 3962 of SEQ ID NO: 317829
ugacaaccuuaucugguaa

SEQ ID NO: 515562 - RNA, 19 nt, Artificial Sequence
  Description of Artificial Sequence: Synthetic oligonucleotide
  Antisense strand to SEQ ID NO: 515561
uuaccagauaagguuguca

SEQ ID NO: 515563 - RNA, 19 nt, Artificial Sequence
  Description of Artificial Sequence: Synthetic oligonucleotide
  Sense strand starting at position 26 of SEQ ID NO: 317830
cuugguacccuugacaaua

SEQ ID NO: 515564 - RNA, 19 nt, Artificial Sequence
  Description of Artificial Sequence: Synthetic oligonucleotide
  Antisense strand to SEQ ID NO: 515563
uauugucaaggguaccaag

SEQ ID NO: 515565 - RNA, 19 nt, Artificial Sequence
  Description of Artificial Sequence: Synthetic oligonucleotide
  Sense strand starting at position 244 of SEQ ID NO: 317830
agugacaacuaguuuacga

SEQ ID NO: 515566 - RNA, 19 nt, Artificial Sequence
  Description of Artificial Sequence: Synthetic oligonucleotide
  Antisense strand to SEQ ID NO: 515565
ucguaaacuaguugucacu

SEQ ID NO: 515567 - RNA, 19 nt, Artificial Sequence
  Description of Artificial Sequence: Synthetic oligonucleotide
  Sense strand starting at position 251 of SEQ ID NO: 317830
acuaguuuacgacagauca

SEQ ID NO: 515568 - RNA, 19 nt, Artificial Sequence
  Description of Artificial Sequence: Synthetic oligonucleotide
  Antisense strand to SEQ ID NO: 515567
ugaucugucguaaacuagu

SEQ ID NO: 515569 - RNA, 19 nt, Artificial Sequence
  Description of Artificial Sequence: Synthetic oligonucleotide
  Sense strand starting at position 417 of SEQ ID NO: 317830
ucaagaagcugauuaaugu

SEQ ID NO: 515570 - RNA, 19 nt, Artificial Sequence
  Description of Artificial Sequence: Synthetic oligonucleotide
  Antisense strand to SEQ ID NO: 515569
acauuaaucagcuucuuga

SEQ ID NO: 515571 - RNA, 19 nt, Artificial Sequence
  Description of Artificial Sequence: Synthetic oligonucleotide
  Sense strand starting at position 423 of SEQ ID NO: 317830
agcugauuaauguggacua

SEQ ID NO: 515572 - RNA, 19 nt, Artificial Sequence
  Description of Artificial Sequence: Synthetic oligonucleotide
  Antisense strand to SEQ ID NO: 515571
uaguccacauuaaucagcu

SEQ ID NO: 515573 - RNA, 19 nt, Artificial Sequence
  Description of Artificial Sequence: Synthetic oligonucleotide
  Sense strand starting at position 443 of SEQ ID NO: 317830
caacuuauguuagcaagag

SEQ ID NO: 515574 - RNA, 19 nt, Artificial Sequence
  Description of Artificial Sequence: Synthetic oligonucleotide
  Antisense strand to SEQ ID NO: 515573
cucuugcuaacauaaguug

SEQ ID NO: 515575 - RNA, 19 nt, Artificial Sequence
  Description of Artificial Sequence: Synthetic oligonucleotide
  Sense strand starting at position 622 of SEQ ID NO: 317830
uuaucugaggccugguaca

SEQ ID NO: 515576 - RNA, 19 nt, Artificial Sequence
  Description of Artificial Sequence: Synthetic oligonucleotide
  Antisense strand to SEQ ID NO: 515575
uguaccaggccucagauaa

SEQ ID NO: 515577 - RNA, 19 nt, Artificial Sequence
  Description of Artificial Sequence: Synthetic oligonucleotide
  Sense strand starting at position 649 of SEQ ID NO: 317830
gaccgcuauuuauccaagu

SEQ ID NO: 515578 - RNA, 19 nt, Artificial Sequence
  Description of Artificial Sequence: Synthetic oligonucleotide
  Antisense strand to SEQ ID NO: 515577
acuuggauaaauagcgguc

SEQ ID NO: 515579 - RNA, 19 nt, Artificial Sequence
  Description of Artificial Sequence: Synthetic oligonucleotide
  Sense strand starting at position 650 of SEQ ID NO: 317830
accgcuauuuauccaagua

SEQ ID NO: 515580 - RNA, 19 nt, Artificial Sequence
  Description of Artificial Sequence: Synthetic oligonucleotide
  Antisense strand to SEQ ID NO: 515579
uacuuggauaaauagcggu

SEQ ID NO: 515581 - RNA, 19 nt, Artificial Sequence
  Description of Artificial Sequence: Synthetic oligonucleotide
  Sense strand starting at position 662 of SEQ ID NO: 317830
ccaaguaccuccuuaaggu

SEQ ID NO: 515582 - RNA, 19 nt, Artificial Sequence
  Description of Artificial Sequence: Synthetic oligonucleotide
  Antisense strand to SEQ ID NO: 515581
accuuaaggagguacuugg

SEQ ID NO: 515583 - RNA, 19 nt, Artificial Sequence
  Description of Artificial Sequence: Synthetic oligonucleotide
  Sense strand starting at position 671 of SEQ ID NO: 317830
uccuuaagguagucuuaag

SEQ ID NO: 515584 - RNA, 19 nt, Artificial Sequence
  Description of Artificial Sequence: Synthetic oligonucleotide
  Antisense strand to SEQ ID NO: 515583
cuuaagacuaccuuaagga

SEQ ID NO: 515585 - RNA, 19 nt, Artificial Sequence
  Description of Artificial Sequence: Synthetic oligonucleotide
  Sense strand starting at position 710 of SEQ ID NO: 317830
ggcagaaagacuugcuuuc

SEQ ID NO: 515586 - RNA, 19 nt, Artificial Sequence
  Description of Artificial Sequence: Synthetic oligonucleotide
  Antisense strand to SEQ ID NO: 515585
gaaagcaagucuuucugcc

SEQ ID NO: 515587 - RNA, 19 nt, Artificial Sequence
  Description of Artificial Sequence: Synthetic oligonucleotide
  Sense strand starting at position 723 of SEQ ID NO: 317830
gcuuucuuggguuaaagga

SEQ ID NO: 515588 - RNA, 19 nt, Artificial Sequence
  Description of Artificial Sequence: Synthetic oligonucleotide
  Antisense strand to SEQ ID NO: 515587
uccuuuaacccaagaaagc

SEQ ID NO: 515589 - RNA, 19 nt, Artificial Sequence
  Description of Artificial Sequence: Synthetic oligonucleotide
  Sense strand starting at position 765 of SEQ ID NO: 317830
caggucugucaggaagcau

SEQ ID NO: 515590 - RNA, 19 nt, Artificial Sequence
  Description of Artificial Sequence: Synthetic oligonucleotide
  Antisense strand to SEQ ID NO: 515589
augcuuccugacagaccug

SEQ ID NO: 515591 - RNA, 19 nt, Artificial Sequence
  Description of Artificial Sequence: Synthetic oligonucleotide
  Sense strand starting at position 777 of SEQ ID NO: 317830
gaagcauagggccgagaaa

SEQ ID NO: 515592 - RNA, 19 nt, Artificial Sequence
  Description of Artificial Sequence: Synthetic oligonucleotide
  Antisense strand to SEQ ID NO: 515591
uuucucggcccuaugcuuc

SEQ ID NO: 515593 - RNA, 19 nt, Artificial Sequence
  Description of Artificial Sequence: Synthetic oligonucleotide
  Sense strand starting at position 2368 of SEQ ID NO: 317830
ugaaguggcuaacuugauu

SEQ ID NO: 515594 - RNA, 19 nt, Artificial Sequence
  Description of Artificial Sequence: Synthetic oligonucleotide
  Antisense strand to SEQ ID NO: 515593
aaucaaguuagccacuuca

SEQ ID NO: 515595 - RNA, 19 nt, Artificial Sequence
  Description of Artificial Sequence: Synthetic oligonucleotide
  Sense strand starting at position 2373 of SEQ ID NO: 317830
uggcuaacuugauuaguag

SEQ ID NO: 515596 - RNA, 19 nt, Artificial Sequence
  Description of Artificial Sequence: Synthetic oligonucleotide
  Antisense strand to SEQ ID NO: 515595
cuacuaaucaaguuagcca

SEQ ID NO: 515597 - RNA, 19 nt, Artificial Sequence
  Description of Artificial Sequence: Synthetic oligonucleotide
  Sense strand starting at position 2401 of SEQ ID NO: 317830
aucgaugucaugggugaug

SEQ ID NO: 515598 - RNA, 19 nt, Artificial Sequence
  Description of Artificial Sequence: Synthetic oligonucleotide
  Antisense strand to SEQ ID NO: 515597
caucacccaugacaucgau

SEQ ID NO: 515599 - RNA, 19 nt, Artificial Sequence
  Description of Artificial Sequence: Synthetic oligonucleotide
  Sense strand starting at position 2403 of SEQ ID NO: 317830
cgaugucaugggugaugga

SEQ ID NO: 515600 - RNA, 19 nt, Artificial Sequence
  Description of Artificial Sequence: Synthetic oligonucleotide
  Antisense strand to SEQ ID NO: 515599
uccaucacccaugacaucg

SEQ ID NO: 515601 - RNA, 19 nt, Artificial Sequence
  Description of Artificial Sequence: Synthetic oligonucleotide
  Sense strand starting at position 2439 of SEQ ID NO: 317830
cgucuuaauuaagugagag

SEQ ID NO: 515602 - RNA, 19 nt, Artificial Sequence
  Description of Artificial Sequence: Synthetic oligonucleotide
  Antisense strand to SEQ ID NO: 515601
cucucacuuaauuaagacg

SEQ ID NO: 515603 - RNA, 19 nt, Artificial Sequence
  Description of Artificial Sequence: Synthetic oligonucleotide
  Sense strand starting at position 2440 of SEQ ID NO: 317830
gucuuaauuaagugagaga

SEQ ID NO: 515604 - RNA, 19 nt, Artificial Sequence
  Description of Artificial Sequence: Synthetic oligonucleotide
  Antisense strand to SEQ ID NO: 515603
ucucucacuuaauuaagac

SEQ ID NO: 515605 - RNA, 19 nt, Artificial Sequence
  Description of Artificial Sequence: Synthetic oligonucleotide
  Sense strand starting at position 2502 of SEQ ID NO: 317830
auauuuauuuagcacggau

SEQ ID NO: 515606 - RNA, 19 nt, Artificial Sequence
  Description of Artificial Sequence: Synthetic oligonucleotide
  Antisense strand to SEQ ID NO: 515605
auccgugcuaaauaaauau

SEQ ID NO: 515607 - RNA, 19 nt, Artificial Sequence
  Description of Artificial Sequence: Synthetic oligonucleotide
  Sense strand starting at position 2695 of SEQ ID NO: 317830
gaacgagugcuauauggug

SEQ ID NO: 515608 - RNA, 19 nt, Artificial Sequence
  Description of Artificial Sequence: Synthetic oligonucleotide
  Antisense strand to SEQ ID NO: 515607
caccauauagcacucguuc

SEQ ID NO: 515609 - RNA, 19 nt, Artificial Sequence
  Description of Artificial Sequence: Synthetic oligonucleotide
  Sense strand starting at position 2711 of SEQ ID NO: 317830
gugggcuuaucaucucaau

SEQ ID NO: 515610 - RNA, 19 nt, Artificial Sequence
  Description of Artificial Sequence: Synthetic oligonucleotide
  Antisense strand to SEQ ID NO: 515609
auugagaugauaagcccac

SEQ ID NO: 515611 - RNA, 19 nt, Artificial Sequence
  Description of Artificial Sequence: Synthetic oligonucleotide
  Sense strand starting at position 2743 of SEQ ID NO: 317830
aagcacaugcaguaguaau

SEQ ID NO: 515612 - RNA, 19 nt, Artificial Sequence
  Description of Artificial Sequence: Synthetic oligonucleotide
  Antisense strand to SEQ ID NO: 515611
auuacuacugcaugugcuu

SEQ ID NO: 515613 - RNA, 19 nt, Artificial Sequence
  Description of Artificial Sequence: Synthetic oligonucleotide
  Sense strand starting at position 3039 of SEQ ID NO: 317830
ugcacagauuuagagaagu

SEQ ID NO: 515614 - RNA, 19 nt, Artificial Sequence
  Description of Artificial Sequence: Synthetic oligonucleotide
  Antisense strand to SEQ ID NO: 515613
acuucucuaaaucugugca

SEQ ID NO: 515615 - RNA, 19 nt, Artificial Sequence
  Description of Artificial Sequence: Synthetic oligonucleotide
  Sense strand starting at position 3183 of SEQ ID NO: 317830
auuacauacugguugaaug

SEQ ID NO: 515616 - RNA, 19 nt, Artificial Sequence
  Description of Artificial Sequence: Synthetic oligonucleotide
  Antisense strand to SEQ ID NO: 515615
cauucaaccaguauguaau

SEQ ID NO: 515617 - RNA, 19 nt, Artificial Sequence
  Description of Artificial Sequence: Synthetic oligonucleotide
  Sense strand starting at position 3184 of SEQ ID NO: 317830
uuacauacugguugaauga

SEQ ID NO: 515618 - RNA, 19 nt, Artificial Sequence
  Description of Artificial Sequence: Synthetic oligonucleotide
  Antisense strand to SEQ ID NO: 515617
ucauucaaccaguauguaa

SEQ ID NO: 515619 - RNA, 19 nt, Artificial Sequence
  Description of Artificial Sequence: Synthetic oligonucleotide
  Sense strand starting at position 3195 of SEQ ID NO: 317830
uugaaugaauagucuggau

SEQ ID NO: 515620 - RNA, 19 nt, Artificial Sequence
  Description of Artificial Sequence: Synthetic oligonucleotide
  Antisense strand to SEQ ID NO: 515619
auccagacuauucauucaa

SEQ ID NO: 515621 - RNA, 19 nt, Artificial Sequence
  Description of Artificial Sequence: Synthetic oligonucleotide
  Sense strand starting at position 3198 of SEQ ID NO: 317830
aaugaauagucuggauuug

SEQ ID NO: 515622 - RNA, 19 nt, Artificial Sequence
  Description of Artificial Sequence: Synthetic oligonucleotide
  Antisense strand to SEQ ID NO: 515621
caaauccagacuauucauu

SEQ ID NO: 515623 - RNA, 19 nt, Artificial Sequence
  Description of Artificial Sequence: Synthetic oligonucleotide
  Sense strand starting at position 3233 of SEQ ID NO: 317830
cguguaaagcaacacaaau

SEQ ID NO: 515624 - RNA, 19 nt, Artificial Sequence
  Description of Artificial Sequence: Synthetic oligonucleotide
  Antisense strand to SEQ ID NO: 515623
auuuguguugcuuuacacg

SEQ ID NO: 515625 - RNA, 19 nt, Artificial Sequence
  Description of Artificial Sequence: Synthetic oligonucleotide
  Sense strand starting at position 3270 of SEQ ID NO: 317830
auuuccuccucuguuagua

SEQ ID NO: 515626 - RNA, 19 nt, Artificial Sequence
  Description of Artificial Sequence: Synthetic oligonucleotide
  Antisense strand to SEQ ID NO: 515625
uacuaacagaggaggaaau

SEQ ID NO: 515627 - RNA, 19 nt, Artificial Sequence
  Description of Artificial Sequence: Synthetic oligonucleotide
  Sense strand starting at position 3364 of SEQ ID NO: 317830
gcacucaaucaauaguuga

SEQ ID NO: 515628 - RNA, 19 nt, Artificial Sequence
  Description of Artificial Sequence: Synthetic oligonucleotide
  Antisense strand to SEQ ID NO: 515627
ucaacuauugauugagugc

SEQ ID NO: 515629 - RNA, 19 nt, Artificial Sequence
  Description of Artificial Sequence: Synthetic oligonucleotide
  Sense strand starting at position 3391 of SEQ ID NO: 317830
auuguuuaagggcaucauu

SEQ ID NO: 515630 - RNA, 19 nt, Artificial Sequence
  Description of Artificial Sequence: Synthetic oligonucleotide
  Antisense strand to SEQ ID NO: 515629
aaugaugcccuuaaacaau

SEQ ID NO: 515631 - RNA, 19 nt, Artificial Sequence
  Description of Artificial Sequence: Synthetic oligonucleotide
  Sense strand starting at position 3399 of SEQ ID NO: 317830
agggcaucauuuggaagau

SEQ ID NO: 515632 - RNA, 19 nt, Artificial Sequence
  Description of Artificial Sequence: Synthetic oligonucleotide
  Antisense strand to SEQ ID NO: 515631
aucuuccaaaugaugcccu

SEQ ID NO: 515633 - RNA, 19 nt, Artificial Sequence
  Description of Artificial Sequence: Synthetic oligonucleotide
  Sense strand starting at position 3400 of SEQ ID NO: 317830
gggcaucauuuggaagaug

SEQ ID NO: 515634 - RNA, 19 nt, Artificial Sequence
  Description of Artificial Sequence: Synthetic oligonucleotide
  Antisense strand to SEQ ID NO: 515633
caucuuccaaaugaugccc

SEQ ID NO: 515635 - RNA, 19 nt, Artificial Sequence
  Description of Artificial Sequence: Synthetic oligonucleotide
  Sense strand starting at position 3634 of SEQ ID NO: 317830
aagugaguaccaggauuau

SEQ ID NO: 515636 - RNA, 19 nt, Artificial Sequence
  Description of Artificial Sequence: Synthetic oligonucleotide
  Antisense strand to SEQ ID NO: 515635
auaauccugguacucacuu

SEQ ID NO: 515637 - RNA, 19 nt, Artificial Sequence
  Description of Artificial Sequence: Synthetic oligonucleotide
  Sense strand starting at position 3736 of SEQ ID NO: 317830
ggaaguuugaggcagguua

SEQ ID NO: 515638 - RNA, 19 nt, Artificial Sequence
  Description of Artificial Sequence: Synthetic oligonucleotide
  Antisense strand to SEQ ID NO: 515637
uaaccugccucaaacuucc

SEQ ID NO: 515639 - RNA, 19 nt, Artificial Sequence
  Description of Artificial Sequence: Synthetic oligonucleotide
  Sense strand starting at position 3973 of SEQ ID NO: 317830
acugaagguguuuacuagu

SEQ ID NO: 515640 - RNA, 19 nt, Artificial Sequence
  Description of Artificial Sequence: Synthetic oligonucleotide
  Antisense strand to SEQ ID NO: 515639
acuaguaaacaccuucagu

SEQ ID NO: 515641 - RNA, 19 nt, Artificial Sequence
  Description of Artificial Sequence: Synthetic oligonucleotide
  Sense strand starting at position 3980 of SEQ ID NO: 317830
guguuuacuagugaguuac

SEQ ID NO: 515642 - RNA, 19 nt, Artificial Sequence
  Description of Artificial Sequence: Synthetic oligonucleotide
  Antisense strand to SEQ ID NO: 515641
guaacucacuaguaaacac

SEQ ID NO: 515643 - RNA, 19 nt, Artificial Sequence
  Description of Artificial Sequence: Synthetic oligonucleotide
  Sense strand starting at position 41 of SEQ ID NO: 317831
gagucugacgacuggaauc

SEQ ID NO: 515644 - RNA, 19 nt, Artificial Sequence
  Description of Artificial Sequence: Synthetic oligonucleotide
  Antisense strand to SEQ ID NO: 515643
gauuccagucgucagacuc

SEQ ID NO: 515645 - RNA, 19 nt, Artificial Sequence
  Description of Artificial Sequence: Synthetic oligonucleotide
  Sense strand starting at position 333 of SEQ ID NO: 317831
ccuggauugcgucagaguu

SEQ ID NO: 515646 - RNA, 19 nt, Artificial Sequence
  Description of Artificial Sequence: Synthetic oligonucleotide
  Antisense strand to SEQ ID NO: 515645
aacucugacgcaauccagg

SEQ ID NO: 515647 - RNA, 19 nt, Artificial Sequence
  Description of Artificial Sequence: Synthetic oligonucleotide
  Sense strand starting at position 466 of SEQ ID NO: 317831
gggucgaggucuucgggua

SEQ ID NO: 515648 - RNA, 19 nt, Artificial Sequence
  Description of Artificial Sequence: Synthetic oligonucleotide
  Antisense strand to SEQ ID NO: 515647
uacccgaagaccucgaccc

SEQ ID NO: 515649 - RNA, 19 nt, Artificial Sequence
  Description of Artificial Sequence: Synthetic oligonucleotide
  Sense strand starting at position 467 of SEQ ID NO: 317831
ggucgaggucuucggguaa

SEQ ID NO: 515650 - RNA, 19 nt, Artificial Sequence
  Description of Artificial Sequence: Synthetic oligonucleotide
  Antisense strand to SEQ ID NO: 515649
uuacccgaagaccucgacc

SEQ ID NO: 515651 - RNA, 19 nt, Artificial Sequence
  Description of Artificial Sequence: Synthetic oligonucleotide
  Sense strand starting at position 541 of SEQ ID NO: 317831
cagcgaagugucuaagaag

SEQ ID NO: 515652 - RNA, 19 nt, Artificial Sequence
  Description of Artificial Sequence: Synthetic oligonucleotide
  Antisense strand to SEQ ID NO: 515651
cuucuuagacacuucgcug

SEQ ID NO: 515653 - RNA, 19 nt, Artificial Sequence
  Description of Artificial Sequence: Synthetic oligonucleotide
  Sense strand starting at position 1016 of SEQ ID NO: 317831
cggaccgauccuuagcuaa

SEQ ID NO: 515654 - RNA, 19 nt, Artificial Sequence
  Description of Artificial Sequence: Synthetic oligonucleotide
  Antisense strand to SEQ ID NO: 515653
uuagcuaaggaucgguccg

SEQ ID NO: 515655 - RNA, 19 nt, Artificial Sequence
  Description of Artificial Sequence: Synthetic oligonucleotide
  Sense strand starting at position 1259 of SEQ ID NO: 317831
gcaagaaacauaggucagu

SEQ ID NO: 515656 - RNA, 19 nt, Artificial Sequence
  Description of Artificial Sequence: Synthetic oligonucleotide
  Antisense strand to SEQ ID NO: 515655
acugaccuauguuucuugc

SEQ ID NO: 515657 - RNA, 19 nt, Artificial Sequence
  Description of Artificial Sequence: Synthetic oligonucleotide
  Sense strand starting at position 2020 of SEQ ID NO: 317831
cacuaaaguguuggagaau

SEQ ID NO: 515658 - RNA, 19 nt, Artificial Sequence
  Description of Artificial Sequence: Synthetic oligonucleotide
  Antisense strand to SEQ ID NO: 515657
auucuccaacacuuuagug

SEQ ID NO: 515659 - RNA, 19 nt, Artificial Sequence
  Description of Artificial Sequence: Synthetic oligonucleotide
  Sense strand starting at position 2021 of SEQ ID NO: 317831
acuaaaguguuggagaaug

SEQ ID NO: 515660 - RNA, 19 nt, Artificial Sequence
  Description of Artificial Sequence: Synthetic oligonucleotide
  Antisense strand to SEQ ID NO: 515659
cauucuccaacacuuuagu

SEQ ID NO: 515661 - RNA, 19 nt, Artificial Sequence
  Description of Artificial Sequence: Synthetic oligonucleotide
  Sense strand starting at position 2219 of SEQ ID NO: 317831
augaaaccaugcuagaaau

SEQ ID NO: 515662 - RNA, 19 nt, Artificial Sequence
  Description of Artificial Sequence: Synthetic oligonucleotide
  Antisense strand to SEQ ID NO: 515661
auuucuagcaugguuucau

SEQ ID NO: 515663 - RNA, 19 nt, Artificial Sequence
  Description of Artificial Sequence: Synthetic oligonucleotide
  Sense strand starting at position 2264 of SEQ ID NO: 317831
uuucucaugucucucagua

SEQ ID NO: 515664 - RNA, 19 nt, Artificial Sequence
  Description of Artificial Sequence: Synthetic oligonucleotide
  Antisense strand to SEQ ID NO: 515663
uacugagagacaugagaaa

SEQ ID NO: 515665 - RNA, 19 nt, Artificial Sequence
  Description of Artificial Sequence: Synthetic oligonucleotide
  Sense strand starting at position 2268 of SEQ ID NO: 317831
ucaugucucucaguaagaa

SEQ ID NO: 515666 - RNA, 19 nt, Artificial Sequence
  Description of Artificial Sequence: Synthetic oligonucleotide
  Antisense strand to SEQ ID NO: 515665
uucuuacugagagacauga

SEQ ID NO: 515667 - RNA, 19 nt, Artificial Sequence
  Description of Artificial Sequence: Synthetic oligonucleotide
  Sense strand starting at position 2303 of SEQ ID NO: 317831
gcuuuaaagagguggaaca

SEQ ID NO: 515668 - RNA, 19 nt, Artificial Sequence
  Description of Artificial Sequence: Synthetic oligonucleotide
  Antisense strand to SEQ ID NO: 515667
uguuccaccucuuuaaagc

SEQ ID NO: 515669 - RNA, 19 nt, Artificial Sequence
  Description of Artificial Sequence: Synthetic oligonucleotide
  Sense strand starting at position 2343 of SEQ ID NO: 317831
agaagauugcaguaaugca

SEQ ID NO: 515670 - RNA, 19 nt, Artificial Sequence
  Description of Artificial Sequence: Synthetic oligonucleotide
  Antisense strand to SEQ ID NO: 515669
ugcauuacugcaaucuucu

SEQ ID NO: 515671 - RNA, 19 nt, Artificial Sequence
  Description of Artificial Sequence: Synthetic oligonucleotide
  Sense strand starting at position 2484 of SEQ ID NO: 317831
ucacuugaccuggauguuu

SEQ ID NO: 515672 - RNA, 19 nt, Artificial Sequence
  Description of Artificial Sequence: Synthetic oligonucleotide
  Antisense strand to SEQ ID NO: 515671
aaacauccaggucaaguga

SEQ ID NO: 515673 - RNA, 19 nt, Artificial Sequence
  Description of Artificial Sequence: Synthetic oligonucleotide
  Sense strand starting at position 2495 of SEQ ID NO: 317831
ggauguuuacaugauguac

SEQ ID NO: 515674 - RNA, 19 nt, Artificial Sequence
  Description of Artificial Sequence: Synthetic oligonucleotide
  Antisense strand to SEQ ID NO: 515673
guacaucauguaaacaucc

SEQ ID NO: 515675 - RNA, 19 nt, Artificial Sequence
  Description of Artificial Sequence: Synthetic oligonucleotide
  Sense strand starting at position 2571 of SEQ ID NO: 317831
agaugagauuaagucauuc

SEQ ID NO: 515676 - RNA, 19 nt, Artificial Sequence
  Description of Artificial Sequence: Synthetic oligonucleotide
  Antisense strand to SEQ ID NO: 515675
gaaugacuuaaucucaucu

SEQ ID NO: 515677 - RNA, 19 nt, Artificial Sequence
  Description of Artificial Sequence: Synthetic oligonucleotide
  Sense strand starting at position 2617 of SEQ ID NO: 317831
acuuuaacacucugguaga

SEQ ID NO: 515678 - RNA, 19 nt, Artificial Sequence
  Description of Artificial Sequence: Synthetic oligonucleotide
  Antisense strand to SEQ ID NO: 515677
ucuaccagaguguuaaagu

SEQ ID NO: 515679 - RNA, 19 nt, Artificial Sequence
  Description of Artificial Sequence: Synthetic oligonucleotide
  Sense strand starting at position 2645 of SEQ ID NO: 317831
caggaagcuuuauuguaac

SEQ ID NO: 515680 - RNA, 19 nt, Artificial Sequence
  Description of Artificial Sequence: Synthetic oligonucleotide
  Antisense strand to SEQ ID NO: 515679
guuacaauaaagcuuccug

SEQ ID NO: 515681 - RNA, 19 nt, Artificial Sequence
  Description of Artificial Sequence: Synthetic oligonucleotide
  Sense strand starting at position 2651 of SEQ ID NO: 317831
gcuuuauuguaacugcuca

SEQ ID NO: 515682 - RNA, 19 nt, Artificial Sequence
  Description of Artificial Sequence: Synthetic oligonucleotide
  Antisense strand to SEQ ID NO: 515681
ugagcaguuacaauaaagc

SEQ ID NO: 515683 - RNA, 19 nt, Artificial Sequence
  Description of Artificial Sequence: Synthetic oligonucleotide
  Sense strand starting at position 2659 of SEQ ID NO: 317831
guaacugcucaccagcaaa

SEQ ID NO: 515684 - RNA, 19 nt, Artificial Sequence
  Description of Artificial Sequence: Synthetic oligonucleotide
  Antisense strand to SEQ ID NO: 515683
uuugcuggugagcaguuac

SEQ ID NO: 515685 - RNA, 19 nt, Artificial Sequence
  Description of Artificial Sequence: Synthetic oligonucleotide
  Sense strand starting at position 2709 of SEQ ID NO: 317831
cggaaauaaguauaagcuu

SEQ ID NO: 515686 - RNA, 19 nt, Artificial Sequence
  Description of Artificial Sequence: Synthetic oligonucleotide
  Antisense strand to SEQ ID NO: 515685
aagcuuauacuuauuuccg

SEQ ID NO: 515687 - RNA, 19 nt, Artificial Sequence
  Description of Artificial Sequence: Synthetic oligonucleotide
  Sense strand starting at position 2755 of SEQ ID NO: 317831
uuucuucuuuguguccaaa

SEQ ID NO: 515688 - RNA, 19 nt, Artificial Sequence
  Description of Artificial Sequence: Synthetic oligonucleotide
  Antisense strand to SEQ ID NO: 515687
uuuggacacaaagaagaaa

SEQ ID NO: 515689 - RNA, 19 nt, Artificial Sequence
  Description of Artificial Sequence: Synthetic oligonucleotide
  Sense strand starting at position 2830 of SEQ ID NO: 317831
ugcaccaagcauuguuauu

SEQ ID NO: 515690 - RNA, 19 nt, Artificial Sequence
  Description of Artificial Sequence: Synthetic oligonucleotide
  Antisense strand to SEQ ID NO: 515689
aauaacaaugcuuggugca

SEQ ID NO: 515691 - RNA, 19 nt, Artificial Sequence
  Description of Artificial Sequence: Synthetic oligonucleotide
  Sense strand starting at position 2933 of SEQ ID NO: 317831
aguaauuauccuggcagug

SEQ ID NO: 515692 - RNA, 19 nt, Artificial Sequence
  Description of Artificial Sequence: Synthetic oligonucleotide
  Antisense strand to SEQ ID NO: 515691
cacugccaggauaauuacu

SEQ ID NO: 515693 - RNA, 19 nt, Artificial Sequence
  Description of Artificial Sequence: Synthetic oligonucleotide
  Sense strand starting at position 2938 of SEQ ID NO: 317831
uuauccuggcagugucaga

SEQ ID NO: 515694 - RNA, 19 nt, Artificial Sequence
  Description of Artificial Sequence: Synthetic oligonucleotide
  Antisense strand to SEQ ID NO: 515693
ucugacacugccaggauaa

SEQ ID NO: 515695 - RNA, 19 nt, Artificial Sequence
  Description of Artificial Sequence: Synthetic oligonucleotide
  Sense strand starting at position 2949 of SEQ ID NO: 317831
gugucagaacuugauuauu

SEQ ID NO: 515696 - RNA, 19 nt, Artificial Sequence
  Description of Artificial Sequence: Synthetic oligonucleotide
  Antisense strand to SEQ ID NO: 515695
aauaaucaaguucugacac

SEQ ID NO: 515697 - RNA, 19 nt, Artificial Sequence
  Description of Artificial Sequence: Synthetic oligonucleotide
  Sense strand starting at position 3002 of SEQ ID NO: 317831
ggccucuuuguugguuuaa

SEQ ID NO: 515698 - RNA, 19 nt, Artificial Sequence
  Description of Artificial Sequence: Synthetic oligonucleotide
  Antisense strand to SEQ ID NO: 515697
uuaaaccaacaaagaggcc

SEQ ID NO: 515699 - RNA, 19 nt, Artificial Sequence
  Description of Artificial Sequence: Synthetic oligonucleotide
  Sense strand starting at position 3004 of SEQ ID NO: 317831
ccucuuuguugguuuaauc

SEQ ID NO: 515700 - RNA, 19 nt, Artificial Sequence
  Description of Artificial Sequence: Synthetic oligonucleotide
  Antisense strand to SEQ ID NO: 515699
gauuaaaccaacaaagagg

SEQ ID NO: 515701 - RNA, 19 nt, Artificial Sequence
  Description of Artificial Sequence: Synthetic oligonucleotide
  Sense strand starting at position 3142 of SEQ ID NO: 317831
cuguuuagaugccugaauu

SEQ ID NO: 515702 - RNA, 19 nt, Artificial Sequence
  Description of Artificial Sequence: Synthetic oligonucleotide
  Antisense strand to SEQ ID NO: 515701
aauucaggcaucuaaacag

SEQ ID NO: 515703 - RNA, 19 nt, Artificial Sequence
  Description of Artificial Sequence: Synthetic oligonucleotide
  Sense strand starting at position 3174 of SEQ ID NO: 317831
aaagaaaccugggaggaau

SEQ ID NO: 515704 - RNA, 19 nt, Artificial Sequence
  Description of Artificial Sequence: Synthetic oligonucleotide
  Antisense strand to SEQ ID NO: 515703
auuccucccagguuucuuu

SEQ ID NO: 515705 - RNA, 19 nt, Artificial Sequence
  Description of Artificial Sequence: Synthetic oligonucleotide
  Sense strand starting at position 3222 of SEQ ID NO: 317831
ccaacuugcuggccucaaa

SEQ ID NO: 515706 - RNA, 19 nt, Artificial Sequence
  Description of Artificial Sequence: Synthetic oligonucleotide
  Antisense strand to SEQ ID NO: 515705
uuugaggccagcaaguugg

SEQ ID NO: 515707 - RNA, 19 nt, Artificial Sequence
  Description of Artificial Sequence: Synthetic oligonucleotide
  Sense strand starting at position 3225 of SEQ ID NO: 317831
acuugcuggccucaaacau

SEQ ID NO: 515708 - RNA, 19 nt, Artificial Sequence
  Description of Artificial Sequence: Synthetic oligonucleotide
  Antisense strand to SEQ ID NO: 515707
auguuugaggccagcaagu

SEQ ID NO: 515709 - RNA, 19 nt, Artificial Sequence
  Description of Artificial Sequence: Synthetic oligonucleotide
  Sense strand starting at position 3359 of SEQ ID NO: 317831
cuuggccuguucccagaau

SEQ ID NO: 515710 - RNA, 19 nt, Artificial Sequence
  Description of Artificial Sequence: Synthetic oligonucleotide
  Antisense strand to SEQ ID NO: 515709
auucugggaacaggccaag

SEQ ID NO: 515711 - RNA, 19 nt, Artificial Sequence
  Description of Artificial Sequence: Synthetic oligonucleotide
  Sense strand starting at position 3394 of SEQ ID NO: 317831
cuuggagaccucugccuuu

SEQ ID NO: 515712 - RNA, 19 nt, Artificial Sequence
  Description of Artificial Sequence: Synthetic oligonucleotide
  Antisense strand to SEQ ID NO: 515711
aaaggcagaggucuccaag

SEQ ID NO: 515713 - RNA, 19 nt, Artificial Sequence
  Description of Artificial Sequence: Synthetic oligonucleotide
  Sense strand starting at position 3559 of SEQ ID NO: 317831
cacagacaacagugauguu

SEQ ID NO: 515714 - RNA, 19 nt, Artificial Sequence
  Description of Artificial Sequence: Synthetic oligonucleotide
  Antisense strand to SEQ ID NO: 515713
aacaucacuguugucugug

SEQ ID NO: 515715 - RNA, 19 nt, Artificial Sequence
  Description of Artificial Sequence: Synthetic oligonucleotide
  Sense strand starting at position 3735 of SEQ ID NO: 317831
accaaauucuagguggaua

SEQ ID NO: 515716 - RNA, 19 nt, Artificial Sequence
  Description of Artificial Sequence: Synthetic oligonucleotide
  Antisense strand to SEQ ID NO: 515715
uauccaccuagaauuuggu

SEQ ID NO: 515717 - RNA, 19 nt, Artificial Sequence
  Description of Artificial Sequence: Synthetic oligonucleotide
  Sense strand starting at position 3912 of SEQ ID NO: 317831
uagccauucucucugagag

SEQ ID NO: 515718 - RNA, 19 nt, Artificial Sequence
  Description of Artificial Sequence: Synthetic oligonucleotide
  Antisense strand to SEQ ID NO: 515717
cucucagagagaauggcua

SEQ ID NO: 515719 - RNA, 19 nt, Artificial Sequence
  Description of Artificial Sequence: Synthetic oligonucleotide
  Sense strand starting at position 3913 of SEQ ID NO: 317831
agccauucucucugagaga

SEQ ID NO: 515720 - RNA, 19 nt, Artificial Sequence
  Description of Artificial Sequence: Synthetic oligonucleotide
  Antisense strand to SEQ ID NO: 515719
ucucucagagagaauggcu

SEQ ID NO: 515721 - RNA, 19 nt, Artificial Sequence
  Description of Artificial Sequence: Synthetic oligonucleotide
  Sense strand starting at position 3968 of SEQ ID NO: 317831
uuuggauuaggccgaagaa

SEQ ID NO: 515722 - RNA, 19 nt, Artificial Sequence
  Description of Artificial Sequence: Synthetic oligonucleotide
  Antisense strand to SEQ ID NO: 515721
uucuucggccuaauccaaa

SEQ ID NO: 515723 - RNA, 19 nt, Artificial Sequence
  Description of Artificial Sequence: Synthetic oligonucleotide
  Sense strand starting at position 191 of SEQ ID NO: 317832
agguuguggguguaaggau

SEQ ID NO: 515724 - RNA, 19 nt, Artificial Sequence
  Description of Artificial Sequence: Synthetic oligonucleotide
  Antisense strand to SEQ ID NO: 515723
auccuuacacccacaaccu

SEQ ID NO: 515725 - RNA, 19 nt, Artificial Sequence
  Description of Artificial Sequence: Synthetic oligonucleotide
  Sense strand starting at position 192 of SEQ ID NO: 317832
gguuguggguguaaggaua

SEQ ID NO: 515726 - RNA, 19 nt, Artificial Sequence
  Description of Artificial Sequence: Synthetic oligonucleotide
  Antisense strand to SEQ ID NO: 515725
uauccuuacacccacaacc

SEQ ID NO: 515727 - RNA, 19 nt, Artificial Sequence
  Description of Artificial Sequence: Synthetic oligonucleotide
  Sense strand starting at position 224 of SEQ ID NO: 317832
aaaucaaaccugugggacu

SEQ ID NO: 515728 - RNA, 19 nt, Artificial Sequence
  Description of Artificial Sequence: Synthetic oligonucleotide
  Antisense strand to SEQ ID NO: 515727
agucccacagguuugauuu

SEQ ID NO: 515729 - RNA, 19 nt, Artificial Sequence
  Description of Artificial Sequence: Synthetic oligonucleotide
  Sense strand starting at position 282 of SEQ ID NO: 317832
uuugucagaccucauugaa

SEQ ID NO: 515730 - RNA, 19 nt, Artificial Sequence
  Description of Artificial Sequence: Synthetic oligonucleotide
  Antisense strand to SEQ ID NO: 515729
uucaaugaggucugacaaa

SEQ ID NO: 515731 - RNA, 19 nt, Artificial Sequence
  Description of Artificial Sequence: Synthetic oligonucleotide
  Sense strand starting at position 285 of SEQ ID NO: 317832
gucagaccucauugaacuu

SEQ ID NO: 515732 - RNA, 19 nt, Artificial Sequence
  Description of Artificial Sequence: Synthetic oligonucleotide
  Antisense strand to SEQ ID NO: 515731
aaguucaaugaggucugac

SEQ ID NO: 515733 - RNA, 19 nt, Artificial Sequence
  Description of Artificial Sequence: Synthetic oligonucleotide
  Sense strand starting at position 660 of SEQ ID NO: 317832
uacucaagcucagugugau

SEQ ID NO: 515734 - RNA, 19 nt, Artificial Sequence
  Description of Artificial Sequence: Synthetic oligonucleotide
  Antisense strand to SEQ ID NO: 515733
aucacacugagcuugagua

SEQ ID NO: 515735 - RNA, 19 nt, Artificial Sequence
  Description of Artificial Sequence: Synthetic oligonucleotide
  Sense strand starting at position 748 of SEQ ID NO: 317832
uaggguccuucugugaaga

SEQ ID NO: 515736 - RNA, 19 nt, Artificial Sequence
  Description of Artificial Sequence: Synthetic oligonucleotide
  Antisense strand to SEQ ID NO: 515735
ucuucacagaaggacccua

SEQ ID NO: 515737 - RNA, 19 nt, Artificial Sequence
  Description of Artificial Sequence: Synthetic oligonucleotide
  Sense strand starting at position 749 of SEQ ID NO: 317832
aggguccuucugugaagag

SEQ ID NO: 515738 - RNA, 19 nt, Artificial Sequence
  Description of Artificial Sequence: Synthetic oligonucleotide
  Antisense strand to SEQ ID NO: 515737
cucuucacagaaggacccu

SEQ ID NO: 515739 - RNA, 19 nt, Artificial Sequence
  Description of Artificial Sequence: Synthetic oligonucleotide
  Sense strand starting at position 823 of SEQ ID NO: 317832
uuugaauaagcaggcaaua

SEQ ID NO: 515740 - RNA, 19 nt, Artificial Sequence
  Description of Artificial Sequence: Synthetic oligonucleotide
  Antisense strand to SEQ ID NO: 515739
uauugccugcuuauucaaa

SEQ ID NO: 515741 - RNA, 19 nt, Artificial Sequence
  Description of Artificial Sequence: Synthetic oligonucleotide
  Sense strand starting at position 834 of SEQ ID NO: 317832
aggcaauagaaauguguuu

SEQ ID NO: 515742 - RNA, 19 nt, Artificial Sequence
  Description of Artificial Sequence: Synthetic oligonucleotide
  Antisense strand to SEQ ID NO: 515741
aaacacauuucuauugccu

SEQ ID NO: 515743 - RNA, 19 nt, Artificial Sequence
  Description of Artificial Sequence: Synthetic oligonucleotide
  Sense strand starting at position 909 of SEQ ID NO: 317832
gauggaaauucugcagaac

SEQ ID NO: 515744 - RNA, 19 nt, Artificial Sequence
  Description of Artificial Sequence: Synthetic oligonucleotide
  Antisense strand to SEQ ID NO: 515743
guucugcagaauuuccauc

SEQ ID NO: 515745 - RNA, 19 nt, Artificial Sequence
  Description of Artificial Sequence: Synthetic oligonucleotide
  Sense strand starting at position 1160 of SEQ ID NO: 317832
ucagaucuugcauagaauc

SEQ ID NO: 515746 - RNA, 19 nt, Artificial Sequence
  Description of Artificial Sequence: Synthetic oligonucleotide
  Antisense strand to SEQ ID NO: 515745
gauucuaugcaagaucuga

SEQ ID NO: 515747 - RNA, 19 nt, Artificial Sequence
  Description of Artificial Sequence: Synthetic oligonucleotide
  Sense strand starting at position 1168 of SEQ ID NO: 317832
ugcauagaaucaucgaauc

SEQ ID NO: 515748 - RNA, 19 nt, Artificial Sequence
  Description of Artificial Sequence: Synthetic oligonucleotide
  Antisense strand to SEQ ID NO: 515747
gauucgaugauucuaugca

SEQ ID NO: 515749 - RNA, 19 nt, Artificial Sequence
  Description of Artificial Sequence: Synthetic oligonucleotide
  Sense strand starting at position 1287 of SEQ ID NO: 317832
guguguuggauauacagaa

SEQ ID NO: 515750 - RNA, 19 nt, Artificial Sequence
  Description of Artificial Sequence: Synthetic oligonucleotide
  Antisense strand to SEQ ID NO: 515749
uucuguauauccaacacac

SEQ ID NO: 515751 - RNA, 19 nt, Artificial Sequence
  Description of Artificial Sequence: Synthetic oligonucleotide
  Sense strand starting at position 1335 of SEQ ID NO: 317832
cugaaucugcauuguaaca

SEQ ID NO: 515752 - RNA, 19 nt, Artificial Sequence
  Description of Artificial Sequence: Synthetic oligonucleotide
  Antisense strand to SEQ ID NO: 515751
uguuacaaugcagauucag

SEQ ID NO: 515753 - RNA, 19 nt, Artificial Sequence
  Description of Artificial Sequence: Synthetic oligonucleotide
  Sense strand starting at position 1368 of SEQ ID NO: 317832
cuuguaugcacaggaaagu

SEQ ID NO: 515754 - RNA, 19 nt, Artificial Sequence
  Description of Artificial Sequence: Synthetic oligonucleotide
  Antisense strand to SEQ ID NO: 515753
acuuuccugugcauacaag

SEQ ID NO: 515755 - RNA, 19 nt, Artificial Sequence
  Description of Artificial Sequence: Synthetic oligonucleotide
  Sense strand starting at position 1369 of SEQ ID NO: 317832
uuguaugcacaggaaagua

SEQ ID NO: 515756 - RNA, 19 nt, Artificial Sequence
  Description of Artificial Sequence: Synthetic oligonucleotide
  Antisense strand to SEQ ID NO: 515755
uacuuuccugugcauacaa

SEQ ID NO: 515757 - RNA, 19 nt, Artificial Sequence
  Description of Artificial Sequence: Synthetic oligonucleotide
  Sense strand starting at position 1438 of SEQ ID NO: 317832
ccugcaauugaauagaagu

SEQ ID NO: 515758 - RNA, 19 nt, Artificial Sequence
  Description of Artificial Sequence: Synthetic oligonucleotide
  Antisense strand to SEQ ID NO: 515757
acuucuauucaauugcagg

SEQ ID NO: 515759 - RNA, 19 nt, Artificial Sequence
  Description of Artificial Sequence: Synthetic oligonucleotide
  Sense strand starting at position 1853 of SEQ ID NO: 317832
cuacuagcuccgcagggau

SEQ ID NO: 515760 - RNA, 19 nt, Artificial Sequence
  Description of Artificial Sequence: Synthetic oligonucleotide
  Antisense strand to SEQ ID NO: 515759
aucccugcggagcuaguag

SEQ ID NO: 515761 - RNA, 19 nt, Artificial Sequence
  Description of Artificial Sequence: Synthetic oligonucleotide
  Sense strand starting at position 1989 of SEQ ID NO: 317832
uuuggaaaucuugggucuu

SEQ ID NO: 515762 - RNA, 19 nt, Artificial Sequence
  Description of Artificial Sequence: Synthetic oligonucleotide
  Antisense strand to SEQ ID NO: 515761
aagacccaagauuuccaaa

SEQ ID NO: 515763 - RNA, 19 nt, Artificial Sequence
  Description of Artificial Sequence: Synthetic oligonucleotide
  Sense strand starting at position 1991 of SEQ ID NO: 317832
uggaaaucuugggucuuua

SEQ ID NO: 515764 - RNA, 19 nt, Artificial Sequence
  Description of Artificial Sequence: Synthetic oligonucleotide
  Antisense strand to SEQ ID NO: 515763
uaaagacccaagauuucca

SEQ ID NO: 515765 - RNA, 19 nt, Artificial Sequence
  Description of Artificial Sequence: Synthetic oligonucleotide
  Sense strand starting at position 2184 of SEQ ID NO: 317832
gggucuucagagugaucag

SEQ ID NO: 515766 - RNA, 19 nt, Artificial Sequence
  Description of Artificial Sequence: Synthetic oligonucleotide
  Antisense strand to SEQ ID NO: 515765
cugaucacucugaagaccc

SEQ ID NO: 515767 - RNA, 19 nt, Artificial Sequence
  Description of Artificial Sequence: Synthetic oligonucleotide
  Sense strand starting at position 2222 of SEQ ID NO: 317832
aagagaaguuagguugcau

SEQ ID NO: 515768 - RNA, 19 nt, Artificial Sequence
  Description of Artificial Sequence: Synthetic oligonucleotide
  Antisense strand to SEQ ID NO: 515767
augcaaccuaacuucucuu

SEQ ID NO: 515769 - RNA, 19 nt, Artificial Sequence
  Description of Artificial Sequence: Synthetic oligonucleotide
  Sense strand starting at position 2451 of SEQ ID NO: 317832
gagaucugacguuaucucu

SEQ ID NO: 515770 - RNA, 19 nt, Artificial Sequence
  Description of Artificial Sequence: Synthetic oligonucleotide
  Antisense strand to SEQ ID NO: 515769
agagauaacgucagaucuc

SEQ ID NO: 515771 - RNA, 19 nt, Artificial Sequence
  Description of Artificial Sequence: Synthetic oligonucleotide
  Sense strand starting at position 2457 of SEQ ID NO: 317832
ugacguuaucucuagguaa

SEQ ID NO: 515772 - RNA, 19 nt, Artificial Sequence
  Description of Artificial Sequence: Synthetic oligonucleotide
  Antisense strand to SEQ ID NO: 515771
uuaccuagagauaacguca

SEQ ID NO: 515773 - RNA, 19 nt, Artificial Sequence
  Description of Artificial Sequence: Synthetic oligonucleotide
  Sense strand starting at position 2459 of SEQ ID NO: 317832
acguuaucucuagguaaau

SEQ ID NO: 515774 - RNA, 19 nt, Artificial Sequence
  Description of Artificial Sequence: Synthetic oligonucleotide
  Antisense strand to SEQ ID NO: 515773
auuuaccuagagauaacgu

SEQ ID NO: 515775 - RNA, 19 nt, Artificial Sequence
  Description of Artificial Sequence: Synthetic oligonucleotide
  Sense strand starting at position 2460 of SEQ ID NO: 317832
cguuaucucuagguaaaua

SEQ ID NO: 515776 - RNA, 19 nt, Artificial Sequence
  Description of Artificial Sequence: Synthetic oligonucleotide
  Antisense strand to SEQ ID NO: 515775
uauuuaccuagagauaacg

SEQ ID NO: 515777 - RNA, 19 nt, Artificial Sequence
  Description of Artificial Sequence: Synthetic oligonucleotide
  Sense strand starting at position 2528 of SEQ ID NO: 317832
ucugaacaauugguugauu

SEQ ID NO: 515778 - RNA, 19 nt, Artificial Sequence
  Description of Artificial Sequence: Synthetic oligonucleotide
  Antisense strand to SEQ ID NO: 515777
aaucaaccaauuguucaga

SEQ ID NO: 515779 - RNA, 19 nt, Artificial Sequence
  Description of Artificial Sequence: Synthetic oligonucleotide
  Sense strand starting at position 2669 of SEQ ID NO: 317832
cugauaauauuggcaauaa

SEQ ID NO: 515780 - RNA, 19 nt, Artificial Sequence
  Description of Artificial Sequence: Synthetic oligonucleotide
  Antisense strand to SEQ ID NO: 515779
uuauugccaauauuaucag

SEQ ID NO: 515781 - RNA, 19 nt, Artificial Sequence
  Description of Artificial Sequence: Synthetic oligonucleotide
  Sense strand starting at position 2752 of SEQ ID NO: 317832
aaacuuuauguagguaagu

SEQ ID NO: 515782 - RNA, 19 nt, Artificial Sequence
  Description of Artificial Sequence: Synthetic oligonucleotide
  Antisense strand to SEQ ID NO: 515781
acuuaccuacauaaaguuu

SEQ ID NO: 515783 - RNA, 19 nt, Artificial Sequence
  Description of Artificial Sequence: Synthetic oligonucleotide
  Sense strand starting at position 2753 of SEQ ID NO: 317832
aacuuuauguagguaagua

SEQ ID NO: 515784 - RNA, 19 nt, Artificial Sequence
  Description of Artificial Sequence: Synthetic oligonucleotide
  Antisense strand to SEQ ID NO: 515783
uacuuaccuacauaaaguu

SEQ ID NO: 515785 - RNA, 19 nt, Artificial Sequence
  Description of Artificial Sequence: Synthetic oligonucleotide
  Sense strand starting at position 2769 of SEQ ID NO: 317832
guacuauugucauucucau

SEQ ID NO: 515786 - RNA, 19 nt, Artificial Sequence
  Description of Artificial Sequence: Synthetic oligonucleotide
  Antisense strand to SEQ ID NO: 515785
augagaaugacaauaguac

SEQ ID NO: 515787 - RNA, 19 nt, Artificial Sequence
  Description of Artificial Sequence: Synthetic oligonucleotide
  Sense strand starting at position 2833 of SEQ ID NO: 317832
gcuuguccauagucaaaca

SEQ ID NO: 515788 - RNA, 19 nt, Artificial Sequence
  Description of Artificial Sequence: Synthetic oligonucleotide
  Antisense strand to SEQ ID NO: 515787
uguuugacuauggacaagc

SEQ ID NO: 515789 - RNA, 19 nt, Artificial Sequence
  Description of Artificial Sequence: Synthetic oligonucleotide
  Sense strand starting at position 2883 of SEQ ID NO: 317832
ccagcagucugguuauaaa

SEQ ID NO: 515790 - RNA, 19 nt, Artificial Sequence
  Description of Artificial Sequence: Synthetic oligonucleotide
  Antisense strand to SEQ ID NO: 515789
uuuauaaccagacugcugg

SEQ ID NO: 515791 - RNA, 19 nt, Artificial Sequence
  Description of Artificial Sequence: Synthetic oligonucleotide
  Sense strand starting at position 3064 of SEQ ID NO: 317832
ucuaaagaacauggucauu

SEQ ID NO: 515792 - RNA, 19 nt, Artificial Sequence
  Description of Artificial Sequence: Synthetic oligonucleotide
  Antisense strand to SEQ ID NO: 515791
aaugaccauguucuuuaga

SEQ ID NO: 515793 - RNA, 19 nt, Artificial Sequence
  Description of Artificial Sequence: Synthetic oligonucleotide
  Sense strand starting at position 3330 of SEQ ID NO: 317832
aagugauucgcauaccuug

SEQ ID NO: 515794 - RNA, 19 nt, Artificial Sequence
  Description of Artificial Sequence: Synthetic oligonucleotide
  Antisense strand to SEQ ID NO: 515793
caagguaugcgaaucacuu

SEQ ID NO: 515795 - RNA, 19 nt, Artificial Sequence
  Description of Artificial Sequence: Synthetic oligonucleotide
  Sense strand starting at position 3393 of SEQ ID NO: 317832
gccuaaaguuccuucuuga

SEQ ID NO: 515796 - RNA, 19 nt, Artificial Sequence
  Description of Artificial Sequence: Synthetic oligonucleotide
  Antisense strand to SEQ ID NO: 515795
ucaagaaggaacuuuaggc

SEQ ID NO: 515797 - RNA, 19 nt, Artificial Sequence
  Description of Artificial Sequence: Synthetic oligonucleotide
  Sense strand starting at position 3446 of SEQ ID NO: 317832
aaaugaucauucccgugua

SEQ ID NO: 515798 - RNA, 19 nt, Artificial Sequence
  Description of Artificial Sequence: Synthetic oligonucleotide
  Antisense strand to SEQ ID NO: 515797
uacacgggaaugaucauuu

SEQ ID NO: 515799 - RNA, 19 nt, Artificial Sequence
  Description of Artificial Sequence: Synthetic oligonucleotide
  Sense strand starting at position 3513 of SEQ ID NO: 317832
gaguguauauauguacuuu

SEQ ID NO: 515800 - RNA, 19 nt, Artificial Sequence
  Description of Artificial Sequence: Synthetic oligonucleotide
  Antisense strand to SEQ ID NO: 515799
aaaguacauauauacacuc

SEQ ID NO: 515801 - RNA, 19 nt, Artificial Sequence
  Description of Artificial Sequence: Synthetic oligonucleotide
  Sense strand starting at position 3560 of SEQ ID NO: 317832
agcaaucaugaaugucaau

SEQ ID NO: 515802 - RNA, 19 nt, Artificial Sequence
  Description of Artificial Sequence: Synthetic oligonucleotide
  Antisense strand to SEQ ID NO: 515801
auugacauucaugauugcu

SEQ ID NO: 515803 - RNA, 19 nt, Artificial Sequence
  Description of Artificial Sequence: Synthetic oligonucleotide
  Sense strand starting at position 124 of SEQ ID NO: 317833
uagcucucagaugauguua

SEQ ID NO: 515804 - RNA, 19 nt, Artificial Sequence
  Description of Artificial Sequence: Synthetic oligonucleotide
  Antisense strand to SEQ ID NO: 515803
uaacaucaucugagagcua

SEQ ID NO: 515805 - RNA, 19 nt, Artificial Sequence
  Description of Artificial Sequence: Synthetic oligonucleotide
  Sense strand starting at position 387 of SEQ ID NO: 317833
cacauuugauuugguuuga

SEQ ID NO: 515806 - RNA, 19 nt, Artificial Sequence
  Description of Artificial Sequence: Synthetic oligonucleotide
  Antisense strand to SEQ ID NO: 515805
ucaaaccaaaucaaaugug

SEQ ID NO: 515807 - RNA, 19 nt, Artificial Sequence
  Description of Artificial Sequence: Synthetic oligonucleotide
  Sense strand starting at position 505 of SEQ ID NO: 317833
aggacugcucucugaccau

SEQ ID NO: 515808 - RNA, 19 nt, Artificial Sequence
  Description of Artificial Sequence: Synthetic oligonucleotide
  Antisense strand to SEQ ID NO: 515807
auggucagagagcaguccu

SEQ ID NO: 515809 - RNA, 19 nt, Artificial Sequence
  Description of Artificial Sequence: Synthetic oligonucleotide
  Sense strand starting at position 537 of SEQ ID NO: 317833
uuguguugagaauguuaua

SEQ ID NO: 515810 - RNA, 19 nt, Artificial Sequence
  Description of Artificial Sequence: Synthetic oligonucleotide
  Antisense strand to SEQ ID NO: 515809
uauaacauucucaacacaa

SEQ ID NO: 515811 - RNA, 19 nt, Artificial Sequence
  Description of Artificial Sequence: Synthetic oligonucleotide
  Sense strand starting at position 606 of SEQ ID NO: 317833
uggugaucauuaccucuuu

SEQ ID NO: 515812 - RNA, 19 nt, Artificial Sequence
  Description of Artificial Sequence: Synthetic oligonucleotide
  Antisense strand to SEQ ID NO: 515811
aaagagguaaugaucacca

SEQ ID NO: 515813 - RNA, 19 nt, Artificial Sequence
  Description of Artificial Sequence: Synthetic oligonucleotide
  Sense strand starting at position 607 of SEQ ID NO: 317833
ggugaucauuaccucuuua

SEQ ID NO: 515814 - RNA, 19 nt, Artificial Sequence
  Description of Artificial Sequence: Synthetic oligonucleotide
  Antisense strand to SEQ ID NO: 515813
uaaagagguaaugaucacc

SEQ ID NO: 515815 - RNA, 19 nt, Artificial Sequence
  Description of Artificial Sequence: Synthetic oligonucleotide
  Sense strand starting at position 621 of SEQ ID NO: 317833
cuuuacaaaugaguguuaa

SEQ ID NO: 515816 - RNA, 19 nt, Artificial Sequence
  Description of Artificial Sequence: Synthetic oligonucleotide
  Antisense strand to SEQ ID NO: 515815
uuaacacucauuuguaaag

SEQ ID NO: 515817 - RNA, 19 nt, Artificial Sequence
  Description of Artificial Sequence: Synthetic oligonucleotide
  Sense strand starting at position 622 of SEQ ID NO: 317833
uuuacaaaugaguguuaag

SEQ ID NO: 515818 - RNA, 19 nt, Artificial Sequence
  Description of Artificial Sequence: Synthetic oligonucleotide
  Antisense strand to SEQ ID NO: 515817
cuuaacacucauuuguaaa

SEQ ID NO: 515819 - RNA, 19 nt, Artificial Sequence
  Description of Artificial Sequence: Synthetic oligonucleotide
  Sense strand starting at position 648 of SEQ ID NO: 317833
cuuaaaguguagucaauag

SEQ ID NO: 515820 - RNA, 19 nt, Artificial Sequence
  Description of Artificial Sequence: Synthetic oligonucleotide
  Antisense strand to SEQ ID NO: 515819
cuauugacuacacuuuaag

SEQ ID NO: 515821 - RNA, 19 nt, Artificial Sequence
  Description of Artificial Sequence: Synthetic oligonucleotide
  Sense strand starting at position 732 of SEQ ID NO: 317833
cguuucuggcuauauaaac

SEQ ID NO: 515822 - RNA, 19 nt, Artificial Sequence
  Description of Artificial Sequence: Synthetic oligonucleotide
  Antisense strand to SEQ ID NO: 515821
guuuauauagccagaaacg

SEQ ID NO: 515823 - RNA, 19 nt, Artificial Sequence
  Description of Artificial Sequence: Synthetic oligonucleotide
  Sense strand starting at position 897 of SEQ ID NO: 317833
gugucucaucuguaacaug

SEQ ID NO: 515824 - RNA, 19 nt, Artificial Sequence
  Description of Artificial Sequence: Synthetic oligonucleotide
  Antisense strand to SEQ ID NO: 515823
cauguuacagaugagacac

SEQ ID NO: 515825 - RNA, 19 nt, Artificial Sequence
  Description of Artificial Sequence: Synthetic oligonucleotide
  Sense strand starting at position 996 of SEQ ID NO: 317833
gggcauaguaacuguugga

SEQ ID NO: 515826 - RNA, 19 nt, Artificial Sequence
  Description of Artificial Sequence: Synthetic oligonucleotide
  Antisense strand to SEQ ID NO: 515825
uccaacaguuacuaugccc

SEQ ID NO: 515827 - RNA, 19 nt, Artificial Sequence
  Description of Artificial Sequence: Synthetic oligonucleotide
  Sense strand starting at position 1000 of SEQ ID NO: 317833
auaguaacuguuggauagu

SEQ ID NO: 515828 - RNA, 19 nt, Artificial Sequence
  Description of Artificial Sequence: Synthetic oligonucleotide
  Antisense strand to SEQ ID NO: 515827
acuauccaacaguuacuau

SEQ ID NO: 515829 - RNA, 19 nt, Artificial Sequence
  Description of Artificial Sequence: Synthetic oligonucleotide
  Sense strand starting at position 1090 of SEQ ID NO: 317833
ccugaugugguguaaucca

SEQ ID NO: 515830 - RNA, 19 nt, Artificial Sequence
  Description of Artificial Sequence: Synthetic oligonucleotide
  Antisense strand to SEQ ID NO: 515829
uggauuacaccacaucagg

SEQ ID NO: 515831 - RNA, 19 nt, Artificial Sequence
  Description of Artificial Sequence: Synthetic oligonucleotide
  Sense strand starting at position 1192 of SEQ ID NO: 317833
gauaaucccugucuggaau

SEQ ID NO: 515832 - RNA, 19 nt, Artificial Sequence
  Description of Artificial Sequence: Synthetic oligonucleotide
  Antisense strand to SEQ ID NO: 515831
auuccagacagggauuauc

SEQ ID NO: 515833 - RNA, 19 nt, Artificial Sequence
  Description of Artificial Sequence: Synthetic oligonucleotide
  Sense strand starting at position 1205 of SEQ ID NO: 317833
uggaaugugggcuaguuau

SEQ ID NO: 515834 - RNA, 19 nt, Artificial Sequence
  Description of Artificial Sequence: Synthetic oligonucleotide
  Antisense strand to SEQ ID NO: 515833
auaacuagcccacauucca

SEQ ID NO: 515835 - RNA, 19 nt, Artificial Sequence
  Description of Artificial Sequence: Synthetic oligonucleotide
  Sense strand starting at position 1312 of SEQ ID NO: 317833
ccaggaucccugggauggu

SEQ ID NO: 515836 - RNA, 19 nt, Artificial Sequence
  Description of Artificial Sequence: Synthetic oligonucleotide
  Antisense strand to SEQ ID NO: 515835
accaucccagggauccugg

SEQ ID NO: 515837 - RNA, 19 nt, Artificial Sequence
  Description of Artificial Sequence: Synthetic oligonucleotide
  Sense strand starting at position 1348 of SEQ ID NO: 317833
gccuuauagccgucgggua

SEQ ID NO: 515838 - RNA, 19 nt, Artificial Sequence
  Description of Artificial Sequence: Synthetic oligonucleotide
  Antisense strand to SEQ ID NO: 515837
uacccgacggcuauaaggc

SEQ ID NO: 515839 - RNA, 19 nt, Artificial Sequence
  Description of Artificial Sequence: Synthetic oligonucleotide
  Sense strand starting at position 1589 of SEQ ID NO: 317833
cagugauggaucugaggcu

SEQ ID NO: 515840 - RNA, 19 nt, Artificial Sequence
  Description of Artificial Sequence: Synthetic oligonucleotide
  Antisense strand to SEQ ID NO: 515839
agccucagauccaucacug

SEQ ID NO: 515841 - RNA, 19 nt, Artificial Sequence
  Description of Artificial Sequence: Synthetic oligonucleotide
  Sense strand starting at position 2457 of SEQ ID NO: 317833
ccacaaagucugugaguga

SEQ ID NO: 515842 - RNA, 19 nt, Artificial Sequence
  Description of Artificial Sequence: Synthetic oligonucleotide
  Antisense strand to SEQ ID NO: 515841
ucacucacagacuuugugg

SEQ ID NO: 515843 - RNA, 19 nt, Artificial Sequence
  Description of Artificial Sequence: Synthetic oligonucleotide
  Sense strand starting at position 2460 of SEQ ID NO: 317833
caaagucugugagugagaa

SEQ ID NO: 515844 - RNA, 19 nt, Artificial Sequence
  Description of Artificial Sequence: Synthetic oligonucleotide
  Antisense strand to SEQ ID NO: 515843
uucucacucacagacuuug

SEQ ID NO: 515845 - RNA, 19 nt, Artificial Sequence
  Description of Artificial Sequence: Synthetic oligonucleotide
  Sense strand starting at position 2461 of SEQ ID NO: 317833
aaagucugugagugagaag

SEQ ID NO: 515846 - RNA, 19 nt, Artificial Sequence
  Description of Artificial Sequence: Synthetic oligonucleotide
  Antisense strand to SEQ ID NO: 515845
cuucucacucacagacuuu

SEQ ID NO: 515847 - RNA, 19 nt, Artificial Sequence
  Description of Artificial Sequence: Synthetic oligonucleotide
  Sense strand starting at position 2473 of SEQ ID NO: 317833
ugagaagcaccagguuuaa

SEQ ID NO: 515848 - RNA, 19 nt, Artificial Sequence
  Description of Artificial Sequence: Synthetic oligonucleotide
  Antisense strand to SEQ ID NO: 515847
uuaaaccuggugcuucuca

SEQ ID NO: 515849 - RNA, 19 nt, Artificial Sequence
  Description of Artificial Sequence: Synthetic oligonucleotide
  Sense strand starting at position 2565 of SEQ ID NO: 317833
guauaaaugugaguuaacg

SEQ ID NO: 515850 - RNA, 19 nt, Artificial Sequence
  Description of Artificial Sequence: Synthetic oligonucleotide
  Antisense strand to SEQ ID NO: 515849
cguuaacucacauuuauac

SEQ ID NO: 515851 - RNA, 19 nt, Artificial Sequence
  Description of Artificial Sequence: Synthetic oligonucleotide
  Sense strand starting at position 2599 of SEQ ID NO: 317833
uuuguaaaccuaggugauu

SEQ ID NO: 515852 - RNA, 19 nt, Artificial Sequence
  Description of Artificial Sequence: Synthetic oligonucleotide
  Antisense strand to SEQ ID NO: 515851
aaucaccuagguuuacaaa

SEQ ID NO: 515853 - RNA, 19 nt, Artificial Sequence
  Description of Artificial Sequence: Synthetic oligonucleotide
  Sense strand starting at position 2600 of SEQ ID NO: 317833
uuguaaaccuaggugauua

SEQ ID NO: 515854 - RNA, 19 nt, Artificial Sequence
  Description of Artificial Sequence: Synthetic oligonucleotide
  Antisense strand to SEQ ID NO: 515853
uaaucaccuagguuuacaa

SEQ ID NO: 515855 - RNA, 19 nt, Artificial Sequence
  Description of Artificial Sequence: Synthetic oligonucleotide
  Sense strand starting at position 2610 of SEQ ID NO: 317833
aggugauuauaucuuuggu

SEQ ID NO: 515856 - RNA, 19 nt, Artificial Sequence
  Description of Artificial Sequence: Synthetic oligonucleotide
  Antisense strand to SEQ ID NO: 515855
accaaagauauaaucaccu

SEQ ID NO: 515857 - RNA, 19 nt, Artificial Sequence
  Description of Artificial Sequence: Synthetic oligonucleotide
  Sense strand starting at position 2612 of SEQ ID NO: 317833
gugauuauaucuuugguac

SEQ ID NO: 515858 - RNA, 19 nt, Artificial Sequence
  Description of Artificial Sequence: Synthetic oligonucleotide
  Antisense strand to SEQ ID NO: 515857
guaccaaagauauaaucac

SEQ ID NO: 515859 - RNA, 19 nt, Artificial Sequence
  Description of Artificial Sequence: Synthetic oligonucleotide
  Sense strand starting at position 2843 of SEQ ID NO: 317833
aggucugggcagugacaaa

SEQ ID NO: 515860 - RNA, 19 nt, Artificial Sequence
  Description of Artificial Sequence: Synthetic oligonucleotide
  Antisense strand to SEQ ID NO: 515859
uuugucacugcccagaccu

SEQ ID NO: 515861 - RNA, 19 nt, Artificial Sequence
  Description of Artificial Sequence: Synthetic oligonucleotide
  Sense strand starting at position 3112 of SEQ ID NO: 317833
gucaucguggguagugaaa

SEQ ID NO: 515862 - RNA, 19 nt, Artificial Sequence
  Description of Artificial Sequence: Synthetic oligonucleotide
  Antisense strand to SEQ ID NO: 515861
uuucacuacccacgaugac

SEQ ID NO: 515863 - RNA, 19 nt, Artificial Sequence
  Description of Artificial Sequence: Synthetic oligonucleotide
  Sense strand starting at position 3279 of SEQ ID NO: 317833
ugugaugugugaucuggaa

SEQ ID NO: 515864 - RNA, 19 nt, Artificial Sequence
  Description of Artificial Sequence: Synthetic oligonucleotide
  Antisense strand to SEQ ID NO: 515863
uuccagaucacacaucaca

SEQ ID NO: 515865 - RNA, 19 nt, Artificial Sequence
  Description of Artificial Sequence: Synthetic oligonucleotide
  Sense strand starting at position 3281 of SEQ ID NO: 317833
ugaugugugaucuggaauc

SEQ ID NO: 515866 - RNA, 19 nt, Artificial Sequence
  Description of Artificial Sequence: Synthetic oligonucleotide
  Antisense strand to SEQ ID NO: 515865
gauuccagaucacacauca

SEQ ID NO: 515867 - RNA, 19 nt, Artificial Sequence
  Description of Artificial Sequence: Synthetic oligonucleotide
  Sense strand starting at position 3403 of SEQ ID NO: 317833
uggcaaggcacucagaguu

SEQ ID NO: 515868 - RNA, 19 nt, Artificial Sequence
  Description of Artificial Sequence: Synthetic oligonucleotide
  Antisense strand to SEQ ID NO: 515867
aacucugagugccuugcca

SEQ ID NO: 515869 - RNA, 19 nt, Artificial Sequence
  Description of Artificial Sequence: Synthetic oligonucleotide
  Sense strand starting at position 3418 of SEQ ID NO: 317833
aguuaauaaguccgacuua

SEQ ID NO: 515870 - RNA, 19 nt, Artificial Sequence
  Description of Artificial Sequence: Synthetic oligonucleotide
  Antisense strand to SEQ ID NO: 515869
uaagucggacuuauuaacu

SEQ ID NO: 515871 - RNA, 19 nt, Artificial Sequence
  Description of Artificial Sequence: Synthetic oligonucleotide
  Sense strand starting at position 3589 of SEQ ID NO: 317833
gcccgucuggccuucuaga

SEQ ID NO: 515872 - RNA, 19 nt, Artificial Sequence
  Description of Artificial Sequence: Synthetic oligonucleotide
  Antisense strand to SEQ ID NO: 515871
ucuagaaggccagacgggc

SEQ ID NO: 515873 - RNA, 19 nt, Artificial Sequence
  Description of Artificial Sequence: Synthetic oligonucleotide
  Sense strand starting at position 3606 of SEQ ID NO: 317833
gacucugguggauggauua

SEQ ID NO: 515874 - RNA, 19 nt, Artificial Sequence
  Description of Artificial Sequence: Synthetic oligonucleotide
  Antisense strand to SEQ ID NO: 515873
uaauccauccaccagaguc

SEQ ID NO: 515875 - RNA, 19 nt, Artificial Sequence
  Description of Artificial Sequence: Synthetic oligonucleotide
  Sense strand starting at position 3655 of SEQ ID NO: 317833
gacugaugggccugaagga

SEQ ID NO: 515876 - RNA, 19 nt, Artificial Sequence
  Description of Artificial Sequence: Synthetic oligonucleotide
  Antisense strand to SEQ ID NO: 515875
uccuucaggcccaucaguc

SEQ ID NO: 515877 - RNA, 19 nt, Artificial Sequence
  Description of Artificial Sequence: Synthetic oligonucleotide
  Sense strand starting at position 3827 of SEQ ID NO: 317833
gcaucauagggaggagacu

SEQ ID NO: 515878 - RNA, 19 nt, Artificial Sequence
  Description of Artificial Sequence: Synthetic oligonucleotide
  Antisense strand to SEQ ID NO: 515877
agucuccucccuaugaugc

SEQ ID NO: 515879 - RNA, 19 nt, Artificial Sequence
  Description of Artificial Sequence: Synthetic oligonucleotide
  Sense strand starting at position 3836 of SEQ ID NO: 317833
ggaggagacuggcuuucuu

SEQ ID NO: 515880 - RNA, 19 nt, Artificial Sequence
  Description of Artificial Sequence: Synthetic oligonucleotide
  Antisense strand to SEQ ID NO: 515879
aagaaagccagucuccucc

SEQ ID NO: 515881 - RNA, 19 nt, Artificial Sequence
  Description of Artificial Sequence: Synthetic oligonucleotide
  Sense strand starting at position 3848 of SEQ ID NO: 317833
cuuucuucuggaugaggca

SEQ ID NO: 515882 - RNA, 19 nt, Artificial Sequence
  Description of Artificial Sequence: Synthetic oligonucleotide
  Antisense strand to SEQ ID NO: 515881
ugccucauccagaagaaag

SEQ ID NO: 515883 - RNA, 19 nt, Artificial Sequence
  Description of Artificial Sequence: Synthetic oligonucleotide
  Sense strand starting at position 254 of SEQ ID NO: 317834
gagucaagggccugacuua

SEQ ID NO: 515884 - RNA, 19 nt, Artificial Sequence
  Description of Artificial Sequence: Synthetic oligonucleotide
  Antisense strand to SEQ ID NO: 515883
uaagucaggcccuugacuc

SEQ ID NO: 515885 - RNA, 19 nt, Artificial Sequence
  Description of Artificial Sequence: Synthetic oligonucleotide
  Sense strand starting at position 255 of SEQ ID NO: 317834
agucaagggccugacuuaa

SEQ ID NO: 515886 - RNA, 19 nt, Artificial Sequence
  Description of Artificial Sequence: Synthetic oligonucleotide
  Antisense strand to SEQ ID NO: 515885
uuaagucaggcccuugacu

SEQ ID NO: 515887 - RNA, 19 nt, Artificial Sequence
  Description of Artificial Sequence: Synthetic oligonucleotide
  Sense strand starting at position 382 of SEQ ID NO: 317834
gagucaaggccacaaacuu

SEQ ID NO: 515888 - RNA, 19 nt, Artificial Sequence
  Description of Artificial Sequence: Synthetic oligonucleotide
  Antisense strand to SEQ ID NO: 515887
aaguuuguggccuugacuc

SEQ ID NO: 515889 - RNA, 19 nt, Artificial Sequence
  Description of Artificial Sequence: Synthetic oligonucleotide
  Sense strand starting at position 425 of SEQ ID NO: 317834
gccugagguccuuguccau

SEQ ID NO: 515890 - RNA, 19 nt, Artificial Sequence
  Description of Artificial Sequence: Synthetic oligonucleotide
  Antisense strand to SEQ ID NO: 515889
auggacaaggaccucaggc

SEQ ID NO: 515891 - RNA, 19 nt, Artificial Sequence
  Description of Artificial Sequence: Synthetic oligonucleotide
  Sense strand starting at position 675 of SEQ ID NO: 317834
ggcucugacuccuugggau

SEQ ID NO: 515892 - RNA, 19 nt, Artificial Sequence
  Description of Artificial Sequence: Synthetic oligonucleotide
  Antisense strand to SEQ ID NO: 515891
aucccaaggagucagagcc

SEQ ID NO: 515893 - RNA, 19 nt, Artificial Sequence
  Description of Artificial Sequence: Synthetic oligonucleotide
  Sense strand starting at position 679 of SEQ ID NO: 317834
cugacuccuugggaugaaa

SEQ ID NO: 515894 - RNA, 19 nt, Artificial Sequence
  Description of Artificial Sequence: Synthetic oligonucleotide
  Antisense strand to SEQ ID NO: 515893
uuucaucccaaggagucag

SEQ ID NO: 515895 - RNA, 19 nt, Artificial Sequence
  Description of Artificial Sequence: Synthetic oligonucleotide
  Sense strand starting at position 1427 of SEQ ID NO: 317834
ggugacuccuggccauuga

SEQ ID NO: 515896 - RNA, 19 nt, Artificial Sequence
  Description of Artificial Sequence: Synthetic oligonucleotide
  Antisense strand to SEQ ID NO: 515895
ucaauggccaggagucacc

SEQ ID NO: 515897 - RNA, 19 nt, Artificial Sequence
  Description of Artificial Sequence: Synthetic oligonucleotide
  Sense strand starting at position 1428 of SEQ ID NO: 317834
gugacuccuggccauugaa

SEQ ID NO: 515898 - RNA, 19 nt, Artificial Sequence
  Description of Artificial Sequence: Synthetic oligonucleotide
  Antisense strand to SEQ ID NO: 515897
uucaauggccaggagucac

SEQ ID NO: 515899 - RNA, 19 nt, Artificial Sequence
  Description of Artificial Sequence: Synthetic oligonucleotide
  Sense strand starting at position 1444 of SEQ ID NO: 317834
gaaugcuaggucugcccau

SEQ ID NO: 515900 - RNA, 19 nt, Artificial Sequence
  Description of Artificial Sequence: Synthetic oligonucleotide
  Antisense strand to SEQ ID NO: 515899
augggcagaccuagcauuc

SEQ ID NO: 515901 - RNA, 19 nt, Artificial Sequence
  Description of Artificial Sequence: Synthetic oligonucleotide
  Sense strand starting at position 1483 of SEQ ID NO: 317834
agcucaugugacugccaua

SEQ ID NO: 515902 - RNA, 19 nt, Artificial Sequence
  Description of Artificial Sequence: Synthetic oligonucleotide
  Antisense strand to SEQ ID NO: 515901
uauggcagucacaugagcu

SEQ ID NO: 515903 - RNA, 19 nt, Artificial Sequence
  Description of Artificial Sequence: Synthetic oligonucleotide
  Sense strand starting at position 1638 of SEQ ID NO: 317834
ucuggaaagcuaugucaga

SEQ ID NO: 515904 - RNA, 19 nt, Artificial Sequence
  Description of Artificial Sequence: Synthetic oligonucleotide
  Antisense strand to SEQ ID NO: 515903
ucugacauagcuuuccaga

SEQ ID NO: 515905 - RNA, 19 nt, Artificial Sequence
  Description of Artificial Sequence: Synthetic oligonucleotide
  Sense strand starting at position 1643 of SEQ ID NO: 317834
aaagcuaugucagagagaa

SEQ ID NO: 515906 - RNA, 19 nt, Artificial Sequence
  Description of Artificial Sequence: Synthetic oligonucleotide
  Antisense strand to SEQ ID NO: 515905
uucucucugacauagcuuu

SEQ ID NO: 515907 - RNA, 19 nt, Artificial Sequence
  Description of Artificial Sequence: Synthetic oligonucleotide
  Sense strand starting at position 1662 of SEQ ID NO: 317834
gcaucuuaccuggagguca

SEQ ID NO: 515908 - RNA, 19 nt, Artificial Sequence
  Description of Artificial Sequence: Synthetic oligonucleotide
  Antisense strand to SEQ ID NO: 515907
ugaccuccagguaagaugc

SEQ ID NO: 515909 - RNA, 19 nt, Artificial Sequence
  Description of Artificial Sequence: Synthetic oligonucleotide
  Sense strand starting at position 1664 of SEQ ID NO: 317834
aucuuaccuggaggucaaa

SEQ ID NO: 515910 - RNA, 19 nt, Artificial Sequence
  Description of Artificial Sequence: Synthetic oligonucleotide
  Antisense strand to SEQ ID NO: 515909
uuugaccuccagguaagau

SEQ ID NO: 515911 - RNA, 19 nt, Artificial Sequence
  Description of Artificial Sequence: Synthetic oligonucleotide
  Sense strand starting at position 2441 of SEQ ID NO: 317834
cugugagagacuugagugu

SEQ ID NO: 515912 - RNA, 19 nt, Artificial Sequence
  Description of Artificial Sequence: Synthetic oligonucleotide
  Antisense strand to SEQ ID NO: 515911
acacucaagucucucacag

SEQ ID NO: 515913 - RNA, 19 nt, Artificial Sequence
  Description of Artificial Sequence: Synthetic oligonucleotide
  Sense strand starting at position 2443 of SEQ ID NO: 317834
gugagagacuugaguguga

SEQ ID NO: 515914 - RNA, 19 nt, Artificial Sequence
  Description of Artificial Sequence: Synthetic oligonucleotide
  Antisense strand to SEQ ID NO: 515913
ucacacucaagucucucac

SEQ ID NO: 515915 - RNA, 19 nt, Artificial Sequence
  Description of Artificial Sequence: Synthetic oligonucleotide
  Sense strand starting at position 2927 of SEQ ID NO: 317834
gaggccuuucuguggaagu

SEQ ID NO: 515916 - RNA, 19 nt, Artificial Sequence
  Description of Artificial Sequence: Synthetic oligonucleotide
  Antisense strand to SEQ ID NO: 515915
acuuccacagaaaggccuc

SEQ ID NO: 515917 - RNA, 19 nt, Artificial Sequence
  Description of Artificial Sequence: Synthetic oligonucleotide
  Sense strand starting at position 2929 of SEQ ID NO: 317834
ggccuuucuguggaagugu

SEQ ID NO: 515918 - RNA, 19 nt, Artificial Sequence
  Description of Artificial Sequence: Synthetic oligonucleotide
  Antisense strand to SEQ ID NO: 515917
acacuuccacagaaaggcc

SEQ ID NO: 515919 - RNA, 19 nt, Artificial Sequence
  Description of Artificial Sequence: Synthetic oligonucleotide
  Sense strand starting at position 2978 of SEQ ID NO: 317834
gcugacaaguguuugauuu

SEQ ID NO: 515920 - RNA, 19 nt, Artificial Sequence
  Description of Artificial Sequence: Synthetic oligonucleotide
  Antisense strand to SEQ ID NO: 515919
aaaucaaacacuugucagc

SEQ ID NO: 515921 - RNA, 19 nt, Artificial Sequence
  Description of Artificial Sequence: Synthetic oligonucleotide
  Sense strand starting at position 3023 of SEQ ID NO: 317834
acgaguuuguguuugcaca

SEQ ID NO: 515922 - RNA, 19 nt, Artificial Sequence
  Description of Artificial Sequence: Synthetic oligonucleotide
  Antisense strand to SEQ ID NO: 515921
ugugcaaacacaaacucgu

SEQ ID NO: 515923 - RNA, 19 nt, Artificial Sequence
  Description of Artificial Sequence: Synthetic oligonucleotide
  Sense strand starting at position 3024 of SEQ ID NO: 317834
cgaguuuguguuugcacaa

SEQ ID NO: 515924 - RNA, 19 nt, Artificial Sequence
  Description of Artificial Sequence: Synthetic oligonucleotide
  Antisense strand to SEQ ID NO: 515923
uugugcaaacacaaacucg

SEQ ID NO: 515925 - RNA, 19 nt, Artificial Sequence
  Description of Artificial Sequence: Synthetic oligonucleotide
  Sense strand starting at position 3025 of SEQ ID NO: 317834
gaguuuguguuugcacaag

SEQ ID NO: 515926 - RNA, 19 nt, Artificial Sequence
  Description of Artificial Sequence: Synthetic oligonucleotide
  Antisense strand to SEQ ID NO: 515925
cuugugcaaacacaaacuc

SEQ ID NO: 515927 - RNA, 19 nt, Artificial Sequence
  Description of Artificial Sequence: Synthetic oligonucleotide
  Sense strand starting at position 3105 of SEQ ID NO: 317834
ugcccauuucuggguguau

SEQ ID NO: 515928 - RNA, 19 nt, Artificial Sequence
  Description of Artificial Sequence: Synthetic oligonucleotide
  Antisense strand to SEQ ID NO: 515927
auacacccagaaaugggca

SEQ ID NO: 515929 - RNA, 19 nt, Artificial Sequence
  Description of Artificial Sequence: Synthetic oligonucleotide
  Sense strand starting at position 3106 of SEQ ID NO: 317834
gcccauuucuggguguaug

SEQ ID NO: 515930 - RNA, 19 nt, Artificial Sequence
  Description of Artificial Sequence: Synthetic oligonucleotide
  Antisense strand to SEQ ID NO: 515929
cauacacccagaaaugggc

SEQ ID NO: 515931 - RNA, 19 nt, Artificial Sequence
  Description of Artificial Sequence: Synthetic oligonucleotide
  Sense strand starting at position 3107 of SEQ ID NO: 317834
cccauuucuggguguaugu

SEQ ID NO: 515932 - RNA, 19 nt, Artificial Sequence
  Description of Artificial Sequence: Synthetic oligonucleotide
  Antisense strand to SEQ ID NO: 515931
acauacacccagaaauggg

SEQ ID NO: 515933 - RNA, 19 nt, Artificial Sequence
  Description of Artificial Sequence: Synthetic oligonucleotide
  Sense strand starting at position 3120 of SEQ ID NO: 317834
guaugugugcugcugugau

SEQ ID NO: 515934 - RNA, 19 nt, Artificial Sequence
  Description of Artificial Sequence: Synthetic oligonucleotide
  Antisense strand to SEQ ID NO: 515933
aucacagcagcacacauac

SEQ ID NO: 515935 - RNA, 19 nt, Artificial Sequence
  Description of Artificial Sequence: Synthetic oligonucleotide
  Sense strand starting at position 3130 of SEQ ID NO: 317834
ugcugugauugguuguaca

SEQ ID NO: 515936 - RNA, 19 nt, Artificial Sequence
  Description of Artificial Sequence: Synthetic oligonucleotide
  Antisense strand to SEQ ID NO: 515935
uguacaaccaaucacagca

SEQ ID NO: 515937 - RNA, 19 nt, Artificial Sequence
  Description of Artificial Sequence: Synthetic oligonucleotide
  Sense strand starting at position 3183 of SEQ ID NO: 317834
ugcagaugcaucuauugag

SEQ ID NO: 515938 - RNA, 19 nt, Artificial Sequence
  Description of Artificial Sequence: Synthetic oligonucleotide
  Antisense strand to SEQ ID NO: 515937
cucaauagaugcaucugca

SEQ ID NO: 515939 - RNA, 19 nt, Artificial Sequence
  Description of Artificial Sequence: Synthetic oligonucleotide
  Sense strand starting at position 3238 of SEQ ID NO: 317834
gaaggugacucugauacug

SEQ ID NO: 515940 - RNA, 19 nt, Artificial Sequence
  Description of Artificial Sequence: Synthetic oligonucleotide
  Antisense strand to SEQ ID NO: 515939
caguaucagagucaccuuc

SEQ ID NO: 515941 - RNA, 19 nt, Artificial Sequence
  Description of Artificial Sequence: Synthetic oligonucleotide
  Sense strand starting at position 3240 of SEQ ID NO: 317834
aggugacucugauacugga

SEQ ID NO: 515942 - RNA, 19 nt, Artificial Sequence
  Description of Artificial Sequence: Synthetic oligonucleotide
  Antisense strand to SEQ ID NO: 515941
uccaguaucagagucaccu

SEQ ID NO: 515943 - RNA, 19 nt, Artificial Sequence
  Description of Artificial Sequence: Synthetic oligonucleotide
  Sense strand starting at position 3243 of SEQ ID NO: 317834
ugacucugauacuggagaa

SEQ ID NO: 515944 - RNA, 19 nt, Artificial Sequence
  Description of Artificial Sequence: Synthetic oligonucleotide
  Antisense strand to SEQ ID NO: 515943
uucuccaguaucagaguca

SEQ ID NO: 515945 - RNA, 19 nt, Artificial Sequence
  Description of Artificial Sequence: Synthetic oligonucleotide
  Sense strand starting at position 3381 of SEQ ID NO: 317834
gguggaguucauggcuuua

SEQ ID NO: 515946 - RNA, 19 nt, Artificial Sequence
  Description of Artificial Sequence: Synthetic oligonucleotide
  Antisense strand to SEQ ID NO: 515945
uaaagccaugaacuccacc

SEQ ID NO: 515947 - RNA, 19 nt, Artificial Sequence
  Description of Artificial Sequence: Synthetic oligonucleotide
  Sense strand starting at position 3427 of SEQ ID NO: 317834
gccaguuucccuguacugu

SEQ ID NO: 515948 - RNA, 19 nt, Artificial Sequence
  Description of Artificial Sequence: Synthetic oligonucleotide
  Antisense strand to SEQ ID NO: 515947
acaguacagggaaacuggc

SEQ ID NO: 515949 - RNA, 19 nt, Artificial Sequence
  Description of Artificial Sequence: Synthetic oligonucleotide
  Sense strand starting at position 3435 of SEQ ID NO: 317834
cccuguacugugggaguuu

SEQ ID NO: 515950 - RNA, 19 nt, Artificial Sequence
  Description of Artificial Sequence: Synthetic oligonucleotide
  Antisense strand to SEQ ID NO: 515949
aaacucccacaguacaggg

SEQ ID NO: 515951 - RNA, 19 nt, Artificial Sequence
  Description of Artificial Sequence: Synthetic oligonucleotide
  Sense strand starting at position 3673 of SEQ ID NO: 317834
guagauaucacauguguug

SEQ ID NO: 515952 - RNA, 19 nt, Artificial Sequence
  Description of Artificial Sequence: Synthetic oligonucleotide
  Antisense strand to SEQ ID NO: 515951
caacacaugugauaucuac

SEQ ID NO: 515953 - RNA, 19 nt, Artificial Sequence
  Description of Artificial Sequence: Synthetic oligonucleotide
  Sense strand starting at position 3676 of SEQ ID NO: 317834
gauaucacauguguuggau

SEQ ID NO: 515954 - RNA, 19 nt, Artificial Sequence
  Description of Artificial Sequence: Synthetic oligonucleotide
  Antisense strand to SEQ ID NO: 515953
auccaacacaugugauauc

SEQ ID NO: 515955 - RNA, 19 nt, Artificial Sequence
  Description of Artificial Sequence: Synthetic oligonucleotide
  Sense strand starting at position 3772 of SEQ ID NO: 317834
guaugacccaucugggaga

SEQ ID NO: 515956 - RNA, 19 nt, Artificial Sequence
  Description of Artificial Sequence: Synthetic oligonucleotide
  Antisense strand to SEQ ID NO: 515955
ucucccagaugggucauac

SEQ ID NO: 515957 - RNA, 19 nt, Artificial Sequence
  Description of Artificial Sequence: Synthetic oligonucleotide
  Sense strand starting at position 3775 of SEQ ID NO: 317834
ugacccaucugggagagaa

SEQ ID NO: 515958 - RNA, 19 nt, Artificial Sequence
  Description of Artificial Sequence: Synthetic oligonucleotide
  Antisense strand to SEQ ID NO: 515957
uucucucccagauggguca

SEQ ID NO: 515959 - RNA, 19 nt, Artificial Sequence
  Description of Artificial Sequence: Synthetic oligonucleotide
  Sense strand starting at position 3793 of SEQ ID NO: 317834
aggucacuuuccuccuaga

SEQ ID NO: 515960 - RNA, 19 nt, Artificial Sequence
  Description of Artificial Sequence: Synthetic oligonucleotide
  Antisense strand to SEQ ID NO: 515959
ucuaggaggaaagugaccu

SEQ ID NO: 515961 - RNA, 19 nt, Artificial Sequence
  Description of Artificial Sequence: Synthetic oligonucleotide
  Sense strand starting at position 3809 of SEQ ID NO: 317834
agaaaugaguugucauagc

SEQ ID NO: 515962 - RNA, 19 nt, Artificial Sequence
  Description of Artificial Sequence: Synthetic oligonucleotide
  Antisense strand to SEQ ID NO: 515961
gcuaugacaacucauuucu

SEQ ID NO: 515963 - RNA, 19 nt, Artificial Sequence
  Description of Artificial Sequence: Synthetic oligonucleotide
  Sense strand starting at position 65 of SEQ ID NO: 317835
gaagacauguuggaacaaa

SEQ ID NO: 515964 - RNA, 19 nt, Artificial Sequence
  Description of Artificial Sequence: Synthetic oligonucleotide
  Antisense strand to SEQ ID NO: 515963
uuuguuccaacaugucuuc

SEQ ID NO: 515965 - RNA, 19 nt, Artificial Sequence
  Description of Artificial Sequence: Synthetic oligonucleotide
  Sense strand starting at position 197 of SEQ ID NO: 317835
ucagaagugccgccguaaa

SEQ ID NO: 515966 - RNA, 19 nt, Artificial Sequence
  Description of Artificial Sequence: Synthetic oligonucleotide
  Antisense strand to SEQ ID NO: 515965
uuuacggcggcacuucuga

SEQ ID NO: 515967 - RNA, 19 nt, Artificial Sequence
  Description of Artificial Sequence: Synthetic oligonucleotide
  Sense strand starting at position 236 of SEQ ID NO: 317835
ccgcguagggaucaaagau

SEQ ID NO: 515968 - RNA, 19 nt, Artificial Sequence
  Description of Artificial Sequence: Synthetic oligonucleotide
  Antisense strand to SEQ ID NO: 515967
aucuuugaucccuacgcgg

SEQ ID NO: 515969 - RNA, 19 nt, Artificial Sequence
  Description of Artificial Sequence: Synthetic oligonucleotide
  Sense strand starting at position 275 of SEQ ID NO: 317835
aaugaaagccucgggaaga

SEQ ID NO: 515970 - RNA, 19 nt, Artificial Sequence
  Description of Artificial Sequence: Synthetic oligonucleotide
  Antisense strand to SEQ ID NO: 515969
ucuucccgaggcuuucauu

SEQ ID NO: 515971 - RNA, 19 nt, Artificial Sequence
  Description of Artificial Sequence: Synthetic oligonucleotide
  Sense strand starting at position 313 of SEQ ID NO: 317835
aauggagcaguguaauaca

SEQ ID NO: 515972 - RNA, 19 nt, Artificial Sequence
  Description of Artificial Sequence: Synthetic oligonucleotide
  Antisense strand to SEQ ID NO: 515971
uguauuacacugcuccauu

SEQ ID NO: 515973 - RNA, 19 nt, Artificial Sequence
  Description of Artificial Sequence: Synthetic oligonucleotide
  Sense strand starting at position 333 of SEQ ID NO: 317835
ugaaauaaguuggcaaacu

SEQ ID NO: 515974 - RNA, 19 nt, Artificial Sequence
  Description of Artificial Sequence: Synthetic oligonucleotide
  Antisense strand to SEQ ID NO: 515973
aguuugccaacuuauuuca

SEQ ID NO: 515975 - RNA, 19 nt, Artificial Sequence
  Description of Artificial Sequence: Synthetic oligonucleotide
  Sense strand starting at position 356 of SEQ ID NO: 317835
uuuacucaguaauugagau

SEQ ID NO: 515976 - RNA, 19 nt, Artificial Sequence
  Description of Artificial Sequence: Synthetic oligonucleotide
  Antisense strand to SEQ ID NO: 515975
aucucaauuacugaguaaa

SEQ ID NO: 515977 - RNA, 19 nt, Artificial Sequence
  Description of Artificial Sequence: Synthetic oligonucleotide
  Sense strand starting at position 373 of SEQ ID NO: 317835
augacugacuuacaggaaa

SEQ ID NO: 515978 - RNA, 19 nt, Artificial Sequence
  Description of Artificial Sequence: Synthetic oligonucleotide
  Antisense strand to SEQ ID NO: 515977
uuuccuguaagucagucau

SEQ ID NO: 515979 - RNA, 19 nt, Artificial Sequence
  Description of Artificial Sequence: Synthetic oligonucleotide
  Sense strand starting at position 714 of SEQ ID NO: 317835
ccaagucgcgacuacaaga

SEQ ID NO: 515980 - RNA, 19 nt, Artificial Sequence
  Description of Artificial Sequence: Synthetic oligonucleotide
  Antisense strand to SEQ ID NO: 515979
ucuuguagucgcgacuugg

SEQ ID NO: 515981 - RNA, 19 nt, Artificial Sequence
  Description of Artificial Sequence: Synthetic oligonucleotide
  Sense strand starting at position 752 of SEQ ID NO: 317835
gagaaagcucucgguaauu

SEQ ID NO: 515982 - RNA, 19 nt, Artificial Sequence
  Description of Artificial Sequence: Synthetic oligonucleotide
  Antisense strand to SEQ ID NO: 515981
aauuaccgagagcuuucuc

SEQ ID NO: 515983 - RNA, 19 nt, Artificial Sequence
  Description of Artificial Sequence: Synthetic oligonucleotide
  Sense strand starting at position 754 of SEQ ID NO: 317835
gaaagcucucgguaauuau

SEQ ID NO: 515984 - RNA, 19 nt, Artificial Sequence
  Description of Artificial Sequence: Synthetic oligonucleotide
  Antisense strand to SEQ ID NO: 515983
auaauuaccgagagcuuuc

SEQ ID NO: 515985 - RNA, 19 nt, Artificial Sequence
  Description of Artificial Sequence: Synthetic oligonucleotide
  Sense strand starting at position 757 of SEQ ID NO: 317835
agcucucgguaauuauaaa

SEQ ID NO: 515986 - RNA, 19 nt, Artificial Sequence
  Description of Artificial Sequence: Synthetic oligonucleotide
  Antisense strand to SEQ ID NO: 515985
uuuauaauuaccgagagcu

SEQ ID NO: 515987 - RNA, 19 nt, Artificial Sequence
  Description of Artificial Sequence: Synthetic oligonucleotide
  Sense strand starting at position 822 of SEQ ID NO: 317835
uccguacguccucuaaagu

SEQ ID NO: 515988 - RNA, 19 nt, Artificial Sequence
  Description of Artificial Sequence: Synthetic oligonucleotide
  Antisense strand to SEQ ID NO: 515987
acuuuagaggacguacgga

SEQ ID NO: 515989 - RNA, 19 nt, Artificial Sequence
  Description of Artificial Sequence: Synthetic oligonucleotide
  Sense strand starting at position 1050 of SEQ ID NO: 317835
ggacauuuaugggacgugu

SEQ ID NO: 515990 - RNA, 19 nt, Artificial Sequence
  Description of Artificial Sequence: Synthetic oligonucleotide
  Antisense strand to SEQ ID NO: 515989
acacgucccauaaaugucc

SEQ ID NO: 515991 - RNA, 19 nt, Artificial Sequence
  Description of Artificial Sequence: Synthetic oligonucleotide
  Sense strand starting at position 1052 of SEQ ID NO: 317835
acauuuaugggacguguuu

SEQ ID NO: 515992 - RNA, 19 nt, Artificial Sequence
  Description of Artificial Sequence: Synthetic oligonucleotide
  Antisense strand to SEQ ID NO: 515991
aaacacgucccauaaaugu

SEQ ID NO: 515993 - RNA, 19 nt, Artificial Sequence
  Description of Artificial Sequence: Synthetic oligonucleotide
  Sense strand starting at position 1066 of SEQ ID NO: 317835
uguuuaacaaggugggaaa

SEQ ID NO: 515994 - RNA, 19 nt, Artificial Sequence
  Description of Artificial Sequence: Synthetic oligonucleotide
  Antisense strand to SEQ ID NO: 515993
uuucccaccuuguuaaaca

SEQ ID NO: 515995 - RNA, 19 nt, Artificial Sequence
  Description of Artificial Sequence: Synthetic oligonucleotide
  Sense strand starting at position 1301 of SEQ ID NO: 317835
ugauguugaucgccaaaua

SEQ ID NO: 515996 - RNA, 19 nt, Artificial Sequence
  Description of Artificial Sequence: Synthetic oligonucleotide
  Antisense strand to SEQ ID NO: 515995
uauuuggcgaucaacauca

SEQ ID NO: 515997 - RNA, 19 nt, Artificial Sequence
  Description of Artificial Sequence: Synthetic oligonucleotide
  Sense strand starting at position 1302 of SEQ ID NO: 317835
gauguugaucgccaaauag

SEQ ID NO: 515998 - RNA, 19 nt, Artificial Sequence
  Description of Artificial Sequence: Synthetic oligonucleotide
  Antisense strand to SEQ ID NO: 515997
cuauuuggcgaucaacauc

SEQ ID NO: 515999 - RNA, 19 nt, Artificial Sequence
  Description of Artificial Sequence: Synthetic oligonucleotide
  Sense strand starting at position 1362 of SEQ ID NO: 317835
auauuucccuccgacaaug

SEQ ID NO: 516000 - RNA, 19 nt, Artificial Sequence
  Description of Artificial Sequence: Synthetic oligonucleotide
  Antisense strand to SEQ ID NO: 515999
cauugucggagggaaauau

SEQ ID NO: 516001 - RNA, 19 nt, Artificial Sequence
  Description of Artificial Sequence: Synthetic oligonucleotide
  Sense strand starting at position 1588 of SEQ ID NO: 317835
cgcucagucagguuucuuu

SEQ ID NO: 516002 - RNA, 19 nt, Artificial Sequence
  Description of Artificial Sequence: Synthetic oligonucleotide
  Antisense strand to SEQ ID NO: 516001
aaagaaaccugacugagcg

SEQ ID NO: 516003 - RNA, 19 nt, Artificial Sequence
  Description of Artificial Sequence: Synthetic oligonucleotide
  Sense strand starting at position 1872 of SEQ ID NO: 317835
cgcagagcacucugggaaa

SEQ ID NO: 516004 - RNA, 19 nt, Artificial Sequence
  Description of Artificial Sequence: Synthetic oligonucleotide
  Antisense strand to SEQ ID NO: 516003
uuucccagagugcucugcg

SEQ ID NO: 516005 - RNA, 19 nt, Artificial Sequence
  Description of Artificial Sequence: Synthetic oligonucleotide
  Sense strand starting at position 2157 of SEQ ID NO: 317835
ggccuugauauugggagga

SEQ ID NO: 516006 - RNA, 19 nt, Artificial Sequence
  Description of Artificial Sequence: Synthetic oligonucleotide
  Antisense strand to SEQ ID NO: 516005
uccucccaauaucaaggcc

SEQ ID NO: 516007 - RNA, 19 nt, Artificial Sequence
  Description of Artificial Sequence: Synthetic oligonucleotide
  Sense strand starting at position 2161 of SEQ ID NO: 317835
uugauauugggaggaguca

SEQ ID NO: 516008 - RNA, 19 nt, Artificial Sequence
  Description of Artificial Sequence: Synthetic oligonucleotide
  Antisense strand to SEQ ID NO: 516007
ugacuccucccaauaucaa

SEQ ID NO: 516009 - RNA, 19 nt, Artificial Sequence
  Description of Artificial Sequence: Synthetic oligonucleotide
  Sense strand starting at position 2186 of SEQ ID NO: 317835
uguuucguggcagaugaaa

SEQ ID NO: 516010 - RNA, 19 nt, Artificial Sequence
  Description of Artificial Sequence: Synthetic oligonucleotide
  Antisense strand to SEQ ID NO: 516009
uuucaucugccacgaaaca

SEQ ID NO: 516011 - RNA, 19 nt, Artificial Sequence
  Description of Artificial Sequence: Synthetic oligonucleotide
  Sense strand starting at position 2214 of SEQ ID NO: 317835
cuccuuaggaguuggguau

SEQ ID NO: 516012 - RNA, 19 nt, Artificial Sequence
  Description of Artificial Sequence: Synthetic oligonucleotide
  Antisense strand to SEQ ID NO: 516011
auacccaacuccuaaggag

SEQ ID NO: 516013 - RNA, 19 nt, Artificial Sequence
  Description of Artificial Sequence: Synthetic oligonucleotide
  Sense strand starting at position 2308 of SEQ ID NO: 317835
cccaguuucuguuuggaaa

SEQ ID NO: 516014 - RNA, 19 nt, Artificial Sequence
  Description of Artificial Sequence: Synthetic oligonucleotide
  Antisense strand to SEQ ID NO: 516013
uuuccaaacagaaacuggg

SEQ ID NO: 516015 - RNA, 19 nt, Artificial Sequence
  Description of Artificial Sequence: Synthetic oligonucleotide
  Sense strand starting at position 2309 of SEQ ID NO: 317835
ccaguuucuguuuggaaag

SEQ ID NO: 516016 - RNA, 19 nt, Artificial Sequence
  Description of Artificial Sequence: Synthetic oligonucleotide
  Antisense strand to SEQ ID NO: 516015
cuuuccaaacagaaacugg

SEQ ID NO: 516017 - RNA, 19 nt, Artificial Sequence
  Description of Artificial Sequence: Synthetic oligonucleotide
  Sense strand starting at position 2400 of SEQ ID NO: 317835
agcagagccuagcuaauua

SEQ ID NO: 516018 - RNA, 19 nt, Artificial Sequence
  Description of Artificial Sequence: Synthetic oligonucleotide
  Antisense strand to SEQ ID NO: 516017
uaauuagcuaggcucugcu

SEQ ID NO: 516019 - RNA, 19 nt, Artificial Sequence
  Description of Artificial Sequence: Synthetic oligonucleotide
  Sense strand starting at position 2570 of SEQ ID NO: 317835
ugguauguugcucauaaug

SEQ ID NO: 516020 - RNA, 19 nt, Artificial Sequence
  Description of Artificial Sequence: Synthetic oligonucleotide
  Antisense strand to SEQ ID NO: 516019
cauuaugagcaacauacca

SEQ ID NO: 516021 - RNA, 19 nt, Artificial Sequence
  Description of Artificial Sequence: Synthetic oligonucleotide
  Sense strand starting at position 2585 of SEQ ID NO: 317835
aaugaagauuaaggauaga

SEQ ID NO: 516022 - RNA, 19 nt, Artificial Sequence
  Description of Artificial Sequence: Synthetic oligonucleotide
  Antisense strand to SEQ ID NO: 516021
ucuauccuuaaucuucauu

SEQ ID NO: 516023 - RNA, 19 nt, Artificial Sequence
  Description of Artificial Sequence: Synthetic oligonucleotide
  Sense strand starting at position 3211 of SEQ ID NO: 317835
ggagguugcggugagacua

SEQ ID NO: 516024 - RNA, 19 nt, Artificial Sequence
  Description of Artificial Sequence: Synthetic oligonucleotide
  Antisense strand to SEQ ID NO: 516023
uagucucaccgcaaccucc

SEQ ID NO: 516025 - RNA, 19 nt, Artificial Sequence
  Description of Artificial Sequence: Synthetic oligonucleotide
  Sense strand starting at position 3338 of SEQ ID NO: 317835
uuugaaagguggucaagua

SEQ ID NO: 516026 - RNA, 19 nt, Artificial Sequence
  Description of Artificial Sequence: Synthetic oligonucleotide
  Antisense strand to SEQ ID NO: 516025
uacuugaccaccuuucaaa

SEQ ID NO: 516027 - RNA, 19 nt, Artificial Sequence
  Description of Artificial Sequence: Synthetic oligonucleotide
  Sense strand starting at position 3339 of SEQ ID NO: 317835
uugaaagguggucaaguaa

SEQ ID NO: 516028 - RNA, 19 nt, Artificial Sequence
  Description of Artificial Sequence: Synthetic oligonucleotide
  Antisense strand to SEQ ID NO: 516027
uuacuugaccaccuuucaa

SEQ ID NO: 516029 - RNA, 19 nt, Artificial Sequence
  Description of Artificial Sequence: Synthetic oligonucleotide
  Sense strand starting at position 3346 of SEQ ID NO: 317835
guggucaaguaauuaguaa

SEQ ID NO: 516030 - RNA, 19 nt, Artificial Sequence
  Description of Artificial Sequence: Synthetic oligonucleotide
  Antisense strand to SEQ ID NO: 516029
uuacuaauuacuugaccac

SEQ ID NO: 516031 - RNA, 19 nt, Artificial Sequence
  Description of Artificial Sequence: Synthetic oligonucleotide
  Sense strand starting at position 3366 of SEQ ID NO: 317835
aggguucaucucggaagac

SEQ ID NO: 516032 - RNA, 19 nt, Artificial Sequence
  Description of Artificial Sequence: Synthetic oligonucleotide
  Antisense strand to SEQ ID NO: 516031
gucuuccgagaugaacccu

SEQ ID NO: 516033 - RNA, 19 nt, Artificial Sequence
  Description of Artificial Sequence: Synthetic oligonucleotide
  Sense strand starting at position 3412 of SEQ ID NO: 317835
cccugaaguuuagcaugaa

SEQ ID NO: 516034 - RNA, 19 nt, Artificial Sequence
  Description of Artificial Sequence: Synthetic oligonucleotide
  Antisense strand to SEQ ID NO: 516033
uucaugcuaaacuucaggg

SEQ ID NO: 516035 - RNA, 19 nt, Artificial Sequence
  Description of Artificial Sequence: Synthetic oligonucleotide
  Sense strand starting at position 3415 of SEQ ID NO: 317835
ugaaguuuagcaugaaguu

SEQ ID NO: 516036 - RNA, 19 nt, Artificial Sequence
  Description of Artificial Sequence: Synthetic oligonucleotide
  Antisense strand to SEQ ID NO: 516035
aacuucaugcuaaacuuca

SEQ ID NO: 516037 - RNA, 19 nt, Artificial Sequence
  Description of Artificial Sequence: Synthetic oligonucleotide
  Sense strand starting at position 3416 of SEQ ID NO: 317835
gaaguuuagcaugaaguuu

SEQ ID NO: 516038 - RNA, 19 nt, Artificial Sequence
  Description of Artificial Sequence: Synthetic oligonucleotide
  Antisense strand to SEQ ID NO: 516037
aaacuucaugcuaaacuuc

SEQ ID NO: 516039 - RNA, 19 nt, Artificial Sequence
  Description of Artificial Sequence: Synthetic oligonucleotide
  Sense strand starting at position 3469 of SEQ ID NO: 317835
ccaaaucagcacuguuaga

SEQ ID NO: 516040 - RNA, 19 nt, Artificial Sequence
  Description of Artificial Sequence: Synthetic oligonucleotide
  Antisense strand to SEQ ID NO: 516039
ucuaacagugcugauuugg

SEQ ID NO: 516041 - RNA, 19 nt, Artificial Sequence
  Description of Artificial Sequence: Synthetic oligonucleotide
  Sense strand starting at position 3495 of SEQ ID NO: 317835
cuccuuuggugacucuaaa

SEQ ID NO: 516042 - RNA, 19 nt, Artificial Sequence
  Description of Artificial Sequence: Synthetic oligonucleotide
  Antisense strand to SEQ ID NO: 516041
uuuagagucaccaaaggag

SEQ ID NO: 516043 - RNA, 19 nt, Artificial Sequence
  Description of Artificial Sequence: Synthetic oligonucleotide
  Sense strand starting at position 99 of SEQ ID NO: 317836
aguagugcagcucugcaau

SEQ ID NO: 516044 - RNA, 19 nt, Artificial Sequence
  Description of Artificial Sequence: Synthetic oligonucleotide
  Antisense strand to SEQ ID NO: 516043
auugcagagcugcacuacu

SEQ ID NO: 516045 - RNA, 19 nt, Artificial Sequence
  Description of Artificial Sequence: Synthetic oligonucleotide
  Sense strand starting at position 591 of SEQ ID NO: 317836
uuuagauuauugcuggaaa

SEQ ID NO: 516046 - RNA, 19 nt, Artificial Sequence
  Description of Artificial Sequence: Synthetic oligonucleotide
  Antisense strand to SEQ ID NO: 516045
uuuccagcaauaaucuaaa

SEQ ID NO: 516047 - RNA, 19 nt, Artificial Sequence
  Description of Artificial Sequence: Synthetic oligonucleotide
  Sense strand starting at position 610 of SEQ ID NO: 317836
auagcugggcuuuaaacua

SEQ ID NO: 516048 - RNA, 19 nt, Artificial Sequence
  Description of Artificial Sequence: Synthetic oligonucleotide
  Antisense strand to SEQ ID NO: 516047
uaguuuaaagcccagcuau

SEQ ID NO: 516049 - RNA, 19 nt, Artificial Sequence
  Description of Artificial Sequence: Synthetic oligonucleotide
  Sense strand starting at position 636 of SEQ ID NO: 317836
gucuccauuccaugaagag

SEQ ID NO: 516050 - RNA, 19 nt, Artificial Sequence
  Description of Artificial Sequence: Synthetic oligonucleotide
  Antisense strand to SEQ ID NO: 516049
cucuucauggaauggagac

SEQ ID NO: 516051 - RNA, 19 nt, Artificial Sequence
  Description of Artificial Sequence: Synthetic oligonucleotide
  Sense strand starting at position 700 of SEQ ID NO: 317836
aguuaaccauuugacagaa

SEQ ID NO: 516052 - RNA, 19 nt, Artificial Sequence
  Description of Artificial Sequence: Synthetic oligonucleotide
  Antisense strand to SEQ ID NO: 516051
uucugucaaaugguuaacu

SEQ ID NO: 516053 - RNA, 19 nt, Artificial Sequence
  Description of Artificial Sequence: Synthetic oligonucleotide
  Sense strand starting at position 710 of SEQ ID NO: 317836
uugacagaacaaugucuau

SEQ ID NO: 516054 - RNA, 19 nt, Artificial Sequence
  Description of Artificial Sequence: Synthetic oligonucleotide
  Antisense strand to SEQ ID NO: 516053
auagacauuguucugucaa

SEQ ID NO: 516055 - RNA, 19 nt, Artificial Sequence
  Description of Artificial Sequence: Synthetic oligonucleotide
  Sense strand starting at position 844 of SEQ ID NO: 317836
cuuaucaaaguguggcuaa

SEQ ID NO: 516056 - RNA, 19 nt, Artificial Sequence
  Description of Artificial Sequence: Synthetic oligonucleotide
  Antisense strand to SEQ ID NO: 516055
uuagccacacuuugauaag

SEQ ID NO: 516057 - RNA, 19 nt, Artificial Sequence
  Description of Artificial Sequence: Synthetic oligonucleotide
  Sense strand starting at position 851 of SEQ ID NO: 317836
aaguguggcuaagugauua

SEQ ID NO: 516058 - RNA, 19 nt, Artificial Sequence
  Description of Artificial Sequence: Synthetic oligonucleotide
  Antisense strand to SEQ ID NO: 516057
uaaucacuuagccacacuu

SEQ ID NO: 516059 - RNA, 19 nt, Artificial Sequence
  Description of Artificial Sequence: Synthetic oligonucleotide
  Sense strand starting at position 855 of SEQ ID NO: 317836
guggcuaagugauuaagau

SEQ ID NO: 516060 - RNA, 19 nt, Artificial Sequence
  Description of Artificial Sequence: Synthetic oligonucleotide
  Antisense strand to SEQ ID NO: 516059
aucuuaaucacuuagccac

SEQ ID NO: 516061 - RNA, 19 nt, Artificial Sequence
  Description of Artificial Sequence: Synthetic oligonucleotide
  Sense strand starting at position 856 of SEQ ID NO: 317836
uggcuaagugauuaagauu

SEQ ID NO: 516062 - RNA, 19 nt, Artificial Sequence
  Description of Artificial Sequence: Synthetic oligonucleotide
  Antisense strand to SEQ ID NO: 516061
aaucuuaaucacuuagcca

SEQ ID NO: 516063 - RNA, 19 nt, Artificial Sequence
  Description of Artificial Sequence: Synthetic oligonucleotide
  Sense strand starting at position 1065 of SEQ ID NO: 317836
ucacaucugcugcagagau

SEQ ID NO: 516064 - RNA, 19 nt, Artificial Sequence
  Description of Artificial Sequence: Synthetic oligonucleotide
  Antisense strand to SEQ ID NO: 516063
aucucugcagcagauguga

SEQ ID NO: 516065 - RNA, 19 nt, Artificial Sequence
  Description of Artificial Sequence: Synthetic oligonucleotide
  Sense strand starting at position 1202 of SEQ ID NO: 317836
agcauaauuugugaacuca

SEQ ID NO: 516066 - RNA, 19 nt, Artificial Sequence
  Description of Artificial Sequence: Synthetic oligonucleotide
  Antisense strand to SEQ ID NO: 516065
ugaguucacaaauuaugcu

SEQ ID NO: 516067 - RNA, 19 nt, Artificial Sequence
  Description of Artificial Sequence: Synthetic oligonucleotide
  Sense strand starting at position 1212 of SEQ ID NO: 317836
gugaacucaagcugagaaa

SEQ ID NO: 516068 - RNA, 19 nt, Artificial Sequence
  Description of Artificial Sequence: Synthetic oligonucleotide
  Antisense strand to SEQ ID NO: 516067
uuucucagcuugaguucac

SEQ ID NO: 516069 - RNA, 19 nt, Artificial Sequence
  Description of Artificial Sequence: Synthetic oligonucleotide
  Sense strand starting at position 1418 of SEQ ID NO: 317836
ucagaagugccgccguaaa

SEQ ID NO: 516070 - RNA, 19 nt, Artificial Sequence
  Description of Artificial Sequence: Synthetic oligonucleotide
  Antisense strand to SEQ ID NO: 516069
uuuacggcggcacuucuga

SEQ ID NO: 516071 - RNA, 19 nt, Artificial Sequence
  Description of Artificial Sequence: Synthetic oligonucleotide
  Sense strand starting at position 1457 of SEQ ID NO: 317836
ccgcguagggaucaaagau

SEQ ID NO: 516072 - RNA, 19 nt, Artificial Sequence
  Description of Artificial Sequence: Synthetic oligonucleotide
  Antisense strand to SEQ ID NO: 516071
aucuuugaucccuacgcgg

SEQ ID NO: 516073 - RNA, 19 nt, Artificial Sequence
  Description of Artificial Sequence: Synthetic oligonucleotide
  Sense strand starting at position 1496 of SEQ ID NO: 317836
aaugaaagccucgggaaga

SEQ ID NO: 516074 - RNA, 19 nt, Artificial Sequence
  Description of Artificial Sequence: Synthetic oligonucleotide
  Antisense strand to SEQ ID NO: 516073
ucuucccgaggcuuucauu

SEQ ID NO: 516075 - RNA, 19 nt, Artificial Sequence
  Description of Artificial Sequence: Synthetic oligonucleotide
  Sense strand starting at position 1534 of SEQ ID NO: 317836
aauggagcaguguaauaca

SEQ ID NO: 516076 - RNA, 19 nt, Artificial Sequence
  Description of Artificial Sequence: Synthetic oligonucleotide
  Antisense strand to SEQ ID NO: 516075
uguauuacacugcuccauu

SEQ ID NO: 516077 - RNA, 19 nt, Artificial Sequence
  Description of Artificial Sequence: Synthetic oligonucleotide
  Sense strand starting at position 1554 of SEQ ID NO: 317836
ugaaauaaguuggcaaacu

SEQ ID NO: 516078 - RNA, 19 nt, Artificial Sequence
  Description of Artificial Sequence: Synthetic oligonucleotide
  Antisense strand to SEQ ID NO: 516077
aguuugccaacuuauuuca

SEQ ID NO: 516079 - RNA, 19 nt, Artificial Sequence
  Description of Artificial Sequence: Synthetic oligonucleotide
  Sense strand starting at position 1577 of SEQ ID NO: 317836
uuuacucaguaauugagau

SEQ ID NO: 516080 - RNA, 19 nt, Artificial Sequence
  Description of Artificial Sequence: Synthetic oligonucleotide
  Antisense strand to SEQ ID NO: 516079
aucucaauuacugaguaaa

SEQ ID NO: 516081 - RNA, 19 nt, Artificial Sequence
  Description of Artificial Sequence: Synthetic oligonucleotide
  Sense strand starting at position 1594 of SEQ ID NO: 317836
augacugacuuacaggaaa

SEQ ID NO: 516082 - RNA, 19 nt, Artificial Sequence
  Description of Artificial Sequence: Synthetic oligonucleotide
  Antisense strand to SEQ ID NO: 516081
uuuccuguaagucagucau

SEQ ID NO: 516083 - RNA, 19 nt, Artificial Sequence
  Description of Artificial Sequence: Synthetic oligonucleotide
  Sense strand starting at position 1935 of SEQ ID NO: 317836
ccaagucgcgacuacaaga

SEQ ID NO: 516084 - RNA, 19 nt, Artificial Sequence
  Description of Artificial Sequence: Synthetic oligonucleotide
  Antisense strand to SEQ ID NO: 516083
ucuuguagucgcgacuugg

SEQ ID NO: 516085 - RNA, 19 nt, Artificial Sequence
  Description of Artificial Sequence: Synthetic oligonucleotide
  Sense strand starting at position 1973 of SEQ ID NO: 317836
gagaaagcucucgguaauu

SEQ ID NO: 516086 - RNA, 19 nt, Artificial Sequence
  Description of Artificial Sequence: Synthetic oligonucleotide
  Antisense strand to SEQ ID NO: 516085
aauuaccgagagcuuucuc

SEQ ID NO: 516087 - RNA, 19 nt, Artificial Sequence
  Description of Artificial Sequence: Synthetic oligonucleotide
  Sense strand starting at position 1975 of SEQ ID NO: 317836
gaaagcucucgguaauuau

SEQ ID NO: 516088 - RNA, 19 nt, Artificial Sequence
  Description of Artificial Sequence: Synthetic oligonucleotide
  Antisense strand to SEQ ID NO: 516087
auaauuaccgagagcuuuc

SEQ ID NO: 516089 - RNA, 19 nt, Artificial Sequence
  Description of Artificial Sequence: Synthetic oligonucleotide
  Sense strand starting at position 1978 of SEQ ID NO: 317836
agcucucgguaauuauaaa

SEQ ID NO: 516090 - RNA, 19 nt, Artificial Sequence
  Description of Artificial Sequence: Synthetic oligonucleotide
  Antisense strand to SEQ ID NO: 516089
uuuauaauuaccgagagcu

SEQ ID NO: 516091 - RNA, 19 nt, Artificial Sequence
  Description of Artificial Sequence: Synthetic oligonucleotide
  Sense strand starting at position 2043 of SEQ ID NO: 317836
uccguacguccucuaaagu

SEQ ID NO: 516092 - RNA, 19 nt, Artificial Sequence
  Description of Artificial Sequence: Synthetic oligonucleotide
  Antisense strand to SEQ ID NO: 516091
acuuuagaggacguacgga

SEQ ID NO: 516093 - RNA, 19 nt, Artificial Sequence
  Description of Artificial Sequence: Synthetic oligonucleotide
  Sense strand starting at position 2273 of SEQ ID NO: 317836
acauuuaugggacguguuu

SEQ ID NO: 516094 - RNA, 19 nt, Artificial Sequence
  Description of Artificial Sequence: Synthetic oligonucleotide
  Antisense strand to SEQ ID NO: 516093
aaacacgucccauaaaugu

SEQ ID NO: 516095 - RNA, 19 nt, Artificial Sequence
  Description of Artificial Sequence: Synthetic oligonucleotide
  Sense strand starting at position 2287 of SEQ ID NO: 317836
uguuuaacaaggugggaaa

SEQ ID NO: 516096 - RNA, 19 nt, Artificial Sequence
  Description of Artificial Sequence: Synthetic oligonucleotide
  Antisense strand to SEQ ID NO: 516095
uuucccaccuuguuaaaca

SEQ ID NO: 516097 - RNA, 19 nt, Artificial Sequence
  Description of Artificial Sequence: Synthetic oligonucleotide
  Sense strand starting at position 2522 of SEQ ID NO: 317836
ugauguugaucgccaaaua

SEQ ID NO: 516098 - RNA, 19 nt, Artificial Sequence
  Description of Artificial Sequence: Synthetic oligonucleotide
  Antisense strand to SEQ ID NO: 516097
uauuuggcgaucaacauca

SEQ ID NO: 516099 - RNA, 19 nt, Artificial Sequence
  Description of Artificial Sequence: Synthetic oligonucleotide
  Sense strand starting at position 2523 of SEQ ID NO: 317836
gauguugaucgccaaauag

SEQ ID NO: 516100 - RNA, 19 nt, Artificial Sequence
  Description of Artificial Sequence: Synthetic oligonucleotide
  Antisense strand to SEQ ID NO: 516099
cuauuuggcgaucaacauc

SEQ ID NO: 516101 - RNA, 19 nt, Artificial Sequence
  Description of Artificial Sequence: Synthetic oligonucleotide
  Sense strand starting at position 2583 of SEQ ID NO: 317836
auauuucccuccgacaaug

SEQ ID NO: 516102 - RNA, 19 nt, Artificial Sequence
  Description of Artificial Sequence: Synthetic oligonucleotide
  Antisense strand to SEQ ID NO: 516101
cauugucggagggaaauau

SEQ ID NO: 516103 - RNA, 19 nt, Artificial Sequence
  Description of Artificial Sequence: Synthetic oligonucleotide
  Sense strand starting at position 2809 of SEQ ID NO: 317836
cgcucagucagguuucuuu

SEQ ID NO: 516104 - RNA, 19 nt, Artificial Sequence
  Description of Artificial Sequence: Synthetic oligonucleotide
  Antisense strand to SEQ ID NO: 516103
aaagaaaccugacugagcg

SEQ ID NO: 516105 - RNA, 19 nt, Artificial Sequence
  Description of Artificial Sequence: Synthetic oligonucleotide
  Sense strand starting at position 3093 of SEQ ID NO: 317836
cgcagagcacucugggaaa

SEQ ID NO: 516106 - RNA, 19 nt, Artificial Sequence
  Description of Artificial Sequence: Synthetic oligonucleotide
  Antisense strand to SEQ ID NO: 516105
uuucccagagugcucugcg

SEQ ID NO: 516107 - RNA, 19 nt, Artificial Sequence
  Description of Artificial Sequence: Synthetic oligonucleotide
  Sense strand starting at position 3378 of SEQ ID NO: 317836
ggccuugauauugggagga

SEQ ID NO: 516108 - RNA, 19 nt, Artificial Sequence
  Description of Artificial Sequence: Synthetic oligonucleotide
  Antisense strand to SEQ ID NO: 516107
uccucccaauaucaaggcc

SEQ ID NO: 516109 - RNA, 19 nt, Artificial Sequence
  Description of Artificial Sequence: Synthetic oligonucleotide
  Sense strand starting at position 3382 of SEQ ID NO: 317836
uugauauugggaggaguca

SEQ ID NO: 516110 - RNA, 19 nt, Artificial Sequence
  Description of Artificial Sequence: Synthetic oligonucleotide
  Antisense strand to SEQ ID NO: 516109
ugacuccucccaauaucaa

SEQ ID NO: 516111 - RNA, 19 nt, Artificial Sequence
  Description of Artificial Sequence: Synthetic oligonucleotide
  Sense strand starting at position 3407 of SEQ ID NO: 317836
uguuucguggcagaugaaa

SEQ ID NO: 516112 - RNA, 19 nt, Artificial Sequence
  Description of Artificial Sequence: Synthetic oligonucleotide
  Antisense strand to SEQ ID NO: 516111
uuucaucugccacgaaaca

SEQ ID NO: 516113 - RNA, 19 nt, Artificial Sequence
  Description of Artificial Sequence: Synthetic oligonucleotide
  Sense strand starting at position 3435 of SEQ ID NO: 317836
cuccuuaggaguuggguau

SEQ ID NO: 516114 - RNA, 19 nt, Artificial Sequence
  Description of Artificial Sequence: Synthetic oligonucleotide
  Antisense strand to SEQ ID NO: 516113
auacccaacuccuaaggag

SEQ ID NO: 516115 - RNA, 19 nt, Artificial Sequence
  Description of Artificial Sequence: Synthetic oligonucleotide
  Sense strand starting at position 3529 of SEQ ID NO: 317836
cccaguuucuguuuggaaa

SEQ ID NO: 516116 - RNA, 19 nt, Artificial Sequence
  Description of Artificial Sequence: Synthetic oligonucleotide
  Antisense strand to SEQ ID NO: 516115
uuuccaaacagaaacuggg

SEQ ID NO: 516117 - RNA, 19 nt, Artificial Sequence
  Description of Artificial Sequence: Synthetic oligonucleotide
  Sense strand starting at position 3530 of SEQ ID NO: 317836
ccaguuucuguuuggaaag

SEQ ID NO: 516118 - RNA, 19 nt, Artificial Sequence
  Description of Artificial Sequence: Synthetic oligonucleotide
  Antisense strand to SEQ ID NO: 516117
cuuuccaaacagaaacugg

SEQ ID NO: 516119 - RNA, 19 nt, Artificial Sequence
  Description of Artificial Sequence: Synthetic oligonucleotide
  Sense strand starting at position 3791 of SEQ ID NO: 317836
ugguauguugcucauaaug

SEQ ID NO: 516120 - RNA, 19 nt, Artificial Sequence
  Description of Artificial Sequence: Synthetic oligonucleotide
  Antisense strand to SEQ ID NO: 516119
cauuaugagcaacauacca

SEQ ID NO: 516121 - RNA, 19 nt, Artificial Sequence
  Description of Artificial Sequence: Synthetic oligonucleotide
  Sense strand starting at position 3806 of SEQ ID NO: 317836
aaugaagauuaaggauaga

SEQ ID NO: 516122 - RNA, 19 nt, Artificial Sequence
  Description of Artificial Sequence: Synthetic oligonucleotide
  Antisense strand to SEQ ID NO: 516121
ucuauccuuaaucuucauu

SEQ ID NO: 516123 - RNA, 19 nt, Artificial Sequence
  Description of Artificial Sequence: Synthetic oligonucleotide
  Sense strand starting at position 58 of SEQ ID NO: 317837
uuccaauguccauaaaggu

SEQ ID NO: 516124 - RNA, 19 nt, Artificial Sequence
  Description of Artificial Sequence: Synthetic oligonucleotide
  Antisense strand to SEQ ID NO: 516123
accuuuauggacauuggaa

SEQ ID NO: 516125 - RNA, 19 nt, Artificial Sequence
  Description of Artificial Sequence: Synthetic oligonucleotide
  Sense strand starting at position 157 of SEQ ID NO: 317837
ggagcaaaguuuguaaaua

SEQ ID NO: 516126 - RNA, 19 nt, Artificial Sequence
  Description of Artificial Sequence: Synthetic oligonucleotide
  Antisense strand to SEQ ID NO: 516125
uauuuacaaacuuugcucc

SEQ ID NO: 516127 - RNA, 19 nt, Artificial Sequence
  Description of Artificial Sequence: Synthetic oligonucleotide
  Sense strand starting at position 334 of SEQ ID NO: 317837
cgggaaagccaauauucuu

SEQ ID NO: 516128 - RNA, 19 nt, Artificial Sequence
  Description of Artificial Sequence: Synthetic oligonucleotide
  Antisense strand to SEQ ID NO: 516127
aagaauauuggcuuucccg

SEQ ID NO: 516129 - RNA, 19 nt, Artificial Sequence
  Description of Artificial Sequence: Synthetic oligonucleotide
  Sense strand starting at position 457 of SEQ ID NO: 317837
ucauuugaaucggacuaag

SEQ ID NO: 516130 - RNA, 19 nt, Artificial Sequence
  Description of Artificial Sequence: Synthetic oligonucleotide
  Antisense strand to SEQ ID NO: 516129
cuuaguccgauucaaauga

SEQ ID NO: 516131 - RNA, 19 nt, Artificial Sequence
  Description of Artificial Sequence: Synthetic oligonucleotide
  Sense strand starting at position 467 of SEQ ID NO: 317837
cggacuaaguaauugcaaa

SEQ ID NO: 516132 - RNA, 19 nt, Artificial Sequence
  Description of Artificial Sequence: Synthetic oligonucleotide
  Antisense strand to SEQ ID NO: 516131
uuugcaauuacuuaguccg

SEQ ID NO: 516133 - RNA, 19 nt, Artificial Sequence
  Description of Artificial Sequence: Synthetic oligonucleotide
  Sense strand starting at position 886 of SEQ ID NO: 317837
gcaccaugagaguaaccau

SEQ ID NO: 516134 - RNA, 19 nt, Artificial Sequence
  Description of Artificial Sequence: Synthetic oligonucleotide
  Antisense strand to SEQ ID NO: 516133
augguuacucucauggugc

SEQ ID NO: 516135 - RNA, 19 nt, Artificial Sequence
  Description of Artificial Sequence: Synthetic oligonucleotide
  Sense strand starting at position 927 of SEQ ID NO: 317837
gacuaaugucuugguuaag

SEQ ID NO: 516136 - RNA, 19 nt, Artificial Sequence
  Description of Artificial Sequence: Synthetic oligonucleotide
  Antisense strand to SEQ ID NO: 516135
cuuaaccaagacauuaguc

SEQ ID NO: 516137 - RNA, 19 nt, Artificial Sequence
  Description of Artificial Sequence: Synthetic oligonucleotide
  Sense strand starting at position 1019 of SEQ ID NO: 317837
acgggaaguuuaucccuga

SEQ ID NO: 516138 - RNA, 19 nt, Artificial Sequence
  Description of Artificial Sequence: Synthetic oligonucleotide
  Antisense strand to SEQ ID NO: 516137
ucagggauaaacuucccgu

SEQ ID NO: 516139 - RNA, 19 nt, Artificial Sequence
  Description of Artificial Sequence: Synthetic oligonucleotide
  Sense strand starting at position 1024 of SEQ ID NO: 317837
aaguuuaucccugagcuga

SEQ ID NO: 516140 - RNA, 19 nt, Artificial Sequence
  Description of Artificial Sequence: Synthetic oligonucleotide
  Antisense strand to SEQ ID NO: 516139
ucagcucagggauaaacuu

SEQ ID NO: 516141 - RNA, 19 nt, Artificial Sequence
  Description of Artificial Sequence: Synthetic oligonucleotide
  Sense strand starting at position 1108 of SEQ ID NO: 317837
aaagguaauugucuggaca

SEQ ID NO: 516142 - RNA, 19 nt, Artificial Sequence
  Description of Artificial Sequence: Synthetic oligonucleotide
  Antisense strand to SEQ ID NO: 516141
uguccagacaauuaccuuu

SEQ ID NO: 516143 - RNA, 19 nt, Artificial Sequence
  Description of Artificial Sequence: Synthetic oligonucleotide
  Sense strand starting at position 1109 of SEQ ID NO: 317837
aagguaauugucuggacac

SEQ ID NO: 516144 - RNA, 19 nt, Artificial Sequence
  Description of Artificial Sequence: Synthetic oligonucleotide
  Antisense strand to SEQ ID NO: 516143
guguccagacaauuaccuu

SEQ ID NO: 516145 - RNA, 19 nt, Artificial Sequence
  Description of Artificial Sequence: Synthetic oligonucleotide
  Sense strand starting at position 1111 of SEQ ID NO: 317837
gguaauugucuggacacag

SEQ ID NO: 516146 - RNA, 19 nt, Artificial Sequence
  Description of Artificial Sequence: Synthetic oligonucleotide
  Antisense strand to SEQ ID NO: 516145
cuguguccagacaauuacc

SEQ ID NO: 516147 - RNA, 19 nt, Artificial Sequence
  Description of Artificial Sequence: Synthetic oligonucleotide
  Sense strand starting at position 2007 of SEQ ID NO: 317837
cgaagauugcaccaaccuu

SEQ ID NO: 516148 - RNA, 19 nt, Artificial Sequence
  Description of Artificial Sequence: Synthetic oligonucleotide
  Antisense strand to SEQ ID NO: 516147
aagguuggugcaaucuucg

SEQ ID NO: 516149 - RNA, 19 nt, Artificial Sequence
  Description of Artificial Sequence: Synthetic oligonucleotide
  Sense strand starting at position 2164 of SEQ ID NO: 317837
aguguuucucuggaugaag

SEQ ID NO: 516150 - RNA, 19 nt, Artificial Sequence
  Description of Artificial Sequence: Synthetic oligonucleotide
  Antisense strand to SEQ ID NO: 516149
cuucauccagagaaacacu

SEQ ID NO: 516151 - RNA, 19 nt, Artificial Sequence
  Description of Artificial Sequence: Synthetic oligonucleotide
  Sense strand starting at position 2188 of SEQ ID NO: 317837
ggcggagaagcauagcaaa

SEQ ID NO: 516152 - RNA, 19 nt, Artificial Sequence
  Description of Artificial Sequence: Synthetic oligonucleotide
  Antisense strand to SEQ ID NO: 516151
uuugcuaugcuucuccgcc

SEQ ID NO: 516153 - RNA, 19 nt, Artificial Sequence
  Description of Artificial Sequence: Synthetic oligonucleotide
  Sense strand starting at position 2204 of SEQ ID NO: 317837
aaagucuacgcagagaacu

SEQ ID NO: 516154 - RNA, 19 nt, Artificial Sequence
  Description of Artificial Sequence: Synthetic oligonucleotide
  Antisense strand to SEQ ID NO: 516153
aguucucugcguagacuuu

SEQ ID NO: 516155 - RNA, 19 nt, Artificial Sequence
  Description of Artificial Sequence: Synthetic oligonucleotide
  Sense strand starting at position 2252 of SEQ ID NO: 317837
gcuacuaagaacugaguga

SEQ ID NO: 516156 - RNA, 19 nt, Artificial Sequence
  Description of Artificial Sequence: Synthetic oligonucleotide
  Antisense strand to SEQ ID NO: 516155
ucacucaguucuuaguagc

SEQ ID NO: 516157 - RNA, 19 nt, Artificial Sequence
  Description of Artificial Sequence: Synthetic oligonucleotide
  Sense strand starting at position 2256 of SEQ ID NO: 317837
cuaagaacugagugagcaa

SEQ ID NO: 516158 - RNA, 19 nt, Artificial Sequence
  Description of Artificial Sequence: Synthetic oligonucleotide
  Antisense strand to SEQ ID NO: 516157
uugcucacucaguucuuag

SEQ ID NO: 516159 - RNA, 19 nt, Artificial Sequence
  Description of Artificial Sequence: Synthetic oligonucleotide
  Sense strand starting at position 2276 of SEQ ID NO: 317837
gagccuuaaggguaccauu

SEQ ID NO: 516160 - RNA, 19 nt, Artificial Sequence
  Description of Artificial Sequence: Synthetic oligonucleotide
  Antisense strand to SEQ ID NO: 516159
aaugguacccuuaaggcuc

SEQ ID NO: 516161 - RNA, 19 nt, Artificial Sequence
  Description of Artificial Sequence: Synthetic oligonucleotide
  Sense strand starting at position 2379 of SEQ ID NO: 317837
ugacaucacuggguugaca

SEQ ID NO: 516162 - RNA, 19 nt, Artificial Sequence
  Description of Artificial Sequence: Synthetic oligonucleotide
  Antisense strand to SEQ ID NO: 516161
ugucaacccagugauguca

SEQ ID NO: 516163 - RNA, 19 nt, Artificial Sequence
  Description of Artificial Sequence: Synthetic oligonucleotide
  Sense strand starting at position 2381 of SEQ ID NO: 317837
acaucacuggguugacauu

SEQ ID NO: 516164 - RNA, 19 nt, Artificial Sequence
  Description of Artificial Sequence: Synthetic oligonucleotide
  Antisense strand to SEQ ID NO: 516163
aaugucaacccagugaugu

SEQ ID NO: 516165 - RNA, 19 nt, Artificial Sequence
  Description of Artificial Sequence: Synthetic oligonucleotide
  Sense strand starting at position 2437 of SEQ ID NO: 317837
gcuccaacugcuuagaaau

SEQ ID NO: 516166 - RNA, 19 nt, Artificial Sequence
  Description of Artificial Sequence: Synthetic oligonucleotide
  Antisense strand to SEQ ID NO: 516165
auuucuaagcaguuggagc

SEQ ID NO: 516167 - RNA, 19 nt, Artificial Sequence
  Description of Artificial Sequence: Synthetic oligonucleotide
  Sense strand starting at position 2501 of SEQ ID NO: 317837
gagguaauccucugaacua

SEQ ID NO: 516168 - RNA, 19 nt, Artificial Sequence
  Description of Artificial Sequence: Synthetic oligonucleotide
  Antisense strand to SEQ ID NO: 516167
uaguucagaggauuaccuc

SEQ ID NO: 516169 - RNA, 19 nt, Artificial Sequence
  Description of Artificial Sequence: Synthetic oligonucleotide
  Sense strand starting at position 2724 of SEQ ID NO: 317837
gguagacuucuauggaaau

SEQ ID NO: 516170 - RNA, 19 nt, Artificial Sequence
  Description of Artificial Sequence: Synthetic oligonucleotide
  Antisense strand to SEQ ID NO: 516169
auuuccauagaagucuacc

SEQ ID NO: 516171 - RNA, 19 nt, Artificial Sequence
  Description of Artificial Sequence: Synthetic oligonucleotide
  Sense strand starting at position 2750 of SEQ ID NO: 317837
ccaugaaggcauggaaacu

SEQ ID NO: 516172 - RNA, 19 nt, Artificial Sequence
  Description of Artificial Sequence: Synthetic oligonucleotide
  Antisense strand to SEQ ID NO: 516171
aguuuccaugccuucaugg

SEQ ID NO: 516173 - RNA, 19 nt, Artificial Sequence
  Description of Artificial Sequence: Synthetic oligonucleotide
  Sense strand starting at position 2917 of SEQ ID NO: 317837
caagaaacuugagucuugu

SEQ ID NO: 516174 - RNA, 19 nt, Artificial Sequence
  Description of Artificial Sequence: Synthetic oligonucleotide
  Antisense strand to SEQ ID NO: 516173
acaagacucaaguuucuug

SEQ ID NO: 516175 - RNA, 19 nt, Artificial Sequence
  Description of Artificial Sequence: Synthetic oligonucleotide
  Sense strand starting at position 3018 of SEQ ID NO: 317837
cuagauuaacgguauagcu

SEQ ID NO: 516176 - RNA, 19 nt, Artificial Sequence
  Description of Artificial Sequence: Synthetic oligonucleotide
  Antisense strand to SEQ ID NO: 516175
agcuauaccguuaaucuag

SEQ ID NO: 516177 - RNA, 19 nt, Artificial Sequence
  Description of Artificial Sequence: Synthetic oligonucleotide
  Sense strand starting at position 3020 of SEQ ID NO: 317837
agauuaacgguauagcuaa

SEQ ID NO: 516178 - RNA, 19 nt, Artificial Sequence
  Description of Artificial Sequence: Synthetic oligonucleotide
  Antisense strand to SEQ ID NO: 516177
uuagcuauaccguuaaucu

SEQ ID NO: 516179 - RNA, 19 nt, Artificial Sequence
  Description of Artificial Sequence: Synthetic oligonucleotide
  Sense strand starting at position 3049 of SEQ ID NO: 317837
uuggaaggguaguuaguau

SEQ ID NO: 516180 - RNA, 19 nt, Artificial Sequence
  Description of Artificial Sequence: Synthetic oligonucleotide
  Antisense strand to SEQ ID NO: 516179
auacuaacuacccuuccaa

SEQ ID NO: 516181 - RNA, 19 nt, Artificial Sequence
  Description of Artificial Sequence: Synthetic oligonucleotide
  Sense strand starting at position 3057 of SEQ ID NO: 317837
guaguuaguauagaaaucu

SEQ ID NO: 516182 - RNA, 19 nt, Artificial Sequence
  Description of Artificial Sequence: Synthetic oligonucleotide
  Antisense strand to SEQ ID NO: 516181
agauuucuauacuaacuac

SEQ ID NO: 516183 - RNA, 19 nt, Artificial Sequence
  Description of Artificial Sequence: Synthetic oligonucleotide
  Sense strand starting at position 3175 of SEQ ID NO: 317837
gccuuagaaggguagugau

SEQ ID NO: 516184 - RNA, 19 nt, Artificial Sequence
  Description of Artificial Sequence: Synthetic oligonucleotide
  Antisense strand to SEQ ID NO: 516183
aucacuacccuucuaaggc

SEQ ID NO: 516185 - RNA, 19 nt, Artificial Sequence
  Description of Artificial Sequence: Synthetic oligonucleotide
  Sense strand starting at position 3221 of SEQ ID NO: 317837
caucauucuguaggagacu

SEQ ID NO: 516186 - RNA, 19 nt, Artificial Sequence
  Description of Artificial Sequence: Synthetic oligonucleotide
  Antisense strand to SEQ ID NO: 516185
agucuccuacagaaugaug

SEQ ID NO: 516187 - RNA, 19 nt, Artificial Sequence
  Description of Artificial Sequence: Synthetic oligonucleotide
  Sense strand starting at position 3267 of SEQ ID NO: 317837
cagaauugugaaugacuug

SEQ ID NO: 516188 - RNA, 19 nt, Artificial Sequence
  Description of Artificial Sequence: Synthetic oligonucleotide
  Antisense strand to SEQ ID NO: 516187
caagucauucacaauucug

SEQ ID NO: 516189 - RNA, 19 nt, Artificial Sequence
  Description of Artificial Sequence: Synthetic oligonucleotide
  Sense strand starting at position 3276 of SEQ ID NO: 317837
gaaugacuugccuagggca

SEQ ID NO: 516190 - RNA, 19 nt, Artificial Sequence
  Description of Artificial Sequence: Synthetic oligonucleotide
  Antisense strand to SEQ ID NO: 516189
ugcccuaggcaagucauuc

SEQ ID NO: 516191 - RNA, 19 nt, Artificial Sequence
  Description of Artificial Sequence: Synthetic oligonucleotide
  Sense strand starting at position 3377 of SEQ ID NO: 317837
aagagaagugucugcaaca

SEQ ID NO: 516192 - RNA, 19 nt, Artificial Sequence
  Description of Artificial Sequence: Synthetic oligonucleotide
  Antisense strand to SEQ ID NO: 516191
uguugcagacacuucucuu

SEQ ID NO: 516193 - RNA, 19 nt, Artificial Sequence
  Description of Artificial Sequence: Synthetic oligonucleotide
  Sense strand starting at position 3505 of SEQ ID NO: 317837
gguugagaaagucaagugu

SEQ ID NO: 516194 - RNA, 19 nt, Artificial Sequence
  Description of Artificial Sequence: Synthetic oligonucleotide
  Antisense strand to SEQ ID NO: 516193
acacuugacuuucucaacc

SEQ ID NO: 516195 - RNA, 19 nt, Artificial Sequence
  Description of Artificial Sequence: Synthetic oligonucleotide
  Sense strand starting at position 3674 of SEQ ID NO: 317837
auuagaaacguaugggaau

SEQ ID NO: 516196 - RNA, 19 nt, Artificial Sequence
  Description of Artificial Sequence: Synthetic oligonucleotide
  Antisense strand to SEQ ID NO: 516195
auucccauacguuucuaau

SEQ ID NO: 516197 - RNA, 19 nt, Artificial Sequence
  Description of Artificial Sequence: Synthetic oligonucleotide
  Sense strand starting at position 3687 of SEQ ID NO: 317837
gggaauaaauguuuacauu

SEQ ID NO: 516198 - RNA, 19 nt, Artificial Sequence
  Description of Artificial Sequence: Synthetic oligonucleotide
  Antisense strand to SEQ ID NO: 516197
aauguaaacauuuauuccc

SEQ ID NO: 516199 - RNA, 19 nt, Artificial Sequence
  Description of Artificial Sequence: Synthetic oligonucleotide
  Sense strand starting at position 3831 of SEQ ID NO: 317837
aggaucucccaguagucua

SEQ ID NO: 516200 - RNA, 19 nt, Artificial Sequence
  Description of Artificial Sequence: Synthetic oligonucleotide
  Antisense strand to SEQ ID NO: 516199
uagacuacugggagauccu

SEQ ID NO: 516201 - RNA, 19 nt, Artificial Sequence
  Description of Artificial Sequence: Synthetic oligonucleotide
  Sense strand starting at position 3909 of SEQ ID NO: 317837
gcaaguaaccuagguagga

SEQ ID NO: 516202 - RNA, 19 nt, Artificial Sequence
  Description of Artificial Sequence: Synthetic oligonucleotide
  Antisense strand to SEQ ID NO: 516201
uccuaccuagguuacuugc

SEQ ID NO: 516203 - RNA, 19 nt, Artificial Sequence
  Description of Artificial Sequence: Synthetic oligonucleotide
  Sense strand starting at position 200 of SEQ ID NO: 317838
cgugaagcccugagugguu

SEQ ID NO: 516204 - RNA, 19 nt, Artificial Sequence
  Description of Artificial Sequence: Synthetic oligonucleotide
  Antisense strand to SEQ ID NO: 516203
aaccacucagggcuucacg

SEQ ID NO: 516205 - RNA, 19 nt, Artificial Sequence
  Description of Artificial Sequence: Synthetic oligonucleotide
  Sense strand starting at position 213 of SEQ ID NO: 317838
gugguuaaaugacuuaucu

SEQ ID NO: 516206 - RNA, 19 nt, Artificial Sequence
  Description of Artificial Sequence: Synthetic oligonucleotide
  Antisense strand to SEQ ID NO: 516205
agauaagucauuuaaccac

SEQ ID NO: 516207 - RNA, 19 nt, Artificial Sequence
  Description of Artificial Sequence: Synthetic oligonucleotide
  Sense strand starting at position 226 of SEQ ID NO: 317838
uuaucuguuccauaaggca

SEQ ID NO: 516208 - RNA, 19 nt, Artificial Sequence
  Description of Artificial Sequence: Synthetic oligonucleotide
  Antisense strand to SEQ ID NO: 516207
ugccuuauggaacagauaa

SEQ ID NO: 516209 - RNA, 19 nt, Artificial Sequence
  Description of Artificial Sequence: Synthetic oligonucleotide
  Sense strand starting at position 278 of SEQ ID NO: 317838
ucuaaucaugccugguaca

SEQ ID NO: 516210 - RNA, 19 nt, Artificial Sequence
  Description of Artificial Sequence: Synthetic oligonucleotide
  Antisense strand to SEQ ID NO: 516209
uguaccaggcaugauuaga

SEQ ID NO: 516211 - RNA, 19 nt, Artificial Sequence
  Description of Artificial Sequence: Synthetic oligonucleotide
  Sense strand starting at position 279 of SEQ ID NO: 317838
cuaaucaugccugguacau

SEQ ID NO: 516212 - RNA, 19 nt, Artificial Sequence
  Description of Artificial Sequence: Synthetic oligonucleotide
  Antisense strand to SEQ ID NO: 516211
auguaccaggcaugauuag

SEQ ID NO: 516213 - RNA, 19 nt, Artificial Sequence
  Description of Artificial Sequence: Synthetic oligonucleotide
  Sense strand starting at position 283 of SEQ ID NO: 317838
ucaugccugguacaugaua

SEQ ID NO: 516214 - RNA, 19 nt, Artificial Sequence
  Description of Artificial Sequence: Synthetic oligonucleotide
  Antisense strand to SEQ ID NO: 516213
uaucauguaccaggcauga

SEQ ID NO: 516215 - RNA, 19 nt, Artificial Sequence
  Description of Artificial Sequence: Synthetic oligonucleotide
  Sense strand starting at position 307 of SEQ ID NO: 317838
guaauaaguacuggaugga

SEQ ID NO: 516216 - RNA, 19 nt, Artificial Sequence
  Description of Artificial Sequence: Synthetic oligonucleotide
  Antisense strand to SEQ ID NO: 516215
uccauccaguacuuauuac

SEQ ID NO: 516217 - RNA, 19 nt, Artificial Sequence
  Description of Artificial Sequence: Synthetic oligonucleotide
  Sense strand starting at position 491 of SEQ ID NO: 317838
uaaauuugagucugccagu

SEQ ID NO: 516218 - RNA, 19 nt, Artificial Sequence
  Description of Artificial Sequence: Synthetic oligonucleotide
  Antisense strand to SEQ ID NO: 516217
acuggcagacucaaauuua

SEQ ID NO: 516219 - RNA, 19 nt, Artificial Sequence
  Description of Artificial Sequence: Synthetic oligonucleotide
  Sense strand starting at position 601 of SEQ ID NO: 317838
uaguaagaugaaugaguca

SEQ ID NO: 516220 - RNA, 19 nt, Artificial Sequence
  Description of Artificial Sequence: Synthetic oligonucleotide
  Antisense strand to SEQ ID NO: 516219
ugacucauucaucuuacua

SEQ ID NO: 516221 - RNA, 19 nt, Artificial Sequence
  Description of Artificial Sequence: Synthetic oligonucleotide
  Sense strand starting at position 871 of SEQ ID NO: 317838
acuacuguacuggaaguua

SEQ ID NO: 516222 - RNA, 19 nt, Artificial Sequence
  Description of Artificial Sequence: Synthetic oligonucleotide
  Antisense strand to SEQ ID NO: 516221
uaacuuccaguacaguagu

SEQ ID NO: 516223 - RNA, 19 nt, Artificial Sequence
  Description of Artificial Sequence: Synthetic oligonucleotide
  Sense strand starting at position 963 of SEQ ID NO: 317838
aguuccaauugccuugaau

SEQ ID NO: 516224 - RNA, 19 nt, Artificial Sequence
  Description of Artificial Sequence: Synthetic oligonucleotide
  Antisense strand to SEQ ID NO: 516223
auucaaggcaauuggaacu

SEQ ID NO: 516225 - RNA, 19 nt, Artificial Sequence
  Description of Artificial Sequence: Synthetic oligonucleotide
  Sense strand starting at position 1344 of SEQ ID NO: 317838
ucucauaaucuggauaguc

SEQ ID NO: 516226 - RNA, 19 nt, Artificial Sequence
  Description of Artificial Sequence: Synthetic oligonucleotide
  Antisense strand to SEQ ID NO: 516225
gacuauccagauuaugaga

SEQ ID NO: 516227 - RNA, 19 nt, Artificial Sequence
  Description of Artificial Sequence: Synthetic oligonucleotide
  Sense strand starting at position 1361 of SEQ ID NO: 317838
ucaaucucuggauggcuaa

SEQ ID NO: 516228 - RNA, 19 nt, Artificial Sequence
  Description of Artificial Sequence: Synthetic oligonucleotide
  Antisense strand to SEQ ID NO: 516227
uuagccauccagagauuga

SEQ ID NO: 516229 - RNA, 19 nt, Artificial Sequence
  Description of Artificial Sequence: Synthetic oligonucleotide
  Sense strand starting at position 1387 of SEQ ID NO: 317838
acuccuauacuagggaauu

SEQ ID NO: 516230 - RNA, 19 nt, Artificial Sequence
  Description of Artificial Sequence: Synthetic oligonucleotide
  Antisense strand to SEQ ID NO: 516229
aauucccuaguauaggagu

SEQ ID NO: 516231 - RNA, 19 nt, Artificial Sequence
  Description of Artificial Sequence: Synthetic oligonucleotide
  Sense strand starting at position 1569 of SEQ ID NO: 317838
agucuuaccuaaucguaau

SEQ ID NO: 516232 - RNA, 19 nt, Artificial Sequence
  Description of Artificial Sequence: Synthetic oligonucleotide
  Antisense strand to SEQ ID NO: 516231
auuacgauuagguaagacu

SEQ ID NO: 516233 - RNA, 19 nt, Artificial Sequence
  Description of Artificial Sequence: Synthetic oligonucleotide
  Sense strand starting at position 2045 of SEQ ID NO: 317838
aauauaugucugggaaauu

SEQ ID NO: 516234 - RNA, 19 nt, Artificial Sequence
  Description of Artificial Sequence: Synthetic oligonucleotide
  Antisense strand to SEQ ID NO: 516233
aauuucccagacauauauu

SEQ ID NO: 516235 - RNA, 19 nt, Artificial Sequence
  Description of Artificial Sequence: Synthetic oligonucleotide
  Sense strand starting at position 2102 of SEQ ID NO: 317838
ucuauugaugcccauugaa

SEQ ID NO: 516236 - RNA, 19 nt, Artificial Sequence
  Description of Artificial Sequence: Synthetic oligonucleotide
  Antisense strand to SEQ ID NO: 516235
uucaaugggcaucaauaga

SEQ ID NO: 516237 - RNA, 19 nt, Artificial Sequence
  Description of Artificial Sequence: Synthetic oligonucleotide
  Sense strand starting at position 2105 of SEQ ID NO: 317838
auugaugcccauugaaauc

SEQ ID NO: 516238 - RNA, 19 nt, Artificial Sequence
  Description of Artificial Sequence: Synthetic oligonucleotide
  Antisense strand to SEQ ID NO: 516237
gauuucaaugggcaucaau

SEQ ID NO: 516239 - RNA, 19 nt, Artificial Sequence
  Description of Artificial Sequence: Synthetic oligonucleotide
  Sense strand starting at position 2585 of SEQ ID NO: 317838
acauuuaacgugggccuua

SEQ ID NO: 516240 - RNA, 19 nt, Artificial Sequence
  Description of Artificial Sequence: Synthetic oligonucleotide
  Antisense strand to SEQ ID NO: 516239
uaaggcccacguuaaaugu

SEQ ID NO: 516241 - RNA, 19 nt, Artificial Sequence
  Description of Artificial Sequence: Synthetic oligonucleotide
  Sense strand starting at position 2646 of SEQ ID NO: 317838
gcaucaaccuuaucagaug

SEQ ID NO: 516242 - RNA, 19 nt, Artificial Sequence
  Description of Artificial Sequence: Synthetic oligonucleotide
  Antisense strand to SEQ ID NO: 516241
caucugauaagguugaugc

SEQ ID NO: 516243 - RNA, 19 nt, Artificial Sequence
  Description of Artificial Sequence: Synthetic oligonucleotide
  Sense strand starting at position 2663 of SEQ ID NO: 317838
ugcagaaauuagguauuaa

SEQ ID NO: 516244 - RNA, 19 nt, Artificial Sequence
  Description of Artificial Sequence: Synthetic oligonucleotide
  Antisense strand to SEQ ID NO: 516243
uuaauaccuaauuucugca

SEQ ID NO: 516245 - RNA, 19 nt, Artificial Sequence
  Description of Artificial Sequence: Synthetic oligonucleotide
  Sense strand starting at position 2763 of SEQ ID NO: 317838
ugggaauugcagugaucaa

SEQ ID NO: 516246 - RNA, 19 nt, Artificial Sequence
  Description of Artificial Sequence: Synthetic oligonucleotide
  Antisense strand to SEQ ID NO: 516245
uugaucacugcaauuccca

SEQ ID NO: 516247 - RNA, 19 nt, Artificial Sequence
  Description of Artificial Sequence: Synthetic oligonucleotide
  Sense strand starting at position 2767 of SEQ ID NO: 317838
aauugcagugaucaaaugu

SEQ ID NO: 516248 - RNA, 19 nt, Artificial Sequence
  Description of Artificial Sequence: Synthetic oligonucleotide
  Antisense strand to SEQ ID NO: 516247
acauuugaucacugcaauu

SEQ ID NO: 516249 - RNA, 19 nt, Artificial Sequence
  Description of Artificial Sequence: Synthetic oligonucleotide
  Sense strand starting at position 2786 of SEQ ID NO: 317838
accuuaauucugugguaau

SEQ ID NO: 516250 - RNA, 19 nt, Artificial Sequence
  Description of Artificial Sequence: Synthetic oligonucleotide
  Antisense strand to SEQ ID NO: 516249
auuaccacagaauuaaggu

SEQ ID NO: 516251 - RNA, 19 nt, Artificial Sequence
  Description of Artificial Sequence: Synthetic oligonucleotide
  Sense strand starting at position 2839 of SEQ ID NO: 317838
gaacaaauugagugggcua

SEQ ID NO: 516252 - RNA, 19 nt, Artificial Sequence
  Description of Artificial Sequence: Synthetic oligonucleotide
  Antisense strand to SEQ ID NO: 516251
uagcccacucaauuuguuc

SEQ ID NO: 516253 - RNA, 19 nt, Artificial Sequence
  Description of Artificial Sequence: Synthetic oligonucleotide
  Sense strand starting at position 2842 of SEQ ID NO: 317838
caaauugagugggcuauca

SEQ ID NO: 516254 - RNA, 19 nt, Artificial Sequence
  Description of Artificial Sequence: Synthetic oligonucleotide
  Antisense strand to SEQ ID NO: 516253
ugauagcccacucaauuug

SEQ ID NO: 516255 - RNA, 19 nt, Artificial Sequence
  Description of Artificial Sequence: Synthetic oligonucleotide
  Sense strand starting at position 2844 of SEQ ID NO: 317838
aauugagugggcuaucauu

SEQ ID NO: 516256 - RNA, 19 nt, Artificial Sequence
  Description of Artificial Sequence: Synthetic oligonucleotide
  Antisense strand to SEQ ID NO: 516255
aaugauagcccacucaauu

SEQ ID NO: 516257 - RNA, 19 nt, Artificial Sequence
  Description of Artificial Sequence: Synthetic oligonucleotide
  Sense strand starting at position 2983 of SEQ ID NO: 317838
gguugaaacggacaguauu

SEQ ID NO: 516258 - RNA, 19 nt, Artificial Sequence
  Description of Artificial Sequence: Synthetic oligonucleotide
  Antisense strand to SEQ ID NO: 516257
aauacuguccguuucaacc

SEQ ID NO: 516259 - RNA, 19 nt, Artificial Sequence
  Description of Artificial Sequence: Synthetic oligonucleotide
  Sense strand starting at position 3094 of SEQ ID NO: 317838
ccaagacaguugguaaaga

SEQ ID NO: 516260 - RNA, 19 nt, Artificial Sequence
  Description of Artificial Sequence: Synthetic oligonucleotide
  Antisense strand to SEQ ID NO: 516259
ucuuuaccaacugucuugg

SEQ ID NO: 516261 - RNA, 19 nt, Artificial Sequence
  Description of Artificial Sequence: Synthetic oligonucleotide
  Sense strand starting at position 3113 of SEQ ID NO: 317838
aaggcaggcuuauuagaaa

SEQ ID NO: 516262 - RNA, 19 nt, Artificial Sequence
  Description of Artificial Sequence: Synthetic oligonucleotide
  Antisense strand to SEQ ID NO: 516261
uuucuaauaagccugccuu

SEQ ID NO: 516263 - RNA, 19 nt, Artificial Sequence
  Description of Artificial Sequence: Synthetic oligonucleotide
  Sense strand starting at position 3318 of SEQ ID NO: 317838
ugauaaguugcguauagga

SEQ ID NO: 516264 - RNA, 19 nt, Artificial Sequence
  Description of Artificial Sequence: Synthetic oligonucleotide
  Antisense strand to SEQ ID NO: 516263
uccuauacgcaacuuauca

SEQ ID NO: 516265 - RNA, 19 nt, Artificial Sequence
  Description of Artificial Sequence: Synthetic oligonucleotide
  Sense strand starting at position 3331 of SEQ ID NO: 317838
auaggaagacugugaguuu

SEQ ID NO: 516266 - RNA, 19 nt, Artificial Sequence
  Description of Artificial Sequence: Synthetic oligonucleotide
  Antisense strand to SEQ ID NO: 516265
aaacucacagucuuccuau

SEQ ID NO: 516267 - RNA, 19 nt, Artificial Sequence
  Description of Artificial Sequence: Synthetic oligonucleotide
  Sense strand starting at position 3486 of SEQ ID NO: 317838
uuaggauuccaccauuagu

SEQ ID NO: 516268 - RNA, 19 nt, Artificial Sequence
  Description of Artificial Sequence: Synthetic oligonucleotide
  Antisense strand to SEQ ID NO: 516267
acuaaugguggaauccuaa

SEQ ID NO: 516269 - RNA, 19 nt, Artificial Sequence
  Description of Artificial Sequence: Synthetic oligonucleotide
  Sense strand starting at position 3545 of SEQ ID NO: 317838
gccauauucuuauuugcag

SEQ ID NO: 516270 - RNA, 19 nt, Artificial Sequence
  Description of Artificial Sequence: Synthetic oligonucleotide
  Antisense strand to SEQ ID NO: 516269
cugcaaauaagaauauggc

SEQ ID NO: 516271 - RNA, 19 nt, Artificial Sequence
  Description of Artificial Sequence: Synthetic oligonucleotide
  Sense strand starting at position 3566 of SEQ ID NO: 317838
gaaacugaguuccuguuua

SEQ ID NO: 516272 - RNA, 19 nt, Artificial Sequence
  Description of Artificial Sequence: Synthetic oligonucleotide
  Antisense strand to SEQ ID NO: 516271
uaaacaggaacucaguuuc

SEQ ID NO: 516273 - RNA, 19 nt, Artificial Sequence
  Description of Artificial Sequence: Synthetic oligonucleotide
  Sense strand starting at position 3588 of SEQ ID NO: 317838
ugcuucuagccaugacaga

SEQ ID NO: 516274 - RNA, 19 nt, Artificial Sequence
  Description of Artificial Sequence: Synthetic oligonucleotide
  Antisense strand to SEQ ID NO: 516273
ucugucauggcuagaagca

SEQ ID NO: 516275 - RNA, 19 nt, Artificial Sequence
  Description of Artificial Sequence: Synthetic oligonucleotide
  Sense strand starting at position 3844 of SEQ ID NO: 317838
uguugaaguaaauggaauu

SEQ ID NO: 516276 - RNA, 19 nt, Artificial Sequence
  Description of Artificial Sequence: Synthetic oligonucleotide
  Antisense strand to SEQ ID NO: 516275
aauuccauuuacuucaaca

SEQ ID NO: 516277 - RNA, 19 nt, Artificial Sequence
  Description of Artificial Sequence: Synthetic oligonucleotide
  Sense strand starting at position 3863 of SEQ ID NO: 317838
uguaguacacaguaucaaa

SEQ ID NO: 516278 - RNA, 19 nt, Artificial Sequence
  Description of Artificial Sequence: Synthetic oligonucleotide
  Antisense strand to SEQ ID NO: 516277
uuugauacuguguacuaca

SEQ ID NO: 516279 - RNA, 19 nt, Artificial Sequence
  Description of Artificial Sequence: Synthetic oligonucleotide
  Sense strand starting at position 3940 of SEQ ID NO: 317838
gcuacauguguacaaggga

SEQ ID NO: 516280 - RNA, 19 nt, Artificial Sequence
  Description of Artificial Sequence: Synthetic oligonucleotide
  Antisense strand to SEQ ID NO: 516279
ucccuuguacacauguagc

SEQ ID NO: 516281 - RNA, 19 nt, Artificial Sequence
  Description of Artificial Sequence: Synthetic oligonucleotide
  Sense strand starting at position 3943 of SEQ ID NO: 317838
acauguguacaagggaaua

SEQ ID NO: 516282 - RNA, 19 nt, Artificial Sequence
  Description of Artificial Sequence: Synthetic oligonucleotide
  Antisense strand to SEQ ID NO: 516281
uauucccuuguacacaugu

SEQ ID NO: 516283 - RNA, 19 nt, Artificial Sequence
  Description of Artificial Sequence: Synthetic oligonucleotide
  Sense strand starting at position 172 of SEQ ID NO: 317839
uguuacuauuagguaagau

SEQ ID NO: 516284 - RNA, 19 nt, Artificial Sequence
  Description of Artificial Sequence: Synthetic oligonucleotide
  Antisense strand to SEQ ID NO: 516283
aucuuaccuaauaguaaca

SEQ ID NO: 516285 - RNA, 19 nt, Artificial Sequence
  Description of Artificial Sequence: Synthetic oligonucleotide
  Sense strand starting at position 176 of SEQ ID NO: 317839
acuauuagguaagauuuga

SEQ ID NO: 516286 - RNA, 19 nt, Artificial Sequence
  Description of Artificial Sequence: Synthetic oligonucleotide
  Antisense strand to SEQ ID NO: 516285
ucaaaucuuaccuaauagu

SEQ ID NO: 516287 - RNA, 19 nt, Artificial Sequence
  Description of Artificial Sequence: Synthetic oligonucleotide
  Sense strand starting at position 187 of SEQ ID NO: 317839
agauuugacucagacaaua

SEQ ID NO: 516288 - RNA, 19 nt, Artificial Sequence
  Description of Artificial Sequence: Synthetic oligonucleotide
  Antisense strand to SEQ ID NO: 516287
uauugucugagucaaaucu

SEQ ID NO: 516289 - RNA, 19 nt, Artificial Sequence
  Description of Artificial Sequence: Synthetic oligonucleotide
  Sense strand starting at position 284 of SEQ ID NO: 317839
gugagcucuuagguggauu

SEQ ID NO: 516290 - RNA, 19 nt, Artificial Sequence
  Description of Artificial Sequence: Synthetic oligonucleotide
  Antisense strand to SEQ ID NO: 516289
aauccaccuaagagcucac

SEQ ID NO: 516291 - RNA, 19 nt, Artificial Sequence
  Description of Artificial Sequence: Synthetic oligonucleotide
  Sense strand starting at position 285 of SEQ ID NO: 317839
ugagcucuuagguggauua

SEQ ID NO: 516292 - RNA, 19 nt, Artificial Sequence
  Description of Artificial Sequence: Synthetic oligonucleotide
  Antisense strand to SEQ ID NO: 516291
uaauccaccuaagagcuca

SEQ ID NO: 516293 - RNA, 19 nt, Artificial Sequence
  Description of Artificial Sequence: Synthetic oligonucleotide
  Sense strand starting at position 286 of SEQ ID NO: 317839
gagcucuuagguggauuaa

SEQ ID NO: 516294 - RNA, 19 nt, Artificial Sequence
  Description of Artificial Sequence: Synthetic oligonucleotide
  Antisense strand to SEQ ID NO: 516293
uuaauccaccuaagagcuc

SEQ ID NO: 516295 - RNA, 19 nt, Artificial Sequence
  Description of Artificial Sequence: Synthetic oligonucleotide
  Sense strand starting at position 287 of SEQ ID NO: 317839
agcucuuagguggauuaaa

SEQ ID NO: 516296 - RNA, 19 nt, Artificial Sequence
  Description of Artificial Sequence: Synthetic oligonucleotide
  Antisense strand to SEQ ID NO: 516295
uuuaauccaccuaagagcu

SEQ ID NO: 516297 - RNA, 19 nt, Artificial Sequence
  Description of Artificial Sequence: Synthetic oligonucleotide
  Sense strand starting at position 308 of SEQ ID NO: 317839
auuauucuuucgcugaaua

SEQ ID NO: 516298 - RNA, 19 nt, Artificial Sequence
  Description of Artificial Sequence: Synthetic oligonucleotide
  Antisense strand to SEQ ID NO: 516297
uauucagcgaaagaauaau

SEQ ID NO: 516299 - RNA, 19 nt, Artificial Sequence
  Description of Artificial Sequence: Synthetic oligonucleotide
  Sense strand starting at position 309 of SEQ ID NO: 317839
uuauucuuucgcugaauaa

SEQ ID NO: 516300 - RNA, 19 nt, Artificial Sequence
  Description of Artificial Sequence: Synthetic oligonucleotide
  Antisense strand to SEQ ID NO: 516299
uuauucagcgaaagaauaa

SEQ ID NO: 516301 - RNA, 19 nt, Artificial Sequence
  Description of Artificial Sequence: Synthetic oligonucleotide
  Sense strand starting at position 313 of SEQ ID NO: 317839
ucuuucgcugaauaaauau

SEQ ID NO: 516302 - RNA, 19 nt, Artificial Sequence
  Description of Artificial Sequence: Synthetic oligonucleotide
  Antisense strand to SEQ ID NO: 516301
auauuuauucagcgaaaga

SEQ ID NO: 516303 - RNA, 19 nt, Artificial Sequence
  Description of Artificial Sequence: Synthetic oligonucleotide
  Sense strand starting at position 638 of SEQ ID NO: 317839
aaguccagauugguaaaua

SEQ ID NO: 516304 - RNA, 19 nt, Artificial Sequence
  Description of Artificial Sequence: Synthetic oligonucleotide
  Antisense strand to SEQ ID NO: 516303
uauuuaccaaucuggacuu

SEQ ID NO: 516305 - RNA, 19 nt, Artificial Sequence
  Description of Artificial Sequence: Synthetic oligonucleotide
  Sense strand starting at position 639 of SEQ ID NO: 317839
aguccagauugguaaauaa

SEQ ID NO: 516306 - RNA, 19 nt, Artificial Sequence
  Description of Artificial Sequence: Synthetic oligonucleotide
  Antisense strand to SEQ ID NO: 516305
uuauuuaccaaucuggacu

SEQ ID NO: 516307 - RNA, 19 nt, Artificial Sequence
  Description of Artificial Sequence: Synthetic oligonucleotide
  Sense strand starting at position 649 of SEQ ID NO: 317839
gguaaauaauuaggcagaa

SEQ ID NO: 516308 - RNA, 19 nt, Artificial Sequence
  Description of Artificial Sequence: Synthetic oligonucleotide
  Antisense strand to SEQ ID NO: 516307
uucugccuaauuauuuacc

SEQ ID NO: 516309 - RNA, 19 nt, Artificial Sequence
  Description of Artificial Sequence: Synthetic oligonucleotide
  Sense strand starting at position 884 of SEQ ID NO: 317839
cccgaauuuagucguagac

SEQ ID NO: 516310 - RNA, 19 nt, Artificial Sequence
  Description of Artificial Sequence: Synthetic oligonucleotide
  Antisense strand to SEQ ID NO: 516309
gucuacgacuaaauucggg

SEQ ID NO: 516311 - RNA, 19 nt, Artificial Sequence
  Description of Artificial Sequence: Synthetic oligonucleotide
  Sense strand starting at position 886 of SEQ ID NO: 317839
cgaauuuagucguagacuu

SEQ ID NO: 516312 - RNA, 19 nt, Artificial Sequence
  Description of Artificial Sequence: Synthetic oligonucleotide
  Antisense strand to SEQ ID NO: 516311
aagucuacgacuaaauucg

SEQ ID NO: 516313 - RNA, 19 nt, Artificial Sequence
  Description of Artificial Sequence: Synthetic oligonucleotide
  Sense strand starting at position 893 of SEQ ID NO: 317839
agucguagacuugacauau

SEQ ID NO: 516314 - RNA, 19 nt, Artificial Sequence
  Description of Artificial Sequence: Synthetic oligonucleotide
  Antisense strand to SEQ ID NO: 516313
auaugucaagucuacgacu

SEQ ID NO: 516315 - RNA, 19 nt, Artificial Sequence
  Description of Artificial Sequence: Synthetic oligonucleotide
  Sense strand starting at position 995 of SEQ ID NO: 317839
gggagucaaccuuggaacu

SEQ ID NO: 516316 - RNA, 19 nt, Artificial Sequence
  Description of Artificial Sequence: Synthetic oligonucleotide
  Antisense strand to SEQ ID NO: 516315
aguuccaagguugacuccc

SEQ ID NO: 516317 - RNA, 19 nt, Artificial Sequence
  Description of Artificial Sequence: Synthetic oligonucleotide
  Sense strand starting at position 1431 of SEQ ID NO: 317839
acaaucacuucccgggaaa

SEQ ID NO: 516318 - RNA, 19 nt, Artificial Sequence
  Description of Artificial Sequence: Synthetic oligonucleotide
  Antisense strand to SEQ ID NO: 516317
uuucccgggaagugauugu

SEQ ID NO: 516319 - RNA, 19 nt, Artificial Sequence
  Description of Artificial Sequence: Synthetic oligonucleotide
  Sense strand starting at position 1432 of SEQ ID NO: 317839
caaucacuucccgggaaag

SEQ ID NO: 516320 - RNA, 19 nt, Artificial Sequence
  Description of Artificial Sequence: Synthetic oligonucleotide
  Antisense strand to SEQ ID NO: 516319
cuuucccgggaagugauug

SEQ ID NO: 516321 - RNA, 19 nt, Artificial Sequence
  Description of Artificial Sequence: Synthetic oligonucleotide
  Sense strand starting at position 1746 of SEQ ID NO: 317839
cggcgacgucgccaaagaa

SEQ ID NO: 516322 - RNA, 19 nt, Artificial Sequence
  Description of Artificial Sequence: Synthetic oligonucleotide
  Antisense strand to SEQ ID NO: 516321
uucuuuggcgacgucgccg

SEQ ID NO: 516323 - RNA, 19 nt, Artificial Sequence
  Description of Artificial Sequence: Synthetic oligonucleotide
  Sense strand starting at position 2475 of SEQ ID NO: 317839
gagucacagucuucuggaa

SEQ ID NO: 516324 - RNA, 19 nt, Artificial Sequence
  Description of Artificial Sequence: Synthetic oligonucleotide
  Antisense strand to SEQ ID NO: 516323
uuccagaagacugugacuc

SEQ ID NO: 516325 - RNA, 19 nt, Artificial Sequence
  Description of Artificial Sequence: Synthetic oligonucleotide
  Sense strand starting at position 2601 of SEQ ID NO: 317839
uucauaaugugagguggaa

SEQ ID NO: 516326 - RNA, 19 nt, Artificial Sequence
  Description of Artificial Sequence: Synthetic oligonucleotide
  Antisense strand to SEQ ID NO: 516325
uuccaccucacauuaugaa

SEQ ID NO: 516327 - RNA, 19 nt, Artificial Sequence
  Description of Artificial Sequence: Synthetic oligonucleotide
  Sense strand starting at position 2678 of SEQ ID NO: 317839
ccucuugaucaaggacuuu

SEQ ID NO: 516328 - RNA, 19 nt, Artificial Sequence
  Description of Artificial Sequence: Synthetic oligonucleotide
  Antisense strand to SEQ ID NO: 516327
aaaguccuugaucaagagg

SEQ ID NO: 516329 - RNA, 19 nt, Artificial Sequence
  Description of Artificial Sequence: Synthetic oligonucleotide
  Sense strand starting at position 2770 of SEQ ID NO: 317839
gccucaaaucccuggacaa

SEQ ID NO: 516330 - RNA, 19 nt, Artificial Sequence
  Description of Artificial Sequence: Synthetic oligonucleotide
  Antisense strand to SEQ ID NO: 516329
uuguccagggauuugaggc

SEQ ID NO: 516331 - RNA, 19 nt, Artificial Sequence
  Description of Artificial Sequence: Synthetic oligonucleotide
  Sense strand starting at position 3071 of SEQ ID NO: 317839
ucucuauuccucuggucau

SEQ ID NO: 516332 - RNA, 19 nt, Artificial Sequence
  Description of Artificial Sequence: Synthetic oligonucleotide
  Antisense strand to SEQ ID NO: 516331
augaccagaggaauagaga

SEQ ID NO: 516333 - RNA, 19 nt, Artificial Sequence
  Description of Artificial Sequence: Synthetic oligonucleotide
  Sense strand starting at position 3207 of SEQ ID NO: 317839
cuaucauccugguauagaa

SEQ ID NO: 516334 - RNA, 19 nt, Artificial Sequence
  Description of Artificial Sequence: Synthetic oligonucleotide
  Antisense strand to SEQ ID NO: 516333
uucuauaccaggaugauag

SEQ ID NO: 516335 - RNA, 19 nt, Artificial Sequence
  Description of Artificial Sequence: Synthetic oligonucleotide
  Sense strand starting at position 3275 of SEQ ID NO: 317839
ucaguauuggccuauaaac

SEQ ID NO: 516336 - RNA, 19 nt, Artificial Sequence
  Description of Artificial Sequence: Synthetic oligonucleotide
  Antisense strand to SEQ ID NO: 516335
guuuauaggccaauacuga

SEQ ID NO: 516337 - RNA, 19 nt, Artificial Sequence
  Description of Artificial Sequence: Synthetic oligonucleotide
  Sense strand starting at position 3277 of SEQ ID NO: 317839
aguauuggccuauaaaccu

SEQ ID NO: 516338 - RNA, 19 nt, Artificial Sequence
  Description of Artificial Sequence: Synthetic oligonucleotide
  Antisense strand to SEQ ID NO: 516337
agguuuauaggccaauacu

SEQ ID NO: 516339 - RNA, 19 nt, Artificial Sequence
  Description of Artificial Sequence: Synthetic oligonucleotide
  Sense strand starting at position 3325 of SEQ ID NO: 317839
uggccuugugcugaauaga

SEQ ID NO: 516340 - RNA, 19 nt, Artificial Sequence
  Description of Artificial Sequence: Synthetic oligonucleotide
  Antisense strand to SEQ ID NO: 516339
ucuauucagcacaaggcca

SEQ ID NO: 516341 - RNA, 19 nt, Artificial Sequence
  Description of Artificial Sequence: Synthetic oligonucleotide
  Sense strand starting at position 3492 of SEQ ID NO: 317839
agugaacaucuguggguga

SEQ ID NO: 516342 - RNA, 19 nt, Artificial Sequence
  Description of Artificial Sequence: Synthetic oligonucleotide
  Antisense strand to SEQ ID NO: 516341
ucacccacagauguucacu

SEQ ID NO: 516343 - RNA, 19 nt, Artificial Sequence
  Description of Artificial Sequence: Synthetic oligonucleotide
  Sense strand starting at position 3494 of SEQ ID NO: 317839
ugaacaucugugggugaau

SEQ ID NO: 516344 - RNA, 19 nt, Artificial Sequence
  Description of Artificial Sequence: Synthetic oligonucleotide
  Antisense strand to SEQ ID NO: 516343
auucacccacagauguuca

SEQ ID NO: 516345 - RNA, 19 nt, Artificial Sequence
  Description of Artificial Sequence: Synthetic oligonucleotide
  Sense strand starting at position 3495 of SEQ ID NO: 317839
gaacaucugugggugaaug

SEQ ID NO: 516346 - RNA, 19 nt, Artificial Sequence
  Description of Artificial Sequence: Synthetic oligonucleotide
  Antisense strand to SEQ ID NO: 516345
cauucacccacagauguuc

SEQ ID NO: 516347 - RNA, 19 nt, Artificial Sequence
  Description of Artificial Sequence: Synthetic oligonucleotide
  Sense strand starting at position 3496 of SEQ ID NO: 317839
aacaucugugggugaaugu

SEQ ID NO: 516348 - RNA, 19 nt, Artificial Sequence
  Description of Artificial Sequence: Synthetic oligonucleotide
  Antisense strand to SEQ ID NO: 516347
acauucacccacagauguu

SEQ ID NO: 516349 - RNA, 19 nt, Artificial Sequence
  Description of Artificial Sequence: Synthetic oligonucleotide
  Sense strand starting at position 3505 of SEQ ID NO: 317839
gggugaaugugcccacugu

SEQ ID NO: 516350 - RNA, 19 nt, Artificial Sequence
  Description of Artificial Sequence: Synthetic oligonucleotide
  Antisense strand to SEQ ID NO: 516349
acagugggcacauucaccc

SEQ ID NO: 516351 - RNA, 19 nt, Artificial Sequence
  Description of Artificial Sequence: Synthetic oligonucleotide
  Sense strand starting at position 3506 of SEQ ID NO: 317839
ggugaaugugcccacugua

SEQ ID NO: 516352 - RNA, 19 nt, Artificial Sequence
  Description of Artificial Sequence: Synthetic oligonucleotide
  Antisense strand to SEQ ID NO: 516351
uacagugggcacauucacc

SEQ ID NO: 516353 - RNA, 19 nt, Artificial Sequence
  Description of Artificial Sequence: Synthetic oligonucleotide
  Sense strand starting at position 3509 of SEQ ID NO: 317839
gaaugugcccacuguaauu

SEQ ID NO: 516354 - RNA, 19 nt, Artificial Sequence
  Description of Artificial Sequence: Synthetic oligonucleotide
  Antisense strand to SEQ ID NO: 516353
aauuacagugggcacauuc

SEQ ID NO: 516355 - RNA, 19 nt, Artificial Sequence
  Description of Artificial Sequence: Synthetic oligonucleotide
  Sense strand starting at position 3541 of SEQ ID NO: 317839
gccugugcuaguuaacaga

SEQ ID NO: 516356 - RNA, 19 nt, Artificial Sequence
  Description of Artificial Sequence: Synthetic oligonucleotide
  Antisense strand to SEQ ID NO: 516355
ucuguuaacuagcacaggc

SEQ ID NO: 516357 - RNA, 19 nt, Artificial Sequence
  Description of Artificial Sequence: Synthetic oligonucleotide
  Sense strand starting at position 3920 of SEQ ID NO: 317839
cugacaaggucauucuugu

SEQ ID NO: 516358 - RNA, 19 nt, Artificial Sequence
  Description of Artificial Sequence: Synthetic oligonucleotide
  Antisense strand to SEQ ID NO: 516357
acaagaaugaccuugucag

SEQ ID NO: 516359 - RNA, 19 nt, Artificial Sequence
  Description of Artificial Sequence: Synthetic oligonucleotide
  Sense strand starting at position 3926 of SEQ ID NO: 317839
aggucauucuuguccaacu

SEQ ID NO: 516360 - RNA, 19 nt, Artificial Sequence
  Description of Artificial Sequence: Synthetic oligonucleotide
  Antisense strand to SEQ ID NO: 516359
aguuggacaagaaugaccu

SEQ ID NO: 516361 - RNA, 19 nt, Artificial Sequence
  Description of Artificial Sequence: Synthetic oligonucleotide
  Sense strand starting at position 3927 of SEQ ID NO: 317839
ggucauucuuguccaacua

SEQ ID NO: 516362 - RNA, 19 nt, Artificial Sequence
  Description of Artificial Sequence: Synthetic oligonucleotide
  Antisense strand to SEQ ID NO: 516361
uaguuggacaagaaugacc

SEQ ID NO: 516363 - RNA, 19 nt, Artificial Sequence
  Description of Artificial Sequence: Synthetic oligonucleotide
  Sense strand starting at position 36 of SEQ ID NO: 317840
ggucuaaaccaggacuugu

SEQ ID NO: 516364 - RNA, 19 nt, Artificial Sequence
  Description of Artificial Sequence: Synthetic oligonucleotide
  Antisense strand to SEQ ID NO: 516363
acaaguccugguuuagacc

SEQ ID NO: 516365 - RNA, 19 nt, Artificial Sequence
  Description of Artificial Sequence: Synthetic oligonucleotide
  Sense strand starting at position 142 of SEQ ID NO: 317840
gcaacuuuggcuugggaau

SEQ ID NO: 516366 - RNA, 19 nt, Artificial Sequence
  Description of Artificial Sequence: Synthetic oligonucleotide
  Antisense strand to SEQ ID NO: 516365
auucccaagccaaaguugc

SEQ ID NO: 516367 - RNA, 19 nt, Artificial Sequence
  Description of Artificial Sequence: Synthetic oligonucleotide
  Sense strand starting at position 143 of SEQ ID NO: 317840
caacuuuggcuugggaauu

SEQ ID NO: 516368 - RNA, 19 nt, Artificial Sequence
  Description of Artificial Sequence: Synthetic oligonucleotide
  Antisense strand to SEQ ID NO: 516367
aauucccaagccaaaguug

SEQ ID NO: 516369 - RNA, 19 nt, Artificial Sequence
  Description of Artificial Sequence: Synthetic oligonucleotide
  Sense strand starting at position 332 of SEQ ID NO: 317840
uucuaauucuaccuuggga

SEQ ID NO: 516370 - RNA, 19 nt, Artificial Sequence
  Description of Artificial Sequence: Synthetic oligonucleotide
  Antisense strand to SEQ ID NO: 516369
ucccaagguagaauuagaa

SEQ ID NO: 516371 - RNA, 19 nt, Artificial Sequence
  Description of Artificial Sequence: Synthetic oligonucleotide
  Sense strand starting at position 334 of SEQ ID NO: 317840
cuaauucuaccuugggauc

SEQ ID NO: 516372 - RNA, 19 nt, Artificial Sequence
  Description of Artificial Sequence: Synthetic oligonucleotide
  Antisense strand to SEQ ID NO: 516371
gaucccaagguagaauuag

SEQ ID NO: 516373 - RNA, 19 nt, Artificial Sequence
  Description of Artificial Sequence: Synthetic oligonucleotide
  Sense strand starting at position 594 of SEQ ID NO: 317840
uguccuuaggucugagaca

SEQ ID NO: 516374 - RNA, 19 nt, Artificial Sequence
  Description of Artificial Sequence: Synthetic oligonucleotide
  Antisense strand to SEQ ID NO: 516373
ugucucagaccuaaggaca

SEQ ID NO: 516375 - RNA, 19 nt, Artificial Sequence
  Description of Artificial Sequence: Synthetic oligonucleotide
  Sense strand starting at position 630 of SEQ ID NO: 317840
gugccaaugauaugggaga

SEQ ID NO: 516376 - RNA, 19 nt, Artificial Sequence
  Description of Artificial Sequence: Synthetic oligonucleotide
  Antisense strand to SEQ ID NO: 516375
ucucccauaucauuggcac

SEQ ID NO: 516377 - RNA, 19 nt, Artificial Sequence
  Description of Artificial Sequence: Synthetic oligonucleotide
  Sense strand starting at position 651 of SEQ ID NO: 317840
uagguauguugggucaaau

SEQ ID NO: 516378 - RNA, 19 nt, Artificial Sequence
  Description of Artificial Sequence: Synthetic oligonucleotide
  Antisense strand to SEQ ID NO: 516377
auuugacccaacauaccua

SEQ ID NO: 516379 - RNA, 19 nt, Artificial Sequence
  Description of Artificial Sequence: Synthetic oligonucleotide
  Sense strand starting at position 960 of SEQ ID NO: 317840
gugcaaaugcucuauuauu

SEQ ID NO: 516380 - RNA, 19 nt, Artificial Sequence
  Description of Artificial Sequence: Synthetic oligonucleotide
  Antisense strand to SEQ ID NO: 516379
aauaauagagcauuugcac

SEQ ID NO: 516381 - RNA, 19 nt, Artificial Sequence
  Description of Artificial Sequence: Synthetic oligonucleotide
  Sense strand starting at position 1019 of SEQ ID NO: 317840
uuaguuauggaguagguga

SEQ ID NO: 516382 - RNA, 19 nt, Artificial Sequence
  Description of Artificial Sequence: Synthetic oligonucleotide
  Antisense strand to SEQ ID NO: 516381
ucaccuacuccauaacuaa

SEQ ID NO: 516383 - RNA, 19 nt, Artificial Sequence
  Description of Artificial Sequence: Synthetic oligonucleotide
  Sense strand starting at position 1084 of SEQ ID NO: 317840
gguaucacuuguccuaaau

SEQ ID NO: 516384 - RNA, 19 nt, Artificial Sequence
  Description of Artificial Sequence: Synthetic oligonucleotide
  Antisense strand to SEQ ID NO: 516383
auuuaggacaagugauacc

SEQ ID NO: 516385 - RNA, 19 nt, Artificial Sequence
  Description of Artificial Sequence: Synthetic oligonucleotide
  Sense strand starting at position 1345 of SEQ ID NO: 317840
uguuaagcucuugaugaca

SEQ ID NO: 516386 - RNA, 19 nt, Artificial Sequence
  Description of Artificial Sequence: Synthetic oligonucleotide
  Antisense strand to SEQ ID NO: 516385
ugucaucaagagcuuaaca

SEQ ID NO: 516387 - RNA, 19 nt, Artificial Sequence
  Description of Artificial Sequence: Synthetic oligonucleotide
  Sense strand starting at position 1376 of SEQ ID NO: 317840
ccacuuagcuaguuuauca

SEQ ID NO: 516388 - RNA, 19 nt, Artificial Sequence
  Description of Artificial Sequence: Synthetic oligonucleotide
  Antisense strand to SEQ ID NO: 516387
ugauaaacuagcuaagugg

SEQ ID NO: 516389 - RNA, 19 nt, Artificial Sequence
  Description of Artificial Sequence: Synthetic oligonucleotide
  Sense strand starting at position 2053 of SEQ ID NO: 317840
agcaguuagagguggagaa

SEQ ID NO: 516390 - RNA, 19 nt, Artificial Sequence
  Description of Artificial Sequence: Synthetic oligonucleotide
  Antisense strand to SEQ ID NO: 516389
uucuccaccucuaacugcu

SEQ ID NO: 516391 - RNA, 19 nt, Artificial Sequence
  Description of Artificial Sequence: Synthetic oligonucleotide
  Sense strand starting at position 2133 of SEQ ID NO: 317840
augcuuuccagagggauau

SEQ ID NO: 516392 - RNA, 19 nt, Artificial Sequence
  Description of Artificial Sequence: Synthetic oligonucleotide
  Antisense strand to SEQ ID NO: 516391
auaucccucuggaaagcau

SEQ ID NO: 516393 - RNA, 19 nt, Artificial Sequence
  Description of Artificial Sequence: Synthetic oligonucleotide
  Sense strand starting at position 2134 of SEQ ID NO: 317840
ugcuuuccagagggauauc

SEQ ID NO: 516394 - RNA, 19 nt, Artificial Sequence
  Description of Artificial Sequence: Synthetic oligonucleotide
  Antisense strand to SEQ ID NO: 516393
gauaucccucuggaaagca

SEQ ID NO: 516395 - RNA, 19 nt, Artificial Sequence
  Description of Artificial Sequence: Synthetic oligonucleotide
  Sense strand starting at position 2300 of SEQ ID NO: 317840
ccuccaaugugcucagaag

SEQ ID NO: 516396 - RNA, 19 nt, Artificial Sequence
  Description of Artificial Sequence: Synthetic oligonucleotide
  Antisense strand to SEQ ID NO: 516395
cuucugagcacauuggagg

SEQ ID NO: 516397 - RNA, 19 nt, Artificial Sequence
  Description of Artificial Sequence: Synthetic oligonucleotide
  Sense strand starting at position 2301 of SEQ ID NO: 317840
cuccaaugugcucagaaga

SEQ ID NO: 516398 - RNA, 19 nt, Artificial Sequence
  Description of Artificial Sequence: Synthetic oligonucleotide
  Antisense strand to SEQ ID NO: 516397
ucuucugagcacauuggag

SEQ ID NO: 516399 - RNA, 19 nt, Artificial Sequence
  Description of Artificial Sequence: Synthetic oligonucleotide
  Sense strand starting at position 2309 of SEQ ID NO: 317840
ugcucagaagaauggguaa

SEQ ID NO: 516400 - RNA, 19 nt, Artificial Sequence
  Description of Artificial Sequence: Synthetic oligonucleotide
  Antisense strand to SEQ ID NO: 516399
uuacccauucuucugagca

SEQ ID NO: 516401 - RNA, 19 nt, Artificial Sequence
  Description of Artificial Sequence: Synthetic oligonucleotide
  Sense strand starting at position 2311 of SEQ ID NO: 317840
cucagaagaauggguaagu

SEQ ID NO: 516402 - RNA, 19 nt, Artificial Sequence
  Description of Artificial Sequence: Synthetic oligonucleotide
  Antisense strand to SEQ ID NO: 516401
acuuacccauucuucugag

SEQ ID NO: 516403 - RNA, 19 nt, Artificial Sequence
  Description of Artificial Sequence: Synthetic oligonucleotide
  Sense strand starting at position 2321 of SEQ ID NO: 317840
uggguaagucugugcauuu

SEQ ID NO: 516404 - RNA, 19 nt, Artificial Sequence
  Description of Artificial Sequence: Synthetic oligonucleotide
  Antisense strand to SEQ ID NO: 516403
aaaugcacagacuuaccca

SEQ ID NO: 516405 - RNA, 19 nt, Artificial Sequence
  Description of Artificial Sequence: Synthetic oligonucleotide
  Sense strand starting at position 2322 of SEQ ID NO: 317840
ggguaagucugugcauuua

SEQ ID NO: 516406 - RNA, 19 nt, Artificial Sequence
  Description of Artificial Sequence: Synthetic oligonucleotide
  Antisense strand to SEQ ID NO: 516405
uaaaugcacagacuuaccc

SEQ ID NO: 516407 - RNA, 19 nt, Artificial Sequence
  Description of Artificial Sequence: Synthetic oligonucleotide
  Sense strand starting at position 2334 of SEQ ID NO: 317840
gcauuuauaugucuuguac

SEQ ID NO: 516408 - RNA, 19 nt, Artificial Sequence
  Description of Artificial Sequence: Synthetic oligonucleotide
  Antisense strand to SEQ ID NO: 516407
guacaagacauauaaaugc

SEQ ID NO: 516409 - RNA, 19 nt, Artificial Sequence
  Description of Artificial Sequence: Synthetic oligonucleotide
  Sense strand starting at position 2448 of SEQ ID NO: 317840
agcauauaucgaugaugac

SEQ ID NO: 516410 - RNA, 19 nt, Artificial Sequence
  Description of Artificial Sequence: Synthetic oligonucleotide
  Antisense strand to SEQ ID NO: 516409
gucaucaucgauauaugcu

SEQ ID NO: 516411 - RNA, 19 nt, Artificial Sequence
  Description of Artificial Sequence: Synthetic oligonucleotide
  Sense strand starting at position 2449 of SEQ ID NO: 317840
gcauauaucgaugaugaca

SEQ ID NO: 516412 - RNA, 19 nt, Artificial Sequence
  Description of Artificial Sequence: Synthetic oligonucleotide
  Antisense strand to SEQ ID NO: 516411
ugucaucaucgauauaugc

SEQ ID NO: 516413 - RNA, 19 nt, Artificial Sequence
  Description of Artificial Sequence: Synthetic oligonucleotide
  Sense strand starting at position 2556 of SEQ ID NO: 317840
aguuauaugcagugaaauc

SEQ ID NO: 516414 - RNA, 19 nt, Artificial Sequence
  Description of Artificial Sequence: Synthetic oligonucleotide
  Antisense strand to SEQ ID NO: 516413
gauuucacugcauauaacu

SEQ ID NO: 516415 - RNA, 19 nt, Artificial Sequence
  Description of Artificial Sequence: Synthetic oligonucleotide
  Sense strand starting at position 2615 of SEQ ID NO: 317840
cccauauguucugcugaaa

SEQ ID NO: 516416 - RNA, 19 nt, Artificial Sequence
  Description of Artificial Sequence: Synthetic oligonucleotide
  Antisense strand to SEQ ID NO: 516415
uuucagcagaacauauggg

SEQ ID NO: 516417 - RNA, 19 nt, Artificial Sequence
  Description of Artificial Sequence: Synthetic oligonucleotide
  Sense strand starting at position 2705 of SEQ ID NO: 317840
cuaugcuggcagcaauaua

SEQ ID NO: 516418 - RNA, 19 nt, Artificial Sequence
  Description of Artificial Sequence: Synthetic oligonucleotide
  Antisense strand to SEQ ID NO: 516417
uauauugcugccagcauag

SEQ ID NO: 516419 - RNA, 19 nt, Artificial Sequence
  Description of Artificial Sequence: Synthetic oligonucleotide
  Sense strand starting at position 2721 of SEQ ID NO: 317840
auaugcaaugaguaugguu

SEQ ID NO: 516420 - RNA, 19 nt, Artificial Sequence
  Description of Artificial Sequence: Synthetic oligonucleotide
  Antisense strand to SEQ ID NO: 516419
aaccauacucauugcauau

SEQ ID NO: 516421 - RNA, 19 nt, Artificial Sequence
  Description of Artificial Sequence: Synthetic oligonucleotide
  Sense strand starting at position 3312 of SEQ ID NO: 317840
caaccagcugacgaagauu

SEQ ID NO: 516422 - RNA, 19 nt, Artificial Sequence
  Description of Artificial Sequence: Synthetic oligonucleotide
  Antisense strand to SEQ ID NO: 516421
aaucuucgucagcugguug

SEQ ID NO: 516423 - RNA, 19 nt, Artificial Sequence
  Description of Artificial Sequence: Synthetic oligonucleotide
  Sense strand starting at position 3315 of SEQ ID NO: 317840
ccagcugacgaagauuaau

SEQ ID NO: 516424 - RNA, 19 nt, Artificial Sequence
  Description of Artificial Sequence: Synthetic oligonucleotide
  Antisense strand to SEQ ID NO: 516423
auuaaucuucgucagcugg

SEQ ID NO: 516425 - RNA, 19 nt, Artificial Sequence
  Description of Artificial Sequence: Synthetic oligonucleotide
  Sense strand starting at position 3337 of SEQ ID NO: 317840
gcucauuuccuacggcuaa

SEQ ID NO: 516426 - RNA, 19 nt, Artificial Sequence
  Description of Artificial Sequence: Synthetic oligonucleotide
  Antisense strand to SEQ ID NO: 516425
uuagccguaggaaaugagc

SEQ ID NO: 516427 - RNA, 19 nt, Artificial Sequence
  Description of Artificial Sequence: Synthetic oligonucleotide
  Sense strand starting at position 3441 of SEQ ID NO: 317840
gcuagaccugacuggaaau

SEQ ID NO: 516428 - RNA, 19 nt, Artificial Sequence
  Description of Artificial Sequence: Synthetic oligonucleotide
  Antisense strand to SEQ ID NO: 516427
auuuccagucaggucuagc

SEQ ID NO: 516429 - RNA, 19 nt, Artificial Sequence
  Description of Artificial Sequence: Synthetic oligonucleotide
  Sense strand starting at position 3476 of SEQ ID NO: 317840
acuugacaguguuugaaac

SEQ ID NO: 516430 - RNA, 19 nt, Artificial Sequence
  Description of Artificial Sequence: Synthetic oligonucleotide
  Antisense strand to SEQ ID NO: 516429
guuucaaacacugucaagu

SEQ ID NO: 516431 - RNA, 19 nt, Artificial Sequence
  Description of Artificial Sequence: Synthetic oligonucleotide
  Sense strand starting at position 3595 of SEQ ID NO: 317840
ucuggcaaucugugggaau

SEQ ID NO: 516432 - RNA, 19 nt, Artificial Sequence
  Description of Artificial Sequence: Synthetic oligonucleotide
  Antisense strand to SEQ ID NO: 516431
auucccacagauugccaga

SEQ ID NO: 516433 - RNA, 19 nt, Artificial Sequence
  Description of Artificial Sequence: Synthetic oligonucleotide
  Sense strand starting at position 3714 of SEQ ID NO: 317840
ggauauucuagaugcaguc

SEQ ID NO: 516434 - RNA, 19 nt, Artificial Sequence
  Description of Artificial Sequence: Synthetic oligonucleotide
  Antisense strand to SEQ ID NO: 516433
gacugcaucuagaauaucc

SEQ ID NO: 516435 - RNA, 19 nt, Artificial Sequence
  Description of Artificial Sequence: Synthetic oligonucleotide
  Sense strand starting at position 3820 of SEQ ID NO: 317840
agaauaagcucaucaaguu

SEQ ID NO: 516436 - RNA, 19 nt, Artificial Sequence
  Description of Artificial Sequence: Synthetic oligonucleotide
  Antisense strand to SEQ ID NO: 516435
aacuugaugagcuuauucu

SEQ ID NO: 516437 - RNA, 19 nt, Artificial Sequence
  Description of Artificial Sequence: Synthetic oligonucleotide
  Sense strand starting at position 3934 of SEQ ID NO: 317840
cggguaauuacgggaacaa

SEQ ID NO: 516438 - RNA, 19 nt, Artificial Sequence
  Description of Artificial Sequence: Synthetic oligonucleotide
  Antisense strand to SEQ ID NO: 516437
uuguucccguaauuacccg

SEQ ID NO: 516439 - RNA, 19 nt, Artificial Sequence
  Description of Artificial Sequence: Synthetic oligonucleotide
  Sense strand starting at position 3944 of SEQ ID NO: 317840
cgggaacaauggcuuuauu

SEQ ID NO: 516440 - RNA, 19 nt, Artificial Sequence
  Description of Artificial Sequence: Synthetic oligonucleotide
  Antisense strand to SEQ ID NO: 516439
aauaaagccauuguucccg

SEQ ID NO: 516441 - RNA, 19 nt, Artificial Sequence
  Description of Artificial Sequence: Synthetic oligonucleotide
  Sense strand starting at position 3947 of SEQ ID NO: 317840
gaacaauggcuuuauuguu

SEQ ID NO: 516442 - RNA, 19 nt, Artificial Sequence
  Description of Artificial Sequence: Synthetic oligonucleotide
  Antisense strand to SEQ ID NO: 516441
aacaauaaagccauuguuc

SEQ ID NO: 516443 - RNA, 19 nt, Artificial Sequence
  Description of Artificial Sequence: Synthetic oligonucleotide
  Sense strand starting at position 147 of SEQ ID NO: 317841
auacauauacuguguccua

SEQ ID NO: 516444 - RNA, 19 nt, Artificial Sequence
  Description of Artificial Sequence: Synthetic oligonucleotide
  Antisense strand to SEQ ID NO: 516443
uaggacacaguauauguau

SEQ ID NO: 516445 - RNA, 19 nt, Artificial Sequence
  Description of Artificial Sequence: Synthetic oligonucleotide
  Sense strand starting at position 154 of SEQ ID NO: 317841
uacuguguccuauaguuug

SEQ ID NO: 516446 - RNA, 19 nt, Artificial Sequence
  Description of Artificial Sequence: Synthetic oligonucleotide
  Antisense strand to SEQ ID NO: 516445
caaacuauaggacacagua

SEQ ID NO: 516447 - RNA, 19 nt, Artificial Sequence
  Description of Artificial Sequence: Synthetic oligonucleotide
  Sense strand starting at position 159 of SEQ ID NO: 317841
uguccuauaguuugaagac

SEQ ID NO: 516448 - RNA, 19 nt, Artificial Sequence
  Description of Artificial Sequence: Synthetic oligonucleotide
  Antisense strand to SEQ ID NO: 516447
gucuucaaacuauaggaca

SEQ ID NO: 516449 - RNA, 19 nt, Artificial Sequence
  Description of Artificial Sequence: Synthetic oligonucleotide
  Sense strand starting at position 177 of SEQ ID NO: 317841
cuuagugucacguaaaucu

SEQ ID NO: 516450 - RNA, 19 nt, Artificial Sequence
  Description of Artificial Sequence: Synthetic oligonucleotide
  Antisense strand to SEQ ID NO: 516449
agauuuacgugacacuaag

SEQ ID NO: 516451 - RNA, 19 nt, Artificial Sequence
  Description of Artificial Sequence: Synthetic oligonucleotide
  Sense strand starting at position 292 of SEQ ID NO: 317841
aauuacagucaauguggaa

SEQ ID NO: 516452 - RNA, 19 nt, Artificial Sequence
  Description of Artificial Sequence: Synthetic oligonucleotide
  Antisense strand to SEQ ID NO: 516451
uuccacauugacuguaauu

SEQ ID NO: 516453 - RNA, 19 nt, Artificial Sequence
  Description of Artificial Sequence: Synthetic oligonucleotide
  Sense strand starting at position 357 of SEQ ID NO: 317841
uagcauugagauugacuuu

SEQ ID NO: 516454 - RNA, 19 nt, Artificial Sequence
  Description of Artificial Sequence: Synthetic oligonucleotide
  Antisense strand to SEQ ID NO: 516453
aaagucaaucucaaugcua

SEQ ID NO: 516455 - RNA, 19 nt, Artificial Sequence
  Description of Artificial Sequence: Synthetic oligonucleotide
  Sense strand starting at position 630 of SEQ ID NO: 317841
uuaagucaacauggucauu

SEQ ID NO: 516456 - RNA, 19 nt, Artificial Sequence
  Description of Artificial Sequence: Synthetic oligonucleotide
  Antisense strand to SEQ ID NO: 516455
aaugaccauguugacuuaa

SEQ ID NO: 516457 - RNA, 19 nt, Artificial Sequence
  Description of Artificial Sequence: Synthetic oligonucleotide
  Sense strand starting at position 981 of SEQ ID NO: 317841
uaaucuguuggguaucaca

SEQ ID NO: 516458 - RNA, 19 nt, Artificial Sequence
  Description of Artificial Sequence: Synthetic oligonucleotide
  Antisense strand to SEQ ID NO: 516457
ugugauacccaacagauua

SEQ ID NO: 516459 - RNA, 19 nt, Artificial Sequence
  Description of Artificial Sequence: Synthetic oligonucleotide
  Sense strand starting at position 1039 of SEQ ID NO: 317841
cuaugaagccauuguaaau

SEQ ID NO: 516460 - RNA, 19 nt, Artificial Sequence
  Description of Artificial Sequence: Synthetic oligonucleotide
  Antisense strand to SEQ ID NO: 516459
auuuacaauggcuucauag

SEQ ID NO: 516461 - RNA, 19 nt, Artificial Sequence
  Description of Artificial Sequence: Synthetic oligonucleotide
  Sense strand starting at position 1201 of SEQ ID NO: 317841
cuaguucuaguauaaacuu

SEQ ID NO: 516462 - RNA, 19 nt, Artificial Sequence
  Description of Artificial Sequence: Synthetic oligonucleotide
  Antisense strand to SEQ ID NO: 516461
aaguuuauacuagaacuag

SEQ ID NO: 516463 - RNA, 19 nt, Artificial Sequence
  Description of Artificial Sequence: Synthetic oligonucleotide
  Sense strand starting at position 1251 of SEQ ID NO: 317841
agagaaagcuaugcaacaa

SEQ ID NO: 516464 - RNA, 19 nt, Artificial Sequence
  Description of Artificial Sequence: Synthetic oligonucleotide
  Antisense strand to SEQ ID NO: 516463
uuguugcauagcuuucucu

SEQ ID NO: 516465 - RNA, 19 nt, Artificial Sequence
  Description of Artificial Sequence: Synthetic oligonucleotide
  Sense strand starting at position 1268 of SEQ ID NO: 317841
aaguuagcugcccaguaua

SEQ ID NO: 516466 - RNA, 19 nt, Artificial Sequence
  Description of Artificial Sequence: Synthetic oligonucleotide
  Antisense strand to SEQ ID NO: 516465
uauacugggcagcuaacuu

SEQ ID NO: 516467 - RNA, 19 nt, Artificial Sequence
  Description of Artificial Sequence: Synthetic oligonucleotide
  Sense strand starting at position 1271 of SEQ ID NO: 317841
uuagcugcccaguauauua

SEQ ID NO: 516468 - RNA, 19 nt, Artificial Sequence
  Description of Artificial Sequence: Synthetic oligonucleotide
  Antisense strand to SEQ ID NO: 516467
uaauauacugggcagcuaa

SEQ ID NO: 516469 - RNA, 19 nt, Artificial Sequence
  Description of Artificial Sequence: Synthetic oligonucleotide
  Sense strand starting at position 1371 of SEQ ID NO: 317841
ggguuauuccuuuaacugc

SEQ ID NO: 516470 - RNA, 19 nt, Artificial Sequence
  Description of Artificial Sequence: Synthetic oligonucleotide
  Antisense strand to SEQ ID NO: 516469
gcaguuaaaggaauaaccc

SEQ ID NO: 516471 - RNA, 19 nt, Artificial Sequence
  Description of Artificial Sequence: Synthetic oligonucleotide
  Sense strand starting at position 1448 of SEQ ID NO: 317841
cacagaauuguaugugauu

SEQ ID NO: 516472 - RNA, 19 nt, Artificial Sequence
  Description of Artificial Sequence: Synthetic oligonucleotide
  Antisense strand to SEQ ID NO: 516471
aaucacauacaauucugug

SEQ ID NO: 516473 - RNA, 19 nt, Artificial Sequence
  Description of Artificial Sequence: Synthetic oligonucleotide
  Sense strand starting at position 1449 of SEQ ID NO: 317841
acagaauuguaugugauua

SEQ ID NO: 516474 - RNA, 19 nt, Artificial Sequence
  Description of Artificial Sequence: Synthetic oligonucleotide
  Antisense strand to SEQ ID NO: 516473
uaaucacauacaauucugu

SEQ ID NO: 516475 - RNA, 19 nt, Artificial Sequence
  Description of Artificial Sequence: Synthetic oligonucleotide
  Sense strand starting at position 1454 of SEQ ID NO: 317841
auuguaugugauuacuuac

SEQ ID NO: 516476 - RNA, 19 nt, Artificial Sequence
  Description of Artificial Sequence: Synthetic oligonucleotide
  Antisense strand to SEQ ID NO: 516475
guaaguaaucacauacaau

SEQ ID NO: 516477 - RNA, 19 nt, Artificial Sequence
  Description of Artificial Sequence: Synthetic oligonucleotide
  Sense strand starting at position 1457 of SEQ ID NO: 317841
guaugugauuacuuacaug

SEQ ID NO: 516478 - RNA, 19 nt, Artificial Sequence
  Description of Artificial Sequence: Synthetic oligonucleotide
  Antisense strand to SEQ ID NO: 516477
cauguaaguaaucacauac

SEQ ID NO: 516479 - RNA, 19 nt, Artificial Sequence
  Description of Artificial Sequence: Synthetic oligonucleotide
  Sense strand starting at position 1503 of SEQ ID NO: 317841
aguauauaucuaugacaca

SEQ ID NO: 516480 - RNA, 19 nt, Artificial Sequence
  Description of Artificial Sequence: Synthetic oligonucleotide
  Antisense strand to SEQ ID NO: 516479
ugugucauagauauauacu

SEQ ID NO: 516481 - RNA, 19 nt, Artificial Sequence
  Description of Artificial Sequence: Synthetic oligonucleotide
  Sense strand starting at position 1550 of SEQ ID NO: 317841
ugguuauaaugguuaguua

SEQ ID NO: 516482 - RNA, 19 nt, Artificial Sequence
  Description of Artificial Sequence: Synthetic oligonucleotide
  Antisense strand to SEQ ID NO: 516481
uaacuaaccauuauaacca

SEQ ID NO: 516483 - RNA, 19 nt, Artificial Sequence
  Description of Artificial Sequence: Synthetic oligonucleotide
  Sense strand starting at position 1551 of SEQ ID NO: 317841
gguuauaaugguuaguuaa

SEQ ID NO: 516484 - RNA, 19 nt, Artificial Sequence
  Description of Artificial Sequence: Synthetic oligonucleotide
  Antisense strand to SEQ ID NO: 516483
uuaacuaaccauuauaacc

SEQ ID NO: 516485 - RNA, 19 nt, Artificial Sequence
  Description of Artificial Sequence: Synthetic oligonucleotide
  Sense strand starting at position 1657 of SEQ ID NO: 317841
aauugauaacugugagguc

SEQ ID NO: 516486 - RNA, 19 nt, Artificial Sequence
  Description of Artificial Sequence: Synthetic oligonucleotide
  Antisense strand to SEQ ID NO: 516485
gaccucacaguuaucaauu

SEQ ID NO: 516487 - RNA, 19 nt, Artificial Sequence
  Description of Artificial Sequence: Synthetic oligonucleotide
  Sense strand starting at position 1862 of SEQ ID NO: 317841
acuguagucuaggcaaaca

SEQ ID NO: 516488 - RNA, 19 nt, Artificial Sequence
  Description of Artificial Sequence: Synthetic oligonucleotide
  Antisense strand to SEQ ID NO: 516487
uguuugccuagacuacagu

SEQ ID NO: 516489 - RNA, 19 nt, Artificial Sequence
  Description of Artificial Sequence: Synthetic oligonucleotide
  Sense strand starting at position 1879 of SEQ ID NO: 317841
caagacgacuagucccaaa

SEQ ID NO: 516490 - RNA, 19 nt, Artificial Sequence
  Description of Artificial Sequence: Synthetic oligonucleotide
  Antisense strand to SEQ ID NO: 516489
uuugggacuagucgucuug

SEQ ID NO: 516491 - RNA, 19 nt, Artificial Sequence
  Description of Artificial Sequence: Synthetic oligonucleotide
  Sense strand starting at position 2049 of SEQ ID NO: 317841
aagucaggacgcugaauua

SEQ ID NO: 516492 - RNA, 19 nt, Artificial Sequence
  Description of Artificial Sequence: Synthetic oligonucleotide
  Antisense strand to SEQ ID NO: 516491
uaauucagcguccugacuu

SEQ ID NO: 516493 - RNA, 19 nt, Artificial Sequence
  Description of Artificial Sequence: Synthetic oligonucleotide
  Sense strand starting at position 2061 of SEQ ID NO: 317841
ugaauuauccuaugguaau

SEQ ID NO: 516494 - RNA, 19 nt, Artificial Sequence
  Description of Artificial Sequence: Synthetic oligonucleotide
  Antisense strand to SEQ ID NO: 516493
auuaccauaggauaauuca

SEQ ID NO: 516495 - RNA, 19 nt, Artificial Sequence
  Description of Artificial Sequence: Synthetic oligonucleotide
  Sense strand starting at position 2328 of SEQ ID NO: 317841
guaucuggauucuuagcua

SEQ ID NO: 516496 - RNA, 19 nt, Artificial Sequence
  Description of Artificial Sequence: Synthetic oligonucleotide
  Antisense strand to SEQ ID NO: 516495
uagcuaagaauccagauac

SEQ ID NO: 516497 - RNA, 19 nt, Artificial Sequence
  Description of Artificial Sequence: Synthetic oligonucleotide
  Sense strand starting at position 2331 of SEQ ID NO: 317841
ucuggauucuuagcuaucu

SEQ ID NO: 516498 - RNA, 19 nt, Artificial Sequence
  Description of Artificial Sequence: Synthetic oligonucleotide
  Antisense strand to SEQ ID NO: 516497
agauagcuaagaauccaga

SEQ ID NO: 516499 - RNA, 19 nt, Artificial Sequence
  Description of Artificial Sequence: Synthetic oligonucleotide
  Sense strand starting at position 2339 of SEQ ID NO: 317841
cuuagcuaucuguauguua

SEQ ID NO: 516500 - RNA, 19 nt, Artificial Sequence
  Description of Artificial Sequence: Synthetic oligonucleotide
  Antisense strand to SEQ ID NO: 516499
uaacauacagauagcuaag

SEQ ID NO: 516501 - RNA, 19 nt, Artificial Sequence
  Description of Artificial Sequence: Synthetic oligonucleotide
  Sense strand starting at position 2801 of SEQ ID NO: 317841
acauaaauucggcaaagua

SEQ ID NO: 516502 - RNA, 19 nt, Artificial Sequence
  Description of Artificial Sequence: Synthetic oligonucleotide
  Antisense strand to SEQ ID NO: 516501
uacuuugccgaauuuaugu

SEQ ID NO: 516503 - RNA, 19 nt, Artificial Sequence
  Description of Artificial Sequence: Synthetic oligonucleotide
  Sense strand starting at position 2832 of SEQ ID NO: 317841
uuuauugaccuuuguacca

SEQ ID NO: 516504 - RNA, 19 nt, Artificial Sequence
  Description of Artificial Sequence: Synthetic oligonucleotide
  Antisense strand to SEQ ID NO: 516503
ugguacaaaggucaauaaa

SEQ ID NO: 516505 - RNA, 19 nt, Artificial Sequence
  Description of Artificial Sequence: Synthetic oligonucleotide
  Sense strand starting at position 2932 of SEQ ID NO: 317841
gguugcugugaguauuaac

SEQ ID NO: 516506 - RNA, 19 nt, Artificial Sequence
  Description of Artificial Sequence: Synthetic oligonucleotide
  Antisense strand to SEQ ID NO: 516505
guuaauacucacagcaacc

SEQ ID NO: 516507 - RNA, 19 nt, Artificial Sequence
  Description of Artificial Sequence: Synthetic oligonucleotide
  Sense strand starting at position 2954 of SEQ ID NO: 317841
augauaucugcagaaguac

SEQ ID NO: 516508 - RNA, 19 nt, Artificial Sequence
  Description of Artificial Sequence: Synthetic oligonucleotide
  Antisense strand to SEQ ID NO: 516507
guacuucugcagauaucau

SEQ ID NO: 516509 - RNA, 19 nt, Artificial Sequence
  Description of Artificial Sequence: Synthetic oligonucleotide
  Sense strand starting at position 2998 of SEQ ID NO: 317841
aaauguaaaugguuaggau

SEQ ID NO: 516510 - RNA, 19 nt, Artificial Sequence
  Description of Artificial Sequence: Synthetic oligonucleotide
  Antisense strand to SEQ ID NO: 516509
auccuaaccauuuacauuu

SEQ ID NO: 516511 - RNA, 19 nt, Artificial Sequence
  Description of Artificial Sequence: Synthetic oligonucleotide
  Sense strand starting at position 3007 of SEQ ID NO: 317841
ugguuaggauaauauuuga

SEQ ID NO: 516512 - RNA, 19 nt, Artificial Sequence
  Description of Artificial Sequence: Synthetic oligonucleotide
  Antisense strand to SEQ ID NO: 516511
ucaaauauuauccuaacca

SEQ ID NO: 516513 - RNA, 19 nt, Artificial Sequence
  Description of Artificial Sequence: Synthetic oligonucleotide
  Sense strand starting at position 3012 of SEQ ID NO: 317841
aggauaauauuugauggca

SEQ ID NO: 516514 - RNA, 19 nt, Artificial Sequence
  Description of Artificial Sequence: Synthetic oligonucleotide
  Antisense strand to SEQ ID NO: 516513
ugccaucaaauauuauccu

SEQ ID NO: 516515 - RNA, 19 nt, Artificial Sequence
  Description of Artificial Sequence: Synthetic oligonucleotide
  Sense strand starting at position 3329 of SEQ ID NO: 317841
cauguuagccaggagucuu

SEQ ID NO: 516516 - RNA, 19 nt, Artificial Sequence
  Description of Artificial Sequence: Synthetic oligonucleotide
  Antisense strand to SEQ ID NO: 516515
aagacuccuggcuaacaug

SEQ ID NO: 516517 - RNA, 19 nt, Artificial Sequence
  Description of Artificial Sequence: Synthetic oligonucleotide
  Sense strand starting at position 3495 of SEQ ID NO: 317841
caggguaguccuuauucca

SEQ ID NO: 516518 - RNA, 19 nt, Artificial Sequence
  Description of Artificial Sequence: Synthetic oligonucleotide
  Antisense strand to SEQ ID NO: 516517
uggaauaaggacuacccug

SEQ ID NO: 516519 - RNA, 19 nt, Artificial Sequence
  Description of Artificial Sequence: Synthetic oligonucleotide
  Sense strand starting at position 3919 of SEQ ID NO: 317841
gcugacaccuuucucagau

SEQ ID NO: 516520 - RNA, 19 nt, Artificial Sequence
  Description of Artificial Sequence: Synthetic oligonucleotide
  Antisense strand to SEQ ID NO: 516519
aucugagaaaggugucagc

SEQ ID NO: 516521 - RNA, 19 nt, Artificial Sequence
  Description of Artificial Sequence: Synthetic oligonucleotide
  Sense strand starting at position 3967 of SEQ ID NO: 317841
aggcuuguugcucacacua

SEQ ID NO: 516522 - RNA, 19 nt, Artificial Sequence
  Description of Artificial Sequence: Synthetic oligonucleotide
  Antisense strand to SEQ ID NO: 516521
uagugugagcaacaagccu

SEQ ID NO: 516523 - RNA, 19 nt, Artificial Sequence
  Description of Artificial Sequence: Synthetic oligonucleotide
  Sense strand starting at position 10 of SEQ ID NO: 317842
caacuugagccguauagac

SEQ ID NO: 516524 - RNA, 19 nt, Artificial Sequence
  Description of Artificial Sequence: Synthetic oligonucleotide
  Antisense strand to SEQ ID NO: 516523
gucuauacggcucaaguug

SEQ ID NO: 516525 - RNA, 19 nt, Artificial Sequence
  Description of Artificial Sequence: Synthetic oligonucleotide
  Sense strand starting at position 50 of SEQ ID NO: 317842
cugacuugugauuagugua

SEQ ID NO: 516526 - RNA, 19 nt, Artificial Sequence
  Description of Artificial Sequence: Synthetic oligonucleotide
  Antisense strand to SEQ ID NO: 516525
uacacuaaucacaagucag

SEQ ID NO: 516527 - RNA, 19 nt, Artificial Sequence
  Description of Artificial Sequence: Synthetic oligonucleotide
  Sense strand starting at position 55 of SEQ ID NO: 317842
uugugauuaguguaaucaa

SEQ ID NO: 516528 - RNA, 19 nt, Artificial Sequence
  Description of Artificial Sequence: Synthetic oligonucleotide
  Antisense strand to SEQ ID NO: 516527
uugauuacacuaaucacaa

SEQ ID NO: 516529 - RNA, 19 nt, Artificial Sequence
  Description of Artificial Sequence: Synthetic oligonucleotide
  Sense strand starting at position 58 of SEQ ID NO: 317842
ugauuaguguaaucaaagg

SEQ ID NO: 516530 - RNA, 19 nt, Artificial Sequence
  Description of Artificial Sequence: Synthetic oligonucleotide
  Antisense strand to SEQ ID NO: 516529
ccuuugauuacacuaauca

SEQ ID NO: 516531 - RNA, 19 nt, Artificial Sequence
  Description of Artificial Sequence: Synthetic oligonucleotide
  Sense strand starting at position 94 of SEQ ID NO: 317842
cuuaacuccgaauguaauc

SEQ ID NO: 516532 - RNA, 19 nt, Artificial Sequence
  Description of Artificial Sequence: Synthetic oligonucleotide
  Antisense strand to SEQ ID NO: 516531
gauuacauucggaguuaag

SEQ ID NO: 516533 - RNA, 19 nt, Artificial Sequence
  Description of Artificial Sequence: Synthetic oligonucleotide
  Sense strand starting at position 192 of SEQ ID NO: 317842
gaacauucuccguauggca

SEQ ID NO: 516534 - RNA, 19 nt, Artificial Sequence
  Description of Artificial Sequence: Synthetic oligonucleotide
  Antisense strand to SEQ ID NO: 516533
ugccauacggagaauguuc

SEQ ID NO: 516535 - RNA, 19 nt, Artificial Sequence
  Description of Artificial Sequence: Synthetic oligonucleotide
  Sense strand starting at position 206 of SEQ ID NO: 317842
uggcaaccauaugcuaaua

SEQ ID NO: 516536 - RNA, 19 nt, Artificial Sequence
  Description of Artificial Sequence: Synthetic oligonucleotide
  Antisense strand to SEQ ID NO: 516535
uauuagcauaugguugcca

SEQ ID NO: 516537 - RNA, 19 nt, Artificial Sequence
  Description of Artificial Sequence: Synthetic oligonucleotide
  Sense strand starting at position 253 of SEQ ID NO: 317842
cuaguucguauuugaggau

SEQ ID NO: 516538 - RNA, 19 nt, Artificial Sequence
  Description of Artificial Sequence: Synthetic oligonucleotide
  Antisense strand to SEQ ID NO: 516537
auccucaaauacgaacuag

SEQ ID NO: 516539 - RNA, 19 nt, Artificial Sequence
  Description of Artificial Sequence: Synthetic oligonucleotide
  Sense strand starting at position 331 of SEQ ID NO: 317842
ccgccauaacuugauauga

SEQ ID NO: 516540 - RNA, 19 nt, Artificial Sequence
  Description of Artificial Sequence: Synthetic oligonucleotide
  Antisense strand to SEQ ID NO: 516539
ucauaucaaguuauggcgg

SEQ ID NO: 516541 - RNA, 19 nt, Artificial Sequence
  Description of Artificial Sequence: Synthetic oligonucleotide
  Sense strand starting at position 398 of SEQ ID NO: 317842
aagccuugucauuauguag

SEQ ID NO: 516542 - RNA, 19 nt, Artificial Sequence
  Description of Artificial Sequence: Synthetic oligonucleotide
  Antisense strand to SEQ ID NO: 516541
cuacauaaugacaaggcuu

SEQ ID NO: 516543 - RNA, 19 nt, Artificial Sequence
  Description of Artificial Sequence: Synthetic oligonucleotide
  Sense strand starting at position 402 of SEQ ID NO: 317842
cuugucauuauguagguga

SEQ ID NO: 516544 - RNA, 19 nt, Artificial Sequence
  Description of Artificial Sequence: Synthetic oligonucleotide
  Antisense strand to SEQ ID NO: 516543
ucaccuacauaaugacaag

SEQ ID NO: 516545 - RNA, 19 nt, Artificial Sequence
  Description of Artificial Sequence: Synthetic oligonucleotide
  Sense strand starting at position 405 of SEQ ID NO: 317842
gucauuauguaggugaaug

SEQ ID NO: 516546 - RNA, 19 nt, Artificial Sequence
  Description of Artificial Sequence: Synthetic oligonucleotide
  Antisense strand to SEQ ID NO: 516545
cauucaccuacauaaugac

SEQ ID NO: 516547 - RNA, 19 nt, Artificial Sequence
  Description of Artificial Sequence: Synthetic oligonucleotide
  Sense strand starting at position 406 of SEQ ID NO: 317842
ucauuauguaggugaauga

SEQ ID NO: 516548 - RNA, 19 nt, Artificial Sequence
  Description of Artificial Sequence: Synthetic oligonucleotide
  Antisense strand to SEQ ID NO: 516547
ucauucaccuacauaauga

SEQ ID NO: 516549 - RNA, 19 nt, Artificial Sequence
  Description of Artificial Sequence: Synthetic oligonucleotide
  Sense strand starting at position 475 of SEQ ID NO: 317842
aaguaugcacaaugagaua

SEQ ID NO: 516550 - RNA, 19 nt, Artificial Sequence
  Description of Artificial Sequence: Synthetic oligonucleotide
  Antisense strand to SEQ ID NO: 516549
uaucucauugugcauacuu

SEQ ID NO: 516551 - RNA, 19 nt, Artificial Sequence
  Description of Artificial Sequence: Synthetic oligonucleotide
  Sense strand starting at position 489 of SEQ ID NO: 317842
agauaacuccuagggaguu

SEQ ID NO: 516552 - RNA, 19 nt, Artificial Sequence
  Description of Artificial Sequence: Synthetic oligonucleotide
  Antisense strand to SEQ ID NO: 516551
aacucccuaggaguuaucu

SEQ ID NO: 516553 - RNA, 19 nt, Artificial Sequence
  Description of Artificial Sequence: Synthetic oligonucleotide
  Sense strand starting at position 526 of SEQ ID NO: 317842
cauggaagucacugcagaa

SEQ ID NO: 516554 - RNA, 19 nt, Artificial Sequence
  Description of Artificial Sequence: Synthetic oligonucleotide
  Antisense strand to SEQ ID NO: 516553
uucugcagugacuuccaug

SEQ ID NO: 516555 - RNA, 19 nt, Artificial Sequence
  Description of Artificial Sequence: Synthetic oligonucleotide
  Sense strand starting at position 565 of SEQ ID NO: 317842
uuggucacauaguucuuaa

SEQ ID NO: 516556 - RNA, 19 nt, Artificial Sequence
  Description of Artificial Sequence: Synthetic oligonucleotide
  Antisense strand to SEQ ID NO: 516555
uuaagaacuaugugaccaa

SEQ ID NO: 516557 - RNA, 19 nt, Artificial Sequence
  Description of Artificial Sequence: Synthetic oligonucleotide
  Sense strand starting at position 598 of SEQ ID NO: 317842
accugucaggccuaauacu

SEQ ID NO: 516558 - RNA, 19 nt, Artificial Sequence
  Description of Artificial Sequence: Synthetic oligonucleotide
  Antisense strand to SEQ ID NO: 516557
aguauuaggccugacaggu

SEQ ID NO: 516559 - RNA, 19 nt, Artificial Sequence
  Description of Artificial Sequence: Synthetic oligonucleotide
  Sense strand starting at position 653 of SEQ ID NO: 317842
uuugcuugagcacaguaaa

SEQ ID NO: 516560 - RNA, 19 nt, Artificial Sequence
  Description of Artificial Sequence: Synthetic oligonucleotide
  Antisense strand to SEQ ID NO: 516559
uuuacugugcucaagcaaa

SEQ ID NO: 516561 - RNA, 19 nt, Artificial Sequence
  Description of Artificial Sequence: Synthetic oligonucleotide
  Sense strand starting at position 705 of SEQ ID NO: 317842
cgaaucagaucagcucaaa

SEQ ID NO: 516562 - RNA, 19 nt, Artificial Sequence
  Description of Artificial Sequence: Synthetic oligonucleotide
  Antisense strand to SEQ ID NO: 516561
uuugagcugaucugauucg

SEQ ID NO: 516563 - RNA, 19 nt, Artificial Sequence
  Description of Artificial Sequence: Synthetic oligonucleotide
  Sense strand starting at position 1220 of SEQ ID NO: 317842
cugggaagccgcuaaauau

SEQ ID NO: 516564 - RNA, 19 nt, Artificial Sequence
  Description of Artificial Sequence: Synthetic oligonucleotide
  Antisense strand to SEQ ID NO: 516563
auauuuagcggcuucccag

SEQ ID NO: 516565 - RNA, 19 nt, Artificial Sequence
  Description of Artificial Sequence: Synthetic oligonucleotide
  Sense strand starting at position 1294 of SEQ ID NO: 317842
gacgcauaugacuaagucu

SEQ ID NO: 516566 - RNA, 19 nt, Artificial Sequence
  Description of Artificial Sequence: Synthetic oligonucleotide
  Antisense strand to SEQ ID NO: 516565
agacuuagucauaugcguc

SEQ ID NO: 516567 - RNA, 19 nt, Artificial Sequence
  Description of Artificial Sequence: Synthetic oligonucleotide
  Sense strand starting at position 1336 of SEQ ID NO: 317842
ucguaaugacauugaacau

SEQ ID NO: 516568 - RNA, 19 nt, Artificial Sequence
  Description of Artificial Sequence: Synthetic oligonucleotide
  Antisense strand to SEQ ID NO: 516567
auguucaaugucauuacga

SEQ ID NO: 516569 - RNA, 19 nt, Artificial Sequence
  Description of Artificial Sequence: Synthetic oligonucleotide
  Sense strand starting at position 1405 of SEQ ID NO: 317842
ccguauauuagggacguca

SEQ ID NO: 516570 - RNA, 19 nt, Artificial Sequence
  Description of Artificial Sequence: Synthetic oligonucleotide
  Antisense strand to SEQ ID NO: 516569
ugacgucccuaauauacgg

SEQ ID NO: 516571 - RNA, 19 nt, Artificial Sequence
  Description of Artificial Sequence: Synthetic oligonucleotide
  Sense strand starting at position 1541 of SEQ ID NO: 317842
ugguaaccgcuccaagaaa

SEQ ID NO: 516572 - RNA, 19 nt, Artificial Sequence
  Description of Artificial Sequence: Synthetic oligonucleotide
  Antisense strand to SEQ ID NO: 516571
uuucuuggagcgguuacca

SEQ ID NO: 516573 - RNA, 19 nt, Artificial Sequence
  Description of Artificial Sequence: Synthetic oligonucleotide
  Sense strand starting at position 1791 of SEQ ID NO: 317842
ggcggcuuccucgcaaaca

SEQ ID NO: 516574 - RNA, 19 nt, Artificial Sequence
  Description of Artificial Sequence: Synthetic oligonucleotide
  Antisense strand to SEQ ID NO: 516573
uguuugcgaggaagccgcc

SEQ ID NO: 516575 - RNA, 19 nt, Artificial Sequence
  Description of Artificial Sequence: Synthetic oligonucleotide
  Sense strand starting at position 2682 of SEQ ID NO: 317842
gaugucagccugcaacaaa

SEQ ID NO: 516576 - RNA, 19 nt, Artificial Sequence
  Description of Artificial Sequence: Synthetic oligonucleotide
  Antisense strand to SEQ ID NO: 516575
uuuguugcaggcugacauc

SEQ ID NO: 516577 - RNA, 19 nt, Artificial Sequence
  Description of Artificial Sequence: Synthetic oligonucleotide
  Sense strand starting at position 2911 of SEQ ID NO: 317842
aggguuucuccuuaggcaa

SEQ ID NO: 516578 - RNA, 19 nt, Artificial Sequence
  Description of Artificial Sequence: Synthetic oligonucleotide
  Antisense strand to SEQ ID NO: 516577
uugccuaaggagaaacccu

SEQ ID NO: 516579 - RNA, 19 nt, Artificial Sequence
  Description of Artificial Sequence: Synthetic oligonucleotide
  Sense strand starting at position 2948 of SEQ ID NO: 317842
acuggaaugucuguaaacu

SEQ ID NO: 516580 - RNA, 19 nt, Artificial Sequence
  Description of Artificial Sequence: Synthetic oligonucleotide
  Antisense strand to SEQ ID NO: 516579
aguuuacagacauuccagu

SEQ ID NO: 516581 - RNA, 19 nt, Artificial Sequence
  Description of Artificial Sequence: Synthetic oligonucleotide
  Sense strand starting at position 2949 of SEQ ID NO: 317842
cuggaaugucuguaaacuu

SEQ ID NO: 516582 - RNA, 19 nt, Artificial Sequence
  Description of Artificial Sequence: Synthetic oligonucleotide
  Antisense strand to SEQ ID NO: 516581
aaguuuacagacauuccag

SEQ ID NO: 516583 - RNA, 19 nt, Artificial Sequence
  Description of Artificial Sequence: Synthetic oligonucleotide
  Sense strand starting at position 2960 of SEQ ID NO: 317842
guaaacuuccugcaagaaa

SEQ ID NO: 516584 - RNA, 19 nt, Artificial Sequence
  Description of Artificial Sequence: Synthetic oligonucleotide
  Antisense strand to SEQ ID NO: 516583
uuucuugcaggaaguuuac

SEQ ID NO: 516585 - RNA, 19 nt, Artificial Sequence
  Description of Artificial Sequence: Synthetic oligonucleotide
  Sense strand starting at position 2992 of SEQ ID NO: 317842
ucuggaacuugagcagauu

SEQ ID NO: 516586 - RNA, 19 nt, Artificial Sequence
  Description of Artificial Sequence: Synthetic oligonucleotide
  Antisense strand to SEQ ID NO: 516585
aaucugcucaaguuccaga

SEQ ID NO: 516587 - RNA, 19 nt, Artificial Sequence
  Description of Artificial Sequence: Synthetic oligonucleotide
  Sense strand starting at position 3242 of SEQ ID NO: 317842
augcguagccugcugugaa

SEQ ID NO: 516588 - RNA, 19 nt, Artificial Sequence
  Description of Artificial Sequence: Synthetic oligonucleotide
  Antisense strand to SEQ ID NO: 516587
uucacagcaggcuacgcau

SEQ ID NO: 516589 - RNA, 19 nt, Artificial Sequence
  Description of Artificial Sequence: Synthetic oligonucleotide
  Sense strand starting at position 3542 of SEQ ID NO: 317842
cagagcuuguuucugaaac

SEQ ID NO: 516590 - RNA, 19 nt, Artificial Sequence
  Description of Artificial Sequence: Synthetic oligonucleotide
  Antisense strand to SEQ ID NO: 516589
guuucagaaacaagcucug

SEQ ID NO: 516591 - RNA, 19 nt, Artificial Sequence
  Description of Artificial Sequence: Synthetic oligonucleotide
  Sense strand starting at position 3600 of SEQ ID NO: 317842
gggauuuggugcuuacgau

SEQ ID NO: 516592 - RNA, 19 nt, Artificial Sequence
  Description of Artificial Sequence: Synthetic oligonucleotide
  Antisense strand to SEQ ID NO: 516591
aucguaagcaccaaauccc

SEQ ID NO: 516593 - RNA, 19 nt, Artificial Sequence
  Description of Artificial Sequence: Synthetic oligonucleotide
  Sense strand starting at position 3612 of SEQ ID NO: 317842
uuacgauucucaguaacau

SEQ ID NO: 516594 - RNA, 19 nt, Artificial Sequence
  Description of Artificial Sequence: Synthetic oligonucleotide
  Antisense strand to SEQ ID NO: 516593
auguuacugagaaucguaa

SEQ ID NO: 516595 - RNA, 19 nt, Artificial Sequence
  Description of Artificial Sequence: Synthetic oligonucleotide
  Sense strand starting at position 3700 of SEQ ID NO: 317842
uuuauuauacuugggagua

SEQ ID NO: 516596 - RNA, 19 nt, Artificial Sequence
  Description of Artificial Sequence: Synthetic oligonucleotide
  Antisense strand to SEQ ID NO: 516595
uacucccaaguauaauaaa

SEQ ID NO: 516597 - RNA, 19 nt, Artificial Sequence
  Description of Artificial Sequence: Synthetic oligonucleotide
  Sense strand starting at position 3710 of SEQ ID NO: 317842
uugggaguaaguugaaaua

SEQ ID NO: 516598 - RNA, 19 nt, Artificial Sequence
  Description of Artificial Sequence: Synthetic oligonucleotide
  Antisense strand to SEQ ID NO: 516597
uauuucaacuuacucccaa

SEQ ID NO: 516599 - RNA, 19 nt, Artificial Sequence
  Description of Artificial Sequence: Synthetic oligonucleotide
  Sense strand starting at position 3800 of SEQ ID NO: 317842
gcagauuaagcagacuauu

SEQ ID NO: 516600 - RNA, 19 nt, Artificial Sequence
  Description of Artificial Sequence: Synthetic oligonucleotide
  Antisense strand to SEQ ID NO: 516599
aauagucugcuuaaucugc

SEQ ID NO: 516601 - RNA, 19 nt, Artificial Sequence
  Description of Artificial Sequence: Synthetic oligonucleotide
  Sense strand starting at position 3954 of SEQ ID NO: 317842
uccugaguccugugaggga

SEQ ID NO: 516602 - RNA, 19 nt, Artificial Sequence
  Description of Artificial Sequence: Synthetic oligonucleotide
  Antisense strand to SEQ ID NO: 516601
ucccucacaggacucagga

SEQ ID NO: 516603 - RNA, 19 nt, Artificial Sequence
  Description of Artificial Sequence: Synthetic oligonucleotide
  Sense strand starting at position 8 of SEQ ID NO: 317843
ucugaaguuaacuguggaa

SEQ ID NO: 516604 - RNA, 19 nt, Artificial Sequence
  Description of Artificial Sequence: Synthetic oligonucleotide
  Antisense strand to SEQ ID NO: 516603
uuccacaguuaacuucaga

SEQ ID NO: 516605 - RNA, 19 nt, Artificial Sequence
  Description of Artificial Sequence: Synthetic oligonucleotide
  Sense strand starting at position 10 of SEQ ID NO: 317843
ugaaguuaacuguggaaau

SEQ ID NO: 516606 - RNA, 19 nt, Artificial Sequence
  Description of Artificial Sequence: Synthetic oligonucleotide
  Antisense strand to SEQ ID NO: 516605
auuuccacaguuaacuuca

SEQ ID NO: 516607 - RNA, 19 nt, Artificial Sequence
  Description of Artificial Sequence: Synthetic oligonucleotide
  Sense strand starting at position 12 of SEQ ID NO: 317843
aaguuaacuguggaaaugu

SEQ ID NO: 516608 - RNA, 19 nt, Artificial Sequence
  Description of Artificial Sequence: Synthetic oligonucleotide
  Antisense strand to SEQ ID NO: 516607
acauuuccacaguuaacuu

SEQ ID NO: 516609 - RNA, 19 nt, Artificial Sequence
  Description of Artificial Sequence: Synthetic oligonucleotide
  Sense strand starting at position 27 of SEQ ID NO: 317843
auguuaacauggcuuugaa

SEQ ID NO: 516610 - RNA, 19 nt, Artificial Sequence
  Description of Artificial Sequence: Synthetic oligonucleotide
  Antisense strand to SEQ ID NO: 516609
uucaaagccauguuaacau

SEQ ID NO: 516611 - RNA, 19 nt, Artificial Sequence
  Description of Artificial Sequence: Synthetic oligonucleotide
  Sense strand starting at position 30 of SEQ ID NO: 317843
uuaacauggcuuugaauga

SEQ ID NO: 516612 - RNA, 19 nt, Artificial Sequence
  Description of Artificial Sequence: Synthetic oligonucleotide
  Antisense strand to SEQ ID NO: 516611
ucauucaaagccauguuaa

SEQ ID NO: 516613 - RNA, 19 nt, Artificial Sequence
  Description of Artificial Sequence: Synthetic oligonucleotide
  Sense strand starting at position 64 of SEQ ID NO: 317843
uccugauacugagccuaaa

SEQ ID NO: 516614 - RNA, 19 nt, Artificial Sequence
  Description of Artificial Sequence: Synthetic oligonucleotide
  Antisense strand to SEQ ID NO: 516613
uuuaggcucaguaucagga

SEQ ID NO: 516615 - RNA, 19 nt, Artificial Sequence
  Description of Artificial Sequence: Synthetic oligonucleotide
  Sense strand starting at position 121 of SEQ ID NO: 317843
ggcugcauuccuguuugua

SEQ ID NO: 516616 - RNA, 19 nt, Artificial Sequence
  Description of Artificial Sequence: Synthetic oligonucleotide
  Antisense strand to SEQ ID NO: 516615
uacaaacaggaaugcagcc

SEQ ID NO: 516617 - RNA, 19 nt, Artificial Sequence
  Description of Artificial Sequence: Synthetic oligonucleotide
  Sense strand starting at position 122 of SEQ ID NO: 317843
gcugcauuccuguuuguau

SEQ ID NO: 516618 - RNA, 19 nt, Artificial Sequence
  Description of Artificial Sequence: Synthetic oligonucleotide
  Antisense strand to SEQ ID NO: 516617
auacaaacaggaaugcagc

SEQ ID NO: 516619 - RNA, 19 nt, Artificial Sequence
  Description of Artificial Sequence: Synthetic oligonucleotide
  Sense strand starting at position 187 of SEQ ID NO: 317843
acccuagauguguaaaucu

SEQ ID NO: 516620 - RNA, 19 nt, Artificial Sequence
  Description of Artificial Sequence: Synthetic oligonucleotide
  Antisense strand to SEQ ID NO: 516619
agauuuacacaucuagggu

SEQ ID NO: 516621 - RNA, 19 nt, Artificial Sequence
  Description of Artificial Sequence: Synthetic oligonucleotide
  Sense strand starting at position 194 of SEQ ID NO: 317843
auguguaaaucucccaaau

SEQ ID NO: 516622 - RNA, 19 nt, Artificial Sequence
  Description of Artificial Sequence: Synthetic oligonucleotide
  Antisense strand to SEQ ID NO: 516621
auuugggagauuuacacau

SEQ ID NO: 516623 - RNA, 19 nt, Artificial Sequence
  Description of Artificial Sequence: Synthetic oligonucleotide
  Sense strand starting at position 243 of SEQ ID NO: 317843
gagucaucuguauaagcca

SEQ ID NO: 516624 - RNA, 19 nt, Artificial Sequence
  Description of Artificial Sequence: Synthetic oligonucleotide
  Antisense strand to SEQ ID NO: 516623
uggcuuauacagaugacuc

SEQ ID NO: 516625 - RNA, 19 nt, Artificial Sequence
  Description of Artificial Sequence: Synthetic oligonucleotide
  Sense strand starting at position 423 of SEQ ID NO: 317843
cuugcuuaccagcaaagaa

SEQ ID NO: 516626 - RNA, 19 nt, Artificial Sequence
  Description of Artificial Sequence: Synthetic oligonucleotide
  Antisense strand to SEQ ID NO: 516625
uucuuugcugguaagcaag

SEQ ID NO: 516627 - RNA, 19 nt, Artificial Sequence
  Description of Artificial Sequence: Synthetic oligonucleotide
  Sense strand starting at position 938 of SEQ ID NO: 317843
cuuaauaucugcuugagga

SEQ ID NO: 516628 - RNA, 19 nt, Artificial Sequence
  Description of Artificial Sequence: Synthetic oligonucleotide
  Antisense strand to SEQ ID NO: 516627
uccucaagcagauauuaag

SEQ ID NO: 516629 - RNA, 19 nt, Artificial Sequence
  Description of Artificial Sequence: Synthetic oligonucleotide
  Sense strand starting at position 939 of SEQ ID NO: 317843
uuaauaucugcuugaggaa

SEQ ID NO: 516630 - RNA, 19 nt, Artificial Sequence
  Description of Artificial Sequence: Synthetic oligonucleotide
  Antisense strand to SEQ ID NO: 516629
uuccucaagcagauauuaa

SEQ ID NO: 516631 - RNA, 19 nt, Artificial Sequence
  Description of Artificial Sequence: Synthetic oligonucleotide
  Sense strand starting at position 1016 of SEQ ID NO: 317843
gagggugccuagucaggaa

SEQ ID NO: 516632 - RNA, 19 nt, Artificial Sequence
  Description of Artificial Sequence: Synthetic oligonucleotide
  Antisense strand to SEQ ID NO: 516631
uuccugacuaggcacccuc

SEQ ID NO: 516633 - RNA, 19 nt, Artificial Sequence
  Description of Artificial Sequence: Synthetic oligonucleotide
  Sense strand starting at position 1346 of SEQ ID NO: 317843
auuacugcagcuuaggaaa

SEQ ID NO: 516634 - RNA, 19 nt, Artificial Sequence
  Description of Artificial Sequence: Synthetic oligonucleotide
  Antisense strand to SEQ ID NO: 516633
uuuccuaagcugcaguaau

SEQ ID NO: 516635 - RNA, 19 nt, Artificial Sequence
  Description of Artificial Sequence: Synthetic oligonucleotide
  Sense strand starting at position 1480 of SEQ ID NO: 317843
cuagcaauuguuuaauuag

SEQ ID NO: 516636 - RNA, 19 nt, Artificial Sequence
  Description of Artificial Sequence: Synthetic oligonucleotide
  Antisense strand to SEQ ID NO: 516635
cuaauuaaacaauugcuag

SEQ ID NO: 516637 - RNA, 19 nt, Artificial Sequence
  Description of Artificial Sequence: Synthetic oligonucleotide
  Sense strand starting at position 1524 of SEQ ID NO: 317843
ucacaacuaugauccgaaa

SEQ ID NO: 516638 - RNA, 19 nt, Artificial Sequence
  Description of Artificial Sequence: Synthetic oligonucleotide
  Antisense strand to SEQ ID NO: 516637
uuucggaucauaguuguga

SEQ ID NO: 516639 - RNA, 19 nt, Artificial Sequence
  Description of Artificial Sequence: Synthetic oligonucleotide
  Sense strand starting at position 1592 of SEQ ID NO: 317843
gcauuuaauuagcccguca

SEQ ID NO: 516640 - RNA, 19 nt, Artificial Sequence
  Description of Artificial Sequence: Synthetic oligonucleotide
  Antisense strand to SEQ ID NO: 516639
ugacgggcuaauuaaaugc

SEQ ID NO: 516641 - RNA, 19 nt, Artificial Sequence
  Description of Artificial Sequence: Synthetic oligonucleotide
  Sense strand starting at position 1597 of SEQ ID NO: 317843
uaauuagcccgucaaagau

SEQ ID NO: 516642 - RNA, 19 nt, Artificial Sequence
  Description of Artificial Sequence: Synthetic oligonucleotide
  Antisense strand to SEQ ID NO: 516641
aucuuugacgggcuaauua

SEQ ID NO: 516643 - RNA, 19 nt, Artificial Sequence
  Description of Artificial Sequence: Synthetic oligonucleotide
  Sense strand starting at position 2090 of SEQ ID NO: 317843
gugcucuguccucuuuauu

SEQ ID NO: 516644 - RNA, 19 nt, Artificial Sequence
  Description of Artificial Sequence: Synthetic oligonucleotide
  Antisense strand to SEQ ID NO: 516643
aauaaagaggacagagcac

SEQ ID NO: 516645 - RNA, 19 nt, Artificial Sequence
  Description of Artificial Sequence: Synthetic oligonucleotide
  Sense strand starting at position 2093 of SEQ ID NO: 317843
cucuguccucuuuauugau

SEQ ID NO: 516646 - RNA, 19 nt, Artificial Sequence
  Description of Artificial Sequence: Synthetic oligonucleotide
  Antisense strand to SEQ ID NO: 516645
aucaauaaagaggacagag

SEQ ID NO: 516647 - RNA, 19 nt, Artificial Sequence
  Description of Artificial Sequence: Synthetic oligonucleotide
  Sense strand starting at position 2303 of SEQ ID NO: 317843
cagcauuuaugggaaggaa

SEQ ID NO: 516648 - RNA, 19 nt, Artificial Sequence
  Description of Artificial Sequence: Synthetic oligonucleotide
  Antisense strand to SEQ ID NO: 516647
uuccuucccauaaaugcug

SEQ ID NO: 516649 - RNA, 19 nt, Artificial Sequence
  Description of Artificial Sequence: Synthetic oligonucleotide
  Sense strand starting at position 2507 of SEQ ID NO: 317843
gagagaaaguuguucucau

SEQ ID NO: 516650 - RNA, 19 nt, Artificial Sequence
  Description of Artificial Sequence: Synthetic oligonucleotide
  Antisense strand to SEQ ID NO: 516649
augagaacaacuuucucuc

SEQ ID NO: 516651 - RNA, 19 nt, Artificial Sequence
  Description of Artificial Sequence: Synthetic oligonucleotide
  Sense strand starting at position 2508 of SEQ ID NO: 317843
agagaaaguuguucucauu

SEQ ID NO: 516652 - RNA, 19 nt, Artificial Sequence
  Description of Artificial Sequence: Synthetic oligonucleotide
  Antisense strand to SEQ ID NO: 516651
aaugagaacaacuuucucu

SEQ ID NO: 516653 - RNA, 19 nt, Artificial Sequence
  Description of Artificial Sequence: Synthetic oligonucleotide
  Sense strand starting at position 2558 of SEQ ID NO: 317843
aaauuacuuucguuggaua

SEQ ID NO: 516654 - RNA, 19 nt, Artificial Sequence
  Description of Artificial Sequence: Synthetic oligonucleotide
  Antisense strand to SEQ ID NO: 516653
uauccaacgaaaguaauuu

SEQ ID NO: 516655 - RNA, 19 nt, Artificial Sequence
  Description of Artificial Sequence: Synthetic oligonucleotide
  Sense strand starting at position 2559 of SEQ ID NO: 317843
aauuacuuucguuggauaa

SEQ ID NO: 516656 - RNA, 19 nt, Artificial Sequence
  Description of Artificial Sequence: Synthetic oligonucleotide
  Antisense strand to SEQ ID NO: 516655
uuauccaacgaaaguaauu

SEQ ID NO: 516657 - RNA, 19 nt, Artificial Sequence
  Description of Artificial Sequence: Synthetic oligonucleotide
  Sense strand starting at position 2563 of SEQ ID NO: 317843
acuuucguuggauaaguaa

SEQ ID NO: 516658 - RNA, 19 nt, Artificial Sequence
  Description of Artificial Sequence: Synthetic oligonucleotide
  Antisense strand to SEQ ID NO: 516657
uuacuuauccaacgaaagu

SEQ ID NO: 516659 - RNA, 19 nt, Artificial Sequence
  Description of Artificial Sequence: Synthetic oligonucleotide
  Sense strand starting at position 2711 of SEQ ID NO: 317843
cacaguuagcgacaacaca

SEQ ID NO: 516660 - RNA, 19 nt, Artificial Sequence
  Description of Artificial Sequence: Synthetic oligonucleotide
  Antisense strand to SEQ ID NO: 516659
uguguugucgcuaacugug

SEQ ID NO: 516661 - RNA, 19 nt, Artificial Sequence
  Description of Artificial Sequence: Synthetic oligonucleotide
  Sense strand starting at position 2750 of SEQ ID NO: 317843
gugcgugauauuuaaagcu

SEQ ID NO: 516662 - RNA, 19 nt, Artificial Sequence
  Description of Artificial Sequence: Synthetic oligonucleotide
  Antisense strand to SEQ ID NO: 516661
agcuuuaaauaucacgcac

SEQ ID NO: 516663 - RNA, 19 nt, Artificial Sequence
  Description of Artificial Sequence: Synthetic oligonucleotide
  Sense strand starting at position 2966 of SEQ ID NO: 317843
gaucgaaugcuugauguua

SEQ ID NO: 516664 - RNA, 19 nt, Artificial Sequence
  Description of Artificial Sequence: Synthetic oligonucleotide
  Antisense strand to SEQ ID NO: 516663
uaacaucaagcauucgauc

SEQ ID NO: 516665 - RNA, 19 nt, Artificial Sequence
  Description of Artificial Sequence: Synthetic oligonucleotide
  Sense strand starting at position 2981 of SEQ ID NO: 317843
guuagagucuaaccucaag

SEQ ID NO: 516666 - RNA, 19 nt, Artificial Sequence
  Description of Artificial Sequence: Synthetic oligonucleotide
  Antisense strand to SEQ ID NO: 516665
cuugagguuagacucuaac

SEQ ID NO: 516667 - RNA, 19 nt, Artificial Sequence
  Description of Artificial Sequence: Synthetic oligonucleotide
  Sense strand starting at position 3219 of SEQ ID NO: 317843
cagagugugguugaggaau

SEQ ID NO: 516668 - RNA, 19 nt, Artificial Sequence
  Description of Artificial Sequence: Synthetic oligonucleotide
  Antisense strand to SEQ ID NO: 516667
auuccucaaccacacucug

SEQ ID NO: 516669 - RNA, 19 nt, Artificial Sequence
  Description of Artificial Sequence: Synthetic oligonucleotide
  Sense strand starting at position 3230 of SEQ ID NO: 317843
ugaggaaucuuuccgaccu

SEQ ID NO: 516670 - RNA, 19 nt, Artificial Sequence
  Description of Artificial Sequence: Synthetic oligonucleotide
  Antisense strand to SEQ ID NO: 516669
aggucggaaagauuccuca

SEQ ID NO: 516671 - RNA, 19 nt, Artificial Sequence
  Description of Artificial Sequence: Synthetic oligonucleotide
  Sense strand starting at position 3349 of SEQ ID NO: 317843
ggauaugguuuagccuaca

SEQ ID NO: 516672 - RNA, 19 nt, Artificial Sequence
  Description of Artificial Sequence: Synthetic oligonucleotide
  Antisense strand to SEQ ID NO: 516671
uguaggcuaaaccauaucc

SEQ ID NO: 516673 - RNA, 19 nt, Artificial Sequence
  Description of Artificial Sequence: Synthetic oligonucleotide
  Sense strand starting at position 3352 of SEQ ID NO: 317843
uaugguuuagccuacagac

SEQ ID NO: 516674 - RNA, 19 nt, Artificial Sequence
  Description of Artificial Sequence: Synthetic oligonucleotide
  Antisense strand to SEQ ID NO: 516673
gucuguaggcuaaaccaua

SEQ ID NO: 516675 - RNA, 19 nt, Artificial Sequence
  Description of Artificial Sequence: Synthetic oligonucleotide
  Sense strand starting at position 3449 of SEQ ID NO: 317843
augagugccuggccuauuu

SEQ ID NO: 516676 - RNA, 19 nt, Artificial Sequence
  Description of Artificial Sequence: Synthetic oligonucleotide
  Antisense strand to SEQ ID NO: 516675
aaauaggccaggcacucau

SEQ ID NO: 516677 - RNA, 19 nt, Artificial Sequence
  Description of Artificial Sequence: Synthetic oligonucleotide
  Sense strand starting at position 3666 of SEQ ID NO: 317843
caaagaguauuugaugaag

SEQ ID NO: 516678 - RNA, 19 nt, Artificial Sequence
  Description of Artificial Sequence: Synthetic oligonucleotide
  Antisense strand to SEQ ID NO: 516677
cuucaucaaauacucuuug

SEQ ID NO: 516679 - RNA, 19 nt, Artificial Sequence
  Description of Artificial Sequence: Synthetic oligonucleotide
  Sense strand starting at position 3668 of SEQ ID NO: 317843
aagaguauuugaugaagau

SEQ ID NO: 516680 - RNA, 19 nt, Artificial Sequence
  Description of Artificial Sequence: Synthetic oligonucleotide
  Antisense strand to SEQ ID NO: 516679
aucuucaucaaauacucuu

SEQ ID NO: 516681 - RNA, 19 nt, Artificial Sequence
  Description of Artificial Sequence: Synthetic oligonucleotide
  Sense strand starting at position 3782 of SEQ ID NO: 317843
uuaugugaaucaucaugaa

SEQ ID NO: 516682 - RNA, 19 nt, Artificial Sequence
  Description of Artificial Sequence: Synthetic oligonucleotide
  Antisense strand to SEQ ID NO: 516681
uucaugaugauucacauaa

SEQ ID NO: 516683 - RNA, 19 nt, Artificial Sequence
  Description of Artificial Sequence: Synthetic oligonucleotide
  Sense strand starting at position 76 of SEQ ID NO: 317844
aaggaaauauaagaagaga

SEQ ID NO: 516684 - RNA, 19 nt, Artificial Sequence
  Description of Artificial Sequence: Synthetic oligonucleotide
  Antisense strand to SEQ ID NO: 516683
ucucuucuuauauuuccuu

SEQ ID NO: 516685 - RNA, 19 nt, Artificial Sequence
  Description of Artificial Sequence: Synthetic oligonucleotide
  Sense strand starting at position 269 of SEQ ID NO: 317844
ccacuugaugagcaacauu

SEQ ID NO: 516686 - RNA, 19 nt, Artificial Sequence
  Description of Artificial Sequence: Synthetic oligonucleotide
  Antisense strand to SEQ ID NO: 516685
aauguugcucaucaagugg

SEQ ID NO: 516687 - RNA, 19 nt, Artificial Sequence
  Description of Artificial Sequence: Synthetic oligonucleotide
  Sense strand starting at position 511 of SEQ ID NO: 317844
ucagucacccuaggaauga

SEQ ID NO: 516688 - RNA, 19 nt, Artificial Sequence
  Description of Artificial Sequence: Synthetic oligonucleotide
  Antisense strand to SEQ ID NO: 516687
ucauuccuagggugacuga

SEQ ID NO: 516689 - RNA, 19 nt, Artificial Sequence
  Description of Artificial Sequence: Synthetic oligonucleotide
  Sense strand starting at position 539 of SEQ ID NO: 317844
ucagauucugcacgaggau

SEQ ID NO: 516690 - RNA, 19 nt, Artificial Sequence
  Description of Artificial Sequence: Synthetic oligonucleotide
  Antisense strand to SEQ ID NO: 516689
auccucgugcagaaucuga

SEQ ID NO: 516691 - RNA, 19 nt, Artificial Sequence
  Description of Artificial Sequence: Synthetic oligonucleotide
  Sense strand starting at position 650 of SEQ ID NO: 317844
cccucuuugcauugagaag

SEQ ID NO: 516692 - RNA, 19 nt, Artificial Sequence
  Description of Artificial Sequence: Synthetic oligonucleotide
  Antisense strand to SEQ ID NO: 516691
cuucucaaugcaaagaggg

SEQ ID NO: 516693 - RNA, 19 nt, Artificial Sequence
  Description of Artificial Sequence: Synthetic oligonucleotide
  Sense strand starting at position 684 of SEQ ID NO: 317844
auauguguauacuccaaug

SEQ ID NO: 516694 - RNA, 19 nt, Artificial Sequence
  Description of Artificial Sequence: Synthetic oligonucleotide
  Antisense strand to SEQ ID NO: 516693
cauuggaguauacacauau

SEQ ID NO: 516695 - RNA, 19 nt, Artificial Sequence
  Description of Artificial Sequence: Synthetic oligonucleotide
  Sense strand starting at position 989 of SEQ ID NO: 317844
ggaagaccuagcugggaau

SEQ ID NO: 516696 - RNA, 19 nt, Artificial Sequence
  Description of Artificial Sequence: Synthetic oligonucleotide
  Antisense strand to SEQ ID NO: 516695
auucccagcuaggucuucc

SEQ ID NO: 516697 - RNA, 19 nt, Artificial Sequence
  Description of Artificial Sequence: Synthetic oligonucleotide
  Sense strand starting at position 1116 of SEQ ID NO: 317844
gugguugcuaaagggauaa

SEQ ID NO: 516698 - RNA, 19 nt, Artificial Sequence
  Description of Artificial Sequence: Synthetic oligonucleotide
  Antisense strand to SEQ ID NO: 516697
uuaucccuuuagcaaccac

SEQ ID NO: 516699 - RNA, 19 nt, Artificial Sequence
  Description of Artificial Sequence: Synthetic oligonucleotide
  Sense strand starting at position 1194 of SEQ ID NO: 317844
cuggaagagucugcuugau

SEQ ID NO: 516700 - RNA, 19 nt, Artificial Sequence
  Description of Artificial Sequence: Synthetic oligonucleotide
  Antisense strand to SEQ ID NO: 516699
aucaagcagacucuuccag

SEQ ID NO: 516701 - RNA, 19 nt, Artificial Sequence
  Description of Artificial Sequence: Synthetic oligonucleotide
  Sense strand starting at position 1266 of SEQ ID NO: 317844
gcauguauaaguugaagga

SEQ ID NO: 516702 - RNA, 19 nt, Artificial Sequence
  Description of Artificial Sequence: Synthetic oligonucleotide
  Antisense strand to SEQ ID NO: 516701
uccuucaacuuauacaugc

SEQ ID NO: 516703 - RNA, 19 nt, Artificial Sequence
  Description of Artificial Sequence: Synthetic oligonucleotide
  Sense strand starting at position 1292 of SEQ ID NO: 317844
gcuauuauaagguggagaa

SEQ ID NO: 516704 - RNA, 19 nt, Artificial Sequence
  Description of Artificial Sequence: Synthetic oligonucleotide
  Antisense strand to SEQ ID NO: 516703
uucuccaccuuauaauagc

SEQ ID NO: 516705 - RNA, 19 nt, Artificial Sequence
  Description of Artificial Sequence: Synthetic oligonucleotide
  Sense strand starting at position 1480 of SEQ ID NO: 317844
agggaaaucugugcaaguc

SEQ ID NO: 516706 - RNA, 19 nt, Artificial Sequence
  Description of Artificial Sequence: Synthetic oligonucleotide
  Antisense strand to SEQ ID NO: 516705
gacuugcacagauuucccu

SEQ ID NO: 516707 - RNA, 19 nt, Artificial Sequence
  Description of Artificial Sequence: Synthetic oligonucleotide
  Sense strand starting at position 1481 of SEQ ID NO: 317844
gggaaaucugugcaagucu

SEQ ID NO: 516708 - RNA, 19 nt, Artificial Sequence
  Description of Artificial Sequence: Synthetic oligonucleotide
  Antisense strand to SEQ ID NO: 516707
agacuugcacagauuuccc

SEQ ID NO: 516709 - RNA, 19 nt, Artificial Sequence
  Description of Artificial Sequence: Synthetic oligonucleotide
  Sense strand starting at position 2078 of SEQ ID NO: 317844
cuaugcugacaauggaauu

SEQ ID NO: 516710 - RNA, 19 nt, Artificial Sequence
  Description of Artificial Sequence: Synthetic oligonucleotide
  Antisense strand to SEQ ID NO: 516709
aauuccauugucagcauag

SEQ ID NO: 516711 - RNA, 19 nt, Artificial Sequence
  Description of Artificial Sequence: Synthetic oligonucleotide
  Sense strand starting at position 2171 of SEQ ID NO: 317844
ggccaauguguugaucaga

SEQ ID NO: 516712 - RNA, 19 nt, Artificial Sequence
  Description of Artificial Sequence: Synthetic oligonucleotide
  Antisense strand to SEQ ID NO: 516711
ucugaucaacacauuggcc

SEQ ID NO: 516713 - RNA, 19 nt, Artificial Sequence
  Description of Artificial Sequence: Synthetic oligonucleotide
  Sense strand starting at position 2191 of SEQ ID NO: 317844
uaaacuuccguguaacuga

SEQ ID NO: 516714 - RNA, 19 nt, Artificial Sequence
  Description of Artificial Sequence: Synthetic oligonucleotide
  Antisense strand to SEQ ID NO: 516713
ucaguuacacggaaguuua

SEQ ID NO: 516715 - RNA, 19 nt, Artificial Sequence
  Description of Artificial Sequence: Synthetic oligonucleotide
  Sense strand starting at position 2202 of SEQ ID NO: 317844
guaacugagucuguggaca

SEQ ID NO: 516716 - RNA, 19 nt, Artificial Sequence
  Description of Artificial Sequence: Synthetic oligonucleotide
  Antisense strand to SEQ ID NO: 516715
uguccacagacucaguuac

SEQ ID NO: 516717 - RNA, 19 nt, Artificial Sequence
  Description of Artificial Sequence: Synthetic oligonucleotide
  Sense strand starting at position 2223 of SEQ ID NO: 317844
uguggagaauguccucauu

SEQ ID NO: 516718 - RNA, 19 nt, Artificial Sequence
  Description of Artificial Sequence: Synthetic oligonucleotide
  Antisense strand to SEQ ID NO: 516717
aaugaggacauucuccaca

SEQ ID NO: 516719 - RNA, 19 nt, Artificial Sequence
  Description of Artificial Sequence: Synthetic oligonucleotide
  Sense strand starting at position 2531 of SEQ ID NO: 317844
gugcgagucuugacagugu

SEQ ID NO: 516720 - RNA, 19 nt, Artificial Sequence
  Description of Artificial Sequence: Synthetic oligonucleotide
  Antisense strand to SEQ ID NO: 516719
acacugucaagacucgcac

SEQ ID NO: 516721 - RNA, 19 nt, Artificial Sequence
  Description of Artificial Sequence: Synthetic oligonucleotide
  Sense strand starting at position 2568 of SEQ ID NO: 317844
acaauaagcuccuugagga

SEQ ID NO: 516722 - RNA, 19 nt, Artificial Sequence
  Description of Artificial Sequence: Synthetic oligonucleotide
  Antisense strand to SEQ ID NO: 516721
uccucaaggagcuuauugu

SEQ ID NO: 516723 - RNA, 19 nt, Artificial Sequence
  Description of Artificial Sequence: Synthetic oligonucleotide
  Sense strand starting at position 2762 of SEQ ID NO: 317844
aaguaagucuuguuugaaa

SEQ ID NO: 516724 - RNA, 19 nt, Artificial Sequence
  Description of Artificial Sequence: Synthetic oligonucleotide
  Antisense strand to SEQ ID NO: 516723
uuucaaacaagacuuacuu

SEQ ID NO: 516725 - RNA, 19 nt, Artificial Sequence
  Description of Artificial Sequence: Synthetic oligonucleotide
  Sense strand starting at position 2764 of SEQ ID NO: 317844
guaagucuuguuugaaaga

SEQ ID NO: 516726 - RNA, 19 nt, Artificial Sequence
  Description of Artificial Sequence: Synthetic oligonucleotide
  Antisense strand to SEQ ID NO: 516725
ucuuucaaacaagacuuac

SEQ ID NO: 516727 - RNA, 19 nt, Artificial Sequence
  Description of Artificial Sequence: Synthetic oligonucleotide
  Sense strand starting at position 2835 of SEQ ID NO: 317844
uuugaagagccauaaguua

SEQ ID NO: 516728 - RNA, 19 nt, Artificial Sequence
  Description of Artificial Sequence: Synthetic oligonucleotide
  Antisense strand to SEQ ID NO: 516727
uaacuuauggcucuucaaa

SEQ ID NO: 516729 - RNA, 19 nt, Artificial Sequence
  Description of Artificial Sequence: Synthetic oligonucleotide
  Sense strand starting at position 2885 of SEQ ID NO: 317844
guugauggguggaaucuga

SEQ ID NO: 516730 - RNA, 19 nt, Artificial Sequence
  Description of Artificial Sequence: Synthetic oligonucleotide
  Antisense strand to SEQ ID NO: 516729
ucagauuccacccaucaac

SEQ ID NO: 516731 - RNA, 19 nt, Artificial Sequence
  Description of Artificial Sequence: Synthetic oligonucleotide
  Sense strand starting at position 2947 of SEQ ID NO: 317844
agaggucaauucuuucuua

SEQ ID NO: 516732 - RNA, 19 nt, Artificial Sequence
  Description of Artificial Sequence: Synthetic oligonucleotide
  Antisense strand to SEQ ID NO: 516731
uaagaaagaauugaccucu

SEQ ID NO: 516733 - RNA, 19 nt, Artificial Sequence
  Description of Artificial Sequence: Synthetic oligonucleotide
  Sense strand starting at position 3066 of SEQ ID NO: 317844
cuuggaucccuuggacauu

SEQ ID NO: 516734 - RNA, 19 nt, Artificial Sequence
  Description of Artificial Sequence: Synthetic oligonucleotide
  Antisense strand to SEQ ID NO: 516733
aauguccaagggauccaag

SEQ ID NO: 516735 - RNA, 19 nt, Artificial Sequence
  Description of Artificial Sequence: Synthetic oligonucleotide
  Sense strand starting at position 3152 of SEQ ID NO: 317844
aucuuaaagcaaugacaug

SEQ ID NO: 516736 - RNA, 19 nt, Artificial Sequence
  Description of Artificial Sequence: Synthetic oligonucleotide
  Antisense strand to SEQ ID NO: 516735
caugucauugcuuuaagau

SEQ ID NO: 516737 - RNA, 19 nt, Artificial Sequence
  Description of Artificial Sequence: Synthetic oligonucleotide
  Sense strand starting at position 3192 of SEQ ID NO: 317844
aagugacagcgacagaauu

SEQ ID NO: 516738 - RNA, 19 nt, Artificial Sequence
  Description of Artificial Sequence: Synthetic oligonucleotide
  Antisense strand to SEQ ID NO: 516737
aauucugucgcugucacuu

SEQ ID NO: 516739 - RNA, 19 nt, Artificial Sequence
  Description of Artificial Sequence: Synthetic oligonucleotide
  Sense strand starting at position 3205 of SEQ ID NO: 317844
agaauuacuuaagugcauu

SEQ ID NO: 516740 - RNA, 19 nt, Artificial Sequence
  Description of Artificial Sequence: Synthetic oligonucleotide
  Antisense strand to SEQ ID NO: 516739
aaugcacuuaaguaauucu

SEQ ID NO: 516741 - RNA, 19 nt, Artificial Sequence
  Description of Artificial Sequence: Synthetic oligonucleotide
  Sense strand starting at position 3442 of SEQ ID NO: 317844
ucuauuaugugaucaagca

SEQ ID NO: 516742 - RNA, 19 nt, Artificial Sequence
  Description of Artificial Sequence: Synthetic oligonucleotide
  Antisense strand to SEQ ID NO: 516741
ugcuugaucacauaauaga

SEQ ID NO: 516743 - RNA, 19 nt, Artificial Sequence
  Description of Artificial Sequence: Synthetic oligonucleotide
  Sense strand starting at position 3443 of SEQ ID NO: 317844
cuauuaugugaucaagcac

SEQ ID NO: 516744 - RNA, 19 nt, Artificial Sequence
  Description of Artificial Sequence: Synthetic oligonucleotide
  Antisense strand to SEQ ID NO: 516743
gugcuugaucacauaauag

SEQ ID NO: 516745 - RNA, 19 nt, Artificial Sequence
  Description of Artificial Sequence: Synthetic oligonucleotide
  Sense strand starting at position 3545 of SEQ ID NO: 317844
acgccaaaugaugguagau

SEQ ID NO: 516746 - RNA, 19 nt, Artificial Sequence
  Description of Artificial Sequence: Synthetic oligonucleotide
  Antisense strand to SEQ ID NO: 516745
aucuaccaucauuuggcgu

SEQ ID NO: 516747 - RNA, 19 nt, Artificial Sequence
  Description of Artificial Sequence: Synthetic oligonucleotide
  Sense strand starting at position 3554 of SEQ ID NO: 317844
gaugguagaucccuaguuu

SEQ ID NO: 516748 - RNA, 19 nt, Artificial Sequence
  Description of Artificial Sequence: Synthetic oligonucleotide
  Antisense strand to SEQ ID NO: 516747
aaacuagggaucuaccauc

SEQ ID NO: 516749 - RNA, 19 nt, Artificial Sequence
  Description of Artificial Sequence: Synthetic oligonucleotide
  Sense strand starting at position 3580 of SEQ ID NO: 317844
gcacguuggaaugaauuga

SEQ ID NO: 516750 - RNA, 19 nt, Artificial Sequence
  Description of Artificial Sequence: Synthetic oligonucleotide
  Antisense strand to SEQ ID NO: 516749
ucaauucauuccaacgugc

SEQ ID NO: 516751 - RNA, 19 nt, Artificial Sequence
  Description of Artificial Sequence: Synthetic oligonucleotide
  Sense strand starting at position 3584 of SEQ ID NO: 317844
guuggaaugaauugaaggu

SEQ ID NO: 516752 - RNA, 19 nt, Artificial Sequence
  Description of Artificial Sequence: Synthetic oligonucleotide
  Antisense strand to SEQ ID NO: 516751
accuucaauucauuccaac

SEQ ID NO: 516753 - RNA, 19 nt, Artificial Sequence
  Description of Artificial Sequence: Synthetic oligonucleotide
  Sense strand starting at position 3590 of SEQ ID NO: 317844
augaauugaaggugucauc

SEQ ID NO: 516754 - RNA, 19 nt, Artificial Sequence
  Description of Artificial Sequence: Synthetic oligonucleotide
  Antisense strand to SEQ ID NO: 516753
gaugacaccuucaauucau

SEQ ID NO: 516755 - RNA, 19 nt, Artificial Sequence
  Description of Artificial Sequence: Synthetic oligonucleotide
  Sense strand starting at position 3642 of SEQ ID NO: 317844
agcaaugcugucuguauuu

SEQ ID NO: 516756 - RNA, 19 nt, Artificial Sequence
  Description of Artificial Sequence: Synthetic oligonucleotide
  Antisense strand to SEQ ID NO: 516755
aaauacagacagcauugcu

SEQ ID NO: 516757 - RNA, 19 nt, Artificial Sequence
  Description of Artificial Sequence: Synthetic oligonucleotide
  Sense strand starting at position 3827 of SEQ ID NO: 317844
aggacacuuuauccugcaa

SEQ ID NO: 516758 - RNA, 19 nt, Artificial Sequence
  Description of Artificial Sequence: Synthetic oligonucleotide
  Antisense strand to SEQ ID NO: 516757
uugcaggauaaaguguccu

SEQ ID NO: 516759 - RNA, 19 nt, Artificial Sequence
  Description of Artificial Sequence: Synthetic oligonucleotide
  Sense strand starting at position 3879 of SEQ ID NO: 317844
gcagacuagcgagaccaau

SEQ ID NO: 516760 - RNA, 19 nt, Artificial Sequence
  Description of Artificial Sequence: Synthetic oligonucleotide
  Antisense strand to SEQ ID NO: 516759
auuggucucgcuagucugc

SEQ ID NO: 516761 - RNA, 19 nt, Artificial Sequence
  Description of Artificial Sequence: Synthetic oligonucleotide
  Sense strand starting at position 3888 of SEQ ID NO: 317844
cgagaccaaucuuuagacu

SEQ ID NO: 516762 - RNA, 19 nt, Artificial Sequence
  Description of Artificial Sequence: Synthetic oligonucleotide
  Antisense strand to SEQ ID NO: 516761
agucuaaagauuggucucg

SEQ ID NO: 516763 - RNA, 19 nt, Artificial Sequence
  Description of Artificial Sequence: Synthetic oligonucleotide
  Sense strand starting at position 20 of SEQ ID NO: 317845
ucaggaauguauccuuguu

SEQ ID NO: 516764 - RNA, 19 nt, Artificial Sequence
  Description of Artificial Sequence: Synthetic oligonucleotide
  Antisense strand to SEQ ID NO: 516763
aacaaggauacauuccuga

SEQ ID NO: 516765 - RNA, 19 nt, Artificial Sequence
  Description of Artificial Sequence: Synthetic oligonucleotide
  Sense strand starting at position 22 of SEQ ID NO: 317845
aggaauguauccuuguuaa

SEQ ID NO: 516766 - RNA, 19 nt, Artificial Sequence
  Description of Artificial Sequence: Synthetic oligonucleotide
  Antisense strand to SEQ ID NO: 516765
uuaacaaggauacauuccu

SEQ ID NO: 516767 - RNA, 19 nt, Artificial Sequence
  Description of Artificial Sequence: Synthetic oligonucleotide
  Sense strand starting at position 63 of SEQ ID NO: 317845
gucaaaucuugcuuuagaa

SEQ ID NO: 516768 - RNA, 19 nt, Artificial Sequence
  Description of Artificial Sequence: Synthetic oligonucleotide
  Antisense strand to SEQ ID NO: 516767
uucuaaagcaagauuugac

SEQ ID NO: 516769 - RNA, 19 nt, Artificial Sequence
  Description of Artificial Sequence: Synthetic oligonucleotide
  Sense strand starting at position 70 of SEQ ID NO: 317845
cuugcuuuagaauaaagca

SEQ ID NO: 516770 - RNA, 19 nt, Artificial Sequence
  Description of Artificial Sequence: Synthetic oligonucleotide
  Antisense strand to SEQ ID NO: 516769
ugcuuuauucuaaagcaag

SEQ ID NO: 516771 - RNA, 19 nt, Artificial Sequence
  Description of Artificial Sequence: Synthetic oligonucleotide
  Sense strand starting at position 98 of SEQ ID NO: 317845
guccuugaccagcaguaua

SEQ ID NO: 516772 - RNA, 19 nt, Artificial Sequence
  Description of Artificial Sequence: Synthetic oligonucleotide
  Antisense strand to SEQ ID NO: 516771
uauacugcuggucaaggac

SEQ ID NO: 516773 - RNA, 19 nt, Artificial Sequence
  Description of Artificial Sequence: Synthetic oligonucleotide
  Sense strand starting at position 372 of SEQ ID NO: 317845
ggaugcaaggcaugauuga

SEQ ID NO: 516774 - RNA, 19 nt, Artificial Sequence
  Description of Artificial Sequence: Synthetic oligonucleotide
  Antisense strand to SEQ ID NO: 516773
ucaaucaugccuugcaucc

SEQ ID NO: 516775 - RNA, 19 nt, Artificial Sequence
  Description of Artificial Sequence: Synthetic oligonucleotide
  Sense strand starting at position 438 of SEQ ID NO: 317845
gucaacacuugauuagaca

SEQ ID NO: 516776 - RNA, 19 nt, Artificial Sequence
  Description of Artificial Sequence: Synthetic oligonucleotide
  Antisense strand to SEQ ID NO: 516775
ugucuaaucaaguguugac

SEQ ID NO: 516777 - RNA, 19 nt, Artificial Sequence
  Description of Artificial Sequence: Synthetic oligonucleotide
  Sense strand starting at position 533 of SEQ ID NO: 317845
gggugauauugcccucaag

SEQ ID NO: 516778 - RNA, 19 nt, Artificial Sequence
  Description of Artificial Sequence: Synthetic oligonucleotide
  Antisense strand to SEQ ID NO: 516777
cuugagggcaauaucaccc

SEQ ID NO: 516779 - RNA, 19 nt, Artificial Sequence
  Description of Artificial Sequence: Synthetic oligonucleotide
  Sense strand starting at position 676 of SEQ ID NO: 317845
aaagaauuggucugcccau

SEQ ID NO: 516780 - RNA, 19 nt, Artificial Sequence
  Description of Artificial Sequence: Synthetic oligonucleotide
  Antisense strand to SEQ ID NO: 516779
augggcagaccaauucuuu

SEQ ID NO: 516781 - RNA, 19 nt, Artificial Sequence
  Description of Artificial Sequence: Synthetic oligonucleotide
  Sense strand starting at position 677 of SEQ ID NO: 317845
aagaauuggucugcccaua

SEQ ID NO: 516782 - RNA, 19 nt, Artificial Sequence
  Description of Artificial Sequence: Synthetic oligonucleotide
  Antisense strand to SEQ ID NO: 516781
uaugggcagaccaauucuu

SEQ ID NO: 516783 - RNA, 19 nt, Artificial Sequence
  Description of Artificial Sequence: Synthetic oligonucleotide
  Sense strand starting at position 840 of SEQ ID NO: 317845
guguaaauuuagcuuaucu

SEQ ID NO: 516784 - RNA, 19 nt, Artificial Sequence
  Description of Artificial Sequence: Synthetic oligonucleotide
  Antisense strand to SEQ ID NO: 516783
agauaagcuaaauuuacac

SEQ ID NO: 516785 - RNA, 19 nt, Artificial Sequence
  Description of Artificial Sequence: Synthetic oligonucleotide
  Sense strand starting at position 922 of SEQ ID NO: 317845
ugauauaagcuaggucuca

SEQ ID NO: 516786 - RNA, 19 nt, Artificial Sequence
  Description of Artificial Sequence: Synthetic oligonucleotide
  Antisense strand to SEQ ID NO: 516785
ugagaccuagcuuauauca

SEQ ID NO: 516787 - RNA, 19 nt, Artificial Sequence
  Description of Artificial Sequence: Synthetic oligonucleotide
  Sense strand starting at position 923 of SEQ ID NO: 317845
gauauaagcuaggucucaa

SEQ ID NO: 516788 - RNA, 19 nt, Artificial Sequence
  Description of Artificial Sequence: Synthetic oligonucleotide
  Antisense strand to SEQ ID NO: 516787
uugagaccuagcuuauauc

SEQ ID NO: 516789 - RNA, 19 nt, Artificial Sequence
  Description of Artificial Sequence: Synthetic oligonucleotide
  Sense strand starting at position 953 of SEQ ID NO: 317845
aggugacacuuauuccaca

SEQ ID NO: 516790 - RNA, 19 nt, Artificial Sequence
  Description of Artificial Sequence: Synthetic oligonucleotide
  Antisense strand to SEQ ID NO: 516789
uguggaauaagugucaccu

SEQ ID NO: 516791 - RNA, 19 nt, Artificial Sequence
  Description of Artificial Sequence: Synthetic oligonucleotide
  Sense strand starting at position 954 of SEQ ID NO: 317845
ggugacacuuauuccacaa

SEQ ID NO: 516792 - RNA, 19 nt, Artificial Sequence
  Description of Artificial Sequence: Synthetic oligonucleotide
  Antisense strand to SEQ ID NO: 516791
uuguggaauaagugucacc

SEQ ID NO: 516793 - RNA, 19 nt, Artificial Sequence
  Description of Artificial Sequence: Synthetic oligonucleotide
  Sense strand starting at position 1007 of SEQ ID NO: 317845
uuggaugggaauuggcaua

SEQ ID NO: 516794 - RNA, 19 nt, Artificial Sequence
  Description of Artificial Sequence: Synthetic oligonucleotide
  Antisense strand to SEQ ID NO: 516793
uaugccaauucccauccaa

SEQ ID NO: 516795 - RNA, 19 nt, Artificial Sequence
  Description of Artificial Sequence: Synthetic oligonucleotide
  Sense strand starting at position 1020 of SEQ ID NO: 317845
ggcauacauuagccaucaa

SEQ ID NO: 516796 - RNA, 19 nt, Artificial Sequence
  Description of Artificial Sequence: Synthetic oligonucleotide
  Antisense strand to SEQ ID NO: 516795
uugauggcuaauguaugcc

SEQ ID NO: 516797 - RNA, 19 nt, Artificial Sequence
  Description of Artificial Sequence: Synthetic oligonucleotide
  Sense strand starting at position 1092 of SEQ ID NO: 317845
acuuucucugacugacagu

SEQ ID NO: 516798 - RNA, 19 nt, Artificial Sequence
  Description of Artificial Sequence: Synthetic oligonucleotide
  Antisense strand to SEQ ID NO: 516797
acugucagucagagaaagu

SEQ ID NO: 516799 - RNA, 19 nt, Artificial Sequence
  Description of Artificial Sequence: Synthetic oligonucleotide
  Sense strand starting at position 1354 of SEQ ID NO: 317845
ccucgcaggcguucaauua

SEQ ID NO: 516800 - RNA, 19 nt, Artificial Sequence
  Description of Artificial Sequence: Synthetic oligonucleotide
  Antisense strand to SEQ ID NO: 516799
uaauugaacgccugcgagg

SEQ ID NO: 516801 - RNA, 19 nt, Artificial Sequence
  Description of Artificial Sequence: Synthetic oligonucleotide
  Sense strand starting at position 1397 of SEQ ID NO: 317845
gaaugaccuuaguuaagca

SEQ ID NO: 516802 - RNA, 19 nt, Artificial Sequence
  Description of Artificial Sequence: Synthetic oligonucleotide
  Antisense strand to SEQ ID NO: 516801
ugcuuaacuaaggucauuc

SEQ ID NO: 516803 - RNA, 19 nt, Artificial Sequence
  Description of Artificial Sequence: Synthetic oligonucleotide
  Sense strand starting at position 1401 of SEQ ID NO: 317845
gaccuuaguuaagcaaaga

SEQ ID NO: 516804 - RNA, 19 nt, Artificial Sequence
  Description of Artificial Sequence: Synthetic oligonucleotide
  Antisense strand to SEQ ID NO: 516803
ucuuugcuuaacuaagguc

SEQ ID NO: 516805 - RNA, 19 nt, Artificial Sequence
  Description of Artificial Sequence: Synthetic oligonucleotide
  Sense strand starting at position 1463 of SEQ ID NO: 317845
agaaaucggcugcaugagu

SEQ ID NO: 516806 - RNA, 19 nt, Artificial Sequence
  Description of Artificial Sequence: Synthetic oligonucleotide
  Antisense strand to SEQ ID NO: 516805
acucaugcagccgauuucu

SEQ ID NO: 516807 - RNA, 19 nt, Artificial Sequence
  Description of Artificial Sequence: Synthetic oligonucleotide
  Sense strand starting at position 1592 of SEQ ID NO: 317845
guccacaugcaggaguaaa

SEQ ID NO: 516808 - RNA, 19 nt, Artificial Sequence
  Description of Artificial Sequence: Synthetic oligonucleotide
  Antisense strand to SEQ ID NO: 516807
uuuacuccugcauguggac

SEQ ID NO: 516809 - RNA, 19 nt, Artificial Sequence
  Description of Artificial Sequence: Synthetic oligonucleotide
  Sense strand starting at position 1995 of SEQ ID NO: 317845
ugagaaggguuauuccaau

SEQ ID NO: 516810 - RNA, 19 nt, Artificial Sequence
  Description of Artificial Sequence: Synthetic oligonucleotide
  Antisense strand to SEQ ID NO: 516809
auuggaauaacccuucuca

SEQ ID NO: 516811 - RNA, 19 nt, Artificial Sequence
  Description of Artificial Sequence: Synthetic oligonucleotide
  Sense strand starting at position 2044 of SEQ ID NO: 317845
guuaccauagcuuaauguu

SEQ ID NO: 516812 - RNA, 19 nt, Artificial Sequence
  Description of Artificial Sequence: Synthetic oligonucleotide
  Antisense strand to SEQ ID NO: 516811
aacauuaagcuaugguaac

SEQ ID NO: 516813 - RNA, 19 nt, Artificial Sequence
  Description of Artificial Sequence: Synthetic oligonucleotide
  Sense strand starting at position 2198 of SEQ ID NO: 317845
caauaugacucguccggaa

SEQ ID NO: 516814 - RNA, 19 nt, Artificial Sequence
  Description of Artificial Sequence: Synthetic oligonucleotide
  Antisense strand to SEQ ID NO: 516813
uuccggacgagucauauug

SEQ ID NO: 516815 - RNA, 19 nt, Artificial Sequence
  Description of Artificial Sequence: Synthetic oligonucleotide
  Sense strand starting at position 2652 of SEQ ID NO: 317845
aguguauuguggaagggag

SEQ ID NO: 516816 - RNA, 19 nt, Artificial Sequence
  Description of Artificial Sequence: Synthetic oligonucleotide
  Antisense strand to SEQ ID NO: 516815
cucccuuccacaauacacu

SEQ ID NO: 516817 - RNA, 19 nt, Artificial Sequence
  Description of Artificial Sequence: Synthetic oligonucleotide
  Sense strand starting at position 2853 of SEQ ID NO: 317845
gcucuuccuguuguaugua

SEQ ID NO: 516818 - RNA, 19 nt, Artificial Sequence
  Description of Artificial Sequence: Synthetic oligonucleotide
  Antisense strand to SEQ ID NO: 516817
uacauacaacaggaagagc

SEQ ID NO: 516819 - RNA, 19 nt, Artificial Sequence
  Description of Artificial Sequence: Synthetic oligonucleotide
  Sense strand starting at position 2933 of SEQ ID NO: 317845
gaaggagcuuuguugaauu

SEQ ID NO: 516820 - RNA, 19 nt, Artificial Sequence
  Description of Artificial Sequence: Synthetic oligonucleotide
  Antisense strand to SEQ ID NO: 516819
aauucaacaaagcuccuuc

SEQ ID NO: 516821 - RNA, 19 nt, Artificial Sequence
  Description of Artificial Sequence: Synthetic oligonucleotide
  Sense strand starting at position 2935 of SEQ ID NO: 317845
aggagcuuuguugaauuau

SEQ ID NO: 516822 - RNA, 19 nt, Artificial Sequence
  Description of Artificial Sequence: Synthetic oligonucleotide
  Antisense strand to SEQ ID NO: 516821
auaauucaacaaagcuccu

SEQ ID NO: 516823 - RNA, 19 nt, Artificial Sequence
  Description of Artificial Sequence: Synthetic oligonucleotide
  Sense strand starting at position 2979 of SEQ ID NO: 317845
auucuauguccagaaguua

SEQ ID NO: 516824 - RNA, 19 nt, Artificial Sequence
  Description of Artificial Sequence: Synthetic oligonucleotide
  Antisense strand to SEQ ID NO: 516823
uaacuucuggacauagaau

SEQ ID NO: 516825 - RNA, 19 nt, Artificial Sequence
  Description of Artificial Sequence: Synthetic oligonucleotide
  Sense strand starting at position 3008 of SEQ ID NO: 317845
aacggugaacucugcagaa

SEQ ID NO: 516826 - RNA, 19 nt, Artificial Sequence
  Description of Artificial Sequence: Synthetic oligonucleotide
  Antisense strand to SEQ ID NO: 516825
uucugcagaguucaccguu

SEQ ID NO: 516827 - RNA, 19 nt, Artificial Sequence
  Description of Artificial Sequence: Synthetic oligonucleotide
  Sense strand starting at position 3010 of SEQ ID NO: 317845
cggugaacucugcagaaua

SEQ ID NO: 516828 - RNA, 19 nt, Artificial Sequence
  Description of Artificial Sequence: Synthetic oligonucleotide
  Antisense strand to SEQ ID NO: 516827
uauucugcagaguucaccg

SEQ ID NO: 516829 - RNA, 19 nt, Artificial Sequence
  Description of Artificial Sequence: Synthetic oligonucleotide
  Sense strand starting at position 3012 of SEQ ID NO: 317845
gugaacucugcagaauaau

SEQ ID NO: 516830 - RNA, 19 nt, Artificial Sequence
  Description of Artificial Sequence: Synthetic oligonucleotide
  Antisense strand to SEQ ID NO: 516829
auuauucugcagaguucac

SEQ ID NO: 516831 - RNA, 19 nt, Artificial Sequence
  Description of Artificial Sequence: Synthetic oligonucleotide
  Sense strand starting at position 3085 of SEQ ID NO: 317845
cggaaagcaucuccucaaa

SEQ ID NO: 516832 - RNA, 19 nt, Artificial Sequence
  Description of Artificial Sequence: Synthetic oligonucleotide
  Antisense strand to SEQ ID NO: 516831
uuugaggagaugcuuuccg

SEQ ID NO: 516833 - RNA, 19 nt, Artificial Sequence
  Description of Artificial Sequence: Synthetic oligonucleotide
  Sense strand starting at position 3248 of SEQ ID NO: 317845
gcuauagaauuacuaugaa

SEQ ID NO: 516834 - RNA, 19 nt, Artificial Sequence
  Description of Artificial Sequence: Synthetic oligonucleotide
  Antisense strand to SEQ ID NO: 516833
uucauaguaauucuauagc

SEQ ID NO: 516835 - RNA, 19 nt, Artificial Sequence
  Description of Artificial Sequence: Synthetic oligonucleotide
  Sense strand starting at position 3310 of SEQ ID NO: 317845
ugcacuucccaguauuauu

SEQ ID NO: 516836 - RNA, 19 nt, Artificial Sequence
  Description of Artificial Sequence: Synthetic oligonucleotide
  Antisense strand to SEQ ID NO: 516835
aauaauacugggaagugca

SEQ ID NO: 516837 - RNA, 19 nt, Artificial Sequence
  Description of Artificial Sequence: Synthetic oligonucleotide
  Sense strand starting at position 3413 of SEQ ID NO: 317845
cugaaguuugcggaggagu

SEQ ID NO: 516838 - RNA, 19 nt, Artificial Sequence
  Description of Artificial Sequence: Synthetic oligonucleotide
  Antisense strand to SEQ ID NO: 516837
acuccuccgcaaacuucag

SEQ ID NO: 516839 - RNA, 19 nt, Artificial Sequence
  Description of Artificial Sequence: Synthetic oligonucleotide
  Sense strand starting at position 3495 of SEQ ID NO: 317845
gguacugggcauuggaaau

SEQ ID NO: 516840 - RNA, 19 nt, Artificial Sequence
  Description of Artificial Sequence: Synthetic oligonucleotide
  Antisense strand to SEQ ID NO: 516839
auuuccaaugcccaguacc

SEQ ID NO: 516841 - RNA, 19 nt, Artificial Sequence
  Description of Artificial Sequence: Synthetic oligonucleotide
  Sense strand starting at position 3903 of SEQ ID NO: 317845
ugugucaaauaugucagaa

SEQ ID NO: 516842 - RNA, 19 nt, Artificial Sequence
  Description of Artificial Sequence: Synthetic oligonucleotide
  Antisense strand to SEQ ID NO: 516841
uucugacauauuugacaca

SEQ ID NO: 516843 - RNA, 19 nt, Artificial Sequence
  Description of Artificial Sequence: Synthetic oligonucleotide
  Sense strand starting at position 103 of SEQ ID NO: 317846
aguuaauuuaggugucugu

SEQ ID NO: 516844 - RNA, 19 nt, Artificial Sequence
  Description of Artificial Sequence: Synthetic oligonucleotide
  Antisense strand to SEQ ID NO: 516843
acagacaccuaaauuaacu

SEQ ID NO: 516845 - RNA, 19 nt, Artificial Sequence
  Description of Artificial Sequence: Synthetic oligonucleotide
  Sense strand starting at position 399 of SEQ ID NO: 317846
uggccaagagcauauugau

SEQ ID NO: 516846 - RNA, 19 nt, Artificial Sequence
  Description of Artificial Sequence: Synthetic oligonucleotide
  Antisense strand to SEQ ID NO: 516845
aucaauaugcucuuggcca

SEQ ID NO: 516847 - RNA, 19 nt, Artificial Sequence
  Description of Artificial Sequence: Synthetic oligonucleotide
  Sense strand starting at position 439 of SEQ ID NO: 317846
ucaagugguuaauugggaa

SEQ ID NO: 516848 - RNA, 19 nt, Artificial Sequence
  Description of Artificial Sequence: Synthetic oligonucleotide
  Antisense strand to SEQ ID NO: 516847
uucccaauuaaccacuuga

SEQ ID NO: 516849 - RNA, 19 nt, Artificial Sequence
  Description of Artificial Sequence: Synthetic oligonucleotide
  Sense strand starting at position 577 of SEQ ID NO: 317846
ugcaguacugcuccguauu

SEQ ID NO: 516850 - RNA, 19 nt, Artificial Sequence
  Description of Artificial Sequence: Synthetic oligonucleotide
  Antisense strand to SEQ ID NO: 516849
aauacggagcaguacugca

SEQ ID NO: 516851 - RNA, 19 nt, Artificial Sequence
  Description of Artificial Sequence: Synthetic oligonucleotide
  Sense strand starting at position 629 of SEQ ID NO: 317846
gcucguggagcguucucaa

SEQ ID NO: 516852 - RNA, 19 nt, Artificial Sequence
  Description of Artificial Sequence: Synthetic oligonucleotide
  Antisense strand to SEQ ID NO: 516851
uugagaacgcuccacgagc

SEQ ID NO: 516853 - RNA, 19 nt, Artificial Sequence
  Description of Artificial Sequence: Synthetic oligonucleotide
  Sense strand starting at position 709 of SEQ ID NO: 317846
gaaggagacucaggauuua

SEQ ID NO: 516854 - RNA, 19 nt, Artificial Sequence
  Description of Artificial Sequence: Synthetic oligonucleotide
  Antisense strand to SEQ ID NO: 516853
uaaauccugagucuccuuc

SEQ ID NO: 516855 - RNA, 19 nt, Artificial Sequence
  Description of Artificial Sequence: Synthetic oligonucleotide
  Sense strand starting at position 739 of SEQ ID NO: 317846
gcauuaguccucuauccag

SEQ ID NO: 516856 - RNA, 19 nt, Artificial Sequence
  Description of Artificial Sequence: Synthetic oligonucleotide
  Antisense strand to SEQ ID NO: 516855
cuggauagaggacuaaugc

SEQ ID NO: 516857 - RNA, 19 nt, Artificial Sequence
  Description of Artificial Sequence: Synthetic oligonucleotide
  Sense strand starting at position 854 of SEQ ID NO: 317846
ccuugauggcccuagcaga

SEQ ID NO: 516858 - RNA, 19 nt, Artificial Sequence
  Description of Artificial Sequence: Synthetic oligonucleotide
  Antisense strand to SEQ ID NO: 516857
ucugcuagggccaucaagg

SEQ ID NO: 516859 - RNA, 19 nt, Artificial Sequence
  Description of Artificial Sequence: Synthetic oligonucleotide
  Sense strand starting at position 1006 of SEQ ID NO: 317846
aaggacucucugggcaauu

SEQ ID NO: 516860 - RNA, 19 nt, Artificial Sequence
  Description of Artificial Sequence: Synthetic oligonucleotide
  Antisense strand to SEQ ID NO: 516859
aauugcccagagaguccuu

SEQ ID NO: 516861 - RNA, 19 nt, Artificial Sequence
  Description of Artificial Sequence: Synthetic oligonucleotide
  Sense strand starting at position 1007 of SEQ ID NO: 317846
aggacucucugggcaauua

SEQ ID NO: 516862 - RNA, 19 nt, Artificial Sequence
  Description of Artificial Sequence: Synthetic oligonucleotide
  Antisense strand to SEQ ID NO: 516861
uaauugcccagagaguccu

SEQ ID NO: 516863 - RNA, 19 nt, Artificial Sequence
  Description of Artificial Sequence: Synthetic oligonucleotide
  Sense strand starting at position 1034 of SEQ ID NO: 317846
uuuccagggccuugacaaa

SEQ ID NO: 516864 - RNA, 19 nt, Artificial Sequence
  Description of Artificial Sequence: Synthetic oligonucleotide
  Antisense strand to SEQ ID NO: 516863
uuugucaaggcccuggaaa

SEQ ID NO: 516865 - RNA, 19 nt, Artificial Sequence
  Description of Artificial Sequence: Synthetic oligonucleotide
  Sense strand starting at position 1766 of SEQ ID NO: 317846
gagcgagcucauuaauaug

SEQ ID NO: 516866 - RNA, 19 nt, Artificial Sequence
  Description of Artificial Sequence: Synthetic oligonucleotide
  Antisense strand to SEQ ID NO: 516865
cauauuaaugagcucgcuc

SEQ ID NO: 516867 - RNA, 19 nt, Artificial Sequence
  Description of Artificial Sequence: Synthetic oligonucleotide
  Sense strand starting at position 2136 of SEQ ID NO: 317846
gggcucagauccucaaaga

SEQ ID NO: 516868 - RNA, 19 nt, Artificial Sequence
  Description of Artificial Sequence: Synthetic oligonucleotide
  Antisense strand to SEQ ID NO: 516867
ucuuugaggaucugagccc

SEQ ID NO: 516869 - RNA, 19 nt, Artificial Sequence
  Description of Artificial Sequence: Synthetic oligonucleotide
  Sense strand starting at position 2278 of SEQ ID NO: 317846
caaagucauugacugugau

SEQ ID NO: 516870 - RNA, 19 nt, Artificial Sequence
  Description of Artificial Sequence: Synthetic oligonucleotide
  Antisense strand to SEQ ID NO: 516869
aucacagucaaugacuuug

SEQ ID NO: 516871 - RNA, 19 nt, Artificial Sequence
  Description of Artificial Sequence: Synthetic oligonucleotide
  Sense strand starting at position 2279 of SEQ ID NO: 317846
aaagucauugacugugauc

SEQ ID NO: 516872 - RNA, 19 nt, Artificial Sequence
  Description of Artificial Sequence: Synthetic oligonucleotide
  Antisense strand to SEQ ID NO: 516871
gaucacagucaaugacuuu

SEQ ID NO: 516873 - RNA, 19 nt, Artificial Sequence
  Description of Artificial Sequence: Synthetic oligonucleotide
  Sense strand starting at position 2288 of SEQ ID NO: 317846
gacugugaucacuggaacu

SEQ ID NO: 516874 - RNA, 19 nt, Artificial Sequence
  Description of Artificial Sequence: Synthetic oligonucleotide
  Antisense strand to SEQ ID NO: 516873
aguuccagugaucacaguc

SEQ ID NO: 516875 - RNA, 19 nt, Artificial Sequence
  Description of Artificial Sequence: Synthetic oligonucleotide
  Sense strand starting at position 2514 of SEQ ID NO: 317846
gugguaaccaucuggauga

SEQ ID NO: 516876 - RNA, 19 nt, Artificial Sequence
  Description of Artificial Sequence: Synthetic oligonucleotide
  Antisense strand to SEQ ID NO: 516875
ucauccagaugguuaccac

SEQ ID NO: 516877 - RNA, 19 nt, Artificial Sequence
  Description of Artificial Sequence: Synthetic oligonucleotide
  Sense strand starting at position 2539 of SEQ ID NO: 317846
ucccauguucuagacauug

SEQ ID NO: 516878 - RNA, 19 nt, Artificial Sequence
  Description of Artificial Sequence: Synthetic oligonucleotide
  Antisense strand to SEQ ID NO: 516877
caaugucuagaacauggga

SEQ ID NO: 516879 - RNA, 19 nt, Artificial Sequence
  Description of Artificial Sequence: Synthetic oligonucleotide
  Sense strand starting at position 2547 of SEQ ID NO: 317846
ucuagacauugugccagaa

SEQ ID NO: 516880 - RNA, 19 nt, Artificial Sequence
  Description of Artificial Sequence: Synthetic oligonucleotide
  Antisense strand to SEQ ID NO: 516879
uucuggcacaaugucuaga

SEQ ID NO: 516881 - RNA, 19 nt, Artificial Sequence
  Description of Artificial Sequence: Synthetic oligonucleotide
  Sense strand starting at position 2591 of SEQ ID NO: 317846
gccauaguggcagaaauuc

SEQ ID NO: 516882 - RNA, 19 nt, Artificial Sequence
  Description of Artificial Sequence: Synthetic oligonucleotide
  Antisense strand to SEQ ID NO: 516881
gaauuucugccacuauggc

SEQ ID NO: 516883 - RNA, 19 nt, Artificial Sequence
  Description of Artificial Sequence: Synthetic oligonucleotide
  Sense strand starting at position 2599 of SEQ ID NO: 317846
ggcagaaauucccuccuca

SEQ ID NO: 516884 - RNA, 19 nt, Artificial Sequence
  Description of Artificial Sequence: Synthetic oligonucleotide
  Antisense strand to SEQ ID NO: 516883
ugaggagggaauuucugcc

SEQ ID NO: 516885 - RNA, 19 nt, Artificial Sequence
  Description of Artificial Sequence: Synthetic oligonucleotide
  Sense strand starting at position 2734 of SEQ ID NO: 317846
guugucaguacccaggaaa

SEQ ID NO: 516886 - RNA, 19 nt, Artificial Sequence
  Description of Artificial Sequence: Synthetic oligonucleotide
  Antisense strand to SEQ ID NO: 516885
uuuccuggguacugacaac

SEQ ID NO: 516887 - RNA, 19 nt, Artificial Sequence
  Description of Artificial Sequence: Synthetic oligonucleotide
  Sense strand starting at position 2737 of SEQ ID NO: 317846
gucaguacccaggaaaugu

SEQ ID NO: 516888 - RNA, 19 nt, Artificial Sequence
  Description of Artificial Sequence: Synthetic oligonucleotide
  Antisense strand to SEQ ID NO: 516887
acauuuccuggguacugac

SEQ ID NO: 516889 - RNA, 19 nt, Artificial Sequence
  Description of Artificial Sequence: Synthetic oligonucleotide
  Sense strand starting at position 2746 of SEQ ID NO: 317846
caggaaauguuacuuauug

SEQ ID NO: 516890 - RNA, 19 nt, Artificial Sequence
  Description of Artificial Sequence: Synthetic oligonucleotide
  Antisense strand to SEQ ID NO: 516889
caauaaguaacauuuccug

SEQ ID NO: 516891 - RNA, 19 nt, Artificial Sequence
  Description of Artificial Sequence: Synthetic oligonucleotide
  Sense strand starting at position 2863 of SEQ ID NO: 317846
guggaaacaugcucugaga

SEQ ID NO: 516892 - RNA, 19 nt, Artificial Sequence
  Description of Artificial Sequence: Synthetic oligonucleotide
  Antisense strand to SEQ ID NO: 516891
ucucagagcauguuuccac

SEQ ID NO: 516893 - RNA, 19 nt, Artificial Sequence
  Description of Artificial Sequence: Synthetic oligonucleotide
  Sense strand starting at position 2931 of SEQ ID NO: 317846
ccaggaggguccucaguau

SEQ ID NO: 516894 - RNA, 19 nt, Artificial Sequence
  Description of Artificial Sequence: Synthetic oligonucleotide
  Antisense strand to SEQ ID NO: 516893
auacugaggacccuccugg

SEQ ID NO: 516895 - RNA, 19 nt, Artificial Sequence
  Description of Artificial Sequence: Synthetic oligonucleotide
  Sense strand starting at position 2935 of SEQ ID NO: 317846
gaggguccucaguauauac

SEQ ID NO: 516896 - RNA, 19 nt, Artificial Sequence
  Description of Artificial Sequence: Synthetic oligonucleotide
  Antisense strand to SEQ ID NO: 516895
guauauacugaggacccuc

SEQ ID NO: 516897 - RNA, 19 nt, Artificial Sequence
  Description of Artificial Sequence: Synthetic oligonucleotide
  Sense strand starting at position 3129 of SEQ ID NO: 317846
ggcaguucccuggaggcaa

SEQ ID NO: 516898 - RNA, 19 nt, Artificial Sequence
  Description of Artificial Sequence: Synthetic oligonucleotide
  Antisense strand to SEQ ID NO: 516897
uugccuccagggaacugcc

SEQ ID NO: 516899 - RNA, 19 nt, Artificial Sequence
  Description of Artificial Sequence: Synthetic oligonucleotide
  Sense strand starting at position 3209 of SEQ ID NO: 317846
cugugucgucucuucccaa

SEQ ID NO: 516900 - RNA, 19 nt, Artificial Sequence
  Description of Artificial Sequence: Synthetic oligonucleotide
  Antisense strand to SEQ ID NO: 516899
uugggaagagacgacacag

SEQ ID NO: 516901 - RNA, 19 nt, Artificial Sequence
  Description of Artificial Sequence: Synthetic oligonucleotide
  Sense strand starting at position 3324 of SEQ ID NO: 317846
gcuggacauuugcauuuau

SEQ ID NO: 516902 - RNA, 19 nt, Artificial Sequence
  Description of Artificial Sequence: Synthetic oligonucleotide
  Antisense strand to SEQ ID NO: 516901
auaaaugcaaauguccagc

SEQ ID NO: 516903 - RNA, 19 nt, Artificial Sequence
  Description of Artificial Sequence: Synthetic oligonucleotide
  Sense strand starting at position 3339 of SEQ ID NO: 317846
uuaugcaugagaugaguau

SEQ ID NO: 516904 - RNA, 19 nt, Artificial Sequence
  Description of Artificial Sequence: Synthetic oligonucleotide
  Antisense strand to SEQ ID NO: 516903
auacucaucucaugcauaa

SEQ ID NO: 516905 - RNA, 19 nt, Artificial Sequence
  Description of Artificial Sequence: Synthetic oligonucleotide
  Sense strand starting at position 3497 of SEQ ID NO: 317846
ggugaaaucuucccaaagc

SEQ ID NO: 516906 - RNA, 19 nt, Artificial Sequence
  Description of Artificial Sequence: Synthetic oligonucleotide
  Antisense strand to SEQ ID NO: 516905
gcuuugggaagauuucacc

SEQ ID NO: 516907 - RNA, 19 nt, Artificial Sequence
  Description of Artificial Sequence: Synthetic oligonucleotide
  Sense strand starting at position 3561 of SEQ ID NO: 317846
gcauguagucuuuaauaac

SEQ ID NO: 516908 - RNA, 19 nt, Artificial Sequence
  Description of Artificial Sequence: Synthetic oligonucleotide
  Antisense strand to SEQ ID NO: 516907
guuauuaaagacuacaugc

SEQ ID NO: 516909 - RNA, 19 nt, Artificial Sequence
  Description of Artificial Sequence: Synthetic oligonucleotide
  Sense strand starting at position 3675 of SEQ ID NO: 317846
guaguauaauggcuaagag

SEQ ID NO: 516910 - RNA, 19 nt, Artificial Sequence
  Description of Artificial Sequence: Synthetic oligonucleotide
  Antisense strand to SEQ ID NO: 516909
cucuuagccauuauacuac

SEQ ID NO: 516911 - RNA, 19 nt, Artificial Sequence
  Description of Artificial Sequence: Synthetic oligonucleotide
  Sense strand starting at position 3707 of SEQ ID NO: 317846
gucaaauugccugaguaug

SEQ ID NO: 516912 - RNA, 19 nt, Artificial Sequence
  Description of Artificial Sequence: Synthetic oligonucleotide
  Antisense strand to SEQ ID NO: 516911
cauacucaggcaauuugac

SEQ ID NO: 516913 - RNA, 19 nt, Artificial Sequence
  Description of Artificial Sequence: Synthetic oligonucleotide
  Sense strand starting at position 3753 of SEQ ID NO: 317846
gggcaaauaccuuaacucu

SEQ ID NO: 516914 - RNA, 19 nt, Artificial Sequence
  Description of Artificial Sequence: Synthetic oligonucleotide
  Antisense strand to SEQ ID NO: 516913
agaguuaagguauuugccc

SEQ ID NO: 516915 - RNA, 19 nt, Artificial Sequence
  Description of Artificial Sequence: Synthetic oligonucleotide
  Sense strand starting at position 3882 of SEQ ID NO: 317846
agaguaaguguuugauaug

SEQ ID NO: 516916 - RNA, 19 nt, Artificial Sequence
  Description of Artificial Sequence: Synthetic oligonucleotide
  Antisense strand to SEQ ID NO: 516915
cauaucaaacacuuacucu

SEQ ID NO: 516917 - RNA, 19 nt, Artificial Sequence
  Description of Artificial Sequence: Synthetic oligonucleotide
  Sense strand starting at position 3893 of SEQ ID NO: 317846
uugauaugugcugaccauu

SEQ ID NO: 516918 - RNA, 19 nt, Artificial Sequence
  Description of Artificial Sequence: Synthetic oligonucleotide
  Antisense strand to SEQ ID NO: 516917
aauggucagcacauaucaa

SEQ ID NO: 516919 - RNA, 19 nt, Artificial Sequence
  Description of Artificial Sequence: Synthetic oligonucleotide
  Sense strand starting at position 3935 of SEQ ID NO: 317846
agaguauuccgucauacag

SEQ ID NO: 516920 - RNA, 19 nt, Artificial Sequence
  Description of Artificial Sequence: Synthetic oligonucleotide
  Antisense strand to SEQ ID NO: 516919
cuguaugacggaauacucu

SEQ ID NO: 516921 - RNA, 19 nt, Artificial Sequence
  Description of Artificial Sequence: Synthetic oligonucleotide
  Sense strand starting at position 3972 of SEQ ID NO: 317846
gacuacuccuugcuggaca

SEQ ID NO: 516922 - RNA, 19 nt, Artificial Sequence
  Description of Artificial Sequence: Synthetic oligonucleotide
  Antisense strand to SEQ ID NO: 516921
uguccagcaaggaguaguc

SEQ ID NO: 516923 - RNA, 19 nt, Artificial Sequence
  Description of Artificial Sequence: Synthetic oligonucleotide
  Sense strand starting at position 126 of SEQ ID NO: 317847
cguucaaaucgcgcuccaa

SEQ ID NO: 516924 - RNA, 19 nt, Artificial Sequence
  Description of Artificial Sequence: Synthetic oligonucleotide
  Antisense strand to SEQ ID NO: 516923
uuggagcgcgauuugaacg

SEQ ID NO: 516925 - RNA, 19 nt, Artificial Sequence
  Description of Artificial Sequence: Synthetic oligonucleotide
  Sense strand starting at position 518 of SEQ ID NO: 317847
gcgggucuuuccgaaugag

SEQ ID NO: 516926 - RNA, 19 nt, Artificial Sequence
  Description of Artificial Sequence: Synthetic oligonucleotide
  Antisense strand to SEQ ID NO: 516925
cucauucggaaagacccgc

SEQ ID NO: 516927 - RNA, 19 nt, Artificial Sequence
  Description of Artificial Sequence: Synthetic oligonucleotide
  Sense strand starting at position 521 of SEQ ID NO: 317847
ggucuuuccgaaugaguca

SEQ ID NO: 516928 - RNA, 19 nt, Artificial Sequence
  Description of Artificial Sequence: Synthetic oligonucleotide
  Antisense strand to SEQ ID NO: 516927
ugacucauucggaaagacc

SEQ ID NO: 516929 - RNA, 19 nt, Artificial Sequence
  Description of Artificial Sequence: Synthetic oligonucleotide
  Sense strand starting at position 528 of SEQ ID NO: 317847
ccgaaugagucacuacaga

SEQ ID NO: 516930 - RNA, 19 nt, Artificial Sequence
  Description of Artificial Sequence: Synthetic oligonucleotide
  Antisense strand to SEQ ID NO: 516929
ucuguagugacucauucgg

SEQ ID NO: 516931 - RNA, 19 nt, Artificial Sequence
  Description of Artificial Sequence: Synthetic oligonucleotide
  Sense strand starting at position 662 of SEQ ID NO: 317847
ggcguuucagcucuucuga

SEQ ID NO: 516932 - RNA, 19 nt, Artificial Sequence
  Description of Artificial Sequence: Synthetic oligonucleotide
  Antisense strand to SEQ ID NO: 516931
ucagaagagcugaaacgcc

SEQ ID NO: 516933 - RNA, 19 nt, Artificial Sequence
  Description of Artificial Sequence: Synthetic oligonucleotide
  Sense strand starting at position 727 of SEQ ID NO: 317847
uuccgucgauccuacaaau

SEQ ID NO: 516934 - RNA, 19 nt, Artificial Sequence
  Description of Artificial Sequence: Synthetic oligonucleotide
  Antisense strand to SEQ ID NO: 516933
auuuguaggaucgacggaa

SEQ ID NO: 516935 - RNA, 19 nt, Artificial Sequence
  Description of Artificial Sequence: Synthetic oligonucleotide
  Sense strand starting at position 895 of SEQ ID NO: 317847
ggccgaacuucauggguaa

SEQ ID NO: 516936 - RNA, 19 nt, Artificial Sequence
  Description of Artificial Sequence: Synthetic oligonucleotide
  Antisense strand to SEQ ID NO: 516935
uuacccaugaaguucggcc

SEQ ID NO: 516937 - RNA, 19 nt, Artificial Sequence
  Description of Artificial Sequence: Synthetic oligonucleotide
  Sense strand starting at position 1108 of SEQ ID NO: 317847
gggagauacuuugauggaa

SEQ ID NO: 516938 - RNA, 19 nt, Artificial Sequence
  Description of Artificial Sequence: Synthetic oligonucleotide
  Antisense strand to SEQ ID NO: 516937
uuccaucaaaguaucuccc

SEQ ID NO: 516939 - RNA, 19 nt, Artificial Sequence
  Description of Artificial Sequence: Synthetic oligonucleotide
  Sense strand starting at position 1316 of SEQ ID NO: 317847
gggagugcgcgccagagau

SEQ ID NO: 516940 - RNA, 19 nt, Artificial Sequence
  Description of Artificial Sequence: Synthetic oligonucleotide
  Antisense strand to SEQ ID NO: 516939
aucucuggcgcgcacuccc

SEQ ID NO: 516941 - RNA, 19 nt, Artificial Sequence
  Description of Artificial Sequence: Synthetic oligonucleotide
  Sense strand starting at position 1524 of SEQ ID NO: 317847
gucugaacucagugaucug

SEQ ID NO: 516942 - RNA, 19 nt, Artificial Sequence
  Description of Artificial Sequence: Synthetic oligonucleotide
  Antisense strand to SEQ ID NO: 516941
cagaucacugaguucagac

SEQ ID NO: 516943 - RNA, 19 nt, Artificial Sequence
  Description of Artificial Sequence: Synthetic oligonucleotide
  Sense strand starting at position 1531 of SEQ ID NO: 317847
cucagugaucugcgaccga

SEQ ID NO: 516944 - RNA, 19 nt, Artificial Sequence
  Description of Artificial Sequence: Synthetic oligonucleotide
  Antisense strand to SEQ ID NO: 516943
ucggucgcagaucacugag

SEQ ID NO: 516945 - RNA, 19 nt, Artificial Sequence
  Description of Artificial Sequence: Synthetic oligonucleotide
  Sense strand starting at position 1536 of SEQ ID NO: 317847
ugaucugcgaccgagcaua

SEQ ID NO: 516946 - RNA, 19 nt, Artificial Sequence
  Description of Artificial Sequence: Synthetic oligonucleotide
  Antisense strand to SEQ ID NO: 516945
uaugcucggucgcagauca

SEQ ID NO: 516947 - RNA, 19 nt, Artificial Sequence
  Description of Artificial Sequence: Synthetic oligonucleotide
  Sense strand starting at position 2629 of SEQ ID NO: 317847
gccuauuucccgcaacuuu

SEQ ID NO: 516948 - RNA, 19 nt, Artificial Sequence
  Description of Artificial Sequence: Synthetic oligonucleotide
  Antisense strand to SEQ ID NO: 516947
aaaguugcgggaaauaggc

SEQ ID NO: 516949 - RNA, 19 nt, Artificial Sequence
  Description of Artificial Sequence: Synthetic oligonucleotide
  Sense strand starting at position 2819 of SEQ ID NO: 317847
gccagagauuccuagucga

SEQ ID NO: 516950 - RNA, 19 nt, Artificial Sequence
  Description of Artificial Sequence: Synthetic oligonucleotide
  Antisense strand to SEQ ID NO: 516949
ucgacuaggaaucucuggc

SEQ ID NO: 516951 - RNA, 19 nt, Artificial Sequence
  Description of Artificial Sequence: Synthetic oligonucleotide
  Sense strand starting at position 2823 of SEQ ID NO: 317847
gagauuccuagucgagggu

SEQ ID NO: 516952 - RNA, 19 nt, Artificial Sequence
  Description of Artificial Sequence: Synthetic oligonucleotide
  Antisense strand to SEQ ID NO: 516951
acccucgacuaggaaucuc

SEQ ID NO: 516953 - RNA, 19 nt, Artificial Sequence
  Description of Artificial Sequence: Synthetic oligonucleotide
  Sense strand starting at position 2850 of SEQ ID NO: 317847
guagacgcguguuccaaga

SEQ ID NO: 516954 - RNA, 19 nt, Artificial Sequence
  Description of Artificial Sequence: Synthetic oligonucleotide
  Antisense strand to SEQ ID NO: 516953
ucuuggaacacgcgucuac

SEQ ID NO: 516955 - RNA, 19 nt, Artificial Sequence
  Description of Artificial Sequence: Synthetic oligonucleotide
  Sense strand starting at position 2943 of SEQ ID NO: 317847
guucccauuucucagguga

SEQ ID NO: 516956 - RNA, 19 nt, Artificial Sequence
  Description of Artificial Sequence: Synthetic oligonucleotide
  Antisense strand to SEQ ID NO: 516955
ucaccugagaaaugggaac

SEQ ID NO: 516957 - RNA, 19 nt, Artificial Sequence
  Description of Artificial Sequence: Synthetic oligonucleotide
  Sense strand starting at position 2962 of SEQ ID NO: 317847
ggaaacugauccgagaaag

SEQ ID NO: 516958 - RNA, 19 nt, Artificial Sequence
  Description of Artificial Sequence: Synthetic oligonucleotide
  Antisense strand to SEQ ID NO: 516957
cuuucucggaucaguuucc

SEQ ID NO: 516959 - RNA, 19 nt, Artificial Sequence
  Description of Artificial Sequence: Synthetic oligonucleotide
  Sense strand starting at position 3087 of SEQ ID NO: 317847
cgaaacaaugcuuggaaca

SEQ ID NO: 516960 - RNA, 19 nt, Artificial Sequence
  Description of Artificial Sequence: Synthetic oligonucleotide
  Antisense strand to SEQ ID NO: 516959
uguuccaagcauuguuucg

SEQ ID NO: 516961 - RNA, 19 nt, Artificial Sequence
  Description of Artificial Sequence: Synthetic oligonucleotide
  Sense strand starting at position 3112 of SEQ ID NO: 317847
cucaauagguacugauuga

SEQ ID NO: 516962 - RNA, 19 nt, Artificial Sequence
  Description of Artificial Sequence: Synthetic oligonucleotide
  Antisense strand to SEQ ID NO: 516961
ucaaucaguaccuauugag

SEQ ID NO: 516963 - RNA, 19 nt, Artificial Sequence
  Description of Artificial Sequence: Synthetic oligonucleotide
  Sense strand starting at position 3179 of SEQ ID NO: 317847
cagaguugggcccgcauau

SEQ ID NO: 516964 - RNA, 19 nt, Artificial Sequence
  Description of Artificial Sequence: Synthetic oligonucleotide
  Antisense strand to SEQ ID NO: 516963
auaugcgggcccaacucug

SEQ ID NO: 516965 - RNA, 19 nt, Artificial Sequence
  Description of Artificial Sequence: Synthetic oligonucleotide
  Sense strand starting at position 3228 of SEQ ID NO: 317847
ugcccaucuuaggcuaauu

SEQ ID NO: 516966 - RNA, 19 nt, Artificial Sequence
  Description of Artificial Sequence: Synthetic oligonucleotide
  Antisense strand to SEQ ID NO: 516965
aauuagccuaagaugggca

SEQ ID NO: 516967 - RNA, 19 nt, Artificial Sequence
  Description of Artificial Sequence: Synthetic oligonucleotide
  Sense strand starting at position 3342 of SEQ ID NO: 317847
uucuccaauucuuugggau

SEQ ID NO: 516968 - RNA, 19 nt, Artificial Sequence
  Description of Artificial Sequence: Synthetic oligonucleotide
  Antisense strand to SEQ ID NO: 516967
aucccaaagaauuggagaa

SEQ ID NO: 516969 - RNA, 19 nt, Artificial Sequence
  Description of Artificial Sequence: Synthetic oligonucleotide
  Sense strand starting at position 3343 of SEQ ID NO: 317847
ucuccaauucuuugggauu

SEQ ID NO: 516970 - RNA, 19 nt, Artificial Sequence
  Description of Artificial Sequence: Synthetic oligonucleotide
  Antisense strand to SEQ ID NO: 516969
aaucccaaagaauuggaga

SEQ ID NO: 516971 - RNA, 19 nt, Artificial Sequence
  Description of Artificial Sequence: Synthetic oligonucleotide
  Sense strand starting at position 3344 of SEQ ID NO: 317847
cuccaauucuuugggauuc

SEQ ID NO: 516972 - RNA, 19 nt, Artificial Sequence
  Description of Artificial Sequence: Synthetic oligonucleotide
  Antisense strand to SEQ ID NO: 516971
gaaucccaaagaauuggag

SEQ ID NO: 516973 - RNA, 19 nt, Artificial Sequence
  Description of Artificial Sequence: Synthetic oligonucleotide
  Sense strand starting at position 3462 of SEQ ID NO: 317847
gaagucagccuaggguuaa

SEQ ID NO: 516974 - RNA, 19 nt, Artificial Sequence
  Description of Artificial Sequence: Synthetic oligonucleotide
  Antisense strand to SEQ ID NO: 516973
uuaacccuaggcugacuuc

SEQ ID NO: 516975 - RNA, 19 nt, Artificial Sequence
  Description of Artificial Sequence: Synthetic oligonucleotide
  Sense strand starting at position 3463 of SEQ ID NO: 317847
aagucagccuaggguuaaa

SEQ ID NO: 516976 - RNA, 19 nt, Artificial Sequence
  Description of Artificial Sequence: Synthetic oligonucleotide
  Antisense strand to SEQ ID NO: 516975
uuuaacccuaggcugacuu

SEQ ID NO: 516977 - RNA, 19 nt, Artificial Sequence
  Description of Artificial Sequence: Synthetic oligonucleotide
  Sense strand starting at position 3480 of SEQ ID NO: 317847
aacguuacagccugagauc

SEQ ID NO: 516978 - RNA, 19 nt, Artificial Sequence
  Description of Artificial Sequence: Synthetic oligonucleotide
  Antisense strand to SEQ ID NO: 516977
gaucucaggcuguaacguu

SEQ ID NO: 516979 - RNA, 19 nt, Artificial Sequence
  Description of Artificial Sequence: Synthetic oligonucleotide
  Sense strand starting at position 3483 of SEQ ID NO: 317847
guuacagccugagaucgau

SEQ ID NO: 516980 - RNA, 19 nt, Artificial Sequence
  Description of Artificial Sequence: Synthetic oligonucleotide
  Antisense strand to SEQ ID NO: 516979
aucgaucucaggcuguaac

SEQ ID NO: 516981 - RNA, 19 nt, Artificial Sequence
  Description of Artificial Sequence: Synthetic oligonucleotide
  Sense strand starting at position 3518 of SEQ ID NO: 317847
gggaguuaacuguggcgau

SEQ ID NO: 516982 - RNA, 19 nt, Artificial Sequence
  Description of Artificial Sequence: Synthetic oligonucleotide
  Antisense strand to SEQ ID NO: 516981
aucgccacaguuaacuccc

SEQ ID NO: 516983 - RNA, 19 nt, Artificial Sequence
  Description of Artificial Sequence: Synthetic oligonucleotide
  Sense strand starting at position 3519 of SEQ ID NO: 317847
ggaguuaacuguggcgauc

SEQ ID NO: 516984 - RNA, 19 nt, Artificial Sequence
  Description of Artificial Sequence: Synthetic oligonucleotide
  Antisense strand to SEQ ID NO: 516983
gaucgccacaguuaacucc

SEQ ID NO: 516985 - RNA, 19 nt, Artificial Sequence
  Description of Artificial Sequence: Synthetic oligonucleotide
  Sense strand starting at position 3651 of SEQ ID NO: 317847
gggcuuauggagcauggau

SEQ ID NO: 516986 - RNA, 19 nt, Artificial Sequence
  Description of Artificial Sequence: Synthetic oligonucleotide
  Antisense strand to SEQ ID NO: 516985
auccaugcuccauaagccc

SEQ ID NO: 516987 - RNA, 19 nt, Artificial Sequence
  Description of Artificial Sequence: Synthetic oligonucleotide
  Sense strand starting at position 3889 of SEQ ID NO: 317847
aguggucucccuuaacuac

SEQ ID NO: 516988 - RNA, 19 nt, Artificial Sequence
  Description of Artificial Sequence: Synthetic oligonucleotide
  Antisense strand to SEQ ID NO: 516987
guaguuaagggagaccacu

SEQ ID NO: 516989 - RNA, 19 nt, Artificial Sequence
  Description of Artificial Sequence: Synthetic oligonucleotide
  Sense strand starting at position 21 of SEQ ID NO: 317848
cgaggaacccuguguacac

SEQ ID NO: 516990 - RNA, 19 nt, Artificial Sequence
  Description of Artificial Sequence: Synthetic oligonucleotide
  Antisense strand to SEQ ID NO: 516989
guguacacaggguuccucg

SEQ ID NO: 516991 - RNA, 19 nt, Artificial Sequence
  Description of Artificial Sequence: Synthetic oligonucleotide
  Sense strand starting at position 38 of SEQ ID NO: 317848
acaaguuucucaucccgaa

SEQ ID NO: 516992 - RNA, 19 nt, Artificial Sequence
  Description of Artificial Sequence: Synthetic oligonucleotide
  Antisense strand to SEQ ID NO: 516991
uucgggaugagaaacuugu

SEQ ID NO: 516993 - RNA, 19 nt, Artificial Sequence
  Description of Artificial Sequence: Synthetic oligonucleotide
  Sense strand starting at position 42 of SEQ ID NO: 317848
guuucucaucccgaaagug

SEQ ID NO: 516994 - RNA, 19 nt, Artificial Sequence
  Description of Artificial Sequence: Synthetic oligonucleotide
  Antisense strand to SEQ ID NO: 516993
cacuuucgggaugagaaac

SEQ ID NO: 516995 - RNA, 19 nt, Artificial Sequence
  Description of Artificial Sequence: Synthetic oligonucleotide
  Sense strand starting at position 80 of SEQ ID NO: 317848
augccuucuggugacagua

SEQ ID NO: 516996 - RNA, 19 nt, Artificial Sequence
  Description of Artificial Sequence: Synthetic oligonucleotide
  Antisense strand to SEQ ID NO: 516995
uacugucaccagaaggcau

SEQ ID NO: 516997 - RNA, 19 nt, Artificial Sequence
  Description of Artificial Sequence: Synthetic oligonucleotide
  Sense strand starting at position 275 of SEQ ID NO: 317848
ccagcccacuguuugaaau

SEQ ID NO: 516998 - RNA, 19 nt, Artificial Sequence
  Description of Artificial Sequence: Synthetic oligonucleotide
  Antisense strand to SEQ ID NO: 516997
auuucaaacagugggcugg

SEQ ID NO: 516999 - RNA, 19 nt, Artificial Sequence
  Description of Artificial Sequence: Synthetic oligonucleotide
  Sense strand starting at position 319 of SEQ ID NO: 317848
ucuacaguguuucccauua

SEQ ID NO: 517000 - RNA, 19 nt, Artificial Sequence
  Description of Artificial Sequence: Synthetic oligonucleotide
  Antisense strand to SEQ ID NO: 516999
uaaugggaaacacuguaga

SEQ ID NO: 517001 - RNA, 19 nt, Artificial Sequence
  Description of Artificial Sequence: Synthetic oligonucleotide
  Sense strand starting at position 324 of SEQ ID NO: 317848
aguguuucccauuaaagcu

SEQ ID NO: 517002 - RNA, 19 nt, Artificial Sequence
  Description of Artificial Sequence: Synthetic oligonucleotide
  Antisense strand to SEQ ID NO: 517001
agcuuuaaugggaaacacu

SEQ ID NO: 517003 - RNA, 19 nt, Artificial Sequence
  Description of Artificial Sequence: Synthetic oligonucleotide
  Sense strand starting at position 382 of SEQ ID NO: 317848
ccggucaaaugacuuguaa

SEQ ID NO: 517004 - RNA, 19 nt, Artificial Sequence
  Description of Artificial Sequence: Synthetic oligonucleotide
  Antisense strand to SEQ ID NO: 517003
uuacaagucauuugaccgg

SEQ ID NO: 517005 - RNA, 19 nt, Artificial Sequence
  Description of Artificial Sequence: Synthetic oligonucleotide
  Sense strand starting at position 384 of SEQ ID NO: 317848
ggucaaaugacuuguaaag

SEQ ID NO: 517006 - RNA, 19 nt, Artificial Sequence
  Description of Artificial Sequence: Synthetic oligonucleotide
  Antisense strand to SEQ ID NO: 517005
cuuuacaagucauuugacc

SEQ ID NO: 517007 - RNA, 19 nt, Artificial Sequence
  Description of Artificial Sequence: Synthetic oligonucleotide
  Sense strand starting at position 386 of SEQ ID NO: 317848
ucaaaugacuuguaaagca

SEQ ID NO: 517008 - RNA, 19 nt, Artificial Sequence
  Description of Artificial Sequence: Synthetic oligonucleotide
  Antisense strand to SEQ ID NO: 517007
ugcuuuacaagucauuuga

SEQ ID NO: 517009 - RNA, 19 nt, Artificial Sequence
  Description of Artificial Sequence: Synthetic oligonucleotide
  Sense strand starting at position 402 of SEQ ID NO: 317848
gcaccugcucugcaucaaa

SEQ ID NO: 517010 - RNA, 19 nt, Artificial Sequence
  Description of Artificial Sequence: Synthetic oligonucleotide
  Antisense strand to SEQ ID NO: 517009
uuugaugcagagcaggugc

SEQ ID NO: 517011 - RNA, 19 nt, Artificial Sequence
  Description of Artificial Sequence: Synthetic oligonucleotide
  Sense strand starting at position 464 of SEQ ID NO: 317848
auuggcuccuuucuugaaa

SEQ ID NO: 517012 - RNA, 19 nt, Artificial Sequence
  Description of Artificial Sequence: Synthetic oligonucleotide
  Antisense strand to SEQ ID NO: 517011
uuucaagaaaggagccaau

SEQ ID NO: 517013 - RNA, 19 nt, Artificial Sequence
  Description of Artificial Sequence: Synthetic oligonucleotide
  Sense strand starting at position 569 of SEQ ID NO: 317848
gggucuaaugguggagaaa

SEQ ID NO: 517014 - RNA, 19 nt, Artificial Sequence
  Description of Artificial Sequence: Synthetic oligonucleotide
  Antisense strand to SEQ ID NO: 517013
uuucuccaccauuagaccc

SEQ ID NO: 517015 - RNA, 19 nt, Artificial Sequence
  Description of Artificial Sequence: Synthetic oligonucleotide
  Sense strand starting at position 676 of SEQ ID NO: 317848
gccuguauccaagaguaag

SEQ ID NO: 517016 - RNA, 19 nt, Artificial Sequence
  Description of Artificial Sequence: Synthetic oligonucleotide
  Antisense strand to SEQ ID NO: 517015
cuuacucuuggauacaggc

SEQ ID NO: 517017 - RNA, 19 nt, Artificial Sequence
  Description of Artificial Sequence: Synthetic oligonucleotide
  Sense strand starting at position 752 of SEQ ID NO: 317848
aaccgacagucuccugauu

SEQ ID NO: 517018 - RNA, 19 nt, Artificial Sequence
  Description of Artificial Sequence: Synthetic oligonucleotide
  Antisense strand to SEQ ID NO: 517017
aaucaggagacugucgguu

SEQ ID NO: 517019 - RNA, 19 nt, Artificial Sequence
  Description of Artificial Sequence: Synthetic oligonucleotide
  Sense strand starting at position 754 of SEQ ID NO: 317848
ccgacagucuccugauuug

SEQ ID NO: 517020 - RNA, 19 nt, Artificial Sequence
  Description of Artificial Sequence: Synthetic oligonucleotide
  Antisense strand to SEQ ID NO: 517019
caaaucaggagacugucgg

SEQ ID NO: 517021 - RNA, 19 nt, Artificial Sequence
  Description of Artificial Sequence: Synthetic oligonucleotide
  Sense strand starting at position 904 of SEQ ID NO: 317848
uggugaguguuuccacugu

SEQ ID NO: 517022 - RNA, 19 nt, Artificial Sequence
  Description of Artificial Sequence: Synthetic oligonucleotide
  Antisense strand to SEQ ID NO: 517021
acaguggaaacacucacca

SEQ ID NO: 517023 - RNA, 19 nt, Artificial Sequence
  Description of Artificial Sequence: Synthetic oligonucleotide
  Sense strand starting at position 908 of SEQ ID NO: 317848
gaguguuuccacugugcug

SEQ ID NO: 517024 - RNA, 19 nt, Artificial Sequence
  Description of Artificial Sequence: Synthetic oligonucleotide
  Antisense strand to SEQ ID NO: 517023
cagcacaguggaaacacuc

SEQ ID NO: 517025 - RNA, 19 nt, Artificial Sequence
  Description of Artificial Sequence: Synthetic oligonucleotide
  Sense strand starting at position 1004 of SEQ ID NO: 317848
ccggguucuggauauagag

SEQ ID NO: 517026 - RNA, 19 nt, Artificial Sequence
  Description of Artificial Sequence: Synthetic oligonucleotide
  Antisense strand to SEQ ID NO: 517025
cucuauauccagaacccgg

SEQ ID NO: 517027 - RNA, 19 nt, Artificial Sequence
  Description of Artificial Sequence: Synthetic oligonucleotide
  Sense strand starting at position 1282 of SEQ ID NO: 317848
uaguguaggccagaaagcu

SEQ ID NO: 517028 - RNA, 19 nt, Artificial Sequence
  Description of Artificial Sequence: Synthetic oligonucleotide
  Antisense strand to SEQ ID NO: 517027
agcuuucuggccuacacua

SEQ ID NO: 517029 - RNA, 19 nt, Artificial Sequence
  Description of Artificial Sequence: Synthetic oligonucleotide
  Sense strand starting at position 1544 of SEQ ID NO: 317848
gucuccggucccugagauu

SEQ ID NO: 517030 - RNA, 19 nt, Artificial Sequence
  Description of Artificial Sequence: Synthetic oligonucleotide
  Antisense strand to SEQ ID NO: 517029
aaucucagggaccggagac

SEQ ID NO: 517031 - RNA, 19 nt, Artificial Sequence
  Description of Artificial Sequence: Synthetic oligonucleotide
  Sense strand starting at position 2325 of SEQ ID NO: 317848
agucuuuauugauuaccua

SEQ ID NO: 517032 - RNA, 19 nt, Artificial Sequence
  Description of Artificial Sequence: Synthetic oligonucleotide
  Antisense strand to SEQ ID NO: 517031
uagguaaucaauaaagacu

SEQ ID NO: 517033 - RNA, 19 nt, Artificial Sequence
  Description of Artificial Sequence: Synthetic oligonucleotide
  Sense strand starting at position 2326 of SEQ ID NO: 317848
gucuuuauugauuaccuau

SEQ ID NO: 517034 - RNA, 19 nt, Artificial Sequence
  Description of Artificial Sequence: Synthetic oligonucleotide
  Antisense strand to SEQ ID NO: 517033
auagguaaucaauaaagac

SEQ ID NO: 517035 - RNA, 19 nt, Artificial Sequence
  Description of Artificial Sequence: Synthetic oligonucleotide
  Sense strand starting at position 2441 of SEQ ID NO: 317848
gguguaaauuaaccuagca

SEQ ID NO: 517036 - RNA, 19 nt, Artificial Sequence
  Description of Artificial Sequence: Synthetic oligonucleotide
  Antisense strand to SEQ ID NO: 517035
ugcuagguuaauuuacacc

SEQ ID NO: 517037 - RNA, 19 nt, Artificial Sequence
  Description of Artificial Sequence: Synthetic oligonucleotide
  Sense strand starting at position 2573 of SEQ ID NO: 317848
agggcuccuucgcuuaaga

SEQ ID NO: 517038 - RNA, 19 nt, Artificial Sequence
  Description of Artificial Sequence: Synthetic oligonucleotide
  Antisense strand to SEQ ID NO: 517037
ucuuaagcgaaggagcccu

SEQ ID NO: 517039 - RNA, 19 nt, Artificial Sequence
  Description of Artificial Sequence: Synthetic oligonucleotide
  Sense strand starting at position 2575 of SEQ ID NO: 317848
ggcuccuucgcuuaagaau

SEQ ID NO: 517040 - RNA, 19 nt, Artificial Sequence
  Description of Artificial Sequence: Synthetic oligonucleotide
  Antisense strand to SEQ ID NO: 517039
auucuuaagcgaaggagcc

SEQ ID NO: 517041 - RNA, 19 nt, Artificial Sequence
  Description of Artificial Sequence: Synthetic oligonucleotide
  Sense strand starting at position 2609 of SEQ ID NO: 317848
cuuccaguucccuggagaa

SEQ ID NO: 517042 - RNA, 19 nt, Artificial Sequence
  Description of Artificial Sequence: Synthetic oligonucleotide
  Antisense strand to SEQ ID NO: 517041
uucuccagggaacuggaag

SEQ ID NO: 517043 - RNA, 19 nt, Artificial Sequence
  Description of Artificial Sequence: Synthetic oligonucleotide
  Sense strand starting at position 2757 of SEQ ID NO: 317848
ccgugucgggcucuuuaaa

SEQ ID NO: 517044 - RNA, 19 nt, Artificial Sequence
  Description of Artificial Sequence: Synthetic oligonucleotide
  Antisense strand to SEQ ID NO: 517043
uuuaaagagcccgacacgg

SEQ ID NO: 517045 - RNA, 19 nt, Artificial Sequence
  Description of Artificial Sequence: Synthetic oligonucleotide
  Sense strand starting at position 3402 of SEQ ID NO: 317848
ugagacauuguggagugua

SEQ ID NO: 517046 - RNA, 19 nt, Artificial Sequence
  Description of Artificial Sequence: Synthetic oligonucleotide
  Antisense strand to SEQ ID NO: 517045
uacacuccacaaugucuca

SEQ ID NO: 517047 - RNA, 19 nt, Artificial Sequence
  Description of Artificial Sequence: Synthetic oligonucleotide
  Sense strand starting at position 3410 of SEQ ID NO: 317848
uguggaguguauguagaua

SEQ ID NO: 517048 - RNA, 19 nt, Artificial Sequence
  Description of Artificial Sequence: Synthetic oligonucleotide
  Antisense strand to SEQ ID NO: 517047
uaucuacauacacuccaca

SEQ ID NO: 517049 - RNA, 19 nt, Artificial Sequence
  Description of Artificial Sequence: Synthetic oligonucleotide
  Sense strand starting at position 3574 of SEQ ID NO: 317848
uuucccacgugcucagaau

SEQ ID NO: 517050 - RNA, 19 nt, Artificial Sequence
  Description of Artificial Sequence: Synthetic oligonucleotide
  Antisense strand to SEQ ID NO: 517049
auucugagcacgugggaaa

SEQ ID NO: 517051 - RNA, 19 nt, Artificial Sequence
  Description of Artificial Sequence: Synthetic oligonucleotide
  Sense strand starting at position 3591 of SEQ ID NO: 317848
auccauaauuccuuguggu

SEQ ID NO: 517052 - RNA, 19 nt, Artificial Sequence
  Description of Artificial Sequence: Synthetic oligonucleotide
  Antisense strand to SEQ ID NO: 517051
accacaaggaauuauggau

SEQ ID NO: 517053 - RNA, 19 nt, Artificial Sequence
  Description of Artificial Sequence: Synthetic oligonucleotide
  Sense strand starting at position 3592 of SEQ ID NO: 317848
uccauaauuccuugugguu

SEQ ID NO: 517054 - RNA, 19 nt, Artificial Sequence
  Description of Artificial Sequence: Synthetic oligonucleotide
  Antisense strand to SEQ ID NO: 517053
aaccacaaggaauuaugga

SEQ ID NO: 517055 - RNA, 19 nt, Artificial Sequence
  Description of Artificial Sequence: Synthetic oligonucleotide
  Sense strand starting at position 3733 of SEQ ID NO: 317848
uguggaggauggguuuaaa

SEQ ID NO: 517056 - RNA, 19 nt, Artificial Sequence
  Description of Artificial Sequence: Synthetic oligonucleotide
  Antisense strand to SEQ ID NO: 517055
uuuaaacccauccuccaca

SEQ ID NO: 517057 - RNA, 19 nt, Artificial Sequence
  Description of Artificial Sequence: Synthetic oligonucleotide
  Sense strand starting at position 3793 of SEQ ID NO: 317848
caccgugauccuugggauu

SEQ ID NO: 517058 - RNA, 19 nt, Artificial Sequence
  Description of Artificial Sequence: Synthetic oligonucleotide
  Antisense strand to SEQ ID NO: 517057
aaucccaaggaucacggug

SEQ ID NO: 517059 - RNA, 19 nt, Artificial Sequence
  Description of Artificial Sequence: Synthetic oligonucleotide
  Sense strand starting at position 3795 of SEQ ID NO: 317848
ccgugauccuugggauuuc

SEQ ID NO: 517060 - RNA, 19 nt, Artificial Sequence
  Description of Artificial Sequence: Synthetic oligonucleotide
  Antisense strand to SEQ ID NO: 517059
gaaaucccaaggaucacgg

SEQ ID NO: 517061 - RNA, 19 nt, Artificial Sequence
  Description of Artificial Sequence: Synthetic oligonucleotide
  Sense strand starting at position 3796 of SEQ ID NO: 317848
cgugauccuugggauuuca

SEQ ID NO: 517062 - RNA, 19 nt, Artificial Sequence
  Description of Artificial Sequence: Synthetic oligonucleotide
  Antisense strand to SEQ ID NO: 517061
ugaaaucccaaggaucacg

SEQ ID NO: 517063 - RNA, 19 nt, Artificial Sequence
  Description of Artificial Sequence: Synthetic oligonucleotide
  Sense strand starting at position 3879 of SEQ ID NO: 317848
cauauuauugcagauggua

SEQ ID NO: 517064 - RNA, 19 nt, Artificial Sequence
  Description of Artificial Sequence: Synthetic oligonucleotide
  Antisense strand to SEQ ID NO: 517063
uaccaucugcaauaauaug

SEQ ID NO: 517065 - RNA, 19 nt, Artificial Sequence
  Description of Artificial Sequence: Synthetic oligonucleotide
  Sense strand starting at position 3910 of SEQ ID NO: 317848
agacguauuucucccuguu

SEQ ID NO: 517066 - RNA, 19 nt, Artificial Sequence
  Description of Artificial Sequence: Synthetic oligonucleotide
  Antisense strand to SEQ ID NO: 517065
aacagggagaaauacgucu

SEQ ID NO: 517067 - RNA, 19 nt, Artificial Sequence
  Description of Artificial Sequence: Synthetic oligonucleotide
  Sense strand starting at position 3913 of SEQ ID NO: 317848
cguauuucucccuguuguu

SEQ ID NO: 517068 - RNA, 19 nt, Artificial Sequence
  Description of Artificial Sequence: Synthetic oligonucleotide
  Antisense strand to SEQ ID NO: 517067
aacaacagggagaaauacg

SEQ ID NO: 517069 - RNA, 19 nt, Artificial Sequence
  Description of Artificial Sequence: Synthetic oligonucleotide
  Sense strand starting at position 336 of SEQ ID NO: 317849
acgacaaacugcuuuauau

SEQ ID NO: 517070 - RNA, 19 nt, Artificial Sequence
  Description of Artificial Sequence: Synthetic oligonucleotide
  Antisense strand to SEQ ID NO: 517069
auauaaagcaguuugucgu

SEQ ID NO: 517071 - RNA, 19 nt, Artificial Sequence
  Description of Artificial Sequence: Synthetic oligonucleotide
  Sense strand starting at position 356 of SEQ ID NO: 317849
ucacuaauucuuuggauug

SEQ ID NO: 517072 - RNA, 19 nt, Artificial Sequence
  Description of Artificial Sequence: Synthetic oligonucleotide
  Antisense strand to SEQ ID NO: 517071
caauccaaagaauuaguga

SEQ ID NO: 517073 - RNA, 19 nt, Artificial Sequence
  Description of Artificial Sequence: Synthetic oligonucleotide
  Sense strand starting at position 363 of SEQ ID NO: 317849
uucuuuggauugcuaagaa

SEQ ID NO: 517074 - RNA, 19 nt, Artificial Sequence
  Description of Artificial Sequence: Synthetic oligonucleotide
  Antisense strand to SEQ ID NO: 517073
uucuuagcaauccaaagaa

SEQ ID NO: 517075 - RNA, 19 nt, Artificial Sequence
  Description of Artificial Sequence: Synthetic oligonucleotide
  Sense strand starting at position 376 of SEQ ID NO: 317849
uaagaaugccaaggauagu

SEQ ID NO: 517076 - RNA, 19 nt, Artificial Sequence
  Description of Artificial Sequence: Synthetic oligonucleotide
  Antisense strand to SEQ ID NO: 517075
acuauccuuggcauucuua

SEQ ID NO: 517077 - RNA, 19 nt, Artificial Sequence
  Description of Artificial Sequence: Synthetic oligonucleotide
  Sense strand starting at position 382 of SEQ ID NO: 317849
ugccaaggauagucaucuu

SEQ ID NO: 517078 - RNA, 19 nt, Artificial Sequence
  Description of Artificial Sequence: Synthetic oligonucleotide
  Antisense strand to SEQ ID NO: 517077
aagaugacuauccuuggca

SEQ ID NO: 517079 - RNA, 19 nt, Artificial Sequence
  Description of Artificial Sequence: Synthetic oligonucleotide
  Sense strand starting at position 390 of SEQ ID NO: 317849
auagucaucuuaucugagu

SEQ ID NO: 517080 - RNA, 19 nt, Artificial Sequence
  Description of Artificial Sequence: Synthetic oligonucleotide
  Antisense strand to SEQ ID NO: 517079
acucagauaagaugacuau

SEQ ID NO: 517081 - RNA, 19 nt, Artificial Sequence
  Description of Artificial Sequence: Synthetic oligonucleotide
  Sense strand starting at position 405 of SEQ ID NO: 317849
gaguuugacccauagcaac

SEQ ID NO: 517082 - RNA, 19 nt, Artificial Sequence
  Description of Artificial Sequence: Synthetic oligonucleotide
  Antisense strand to SEQ ID NO: 517081
guugcuaugggucaaacuc

SEQ ID NO: 517083 - RNA, 19 nt, Artificial Sequence
  Description of Artificial Sequence: Synthetic oligonucleotide
  Sense strand starting at position 447 of SEQ ID NO: 317849
aggaauuacuugcuuaauu

SEQ ID NO: 517084 - RNA, 19 nt, Artificial Sequence
  Description of Artificial Sequence: Synthetic oligonucleotide
  Antisense strand to SEQ ID NO: 517083
aauuaagcaaguaauuccu

SEQ ID NO: 517085 - RNA, 19 nt, Artificial Sequence
  Description of Artificial Sequence: Synthetic oligonucleotide
  Sense strand starting at position 448 of SEQ ID NO: 317849
ggaauuacuugcuuaauua

SEQ ID NO: 517086 - RNA, 19 nt, Artificial Sequence
  Description of Artificial Sequence: Synthetic oligonucleotide
  Antisense strand to SEQ ID NO: 517085
uaauuaagcaaguaauucc

SEQ ID NO: 517087 - RNA, 19 nt, Artificial Sequence
  Description of Artificial Sequence: Synthetic oligonucleotide
  Sense strand starting at position 586 of SEQ ID NO: 317849
cugccuugucaauauaaga

SEQ ID NO: 517088 - RNA, 19 nt, Artificial Sequence
  Description of Artificial Sequence: Synthetic oligonucleotide
  Antisense strand to SEQ ID NO: 517087
ucuuauauugacaaggcag

SEQ ID NO: 517089 - RNA, 19 nt, Artificial Sequence
  Description of Artificial Sequence: Synthetic oligonucleotide
  Sense strand starting at position 597 of SEQ ID NO: 317849
auauaagaaucugaggaga

SEQ ID NO: 517090 - RNA, 19 nt, Artificial Sequence
  Description of Artificial Sequence: Synthetic oligonucleotide
  Antisense strand to SEQ ID NO: 517089
ucuccucagauucuuauau

SEQ ID NO: 517091 - RNA, 19 nt, Artificial Sequence
  Description of Artificial Sequence: Synthetic oligonucleotide
  Sense strand starting at position 818 of SEQ ID NO: 317849
cucggauauuccuuaagag

SEQ ID NO: 517092 - RNA, 19 nt, Artificial Sequence
  Description of Artificial Sequence: Synthetic oligonucleotide
  Antisense strand to SEQ ID NO: 517091
cucuuaaggaauauccgag

SEQ ID NO: 517093 - RNA, 19 nt, Artificial Sequence
  Description of Artificial Sequence: Synthetic oligonucleotide
  Sense strand starting at position 819 of SEQ ID NO: 317849
ucggauauuccuuaagagu

SEQ ID NO: 517094 - RNA, 19 nt, Artificial Sequence
  Description of Artificial Sequence: Synthetic oligonucleotide
  Antisense strand to SEQ ID NO: 517093
acucuuaaggaauauccga

SEQ ID NO: 517095 - RNA, 19 nt, Artificial Sequence
  Description of Artificial Sequence: Synthetic oligonucleotide
  Sense strand starting at position 1241 of SEQ ID NO: 317849
aucugaguugcccaaaguc

SEQ ID NO: 517096 - RNA, 19 nt, Artificial Sequence
  Description of Artificial Sequence: Synthetic oligonucleotide
  Antisense strand to SEQ ID NO: 517095
gacuuugggcaacucagau

SEQ ID NO: 517097 - RNA, 19 nt, Artificial Sequence
  Description of Artificial Sequence: Synthetic oligonucleotide
  Sense strand starting at position 1278 of SEQ ID NO: 317849
ccagaaugaucccugcaag

SEQ ID NO: 517098 - RNA, 19 nt, Artificial Sequence
  Description of Artificial Sequence: Synthetic oligonucleotide
  Antisense strand to SEQ ID NO: 517097
cuugcagggaucauucugg

SEQ ID NO: 517099 - RNA, 19 nt, Artificial Sequence
  Description of Artificial Sequence: Synthetic oligonucleotide
  Sense strand starting at position 1292 of SEQ ID NO: 317849
gcaagaaauucugccugaa

SEQ ID NO: 517100 - RNA, 19 nt, Artificial Sequence
  Description of Artificial Sequence: Synthetic oligonucleotide
  Antisense strand to SEQ ID NO: 517099
uucaggcagaauuucuugc

SEQ ID NO: 517101 - RNA, 19 nt, Artificial Sequence
  Description of Artificial Sequence: Synthetic oligonucleotide
  Sense strand starting at position 1295 of SEQ ID NO: 317849
agaaauucugccugaacuc

SEQ ID NO: 517102 - RNA, 19 nt, Artificial Sequence
  Description of Artificial Sequence: Synthetic oligonucleotide
  Antisense strand to SEQ ID NO: 517101
gaguucaggcagaauuucu

SEQ ID NO: 517103 - RNA, 19 nt, Artificial Sequence
  Description of Artificial Sequence: Synthetic oligonucleotide
  Sense strand starting at position 1506 of SEQ ID NO: 317849
agugucuuuguacagacaa

SEQ ID NO: 517104 - RNA, 19 nt, Artificial Sequence
  Description of Artificial Sequence: Synthetic oligonucleotide
  Antisense strand to SEQ ID NO: 517103
uugucuguacaaagacacu

SEQ ID NO: 517105 - RNA, 19 nt, Artificial Sequence
  Description of Artificial Sequence: Synthetic oligonucleotide
  Sense strand starting at position 1540 of SEQ ID NO: 317849
uugacagaaucugugaauc

SEQ ID NO: 517106 - RNA, 19 nt, Artificial Sequence
  Description of Artificial Sequence: Synthetic oligonucleotide
  Antisense strand to SEQ ID NO: 517105
gauucacagauucugucaa

SEQ ID NO: 517107 - RNA, 19 nt, Artificial Sequence
  Description of Artificial Sequence: Synthetic oligonucleotide
  Sense strand starting at position 1576 of SEQ ID NO: 317849
uucccauuggcucaacagu

SEQ ID NO: 517108 - RNA, 19 nt, Artificial Sequence
  Description of Artificial Sequence: Synthetic oligonucleotide
  Antisense strand to SEQ ID NO: 517107
acuguugagccaaugggaa

SEQ ID NO: 517109 - RNA, 19 nt, Artificial Sequence
  Description of Artificial Sequence: Synthetic oligonucleotide
  Sense strand starting at position 1697 of SEQ ID NO: 317849
ucaggaggcuccuucucua

SEQ ID NO: 517110 - RNA, 19 nt, Artificial Sequence
  Description of Artificial Sequence: Synthetic oligonucleotide
  Antisense strand to SEQ ID NO: 517109
uagagaaggagccuccuga

SEQ ID NO: 517111 - RNA, 19 nt, Artificial Sequence
  Description of Artificial Sequence: Synthetic oligonucleotide
  Sense strand starting at position 1710 of SEQ ID NO: 317849
ucucuauuuccacggcuuu

SEQ ID NO: 517112 - RNA, 19 nt, Artificial Sequence
  Description of Artificial Sequence: Synthetic oligonucleotide
  Antisense strand to SEQ ID NO: 517111
aaagccguggaaauagaga

SEQ ID NO: 517113 - RNA, 19 nt, Artificial Sequence
  Description of Artificial Sequence: Synthetic oligonucleotide
  Sense strand starting at position 2182 of SEQ ID NO: 317849
uggguuuacuggucacaga

SEQ ID NO: 517114 - RNA, 19 nt, Artificial Sequence
  Description of Artificial Sequence: Synthetic oligonucleotide
  Antisense strand to SEQ ID NO: 517113
ucugugaccaguaaaccca

SEQ ID NO: 517115 - RNA, 19 nt, Artificial Sequence
  Description of Artificial Sequence: Synthetic oligonucleotide
  Sense strand starting at position 2183 of SEQ ID NO: 317849
ggguuuacuggucacagag

SEQ ID NO: 517116 - RNA, 19 nt, Artificial Sequence
  Description of Artificial Sequence: Synthetic oligonucleotide
  Antisense strand to SEQ ID NO: 517115
cucugugaccaguaaaccc

SEQ ID NO: 517117 - RNA, 19 nt, Artificial Sequence
  Description of Artificial Sequence: Synthetic oligonucleotide
  Sense strand starting at position 2256 of SEQ ID NO: 317849
gguaauagccaaggguuga

SEQ ID NO: 517118 - RNA, 19 nt, Artificial Sequence
  Description of Artificial Sequence: Synthetic oligonucleotide
  Antisense strand to SEQ ID NO: 517117
ucaacccuuggcuauuacc

SEQ ID NO: 517119 - RNA, 19 nt, Artificial Sequence
  Description of Artificial Sequence: Synthetic oligonucleotide
  Sense strand starting at position 2257 of SEQ ID NO: 317849
guaauagccaaggguugau

SEQ ID NO: 517120 - RNA, 19 nt, Artificial Sequence
  Description of Artificial Sequence: Synthetic oligonucleotide
  Antisense strand to SEQ ID NO: 517119
aucaacccuuggcuauuac

SEQ ID NO: 517121 - RNA, 19 nt, Artificial Sequence
  Description of Artificial Sequence: Synthetic oligonucleotide
  Sense strand starting at position 2528 of SEQ ID NO: 317849
ggcuuugcuccucagaaug

SEQ ID NO: 517122 - RNA, 19 nt, Artificial Sequence
  Description of Artificial Sequence: Synthetic oligonucleotide
  Antisense strand to SEQ ID NO: 517121
cauucugaggagcaaagcc

SEQ ID NO: 517123 - RNA, 19 nt, Artificial Sequence
  Description of Artificial Sequence: Synthetic oligonucleotide
  Sense strand starting at position 2744 of SEQ ID NO: 317849
gagaguguaguccaaucuu

SEQ ID NO: 517124 - RNA, 19 nt, Artificial Sequence
  Description of Artificial Sequence: Synthetic oligonucleotide
  Antisense strand to SEQ ID NO: 517123
aagauuggacuacacucuc

SEQ ID NO: 517125 - RNA, 19 nt, Artificial Sequence
  Description of Artificial Sequence: Synthetic oligonucleotide
  Sense strand starting at position 2976 of SEQ ID NO: 317849
gccagcaucugauuugagu

SEQ ID NO: 517126 - RNA, 19 nt, Artificial Sequence
  Description of Artificial Sequence: Synthetic oligonucleotide
  Antisense strand to SEQ ID NO: 517125
acucaaaucagaugcuggc

SEQ ID NO: 517127 - RNA, 19 nt, Artificial Sequence
  Description of Artificial Sequence: Synthetic oligonucleotide
  Sense strand starting at position 3033 of SEQ ID NO: 317849
uggccuaaugccuaaagca

SEQ ID NO: 517128 - RNA, 19 nt, Artificial Sequence
  Description of Artificial Sequence: Synthetic oligonucleotide
  Antisense strand to SEQ ID NO: 517127
ugcuuuaggcauuaggcca

SEQ ID NO: 517129 - RNA, 19 nt, Artificial Sequence
  Description of Artificial Sequence: Synthetic oligonucleotide
  Sense strand starting at position 3144 of SEQ ID NO: 317849
gaagcuuagugagcagaga

SEQ ID NO: 517130 - RNA, 19 nt, Artificial Sequence
  Description of Artificial Sequence: Synthetic oligonucleotide
  Antisense strand to SEQ ID NO: 517129
ucucugcucacuaagcuuc

SEQ ID NO: 517131 - RNA, 19 nt, Artificial Sequence
  Description of Artificial Sequence: Synthetic oligonucleotide
  Sense strand starting at position 3211 of SEQ ID NO: 317849
cugacuuuguaagcaacaa

SEQ ID NO: 517132 - RNA, 19 nt, Artificial Sequence
  Description of Artificial Sequence: Synthetic oligonucleotide
  Antisense strand to SEQ ID NO: 517131
uuguugcuuacaaagucag

SEQ ID NO: 517133 - RNA, 19 nt, Artificial Sequence
  Description of Artificial Sequence: Synthetic oligonucleotide
  Sense strand starting at position 3236 of SEQ ID NO: 317849
cuucuugaggucuaauaau

SEQ ID NO: 517134 - RNA, 19 nt, Artificial Sequence
  Description of Artificial Sequence: Synthetic oligonucleotide
  Antisense strand to SEQ ID NO: 517133
auuauuagaccucaagaag

SEQ ID NO: 517135 - RNA, 19 nt, Artificial Sequence
  Description of Artificial Sequence: Synthetic oligonucleotide
  Sense strand starting at position 3300 of SEQ ID NO: 317849
acaaguuucucaucccgaa

SEQ ID NO: 517136 - RNA, 19 nt, Artificial Sequence
  Description of Artificial Sequence: Synthetic oligonucleotide
  Antisense strand to SEQ ID NO: 517135
uucgggaugagaaacuugu

SEQ ID NO: 517137 - RNA, 19 nt, Artificial Sequence
  Description of Artificial Sequence: Synthetic oligonucleotide
  Sense strand starting at position 3304 of SEQ ID NO: 317849
guuucucaucccgaaagug

SEQ ID NO: 517138 - RNA, 19 nt, Artificial Sequence
  Description of Artificial Sequence: Synthetic oligonucleotide
  Antisense strand to SEQ ID NO: 517137
cacuuucgggaugagaaac

SEQ ID NO: 517139 - RNA, 19 nt, Artificial Sequence
  Description of Artificial Sequence: Synthetic oligonucleotide
  Sense strand starting at position 3342 of SEQ ID NO: 317849
augccuucuggugacagua

SEQ ID NO: 517140 - RNA, 19 nt, Artificial Sequence
  Description of Artificial Sequence: Synthetic oligonucleotide
  Antisense strand to SEQ ID NO: 517139
uacugucaccagaaggcau

SEQ ID NO: 517141 - RNA, 19 nt, Artificial Sequence
  Description of Artificial Sequence: Synthetic oligonucleotide
  Sense strand starting at position 3646 of SEQ ID NO: 317849
ggucaaaugacuuguaaag

SEQ ID NO: 517142 - RNA, 19 nt, Artificial Sequence
  Description of Artificial Sequence: Synthetic oligonucleotide
  Antisense strand to SEQ ID NO: 517141
cuuuacaagucauuugacc

SEQ ID NO: 517143 - RNA, 19 nt, Artificial Sequence
  Description of Artificial Sequence: Synthetic oligonucleotide
  Sense strand starting at position 3726 of SEQ ID NO: 317849
auuggcuccuuucuugaaa

SEQ ID NO: 517144 - RNA, 19 nt, Artificial Sequence
  Description of Artificial Sequence: Synthetic oligonucleotide
  Antisense strand to SEQ ID NO: 517143
uuucaagaaaggagccaau

SEQ ID NO: 517145 - RNA, 19 nt, Artificial Sequence
  Description of Artificial Sequence: Synthetic oligonucleotide
  Sense strand starting at position 3831 of SEQ ID NO: 317849
gggucuaaugguggagaaa

SEQ ID NO: 517146 - RNA, 19 nt, Artificial Sequence
  Description of Artificial Sequence: Synthetic oligonucleotide
  Antisense strand to SEQ ID NO: 517145
uuucuccaccauuagaccc

SEQ ID NO: 517147 - RNA, 19 nt, Artificial Sequence
  Description of Artificial Sequence: Synthetic oligonucleotide
  Sense strand starting at position 3938 of SEQ ID NO: 317849
gccuguauccaagaguaag

SEQ ID NO: 517148 - RNA, 19 nt, Artificial Sequence
  Description of Artificial Sequence: Synthetic oligonucleotide
  Antisense strand to SEQ ID NO: 517147
cuuacucuuggauacaggc

SEQ ID NO: 517149 - RNA, 19 nt, Artificial Sequence
  Description of Artificial Sequence: Synthetic oligonucleotide
  Sense strand starting at position 285 of SEQ ID NO: 317850
ucuagagaucuuugaucua

SEQ ID NO: 517150 - RNA, 19 nt, Artificial Sequence
  Description of Artificial Sequence: Synthetic oligonucleotide
  Antisense strand to SEQ ID NO: 517149
uagaucaaagaucucuaga

SEQ ID NO: 517151 - RNA, 19 nt, Artificial Sequence
  Description of Artificial Sequence: Synthetic oligonucleotide
  Sense strand starting at position 362 of SEQ ID NO: 317850
ggaugcugguucuccuuua

SEQ ID NO: 517152 - RNA, 19 nt, Artificial Sequence
  Description of Artificial Sequence: Synthetic oligonucleotide
  Antisense strand to SEQ ID NO: 517151
uaaaggagaaccagcaucc

SEQ ID NO: 517153 - RNA, 19 nt, Artificial Sequence
  Description of Artificial Sequence: Synthetic oligonucleotide
  Sense strand starting at position 363 of SEQ ID NO: 317850
gaugcugguucuccuuuaa

SEQ ID NO: 517154 - RNA, 19 nt, Artificial Sequence
  Description of Artificial Sequence: Synthetic oligonucleotide
  Antisense strand to SEQ ID NO: 517153
uuaaaggagaaccagcauc

SEQ ID NO: 517155 - RNA, 19 nt, Artificial Sequence
  Description of Artificial Sequence: Synthetic oligonucleotide
  Sense strand starting at position 423 of SEQ ID NO: 317850
uggguuucacccuagggau

SEQ ID NO: 517156 - RNA, 19 nt, Artificial Sequence
  Description of Artificial Sequence: Synthetic oligonucleotide
  Antisense strand to SEQ ID NO: 517155
aucccuagggugaaaccca

SEQ ID NO: 517157 - RNA, 19 nt, Artificial Sequence
  Description of Artificial Sequence: Synthetic oligonucleotide
  Sense strand starting at position 439 of SEQ ID NO: 317850
gauacaagguguuuguaag

SEQ ID NO: 517158 - RNA, 19 nt, Artificial Sequence
  Description of Artificial Sequence: Synthetic oligonucleotide
  Antisense strand to SEQ ID NO: 517157
cuuacaaacaccuuguauc

SEQ ID NO: 517159 - RNA, 19 nt, Artificial Sequence
  Description of Artificial Sequence: Synthetic oligonucleotide
  Sense strand starting at position 440 of SEQ ID NO: 317850
auacaagguguuuguaagu

SEQ ID NO: 517160 - RNA, 19 nt, Artificial Sequence
  Description of Artificial Sequence: Synthetic oligonucleotide
  Antisense strand to SEQ ID NO: 517159
acuuacaaacaccuuguau

SEQ ID NO: 517161 - RNA, 19 nt, Artificial Sequence
  Description of Artificial Sequence: Synthetic oligonucleotide
  Sense strand starting at position 449 of SEQ ID NO: 317850
guuuguaagucacucugaa

SEQ ID NO: 517162 - RNA, 19 nt, Artificial Sequence
  Description of Artificial Sequence: Synthetic oligonucleotide
  Antisense strand to SEQ ID NO: 517161
uucagagugacuuacaaac

SEQ ID NO: 517163 - RNA, 19 nt, Artificial Sequence
  Description of Artificial Sequence: Synthetic oligonucleotide
  Sense strand starting at position 480 of SEQ ID NO: 317850
caaaguguuguggacgcua

SEQ ID NO: 517164 - RNA, 19 nt, Artificial Sequence
  Description of Artificial Sequence: Synthetic oligonucleotide
  Antisense strand to SEQ ID NO: 517163
uagcguccacaacacuuug

SEQ ID NO: 517165 - RNA, 19 nt, Artificial Sequence
  Description of Artificial Sequence: Synthetic oligonucleotide
  Sense strand starting at position 485 of SEQ ID NO: 317850
uguuguggacgcuauaauc

SEQ ID NO: 517166 - RNA, 19 nt, Artificial Sequence
  Description of Artificial Sequence: Synthetic oligonucleotide
  Antisense strand to SEQ ID NO: 517165
gauuauagcguccacaaca

SEQ ID NO: 517167 - RNA, 19 nt, Artificial Sequence
  Description of Artificial Sequence: Synthetic oligonucleotide
  Sense strand starting at position 551 of SEQ ID NO: 317850
cgucaaaugagauacucga

SEQ ID NO: 517168 - RNA, 19 nt, Artificial Sequence
  Description of Artificial Sequence: Synthetic oligonucleotide
  Antisense strand to SEQ ID NO: 517167
ucgaguaucucauuugacg

SEQ ID NO: 517169 - RNA, 19 nt, Artificial Sequence
  Description of Artificial Sequence: Synthetic oligonucleotide
  Sense strand starting at position 583 of SEQ ID NO: 317850
uuggguggguccuuucaua

SEQ ID NO: 517170 - RNA, 19 nt, Artificial Sequence
  Description of Artificial Sequence: Synthetic oligonucleotide
  Antisense strand to SEQ ID NO: 517169
uaugaaaggacccacccaa

SEQ ID NO: 517171 - RNA, 19 nt, Artificial Sequence
  Description of Artificial Sequence: Synthetic oligonucleotide
  Sense strand starting at position 629 of SEQ ID NO: 317850
augguuacuccacaaaguu

SEQ ID NO: 517172 - RNA, 19 nt, Artificial Sequence
  Description of Artificial Sequence: Synthetic oligonucleotide
  Antisense strand to SEQ ID NO: 517171
aacuuuguggaguaaccau

SEQ ID NO: 517173 - RNA, 19 nt, Artificial Sequence
  Description of Artificial Sequence: Synthetic oligonucleotide
  Sense strand starting at position 757 of SEQ ID NO: 317850
acccuugucgguuacaagu

SEQ ID NO: 517174 - RNA, 19 nt, Artificial Sequence
  Description of Artificial Sequence: Synthetic oligonucleotide
  Antisense strand to SEQ ID NO: 517173
acuuguaaccgacaagggu

SEQ ID NO: 517175 - RNA, 19 nt, Artificial Sequence
  Description of Artificial Sequence: Synthetic oligonucleotide
  Sense strand starting at position 809 of SEQ ID NO: 317850
agaagaguguugucaccuu

SEQ ID NO: 517176 - RNA, 19 nt, Artificial Sequence
  Description of Artificial Sequence: Synthetic oligonucleotide
  Antisense strand to SEQ ID NO: 517175
aaggugacaacacucuucu

SEQ ID NO: 517177 - RNA, 19 nt, Artificial Sequence
  Description of Artificial Sequence: Synthetic oligonucleotide
  Sense strand starting at position 954 of SEQ ID NO: 317850
acucaaggguccuuuccua

SEQ ID NO: 517178 - RNA, 19 nt, Artificial Sequence
  Description of Artificial Sequence: Synthetic oligonucleotide
  Antisense strand to SEQ ID NO: 517177
uaggaaaggacccuugagu

SEQ ID NO: 517179 - RNA, 19 nt, Artificial Sequence
  Description of Artificial Sequence: Synthetic oligonucleotide
  Sense strand starting at position 1111 of SEQ ID NO: 317850
cacugcuaccgggagauua

SEQ ID NO: 517180 - RNA, 19 nt, Artificial Sequence
  Description of Artificial Sequence: Synthetic oligonucleotide
  Antisense strand to SEQ ID NO: 517179
uaaucucccgguagcagug

SEQ ID NO: 517181 - RNA, 19 nt, Artificial Sequence
  Description of Artificial Sequence: Synthetic oligonucleotide
  Sense strand starting at position 1272 of SEQ ID NO: 317850
uugcguucccuaguuacuu

SEQ ID NO: 517182 - RNA, 19 nt, Artificial Sequence
  Description of Artificial Sequence: Synthetic oligonucleotide
  Antisense strand to SEQ ID NO: 517181
aaguaacuagggaacgcaa

SEQ ID NO: 517183 - RNA, 19 nt, Artificial Sequence
  Description of Artificial Sequence: Synthetic oligonucleotide
  Sense strand starting at position 1377 of SEQ ID NO: 317850
agagcagcgccucagaaau

SEQ ID NO: 517184 - RNA, 19 nt, Artificial Sequence
  Description of Artificial Sequence: Synthetic oligonucleotide
  Antisense strand to SEQ ID NO: 517183
auuucugaggcgcugcucu

SEQ ID NO: 517185 - RNA, 19 nt, Artificial Sequence
  Description of Artificial Sequence: Synthetic oligonucleotide
  Sense strand starting at position 2151 of SEQ ID NO: 317850
uuggauugguucuccgaga

SEQ ID NO: 517186 - RNA, 19 nt, Artificial Sequence
  Description of Artificial Sequence: Synthetic oligonucleotide
  Antisense strand to SEQ ID NO: 517185
ucucggagaaccaauccaa

SEQ ID NO: 517187 - RNA, 19 nt, Artificial Sequence
  Description of Artificial Sequence: Synthetic oligonucleotide
  Sense strand starting at position 2152 of SEQ ID NO: 317850
uggauugguucuccgagac

SEQ ID NO: 517188 - RNA, 19 nt, Artificial Sequence
  Description of Artificial Sequence: Synthetic oligonucleotide
  Antisense strand to SEQ ID NO: 517187
gucucggagaaccaaucca

SEQ ID NO: 517189 - RNA, 19 nt, Artificial Sequence
  Description of Artificial Sequence: Synthetic oligonucleotide
  Sense strand starting at position 2360 of SEQ ID NO: 317850
ggcugauaacuggauugcu

SEQ ID NO: 517190 - RNA, 19 nt, Artificial Sequence
  Description of Artificial Sequence: Synthetic oligonucleotide
  Antisense strand to SEQ ID NO: 517189
agcaauccaguuaucagcc

SEQ ID NO: 517191 - RNA, 19 nt, Artificial Sequence
  Description of Artificial Sequence: Synthetic oligonucleotide
  Sense strand starting at position 2424 of SEQ ID NO: 317850
aguacuuuagaguguaaug

SEQ ID NO: 517192 - RNA, 19 nt, Artificial Sequence
  Description of Artificial Sequence: Synthetic oligonucleotide
  Antisense strand to SEQ ID NO: 517191
cauuacacucuaaaguacu

SEQ ID NO: 517193 - RNA, 19 nt, Artificial Sequence
  Description of Artificial Sequence: Synthetic oligonucleotide
  Sense strand starting at position 2477 of SEQ ID NO: 317850
agaaucuucuguccugaag

SEQ ID NO: 517194 - RNA, 19 nt, Artificial Sequence
  Description of Artificial Sequence: Synthetic oligonucleotide
  Antisense strand to SEQ ID NO: 517193
cuucaggacagaagauucu

SEQ ID NO: 517195 - RNA, 19 nt, Artificial Sequence
  Description of Artificial Sequence: Synthetic oligonucleotide
  Sense strand starting at position 2480 of SEQ ID NO: 317850
aucuucuguccugaagguu

SEQ ID NO: 517196 - RNA, 19 nt, Artificial Sequence
  Description of Artificial Sequence: Synthetic oligonucleotide
  Antisense strand to SEQ ID NO: 517195
aaccuucaggacagaagau

SEQ ID NO: 517197 - RNA, 19 nt, Artificial Sequence
  Description of Artificial Sequence: Synthetic oligonucleotide
  Sense strand starting at position 2554 of SEQ ID NO: 317850
cuagaaugagcuugcaagu

SEQ ID NO: 517198 - RNA, 19 nt, Artificial Sequence
  Description of Artificial Sequence: Synthetic oligonucleotide
  Antisense strand to SEQ ID NO: 517197
acuugcaagcucauucuag

SEQ ID NO: 517199 - RNA, 19 nt, Artificial Sequence
  Description of Artificial Sequence: Synthetic oligonucleotide
  Sense strand starting at position 2758 of SEQ ID NO: 317850
ucucuaggcuucccagaua

SEQ ID NO: 517200 - RNA, 19 nt, Artificial Sequence
  Description of Artificial Sequence: Synthetic oligonucleotide
  Antisense strand to SEQ ID NO: 517199
uaucugggaagccuagaga

SEQ ID NO: 517201 - RNA, 19 nt, Artificial Sequence
  Description of Artificial Sequence: Synthetic oligonucleotide
  Sense strand starting at position 2778 of SEQ ID NO: 317850
gacuaucagcuucgaaaug

SEQ ID NO: 517202 - RNA, 19 nt, Artificial Sequence
  Description of Artificial Sequence: Synthetic oligonucleotide
  Antisense strand to SEQ ID NO: 517201
cauuucgaagcugauaguc

SEQ ID NO: 517203 - RNA, 19 nt, Artificial Sequence
  Description of Artificial Sequence: Synthetic oligonucleotide
  Sense strand starting at position 2815 of SEQ ID NO: 317850
gaggucucagugugagagu

SEQ ID NO: 517204 - RNA, 19 nt, Artificial Sequence
  Description of Artificial Sequence: Synthetic oligonucleotide
  Antisense strand to SEQ ID NO: 517203
acucucacacugagaccuc

SEQ ID NO: 517205 - RNA, 19 nt, Artificial Sequence
  Description of Artificial Sequence: Synthetic oligonucleotide
  Sense strand starting at position 2960 of SEQ ID NO: 317850
ccaagaaguuaguuuauag

SEQ ID NO: 517206 - RNA, 19 nt, Artificial Sequence
  Description of Artificial Sequence: Synthetic oligonucleotide
  Antisense strand to SEQ ID NO: 517205
cuauaaacuaacuucuugg

SEQ ID NO: 517207 - RNA, 19 nt, Artificial Sequence
  Description of Artificial Sequence: Synthetic oligonucleotide
  Sense strand starting at position 2967 of SEQ ID NO: 317850
guuaguuuauagucaacuu

SEQ ID NO: 517208 - RNA, 19 nt, Artificial Sequence
  Description of Artificial Sequence: Synthetic oligonucleotide
  Antisense strand to SEQ ID NO: 517207
aaguugacuauaaacuaac

SEQ ID NO: 517209 - RNA, 19 nt, Artificial Sequence
  Description of Artificial Sequence: Synthetic oligonucleotide
  Sense strand starting at position 3023 of SEQ ID NO: 317850
ggcagauugagaugugguu

SEQ ID NO: 517210 - RNA, 19 nt, Artificial Sequence
  Description of Artificial Sequence: Synthetic oligonucleotide
  Antisense strand to SEQ ID NO: 517209
aaccacaucucaaucugcc

SEQ ID NO: 517211 - RNA, 19 nt, Artificial Sequence
  Description of Artificial Sequence: Synthetic oligonucleotide
  Sense strand starting at position 3036 of SEQ ID NO: 317850
gugguucucgaagaucaaa

SEQ ID NO: 517212 - RNA, 19 nt, Artificial Sequence
  Description of Artificial Sequence: Synthetic oligonucleotide
  Antisense strand to SEQ ID NO: 517211
uuugaucuucgagaaccac

SEQ ID NO: 517213 - RNA, 19 nt, Artificial Sequence
  Description of Artificial Sequence: Synthetic oligonucleotide
  Sense strand starting at position 3047 of SEQ ID NO: 317850
agaucaaacguguaugggu

SEQ ID NO: 517214 - RNA, 19 nt, Artificial Sequence
  Description of Artificial Sequence: Synthetic oligonucleotide
  Antisense strand to SEQ ID NO: 517213
acccauacacguuugaucu

SEQ ID NO: 517215 - RNA, 19 nt, Artificial Sequence
  Description of Artificial Sequence: Synthetic oligonucleotide
  Sense strand starting at position 3158 of SEQ ID NO: 317850
ucauauaagugggaaagaa

SEQ ID NO: 517216 - RNA, 19 nt, Artificial Sequence
  Description of Artificial Sequence: Synthetic oligonucleotide
  Antisense strand to SEQ ID NO: 517215
uucuuucccacuuauauga

SEQ ID NO: 517217 - RNA, 19 nt, Artificial Sequence
  Description of Artificial Sequence: Synthetic oligonucleotide
  Sense strand starting at position 3211 of SEQ ID NO: 317850
uagacagagcuguacuaau

SEQ ID NO: 517218 - RNA, 19 nt, Artificial Sequence
  Description of Artificial Sequence: Synthetic oligonucleotide
  Antisense strand to SEQ ID NO: 517217
auuaguacagcucugucua

SEQ ID NO: 517219 - RNA, 19 nt, Artificial Sequence
  Description of Artificial Sequence: Synthetic oligonucleotide
  Sense strand starting at position 3284 of SEQ ID NO: 317850
gucagaagguugguaggaa

SEQ ID NO: 517220 - RNA, 19 nt, Artificial Sequence
  Description of Artificial Sequence: Synthetic oligonucleotide
  Antisense strand to SEQ ID NO: 517219
uuccuaccaaccuucugac

SEQ ID NO: 517221 - RNA, 19 nt, Artificial Sequence
  Description of Artificial Sequence: Synthetic oligonucleotide
  Sense strand starting at position 3326 of SEQ ID NO: 317850
agguguuuggcagaucuga

SEQ ID NO: 517222 - RNA, 19 nt, Artificial Sequence
  Description of Artificial Sequence: Synthetic oligonucleotide
  Antisense strand to SEQ ID NO: 517221
ucagaucugccaaacaccu

SEQ ID NO: 517223 - RNA, 19 nt, Artificial Sequence
  Description of Artificial Sequence: Synthetic oligonucleotide
  Sense strand starting at position 3673 of SEQ ID NO: 317850
ucuguuugccucugaagag

SEQ ID NO: 517224 - RNA, 19 nt, Artificial Sequence
  Description of Artificial Sequence: Synthetic oligonucleotide
  Antisense strand to SEQ ID NO: 517223
cucuucagaggcaaacaga

SEQ ID NO: 517225 - RNA, 19 nt, Artificial Sequence
  Description of Artificial Sequence: Synthetic oligonucleotide
  Sense strand starting at position 3693 of SEQ ID NO: 317850
gaaggugauccaugcacac

SEQ ID NO: 517226 - RNA, 19 nt, Artificial Sequence
  Description of Artificial Sequence: Synthetic oligonucleotide
  Antisense strand to SEQ ID NO: 517225
gugugcauggaucaccuuc

SEQ ID NO: 517227 - RNA, 19 nt, Artificial Sequence
  Description of Artificial Sequence: Synthetic oligonucleotide
  Sense strand starting at position 3977 of SEQ ID NO: 317850
ggcugugcuagggaagaaa

SEQ ID NO: 517228 - RNA, 19 nt, Artificial Sequence
  Description of Artificial Sequence: Synthetic oligonucleotide
  Antisense strand to SEQ ID NO: 517227
uuucuucccuagcacagcc

SEQ ID NO: 517229 - RNA, 19 nt, Artificial Sequence
  Description of Artificial Sequence: Synthetic oligonucleotide
  Sense strand starting at position 4 of SEQ ID NO: 317851
gacuaaggauuuggaagaa

SEQ ID NO: 517230 - RNA, 19 nt, Artificial Sequence
  Description of Artificial Sequence: Synthetic oligonucleotide
  Antisense strand to SEQ ID NO: 517229
uucuuccaaauccuuaguc

SEQ ID NO: 517231 - RNA, 19 nt, Artificial Sequence
  Description of Artificial Sequence: Synthetic oligonucleotide
  Sense strand starting at position 70 of SEQ ID NO: 317851
ucaugcuuucucuagaaga

SEQ ID NO: 517232 - RNA, 19 nt, Artificial Sequence
  Description of Artificial Sequence: Synthetic oligonucleotide
  Antisense strand to SEQ ID NO: 517231
ucuucuagagaaagcauga

SEQ ID NO: 517233 - RNA, 19 nt, Artificial Sequence
  Description of Artificial Sequence: Synthetic oligonucleotide
  Sense strand starting at position 72 of SEQ ID NO: 317851
augcuuucucuagaagacu

SEQ ID NO: 517234 - RNA, 19 nt, Artificial Sequence
  Description of Artificial Sequence: Synthetic oligonucleotide
  Antisense strand to SEQ ID NO: 517233
agucuucuagagaaagcau

SEQ ID NO: 517235 - RNA, 19 nt, Artificial Sequence
  Description of Artificial Sequence: Synthetic oligonucleotide
  Sense strand starting at position 113 of SEQ ID NO: 317851
ccgaauucucaaggcaaua

SEQ ID NO: 517236 - RNA, 19 nt, Artificial Sequence
  Description of Artificial Sequence: Synthetic oligonucleotide
  Antisense strand to SEQ ID NO: 517235
uauugccuugagaauucgg

SEQ ID NO: 517237 - RNA, 19 nt, Artificial Sequence
  Description of Artificial Sequence: Synthetic oligonucleotide
  Sense strand starting at position 381 of SEQ ID NO: 317851
ccaagaggcuuaucagaca

SEQ ID NO: 517238 - RNA, 19 nt, Artificial Sequence
  Description of Artificial Sequence: Synthetic oligonucleotide
  Antisense strand to SEQ ID NO: 517237
ugucugauaagccucuugg

SEQ ID NO: 517239 - RNA, 19 nt, Artificial Sequence
  Description of Artificial Sequence: Synthetic oligonucleotide
  Sense strand starting at position 551 of SEQ ID NO: 317851
cauuuacuauucgugaagu

SEQ ID NO: 517240 - RNA, 19 nt, Artificial Sequence
  Description of Artificial Sequence: Synthetic oligonucleotide
  Antisense strand to SEQ ID NO: 517239
acuucacgaauaguaaaug

SEQ ID NO: 517241 - RNA, 19 nt, Artificial Sequence
  Description of Artificial Sequence: Synthetic oligonucleotide
  Sense strand starting at position 777 of SEQ ID NO: 317851
cugucugcggaccagaauu

SEQ ID NO: 517242 - RNA, 19 nt, Artificial Sequence
  Description of Artificial Sequence: Synthetic oligonucleotide
  Antisense strand to SEQ ID NO: 517241
aauucugguccgcagacag

SEQ ID NO: 517243 - RNA, 19 nt, Artificial Sequence
  Description of Artificial Sequence: Synthetic oligonucleotide
  Sense strand starting at position 839 of SEQ ID NO: 317851
auaacagagucagcucuau

SEQ ID NO: 517244 - RNA, 19 nt, Artificial Sequence
  Description of Artificial Sequence: Synthetic oligonucleotide
  Antisense strand to SEQ ID NO: 517243
auagagcugacucuguuau

SEQ ID NO: 517245 - RNA, 19 nt, Artificial Sequence
  Description of Artificial Sequence: Synthetic oligonucleotide
  Sense strand starting at position 843 of SEQ ID NO: 317851
cagagucagcucuaugcua

SEQ ID NO: 517246 - RNA, 19 nt, Artificial Sequence
  Description of Artificial Sequence: Synthetic oligonucleotide
  Antisense strand to SEQ ID NO: 517245
uagcauagagcugacucug

SEQ ID NO: 517247 - RNA, 19 nt, Artificial Sequence
  Description of Artificial Sequence: Synthetic oligonucleotide
  Sense strand starting at position 1029 of SEQ ID NO: 317851
uuggguagauacuuccuua

SEQ ID NO: 517248 - RNA, 19 nt, Artificial Sequence
  Description of Artificial Sequence: Synthetic oligonucleotide
  Antisense strand to SEQ ID NO: 517247
uaaggaaguaucuacccaa

SEQ ID NO: 517249 - RNA, 19 nt, Artificial Sequence
  Description of Artificial Sequence: Synthetic oligonucleotide
  Sense strand starting at position 1032 of SEQ ID NO: 317851
gguagauacuuccuuagga

SEQ ID NO: 517250 - RNA, 19 nt, Artificial Sequence
  Description of Artificial Sequence: Synthetic oligonucleotide
  Antisense strand to SEQ ID NO: 517249
uccuaaggaaguaucuacc

SEQ ID NO: 517251 - RNA, 19 nt, Artificial Sequence
  Description of Artificial Sequence: Synthetic oligonucleotide
  Sense strand starting at position 1033 of SEQ ID NO: 317851
guagauacuuccuuaggaa

SEQ ID NO: 517252 - RNA, 19 nt, Artificial Sequence
  Description of Artificial Sequence: Synthetic oligonucleotide
  Antisense strand to SEQ ID NO: 517251
uuccuaaggaaguaucuac

SEQ ID NO: 517253 - RNA, 19 nt, Artificial Sequence
  Description of Artificial Sequence: Synthetic oligonucleotide
  Sense strand starting at position 1091 of SEQ ID NO: 317851
guugucagucaccaggaaa

SEQ ID NO: 517254 - RNA, 19 nt, Artificial Sequence
  Description of Artificial Sequence: Synthetic oligonucleotide
  Antisense strand to SEQ ID NO: 517253
uuuccuggugacugacaac

SEQ ID NO: 517255 - RNA, 19 nt, Artificial Sequence
  Description of Artificial Sequence: Synthetic oligonucleotide
  Sense strand starting at position 1164 of SEQ ID NO: 317851
aacacccuucgaggaguua

SEQ ID NO: 517256 - RNA, 19 nt, Artificial Sequence
  Description of Artificial Sequence: Synthetic oligonucleotide
  Antisense strand to SEQ ID NO: 517255
uaacuccucgaaggguguu

SEQ ID NO: 517257 - RNA, 19 nt, Artificial Sequence
  Description of Artificial Sequence: Synthetic oligonucleotide
  Sense strand starting at position 1165 of SEQ ID NO: 317851
acacccuucgaggaguuaa

SEQ ID NO: 517258 - RNA, 19 nt, Artificial Sequence
  Description of Artificial Sequence: Synthetic oligonucleotide
  Antisense strand to SEQ ID NO: 517257
uuaacuccucgaagggugu

SEQ ID NO: 517259 - RNA, 19 nt, Artificial Sequence
  Description of Artificial Sequence: Synthetic oligonucleotide
  Sense strand starting at position 1338 of SEQ ID NO: 317851
ucggauucgaaagguaaau

SEQ ID NO: 517260 - RNA, 19 nt, Artificial Sequence
  Description of Artificial Sequence: Synthetic oligonucleotide
  Antisense strand to SEQ ID NO: 517259
auuuaccuuucgaauccga

SEQ ID NO: 517261 - RNA, 19 nt, Artificial Sequence
  Description of Artificial Sequence: Synthetic oligonucleotide
  Sense strand starting at position 1366 of SEQ ID NO: 317851
ggaagcauuccucagaugu

SEQ ID NO: 517262 - RNA, 19 nt, Artificial Sequence
  Description of Artificial Sequence: Synthetic oligonucleotide
  Antisense strand to SEQ ID NO: 517261
acaucugaggaaugcuucc

SEQ ID NO: 517263 - RNA, 19 nt, Artificial Sequence
  Description of Artificial Sequence: Synthetic oligonucleotide
  Sense strand starting at position 1444 of SEQ ID NO: 317851
gcccaaggucuguacucaa

SEQ ID NO: 517264 - RNA, 19 nt, Artificial Sequence
  Description of Artificial Sequence: Synthetic oligonucleotide
  Antisense strand to SEQ ID NO: 517263
uugaguacagaccuugggc

SEQ ID NO: 517265 - RNA, 19 nt, Artificial Sequence
  Description of Artificial Sequence: Synthetic oligonucleotide
  Sense strand starting at position 1447 of SEQ ID NO: 317851
caaggucuguacucaaaga

SEQ ID NO: 517266 - RNA, 19 nt, Artificial Sequence
  Description of Artificial Sequence: Synthetic oligonucleotide
  Antisense strand to SEQ ID NO: 517265
ucuuugaguacagaccuug

SEQ ID NO: 517267 - RNA, 19 nt, Artificial Sequence
  Description of Artificial Sequence: Synthetic oligonucleotide
  Sense strand starting at position 1574 of SEQ ID NO: 317851
cuagcuauugccuccguga

SEQ ID NO: 517268 - RNA, 19 nt, Artificial Sequence
  Description of Artificial Sequence: Synthetic oligonucleotide
  Antisense strand to SEQ ID NO: 517267
ucacggaggcaauagcuag

SEQ ID NO: 517269 - RNA, 19 nt, Artificial Sequence
  Description of Artificial Sequence: Synthetic oligonucleotide
  Sense strand starting at position 1752 of SEQ ID NO: 317851
aggaaugugccaggauguu

SEQ ID NO: 517270 - RNA, 19 nt, Artificial Sequence
  Description of Artificial Sequence: Synthetic oligonucleotide
  Antisense strand to SEQ ID NO: 517269
aacauccuggcacauuccu

SEQ ID NO: 517271 - RNA, 19 nt, Artificial Sequence
  Description of Artificial Sequence: Synthetic oligonucleotide
  Sense strand starting at position 2205 of SEQ ID NO: 317851
uugaucgcgcgauuggauu

SEQ ID NO: 517272 - RNA, 19 nt, Artificial Sequence
  Description of Artificial Sequence: Synthetic oligonucleotide
  Antisense strand to SEQ ID NO: 517271
aauccaaucgcgcgaucaa

SEQ ID NO: 517273 - RNA, 19 nt, Artificial Sequence
  Description of Artificial Sequence: Synthetic oligonucleotide
  Sense strand starting at position 2273 of SEQ ID NO: 317851
gcuuaaguuagugggaaau

SEQ ID NO: 517274 - RNA, 19 nt, Artificial Sequence
  Description of Artificial Sequence: Synthetic oligonucleotide
  Antisense strand to SEQ ID NO: 517273
auuucccacuaacuuaagc

SEQ ID NO: 517275 - RNA, 19 nt, Artificial Sequence
  Description of Artificial Sequence: Synthetic oligonucleotide
  Sense strand starting at position 2286 of SEQ ID NO: 317851
ggaaaucuaugugugcaua

SEQ ID NO: 517276 - RNA, 19 nt, Artificial Sequence
  Description of Artificial Sequence: Synthetic oligonucleotide
  Antisense strand to SEQ ID NO: 517275
uaugcacacauagauuucc

SEQ ID NO: 517277 - RNA, 19 nt, Artificial Sequence
  Description of Artificial Sequence: Synthetic oligonucleotide
  Sense strand starting at position 2369 of SEQ ID NO: 317851
cucugaaaucgauaugagc

SEQ ID NO: 517278 - RNA, 19 nt, Artificial Sequence
  Description of Artificial Sequence: Synthetic oligonucleotide
  Antisense strand to SEQ ID NO: 517277
gcucauaucgauuucagag

SEQ ID NO: 517279 - RNA, 19 nt, Artificial Sequence
  Description of Artificial Sequence: Synthetic oligonucleotide
  Sense strand starting at position 2401 of SEQ ID NO: 317851
gucuauguagccuaucaaa

SEQ ID NO: 517280 - RNA, 19 nt, Artificial Sequence
  Description of Artificial Sequence: Synthetic oligonucleotide
  Antisense strand to SEQ ID NO: 517279
uuugauaggcuacauagac

SEQ ID NO: 517281 - RNA, 19 nt, Artificial Sequence
  Description of Artificial Sequence: Synthetic oligonucleotide
  Sense strand starting at position 2501 of SEQ ID NO: 317851
augacuuuaucugcaugaa

SEQ ID NO: 517282 - RNA, 19 nt, Artificial Sequence
  Description of Artificial Sequence: Synthetic oligonucleotide
  Antisense strand to SEQ ID NO: 517281
uucaugcagauaaagucau

SEQ ID NO: 517283 - RNA, 19 nt, Artificial Sequence
  Description of Artificial Sequence: Synthetic oligonucleotide
  Sense strand starting at position 2502 of SEQ ID NO: 317851
ugacuuuaucugcaugaau

SEQ ID NO: 517284 - RNA, 19 nt, Artificial Sequence
  Description of Artificial Sequence: Synthetic oligonucleotide
  Antisense strand to SEQ ID NO: 517283
auucaugcagauaaaguca

SEQ ID NO: 517285 - RNA, 19 nt, Artificial Sequence
  Description of Artificial Sequence: Synthetic oligonucleotide
  Sense strand starting at position 2609 of SEQ ID NO: 317851
gaagguacuccgcagcaaa

SEQ ID NO: 517286 - RNA, 19 nt, Artificial Sequence
  Description of Artificial Sequence: Synthetic oligonucleotide
  Antisense strand to SEQ ID NO: 517285
uuugcugcggaguaccuuc

SEQ ID NO: 517287 - RNA, 19 nt, Artificial Sequence
  Description of Artificial Sequence: Synthetic oligonucleotide
  Sense strand starting at position 2637 of SEQ ID NO: 317851
guguuaacaagcugagaau

SEQ ID NO: 517288 - RNA, 19 nt, Artificial Sequence
  Description of Artificial Sequence: Synthetic oligonucleotide
  Antisense strand to SEQ ID NO: 517287
auucucagcuuguuaacac

SEQ ID NO: 517289 - RNA, 19 nt, Artificial Sequence
  Description of Artificial Sequence: Synthetic oligonucleotide
  Sense strand starting at position 2638 of SEQ ID NO: 317851
uguuaacaagcugagaauu

SEQ ID NO: 517290 - RNA, 19 nt, Artificial Sequence
  Description of Artificial Sequence: Synthetic oligonucleotide
  Antisense strand to SEQ ID NO: 517289
aauucucagcuuguuaaca

SEQ ID NO: 517291 - RNA, 19 nt, Artificial Sequence
  Description of Artificial Sequence: Synthetic oligonucleotide
  Sense strand starting at position 3035 of SEQ ID NO: 317851
guaggucaggcuugaaaca

SEQ ID NO: 517292 - RNA, 19 nt, Artificial Sequence
  Description of Artificial Sequence: Synthetic oligonucleotide
  Antisense strand to SEQ ID NO: 517291
uguuucaagccugaccuac

SEQ ID NO: 517293 - RNA, 19 nt, Artificial Sequence
  Description of Artificial Sequence: Synthetic oligonucleotide
  Sense strand starting at position 3221 of SEQ ID NO: 317851
aaaugacuuugugugaaug

SEQ ID NO: 517294 - RNA, 19 nt, Artificial Sequence
  Description of Artificial Sequence: Synthetic oligonucleotide
  Antisense strand to SEQ ID NO: 517293
cauucacacaaagucauuu

SEQ ID NO: 517295 - RNA, 19 nt, Artificial Sequence
  Description of Artificial Sequence: Synthetic oligonucleotide
  Sense strand starting at position 3222 of SEQ ID NO: 317851
aaugacuuugugugaauga

SEQ ID NO: 517296 - RNA, 19 nt, Artificial Sequence
  Description of Artificial Sequence: Synthetic oligonucleotide
  Antisense strand to SEQ ID NO: 517295
ucauucacacaaagucauu

SEQ ID NO: 517297 - RNA, 19 nt, Artificial Sequence
  Description of Artificial Sequence: Synthetic oligonucleotide
  Sense strand starting at position 3231 of SEQ ID NO: 317851
gugugaaugacaggaagua

SEQ ID NO: 517298 - RNA, 19 nt, Artificial Sequence
  Description of Artificial Sequence: Synthetic oligonucleotide
  Antisense strand to SEQ ID NO: 517297
uacuuccugucauucacac

SEQ ID NO: 517299 - RNA, 19 nt, Artificial Sequence
  Description of Artificial Sequence: Synthetic oligonucleotide
  Sense strand starting at position 3258 of SEQ ID NO: 317851
uuaguccuaggauaguauu

SEQ ID NO: 517300 - RNA, 19 nt, Artificial Sequence
  Description of Artificial Sequence: Synthetic oligonucleotide
  Antisense strand to SEQ ID NO: 517299
aauacuauccuaggacuaa

SEQ ID NO: 517301 - RNA, 19 nt, Artificial Sequence
  Description of Artificial Sequence: Synthetic oligonucleotide
  Sense strand starting at position 3479 of SEQ ID NO: 317851
cuaagaagugcucacucaa

SEQ ID NO: 517302 - RNA, 19 nt, Artificial Sequence
  Description of Artificial Sequence: Synthetic oligonucleotide
  Antisense strand to SEQ ID NO: 517301
uugagugagcacuucuuag

SEQ ID NO: 517303 - RNA, 19 nt, Artificial Sequence
  Description of Artificial Sequence: Synthetic oligonucleotide
  Sense strand starting at position 3739 of SEQ ID NO: 317851
ggagaauucugguuugaac

SEQ ID NO: 517304 - RNA, 19 nt, Artificial Sequence
  Description of Artificial Sequence: Synthetic oligonucleotide
  Antisense strand to SEQ ID NO: 517303
guucaaaccagaauucucc

SEQ ID NO: 517305 - RNA, 19 nt, Artificial Sequence
  Description of Artificial Sequence: Synthetic oligonucleotide
  Sense strand starting at position 3741 of SEQ ID NO: 317851
agaauucugguuugaacug

SEQ ID NO: 517306 - RNA, 19 nt, Artificial Sequence
  Description of Artificial Sequence: Synthetic oligonucleotide
  Antisense strand to SEQ ID NO: 517305
caguucaaaccagaauucu

SEQ ID NO: 517307 - RNA, 19 nt, Artificial Sequence
  Description of Artificial Sequence: Synthetic oligonucleotide
  Sense strand starting at position 3854 of SEQ ID NO: 317851
uuuaucccucgugaaacau

SEQ ID NO: 517308 - RNA, 19 nt, Artificial Sequence
  Description of Artificial Sequence: Synthetic oligonucleotide
  Antisense strand to SEQ ID NO: 517307
auguuucacgagggauaaa

SEQ ID NO: 517309 - RNA, 19 nt, Artificial Sequence
  Description of Artificial Sequence: Synthetic oligonucleotide
  Sense strand starting at position 132 of SEQ ID NO: 317852
ggaagucaguuauccuuaa

SEQ ID NO: 517310 - RNA, 19 nt, Artificial Sequence
  Description of Artificial Sequence: Synthetic oligonucleotide
  Antisense strand to SEQ ID NO: 517309
uuaaggauaacugacuucc

SEQ ID NO: 517311 - RNA, 19 nt, Artificial Sequence
  Description of Artificial Sequence: Synthetic oligonucleotide
  Sense strand starting at position 408 of SEQ ID NO: 317852
ugugcuggugcagagaauu

SEQ ID NO: 517312 - RNA, 19 nt, Artificial Sequence
  Description of Artificial Sequence: Synthetic oligonucleotide
  Antisense strand to SEQ ID NO: 517311
aauucucugcaccagcaca

SEQ ID NO: 517313 - RNA, 19 nt, Artificial Sequence
  Description of Artificial Sequence: Synthetic oligonucleotide
  Sense strand starting at position 450 of SEQ ID NO: 317852
agagaaggauaaugggaau

SEQ ID NO: 517314 - RNA, 19 nt, Artificial Sequence
  Description of Artificial Sequence: Synthetic oligonucleotide
  Antisense strand to SEQ ID NO: 517313
auucccauuauccuucucu

SEQ ID NO: 517315 - RNA, 19 nt, Artificial Sequence
  Description of Artificial Sequence: Synthetic oligonucleotide
  Sense strand starting at position 453 of SEQ ID NO: 317852
gaaggauaaugggaaucuu

SEQ ID NO: 517316 - RNA, 19 nt, Artificial Sequence
  Description of Artificial Sequence: Synthetic oligonucleotide
  Antisense strand to SEQ ID NO: 517315
aagauucccauuauccuuc

SEQ ID NO: 517317 - RNA, 19 nt, Artificial Sequence
  Description of Artificial Sequence: Synthetic oligonucleotide
  Sense strand starting at position 842 of SEQ ID NO: 317852
agacuucuguuccuacaag

SEQ ID NO: 517318 - RNA, 19 nt, Artificial Sequence
  Description of Artificial Sequence: Synthetic oligonucleotide
  Antisense strand to SEQ ID NO: 517317
cuuguaggaacagaagucu

SEQ ID NO: 517319 - RNA, 19 nt, Artificial Sequence
  Description of Artificial Sequence: Synthetic oligonucleotide
  Sense strand starting at position 851 of SEQ ID NO: 317852
uuccuacaagacugaguuu

SEQ ID NO: 517320 - RNA, 19 nt, Artificial Sequence
  Description of Artificial Sequence: Synthetic oligonucleotide
  Antisense strand to SEQ ID NO: 517319
aaacucagucuuguaggaa

SEQ ID NO: 517321 - RNA, 19 nt, Artificial Sequence
  Description of Artificial Sequence: Synthetic oligonucleotide
  Sense strand starting at position 854 of SEQ ID NO: 317852
cuacaagacugaguuuaug

SEQ ID NO: 517322 - RNA, 19 nt, Artificial Sequence
  Description of Artificial Sequence: Synthetic oligonucleotide
  Antisense strand to SEQ ID NO: 517321
cauaaacucagucuuguag

SEQ ID NO: 517323 - RNA, 19 nt, Artificial Sequence
  Description of Artificial Sequence: Synthetic oligonucleotide
  Sense strand starting at position 1092 of SEQ ID NO: 317852
caugaaggcugcuuagauc

SEQ ID NO: 517324 - RNA, 19 nt, Artificial Sequence
  Description of Artificial Sequence: Synthetic oligonucleotide
  Antisense strand to SEQ ID NO: 517323
gaucuaagcagccuucaug

SEQ ID NO: 517325 - RNA, 19 nt, Artificial Sequence
  Description of Artificial Sequence: Synthetic oligonucleotide
  Sense strand starting at position 1101 of SEQ ID NO: 317852
ugcuuagaucccuauguuc

SEQ ID NO: 517326 - RNA, 19 nt, Artificial Sequence
  Description of Artificial Sequence: Synthetic oligonucleotide
  Antisense strand to SEQ ID NO: 517325
gaacauagggaucuaagca

SEQ ID NO: 517327 - RNA, 19 nt, Artificial Sequence
  Description of Artificial Sequence: Synthetic oligonucleotide
  Sense strand starting at position 1103 of SEQ ID NO: 317852
cuuagaucccuauguucua

SEQ ID NO: 517328 - RNA, 19 nt, Artificial Sequence
  Description of Artificial Sequence: Synthetic oligonucleotide
  Antisense strand to SEQ ID NO: 517327
uagaacauagggaucuaag

SEQ ID NO: 517329 - RNA, 19 nt, Artificial Sequence
  Description of Artificial Sequence: Synthetic oligonucleotide
  Sense strand starting at position 1106 of SEQ ID NO: 317852
agaucccuauguucuaaga

SEQ ID NO: 517330 - RNA, 19 nt, Artificial Sequence
  Description of Artificial Sequence: Synthetic oligonucleotide
  Antisense strand to SEQ ID NO: 517329
ucuuagaacauagggaucu

SEQ ID NO: 517331 - RNA, 19 nt, Artificial Sequence
  Description of Artificial Sequence: Synthetic oligonucleotide
  Sense strand starting at position 1145 of SEQ ID NO: 317852
uuaacuuccuuggcucaga

SEQ ID NO: 517332 - RNA, 19 nt, Artificial Sequence
  Description of Artificial Sequence: Synthetic oligonucleotide
  Antisense strand to SEQ ID NO: 517331
ucugagccaaggaaguuaa

SEQ ID NO: 517333 - RNA, 19 nt, Artificial Sequence
  Description of Artificial Sequence: Synthetic oligonucleotide
  Sense strand starting at position 1156 of SEQ ID NO: 317852
ggcucagaaguuuaggauu

SEQ ID NO: 517334 - RNA, 19 nt, Artificial Sequence
  Description of Artificial Sequence: Synthetic oligonucleotide
  Antisense strand to SEQ ID NO: 517333
aauccuaaacuucugagcc

SEQ ID NO: 517335 - RNA, 19 nt, Artificial Sequence
  Description of Artificial Sequence: Synthetic oligonucleotide
  Sense strand starting at position 1226 of SEQ ID NO: 317852
gaagaaacuggcggugaaa

SEQ ID NO: 517336 - RNA, 19 nt, Artificial Sequence
  Description of Artificial Sequence: Synthetic oligonucleotide
  Antisense strand to SEQ ID NO: 517335
uuucaccgccaguuucuuc

SEQ ID NO: 517337 - RNA, 19 nt, Artificial Sequence
  Description of Artificial Sequence: Synthetic oligonucleotide
  Sense strand starting at position 1228 of SEQ ID NO: 317852
agaaacuggcggugaaagu

SEQ ID NO: 517338 - RNA, 19 nt, Artificial Sequence
  Description of Artificial Sequence: Synthetic oligonucleotide
  Antisense strand to SEQ ID NO: 517337
acuuucaccgccaguuucu

SEQ ID NO: 517339 - RNA, 19 nt, Artificial Sequence
  Description of Artificial Sequence: Synthetic oligonucleotide
  Sense strand starting at position 1243 of SEQ ID NO: 317852
aagucauauugagugauua

SEQ ID NO: 517340 - RNA, 19 nt, Artificial Sequence
  Description of Artificial Sequence: Synthetic oligonucleotide
  Antisense strand to SEQ ID NO: 517339
uaaucacucaauaugacuu

SEQ ID NO: 517341 - RNA, 19 nt, Artificial Sequence
  Description of Artificial Sequence: Synthetic oligonucleotide
  Sense strand starting at position 1244 of SEQ ID NO: 317852
agucauauugagugauuaa

SEQ ID NO: 517342 - RNA, 19 nt, Artificial Sequence
  Description of Artificial Sequence: Synthetic oligonucleotide
  Antisense strand to SEQ ID NO: 517341
uuaaucacucaauaugacu

SEQ ID NO: 517343 - RNA, 19 nt, Artificial Sequence
  Description of Artificial Sequence: Synthetic oligonucleotide
  Sense strand starting at position 1247 of SEQ ID NO: 317852
cauauugagugauuaauga

SEQ ID NO: 517344 - RNA, 19 nt, Artificial Sequence
  Description of Artificial Sequence: Synthetic oligonucleotide
  Antisense strand to SEQ ID NO: 517343
ucauuaaucacucaauaug

SEQ ID NO: 517345 - RNA, 19 nt, Artificial Sequence
  Description of Artificial Sequence: Synthetic oligonucleotide
  Sense strand starting at position 1309 of SEQ ID NO: 317852
gcuggcagccucuaauuaa

SEQ ID NO: 517346 - RNA, 19 nt, Artificial Sequence
  Description of Artificial Sequence: Synthetic oligonucleotide
  Antisense strand to SEQ ID NO: 517345
uuaauuagaggcugccagc

SEQ ID NO: 517347 - RNA, 19 nt, Artificial Sequence
  Description of Artificial Sequence: Synthetic oligonucleotide
  Sense strand starting at position 1312 of SEQ ID NO: 317852
ggcagccucuaauuaauca

SEQ ID NO: 517348 - RNA, 19 nt, Artificial Sequence
  Description of Artificial Sequence: Synthetic oligonucleotide
  Antisense strand to SEQ ID NO: 517347
ugauuaauuagaggcugcc

SEQ ID NO: 517349 - RNA, 19 nt, Artificial Sequence
  Description of Artificial Sequence: Synthetic oligonucleotide
  Sense strand starting at position 1386 of SEQ ID NO: 317852
acaucuguauccucuaagu

SEQ ID NO: 517350 - RNA, 19 nt, Artificial Sequence
  Description of Artificial Sequence: Synthetic oligonucleotide
  Antisense strand to SEQ ID NO: 517349
acuuagaggauacagaugu

SEQ ID NO: 517351 - RNA, 19 nt, Artificial Sequence
  Description of Artificial Sequence: Synthetic oligonucleotide
  Sense strand starting at position 1388 of SEQ ID NO: 317852
aucuguauccucuaaguaa

SEQ ID NO: 517352 - RNA, 19 nt, Artificial Sequence
  Description of Artificial Sequence: Synthetic oligonucleotide
  Antisense strand to SEQ ID NO: 517351
uuacuuagaggauacagau

SEQ ID NO: 517353 - RNA, 19 nt, Artificial Sequence
  Description of Artificial Sequence: Synthetic oligonucleotide
  Sense strand starting at position 1391 of SEQ ID NO: 317852
uguauccucuaaguaaaua

SEQ ID NO: 517354 - RNA, 19 nt, Artificial Sequence
  Description of Artificial Sequence: Synthetic oligonucleotide
  Antisense strand to SEQ ID NO: 517353
uauuuacuuagaggauaca

SEQ ID NO: 517355 - RNA, 19 nt, Artificial Sequence
  Description of Artificial Sequence: Synthetic oligonucleotide
  Sense strand starting at position 1402 of SEQ ID NO: 317852
aguaaauauuauccgccaa

SEQ ID NO: 517356 - RNA, 19 nt, Artificial Sequence
  Description of Artificial Sequence: Synthetic oligonucleotide
  Antisense strand to SEQ ID NO: 517355
uuggcggauaauauuuacu

SEQ ID NO: 517357 - RNA, 19 nt, Artificial Sequence
  Description of Artificial Sequence: Synthetic oligonucleotide
  Sense strand starting at position 1499 of SEQ ID NO: 317852
cgcgguccucaggaagaaa

SEQ ID NO: 517358 - RNA, 19 nt, Artificial Sequence
  Description of Artificial Sequence: Synthetic oligonucleotide
  Antisense strand to SEQ ID NO: 517357
uuucuuccugaggaccgcg

SEQ ID NO: 517359 - RNA, 19 nt, Artificial Sequence
  Description of Artificial Sequence: Synthetic oligonucleotide
  Sense strand starting at position 1745 of SEQ ID NO: 317852
gcggguguccagcuuuagu

SEQ ID NO: 517360 - RNA, 19 nt, Artificial Sequence
  Description of Artificial Sequence: Synthetic oligonucleotide
  Antisense strand to SEQ ID NO: 517359
acuaaagcuggacacccgc

SEQ ID NO: 517361 - RNA, 19 nt, Artificial Sequence
  Description of Artificial Sequence: Synthetic oligonucleotide
  Sense strand starting at position 2225 of SEQ ID NO: 317852
acuggaguugcggaaaguu

SEQ ID NO: 517362 - RNA, 19 nt, Artificial Sequence
  Description of Artificial Sequence: Synthetic oligonucleotide
  Antisense strand to SEQ ID NO: 517361
aacuuuccgcaacuccagu

SEQ ID NO: 517363 - RNA, 19 nt, Artificial Sequence
  Description of Artificial Sequence: Synthetic oligonucleotide
  Sense strand starting at position 2621 of SEQ ID NO: 317852
gccuguggccuucuaaguu

SEQ ID NO: 517364 - RNA, 19 nt, Artificial Sequence
  Description of Artificial Sequence: Synthetic oligonucleotide
  Antisense strand to SEQ ID NO: 517363
aacuuagaaggccacaggc

SEQ ID NO: 517365 - RNA, 19 nt, Artificial Sequence
  Description of Artificial Sequence: Synthetic oligonucleotide
  Sense strand starting at position 2832 of SEQ ID NO: 317852
gaguccaggucuuuagaug

SEQ ID NO: 517366 - RNA, 19 nt, Artificial Sequence
  Description of Artificial Sequence: Synthetic oligonucleotide
  Antisense strand to SEQ ID NO: 517365
caucuaaagaccuggacuc

SEQ ID NO: 517367 - RNA, 19 nt, Artificial Sequence
  Description of Artificial Sequence: Synthetic oligonucleotide
  Sense strand starting at position 2833 of SEQ ID NO: 317852
aguccaggucuuuagauga

SEQ ID NO: 517368 - RNA, 19 nt, Artificial Sequence
  Description of Artificial Sequence: Synthetic oligonucleotide
  Antisense strand to SEQ ID NO: 517367
ucaucuaaagaccuggacu

SEQ ID NO: 517369 - RNA, 19 nt, Artificial Sequence
  Description of Artificial Sequence: Synthetic oligonucleotide
  Sense strand starting at position 2942 of SEQ ID NO: 317852
ccuacaucuuacguauuga

SEQ ID NO: 517370 - RNA, 19 nt, Artificial Sequence
  Description of Artificial Sequence: Synthetic oligonucleotide
  Antisense strand to SEQ ID NO: 517369
ucaauacguaagauguagg

SEQ ID NO: 517371 - RNA, 19 nt, Artificial Sequence
  Description of Artificial Sequence: Synthetic oligonucleotide
  Sense strand starting at position 2994 of SEQ ID NO: 317852
ccaagauguuuccuggcca

SEQ ID NO: 517372 - RNA, 19 nt, Artificial Sequence
  Description of Artificial Sequence: Synthetic oligonucleotide
  Antisense strand to SEQ ID NO: 517371
uggccaggaaacaucuugg

SEQ ID NO: 517373 - RNA, 19 nt, Artificial Sequence
  Description of Artificial Sequence: Synthetic oligonucleotide
  Sense strand starting at position 3047 of SEQ ID NO: 317852
gugucaaugcacguccuua

SEQ ID NO: 517374 - RNA, 19 nt, Artificial Sequence
  Description of Artificial Sequence: Synthetic oligonucleotide
  Antisense strand to SEQ ID NO: 517373
uaaggacgugcauugacac

SEQ ID NO: 517375 - RNA, 19 nt, Artificial Sequence
  Description of Artificial Sequence: Synthetic oligonucleotide
  Sense strand starting at position 3219 of SEQ ID NO: 317852
ccgcaaugccuugcuggau

SEQ ID NO: 517376 - RNA, 19 nt, Artificial Sequence
  Description of Artificial Sequence: Synthetic oligonucleotide
  Antisense strand to SEQ ID NO: 517375
auccagcaaggcauugcgg

SEQ ID NO: 517377 - RNA, 19 nt, Artificial Sequence
  Description of Artificial Sequence: Synthetic oligonucleotide
  Sense strand starting at position 3259 of SEQ ID NO: 317852
cucuuuagcgaaggaaaca

SEQ ID NO: 517378 - RNA, 19 nt, Artificial Sequence
  Description of Artificial Sequence: Synthetic oligonucleotide
  Antisense strand to SEQ ID NO: 517377
uguuuccuucgcuaaagag

SEQ ID NO: 517379 - RNA, 19 nt, Artificial Sequence
  Description of Artificial Sequence: Synthetic oligonucleotide
  Sense strand starting at position 3610 of SEQ ID NO: 317852
ggcaguucgcccucuucua

SEQ ID NO: 517380 - RNA, 19 nt, Artificial Sequence
  Description of Artificial Sequence: Synthetic oligonucleotide
  Antisense strand to SEQ ID NO: 517379
uagaagagggcgaacugcc

SEQ ID NO: 517381 - RNA, 19 nt, Artificial Sequence
  Description of Artificial Sequence: Synthetic oligonucleotide
  Sense strand starting at position 3719 of SEQ ID NO: 317852
gacuaucaugcagaugcuu

SEQ ID NO: 517382 - RNA, 19 nt, Artificial Sequence
  Description of Artificial Sequence: Synthetic oligonucleotide
  Antisense strand to SEQ ID NO: 517381
aagcaucugcaugauaguc

SEQ ID NO: 517383 - RNA, 19 nt, Artificial Sequence
  Description of Artificial Sequence: Synthetic oligonucleotide
  Sense strand starting at position 3829 of SEQ ID NO: 317852
gugccacaucugcaacuua

SEQ ID NO: 517384 - RNA, 19 nt, Artificial Sequence
  Description of Artificial Sequence: Synthetic oligonucleotide
  Antisense strand to SEQ ID NO: 517383
uaaguugcagauguggcac

SEQ ID NO: 517385 - RNA, 19 nt, Artificial Sequence
  Description of Artificial Sequence: Synthetic oligonucleotide
  Sense strand starting at position 3905 of SEQ ID NO: 317852
cucuauuuguugucuaacu

SEQ ID NO: 517386 - RNA, 19 nt, Artificial Sequence
  Description of Artificial Sequence: Synthetic oligonucleotide
  Antisense strand to SEQ ID NO: 517385
aguuagacaacaaauagag

SEQ ID NO: 517387 - RNA, 19 nt, Artificial Sequence
  Description of Artificial Sequence: Synthetic oligonucleotide
  Sense strand starting at position 3958 of SEQ ID NO: 317852
uggagaugcacauagcaua

SEQ ID NO: 517388 - RNA, 19 nt, Artificial Sequence
  Description of Artificial Sequence: Synthetic oligonucleotide
  Antisense strand to SEQ ID NO: 517387
uaugcuaugugcaucucca

SEQ ID NO: 517389 - RNA, 19 nt, Artificial Sequence
  Description of Artificial Sequence: Synthetic oligonucleotide
  Sense strand starting at position 49 of SEQ ID NO: 317853
gacgcacaccagugaugaa

SEQ ID NO: 517390 - RNA, 19 nt, Artificial Sequence
  Description of Artificial Sequence: Synthetic oligonucleotide
  Antisense strand to SEQ ID NO: 517389
uucaucacuggugugcguc

SEQ ID NO: 517391 - RNA, 19 nt, Artificial Sequence
  Description of Artificial Sequence: Synthetic oligonucleotide
  Sense strand starting at position 50 of SEQ ID NO: 317853
acgcacaccagugaugaau

SEQ ID NO: 517392 - RNA, 19 nt, Artificial Sequence
  Description of Artificial Sequence: Synthetic oligonucleotide
  Antisense strand to SEQ ID NO: 517391
auucaucacuggugugcgu

SEQ ID NO: 517393 - RNA, 19 nt, Artificial Sequence
  Description of Artificial Sequence: Synthetic oligonucleotide
  Sense strand starting at position 52 of SEQ ID NO: 317853
gcacaccagugaugaauaa

SEQ ID NO: 517394 - RNA, 19 nt, Artificial Sequence
  Description of Artificial Sequence: Synthetic oligonucleotide
  Antisense strand to SEQ ID NO: 517393
uuauucaucacuggugugc

SEQ ID NO: 517395 - RNA, 19 nt, Artificial Sequence
  Description of Artificial Sequence: Synthetic oligonucleotide
  Sense strand starting at position 147 of SEQ ID NO: 317853
uuguguggccuuggcaaua

SEQ ID NO: 517396 - RNA, 19 nt, Artificial Sequence
  Description of Artificial Sequence: Synthetic oligonucleotide
  Antisense strand to SEQ ID NO: 517395
uauugccaaggccacacaa

SEQ ID NO: 517397 - RNA, 19 nt, Artificial Sequence
  Description of Artificial Sequence: Synthetic oligonucleotide
  Sense strand starting at position 406 of SEQ ID NO: 317853
cggccucuccugugacuga

SEQ ID NO: 517398 - RNA, 19 nt, Artificial Sequence
  Description of Artificial Sequence: Synthetic oligonucleotide
  Antisense strand to SEQ ID NO: 517397
ucagucacaggagaggccg

SEQ ID NO: 517399 - RNA, 19 nt, Artificial Sequence
  Description of Artificial Sequence: Synthetic oligonucleotide
  Sense strand starting at position 964 of SEQ ID NO: 317853
acuuguucuccagagggcu

SEQ ID NO: 517400 - RNA, 19 nt, Artificial Sequence
  Description of Artificial Sequence: Synthetic oligonucleotide
  Antisense strand to SEQ ID NO: 517399
agcccucuggagaacaagu

SEQ ID NO: 517401 - RNA, 19 nt, Artificial Sequence
  Description of Artificial Sequence: Synthetic oligonucleotide
  Sense strand starting at position 977 of SEQ ID NO: 317853
agggcuuccucccagggau

SEQ ID NO: 517402 - RNA, 19 nt, Artificial Sequence
  Description of Artificial Sequence: Synthetic oligonucleotide
  Antisense strand to SEQ ID NO: 517401
aucccugggaggaagcccu

SEQ ID NO: 517403 - RNA, 19 nt, Artificial Sequence
  Description of Artificial Sequence: Synthetic oligonucleotide
  Sense strand starting at position 2299 of SEQ ID NO: 317853
cgucccaccucauguuaaa

SEQ ID NO: 517404 - RNA, 19 nt, Artificial Sequence
  Description of Artificial Sequence: Synthetic oligonucleotide
  Antisense strand to SEQ ID NO: 517403
uuuaacaugaggugggacg

SEQ ID NO: 517405 - RNA, 19 nt, Artificial Sequence
  Description of Artificial Sequence: Synthetic oligonucleotide
  Sense strand starting at position 2363 of SEQ ID NO: 317853
ccgucuccuuucccugaga

SEQ ID NO: 517406 - RNA, 19 nt, Artificial Sequence
  Description of Artificial Sequence: Synthetic oligonucleotide
  Antisense strand to SEQ ID NO: 517405
ucucagggaaaggagacgg

SEQ ID NO: 517407 - RNA, 19 nt, Artificial Sequence
  Description of Artificial Sequence: Synthetic oligonucleotide
  Sense strand starting at position 2366 of SEQ ID NO: 317853
ucuccuuucccugagaggu

SEQ ID NO: 517408 - RNA, 19 nt, Artificial Sequence
  Description of Artificial Sequence: Synthetic oligonucleotide
  Antisense strand to SEQ ID NO: 517407
accucucagggaaaggaga

SEQ ID NO: 517409 - RNA, 19 nt, Artificial Sequence
  Description of Artificial Sequence: Synthetic oligonucleotide
  Sense strand starting at position 2376 of SEQ ID NO: 317853
cugagagguccuugccuag

SEQ ID NO: 517410 - RNA, 19 nt, Artificial Sequence
  Description of Artificial Sequence: Synthetic oligonucleotide
  Antisense strand to SEQ ID NO: 517409
cuaggcaaggaccucucag

SEQ ID NO: 517411 - RNA, 19 nt, Artificial Sequence
  Description of Artificial Sequence: Synthetic oligonucleotide
  Sense strand starting at position 2380 of SEQ ID NO: 317853
gagguccuugccuagucua

SEQ ID NO: 517412 - RNA, 19 nt, Artificial Sequence
  Description of Artificial Sequence: Synthetic oligonucleotide
  Antisense strand to SEQ ID NO: 517411
uagacuaggcaaggaccuc

SEQ ID NO: 517413 - RNA, 19 nt, Artificial Sequence
  Description of Artificial Sequence: Synthetic oligonucleotide
  Sense strand starting at position 2530 of SEQ ID NO: 317853
aucccagucucauccugau

SEQ ID NO: 517414 - RNA, 19 nt, Artificial Sequence
  Description of Artificial Sequence: Synthetic oligonucleotide
  Antisense strand to SEQ ID NO: 517413
aucaggaugagacugggau

SEQ ID NO: 517415 - RNA, 19 nt, Artificial Sequence
  Description of Artificial Sequence: Synthetic oligonucleotide
  Sense strand starting at position 2697 of SEQ ID NO: 317853
aggagauccuuugcauucu

SEQ ID NO: 517416 - RNA, 19 nt, Artificial Sequence
  Description of Artificial Sequence: Synthetic oligonucleotide
  Antisense strand to SEQ ID NO: 517415
agaaugcaaaggaucuccu

SEQ ID NO: 517417 - RNA, 19 nt, Artificial Sequence
  Description of Artificial Sequence: Synthetic oligonucleotide
  Sense strand starting at position 2739 of SEQ ID NO: 317853
aggagucccaaguagaguu

SEQ ID NO: 517418 - RNA, 19 nt, Artificial Sequence
  Description of Artificial Sequence: Synthetic oligonucleotide
  Antisense strand to SEQ ID NO: 517417
aacucuacuugggacuccu

SEQ ID NO: 517419 - RNA, 19 nt, Artificial Sequence
  Description of Artificial Sequence: Synthetic oligonucleotide
  Sense strand starting at position 2749 of SEQ ID NO: 317853
aguagaguuccggaagcag

SEQ ID NO: 517420 - RNA, 19 nt, Artificial Sequence
  Description of Artificial Sequence: Synthetic oligonucleotide
  Antisense strand to SEQ ID NO: 517419
cugcuuccggaacucuacu

SEQ ID NO: 517421 - RNA, 19 nt, Artificial Sequence
  Description of Artificial Sequence: Synthetic oligonucleotide
  Sense strand starting at position 3077 of SEQ ID NO: 317853
ccgaguucugcguugggua

SEQ ID NO: 517422 - RNA, 19 nt, Artificial Sequence
  Description of Artificial Sequence: Synthetic oligonucleotide
  Antisense strand to SEQ ID NO: 517421
uacccaacgcagaacucgg

SEQ ID NO: 517423 - RNA, 19 nt, Artificial Sequence
  Description of Artificial Sequence: Synthetic oligonucleotide
  Sense strand starting at position 3078 of SEQ ID NO: 317853
cgaguucugcguuggguaa

SEQ ID NO: 517424 - RNA, 19 nt, Artificial Sequence
  Description of Artificial Sequence: Synthetic oligonucleotide
  Antisense strand to SEQ ID NO: 517423
uuacccaacgcagaacucg

SEQ ID NO: 517425 - RNA, 19 nt, Artificial Sequence
  Description of Artificial Sequence: Synthetic oligonucleotide
  Sense strand starting at position 3079 of SEQ ID NO: 317853
gaguucugcguuggguaau

SEQ ID NO: 517426 - RNA, 19 nt, Artificial Sequence
  Description of Artificial Sequence: Synthetic oligonucleotide
  Antisense strand to SEQ ID NO: 517425
auuacccaacgcagaacuc

SEQ ID NO: 517427 - RNA, 19 nt, Artificial Sequence
  Description of Artificial Sequence: Synthetic oligonucleotide
  Sense strand starting at position 3080 of SEQ ID NO: 317853
aguucugcguuggguaauu

SEQ ID NO: 517428 - RNA, 19 nt, Artificial Sequence
  Description of Artificial Sequence: Synthetic oligonucleotide
  Antisense strand to SEQ ID NO: 517427
aauuacccaacgcagaacu

SEQ ID NO: 517429 - RNA, 19 nt, Artificial Sequence
  Description of Artificial Sequence: Synthetic oligonucleotide
  Sense strand starting at position 3090 of SEQ ID NO: 317853
uggguaauuggcuaugcca

SEQ ID NO: 517430 - RNA, 19 nt, Artificial Sequence
  Description of Artificial Sequence: Synthetic oligonucleotide
  Antisense strand to SEQ ID NO: 517429
uggcauagccaauuaccca

SEQ ID NO: 517431 - RNA, 19 nt, Artificial Sequence
  Description of Artificial Sequence: Synthetic oligonucleotide
  Sense strand starting at position 3093 of SEQ ID NO: 317853
guaauuggcuaugccaaga

SEQ ID NO: 517432 - RNA, 19 nt, Artificial Sequence
  Description of Artificial Sequence: Synthetic oligonucleotide
  Antisense strand to SEQ ID NO: 517431
ucuuggcauagccaauuac

SEQ ID NO: 517433 - RNA, 19 nt, Artificial Sequence
  Description of Artificial Sequence: Synthetic oligonucleotide
  Sense strand starting at position 3136 of SEQ ID NO: 317853
ggcaguguuccuggcgcuu

SEQ ID NO: 517434 - RNA, 19 nt, Artificial Sequence
  Description of Artificial Sequence: Synthetic oligonucleotide
  Antisense strand to SEQ ID NO: 517433
aagcgccaggaacacugcc

SEQ ID NO: 517435 - RNA, 19 nt, Artificial Sequence
  Description of Artificial Sequence: Synthetic oligonucleotide
  Sense strand starting at position 3149 of SEQ ID NO: 317853
gcgcuuuggaguugggaga

SEQ ID NO: 517436 - RNA, 19 nt, Artificial Sequence
  Description of Artificial Sequence: Synthetic oligonucleotide
  Antisense strand to SEQ ID NO: 517435
ucucccaacuccaaagcgc

SEQ ID NO: 517437 - RNA, 19 nt, Artificial Sequence
  Description of Artificial Sequence: Synthetic oligonucleotide
  Sense strand starting at position 3150 of SEQ ID NO: 317853
cgcuuuggaguugggagaa

SEQ ID NO: 517438 - RNA, 19 nt, Artificial Sequence
  Description of Artificial Sequence: Synthetic oligonucleotide
  Antisense strand to SEQ ID NO: 517437
uucucccaacuccaaagcg

SEQ ID NO: 517439 - RNA, 19 nt, Artificial Sequence
  Description of Artificial Sequence: Synthetic oligonucleotide
  Sense strand starting at position 3443 of SEQ ID NO: 317853
gcaugaagagccugauucu

SEQ ID NO: 517440 - RNA, 19 nt, Artificial Sequence
  Description of Artificial Sequence: Synthetic oligonucleotide
  Antisense strand to SEQ ID NO: 517439
agaaucaggcucuucaugc

SEQ ID NO: 517441 - RNA, 19 nt, Artificial Sequence
  Description of Artificial Sequence: Synthetic oligonucleotide
  Sense strand starting at position 3452 of SEQ ID NO: 317853
gccugauucuggugaggag

SEQ ID NO: 517442 - RNA, 19 nt, Artificial Sequence
  Description of Artificial Sequence: Synthetic oligonucleotide
  Antisense strand to SEQ ID NO: 517441
cuccucaccagaaucaggc

SEQ ID NO: 517443 - RNA, 19 nt, Artificial Sequence
  Description of Artificial Sequence: Synthetic oligonucleotide
  Sense strand starting at position 3546 of SEQ ID NO: 317853
uuugauuuguccuagcuca

SEQ ID NO: 517444 - RNA, 19 nt, Artificial Sequence
  Description of Artificial Sequence: Synthetic oligonucleotide
  Antisense strand to SEQ ID NO: 517443
ugagcuaggacaaaucaaa

SEQ ID NO: 517445 - RNA, 19 nt, Artificial Sequence
  Description of Artificial Sequence: Synthetic oligonucleotide
  Sense strand starting at position 3761 of SEQ ID NO: 317853
uuagaacaguguuagauuu

SEQ ID NO: 517446 - RNA, 19 nt, Artificial Sequence
  Description of Artificial Sequence: Synthetic oligonucleotide
  Antisense strand to SEQ ID NO: 517445
aaaucuaacacuguucuaa

SEQ ID NO: 517447 - RNA, 19 nt, Artificial Sequence
  Description of Artificial Sequence: Synthetic oligonucleotide
  Sense strand starting at position 3856 of SEQ ID NO: 317853
ggguguucccugcuggcau

SEQ ID NO: 517448 - RNA, 19 nt, Artificial Sequence
  Description of Artificial Sequence: Synthetic oligonucleotide
  Antisense strand to SEQ ID NO: 517447
augccagcagggaacaccc

SEQ ID NO: 517449 - RNA, 19 nt, Artificial Sequence
  Description of Artificial Sequence: Synthetic oligonucleotide
  Sense strand starting at position 45 of SEQ ID NO: 317854
gcuccaacuccuggagaca

SEQ ID NO: 517450 - RNA, 19 nt, Artificial Sequence
  Description of Artificial Sequence: Synthetic oligonucleotide
  Antisense strand to SEQ ID NO: 517449
ugucuccaggaguuggagc

SEQ ID NO: 517451 - RNA, 19 nt, Artificial Sequence
  Description of Artificial Sequence: Synthetic oligonucleotide
  Sense strand starting at position 154 of SEQ ID NO: 317854
caccgcauaccagaaguau

SEQ ID NO: 517452 - RNA, 19 nt, Artificial Sequence
  Description of Artificial Sequence: Synthetic oligonucleotide
  Antisense strand to SEQ ID NO: 517451
auacuucugguaugcggug

SEQ ID NO: 517453 - RNA, 19 nt, Artificial Sequence
  Description of Artificial Sequence: Synthetic oligonucleotide
  Sense strand starting at position 160 of SEQ ID NO: 317854
auaccagaaguauguguga

SEQ ID NO: 517454 - RNA, 19 nt, Artificial Sequence
  Description of Artificial Sequence: Synthetic oligonucleotide
  Antisense strand to SEQ ID NO: 517453
ucacacauacuucugguau

SEQ ID NO: 517455 - RNA, 19 nt, Artificial Sequence
  Description of Artificial Sequence: Synthetic oligonucleotide
  Sense strand starting at position 162 of SEQ ID NO: 317854
accagaaguaugugugaua

SEQ ID NO: 517456 - RNA, 19 nt, Artificial Sequence
  Description of Artificial Sequence: Synthetic oligonucleotide
  Antisense strand to SEQ ID NO: 517455
uaucacacauacuucuggu

SEQ ID NO: 517457 - RNA, 19 nt, Artificial Sequence
  Description of Artificial Sequence: Synthetic oligonucleotide
  Sense strand starting at position 163 of SEQ ID NO: 317854
ccagaaguaugugugauau

SEQ ID NO: 517458 - RNA, 19 nt, Artificial Sequence
  Description of Artificial Sequence: Synthetic oligonucleotide
  Antisense strand to SEQ ID NO: 517457
auaucacacauacuucugg

SEQ ID NO: 517459 - RNA, 19 nt, Artificial Sequence
  Description of Artificial Sequence: Synthetic oligonucleotide
  Sense strand starting at position 173 of SEQ ID NO: 317854
gugugauauugacaccaac

SEQ ID NO: 517460 - RNA, 19 nt, Artificial Sequence
  Description of Artificial Sequence: Synthetic oligonucleotide
  Antisense strand to SEQ ID NO: 517459
guuggugucaauaucacac

SEQ ID NO: 517461 - RNA, 19 nt, Artificial Sequence
  Description of Artificial Sequence: Synthetic oligonucleotide
  Sense strand starting at position 198 of SEQ ID NO: 317854
gccaucuagccagauaaac

SEQ ID NO: 517462 - RNA, 19 nt, Artificial Sequence
  Description of Artificial Sequence: Synthetic oligonucleotide
  Antisense strand to SEQ ID NO: 517461
guuuaucuggcuagauggc

SEQ ID NO: 517463 - RNA, 19 nt, Artificial Sequence
  Description of Artificial Sequence: Synthetic oligonucleotide
  Sense strand starting at position 379 of SEQ ID NO: 317854
uucaguauccgagguagug

SEQ ID NO: 517464 - RNA, 19 nt, Artificial Sequence
  Description of Artificial Sequence: Synthetic oligonucleotide
  Antisense strand to SEQ ID NO: 517463
cacuaccucggauacugaa

SEQ ID NO: 517465 - RNA, 19 nt, Artificial Sequence
  Description of Artificial Sequence: Synthetic oligonucleotide
  Sense strand starting at position 426 of SEQ ID NO: 317854
ggaccaggaacuuguguau

SEQ ID NO: 517466 - RNA, 19 nt, Artificial Sequence
  Description of Artificial Sequence: Synthetic oligonucleotide
  Antisense strand to SEQ ID NO: 517465
auacacaaguuccuggucc

SEQ ID NO: 517467 - RNA, 19 nt, Artificial Sequence
  Description of Artificial Sequence: Synthetic oligonucleotide
  Sense strand starting at position 429 of SEQ ID NO: 317854
ccaggaacuuguguaugau

SEQ ID NO: 517468 - RNA, 19 nt, Artificial Sequence
  Description of Artificial Sequence: Synthetic oligonucleotide
  Antisense strand to SEQ ID NO: 517467
aucauacacaaguuccugg

SEQ ID NO: 517469 - RNA, 19 nt, Artificial Sequence
  Description of Artificial Sequence: Synthetic oligonucleotide
  Sense strand starting at position 430 of SEQ ID NO: 317854
caggaacuuguguaugauc

SEQ ID NO: 517470 - RNA, 19 nt, Artificial Sequence
  Description of Artificial Sequence: Synthetic oligonucleotide
  Antisense strand to SEQ ID NO: 517469
gaucauacacaaguuccug

SEQ ID NO: 517471 - RNA, 19 nt, Artificial Sequence
  Description of Artificial Sequence: Synthetic oligonucleotide
  Sense strand starting at position 432 of SEQ ID NO: 317854
ggaacuuguguaugaucac

SEQ ID NO: 517472 - RNA, 19 nt, Artificial Sequence
  Description of Artificial Sequence: Synthetic oligonucleotide
  Antisense strand to SEQ ID NO: 517471
gugaucauacacaaguucc

SEQ ID NO: 517473 - RNA, 19 nt, Artificial Sequence
  Description of Artificial Sequence: Synthetic oligonucleotide
  Sense strand starting at position 433 of SEQ ID NO: 317854
gaacuuguguaugaucaca

SEQ ID NO: 517474 - RNA, 19 nt, Artificial Sequence
  Description of Artificial Sequence: Synthetic oligonucleotide
  Antisense strand to SEQ ID NO: 517473
ugugaucauacacaaguuc

SEQ ID NO: 517475 - RNA, 19 nt, Artificial Sequence
  Description of Artificial Sequence: Synthetic oligonucleotide
  Sense strand starting at position 435 of SEQ ID NO: 317854
acuuguguaugaucacagu

SEQ ID NO: 517476 - RNA, 19 nt, Artificial Sequence
  Description of Artificial Sequence: Synthetic oligonucleotide
  Antisense strand to SEQ ID NO: 517475
acugugaucauacacaagu

SEQ ID NO: 517477 - RNA, 19 nt, Artificial Sequence
  Description of Artificial Sequence: Synthetic oligonucleotide
  Sense strand starting at position 441 of SEQ ID NO: 317854
guaugaucacagugaguca

SEQ ID NO: 517478 - RNA, 19 nt, Artificial Sequence
  Description of Artificial Sequence: Synthetic oligonucleotide
  Antisense strand to SEQ ID NO: 517477
ugacucacugugaucauac

SEQ ID NO: 517479 - RNA, 19 nt, Artificial Sequence
  Description of Artificial Sequence: Synthetic oligonucleotide
  Sense strand starting at position 444 of SEQ ID NO: 317854
ugaucacagugagucauau

SEQ ID NO: 517480 - RNA, 19 nt, Artificial Sequence
  Description of Artificial Sequence: Synthetic oligonucleotide
  Antisense strand to SEQ ID NO: 517479
auaugacucacugugauca

SEQ ID NO: 517481 - RNA, 19 nt, Artificial Sequence
  Description of Artificial Sequence: Synthetic oligonucleotide
  Sense strand starting at position 735 of SEQ ID NO: 317854
auauucucuuguguagaaa

SEQ ID NO: 517482 - RNA, 19 nt, Artificial Sequence
  Description of Artificial Sequence: Synthetic oligonucleotide
  Antisense strand to SEQ ID NO: 517481
uuucuacacaagagaauau

SEQ ID NO: 517483 - RNA, 19 nt, Artificial Sequence
  Description of Artificial Sequence: Synthetic oligonucleotide
  Sense strand starting at position 736 of SEQ ID NO: 317854
uauucucuuguguagaaag

SEQ ID NO: 517484 - RNA, 19 nt, Artificial Sequence
  Description of Artificial Sequence: Synthetic oligonucleotide
  Antisense strand to SEQ ID NO: 517483
cuuucuacacaagagaaua

SEQ ID NO: 517485 - RNA, 19 nt, Artificial Sequence
  Description of Artificial Sequence: Synthetic oligonucleotide
  Sense strand starting at position 777 of SEQ ID NO: 317854
aaauguuaucugggcccuu

SEQ ID NO: 517486 - RNA, 19 nt, Artificial Sequence
  Description of Artificial Sequence: Synthetic oligonucleotide
  Antisense strand to SEQ ID NO: 517485
aagggcccagauaacauuu

SEQ ID NO: 517487 - RNA, 19 nt, Artificial Sequence
  Description of Artificial Sequence: Synthetic oligonucleotide
  Sense strand starting at position 778 of SEQ ID NO: 317854
aauguuaucugggcccuua

SEQ ID NO: 517488 - RNA, 19 nt, Artificial Sequence
  Description of Artificial Sequence: Synthetic oligonucleotide
  Antisense strand to SEQ ID NO: 517487
uaagggcccagauaacauu

SEQ ID NO: 517489 - RNA, 19 nt, Artificial Sequence
  Description of Artificial Sequence: Synthetic oligonucleotide
  Sense strand starting at position 790 of SEQ ID NO: 317854
gcccuuagugaacgaaugu

SEQ ID NO: 517490 - RNA, 19 nt, Artificial Sequence
  Description of Artificial Sequence: Synthetic oligonucleotide
  Antisense strand to SEQ ID NO: 517489
acauucguucacuaagggc

SEQ ID NO: 517491 - RNA, 19 nt, Artificial Sequence
  Description of Artificial Sequence: Synthetic oligonucleotide
  Sense strand starting at position 872 of SEQ ID NO: 317854
gacgcacaccagugaugaa

SEQ ID NO: 517492 - RNA, 19 nt, Artificial Sequence
  Description of Artificial Sequence: Synthetic oligonucleotide
  Antisense strand to SEQ ID NO: 517491
uucaucacuggugugcguc

SEQ ID NO: 517493 - RNA, 19 nt, Artificial Sequence
  Description of Artificial Sequence: Synthetic oligonucleotide
  Sense strand starting at position 873 of SEQ ID NO: 317854
acgcacaccagugaugaau

SEQ ID NO: 517494 - RNA, 19 nt, Artificial Sequence
  Description of Artificial Sequence: Synthetic oligonucleotide
  Antisense strand to SEQ ID NO: 517493
auucaucacuggugugcgu

SEQ ID NO: 517495 - RNA, 19 nt, Artificial Sequence
  Description of Artificial Sequence: Synthetic oligonucleotide
  Sense strand starting at position 970 of SEQ ID NO: 317854
uuguguggccuuggcaaua

SEQ ID NO: 517496 - RNA, 19 nt, Artificial Sequence
  Description of Artificial Sequence: Synthetic oligonucleotide
  Antisense strand to SEQ ID NO: 517495
uauugccaaggccacacaa

SEQ ID NO: 517497 - RNA, 19 nt, Artificial Sequence
  Description of Artificial Sequence: Synthetic oligonucleotide
  Sense strand starting at position 1229 of SEQ ID NO: 317854
cggccucuccugugacuga

SEQ ID NO: 517498 - RNA, 19 nt, Artificial Sequence
  Description of Artificial Sequence: Synthetic oligonucleotide
  Antisense strand to SEQ ID NO: 517497
ucagucacaggagaggccg

SEQ ID NO: 517499 - RNA, 19 nt, Artificial Sequence
  Description of Artificial Sequence: Synthetic oligonucleotide
  Sense strand starting at position 1787 of SEQ ID NO: 317854
acuuguucuccagagggcu

SEQ ID NO: 517500 - RNA, 19 nt, Artificial Sequence
  Description of Artificial Sequence: Synthetic oligonucleotide
  Antisense strand to SEQ ID NO: 517499
agcccucuggagaacaagu

SEQ ID NO: 517501 - RNA, 19 nt, Artificial Sequence
  Description of Artificial Sequence: Synthetic oligonucleotide
  Sense strand starting at position 3186 of SEQ ID NO: 317854
ccgucuccuuucccugaga

SEQ ID NO: 517502 - RNA, 19 nt, Artificial Sequence
  Description of Artificial Sequence: Synthetic oligonucleotide
  Antisense strand to SEQ ID NO: 517501
ucucagggaaaggagacgg

SEQ ID NO: 517503 - RNA, 19 nt, Artificial Sequence
  Description of Artificial Sequence: Synthetic oligonucleotide
  Sense strand starting at position 3189 of SEQ ID NO: 317854
ucuccuuucccugagaggu

SEQ ID NO: 517504 - RNA, 19 nt, Artificial Sequence
  Description of Artificial Sequence: Synthetic oligonucleotide
  Antisense strand to SEQ ID NO: 517503
accucucagggaaaggaga

SEQ ID NO: 517505 - RNA, 19 nt, Artificial Sequence
  Description of Artificial Sequence: Synthetic oligonucleotide
  Sense strand starting at position 3199 of SEQ ID NO: 317854
cugagagguccuugccuag

SEQ ID NO: 517506 - RNA, 19 nt, Artificial Sequence
  Description of Artificial Sequence: Synthetic oligonucleotide
  Antisense strand to SEQ ID NO: 517505
cuaggcaaggaccucucag

SEQ ID NO: 517507 - RNA, 19 nt, Artificial Sequence
  Description of Artificial Sequence: Synthetic oligonucleotide
  Sense strand starting at position 3203 of SEQ ID NO: 317854
gagguccuugccuagucua

SEQ ID NO: 517508 - RNA, 19 nt, Artificial Sequence
  Description of Artificial Sequence: Synthetic oligonucleotide
  Antisense strand to SEQ ID NO: 517507
uagacuaggcaaggaccuc

SEQ ID NO: 517509 - RNA, 19 nt, Artificial Sequence
  Description of Artificial Sequence: Synthetic oligonucleotide
  Sense strand starting at position 3353 of SEQ ID NO: 317854
aucccagucucauccugau

SEQ ID NO: 517510 - RNA, 19 nt, Artificial Sequence
  Description of Artificial Sequence: Synthetic oligonucleotide
  Antisense strand to SEQ ID NO: 517509
aucaggaugagacugggau

SEQ ID NO: 517511 - RNA, 19 nt, Artificial Sequence
  Description of Artificial Sequence: Synthetic oligonucleotide
  Sense strand starting at position 3520 of SEQ ID NO: 317854
aggagauccuuugcauucu

SEQ ID NO: 517512 - RNA, 19 nt, Artificial Sequence
  Description of Artificial Sequence: Synthetic oligonucleotide
  Antisense strand to SEQ ID NO: 517511
agaaugcaaaggaucuccu

SEQ ID NO: 517513 - RNA, 19 nt, Artificial Sequence
  Description of Artificial Sequence: Synthetic oligonucleotide
  Sense strand starting at position 3562 of SEQ ID NO: 317854
aggagucccaaguagaguu

SEQ ID NO: 517514 - RNA, 19 nt, Artificial Sequence
  Description of Artificial Sequence: Synthetic oligonucleotide
  Antisense strand to SEQ ID NO: 517513
aacucuacuugggacuccu

SEQ ID NO: 517515 - RNA, 19 nt, Artificial Sequence
  Description of Artificial Sequence: Synthetic oligonucleotide
  Sense strand starting at position 3572 of SEQ ID NO: 317854
aguagaguuccggaagcag

SEQ ID NO: 517516 - RNA, 19 nt, Artificial Sequence
  Description of Artificial Sequence: Synthetic oligonucleotide
  Antisense strand to SEQ ID NO: 517515
cugcuuccggaacucuacu

SEQ ID NO: 517517 - RNA, 19 nt, Artificial Sequence
  Description of Artificial Sequence: Synthetic oligonucleotide
  Sense strand starting at position 3900 of SEQ ID NO: 317854
ccgaguucugcguugggua

SEQ ID NO: 517518 - RNA, 19 nt, Artificial Sequence
  Description of Artificial Sequence: Synthetic oligonucleotide
  Antisense strand to SEQ ID NO: 517517
uacccaacgcagaacucgg

SEQ ID NO: 517519 - RNA, 19 nt, Artificial Sequence
  Description of Artificial Sequence: Synthetic oligonucleotide
  Sense strand starting at position 3902 of SEQ ID NO: 317854
gaguucugcguuggguaau

SEQ ID NO: 517520 - RNA, 19 nt, Artificial Sequence
  Description of Artificial Sequence: Synthetic oligonucleotide
  Antisense strand to SEQ ID NO: 517519
auuacccaacgcagaacuc

SEQ ID NO: 517521 - RNA, 19 nt, Artificial Sequence
  Description of Artificial Sequence: Synthetic oligonucleotide
  Sense strand starting at position 3913 of SEQ ID NO: 317854
uggguaauuggcuaugcca

SEQ ID NO: 517522 - RNA, 19 nt, Artificial Sequence
  Description of Artificial Sequence: Synthetic oligonucleotide
  Antisense strand to SEQ ID NO: 517521
uggcauagccaauuaccca

SEQ ID NO: 517523 - RNA, 19 nt, Artificial Sequence
  Description of Artificial Sequence: Synthetic oligonucleotide
  Sense strand starting at position 3916 of SEQ ID NO: 317854
guaauuggcuaugccaaga

SEQ ID NO: 517524 - RNA, 19 nt, Artificial Sequence
  Description of Artificial Sequence: Synthetic oligonucleotide
  Antisense strand to SEQ ID NO: 517523
ucuuggcauagccaauuac

SEQ ID NO: 517525 - RNA, 19 nt, Artificial Sequence
  Description of Artificial Sequence: Synthetic oligonucleotide
  Sense strand starting at position 3972 of SEQ ID NO: 317854
gcgcuuuggaguugggaga

SEQ ID NO: 517526 - RNA, 19 nt, Artificial Sequence
  Description of Artificial Sequence: Synthetic oligonucleotide
  Antisense strand to SEQ ID NO: 517525
ucucccaacuccaaagcgc

SEQ ID NO: 517527 - RNA, 19 nt, Artificial Sequence
  Description of Artificial Sequence: Synthetic oligonucleotide
  Sense strand starting at position 3973 of SEQ ID NO: 317854
cgcuuuggaguugggagaa

SEQ ID NO: 517528 - RNA, 19 nt, Artificial Sequence
  Description of Artificial Sequence: Synthetic oligonucleotide
  Antisense strand to SEQ ID NO: 517527
uucucccaacuccaaagcg

SEQ ID NO: 517529 - RNA, 19 nt, Artificial Sequence
  Description of Artificial Sequence: Synthetic oligonucleotide
  Sense strand starting at position 284 of SEQ ID NO: 317855
ggccuuugucugcaaggaa

SEQ ID NO: 517530 - RNA, 19 nt, Artificial Sequence
  Description of Artificial Sequence: Synthetic oligonucleotide
  Antisense strand to SEQ ID NO: 517529
uuccuugcagacaaaggcc

SEQ ID NO: 517531 - RNA, 19 nt, Artificial Sequence
  Description of Artificial Sequence: Synthetic oligonucleotide
  Sense strand starting at position 332 of SEQ ID NO: 317855
gagugagugcuccaccaug

SEQ ID NO: 517532 - RNA, 19 nt, Artificial Sequence
  Description of Artificial Sequence: Synthetic oligonucleotide
  Antisense strand to SEQ ID NO: 517531
caugguggagcacucacuc

SEQ ID NO: 517533 - RNA, 19 nt, Artificial Sequence
  Description of Artificial Sequence: Synthetic oligonucleotide
  Sense strand starting at position 402 of SEQ ID NO: 317855
cugugacuuccucauggca

SEQ ID NO: 517534 - RNA, 19 nt, Artificial Sequence
  Description of Artificial Sequence: Synthetic oligonucleotide
  Antisense strand to SEQ ID NO: 517533
ugccaugaggaagucacag

SEQ ID NO: 517535 - RNA, 19 nt, Artificial Sequence
  Description of Artificial Sequence: Synthetic oligonucleotide
  Sense strand starting at position 524 of SEQ ID NO: 317855
agaggaaugcgaggguuaa

SEQ ID NO: 517536 - RNA, 19 nt, Artificial Sequence
  Description of Artificial Sequence: Synthetic oligonucleotide
  Antisense strand to SEQ ID NO: 517535
uuaacccucgcauuccucu

SEQ ID NO: 517537 - RNA, 19 nt, Artificial Sequence
  Description of Artificial Sequence: Synthetic oligonucleotide
  Sense strand starting at position 525 of SEQ ID NO: 317855
gaggaaugcgaggguuaaa

SEQ ID NO: 517538 - RNA, 19 nt, Artificial Sequence
  Description of Artificial Sequence: Synthetic oligonucleotide
  Antisense strand to SEQ ID NO: 517537
uuuaacccucgcauuccuc

SEQ ID NO: 517539 - RNA, 19 nt, Artificial Sequence
  Description of Artificial Sequence: Synthetic oligonucleotide
  Sense strand starting at position 588 of SEQ ID NO: 317855
gucucagagaauuguagug

SEQ ID NO: 517540 - RNA, 19 nt, Artificial Sequence
  Description of Artificial Sequence: Synthetic oligonucleotide
  Antisense strand to SEQ ID NO: 517539
cacuacaauucucugagac

SEQ ID NO: 517541 - RNA, 19 nt, Artificial Sequence
  Description of Artificial Sequence: Synthetic oligonucleotide
  Sense strand starting at position 744 of SEQ ID NO: 317855
gugccuuaaauuugugaug

SEQ ID NO: 517542 - RNA, 19 nt, Artificial Sequence
  Description of Artificial Sequence: Synthetic oligonucleotide
  Antisense strand to SEQ ID NO: 517541
caucacaaauuuaaggcac

SEQ ID NO: 517543 - RNA, 19 nt, Artificial Sequence
  Description of Artificial Sequence: Synthetic oligonucleotide
  Sense strand starting at position 794 of SEQ ID NO: 317855
agguaaguacugugaacuu

SEQ ID NO: 517544 - RNA, 19 nt, Artificial Sequence
  Description of Artificial Sequence: Synthetic oligonucleotide
  Antisense strand to SEQ ID NO: 517543
aaguucacaguacuuaccu

SEQ ID NO: 517545 - RNA, 19 nt, Artificial Sequence
  Description of Artificial Sequence: Synthetic oligonucleotide
  Sense strand starting at position 843 of SEQ ID NO: 317855
cggagagauucaguuacuu

SEQ ID NO: 517546 - RNA, 19 nt, Artificial Sequence
  Description of Artificial Sequence: Synthetic oligonucleotide
  Antisense strand to SEQ ID NO: 517545
aaguaacugaaucucuccg

SEQ ID NO: 517547 - RNA, 19 nt, Artificial Sequence
  Description of Artificial Sequence: Synthetic oligonucleotide
  Sense strand starting at position 852 of SEQ ID NO: 317855
ucaguuacuuguccaggau

SEQ ID NO: 517548 - RNA, 19 nt, Artificial Sequence
  Description of Artificial Sequence: Synthetic oligonucleotide
  Antisense strand to SEQ ID NO: 517547
auccuggacaaguaacuga

SEQ ID NO: 517549 - RNA, 19 nt, Artificial Sequence
  Description of Artificial Sequence: Synthetic oligonucleotide
  Sense strand starting at position 853 of SEQ ID NO: 317855
caguuacuuguccaggauc

SEQ ID NO: 517550 - RNA, 19 nt, Artificial Sequence
  Description of Artificial Sequence: Synthetic oligonucleotide
  Antisense strand to SEQ ID NO: 517549
gauccuggacaaguaacug

SEQ ID NO: 517551 - RNA, 19 nt, Artificial Sequence
  Description of Artificial Sequence: Synthetic oligonucleotide
  Sense strand starting at position 965 of SEQ ID NO: 317855
cuguauguucguguuuagu

SEQ ID NO: 517552 - RNA, 19 nt, Artificial Sequence
  Description of Artificial Sequence: Synthetic oligonucleotide
  Antisense strand to SEQ ID NO: 517551
acuaaacacgaacauacag

SEQ ID NO: 517553 - RNA, 19 nt, Artificial Sequence
  Description of Artificial Sequence: Synthetic oligonucleotide
  Sense strand starting at position 1119 of SEQ ID NO: 317855
gcaggugagggauagugau

SEQ ID NO: 517554 - RNA, 19 nt, Artificial Sequence
  Description of Artificial Sequence: Synthetic oligonucleotide
  Antisense strand to SEQ ID NO: 517553
aucacuaucccucaccugc

SEQ ID NO: 517555 - RNA, 19 nt, Artificial Sequence
  Description of Artificial Sequence: Synthetic oligonucleotide
  Sense strand starting at position 1206 of SEQ ID NO: 317855
gugccauggaucugaugau

SEQ ID NO: 517556 - RNA, 19 nt, Artificial Sequence
  Description of Artificial Sequence: Synthetic oligonucleotide
  Antisense strand to SEQ ID NO: 517555
aucaucagauccauggcac

SEQ ID NO: 517557 - RNA, 19 nt, Artificial Sequence
  Description of Artificial Sequence: Synthetic oligonucleotide
  Sense strand starting at position 1323 of SEQ ID NO: 317855
gacugugugaacugugaac

SEQ ID NO: 517558 - RNA, 19 nt, Artificial Sequence
  Description of Artificial Sequence: Synthetic oligonucleotide
  Antisense strand to SEQ ID NO: 517557
guucacaguucacacaguc

SEQ ID NO: 517559 - RNA, 19 nt, Artificial Sequence
  Description of Artificial Sequence: Synthetic oligonucleotide
  Sense strand starting at position 1340 of SEQ ID NO: 317855
acggguagagucugaaacu

SEQ ID NO: 517560 - RNA, 19 nt, Artificial Sequence
  Description of Artificial Sequence: Synthetic oligonucleotide
  Antisense strand to SEQ ID NO: 517559
aguuucagacucuacccgu

SEQ ID NO: 517561 - RNA, 19 nt, Artificial Sequence
  Description of Artificial Sequence: Synthetic oligonucleotide
  Sense strand starting at position 1611 of SEQ ID NO: 317855
cccaaaguucucuggugga

SEQ ID NO: 517562 - RNA, 19 nt, Artificial Sequence
  Description of Artificial Sequence: Synthetic oligonucleotide
  Antisense strand to SEQ ID NO: 517561
uccaccagagaacuuuggg

SEQ ID NO: 517563 - RNA, 19 nt, Artificial Sequence
  Description of Artificial Sequence: Synthetic oligonucleotide
  Sense strand starting at position 1716 of SEQ ID NO: 317855
guggcuucucgaguucugu

SEQ ID NO: 517564 - RNA, 19 nt, Artificial Sequence
  Description of Artificial Sequence: Synthetic oligonucleotide
  Antisense strand to SEQ ID NO: 517563
acagaacucgagaagccac

SEQ ID NO: 517565 - RNA, 19 nt, Artificial Sequence
  Description of Artificial Sequence: Synthetic oligonucleotide
  Sense strand starting at position 1738 of SEQ ID NO: 317855
uggguugcugcuccguaau

SEQ ID NO: 517566 - RNA, 19 nt, Artificial Sequence
  Description of Artificial Sequence: Synthetic oligonucleotide
  Antisense strand to SEQ ID NO: 517565
auuacggagcagcaaccca

SEQ ID NO: 517567 - RNA, 19 nt, Artificial Sequence
  Description of Artificial Sequence: Synthetic oligonucleotide
  Sense strand starting at position 1777 of SEQ ID NO: 317855
uggucagugacagaucacu

SEQ ID NO: 517568 - RNA, 19 nt, Artificial Sequence
  Description of Artificial Sequence: Synthetic oligonucleotide
  Antisense strand to SEQ ID NO: 517567
agugaucugucacugacca

SEQ ID NO: 517569 - RNA, 19 nt, Artificial Sequence
  Description of Artificial Sequence: Synthetic oligonucleotide
  Sense strand starting at position 2077 of SEQ ID NO: 317855
guagcuaacccuuauuaag

SEQ ID NO: 517570 - RNA, 19 nt, Artificial Sequence
  Description of Artificial Sequence: Synthetic oligonucleotide
  Antisense strand to SEQ ID NO: 517569
cuuaauaaggguuagcuac

SEQ ID NO: 517571 - RNA, 19 nt, Artificial Sequence
  Description of Artificial Sequence: Synthetic oligonucleotide
  Sense strand starting at position 2255 of SEQ ID NO: 317855
gauguugggcaagauaugu

SEQ ID NO: 517572 - RNA, 19 nt, Artificial Sequence
  Description of Artificial Sequence: Synthetic oligonucleotide
  Antisense strand to SEQ ID NO: 517571
acauaucuugcccaacauc

SEQ ID NO: 517573 - RNA, 19 nt, Artificial Sequence
  Description of Artificial Sequence: Synthetic oligonucleotide
  Sense strand starting at position 2261 of SEQ ID NO: 317855
gggcaagauauguaaccuu

SEQ ID NO: 517574 - RNA, 19 nt, Artificial Sequence
  Description of Artificial Sequence: Synthetic oligonucleotide
  Antisense strand to SEQ ID NO: 517573
aagguuacauaucuugccc

SEQ ID NO: 517575 - RNA, 19 nt, Artificial Sequence
  Description of Artificial Sequence: Synthetic oligonucleotide
  Sense strand starting at position 2336 of SEQ ID NO: 317855
gagugcuaagcacauggua

SEQ ID NO: 517576 - RNA, 19 nt, Artificial Sequence
  Description of Artificial Sequence: Synthetic oligonucleotide
  Antisense strand to SEQ ID NO: 517575
uaccaugugcuuagcacuc

SEQ ID NO: 517577 - RNA, 19 nt, Artificial Sequence
  Description of Artificial Sequence: Synthetic oligonucleotide
  Sense strand starting at position 2476 of SEQ ID NO: 317855
cuugacuuuccugagugca

SEQ ID NO: 517578 - RNA, 19 nt, Artificial Sequence
  Description of Artificial Sequence: Synthetic oligonucleotide
  Antisense strand to SEQ ID NO: 517577
ugcacucaggaaagucaag

SEQ ID NO: 517579 - RNA, 19 nt, Artificial Sequence
  Description of Artificial Sequence: Synthetic oligonucleotide
  Sense strand starting at position 2934 of SEQ ID NO: 317855
gccucagauucccuggaga

SEQ ID NO: 517580 - RNA, 19 nt, Artificial Sequence
  Description of Artificial Sequence: Synthetic oligonucleotide
  Antisense strand to SEQ ID NO: 517579
ucuccagggaaucugaggc

SEQ ID NO: 517581 - RNA, 19 nt, Artificial Sequence
  Description of Artificial Sequence: Synthetic oligonucleotide
  Sense strand starting at position 2936 of SEQ ID NO: 317855
cucagauucccuggagagu

SEQ ID NO: 517582 - RNA, 19 nt, Artificial Sequence
  Description of Artificial Sequence: Synthetic oligonucleotide
  Antisense strand to SEQ ID NO: 517581
acucuccagggaaucugag

SEQ ID NO: 517583 - RNA, 19 nt, Artificial Sequence
  Description of Artificial Sequence: Synthetic oligonucleotide
  Sense strand starting at position 2963 of SEQ ID NO: 317855
ggaucauggugaccaugua

SEQ ID NO: 517584 - RNA, 19 nt, Artificial Sequence
  Description of Artificial Sequence: Synthetic oligonucleotide
  Antisense strand to SEQ ID NO: 517583
uacauggucaccaugaucc

SEQ ID NO: 517585 - RNA, 19 nt, Artificial Sequence
  Description of Artificial Sequence: Synthetic oligonucleotide
  Sense strand starting at position 2990 of SEQ ID NO: 317855
ccugcaucacacuagugaa

SEQ ID NO: 517586 - RNA, 19 nt, Artificial Sequence
  Description of Artificial Sequence: Synthetic oligonucleotide
  Antisense strand to SEQ ID NO: 517585
uucacuagugugaugcagg

SEQ ID NO: 517587 - RNA, 19 nt, Artificial Sequence
  Description of Artificial Sequence: Synthetic oligonucleotide
  Sense strand starting at position 3118 of SEQ ID NO: 317855
gucccuuauuuggaaggaa

SEQ ID NO: 517588 - RNA, 19 nt, Artificial Sequence
  Description of Artificial Sequence: Synthetic oligonucleotide
  Antisense strand to SEQ ID NO: 517587
uuccuuccaaauaagggac

SEQ ID NO: 517589 - RNA, 19 nt, Artificial Sequence
  Description of Artificial Sequence: Synthetic oligonucleotide
  Sense strand starting at position 3158 of SEQ ID NO: 317855
gugacucacccugagcgaa

SEQ ID NO: 517590 - RNA, 19 nt, Artificial Sequence
  Description of Artificial Sequence: Synthetic oligonucleotide
  Antisense strand to SEQ ID NO: 517589
uucgcucagggugagucac

SEQ ID NO: 517591 - RNA, 19 nt, Artificial Sequence
  Description of Artificial Sequence: Synthetic oligonucleotide
  Sense strand starting at position 3160 of SEQ ID NO: 317855
gacucacccugagcgaaau

SEQ ID NO: 517592 - RNA, 19 nt, Artificial Sequence
  Description of Artificial Sequence: Synthetic oligonucleotide
  Antisense strand to SEQ ID NO: 517591
auuucgcucagggugaguc

SEQ ID NO: 517593 - RNA, 19 nt, Artificial Sequence
  Description of Artificial Sequence: Synthetic oligonucleotide
  Sense strand starting at position 3174 of SEQ ID NO: 317855
gaaauaacugcugggcuga

SEQ ID NO: 517594 - RNA, 19 nt, Artificial Sequence
  Description of Artificial Sequence: Synthetic oligonucleotide
  Antisense strand to SEQ ID NO: 517593
ucagcccagcaguuauuuc

SEQ ID NO: 517595 - RNA, 19 nt, Artificial Sequence
  Description of Artificial Sequence: Synthetic oligonucleotide
  Sense strand starting at position 3257 of SEQ ID NO: 317855
ggccuugauccagaaguga

SEQ ID NO: 517596 - RNA, 19 nt, Artificial Sequence
  Description of Artificial Sequence: Synthetic oligonucleotide
  Antisense strand to SEQ ID NO: 517595
ucacuucuggaucaaggcc

SEQ ID NO: 517597 - RNA, 19 nt, Artificial Sequence
  Description of Artificial Sequence: Synthetic oligonucleotide
  Sense strand starting at position 3379 of SEQ ID NO: 317855
gcauccuuuccagaaaugu

SEQ ID NO: 517598 - RNA, 19 nt, Artificial Sequence
  Description of Artificial Sequence: Synthetic oligonucleotide
  Antisense strand to SEQ ID NO: 517597
acauuucuggaaaggaugc

SEQ ID NO: 517599 - RNA, 19 nt, Artificial Sequence
  Description of Artificial Sequence: Synthetic oligonucleotide
  Sense strand starting at position 3699 of SEQ ID NO: 317855
aguaacuccuagucagaca

SEQ ID NO: 517600 - RNA, 19 nt, Artificial Sequence
  Description of Artificial Sequence: Synthetic oligonucleotide
  Antisense strand to SEQ ID NO: 517599
ugucugacuaggaguuacu

SEQ ID NO: 517601 - RNA, 19 nt, Artificial Sequence
  Description of Artificial Sequence: Synthetic oligonucleotide
  Sense strand starting at position 3779 of SEQ ID NO: 317855
aguauaugauguucccauu

SEQ ID NO: 517602 - RNA, 19 nt, Artificial Sequence
  Description of Artificial Sequence: Synthetic oligonucleotide
  Antisense strand to SEQ ID NO: 517601
aaugggaacaucauauacu

SEQ ID NO: 517603 - RNA, 19 nt, Artificial Sequence
  Description of Artificial Sequence: Synthetic oligonucleotide
  Sense strand starting at position 3785 of SEQ ID NO: 317855
ugauguucccauuacauug

SEQ ID NO: 517604 - RNA, 19 nt, Artificial Sequence
  Description of Artificial Sequence: Synthetic oligonucleotide
  Antisense strand to SEQ ID NO: 517603
caauguaaugggaacauca

SEQ ID NO: 517605 - RNA, 19 nt, Artificial Sequence
  Description of Artificial Sequence: Synthetic oligonucleotide
  Sense strand starting at position 3851 of SEQ ID NO: 317855
cgguguuugcagaauuggu

SEQ ID NO: 517606 - RNA, 19 nt, Artificial Sequence
  Description of Artificial Sequence: Synthetic oligonucleotide
  Antisense strand to SEQ ID NO: 517605
accaauucugcaaacaccg

SEQ ID NO: 517607 - RNA, 19 nt, Artificial Sequence
  Description of Artificial Sequence: Synthetic oligonucleotide
  Sense strand starting at position 3914 of SEQ ID NO: 317855
caugaugcagcucaaguau

SEQ ID NO: 517608 - RNA, 19 nt, Artificial Sequence
  Description of Artificial Sequence: Synthetic oligonucleotide
  Antisense strand to SEQ ID NO: 517607
auacuugagcugcaucaug

SEQ ID NO: 517609 - RNA, 19 nt, Artificial Sequence
  Description of Artificial Sequence: Synthetic oligonucleotide
  Sense strand starting at position 123 of SEQ ID NO: 317856
ccauuuguauuaguugcaa

SEQ ID NO: 517610 - RNA, 19 nt, Artificial Sequence
  Description of Artificial Sequence: Synthetic oligonucleotide
  Antisense strand to SEQ ID NO: 517609
uugcaacuaauacaaaugg

SEQ ID NO: 517611 - RNA, 19 nt, Artificial Sequence
  Description of Artificial Sequence: Synthetic oligonucleotide
  Sense strand starting at position 185 of SEQ ID NO: 317856
aaacguuaggcuuauuacu

SEQ ID NO: 517612 - RNA, 19 nt, Artificial Sequence
  Description of Artificial Sequence: Synthetic oligonucleotide
  Antisense strand to SEQ ID NO: 517611
aguaauaagccuaacguuu

SEQ ID NO: 517613 - RNA, 19 nt, Artificial Sequence
  Description of Artificial Sequence: Synthetic oligonucleotide
  Sense strand starting at position 198 of SEQ ID NO: 317856
auuacuucuccuugguaug

SEQ ID NO: 517614 - RNA, 19 nt, Artificial Sequence
  Description of Artificial Sequence: Synthetic oligonucleotide
  Antisense strand to SEQ ID NO: 517613
cauaccaaggagaaguaau

SEQ ID NO: 517615 - RNA, 19 nt, Artificial Sequence
  Description of Artificial Sequence: Synthetic oligonucleotide
  Sense strand starting at position 199 of SEQ ID NO: 317856
uuacuucuccuugguauga

SEQ ID NO: 517616 - RNA, 19 nt, Artificial Sequence
  Description of Artificial Sequence: Synthetic oligonucleotide
  Antisense strand to SEQ ID NO: 517615
ucauaccaaggagaaguaa

SEQ ID NO: 517617 - RNA, 19 nt, Artificial Sequence
  Description of Artificial Sequence: Synthetic oligonucleotide
  Sense strand starting at position 203 of SEQ ID NO: 317856
uucuccuugguaugagaga

SEQ ID NO: 517618 - RNA, 19 nt, Artificial Sequence
  Description of Artificial Sequence: Synthetic oligonucleotide
  Antisense strand to SEQ ID NO: 517617
ucucucauaccaaggagaa

SEQ ID NO: 517619 - RNA, 19 nt, Artificial Sequence
  Description of Artificial Sequence: Synthetic oligonucleotide
  Sense strand starting at position 272 of SEQ ID NO: 317856
ugugaauuaggaugaaugu

SEQ ID NO: 517620 - RNA, 19 nt, Artificial Sequence
  Description of Artificial Sequence: Synthetic oligonucleotide
  Antisense strand to SEQ ID NO: 517619
acauucauccuaauucaca

SEQ ID NO: 517621 - RNA, 19 nt, Artificial Sequence
  Description of Artificial Sequence: Synthetic oligonucleotide
  Sense strand starting at position 278 of SEQ ID NO: 317856
uuaggaugaaugugaccuu

SEQ ID NO: 517622 - RNA, 19 nt, Artificial Sequence
  Description of Artificial Sequence: Synthetic oligonucleotide
  Antisense strand to SEQ ID NO: 517621
aaggucacauucauccuaa

SEQ ID NO: 517623 - RNA, 19 nt, Artificial Sequence
  Description of Artificial Sequence: Synthetic oligonucleotide
  Sense strand starting at position 281 of SEQ ID NO: 317856
ggaugaaugugaccuuaug

SEQ ID NO: 517624 - RNA, 19 nt, Artificial Sequence
  Description of Artificial Sequence: Synthetic oligonucleotide
  Antisense strand to SEQ ID NO: 517623
cauaaggucacauucaucc

SEQ ID NO: 517625 - RNA, 19 nt, Artificial Sequence
  Description of Artificial Sequence: Synthetic oligonucleotide
  Sense strand starting at position 287 of SEQ ID NO: 317856
augugaccuuauguaaauu

SEQ ID NO: 517626 - RNA, 19 nt, Artificial Sequence
  Description of Artificial Sequence: Synthetic oligonucleotide
  Antisense strand to SEQ ID NO: 517625
aauuuacauaaggucacau

SEQ ID NO: 517627 - RNA, 19 nt, Artificial Sequence
  Description of Artificial Sequence: Synthetic oligonucleotide
  Sense strand starting at position 618 of SEQ ID NO: 317856
gaggcagagacucguuuga

SEQ ID NO: 517628 - RNA, 19 nt, Artificial Sequence
  Description of Artificial Sequence: Synthetic oligonucleotide
  Antisense strand to SEQ ID NO: 517627
ucaaacgagucucugccuc

SEQ ID NO: 517629 - RNA, 19 nt, Artificial Sequence
  Description of Artificial Sequence: Synthetic oligonucleotide
  Sense strand starting at position 620 of SEQ ID NO: 317856
ggcagagacucguuugaau

SEQ ID NO: 517630 - RNA, 19 nt, Artificial Sequence
  Description of Artificial Sequence: Synthetic oligonucleotide
  Antisense strand to SEQ ID NO: 517629
auucaaacgagucucugcc

SEQ ID NO: 517631 - RNA, 19 nt, Artificial Sequence
  Description of Artificial Sequence: Synthetic oligonucleotide
  Sense strand starting at position 911 of SEQ ID NO: 317856
gacaacuccggguaucacu

SEQ ID NO: 517632 - RNA, 19 nt, Artificial Sequence
  Description of Artificial Sequence: Synthetic oligonucleotide
  Antisense strand to SEQ ID NO: 517631
agugauacccggaguuguc

SEQ ID NO: 517633 - RNA, 19 nt, Artificial Sequence
  Description of Artificial Sequence: Synthetic oligonucleotide
  Sense strand starting at position 1042 of SEQ ID NO: 317856
aguauacacccugaguuaa

SEQ ID NO: 517634 - RNA, 19 nt, Artificial Sequence
  Description of Artificial Sequence: Synthetic oligonucleotide
  Antisense strand to SEQ ID NO: 517633
uuaacucaggguguauacu

SEQ ID NO: 517635 - RNA, 19 nt, Artificial Sequence
  Description of Artificial Sequence: Synthetic oligonucleotide
  Sense strand starting at position 1274 of SEQ ID NO: 317856
cugggauccuaagccuuaa

SEQ ID NO: 517636 - RNA, 19 nt, Artificial Sequence
  Description of Artificial Sequence: Synthetic oligonucleotide
  Antisense strand to SEQ ID NO: 517635
uuaaggcuuaggaucccag

SEQ ID NO: 517637 - RNA, 19 nt, Artificial Sequence
  Description of Artificial Sequence: Synthetic oligonucleotide
  Sense strand starting at position 1490 of SEQ ID NO: 317856
gaggaaauuccggguguuc

SEQ ID NO: 517638 - RNA, 19 nt, Artificial Sequence
  Description of Artificial Sequence: Synthetic oligonucleotide
  Antisense strand to SEQ ID NO: 517637
gaacacccggaauuuccuc

SEQ ID NO: 517639 - RNA, 19 nt, Artificial Sequence
  Description of Artificial Sequence: Synthetic oligonucleotide
  Sense strand starting at position 1519 of SEQ ID NO: 317856
gacggagggccuugagaaa

SEQ ID NO: 517640 - RNA, 19 nt, Artificial Sequence
  Description of Artificial Sequence: Synthetic oligonucleotide
  Antisense strand to SEQ ID NO: 517639
uuucucaaggcccuccguc

SEQ ID NO: 517641 - RNA, 19 nt, Artificial Sequence
  Description of Artificial Sequence: Synthetic oligonucleotide
  Sense strand starting at position 2124 of SEQ ID NO: 317856
cucaguugcuacucagaaa

SEQ ID NO: 517642 - RNA, 19 nt, Artificial Sequence
  Description of Artificial Sequence: Synthetic oligonucleotide
  Antisense strand to SEQ ID NO: 517641
uuucugaguagcaacugag

SEQ ID NO: 517643 - RNA, 19 nt, Artificial Sequence
  Description of Artificial Sequence: Synthetic oligonucleotide
  Sense strand starting at position 2245 of SEQ ID NO: 317856
gacacauauccgggacuuu

SEQ ID NO: 517644 - RNA, 19 nt, Artificial Sequence
  Description of Artificial Sequence: Synthetic oligonucleotide
  Antisense strand to SEQ ID NO: 517643
aaagucccggauauguguc

SEQ ID NO: 517645 - RNA, 19 nt, Artificial Sequence
  Description of Artificial Sequence: Synthetic oligonucleotide
  Sense strand starting at position 2317 of SEQ ID NO: 317856
cccugagaauccguacaac

SEQ ID NO: 517646 - RNA, 19 nt, Artificial Sequence
  Description of Artificial Sequence: Synthetic oligonucleotide
  Antisense strand to SEQ ID NO: 517645
guuguacggauucucaggg

SEQ ID NO: 517647 - RNA, 19 nt, Artificial Sequence
  Description of Artificial Sequence: Synthetic oligonucleotide
  Sense strand starting at position 2342 of SEQ ID NO: 317856
guaugcucgcgauuccugu

SEQ ID NO: 517648 - RNA, 19 nt, Artificial Sequence
  Description of Artificial Sequence: Synthetic oligonucleotide
  Antisense strand to SEQ ID NO: 517647
acaggaaucgcgagcauac

SEQ ID NO: 517649 - RNA, 19 nt, Artificial Sequence
  Description of Artificial Sequence: Synthetic oligonucleotide
  Sense strand starting at position 2564 of SEQ ID NO: 317856
gcugaacucugaucuguau

SEQ ID NO: 517650 - RNA, 19 nt, Artificial Sequence
  Description of Artificial Sequence: Synthetic oligonucleotide
  Antisense strand to SEQ ID NO: 517649
auacagaucagaguucagc

SEQ ID NO: 517651 - RNA, 19 nt, Artificial Sequence
  Description of Artificial Sequence: Synthetic oligonucleotide
  Sense strand starting at position 3196 of SEQ ID NO: 317856
uuucuucucccugaguagu

SEQ ID NO: 517652 - RNA, 19 nt, Artificial Sequence
  Description of Artificial Sequence: Synthetic oligonucleotide
  Antisense strand to SEQ ID NO: 517651
acuacucagggagaagaaa

SEQ ID NO: 517653 - RNA, 19 nt, Artificial Sequence
  Description of Artificial Sequence: Synthetic oligonucleotide
  Sense strand starting at position 3311 of SEQ ID NO: 317856
aggccuuaaccuggaguca

SEQ ID NO: 517654 - RNA, 19 nt, Artificial Sequence
  Description of Artificial Sequence: Synthetic oligonucleotide
  Antisense strand to SEQ ID NO: 517653
ugacuccagguuaaggccu

SEQ ID NO: 517655 - RNA, 19 nt, Artificial Sequence
  Description of Artificial Sequence: Synthetic oligonucleotide
  Sense strand starting at position 3312 of SEQ ID NO: 317856
ggccuuaaccuggagucaa

SEQ ID NO: 517656 - RNA, 19 nt, Artificial Sequence
  Description of Artificial Sequence: Synthetic oligonucleotide
  Antisense strand to SEQ ID NO: 517655
uugacuccagguuaaggcc

SEQ ID NO: 517657 - RNA, 19 nt, Artificial Sequence
  Description of Artificial Sequence: Synthetic oligonucleotide
  Sense strand starting at position 3323 of SEQ ID NO: 317856
ggagucaagugccuugaaa

SEQ ID NO: 517658 - RNA, 19 nt, Artificial Sequence
  Description of Artificial Sequence: Synthetic oligonucleotide
  Antisense strand to SEQ ID NO: 517657
uuucaaggcacuugacucc

SEQ ID NO: 517659 - RNA, 19 nt, Artificial Sequence
  Description of Artificial Sequence: Synthetic oligonucleotide
  Sense strand starting at position 3367 of SEQ ID NO: 317856
gaugguacuuguuuccuga

SEQ ID NO: 517660 - RNA, 19 nt, Artificial Sequence
  Description of Artificial Sequence: Synthetic oligonucleotide
  Antisense strand to SEQ ID NO: 517659
ucaggaaacaaguaccauc

SEQ ID NO: 517661 - RNA, 19 nt, Artificial Sequence
  Description of Artificial Sequence: Synthetic oligonucleotide
  Sense strand starting at position 3369 of SEQ ID NO: 317856
ugguacuuguuuccugaga

SEQ ID NO: 517662 - RNA, 19 nt, Artificial Sequence
  Description of Artificial Sequence: Synthetic oligonucleotide
  Antisense strand to SEQ ID NO: 517661
ucucaggaaacaaguacca

SEQ ID NO: 517663 - RNA, 19 nt, Artificial Sequence
  Description of Artificial Sequence: Synthetic oligonucleotide
  Sense strand starting at position 3370 of SEQ ID NO: 317856
gguacuuguuuccugagag

SEQ ID NO: 517664 - RNA, 19 nt, Artificial Sequence
  Description of Artificial Sequence: Synthetic oligonucleotide
  Antisense strand to SEQ ID NO: 517663
cucucaggaaacaaguacc

SEQ ID NO: 517665 - RNA, 19 nt, Artificial Sequence
  Description of Artificial Sequence: Synthetic oligonucleotide
  Sense strand starting at position 3399 of SEQ ID NO: 317856
ggaugaucuggcugagcug

SEQ ID NO: 517666 - RNA, 19 nt, Artificial Sequence
  Description of Artificial Sequence: Synthetic oligonucleotide
  Antisense strand to SEQ ID NO: 517665
cagcucagccagaucaucc

SEQ ID NO: 517667 - RNA, 19 nt, Artificial Sequence
  Description of Artificial Sequence: Synthetic oligonucleotide
  Sense strand starting at position 3421 of SEQ ID NO: 317856
guuggaaacacaugguauc

SEQ ID NO: 517668 - RNA, 19 nt, Artificial Sequence
  Description of Artificial Sequence: Synthetic oligonucleotide
  Antisense strand to SEQ ID NO: 517667
gauaccauguguuuccaac

SEQ ID NO: 517669 - RNA, 19 nt, Artificial Sequence
  Description of Artificial Sequence: Synthetic oligonucleotide
  Sense strand starting at position 3454 of SEQ ID NO: 317856
auucuuucugcugaugaaa

SEQ ID NO: 517670 - RNA, 19 nt, Artificial Sequence
  Description of Artificial Sequence: Synthetic oligonucleotide
  Antisense strand to SEQ ID NO: 517669
uuucaucagcagaaagaau

SEQ ID NO: 517671 - RNA, 19 nt, Artificial Sequence
  Description of Artificial Sequence: Synthetic oligonucleotide
  Sense strand starting at position 3546 of SEQ ID NO: 317856
guauuccauuugcuuuauu

SEQ ID NO: 517672 - RNA, 19 nt, Artificial Sequence
  Description of Artificial Sequence: Synthetic oligonucleotide
  Antisense strand to SEQ ID NO: 517671
aauaaagcaaauggaauac

SEQ ID NO: 517673 - RNA, 19 nt, Artificial Sequence
  Description of Artificial Sequence: Synthetic oligonucleotide
  Sense strand starting at position 3637 of SEQ ID NO: 317856
gcagauagccugugaggga

SEQ ID NO: 517674 - RNA, 19 nt, Artificial Sequence
  Description of Artificial Sequence: Synthetic oligonucleotide
  Antisense strand to SEQ ID NO: 517673
ucccucacaggcuaucugc

SEQ ID NO: 517675 - RNA, 19 nt, Artificial Sequence
  Description of Artificial Sequence: Synthetic oligonucleotide
  Sense strand starting at position 3646 of SEQ ID NO: 317856
cugugagggaggugaucuu

SEQ ID NO: 517676 - RNA, 19 nt, Artificial Sequence
  Description of Artificial Sequence: Synthetic oligonucleotide
  Antisense strand to SEQ ID NO: 517675
aagaucaccucccucacag

SEQ ID NO: 517677 - RNA, 19 nt, Artificial Sequence
  Description of Artificial Sequence: Synthetic oligonucleotide
  Sense strand starting at position 3734 of SEQ ID NO: 317856
ggaaauuagcacugugguu

SEQ ID NO: 517678 - RNA, 19 nt, Artificial Sequence
  Description of Artificial Sequence: Synthetic oligonucleotide
  Antisense strand to SEQ ID NO: 517677
aaccacagugcuaauuucc

SEQ ID NO: 517679 - RNA, 19 nt, Artificial Sequence
  Description of Artificial Sequence: Synthetic oligonucleotide
  Sense strand starting at position 3736 of SEQ ID NO: 317856
aaauuagcacugugguuaa

SEQ ID NO: 517680 - RNA, 19 nt, Artificial Sequence
  Description of Artificial Sequence: Synthetic oligonucleotide
  Antisense strand to SEQ ID NO: 517679
uuaaccacagugcuaauuu

SEQ ID NO: 517681 - RNA, 19 nt, Artificial Sequence
  Description of Artificial Sequence: Synthetic oligonucleotide
  Sense strand starting at position 3746 of SEQ ID NO: 317856
ugugguuaacuggagcuua

SEQ ID NO: 517682 - RNA, 19 nt, Artificial Sequence
  Description of Artificial Sequence: Synthetic oligonucleotide
  Antisense strand to SEQ ID NO: 517681
uaagcuccaguuaaccaca

SEQ ID NO: 517683 - RNA, 19 nt, Artificial Sequence
  Description of Artificial Sequence: Synthetic oligonucleotide
  Sense strand starting at position 3759 of SEQ ID NO: 317856
agcuuacugucacuggaga

SEQ ID NO: 517684 - RNA, 19 nt, Artificial Sequence
  Description of Artificial Sequence: Synthetic oligonucleotide
  Antisense strand to SEQ ID NO: 517683
ucuccagugacaguaagcu

SEQ ID NO: 517685 - RNA, 19 nt, Artificial Sequence
  Description of Artificial Sequence: Synthetic oligonucleotide
  Sense strand starting at position 3760 of SEQ ID NO: 317856
gcuuacugucacuggagaa

SEQ ID NO: 517686 - RNA, 19 nt, Artificial Sequence
  Description of Artificial Sequence: Synthetic oligonucleotide
  Antisense strand to SEQ ID NO: 517685
uucuccagugacaguaagc

SEQ ID NO: 517687 - RNA, 19 nt, Artificial Sequence
  Description of Artificial Sequence: Synthetic oligonucleotide
  Sense strand starting at position 3804 of SEQ ID NO: 317856
accucagaguuaucccacu

SEQ ID NO: 517688 - RNA, 19 nt, Artificial Sequence
  Description of Artificial Sequence: Synthetic oligonucleotide
  Antisense strand to SEQ ID NO: 517687
agugggauaacucugaggu

SEQ ID NO: 517689 - RNA, 19 nt, Artificial Sequence
  Description of Artificial Sequence: Synthetic oligonucleotide
  Sense strand starting at position 11 of SEQ ID NO: 317857
gguccuauuugacaauuau

SEQ ID NO: 517690 - RNA, 19 nt, Artificial Sequence
  Description of Artificial Sequence: Synthetic oligonucleotide
  Antisense strand to SEQ ID NO: 517689
auaauugucaaauaggacc

SEQ ID NO: 517691 - RNA, 19 nt, Artificial Sequence
  Description of Artificial Sequence: Synthetic oligonucleotide
  Sense strand starting at position 35 of SEQ ID NO: 317857
ucuagucaccugcaaauga

SEQ ID NO: 517692 - RNA, 19 nt, Artificial Sequence
  Description of Artificial Sequence: Synthetic oligonucleotide
  Antisense strand to SEQ ID NO: 517691
ucauuugcaggugacuaga

SEQ ID NO: 517693 - RNA, 19 nt, Artificial Sequence
  Description of Artificial Sequence: Synthetic oligonucleotide
  Sense strand starting at position 405 of SEQ ID NO: 317857
cagacuggauguccuaauu

SEQ ID NO: 517694 - RNA, 19 nt, Artificial Sequence
  Description of Artificial Sequence: Synthetic oligonucleotide
  Antisense strand to SEQ ID NO: 517693
aauuaggacauccagucug

SEQ ID NO: 517695 - RNA, 19 nt, Artificial Sequence
  Description of Artificial Sequence: Synthetic oligonucleotide
  Sense strand starting at position 472 of SEQ ID NO: 317857
acaggagaauaugauccaa

SEQ ID NO: 517696 - RNA, 19 nt, Artificial Sequence
  Description of Artificial Sequence: Synthetic oligonucleotide
  Antisense strand to SEQ ID NO: 517695
uuggaucauauucuccugu

SEQ ID NO: 517697 - RNA, 19 nt, Artificial Sequence
  Description of Artificial Sequence: Synthetic oligonucleotide
  Sense strand starting at position 722 of SEQ ID NO: 317857
uuaacagucccgggaucuu

SEQ ID NO: 517698 - RNA, 19 nt, Artificial Sequence
  Description of Artificial Sequence: Synthetic oligonucleotide
  Antisense strand to SEQ ID NO: 517697
aagaucccgggacuguuaa

SEQ ID NO: 517699 - RNA, 19 nt, Artificial Sequence
  Description of Artificial Sequence: Synthetic oligonucleotide
  Sense strand starting at position 817 of SEQ ID NO: 317857
gugacuuacagcgaacacu

SEQ ID NO: 517700 - RNA, 19 nt, Artificial Sequence
  Description of Artificial Sequence: Synthetic oligonucleotide
  Antisense strand to SEQ ID NO: 517699
aguguucgcuguaagucac

SEQ ID NO: 517701 - RNA, 19 nt, Artificial Sequence
  Description of Artificial Sequence: Synthetic oligonucleotide
  Sense strand starting at position 883 of SEQ ID NO: 317857
ccacuuaaauugguuugaa

SEQ ID NO: 517702 - RNA, 19 nt, Artificial Sequence
  Description of Artificial Sequence: Synthetic oligonucleotide
  Antisense strand to SEQ ID NO: 517701
uucaaaccaauuuaagugg

SEQ ID NO: 517703 - RNA, 19 nt, Artificial Sequence
  Description of Artificial Sequence: Synthetic oligonucleotide
  Sense strand starting at position 884 of SEQ ID NO: 317857
cacuuaaauugguuugaag

SEQ ID NO: 517704 - RNA, 19 nt, Artificial Sequence
  Description of Artificial Sequence: Synthetic oligonucleotide
  Antisense strand to SEQ ID NO: 517703
cuucaaaccaauuuaagug

SEQ ID NO: 517705 - RNA, 19 nt, Artificial Sequence
  Description of Artificial Sequence: Synthetic oligonucleotide
  Sense strand starting at position 886 of SEQ ID NO: 317857
cuuaaauugguuugaagau

SEQ ID NO: 517706 - RNA, 19 nt, Artificial Sequence
  Description of Artificial Sequence: Synthetic oligonucleotide
  Antisense strand to SEQ ID NO: 517705
aucuucaaaccaauuuaag

SEQ ID NO: 517707 - RNA, 19 nt, Artificial Sequence
  Description of Artificial Sequence: Synthetic oligonucleotide
  Sense strand starting at position 927 of SEQ ID NO: 317857
gcaaguaucgaauaagcag

SEQ ID NO: 517708 - RNA, 19 nt, Artificial Sequence
  Description of Artificial Sequence: Synthetic oligonucleotide
  Antisense strand to SEQ ID NO: 517707
cugcuuauucgauacuugc

SEQ ID NO: 517709 - RNA, 19 nt, Artificial Sequence
  Description of Artificial Sequence: Synthetic oligonucleotide
  Sense strand starting at position 973 of SEQ ID NO: 317857
ucacuaagacuauggcuua

SEQ ID NO: 517710 - RNA, 19 nt, Artificial Sequence
  Description of Artificial Sequence: Synthetic oligonucleotide
  Antisense strand to SEQ ID NO: 517709
uaagccauagucuuaguga

SEQ ID NO: 517711 - RNA, 19 nt, Artificial Sequence
  Description of Artificial Sequence: Synthetic oligonucleotide
  Sense strand starting at position 976 of SEQ ID NO: 317857
cuaagacuauggcuuauua

SEQ ID NO: 517712 - RNA, 19 nt, Artificial Sequence
  Description of Artificial Sequence: Synthetic oligonucleotide
  Antisense strand to SEQ ID NO: 517711
uaauaagccauagucuuag

SEQ ID NO: 517713 - RNA, 19 nt, Artificial Sequence
  Description of Artificial Sequence: Synthetic oligonucleotide
  Sense strand starting at position 1434 of SEQ ID NO: 317857
ccuuaaguggccugaacua

SEQ ID NO: 517714 - RNA, 19 nt, Artificial Sequence
  Description of Artificial Sequence: Synthetic oligonucleotide
  Antisense strand to SEQ ID NO: 517713
uaguucaggccacuuaagg

SEQ ID NO: 517715 - RNA, 19 nt, Artificial Sequence
  Description of Artificial Sequence: Synthetic oligonucleotide
  Sense strand starting at position 1798 of SEQ ID NO: 317857
cuacaauagcggcagaagu

SEQ ID NO: 517716 - RNA, 19 nt, Artificial Sequence
  Description of Artificial Sequence: Synthetic oligonucleotide
  Antisense strand to SEQ ID NO: 517715
acuucugccgcuauuguag

SEQ ID NO: 517717 - RNA, 19 nt, Artificial Sequence
  Description of Artificial Sequence: Synthetic oligonucleotide
  Sense strand starting at position 1978 of SEQ ID NO: 317857
cgacuuccuacguagacuu

SEQ ID NO: 517718 - RNA, 19 nt, Artificial Sequence
  Description of Artificial Sequence: Synthetic oligonucleotide
  Antisense strand to SEQ ID NO: 517717
aagucuacguaggaagucg

SEQ ID NO: 517719 - RNA, 19 nt, Artificial Sequence
  Description of Artificial Sequence: Synthetic oligonucleotide
  Sense strand starting at position 1991 of SEQ ID NO: 317857
agacuuugacguuagguuu

SEQ ID NO: 517720 - RNA, 19 nt, Artificial Sequence
  Description of Artificial Sequence: Synthetic oligonucleotide
  Antisense strand to SEQ ID NO: 517719
aaaccuaacgucaaagucu

SEQ ID NO: 517721 - RNA, 19 nt, Artificial Sequence
  Description of Artificial Sequence: Synthetic oligonucleotide
  Sense strand starting at position 2397 of SEQ ID NO: 317857
guuagcguuaggucuaagu

SEQ ID NO: 517722 - RNA, 19 nt, Artificial Sequence
  Description of Artificial Sequence: Synthetic oligonucleotide
  Antisense strand to SEQ ID NO: 517721
acuuagaccuaacgcuaac

SEQ ID NO: 517723 - RNA, 19 nt, Artificial Sequence
  Description of Artificial Sequence: Synthetic oligonucleotide
  Sense strand starting at position 2556 of SEQ ID NO: 317857
ugguauuacauggguggga

SEQ ID NO: 517724 - RNA, 19 nt, Artificial Sequence
  Description of Artificial Sequence: Synthetic oligonucleotide
  Antisense strand to SEQ ID NO: 517723
ucccacccauguaauacca

SEQ ID NO: 517725 - RNA, 19 nt, Artificial Sequence
  Description of Artificial Sequence: Synthetic oligonucleotide
  Sense strand starting at position 2557 of SEQ ID NO: 317857
gguauuacaugggugggaa

SEQ ID NO: 517726 - RNA, 19 nt, Artificial Sequence
  Description of Artificial Sequence: Synthetic oligonucleotide
  Antisense strand to SEQ ID NO: 517725
uucccacccauguaauacc

SEQ ID NO: 517727 - RNA, 19 nt, Artificial Sequence
  Description of Artificial Sequence: Synthetic oligonucleotide
  Sense strand starting at position 2558 of SEQ ID NO: 317857
guauuacaugggugggaaa

SEQ ID NO: 517728 - RNA, 19 nt, Artificial Sequence
  Description of Artificial Sequence: Synthetic oligonucleotide
  Antisense strand to SEQ ID NO: 517727
uuucccacccauguaauac

SEQ ID NO: 517729 - RNA, 19 nt, Artificial Sequence
  Description of Artificial Sequence: Synthetic oligonucleotide
  Sense strand starting at position 2747 of SEQ ID NO: 317857
uaccgagaacuccaagguu

SEQ ID NO: 517730 - RNA, 19 nt, Artificial Sequence
  Description of Artificial Sequence: Synthetic oligonucleotide
  Antisense strand to SEQ ID NO: 517729
aaccuuggaguucucggua

SEQ ID NO: 517731 - RNA, 19 nt, Artificial Sequence
  Description of Artificial Sequence: Synthetic oligonucleotide
  Sense strand starting at position 2750 of SEQ ID NO: 317857
cgagaacuccaagguuaca

SEQ ID NO: 517732 - RNA, 19 nt, Artificial Sequence
  Description of Artificial Sequence: Synthetic oligonucleotide
  Antisense strand to SEQ ID NO: 517731
uguaaccuuggaguucucg

SEQ ID NO: 517733 - RNA, 19 nt, Artificial Sequence
  Description of Artificial Sequence: Synthetic oligonucleotide
  Sense strand starting at position 2778 of SEQ ID NO: 317857
cuugcaugugucucgugau

SEQ ID NO: 517734 - RNA, 19 nt, Artificial Sequence
  Description of Artificial Sequence: Synthetic oligonucleotide
  Antisense strand to SEQ ID NO: 517733
aucacgagacacaugcaag

SEQ ID NO: 517735 - RNA, 19 nt, Artificial Sequence
  Description of Artificial Sequence: Synthetic oligonucleotide
  Sense strand starting at position 2961 of SEQ ID NO: 317857
ccuagaacugccuagcaga

SEQ ID NO: 517736 - RNA, 19 nt, Artificial Sequence
  Description of Artificial Sequence: Synthetic oligonucleotide
  Antisense strand to SEQ ID NO: 517735
ucugcuaggcaguucuagg

SEQ ID NO: 517737 - RNA, 19 nt, Artificial Sequence
  Description of Artificial Sequence: Synthetic oligonucleotide
  Sense strand starting at position 3056 of SEQ ID NO: 317857
guuagaguuggugauugag

SEQ ID NO: 517738 - RNA, 19 nt, Artificial Sequence
  Description of Artificial Sequence: Synthetic oligonucleotide
  Antisense strand to SEQ ID NO: 517737
cucaaucaccaacucuaac

SEQ ID NO: 517739 - RNA, 19 nt, Artificial Sequence
  Description of Artificial Sequence: Synthetic oligonucleotide
  Sense strand starting at position 3058 of SEQ ID NO: 317857
uagaguuggugauugagaa

SEQ ID NO: 517740 - RNA, 19 nt, Artificial Sequence
  Description of Artificial Sequence: Synthetic oligonucleotide
  Antisense strand to SEQ ID NO: 517739
uucucaaucaccaacucua

SEQ ID NO: 517741 - RNA, 19 nt, Artificial Sequence
  Description of Artificial Sequence: Synthetic oligonucleotide
  Sense strand starting at position 3059 of SEQ ID NO: 317857
agaguuggugauugagaag

SEQ ID NO: 517742 - RNA, 19 nt, Artificial Sequence
  Description of Artificial Sequence: Synthetic oligonucleotide
  Antisense strand to SEQ ID NO: 517741
cuucucaaucaccaacucu

SEQ ID NO: 517743 - RNA, 19 nt, Artificial Sequence
  Description of Artificial Sequence: Synthetic oligonucleotide
  Sense strand starting at position 3188 of SEQ ID NO: 317857
aaagcauguggcuaucauu

SEQ ID NO: 517744 - RNA, 19 nt, Artificial Sequence
  Description of Artificial Sequence: Synthetic oligonucleotide
  Antisense strand to SEQ ID NO: 517743
aaugauagccacaugcuuu

SEQ ID NO: 517745 - RNA, 19 nt, Artificial Sequence
  Description of Artificial Sequence: Synthetic oligonucleotide
  Sense strand starting at position 3247 of SEQ ID NO: 317857
ugcagugacuccucuauaa

SEQ ID NO: 517746 - RNA, 19 nt, Artificial Sequence
  Description of Artificial Sequence: Synthetic oligonucleotide
  Antisense strand to SEQ ID NO: 517745
uuauagaggagucacugca

SEQ ID NO: 517747 - RNA, 19 nt, Artificial Sequence
  Description of Artificial Sequence: Synthetic oligonucleotide
  Sense strand starting at position 3251 of SEQ ID NO: 317857
gugacuccucuauaagguu

SEQ ID NO: 517748 - RNA, 19 nt, Artificial Sequence
  Description of Artificial Sequence: Synthetic oligonucleotide
  Antisense strand to SEQ ID NO: 517747
aaccuuauagaggagucac

SEQ ID NO: 517749 - RNA, 19 nt, Artificial Sequence
  Description of Artificial Sequence: Synthetic oligonucleotide
  Sense strand starting at position 3266 of SEQ ID NO: 317857
gguuucauagauggaggua

SEQ ID NO: 517750 - RNA, 19 nt, Artificial Sequence
  Description of Artificial Sequence: Synthetic oligonucleotide
  Antisense strand to SEQ ID NO: 517749
uaccuccaucuaugaaacc

SEQ ID NO: 517751 - RNA, 19 nt, Artificial Sequence
  Description of Artificial Sequence: Synthetic oligonucleotide
  Sense strand starting at position 3331 of SEQ ID NO: 317857
guauacucccuccagcaua

SEQ ID NO: 517752 - RNA, 19 nt, Artificial Sequence
  Description of Artificial Sequence: Synthetic oligonucleotide
  Antisense strand to SEQ ID NO: 517751
uaugcuggagggaguauac

SEQ ID NO: 517753 - RNA, 19 nt, Artificial Sequence
  Description of Artificial Sequence: Synthetic oligonucleotide
  Sense strand starting at position 3352 of SEQ ID NO: 317857
uucuaauauggugauguua

SEQ ID NO: 517754 - RNA, 19 nt, Artificial Sequence
  Description of Artificial Sequence: Synthetic oligonucleotide
  Antisense strand to SEQ ID NO: 517753
uaacaucaccauauuagaa

SEQ ID NO: 517755 - RNA, 19 nt, Artificial Sequence
  Description of Artificial Sequence: Synthetic oligonucleotide
  Sense strand starting at position 3553 of SEQ ID NO: 317857
ugcaauuauuucuuuaggu

SEQ ID NO: 517756 - RNA, 19 nt, Artificial Sequence
  Description of Artificial Sequence: Synthetic oligonucleotide
  Antisense strand to SEQ ID NO: 517755
accuaaagaaauaauugca

SEQ ID NO: 517757 - RNA, 19 nt, Artificial Sequence
  Description of Artificial Sequence: Synthetic oligonucleotide
  Sense strand starting at position 3554 of SEQ ID NO: 317857
gcaauuauuucuuuagguu

SEQ ID NO: 517758 - RNA, 19 nt, Artificial Sequence
  Description of Artificial Sequence: Synthetic oligonucleotide
  Antisense strand to SEQ ID NO: 517757
aaccuaaagaaauaauugc

SEQ ID NO: 517759 - RNA, 19 nt, Artificial Sequence
  Description of Artificial Sequence: Synthetic oligonucleotide
  Sense strand starting at position 3605 of SEQ ID NO: 317857
agucucuacugaguuuaaa

SEQ ID NO: 517760 - RNA, 19 nt, Artificial Sequence
  Description of Artificial Sequence: Synthetic oligonucleotide
  Antisense strand to SEQ ID NO: 517759
uuuaaacucaguagagacu

SEQ ID NO: 517761 - RNA, 19 nt, Artificial Sequence
  Description of Artificial Sequence: Synthetic oligonucleotide
  Sense strand starting at position 3740 of SEQ ID NO: 317857
auaauuaaguggccaauua

SEQ ID NO: 517762 - RNA, 19 nt, Artificial Sequence
  Description of Artificial Sequence: Synthetic oligonucleotide
  Antisense strand to SEQ ID NO: 517761
uaauuggccacuuaauuau

SEQ ID NO: 517763 - RNA, 19 nt, Artificial Sequence
  Description of Artificial Sequence: Synthetic oligonucleotide
  Sense strand starting at position 3795 of SEQ ID NO: 317857
acuagcgauaaaugagaua

SEQ ID NO: 517764 - RNA, 19 nt, Artificial Sequence
  Description of Artificial Sequence: Synthetic oligonucleotide
  Antisense strand to SEQ ID NO: 517763
uaucucauuuaucgcuagu

SEQ ID NO: 517765 - RNA, 19 nt, Artificial Sequence
  Description of Artificial Sequence: Synthetic oligonucleotide
  Sense strand starting at position 3855 of SEQ ID NO: 317857
ccuaguuaugcacaauggu

SEQ ID NO: 517766 - RNA, 19 nt, Artificial Sequence
  Description of Artificial Sequence: Synthetic oligonucleotide
  Antisense strand to SEQ ID NO: 517765
accauugugcauaacuagg

SEQ ID NO: 517767 - RNA, 19 nt, Artificial Sequence
  Description of Artificial Sequence: Synthetic oligonucleotide
  Sense strand starting at position 3870 of SEQ ID NO: 317857
uggugaccagcuugauaau

SEQ ID NO: 517768 - RNA, 19 nt, Artificial Sequence
  Description of Artificial Sequence: Synthetic oligonucleotide
  Antisense strand to SEQ ID NO: 517767
auuaucaagcuggucacca

SEQ ID NO: 517769 - RNA, 19 nt, Artificial Sequence
  Description of Artificial Sequence: Synthetic oligonucleotide
  Sense strand starting at position 55 of SEQ ID NO: 317858
uauguuauacuguagcaga

SEQ ID NO: 517770 - RNA, 19 nt, Artificial Sequence
  Description of Artificial Sequence: Synthetic oligonucleotide
  Antisense strand to SEQ ID NO: 517769
ucugcuacaguauaacaua

SEQ ID NO: 517771 - RNA, 19 nt, Artificial Sequence
  Description of Artificial Sequence: Synthetic oligonucleotide
  Sense strand starting at position 60 of SEQ ID NO: 317858
uauacuguagcagaaagua

SEQ ID NO: 517772 - RNA, 19 nt, Artificial Sequence
  Description of Artificial Sequence: Synthetic oligonucleotide
  Antisense strand to SEQ ID NO: 517771
uacuuucugcuacaguaua

SEQ ID NO: 517773 - RNA, 19 nt, Artificial Sequence
  Description of Artificial Sequence: Synthetic oligonucleotide
  Sense strand starting at position 323 of SEQ ID NO: 317858
cuaggcuagcuuuauauga

SEQ ID NO: 517774 - RNA, 19 nt, Artificial Sequence
  Description of Artificial Sequence: Synthetic oligonucleotide
  Antisense strand to SEQ ID NO: 517773
ucauauaaagcuagccuag

SEQ ID NO: 517775 - RNA, 19 nt, Artificial Sequence
  Description of Artificial Sequence: Synthetic oligonucleotide
  Sense strand starting at position 406 of SEQ ID NO: 317858
aguaauacagguugacuga

SEQ ID NO: 517776 - RNA, 19 nt, Artificial Sequence
  Description of Artificial Sequence: Synthetic oligonucleotide
  Antisense strand to SEQ ID NO: 517775
ucagucaaccuguauuacu

SEQ ID NO: 517777 - RNA, 19 nt, Artificial Sequence
  Description of Artificial Sequence: Synthetic oligonucleotide
  Sense strand starting at position 495 of SEQ ID NO: 317858
gggacagucuuauuguacu

SEQ ID NO: 517778 - RNA, 19 nt, Artificial Sequence
  Description of Artificial Sequence: Synthetic oligonucleotide
  Antisense strand to SEQ ID NO: 517777
aguacaauaagacuguccc

SEQ ID NO: 517779 - RNA, 19 nt, Artificial Sequence
  Description of Artificial Sequence: Synthetic oligonucleotide
  Sense strand starting at position 586 of SEQ ID NO: 317858
gguccuauuugacaauuau

SEQ ID NO: 517780 - RNA, 19 nt, Artificial Sequence
  Description of Artificial Sequence: Synthetic oligonucleotide
  Antisense strand to SEQ ID NO: 517779
auaauugucaaauaggacc

SEQ ID NO: 517781 - RNA, 19 nt, Artificial Sequence
  Description of Artificial Sequence: Synthetic oligonucleotide
  Sense strand starting at position 610 of SEQ ID NO: 317858
ucuagucaccugcaaauga

SEQ ID NO: 517782 - RNA, 19 nt, Artificial Sequence
  Description of Artificial Sequence: Synthetic oligonucleotide
  Antisense strand to SEQ ID NO: 517781
ucauuugcaggugacuaga

SEQ ID NO: 517783 - RNA, 19 nt, Artificial Sequence
  Description of Artificial Sequence: Synthetic oligonucleotide
  Sense strand starting at position 980 of SEQ ID NO: 317858
cagacuggauguccuaauu

SEQ ID NO: 517784 - RNA, 19 nt, Artificial Sequence
  Description of Artificial Sequence: Synthetic oligonucleotide
  Antisense strand to SEQ ID NO: 517783
aauuaggacauccagucug

SEQ ID NO: 517785 - RNA, 19 nt, Artificial Sequence
  Description of Artificial Sequence: Synthetic oligonucleotide
  Sense strand starting at position 1047 of SEQ ID NO: 317858
acaggagaauaugauccaa

SEQ ID NO: 517786 - RNA, 19 nt, Artificial Sequence
  Description of Artificial Sequence: Synthetic oligonucleotide
  Antisense strand to SEQ ID NO: 517785
uuggaucauauucuccugu

SEQ ID NO: 517787 - RNA, 19 nt, Artificial Sequence
  Description of Artificial Sequence: Synthetic oligonucleotide
  Sense strand starting at position 1297 of SEQ ID NO: 317858
uuaacagucccgggaucuu

SEQ ID NO: 517788 - RNA, 19 nt, Artificial Sequence
  Description of Artificial Sequence: Synthetic oligonucleotide
  Antisense strand to SEQ ID NO: 517787
aagaucccgggacuguuaa

SEQ ID NO: 517789 - RNA, 19 nt, Artificial Sequence
  Description of Artificial Sequence: Synthetic oligonucleotide
  Sense strand starting at position 1392 of SEQ ID NO: 317858
gugacuuacagcgaacacu

SEQ ID NO: 517790 - RNA, 19 nt, Artificial Sequence
  Description of Artificial Sequence: Synthetic oligonucleotide
  Antisense strand to SEQ ID NO: 517789
aguguucgcuguaagucac

SEQ ID NO: 517791 - RNA, 19 nt, Artificial Sequence
  Description of Artificial Sequence: Synthetic oligonucleotide
  Sense strand starting at position 1458 of SEQ ID NO: 317858
ccacuuaaauugguuugaa

SEQ ID NO: 517792 - RNA, 19 nt, Artificial Sequence
  Description of Artificial Sequence: Synthetic oligonucleotide
  Antisense strand to SEQ ID NO: 517791
uucaaaccaauuuaagugg

SEQ ID NO: 517793 - RNA, 19 nt, Artificial Sequence
  Description of Artificial Sequence: Synthetic oligonucleotide
  Sense strand starting at position 1459 of SEQ ID NO: 317858
cacuuaaauugguuugaag

SEQ ID NO: 517794 - RNA, 19 nt, Artificial Sequence
  Description of Artificial Sequence: Synthetic oligonucleotide
  Antisense strand to SEQ ID NO: 517793
cuucaaaccaauuuaagug

SEQ ID NO: 517795 - RNA, 19 nt, Artificial Sequence
  Description of Artificial Sequence: Synthetic oligonucleotide
  Sense strand starting at position 1461 of SEQ ID NO: 317858
cuuaaauugguuugaagau

SEQ ID NO: 517796 - RNA, 19 nt, Artificial Sequence
  Description of Artificial Sequence: Synthetic oligonucleotide
  Antisense strand to SEQ ID NO: 517795
aucuucaaaccaauuuaag

SEQ ID NO: 517797 - RNA, 19 nt, Artificial Sequence
  Description of Artificial Sequence: Synthetic oligonucleotide
  Sense strand starting at position 1502 of SEQ ID NO: 317858
gcaaguaucgaauaagcag

SEQ ID NO: 517798 - RNA, 19 nt, Artificial Sequence
  Description of Artificial Sequence: Synthetic oligonucleotide
  Antisense strand to SEQ ID NO: 517797
cugcuuauucgauacuugc

SEQ ID NO: 517799 - RNA, 19 nt, Artificial Sequence
  Description of Artificial Sequence: Synthetic oligonucleotide
  Sense strand starting at position 1548 of SEQ ID NO: 317858
ucacuaagacuauggcuua

SEQ ID NO: 517800 - RNA, 19 nt, Artificial Sequence
  Description of Artificial Sequence: Synthetic oligonucleotide
  Antisense strand to SEQ ID NO: 517799
uaagccauagucuuaguga

SEQ ID NO: 517801 - RNA, 19 nt, Artificial Sequence
  Description of Artificial Sequence: Synthetic oligonucleotide
  Sense strand starting at position 1551 of SEQ ID NO: 317858
cuaagacuauggcuuauua

SEQ ID NO: 517802 - RNA, 19 nt, Artificial Sequence
  Description of Artificial Sequence: Synthetic oligonucleotide
  Antisense strand to SEQ ID NO: 517801
uaauaagccauagucuuag

SEQ ID NO: 517803 - RNA, 19 nt, Artificial Sequence
  Description of Artificial Sequence: Synthetic oligonucleotide
  Sense strand starting at position 2009 of SEQ ID NO: 317858
ccuuaaguggccugaacua

SEQ ID NO: 517804 - RNA, 19 nt, Artificial Sequence
  Description of Artificial Sequence: Synthetic oligonucleotide
  Antisense strand to SEQ ID NO: 517803
uaguucaggccacuuaagg

SEQ ID NO: 517805 - RNA, 19 nt, Artificial Sequence
  Description of Artificial Sequence: Synthetic oligonucleotide
  Sense strand starting at position 2373 of SEQ ID NO: 317858
cuacaauagcggcagaagu

SEQ ID NO: 517806 - RNA, 19 nt, Artificial Sequence
  Description of Artificial Sequence: Synthetic oligonucleotide
  Antisense strand to SEQ ID NO: 517805
acuucugccgcuauuguag

SEQ ID NO: 517807 - RNA, 19 nt, Artificial Sequence
  Description of Artificial Sequence: Synthetic oligonucleotide
  Sense strand starting at position 2553 of SEQ ID NO: 317858
cgacuuccuacguagacuu

SEQ ID NO: 517808 - RNA, 19 nt, Artificial Sequence
  Description of Artificial Sequence: Synthetic oligonucleotide
  Antisense strand to SEQ ID NO: 517807
aagucuacguaggaagucg

SEQ ID NO: 517809 - RNA, 19 nt, Artificial Sequence
  Description of Artificial Sequence: Synthetic oligonucleotide
  Sense strand starting at position 2566 of SEQ ID NO: 317858
agacuuugacguuagguuu

SEQ ID NO: 517810 - RNA, 19 nt, Artificial Sequence
  Description of Artificial Sequence: Synthetic oligonucleotide
  Antisense strand to SEQ ID NO: 517809
aaaccuaacgucaaagucu

SEQ ID NO: 517811 - RNA, 19 nt, Artificial Sequence
  Description of Artificial Sequence: Synthetic oligonucleotide
  Sense strand starting at position 2972 of SEQ ID NO: 317858
guuagcguuaggucuaagu

SEQ ID NO: 517812 - RNA, 19 nt, Artificial Sequence
  Description of Artificial Sequence: Synthetic oligonucleotide
  Antisense strand to SEQ ID NO: 517811
acuuagaccuaacgcuaac

SEQ ID NO: 517813 - RNA, 19 nt, Artificial Sequence
  Description of Artificial Sequence: Synthetic oligonucleotide
  Sense strand starting at position 2976 of SEQ ID NO: 317858
gcguuaggucuaagucugu

SEQ ID NO: 517814 - RNA, 19 nt, Artificial Sequence
  Description of Artificial Sequence: Synthetic oligonucleotide
  Antisense strand to SEQ ID NO: 517813
acagacuuagaccuaacgc

SEQ ID NO: 517815 - RNA, 19 nt, Artificial Sequence
  Description of Artificial Sequence: Synthetic oligonucleotide
  Sense strand starting at position 3120 of SEQ ID NO: 317858
cuacgugagacugguauua

SEQ ID NO: 517816 - RNA, 19 nt, Artificial Sequence
  Description of Artificial Sequence: Synthetic oligonucleotide
  Antisense strand to SEQ ID NO: 517815
uaauaccagucucacguag

SEQ ID NO: 517817 - RNA, 19 nt, Artificial Sequence
  Description of Artificial Sequence: Synthetic oligonucleotide
  Sense strand starting at position 3131 of SEQ ID NO: 317858
ugguauuacauggguggga

SEQ ID NO: 517818 - RNA, 19 nt, Artificial Sequence
  Description of Artificial Sequence: Synthetic oligonucleotide
  Antisense strand to SEQ ID NO: 517817
ucccacccauguaauacca

SEQ ID NO: 517819 - RNA, 19 nt, Artificial Sequence
  Description of Artificial Sequence: Synthetic oligonucleotide
  Sense strand starting at position 3132 of SEQ ID NO: 317858
gguauuacaugggugggaa

SEQ ID NO: 517820 - RNA, 19 nt, Artificial Sequence
  Description of Artificial Sequence: Synthetic oligonucleotide
  Antisense strand to SEQ ID NO: 517819
uucccacccauguaauacc

SEQ ID NO: 517821 - RNA, 19 nt, Artificial Sequence
  Description of Artificial Sequence: Synthetic oligonucleotide
  Sense strand starting at position 3133 of SEQ ID NO: 317858
guauuacaugggugggaaa

SEQ ID NO: 517822 - RNA, 19 nt, Artificial Sequence
  Description of Artificial Sequence: Synthetic oligonucleotide
  Antisense strand to SEQ ID NO: 517821
uuucccacccauguaauac

SEQ ID NO: 517823 - RNA, 19 nt, Artificial Sequence
  Description of Artificial Sequence: Synthetic oligonucleotide
  Sense strand starting at position 3322 of SEQ ID NO: 317858
uaccgagaacuccaagguu

SEQ ID NO: 517824 - RNA, 19 nt, Artificial Sequence
  Description of Artificial Sequence: Synthetic oligonucleotide
  Antisense strand to SEQ ID NO: 517823
aaccuuggaguucucggua

SEQ ID NO: 517825 - RNA, 19 nt, Artificial Sequence
  Description of Artificial Sequence: Synthetic oligonucleotide
  Sense strand starting at position 3325 of SEQ ID NO: 317858
cgagaacuccaagguuaca

SEQ ID NO: 517826 - RNA, 19 nt, Artificial Sequence
  Description of Artificial Sequence: Synthetic oligonucleotide
  Antisense strand to SEQ ID NO: 517825
uguaaccuuggaguucucg

SEQ ID NO: 517827 - RNA, 19 nt, Artificial Sequence
  Description of Artificial Sequence: Synthetic oligonucleotide
  Sense strand starting at position 3353 of SEQ ID NO: 317858
cuugcaugugucucgugau

SEQ ID NO: 517828 - RNA, 19 nt, Artificial Sequence
  Description of Artificial Sequence: Synthetic oligonucleotide
  Antisense strand to SEQ ID NO: 517827
aucacgagacacaugcaag

SEQ ID NO: 517829 - RNA, 19 nt, Artificial Sequence
  Description of Artificial Sequence: Synthetic oligonucleotide
  Sense strand starting at position 3536 of SEQ ID NO: 317858
ccuagaacugccuagcaga

SEQ ID NO: 517830 - RNA, 19 nt, Artificial Sequence
  Description of Artificial Sequence: Synthetic oligonucleotide
  Antisense strand to SEQ ID NO: 517829
ucugcuaggcaguucuagg

SEQ ID NO: 517831 - RNA, 19 nt, Artificial Sequence
  Description of Artificial Sequence: Synthetic oligonucleotide
  Sense strand starting at position 3631 of SEQ ID NO: 317858
guuagaguuggugauugag

SEQ ID NO: 517832 - RNA, 19 nt, Artificial Sequence
  Description of Artificial Sequence: Synthetic oligonucleotide
  Antisense strand to SEQ ID NO: 517831
cucaaucaccaacucuaac

SEQ ID NO: 517833 - RNA, 19 nt, Artificial Sequence
  Description of Artificial Sequence: Synthetic oligonucleotide
  Sense strand starting at position 3633 of SEQ ID NO: 317858
uagaguuggugauugagaa

SEQ ID NO: 517834 - RNA, 19 nt, Artificial Sequence
  Description of Artificial Sequence: Synthetic oligonucleotide
  Antisense strand to SEQ ID NO: 517833
uucucaaucaccaacucua

SEQ ID NO: 517835 - RNA, 19 nt, Artificial Sequence
  Description of Artificial Sequence: Synthetic oligonucleotide
  Sense strand starting at position 3634 of SEQ ID NO: 317858
agaguuggugauugagaag

SEQ ID NO: 517836 - RNA, 19 nt, Artificial Sequence
  Description of Artificial Sequence: Synthetic oligonucleotide
  Antisense strand to SEQ ID NO: 517835
cuucucaaucaccaacucu

SEQ ID NO: 517837 - RNA, 19 nt, Artificial Sequence
  Description of Artificial Sequence: Synthetic oligonucleotide
  Sense strand starting at position 3763 of SEQ ID NO: 317858
aaagcauguggcuaucauu

SEQ ID NO: 517838 - RNA, 19 nt, Artificial Sequence
  Description of Artificial Sequence: Synthetic oligonucleotide
  Antisense strand to SEQ ID NO: 517837
aaugauagccacaugcuuu

SEQ ID NO: 517839 - RNA, 19 nt, Artificial Sequence
  Description of Artificial Sequence: Synthetic oligonucleotide
  Sense strand starting at position 3822 of SEQ ID NO: 317858
ugcagugacuccucuauaa

SEQ ID NO: 517840 - RNA, 19 nt, Artificial Sequence
  Description of Artificial Sequence: Synthetic oligonucleotide
  Antisense strand to SEQ ID NO: 517839
uuauagaggagucacugca

SEQ ID NO: 517841 - RNA, 19 nt, Artificial Sequence
  Description of Artificial Sequence: Synthetic oligonucleotide
  Sense strand starting at position 3826 of SEQ ID NO: 317858
gugacuccucuauaagguu

SEQ ID NO: 517842 - RNA, 19 nt, Artificial Sequence
  Description of Artificial Sequence: Synthetic oligonucleotide
  Antisense strand to SEQ ID NO: 517841
aaccuuauagaggagucac

SEQ ID NO: 517843 - RNA, 19 nt, Artificial Sequence
  Description of Artificial Sequence: Synthetic oligonucleotide
  Sense strand starting at position 3841 of SEQ ID NO: 317858
gguuucauagauggaggua

SEQ ID NO: 517844 - RNA, 19 nt, Artificial Sequence
  Description of Artificial Sequence: Synthetic oligonucleotide
  Antisense strand to SEQ ID NO: 517843
uaccuccaucuaugaaacc

SEQ ID NO: 517845 - RNA, 19 nt, Artificial Sequence
  Description of Artificial Sequence: Synthetic oligonucleotide
  Sense strand starting at position 3906 of SEQ ID NO: 317858
guauacucccuccagcaua

SEQ ID NO: 517846 - RNA, 19 nt, Artificial Sequence
  Description of Artificial Sequence: Synthetic oligonucleotide
  Antisense strand to SEQ ID NO: 517845
uaugcuggagggaguauac

SEQ ID NO: 517847 - RNA, 19 nt, Artificial Sequence
  Description of Artificial Sequence: Synthetic oligonucleotide
  Sense strand starting at position 3927 of SEQ ID NO: 317858
uucuaauauggugauguua

SEQ ID NO: 517848 - RNA, 19 nt, Artificial Sequence
  Description of Artificial Sequence: Synthetic oligonucleotide
  Antisense strand to SEQ ID NO: 517847
uaacaucaccauauuagaa

SEQ ID NO: 517849 - RNA, 19 nt, Artificial Sequence
  Description of Artificial Sequence: Synthetic oligonucleotide
  Sense strand starting at position 29 of SEQ ID NO: 317859
uugagaaugucgccugaac

SEQ ID NO: 517850 - RNA, 19 nt, Artificial Sequence
  Description of Artificial Sequence: Synthetic oligonucleotide
  Antisense strand to SEQ ID NO: 517849
guucaggcgacauucucaa

SEQ ID NO: 517851 - RNA, 19 nt, Artificial Sequence
  Description of Artificial Sequence: Synthetic oligonucleotide
  Sense strand starting at position 31 of SEQ ID NO: 317859
gagaaugucgccugaacuc

SEQ ID NO: 517852 - RNA, 19 nt, Artificial Sequence
  Description of Artificial Sequence: Synthetic oligonucleotide
  Antisense strand to SEQ ID NO: 517851
gaguucaggcgacauucuc

SEQ ID NO: 517853 - RNA, 19 nt, Artificial Sequence
  Description of Artificial Sequence: Synthetic oligonucleotide
  Sense strand starting at position 299 of SEQ ID NO: 317859
cagaaagugucagaacuga

SEQ ID NO: 517854 - RNA, 19 nt, Artificial Sequence
  Description of Artificial Sequence: Synthetic oligonucleotide
  Antisense strand to SEQ ID NO: 517853
ucaguucugacacuuucug

SEQ ID NO: 517855 - RNA, 19 nt, Artificial Sequence
  Description of Artificial Sequence: Synthetic oligonucleotide
  Sense strand starting at position 594 of SEQ ID NO: 317859
ugagaacccuccuugcaca

SEQ ID NO: 517856 - RNA, 19 nt, Artificial Sequence
  Description of Artificial Sequence: Synthetic oligonucleotide
  Antisense strand to SEQ ID NO: 517855
ugugcaaggaggguucuca

SEQ ID NO: 517857 - RNA, 19 nt, Artificial Sequence
  Description of Artificial Sequence: Synthetic oligonucleotide
  Sense strand starting at position 731 of SEQ ID NO: 317859
aguccuaaaucauugagau

SEQ ID NO: 517858 - RNA, 19 nt, Artificial Sequence
  Description of Artificial Sequence: Synthetic oligonucleotide
  Antisense strand to SEQ ID NO: 517857
aucucaaugauuuaggacu

SEQ ID NO: 517859 - RNA, 19 nt, Artificial Sequence
  Description of Artificial Sequence: Synthetic oligonucleotide
  Sense strand starting at position 732 of SEQ ID NO: 317859
guccuaaaucauugagauu

SEQ ID NO: 517860 - RNA, 19 nt, Artificial Sequence
  Description of Artificial Sequence: Synthetic oligonucleotide
  Antisense strand to SEQ ID NO: 517859
aaucucaaugauuuaggac

SEQ ID NO: 517861 - RNA, 19 nt, Artificial Sequence
  Description of Artificial Sequence: Synthetic oligonucleotide
  Sense strand starting at position 829 of SEQ ID NO: 317859
aggcuuagguugucucuua

SEQ ID NO: 517862 - RNA, 19 nt, Artificial Sequence
  Description of Artificial Sequence: Synthetic oligonucleotide
  Antisense strand to SEQ ID NO: 517861
uaagagacaaccuaagccu

SEQ ID NO: 517863 - RNA, 19 nt, Artificial Sequence
  Description of Artificial Sequence: Synthetic oligonucleotide
  Sense strand starting at position 830 of SEQ ID NO: 317859
ggcuuagguugucucuuau

SEQ ID NO: 517864 - RNA, 19 nt, Artificial Sequence
  Description of Artificial Sequence: Synthetic oligonucleotide
  Antisense strand to SEQ ID NO: 517863
auaagagacaaccuaagcc

SEQ ID NO: 517865 - RNA, 19 nt, Artificial Sequence
  Description of Artificial Sequence: Synthetic oligonucleotide
  Sense strand starting at position 950 of SEQ ID NO: 317859
cguagcauuuaauaacuaa

SEQ ID NO: 517866 - RNA, 19 nt, Artificial Sequence
  Description of Artificial Sequence: Synthetic oligonucleotide
  Antisense strand to SEQ ID NO: 517865
uuaguuauuaaaugcuacg

SEQ ID NO: 517867 - RNA, 19 nt, Artificial Sequence
  Description of Artificial Sequence: Synthetic oligonucleotide
  Sense strand starting at position 1098 of SEQ ID NO: 317859
uggacucaauuagaucaga

SEQ ID NO: 517868 - RNA, 19 nt, Artificial Sequence
  Description of Artificial Sequence: Synthetic oligonucleotide
  Antisense strand to SEQ ID NO: 517867
ucugaucuaauugagucca

SEQ ID NO: 517869 - RNA, 19 nt, Artificial Sequence
  Description of Artificial Sequence: Synthetic oligonucleotide
  Sense strand starting at position 1209 of SEQ ID NO: 317859
ggaauuaggucucuucuua

SEQ ID NO: 517870 - RNA, 19 nt, Artificial Sequence
  Description of Artificial Sequence: Synthetic oligonucleotide
  Antisense strand to SEQ ID NO: 517869
uaagaagagaccuaauucc

SEQ ID NO: 517871 - RNA, 19 nt, Artificial Sequence
  Description of Artificial Sequence: Synthetic oligonucleotide
  Sense strand starting at position 1213 of SEQ ID NO: 317859
uuaggucucuucuuaucua

SEQ ID NO: 517872 - RNA, 19 nt, Artificial Sequence
  Description of Artificial Sequence: Synthetic oligonucleotide
  Antisense strand to SEQ ID NO: 517871
uagauaagaagagaccuaa

SEQ ID NO: 517873 - RNA, 19 nt, Artificial Sequence
  Description of Artificial Sequence: Synthetic oligonucleotide
  Sense strand starting at position 1216 of SEQ ID NO: 317859
ggucucuucuuaucuaaag

SEQ ID NO: 517874 - RNA, 19 nt, Artificial Sequence
  Description of Artificial Sequence: Synthetic oligonucleotide
  Antisense strand to SEQ ID NO: 517873
cuuuagauaagaagagacc

SEQ ID NO: 517875 - RNA, 19 nt, Artificial Sequence
  Description of Artificial Sequence: Synthetic oligonucleotide
  Sense strand starting at position 1227 of SEQ ID NO: 317859
aucuaaagguggcauuuau

SEQ ID NO: 517876 - RNA, 19 nt, Artificial Sequence
  Description of Artificial Sequence: Synthetic oligonucleotide
  Antisense strand to SEQ ID NO: 517875
auaaaugccaccuuuagau

SEQ ID NO: 517877 - RNA, 19 nt, Artificial Sequence
  Description of Artificial Sequence: Synthetic oligonucleotide
  Sense strand starting at position 1380 of SEQ ID NO: 317859
ccaaacgacuuacugaaua

SEQ ID NO: 517878 - RNA, 19 nt, Artificial Sequence
  Description of Artificial Sequence: Synthetic oligonucleotide
  Antisense strand to SEQ ID NO: 517877
uauucaguaagucguuugg

SEQ ID NO: 517879 - RNA, 19 nt, Artificial Sequence
  Description of Artificial Sequence: Synthetic oligonucleotide
  Sense strand starting at position 1435 of SEQ ID NO: 317859
gauuucucccuucgcauga

SEQ ID NO: 517880 - RNA, 19 nt, Artificial Sequence
  Description of Artificial Sequence: Synthetic oligonucleotide
  Antisense strand to SEQ ID NO: 517879
ucaugcgaagggagaaauc

SEQ ID NO: 517881 - RNA, 19 nt, Artificial Sequence
  Description of Artificial Sequence: Synthetic oligonucleotide
  Sense strand starting at position 1439 of SEQ ID NO: 317859
ucucccuucgcaugauuaa

SEQ ID NO: 517882 - RNA, 19 nt, Artificial Sequence
  Description of Artificial Sequence: Synthetic oligonucleotide
  Antisense strand to SEQ ID NO: 517881
uuaaucaugcgaagggaga

SEQ ID NO: 517883 - RNA, 19 nt, Artificial Sequence
  Description of Artificial Sequence: Synthetic oligonucleotide
  Sense strand starting at position 1440 of SEQ ID NO: 317859
cucccuucgcaugauuaac

SEQ ID NO: 517884 - RNA, 19 nt, Artificial Sequence
  Description of Artificial Sequence: Synthetic oligonucleotide
  Antisense strand to SEQ ID NO: 517883
guuaaucaugcgaagggag

SEQ ID NO: 517885 - RNA, 19 nt, Artificial Sequence
  Description of Artificial Sequence: Synthetic oligonucleotide
  Sense strand starting at position 1442 of SEQ ID NO: 317859
cccuucgcaugauuaacau

SEQ ID NO: 517886 - RNA, 19 nt, Artificial Sequence
  Description of Artificial Sequence: Synthetic oligonucleotide
  Antisense strand to SEQ ID NO: 517885
auguuaaucaugcgaaggg

SEQ ID NO: 517887 - RNA, 19 nt, Artificial Sequence
  Description of Artificial Sequence: Synthetic oligonucleotide
  Sense strand starting at position 1446 of SEQ ID NO: 317859
ucgcaugauuaacauccaa

SEQ ID NO: 517888 - RNA, 19 nt, Artificial Sequence
  Description of Artificial Sequence: Synthetic oligonucleotide
  Antisense strand to SEQ ID NO: 517887
uuggauguuaaucaugcga

SEQ ID NO: 517889 - RNA, 19 nt, Artificial Sequence
  Description of Artificial Sequence: Synthetic oligonucleotide
  Sense strand starting at position 1598 of SEQ ID NO: 317859
aggguaugguugcccaaau

SEQ ID NO: 517890 - RNA, 19 nt, Artificial Sequence
  Description of Artificial Sequence: Synthetic oligonucleotide
  Antisense strand to SEQ ID NO: 517889
auuugggcaaccauacccu

SEQ ID NO: 517891 - RNA, 19 nt, Artificial Sequence
  Description of Artificial Sequence: Synthetic oligonucleotide
  Sense strand starting at position 1599 of SEQ ID NO: 317859
ggguaugguugcccaaauc

SEQ ID NO: 517892 - RNA, 19 nt, Artificial Sequence
  Description of Artificial Sequence: Synthetic oligonucleotide
  Antisense strand to SEQ ID NO: 517891
gauuugggcaaccauaccc

SEQ ID NO: 517893 - RNA, 19 nt, Artificial Sequence
  Description of Artificial Sequence: Synthetic oligonucleotide
  Sense strand starting at position 1673 of SEQ ID NO: 317859
cggaccaugucuguucaga

SEQ ID NO: 517894 - RNA, 19 nt, Artificial Sequence
  Description of Artificial Sequence: Synthetic oligonucleotide
  Antisense strand to SEQ ID NO: 517893
ucugaacagacaugguccg

SEQ ID NO: 517895 - RNA, 19 nt, Artificial Sequence
  Description of Artificial Sequence: Synthetic oligonucleotide
  Sense strand starting at position 1789 of SEQ ID NO: 317859
gcagaaaggcuucgaagga

SEQ ID NO: 517896 - RNA, 19 nt, Artificial Sequence
  Description of Artificial Sequence: Synthetic oligonucleotide
  Antisense strand to SEQ ID NO: 517895
uccuucgaagccuuucugc

SEQ ID NO: 517897 - RNA, 19 nt, Artificial Sequence
  Description of Artificial Sequence: Synthetic oligonucleotide
  Sense strand starting at position 2031 of SEQ ID NO: 317859
ugacgauuggcuggugacu

SEQ ID NO: 517898 - RNA, 19 nt, Artificial Sequence
  Description of Artificial Sequence: Synthetic oligonucleotide
  Antisense strand to SEQ ID NO: 517897
agucaccagccaaucguca

SEQ ID NO: 517899 - RNA, 19 nt, Artificial Sequence
  Description of Artificial Sequence: Synthetic oligonucleotide
  Sense strand starting at position 2339 of SEQ ID NO: 317859
gggauaauguccucccuac

SEQ ID NO: 517900 - RNA, 19 nt, Artificial Sequence
  Description of Artificial Sequence: Synthetic oligonucleotide
  Antisense strand to SEQ ID NO: 517899
guagggaggacauuauccc

SEQ ID NO: 517901 - RNA, 19 nt, Artificial Sequence
  Description of Artificial Sequence: Synthetic oligonucleotide
  Sense strand starting at position 2811 of SEQ ID NO: 317859
ccgagaucaugccauugau

SEQ ID NO: 517902 - RNA, 19 nt, Artificial Sequence
  Description of Artificial Sequence: Synthetic oligonucleotide
  Antisense strand to SEQ ID NO: 517901
aucaauggcaugaucucgg

SEQ ID NO: 517903 - RNA, 19 nt, Artificial Sequence
  Description of Artificial Sequence: Synthetic oligonucleotide
  Sense strand starting at position 2814 of SEQ ID NO: 317859
agaucaugccauugaucuc

SEQ ID NO: 517904 - RNA, 19 nt, Artificial Sequence
  Description of Artificial Sequence: Synthetic oligonucleotide
  Antisense strand to SEQ ID NO: 517903
gagaucaauggcaugaucu

SEQ ID NO: 517905 - RNA, 19 nt, Artificial Sequence
  Description of Artificial Sequence: Synthetic oligonucleotide
  Sense strand starting at position 2987 of SEQ ID NO: 317859
uggcccaccuguuuauauu

SEQ ID NO: 517906 - RNA, 19 nt, Artificial Sequence
  Description of Artificial Sequence: Synthetic oligonucleotide
  Antisense strand to SEQ ID NO: 517905
aauauaaacaggugggcca

SEQ ID NO: 517907 - RNA, 19 nt, Artificial Sequence
  Description of Artificial Sequence: Synthetic oligonucleotide
  Sense strand starting at position 3193 of SEQ ID NO: 317859
uggcuuacgucugucugua

SEQ ID NO: 517908 - RNA, 19 nt, Artificial Sequence
  Description of Artificial Sequence: Synthetic oligonucleotide
  Antisense strand to SEQ ID NO: 517907
uacagacagacguaagcca

SEQ ID NO: 517909 - RNA, 19 nt, Artificial Sequence
  Description of Artificial Sequence: Synthetic oligonucleotide
  Sense strand starting at position 3194 of SEQ ID NO: 317859
ggcuuacgucugucuguaa

SEQ ID NO: 517910 - RNA, 19 nt, Artificial Sequence
  Description of Artificial Sequence: Synthetic oligonucleotide
  Antisense strand to SEQ ID NO: 517909
uuacagacagacguaagcc

SEQ ID NO: 517911 - RNA, 19 nt, Artificial Sequence
  Description of Artificial Sequence: Synthetic oligonucleotide
  Sense strand starting at position 3195 of SEQ ID NO: 317859
gcuuacgucugucuguaau

SEQ ID NO: 517912 - RNA, 19 nt, Artificial Sequence
  Description of Artificial Sequence: Synthetic oligonucleotide
  Antisense strand to SEQ ID NO: 517911
auuacagacagacguaagc

SEQ ID NO: 517913 - RNA, 19 nt, Artificial Sequence
  Description of Artificial Sequence: Synthetic oligonucleotide
  Sense strand starting at position 3505 of SEQ ID NO: 317859
guugucguuucugucauuu

SEQ ID NO: 517914 - RNA, 19 nt, Artificial Sequence
  Description of Artificial Sequence: Synthetic oligonucleotide
  Antisense strand to SEQ ID NO: 517913
aaaugacagaaacgacaac

SEQ ID NO: 517915 - RNA, 19 nt, Artificial Sequence
  Description of Artificial Sequence: Synthetic oligonucleotide
  Sense strand starting at position 3579 of SEQ ID NO: 317859
acaguuugauacugguaca

SEQ ID NO: 517916 - RNA, 19 nt, Artificial Sequence
  Description of Artificial Sequence: Synthetic oligonucleotide
  Antisense strand to SEQ ID NO: 517915
uguaccaguaucaaacugu

SEQ ID NO: 517917 - RNA, 19 nt, Artificial Sequence
  Description of Artificial Sequence: Synthetic oligonucleotide
  Sense strand starting at position 3582 of SEQ ID NO: 317859
guuugauacugguacauaa

SEQ ID NO: 517918 - RNA, 19 nt, Artificial Sequence
  Description of Artificial Sequence: Synthetic oligonucleotide
  Antisense strand to SEQ ID NO: 517917
uuauguaccaguaucaaac

SEQ ID NO: 517919 - RNA, 19 nt, Artificial Sequence
  Description of Artificial Sequence: Synthetic oligonucleotide
  Sense strand starting at position 3689 of SEQ ID NO: 317859
agcaauaaacuuugucaga

SEQ ID NO: 517920 - RNA, 19 nt, Artificial Sequence
  Description of Artificial Sequence: Synthetic oligonucleotide
  Antisense strand to SEQ ID NO: 517919
ucugacaaaguuuauugcu

SEQ ID NO: 517921 - RNA, 19 nt, Artificial Sequence
  Description of Artificial Sequence: Synthetic oligonucleotide
  Sense strand starting at position 3690 of SEQ ID NO: 317859
gcaauaaacuuugucagac

SEQ ID NO: 517922 - RNA, 19 nt, Artificial Sequence
  Description of Artificial Sequence: Synthetic oligonucleotide
  Antisense strand to SEQ ID NO: 517921
gucugacaaaguuuauugc

SEQ ID NO: 517923 - RNA, 19 nt, Artificial Sequence
  Description of Artificial Sequence: Synthetic oligonucleotide
  Sense strand starting at position 3700 of SEQ ID NO: 317859
uugucagacuauucucaag

SEQ ID NO: 517924 - RNA, 19 nt, Artificial Sequence
  Description of Artificial Sequence: Synthetic oligonucleotide
  Antisense strand to SEQ ID NO: 517923
cuugagaauagucugacaa

SEQ ID NO: 517925 - RNA, 19 nt, Artificial Sequence
  Description of Artificial Sequence: Synthetic oligonucleotide
  Sense strand starting at position 3702 of SEQ ID NO: 317859
gucagacuauucucaagau

SEQ ID NO: 517926 - RNA, 19 nt, Artificial Sequence
  Description of Artificial Sequence: Synthetic oligonucleotide
  Antisense strand to SEQ ID NO: 517925
aucuugagaauagucugac

SEQ ID NO: 517927 - RNA, 19 nt, Artificial Sequence
  Description of Artificial Sequence: Synthetic oligonucleotide
  Sense strand starting at position 3703 of SEQ ID NO: 317859
ucagacuauucucaagaug

SEQ ID NO: 517928 - RNA, 19 nt, Artificial Sequence
  Description of Artificial Sequence: Synthetic oligonucleotide
  Antisense strand to SEQ ID NO: 517927
caucuugagaauagucuga

SEQ ID NO: 517929 - RNA, 19 nt, Artificial Sequence
  Description of Artificial Sequence: Synthetic oligonucleotide
  Sense strand starting at position 428 of SEQ ID NO: 317860
gacauaaaguccuuugcag

SEQ ID NO: 517930 - RNA, 19 nt, Artificial Sequence
  Description of Artificial Sequence: Synthetic oligonucleotide
  Antisense strand to SEQ ID NO: 517929
cugcaaaggacuuuauguc

SEQ ID NO: 517931 - RNA, 19 nt, Artificial Sequence
  Description of Artificial Sequence: Synthetic oligonucleotide
  Sense strand starting at position 430 of SEQ ID NO: 317860
cauaaaguccuuugcagga

SEQ ID NO: 517932 - RNA, 19 nt, Artificial Sequence
  Description of Artificial Sequence: Synthetic oligonucleotide
  Antisense strand to SEQ ID NO: 517931
uccugcaaaggacuuuaug

SEQ ID NO: 517933 - RNA, 19 nt, Artificial Sequence
  Description of Artificial Sequence: Synthetic oligonucleotide
  Sense strand starting at position 636 of SEQ ID NO: 317860
cagggacuaugcuuauuau

SEQ ID NO: 517934 - RNA, 19 nt, Artificial Sequence
  Description of Artificial Sequence: Synthetic oligonucleotide
  Antisense strand to SEQ ID NO: 517933
auaauaagcauagucccug

SEQ ID NO: 517935 - RNA, 19 nt, Artificial Sequence
  Description of Artificial Sequence: Synthetic oligonucleotide
  Sense strand starting at position 637 of SEQ ID NO: 317860
agggacuaugcuuauuauc

SEQ ID NO: 517936 - RNA, 19 nt, Artificial Sequence
  Description of Artificial Sequence: Synthetic oligonucleotide
  Antisense strand to SEQ ID NO: 517935
gauaauaagcauagucccu

SEQ ID NO: 517937 - RNA, 19 nt, Artificial Sequence
  Description of Artificial Sequence: Synthetic oligonucleotide
  Sense strand starting at position 639 of SEQ ID NO: 317860
ggacuaugcuuauuaucug

SEQ ID NO: 517938 - RNA, 19 nt, Artificial Sequence
  Description of Artificial Sequence: Synthetic oligonucleotide
  Antisense strand to SEQ ID NO: 517937
cagauaauaagcauagucc

SEQ ID NO: 517939 - RNA, 19 nt, Artificial Sequence
  Description of Artificial Sequence: Synthetic oligonucleotide
  Sense strand starting at position 1176 of SEQ ID NO: 317860
agagucgauucccuauaca

SEQ ID NO: 517940 - RNA, 19 nt, Artificial Sequence
  Description of Artificial Sequence: Synthetic oligonucleotide
  Antisense strand to SEQ ID NO: 517939
uguauagggaaucgacucu

SEQ ID NO: 517941 - RNA, 19 nt, Artificial Sequence
  Description of Artificial Sequence: Synthetic oligonucleotide
  Sense strand starting at position 1179 of SEQ ID NO: 317860
gucgauucccuauacaaau

SEQ ID NO: 517942 - RNA, 19 nt, Artificial Sequence
  Description of Artificial Sequence: Synthetic oligonucleotide
  Antisense strand to SEQ ID NO: 517941
auuuguauagggaaucgac

SEQ ID NO: 517943 - RNA, 19 nt, Artificial Sequence
  Description of Artificial Sequence: Synthetic oligonucleotide
  Sense strand starting at position 1230 of SEQ ID NO: 317860
auaugaaauugagaaccua

SEQ ID NO: 517944 - RNA, 19 nt, Artificial Sequence
  Description of Artificial Sequence: Synthetic oligonucleotide
  Antisense strand to SEQ ID NO: 517943
uagguucucaauuucauau

SEQ ID NO: 517945 - RNA, 19 nt, Artificial Sequence
  Description of Artificial Sequence: Synthetic oligonucleotide
  Sense strand starting at position 1335 of SEQ ID NO: 317860
aggaacaucuaagcuauua

SEQ ID NO: 517946 - RNA, 19 nt, Artificial Sequence
  Description of Artificial Sequence: Synthetic oligonucleotide
  Antisense strand to SEQ ID NO: 517945
uaauagcuuagauguuccu

SEQ ID NO: 517947 - RNA, 19 nt, Artificial Sequence
  Description of Artificial Sequence: Synthetic oligonucleotide
  Sense strand starting at position 1347 of SEQ ID NO: 317860
gcuauuaaguaaucaagug

SEQ ID NO: 517948 - RNA, 19 nt, Artificial Sequence
  Description of Artificial Sequence: Synthetic oligonucleotide
  Antisense strand to SEQ ID NO: 517947
cacuugauuacuuaauagc

SEQ ID NO: 517949 - RNA, 19 nt, Artificial Sequence
  Description of Artificial Sequence: Synthetic oligonucleotide
  Sense strand starting at position 1753 of SEQ ID NO: 317860
agacauuugugcuuucuua

SEQ ID NO: 517950 - RNA, 19 nt, Artificial Sequence
  Description of Artificial Sequence: Synthetic oligonucleotide
  Antisense strand to SEQ ID NO: 517949
uaagaaagcacaaaugucu

SEQ ID NO: 517951 - RNA, 19 nt, Artificial Sequence
  Description of Artificial Sequence: Synthetic oligonucleotide
  Sense strand starting at position 1882 of SEQ ID NO: 317860
augagagauuacuauacug

SEQ ID NO: 517952 - RNA, 19 nt, Artificial Sequence
  Description of Artificial Sequence: Synthetic oligonucleotide
  Antisense strand to SEQ ID NO: 517951
caguauaguaaucucucau

SEQ ID NO: 517953 - RNA, 19 nt, Artificial Sequence
  Description of Artificial Sequence: Synthetic oligonucleotide
  Sense strand starting at position 2009 of SEQ ID NO: 317860
auguuauuacuaugacauc

SEQ ID NO: 517954 - RNA, 19 nt, Artificial Sequence
  Description of Artificial Sequence: Synthetic oligonucleotide
  Antisense strand to SEQ ID NO: 517953
gaugucauaguaauaacau

SEQ ID NO: 517955 - RNA, 19 nt, Artificial Sequence
  Description of Artificial Sequence: Synthetic oligonucleotide
  Sense strand starting at position 2015 of SEQ ID NO: 317860
uuacuaugacaucaggcuu

SEQ ID NO: 517956 - RNA, 19 nt, Artificial Sequence
  Description of Artificial Sequence: Synthetic oligonucleotide
  Antisense strand to SEQ ID NO: 517955
aagccugaugucauaguaa

SEQ ID NO: 517957 - RNA, 19 nt, Artificial Sequence
  Description of Artificial Sequence: Synthetic oligonucleotide
  Sense strand starting at position 2026 of SEQ ID NO: 317860
ucaggcuuuccagaagauu

SEQ ID NO: 517958 - RNA, 19 nt, Artificial Sequence
  Description of Artificial Sequence: Synthetic oligonucleotide
  Antisense strand to SEQ ID NO: 517957
aaucuucuggaaagccuga

SEQ ID NO: 517959 - RNA, 19 nt, Artificial Sequence
  Description of Artificial Sequence: Synthetic oligonucleotide
  Sense strand starting at position 2177 of SEQ ID NO: 317860
cuaaguuccugugugaaag

SEQ ID NO: 517960 - RNA, 19 nt, Artificial Sequence
  Description of Artificial Sequence: Synthetic oligonucleotide
  Antisense strand to SEQ ID NO: 517959
cuuucacacaggaacuuag

SEQ ID NO: 517961 - RNA, 19 nt, Artificial Sequence
  Description of Artificial Sequence: Synthetic oligonucleotide
  Sense strand starting at position 2380 of SEQ ID NO: 317860
aaaguuggcccuggaauaa

SEQ ID NO: 517962 - RNA, 19 nt, Artificial Sequence
  Description of Artificial Sequence: Synthetic oligonucleotide
  Antisense strand to SEQ ID NO: 517961
uuauuccagggccaacuuu

SEQ ID NO: 517963 - RNA, 19 nt, Artificial Sequence
  Description of Artificial Sequence: Synthetic oligonucleotide
  Sense strand starting at position 2475 of SEQ ID NO: 317860
gggaaagagucucacaaua

SEQ ID NO: 517964 - RNA, 19 nt, Artificial Sequence
  Description of Artificial Sequence: Synthetic oligonucleotide
  Antisense strand to SEQ ID NO: 517963
uauugugagacucuuuccc

SEQ ID NO: 517965 - RNA, 19 nt, Artificial Sequence
  Description of Artificial Sequence: Synthetic oligonucleotide
  Sense strand starting at position 2534 of SEQ ID NO: 317860
uuugaucacagugggaaua

SEQ ID NO: 517966 - RNA, 19 nt, Artificial Sequence
  Description of Artificial Sequence: Synthetic oligonucleotide
  Antisense strand to SEQ ID NO: 517965
uauucccacugugaucaaa

SEQ ID NO: 517967 - RNA, 19 nt, Artificial Sequence
  Description of Artificial Sequence: Synthetic oligonucleotide
  Sense strand starting at position 2536 of SEQ ID NO: 317860
ugaucacagugggaauaaa

SEQ ID NO: 517968 - RNA, 19 nt, Artificial Sequence
  Description of Artificial Sequence: Synthetic oligonucleotide
  Antisense strand to SEQ ID NO: 517967
uuuauucccacugugauca

SEQ ID NO: 517969 - RNA, 19 nt, Artificial Sequence
  Description of Artificial Sequence: Synthetic oligonucleotide
  Sense strand starting at position 2566 of SEQ ID NO: 317860
uuaagagaaguugggugau

SEQ ID NO: 517970 - RNA, 19 nt, Artificial Sequence
  Description of Artificial Sequence: Synthetic oligonucleotide
  Antisense strand to SEQ ID NO: 517969
aucacccaacuucucuuaa

SEQ ID NO: 517971 - RNA, 19 nt, Artificial Sequence
  Description of Artificial Sequence: Synthetic oligonucleotide
  Sense strand starting at position 2713 of SEQ ID NO: 317860
augagauaaugauaccaag

SEQ ID NO: 517972 - RNA, 19 nt, Artificial Sequence
  Description of Artificial Sequence: Synthetic oligonucleotide
  Antisense strand to SEQ ID NO: 517971
cuugguaucauuaucucau

SEQ ID NO: 517973 - RNA, 19 nt, Artificial Sequence
  Description of Artificial Sequence: Synthetic oligonucleotide
  Sense strand starting at position 2716 of SEQ ID NO: 317860
agauaaugauaccaagauu

SEQ ID NO: 517974 - RNA, 19 nt, Artificial Sequence
  Description of Artificial Sequence: Synthetic oligonucleotide
  Antisense strand to SEQ ID NO: 517973
aaucuugguaucauuaucu

SEQ ID NO: 517975 - RNA, 19 nt, Artificial Sequence
  Description of Artificial Sequence: Synthetic oligonucleotide
  Sense strand starting at position 3157 of SEQ ID NO: 317860
uugugaaguagauauaguc

SEQ ID NO: 517976 - RNA, 19 nt, Artificial Sequence
  Description of Artificial Sequence: Synthetic oligonucleotide
  Antisense strand to SEQ ID NO: 517975
gacuauaucuacuucacaa

SEQ ID NO: 517977 - RNA, 19 nt, Artificial Sequence
  Description of Artificial Sequence: Synthetic oligonucleotide
  Sense strand starting at position 3280 of SEQ ID NO: 317860
uccaguaucugaguuccuu

SEQ ID NO: 517978 - RNA, 19 nt, Artificial Sequence
  Description of Artificial Sequence: Synthetic oligonucleotide
  Antisense strand to SEQ ID NO: 517977
aaggaacucagauacugga

SEQ ID NO: 517979 - RNA, 19 nt, Artificial Sequence
  Description of Artificial Sequence: Synthetic oligonucleotide
  Sense strand starting at position 3284 of SEQ ID NO: 317860
guaucugaguuccuuauca

SEQ ID NO: 517980 - RNA, 19 nt, Artificial Sequence
  Description of Artificial Sequence: Synthetic oligonucleotide
  Antisense strand to SEQ ID NO: 517979
ugauaaggaacucagauac

SEQ ID NO: 517981 - RNA, 19 nt, Artificial Sequence
  Description of Artificial Sequence: Synthetic oligonucleotide
  Sense strand starting at position 3286 of SEQ ID NO: 317860
aucugaguuccuuaucacu

SEQ ID NO: 517982 - RNA, 19 nt, Artificial Sequence
  Description of Artificial Sequence: Synthetic oligonucleotide
  Antisense strand to SEQ ID NO: 517981
agugauaaggaacucagau

SEQ ID NO: 517983 - RNA, 19 nt, Artificial Sequence
  Description of Artificial Sequence: Synthetic oligonucleotide
  Sense strand starting at position 3288 of SEQ ID NO: 317860
cugaguuccuuaucacuac

SEQ ID NO: 517984 - RNA, 19 nt, Artificial Sequence
  Description of Artificial Sequence: Synthetic oligonucleotide
  Antisense strand to SEQ ID NO: 517983
guagugauaaggaacucag

SEQ ID NO: 517985 - RNA, 19 nt, Artificial Sequence
  Description of Artificial Sequence: Synthetic oligonucleotide
  Sense strand starting at position 3362 of SEQ ID NO: 317860
auccauuuguguccagagu

SEQ ID NO: 517986 - RNA, 19 nt, Artificial Sequence
  Description of Artificial Sequence: Synthetic oligonucleotide
  Antisense strand to SEQ ID NO: 517985
acucuggacacaaauggau

SEQ ID NO: 517987 - RNA, 19 nt, Artificial Sequence
  Description of Artificial Sequence: Synthetic oligonucleotide
  Sense strand starting at position 3542 of SEQ ID NO: 317860
ggccacuucggagagaagu

SEQ ID NO: 517988 - RNA, 19 nt, Artificial Sequence
  Description of Artificial Sequence: Synthetic oligonucleotide
  Antisense strand to SEQ ID NO: 517987
acuucucuccgaaguggcc

SEQ ID NO: 517989 - RNA, 19 nt, Artificial Sequence
  Description of Artificial Sequence: Synthetic oligonucleotide
  Sense strand starting at position 3552 of SEQ ID NO: 317860
gagagaaguucucucaagu

SEQ ID NO: 517990 - RNA, 19 nt, Artificial Sequence
  Description of Artificial Sequence: Synthetic oligonucleotide
  Antisense strand to SEQ ID NO: 517989
acuugagagaacuucucuc

SEQ ID NO: 517991 - RNA, 19 nt, Artificial Sequence
  Description of Artificial Sequence: Synthetic oligonucleotide
  Sense strand starting at position 3563 of SEQ ID NO: 317860
ucucaagugccaugagaaa

SEQ ID NO: 517992 - RNA, 19 nt, Artificial Sequence
  Description of Artificial Sequence: Synthetic oligonucleotide
  Antisense strand to SEQ ID NO: 517991
uuucucauggcacuugaga

SEQ ID NO: 517993 - RNA, 19 nt, Artificial Sequence
  Description of Artificial Sequence: Synthetic oligonucleotide
  Sense strand starting at position 3638 of SEQ ID NO: 317860
gguagaaaggucuguguau

SEQ ID NO: 517994 - RNA, 19 nt, Artificial Sequence
  Description of Artificial Sequence: Synthetic oligonucleotide
  Antisense strand to SEQ ID NO: 517993
auacacagaccuuucuacc

SEQ ID NO: 517995 - RNA, 19 nt, Artificial Sequence
  Description of Artificial Sequence: Synthetic oligonucleotide
  Sense strand starting at position 3639 of SEQ ID NO: 317860
guagaaaggucuguguaua

SEQ ID NO: 517996 - RNA, 19 nt, Artificial Sequence
  Description of Artificial Sequence: Synthetic oligonucleotide
  Antisense strand to SEQ ID NO: 517995
uauacacagaccuuucuac

SEQ ID NO: 517997 - RNA, 19 nt, Artificial Sequence
  Description of Artificial Sequence: Synthetic oligonucleotide
  Sense strand starting at position 3640 of SEQ ID NO: 317860
uagaaaggucuguguauaa

SEQ ID NO: 517998 - RNA, 19 nt, Artificial Sequence
  Description of Artificial Sequence: Synthetic oligonucleotide
  Antisense strand to SEQ ID NO: 517997
uuauacacagaccuuucua

SEQ ID NO: 517999 - RNA, 19 nt, Artificial Sequence
  Description of Artificial Sequence: Synthetic oligonucleotide
  Sense strand starting at position 3647 of SEQ ID NO: 317860
gucuguguauaaguagaaa

SEQ ID NO: 518000 - RNA, 19 nt, Artificial Sequence
  Description of Artificial Sequence: Synthetic oligonucleotide
  Antisense strand to SEQ ID NO: 517999
uuucuacuuauacacagac

SEQ ID NO: 518001 - RNA, 19 nt, Artificial Sequence
  Description of Artificial Sequence: Synthetic oligonucleotide
  Sense strand starting at position 3833 of SEQ ID NO: 317860
cuggcaauaguuuggagaa

SEQ ID NO: 518002 - RNA, 19 nt, Artificial Sequence
  Description of Artificial Sequence: Synthetic oligonucleotide
  Antisense strand to SEQ ID NO: 518001
uucuccaaacuauugccag

SEQ ID NO: 518003 - RNA, 19 nt, Artificial Sequence
  Description of Artificial Sequence: Synthetic oligonucleotide
  Sense strand starting at position 3847 of SEQ ID NO: 317860
gagaaacagucucauuuga

SEQ ID NO: 518004 - RNA, 19 nt, Artificial Sequence
  Description of Artificial Sequence: Synthetic oligonucleotide
  Antisense strand to SEQ ID NO: 518003
ucaaaugagacuguuucuc

SEQ ID NO: 518005 - RNA, 19 nt, Artificial Sequence
  Description of Artificial Sequence: Synthetic oligonucleotide
  Sense strand starting at position 3932 of SEQ ID NO: 317860
ugggaaucaaaguguuuaa

SEQ ID NO: 518006 - RNA, 19 nt, Artificial Sequence
  Description of Artificial Sequence: Synthetic oligonucleotide
  Antisense strand to SEQ ID NO: 518005
uuaaacacuuugauuccca

SEQ ID NO: 518007 - RNA, 19 nt, Artificial Sequence
  Description of Artificial Sequence: Synthetic oligonucleotide
  Sense strand starting at position 3983 of SEQ ID NO: 317860
auggaugacaucugagugu

SEQ ID NO: 518008 - RNA, 19 nt, Artificial Sequence
  Description of Artificial Sequence: Synthetic oligonucleotide
  Antisense strand to SEQ ID NO: 518007
acacucagaugucauccau

SEQ ID NO: 518009 - RNA, 19 nt, Artificial Sequence
  Description of Artificial Sequence: Synthetic oligonucleotide
  Sense strand starting at position 6 of SEQ ID NO: 317861
ucucuuguuccaggcagaa

SEQ ID NO: 518010 - RNA, 19 nt, Artificial Sequence
  Description of Artificial Sequence: Synthetic oligonucleotide
  Antisense strand to SEQ ID NO: 518009
uucugccuggaacaagaga

SEQ ID NO: 518011 - RNA, 19 nt, Artificial Sequence
  Description of Artificial Sequence: Synthetic oligonucleotide
  Sense strand starting at position 55 of SEQ ID NO: 317861
cuugccugaacccgugaaa

SEQ ID NO: 518012 - RNA, 19 nt, Artificial Sequence
  Description of Artificial Sequence: Synthetic oligonucleotide
  Antisense strand to SEQ ID NO: 518011
uuucacggguucaggcaag

SEQ ID NO: 518013 - RNA, 19 nt, Artificial Sequence
  Description of Artificial Sequence: Synthetic oligonucleotide
  Sense strand starting at position 81 of SEQ ID NO: 317861
cuaucaugucacggccaga

SEQ ID NO: 518014 - RNA, 19 nt, Artificial Sequence
  Description of Artificial Sequence: Synthetic oligonucleotide
  Antisense strand to SEQ ID NO: 518013
ucuggccgugacaugauag

SEQ ID NO: 518015 - RNA, 19 nt, Artificial Sequence
  Description of Artificial Sequence: Synthetic oligonucleotide
  Sense strand starting at position 96 of SEQ ID NO: 317861
cagauagacuguugggaga

SEQ ID NO: 518016 - RNA, 19 nt, Artificial Sequence
  Description of Artificial Sequence: Synthetic oligonucleotide
  Antisense strand to SEQ ID NO: 518015
ucucccaacagucuaucug

SEQ ID NO: 518017 - RNA, 19 nt, Artificial Sequence
  Description of Artificial Sequence: Synthetic oligonucleotide
  Sense strand starting at position 245 of SEQ ID NO: 317861
uggguguuggguggugaau

SEQ ID NO: 518018 - RNA, 19 nt, Artificial Sequence
  Description of Artificial Sequence: Synthetic oligonucleotide
  Antisense strand to SEQ ID NO: 518017
auucaccacccaacaccca

SEQ ID NO: 518019 - RNA, 19 nt, Artificial Sequence
  Description of Artificial Sequence: Synthetic oligonucleotide
  Sense strand starting at position 376 of SEQ ID NO: 317861
acaaguugcagaugaugaa

SEQ ID NO: 518020 - RNA, 19 nt, Artificial Sequence
  Description of Artificial Sequence: Synthetic oligonucleotide
  Antisense strand to SEQ ID NO: 518019
uucaucaucugcaacuugu

SEQ ID NO: 518021 - RNA, 19 nt, Artificial Sequence
  Description of Artificial Sequence: Synthetic oligonucleotide
  Sense strand starting at position 483 of SEQ ID NO: 317861
auuuguacccagugucuau

SEQ ID NO: 518022 - RNA, 19 nt, Artificial Sequence
  Description of Artificial Sequence: Synthetic oligonucleotide
  Antisense strand to SEQ ID NO: 518021
auagacacuggguacaaau

SEQ ID NO: 518023 - RNA, 19 nt, Artificial Sequence
  Description of Artificial Sequence: Synthetic oligonucleotide
  Sense strand starting at position 507 of SEQ ID NO: 317861
auggcacuuuccuccugaa

SEQ ID NO: 518024 - RNA, 19 nt, Artificial Sequence
  Description of Artificial Sequence: Synthetic oligonucleotide
  Antisense strand to SEQ ID NO: 518023
uucaggaggaaagugccau

SEQ ID NO: 518025 - RNA, 19 nt, Artificial Sequence
  Description of Artificial Sequence: Synthetic oligonucleotide
  Sense strand starting at position 876 of SEQ ID NO: 317861
ucaagagagcccugggaau

SEQ ID NO: 518026 - RNA, 19 nt, Artificial Sequence
  Description of Artificial Sequence: Synthetic oligonucleotide
  Antisense strand to SEQ ID NO: 518025
auucccagggcucucuuga

SEQ ID NO: 518027 - RNA, 19 nt, Artificial Sequence
  Description of Artificial Sequence: Synthetic oligonucleotide
  Sense strand starting at position 985 of SEQ ID NO: 317861
acguaaugcccuuagccau

SEQ ID NO: 518028 - RNA, 19 nt, Artificial Sequence
  Description of Artificial Sequence: Synthetic oligonucleotide
  Antisense strand to SEQ ID NO: 518027
auggcuaagggcauuacgu

SEQ ID NO: 518029 - RNA, 19 nt, Artificial Sequence
  Description of Artificial Sequence: Synthetic oligonucleotide
  Sense strand starting at position 1066 of SEQ ID NO: 317861
gaagccagaucccuugaga

SEQ ID NO: 518030 - RNA, 19 nt, Artificial Sequence
  Description of Artificial Sequence: Synthetic oligonucleotide
  Antisense strand to SEQ ID NO: 518029
ucucaagggaucuggcuuc

SEQ ID NO: 518031 - RNA, 19 nt, Artificial Sequence
  Description of Artificial Sequence: Synthetic oligonucleotide
  Sense strand starting at position 1069 of SEQ ID NO: 317861
gccagaucccuugagauau

SEQ ID NO: 518032 - RNA, 19 nt, Artificial Sequence
  Description of Artificial Sequence: Synthetic oligonucleotide
  Antisense strand to SEQ ID NO: 518031
auaucucaagggaucuggc

SEQ ID NO: 518033 - RNA, 19 nt, Artificial Sequence
  Description of Artificial Sequence: Synthetic oligonucleotide
  Sense strand starting at position 1198 of SEQ ID NO: 317861
gcugcuucuccuuggcaga

SEQ ID NO: 518034 - RNA, 19 nt, Artificial Sequence
  Description of Artificial Sequence: Synthetic oligonucleotide
  Antisense strand to SEQ ID NO: 518033
ucugccaaggagaagcagc

SEQ ID NO: 518035 - RNA, 19 nt, Artificial Sequence
  Description of Artificial Sequence: Synthetic oligonucleotide
  Sense strand starting at position 1215 of SEQ ID NO: 317861
gacucuuugcgcgcugaga

SEQ ID NO: 518036 - RNA, 19 nt, Artificial Sequence
  Description of Artificial Sequence: Synthetic oligonucleotide
  Antisense strand to SEQ ID NO: 518035
ucucagcgcgcaaagaguc

SEQ ID NO: 518037 - RNA, 19 nt, Artificial Sequence
  Description of Artificial Sequence: Synthetic oligonucleotide
  Sense strand starting at position 1216 of SEQ ID NO: 317861
acucuuugcgcgcugagaa

SEQ ID NO: 518038 - RNA, 19 nt, Artificial Sequence
  Description of Artificial Sequence: Synthetic oligonucleotide
  Antisense strand to SEQ ID NO: 518037
uucucagcgcgcaaagagu

SEQ ID NO: 518039 - RNA, 19 nt, Artificial Sequence
  Description of Artificial Sequence: Synthetic oligonucleotide
  Sense strand starting at position 1324 of SEQ ID NO: 317861
ucagccuucucuuuaaggu

SEQ ID NO: 518040 - RNA, 19 nt, Artificial Sequence
  Description of Artificial Sequence: Synthetic oligonucleotide
  Antisense strand to SEQ ID NO: 518039
accuuaaagagaaggcuga

SEQ ID NO: 518041 - RNA, 19 nt, Artificial Sequence
  Description of Artificial Sequence: Synthetic oligonucleotide
  Sense strand starting at position 1385 of SEQ ID NO: 317861
gcgggaugucguccucauc

SEQ ID NO: 518042 - RNA, 19 nt, Artificial Sequence
  Description of Artificial Sequence: Synthetic oligonucleotide
  Antisense strand to SEQ ID NO: 518041
gaugaggacgacaucccgc

SEQ ID NO: 518043 - RNA, 19 nt, Artificial Sequence
  Description of Artificial Sequence: Synthetic oligonucleotide
  Sense strand starting at position 2033 of SEQ ID NO: 317861
gacccaauccgaugugaag

SEQ ID NO: 518044 - RNA, 19 nt, Artificial Sequence
  Description of Artificial Sequence: Synthetic oligonucleotide
  Antisense strand to SEQ ID NO: 518043
cuucacaucggauuggguc

SEQ ID NO: 518045 - RNA, 19 nt, Artificial Sequence
  Description of Artificial Sequence: Synthetic oligonucleotide
  Sense strand starting at position 2105 of SEQ ID NO: 317861
acaaauuuguuccggagau

SEQ ID NO: 518046 - RNA, 19 nt, Artificial Sequence
  Description of Artificial Sequence: Synthetic oligonucleotide
  Antisense strand to SEQ ID NO: 518045
aucuccggaacaaauuugu

SEQ ID NO: 518047 - RNA, 19 nt, Artificial Sequence
  Description of Artificial Sequence: Synthetic oligonucleotide
  Sense strand starting at position 2106 of SEQ ID NO: 317861
caaauuuguuccggagaua

SEQ ID NO: 518048 - RNA, 19 nt, Artificial Sequence
  Description of Artificial Sequence: Synthetic oligonucleotide
  Antisense strand to SEQ ID NO: 518047
uaucuccggaacaaauuug

SEQ ID NO: 518049 - RNA, 19 nt, Artificial Sequence
  Description of Artificial Sequence: Synthetic oligonucleotide
  Sense strand starting at position 2146 of SEQ ID NO: 317861
acgcuuucaugggugguua

SEQ ID NO: 518050 - RNA, 19 nt, Artificial Sequence
  Description of Artificial Sequence: Synthetic oligonucleotide
  Antisense strand to SEQ ID NO: 518049
uaaccacccaugaaagcgu

SEQ ID NO: 518051 - RNA, 19 nt, Artificial Sequence
  Description of Artificial Sequence: Synthetic oligonucleotide
  Sense strand starting at position 2156 of SEQ ID NO: 317861
gggugguuacgcgacaguu

SEQ ID NO: 518052 - RNA, 19 nt, Artificial Sequence
  Description of Artificial Sequence: Synthetic oligonucleotide
  Antisense strand to SEQ ID NO: 518051
aacugucgcguaaccaccc

SEQ ID NO: 518053 - RNA, 19 nt, Artificial Sequence
  Description of Artificial Sequence: Synthetic oligonucleotide
  Sense strand starting at position 2201 of SEQ ID NO: 317861
caaggcauugugggacauu

SEQ ID NO: 518054 - RNA, 19 nt, Artificial Sequence
  Description of Artificial Sequence: Synthetic oligonucleotide
  Antisense strand to SEQ ID NO: 518053
aaugucccacaaugccuug

SEQ ID NO: 518055 - RNA, 19 nt, Artificial Sequence
  Description of Artificial Sequence: Synthetic oligonucleotide
  Sense strand starting at position 2226 of SEQ ID NO: 317861
cuuggaauaugcgcuagaa

SEQ ID NO: 518056 - RNA, 19 nt, Artificial Sequence
  Description of Artificial Sequence: Synthetic oligonucleotide
  Antisense strand to SEQ ID NO: 518055
uucuagcgcauauuccaag

SEQ ID NO: 518057 - RNA, 19 nt, Artificial Sequence
  Description of Artificial Sequence: Synthetic oligonucleotide
  Sense strand starting at position 2459 of SEQ ID NO: 317861
ggauaaaccgcucgacaca

SEQ ID NO: 518058 - RNA, 19 nt, Artificial Sequence
  Description of Artificial Sequence: Synthetic oligonucleotide
  Antisense strand to SEQ ID NO: 518057
ugugucgagcgguuuaucc

SEQ ID NO: 518059 - RNA, 19 nt, Artificial Sequence
  Description of Artificial Sequence: Synthetic oligonucleotide
  Sense strand starting at position 2577 of SEQ ID NO: 317861
aauguaaacgguuauuacu

SEQ ID NO: 518060 - RNA, 19 nt, Artificial Sequence
  Description of Artificial Sequence: Synthetic oligonucleotide
  Antisense strand to SEQ ID NO: 518059
aguaauaaccguuuacauu

SEQ ID NO: 518061 - RNA, 19 nt, Artificial Sequence
  Description of Artificial Sequence: Synthetic oligonucleotide
  Sense strand starting at position 2594 of SEQ ID NO: 317861
cuguaaaugcucuaacaga

SEQ ID NO: 518062 - RNA, 19 nt, Artificial Sequence
  Description of Artificial Sequence: Synthetic oligonucleotide
  Antisense strand to SEQ ID NO: 518061
ucuguuagagcauuuacag

SEQ ID NO: 518063 - RNA, 19 nt, Artificial Sequence
  Description of Artificial Sequence: Synthetic oligonucleotide
  Sense strand starting at position 2692 of SEQ ID NO: 317861
ggaauacaggucuggcgau

SEQ ID NO: 518064 - RNA, 19 nt, Artificial Sequence
  Description of Artificial Sequence: Synthetic oligonucleotide
  Antisense strand to SEQ ID NO: 518063
aucgccagaccuguauucc

SEQ ID NO: 518065 - RNA, 19 nt, Artificial Sequence
  Description of Artificial Sequence: Synthetic oligonucleotide
  Sense strand starting at position 2788 of SEQ ID NO: 317861
ggagauugcgaccagagca

SEQ ID NO: 518066 - RNA, 19 nt, Artificial Sequence
  Description of Artificial Sequence: Synthetic oligonucleotide
  Antisense strand to SEQ ID NO: 518065
ugcucuggucgcaaucucc

SEQ ID NO: 518067 - RNA, 19 nt, Artificial Sequence
  Description of Artificial Sequence: Synthetic oligonucleotide
  Sense strand starting at position 2808 of SEQ ID NO: 317861
gccugcugugacugucaga

SEQ ID NO: 518068 - RNA, 19 nt, Artificial Sequence
  Description of Artificial Sequence: Synthetic oligonucleotide
  Antisense strand to SEQ ID NO: 518067
ucugacagucacagcaggc

SEQ ID NO: 518069 - RNA, 19 nt, Artificial Sequence
  Description of Artificial Sequence: Synthetic oligonucleotide
  Sense strand starting at position 2845 of SEQ ID NO: 317861
auuagagacuucuaaggaa

SEQ ID NO: 518070 - RNA, 19 nt, Artificial Sequence
  Description of Artificial Sequence: Synthetic oligonucleotide
  Antisense strand to SEQ ID NO: 518069
uuccuuagaagucucuaau

SEQ ID NO: 518071 - RNA, 19 nt, Artificial Sequence
  Description of Artificial Sequence: Synthetic oligonucleotide
  Sense strand starting at position 2848 of SEQ ID NO: 317861
agagacuucuaaggaauga

SEQ ID NO: 518072 - RNA, 19 nt, Artificial Sequence
  Description of Artificial Sequence: Synthetic oligonucleotide
  Antisense strand to SEQ ID NO: 518071
ucauuccuuagaagucucu

SEQ ID NO: 518073 - RNA, 19 nt, Artificial Sequence
  Description of Artificial Sequence: Synthetic oligonucleotide
  Sense strand starting at position 2861 of SEQ ID NO: 317861
gaaugacuuggucagcucu

SEQ ID NO: 518074 - RNA, 19 nt, Artificial Sequence
  Description of Artificial Sequence: Synthetic oligonucleotide
  Antisense strand to SEQ ID NO: 518073
agagcugaccaagucauuc

SEQ ID NO: 518075 - RNA, 19 nt, Artificial Sequence
  Description of Artificial Sequence: Synthetic oligonucleotide
  Sense strand starting at position 2921 of SEQ ID NO: 317861
ugcgcucaagcagaugaua

SEQ ID NO: 518076 - RNA, 19 nt, Artificial Sequence
  Description of Artificial Sequence: Synthetic oligonucleotide
  Antisense strand to SEQ ID NO: 518075
uaucaucugcuugagcgca

SEQ ID NO: 518077 - RNA, 19 nt, Artificial Sequence
  Description of Artificial Sequence: Synthetic oligonucleotide
  Sense strand starting at position 2962 of SEQ ID NO: 317861
cgaggagcuuauguagauu

SEQ ID NO: 518078 - RNA, 19 nt, Artificial Sequence
  Description of Artificial Sequence: Synthetic oligonucleotide
  Antisense strand to SEQ ID NO: 518077
aaucuacauaagcuccucg

SEQ ID NO: 518079 - RNA, 19 nt, Artificial Sequence
  Description of Artificial Sequence: Synthetic oligonucleotide
  Sense strand starting at position 2968 of SEQ ID NO: 317861
gcuuauguagauugagacu

SEQ ID NO: 518080 - RNA, 19 nt, Artificial Sequence
  Description of Artificial Sequence: Synthetic oligonucleotide
  Antisense strand to SEQ ID NO: 518079
agucucaaucuacauaagc

SEQ ID NO: 518081 - RNA, 19 nt, Artificial Sequence
  Description of Artificial Sequence: Synthetic oligonucleotide
  Sense strand starting at position 2971 of SEQ ID NO: 317861
uauguagauugagacuaga

SEQ ID NO: 518082 - RNA, 19 nt, Artificial Sequence
  Description of Artificial Sequence: Synthetic oligonucleotide
  Antisense strand to SEQ ID NO: 518081
ucuagucucaaucuacaua

SEQ ID NO: 518083 - RNA, 19 nt, Artificial Sequence
  Description of Artificial Sequence: Synthetic oligonucleotide
  Sense strand starting at position 3000 of SEQ ID NO: 317861
gauaacuggucuuaaagag

SEQ ID NO: 518084 - RNA, 19 nt, Artificial Sequence
  Description of Artificial Sequence: Synthetic oligonucleotide
  Antisense strand to SEQ ID NO: 518083
cucuuuaagaccaguuauc

SEQ ID NO: 518085 - RNA, 19 nt, Artificial Sequence
  Description of Artificial Sequence: Synthetic oligonucleotide
  Sense strand starting at position 3015 of SEQ ID NO: 317861
agagaaagauccuaagaca

SEQ ID NO: 518086 - RNA, 19 nt, Artificial Sequence
  Description of Artificial Sequence: Synthetic oligonucleotide
  Antisense strand to SEQ ID NO: 518085
ugucuuaggaucuuucucu

SEQ ID NO: 518087 - RNA, 19 nt, Artificial Sequence
  Description of Artificial Sequence: Synthetic oligonucleotide
  Sense strand starting at position 3114 of SEQ ID NO: 317861
ugaagucuucuuuaguaaa

SEQ ID NO: 518088 - RNA, 19 nt, Artificial Sequence
  Description of Artificial Sequence: Synthetic oligonucleotide
  Antisense strand to SEQ ID NO: 518087
uuuacuaaagaagacuuca

SEQ ID NO: 518089 - RNA, 19 nt, Artificial Sequence
  Description of Artificial Sequence: Synthetic oligonucleotide
  Sense strand starting at position 109 of SEQ ID NO: 317862
cuaggagauucuuaaagac

SEQ ID NO: 518090 - RNA, 19 nt, Artificial Sequence
  Description of Artificial Sequence: Synthetic oligonucleotide
  Antisense strand to SEQ ID NO: 518089
gucuuuaagaaucuccuag

SEQ ID NO: 518091 - RNA, 19 nt, Artificial Sequence
  Description of Artificial Sequence: Synthetic oligonucleotide
  Sense strand starting at position 118 of SEQ ID NO: 317862
ucuuaaagacuguagucuu

SEQ ID NO: 518092 - RNA, 19 nt, Artificial Sequence
  Description of Artificial Sequence: Synthetic oligonucleotide
  Antisense strand to SEQ ID NO: 518091
aagacuacagucuuuaaga

SEQ ID NO: 518093 - RNA, 19 nt, Artificial Sequence
  Description of Artificial Sequence: Synthetic oligonucleotide
  Sense strand starting at position 182 of SEQ ID NO: 317862
ggagaauucugauucuauu

SEQ ID NO: 518094 - RNA, 19 nt, Artificial Sequence
  Description of Artificial Sequence: Synthetic oligonucleotide
  Antisense strand to SEQ ID NO: 518093
aauagaaucagaauucucc

SEQ ID NO: 518095 - RNA, 19 nt, Artificial Sequence
  Description of Artificial Sequence: Synthetic oligonucleotide
  Sense strand starting at position 510 of SEQ ID NO: 317862
ggccuugaaggcugucaua

SEQ ID NO: 518096 - RNA, 19 nt, Artificial Sequence
  Description of Artificial Sequence: Synthetic oligonucleotide
  Antisense strand to SEQ ID NO: 518095
uaugacagccuucaaggcc

SEQ ID NO: 518097 - RNA, 19 nt, Artificial Sequence
  Description of Artificial Sequence: Synthetic oligonucleotide
  Sense strand starting at position 625 of SEQ ID NO: 317862
uguaguguaagggaucuaa

SEQ ID NO: 518098 - RNA, 19 nt, Artificial Sequence
  Description of Artificial Sequence: Synthetic oligonucleotide
  Antisense strand to SEQ ID NO: 518097
uuagaucccuuacacuaca

SEQ ID NO: 518099 - RNA, 19 nt, Artificial Sequence
  Description of Artificial Sequence: Synthetic oligonucleotide
  Sense strand starting at position 698 of SEQ ID NO: 317862
gauguaguagucuggacaa

SEQ ID NO: 518100 - RNA, 19 nt, Artificial Sequence
  Description of Artificial Sequence: Synthetic oligonucleotide
  Antisense strand to SEQ ID NO: 518099
uuguccagacuacuacauc

SEQ ID NO: 518101 - RNA, 19 nt, Artificial Sequence
  Description of Artificial Sequence: Synthetic oligonucleotide
  Sense strand starting at position 700 of SEQ ID NO: 317862
uguaguagucuggacaaua

SEQ ID NO: 518102 - RNA, 19 nt, Artificial Sequence
  Description of Artificial Sequence: Synthetic oligonucleotide
  Antisense strand to SEQ ID NO: 518101
uauuguccagacuacuaca

SEQ ID NO: 518103 - RNA, 19 nt, Artificial Sequence
  Description of Artificial Sequence: Synthetic oligonucleotide
  Sense strand starting at position 921 of SEQ ID NO: 317862
ugaugauuacacgguuuau

SEQ ID NO: 518104 - RNA, 19 nt, Artificial Sequence
  Description of Artificial Sequence: Synthetic oligonucleotide
  Antisense strand to SEQ ID NO: 518103
auaaaccguguaaucauca

SEQ ID NO: 518105 - RNA, 19 nt, Artificial Sequence
  Description of Artificial Sequence: Synthetic oligonucleotide
  Sense strand starting at position 925 of SEQ ID NO: 317862
gauuacacgguuuauauau

SEQ ID NO: 518106 - RNA, 19 nt, Artificial Sequence
  Description of Artificial Sequence: Synthetic oligonucleotide
  Antisense strand to SEQ ID NO: 518105
auauauaaaccguguaauc

SEQ ID NO: 518107 - RNA, 19 nt, Artificial Sequence
  Description of Artificial Sequence: Synthetic oligonucleotide
  Sense strand starting at position 932 of SEQ ID NO: 317862
cgguuuauauauuugcuaa

SEQ ID NO: 518108 - RNA, 19 nt, Artificial Sequence
  Description of Artificial Sequence: Synthetic oligonucleotide
  Antisense strand to SEQ ID NO: 518107
uuagcaaauauauaaaccg

SEQ ID NO: 518109 - RNA, 19 nt, Artificial Sequence
  Description of Artificial Sequence: Synthetic oligonucleotide
  Sense strand starting at position 978 of SEQ ID NO: 317862
uguccauuucccugauugu

SEQ ID NO: 518110 - RNA, 19 nt, Artificial Sequence
  Description of Artificial Sequence: Synthetic oligonucleotide
  Antisense strand to SEQ ID NO: 518109
acaaucagggaaauggaca

SEQ ID NO: 518111 - RNA, 19 nt, Artificial Sequence
  Description of Artificial Sequence: Synthetic oligonucleotide
  Sense strand starting at position 994 of SEQ ID NO: 317862
uguuaauuguaccucaaca

SEQ ID NO: 518112 - RNA, 19 nt, Artificial Sequence
  Description of Artificial Sequence: Synthetic oligonucleotide
  Antisense strand to SEQ ID NO: 518111
uguugagguacaauuaaca

SEQ ID NO: 518113 - RNA, 19 nt, Artificial Sequence
  Description of Artificial Sequence: Synthetic oligonucleotide
  Sense strand starting at position 1160 of SEQ ID NO: 317862
gagaucuaaugaguucuaa

SEQ ID NO: 518114 - RNA, 19 nt, Artificial Sequence
  Description of Artificial Sequence: Synthetic oligonucleotide
  Antisense strand to SEQ ID NO: 518113
uuagaacucauuagaucuc

SEQ ID NO: 518115 - RNA, 19 nt, Artificial Sequence
  Description of Artificial Sequence: Synthetic oligonucleotide
  Sense strand starting at position 1175 of SEQ ID NO: 317862
cuaauaagagcucauaguc

SEQ ID NO: 518116 - RNA, 19 nt, Artificial Sequence
  Description of Artificial Sequence: Synthetic oligonucleotide
  Antisense strand to SEQ ID NO: 518115
gacuaugagcucuuauuag

SEQ ID NO: 518117 - RNA, 19 nt, Artificial Sequence
  Description of Artificial Sequence: Synthetic oligonucleotide
  Sense strand starting at position 1245 of SEQ ID NO: 317862
cgaaaucuauuugcgaagu

SEQ ID NO: 518118 - RNA, 19 nt, Artificial Sequence
  Description of Artificial Sequence: Synthetic oligonucleotide
  Antisense strand to SEQ ID NO: 518117
acuucgcaaauagauuucg

SEQ ID NO: 518119 - RNA, 19 nt, Artificial Sequence
  Description of Artificial Sequence: Synthetic oligonucleotide
  Sense strand starting at position 1284 of SEQ ID NO: 317862
uuuauuguagcccaguaaa

SEQ ID NO: 518120 - RNA, 19 nt, Artificial Sequence
  Description of Artificial Sequence: Synthetic oligonucleotide
  Antisense strand to SEQ ID NO: 518119
uuuacugggcuacaauaaa

SEQ ID NO: 518121 - RNA, 19 nt, Artificial Sequence
  Description of Artificial Sequence: Synthetic oligonucleotide
  Sense strand starting at position 1302 of SEQ ID NO: 317862
aagccuagucguguauagu

SEQ ID NO: 518122 - RNA, 19 nt, Artificial Sequence
  Description of Artificial Sequence: Synthetic oligonucleotide
  Antisense strand to SEQ ID NO: 518121
acuauacacgacuaggcuu

SEQ ID NO: 518123 - RNA, 19 nt, Artificial Sequence
  Description of Artificial Sequence: Synthetic oligonucleotide
  Sense strand starting at position 1312 of SEQ ID NO: 317862
guguauagugcugucgaug

SEQ ID NO: 518124 - RNA, 19 nt, Artificial Sequence
  Description of Artificial Sequence: Synthetic oligonucleotide
  Antisense strand to SEQ ID NO: 518123
caucgacagcacuauacac

SEQ ID NO: 518125 - RNA, 19 nt, Artificial Sequence
  Description of Artificial Sequence: Synthetic oligonucleotide
  Sense strand starting at position 1318 of SEQ ID NO: 317862
agugcugucgaugcgguaa

SEQ ID NO: 518126 - RNA, 19 nt, Artificial Sequence
  Description of Artificial Sequence: Synthetic oligonucleotide
  Antisense strand to SEQ ID NO: 518125
uuaccgcaucgacagcacu

SEQ ID NO: 518127 - RNA, 19 nt, Artificial Sequence
  Description of Artificial Sequence: Synthetic oligonucleotide
  Sense strand starting at position 1464 of SEQ ID NO: 317862
gaucacuucugacugaagu

SEQ ID NO: 518128 - RNA, 19 nt, Artificial Sequence
  Description of Artificial Sequence: Synthetic oligonucleotide
  Antisense strand to SEQ ID NO: 518127
acuucagucagaagugauc

SEQ ID NO: 518129 - RNA, 19 nt, Artificial Sequence
  Description of Artificial Sequence: Synthetic oligonucleotide
  Sense strand starting at position 1465 of SEQ ID NO: 317862
aucacuucugacugaagua

SEQ ID NO: 518130 - RNA, 19 nt, Artificial Sequence
  Description of Artificial Sequence: Synthetic oligonucleotide
  Antisense strand to SEQ ID NO: 518129
uacuucagucagaagugau

SEQ ID NO: 518131 - RNA, 19 nt, Artificial Sequence
  Description of Artificial Sequence: Synthetic oligonucleotide
  Sense strand starting at position 2114 of SEQ ID NO: 317862
ggcugauuagugcgaugga

SEQ ID NO: 518132 - RNA, 19 nt, Artificial Sequence
  Description of Artificial Sequence: Synthetic oligonucleotide
  Antisense strand to SEQ ID NO: 518131
uccaucgcacuaaucagcc

SEQ ID NO: 518133 - RNA, 19 nt, Artificial Sequence
  Description of Artificial Sequence: Synthetic oligonucleotide
  Sense strand starting at position 2212 of SEQ ID NO: 317862
gccuuaauuugcgcuaaau

SEQ ID NO: 518134 - RNA, 19 nt, Artificial Sequence
  Description of Artificial Sequence: Synthetic oligonucleotide
  Antisense strand to SEQ ID NO: 518133
auuuagcgcaaauuaaggc

SEQ ID NO: 518135 - RNA, 19 nt, Artificial Sequence
  Description of Artificial Sequence: Synthetic oligonucleotide
  Sense strand starting at position 2246 of SEQ ID NO: 317862
uccguacacgcucuuuauu

SEQ ID NO: 518136 - RNA, 19 nt, Artificial Sequence
  Description of Artificial Sequence: Synthetic oligonucleotide
  Antisense strand to SEQ ID NO: 518135
aauaaagagcguguacgga

SEQ ID NO: 518137 - RNA, 19 nt, Artificial Sequence
  Description of Artificial Sequence: Synthetic oligonucleotide
  Sense strand starting at position 2332 of SEQ ID NO: 317862
acagucuauccgggaaaca

SEQ ID NO: 518138 - RNA, 19 nt, Artificial Sequence
  Description of Artificial Sequence: Synthetic oligonucleotide
  Antisense strand to SEQ ID NO: 518137
uguuucccggauagacugu

SEQ ID NO: 518139 - RNA, 19 nt, Artificial Sequence
  Description of Artificial Sequence: Synthetic oligonucleotide
  Sense strand starting at position 2561 of SEQ ID NO: 317862
acacguuucccuuggaagu

SEQ ID NO: 518140 - RNA, 19 nt, Artificial Sequence
  Description of Artificial Sequence: Synthetic oligonucleotide
  Antisense strand to SEQ ID NO: 518139
acuuccaagggaaacgugu

SEQ ID NO: 518141 - RNA, 19 nt, Artificial Sequence
  Description of Artificial Sequence: Synthetic oligonucleotide
  Sense strand starting at position 2579 of SEQ ID NO: 317862
ugaacucugaggugagauu

SEQ ID NO: 518142 - RNA, 19 nt, Artificial Sequence
  Description of Artificial Sequence: Synthetic oligonucleotide
  Antisense strand to SEQ ID NO: 518141
aaucucaccucagaguuca

SEQ ID NO: 518143 - RNA, 19 nt, Artificial Sequence
  Description of Artificial Sequence: Synthetic oligonucleotide
  Sense strand starting at position 3091 of SEQ ID NO: 317862
cuucuugugcacugggaau

SEQ ID NO: 518144 - RNA, 19 nt, Artificial Sequence
  Description of Artificial Sequence: Synthetic oligonucleotide
  Antisense strand to SEQ ID NO: 518143
auucccagugcacaagaag

SEQ ID NO: 518145 - RNA, 19 nt, Artificial Sequence
  Description of Artificial Sequence: Synthetic oligonucleotide
  Sense strand starting at position 3140 of SEQ ID NO: 317862
agucaagauugagaacauu

SEQ ID NO: 518146 - RNA, 19 nt, Artificial Sequence
  Description of Artificial Sequence: Synthetic oligonucleotide
  Antisense strand to SEQ ID NO: 518145
aauguucucaaucuugacu

SEQ ID NO: 518147 - RNA, 19 nt, Artificial Sequence
  Description of Artificial Sequence: Synthetic oligonucleotide
  Sense strand starting at position 3148 of SEQ ID NO: 317862
uugagaacauuauucgaga

SEQ ID NO: 518148 - RNA, 19 nt, Artificial Sequence
  Description of Artificial Sequence: Synthetic oligonucleotide
  Antisense strand to SEQ ID NO: 518147
ucucgaauaauguucucaa

SEQ ID NO: 518149 - RNA, 19 nt, Artificial Sequence
  Description of Artificial Sequence: Synthetic oligonucleotide
  Sense strand starting at position 3153 of SEQ ID NO: 317862
aacauuauucgagaguuug

SEQ ID NO: 518150 - RNA, 19 nt, Artificial Sequence
  Description of Artificial Sequence: Synthetic oligonucleotide
  Antisense strand to SEQ ID NO: 518149
caaacucucgaauaauguu

SEQ ID NO: 518151 - RNA, 19 nt, Artificial Sequence
  Description of Artificial Sequence: Synthetic oligonucleotide
  Sense strand starting at position 3161 of SEQ ID NO: 317862
ucgagaguuugggcaccaa

SEQ ID NO: 518152 - RNA, 19 nt, Artificial Sequence
  Description of Artificial Sequence: Synthetic oligonucleotide
  Antisense strand to SEQ ID NO: 518151
uuggugcccaaacucucga

SEQ ID NO: 518153 - RNA, 19 nt, Artificial Sequence
  Description of Artificial Sequence: Synthetic oligonucleotide
  Sense strand starting at position 3186 of SEQ ID NO: 317862
guauauguauugucucaug

SEQ ID NO: 518154 - RNA, 19 nt, Artificial Sequence
  Description of Artificial Sequence: Synthetic oligonucleotide
  Antisense strand to SEQ ID NO: 518153
caugagacaauacauauac

SEQ ID NO: 518155 - RNA, 19 nt, Artificial Sequence
  Description of Artificial Sequence: Synthetic oligonucleotide
  Sense strand starting at position 3637 of SEQ ID NO: 317862
aaaguucugugucuugauu

SEQ ID NO: 518156 - RNA, 19 nt, Artificial Sequence
  Description of Artificial Sequence: Synthetic oligonucleotide
  Antisense strand to SEQ ID NO: 518155
aaucaagacacagaacuuu

SEQ ID NO: 518157 - RNA, 19 nt, Artificial Sequence
  Description of Artificial Sequence: Synthetic oligonucleotide
  Sense strand starting at position 3655 of SEQ ID NO: 317862
uuuaguggucauugaauag

SEQ ID NO: 518158 - RNA, 19 nt, Artificial Sequence
  Description of Artificial Sequence: Synthetic oligonucleotide
  Antisense strand to SEQ ID NO: 518157
cuauucaaugaccacuaaa

SEQ ID NO: 518159 - RNA, 19 nt, Artificial Sequence
  Description of Artificial Sequence: Synthetic oligonucleotide
  Sense strand starting at position 3717 of SEQ ID NO: 317862
guacaugacuuauuguaug

SEQ ID NO: 518160 - RNA, 19 nt, Artificial Sequence
  Description of Artificial Sequence: Synthetic oligonucleotide
  Antisense strand to SEQ ID NO: 518159
cauacaauaagucauguac

SEQ ID NO: 518161 - RNA, 19 nt, Artificial Sequence
  Description of Artificial Sequence: Synthetic oligonucleotide
  Sense strand starting at position 3906 of SEQ ID NO: 317862
guaagaaggccugagcuaa

SEQ ID NO: 518162 - RNA, 19 nt, Artificial Sequence
  Description of Artificial Sequence: Synthetic oligonucleotide
  Antisense strand to SEQ ID NO: 518161
uuagcucaggccuucuuac

SEQ ID NO: 518163 - RNA, 19 nt, Artificial Sequence
  Description of Artificial Sequence: Synthetic oligonucleotide
  Sense strand starting at position 3967 of SEQ ID NO: 317862
cccuguaaauuguuuggau

SEQ ID NO: 518164 - RNA, 19 nt, Artificial Sequence
  Description of Artificial Sequence: Synthetic oligonucleotide
  Antisense strand to SEQ ID NO: 518163
auccaaacaauuuacaggg

SEQ ID NO: 518165 - RNA, 19 nt, Artificial Sequence
  Description of Artificial Sequence: Synthetic oligonucleotide
  Sense strand starting at position 3968 of SEQ ID NO: 317862
ccuguaaauuguuuggaug

SEQ ID NO: 518166 - RNA, 19 nt, Artificial Sequence
  Description of Artificial Sequence: Synthetic oligonucleotide
  Antisense strand to SEQ ID NO: 518165
cauccaaacaauuuacagg

SEQ ID NO: 518167 - RNA, 19 nt, Artificial Sequence
  Description of Artificial Sequence: Synthetic oligonucleotide
  Sense strand starting at position 3969 of SEQ ID NO: 317862
cuguaaauuguuuggaugu

SEQ ID NO: 518168 - RNA, 19 nt, Artificial Sequence
  Description of Artificial Sequence: Synthetic oligonucleotide
  Antisense strand to SEQ ID NO: 518167
acauccaaacaauuuacag

SEQ ID NO: 518169 - RNA, 19 nt, Artificial Sequence
  Description of Artificial Sequence: Synthetic oligonucleotide
  Sense strand starting at position 37 of SEQ ID NO: 317863
gugucuauacuguauagag

SEQ ID NO: 518170 - RNA, 19 nt, Artificial Sequence
  Description of Artificial Sequence: Synthetic oligonucleotide
  Antisense strand to SEQ ID NO: 518169
cucuauacaguauagacac

SEQ ID NO: 518171 - RNA, 19 nt, Artificial Sequence
  Description of Artificial Sequence: Synthetic oligonucleotide
  Sense strand starting at position 49 of SEQ ID NO: 317863
uauagaguguucgcaaaga

SEQ ID NO: 518172 - RNA, 19 nt, Artificial Sequence
  Description of Artificial Sequence: Synthetic oligonucleotide
  Antisense strand to SEQ ID NO: 518171
ucuuugcgaacacucuaua

SEQ ID NO: 518173 - RNA, 19 nt, Artificial Sequence
  Description of Artificial Sequence: Synthetic oligonucleotide
  Sense strand starting at position 54 of SEQ ID NO: 317863
aguguucgcaaagaugagu

SEQ ID NO: 518174 - RNA, 19 nt, Artificial Sequence
  Description of Artificial Sequence: Synthetic oligonucleotide
  Antisense strand to SEQ ID NO: 518173
acucaucuuugcgaacacu

SEQ ID NO: 518175 - RNA, 19 nt, Artificial Sequence
  Description of Artificial Sequence: Synthetic oligonucleotide
  Sense strand starting at position 65 of SEQ ID NO: 317863
agaugagugcaaugauucu

SEQ ID NO: 518176 - RNA, 19 nt, Artificial Sequence
  Description of Artificial Sequence: Synthetic oligonucleotide
  Antisense strand to SEQ ID NO: 518175
agaaucauugcacucaucu

SEQ ID NO: 518177 - RNA, 19 nt, Artificial Sequence
  Description of Artificial Sequence: Synthetic oligonucleotide
  Sense strand starting at position 148 of SEQ ID NO: 317863
uuucuagaaucuggauuua

SEQ ID NO: 518178 - RNA, 19 nt, Artificial Sequence
  Description of Artificial Sequence: Synthetic oligonucleotide
  Antisense strand to SEQ ID NO: 518177
uaaauccagauucuagaaa

SEQ ID NO: 518179 - RNA, 19 nt, Artificial Sequence
  Description of Artificial Sequence: Synthetic oligonucleotide
  Sense strand starting at position 178 of SEQ ID NO: 317863
ugcuuugaccaaugagauu

SEQ ID NO: 518180 - RNA, 19 nt, Artificial Sequence
  Description of Artificial Sequence: Synthetic oligonucleotide
  Antisense strand to SEQ ID NO: 518179
aaucucauuggucaaagca

SEQ ID NO: 518181 - RNA, 19 nt, Artificial Sequence
  Description of Artificial Sequence: Synthetic oligonucleotide
  Sense strand starting at position 259 of SEQ ID NO: 317863
ugaagaugccuccgauaac

SEQ ID NO: 518182 - RNA, 19 nt, Artificial Sequence
  Description of Artificial Sequence: Synthetic oligonucleotide
  Antisense strand to SEQ ID NO: 518181
guuaucggaggcaucuuca

SEQ ID NO: 518183 - RNA, 19 nt, Artificial Sequence
  Description of Artificial Sequence: Synthetic oligonucleotide
  Sense strand starting at position 280 of SEQ ID NO: 317863
guuagagauaucuggccca

SEQ ID NO: 518184 - RNA, 19 nt, Artificial Sequence
  Description of Artificial Sequence: Synthetic oligonucleotide
  Antisense strand to SEQ ID NO: 518183
ugggccagauaucucuaac

SEQ ID NO: 518185 - RNA, 19 nt, Artificial Sequence
  Description of Artificial Sequence: Synthetic oligonucleotide
  Sense strand starting at position 283 of SEQ ID NO: 317863
agagauaucuggcccaggu

SEQ ID NO: 518186 - RNA, 19 nt, Artificial Sequence
  Description of Artificial Sequence: Synthetic oligonucleotide
  Antisense strand to SEQ ID NO: 518185
accugggccagauaucucu

SEQ ID NO: 518187 - RNA, 19 nt, Artificial Sequence
  Description of Artificial Sequence: Synthetic oligonucleotide
  Sense strand starting at position 285 of SEQ ID NO: 317863
agauaucuggcccagguaa

SEQ ID NO: 518188 - RNA, 19 nt, Artificial Sequence
  Description of Artificial Sequence: Synthetic oligonucleotide
  Antisense strand to SEQ ID NO: 518187
uuaccugggccagauaucu

SEQ ID NO: 518189 - RNA, 19 nt, Artificial Sequence
  Description of Artificial Sequence: Synthetic oligonucleotide
  Sense strand starting at position 401 of SEQ ID NO: 317863
acaugagucuagcccagau

SEQ ID NO: 518190 - RNA, 19 nt, Artificial Sequence
  Description of Artificial Sequence: Synthetic oligonucleotide
  Antisense strand to SEQ ID NO: 518189
aucugggcuagacucaugu

SEQ ID NO: 518191 - RNA, 19 nt, Artificial Sequence
  Description of Artificial Sequence: Synthetic oligonucleotide
  Sense strand starting at position 403 of SEQ ID NO: 317863
augagucuagcccagauua

SEQ ID NO: 518192 - RNA, 19 nt, Artificial Sequence
  Description of Artificial Sequence: Synthetic oligonucleotide
  Antisense strand to SEQ ID NO: 518191
uaaucugggcuagacucau

SEQ ID NO: 518193 - RNA, 19 nt, Artificial Sequence
  Description of Artificial Sequence: Synthetic oligonucleotide
  Sense strand starting at position 405 of SEQ ID NO: 317863
gagucuagcccagauuacu

SEQ ID NO: 518194 - RNA, 19 nt, Artificial Sequence
  Description of Artificial Sequence: Synthetic oligonucleotide
  Antisense strand to SEQ ID NO: 518193
aguaaucugggcuagacuc

SEQ ID NO: 518195 - RNA, 19 nt, Artificial Sequence
  Description of Artificial Sequence: Synthetic oligonucleotide
  Sense strand starting at position 830 of SEQ ID NO: 317863
agcgaucuaugagccaaau

SEQ ID NO: 518196 - RNA, 19 nt, Artificial Sequence
  Description of Artificial Sequence: Synthetic oligonucleotide
  Antisense strand to SEQ ID NO: 518195
auuuggcucauagaucgcu

SEQ ID NO: 518197 - RNA, 19 nt, Artificial Sequence
  Description of Artificial Sequence: Synthetic oligonucleotide
  Sense strand starting at position 916 of SEQ ID NO: 317863
gcuugacuuacugguauag

SEQ ID NO: 518198 - RNA, 19 nt, Artificial Sequence
  Description of Artificial Sequence: Synthetic oligonucleotide
  Antisense strand to SEQ ID NO: 518197
cuauaccaguaagucaagc

SEQ ID NO: 518199 - RNA, 19 nt, Artificial Sequence
  Description of Artificial Sequence: Synthetic oligonucleotide
  Sense strand starting at position 996 of SEQ ID NO: 317863
ucaccucuuccaugagucu

SEQ ID NO: 518200 - RNA, 19 nt, Artificial Sequence
  Description of Artificial Sequence: Synthetic oligonucleotide
  Antisense strand to SEQ ID NO: 518199
agacucauggaagagguga

SEQ ID NO: 518201 - RNA, 19 nt, Artificial Sequence
  Description of Artificial Sequence: Synthetic oligonucleotide
  Sense strand starting at position 1002 of SEQ ID NO: 317863
cuuccaugagucuagcuga

SEQ ID NO: 518202 - RNA, 19 nt, Artificial Sequence
  Description of Artificial Sequence: Synthetic oligonucleotide
  Antisense strand to SEQ ID NO: 518201
ucagcuagacucauggaag

SEQ ID NO: 518203 - RNA, 19 nt, Artificial Sequence
  Description of Artificial Sequence: Synthetic oligonucleotide
  Sense strand starting at position 1010 of SEQ ID NO: 317863
agucuagcugaguaagagu

SEQ ID NO: 518204 - RNA, 19 nt, Artificial Sequence
  Description of Artificial Sequence: Synthetic oligonucleotide
  Antisense strand to SEQ ID NO: 518203
acucuuacucagcuagacu

SEQ ID NO: 518205 - RNA, 19 nt, Artificial Sequence
  Description of Artificial Sequence: Synthetic oligonucleotide
  Sense strand starting at position 1018 of SEQ ID NO: 317863
ugaguaagaguuuggaugu

SEQ ID NO: 518206 - RNA, 19 nt, Artificial Sequence
  Description of Artificial Sequence: Synthetic oligonucleotide
  Antisense strand to SEQ ID NO: 518205
acauccaaacucuuacuca

SEQ ID NO: 518207 - RNA, 19 nt, Artificial Sequence
  Description of Artificial Sequence: Synthetic oligonucleotide
  Sense strand starting at position 1028 of SEQ ID NO: 317863
uuuggauguuaguucccau

SEQ ID NO: 518208 - RNA, 19 nt, Artificial Sequence
  Description of Artificial Sequence: Synthetic oligonucleotide
  Antisense strand to SEQ ID NO: 518207
augggaacuaacauccaaa

SEQ ID NO: 518209 - RNA, 19 nt, Artificial Sequence
  Description of Artificial Sequence: Synthetic oligonucleotide
  Sense strand starting at position 1031 of SEQ ID NO: 317863
ggauguuaguucccaucuu

SEQ ID NO: 518210 - RNA, 19 nt, Artificial Sequence
  Description of Artificial Sequence: Synthetic oligonucleotide
  Antisense strand to SEQ ID NO: 518209
aagaugggaacuaacaucc

SEQ ID NO: 518211 - RNA, 19 nt, Artificial Sequence
  Description of Artificial Sequence: Synthetic oligonucleotide
  Sense strand starting at position 1063 of SEQ ID NO: 317863
auuauaaugcauggaacua

SEQ ID NO: 518212 - RNA, 19 nt, Artificial Sequence
  Description of Artificial Sequence: Synthetic oligonucleotide
  Antisense strand to SEQ ID NO: 518211
uaguuccaugcauuauaau

SEQ ID NO: 518213 - RNA, 19 nt, Artificial Sequence
  Description of Artificial Sequence: Synthetic oligonucleotide
  Sense strand starting at position 1079 of SEQ ID NO: 317863
cuaugagaguaauucccau

SEQ ID NO: 518214 - RNA, 19 nt, Artificial Sequence
  Description of Artificial Sequence: Synthetic oligonucleotide
  Antisense strand to SEQ ID NO: 518213
augggaauuacucucauag

SEQ ID NO: 518215 - RNA, 19 nt, Artificial Sequence
  Description of Artificial Sequence: Synthetic oligonucleotide
  Sense strand starting at position 1097 of SEQ ID NO: 317863
uguuaaauguggccagaga

SEQ ID NO: 518216 - RNA, 19 nt, Artificial Sequence
  Description of Artificial Sequence: Synthetic oligonucleotide
  Antisense strand to SEQ ID NO: 518215
ucucuggccacauuuaaca

SEQ ID NO: 518217 - RNA, 19 nt, Artificial Sequence
  Description of Artificial Sequence: Synthetic oligonucleotide
  Sense strand starting at position 1098 of SEQ ID NO: 317863
guuaaauguggccagagag

SEQ ID NO: 518218 - RNA, 19 nt, Artificial Sequence
  Description of Artificial Sequence: Synthetic oligonucleotide
  Antisense strand to SEQ ID NO: 518217
cucucuggccacauuuaac

SEQ ID NO: 518219 - RNA, 19 nt, Artificial Sequence
  Description of Artificial Sequence: Synthetic oligonucleotide
  Sense strand starting at position 2289 of SEQ ID NO: 317863
gggucaauaauagguguua

SEQ ID NO: 518220 - RNA, 19 nt, Artificial Sequence
  Description of Artificial Sequence: Synthetic oligonucleotide
  Antisense strand to SEQ ID NO: 518219
uaacaccuauuauugaccc

SEQ ID NO: 518221 - RNA, 19 nt, Artificial Sequence
  Description of Artificial Sequence: Synthetic oligonucleotide
  Sense strand starting at position 2290 of SEQ ID NO: 317863
ggucaauaauagguguuau

SEQ ID NO: 518222 - RNA, 19 nt, Artificial Sequence
  Description of Artificial Sequence: Synthetic oligonucleotide
  Antisense strand to SEQ ID NO: 518221
auaacaccuauuauugacc

SEQ ID NO: 518223 - RNA, 19 nt, Artificial Sequence
  Description of Artificial Sequence: Synthetic oligonucleotide
  Sense strand starting at position 2491 of SEQ ID NO: 317863
guguguuaagggcaauaaa

SEQ ID NO: 518224 - RNA, 19 nt, Artificial Sequence
  Description of Artificial Sequence: Synthetic oligonucleotide
  Antisense strand to SEQ ID NO: 518223
uuuauugcccuuaacacac

SEQ ID NO: 518225 - RNA, 19 nt, Artificial Sequence
  Description of Artificial Sequence: Synthetic oligonucleotide
  Sense strand starting at position 2540 of SEQ ID NO: 317863
guuuguucucaugauaguc

SEQ ID NO: 518226 - RNA, 19 nt, Artificial Sequence
  Description of Artificial Sequence: Synthetic oligonucleotide
  Antisense strand to SEQ ID NO: 518225
gacuaucaugagaacaaac

SEQ ID NO: 518227 - RNA, 19 nt, Artificial Sequence
  Description of Artificial Sequence: Synthetic oligonucleotide
  Sense strand starting at position 2587 of SEQ ID NO: 317863
uuguauugggcugauacuu

SEQ ID NO: 518228 - RNA, 19 nt, Artificial Sequence
  Description of Artificial Sequence: Synthetic oligonucleotide
  Antisense strand to SEQ ID NO: 518227
aaguaucagcccaauacaa

SEQ ID NO: 518229 - RNA, 19 nt, Artificial Sequence
  Description of Artificial Sequence: Synthetic oligonucleotide
  Sense strand starting at position 2670 of SEQ ID NO: 317863
gcuaguccgauuugcaauc

SEQ ID NO: 518230 - RNA, 19 nt, Artificial Sequence
  Description of Artificial Sequence: Synthetic oligonucleotide
  Antisense strand to SEQ ID NO: 518229
gauugcaaaucggacuagc

SEQ ID NO: 518231 - RNA, 19 nt, Artificial Sequence
  Description of Artificial Sequence: Synthetic oligonucleotide
  Sense strand starting at position 2749 of SEQ ID NO: 317863
uggucaucucgguaaguac

SEQ ID NO: 518232 - RNA, 19 nt, Artificial Sequence
  Description of Artificial Sequence: Synthetic oligonucleotide
  Antisense strand to SEQ ID NO: 518231
guacuuaccgagaugacca

SEQ ID NO: 518233 - RNA, 19 nt, Artificial Sequence
  Description of Artificial Sequence: Synthetic oligonucleotide
  Sense strand starting at position 2814 of SEQ ID NO: 317863
gccuaauugguauauugau

SEQ ID NO: 518234 - RNA, 19 nt, Artificial Sequence
  Description of Artificial Sequence: Synthetic oligonucleotide
  Antisense strand to SEQ ID NO: 518233
aucaauauaccaauuaggc

SEQ ID NO: 518235 - RNA, 19 nt, Artificial Sequence
  Description of Artificial Sequence: Synthetic oligonucleotide
  Sense strand starting at position 2968 of SEQ ID NO: 317863
ucaccaaaggcuuggaauu

SEQ ID NO: 518236 - RNA, 19 nt, Artificial Sequence
  Description of Artificial Sequence: Synthetic oligonucleotide
  Antisense strand to SEQ ID NO: 518235
aauuccaagccuuugguga

SEQ ID NO: 518237 - RNA, 19 nt, Artificial Sequence
  Description of Artificial Sequence: Synthetic oligonucleotide
  Sense strand starting at position 3074 of SEQ ID NO: 317863
ucuagugacucccuagaaa

SEQ ID NO: 518238 - RNA, 19 nt, Artificial Sequence
  Description of Artificial Sequence: Synthetic oligonucleotide
  Antisense strand to SEQ ID NO: 518237
uuucuagggagucacuaga

SEQ ID NO: 518239 - RNA, 19 nt, Artificial Sequence
  Description of Artificial Sequence: Synthetic oligonucleotide
  Sense strand starting at position 3105 of SEQ ID NO: 317863
uugugagcuguggaaguua

SEQ ID NO: 518240 - RNA, 19 nt, Artificial Sequence
  Description of Artificial Sequence: Synthetic oligonucleotide
  Antisense strand to SEQ ID NO: 518239
uaacuuccacagcucacaa

SEQ ID NO: 518241 - RNA, 19 nt, Artificial Sequence
  Description of Artificial Sequence: Synthetic oligonucleotide
  Sense strand starting at position 3116 of SEQ ID NO: 317863
ggaaguuaacucgagucac

SEQ ID NO: 518242 - RNA, 19 nt, Artificial Sequence
  Description of Artificial Sequence: Synthetic oligonucleotide
  Antisense strand to SEQ ID NO: 518241
gugacucgaguuaacuucc

SEQ ID NO: 518243 - RNA, 19 nt, Artificial Sequence
  Description of Artificial Sequence: Synthetic oligonucleotide
  Sense strand starting at position 3186 of SEQ ID NO: 317863
guauguuacaggcagugaa

SEQ ID NO: 518244 - RNA, 19 nt, Artificial Sequence
  Description of Artificial Sequence: Synthetic oligonucleotide
  Antisense strand to SEQ ID NO: 518243
uucacugccuguaacauac

SEQ ID NO: 518245 - RNA, 19 nt, Artificial Sequence
  Description of Artificial Sequence: Synthetic oligonucleotide
  Sense strand starting at position 3196 of SEQ ID NO: 317863
ggcagugaauuccuacaga

SEQ ID NO: 518246 - RNA, 19 nt, Artificial Sequence
  Description of Artificial Sequence: Synthetic oligonucleotide
  Antisense strand to SEQ ID NO: 518245
ucuguaggaauucacugcc

SEQ ID NO: 518247 - RNA, 19 nt, Artificial Sequence
  Description of Artificial Sequence: Synthetic oligonucleotide
  Sense strand starting at position 3471 of SEQ ID NO: 317863
ccugauucuucccuuagag

SEQ ID NO: 518248 - RNA, 19 nt, Artificial Sequence
  Description of Artificial Sequence: Synthetic oligonucleotide
  Antisense strand to SEQ ID NO: 518247
cucuaagggaagaaucagg

SEQ ID NO: 518249 - RNA, 19 nt, Artificial Sequence
  Description of Artificial Sequence: Synthetic oligonucleotide
  Sense strand starting at position 1 of SEQ ID NO: 317864
auuuguguacuuuguagau

SEQ ID NO: 518250 - RNA, 19 nt, Artificial Sequence
  Description of Artificial Sequence: Synthetic oligonucleotide
  Antisense strand to SEQ ID NO: 518249
aucuacaaaguacacaaau

SEQ ID NO: 518251 - RNA, 19 nt, Artificial Sequence
  Description of Artificial Sequence: Synthetic oligonucleotide
  Sense strand starting at position 5 of SEQ ID NO: 317864
guguacuuuguagauugau

SEQ ID NO: 518252 - RNA, 19 nt, Artificial Sequence
  Description of Artificial Sequence: Synthetic oligonucleotide
  Antisense strand to SEQ ID NO: 518251
aucaaucuacaaaguacac

SEQ ID NO: 518253 - RNA, 19 nt, Artificial Sequence
  Description of Artificial Sequence: Synthetic oligonucleotide
  Sense strand starting at position 177 of SEQ ID NO: 317864
uugagagucagcuaucuga

SEQ ID NO: 518254 - RNA, 19 nt, Artificial Sequence
  Description of Artificial Sequence: Synthetic oligonucleotide
  Antisense strand to SEQ ID NO: 518253
ucagauagcugacucucaa

SEQ ID NO: 518255 - RNA, 19 nt, Artificial Sequence
  Description of Artificial Sequence: Synthetic oligonucleotide
  Sense strand starting at position 275 of SEQ ID NO: 317864
ugucaucaucucuaccagu

SEQ ID NO: 518256 - RNA, 19 nt, Artificial Sequence
  Description of Artificial Sequence: Synthetic oligonucleotide
  Antisense strand to SEQ ID NO: 518255
acugguagagaugaugaca

SEQ ID NO: 518257 - RNA, 19 nt, Artificial Sequence
  Description of Artificial Sequence: Synthetic oligonucleotide
  Sense strand starting at position 286 of SEQ ID NO: 317864
cuaccagugaccuaagugu

SEQ ID NO: 518258 - RNA, 19 nt, Artificial Sequence
  Description of Artificial Sequence: Synthetic oligonucleotide
  Antisense strand to SEQ ID NO: 518257
acacuuaggucacugguag

SEQ ID NO: 518259 - RNA, 19 nt, Artificial Sequence
  Description of Artificial Sequence: Synthetic oligonucleotide
  Sense strand starting at position 510 of SEQ ID NO: 317864
gccugaaauuauccuagau

SEQ ID NO: 518260 - RNA, 19 nt, Artificial Sequence
  Description of Artificial Sequence: Synthetic oligonucleotide
  Antisense strand to SEQ ID NO: 518259
aucuaggauaauuucaggc

SEQ ID NO: 518261 - RNA, 19 nt, Artificial Sequence
  Description of Artificial Sequence: Synthetic oligonucleotide
  Sense strand starting at position 661 of SEQ ID NO: 317864
agggucauguaaccuuaaa

SEQ ID NO: 518262 - RNA, 19 nt, Artificial Sequence
  Description of Artificial Sequence: Synthetic oligonucleotide
  Antisense strand to SEQ ID NO: 518261
uuuaagguuacaugacccu

SEQ ID NO: 518263 - RNA, 19 nt, Artificial Sequence
  Description of Artificial Sequence: Synthetic oligonucleotide
  Sense strand starting at position 827 of SEQ ID NO: 317864
uuugcucgugcguugacau

SEQ ID NO: 518264 - RNA, 19 nt, Artificial Sequence
  Description of Artificial Sequence: Synthetic oligonucleotide
  Antisense strand to SEQ ID NO: 518263
augucaacgcacgagcaaa

SEQ ID NO: 518265 - RNA, 19 nt, Artificial Sequence
  Description of Artificial Sequence: Synthetic oligonucleotide
  Sense strand starting at position 915 of SEQ ID NO: 317864
acagauccauaauaagaga

SEQ ID NO: 518266 - RNA, 19 nt, Artificial Sequence
  Description of Artificial Sequence: Synthetic oligonucleotide
  Antisense strand to SEQ ID NO: 518265
ucucuuauuauggaucugu

SEQ ID NO: 518267 - RNA, 19 nt, Artificial Sequence
  Description of Artificial Sequence: Synthetic oligonucleotide
  Sense strand starting at position 1087 of SEQ ID NO: 317864
gagaaacagcguuacucga

SEQ ID NO: 518268 - RNA, 19 nt, Artificial Sequence
  Description of Artificial Sequence: Synthetic oligonucleotide
  Antisense strand to SEQ ID NO: 518267
ucgaguaacgcuguuucuc

SEQ ID NO: 518269 - RNA, 19 nt, Artificial Sequence
  Description of Artificial Sequence: Synthetic oligonucleotide
  Sense strand starting at position 1238 of SEQ ID NO: 317864
gcagaauccgggcagaaau

SEQ ID NO: 518270 - RNA, 19 nt, Artificial Sequence
  Description of Artificial Sequence: Synthetic oligonucleotide
  Antisense strand to SEQ ID NO: 518269
auuucugcccggauucugc

SEQ ID NO: 518271 - RNA, 19 nt, Artificial Sequence
  Description of Artificial Sequence: Synthetic oligonucleotide
  Sense strand starting at position 2316 of SEQ ID NO: 317864
cuugguggucgaagaguuu

SEQ ID NO: 518272 - RNA, 19 nt, Artificial Sequence
  Description of Artificial Sequence: Synthetic oligonucleotide
  Antisense strand to SEQ ID NO: 518271
aaacucuucgaccaccaag

SEQ ID NO: 518273 - RNA, 19 nt, Artificial Sequence
  Description of Artificial Sequence: Synthetic oligonucleotide
  Sense strand starting at position 2355 of SEQ ID NO: 317864
gcuggauugggugacuaga

SEQ ID NO: 518274 - RNA, 19 nt, Artificial Sequence
  Description of Artificial Sequence: Synthetic oligonucleotide
  Antisense strand to SEQ ID NO: 518273
ucuagucacccaauccagc

SEQ ID NO: 518275 - RNA, 19 nt, Artificial Sequence
  Description of Artificial Sequence: Synthetic oligonucleotide
  Sense strand starting at position 2419 of SEQ ID NO: 317864
ggcucaauauuugaaauca

SEQ ID NO: 518276 - RNA, 19 nt, Artificial Sequence
  Description of Artificial Sequence: Synthetic oligonucleotide
  Antisense strand to SEQ ID NO: 518275
ugauuucaaauauugagcc

SEQ ID NO: 518277 - RNA, 19 nt, Artificial Sequence
  Description of Artificial Sequence: Synthetic oligonucleotide
  Sense strand starting at position 2429 of SEQ ID NO: 317864
uugaaaucacuacgguuaa

SEQ ID NO: 518278 - RNA, 19 nt, Artificial Sequence
  Description of Artificial Sequence: Synthetic oligonucleotide
  Antisense strand to SEQ ID NO: 518277
uuaaccguagugauuucaa

SEQ ID NO: 518279 - RNA, 19 nt, Artificial Sequence
  Description of Artificial Sequence: Synthetic oligonucleotide
  Sense strand starting at position 2510 of SEQ ID NO: 317864
aauacaguuuggguggaua

SEQ ID NO: 518280 - RNA, 19 nt, Artificial Sequence
  Description of Artificial Sequence: Synthetic oligonucleotide
  Antisense strand to SEQ ID NO: 518279
uauccacccaaacuguauu

SEQ ID NO: 518281 - RNA, 19 nt, Artificial Sequence
  Description of Artificial Sequence: Synthetic oligonucleotide
  Sense strand starting at position 2512 of SEQ ID NO: 317864
uacaguuuggguggauaaa

SEQ ID NO: 518282 - RNA, 19 nt, Artificial Sequence
  Description of Artificial Sequence: Synthetic oligonucleotide
  Antisense strand to SEQ ID NO: 518281
uuuauccacccaaacugua

SEQ ID NO: 518283 - RNA, 19 nt, Artificial Sequence
  Description of Artificial Sequence: Synthetic oligonucleotide
  Sense strand starting at position 2523 of SEQ ID NO: 317864
uggauaaaguuucuuagga

SEQ ID NO: 518284 - RNA, 19 nt, Artificial Sequence
  Description of Artificial Sequence: Synthetic oligonucleotide
  Antisense strand to SEQ ID NO: 518283
uccuaagaaacuuuaucca

SEQ ID NO: 518285 - RNA, 19 nt, Artificial Sequence
  Description of Artificial Sequence: Synthetic oligonucleotide
  Sense strand starting at position 2530 of SEQ ID NO: 317864
aguuucuuaggaugguaua

SEQ ID NO: 518286 - RNA, 19 nt, Artificial Sequence
  Description of Artificial Sequence: Synthetic oligonucleotide
  Antisense strand to SEQ ID NO: 518285
uauaccauccuaagaaacu

SEQ ID NO: 518287 - RNA, 19 nt, Artificial Sequence
  Description of Artificial Sequence: Synthetic oligonucleotide
  Sense strand starting at position 2541 of SEQ ID NO: 317864
augguauagaugugacuaa

SEQ ID NO: 518288 - RNA, 19 nt, Artificial Sequence
  Description of Artificial Sequence: Synthetic oligonucleotide
  Antisense strand to SEQ ID NO: 518287
uuagucacaucuauaccau

SEQ ID NO: 518289 - RNA, 19 nt, Artificial Sequence
  Description of Artificial Sequence: Synthetic oligonucleotide
  Sense strand starting at position 2665 of SEQ ID NO: 317864
gggucaccugcacaguauu

SEQ ID NO: 518290 - RNA, 19 nt, Artificial Sequence
  Description of Artificial Sequence: Synthetic oligonucleotide
  Antisense strand to SEQ ID NO: 518289
aauacugugcaggugaccc

SEQ ID NO: 518291 - RNA, 19 nt, Artificial Sequence
  Description of Artificial Sequence: Synthetic oligonucleotide
  Sense strand starting at position 2686 of SEQ ID NO: 317864
ucagauugaggcuguggaa

SEQ ID NO: 518292 - RNA, 19 nt, Artificial Sequence
  Description of Artificial Sequence: Synthetic oligonucleotide
  Antisense strand to SEQ ID NO: 518291
uuccacagccucaaucuga

SEQ ID NO: 518293 - RNA, 19 nt, Artificial Sequence
  Description of Artificial Sequence: Synthetic oligonucleotide
  Sense strand starting at position 2778 of SEQ ID NO: 317864
guuccuuucguauauauuu

SEQ ID NO: 518294 - RNA, 19 nt, Artificial Sequence
  Description of Artificial Sequence: Synthetic oligonucleotide
  Antisense strand to SEQ ID NO: 518293
aaauauauacgaaaggaac

SEQ ID NO: 518295 - RNA, 19 nt, Artificial Sequence
  Description of Artificial Sequence: Synthetic oligonucleotide
  Sense strand starting at position 2786 of SEQ ID NO: 317864
cguauauauuucucccuua

SEQ ID NO: 518296 - RNA, 19 nt, Artificial Sequence
  Description of Artificial Sequence: Synthetic oligonucleotide
  Antisense strand to SEQ ID NO: 518295
uaagggagaaauauauacg

SEQ ID NO: 518297 - RNA, 19 nt, Artificial Sequence
  Description of Artificial Sequence: Synthetic oligonucleotide
  Sense strand starting at position 2894 of SEQ ID NO: 317864
uggugaaggacuuauguau

SEQ ID NO: 518298 - RNA, 19 nt, Artificial Sequence
  Description of Artificial Sequence: Synthetic oligonucleotide
  Antisense strand to SEQ ID NO: 518297
auacauaaguccuucacca

SEQ ID NO: 518299 - RNA, 19 nt, Artificial Sequence
  Description of Artificial Sequence: Synthetic oligonucleotide
  Sense strand starting at position 2952 of SEQ ID NO: 317864
uugucacaucuuuagugau

SEQ ID NO: 518300 - RNA, 19 nt, Artificial Sequence
  Description of Artificial Sequence: Synthetic oligonucleotide
  Antisense strand to SEQ ID NO: 518299
aucacuaaagaugugacaa

SEQ ID NO: 518301 - RNA, 19 nt, Artificial Sequence
  Description of Artificial Sequence: Synthetic oligonucleotide
  Sense strand starting at position 2954 of SEQ ID NO: 317864
gucacaucuuuagugauga

SEQ ID NO: 518302 - RNA, 19 nt, Artificial Sequence
  Description of Artificial Sequence: Synthetic oligonucleotide
  Antisense strand to SEQ ID NO: 518301
ucaucacuaaagaugugac

SEQ ID NO: 518303 - RNA, 19 nt, Artificial Sequence
  Description of Artificial Sequence: Synthetic oligonucleotide
  Sense strand starting at position 2998 of SEQ ID NO: 317864
cuuaaauugcagugaacau

SEQ ID NO: 518304 - RNA, 19 nt, Artificial Sequence
  Description of Artificial Sequence: Synthetic oligonucleotide
  Antisense strand to SEQ ID NO: 518303
auguucacugcaauuuaag

SEQ ID NO: 518305 - RNA, 19 nt, Artificial Sequence
  Description of Artificial Sequence: Synthetic oligonucleotide
  Sense strand starting at position 3111 of SEQ ID NO: 317864
auguaaguagggugauuca

SEQ ID NO: 518306 - RNA, 19 nt, Artificial Sequence
  Description of Artificial Sequence: Synthetic oligonucleotide
  Antisense strand to SEQ ID NO: 518305
ugaaucacccuacuuacau

SEQ ID NO: 518307 - RNA, 19 nt, Artificial Sequence
  Description of Artificial Sequence: Synthetic oligonucleotide
  Sense strand starting at position 3149 of SEQ ID NO: 317864
gcugaaggcucauugaauc

SEQ ID NO: 518308 - RNA, 19 nt, Artificial Sequence
  Description of Artificial Sequence: Synthetic oligonucleotide
  Antisense strand to SEQ ID NO: 518307
gauucaaugagccuucagc

SEQ ID NO: 518309 - RNA, 19 nt, Artificial Sequence
  Description of Artificial Sequence: Synthetic oligonucleotide
  Sense strand starting at position 3346 of SEQ ID NO: 317864
aguuguaagguuuaaauug

SEQ ID NO: 518310 - RNA, 19 nt, Artificial Sequence
  Description of Artificial Sequence: Synthetic oligonucleotide
  Antisense strand to SEQ ID NO: 518309
caauuuaaaccuuacaacu

SEQ ID NO: 518311 - RNA, 19 nt, Artificial Sequence
  Description of Artificial Sequence: Synthetic oligonucleotide
  Sense strand starting at position 3380 of SEQ ID NO: 317864
gccuucucagaguagagau

SEQ ID NO: 518312 - RNA, 19 nt, Artificial Sequence
  Description of Artificial Sequence: Synthetic oligonucleotide
  Antisense strand to SEQ ID NO: 518311
aucucuacucugagaaggc

SEQ ID NO: 518313 - RNA, 19 nt, Artificial Sequence
  Description of Artificial Sequence: Synthetic oligonucleotide
  Sense strand starting at position 3420 of SEQ ID NO: 317864
cccgauauaggcuacagaa

SEQ ID NO: 518314 - RNA, 19 nt, Artificial Sequence
  Description of Artificial Sequence: Synthetic oligonucleotide
  Antisense strand to SEQ ID NO: 518313
uucuguagccuauaucggg

SEQ ID NO: 518315 - RNA, 19 nt, Artificial Sequence
  Description of Artificial Sequence: Synthetic oligonucleotide
  Sense strand starting at position 3615 of SEQ ID NO: 317864
ggcagaagagcguauuaga

SEQ ID NO: 518316 - RNA, 19 nt, Artificial Sequence
  Description of Artificial Sequence: Synthetic oligonucleotide
  Antisense strand to SEQ ID NO: 518315
ucuaauacgcucuucugcc

SEQ ID NO: 518317 - RNA, 19 nt, Artificial Sequence
  Description of Artificial Sequence: Synthetic oligonucleotide
  Sense strand starting at position 3645 of SEQ ID NO: 317864
uuucuuuguggagaaaggu

SEQ ID NO: 518318 - RNA, 19 nt, Artificial Sequence
  Description of Artificial Sequence: Synthetic oligonucleotide
  Antisense strand to SEQ ID NO: 518317
accuuucuccacaaagaaa

SEQ ID NO: 518319 - RNA, 19 nt, Artificial Sequence
  Description of Artificial Sequence: Synthetic oligonucleotide
  Sense strand starting at position 3700 of SEQ ID NO: 317864
gauggugauguguauagga

SEQ ID NO: 518320 - RNA, 19 nt, Artificial Sequence
  Description of Artificial Sequence: Synthetic oligonucleotide
  Antisense strand to SEQ ID NO: 518319
uccuauacacaucaccauc

SEQ ID NO: 518321 - RNA, 19 nt, Artificial Sequence
  Description of Artificial Sequence: Synthetic oligonucleotide
  Sense strand starting at position 3748 of SEQ ID NO: 317864
gcaauuuagcuguaguucu

SEQ ID NO: 518322 - RNA, 19 nt, Artificial Sequence
  Description of Artificial Sequence: Synthetic oligonucleotide
  Antisense strand to SEQ ID NO: 518321
agaacuacagcuaaauugc

SEQ ID NO: 518323 - RNA, 19 nt, Artificial Sequence
  Description of Artificial Sequence: Synthetic oligonucleotide
  Sense strand starting at position 3917 of SEQ ID NO: 317864
auugguguucuguauauac

SEQ ID NO: 518324 - RNA, 19 nt, Artificial Sequence
  Description of Artificial Sequence: Synthetic oligonucleotide
  Antisense strand to SEQ ID NO: 518323
guauauacagaacaccaau

SEQ ID NO: 518325 - RNA, 19 nt, Artificial Sequence
  Description of Artificial Sequence: Synthetic oligonucleotide
  Sense strand starting at position 3924 of SEQ ID NO: 317864
uucuguauauacuuccaga

SEQ ID NO: 518326 - RNA, 19 nt, Artificial Sequence
  Description of Artificial Sequence: Synthetic oligonucleotide
  Antisense strand to SEQ ID NO: 518325
ucuggaaguauauacagaa

SEQ ID NO: 518327 - RNA, 19 nt, Artificial Sequence
  Description of Artificial Sequence: Synthetic oligonucleotide
  Sense strand starting at position 3965 of SEQ ID NO: 317864
auaugugcauagucauaag

SEQ ID NO: 518328 - RNA, 19 nt, Artificial Sequence
  Description of Artificial Sequence: Synthetic oligonucleotide
  Antisense strand to SEQ ID NO: 518327
cuuaugacuaugcacauau

SEQ ID NO: 518329 - RNA, 19 nt, Artificial Sequence
  Description of Artificial Sequence: Synthetic oligonucleotide
  Sense strand starting at position 55 of SEQ ID NO: 317865
aaagaagagugguuuagua

SEQ ID NO: 518330 - RNA, 19 nt, Artificial Sequence
  Description of Artificial Sequence: Synthetic oligonucleotide
  Antisense strand to SEQ ID NO: 518329
uacuaaaccacucuucuuu

SEQ ID NO: 518331 - RNA, 19 nt, Artificial Sequence
  Description of Artificial Sequence: Synthetic oligonucleotide
  Sense strand starting at position 57 of SEQ ID NO: 317865
agaagagugguuuaguacu

SEQ ID NO: 518332 - RNA, 19 nt, Artificial Sequence
  Description of Artificial Sequence: Synthetic oligonucleotide
  Antisense strand to SEQ ID NO: 518331
aguacuaaaccacucuucu

SEQ ID NO: 518333 - RNA, 19 nt, Artificial Sequence
  Description of Artificial Sequence: Synthetic oligonucleotide
  Sense strand starting at position 212 of SEQ ID NO: 317865
cuagaagggcuuuaggagu

SEQ ID NO: 518334 - RNA, 19 nt, Artificial Sequence
  Description of Artificial Sequence: Synthetic oligonucleotide
  Antisense strand to SEQ ID NO: 518333
acuccuaaagcccuucuag

SEQ ID NO: 518335 - RNA, 19 nt, Artificial Sequence
  Description of Artificial Sequence: Synthetic oligonucleotide
  Sense strand starting at position 218 of SEQ ID NO: 317865
gggcuuuaggagugaacua

SEQ ID NO: 518336 - RNA, 19 nt, Artificial Sequence
  Description of Artificial Sequence: Synthetic oligonucleotide
  Antisense strand to SEQ ID NO: 518335
uaguucacuccuaaagccc

SEQ ID NO: 518337 - RNA, 19 nt, Artificial Sequence
  Description of Artificial Sequence: Synthetic oligonucleotide
  Sense strand starting at position 219 of SEQ ID NO: 317865
ggcuuuaggagugaacuau

SEQ ID NO: 518338 - RNA, 19 nt, Artificial Sequence
  Description of Artificial Sequence: Synthetic oligonucleotide
  Antisense strand to SEQ ID NO: 518337
auaguucacuccuaaagcc

SEQ ID NO: 518339 - RNA, 19 nt, Artificial Sequence
  Description of Artificial Sequence: Synthetic oligonucleotide
  Sense strand starting at position 234 of SEQ ID NO: 317865
cuauacugucaaggauuga

SEQ ID NO: 518340 - RNA, 19 nt, Artificial Sequence
  Description of Artificial Sequence: Synthetic oligonucleotide
  Antisense strand to SEQ ID NO: 518339
ucaauccuugacaguauag

SEQ ID NO: 518341 - RNA, 19 nt, Artificial Sequence
  Description of Artificial Sequence: Synthetic oligonucleotide
  Sense strand starting at position 397 of SEQ ID NO: 317865
cauaguugucagggagaaa

SEQ ID NO: 518342 - RNA, 19 nt, Artificial Sequence
  Description of Artificial Sequence: Synthetic oligonucleotide
  Antisense strand to SEQ ID NO: 518341
uuucucccugacaacuaug

SEQ ID NO: 518343 - RNA, 19 nt, Artificial Sequence
  Description of Artificial Sequence: Synthetic oligonucleotide
  Sense strand starting at position 440 of SEQ ID NO: 317865
augcuaacucuguagcuaa

SEQ ID NO: 518344 - RNA, 19 nt, Artificial Sequence
  Description of Artificial Sequence: Synthetic oligonucleotide
  Antisense strand to SEQ ID NO: 518343
uuagcuacagaguuagcau

SEQ ID NO: 518345 - RNA, 19 nt, Artificial Sequence
  Description of Artificial Sequence: Synthetic oligonucleotide
  Sense strand starting at position 464 of SEQ ID NO: 317865
caauaaaucgcagggcaaa

SEQ ID NO: 518346 - RNA, 19 nt, Artificial Sequence
  Description of Artificial Sequence: Synthetic oligonucleotide
  Antisense strand to SEQ ID NO: 518345
uuugcccugcgauuuauug

SEQ ID NO: 518347 - RNA, 19 nt, Artificial Sequence
  Description of Artificial Sequence: Synthetic oligonucleotide
  Sense strand starting at position 569 of SEQ ID NO: 317865
uucugugaauuccucaaga

SEQ ID NO: 518348 - RNA, 19 nt, Artificial Sequence
  Description of Artificial Sequence: Synthetic oligonucleotide
  Antisense strand to SEQ ID NO: 518347
ucuugaggaauucacagaa

SEQ ID NO: 518349 - RNA, 19 nt, Artificial Sequence
  Description of Artificial Sequence: Synthetic oligonucleotide
  Sense strand starting at position 571 of SEQ ID NO: 317865
cugugaauuccucaagagc

SEQ ID NO: 518350 - RNA, 19 nt, Artificial Sequence
  Description of Artificial Sequence: Synthetic oligonucleotide
  Antisense strand to SEQ ID NO: 518349
gcucuugaggaauucacag

SEQ ID NO: 518351 - RNA, 19 nt, Artificial Sequence
  Description of Artificial Sequence: Synthetic oligonucleotide
  Sense strand starting at position 839 of SEQ ID NO: 317865
gugcguuaccuauuaguua

SEQ ID NO: 518352 - RNA, 19 nt, Artificial Sequence
  Description of Artificial Sequence: Synthetic oligonucleotide
  Antisense strand to SEQ ID NO: 518351
uaacuaauagguaacgcac

SEQ ID NO: 518353 - RNA, 19 nt, Artificial Sequence
  Description of Artificial Sequence: Synthetic oligonucleotide
  Sense strand starting at position 1058 of SEQ ID NO: 317865
ugagcucaaccguaauaug

SEQ ID NO: 518354 - RNA, 19 nt, Artificial Sequence
  Description of Artificial Sequence: Synthetic oligonucleotide
  Antisense strand to SEQ ID NO: 518353
cauauuacgguugagcuca

SEQ ID NO: 518355 - RNA, 19 nt, Artificial Sequence
  Description of Artificial Sequence: Synthetic oligonucleotide
  Sense strand starting at position 1083 of SEQ ID NO: 317865
gcucaucugcagcaggaau

SEQ ID NO: 518356 - RNA, 19 nt, Artificial Sequence
  Description of Artificial Sequence: Synthetic oligonucleotide
  Antisense strand to SEQ ID NO: 518355
auuccugcugcagaugagc

SEQ ID NO: 518357 - RNA, 19 nt, Artificial Sequence
  Description of Artificial Sequence: Synthetic oligonucleotide
  Sense strand starting at position 1094 of SEQ ID NO: 317865
gcaggaaucggccaucuau

SEQ ID NO: 518358 - RNA, 19 nt, Artificial Sequence
  Description of Artificial Sequence: Synthetic oligonucleotide
  Antisense strand to SEQ ID NO: 518357
auagauggccgauuccugc

SEQ ID NO: 518359 - RNA, 19 nt, Artificial Sequence
  Description of Artificial Sequence: Synthetic oligonucleotide
  Sense strand starting at position 1112 of SEQ ID NO: 317865
uaaguugaguugucaaauc

SEQ ID NO: 518360 - RNA, 19 nt, Artificial Sequence
  Description of Artificial Sequence: Synthetic oligonucleotide
  Antisense strand to SEQ ID NO: 518359
gauuugacaacucaacuua

SEQ ID NO: 518361 - RNA, 19 nt, Artificial Sequence
  Description of Artificial Sequence: Synthetic oligonucleotide
  Sense strand starting at position 1270 of SEQ ID NO: 317865
gacacuagauuguugcuga

SEQ ID NO: 518362 - RNA, 19 nt, Artificial Sequence
  Description of Artificial Sequence: Synthetic oligonucleotide
  Antisense strand to SEQ ID NO: 518361
ucagcaacaaucuaguguc

SEQ ID NO: 518363 - RNA, 19 nt, Artificial Sequence
  Description of Artificial Sequence: Synthetic oligonucleotide
  Sense strand starting at position 1382 of SEQ ID NO: 317865
cugagauggugcucaggau

SEQ ID NO: 518364 - RNA, 19 nt, Artificial Sequence
  Description of Artificial Sequence: Synthetic oligonucleotide
  Antisense strand to SEQ ID NO: 518363
auccugagcaccaucucag

SEQ ID NO: 518365 - RNA, 19 nt, Artificial Sequence
  Description of Artificial Sequence: Synthetic oligonucleotide
  Sense strand starting at position 1386 of SEQ ID NO: 317865
gauggugcucaggaugaau

SEQ ID NO: 518366 - RNA, 19 nt, Artificial Sequence
  Description of Artificial Sequence: Synthetic oligonucleotide
  Antisense strand to SEQ ID NO: 518365
auucauccugagcaccauc

SEQ ID NO: 518367 - RNA, 19 nt, Artificial Sequence
  Description of Artificial Sequence: Synthetic oligonucleotide
  Sense strand starting at position 1589 of SEQ ID NO: 317865
uagaaauguugggcccgaa

SEQ ID NO: 518368 - RNA, 19 nt, Artificial Sequence
  Description of Artificial Sequence: Synthetic oligonucleotide
  Antisense strand to SEQ ID NO: 518367
uucgggcccaacauuucua

SEQ ID NO: 518369 - RNA, 19 nt, Artificial Sequence
  Description of Artificial Sequence: Synthetic oligonucleotide
  Sense strand starting at position 1850 of SEQ ID NO: 317865
gagccuuguguuucuuguu

SEQ ID NO: 518370 - RNA, 19 nt, Artificial Sequence
  Description of Artificial Sequence: Synthetic oligonucleotide
  Antisense strand to SEQ ID NO: 518369
aacaagaaacacaaggcuc

SEQ ID NO: 518371 - RNA, 19 nt, Artificial Sequence
  Description of Artificial Sequence: Synthetic oligonucleotide
  Sense strand starting at position 2536 of SEQ ID NO: 317865
gagaaagugaaguguacau

SEQ ID NO: 518372 - RNA, 19 nt, Artificial Sequence
  Description of Artificial Sequence: Synthetic oligonucleotide
  Antisense strand to SEQ ID NO: 518371
auguacacuucacuuucuc

SEQ ID NO: 518373 - RNA, 19 nt, Artificial Sequence
  Description of Artificial Sequence: Synthetic oligonucleotide
  Sense strand starting at position 2748 of SEQ ID NO: 317865
gcacauagucguuaauaaa

SEQ ID NO: 518374 - RNA, 19 nt, Artificial Sequence
  Description of Artificial Sequence: Synthetic oligonucleotide
  Antisense strand to SEQ ID NO: 518373
uuuauuaacgacuaugugc

SEQ ID NO: 518375 - RNA, 19 nt, Artificial Sequence
  Description of Artificial Sequence: Synthetic oligonucleotide
  Sense strand starting at position 2770 of SEQ ID NO: 317865
aacgaaugauuaguugagu

SEQ ID NO: 518376 - RNA, 19 nt, Artificial Sequence
  Description of Artificial Sequence: Synthetic oligonucleotide
  Antisense strand to SEQ ID NO: 518375
acucaacuaaucauucguu

SEQ ID NO: 518377 - RNA, 19 nt, Artificial Sequence
  Description of Artificial Sequence: Synthetic oligonucleotide
  Sense strand starting at position 2771 of SEQ ID NO: 317865
acgaaugauuaguugagua

SEQ ID NO: 518378 - RNA, 19 nt, Artificial Sequence
  Description of Artificial Sequence: Synthetic oligonucleotide
  Antisense strand to SEQ ID NO: 518377
uacucaacuaaucauucgu

SEQ ID NO: 518379 - RNA, 19 nt, Artificial Sequence
  Description of Artificial Sequence: Synthetic oligonucleotide
  Sense strand starting at position 2953 of SEQ ID NO: 317865
gagauacacguguaaagug

SEQ ID NO: 518380 - RNA, 19 nt, Artificial Sequence
  Description of Artificial Sequence: Synthetic oligonucleotide
  Antisense strand to SEQ ID NO: 518379
cacuuuacacguguaucuc

SEQ ID NO: 518381 - RNA, 19 nt, Artificial Sequence
  Description of Artificial Sequence: Synthetic oligonucleotide
  Sense strand starting at position 3049 of SEQ ID NO: 317865
ggacccuacccauauguuu

SEQ ID NO: 518382 - RNA, 19 nt, Artificial Sequence
  Description of Artificial Sequence: Synthetic oligonucleotide
  Antisense strand to SEQ ID NO: 518381
aaacauauggguagggucc

SEQ ID NO: 518383 - RNA, 19 nt, Artificial Sequence
  Description of Artificial Sequence: Synthetic oligonucleotide
  Sense strand starting at position 3207 of SEQ ID NO: 317865
cccaauagaugcuugaaau

SEQ ID NO: 518384 - RNA, 19 nt, Artificial Sequence
  Description of Artificial Sequence: Synthetic oligonucleotide
  Antisense strand to SEQ ID NO: 518383
auuucaagcaucuauuggg

SEQ ID NO: 518385 - RNA, 19 nt, Artificial Sequence
  Description of Artificial Sequence: Synthetic oligonucleotide
  Sense strand starting at position 3208 of SEQ ID NO: 317865
ccaauagaugcuugaaauu

SEQ ID NO: 518386 - RNA, 19 nt, Artificial Sequence
  Description of Artificial Sequence: Synthetic oligonucleotide
  Antisense strand to SEQ ID NO: 518385
aauuucaagcaucuauugg

SEQ ID NO: 518387 - RNA, 19 nt, Artificial Sequence
  Description of Artificial Sequence: Synthetic oligonucleotide
  Sense strand starting at position 3308 of SEQ ID NO: 317865
ugaggaggucguuaacuua

SEQ ID NO: 518388 - RNA, 19 nt, Artificial Sequence
  Description of Artificial Sequence: Synthetic oligonucleotide
  Antisense strand to SEQ ID NO: 518387
uaaguuaacgaccuccuca

SEQ ID NO: 518389 - RNA, 19 nt, Artificial Sequence
  Description of Artificial Sequence: Synthetic oligonucleotide
  Sense strand starting at position 3431 of SEQ ID NO: 317865
uaaggaaauuguguuguua

SEQ ID NO: 518390 - RNA, 19 nt, Artificial Sequence
  Description of Artificial Sequence: Synthetic oligonucleotide
  Antisense strand to SEQ ID NO: 518389
uaacaacacaauuuccuua

SEQ ID NO: 518391 - RNA, 19 nt, Artificial Sequence
  Description of Artificial Sequence: Synthetic oligonucleotide
  Sense strand starting at position 3435 of SEQ ID NO: 317865
gaaauuguguuguuaaugg

SEQ ID NO: 518392 - RNA, 19 nt, Artificial Sequence
  Description of Artificial Sequence: Synthetic oligonucleotide
  Antisense strand to SEQ ID NO: 518391
ccauuaacaacacaauuuc

SEQ ID NO: 518393 - RNA, 19 nt, Artificial Sequence
  Description of Artificial Sequence: Synthetic oligonucleotide
  Sense strand starting at position 3522 of SEQ ID NO: 317865
agauaagacugggaauaua

SEQ ID NO: 518394 - RNA, 19 nt, Artificial Sequence
  Description of Artificial Sequence: Synthetic oligonucleotide
  Antisense strand to SEQ ID NO: 518393
uauauucccagucuuaucu

SEQ ID NO: 518395 - RNA, 19 nt, Artificial Sequence
  Description of Artificial Sequence: Synthetic oligonucleotide
  Sense strand starting at position 3538 of SEQ ID NO: 317865
auacauugauuugagaaca

SEQ ID NO: 518396 - RNA, 19 nt, Artificial Sequence
  Description of Artificial Sequence: Synthetic oligonucleotide
  Antisense strand to SEQ ID NO: 518395
uguucucaaaucaauguau

SEQ ID NO: 518397 - RNA, 19 nt, Artificial Sequence
  Description of Artificial Sequence: Synthetic oligonucleotide
  Sense strand starting at position 3570 of SEQ ID NO: 317865
auaucaagcagaggaguuu

SEQ ID NO: 518398 - RNA, 19 nt, Artificial Sequence
  Description of Artificial Sequence: Synthetic oligonucleotide
  Antisense strand to SEQ ID NO: 518397
aaacuccucugcuugauau

SEQ ID NO: 518399 - RNA, 19 nt, Artificial Sequence
  Description of Artificial Sequence: Synthetic oligonucleotide
  Sense strand starting at position 3620 of SEQ ID NO: 317865
gugauuggauaaguagaau

SEQ ID NO: 518400 - RNA, 19 nt, Artificial Sequence
  Description of Artificial Sequence: Synthetic oligonucleotide
  Antisense strand to SEQ ID NO: 518399
auucuacuuauccaaucac

SEQ ID NO: 518401 - RNA, 19 nt, Artificial Sequence
  Description of Artificial Sequence: Synthetic oligonucleotide
  Sense strand starting at position 3632 of SEQ ID NO: 317865
guagaaugauaguuuagga

SEQ ID NO: 518402 - RNA, 19 nt, Artificial Sequence
  Description of Artificial Sequence: Synthetic oligonucleotide
  Antisense strand to SEQ ID NO: 518401
uccuaaacuaucauucuac

SEQ ID NO: 518403 - RNA, 19 nt, Artificial Sequence
  Description of Artificial Sequence: Synthetic oligonucleotide
  Sense strand starting at position 3671 of SEQ ID NO: 317865
ggcagaguacuauaauagu

SEQ ID NO: 518404 - RNA, 19 nt, Artificial Sequence
  Description of Artificial Sequence: Synthetic oligonucleotide
  Antisense strand to SEQ ID NO: 518403
acuauuauaguacucugcc

SEQ ID NO: 518405 - RNA, 19 nt, Artificial Sequence
  Description of Artificial Sequence: Synthetic oligonucleotide
  Sense strand starting at position 3875 of SEQ ID NO: 317865
guuuaauuugcaugucagg

SEQ ID NO: 518406 - RNA, 19 nt, Artificial Sequence
  Description of Artificial Sequence: Synthetic oligonucleotide
  Antisense strand to SEQ ID NO: 518405
ccugacaugcaaauuaaac

SEQ ID NO: 518407 - RNA, 19 nt, Artificial Sequence
  Description of Artificial Sequence: Synthetic oligonucleotide
  Sense strand starting at position 3970 of SEQ ID NO: 317865
cuaguaugucuguaggaaa

SEQ ID NO: 518408 - RNA, 19 nt, Artificial Sequence
  Description of Artificial Sequence: Synthetic oligonucleotide
  Antisense strand to SEQ ID NO: 518407
uuuccuacagacauacuag

SEQ ID NO: 518409 - RNA, 19 nt, Artificial Sequence
  Description of Artificial Sequence: Synthetic oligonucleotide
  Sense strand starting at position 17 of SEQ ID NO: 317866
gcagcaauagcuggaauuu

SEQ ID NO: 518410 - RNA, 19 nt, Artificial Sequence
  Description of Artificial Sequence: Synthetic oligonucleotide
  Antisense strand to SEQ ID NO: 518409
aaauuccagcuauugcugc

SEQ ID NO: 518411 - RNA, 19 nt, Artificial Sequence
  Description of Artificial Sequence: Synthetic oligonucleotide
  Sense strand starting at position 188 of SEQ ID NO: 317866
cugcuuuagucaccaaaga

SEQ ID NO: 518412 - RNA, 19 nt, Artificial Sequence
  Description of Artificial Sequence: Synthetic oligonucleotide
  Antisense strand to SEQ ID NO: 518411
ucuuuggugacuaaagcag

SEQ ID NO: 518413 - RNA, 19 nt, Artificial Sequence
  Description of Artificial Sequence: Synthetic oligonucleotide
  Sense strand starting at position 189 of SEQ ID NO: 317866
ugcuuuagucaccaaagaa

SEQ ID NO: 518414 - RNA, 19 nt, Artificial Sequence
  Description of Artificial Sequence: Synthetic oligonucleotide
  Antisense strand to SEQ ID NO: 518413
uucuuuggugacuaaagca

SEQ ID NO: 518415 - RNA, 19 nt, Artificial Sequence
  Description of Artificial Sequence: Synthetic oligonucleotide
  Sense strand starting at position 275 of SEQ ID NO: 317866
aacagaugguuacugacau

SEQ ID NO: 518416 - RNA, 19 nt, Artificial Sequence
  Description of Artificial Sequence: Synthetic oligonucleotide
  Antisense strand to SEQ ID NO: 518415
augucaguaaccaucuguu

SEQ ID NO: 518417 - RNA, 19 nt, Artificial Sequence
  Description of Artificial Sequence: Synthetic oligonucleotide
  Sense strand starting at position 329 of SEQ ID NO: 317866
uuggucuugcuagaaauag

SEQ ID NO: 518418 - RNA, 19 nt, Artificial Sequence
  Description of Artificial Sequence: Synthetic oligonucleotide
  Antisense strand to SEQ ID NO: 518417
cuauuucuagcaagaccaa

SEQ ID NO: 518419 - RNA, 19 nt, Artificial Sequence
  Description of Artificial Sequence: Synthetic oligonucleotide
  Sense strand starting at position 556 of SEQ ID NO: 317866
aguguaagggcauaaauac

SEQ ID NO: 518420 - RNA, 19 nt, Artificial Sequence
  Description of Artificial Sequence: Synthetic oligonucleotide
  Antisense strand to SEQ ID NO: 518419
guauuuaugcccuuacacu

SEQ ID NO: 518421 - RNA, 19 nt, Artificial Sequence
  Description of Artificial Sequence: Synthetic oligonucleotide
  Sense strand starting at position 755 of SEQ ID NO: 317866
ggguuacauguauaucacu

SEQ ID NO: 518422 - RNA, 19 nt, Artificial Sequence
  Description of Artificial Sequence: Synthetic oligonucleotide
  Antisense strand to SEQ ID NO: 518421
agugauauacauguaaccc

SEQ ID NO: 518423 - RNA, 19 nt, Artificial Sequence
  Description of Artificial Sequence: Synthetic oligonucleotide
  Sense strand starting at position 795 of SEQ ID NO: 317866
guaacuggcacuugaggaa

SEQ ID NO: 518424 - RNA, 19 nt, Artificial Sequence
  Description of Artificial Sequence: Synthetic oligonucleotide
  Antisense strand to SEQ ID NO: 518423
uuccucaagugccaguuac

SEQ ID NO: 518425 - RNA, 19 nt, Artificial Sequence
  Description of Artificial Sequence: Synthetic oligonucleotide
  Sense strand starting at position 809 of SEQ ID NO: 317866
aggaaagcuuacucuucua

SEQ ID NO: 518426 - RNA, 19 nt, Artificial Sequence
  Description of Artificial Sequence: Synthetic oligonucleotide
  Antisense strand to SEQ ID NO: 518425
uagaagaguaagcuuuccu

SEQ ID NO: 518427 - RNA, 19 nt, Artificial Sequence
  Description of Artificial Sequence: Synthetic oligonucleotide
  Sense strand starting at position 894 of SEQ ID NO: 317866
gacgguuaucaugggaaau

SEQ ID NO: 518428 - RNA, 19 nt, Artificial Sequence
  Description of Artificial Sequence: Synthetic oligonucleotide
  Antisense strand to SEQ ID NO: 518427
auuucccaugauaaccguc

SEQ ID NO: 518429 - RNA, 19 nt, Artificial Sequence
  Description of Artificial Sequence: Synthetic oligonucleotide
  Sense strand starting at position 895 of SEQ ID NO: 317866
acgguuaucaugggaaaug

SEQ ID NO: 518430 - RNA, 19 nt, Artificial Sequence
  Description of Artificial Sequence: Synthetic oligonucleotide
  Antisense strand to SEQ ID NO: 518429
cauuucccaugauaaccgu

SEQ ID NO: 518431 - RNA, 19 nt, Artificial Sequence
  Description of Artificial Sequence: Synthetic oligonucleotide
  Sense strand starting at position 971 of SEQ ID NO: 317866
aggagagguuuaucaccau

SEQ ID NO: 518432 - RNA, 19 nt, Artificial Sequence
  Description of Artificial Sequence: Synthetic oligonucleotide
  Antisense strand to SEQ ID NO: 518431
auggugauaaaccucuccu

SEQ ID NO: 518433 - RNA, 19 nt, Artificial Sequence
  Description of Artificial Sequence: Synthetic oligonucleotide
  Sense strand starting at position 974 of SEQ ID NO: 317866
agagguuuaucaccauccu

SEQ ID NO: 518434 - RNA, 19 nt, Artificial Sequence
  Description of Artificial Sequence: Synthetic oligonucleotide
  Antisense strand to SEQ ID NO: 518433
aggauggugauaaaccucu

SEQ ID NO: 518435 - RNA, 19 nt, Artificial Sequence
  Description of Artificial Sequence: Synthetic oligonucleotide
  Sense strand starting at position 983 of SEQ ID NO: 317866
ucaccauccuaggucaaga

SEQ ID NO: 518436 - RNA, 19 nt, Artificial Sequence
  Description of Artificial Sequence: Synthetic oligonucleotide
  Antisense strand to SEQ ID NO: 518435
ucuugaccuaggaugguga

SEQ ID NO: 518437 - RNA, 19 nt, Artificial Sequence
  Description of Artificial Sequence: Synthetic oligonucleotide
  Sense strand starting at position 1143 of SEQ ID NO: 317866
cuguaaucgcaaggacaaa

SEQ ID NO: 518438 - RNA, 19 nt, Artificial Sequence
  Description of Artificial Sequence: Synthetic oligonucleotide
  Antisense strand to SEQ ID NO: 518437
uuuguccuugcgauuacag

SEQ ID NO: 518439 - RNA, 19 nt, Artificial Sequence
  Description of Artificial Sequence: Synthetic oligonucleotide
  Sense strand starting at position 1264 of SEQ ID NO: 317866
ggaggaaaguuagcaggua

SEQ ID NO: 518440 - RNA, 19 nt, Artificial Sequence
  Description of Artificial Sequence: Synthetic oligonucleotide
  Antisense strand to SEQ ID NO: 518439
uaccugcuaacuuuccucc

SEQ ID NO: 518441 - RNA, 19 nt, Artificial Sequence
  Description of Artificial Sequence: Synthetic oligonucleotide
  Sense strand starting at position 1988 of SEQ ID NO: 317866
gcgccucaugaauauacaa

SEQ ID NO: 518442 - RNA, 19 nt, Artificial Sequence
  Description of Artificial Sequence: Synthetic oligonucleotide
  Antisense strand to SEQ ID NO: 518441
uuguauauucaugaggcgc

SEQ ID NO: 518443 - RNA, 19 nt, Artificial Sequence
  Description of Artificial Sequence: Synthetic oligonucleotide
  Sense strand starting at position 2305 of SEQ ID NO: 317866
gcgugagaccauuauccug

SEQ ID NO: 518444 - RNA, 19 nt, Artificial Sequence
  Description of Artificial Sequence: Synthetic oligonucleotide
  Antisense strand to SEQ ID NO: 518443
caggauaauggucucacgc

SEQ ID NO: 518445 - RNA, 19 nt, Artificial Sequence
  Description of Artificial Sequence: Synthetic oligonucleotide
  Sense strand starting at position 2369 of SEQ ID NO: 317866
gugugcaauacccauggaa

SEQ ID NO: 518446 - RNA, 19 nt, Artificial Sequence
  Description of Artificial Sequence: Synthetic oligonucleotide
  Antisense strand to SEQ ID NO: 518445
uuccauggguauugcacac

SEQ ID NO: 518447 - RNA, 19 nt, Artificial Sequence
  Description of Artificial Sequence: Synthetic oligonucleotide
  Sense strand starting at position 2371 of SEQ ID NO: 317866
gugcaauacccauggaaca

SEQ ID NO: 518448 - RNA, 19 nt, Artificial Sequence
  Description of Artificial Sequence: Synthetic oligonucleotide
  Antisense strand to SEQ ID NO: 518447
uguuccauggguauugcac

SEQ ID NO: 518449 - RNA, 19 nt, Artificial Sequence
  Description of Artificial Sequence: Synthetic oligonucleotide
  Sense strand starting at position 2405 of SEQ ID NO: 317866
agugauagccaccauguuu

SEQ ID NO: 518450 - RNA, 19 nt, Artificial Sequence
  Description of Artificial Sequence: Synthetic oligonucleotide
  Antisense strand to SEQ ID NO: 518449
aaacaugguggcuaucacu

SEQ ID NO: 518451 - RNA, 19 nt, Artificial Sequence
  Description of Artificial Sequence: Synthetic oligonucleotide
  Sense strand starting at position 2479 of SEQ ID NO: 317866
agacucgcucuggaguuua

SEQ ID NO: 518452 - RNA, 19 nt, Artificial Sequence
  Description of Artificial Sequence: Synthetic oligonucleotide
  Antisense strand to SEQ ID NO: 518451
uaaacuccagagcgagucu

SEQ ID NO: 518453 - RNA, 19 nt, Artificial Sequence
  Description of Artificial Sequence: Synthetic oligonucleotide
  Sense strand starting at position 2806 of SEQ ID NO: 317866
cccuauguuuaaccaggau

SEQ ID NO: 518454 - RNA, 19 nt, Artificial Sequence
  Description of Artificial Sequence: Synthetic oligonucleotide
  Antisense strand to SEQ ID NO: 518453
auccugguuaaacauaggg

SEQ ID NO: 518455 - RNA, 19 nt, Artificial Sequence
  Description of Artificial Sequence: Synthetic oligonucleotide
  Sense strand starting at position 2858 of SEQ ID NO: 317866
gaaugaguauucuccaaga

SEQ ID NO: 518456 - RNA, 19 nt, Artificial Sequence
  Description of Artificial Sequence: Synthetic oligonucleotide
  Antisense strand to SEQ ID NO: 518455
ucuuggagaauacucauuc

SEQ ID NO: 518457 - RNA, 19 nt, Artificial Sequence
  Description of Artificial Sequence: Synthetic oligonucleotide
  Sense strand starting at position 2860 of SEQ ID NO: 317866
augaguauucuccaagagu

SEQ ID NO: 518458 - RNA, 19 nt, Artificial Sequence
  Description of Artificial Sequence: Synthetic oligonucleotide
  Antisense strand to SEQ ID NO: 518457
acucuuggagaauacucau

SEQ ID NO: 518459 - RNA, 19 nt, Artificial Sequence
  Description of Artificial Sequence: Synthetic oligonucleotide
  Sense strand starting at position 2863 of SEQ ID NO: 317866
aguauucuccaagaguaua

SEQ ID NO: 518460 - RNA, 19 nt, Artificial Sequence
  Description of Artificial Sequence: Synthetic oligonucleotide
  Antisense strand to SEQ ID NO: 518459
uauacucuuggagaauacu

SEQ ID NO: 518461 - RNA, 19 nt, Artificial Sequence
  Description of Artificial Sequence: Synthetic oligonucleotide
  Sense strand starting at position 2897 of SEQ ID NO: 317866
gcaugacuuucucccuaag

SEQ ID NO: 518462 - RNA, 19 nt, Artificial Sequence
  Description of Artificial Sequence: Synthetic oligonucleotide
  Antisense strand to SEQ ID NO: 518461
cuuagggagaaagucaugc

SEQ ID NO: 518463 - RNA, 19 nt, Artificial Sequence
  Description of Artificial Sequence: Synthetic oligonucleotide
  Sense strand starting at position 3048 of SEQ ID NO: 317866
cagagucagugacuuacuu

SEQ ID NO: 518464 - RNA, 19 nt, Artificial Sequence
  Description of Artificial Sequence: Synthetic oligonucleotide
  Antisense strand to SEQ ID NO: 518463
aaguaagucacugacucug

SEQ ID NO: 518465 - RNA, 19 nt, Artificial Sequence
  Description of Artificial Sequence: Synthetic oligonucleotide
  Sense strand starting at position 3056 of SEQ ID NO: 317866
gugacuuacuuacucuaga

SEQ ID NO: 518466 - RNA, 19 nt, Artificial Sequence
  Description of Artificial Sequence: Synthetic oligonucleotide
  Antisense strand to SEQ ID NO: 518465
ucuagaguaaguaagucac

SEQ ID NO: 518467 - RNA, 19 nt, Artificial Sequence
  Description of Artificial Sequence: Synthetic oligonucleotide
  Sense strand starting at position 3057 of SEQ ID NO: 317866
ugacuuacuuacucuagag

SEQ ID NO: 518468 - RNA, 19 nt, Artificial Sequence
  Description of Artificial Sequence: Synthetic oligonucleotide
  Antisense strand to SEQ ID NO: 518467
cucuagaguaaguaaguca

SEQ ID NO: 518469 - RNA, 19 nt, Artificial Sequence
  Description of Artificial Sequence: Synthetic oligonucleotide
  Sense strand starting at position 3086 of SEQ ID NO: 317866
uagucaagggccugagaua

SEQ ID NO: 518470 - RNA, 19 nt, Artificial Sequence
  Description of Artificial Sequence: Synthetic oligonucleotide
  Antisense strand to SEQ ID NO: 518469
uaucucaggcccuugacua

SEQ ID NO: 518471 - RNA, 19 nt, Artificial Sequence
  Description of Artificial Sequence: Synthetic oligonucleotide
  Sense strand starting at position 3171 of SEQ ID NO: 317866
uucugauggugaucggaua

SEQ ID NO: 518472 - RNA, 19 nt, Artificial Sequence
  Description of Artificial Sequence: Synthetic oligonucleotide
  Antisense strand to SEQ ID NO: 518471
uauccgaucaccaucagaa

SEQ ID NO: 518473 - RNA, 19 nt, Artificial Sequence
  Description of Artificial Sequence: Synthetic oligonucleotide
  Sense strand starting at position 3178 of SEQ ID NO: 317866
ggugaucggauagaauguu

SEQ ID NO: 518474 - RNA, 19 nt, Artificial Sequence
  Description of Artificial Sequence: Synthetic oligonucleotide
  Antisense strand to SEQ ID NO: 518473
aacauucuauccgaucacc

SEQ ID NO: 518475 - RNA, 19 nt, Artificial Sequence
  Description of Artificial Sequence: Synthetic oligonucleotide
  Sense strand starting at position 3284 of SEQ ID NO: 317866
uaagcuaguguugagaaca

SEQ ID NO: 518476 - RNA, 19 nt, Artificial Sequence
  Description of Artificial Sequence: Synthetic oligonucleotide
  Antisense strand to SEQ ID NO: 518475
uguucucaacacuagcuua

SEQ ID NO: 518477 - RNA, 19 nt, Artificial Sequence
  Description of Artificial Sequence: Synthetic oligonucleotide
  Sense strand starting at position 3447 of SEQ ID NO: 317866
aguauuuagcauuguucuu

SEQ ID NO: 518478 - RNA, 19 nt, Artificial Sequence
  Description of Artificial Sequence: Synthetic oligonucleotide
  Antisense strand to SEQ ID NO: 518477
aagaacaaugcuaaauacu

SEQ ID NO: 518479 - RNA, 19 nt, Artificial Sequence
  Description of Artificial Sequence: Synthetic oligonucleotide
  Sense strand starting at position 3472 of SEQ ID NO: 317866
gacagauaaugggcaacuu

SEQ ID NO: 518480 - RNA, 19 nt, Artificial Sequence
  Description of Artificial Sequence: Synthetic oligonucleotide
  Antisense strand to SEQ ID NO: 518479
aaguugcccauuaucuguc

SEQ ID NO: 518481 - RNA, 19 nt, Artificial Sequence
  Description of Artificial Sequence: Synthetic oligonucleotide
  Sense strand starting at position 3607 of SEQ ID NO: 317866
cucaaaucugcccagguuu

SEQ ID NO: 518482 - RNA, 19 nt, Artificial Sequence
  Description of Artificial Sequence: Synthetic oligonucleotide
  Antisense strand to SEQ ID NO: 518481
aaaccugggcagauuugag

SEQ ID NO: 518483 - RNA, 19 nt, Artificial Sequence
  Description of Artificial Sequence: Synthetic oligonucleotide
  Sense strand starting at position 3710 of SEQ ID NO: 317866
auaagugcugaaugaaugu

SEQ ID NO: 518484 - RNA, 19 nt, Artificial Sequence
  Description of Artificial Sequence: Synthetic oligonucleotide
  Antisense strand to SEQ ID NO: 518483
acauucauucagcacuuau

SEQ ID NO: 518485 - RNA, 19 nt, Artificial Sequence
  Description of Artificial Sequence: Synthetic oligonucleotide
  Sense strand starting at position 3838 of SEQ ID NO: 317866
cgacuuaguuuauuggaua

SEQ ID NO: 518486 - RNA, 19 nt, Artificial Sequence
  Description of Artificial Sequence: Synthetic oligonucleotide
  Antisense strand to SEQ ID NO: 518485
uauccaauaaacuaagucg

SEQ ID NO: 518487 - RNA, 19 nt, Artificial Sequence
  Description of Artificial Sequence: Synthetic oligonucleotide
  Sense strand starting at position 3945 of SEQ ID NO: 317866
cugggauucagguguuagg

SEQ ID NO: 518488 - RNA, 19 nt, Artificial Sequence
  Description of Artificial Sequence: Synthetic oligonucleotide
  Antisense strand to SEQ ID NO: 518487
ccuaacaccugaaucccag

SEQ ID NO: 518489 - RNA, 19 nt, Artificial Sequence
  Description of Artificial Sequence: Synthetic oligonucleotide
  Sense strand starting at position 97 of SEQ ID NO: 317867
agucauuugugauaccaaa

SEQ ID NO: 518490 - RNA, 19 nt, Artificial Sequence
  Description of Artificial Sequence: Synthetic oligonucleotide
  Antisense strand to SEQ ID NO: 518489
uuugguaucacaaaugacu

SEQ ID NO: 518491 - RNA, 19 nt, Artificial Sequence
  Description of Artificial Sequence: Synthetic oligonucleotide
  Sense strand starting at position 354 of SEQ ID NO: 317867
ugaucuacgugguuaacaa

SEQ ID NO: 518492 - RNA, 19 nt, Artificial Sequence
  Description of Artificial Sequence: Synthetic oligonucleotide
  Antisense strand to SEQ ID NO: 518491
uuguuaaccacguagauca

SEQ ID NO: 518493 - RNA, 19 nt, Artificial Sequence
  Description of Artificial Sequence: Synthetic oligonucleotide
  Sense strand starting at position 355 of SEQ ID NO: 317867
gaucuacgugguuaacaaa

SEQ ID NO: 518494 - RNA, 19 nt, Artificial Sequence
  Description of Artificial Sequence: Synthetic oligonucleotide
  Antisense strand to SEQ ID NO: 518493
uuuguuaaccacguagauc

SEQ ID NO: 518495 - RNA, 19 nt, Artificial Sequence
  Description of Artificial Sequence: Synthetic oligonucleotide
  Sense strand starting at position 488 of SEQ ID NO: 317867
ucugcuuucuaucuggaaa

SEQ ID NO: 518496 - RNA, 19 nt, Artificial Sequence
  Description of Artificial Sequence: Synthetic oligonucleotide
  Antisense strand to SEQ ID NO: 518495
uuuccagauagaaagcaga

SEQ ID NO: 518497 - RNA, 19 nt, Artificial Sequence
  Description of Artificial Sequence: Synthetic oligonucleotide
  Sense strand starting at position 491 of SEQ ID NO: 317867
gcuuucuaucuggaaauau

SEQ ID NO: 518498 - RNA, 19 nt, Artificial Sequence
  Description of Artificial Sequence: Synthetic oligonucleotide
  Antisense strand to SEQ ID NO: 518497
auauuuccagauagaaagc

SEQ ID NO: 518499 - RNA, 19 nt, Artificial Sequence
  Description of Artificial Sequence: Synthetic oligonucleotide
  Sense strand starting at position 860 of SEQ ID NO: 317867
guaaucugcaccgugugua

SEQ ID NO: 518500 - RNA, 19 nt, Artificial Sequence
  Description of Artificial Sequence: Synthetic oligonucleotide
  Antisense strand to SEQ ID NO: 518499
uacacacggugcagauuac

SEQ ID NO: 518501 - RNA, 19 nt, Artificial Sequence
  Description of Artificial Sequence: Synthetic oligonucleotide
  Sense strand starting at position 929 of SEQ ID NO: 317867
cucagaaagcaguaauacu

SEQ ID NO: 518502 - RNA, 19 nt, Artificial Sequence
  Description of Artificial Sequence: Synthetic oligonucleotide
  Antisense strand to SEQ ID NO: 518501
aguauuacugcuuucugag

SEQ ID NO: 518503 - RNA, 19 nt, Artificial Sequence
  Description of Artificial Sequence: Synthetic oligonucleotide
  Sense strand starting at position 937 of SEQ ID NO: 317867
gcaguaauacuccaagcaa

SEQ ID NO: 518504 - RNA, 19 nt, Artificial Sequence
  Description of Artificial Sequence: Synthetic oligonucleotide
  Antisense strand to SEQ ID NO: 518503
uugcuuggaguauuacugc

SEQ ID NO: 518505 - RNA, 19 nt, Artificial Sequence
  Description of Artificial Sequence: Synthetic oligonucleotide
  Sense strand starting at position 1016 of SEQ ID NO: 317867
ggaacaaacuuucuaaugu

SEQ ID NO: 518506 - RNA, 19 nt, Artificial Sequence
  Description of Artificial Sequence: Synthetic oligonucleotide
  Antisense strand to SEQ ID NO: 518505
acauuagaaaguuuguucc

SEQ ID NO: 518507 - RNA, 19 nt, Artificial Sequence
  Description of Artificial Sequence: Synthetic oligonucleotide
  Sense strand starting at position 1024 of SEQ ID NO: 317867
cuuucuaauguguaguuua

SEQ ID NO: 518508 - RNA, 19 nt, Artificial Sequence
  Description of Artificial Sequence: Synthetic oligonucleotide
  Antisense strand to SEQ ID NO: 518507
uaaacuacacauuagaaag

SEQ ID NO: 518509 - RNA, 19 nt, Artificial Sequence
  Description of Artificial Sequence: Synthetic oligonucleotide
  Sense strand starting at position 1027 of SEQ ID NO: 317867
ucuaauguguaguuuagac

SEQ ID NO: 518510 - RNA, 19 nt, Artificial Sequence
  Description of Artificial Sequence: Synthetic oligonucleotide
  Antisense strand to SEQ ID NO: 518509
gucuaaacuacacauuaga

SEQ ID NO: 518511 - RNA, 19 nt, Artificial Sequence
  Description of Artificial Sequence: Synthetic oligonucleotide
  Sense strand starting at position 1029 of SEQ ID NO: 317867
uaauguguaguuuagacau

SEQ ID NO: 518512 - RNA, 19 nt, Artificial Sequence
  Description of Artificial Sequence: Synthetic oligonucleotide
  Antisense strand to SEQ ID NO: 518511
augucuaaacuacacauua

SEQ ID NO: 518513 - RNA, 19 nt, Artificial Sequence
  Description of Artificial Sequence: Synthetic oligonucleotide
  Sense strand starting at position 1126 of SEQ ID NO: 317867
aagguccagcuauaaagua

SEQ ID NO: 518514 - RNA, 19 nt, Artificial Sequence
  Description of Artificial Sequence: Synthetic oligonucleotide
  Antisense strand to SEQ ID NO: 518513
uacuuuauagcuggaccuu

SEQ ID NO: 518515 - RNA, 19 nt, Artificial Sequence
  Description of Artificial Sequence: Synthetic oligonucleotide
  Sense strand starting at position 1205 of SEQ ID NO: 317867
gcuuaucaugcagaagaca

SEQ ID NO: 518516 - RNA, 19 nt, Artificial Sequence
  Description of Artificial Sequence: Synthetic oligonucleotide
  Antisense strand to SEQ ID NO: 518515
ugucuucugcaugauaagc

SEQ ID NO: 518517 - RNA, 19 nt, Artificial Sequence
  Description of Artificial Sequence: Synthetic oligonucleotide
  Sense strand starting at position 1294 of SEQ ID NO: 317867
agacuuucugcgcuuaugu

SEQ ID NO: 518518 - RNA, 19 nt, Artificial Sequence
  Description of Artificial Sequence: Synthetic oligonucleotide
  Antisense strand to SEQ ID NO: 518517
acauaagcgcagaaagucu

SEQ ID NO: 518519 - RNA, 19 nt, Artificial Sequence
  Description of Artificial Sequence: Synthetic oligonucleotide
  Sense strand starting at position 1295 of SEQ ID NO: 317867
gacuuucugcgcuuaugua

SEQ ID NO: 518520 - RNA, 19 nt, Artificial Sequence
  Description of Artificial Sequence: Synthetic oligonucleotide
  Antisense strand to SEQ ID NO: 518519
uacauaagcgcagaaaguc

SEQ ID NO: 518521 - RNA, 19 nt, Artificial Sequence
  Description of Artificial Sequence: Synthetic oligonucleotide
  Sense strand starting at position 1368 of SEQ ID NO: 317867
ccaccuuaucgauaaugcu

SEQ ID NO: 518522 - RNA, 19 nt, Artificial Sequence
  Description of Artificial Sequence: Synthetic oligonucleotide
  Antisense strand to SEQ ID NO: 518521
agcauuaucgauaaggugg

SEQ ID NO: 518523 - RNA, 19 nt, Artificial Sequence
  Description of Artificial Sequence: Synthetic oligonucleotide
  Sense strand starting at position 1510 of SEQ ID NO: 317867
aagaaagcugcauggguau

SEQ ID NO: 518524 - RNA, 19 nt, Artificial Sequence
  Description of Artificial Sequence: Synthetic oligonucleotide
  Antisense strand to SEQ ID NO: 518523
auacccaugcagcuuucuu

SEQ ID NO: 518525 - RNA, 19 nt, Artificial Sequence
  Description of Artificial Sequence: Synthetic oligonucleotide
  Sense strand starting at position 1531 of SEQ ID NO: 317867
ggaagauuucugcgccaac

SEQ ID NO: 518526 - RNA, 19 nt, Artificial Sequence
  Description of Artificial Sequence: Synthetic oligonucleotide
  Antisense strand to SEQ ID NO: 518525
guuggcgcagaaaucuucc

SEQ ID NO: 518527 - RNA, 19 nt, Artificial Sequence
  Description of Artificial Sequence: Synthetic oligonucleotide
  Sense strand starting at position 2231 of SEQ ID NO: 317867
aaggcuguuuaaguuauau

SEQ ID NO: 518528 - RNA, 19 nt, Artificial Sequence
  Description of Artificial Sequence: Synthetic oligonucleotide
  Antisense strand to SEQ ID NO: 518527
auauaacuuaaacagccuu

SEQ ID NO: 518529 - RNA, 19 nt, Artificial Sequence
  Description of Artificial Sequence: Synthetic oligonucleotide
  Sense strand starting at position 2233 of SEQ ID NO: 317867
ggcuguuuaaguuauauga

SEQ ID NO: 518530 - RNA, 19 nt, Artificial Sequence
  Description of Artificial Sequence: Synthetic oligonucleotide
  Antisense strand to SEQ ID NO: 518529
ucauauaacuuaaacagcc

SEQ ID NO: 518531 - RNA, 19 nt, Artificial Sequence
  Description of Artificial Sequence: Synthetic oligonucleotide
  Sense strand starting at position 2252 of SEQ ID NO: 317867
ugagguuaagccuauggau

SEQ ID NO: 518532 - RNA, 19 nt, Artificial Sequence
  Description of Artificial Sequence: Synthetic oligonucleotide
  Antisense strand to SEQ ID NO: 518531
auccauaggcuuaaccuca

SEQ ID NO: 518533 - RNA, 19 nt, Artificial Sequence
  Description of Artificial Sequence: Synthetic oligonucleotide
  Sense strand starting at position 2254 of SEQ ID NO: 317867
agguuaagccuauggaugu

SEQ ID NO: 518534 - RNA, 19 nt, Artificial Sequence
  Description of Artificial Sequence: Synthetic oligonucleotide
  Antisense strand to SEQ ID NO: 518533
acauccauaggcuuaaccu

SEQ ID NO: 518535 - RNA, 19 nt, Artificial Sequence
  Description of Artificial Sequence: Synthetic oligonucleotide
  Sense strand starting at position 2908 of SEQ ID NO: 317867
aagcuuaucgugcagaaga

SEQ ID NO: 518536 - RNA, 19 nt, Artificial Sequence
  Description of Artificial Sequence: Synthetic oligonucleotide
  Antisense strand to SEQ ID NO: 518535
ucuucugcacgauaagcuu

SEQ ID NO: 518537 - RNA, 19 nt, Artificial Sequence
  Description of Artificial Sequence: Synthetic oligonucleotide
  Sense strand starting at position 2910 of SEQ ID NO: 317867
gcuuaucgugcagaagaca

SEQ ID NO: 518538 - RNA, 19 nt, Artificial Sequence
  Description of Artificial Sequence: Synthetic oligonucleotide
  Antisense strand to SEQ ID NO: 518537
ugucuucugcacgauaagc

SEQ ID NO: 518539 - RNA, 19 nt, Artificial Sequence
  Description of Artificial Sequence: Synthetic oligonucleotide
  Sense strand starting at position 3023 of SEQ ID NO: 317867
gcuccaacuguguaucaaa

SEQ ID NO: 518540 - RNA, 19 nt, Artificial Sequence
  Description of Artificial Sequence: Synthetic oligonucleotide
  Antisense strand to SEQ ID NO: 518539
uuugauacacaguuggagc

SEQ ID NO: 518541 - RNA, 19 nt, Artificial Sequence
  Description of Artificial Sequence: Synthetic oligonucleotide
  Sense strand starting at position 3119 of SEQ ID NO: 317867
cuguaaauacgauaacgua

SEQ ID NO: 518542 - RNA, 19 nt, Artificial Sequence
  Description of Artificial Sequence: Synthetic oligonucleotide
  Antisense strand to SEQ ID NO: 518541
uacguuaucguauuuacag

SEQ ID NO: 518543 - RNA, 19 nt, Artificial Sequence
  Description of Artificial Sequence: Synthetic oligonucleotide
  Sense strand starting at position 3154 of SEQ ID NO: 317867
gacaguguaccugacuaua

SEQ ID NO: 518544 - RNA, 19 nt, Artificial Sequence
  Description of Artificial Sequence: Synthetic oligonucleotide
  Antisense strand to SEQ ID NO: 518543
uauagucagguacacuguc

SEQ ID NO: 518545 - RNA, 19 nt, Artificial Sequence
  Description of Artificial Sequence: Synthetic oligonucleotide
  Sense strand starting at position 3157 of SEQ ID NO: 317867
aguguaccugacuauaaac

SEQ ID NO: 518546 - RNA, 19 nt, Artificial Sequence
  Description of Artificial Sequence: Synthetic oligonucleotide
  Antisense strand to SEQ ID NO: 518545
guuuauagucagguacacu

SEQ ID NO: 518547 - RNA, 19 nt, Artificial Sequence
  Description of Artificial Sequence: Synthetic oligonucleotide
  Sense strand starting at position 3181 of SEQ ID NO: 317867
guguaccagggccauaaua

SEQ ID NO: 518548 - RNA, 19 nt, Artificial Sequence
  Description of Artificial Sequence: Synthetic oligonucleotide
  Antisense strand to SEQ ID NO: 518547
uauuauggcccugguacac

SEQ ID NO: 518549 - RNA, 19 nt, Artificial Sequence
  Description of Artificial Sequence: Synthetic oligonucleotide
  Sense strand starting at position 3183 of SEQ ID NO: 317867
guaccagggccauaauauc

SEQ ID NO: 518550 - RNA, 19 nt, Artificial Sequence
  Description of Artificial Sequence: Synthetic oligonucleotide
  Antisense strand to SEQ ID NO: 518549
gauauuauggcccugguac

SEQ ID NO: 518551 - RNA, 19 nt, Artificial Sequence
  Description of Artificial Sequence: Synthetic oligonucleotide
  Sense strand starting at position 3248 of SEQ ID NO: 317867
guguguauucuguuugguu

SEQ ID NO: 518552 - RNA, 19 nt, Artificial Sequence
  Description of Artificial Sequence: Synthetic oligonucleotide
  Antisense strand to SEQ ID NO: 518551
aaccaaacagaauacacac

SEQ ID NO: 518553 - RNA, 19 nt, Artificial Sequence
  Description of Artificial Sequence: Synthetic oligonucleotide
  Sense strand starting at position 3253 of SEQ ID NO: 317867
uauucuguuugguugaaga

SEQ ID NO: 518554 - RNA, 19 nt, Artificial Sequence
  Description of Artificial Sequence: Synthetic oligonucleotide
  Antisense strand to SEQ ID NO: 518553
ucuucaaccaaacagaaua

SEQ ID NO: 518555 - RNA, 19 nt, Artificial Sequence
  Description of Artificial Sequence: Synthetic oligonucleotide
  Sense strand starting at position 3255 of SEQ ID NO: 317867
uucuguuugguugaagaaa

SEQ ID NO: 518556 - RNA, 19 nt, Artificial Sequence
  Description of Artificial Sequence: Synthetic oligonucleotide
  Antisense strand to SEQ ID NO: 518555
uuucuucaaccaaacagaa

SEQ ID NO: 518557 - RNA, 19 nt, Artificial Sequence
  Description of Artificial Sequence: Synthetic oligonucleotide
  Sense strand starting at position 3269 of SEQ ID NO: 317867
agaaauagcuucuuccugu

SEQ ID NO: 518558 - RNA, 19 nt, Artificial Sequence
  Description of Artificial Sequence: Synthetic oligonucleotide
  Antisense strand to SEQ ID NO: 518557
acaggaagaagcuauuucu

SEQ ID NO: 518559 - RNA, 19 nt, Artificial Sequence
  Description of Artificial Sequence: Synthetic oligonucleotide
  Sense strand starting at position 3459 of SEQ ID NO: 317867
uaaagaguacacugugcua

SEQ ID NO: 518560 - RNA, 19 nt, Artificial Sequence
  Description of Artificial Sequence: Synthetic oligonucleotide
  Antisense strand to SEQ ID NO: 518559
uagcacaguguacucuuua

SEQ ID NO: 518561 - RNA, 19 nt, Artificial Sequence
  Description of Artificial Sequence: Synthetic oligonucleotide
  Sense strand starting at position 3564 of SEQ ID NO: 317867
cggaucacuugagcugaga

SEQ ID NO: 518562 - RNA, 19 nt, Artificial Sequence
  Description of Artificial Sequence: Synthetic oligonucleotide
  Antisense strand to SEQ ID NO: 518561
ucucagcucaagugauccg

SEQ ID NO: 518563 - RNA, 19 nt, Artificial Sequence
  Description of Artificial Sequence: Synthetic oligonucleotide
  Sense strand starting at position 3702 of SEQ ID NO: 317867
cucacuugagcccgagaau

SEQ ID NO: 518564 - RNA, 19 nt, Artificial Sequence
  Description of Artificial Sequence: Synthetic oligonucleotide
  Antisense strand to SEQ ID NO: 518563
auucucgggcucaagugag

SEQ ID NO: 518565 - RNA, 19 nt, Artificial Sequence
  Description of Artificial Sequence: Synthetic oligonucleotide
  Sense strand starting at position 3711 of SEQ ID NO: 317867
gcccgagaauuuguaguga

SEQ ID NO: 518566 - RNA, 19 nt, Artificial Sequence
  Description of Artificial Sequence: Synthetic oligonucleotide
  Antisense strand to SEQ ID NO: 518565
ucacuacaaauucucgggc

SEQ ID NO: 518567 - RNA, 19 nt, Artificial Sequence
  Description of Artificial Sequence: Synthetic oligonucleotide
  Sense strand starting at position 3805 of SEQ ID NO: 317867
gugugugauuuguuauugu

SEQ ID NO: 518568 - RNA, 19 nt, Artificial Sequence
  Description of Artificial Sequence: Synthetic oligonucleotide
  Antisense strand to SEQ ID NO: 518567
acaauaacaaaucacacac

SEQ ID NO: 518569 - RNA, 19 nt, Artificial Sequence
  Description of Artificial Sequence: Synthetic oligonucleotide
  Sense strand starting at position 39 of SEQ ID NO: 317868
uucugaauguagucgagga

SEQ ID NO: 518570 - RNA, 19 nt, Artificial Sequence
  Description of Artificial Sequence: Synthetic oligonucleotide
  Antisense strand to SEQ ID NO: 518569
uccucgacuacauucagaa

SEQ ID NO: 518571 - RNA, 19 nt, Artificial Sequence
  Description of Artificial Sequence: Synthetic oligonucleotide
  Sense strand starting at position 40 of SEQ ID NO: 317868
ucugaauguagucgaggau

SEQ ID NO: 518572 - RNA, 19 nt, Artificial Sequence
  Description of Artificial Sequence: Synthetic oligonucleotide
  Antisense strand to SEQ ID NO: 518571
auccucgacuacauucaga

SEQ ID NO: 518573 - RNA, 19 nt, Artificial Sequence
  Description of Artificial Sequence: Synthetic oligonucleotide
  Sense strand starting at position 43 of SEQ ID NO: 317868
gaauguagucgaggauguu

SEQ ID NO: 518574 - RNA, 19 nt, Artificial Sequence
  Description of Artificial Sequence: Synthetic oligonucleotide
  Antisense strand to SEQ ID NO: 518573
aacauccucgacuacauuc

SEQ ID NO: 518575 - RNA, 19 nt, Artificial Sequence
  Description of Artificial Sequence: Synthetic oligonucleotide
  Sense strand starting at position 44 of SEQ ID NO: 317868
aauguagucgaggauguuu

SEQ ID NO: 518576 - RNA, 19 nt, Artificial Sequence
  Description of Artificial Sequence: Synthetic oligonucleotide
  Antisense strand to SEQ ID NO: 518575
aaacauccucgacuacauu

SEQ ID NO: 518577 - RNA, 19 nt, Artificial Sequence
  Description of Artificial Sequence: Synthetic oligonucleotide
  Sense strand starting at position 49 of SEQ ID NO: 317868
agucgaggauguuuauaag

SEQ ID NO: 518578 - RNA, 19 nt, Artificial Sequence
  Description of Artificial Sequence: Synthetic oligonucleotide
  Antisense strand to SEQ ID NO: 518577
cuuauaaacauccucgacu

SEQ ID NO: 518579 - RNA, 19 nt, Artificial Sequence
  Description of Artificial Sequence: Synthetic oligonucleotide
  Sense strand starting at position 112 of SEQ ID NO: 317868
aguuaucuucuguauuaga

SEQ ID NO: 518580 - RNA, 19 nt, Artificial Sequence
  Description of Artificial Sequence: Synthetic oligonucleotide
  Antisense strand to SEQ ID NO: 518579
ucuaauacagaagauaacu

SEQ ID NO: 518581 - RNA, 19 nt, Artificial Sequence
  Description of Artificial Sequence: Synthetic oligonucleotide
  Sense strand starting at position 192 of SEQ ID NO: 317868
guuugaaauuggguauaua

SEQ ID NO: 518582 - RNA, 19 nt, Artificial Sequence
  Description of Artificial Sequence: Synthetic oligonucleotide
  Antisense strand to SEQ ID NO: 518581
uauauacccaauuucaaac

SEQ ID NO: 518583 - RNA, 19 nt, Artificial Sequence
  Description of Artificial Sequence: Synthetic oligonucleotide
  Sense strand starting at position 718 of SEQ ID NO: 317868
acagcaauccugugaguua

SEQ ID NO: 518584 - RNA, 19 nt, Artificial Sequence
  Description of Artificial Sequence: Synthetic oligonucleotide
  Antisense strand to SEQ ID NO: 518583
uaacucacaggauugcugu

SEQ ID NO: 518585 - RNA, 19 nt, Artificial Sequence
  Description of Artificial Sequence: Synthetic oligonucleotide
  Sense strand starting at position 727 of SEQ ID NO: 317868
cugugaguuauauagagca

SEQ ID NO: 518586 - RNA, 19 nt, Artificial Sequence
  Description of Artificial Sequence: Synthetic oligonucleotide
  Antisense strand to SEQ ID NO: 518585
ugcucuauauaacucacag

SEQ ID NO: 518587 - RNA, 19 nt, Artificial Sequence
  Description of Artificial Sequence: Synthetic oligonucleotide
  Sense strand starting at position 729 of SEQ ID NO: 317868
gugaguuauauagagcaaa

SEQ ID NO: 518588 - RNA, 19 nt, Artificial Sequence
  Description of Artificial Sequence: Synthetic oligonucleotide
  Antisense strand to SEQ ID NO: 518587
uuugcucuauauaacucac

SEQ ID NO: 518589 - RNA, 19 nt, Artificial Sequence
  Description of Artificial Sequence: Synthetic oligonucleotide
  Sense strand starting at position 797 of SEQ ID NO: 317868
ggucacauucuguguaaca

SEQ ID NO: 518590 - RNA, 19 nt, Artificial Sequence
  Description of Artificial Sequence: Synthetic oligonucleotide
  Antisense strand to SEQ ID NO: 518589
uguuacacagaaugugacc

SEQ ID NO: 518591 - RNA, 19 nt, Artificial Sequence
  Description of Artificial Sequence: Synthetic oligonucleotide
  Sense strand starting at position 798 of SEQ ID NO: 317868
gucacauucuguguaacag

SEQ ID NO: 518592 - RNA, 19 nt, Artificial Sequence
  Description of Artificial Sequence: Synthetic oligonucleotide
  Antisense strand to SEQ ID NO: 518591
cuguuacacagaaugugac

SEQ ID NO: 518593 - RNA, 19 nt, Artificial Sequence
  Description of Artificial Sequence: Synthetic oligonucleotide
  Sense strand starting at position 799 of SEQ ID NO: 317868
ucacauucuguguaacaga

SEQ ID NO: 518594 - RNA, 19 nt, Artificial Sequence
  Description of Artificial Sequence: Synthetic oligonucleotide
  Antisense strand to SEQ ID NO: 518593
ucuguuacacagaauguga

SEQ ID NO: 518595 - RNA, 19 nt, Artificial Sequence
  Description of Artificial Sequence: Synthetic oligonucleotide
  Sense strand starting at position 846 of SEQ ID NO: 317868
cugcauucccaguacugga

SEQ ID NO: 518596 - RNA, 19 nt, Artificial Sequence
  Description of Artificial Sequence: Synthetic oligonucleotide
  Antisense strand to SEQ ID NO: 518595
uccaguacugggaaugcag

SEQ ID NO: 518597 - RNA, 19 nt, Artificial Sequence
  Description of Artificial Sequence: Synthetic oligonucleotide
  Sense strand starting at position 991 of SEQ ID NO: 317868
aauaauguugagugaugcu

SEQ ID NO: 518598 - RNA, 19 nt, Artificial Sequence
  Description of Artificial Sequence: Synthetic oligonucleotide
  Antisense strand to SEQ ID NO: 518597
agcaucacucaacauuauu

SEQ ID NO: 518599 - RNA, 19 nt, Artificial Sequence
  Description of Artificial Sequence: Synthetic oligonucleotide
  Sense strand starting at position 998 of SEQ ID NO: 317868
uugagugaugcugauaaac

SEQ ID NO: 518600 - RNA, 19 nt, Artificial Sequence
  Description of Artificial Sequence: Synthetic oligonucleotide
  Antisense strand to SEQ ID NO: 518599
guuuaucagcaucacucaa

SEQ ID NO: 518601 - RNA, 19 nt, Artificial Sequence
  Description of Artificial Sequence: Synthetic oligonucleotide
  Sense strand starting at position 1155 of SEQ ID NO: 317868
ugggcuauucugggaacca

SEQ ID NO: 518602 - RNA, 19 nt, Artificial Sequence
  Description of Artificial Sequence: Synthetic oligonucleotide
  Antisense strand to SEQ ID NO: 518601
ugguucccagaauagccca

SEQ ID NO: 518603 - RNA, 19 nt, Artificial Sequence
  Description of Artificial Sequence: Synthetic oligonucleotide
  Sense strand starting at position 1413 of SEQ ID NO: 317868
auagacuaacgauagugua

SEQ ID NO: 518604 - RNA, 19 nt, Artificial Sequence
  Description of Artificial Sequence: Synthetic oligonucleotide
  Antisense strand to SEQ ID NO: 518603
uacacuaucguuagucuau

SEQ ID NO: 518605 - RNA, 19 nt, Artificial Sequence
  Description of Artificial Sequence: Synthetic oligonucleotide
  Sense strand starting at position 1420 of SEQ ID NO: 317868
aacgauaguguagaauauu

SEQ ID NO: 518606 - RNA, 19 nt, Artificial Sequence
  Description of Artificial Sequence: Synthetic oligonucleotide
  Antisense strand to SEQ ID NO: 518605
aauauucuacacuaucguu

SEQ ID NO: 518607 - RNA, 19 nt, Artificial Sequence
  Description of Artificial Sequence: Synthetic oligonucleotide
  Sense strand starting at position 1489 of SEQ ID NO: 317868
ugugcugauauggaacaau

SEQ ID NO: 518608 - RNA, 19 nt, Artificial Sequence
  Description of Artificial Sequence: Synthetic oligonucleotide
  Antisense strand to SEQ ID NO: 518607
auuguuccauaucagcaca

SEQ ID NO: 518609 - RNA, 19 nt, Artificial Sequence
  Description of Artificial Sequence: Synthetic oligonucleotide
  Sense strand starting at position 2131 of SEQ ID NO: 317868
gggccaagaaggugaguuu

SEQ ID NO: 518610 - RNA, 19 nt, Artificial Sequence
  Description of Artificial Sequence: Synthetic oligonucleotide
  Antisense strand to SEQ ID NO: 518609
aaacucaccuucuuggccc

SEQ ID NO: 518611 - RNA, 19 nt, Artificial Sequence
  Description of Artificial Sequence: Synthetic oligonucleotide
  Sense strand starting at position 2345 of SEQ ID NO: 317868
ugcugugcucaaguuaucu

SEQ ID NO: 518612 - RNA, 19 nt, Artificial Sequence
  Description of Artificial Sequence: Synthetic oligonucleotide
  Antisense strand to SEQ ID NO: 518611
agauaacuugagcacagca

SEQ ID NO: 518613 - RNA, 19 nt, Artificial Sequence
  Description of Artificial Sequence: Synthetic oligonucleotide
  Sense strand starting at position 2465 of SEQ ID NO: 317868
ggaucagaagucuagcuuu

SEQ ID NO: 518614 - RNA, 19 nt, Artificial Sequence
  Description of Artificial Sequence: Synthetic oligonucleotide
  Antisense strand to SEQ ID NO: 518613
aaagcuagacuucugaucc

SEQ ID NO: 518615 - RNA, 19 nt, Artificial Sequence
  Description of Artificial Sequence: Synthetic oligonucleotide
  Sense strand starting at position 2770 of SEQ ID NO: 317868
ucaccagauguuggcuuua

SEQ ID NO: 518616 - RNA, 19 nt, Artificial Sequence
  Description of Artificial Sequence: Synthetic oligonucleotide
  Antisense strand to SEQ ID NO: 518615
uaaagccaacaucugguga

SEQ ID NO: 518617 - RNA, 19 nt, Artificial Sequence
  Description of Artificial Sequence: Synthetic oligonucleotide
  Sense strand starting at position 2772 of SEQ ID NO: 317868
accagauguuggcuuuaug

SEQ ID NO: 518618 - RNA, 19 nt, Artificial Sequence
  Description of Artificial Sequence: Synthetic oligonucleotide
  Antisense strand to SEQ ID NO: 518617
cauaaagccaacaucuggu

SEQ ID NO: 518619 - RNA, 19 nt, Artificial Sequence
  Description of Artificial Sequence: Synthetic oligonucleotide
  Sense strand starting at position 2794 of SEQ ID NO: 317868
agccauuucuacgucgagu

SEQ ID NO: 518620 - RNA, 19 nt, Artificial Sequence
  Description of Artificial Sequence: Synthetic oligonucleotide
  Antisense strand to SEQ ID NO: 518619
acucgacguagaaauggcu

SEQ ID NO: 518621 - RNA, 19 nt, Artificial Sequence
  Description of Artificial Sequence: Synthetic oligonucleotide
  Sense strand starting at position 2796 of SEQ ID NO: 317868
ccauuucuacgucgaguau

SEQ ID NO: 518622 - RNA, 19 nt, Artificial Sequence
  Description of Artificial Sequence: Synthetic oligonucleotide
  Antisense strand to SEQ ID NO: 518621
auacucgacguagaaaugg

SEQ ID NO: 518623 - RNA, 19 nt, Artificial Sequence
  Description of Artificial Sequence: Synthetic oligonucleotide
  Sense strand starting at position 2978 of SEQ ID NO: 317868
ccgagcuauuuauacuaaa

SEQ ID NO: 518624 - RNA, 19 nt, Artificial Sequence
  Description of Artificial Sequence: Synthetic oligonucleotide
  Antisense strand to SEQ ID NO: 518623
uuuaguauaaauagcucgg

SEQ ID NO: 518625 - RNA, 19 nt, Artificial Sequence
  Description of Artificial Sequence: Synthetic oligonucleotide
  Sense strand starting at position 3019 of SEQ ID NO: 317868
ucugcaauacgggauucua

SEQ ID NO: 518626 - RNA, 19 nt, Artificial Sequence
  Description of Artificial Sequence: Synthetic oligonucleotide
  Antisense strand to SEQ ID NO: 518625
uagaaucccguauugcaga

SEQ ID NO: 518627 - RNA, 19 nt, Artificial Sequence
  Description of Artificial Sequence: Synthetic oligonucleotide
  Sense strand starting at position 3131 of SEQ ID NO: 317868
ggaaauauaucacaaacug

SEQ ID NO: 518628 - RNA, 19 nt, Artificial Sequence
  Description of Artificial Sequence: Synthetic oligonucleotide
  Antisense strand to SEQ ID NO: 518627
caguuugugauauauuucc

SEQ ID NO: 518629 - RNA, 19 nt, Artificial Sequence
  Description of Artificial Sequence: Synthetic oligonucleotide
  Sense strand starting at position 3222 of SEQ ID NO: 317868
uguggaauauugguuuaaa

SEQ ID NO: 518630 - RNA, 19 nt, Artificial Sequence
  Description of Artificial Sequence: Synthetic oligonucleotide
  Antisense strand to SEQ ID NO: 518629
uuuaaaccaauauuccaca

SEQ ID NO: 518631 - RNA, 19 nt, Artificial Sequence
  Description of Artificial Sequence: Synthetic oligonucleotide
  Sense strand starting at position 3279 of SEQ ID NO: 317868
aaaugugagcauugaaaga

SEQ ID NO: 518632 - RNA, 19 nt, Artificial Sequence
  Description of Artificial Sequence: Synthetic oligonucleotide
  Antisense strand to SEQ ID NO: 518631
ucuuucaaugcucacauuu

SEQ ID NO: 518633 - RNA, 19 nt, Artificial Sequence
  Description of Artificial Sequence: Synthetic oligonucleotide
  Sense strand starting at position 3474 of SEQ ID NO: 317868
gaauguguaccugggaguu

SEQ ID NO: 518634 - RNA, 19 nt, Artificial Sequence
  Description of Artificial Sequence: Synthetic oligonucleotide
  Antisense strand to SEQ ID NO: 518633
aacucccagguacacauuc

SEQ ID NO: 518635 - RNA, 19 nt, Artificial Sequence
  Description of Artificial Sequence: Synthetic oligonucleotide
  Sense strand starting at position 3676 of SEQ ID NO: 317868
ccuacuacacagugaaguu

SEQ ID NO: 518636 - RNA, 19 nt, Artificial Sequence
  Description of Artificial Sequence: Synthetic oligonucleotide
  Antisense strand to SEQ ID NO: 518635
aacuucacuguguaguagg

SEQ ID NO: 518637 - RNA, 19 nt, Artificial Sequence
  Description of Artificial Sequence: Synthetic oligonucleotide
  Sense strand starting at position 3745 of SEQ ID NO: 317868
agaggucuuacguagugau

SEQ ID NO: 518638 - RNA, 19 nt, Artificial Sequence
  Description of Artificial Sequence: Synthetic oligonucleotide
  Antisense strand to SEQ ID NO: 518637
aucacuacguaagaccucu

SEQ ID NO: 518639 - RNA, 19 nt, Artificial Sequence
  Description of Artificial Sequence: Synthetic oligonucleotide
  Sense strand starting at position 3749 of SEQ ID NO: 317868
gucuuacguagugauaucu

SEQ ID NO: 518640 - RNA, 19 nt, Artificial Sequence
  Description of Artificial Sequence: Synthetic oligonucleotide
  Antisense strand to SEQ ID NO: 518639
agauaucacuacguaagac

SEQ ID NO: 518641 - RNA, 19 nt, Artificial Sequence
  Description of Artificial Sequence: Synthetic oligonucleotide
  Sense strand starting at position 3899 of SEQ ID NO: 317868
acauguuccugucuuuaua

SEQ ID NO: 518642 - RNA, 19 nt, Artificial Sequence
  Description of Artificial Sequence: Synthetic oligonucleotide
  Antisense strand to SEQ ID NO: 518641
uauaaagacaggaacaugu

SEQ ID NO: 518643 - RNA, 19 nt, Artificial Sequence
  Description of Artificial Sequence: Synthetic oligonucleotide
  Sense strand starting at position 3901 of SEQ ID NO: 317868
auguuccugucuuuauaau

SEQ ID NO: 518644 - RNA, 19 nt, Artificial Sequence
  Description of Artificial Sequence: Synthetic oligonucleotide
  Antisense strand to SEQ ID NO: 518643
auuauaaagacaggaacau

SEQ ID NO: 518645 - RNA, 19 nt, Artificial Sequence
  Description of Artificial Sequence: Synthetic oligonucleotide
  Sense strand starting at position 3902 of SEQ ID NO: 317868
uguuccugucuuuauaauu

SEQ ID NO: 518646 - RNA, 19 nt, Artificial Sequence
  Description of Artificial Sequence: Synthetic oligonucleotide
  Antisense strand to SEQ ID NO: 518645
aauuauaaagacaggaaca

SEQ ID NO: 518647 - RNA, 19 nt, Artificial Sequence
  Description of Artificial Sequence: Synthetic oligonucleotide
  Sense strand starting at position 3927 of SEQ ID NO: 317868
uugacuuuagaucguacua

SEQ ID NO: 518648 - RNA, 19 nt, Artificial Sequence
  Description of Artificial Sequence: Synthetic oligonucleotide
  Antisense strand to SEQ ID NO: 518647
uaguacgaucuaaagucaa

SEQ ID NO: 518649 - RNA, 19 nt, Artificial Sequence
  Description of Artificial Sequence: Synthetic oligonucleotide
  Sense strand starting at position 131 of SEQ ID NO: 317869
ggaugauguuuacuuuccu

SEQ ID NO: 518650 - RNA, 19 nt, Artificial Sequence
  Description of Artificial Sequence: Synthetic oligonucleotide
  Antisense strand to SEQ ID NO: 518649
aggaaaguaaacaucaucc

SEQ ID NO: 518651 - RNA, 19 nt, Artificial Sequence
  Description of Artificial Sequence: Synthetic oligonucleotide
  Sense strand starting at position 182 of SEQ ID NO: 317869
guguaaggaaacuauaguu

SEQ ID NO: 518652 - RNA, 19 nt, Artificial Sequence
  Description of Artificial Sequence: Synthetic oligonucleotide
  Antisense strand to SEQ ID NO: 518651
aacuauaguuuccuuacac

SEQ ID NO: 518653 - RNA, 19 nt, Artificial Sequence
  Description of Artificial Sequence: Synthetic oligonucleotide
  Sense strand starting at position 236 of SEQ ID NO: 317869
aguauucaggcugggcaaa

SEQ ID NO: 518654 - RNA, 19 nt, Artificial Sequence
  Description of Artificial Sequence: Synthetic oligonucleotide
  Antisense strand to SEQ ID NO: 518653
uuugcccagccugaauacu

SEQ ID NO: 518655 - RNA, 19 nt, Artificial Sequence
  Description of Artificial Sequence: Synthetic oligonucleotide
  Sense strand starting at position 273 of SEQ ID NO: 317869
cgauaauuaagauguguau

SEQ ID NO: 518656 - RNA, 19 nt, Artificial Sequence
  Description of Artificial Sequence: Synthetic oligonucleotide
  Antisense strand to SEQ ID NO: 518655
auacacaucuuaauuaucg

SEQ ID NO: 518657 - RNA, 19 nt, Artificial Sequence
  Description of Artificial Sequence: Synthetic oligonucleotide
  Sense strand starting at position 277 of SEQ ID NO: 317869
aauuaagauguguaugagu

SEQ ID NO: 518658 - RNA, 19 nt, Artificial Sequence
  Description of Artificial Sequence: Synthetic oligonucleotide
  Antisense strand to SEQ ID NO: 518657
acucauacacaucuuaauu

SEQ ID NO: 518659 - RNA, 19 nt, Artificial Sequence
  Description of Artificial Sequence: Synthetic oligonucleotide
  Sense strand starting at position 282 of SEQ ID NO: 317869
agauguguaugagucaauc

SEQ ID NO: 518660 - RNA, 19 nt, Artificial Sequence
  Description of Artificial Sequence: Synthetic oligonucleotide
  Antisense strand to SEQ ID NO: 518659
gauugacucauacacaucu

SEQ ID NO: 518661 - RNA, 19 nt, Artificial Sequence
  Description of Artificial Sequence: Synthetic oligonucleotide
  Sense strand starting at position 284 of SEQ ID NO: 317869
auguguaugagucaaucua

SEQ ID NO: 518662 - RNA, 19 nt, Artificial Sequence
  Description of Artificial Sequence: Synthetic oligonucleotide
  Antisense strand to SEQ ID NO: 518661
uagauugacucauacacau

SEQ ID NO: 518663 - RNA, 19 nt, Artificial Sequence
  Description of Artificial Sequence: Synthetic oligonucleotide
  Sense strand starting at position 396 of SEQ ID NO: 317869
ugcugaguauuauuuauuc

SEQ ID NO: 518664 - RNA, 19 nt, Artificial Sequence
  Description of Artificial Sequence: Synthetic oligonucleotide
  Antisense strand to SEQ ID NO: 518663
gaauaaauaauacucagca

SEQ ID NO: 518665 - RNA, 19 nt, Artificial Sequence
  Description of Artificial Sequence: Synthetic oligonucleotide
  Sense strand starting at position 760 of SEQ ID NO: 317869
ugacaaguagcccgaaauu

SEQ ID NO: 518666 - RNA, 19 nt, Artificial Sequence
  Description of Artificial Sequence: Synthetic oligonucleotide
  Antisense strand to SEQ ID NO: 518665
aauuucgggcuacuuguca

SEQ ID NO: 518667 - RNA, 19 nt, Artificial Sequence
  Description of Artificial Sequence: Synthetic oligonucleotide
  Sense strand starting at position 787 of SEQ ID NO: 317869
ucuucuugucaauauguga

SEQ ID NO: 518668 - RNA, 19 nt, Artificial Sequence
  Description of Artificial Sequence: Synthetic oligonucleotide
  Antisense strand to SEQ ID NO: 518667
ucacauauugacaagaaga

SEQ ID NO: 518669 - RNA, 19 nt, Artificial Sequence
  Description of Artificial Sequence: Synthetic oligonucleotide
  Sense strand starting at position 836 of SEQ ID NO: 317869
cugggauuaccagguuauu

SEQ ID NO: 518670 - RNA, 19 nt, Artificial Sequence
  Description of Artificial Sequence: Synthetic oligonucleotide
  Antisense strand to SEQ ID NO: 518669
aauaaccugguaaucccag

SEQ ID NO: 518671 - RNA, 19 nt, Artificial Sequence
  Description of Artificial Sequence: Synthetic oligonucleotide
  Sense strand starting at position 839 of SEQ ID NO: 317869
ggauuaccagguuauugua

SEQ ID NO: 518672 - RNA, 19 nt, Artificial Sequence
  Description of Artificial Sequence: Synthetic oligonucleotide
  Antisense strand to SEQ ID NO: 518671
uacaauaaccugguaaucc

SEQ ID NO: 518673 - RNA, 19 nt, Artificial Sequence
  Description of Artificial Sequence: Synthetic oligonucleotide
  Sense strand starting at position 841 of SEQ ID NO: 317869
auuaccagguuauuguaaa

SEQ ID NO: 518674 - RNA, 19 nt, Artificial Sequence
  Description of Artificial Sequence: Synthetic oligonucleotide
  Antisense strand to SEQ ID NO: 518673
uuuacaauaaccugguaau

SEQ ID NO: 518675 - RNA, 19 nt, Artificial Sequence
  Description of Artificial Sequence: Synthetic oligonucleotide
  Sense strand starting at position 907 of SEQ ID NO: 317869
gaaguuauuucucagggaa

SEQ ID NO: 518676 - RNA, 19 nt, Artificial Sequence
  Description of Artificial Sequence: Synthetic oligonucleotide
  Antisense strand to SEQ ID NO: 518675
uucccugagaaauaacuuc

SEQ ID NO: 518677 - RNA, 19 nt, Artificial Sequence
  Description of Artificial Sequence: Synthetic oligonucleotide
  Sense strand starting at position 1122 of SEQ ID NO: 317869
cucguuacucaacaaagau

SEQ ID NO: 518678 - RNA, 19 nt, Artificial Sequence
  Description of Artificial Sequence: Synthetic oligonucleotide
  Antisense strand to SEQ ID NO: 518677
aucuuuguugaguaacgag

SEQ ID NO: 518679 - RNA, 19 nt, Artificial Sequence
  Description of Artificial Sequence: Synthetic oligonucleotide
  Sense strand starting at position 2014 of SEQ ID NO: 317869
ccgaaauaucgcgagacuu

SEQ ID NO: 518680 - RNA, 19 nt, Artificial Sequence
  Description of Artificial Sequence: Synthetic oligonucleotide
  Antisense strand to SEQ ID NO: 518679
aagucucgcgauauuucgg

SEQ ID NO: 518681 - RNA, 19 nt, Artificial Sequence
  Description of Artificial Sequence: Synthetic oligonucleotide
  Sense strand starting at position 2233 of SEQ ID NO: 317869
accugauaagccuggcaga

SEQ ID NO: 518682 - RNA, 19 nt, Artificial Sequence
  Description of Artificial Sequence: Synthetic oligonucleotide
  Antisense strand to SEQ ID NO: 518681
ucugccaggcuuaucaggu

SEQ ID NO: 518683 - RNA, 19 nt, Artificial Sequence
  Description of Artificial Sequence: Synthetic oligonucleotide
  Sense strand starting at position 2234 of SEQ ID NO: 317869
ccugauaagccuggcagaa

SEQ ID NO: 518684 - RNA, 19 nt, Artificial Sequence
  Description of Artificial Sequence: Synthetic oligonucleotide
  Antisense strand to SEQ ID NO: 518683
uucugccaggcuuaucagg

SEQ ID NO: 518685 - RNA, 19 nt, Artificial Sequence
  Description of Artificial Sequence: Synthetic oligonucleotide
  Sense strand starting at position 2244 of SEQ ID NO: 317869
cuggcagaagccugaugaa

SEQ ID NO: 518686 - RNA, 19 nt, Artificial Sequence
  Description of Artificial Sequence: Synthetic oligonucleotide
  Antisense strand to SEQ ID NO: 518685
uucaucaggcuucugccag

SEQ ID NO: 518687 - RNA, 19 nt, Artificial Sequence
  Description of Artificial Sequence: Synthetic oligonucleotide
  Sense strand starting at position 2267 of SEQ ID NO: 317869
gaaugagugagauguggua

SEQ ID NO: 518688 - RNA, 19 nt, Artificial Sequence
  Description of Artificial Sequence: Synthetic oligonucleotide
  Antisense strand to SEQ ID NO: 518687
uaccacaucucacucauuc

SEQ ID NO: 518689 - RNA, 19 nt, Artificial Sequence
  Description of Artificial Sequence: Synthetic oligonucleotide
  Sense strand starting at position 2297 of SEQ ID NO: 317869
agguuagggcgucaucuaa

SEQ ID NO: 518690 - RNA, 19 nt, Artificial Sequence
  Description of Artificial Sequence: Synthetic oligonucleotide
  Antisense strand to SEQ ID NO: 518689
uuagaugacgcccuaaccu

SEQ ID NO: 518691 - RNA, 19 nt, Artificial Sequence
  Description of Artificial Sequence: Synthetic oligonucleotide
  Sense strand starting at position 2428 of SEQ ID NO: 317869
agugucucuugaguaaaug

SEQ ID NO: 518692 - RNA, 19 nt, Artificial Sequence
  Description of Artificial Sequence: Synthetic oligonucleotide
  Antisense strand to SEQ ID NO: 518691
cauuuacucaagagacacu

SEQ ID NO: 518693 - RNA, 19 nt, Artificial Sequence
  Description of Artificial Sequence: Synthetic oligonucleotide
  Sense strand starting at position 2429 of SEQ ID NO: 317869
gugucucuugaguaaaugu

SEQ ID NO: 518694 - RNA, 19 nt, Artificial Sequence
  Description of Artificial Sequence: Synthetic oligonucleotide
  Antisense strand to SEQ ID NO: 518693
acauuuacucaagagacac

SEQ ID NO: 518695 - RNA, 19 nt, Artificial Sequence
  Description of Artificial Sequence: Synthetic oligonucleotide
  Sense strand starting at position 2438 of SEQ ID NO: 317869
gaguaaaugugacccuuga

SEQ ID NO: 518696 - RNA, 19 nt, Artificial Sequence
  Description of Artificial Sequence: Synthetic oligonucleotide
  Antisense strand to SEQ ID NO: 518695
ucaagggucacauuuacuc

SEQ ID NO: 518697 - RNA, 19 nt, Artificial Sequence
  Description of Artificial Sequence: Synthetic oligonucleotide
  Sense strand starting at position 2497 of SEQ ID NO: 317869
gcguguuuccaagucccua

SEQ ID NO: 518698 - RNA, 19 nt, Artificial Sequence
  Description of Artificial Sequence: Synthetic oligonucleotide
  Antisense strand to SEQ ID NO: 518697
uagggacuuggaaacacgc

SEQ ID NO: 518699 - RNA, 19 nt, Artificial Sequence
  Description of Artificial Sequence: Synthetic oligonucleotide
  Sense strand starting at position 2528 of SEQ ID NO: 317869
uuugaaaggcucgaacacu

SEQ ID NO: 518700 - RNA, 19 nt, Artificial Sequence
  Description of Artificial Sequence: Synthetic oligonucleotide
  Antisense strand to SEQ ID NO: 518699
aguguucgagccuuucaaa

SEQ ID NO: 518701 - RNA, 19 nt, Artificial Sequence
  Description of Artificial Sequence: Synthetic oligonucleotide
  Sense strand starting at position 2536 of SEQ ID NO: 317869
gcucgaacacuugacaagu

SEQ ID NO: 518702 - RNA, 19 nt, Artificial Sequence
  Description of Artificial Sequence: Synthetic oligonucleotide
  Antisense strand to SEQ ID NO: 518701
acuugucaaguguucgagc

SEQ ID NO: 518703 - RNA, 19 nt, Artificial Sequence
  Description of Artificial Sequence: Synthetic oligonucleotide
  Sense strand starting at position 2550 of SEQ ID NO: 317869
caaguaggaaagugguauu

SEQ ID NO: 518704 - RNA, 19 nt, Artificial Sequence
  Description of Artificial Sequence: Synthetic oligonucleotide
  Antisense strand to SEQ ID NO: 518703
aauaccacuuuccuacuug

SEQ ID NO: 518705 - RNA, 19 nt, Artificial Sequence
  Description of Artificial Sequence: Synthetic oligonucleotide
  Sense strand starting at position 2600 of SEQ ID NO: 317869
ugaaauagugcugguaaua

SEQ ID NO: 518706 - RNA, 19 nt, Artificial Sequence
  Description of Artificial Sequence: Synthetic oligonucleotide
  Antisense strand to SEQ ID NO: 518705
uauuaccagcacuauuuca

SEQ ID NO: 518707 - RNA, 19 nt, Artificial Sequence
  Description of Artificial Sequence: Synthetic oligonucleotide
  Sense strand starting at position 2632 of SEQ ID NO: 317869
ccugcauugagcguuuguu

SEQ ID NO: 518708 - RNA, 19 nt, Artificial Sequence
  Description of Artificial Sequence: Synthetic oligonucleotide
  Antisense strand to SEQ ID NO: 518707
aacaaacgcucaaugcagg

SEQ ID NO: 518709 - RNA, 19 nt, Artificial Sequence
  Description of Artificial Sequence: Synthetic oligonucleotide
  Sense strand starting at position 2633 of SEQ ID NO: 317869
cugcauugagcguuuguuu

SEQ ID NO: 518710 - RNA, 19 nt, Artificial Sequence
  Description of Artificial Sequence: Synthetic oligonucleotide
  Antisense strand to SEQ ID NO: 518709
aaacaaacgcucaaugcag

SEQ ID NO: 518711 - RNA, 19 nt, Artificial Sequence
  Description of Artificial Sequence: Synthetic oligonucleotide
  Sense strand starting at position 2669 of SEQ ID NO: 317869
auuccagaaugaucagagu

SEQ ID NO: 518712 - RNA, 19 nt, Artificial Sequence
  Description of Artificial Sequence: Synthetic oligonucleotide
  Antisense strand to SEQ ID NO: 518711
acucugaucauucuggaau

SEQ ID NO: 518713 - RNA, 19 nt, Artificial Sequence
  Description of Artificial Sequence: Synthetic oligonucleotide
  Sense strand starting at position 2813 of SEQ ID NO: 317869
ggacacaagucuguccuua

SEQ ID NO: 518714 - RNA, 19 nt, Artificial Sequence
  Description of Artificial Sequence: Synthetic oligonucleotide
  Antisense strand to SEQ ID NO: 518713
uaaggacagacuugugucc

SEQ ID NO: 518715 - RNA, 19 nt, Artificial Sequence
  Description of Artificial Sequence: Synthetic oligonucleotide
  Sense strand starting at position 2815 of SEQ ID NO: 317869
acacaagucuguccuuaau

SEQ ID NO: 518716 - RNA, 19 nt, Artificial Sequence
  Description of Artificial Sequence: Synthetic oligonucleotide
  Antisense strand to SEQ ID NO: 518715
auuaaggacagacuugugu

SEQ ID NO: 518717 - RNA, 19 nt, Artificial Sequence
  Description of Artificial Sequence: Synthetic oligonucleotide
  Sense strand starting at position 2880 of SEQ ID NO: 317869
uugcaugaauguguauaga

SEQ ID NO: 518718 - RNA, 19 nt, Artificial Sequence
  Description of Artificial Sequence: Synthetic oligonucleotide
  Antisense strand to SEQ ID NO: 518717
ucuauacacauucaugcaa

SEQ ID NO: 518719 - RNA, 19 nt, Artificial Sequence
  Description of Artificial Sequence: Synthetic oligonucleotide
  Sense strand starting at position 3675 of SEQ ID NO: 317869
agcuacuuacgagauacuu

SEQ ID NO: 518720 - RNA, 19 nt, Artificial Sequence
  Description of Artificial Sequence: Synthetic oligonucleotide
  Antisense strand to SEQ ID NO: 518719
aaguaucucguaaguagcu

SEQ ID NO: 518721 - RNA, 19 nt, Artificial Sequence
  Description of Artificial Sequence: Synthetic oligonucleotide
  Sense strand starting at position 3697 of SEQ ID NO: 317869
aguucauaagugggaugau

SEQ ID NO: 518722 - RNA, 19 nt, Artificial Sequence
  Description of Artificial Sequence: Synthetic oligonucleotide
  Antisense strand to SEQ ID NO: 518721
aucaucccacuuaugaacu

SEQ ID NO: 518723 - RNA, 19 nt, Artificial Sequence
  Description of Artificial Sequence: Synthetic oligonucleotide
  Sense strand starting at position 3700 of SEQ ID NO: 317869
ucauaagugggaugauugu

SEQ ID NO: 518724 - RNA, 19 nt, Artificial Sequence
  Description of Artificial Sequence: Synthetic oligonucleotide
  Antisense strand to SEQ ID NO: 518723
acaaucaucccacuuauga

SEQ ID NO: 518725 - RNA, 19 nt, Artificial Sequence
  Description of Artificial Sequence: Synthetic oligonucleotide
  Sense strand starting at position 3707 of SEQ ID NO: 317869
ugggaugauuguguguuca

SEQ ID NO: 518726 - RNA, 19 nt, Artificial Sequence
  Description of Artificial Sequence: Synthetic oligonucleotide
  Antisense strand to SEQ ID NO: 518725
ugaacacacaaucauccca

SEQ ID NO: 518727 - RNA, 19 nt, Artificial Sequence
  Description of Artificial Sequence: Synthetic oligonucleotide
  Sense strand starting at position 3709 of SEQ ID NO: 317869
ggaugauuguguguucaca

SEQ ID NO: 518728 - RNA, 19 nt, Artificial Sequence
  Description of Artificial Sequence: Synthetic oligonucleotide
  Antisense strand to SEQ ID NO: 518727
ugugaacacacaaucaucc

SEQ ID NO: 518729 - RNA, 19 nt, Artificial Sequence
  Description of Artificial Sequence: Synthetic oligonucleotide
  Sense strand starting at position 60 of SEQ ID NO: 317870
agcaaagaacucugcuaag

SEQ ID NO: 518730 - RNA, 19 nt, Artificial Sequence
  Description of Artificial Sequence: Synthetic oligonucleotide
  Antisense strand to SEQ ID NO: 518729
cuuagcagaguucuuugcu

SEQ ID NO: 518731 - RNA, 19 nt, Artificial Sequence
  Description of Artificial Sequence: Synthetic oligonucleotide
  Sense strand starting at position 97 of SEQ ID NO: 317870
uguagaggguacucaauau

SEQ ID NO: 518732 - RNA, 19 nt, Artificial Sequence
  Description of Artificial Sequence: Synthetic oligonucleotide
  Antisense strand to SEQ ID NO: 518731
auauugaguacccucuaca

SEQ ID NO: 518733 - RNA, 19 nt, Artificial Sequence
  Description of Artificial Sequence: Synthetic oligonucleotide
  Sense strand starting at position 104 of SEQ ID NO: 317870
gguacucaauaucugauca

SEQ ID NO: 518734 - RNA, 19 nt, Artificial Sequence
  Description of Artificial Sequence: Synthetic oligonucleotide
  Antisense strand to SEQ ID NO: 518733
ugaucagauauugaguacc

SEQ ID NO: 518735 - RNA, 19 nt, Artificial Sequence
  Description of Artificial Sequence: Synthetic oligonucleotide
  Sense strand starting at position 359 of SEQ ID NO: 317870
ccagauagguccuuauacc

SEQ ID NO: 518736 - RNA, 19 nt, Artificial Sequence
  Description of Artificial Sequence: Synthetic oligonucleotide
  Antisense strand to SEQ ID NO: 518735
gguauaaggaccuaucugg

SEQ ID NO: 518737 - RNA, 19 nt, Artificial Sequence
  Description of Artificial Sequence: Synthetic oligonucleotide
  Sense strand starting at position 465 of SEQ ID NO: 317870
aguagaaacuguguaauua

SEQ ID NO: 518738 - RNA, 19 nt, Artificial Sequence
  Description of Artificial Sequence: Synthetic oligonucleotide
  Antisense strand to SEQ ID NO: 518737
uaauuacacaguuucuacu

SEQ ID NO: 518739 - RNA, 19 nt, Artificial Sequence
  Description of Artificial Sequence: Synthetic oligonucleotide
  Sense strand starting at position 466 of SEQ ID NO: 317870
guagaaacuguguaauuau

SEQ ID NO: 518740 - RNA, 19 nt, Artificial Sequence
  Description of Artificial Sequence: Synthetic oligonucleotide
  Antisense strand to SEQ ID NO: 518739
auaauuacacaguuucuac

SEQ ID NO: 518741 - RNA, 19 nt, Artificial Sequence
  Description of Artificial Sequence: Synthetic oligonucleotide
  Sense strand starting at position 786 of SEQ ID NO: 317870
cucuguguuaaaggaagau

SEQ ID NO: 518742 - RNA, 19 nt, Artificial Sequence
  Description of Artificial Sequence: Synthetic oligonucleotide
  Antisense strand to SEQ ID NO: 518741
aucuuccuuuaacacagag

SEQ ID NO: 518743 - RNA, 19 nt, Artificial Sequence
  Description of Artificial Sequence: Synthetic oligonucleotide
  Sense strand starting at position 845 of SEQ ID NO: 317870
gagacauguggguaaaugu

SEQ ID NO: 518744 - RNA, 19 nt, Artificial Sequence
  Description of Artificial Sequence: Synthetic oligonucleotide
  Antisense strand to SEQ ID NO: 518743
acauuuacccacaugucuc

SEQ ID NO: 518745 - RNA, 19 nt, Artificial Sequence
  Description of Artificial Sequence: Synthetic oligonucleotide
  Sense strand starting at position 870 of SEQ ID NO: 317870
acuacagugaugugacaag

SEQ ID NO: 518746 - RNA, 19 nt, Artificial Sequence
  Description of Artificial Sequence: Synthetic oligonucleotide
  Antisense strand to SEQ ID NO: 518745
cuugucacaucacuguagu

SEQ ID NO: 518747 - RNA, 19 nt, Artificial Sequence
  Description of Artificial Sequence: Synthetic oligonucleotide
  Sense strand starting at position 992 of SEQ ID NO: 317870
gcacuuggucuugaagaau

SEQ ID NO: 518748 - RNA, 19 nt, Artificial Sequence
  Description of Artificial Sequence: Synthetic oligonucleotide
  Antisense strand to SEQ ID NO: 518747
auucuucaagaccaagugc

SEQ ID NO: 518749 - RNA, 19 nt, Artificial Sequence
  Description of Artificial Sequence: Synthetic oligonucleotide
  Sense strand starting at position 1035 of SEQ ID NO: 317870
ucagcucuuccagaauggu

SEQ ID NO: 518750 - RNA, 19 nt, Artificial Sequence
  Description of Artificial Sequence: Synthetic oligonucleotide
  Antisense strand to SEQ ID NO: 518749
accauucuggaagagcuga

SEQ ID NO: 518751 - RNA, 19 nt, Artificial Sequence
  Description of Artificial Sequence: Synthetic oligonucleotide
  Sense strand starting at position 1044 of SEQ ID NO: 317870
ccagaauggucuucuaacu

SEQ ID NO: 518752 - RNA, 19 nt, Artificial Sequence
  Description of Artificial Sequence: Synthetic oligonucleotide
  Antisense strand to SEQ ID NO: 518751
aguuagaagaccauucugg

SEQ ID NO: 518753 - RNA, 19 nt, Artificial Sequence
  Description of Artificial Sequence: Synthetic oligonucleotide
  Sense strand starting at position 1093 of SEQ ID NO: 317870
agacguucaccuugggaag

SEQ ID NO: 518754 - RNA, 19 nt, Artificial Sequence
  Description of Artificial Sequence: Synthetic oligonucleotide
  Antisense strand to SEQ ID NO: 518753
cuucccaaggugaacgucu

SEQ ID NO: 518755 - RNA, 19 nt, Artificial Sequence
  Description of Artificial Sequence: Synthetic oligonucleotide
  Sense strand starting at position 1285 of SEQ ID NO: 317870
uggguuaaugguugagaac

SEQ ID NO: 518756 - RNA, 19 nt, Artificial Sequence
  Description of Artificial Sequence: Synthetic oligonucleotide
  Antisense strand to SEQ ID NO: 518755
guucucaaccauuaaccca

SEQ ID NO: 518757 - RNA, 19 nt, Artificial Sequence
  Description of Artificial Sequence: Synthetic oligonucleotide
  Sense strand starting at position 1478 of SEQ ID NO: 317870
accucauuugcaggcauau

SEQ ID NO: 518758 - RNA, 19 nt, Artificial Sequence
  Description of Artificial Sequence: Synthetic oligonucleotide
  Antisense strand to SEQ ID NO: 518757
auaugccugcaaaugaggu

SEQ ID NO: 518759 - RNA, 19 nt, Artificial Sequence
  Description of Artificial Sequence: Synthetic oligonucleotide
  Sense strand starting at position 1572 of SEQ ID NO: 317870
aguuuacagguuugaaaga

SEQ ID NO: 518760 - RNA, 19 nt, Artificial Sequence
  Description of Artificial Sequence: Synthetic oligonucleotide
  Antisense strand to SEQ ID NO: 518759
ucuuucaaaccuguaaacu

SEQ ID NO: 518761 - RNA, 19 nt, Artificial Sequence
  Description of Artificial Sequence: Synthetic oligonucleotide
  Sense strand starting at position 1632 of SEQ ID NO: 317870
aggaaagcaucuucccaaa

SEQ ID NO: 518762 - RNA, 19 nt, Artificial Sequence
  Description of Artificial Sequence: Synthetic oligonucleotide
  Antisense strand to SEQ ID NO: 518761
uuugggaagaugcuuuccu

SEQ ID NO: 518763 - RNA, 19 nt, Artificial Sequence
  Description of Artificial Sequence: Synthetic oligonucleotide
  Sense strand starting at position 1659 of SEQ ID NO: 317870
caugaauuucuaggugcgu

SEQ ID NO: 518764 - RNA, 19 nt, Artificial Sequence
  Description of Artificial Sequence: Synthetic oligonucleotide
  Antisense strand to SEQ ID NO: 518763
acgcaccuagaaauucaug

SEQ ID NO: 518765 - RNA, 19 nt, Artificial Sequence
  Description of Artificial Sequence: Synthetic oligonucleotide
  Sense strand starting at position 1660 of SEQ ID NO: 317870
augaauuucuaggugcgua

SEQ ID NO: 518766 - RNA, 19 nt, Artificial Sequence
  Description of Artificial Sequence: Synthetic oligonucleotide
  Antisense strand to SEQ ID NO: 518765
uacgcaccuagaaauucau

SEQ ID NO: 518767 - RNA, 19 nt, Artificial Sequence
  Description of Artificial Sequence: Synthetic oligonucleotide
  Sense strand starting at position 1843 of SEQ ID NO: 317870
aggugugacagaugauaau

SEQ ID NO: 518768 - RNA, 19 nt, Artificial Sequence
  Description of Artificial Sequence: Synthetic oligonucleotide
  Antisense strand to SEQ ID NO: 518767
auuaucaucugucacaccu

SEQ ID NO: 518769 - RNA, 19 nt, Artificial Sequence
  Description of Artificial Sequence: Synthetic oligonucleotide
  Sense strand starting at position 2076 of SEQ ID NO: 317870
ucacguuucuaauuugcau

SEQ ID NO: 518770 - RNA, 19 nt, Artificial Sequence
  Description of Artificial Sequence: Synthetic oligonucleotide
  Antisense strand to SEQ ID NO: 518769
augcaaauuagaaacguga

SEQ ID NO: 518771 - RNA, 19 nt, Artificial Sequence
  Description of Artificial Sequence: Synthetic oligonucleotide
  Sense strand starting at position 2197 of SEQ ID NO: 317870
ccugguguuguuaggguaa

SEQ ID NO: 518772 - RNA, 19 nt, Artificial Sequence
  Description of Artificial Sequence: Synthetic oligonucleotide
  Antisense strand to SEQ ID NO: 518771
uuacccuaacaacaccagg

SEQ ID NO: 518773 - RNA, 19 nt, Artificial Sequence
  Description of Artificial Sequence: Synthetic oligonucleotide
  Sense strand starting at position 2209 of SEQ ID NO: 317870
aggguaauauuguuuauac

SEQ ID NO: 518774 - RNA, 19 nt, Artificial Sequence
  Description of Artificial Sequence: Synthetic oligonucleotide
  Antisense strand to SEQ ID NO: 518773
guauaaacaauauuacccu

SEQ ID NO: 518775 - RNA, 19 nt, Artificial Sequence
  Description of Artificial Sequence: Synthetic oligonucleotide
  Sense strand starting at position 2210 of SEQ ID NO: 317870
ggguaauauuguuuauaca

SEQ ID NO: 518776 - RNA, 19 nt, Artificial Sequence
  Description of Artificial Sequence: Synthetic oligonucleotide
  Antisense strand to SEQ ID NO: 518775
uguauaaacaauauuaccc

SEQ ID NO: 518777 - RNA, 19 nt, Artificial Sequence
  Description of Artificial Sequence: Synthetic oligonucleotide
  Sense strand starting at position 2211 of SEQ ID NO: 317870
gguaauauuguuuauacac

SEQ ID NO: 518778 - RNA, 19 nt, Artificial Sequence
  Description of Artificial Sequence: Synthetic oligonucleotide
  Antisense strand to SEQ ID NO: 518777
guguauaaacaauauuacc

SEQ ID NO: 518779 - RNA, 19 nt, Artificial Sequence
  Description of Artificial Sequence: Synthetic oligonucleotide
  Sense strand starting at position 2220 of SEQ ID NO: 317870
guuuauacacuauacaguu

SEQ ID NO: 518780 - RNA, 19 nt, Artificial Sequence
  Description of Artificial Sequence: Synthetic oligonucleotide
  Antisense strand to SEQ ID NO: 518779
aacuguauaguguauaaac

SEQ ID NO: 518781 - RNA, 19 nt, Artificial Sequence
  Description of Artificial Sequence: Synthetic oligonucleotide
  Sense strand starting at position 2352 of SEQ ID NO: 317870
uugagucaacagugauauc

SEQ ID NO: 518782 - RNA, 19 nt, Artificial Sequence
  Description of Artificial Sequence: Synthetic oligonucleotide
  Antisense strand to SEQ ID NO: 518781
gauaucacuguugacucaa

SEQ ID NO: 518783 - RNA, 19 nt, Artificial Sequence
  Description of Artificial Sequence: Synthetic oligonucleotide
  Sense strand starting at position 2455 of SEQ ID NO: 317870
ugucgagaaacucagucuu

SEQ ID NO: 518784 - RNA, 19 nt, Artificial Sequence
  Description of Artificial Sequence: Synthetic oligonucleotide
  Antisense strand to SEQ ID NO: 518783
aagacugaguuucucgaca

SEQ ID NO: 518785 - RNA, 19 nt, Artificial Sequence
  Description of Artificial Sequence: Synthetic oligonucleotide
  Sense strand starting at position 2457 of SEQ ID NO: 317870
ucgagaaacucagucuuac

SEQ ID NO: 518786 - RNA, 19 nt, Artificial Sequence
  Description of Artificial Sequence: Synthetic oligonucleotide
  Antisense strand to SEQ ID NO: 518785
guaagacugaguuucucga

SEQ ID NO: 518787 - RNA, 19 nt, Artificial Sequence
  Description of Artificial Sequence: Synthetic oligonucleotide
  Sense strand starting at position 2470 of SEQ ID NO: 317870
ucuuacuuuguguaaacaa

SEQ ID NO: 518788 - RNA, 19 nt, Artificial Sequence
  Description of Artificial Sequence: Synthetic oligonucleotide
  Antisense strand to SEQ ID NO: 518787
uuguuuacacaaaguaaga

SEQ ID NO: 518789 - RNA, 19 nt, Artificial Sequence
  Description of Artificial Sequence: Synthetic oligonucleotide
  Sense strand starting at position 2681 of SEQ ID NO: 317870
auccuauguggcuaaacau

SEQ ID NO: 518790 - RNA, 19 nt, Artificial Sequence
  Description of Artificial Sequence: Synthetic oligonucleotide
  Antisense strand to SEQ ID NO: 518789
auguuuagccacauaggau

SEQ ID NO: 518791 - RNA, 19 nt, Artificial Sequence
  Description of Artificial Sequence: Synthetic oligonucleotide
  Sense strand starting at position 2702 of SEQ ID NO: 317870
ugaucaucuuaacugugaa

SEQ ID NO: 518792 - RNA, 19 nt, Artificial Sequence
  Description of Artificial Sequence: Synthetic oligonucleotide
  Antisense strand to SEQ ID NO: 518791
uucacaguuaagaugauca

SEQ ID NO: 518793 - RNA, 19 nt, Artificial Sequence
  Description of Artificial Sequence: Synthetic oligonucleotide
  Sense strand starting at position 2776 of SEQ ID NO: 317870
ucccaucgaguugaauaaa

SEQ ID NO: 518794 - RNA, 19 nt, Artificial Sequence
  Description of Artificial Sequence: Synthetic oligonucleotide
  Antisense strand to SEQ ID NO: 518793
uuuauucaacucgauggga

SEQ ID NO: 518795 - RNA, 19 nt, Artificial Sequence
  Description of Artificial Sequence: Synthetic oligonucleotide
  Sense strand starting at position 2903 of SEQ ID NO: 317870
ggaacucauccugguaaca

SEQ ID NO: 518796 - RNA, 19 nt, Artificial Sequence
  Description of Artificial Sequence: Synthetic oligonucleotide
  Antisense strand to SEQ ID NO: 518795
uguuaccaggaugaguucc

SEQ ID NO: 518797 - RNA, 19 nt, Artificial Sequence
  Description of Artificial Sequence: Synthetic oligonucleotide
  Sense strand starting at position 3467 of SEQ ID NO: 317870
ggcuguuguccguuucuaa

SEQ ID NO: 518798 - RNA, 19 nt, Artificial Sequence
  Description of Artificial Sequence: Synthetic oligonucleotide
  Antisense strand to SEQ ID NO: 518797
uuagaaacggacaacagcc

SEQ ID NO: 518799 - RNA, 19 nt, Artificial Sequence
  Description of Artificial Sequence: Synthetic oligonucleotide
  Sense strand starting at position 3468 of SEQ ID NO: 317870
gcuguuguccguuucuaau

SEQ ID NO: 518800 - RNA, 19 nt, Artificial Sequence
  Description of Artificial Sequence: Synthetic oligonucleotide
  Antisense strand to SEQ ID NO: 518799
auuagaaacggacaacagc

SEQ ID NO: 518801 - RNA, 19 nt, Artificial Sequence
  Description of Artificial Sequence: Synthetic oligonucleotide
  Sense strand starting at position 3762 of SEQ ID NO: 317870
gagaguuacuuccugggaa

SEQ ID NO: 518802 - RNA, 19 nt, Artificial Sequence
  Description of Artificial Sequence: Synthetic oligonucleotide
  Antisense strand to SEQ ID NO: 518801
uucccaggaaguaacucuc

SEQ ID NO: 518803 - RNA, 19 nt, Artificial Sequence
  Description of Artificial Sequence: Synthetic oligonucleotide
  Sense strand starting at position 3764 of SEQ ID NO: 317870
gaguuacuuccugggaaga

SEQ ID NO: 518804 - RNA, 19 nt, Artificial Sequence
  Description of Artificial Sequence: Synthetic oligonucleotide
  Antisense strand to SEQ ID NO: 518803
ucuucccaggaaguaacuc

SEQ ID NO: 518805 - RNA, 19 nt, Artificial Sequence
  Description of Artificial Sequence: Synthetic oligonucleotide
  Sense strand starting at position 3765 of SEQ ID NO: 317870
aguuacuuccugggaagau

SEQ ID NO: 518806 - RNA, 19 nt, Artificial Sequence
  Description of Artificial Sequence: Synthetic oligonucleotide
  Antisense strand to SEQ ID NO: 518805
aucuucccaggaaguaacu

SEQ ID NO: 518807 - RNA, 19 nt, Artificial Sequence
  Description of Artificial Sequence: Synthetic oligonucleotide
  Sense strand starting at position 3775 of SEQ ID NO: 317870
ugggaagauuuccacagau

SEQ ID NO: 518808 - RNA, 19 nt, Artificial Sequence
  Description of Artificial Sequence: Synthetic oligonucleotide
  Antisense strand to SEQ ID NO: 518807
aucuguggaaaucuuccca

SEQ ID NO: 518809 - RNA, 19 nt, Artificial Sequence
  Description of Artificial Sequence: Synthetic oligonucleotide
  Sense strand starting at position 1 of SEQ ID NO: 317871
gguauuuguuucuucuaac

SEQ ID NO: 518810 - RNA, 19 nt, Artificial Sequence
  Description of Artificial Sequence: Synthetic oligonucleotide
  Antisense strand to SEQ ID NO: 518809
guuagaagaaacaaauacc

SEQ ID NO: 518811 - RNA, 19 nt, Artificial Sequence
  Description of Artificial Sequence: Synthetic oligonucleotide
  Sense strand starting at position 2 of SEQ ID NO: 317871
guauuuguuucuucuaacu

SEQ ID NO: 518812 - RNA, 19 nt, Artificial Sequence
  Description of Artificial Sequence: Synthetic oligonucleotide
  Antisense strand to SEQ ID NO: 518811
aguuagaagaaacaaauac

SEQ ID NO: 518813 - RNA, 19 nt, Artificial Sequence
  Description of Artificial Sequence: Synthetic oligonucleotide
  Sense strand starting at position 52 of SEQ ID NO: 317871
ccauuaggucuccaucuga

SEQ ID NO: 518814 - RNA, 19 nt, Artificial Sequence
  Description of Artificial Sequence: Synthetic oligonucleotide
  Antisense strand to SEQ ID NO: 518813
ucagauggagaccuaaugg

SEQ ID NO: 518815 - RNA, 19 nt, Artificial Sequence
  Description of Artificial Sequence: Synthetic oligonucleotide
  Sense strand starting at position 227 of SEQ ID NO: 317871
aagagacacugcucguaaa

SEQ ID NO: 518816 - RNA, 19 nt, Artificial Sequence
  Description of Artificial Sequence: Synthetic oligonucleotide
  Antisense strand to SEQ ID NO: 518815
uuuacgagcagugucucuu

SEQ ID NO: 518817 - RNA, 19 nt, Artificial Sequence
  Description of Artificial Sequence: Synthetic oligonucleotide
  Sense strand starting at position 397 of SEQ ID NO: 317871
caaagagguuaguuuaaug

SEQ ID NO: 518818 - RNA, 19 nt, Artificial Sequence
  Description of Artificial Sequence: Synthetic oligonucleotide
  Antisense strand to SEQ ID NO: 518817
cauuaaacuaaccucuuug

SEQ ID NO: 518819 - RNA, 19 nt, Artificial Sequence
  Description of Artificial Sequence: Synthetic oligonucleotide
  Sense strand starting at position 461 of SEQ ID NO: 317871
cggcuuugagcucaauaca

SEQ ID NO: 518820 - RNA, 19 nt, Artificial Sequence
  Description of Artificial Sequence: Synthetic oligonucleotide
  Antisense strand to SEQ ID NO: 518819
uguauugagcucaaagccg

SEQ ID NO: 518821 - RNA, 19 nt, Artificial Sequence
  Description of Artificial Sequence: Synthetic oligonucleotide
  Sense strand starting at position 483 of SEQ ID NO: 317871
ucguaaacuuucuuagaac

SEQ ID NO: 518822 - RNA, 19 nt, Artificial Sequence
  Description of Artificial Sequence: Synthetic oligonucleotide
  Antisense strand to SEQ ID NO: 518821
guucuaagaaaguuuacga

SEQ ID NO: 518823 - RNA, 19 nt, Artificial Sequence
  Description of Artificial Sequence: Synthetic oligonucleotide
  Sense strand starting at position 851 of SEQ ID NO: 317871
ugucaucaguuaguuauuu

SEQ ID NO: 518824 - RNA, 19 nt, Artificial Sequence
  Description of Artificial Sequence: Synthetic oligonucleotide
  Antisense strand to SEQ ID NO: 518823
aaauaacuaacugaugaca

SEQ ID NO: 518825 - RNA, 19 nt, Artificial Sequence
  Description of Artificial Sequence: Synthetic oligonucleotide
  Sense strand starting at position 852 of SEQ ID NO: 317871
gucaucaguuaguuauuua

SEQ ID NO: 518826 - RNA, 19 nt, Artificial Sequence
  Description of Artificial Sequence: Synthetic oligonucleotide
  Antisense strand to SEQ ID NO: 518825
uaaauaacuaacugaugac

SEQ ID NO: 518827 - RNA, 19 nt, Artificial Sequence
  Description of Artificial Sequence: Synthetic oligonucleotide
  Sense strand starting at position 859 of SEQ ID NO: 317871
guuaguuauuuagucguca

SEQ ID NO: 518828 - RNA, 19 nt, Artificial Sequence
  Description of Artificial Sequence: Synthetic oligonucleotide
  Antisense strand to SEQ ID NO: 518827
ugacgacuaaauaacuaac

SEQ ID NO: 518829 - RNA, 19 nt, Artificial Sequence
  Description of Artificial Sequence: Synthetic oligonucleotide
  Sense strand starting at position 861 of SEQ ID NO: 317871
uaguuauuuagucgucagu

SEQ ID NO: 518830 - RNA, 19 nt, Artificial Sequence
  Description of Artificial Sequence: Synthetic oligonucleotide
  Antisense strand to SEQ ID NO: 518829
acugacgacuaaauaacua

SEQ ID NO: 518831 - RNA, 19 nt, Artificial Sequence
  Description of Artificial Sequence: Synthetic oligonucleotide
  Sense strand starting at position 863 of SEQ ID NO: 317871
guuauuuagucgucaguua

SEQ ID NO: 518832 - RNA, 19 nt, Artificial Sequence
  Description of Artificial Sequence: Synthetic oligonucleotide
  Antisense strand to SEQ ID NO: 518831
uaacugacgacuaaauaac

SEQ ID NO: 518833 - RNA, 19 nt, Artificial Sequence
  Description of Artificial Sequence: Synthetic oligonucleotide
  Sense strand starting at position 867 of SEQ ID NO: 317871
uuuagucgucaguuagugu

SEQ ID NO: 518834 - RNA, 19 nt, Artificial Sequence
  Description of Artificial Sequence: Synthetic oligonucleotide
  Antisense strand to SEQ ID NO: 518833
acacuaacugacgacuaaa

SEQ ID NO: 518835 - RNA, 19 nt, Artificial Sequence
  Description of Artificial Sequence: Synthetic oligonucleotide
  Sense strand starting at position 1039 of SEQ ID NO: 317871
ucaugucuucucuggagga

SEQ ID NO: 518836 - RNA, 19 nt, Artificial Sequence
  Description of Artificial Sequence: Synthetic oligonucleotide
  Antisense strand to SEQ ID NO: 518835
uccuccagagaagacauga

SEQ ID NO: 518837 - RNA, 19 nt, Artificial Sequence
  Description of Artificial Sequence: Synthetic oligonucleotide
  Sense strand starting at position 1055 of SEQ ID NO: 317871
ggaccugagaaaggcuuua

SEQ ID NO: 518838 - RNA, 19 nt, Artificial Sequence
  Description of Artificial Sequence: Synthetic oligonucleotide
  Antisense strand to SEQ ID NO: 518837
uaaagccuuucucaggucc

SEQ ID NO: 518839 - RNA, 19 nt, Artificial Sequence
  Description of Artificial Sequence: Synthetic oligonucleotide
  Sense strand starting at position 1124 of SEQ ID NO: 317871
ccuggacagucuuccucua

SEQ ID NO: 518840 - RNA, 19 nt, Artificial Sequence
  Description of Artificial Sequence: Synthetic oligonucleotide
  Antisense strand to SEQ ID NO: 518839
uagaggaagacuguccagg

SEQ ID NO: 518841 - RNA, 19 nt, Artificial Sequence
  Description of Artificial Sequence: Synthetic oligonucleotide
  Sense strand starting at position 1126 of SEQ ID NO: 317871
uggacagucuuccucuaag

SEQ ID NO: 518842 - RNA, 19 nt, Artificial Sequence
  Description of Artificial Sequence: Synthetic oligonucleotide
  Antisense strand to SEQ ID NO: 518841
cuuagaggaagacugucca

SEQ ID NO: 518843 - RNA, 19 nt, Artificial Sequence
  Description of Artificial Sequence: Synthetic oligonucleotide
  Sense strand starting at position 1186 of SEQ ID NO: 317871
guaacacuuucugcaagaa

SEQ ID NO: 518844 - RNA, 19 nt, Artificial Sequence
  Description of Artificial Sequence: Synthetic oligonucleotide
  Antisense strand to SEQ ID NO: 518843
uucuugcagaaaguguuac

SEQ ID NO: 518845 - RNA, 19 nt, Artificial Sequence
  Description of Artificial Sequence: Synthetic oligonucleotide
  Sense strand starting at position 1312 of SEQ ID NO: 317871
uuggcuguucagucgucaa

SEQ ID NO: 518846 - RNA, 19 nt, Artificial Sequence
  Description of Artificial Sequence: Synthetic oligonucleotide
  Antisense strand to SEQ ID NO: 518845
uugacgacugaacagccaa

SEQ ID NO: 518847 - RNA, 19 nt, Artificial Sequence
  Description of Artificial Sequence: Synthetic oligonucleotide
  Sense strand starting at position 1366 of SEQ ID NO: 317871
ggacccaugucagucaaau

SEQ ID NO: 518848 - RNA, 19 nt, Artificial Sequence
  Description of Artificial Sequence: Synthetic oligonucleotide
  Antisense strand to SEQ ID NO: 518847
auuugacugacaugggucc

SEQ ID NO: 518849 - RNA, 19 nt, Artificial Sequence
  Description of Artificial Sequence: Synthetic oligonucleotide
  Sense strand starting at position 1482 of SEQ ID NO: 317871
gcuggagcgacaugaucaa

SEQ ID NO: 518850 - RNA, 19 nt, Artificial Sequence
  Description of Artificial Sequence: Synthetic oligonucleotide
  Antisense strand to SEQ ID NO: 518849
uugaucaugucgcuccagc

SEQ ID NO: 518851 - RNA, 19 nt, Artificial Sequence
  Description of Artificial Sequence: Synthetic oligonucleotide
  Sense strand starting at position 1904 of SEQ ID NO: 317871
cccagagucgccgccauau

SEQ ID NO: 518852 - RNA, 19 nt, Artificial Sequence
  Description of Artificial Sequence: Synthetic oligonucleotide
  Antisense strand to SEQ ID NO: 518851
auauggcggcgacucuggg

SEQ ID NO: 518853 - RNA, 19 nt, Artificial Sequence
  Description of Artificial Sequence: Synthetic oligonucleotide
  Sense strand starting at position 2245 of SEQ ID NO: 317871
ugaaguccugccuggaaag

SEQ ID NO: 518854 - RNA, 19 nt, Artificial Sequence
  Description of Artificial Sequence: Synthetic oligonucleotide
  Antisense strand to SEQ ID NO: 518853
cuuuccaggcaggacuuca

SEQ ID NO: 518855 - RNA, 19 nt, Artificial Sequence
  Description of Artificial Sequence: Synthetic oligonucleotide
  Sense strand starting at position 2289 of SEQ ID NO: 317871
gugacaguaugacuauuau

SEQ ID NO: 518856 - RNA, 19 nt, Artificial Sequence
  Description of Artificial Sequence: Synthetic oligonucleotide
  Antisense strand to SEQ ID NO: 518855
auaauagucauacugucac

SEQ ID NO: 518857 - RNA, 19 nt, Artificial Sequence
  Description of Artificial Sequence: Synthetic oligonucleotide
  Sense strand starting at position 2301 of SEQ ID NO: 317871
cuauuaugcuccucaggga

SEQ ID NO: 518858 - RNA, 19 nt, Artificial Sequence
  Description of Artificial Sequence: Synthetic oligonucleotide
  Antisense strand to SEQ ID NO: 518857
ucccugaggagcauaauag

SEQ ID NO: 518859 - RNA, 19 nt, Artificial Sequence
  Description of Artificial Sequence: Synthetic oligonucleotide
  Sense strand starting at position 2302 of SEQ ID NO: 317871
uauuaugcuccucagggau

SEQ ID NO: 518860 - RNA, 19 nt, Artificial Sequence
  Description of Artificial Sequence: Synthetic oligonucleotide
  Antisense strand to SEQ ID NO: 518859
aucccugaggagcauaaua

SEQ ID NO: 518861 - RNA, 19 nt, Artificial Sequence
  Description of Artificial Sequence: Synthetic oligonucleotide
  Sense strand starting at position 2361 of SEQ ID NO: 317871
agugguaggcccuggagau

SEQ ID NO: 518862 - RNA, 19 nt, Artificial Sequence
  Description of Artificial Sequence: Synthetic oligonucleotide
  Antisense strand to SEQ ID NO: 518861
aucuccagggccuaccacu

SEQ ID NO: 518863 - RNA, 19 nt, Artificial Sequence
  Description of Artificial Sequence: Synthetic oligonucleotide
  Sense strand starting at position 2362 of SEQ ID NO: 317871
gugguaggcccuggagauu

SEQ ID NO: 518864 - RNA, 19 nt, Artificial Sequence
  Description of Artificial Sequence: Synthetic oligonucleotide
  Antisense strand to SEQ ID NO: 518863
aaucuccagggccuaccac

SEQ ID NO: 518865 - RNA, 19 nt, Artificial Sequence
  Description of Artificial Sequence: Synthetic oligonucleotide
  Sense strand starting at position 2647 of SEQ ID NO: 317871
ucucuuccagucuaguuau

SEQ ID NO: 518866 - RNA, 19 nt, Artificial Sequence
  Description of Artificial Sequence: Synthetic oligonucleotide
  Antisense strand to SEQ ID NO: 518865
auaacuagacuggaagaga

SEQ ID NO: 518867 - RNA, 19 nt, Artificial Sequence
  Description of Artificial Sequence: Synthetic oligonucleotide
  Sense strand starting at position 2729 of SEQ ID NO: 317871
ggaaauaaauauucuugcu

SEQ ID NO: 518868 - RNA, 19 nt, Artificial Sequence
  Description of Artificial Sequence: Synthetic oligonucleotide
  Antisense strand to SEQ ID NO: 518867
agcaagaauauuuauuucc

SEQ ID NO: 518869 - RNA, 19 nt, Artificial Sequence
  Description of Artificial Sequence: Synthetic oligonucleotide
  Sense strand starting at position 2922 of SEQ ID NO: 317871
agagauguauauuccugga

SEQ ID NO: 518870 - RNA, 19 nt, Artificial Sequence
  Description of Artificial Sequence: Synthetic oligonucleotide
  Antisense strand to SEQ ID NO: 518869
uccaggaauauacaucucu

SEQ ID NO: 518871 - RNA, 19 nt, Artificial Sequence
  Description of Artificial Sequence: Synthetic oligonucleotide
  Sense strand starting at position 2924 of SEQ ID NO: 317871
agauguauauuccuggaca

SEQ ID NO: 518872 - RNA, 19 nt, Artificial Sequence
  Description of Artificial Sequence: Synthetic oligonucleotide
  Antisense strand to SEQ ID NO: 518871
uguccaggaauauacaucu

SEQ ID NO: 518873 - RNA, 19 nt, Artificial Sequence
  Description of Artificial Sequence: Synthetic oligonucleotide
  Sense strand starting at position 2926 of SEQ ID NO: 317871
auguauauuccuggacaua

SEQ ID NO: 518874 - RNA, 19 nt, Artificial Sequence
  Description of Artificial Sequence: Synthetic oligonucleotide
  Antisense strand to SEQ ID NO: 518873
uauguccaggaauauacau

SEQ ID NO: 518875 - RNA, 19 nt, Artificial Sequence
  Description of Artificial Sequence: Synthetic oligonucleotide
  Sense strand starting at position 3383 of SEQ ID NO: 317871
aaagcacuggucuagaagu

SEQ ID NO: 518876 - RNA, 19 nt, Artificial Sequence
  Description of Artificial Sequence: Synthetic oligonucleotide
  Antisense strand to SEQ ID NO: 518875
acuucuagaccagugcuuu

SEQ ID NO: 518877 - RNA, 19 nt, Artificial Sequence
  Description of Artificial Sequence: Synthetic oligonucleotide
  Sense strand starting at position 3390 of SEQ ID NO: 317871
uggucuagaaguuguauag

SEQ ID NO: 518878 - RNA, 19 nt, Artificial Sequence
  Description of Artificial Sequence: Synthetic oligonucleotide
  Antisense strand to SEQ ID NO: 518877
cuauacaacuucuagacca

SEQ ID NO: 518879 - RNA, 19 nt, Artificial Sequence
  Description of Artificial Sequence: Synthetic oligonucleotide
  Sense strand starting at position 3394 of SEQ ID NO: 317871
cuagaaguuguauaggugu

SEQ ID NO: 518880 - RNA, 19 nt, Artificial Sequence
  Description of Artificial Sequence: Synthetic oligonucleotide
  Antisense strand to SEQ ID NO: 518879
acaccuauacaacuucuag

SEQ ID NO: 518881 - RNA, 19 nt, Artificial Sequence
  Description of Artificial Sequence: Synthetic oligonucleotide
  Sense strand starting at position 3396 of SEQ ID NO: 317871
agaaguuguauagguguua

SEQ ID NO: 518882 - RNA, 19 nt, Artificial Sequence
  Description of Artificial Sequence: Synthetic oligonucleotide
  Antisense strand to SEQ ID NO: 518881
uaacaccuauacaacuucu

SEQ ID NO: 518883 - RNA, 19 nt, Artificial Sequence
  Description of Artificial Sequence: Synthetic oligonucleotide
  Sense strand starting at position 3445 of SEQ ID NO: 317871
uugcgugauccugaacauc

SEQ ID NO: 518884 - RNA, 19 nt, Artificial Sequence
  Description of Artificial Sequence: Synthetic oligonucleotide
  Antisense strand to SEQ ID NO: 518883
gauguucaggaucacgcaa

SEQ ID NO: 518885 - RNA, 19 nt, Artificial Sequence
  Description of Artificial Sequence: Synthetic oligonucleotide
  Sense strand starting at position 3864 of SEQ ID NO: 317871
aggcuuaaugugcagaugu

SEQ ID NO: 518886 - RNA, 19 nt, Artificial Sequence
  Description of Artificial Sequence: Synthetic oligonucleotide
  Antisense strand to SEQ ID NO: 518885
acaucugcacauuaagccu

SEQ ID NO: 518887 - RNA, 19 nt, Artificial Sequence
  Description of Artificial Sequence: Synthetic oligonucleotide
  Sense strand starting at position 3874 of SEQ ID NO: 317871
ugcagaugucucuggaauc

SEQ ID NO: 518888 - RNA, 19 nt, Artificial Sequence
  Description of Artificial Sequence: Synthetic oligonucleotide
  Antisense strand to SEQ ID NO: 518887
gauuccagagacaucugca

SEQ ID NO: 518889 - RNA, 19 nt, Artificial Sequence
  Description of Artificial Sequence: Synthetic oligonucleotide
  Sense strand starting at position 548 of SEQ ID NO: 317872
ugcuauccuccauacuguu

SEQ ID NO: 518890 - RNA, 19 nt, Artificial Sequence
  Description of Artificial Sequence: Synthetic oligonucleotide
  Antisense strand to SEQ ID NO: 518889
aacaguauggaggauagca

SEQ ID NO: 518891 - RNA, 19 nt, Artificial Sequence
  Description of Artificial Sequence: Synthetic oligonucleotide
  Sense strand starting at position 583 of SEQ ID NO: 317872
auugcauuccucuacgauc

SEQ ID NO: 518892 - RNA, 19 nt, Artificial Sequence
  Description of Artificial Sequence: Synthetic oligonucleotide
  Antisense strand to SEQ ID NO: 518891
gaucguagaggaaugcaau

SEQ ID NO: 518893 - RNA, 19 nt, Artificial Sequence
  Description of Artificial Sequence: Synthetic oligonucleotide
  Sense strand starting at position 603 of SEQ ID NO: 317872
aguccaaacuccucugaga

SEQ ID NO: 518894 - RNA, 19 nt, Artificial Sequence
  Description of Artificial Sequence: Synthetic oligonucleotide
  Antisense strand to SEQ ID NO: 518893
ucucagaggaguuuggacu

SEQ ID NO: 518895 - RNA, 19 nt, Artificial Sequence
  Description of Artificial Sequence: Synthetic oligonucleotide
  Sense strand starting at position 605 of SEQ ID NO: 317872
uccaaacuccucugagaag

SEQ ID NO: 518896 - RNA, 19 nt, Artificial Sequence
  Description of Artificial Sequence: Synthetic oligonucleotide
  Antisense strand to SEQ ID NO: 518895
cuucucagaggaguuugga

SEQ ID NO: 518897 - RNA, 19 nt, Artificial Sequence
  Description of Artificial Sequence: Synthetic oligonucleotide
  Sense strand starting at position 656 of SEQ ID NO: 317872
ccugaauuccuggagcaua

SEQ ID NO: 518898 - RNA, 19 nt, Artificial Sequence
  Description of Artificial Sequence: Synthetic oligonucleotide
  Antisense strand to SEQ ID NO: 518897
uaugcuccaggaauucagg

SEQ ID NO: 518899 - RNA, 19 nt, Artificial Sequence
  Description of Artificial Sequence: Synthetic oligonucleotide
  Sense strand starting at position 661 of SEQ ID NO: 317872
auuccuggagcauauauua

SEQ ID NO: 518900 - RNA, 19 nt, Artificial Sequence
  Description of Artificial Sequence: Synthetic oligonucleotide
  Antisense strand to SEQ ID NO: 518899
uaauauaugcuccaggaau

SEQ ID NO: 518901 - RNA, 19 nt, Artificial Sequence
  Description of Artificial Sequence: Synthetic oligonucleotide
  Sense strand starting at position 752 of SEQ ID NO: 317872
uuguguaaggcagaaaguu

SEQ ID NO: 518902 - RNA, 19 nt, Artificial Sequence
  Description of Artificial Sequence: Synthetic oligonucleotide
  Antisense strand to SEQ ID NO: 518901
aacuuucugccuuacacaa

SEQ ID NO: 518903 - RNA, 19 nt, Artificial Sequence
  Description of Artificial Sequence: Synthetic oligonucleotide
  Sense strand starting at position 832 of SEQ ID NO: 317872
cagugacuugcauauauug

SEQ ID NO: 518904 - RNA, 19 nt, Artificial Sequence
  Description of Artificial Sequence: Synthetic oligonucleotide
  Antisense strand to SEQ ID NO: 518903
caauauaugcaagucacug

SEQ ID NO: 518905 - RNA, 19 nt, Artificial Sequence
  Description of Artificial Sequence: Synthetic oligonucleotide
  Sense strand starting at position 834 of SEQ ID NO: 317872
gugacuugcauauauugga

SEQ ID NO: 518906 - RNA, 19 nt, Artificial Sequence
  Description of Artificial Sequence: Synthetic oligonucleotide
  Antisense strand to SEQ ID NO: 518905
uccaauauaugcaagucac

SEQ ID NO: 518907 - RNA, 19 nt, Artificial Sequence
  Description of Artificial Sequence: Synthetic oligonucleotide
  Sense strand starting at position 868 of SEQ ID NO: 317872
uuuacugaugaaugcuaau

SEQ ID NO: 518908 - RNA, 19 nt, Artificial Sequence
  Description of Artificial Sequence: Synthetic oligonucleotide
  Antisense strand to SEQ ID NO: 518907
auuagcauucaucaguaaa

SEQ ID NO: 518909 - RNA, 19 nt, Artificial Sequence
  Description of Artificial Sequence: Synthetic oligonucleotide
  Sense strand starting at position 924 of SEQ ID NO: 317872
gucaacuacucucuuaguu

SEQ ID NO: 518910 - RNA, 19 nt, Artificial Sequence
  Description of Artificial Sequence: Synthetic oligonucleotide
  Antisense strand to SEQ ID NO: 518909
aacuaagagaguaguugac

SEQ ID NO: 518911 - RNA, 19 nt, Artificial Sequence
  Description of Artificial Sequence: Synthetic oligonucleotide
  Sense strand starting at position 1082 of SEQ ID NO: 317872
gcagaaucauguccaaagu

SEQ ID NO: 518912 - RNA, 19 nt, Artificial Sequence
  Description of Artificial Sequence: Synthetic oligonucleotide
  Antisense strand to SEQ ID NO: 518911
acuuuggacaugauucugc

SEQ ID NO: 518913 - RNA, 19 nt, Artificial Sequence
  Description of Artificial Sequence: Synthetic oligonucleotide
  Sense strand starting at position 1102 of SEQ ID NO: 317872
aaguacaaggucugcuuaa

SEQ ID NO: 518914 - RNA, 19 nt, Artificial Sequence
  Description of Artificial Sequence: Synthetic oligonucleotide
  Antisense strand to SEQ ID NO: 518913
uuaagcagaccuuguacuu

SEQ ID NO: 518915 - RNA, 19 nt, Artificial Sequence
  Description of Artificial Sequence: Synthetic oligonucleotide
  Sense strand starting at position 1103 of SEQ ID NO: 317872
aguacaaggucugcuuaaa

SEQ ID NO: 518916 - RNA, 19 nt, Artificial Sequence
  Description of Artificial Sequence: Synthetic oligonucleotide
  Antisense strand to SEQ ID NO: 518915
uuuaagcagaccuuguacu

SEQ ID NO: 518917 - RNA, 19 nt, Artificial Sequence
  Description of Artificial Sequence: Synthetic oligonucleotide
  Sense strand starting at position 1228 of SEQ ID NO: 317872
cauacaucagguugaagua

SEQ ID NO: 518918 - RNA, 19 nt, Artificial Sequence
  Description of Artificial Sequence: Synthetic oligonucleotide
  Antisense strand to SEQ ID NO: 518917
uacuucaaccugauguaug

SEQ ID NO: 518919 - RNA, 19 nt, Artificial Sequence
  Description of Artificial Sequence: Synthetic oligonucleotide
  Sense strand starting at position 1237 of SEQ ID NO: 317872
gguugaaguaucugggauu

SEQ ID NO: 518920 - RNA, 19 nt, Artificial Sequence
  Description of Artificial Sequence: Synthetic oligonucleotide
  Antisense strand to SEQ ID NO: 518919
aaucccagauacuucaacc

SEQ ID NO: 518921 - RNA, 19 nt, Artificial Sequence
  Description of Artificial Sequence: Synthetic oligonucleotide
  Sense strand starting at position 2213 of SEQ ID NO: 317872
aggccuuggccgggaagaa

SEQ ID NO: 518922 - RNA, 19 nt, Artificial Sequence
  Description of Artificial Sequence: Synthetic oligonucleotide
  Antisense strand to SEQ ID NO: 518921
uucuucccggccaaggccu

SEQ ID NO: 518923 - RNA, 19 nt, Artificial Sequence
  Description of Artificial Sequence: Synthetic oligonucleotide
  Sense strand starting at position 2524 of SEQ ID NO: 317872
gcagaauucgguuggacug

SEQ ID NO: 518924 - RNA, 19 nt, Artificial Sequence
  Description of Artificial Sequence: Synthetic oligonucleotide
  Antisense strand to SEQ ID NO: 518923
caguccaaccgaauucugc

SEQ ID NO: 518925 - RNA, 19 nt, Artificial Sequence
  Description of Artificial Sequence: Synthetic oligonucleotide
  Sense strand starting at position 2525 of SEQ ID NO: 317872
cagaauucgguuggacuga

SEQ ID NO: 518926 - RNA, 19 nt, Artificial Sequence
  Description of Artificial Sequence: Synthetic oligonucleotide
  Antisense strand to SEQ ID NO: 518925
ucaguccaaccgaauucug

SEQ ID NO: 518927 - RNA, 19 nt, Artificial Sequence
  Description of Artificial Sequence: Synthetic oligonucleotide
  Sense strand starting at position 2600 of SEQ ID NO: 317872
ugguauugaucaucuugac

SEQ ID NO: 518928 - RNA, 19 nt, Artificial Sequence
  Description of Artificial Sequence: Synthetic oligonucleotide
  Antisense strand to SEQ ID NO: 518927
gucaagaugaucaauacca

SEQ ID NO: 518929 - RNA, 19 nt, Artificial Sequence
  Description of Artificial Sequence: Synthetic oligonucleotide
  Sense strand starting at position 2615 of SEQ ID NO: 317872
ugaccaauaugcuugagaa

SEQ ID NO: 518930 - RNA, 19 nt, Artificial Sequence
  Description of Artificial Sequence: Synthetic oligonucleotide
  Antisense strand to SEQ ID NO: 518929
uucucaagcauauugguca

SEQ ID NO: 518931 - RNA, 19 nt, Artificial Sequence
  Description of Artificial Sequence: Synthetic oligonucleotide
  Sense strand starting at position 2714 of SEQ ID NO: 317872
ggaugaaauugugcugauc

SEQ ID NO: 518932 - RNA, 19 nt, Artificial Sequence
  Description of Artificial Sequence: Synthetic oligonucleotide
  Antisense strand to SEQ ID NO: 518931
gaucagcacaauuucaucc

SEQ ID NO: 518933 - RNA, 19 nt, Artificial Sequence
  Description of Artificial Sequence: Synthetic oligonucleotide
  Sense strand starting at position 2717 of SEQ ID NO: 317872
ugaaauugugcugaucuau

SEQ ID NO: 518934 - RNA, 19 nt, Artificial Sequence
  Description of Artificial Sequence: Synthetic oligonucleotide
  Antisense strand to SEQ ID NO: 518933
auagaucagcacaauuuca

SEQ ID NO: 518935 - RNA, 19 nt, Artificial Sequence
  Description of Artificial Sequence: Synthetic oligonucleotide
  Sense strand starting at position 2777 of SEQ ID NO: 317872
cuaccuuuccaagauuggu

SEQ ID NO: 518936 - RNA, 19 nt, Artificial Sequence
  Description of Artificial Sequence: Synthetic oligonucleotide
  Antisense strand to SEQ ID NO: 518935
accaaucuuggaaagguag

SEQ ID NO: 518937 - RNA, 19 nt, Artificial Sequence
  Description of Artificial Sequence: Synthetic oligonucleotide
  Sense strand starting at position 2780 of SEQ ID NO: 317872
ccuuuccaagauugguuua

SEQ ID NO: 518938 - RNA, 19 nt, Artificial Sequence
  Description of Artificial Sequence: Synthetic oligonucleotide
  Antisense strand to SEQ ID NO: 518937
uaaaccaaucuuggaaagg

SEQ ID NO: 518939 - RNA, 19 nt, Artificial Sequence
  Description of Artificial Sequence: Synthetic oligonucleotide
  Sense strand starting at position 2783 of SEQ ID NO: 317872
uuccaagauugguuuaggu

SEQ ID NO: 518940 - RNA, 19 nt, Artificial Sequence
  Description of Artificial Sequence: Synthetic oligonucleotide
  Antisense strand to SEQ ID NO: 518939
accuaaaccaaucuuggaa

SEQ ID NO: 518941 - RNA, 19 nt, Artificial Sequence
  Description of Artificial Sequence: Synthetic oligonucleotide
  Sense strand starting at position 2785 of SEQ ID NO: 317872
ccaagauugguuuagguua

SEQ ID NO: 518942 - RNA, 19 nt, Artificial Sequence
  Description of Artificial Sequence: Synthetic oligonucleotide
  Antisense strand to SEQ ID NO: 518941
uaaccuaaaccaaucuugg

SEQ ID NO: 518943 - RNA, 19 nt, Artificial Sequence
  Description of Artificial Sequence: Synthetic oligonucleotide
  Sense strand starting at position 2809 of SEQ ID NO: 317872
gcaguuaaaggauaguauu

SEQ ID NO: 518944 - RNA, 19 nt, Artificial Sequence
  Description of Artificial Sequence: Synthetic oligonucleotide
  Antisense strand to SEQ ID NO: 518943
aauacuauccuuuaacugc

SEQ ID NO: 518945 - RNA, 19 nt, Artificial Sequence
  Description of Artificial Sequence: Synthetic oligonucleotide
  Sense strand starting at position 2939 of SEQ ID NO: 317872
cacuguaauguggaauguu

SEQ ID NO: 518946 - RNA, 19 nt, Artificial Sequence
  Description of Artificial Sequence: Synthetic oligonucleotide
  Antisense strand to SEQ ID NO: 518945
aacauuccacauuacagug

SEQ ID NO: 518947 - RNA, 19 nt, Artificial Sequence
  Description of Artificial Sequence: Synthetic oligonucleotide
  Sense strand starting at position 2970 of SEQ ID NO: 317872
uuagguguggguuguauuu

SEQ ID NO: 518948 - RNA, 19 nt, Artificial Sequence
  Description of Artificial Sequence: Synthetic oligonucleotide
  Antisense strand to SEQ ID NO: 518947
aaauacaacccacaccuaa

SEQ ID NO: 518949 - RNA, 19 nt, Artificial Sequence
  Description of Artificial Sequence: Synthetic oligonucleotide
  Sense strand starting at position 2979 of SEQ ID NO: 317872
gguuguauuuacuaaccau

SEQ ID NO: 518950 - RNA, 19 nt, Artificial Sequence
  Description of Artificial Sequence: Synthetic oligonucleotide
  Antisense strand to SEQ ID NO: 518949
augguuaguaaauacaacc

SEQ ID NO: 518951 - RNA, 19 nt, Artificial Sequence
  Description of Artificial Sequence: Synthetic oligonucleotide
  Sense strand starting at position 2992 of SEQ ID NO: 317872
aaccauguaugguuagcua

SEQ ID NO: 518952 - RNA, 19 nt, Artificial Sequence
  Description of Artificial Sequence: Synthetic oligonucleotide
  Antisense strand to SEQ ID NO: 518951
uagcuaaccauacaugguu

SEQ ID NO: 518953 - RNA, 19 nt, Artificial Sequence
  Description of Artificial Sequence: Synthetic oligonucleotide
  Sense strand starting at position 3204 of SEQ ID NO: 317872
uacacagucucaguuaguu

SEQ ID NO: 518954 - RNA, 19 nt, Artificial Sequence
  Description of Artificial Sequence: Synthetic oligonucleotide
  Antisense strand to SEQ ID NO: 518953
aacuaacugagacugugua

SEQ ID NO: 518955 - RNA, 19 nt, Artificial Sequence
  Description of Artificial Sequence: Synthetic oligonucleotide
  Sense strand starting at position 3212 of SEQ ID NO: 317872
cucaguuaguugguaaauu

SEQ ID NO: 518956 - RNA, 19 nt, Artificial Sequence
  Description of Artificial Sequence: Synthetic oligonucleotide
  Antisense strand to SEQ ID NO: 518955
aauuuaccaacuaacugag

SEQ ID NO: 518957 - RNA, 19 nt, Artificial Sequence
  Description of Artificial Sequence: Synthetic oligonucleotide
  Sense strand starting at position 3244 of SEQ ID NO: 317872
gauugagaagucugaguuu

SEQ ID NO: 518958 - RNA, 19 nt, Artificial Sequence
  Description of Artificial Sequence: Synthetic oligonucleotide
  Antisense strand to SEQ ID NO: 518957
aaacucagacuucucaauc

SEQ ID NO: 518959 - RNA, 19 nt, Artificial Sequence
  Description of Artificial Sequence: Synthetic oligonucleotide
  Sense strand starting at position 3374 of SEQ ID NO: 317872
ccaacuuaauuuggaguau

SEQ ID NO: 518960 - RNA, 19 nt, Artificial Sequence
  Description of Artificial Sequence: Synthetic oligonucleotide
  Antisense strand to SEQ ID NO: 518959
auacuccaaauuaaguugg

SEQ ID NO: 518961 - RNA, 19 nt, Artificial Sequence
  Description of Artificial Sequence: Synthetic oligonucleotide
  Sense strand starting at position 3501 of SEQ ID NO: 317872
gguaacuaugcuggauaua

SEQ ID NO: 518962 - RNA, 19 nt, Artificial Sequence
  Description of Artificial Sequence: Synthetic oligonucleotide
  Antisense strand to SEQ ID NO: 518961
uauauccagcauaguuacc

SEQ ID NO: 518963 - RNA, 19 nt, Artificial Sequence
  Description of Artificial Sequence: Synthetic oligonucleotide
  Sense strand starting at position 3502 of SEQ ID NO: 317872
guaacuaugcuggauauaa

SEQ ID NO: 518964 - RNA, 19 nt, Artificial Sequence
  Description of Artificial Sequence: Synthetic oligonucleotide
  Antisense strand to SEQ ID NO: 518963
uuauauccagcauaguuac

SEQ ID NO: 518965 - RNA, 19 nt, Artificial Sequence
  Description of Artificial Sequence: Synthetic oligonucleotide
  Sense strand starting at position 3809 of SEQ ID NO: 317872
agacccugccgcuaauaaa

SEQ ID NO: 518966 - RNA, 19 nt, Artificial Sequence
  Description of Artificial Sequence: Synthetic oligonucleotide
  Antisense strand to SEQ ID NO: 518965
uuuauuagcggcagggucu

SEQ ID NO: 518967 - RNA, 19 nt, Artificial Sequence
  Description of Artificial Sequence: Synthetic oligonucleotide
  Sense strand starting at position 3849 of SEQ ID NO: 317872
acuggugcccuuuaaauga

SEQ ID NO: 518968 - RNA, 19 nt, Artificial Sequence
  Description of Artificial Sequence: Synthetic oligonucleotide
  Antisense strand to SEQ ID NO: 518967
ucauuuaaagggcaccagu

SEQ ID NO: 518969 - RNA, 19 nt, Artificial Sequence
  Description of Artificial Sequence: Synthetic oligonucleotide
  Sense strand starting at position 156 of SEQ ID NO: 317873
gugacugcccuguaggaaa

SEQ ID NO: 518970 - RNA, 19 nt, Artificial Sequence
  Description of Artificial Sequence: Synthetic oligonucleotide
  Antisense strand to SEQ ID NO: 518969
uuuccuacagggcagucac

SEQ ID NO: 518971 - RNA, 19 nt, Artificial Sequence
  Description of Artificial Sequence: Synthetic oligonucleotide
  Sense strand starting at position 280 of SEQ ID NO: 317873
gugugaccauggguaagaa

SEQ ID NO: 518972 - RNA, 19 nt, Artificial Sequence
  Description of Artificial Sequence: Synthetic oligonucleotide
  Antisense strand to SEQ ID NO: 518971
uucuuacccauggucacac

SEQ ID NO: 518973 - RNA, 19 nt, Artificial Sequence
  Description of Artificial Sequence: Synthetic oligonucleotide
  Sense strand starting at position 357 of SEQ ID NO: 317873
uuacaaguuuccuuggaga

SEQ ID NO: 518974 - RNA, 19 nt, Artificial Sequence
  Description of Artificial Sequence: Synthetic oligonucleotide
  Antisense strand to SEQ ID NO: 518973
ucuccaaggaaacuuguaa

SEQ ID NO: 518975 - RNA, 19 nt, Artificial Sequence
  Description of Artificial Sequence: Synthetic oligonucleotide
  Sense strand starting at position 359 of SEQ ID NO: 317873
acaaguuuccuuggagaag

SEQ ID NO: 518976 - RNA, 19 nt, Artificial Sequence
  Description of Artificial Sequence: Synthetic oligonucleotide
  Antisense strand to SEQ ID NO: 518975
cuucuccaaggaaacuugu

SEQ ID NO: 518977 - RNA, 19 nt, Artificial Sequence
  Description of Artificial Sequence: Synthetic oligonucleotide
  Sense strand starting at position 370 of SEQ ID NO: 317873
uggagaaguacugguuaau

SEQ ID NO: 518978 - RNA, 19 nt, Artificial Sequence
  Description of Artificial Sequence: Synthetic oligonucleotide
  Antisense strand to SEQ ID NO: 518977
auuaaccaguacuucucca

SEQ ID NO: 518979 - RNA, 19 nt, Artificial Sequence
  Description of Artificial Sequence: Synthetic oligonucleotide
  Sense strand starting at position 422 of SEQ ID NO: 317873
ggcuaaucuuuacugggaa

SEQ ID NO: 518980 - RNA, 19 nt, Artificial Sequence
  Description of Artificial Sequence: Synthetic oligonucleotide
  Antisense strand to SEQ ID NO: 518979
uucccaguaaagauuagcc

SEQ ID NO: 518981 - RNA, 19 nt, Artificial Sequence
  Description of Artificial Sequence: Synthetic oligonucleotide
  Sense strand starting at position 446 of SEQ ID NO: 317873
gcuguaagucagucagugu

SEQ ID NO: 518982 - RNA, 19 nt, Artificial Sequence
  Description of Artificial Sequence: Synthetic oligonucleotide
  Antisense strand to SEQ ID NO: 518981
acacugacugacuuacagc

SEQ ID NO: 518983 - RNA, 19 nt, Artificial Sequence
  Description of Artificial Sequence: Synthetic oligonucleotide
  Sense strand starting at position 473 of SEQ ID NO: 317873
ccguacacccauuauguua

SEQ ID NO: 518984 - RNA, 19 nt, Artificial Sequence
  Description of Artificial Sequence: Synthetic oligonucleotide
  Antisense strand to SEQ ID NO: 518983
uaacauaauggguguacgg

SEQ ID NO: 518985 - RNA, 19 nt, Artificial Sequence
  Description of Artificial Sequence: Synthetic oligonucleotide
  Sense strand starting at position 499 of SEQ ID NO: 317873
cucauaacagucugaggaa

SEQ ID NO: 518986 - RNA, 19 nt, Artificial Sequence
  Description of Artificial Sequence: Synthetic oligonucleotide
  Antisense strand to SEQ ID NO: 518985
uuccucagacuguuaugag

SEQ ID NO: 518987 - RNA, 19 nt, Artificial Sequence
  Description of Artificial Sequence: Synthetic oligonucleotide
  Sense strand starting at position 545 of SEQ ID NO: 317873
guuggauucccuugagcaa

SEQ ID NO: 518988 - RNA, 19 nt, Artificial Sequence
  Description of Artificial Sequence: Synthetic oligonucleotide
  Antisense strand to SEQ ID NO: 518987
uugcucaagggaauccaac

SEQ ID NO: 518989 - RNA, 19 nt, Artificial Sequence
  Description of Artificial Sequence: Synthetic oligonucleotide
  Sense strand starting at position 546 of SEQ ID NO: 317873
uuggauucccuugagcaaa

SEQ ID NO: 518990 - RNA, 19 nt, Artificial Sequence
  Description of Artificial Sequence: Synthetic oligonucleotide
  Antisense strand to SEQ ID NO: 518989
uuugcucaagggaauccaa

SEQ ID NO: 518991 - RNA, 19 nt, Artificial Sequence
  Description of Artificial Sequence: Synthetic oligonucleotide
  Sense strand starting at position 652 of SEQ ID NO: 317873
ggagguaaugcucgggaag

SEQ ID NO: 518992 - RNA, 19 nt, Artificial Sequence
  Description of Artificial Sequence: Synthetic oligonucleotide
  Antisense strand to SEQ ID NO: 518991
cuucccgagcauuaccucc

SEQ ID NO: 518993 - RNA, 19 nt, Artificial Sequence
  Description of Artificial Sequence: Synthetic oligonucleotide
  Sense strand starting at position 653 of SEQ ID NO: 317873
gagguaaugcucgggaagu

SEQ ID NO: 518994 - RNA, 19 nt, Artificial Sequence
  Description of Artificial Sequence: Synthetic oligonucleotide
  Antisense strand to SEQ ID NO: 518993
acuucccgagcauuaccuc

SEQ ID NO: 518995 - RNA, 19 nt, Artificial Sequence
  Description of Artificial Sequence: Synthetic oligonucleotide
  Sense strand starting at position 655 of SEQ ID NO: 317873
gguaaugcucgggaagugu

SEQ ID NO: 518996 - RNA, 19 nt, Artificial Sequence
  Description of Artificial Sequence: Synthetic oligonucleotide
  Antisense strand to SEQ ID NO: 518995
acacuucccgagcauuacc

SEQ ID NO: 518997 - RNA, 19 nt, Artificial Sequence
  Description of Artificial Sequence: Synthetic oligonucleotide
  Sense strand starting at position 664 of SEQ ID NO: 317873
cgggaagugucacaaauuu

SEQ ID NO: 518998 - RNA, 19 nt, Artificial Sequence
  Description of Artificial Sequence: Synthetic oligonucleotide
  Antisense strand to SEQ ID NO: 518997
aaauuugugacacuucccg

SEQ ID NO: 518999 - RNA, 19 nt, Artificial Sequence
  Description of Artificial Sequence: Synthetic oligonucleotide
  Sense strand starting at position 748 of SEQ ID NO: 317873
caaauucuggcauguuuga

SEQ ID NO: 519000 - RNA, 19 nt, Artificial Sequence
  Description of Artificial Sequence: Synthetic oligonucleotide
  Antisense strand to SEQ ID NO: 518999
ucaaacaugccagaauuug

SEQ ID NO: 519001 - RNA, 19 nt, Artificial Sequence
  Description of Artificial Sequence: Synthetic oligonucleotide
  Sense strand starting at position 790 of SEQ ID NO: 317873
agcuaugcucaguauaaag

SEQ ID NO: 519002 - RNA, 19 nt, Artificial Sequence
  Description of Artificial Sequence: Synthetic oligonucleotide
  Antisense strand to SEQ ID NO: 519001
cuuuauacugagcauagcu

SEQ ID NO: 519003 - RNA, 19 nt, Artificial Sequence
  Description of Artificial Sequence: Synthetic oligonucleotide
  Sense strand starting at position 892 of SEQ ID NO: 317873
cccggugcgagcugaauuu

SEQ ID NO: 519004 - RNA, 19 nt, Artificial Sequence
  Description of Artificial Sequence: Synthetic oligonucleotide
  Antisense strand to SEQ ID NO: 519003
aaauucagcucgcaccggg

SEQ ID NO: 519005 - RNA, 19 nt, Artificial Sequence
  Description of Artificial Sequence: Synthetic oligonucleotide
  Sense strand starting at position 1003 of SEQ ID NO: 317873
gcgcgcugcgggucagauu

SEQ ID NO: 519006 - RNA, 19 nt, Artificial Sequence
  Description of Artificial Sequence: Synthetic oligonucleotide
  Antisense strand to SEQ ID NO: 519005
aaucugacccgcagcgcgc

SEQ ID NO: 519007 - RNA, 19 nt, Artificial Sequence
  Description of Artificial Sequence: Synthetic oligonucleotide
  Sense strand starting at position 1410 of SEQ ID NO: 317873
ugaacaaaggucugugaaa

SEQ ID NO: 519008 - RNA, 19 nt, Artificial Sequence
  Description of Artificial Sequence: Synthetic oligonucleotide
  Antisense strand to SEQ ID NO: 519007
uuucacagaccuuuguuca

SEQ ID NO: 519009 - RNA, 19 nt, Artificial Sequence
  Description of Artificial Sequence: Synthetic oligonucleotide
  Sense strand starting at position 1411 of SEQ ID NO: 317873
gaacaaaggucugugaaau

SEQ ID NO: 519010 - RNA, 19 nt, Artificial Sequence
  Description of Artificial Sequence: Synthetic oligonucleotide
  Antisense strand to SEQ ID NO: 519009
auuucacagaccuuuguuc

SEQ ID NO: 519011 - RNA, 19 nt, Artificial Sequence
  Description of Artificial Sequence: Synthetic oligonucleotide
  Sense strand starting at position 1412 of SEQ ID NO: 317873
aacaaaggucugugaaaug

SEQ ID NO: 519012 - RNA, 19 nt, Artificial Sequence
  Description of Artificial Sequence: Synthetic oligonucleotide
  Antisense strand to SEQ ID NO: 519011
cauuucacagaccuuuguu

SEQ ID NO: 519013 - RNA, 19 nt, Artificial Sequence
  Description of Artificial Sequence: Synthetic oligonucleotide
  Sense strand starting at position 1417 of SEQ ID NO: 317873
aggucugugaaauggguuu

SEQ ID NO: 519014 - RNA, 19 nt, Artificial Sequence
  Description of Artificial Sequence: Synthetic oligonucleotide
  Antisense strand to SEQ ID NO: 519013
aaacccauuucacagaccu

SEQ ID NO: 519015 - RNA, 19 nt, Artificial Sequence
  Description of Artificial Sequence: Synthetic oligonucleotide
  Sense strand starting at position 1499 of SEQ ID NO: 317873
guagguacaccuugagauu

SEQ ID NO: 519016 - RNA, 19 nt, Artificial Sequence
  Description of Artificial Sequence: Synthetic oligonucleotide
  Antisense strand to SEQ ID NO: 519015
aaucucaagguguaccuac

SEQ ID NO: 519017 - RNA, 19 nt, Artificial Sequence
  Description of Artificial Sequence: Synthetic oligonucleotide
  Sense strand starting at position 1576 of SEQ ID NO: 317873
gguauaaauccggguaguu

SEQ ID NO: 519018 - RNA, 19 nt, Artificial Sequence
  Description of Artificial Sequence: Synthetic oligonucleotide
  Antisense strand to SEQ ID NO: 519017
aacuacccggauuuauacc

SEQ ID NO: 519019 - RNA, 19 nt, Artificial Sequence
  Description of Artificial Sequence: Synthetic oligonucleotide
  Sense strand starting at position 2364 of SEQ ID NO: 317873
ggaggcaucugcuccaacu

SEQ ID NO: 519020 - RNA, 19 nt, Artificial Sequence
  Description of Artificial Sequence: Synthetic oligonucleotide
  Antisense strand to SEQ ID NO: 519019
aguuggagcagaugccucc

SEQ ID NO: 519021 - RNA, 19 nt, Artificial Sequence
  Description of Artificial Sequence: Synthetic oligonucleotide
  Sense strand starting at position 2584 of SEQ ID NO: 317873
gugcaaagcaauugaagua

SEQ ID NO: 519022 - RNA, 19 nt, Artificial Sequence
  Description of Artificial Sequence: Synthetic oligonucleotide
  Antisense strand to SEQ ID NO: 519021
uacuucaauugcuuugcac

SEQ ID NO: 519023 - RNA, 19 nt, Artificial Sequence
  Description of Artificial Sequence: Synthetic oligonucleotide
  Sense strand starting at position 2643 of SEQ ID NO: 317873
cuuccuuuccucugauagu

SEQ ID NO: 519024 - RNA, 19 nt, Artificial Sequence
  Description of Artificial Sequence: Synthetic oligonucleotide
  Antisense strand to SEQ ID NO: 519023
acuaucagaggaaaggaag

SEQ ID NO: 519025 - RNA, 19 nt, Artificial Sequence
  Description of Artificial Sequence: Synthetic oligonucleotide
  Sense strand starting at position 2719 of SEQ ID NO: 317873
aaggucuucucuucggaca

SEQ ID NO: 519026 - RNA, 19 nt, Artificial Sequence
  Description of Artificial Sequence: Synthetic oligonucleotide
  Antisense strand to SEQ ID NO: 519025
uguccgaagagaagaccuu

SEQ ID NO: 519027 - RNA, 19 nt, Artificial Sequence
  Description of Artificial Sequence: Synthetic oligonucleotide
  Sense strand starting at position 2720 of SEQ ID NO: 317873
aggucuucucuucggacau

SEQ ID NO: 519028 - RNA, 19 nt, Artificial Sequence
  Description of Artificial Sequence: Synthetic oligonucleotide
  Antisense strand to SEQ ID NO: 519027
auguccgaagagaagaccu

SEQ ID NO: 519029 - RNA, 19 nt, Artificial Sequence
  Description of Artificial Sequence: Synthetic oligonucleotide
  Sense strand starting at position 2912 of SEQ ID NO: 317873
agguauaugcagggaugga

SEQ ID NO: 519030 - RNA, 19 nt, Artificial Sequence
  Description of Artificial Sequence: Synthetic oligonucleotide
  Antisense strand to SEQ ID NO: 519029
uccaucccugcauauaccu

SEQ ID NO: 519031 - RNA, 19 nt, Artificial Sequence
  Description of Artificial Sequence: Synthetic oligonucleotide
  Sense strand starting at position 3277 of SEQ ID NO: 317873
ugcuguccucagggacaga

SEQ ID NO: 519032 - RNA, 19 nt, Artificial Sequence
  Description of Artificial Sequence: Synthetic oligonucleotide
  Antisense strand to SEQ ID NO: 519031
ucugucccugaggacagca

SEQ ID NO: 519033 - RNA, 19 nt, Artificial Sequence
  Description of Artificial Sequence: Synthetic oligonucleotide
  Sense strand starting at position 3337 of SEQ ID NO: 317873
gaaguaauggcaggaucca

SEQ ID NO: 519034 - RNA, 19 nt, Artificial Sequence
  Description of Artificial Sequence: Synthetic oligonucleotide
  Antisense strand to SEQ ID NO: 519033
uggauccugccauuacuuc

SEQ ID NO: 519035 - RNA, 19 nt, Artificial Sequence
  Description of Artificial Sequence: Synthetic oligonucleotide
  Sense strand starting at position 3351 of SEQ ID NO: 317873
auccauuaugggugagcuu

SEQ ID NO: 519036 - RNA, 19 nt, Artificial Sequence
  Description of Artificial Sequence: Synthetic oligonucleotide
  Antisense strand to SEQ ID NO: 519035
aagcucacccauaauggau

SEQ ID NO: 519037 - RNA, 19 nt, Artificial Sequence
  Description of Artificial Sequence: Synthetic oligonucleotide
  Sense strand starting at position 3352 of SEQ ID NO: 317873
uccauuaugggugagcuuu

SEQ ID NO: 519038 - RNA, 19 nt, Artificial Sequence
  Description of Artificial Sequence: Synthetic oligonucleotide
  Antisense strand to SEQ ID NO: 519037
aaagcucacccauaaugga

SEQ ID NO: 519039 - RNA, 19 nt, Artificial Sequence
  Description of Artificial Sequence: Synthetic oligonucleotide
  Sense strand starting at position 3374 of SEQ ID NO: 317873
ucaguuuguguccagcaca

SEQ ID NO: 519040 - RNA, 19 nt, Artificial Sequence
  Description of Artificial Sequence: Synthetic oligonucleotide
  Antisense strand to SEQ ID NO: 519039
ugugcuggacacaaacuga

SEQ ID NO: 519041 - RNA, 19 nt, Artificial Sequence
  Description of Artificial Sequence: Synthetic oligonucleotide
  Sense strand starting at position 3455 of SEQ ID NO: 317873
ugagacaagcuuuagucuu

SEQ ID NO: 519042 - RNA, 19 nt, Artificial Sequence
  Description of Artificial Sequence: Synthetic oligonucleotide
  Antisense strand to SEQ ID NO: 519041
aagacuaaagcuugucuca

SEQ ID NO: 519043 - RNA, 19 nt, Artificial Sequence
  Description of Artificial Sequence: Synthetic oligonucleotide
  Sense strand starting at position 3528 of SEQ ID NO: 317873
cguaucuucuccuccaaag

SEQ ID NO: 519044 - RNA, 19 nt, Artificial Sequence
  Description of Artificial Sequence: Synthetic oligonucleotide
  Antisense strand to SEQ ID NO: 519043
cuuuggaggagaagauacg

SEQ ID NO: 519045 - RNA, 19 nt, Artificial Sequence
  Description of Artificial Sequence: Synthetic oligonucleotide
  Sense strand starting at position 3734 of SEQ ID NO: 317873
guacauaggacguaucaga

SEQ ID NO: 519046 - RNA, 19 nt, Artificial Sequence
  Description of Artificial Sequence: Synthetic oligonucleotide
  Antisense strand to SEQ ID NO: 519045
ucugauacguccuauguac

SEQ ID NO: 519047 - RNA, 19 nt, Artificial Sequence
  Description of Artificial Sequence: Synthetic oligonucleotide
  Sense strand starting at position 3802 of SEQ ID NO: 317873
agcuuaucuccauguagua

SEQ ID NO: 519048 - RNA, 19 nt, Artificial Sequence
  Description of Artificial Sequence: Synthetic oligonucleotide
  Antisense strand to SEQ ID NO: 519047
uacuacauggagauaagcu

SEQ ID NO: 519049 - RNA, 19 nt, Artificial Sequence
  Description of Artificial Sequence: Synthetic oligonucleotide
  Sense strand starting at position 118 of SEQ ID NO: 317874
uccagaugacacugcucaa

SEQ ID NO: 519050 - RNA, 19 nt, Artificial Sequence
  Description of Artificial Sequence: Synthetic oligonucleotide
  Antisense strand to SEQ ID NO: 519049
uugagcagugucaucugga

SEQ ID NO: 519051 - RNA, 19 nt, Artificial Sequence
  Description of Artificial Sequence: Synthetic oligonucleotide
  Sense strand starting at position 138 of SEQ ID NO: 317874
accuccagugcucagagaa

SEQ ID NO: 519052 - RNA, 19 nt, Artificial Sequence
  Description of Artificial Sequence: Synthetic oligonucleotide
  Antisense strand to SEQ ID NO: 519051
uucucugagcacuggaggu

SEQ ID NO: 519053 - RNA, 19 nt, Artificial Sequence
  Description of Artificial Sequence: Synthetic oligonucleotide
  Sense strand starting at position 412 of SEQ ID NO: 317874
gauguaaacuugguuacuu

SEQ ID NO: 519054 - RNA, 19 nt, Artificial Sequence
  Description of Artificial Sequence: Synthetic oligonucleotide
  Antisense strand to SEQ ID NO: 519053
aaguaaccaaguuuacauc

SEQ ID NO: 519055 - RNA, 19 nt, Artificial Sequence
  Description of Artificial Sequence: Synthetic oligonucleotide
  Sense strand starting at position 430 of SEQ ID NO: 317874
ucaccuguaaguugggaau

SEQ ID NO: 519056 - RNA, 19 nt, Artificial Sequence
  Description of Artificial Sequence: Synthetic oligonucleotide
  Antisense strand to SEQ ID NO: 519055
auucccaacuuacagguga

SEQ ID NO: 519057 - RNA, 19 nt, Artificial Sequence
  Description of Artificial Sequence: Synthetic oligonucleotide
  Sense strand starting at position 444 of SEQ ID NO: 317874
ggaauaauacacugccuca

SEQ ID NO: 519058 - RNA, 19 nt, Artificial Sequence
  Description of Artificial Sequence: Synthetic oligonucleotide
  Antisense strand to SEQ ID NO: 519057
ugaggcaguguauuauucc

SEQ ID NO: 519059 - RNA, 19 nt, Artificial Sequence
  Description of Artificial Sequence: Synthetic oligonucleotide
  Sense strand starting at position 484 of SEQ ID NO: 317874
cagagauugcaugaccuuu

SEQ ID NO: 519060 - RNA, 19 nt, Artificial Sequence
  Description of Artificial Sequence: Synthetic oligonucleotide
  Antisense strand to SEQ ID NO: 519059
aaaggucaugcaaucucug

SEQ ID NO: 519061 - RNA, 19 nt, Artificial Sequence
  Description of Artificial Sequence: Synthetic oligonucleotide
  Sense strand starting at position 537 of SEQ ID NO: 317874
aggcaugacuguccugaau

SEQ ID NO: 519062 - RNA, 19 nt, Artificial Sequence
  Description of Artificial Sequence: Synthetic oligonucleotide
  Antisense strand to SEQ ID NO: 519061
auucaggacagucaugccu

SEQ ID NO: 519063 - RNA, 19 nt, Artificial Sequence
  Description of Artificial Sequence: Synthetic oligonucleotide
  Sense strand starting at position 702 of SEQ ID NO: 317874
ucaugagaccugcauuauu

SEQ ID NO: 519064 - RNA, 19 nt, Artificial Sequence
  Description of Artificial Sequence: Synthetic oligonucleotide
  Antisense strand to SEQ ID NO: 519063
aauaaugcaggucucauga

SEQ ID NO: 519065 - RNA, 19 nt, Artificial Sequence
  Description of Artificial Sequence: Synthetic oligonucleotide
  Sense strand starting at position 705 of SEQ ID NO: 317874
ugagaccugcauuauuauu

SEQ ID NO: 519066 - RNA, 19 nt, Artificial Sequence
  Description of Artificial Sequence: Synthetic oligonucleotide
  Antisense strand to SEQ ID NO: 519065
aauaauaaugcaggucuca

SEQ ID NO: 519067 - RNA, 19 nt, Artificial Sequence
  Description of Artificial Sequence: Synthetic oligonucleotide
  Sense strand starting at position 920 of SEQ ID NO: 317874
cccgguacccaguaauuga

SEQ ID NO: 519068 - RNA, 19 nt, Artificial Sequence
  Description of Artificial Sequence: Synthetic oligonucleotide
  Antisense strand to SEQ ID NO: 519067
ucaauuacuggguaccggg

SEQ ID NO: 519069 - RNA, 19 nt, Artificial Sequence
  Description of Artificial Sequence: Synthetic oligonucleotide
  Sense strand starting at position 927 of SEQ ID NO: 317874
cccaguaauugaguggaua

SEQ ID NO: 519070 - RNA, 19 nt, Artificial Sequence
  Description of Artificial Sequence: Synthetic oligonucleotide
  Antisense strand to SEQ ID NO: 519069
uauccacucaauuacuggg

SEQ ID NO: 519071 - RNA, 19 nt, Artificial Sequence
  Description of Artificial Sequence: Synthetic oligonucleotide
  Sense strand starting at position 928 of SEQ ID NO: 317874
ccaguaauugaguggauaa

SEQ ID NO: 519072 - RNA, 19 nt, Artificial Sequence
  Description of Artificial Sequence: Synthetic oligonucleotide
  Antisense strand to SEQ ID NO: 519071
uuauccacucaauuacugg

SEQ ID NO: 519073 - RNA, 19 nt, Artificial Sequence
  Description of Artificial Sequence: Synthetic oligonucleotide
  Sense strand starting at position 940 of SEQ ID NO: 317874
uggauaacugcugaucucu

SEQ ID NO: 519074 - RNA, 19 nt, Artificial Sequence
  Description of Artificial Sequence: Synthetic oligonucleotide
  Antisense strand to SEQ ID NO: 519073
agagaucagcaguuaucca

SEQ ID NO: 519075 - RNA, 19 nt, Artificial Sequence
  Description of Artificial Sequence: Synthetic oligonucleotide
  Sense strand starting at position 1048 of SEQ ID NO: 317874
auauuuaucucugagaugg

SEQ ID NO: 519076 - RNA, 19 nt, Artificial Sequence
  Description of Artificial Sequence: Synthetic oligonucleotide
  Antisense strand to SEQ ID NO: 519075
ccaucucagagauaaauau

SEQ ID NO: 519077 - RNA, 19 nt, Artificial Sequence
  Description of Artificial Sequence: Synthetic oligonucleotide
  Sense strand starting at position 1069 of SEQ ID NO: 317874
ucugguauccgccugugua

SEQ ID NO: 519078 - RNA, 19 nt, Artificial Sequence
  Description of Artificial Sequence: Synthetic oligonucleotide
  Antisense strand to SEQ ID NO: 519077
uacacaggcggauaccaga

SEQ ID NO: 519079 - RNA, 19 nt, Artificial Sequence
  Description of Artificial Sequence: Synthetic oligonucleotide
  Sense strand starting at position 1135 of SEQ ID NO: 317874
cagugaguccauggagauu

SEQ ID NO: 519080 - RNA, 19 nt, Artificial Sequence
  Description of Artificial Sequence: Synthetic oligonucleotide
  Antisense strand to SEQ ID NO: 519079
aaucuccauggacucacug

SEQ ID NO: 519081 - RNA, 19 nt, Artificial Sequence
  Description of Artificial Sequence: Synthetic oligonucleotide
  Sense strand starting at position 1146 of SEQ ID NO: 317874
uggagauugcaccacggau

SEQ ID NO: 519082 - RNA, 19 nt, Artificial Sequence
  Description of Artificial Sequence: Synthetic oligonucleotide
  Antisense strand to SEQ ID NO: 519081
auccguggugcaaucucca

SEQ ID NO: 519083 - RNA, 19 nt, Artificial Sequence
  Description of Artificial Sequence: Synthetic oligonucleotide
  Sense strand starting at position 1148 of SEQ ID NO: 317874
gagauugcaccacggauga

SEQ ID NO: 519084 - RNA, 19 nt, Artificial Sequence
  Description of Artificial Sequence: Synthetic oligonucleotide
  Antisense strand to SEQ ID NO: 519083
ucauccguggugcaaucuc

SEQ ID NO: 519085 - RNA, 19 nt, Artificial Sequence
  Description of Artificial Sequence: Synthetic oligonucleotide
  Sense strand starting at position 1277 of SEQ ID NO: 317874
cuucuugguuacccuaaga

SEQ ID NO: 519086 - RNA, 19 nt, Artificial Sequence
  Description of Artificial Sequence: Synthetic oligonucleotide
  Antisense strand to SEQ ID NO: 519085
ucuuaggguaaccaagaag

SEQ ID NO: 519087 - RNA, 19 nt, Artificial Sequence
  Description of Artificial Sequence: Synthetic oligonucleotide
  Sense strand starting at position 1398 of SEQ ID NO: 317874
cugccaaaucaggagucau

SEQ ID NO: 519088 - RNA, 19 nt, Artificial Sequence
  Description of Artificial Sequence: Synthetic oligonucleotide
  Antisense strand to SEQ ID NO: 519087
augacuccugauuuggcag

SEQ ID NO: 519089 - RNA, 19 nt, Artificial Sequence
  Description of Artificial Sequence: Synthetic oligonucleotide
  Sense strand starting at position 1409 of SEQ ID NO: 317874
ggagucaucugacccagga

SEQ ID NO: 519090 - RNA, 19 nt, Artificial Sequence
  Description of Artificial Sequence: Synthetic oligonucleotide
  Antisense strand to SEQ ID NO: 519089
uccugggucagaugacucc

SEQ ID NO: 519091 - RNA, 19 nt, Artificial Sequence
  Description of Artificial Sequence: Synthetic oligonucleotide
  Sense strand starting at position 1578 of SEQ ID NO: 317874
gccgaguuuggcgcgaaga

SEQ ID NO: 519092 - RNA, 19 nt, Artificial Sequence
  Description of Artificial Sequence: Synthetic oligonucleotide
  Antisense strand to SEQ ID NO: 519091
ucuucgcgccaaacucggc

SEQ ID NO: 519093 - RNA, 19 nt, Artificial Sequence
  Description of Artificial Sequence: Synthetic oligonucleotide
  Sense strand starting at position 1629 of SEQ ID NO: 317874
cucggaaaugucuaagguu

SEQ ID NO: 519094 - RNA, 19 nt, Artificial Sequence
  Description of Artificial Sequence: Synthetic oligonucleotide
  Antisense strand to SEQ ID NO: 519093
aaccuuagacauuuccgag

SEQ ID NO: 519095 - RNA, 19 nt, Artificial Sequence
  Description of Artificial Sequence: Synthetic oligonucleotide
  Sense strand starting at position 2407 of SEQ ID NO: 317874
gauuauugugaggguuaga

SEQ ID NO: 519096 - RNA, 19 nt, Artificial Sequence
  Description of Artificial Sequence: Synthetic oligonucleotide
  Antisense strand to SEQ ID NO: 519095
ucuaacccucacaauaauc

SEQ ID NO: 519097 - RNA, 19 nt, Artificial Sequence
  Description of Artificial Sequence: Synthetic oligonucleotide
  Sense strand starting at position 2441 of SEQ ID NO: 317874
gcaggugacauggaagagu

SEQ ID NO: 519098 - RNA, 19 nt, Artificial Sequence
  Description of Artificial Sequence: Synthetic oligonucleotide
  Antisense strand to SEQ ID NO: 519097
acucuuccaugucaccugc

SEQ ID NO: 519099 - RNA, 19 nt, Artificial Sequence
  Description of Artificial Sequence: Synthetic oligonucleotide
  Sense strand starting at position 2472 of SEQ ID NO: 317874
ggagguggauccuuuacag

SEQ ID NO: 519100 - RNA, 19 nt, Artificial Sequence
  Description of Artificial Sequence: Synthetic oligonucleotide
  Antisense strand to SEQ ID NO: 519099
cuguaaaggauccaccucc

SEQ ID NO: 519101 - RNA, 19 nt, Artificial Sequence
  Description of Artificial Sequence: Synthetic oligonucleotide
  Sense strand starting at position 2848 of SEQ ID NO: 317874
ugauguaagcucuagaagc

SEQ ID NO: 519102 - RNA, 19 nt, Artificial Sequence
  Description of Artificial Sequence: Synthetic oligonucleotide
  Antisense strand to SEQ ID NO: 519101
gcuucuagagcuuacauca

SEQ ID NO: 519103 - RNA, 19 nt, Artificial Sequence
  Description of Artificial Sequence: Synthetic oligonucleotide
  Sense strand starting at position 3047 of SEQ ID NO: 317874
aagucugauccacagugau

SEQ ID NO: 519104 - RNA, 19 nt, Artificial Sequence
  Description of Artificial Sequence: Synthetic oligonucleotide
  Antisense strand to SEQ ID NO: 519103
aucacuguggaucagacuu

SEQ ID NO: 519105 - RNA, 19 nt, Artificial Sequence
  Description of Artificial Sequence: Synthetic oligonucleotide
  Sense strand starting at position 3050 of SEQ ID NO: 317874
ucugauccacagugauaag

SEQ ID NO: 519106 - RNA, 19 nt, Artificial Sequence
  Description of Artificial Sequence: Synthetic oligonucleotide
  Antisense strand to SEQ ID NO: 519105
cuuaucacuguggaucaga

SEQ ID NO: 519107 - RNA, 19 nt, Artificial Sequence
  Description of Artificial Sequence: Synthetic oligonucleotide
  Sense strand starting at position 3243 of SEQ ID NO: 317874
agcacaaauuagguaauaa

SEQ ID NO: 519108 - RNA, 19 nt, Artificial Sequence
  Description of Artificial Sequence: Synthetic oligonucleotide
  Antisense strand to SEQ ID NO: 519107
uuauuaccuaauuugugcu

SEQ ID NO: 519109 - RNA, 19 nt, Artificial Sequence
  Description of Artificial Sequence: Synthetic oligonucleotide
  Sense strand starting at position 3253 of SEQ ID NO: 317874
agguaauaaugucuuauac

SEQ ID NO: 519110 - RNA, 19 nt, Artificial Sequence
  Description of Artificial Sequence: Synthetic oligonucleotide
  Antisense strand to SEQ ID NO: 519109
guauaagacauuauuaccu

SEQ ID NO: 519111 - RNA, 19 nt, Artificial Sequence
  Description of Artificial Sequence: Synthetic oligonucleotide
  Sense strand starting at position 3638 of SEQ ID NO: 317874
ucauaagguuugucaacua

SEQ ID NO: 519112 - RNA, 19 nt, Artificial Sequence
  Description of Artificial Sequence: Synthetic oligonucleotide
  Antisense strand to SEQ ID NO: 519111
uaguugacaaaccuuauga

SEQ ID NO: 519113 - RNA, 19 nt, Artificial Sequence
  Description of Artificial Sequence: Synthetic oligonucleotide
  Sense strand starting at position 3708 of SEQ ID NO: 317874
caauguaugguagauguua

SEQ ID NO: 519114 - RNA, 19 nt, Artificial Sequence
  Description of Artificial Sequence: Synthetic oligonucleotide
  Antisense strand to SEQ ID NO: 519113
uaacaucuaccauacauug

SEQ ID NO: 519115 - RNA, 19 nt, Artificial Sequence
  Description of Artificial Sequence: Synthetic oligonucleotide
  Sense strand starting at position 3765 of SEQ ID NO: 317874
gauugugaagauugguauu

SEQ ID NO: 519116 - RNA, 19 nt, Artificial Sequence
  Description of Artificial Sequence: Synthetic oligonucleotide
  Antisense strand to SEQ ID NO: 519115
aauaccaaucuucacaauc

SEQ ID NO: 519117 - RNA, 19 nt, Artificial Sequence
  Description of Artificial Sequence: Synthetic oligonucleotide
  Sense strand starting at position 3786 of SEQ ID NO: 317874
auugaauaacugggccaua

SEQ ID NO: 519118 - RNA, 19 nt, Artificial Sequence
  Description of Artificial Sequence: Synthetic oligonucleotide
  Antisense strand to SEQ ID NO: 519117
uauggcccaguuauucaau

SEQ ID NO: 519119 - RNA, 19 nt, Artificial Sequence
  Description of Artificial Sequence: Synthetic oligonucleotide
  Sense strand starting at position 3889 of SEQ ID NO: 317874
uguaaagucacagauagua

SEQ ID NO: 519120 - RNA, 19 nt, Artificial Sequence
  Description of Artificial Sequence: Synthetic oligonucleotide
  Antisense strand to SEQ ID NO: 519119
uacuaucugugacuuuaca

SEQ ID NO: 519121 - RNA, 19 nt, Artificial Sequence
  Description of Artificial Sequence: Synthetic oligonucleotide
  Sense strand starting at position 3913 of SEQ ID NO: 317874
gucuuugcaguccagaaag

SEQ ID NO: 519122 - RNA, 19 nt, Artificial Sequence
  Description of Artificial Sequence: Synthetic oligonucleotide
  Antisense strand to SEQ ID NO: 519121
cuuucuggacugcaaagac

SEQ ID NO: 519123 - RNA, 19 nt, Artificial Sequence
  Description of Artificial Sequence: Synthetic oligonucleotide
  Sense strand starting at position 3937 of SEQ ID NO: 317874
ucaaguauauauguaggau

SEQ ID NO: 519124 - RNA, 19 nt, Artificial Sequence
  Description of Artificial Sequence: Synthetic oligonucleotide
  Antisense strand to SEQ ID NO: 519123
auccuacauauauacuuga

SEQ ID NO: 519125 - RNA, 19 nt, Artificial Sequence
  Description of Artificial Sequence: Synthetic oligonucleotide
  Sense strand starting at position 3949 of SEQ ID NO: 317874
guaggaugcagguacuuau

SEQ ID NO: 519126 - RNA, 19 nt, Artificial Sequence
  Description of Artificial Sequence: Synthetic oligonucleotide
  Antisense strand to SEQ ID NO: 519125
auaaguaccugcauccuac

SEQ ID NO: 519127 - RNA, 19 nt, Artificial Sequence
  Description of Artificial Sequence: Synthetic oligonucleotide
  Sense strand starting at position 3956 of SEQ ID NO: 317874
gcagguacuuauguaaaga

SEQ ID NO: 519128 - RNA, 19 nt, Artificial Sequence
  Description of Artificial Sequence: Synthetic oligonucleotide
  Antisense strand to SEQ ID NO: 519127
ucuuuacauaaguaccugc

SEQ ID NO: 519129 - RNA, 19 nt, Artificial Sequence
  Description of Artificial Sequence: Synthetic oligonucleotide
  Sense strand starting at position 155 of SEQ ID NO: 317875
gcagauuguccgugccacu

SEQ ID NO: 519130 - RNA, 19 nt, Artificial Sequence
  Description of Artificial Sequence: Synthetic oligonucleotide
  Antisense strand to SEQ ID NO: 519129
aguggcacggacaaucugc

SEQ ID NO: 519131 - RNA, 19 nt, Artificial Sequence
  Description of Artificial Sequence: Synthetic oligonucleotide
  Sense strand starting at position 260 of SEQ ID NO: 317875
cuuggcuaugcuugggauu

SEQ ID NO: 519132 - RNA, 19 nt, Artificial Sequence
  Description of Artificial Sequence: Synthetic oligonucleotide
  Antisense strand to SEQ ID NO: 519131
aaucccaagcauagccaag

SEQ ID NO: 519133 - RNA, 19 nt, Artificial Sequence
  Description of Artificial Sequence: Synthetic oligonucleotide
  Sense strand starting at position 319 of SEQ ID NO: 317875
cugugaccuccacaagcau

SEQ ID NO: 519134 - RNA, 19 nt, Artificial Sequence
  Description of Artificial Sequence: Synthetic oligonucleotide
  Antisense strand to SEQ ID NO: 519133
augcuuguggaggucacag

SEQ ID NO: 519135 - RNA, 19 nt, Artificial Sequence
  Description of Artificial Sequence: Synthetic oligonucleotide
  Sense strand starting at position 334 of SEQ ID NO: 317875
gcaucaaugucgucucuca

SEQ ID NO: 519136 - RNA, 19 nt, Artificial Sequence
  Description of Artificial Sequence: Synthetic oligonucleotide
  Antisense strand to SEQ ID NO: 519135
ugagagacgacauugaugc

SEQ ID NO: 519137 - RNA, 19 nt, Artificial Sequence
  Description of Artificial Sequence: Synthetic oligonucleotide
  Sense strand starting at position 385 of SEQ ID NO: 317875
cugggucauguuuguaaag

SEQ ID NO: 519138 - RNA, 19 nt, Artificial Sequence
  Description of Artificial Sequence: Synthetic oligonucleotide
  Antisense strand to SEQ ID NO: 519137
cuuuacaaacaugacccag

SEQ ID NO: 519139 - RNA, 19 nt, Artificial Sequence
  Description of Artificial Sequence: Synthetic oligonucleotide
  Sense strand starting at position 387 of SEQ ID NO: 317875
gggucauguuuguaaagca

SEQ ID NO: 519140 - RNA, 19 nt, Artificial Sequence
  Description of Artificial Sequence: Synthetic oligonucleotide
  Antisense strand to SEQ ID NO: 519139
ugcuuuacaaacaugaccc

SEQ ID NO: 519141 - RNA, 19 nt, Artificial Sequence
  Description of Artificial Sequence: Synthetic oligonucleotide
  Sense strand starting at position 516 of SEQ ID NO: 317875
gccucaagcuguuaaggaa

SEQ ID NO: 519142 - RNA, 19 nt, Artificial Sequence
  Description of Artificial Sequence: Synthetic oligonucleotide
  Antisense strand to SEQ ID NO: 519141
uuccuuaacagcuugaggc

SEQ ID NO: 519143 - RNA, 19 nt, Artificial Sequence
  Description of Artificial Sequence: Synthetic oligonucleotide
  Sense strand starting at position 542 of SEQ ID NO: 317875
ugcaaauagcuucgagcaa

SEQ ID NO: 519144 - RNA, 19 nt, Artificial Sequence
  Description of Artificial Sequence: Synthetic oligonucleotide
  Antisense strand to SEQ ID NO: 519143
uugcucgaagcuauuugca

SEQ ID NO: 519145 - RNA, 19 nt, Artificial Sequence
  Description of Artificial Sequence: Synthetic oligonucleotide
  Sense strand starting at position 543 of SEQ ID NO: 317875
gcaaauagcuucgagcaaa

SEQ ID NO: 519146 - RNA, 19 nt, Artificial Sequence
  Description of Artificial Sequence: Synthetic oligonucleotide
  Antisense strand to SEQ ID NO: 519145
uuugcucgaagcuauuugc

SEQ ID NO: 519147 - RNA, 19 nt, Artificial Sequence
  Description of Artificial Sequence: Synthetic oligonucleotide
  Sense strand starting at position 559 of SEQ ID NO: 317875
aaaggaaacugacgguuua

SEQ ID NO: 519148 - RNA, 19 nt, Artificial Sequence
  Description of Artificial Sequence: Synthetic oligonucleotide
  Antisense strand to SEQ ID NO: 519147
uaaaccgucaguuuccuuu

SEQ ID NO: 519149 - RNA, 19 nt, Artificial Sequence
  Description of Artificial Sequence: Synthetic oligonucleotide
  Sense strand starting at position 560 of SEQ ID NO: 317875
aaggaaacugacgguuuau

SEQ ID NO: 519150 - RNA, 19 nt, Artificial Sequence
  Description of Artificial Sequence: Synthetic oligonucleotide
  Antisense strand to SEQ ID NO: 519149
auaaaccgucaguuuccuu

SEQ ID NO: 519151 - RNA, 19 nt, Artificial Sequence
  Description of Artificial Sequence: Synthetic oligonucleotide
  Sense strand starting at position 571 of SEQ ID NO: 317875
cgguuuaucugccugggca

SEQ ID NO: 519152 - RNA, 19 nt, Artificial Sequence
  Description of Artificial Sequence: Synthetic oligonucleotide
  Antisense strand to SEQ ID NO: 519151
ugcccaggcagauaaaccg

SEQ ID NO: 519153 - RNA, 19 nt, Artificial Sequence
  Description of Artificial Sequence: Synthetic oligonucleotide
  Sense strand starting at position 1174 of SEQ ID NO: 317875
acgggaacuccucacacuu

SEQ ID NO: 519154 - RNA, 19 nt, Artificial Sequence
  Description of Artificial Sequence: Synthetic oligonucleotide
  Antisense strand to SEQ ID NO: 519153
aagugugaggaguucccgu

SEQ ID NO: 519155 - RNA, 19 nt, Artificial Sequence
  Description of Artificial Sequence: Synthetic oligonucleotide
  Sense strand starting at position 2105 of SEQ ID NO: 317875
cuguguguauaccuuuauu

SEQ ID NO: 519156 - RNA, 19 nt, Artificial Sequence
  Description of Artificial Sequence: Synthetic oligonucleotide
  Antisense strand to SEQ ID NO: 519155
aauaaagguauacacacag

SEQ ID NO: 519157 - RNA, 19 nt, Artificial Sequence
  Description of Artificial Sequence: Synthetic oligonucleotide
  Sense strand starting at position 2111 of SEQ ID NO: 317875
guauaccuuuauucuggaa

SEQ ID NO: 519158 - RNA, 19 nt, Artificial Sequence
  Description of Artificial Sequence: Synthetic oligonucleotide
  Antisense strand to SEQ ID NO: 519157
uuccagaauaaagguauac

SEQ ID NO: 519159 - RNA, 19 nt, Artificial Sequence
  Description of Artificial Sequence: Synthetic oligonucleotide
  Sense strand starting at position 2126 of SEQ ID NO: 317875
ggaacagccucaggucauu

SEQ ID NO: 519160 - RNA, 19 nt, Artificial Sequence
  Description of Artificial Sequence: Synthetic oligonucleotide
  Antisense strand to SEQ ID NO: 519159
aaugaccugaggcuguucc

SEQ ID NO: 519161 - RNA, 19 nt, Artificial Sequence
  Description of Artificial Sequence: Synthetic oligonucleotide
  Sense strand starting at position 2199 of SEQ ID NO: 317875
ugcacuuggccaggaaaua

SEQ ID NO: 519162 - RNA, 19 nt, Artificial Sequence
  Description of Artificial Sequence: Synthetic oligonucleotide
  Antisense strand to SEQ ID NO: 519161
uauuuccuggccaagugca

SEQ ID NO: 519163 - RNA, 19 nt, Artificial Sequence
  Description of Artificial Sequence: Synthetic oligonucleotide
  Sense strand starting at position 2200 of SEQ ID NO: 317875
gcacuuggccaggaaauau

SEQ ID NO: 519164 - RNA, 19 nt, Artificial Sequence
  Description of Artificial Sequence: Synthetic oligonucleotide
  Antisense strand to SEQ ID NO: 519163
auauuuccuggccaagugc

SEQ ID NO: 519165 - RNA, 19 nt, Artificial Sequence
  Description of Artificial Sequence: Synthetic oligonucleotide
  Sense strand starting at position 2211 of SEQ ID NO: 317875
ggaaauauguccugaaggc

SEQ ID NO: 519166 - RNA, 19 nt, Artificial Sequence
  Description of Artificial Sequence: Synthetic oligonucleotide
  Antisense strand to SEQ ID NO: 519165
gccuucaggacauauuucc

SEQ ID NO: 519167 - RNA, 19 nt, Artificial Sequence
  Description of Artificial Sequence: Synthetic oligonucleotide
  Sense strand starting at position 2304 of SEQ ID NO: 317875
uugcguucucaucgccauu

SEQ ID NO: 519168 - RNA, 19 nt, Artificial Sequence
  Description of Artificial Sequence: Synthetic oligonucleotide
  Antisense strand to SEQ ID NO: 519167
aauggcgaugagaacgcaa

SEQ ID NO: 519169 - RNA, 19 nt, Artificial Sequence
  Description of Artificial Sequence: Synthetic oligonucleotide
  Sense strand starting at position 2333 of SEQ ID NO: 317875
ggaaaucggugcucagaaa

SEQ ID NO: 519170 - RNA, 19 nt, Artificial Sequence
  Description of Artificial Sequence: Synthetic oligonucleotide
  Antisense strand to SEQ ID NO: 519169
uuucugagcaccgauuucc

SEQ ID NO: 519171 - RNA, 19 nt, Artificial Sequence
  Description of Artificial Sequence: Synthetic oligonucleotide
  Sense strand starting at position 2387 of SEQ ID NO: 317875
acaaauauggcuugagcaa

SEQ ID NO: 519172 - RNA, 19 nt, Artificial Sequence
  Description of Artificial Sequence: Synthetic oligonucleotide
  Antisense strand to SEQ ID NO: 519171
uugcucaagccauauuugu

SEQ ID NO: 519173 - RNA, 19 nt, Artificial Sequence
  Description of Artificial Sequence: Synthetic oligonucleotide
  Sense strand starting at position 2405 of SEQ ID NO: 317875
accgcugucucacuggaau

SEQ ID NO: 519174 - RNA, 19 nt, Artificial Sequence
  Description of Artificial Sequence: Synthetic oligonucleotide
  Antisense strand to SEQ ID NO: 519173
auuccagugagacagcggu

SEQ ID NO: 519175 - RNA, 19 nt, Artificial Sequence
  Description of Artificial Sequence: Synthetic oligonucleotide
  Sense strand starting at position 2423 of SEQ ID NO: 317875
ugagcauguggccauacau

SEQ ID NO: 519176 - RNA, 19 nt, Artificial Sequence
  Description of Artificial Sequence: Synthetic oligonucleotide
  Antisense strand to SEQ ID NO: 519175
auguauggccacaugcuca

SEQ ID NO: 519177 - RNA, 19 nt, Artificial Sequence
  Description of Artificial Sequence: Synthetic oligonucleotide
  Sense strand starting at position 2507 of SEQ ID NO: 317875
cugagauccugccucaucu

SEQ ID NO: 519178 - RNA, 19 nt, Artificial Sequence
  Description of Artificial Sequence: Synthetic oligonucleotide
  Antisense strand to SEQ ID NO: 519177
agaugaggcaggaucucag

SEQ ID NO: 519179 - RNA, 19 nt, Artificial Sequence
  Description of Artificial Sequence: Synthetic oligonucleotide
  Sense strand starting at position 2667 of SEQ ID NO: 317875
gagagcuuguggccuaaau

SEQ ID NO: 519180 - RNA, 19 nt, Artificial Sequence
  Description of Artificial Sequence: Synthetic oligonucleotide
  Antisense strand to SEQ ID NO: 519179
auuuaggccacaagcucuc

SEQ ID NO: 519181 - RNA, 19 nt, Artificial Sequence
  Description of Artificial Sequence: Synthetic oligonucleotide
  Sense strand starting at position 2684 of SEQ ID NO: 317875
auggcaguucuaugacauc

SEQ ID NO: 519182 - RNA, 19 nt, Artificial Sequence
  Description of Artificial Sequence: Synthetic oligonucleotide
  Antisense strand to SEQ ID NO: 519181
gaugucauagaacugccau

SEQ ID NO: 519183 - RNA, 19 nt, Artificial Sequence
  Description of Artificial Sequence: Synthetic oligonucleotide
  Sense strand starting at position 2849 of SEQ ID NO: 317875
gggccugagagcuaugaca

SEQ ID NO: 519184 - RNA, 19 nt, Artificial Sequence
  Description of Artificial Sequence: Synthetic oligonucleotide
  Antisense strand to SEQ ID NO: 519183
ugucauagcucucaggccc

SEQ ID NO: 519185 - RNA, 19 nt, Artificial Sequence
  Description of Artificial Sequence: Synthetic oligonucleotide
  Sense strand starting at position 2918 of SEQ ID NO: 317875
guggucccuccuugaguca

SEQ ID NO: 519186 - RNA, 19 nt, Artificial Sequence
  Description of Artificial Sequence: Synthetic oligonucleotide
  Antisense strand to SEQ ID NO: 519185
ugacucaaggagggaccac

SEQ ID NO: 519187 - RNA, 19 nt, Artificial Sequence
  Description of Artificial Sequence: Synthetic oligonucleotide
  Sense strand starting at position 2921 of SEQ ID NO: 317875
gucccuccuugagucauaa

SEQ ID NO: 519188 - RNA, 19 nt, Artificial Sequence
  Description of Artificial Sequence: Synthetic oligonucleotide
  Antisense strand to SEQ ID NO: 519187
uuaugacucaaggagggac

SEQ ID NO: 519189 - RNA, 19 nt, Artificial Sequence
  Description of Artificial Sequence: Synthetic oligonucleotide
  Sense strand starting at position 3027 of SEQ ID NO: 317875
agguguuggcagugcuagu

SEQ ID NO: 519190 - RNA, 19 nt, Artificial Sequence
  Description of Artificial Sequence: Synthetic oligonucleotide
  Antisense strand to SEQ ID NO: 519189
acuagcacugccaacaccu

SEQ ID NO: 519191 - RNA, 19 nt, Artificial Sequence
  Description of Artificial Sequence: Synthetic oligonucleotide
  Sense strand starting at position 3034 of SEQ ID NO: 317875
ggcagugcuagugggagau

SEQ ID NO: 519192 - RNA, 19 nt, Artificial Sequence
  Description of Artificial Sequence: Synthetic oligonucleotide
  Antisense strand to SEQ ID NO: 519191
aucucccacuagcacugcc

SEQ ID NO: 519193 - RNA, 19 nt, Artificial Sequence
  Description of Artificial Sequence: Synthetic oligonucleotide
  Sense strand starting at position 3090 of SEQ ID NO: 317875
ggugacgucuguccaggaa

SEQ ID NO: 519194 - RNA, 19 nt, Artificial Sequence
  Description of Artificial Sequence: Synthetic oligonucleotide
  Antisense strand to SEQ ID NO: 519193
uuccuggacagacgucacc

SEQ ID NO: 519195 - RNA, 19 nt, Artificial Sequence
  Description of Artificial Sequence: Synthetic oligonucleotide
  Sense strand starting at position 3331 of SEQ ID NO: 317875
ugaggccucuuggagagaa

SEQ ID NO: 519196 - RNA, 19 nt, Artificial Sequence
  Description of Artificial Sequence: Synthetic oligonucleotide
  Antisense strand to SEQ ID NO: 519195
uucucuccaagaggccuca

SEQ ID NO: 519197 - RNA, 19 nt, Artificial Sequence
  Description of Artificial Sequence: Synthetic oligonucleotide
  Sense strand starting at position 3351 of SEQ ID NO: 317875
ggaagacugucggcucaga

SEQ ID NO: 519198 - RNA, 19 nt, Artificial Sequence
  Description of Artificial Sequence: Synthetic oligonucleotide
  Antisense strand to SEQ ID NO: 519197
ucugagccgacagucuucc

SEQ ID NO: 519199 - RNA, 19 nt, Artificial Sequence
  Description of Artificial Sequence: Synthetic oligonucleotide
  Sense strand starting at position 3364 of SEQ ID NO: 317875
cucagaaguccauggagcu

SEQ ID NO: 519200 - RNA, 19 nt, Artificial Sequence
  Description of Artificial Sequence: Synthetic oligonucleotide
  Antisense strand to SEQ ID NO: 519199
agcuccauggacuucugag

SEQ ID NO: 519201 - RNA, 19 nt, Artificial Sequence
  Description of Artificial Sequence: Synthetic oligonucleotide
  Sense strand starting at position 3427 of SEQ ID NO: 317875
ucugcauagccucgaguuu

SEQ ID NO: 519202 - RNA, 19 nt, Artificial Sequence
  Description of Artificial Sequence: Synthetic oligonucleotide
  Antisense strand to SEQ ID NO: 519201
aaacucgaggcuaugcaga

SEQ ID NO: 519203 - RNA, 19 nt, Artificial Sequence
  Description of Artificial Sequence: Synthetic oligonucleotide
  Sense strand starting at position 3450 of SEQ ID NO: 317875
cagucagugauccgaugac

SEQ ID NO: 519204 - RNA, 19 nt, Artificial Sequence
  Description of Artificial Sequence: Synthetic oligonucleotide
  Antisense strand to SEQ ID NO: 519203
gucaucggaucacugacug

SEQ ID NO: 519205 - RNA, 19 nt, Artificial Sequence
  Description of Artificial Sequence: Synthetic oligonucleotide
  Sense strand starting at position 3900 of SEQ ID NO: 317875
cgcuuuguugaugaaggua

SEQ ID NO: 519206 - RNA, 19 nt, Artificial Sequence
  Description of Artificial Sequence: Synthetic oligonucleotide
  Antisense strand to SEQ ID NO: 519205
uaccuucaucaacaaagcg

SEQ ID NO: 519207 - RNA, 19 nt, Artificial Sequence
  Description of Artificial Sequence: Synthetic oligonucleotide
  Sense strand starting at position 3961 of SEQ ID NO: 317875
cgguguacugcagagagaa

SEQ ID NO: 519208 - RNA, 19 nt, Artificial Sequence
  Description of Artificial Sequence: Synthetic oligonucleotide
  Antisense strand to SEQ ID NO: 519207
uucucucugcaguacaccg

SEQ ID NO: 519209 - RNA, 19 nt, Artificial Sequence
  Description of Artificial Sequence: Synthetic oligonucleotide
  Sense strand starting at position 120 of SEQ ID NO: 317876
guggguuccugucauucag

SEQ ID NO: 519210 - RNA, 19 nt, Artificial Sequence
  Description of Artificial Sequence: Synthetic oligonucleotide
  Antisense strand to SEQ ID NO: 519209
cugaaugacaggaacccac

SEQ ID NO: 519211 - RNA, 19 nt, Artificial Sequence
  Description of Artificial Sequence: Synthetic oligonucleotide
  Sense strand starting at position 238 of SEQ ID NO: 317876
cucugagagucauuauaga

SEQ ID NO: 519212 - RNA, 19 nt, Artificial Sequence
  Description of Artificial Sequence: Synthetic oligonucleotide
  Antisense strand to SEQ ID NO: 519211
ucuauaaugacucucagag

SEQ ID NO: 519213 - RNA, 19 nt, Artificial Sequence
  Description of Artificial Sequence: Synthetic oligonucleotide
  Sense strand starting at position 724 of SEQ ID NO: 317876
gcagauuguccgugccacu

SEQ ID NO: 519214 - RNA, 19 nt, Artificial Sequence
  Description of Artificial Sequence: Synthetic oligonucleotide
  Antisense strand to SEQ ID NO: 519213
aguggcacggacaaucugc

SEQ ID NO: 519215 - RNA, 19 nt, Artificial Sequence
  Description of Artificial Sequence: Synthetic oligonucleotide
  Sense strand starting at position 829 of SEQ ID NO: 317876
cuuggcuaugcuugggauu

SEQ ID NO: 519216 - RNA, 19 nt, Artificial Sequence
  Description of Artificial Sequence: Synthetic oligonucleotide
  Antisense strand to SEQ ID NO: 519215
aaucccaagcauagccaag

SEQ ID NO: 519217 - RNA, 19 nt, Artificial Sequence
  Description of Artificial Sequence: Synthetic oligonucleotide
  Sense strand starting at position 888 of SEQ ID NO: 317876
cugugaccuccacaagcau

SEQ ID NO: 519218 - RNA, 19 nt, Artificial Sequence
  Description of Artificial Sequence: Synthetic oligonucleotide
  Antisense strand to SEQ ID NO: 519217
augcuuguggaggucacag

SEQ ID NO: 519219 - RNA, 19 nt, Artificial Sequence
  Description of Artificial Sequence: Synthetic oligonucleotide
  Sense strand starting at position 903 of SEQ ID NO: 317876
gcaucaaugucgucucuca

SEQ ID NO: 519220 - RNA, 19 nt, Artificial Sequence
  Description of Artificial Sequence: Synthetic oligonucleotide
  Antisense strand to SEQ ID NO: 519219
ugagagacgacauugaugc

SEQ ID NO: 519221 - RNA, 19 nt, Artificial Sequence
  Description of Artificial Sequence: Synthetic oligonucleotide
  Sense strand starting at position 954 of SEQ ID NO: 317876
cugggucauguuuguaaag

SEQ ID NO: 519222 - RNA, 19 nt, Artificial Sequence
  Description of Artificial Sequence: Synthetic oligonucleotide
  Antisense strand to SEQ ID NO: 519221
cuuuacaaacaugacccag

SEQ ID NO: 519223 - RNA, 19 nt, Artificial Sequence
  Description of Artificial Sequence: Synthetic oligonucleotide
  Sense strand starting at position 956 of SEQ ID NO: 317876
gggucauguuuguaaagca

SEQ ID NO: 519224 - RNA, 19 nt, Artificial Sequence
  Description of Artificial Sequence: Synthetic oligonucleotide
  Antisense strand to SEQ ID NO: 519223
ugcuuuacaaacaugaccc

SEQ ID NO: 519225 - RNA, 19 nt, Artificial Sequence
  Description of Artificial Sequence: Synthetic oligonucleotide
  Sense strand starting at position 1085 of SEQ ID NO: 317876
gccucaagcuguuaaggaa

SEQ ID NO: 519226 - RNA, 19 nt, Artificial Sequence
  Description of Artificial Sequence: Synthetic oligonucleotide
  Antisense strand to SEQ ID NO: 519225
uuccuuaacagcuugaggc

SEQ ID NO: 519227 - RNA, 19 nt, Artificial Sequence
  Description of Artificial Sequence: Synthetic oligonucleotide
  Sense strand starting at position 1111 of SEQ ID NO: 317876
ugcaaauagcuucgagcaa

SEQ ID NO: 519228 - RNA, 19 nt, Artificial Sequence
  Description of Artificial Sequence: Synthetic oligonucleotide
  Antisense strand to SEQ ID NO: 519227
uugcucgaagcuauuugca

SEQ ID NO: 519229 - RNA, 19 nt, Artificial Sequence
  Description of Artificial Sequence: Synthetic oligonucleotide
  Sense strand starting at position 1112 of SEQ ID NO: 317876
gcaaauagcuucgagcaaa

SEQ ID NO: 519230 - RNA, 19 nt, Artificial Sequence
  Description of Artificial Sequence: Synthetic oligonucleotide
  Antisense strand to SEQ ID NO: 519229
uuugcucgaagcuauuugc

SEQ ID NO: 519231 - RNA, 19 nt, Artificial Sequence
  Description of Artificial Sequence: Synthetic oligonucleotide
  Sense strand starting at position 1128 of SEQ ID NO: 317876
aaaggaaacugacgguuua

SEQ ID NO: 519232 - RNA, 19 nt, Artificial Sequence
  Description of Artificial Sequence: Synthetic oligonucleotide
  Antisense strand to SEQ ID NO: 519231
uaaaccgucaguuuccuuu

SEQ ID NO: 519233 - RNA, 19 nt, Artificial Sequence
  Description of Artificial Sequence: Synthetic oligonucleotide
  Sense strand starting at position 1129 of SEQ ID NO: 317876
aaggaaacugacgguuuau

SEQ ID NO: 519234 - RNA, 19 nt, Artificial Sequence
  Description of Artificial Sequence: Synthetic oligonucleotide
  Antisense strand to SEQ ID NO: 519233
auaaaccgucaguuuccuu

SEQ ID NO: 519235 - RNA, 19 nt, Artificial Sequence
  Description of Artificial Sequence: Synthetic oligonucleotide
  Sense strand starting at position 1140 of SEQ ID NO: 317876
cgguuuaucugccugggca

SEQ ID NO: 519236 - RNA, 19 nt, Artificial Sequence
  Description of Artificial Sequence: Synthetic oligonucleotide
  Antisense strand to SEQ ID NO: 519235
ugcccaggcagauaaaccg

SEQ ID NO: 519237 - RNA, 19 nt, Artificial Sequence
  Description of Artificial Sequence: Synthetic oligonucleotide
  Sense strand starting at position 1628 of SEQ ID NO: 317876
uugacaugcugcugguaga

SEQ ID NO: 519238 - RNA, 19 nt, Artificial Sequence
  Description of Artificial Sequence: Synthetic oligonucleotide
  Antisense strand to SEQ ID NO: 519237
ucuaccagcagcaugucaa

SEQ ID NO: 519239 - RNA, 19 nt, Artificial Sequence
  Description of Artificial Sequence: Synthetic oligonucleotide
  Sense strand starting at position 1743 of SEQ ID NO: 317876
acgggaacuccucacacuu

SEQ ID NO: 519240 - RNA, 19 nt, Artificial Sequence
  Description of Artificial Sequence: Synthetic oligonucleotide
  Antisense strand to SEQ ID NO: 519239
aagugugaggaguucccgu

SEQ ID NO: 519241 - RNA, 19 nt, Artificial Sequence
  Description of Artificial Sequence: Synthetic oligonucleotide
  Sense strand starting at position 2674 of SEQ ID NO: 317876
cuguguguauaccuuuauu

SEQ ID NO: 519242 - RNA, 19 nt, Artificial Sequence
  Description of Artificial Sequence: Synthetic oligonucleotide
  Antisense strand to SEQ ID NO: 519241
aauaaagguauacacacag

SEQ ID NO: 519243 - RNA, 19 nt, Artificial Sequence
  Description of Artificial Sequence: Synthetic oligonucleotide
  Sense strand starting at position 2680 of SEQ ID NO: 317876
guauaccuuuauucuggaa

SEQ ID NO: 519244 - RNA, 19 nt, Artificial Sequence
  Description of Artificial Sequence: Synthetic oligonucleotide
  Antisense strand to SEQ ID NO: 519243
uuccagaauaaagguauac

SEQ ID NO: 519245 - RNA, 19 nt, Artificial Sequence
  Description of Artificial Sequence: Synthetic oligonucleotide
  Sense strand starting at position 2695 of SEQ ID NO: 317876
ggaacagccucaggucauu

SEQ ID NO: 519246 - RNA, 19 nt, Artificial Sequence
  Description of Artificial Sequence: Synthetic oligonucleotide
  Antisense strand to SEQ ID NO: 519245
aaugaccugaggcuguucc

SEQ ID NO: 519247 - RNA, 19 nt, Artificial Sequence
  Description of Artificial Sequence: Synthetic oligonucleotide
  Sense strand starting at position 2768 of SEQ ID NO: 317876
ugcacuuggccaggaaaua

SEQ ID NO: 519248 - RNA, 19 nt, Artificial Sequence
  Description of Artificial Sequence: Synthetic oligonucleotide
  Antisense strand to SEQ ID NO: 519247
uauuuccuggccaagugca

SEQ ID NO: 519249 - RNA, 19 nt, Artificial Sequence
  Description of Artificial Sequence: Synthetic oligonucleotide
  Sense strand starting at position 2769 of SEQ ID NO: 317876
gcacuuggccaggaaauau

SEQ ID NO: 519250 - RNA, 19 nt, Artificial Sequence
  Description of Artificial Sequence: Synthetic oligonucleotide
  Antisense strand to SEQ ID NO: 519249
auauuuccuggccaagugc

SEQ ID NO: 519251 - RNA, 19 nt, Artificial Sequence
  Description of Artificial Sequence: Synthetic oligonucleotide
  Sense strand starting at position 2780 of SEQ ID NO: 317876
ggaaauauguccugaaggc

SEQ ID NO: 519252 - RNA, 19 nt, Artificial Sequence
  Description of Artificial Sequence: Synthetic oligonucleotide
  Antisense strand to SEQ ID NO: 519251
gccuucaggacauauuucc

SEQ ID NO: 519253 - RNA, 19 nt, Artificial Sequence
  Description of Artificial Sequence: Synthetic oligonucleotide
  Sense strand starting at position 2873 of SEQ ID NO: 317876
uugcguucucaucgccauu

SEQ ID NO: 519254 - RNA, 19 nt, Artificial Sequence
  Description of Artificial Sequence: Synthetic oligonucleotide
  Antisense strand to SEQ ID NO: 519253
aauggcgaugagaacgcaa

SEQ ID NO: 519255 - RNA, 19 nt, Artificial Sequence
  Description of Artificial Sequence: Synthetic oligonucleotide
  Sense strand starting at position 2902 of SEQ ID NO: 317876
ggaaaucggugcucagaaa

SEQ ID NO: 519256 - RNA, 19 nt, Artificial Sequence
  Description of Artificial Sequence: Synthetic oligonucleotide
  Antisense strand to SEQ ID NO: 519255
uuucugagcaccgauuucc

SEQ ID NO: 519257 - RNA, 19 nt, Artificial Sequence
  Description of Artificial Sequence: Synthetic oligonucleotide
  Sense strand starting at position 2956 of SEQ ID NO: 317876
acaaauauggcuugagcaa

SEQ ID NO: 519258 - RNA, 19 nt, Artificial Sequence
  Description of Artificial Sequence: Synthetic oligonucleotide
  Antisense strand to SEQ ID NO: 519257
uugcucaagccauauuugu

SEQ ID NO: 519259 - RNA, 19 nt, Artificial Sequence
  Description of Artificial Sequence: Synthetic oligonucleotide
  Sense strand starting at position 2974 of SEQ ID NO: 317876
accgcugucucacuggaau

SEQ ID NO: 519260 - RNA, 19 nt, Artificial Sequence
  Description of Artificial Sequence: Synthetic oligonucleotide
  Antisense strand to SEQ ID NO: 519259
auuccagugagacagcggu

SEQ ID NO: 519261 - RNA, 19 nt, Artificial Sequence
  Description of Artificial Sequence: Synthetic oligonucleotide
  Sense strand starting at position 2992 of SEQ ID NO: 317876
ugagcauguggccauacau

SEQ ID NO: 519262 - RNA, 19 nt, Artificial Sequence
  Description of Artificial Sequence: Synthetic oligonucleotide
  Antisense strand to SEQ ID NO: 519261
auguauggccacaugcuca

SEQ ID NO: 519263 - RNA, 19 nt, Artificial Sequence
  Description of Artificial Sequence: Synthetic oligonucleotide
  Sense strand starting at position 3076 of SEQ ID NO: 317876
cugagauccugccucaucu

SEQ ID NO: 519264 - RNA, 19 nt, Artificial Sequence
  Description of Artificial Sequence: Synthetic oligonucleotide
  Antisense strand to SEQ ID NO: 519263
agaugaggcaggaucucag

SEQ ID NO: 519265 - RNA, 19 nt, Artificial Sequence
  Description of Artificial Sequence: Synthetic oligonucleotide
  Sense strand starting at position 3234 of SEQ ID NO: 317876
gggagagcuuguggccuaa

SEQ ID NO: 519266 - RNA, 19 nt, Artificial Sequence
  Description of Artificial Sequence: Synthetic oligonucleotide
  Antisense strand to SEQ ID NO: 519265
uuaggccacaagcucuccc

SEQ ID NO: 519267 - RNA, 19 nt, Artificial Sequence
  Description of Artificial Sequence: Synthetic oligonucleotide
  Sense strand starting at position 3236 of SEQ ID NO: 317876
gagagcuuguggccuaaau

SEQ ID NO: 519268 - RNA, 19 nt, Artificial Sequence
  Description of Artificial Sequence: Synthetic oligonucleotide
  Antisense strand to SEQ ID NO: 519267
auuuaggccacaagcucuc

SEQ ID NO: 519269 - RNA, 19 nt, Artificial Sequence
  Description of Artificial Sequence: Synthetic oligonucleotide
  Sense strand starting at position 3253 of SEQ ID NO: 317876
auggcaguucuaugacauc

SEQ ID NO: 519270 - RNA, 19 nt, Artificial Sequence
  Description of Artificial Sequence: Synthetic oligonucleotide
  Antisense strand to SEQ ID NO: 519269
gaugucauagaacugccau

SEQ ID NO: 519271 - RNA, 19 nt, Artificial Sequence
  Description of Artificial Sequence: Synthetic oligonucleotide
  Sense strand starting at position 3418 of SEQ ID NO: 317876
gggccugagagcuaugaca

SEQ ID NO: 519272 - RNA, 19 nt, Artificial Sequence
  Description of Artificial Sequence: Synthetic oligonucleotide
  Antisense strand to SEQ ID NO: 519271
ugucauagcucucaggccc

SEQ ID NO: 519273 - RNA, 19 nt, Artificial Sequence
  Description of Artificial Sequence: Synthetic oligonucleotide
  Sense strand starting at position 3487 of SEQ ID NO: 317876
guggucccuccuugaguca

SEQ ID NO: 519274 - RNA, 19 nt, Artificial Sequence
  Description of Artificial Sequence: Synthetic oligonucleotide
  Antisense strand to SEQ ID NO: 519273
ugacucaaggagggaccac

SEQ ID NO: 519275 - RNA, 19 nt, Artificial Sequence
  Description of Artificial Sequence: Synthetic oligonucleotide
  Sense strand starting at position 3490 of SEQ ID NO: 317876
gucccuccuugagucauaa

SEQ ID NO: 519276 - RNA, 19 nt, Artificial Sequence
  Description of Artificial Sequence: Synthetic oligonucleotide
  Antisense strand to SEQ ID NO: 519275
uuaugacucaaggagggac

SEQ ID NO: 519277 - RNA, 19 nt, Artificial Sequence
  Description of Artificial Sequence: Synthetic oligonucleotide
  Sense strand starting at position 3596 of SEQ ID NO: 317876
agguguuggcagugcuagu

SEQ ID NO: 519278 - RNA, 19 nt, Artificial Sequence
  Description of Artificial Sequence: Synthetic oligonucleotide
  Antisense strand to SEQ ID NO: 519277
acuagcacugccaacaccu

SEQ ID NO: 519279 - RNA, 19 nt, Artificial Sequence
  Description of Artificial Sequence: Synthetic oligonucleotide
  Sense strand starting at position 3603 of SEQ ID NO: 317876
ggcagugcuagugggagau

SEQ ID NO: 519280 - RNA, 19 nt, Artificial Sequence
  Description of Artificial Sequence: Synthetic oligonucleotide
  Antisense strand to SEQ ID NO: 519279
aucucccacuagcacugcc

SEQ ID NO: 519281 - RNA, 19 nt, Artificial Sequence
  Description of Artificial Sequence: Synthetic oligonucleotide
  Sense strand starting at position 3659 of SEQ ID NO: 317876
ggugacgucuguccaggaa

SEQ ID NO: 519282 - RNA, 19 nt, Artificial Sequence
  Description of Artificial Sequence: Synthetic oligonucleotide
  Antisense strand to SEQ ID NO: 519281
uuccuggacagacgucacc

SEQ ID NO: 519283 - RNA, 19 nt, Artificial Sequence
  Description of Artificial Sequence: Synthetic oligonucleotide
  Sense strand starting at position 3900 of SEQ ID NO: 317876
ugaggccucuuggagagaa

SEQ ID NO: 519284 - RNA, 19 nt, Artificial Sequence
  Description of Artificial Sequence: Synthetic oligonucleotide
  Antisense strand to SEQ ID NO: 519283
uucucuccaagaggccuca

SEQ ID NO: 519285 - RNA, 19 nt, Artificial Sequence
  Description of Artificial Sequence: Synthetic oligonucleotide
  Sense strand starting at position 3920 of SEQ ID NO: 317876
ggaagacugucggcucaga

SEQ ID NO: 519286 - RNA, 19 nt, Artificial Sequence
  Description of Artificial Sequence: Synthetic oligonucleotide
  Antisense strand to SEQ ID NO: 519285
ucugagccgacagucuucc

SEQ ID NO: 519287 - RNA, 19 nt, Artificial Sequence
  Description of Artificial Sequence: Synthetic oligonucleotide
  Sense strand starting at position 3933 of SEQ ID NO: 317876
cucagaaguccauggagcu

SEQ ID NO: 519288 - RNA, 19 nt, Artificial Sequence
  Description of Artificial Sequence: Synthetic oligonucleotide
  Antisense strand to SEQ ID NO: 519287
agcuccauggacuucugag

SEQ ID NO: 519289 - RNA, 19 nt, Artificial Sequence
  Description of Artificial Sequence: Synthetic oligonucleotide
  Sense strand starting at position 114 of SEQ ID NO: 317877
agaggaagccgacauuguu

SEQ ID NO: 519290 - RNA, 19 nt, Artificial Sequence
  Description of Artificial Sequence: Synthetic oligonucleotide
  Antisense strand to SEQ ID NO: 519289
aacaaugucggcuuccucu

SEQ ID NO: 519291 - RNA, 19 nt, Artificial Sequence
  Description of Artificial Sequence: Synthetic oligonucleotide
  Sense strand starting at position 185 of SEQ ID NO: 317877
ggucuuaguagucaaaggu

SEQ ID NO: 519292 - RNA, 19 nt, Artificial Sequence
  Description of Artificial Sequence: Synthetic oligonucleotide
  Antisense strand to SEQ ID NO: 519291
accuuugacuacuaagacc

SEQ ID NO: 519293 - RNA, 19 nt, Artificial Sequence
  Description of Artificial Sequence: Synthetic oligonucleotide
  Sense strand starting at position 303 of SEQ ID NO: 317877
cugaauaagcauuaacugu

SEQ ID NO: 519294 - RNA, 19 nt, Artificial Sequence
  Description of Artificial Sequence: Synthetic oligonucleotide
  Antisense strand to SEQ ID NO: 519293
acaguuaaugcuuauucag

SEQ ID NO: 519295 - RNA, 19 nt, Artificial Sequence
  Description of Artificial Sequence: Synthetic oligonucleotide
  Sense strand starting at position 323 of SEQ ID NO: 317877
auugcucugaggcagacau

SEQ ID NO: 519296 - RNA, 19 nt, Artificial Sequence
  Description of Artificial Sequence: Synthetic oligonucleotide
  Antisense strand to SEQ ID NO: 519295
augucugccucagagcaau

SEQ ID NO: 519297 - RNA, 19 nt, Artificial Sequence
  Description of Artificial Sequence: Synthetic oligonucleotide
  Sense strand starting at position 349 of SEQ ID NO: 317877
ucagguuguuauuccuaac

SEQ ID NO: 519298 - RNA, 19 nt, Artificial Sequence
  Description of Artificial Sequence: Synthetic oligonucleotide
  Antisense strand to SEQ ID NO: 519297
guuaggaauaacaaccuga

SEQ ID NO: 519299 - RNA, 19 nt, Artificial Sequence
  Description of Artificial Sequence: Synthetic oligonucleotide
  Sense strand starting at position 366 of SEQ ID NO: 317877
accauauuagugcagaaua

SEQ ID NO: 519300 - RNA, 19 nt, Artificial Sequence
  Description of Artificial Sequence: Synthetic oligonucleotide
  Antisense strand to SEQ ID NO: 519299
uauucugcacuaauauggu

SEQ ID NO: 519301 - RNA, 19 nt, Artificial Sequence
  Description of Artificial Sequence: Synthetic oligonucleotide
  Sense strand starting at position 404 of SEQ ID NO: 317877
gcggccauuaccuagacaa

SEQ ID NO: 519302 - RNA, 19 nt, Artificial Sequence
  Description of Artificial Sequence: Synthetic oligonucleotide
  Antisense strand to SEQ ID NO: 519301
uugucuagguaauggccgc

SEQ ID NO: 519303 - RNA, 19 nt, Artificial Sequence
  Description of Artificial Sequence: Synthetic oligonucleotide
  Sense strand starting at position 427 of SEQ ID NO: 317877
gagggcaucugauuauuau

SEQ ID NO: 519304 - RNA, 19 nt, Artificial Sequence
  Description of Artificial Sequence: Synthetic oligonucleotide
  Antisense strand to SEQ ID NO: 519303
auaauaaucagaugcccuc

SEQ ID NO: 519305 - RNA, 19 nt, Artificial Sequence
  Description of Artificial Sequence: Synthetic oligonucleotide
  Sense strand starting at position 428 of SEQ ID NO: 317877
agggcaucugauuauuauu

SEQ ID NO: 519306 - RNA, 19 nt, Artificial Sequence
  Description of Artificial Sequence: Synthetic oligonucleotide
  Antisense strand to SEQ ID NO: 519305
aauaauaaucagaugcccu

SEQ ID NO: 519307 - RNA, 19 nt, Artificial Sequence
  Description of Artificial Sequence: Synthetic oligonucleotide
  Sense strand starting at position 430 of SEQ ID NO: 317877
ggcaucugauuauuauuau

SEQ ID NO: 519308 - RNA, 19 nt, Artificial Sequence
  Description of Artificial Sequence: Synthetic oligonucleotide
  Antisense strand to SEQ ID NO: 519307
auaauaauaaucagaugcc

SEQ ID NO: 519309 - RNA, 19 nt, Artificial Sequence
  Description of Artificial Sequence: Synthetic oligonucleotide
  Sense strand starting at position 466 of SEQ ID NO: 317877
caguuugaacucugaaguc

SEQ ID NO: 519310 - RNA, 19 nt, Artificial Sequence
  Description of Artificial Sequence: Synthetic oligonucleotide
  Antisense strand to SEQ ID NO: 519309
gacuucagaguucaaacug

SEQ ID NO: 519311 - RNA, 19 nt, Artificial Sequence
  Description of Artificial Sequence: Synthetic oligonucleotide
  Sense strand starting at position 520 of SEQ ID NO: 317877
aucucugagucucugugaa

SEQ ID NO: 519312 - RNA, 19 nt, Artificial Sequence
  Description of Artificial Sequence: Synthetic oligonucleotide
  Antisense strand to SEQ ID NO: 519311
uucacagagacucagagau

SEQ ID NO: 519313 - RNA, 19 nt, Artificial Sequence
  Description of Artificial Sequence: Synthetic oligonucleotide
  Sense strand starting at position 630 of SEQ ID NO: 317877
agaaauuggcuuuggcaca

SEQ ID NO: 519314 - RNA, 19 nt, Artificial Sequence
  Description of Artificial Sequence: Synthetic oligonucleotide
  Antisense strand to SEQ ID NO: 519313
ugugccaaagccaauuucu

SEQ ID NO: 519315 - RNA, 19 nt, Artificial Sequence
  Description of Artificial Sequence: Synthetic oligonucleotide
  Sense strand starting at position 672 of SEQ ID NO: 317877
aucucaugcuaguuuaaug

SEQ ID NO: 519316 - RNA, 19 nt, Artificial Sequence
  Description of Artificial Sequence: Synthetic oligonucleotide
  Antisense strand to SEQ ID NO: 519315
cauuaaacuagcaugagau

SEQ ID NO: 519317 - RNA, 19 nt, Artificial Sequence
  Description of Artificial Sequence: Synthetic oligonucleotide
  Sense strand starting at position 854 of SEQ ID NO: 317877
agagauucgcguguuuagu

SEQ ID NO: 519318 - RNA, 19 nt, Artificial Sequence
  Description of Artificial Sequence: Synthetic oligonucleotide
  Antisense strand to SEQ ID NO: 519317
acuaaacacgcgaaucucu

SEQ ID NO: 519319 - RNA, 19 nt, Artificial Sequence
  Description of Artificial Sequence: Synthetic oligonucleotide
  Sense strand starting at position 855 of SEQ ID NO: 317877
gagauucgcguguuuaguc

SEQ ID NO: 519320 - RNA, 19 nt, Artificial Sequence
  Description of Artificial Sequence: Synthetic oligonucleotide
  Antisense strand to SEQ ID NO: 519319
gacuaaacacgcgaaucuc

SEQ ID NO: 519321 - RNA, 19 nt, Artificial Sequence
  Description of Artificial Sequence: Synthetic oligonucleotide
  Sense strand starting at position 1087 of SEQ ID NO: 317877
gcuggaaaucacuaagccu

SEQ ID NO: 519322 - RNA, 19 nt, Artificial Sequence
  Description of Artificial Sequence: Synthetic oligonucleotide
  Antisense strand to SEQ ID NO: 519321
aggcuuagugauuuccagc

SEQ ID NO: 519323 - RNA, 19 nt, Artificial Sequence
  Description of Artificial Sequence: Synthetic oligonucleotide
  Sense strand starting at position 2208 of SEQ ID NO: 317877
gcgcaauuuagacgucuua

SEQ ID NO: 519324 - RNA, 19 nt, Artificial Sequence
  Description of Artificial Sequence: Synthetic oligonucleotide
  Antisense strand to SEQ ID NO: 519323
uaagacgucuaaauugcgc

SEQ ID NO: 519325 - RNA, 19 nt, Artificial Sequence
  Description of Artificial Sequence: Synthetic oligonucleotide
  Sense strand starting at position 2428 of SEQ ID NO: 317877
ggacuugccucauccugau

SEQ ID NO: 519326 - RNA, 19 nt, Artificial Sequence
  Description of Artificial Sequence: Synthetic oligonucleotide
  Antisense strand to SEQ ID NO: 519325
aucaggaugaggcaagucc

SEQ ID NO: 519327 - RNA, 19 nt, Artificial Sequence
  Description of Artificial Sequence: Synthetic oligonucleotide
  Sense strand starting at position 2434 of SEQ ID NO: 317877
gccucauccugaucuuuag

SEQ ID NO: 519328 - RNA, 19 nt, Artificial Sequence
  Description of Artificial Sequence: Synthetic oligonucleotide
  Antisense strand to SEQ ID NO: 519327
cuaaagaucaggaugaggc

SEQ ID NO: 519329 - RNA, 19 nt, Artificial Sequence
  Description of Artificial Sequence: Synthetic oligonucleotide
  Sense strand starting at position 2437 of SEQ ID NO: 317877
ucauccugaucuuuaggau

SEQ ID NO: 519330 - RNA, 19 nt, Artificial Sequence
  Description of Artificial Sequence: Synthetic oligonucleotide
  Antisense strand to SEQ ID NO: 519329
auccuaaagaucaggauga

SEQ ID NO: 519331 - RNA, 19 nt, Artificial Sequence
  Description of Artificial Sequence: Synthetic oligonucleotide
  Sense strand starting at position 2443 of SEQ ID NO: 317877
ugaucuuuaggaugacacu

SEQ ID NO: 519332 - RNA, 19 nt, Artificial Sequence
  Description of Artificial Sequence: Synthetic oligonucleotide
  Antisense strand to SEQ ID NO: 519331
agugucauccuaaagauca

SEQ ID NO: 519333 - RNA, 19 nt, Artificial Sequence
  Description of Artificial Sequence: Synthetic oligonucleotide
  Sense strand starting at position 2478 of SEQ ID NO: 317877
ucuagaaucugccuugcaa

SEQ ID NO: 519334 - RNA, 19 nt, Artificial Sequence
  Description of Artificial Sequence: Synthetic oligonucleotide
  Antisense strand to SEQ ID NO: 519333
uugcaaggcagauucuaga

SEQ ID NO: 519335 - RNA, 19 nt, Artificial Sequence
  Description of Artificial Sequence: Synthetic oligonucleotide
  Sense strand starting at position 2592 of SEQ ID NO: 317877
agcccuuuggcucacauaa

SEQ ID NO: 519336 - RNA, 19 nt, Artificial Sequence
  Description of Artificial Sequence: Synthetic oligonucleotide
  Antisense strand to SEQ ID NO: 519335
uuaugugagccaaagggcu

SEQ ID NO: 519337 - RNA, 19 nt, Artificial Sequence
  Description of Artificial Sequence: Synthetic oligonucleotide
  Sense strand starting at position 2804 of SEQ ID NO: 317877
agguuuaccucagucggaa

SEQ ID NO: 519338 - RNA, 19 nt, Artificial Sequence
  Description of Artificial Sequence: Synthetic oligonucleotide
  Antisense strand to SEQ ID NO: 519337
uuccgacugagguaaaccu

SEQ ID NO: 519339 - RNA, 19 nt, Artificial Sequence
  Description of Artificial Sequence: Synthetic oligonucleotide
  Sense strand starting at position 2906 of SEQ ID NO: 317877
guaugcagacuuuacuuau

SEQ ID NO: 519340 - RNA, 19 nt, Artificial Sequence
  Description of Artificial Sequence: Synthetic oligonucleotide
  Antisense strand to SEQ ID NO: 519339
auaaguaaagucugcauac

SEQ ID NO: 519341 - RNA, 19 nt, Artificial Sequence
  Description of Artificial Sequence: Synthetic oligonucleotide
  Sense strand starting at position 2909 of SEQ ID NO: 317877
ugcagacuuuacuuaugua

SEQ ID NO: 519342 - RNA, 19 nt, Artificial Sequence
  Description of Artificial Sequence: Synthetic oligonucleotide
  Antisense strand to SEQ ID NO: 519341
uacauaaguaaagucugca

SEQ ID NO: 519343 - RNA, 19 nt, Artificial Sequence
  Description of Artificial Sequence: Synthetic oligonucleotide
  Sense strand starting at position 3061 of SEQ ID NO: 317877
accuguugugccggauuua

SEQ ID NO: 519344 - RNA, 19 nt, Artificial Sequence
  Description of Artificial Sequence: Synthetic oligonucleotide
  Antisense strand to SEQ ID NO: 519343
uaaauccggcacaacaggu

SEQ ID NO: 519345 - RNA, 19 nt, Artificial Sequence
  Description of Artificial Sequence: Synthetic oligonucleotide
  Sense strand starting at position 3062 of SEQ ID NO: 317877
ccuguugugccggauuuaa

SEQ ID NO: 519346 - RNA, 19 nt, Artificial Sequence
  Description of Artificial Sequence: Synthetic oligonucleotide
  Antisense strand to SEQ ID NO: 519345
uuaaauccggcacaacagg

SEQ ID NO: 519347 - RNA, 19 nt, Artificial Sequence
  Description of Artificial Sequence: Synthetic oligonucleotide
  Sense strand starting at position 3070 of SEQ ID NO: 317877
gccggauuuaacugugcuc

SEQ ID NO: 519348 - RNA, 19 nt, Artificial Sequence
  Description of Artificial Sequence: Synthetic oligonucleotide
  Antisense strand to SEQ ID NO: 519347
gagcacaguuaaauccggc

SEQ ID NO: 519349 - RNA, 19 nt, Artificial Sequence
  Description of Artificial Sequence: Synthetic oligonucleotide
  Sense strand starting at position 3073 of SEQ ID NO: 317877
ggauuuaacugugcucccu

SEQ ID NO: 519350 - RNA, 19 nt, Artificial Sequence
  Description of Artificial Sequence: Synthetic oligonucleotide
  Antisense strand to SEQ ID NO: 519349
agggagcacaguuaaaucc

SEQ ID NO: 519351 - RNA, 19 nt, Artificial Sequence
  Description of Artificial Sequence: Synthetic oligonucleotide
  Sense strand starting at position 3196 of SEQ ID NO: 317877
gccuguccucaccaagaau

SEQ ID NO: 519352 - RNA, 19 nt, Artificial Sequence
  Description of Artificial Sequence: Synthetic oligonucleotide
  Antisense strand to SEQ ID NO: 519351
auucuuggugaggacaggc

SEQ ID NO: 519353 - RNA, 19 nt, Artificial Sequence
  Description of Artificial Sequence: Synthetic oligonucleotide
  Sense strand starting at position 3199 of SEQ ID NO: 317877
uguccucaccaagaaugua

SEQ ID NO: 519354 - RNA, 19 nt, Artificial Sequence
  Description of Artificial Sequence: Synthetic oligonucleotide
  Antisense strand to SEQ ID NO: 519353
uacauucuuggugaggaca

SEQ ID NO: 519355 - RNA, 19 nt, Artificial Sequence
  Description of Artificial Sequence: Synthetic oligonucleotide
  Sense strand starting at position 3207 of SEQ ID NO: 317877
ccaagaauguagucuauua

SEQ ID NO: 519356 - RNA, 19 nt, Artificial Sequence
  Description of Artificial Sequence: Synthetic oligonucleotide
  Antisense strand to SEQ ID NO: 519355
uaauagacuacauucuugg

SEQ ID NO: 519357 - RNA, 19 nt, Artificial Sequence
  Description of Artificial Sequence: Synthetic oligonucleotide
  Sense strand starting at position 3348 of SEQ ID NO: 317877
agagaucuggucuguucag

SEQ ID NO: 519358 - RNA, 19 nt, Artificial Sequence
  Description of Artificial Sequence: Synthetic oligonucleotide
  Antisense strand to SEQ ID NO: 519357
cugaacagaccagaucucu

SEQ ID NO: 519359 - RNA, 19 nt, Artificial Sequence
  Description of Artificial Sequence: Synthetic oligonucleotide
  Sense strand starting at position 3378 of SEQ ID NO: 317877
auaucuugugcccagaaca

SEQ ID NO: 519360 - RNA, 19 nt, Artificial Sequence
  Description of Artificial Sequence: Synthetic oligonucleotide
  Antisense strand to SEQ ID NO: 519359
uguucugggcacaagauau

SEQ ID NO: 519361 - RNA, 19 nt, Artificial Sequence
  Description of Artificial Sequence: Synthetic oligonucleotide
  Sense strand starting at position 3469 of SEQ ID NO: 317877
uguuuauggaguuauugcu

SEQ ID NO: 519362 - RNA, 19 nt, Artificial Sequence
  Description of Artificial Sequence: Synthetic oligonucleotide
  Antisense strand to SEQ ID NO: 519361
agcaauaacuccauaaaca

SEQ ID NO: 519363 - RNA, 19 nt, Artificial Sequence
  Description of Artificial Sequence: Synthetic oligonucleotide
  Sense strand starting at position 3489 of SEQ ID NO: 317877
ugugccagucauuauuaua

SEQ ID NO: 519364 - RNA, 19 nt, Artificial Sequence
  Description of Artificial Sequence: Synthetic oligonucleotide
  Antisense strand to SEQ ID NO: 519363
uauaauaaugacuggcaca

SEQ ID NO: 519365 - RNA, 19 nt, Artificial Sequence
  Description of Artificial Sequence: Synthetic oligonucleotide
  Sense strand starting at position 3707 of SEQ ID NO: 317877
ggaaguuggccugaacuua

SEQ ID NO: 519366 - RNA, 19 nt, Artificial Sequence
  Description of Artificial Sequence: Synthetic oligonucleotide
  Antisense strand to SEQ ID NO: 519365
uaaguucaggccaacuucc

SEQ ID NO: 519367 - RNA, 19 nt, Artificial Sequence
  Description of Artificial Sequence: Synthetic oligonucleotide
  Sense strand starting at position 3725 of SEQ ID NO: 317877
agaucaaagacagguaugu

SEQ ID NO: 519368 - RNA, 19 nt, Artificial Sequence
  Description of Artificial Sequence: Synthetic oligonucleotide
  Antisense strand to SEQ ID NO: 519367
acauaccugucuuugaucu

SEQ ID NO: 519369 - RNA, 19 nt, Artificial Sequence
  Description of Artificial Sequence: Synthetic oligonucleotide
  Sense strand starting at position 2 of SEQ ID NO: 317878
aagcaaguggcagauacau

SEQ ID NO: 519370 - RNA, 19 nt, Artificial Sequence
  Description of Artificial Sequence: Synthetic oligonucleotide
  Antisense strand to SEQ ID NO: 519369
auguaucugccacuugcuu

SEQ ID NO: 519371 - RNA, 19 nt, Artificial Sequence
  Description of Artificial Sequence: Synthetic oligonucleotide
  Sense strand starting at position 10 of SEQ ID NO: 317878
ggcagauacauguggcaua

SEQ ID NO: 519372 - RNA, 19 nt, Artificial Sequence
  Description of Artificial Sequence: Synthetic oligonucleotide
  Antisense strand to SEQ ID NO: 519371
uaugccacauguaucugcc

SEQ ID NO: 519373 - RNA, 19 nt, Artificial Sequence
  Description of Artificial Sequence: Synthetic oligonucleotide
  Sense strand starting at position 21 of SEQ ID NO: 317878
guggcauaccuccagcaua

SEQ ID NO: 519374 - RNA, 19 nt, Artificial Sequence
  Description of Artificial Sequence: Synthetic oligonucleotide
  Antisense strand to SEQ ID NO: 519373
uaugcuggagguaugccac

SEQ ID NO: 519375 - RNA, 19 nt, Artificial Sequence
  Description of Artificial Sequence: Synthetic oligonucleotide
  Sense strand starting at position 24 of SEQ ID NO: 317878
gcauaccuccagcauagaa

SEQ ID NO: 519376 - RNA, 19 nt, Artificial Sequence
  Description of Artificial Sequence: Synthetic oligonucleotide
  Antisense strand to SEQ ID NO: 519375
uucuaugcuggagguaugc

SEQ ID NO: 519377 - RNA, 19 nt, Artificial Sequence
  Description of Artificial Sequence: Synthetic oligonucleotide
  Sense strand starting at position 171 of SEQ ID NO: 317878
uuccacagcucuuuggaaa

SEQ ID NO: 519378 - RNA, 19 nt, Artificial Sequence
  Description of Artificial Sequence: Synthetic oligonucleotide
  Antisense strand to SEQ ID NO: 519377
uuuccaaagagcuguggaa

SEQ ID NO: 519379 - RNA, 19 nt, Artificial Sequence
  Description of Artificial Sequence: Synthetic oligonucleotide
  Sense strand starting at position 209 of SEQ ID NO: 317878
gacaauacugugcauugua

SEQ ID NO: 519380 - RNA, 19 nt, Artificial Sequence
  Description of Artificial Sequence: Synthetic oligonucleotide
  Antisense strand to SEQ ID NO: 519379
uacaaugcacaguauuguc

SEQ ID NO: 519381 - RNA, 19 nt, Artificial Sequence
  Description of Artificial Sequence: Synthetic oligonucleotide
  Sense strand starting at position 400 of SEQ ID NO: 317878
gggugcauuugugugaagu

SEQ ID NO: 519382 - RNA, 19 nt, Artificial Sequence
  Description of Artificial Sequence: Synthetic oligonucleotide
  Antisense strand to SEQ ID NO: 519381
acuucacacaaaugcaccc

SEQ ID NO: 519383 - RNA, 19 nt, Artificial Sequence
  Description of Artificial Sequence: Synthetic oligonucleotide
  Sense strand starting at position 401 of SEQ ID NO: 317878
ggugcauuugugugaagug

SEQ ID NO: 519384 - RNA, 19 nt, Artificial Sequence
  Description of Artificial Sequence: Synthetic oligonucleotide
  Antisense strand to SEQ ID NO: 519383
cacuucacacaaaugcacc

SEQ ID NO: 519385 - RNA, 19 nt, Artificial Sequence
  Description of Artificial Sequence: Synthetic oligonucleotide
  Sense strand starting at position 876 of SEQ ID NO: 317878
gccauaugugccuacuauu

SEQ ID NO: 519386 - RNA, 19 nt, Artificial Sequence
  Description of Artificial Sequence: Synthetic oligonucleotide
  Antisense strand to SEQ ID NO: 519385
aauaguaggcacauauggc

SEQ ID NO: 519387 - RNA, 19 nt, Artificial Sequence
  Description of Artificial Sequence: Synthetic oligonucleotide
  Sense strand starting at position 1063 of SEQ ID NO: 317878
gguugaacacugcaugcau

SEQ ID NO: 519388 - RNA, 19 nt, Artificial Sequence
  Description of Artificial Sequence: Synthetic oligonucleotide
  Antisense strand to SEQ ID NO: 519387
augcaugcaguguucaacc

SEQ ID NO: 519389 - RNA, 19 nt, Artificial Sequence
  Description of Artificial Sequence: Synthetic oligonucleotide
  Sense strand starting at position 1265 of SEQ ID NO: 317878
uguccagucccauaaacga

SEQ ID NO: 519390 - RNA, 19 nt, Artificial Sequence
  Description of Artificial Sequence: Synthetic oligonucleotide
  Antisense strand to SEQ ID NO: 519389
ucguuuaugggacuggaca

SEQ ID NO: 519391 - RNA, 19 nt, Artificial Sequence
  Description of Artificial Sequence: Synthetic oligonucleotide
  Sense strand starting at position 1290 of SEQ ID NO: 317878
gaaacaugagucggacuga

SEQ ID NO: 519392 - RNA, 19 nt, Artificial Sequence
  Description of Artificial Sequence: Synthetic oligonucleotide
  Antisense strand to SEQ ID NO: 519391
ucaguccgacucauguuuc

SEQ ID NO: 519393 - RNA, 19 nt, Artificial Sequence
  Description of Artificial Sequence: Synthetic oligonucleotide
  Sense strand starting at position 2054 of SEQ ID NO: 317878
gcggcugccagagacaaua

SEQ ID NO: 519394 - RNA, 19 nt, Artificial Sequence
  Description of Artificial Sequence: Synthetic oligonucleotide
  Antisense strand to SEQ ID NO: 519393
uauugucucuggcagccgc

SEQ ID NO: 519395 - RNA, 19 nt, Artificial Sequence
  Description of Artificial Sequence: Synthetic oligonucleotide
  Sense strand starting at position 2299 of SEQ ID NO: 317878
uucugauucgcgagugcug

SEQ ID NO: 519396 - RNA, 19 nt, Artificial Sequence
  Description of Artificial Sequence: Synthetic oligonucleotide
  Antisense strand to SEQ ID NO: 519395
cagcacucgcgaaucagaa

SEQ ID NO: 519397 - RNA, 19 nt, Artificial Sequence
  Description of Artificial Sequence: Synthetic oligonucleotide
  Sense strand starting at position 2806 of SEQ ID NO: 317878
aguaguaucuuguuaaaga

SEQ ID NO: 519398 - RNA, 19 nt, Artificial Sequence
  Description of Artificial Sequence: Synthetic oligonucleotide
  Antisense strand to SEQ ID NO: 519397
ucuuuaacaagauacuacu

SEQ ID NO: 519399 - RNA, 19 nt, Artificial Sequence
  Description of Artificial Sequence: Synthetic oligonucleotide
  Sense strand starting at position 3005 of SEQ ID NO: 317878
gcucacaaucccgaguuua

SEQ ID NO: 519400 - RNA, 19 nt, Artificial Sequence
  Description of Artificial Sequence: Synthetic oligonucleotide
  Antisense strand to SEQ ID NO: 519399
uaaacucgggauugugagc

SEQ ID NO: 519401 - RNA, 19 nt, Artificial Sequence
  Description of Artificial Sequence: Synthetic oligonucleotide
  Sense strand starting at position 3036 of SEQ ID NO: 317878
cugacagacgaagguuuau

SEQ ID NO: 519402 - RNA, 19 nt, Artificial Sequence
  Description of Artificial Sequence: Synthetic oligonucleotide
  Antisense strand to SEQ ID NO: 519401
auaaaccuucgucugucag

SEQ ID NO: 519403 - RNA, 19 nt, Artificial Sequence
  Description of Artificial Sequence: Synthetic oligonucleotide
  Sense strand starting at position 3088 of SEQ ID NO: 317878
gauggaauacauuguccuu

SEQ ID NO: 519404 - RNA, 19 nt, Artificial Sequence
  Description of Artificial Sequence: Synthetic oligonucleotide
  Antisense strand to SEQ ID NO: 519403
aaggacaauguauuccauc

SEQ ID NO: 519405 - RNA, 19 nt, Artificial Sequence
  Description of Artificial Sequence: Synthetic oligonucleotide
  Sense strand starting at position 3090 of SEQ ID NO: 317878
uggaauacauuguccuuua

SEQ ID NO: 519406 - RNA, 19 nt, Artificial Sequence
  Description of Artificial Sequence: Synthetic oligonucleotide
  Antisense strand to SEQ ID NO: 519405
uaaaggacaauguauucca

SEQ ID NO: 519407 - RNA, 19 nt, Artificial Sequence
  Description of Artificial Sequence: Synthetic oligonucleotide
  Sense strand starting at position 3091 of SEQ ID NO: 317878
ggaauacauuguccuuuag

SEQ ID NO: 519408 - RNA, 19 nt, Artificial Sequence
  Description of Artificial Sequence: Synthetic oligonucleotide
  Antisense strand to SEQ ID NO: 519407
cuaaaggacaauguauucc

SEQ ID NO: 519409 - RNA, 19 nt, Artificial Sequence
  Description of Artificial Sequence: Synthetic oligonucleotide
  Sense strand starting at position 3191 of SEQ ID NO: 317878
gagggagcuccucaacucu

SEQ ID NO: 519410 - RNA, 19 nt, Artificial Sequence
  Description of Artificial Sequence: Synthetic oligonucleotide
  Antisense strand to SEQ ID NO: 519409
agaguugaggagcucccuc

SEQ ID NO: 519411 - RNA, 19 nt, Artificial Sequence
  Description of Artificial Sequence: Synthetic oligonucleotide
  Sense strand starting at position 3339 of SEQ ID NO: 317878
auagaaauccuguauguca

SEQ ID NO: 519412 - RNA, 19 nt, Artificial Sequence
  Description of Artificial Sequence: Synthetic oligonucleotide
  Antisense strand to SEQ ID NO: 519411
ugacauacaggauuucuau

SEQ ID NO: 519413 - RNA, 19 nt, Artificial Sequence
  Description of Artificial Sequence: Synthetic oligonucleotide
  Sense strand starting at position 3341 of SEQ ID NO: 317878
agaaauccuguaugucacu

SEQ ID NO: 519414 - RNA, 19 nt, Artificial Sequence
  Description of Artificial Sequence: Synthetic oligonucleotide
  Antisense strand to SEQ ID NO: 519413
agugacauacaggauuucu

SEQ ID NO: 519415 - RNA, 19 nt, Artificial Sequence
  Description of Artificial Sequence: Synthetic oligonucleotide
  Sense strand starting at position 3347 of SEQ ID NO: 317878
ccuguaugucacuaagcau

SEQ ID NO: 519416 - RNA, 19 nt, Artificial Sequence
  Description of Artificial Sequence: Synthetic oligonucleotide
  Antisense strand to SEQ ID NO: 519415
augcuuagugacauacagg

SEQ ID NO: 519417 - RNA, 19 nt, Artificial Sequence
  Description of Artificial Sequence: Synthetic oligonucleotide
  Sense strand starting at position 3353 of SEQ ID NO: 317878
ugucacuaagcaugacuaa

SEQ ID NO: 519418 - RNA, 19 nt, Artificial Sequence
  Description of Artificial Sequence: Synthetic oligonucleotide
  Antisense strand to SEQ ID NO: 519417
uuagucaugcuuagugaca

SEQ ID NO: 519419 - RNA, 19 nt, Artificial Sequence
  Description of Artificial Sequence: Synthetic oligonucleotide
  Sense strand starting at position 3354 of SEQ ID NO: 317878
gucacuaagcaugacuaaa

SEQ ID NO: 519420 - RNA, 19 nt, Artificial Sequence
  Description of Artificial Sequence: Synthetic oligonucleotide
  Antisense strand to SEQ ID NO: 519419
uuuagucaugcuuagugac

SEQ ID NO: 519421 - RNA, 19 nt, Artificial Sequence
  Description of Artificial Sequence: Synthetic oligonucleotide
  Sense strand starting at position 3365 of SEQ ID NO: 317878
ugacuaaagcuguguugaa

SEQ ID NO: 519422 - RNA, 19 nt, Artificial Sequence
  Description of Artificial Sequence: Synthetic oligonucleotide
  Antisense strand to SEQ ID NO: 519421
uucaacacagcuuuaguca

SEQ ID NO: 519423 - RNA, 19 nt, Artificial Sequence
  Description of Artificial Sequence: Synthetic oligonucleotide
  Sense strand starting at position 3366 of SEQ ID NO: 317878
gacuaaagcuguguugaau

SEQ ID NO: 519424 - RNA, 19 nt, Artificial Sequence
  Description of Artificial Sequence: Synthetic oligonucleotide
  Antisense strand to SEQ ID NO: 519423
auucaacacagcuuuaguc

SEQ ID NO: 519425 - RNA, 19 nt, Artificial Sequence
  Description of Artificial Sequence: Synthetic oligonucleotide
  Sense strand starting at position 3369 of SEQ ID NO: 317878
uaaagcuguguugaaucuu

SEQ ID NO: 519426 - RNA, 19 nt, Artificial Sequence
  Description of Artificial Sequence: Synthetic oligonucleotide
  Antisense strand to SEQ ID NO: 519425
aagauucaacacagcuuua

SEQ ID NO: 519427 - RNA, 19 nt, Artificial Sequence
  Description of Artificial Sequence: Synthetic oligonucleotide
  Sense strand starting at position 3418 of SEQ ID NO: 317878
auggcaauucuagacaucu

SEQ ID NO: 519428 - RNA, 19 nt, Artificial Sequence
  Description of Artificial Sequence: Synthetic oligonucleotide
  Antisense strand to SEQ ID NO: 519427
agaugucuagaauugccau

SEQ ID NO: 519429 - RNA, 19 nt, Artificial Sequence
  Description of Artificial Sequence: Synthetic oligonucleotide
  Sense strand starting at position 3431 of SEQ ID NO: 317878
acaucuugucauuaaagug

SEQ ID NO: 519430 - RNA, 19 nt, Artificial Sequence
  Description of Artificial Sequence: Synthetic oligonucleotide
  Antisense strand to SEQ ID NO: 519429
cacuuuaaugacaagaugu

SEQ ID NO: 519431 - RNA, 19 nt, Artificial Sequence
  Description of Artificial Sequence: Synthetic oligonucleotide
  Sense strand starting at position 3453 of SEQ ID NO: 317878
acgugcuugcgauaaagaa

SEQ ID NO: 519432 - RNA, 19 nt, Artificial Sequence
  Description of Artificial Sequence: Synthetic oligonucleotide
  Antisense strand to SEQ ID NO: 519431
uucuuuaucgcaagcacgu

SEQ ID NO: 519433 - RNA, 19 nt, Artificial Sequence
  Description of Artificial Sequence: Synthetic oligonucleotide
  Sense strand starting at position 3540 of SEQ ID NO: 317878
gaaccagacuggucacaua

SEQ ID NO: 519434 - RNA, 19 nt, Artificial Sequence
  Description of Artificial Sequence: Synthetic oligonucleotide
  Antisense strand to SEQ ID NO: 519433
uaugugaccagucugguuc

SEQ ID NO: 519435 - RNA, 19 nt, Artificial Sequence
  Description of Artificial Sequence: Synthetic oligonucleotide
  Sense strand starting at position 3611 of SEQ ID NO: 317878
ccaagcuucugguuauuua

SEQ ID NO: 519436 - RNA, 19 nt, Artificial Sequence
  Description of Artificial Sequence: Synthetic oligonucleotide
  Antisense strand to SEQ ID NO: 519435
uaaauaaccagaagcuugg

SEQ ID NO: 519437 - RNA, 19 nt, Artificial Sequence
  Description of Artificial Sequence: Synthetic oligonucleotide
  Sense strand starting at position 3632 of SEQ ID NO: 317878
guuaauuggacugaaugca

SEQ ID NO: 519438 - RNA, 19 nt, Artificial Sequence
  Description of Artificial Sequence: Synthetic oligonucleotide
  Antisense strand to SEQ ID NO: 519437
ugcauucaguccaauuaac

SEQ ID NO: 519439 - RNA, 19 nt, Artificial Sequence
  Description of Artificial Sequence: Synthetic oligonucleotide
  Sense strand starting at position 3691 of SEQ ID NO: 317878
cugugauacucugcaaagg

SEQ ID NO: 519440 - RNA, 19 nt, Artificial Sequence
  Description of Artificial Sequence: Synthetic oligonucleotide
  Antisense strand to SEQ ID NO: 519439
ccuuugcagaguaucacag

SEQ ID NO: 519441 - RNA, 19 nt, Artificial Sequence
  Description of Artificial Sequence: Synthetic oligonucleotide
  Sense strand starting at position 3692 of SEQ ID NO: 317878
ugugauacucugcaaagga

SEQ ID NO: 519442 - RNA, 19 nt, Artificial Sequence
  Description of Artificial Sequence: Synthetic oligonucleotide
  Antisense strand to SEQ ID NO: 519441
uccuuugcagaguaucaca

SEQ ID NO: 519443 - RNA, 19 nt, Artificial Sequence
  Description of Artificial Sequence: Synthetic oligonucleotide
  Sense strand starting at position 3836 of SEQ ID NO: 317878
cuagccaagaguugugaaa

SEQ ID NO: 519444 - RNA, 19 nt, Artificial Sequence
  Description of Artificial Sequence: Synthetic oligonucleotide
  Antisense strand to SEQ ID NO: 519443
uuucacaacucuuggcuag

SEQ ID NO: 519445 - RNA, 19 nt, Artificial Sequence
  Description of Artificial Sequence: Synthetic oligonucleotide
  Sense strand starting at position 3870 of SEQ ID NO: 317878
gggauuggcaugcaaauga

SEQ ID NO: 519446 - RNA, 19 nt, Artificial Sequence
  Description of Artificial Sequence: Synthetic oligonucleotide
  Antisense strand to SEQ ID NO: 519445
ucauuugcaugccaauccc

SEQ ID NO: 519447 - RNA, 19 nt, Artificial Sequence
  Description of Artificial Sequence: Synthetic oligonucleotide
  Sense strand starting at position 3880 of SEQ ID NO: 317878
ugcaaaugagcaggauuau

SEQ ID NO: 519448 - RNA, 19 nt, Artificial Sequence
  Description of Artificial Sequence: Synthetic oligonucleotide
  Antisense strand to SEQ ID NO: 519447
auaauccugcucauuugca

SEQ ID NO: 519449 - RNA, 19 nt, Artificial Sequence
  Description of Artificial Sequence: Synthetic oligonucleotide
  Sense strand starting at position 3 of SEQ ID NO: 317879
agguguuggaaucaaugca

SEQ ID NO: 519450 - RNA, 19 nt, Artificial Sequence
  Description of Artificial Sequence: Synthetic oligonucleotide
  Antisense strand to SEQ ID NO: 519449
ugcauugauuccaacaccu

SEQ ID NO: 519451 - RNA, 19 nt, Artificial Sequence
  Description of Artificial Sequence: Synthetic oligonucleotide
  Sense strand starting at position 103 of SEQ ID NO: 317879
acccaugaucaccgacaga

SEQ ID NO: 519452 - RNA, 19 nt, Artificial Sequence
  Description of Artificial Sequence: Synthetic oligonucleotide
  Antisense strand to SEQ ID NO: 519451
ucugucggugaucaugggu

SEQ ID NO: 519453 - RNA, 19 nt, Artificial Sequence
  Description of Artificial Sequence: Synthetic oligonucleotide
  Sense strand starting at position 164 of SEQ ID NO: 317879
gaacuuuccgguugagaac

SEQ ID NO: 519454 - RNA, 19 nt, Artificial Sequence
  Description of Artificial Sequence: Synthetic oligonucleotide
  Antisense strand to SEQ ID NO: 519453
guucucaaccggaaaguuc

SEQ ID NO: 519455 - RNA, 19 nt, Artificial Sequence
  Description of Artificial Sequence: Synthetic oligonucleotide
  Sense strand starting at position 165 of SEQ ID NO: 317879
aacuuuccgguugagaaca

SEQ ID NO: 519456 - RNA, 19 nt, Artificial Sequence
  Description of Artificial Sequence: Synthetic oligonucleotide
  Antisense strand to SEQ ID NO: 519455
uguucucaaccggaaaguu

SEQ ID NO: 519457 - RNA, 19 nt, Artificial Sequence
  Description of Artificial Sequence: Synthetic oligonucleotide
  Sense strand starting at position 177 of SEQ ID NO: 317879
gagaacauucgacaggcuu

SEQ ID NO: 519458 - RNA, 19 nt, Artificial Sequence
  Description of Artificial Sequence: Synthetic oligonucleotide
  Antisense strand to SEQ ID NO: 519457
aagccugucgaauguucuc

SEQ ID NO: 519459 - RNA, 19 nt, Artificial Sequence
  Description of Artificial Sequence: Synthetic oligonucleotide
  Sense strand starting at position 262 of SEQ ID NO: 317879
ccguauuuguuucugagca

SEQ ID NO: 519460 - RNA, 19 nt, Artificial Sequence
  Description of Artificial Sequence: Synthetic oligonucleotide
  Antisense strand to SEQ ID NO: 519459
ugcucagaaacaaauacgg

SEQ ID NO: 519461 - RNA, 19 nt, Artificial Sequence
  Description of Artificial Sequence: Synthetic oligonucleotide
  Sense strand starting at position 267 of SEQ ID NO: 317879
uuuguuucugagcaauccu

SEQ ID NO: 519462 - RNA, 19 nt, Artificial Sequence
  Description of Artificial Sequence: Synthetic oligonucleotide
  Antisense strand to SEQ ID NO: 519461
aggauugcucagaaacaaa

SEQ ID NO: 519463 - RNA, 19 nt, Artificial Sequence
  Description of Artificial Sequence: Synthetic oligonucleotide
  Sense strand starting at position 334 of SEQ ID NO: 317879
gcuuauuacagaggaugag

SEQ ID NO: 519464 - RNA, 19 nt, Artificial Sequence
  Description of Artificial Sequence: Synthetic oligonucleotide
  Antisense strand to SEQ ID NO: 519463
cucauccucuguaauaagc

SEQ ID NO: 519465 - RNA, 19 nt, Artificial Sequence
  Description of Artificial Sequence: Synthetic oligonucleotide
  Sense strand starting at position 375 of SEQ ID NO: 317879
uggagucacaguugucuau

SEQ ID NO: 519466 - RNA, 19 nt, Artificial Sequence
  Description of Artificial Sequence: Synthetic oligonucleotide
  Antisense strand to SEQ ID NO: 519465
auagacaacugugacucca

SEQ ID NO: 519467 - RNA, 19 nt, Artificial Sequence
  Description of Artificial Sequence: Synthetic oligonucleotide
  Sense strand starting at position 531 of SEQ ID NO: 317879
gggucaucuuucucucaua

SEQ ID NO: 519468 - RNA, 19 nt, Artificial Sequence
  Description of Artificial Sequence: Synthetic oligonucleotide
  Antisense strand to SEQ ID NO: 519467
uaugagagaaagaugaccc

SEQ ID NO: 519469 - RNA, 19 nt, Artificial Sequence
  Description of Artificial Sequence: Synthetic oligonucleotide
  Sense strand starting at position 550 of SEQ ID NO: 317879
ccggaaagggcuggagaua

SEQ ID NO: 519470 - RNA, 19 nt, Artificial Sequence
  Description of Artificial Sequence: Synthetic oligonucleotide
  Antisense strand to SEQ ID NO: 519469
uaucuccagcccuuuccgg

SEQ ID NO: 519471 - RNA, 19 nt, Artificial Sequence
  Description of Artificial Sequence: Synthetic oligonucleotide
  Sense strand starting at position 753 of SEQ ID NO: 317879
caaagaaguuggucaccuu

SEQ ID NO: 519472 - RNA, 19 nt, Artificial Sequence
  Description of Artificial Sequence: Synthetic oligonucleotide
  Antisense strand to SEQ ID NO: 519471
aaggugaccaacuucuuug

SEQ ID NO: 519473 - RNA, 19 nt, Artificial Sequence
  Description of Artificial Sequence: Synthetic oligonucleotide
  Sense strand starting at position 1005 of SEQ ID NO: 317879
cagucagauuuccaggagu

SEQ ID NO: 519474 - RNA, 19 nt, Artificial Sequence
  Description of Artificial Sequence: Synthetic oligonucleotide
  Antisense strand to SEQ ID NO: 519473
acuccuggaaaucugacug

SEQ ID NO: 519475 - RNA, 19 nt, Artificial Sequence
  Description of Artificial Sequence: Synthetic oligonucleotide
  Sense strand starting at position 1128 of SEQ ID NO: 317879
cguggauggucacucuuga

SEQ ID NO: 519476 - RNA, 19 nt, Artificial Sequence
  Description of Artificial Sequence: Synthetic oligonucleotide
  Antisense strand to SEQ ID NO: 519475
ucaagagugaccauccacg

SEQ ID NO: 519477 - RNA, 19 nt, Artificial Sequence
  Description of Artificial Sequence: Synthetic oligonucleotide
  Sense strand starting at position 1132 of SEQ ID NO: 317879
gauggucacucuugauuuc

SEQ ID NO: 519478 - RNA, 19 nt, Artificial Sequence
  Description of Artificial Sequence: Synthetic oligonucleotide
  Antisense strand to SEQ ID NO: 519477
gaaaucaagagugaccauc

SEQ ID NO: 519479 - RNA, 19 nt, Artificial Sequence
  Description of Artificial Sequence: Synthetic oligonucleotide
  Sense strand starting at position 1150 of SEQ ID NO: 317879
cuacaucugucuucugacu

SEQ ID NO: 519480 - RNA, 19 nt, Artificial Sequence
  Description of Artificial Sequence: Synthetic oligonucleotide
  Antisense strand to SEQ ID NO: 519479
agucagaagacagauguag

SEQ ID NO: 519481 - RNA, 19 nt, Artificial Sequence
  Description of Artificial Sequence: Synthetic oligonucleotide
  Sense strand starting at position 1349 of SEQ ID NO: 317879
uucugagacucagcugaaa

SEQ ID NO: 519482 - RNA, 19 nt, Artificial Sequence
  Description of Artificial Sequence: Synthetic oligonucleotide
  Antisense strand to SEQ ID NO: 519481
uuucagcugagucucagaa

SEQ ID NO: 519483 - RNA, 19 nt, Artificial Sequence
  Description of Artificial Sequence: Synthetic oligonucleotide
  Sense strand starting at position 1446 of SEQ ID NO: 317879
acggucuuucuccaagacu

SEQ ID NO: 519484 - RNA, 19 nt, Artificial Sequence
  Description of Artificial Sequence: Synthetic oligonucleotide
  Antisense strand to SEQ ID NO: 519483
agucuuggagaaagaccgu

SEQ ID NO: 519485 - RNA, 19 nt, Artificial Sequence
  Description of Artificial Sequence: Synthetic oligonucleotide
  Sense strand starting at position 1467 of SEQ ID NO: 317879
agcagauggcaucauuacu

SEQ ID NO: 519486 - RNA, 19 nt, Artificial Sequence
  Description of Artificial Sequence: Synthetic oligonucleotide
  Antisense strand to SEQ ID NO: 519485
aguaaugaugccaucugcu

SEQ ID NO: 519487 - RNA, 19 nt, Artificial Sequence
  Description of Artificial Sequence: Synthetic oligonucleotide
  Sense strand starting at position 1502 of SEQ ID NO: 317879
uaauaauucccagggcgag

SEQ ID NO: 519488 - RNA, 19 nt, Artificial Sequence
  Description of Artificial Sequence: Synthetic oligonucleotide
  Antisense strand to SEQ ID NO: 519487
cucgcccugggaauuauua

SEQ ID NO: 519489 - RNA, 19 nt, Artificial Sequence
  Description of Artificial Sequence: Synthetic oligonucleotide
  Sense strand starting at position 1748 of SEQ ID NO: 317879
ccuugaagagcuggagauu

SEQ ID NO: 519490 - RNA, 19 nt, Artificial Sequence
  Description of Artificial Sequence: Synthetic oligonucleotide
  Antisense strand to SEQ ID NO: 519489
aaucuccagcucuucaagg

SEQ ID NO: 519491 - RNA, 19 nt, Artificial Sequence
  Description of Artificial Sequence: Synthetic oligonucleotide
  Sense strand starting at position 1751 of SEQ ID NO: 317879
ugaagagcuggagauuguu

SEQ ID NO: 519492 - RNA, 19 nt, Artificial Sequence
  Description of Artificial Sequence: Synthetic oligonucleotide
  Antisense strand to SEQ ID NO: 519491
aacaaucuccagcucuuca

SEQ ID NO: 519493 - RNA, 19 nt, Artificial Sequence
  Description of Artificial Sequence: Synthetic oligonucleotide
  Sense strand starting at position 1754 of SEQ ID NO: 317879
agagcuggagauuguucaa

SEQ ID NO: 519494 - RNA, 19 nt, Artificial Sequence
  Description of Artificial Sequence: Synthetic oligonucleotide
  Antisense strand to SEQ ID NO: 519493
uugaacaaucuccagcucu

SEQ ID NO: 519495 - RNA, 19 nt, Artificial Sequence
  Description of Artificial Sequence: Synthetic oligonucleotide
  Sense strand starting at position 2095 of SEQ ID NO: 317879
ucgcuugacaggcagaguu

SEQ ID NO: 519496 - RNA, 19 nt, Artificial Sequence
  Description of Artificial Sequence: Synthetic oligonucleotide
  Antisense strand to SEQ ID NO: 519495
aacucugccugucaagcga

SEQ ID NO: 519497 - RNA, 19 nt, Artificial Sequence
  Description of Artificial Sequence: Synthetic oligonucleotide
  Sense strand starting at position 2249 of SEQ ID NO: 317879
aggcaaauccaaugucaga

SEQ ID NO: 519498 - RNA, 19 nt, Artificial Sequence
  Description of Artificial Sequence: Synthetic oligonucleotide
  Antisense strand to SEQ ID NO: 519497
ucugacauuggauuugccu

SEQ ID NO: 519499 - RNA, 19 nt, Artificial Sequence
  Description of Artificial Sequence: Synthetic oligonucleotide
  Sense strand starting at position 2823 of SEQ ID NO: 317879
gcggaaucuucuccacuca

SEQ ID NO: 519500 - RNA, 19 nt, Artificial Sequence
  Description of Artificial Sequence: Synthetic oligonucleotide
  Antisense strand to SEQ ID NO: 519499
ugaguggagaagauuccgc

SEQ ID NO: 519501 - RNA, 19 nt, Artificial Sequence
  Description of Artificial Sequence: Synthetic oligonucleotide
  Sense strand starting at position 2840 of SEQ ID NO: 317879
caggacuccuccgcuugaa

SEQ ID NO: 519502 - RNA, 19 nt, Artificial Sequence
  Description of Artificial Sequence: Synthetic oligonucleotide
  Antisense strand to SEQ ID NO: 519501
uucaagcggaggaguccug

SEQ ID NO: 519503 - RNA, 19 nt, Artificial Sequence
  Description of Artificial Sequence: Synthetic oligonucleotide
  Sense strand starting at position 2898 of SEQ ID NO: 317879
gcuggcauugcauucguga

SEQ ID NO: 519504 - RNA, 19 nt, Artificial Sequence
  Description of Artificial Sequence: Synthetic oligonucleotide
  Antisense strand to SEQ ID NO: 519503
ucacgaaugcaaugccagc

SEQ ID NO: 519505 - RNA, 19 nt, Artificial Sequence
  Description of Artificial Sequence: Synthetic oligonucleotide
  Sense strand starting at position 2903 of SEQ ID NO: 317879
cauugcauucgugaaucua

SEQ ID NO: 519506 - RNA, 19 nt, Artificial Sequence
  Description of Artificial Sequence: Synthetic oligonucleotide
  Antisense strand to SEQ ID NO: 519505
uagauucacgaaugcaaug

SEQ ID NO: 519507 - RNA, 19 nt, Artificial Sequence
  Description of Artificial Sequence: Synthetic oligonucleotide
  Sense strand starting at position 2911 of SEQ ID NO: 317879
ucgugaaucuauguuuccu

SEQ ID NO: 519508 - RNA, 19 nt, Artificial Sequence
  Description of Artificial Sequence: Synthetic oligonucleotide
  Antisense strand to SEQ ID NO: 519507
aggaaacauagauucacga

SEQ ID NO: 519509 - RNA, 19 nt, Artificial Sequence
  Description of Artificial Sequence: Synthetic oligonucleotide
  Sense strand starting at position 3011 of SEQ ID NO: 317879
ggcauugacucagcagcau

SEQ ID NO: 519510 - RNA, 19 nt, Artificial Sequence
  Description of Artificial Sequence: Synthetic oligonucleotide
  Antisense strand to SEQ ID NO: 519509
augcugcugagucaaugcc

SEQ ID NO: 519511 - RNA, 19 nt, Artificial Sequence
  Description of Artificial Sequence: Synthetic oligonucleotide
  Sense strand starting at position 3262 of SEQ ID NO: 317879
agggaagagucauauggag

SEQ ID NO: 519512 - RNA, 19 nt, Artificial Sequence
  Description of Artificial Sequence: Synthetic oligonucleotide
  Antisense strand to SEQ ID NO: 519511
cuccauaugacucuucccu

SEQ ID NO: 519513 - RNA, 19 nt, Artificial Sequence
  Description of Artificial Sequence: Synthetic oligonucleotide
  Sense strand starting at position 3346 of SEQ ID NO: 317879
gagacuuugcacuaauugu

SEQ ID NO: 519514 - RNA, 19 nt, Artificial Sequence
  Description of Artificial Sequence: Synthetic oligonucleotide
  Antisense strand to SEQ ID NO: 519513
acaauuagugcaaagucuc

SEQ ID NO: 519515 - RNA, 19 nt, Artificial Sequence
  Description of Artificial Sequence: Synthetic oligonucleotide
  Sense strand starting at position 3353 of SEQ ID NO: 317879
ugcacuaauugugcauaaa

SEQ ID NO: 519516 - RNA, 19 nt, Artificial Sequence
  Description of Artificial Sequence: Synthetic oligonucleotide
  Antisense strand to SEQ ID NO: 519515
uuuaugcacaauuagugca

SEQ ID NO: 519517 - RNA, 19 nt, Artificial Sequence
  Description of Artificial Sequence: Synthetic oligonucleotide
  Sense strand starting at position 3354 of SEQ ID NO: 317879
gcacuaauugugcauaaau

SEQ ID NO: 519518 - RNA, 19 nt, Artificial Sequence
  Description of Artificial Sequence: Synthetic oligonucleotide
  Antisense strand to SEQ ID NO: 519517
auuuaugcacaauuagugc

SEQ ID NO: 519519 - RNA, 19 nt, Artificial Sequence
  Description of Artificial Sequence: Synthetic oligonucleotide
  Sense strand starting at position 3511 of SEQ ID NO: 317879
ggguucuuccucugugaaa

SEQ ID NO: 519520 - RNA, 19 nt, Artificial Sequence
  Description of Artificial Sequence: Synthetic oligonucleotide
  Antisense strand to SEQ ID NO: 519519
uuucacagaggaagaaccc

SEQ ID NO: 519521 - RNA, 19 nt, Artificial Sequence
  Description of Artificial Sequence: Synthetic oligonucleotide
  Sense strand starting at position 3512 of SEQ ID NO: 317879
gguucuuccucugugaaac

SEQ ID NO: 519522 - RNA, 19 nt, Artificial Sequence
  Description of Artificial Sequence: Synthetic oligonucleotide
  Antisense strand to SEQ ID NO: 519521
guuucacagaggaagaacc

SEQ ID NO: 519523 - RNA, 19 nt, Artificial Sequence
  Description of Artificial Sequence: Synthetic oligonucleotide
  Sense strand starting at position 3513 of SEQ ID NO: 317879
guucuuccucugugaaacg

SEQ ID NO: 519524 - RNA, 19 nt, Artificial Sequence
  Description of Artificial Sequence: Synthetic oligonucleotide
  Antisense strand to SEQ ID NO: 519523
cguuucacagaggaagaac

SEQ ID NO: 519525 - RNA, 19 nt, Artificial Sequence
  Description of Artificial Sequence: Synthetic oligonucleotide
  Sense strand starting at position 3571 of SEQ ID NO: 317879
cgguguuuccagagggcuu

SEQ ID NO: 519526 - RNA, 19 nt, Artificial Sequence
  Description of Artificial Sequence: Synthetic oligonucleotide
  Antisense strand to SEQ ID NO: 519525
aagcccucuggaaacaccg

SEQ ID NO: 519527 - RNA, 19 nt, Artificial Sequence
  Description of Artificial Sequence: Synthetic oligonucleotide
  Sense strand starting at position 3974 of SEQ ID NO: 317879
agccaugcaccauaucaga

SEQ ID NO: 519528 - RNA, 19 nt, Artificial Sequence
  Description of Artificial Sequence: Synthetic oligonucleotide
  Antisense strand to SEQ ID NO: 519527
ucugauauggugcauggcu

SEQ ID NO: 519529 - RNA, 19 nt, Artificial Sequence
  Description of Artificial Sequence: Synthetic oligonucleotide
  Sense strand starting at position 315 of SEQ ID NO: 317880
uuaccauucgaguacaaag

SEQ ID NO: 519530 - RNA, 19 nt, Artificial Sequence
  Description of Artificial Sequence: Synthetic oligonucleotide
  Antisense strand to SEQ ID NO: 519529
cuuuguacucgaaugguaa

SEQ ID NO: 519531 - RNA, 19 nt, Artificial Sequence
  Description of Artificial Sequence: Synthetic oligonucleotide
  Sense strand starting at position 487 of SEQ ID NO: 317880
uaugaaucugcccagugau

SEQ ID NO: 519532 - RNA, 19 nt, Artificial Sequence
  Description of Artificial Sequence: Synthetic oligonucleotide
  Antisense strand to SEQ ID NO: 519531
aucacugggcagauucaua

SEQ ID NO: 519533 - RNA, 19 nt, Artificial Sequence
  Description of Artificial Sequence: Synthetic oligonucleotide
  Sense strand starting at position 554 of SEQ ID NO: 317880
uccugauucccuuagguaa

SEQ ID NO: 519534 - RNA, 19 nt, Artificial Sequence
  Description of Artificial Sequence: Synthetic oligonucleotide
  Antisense strand to SEQ ID NO: 519533
uuaccuaagggaaucagga

SEQ ID NO: 519535 - RNA, 19 nt, Artificial Sequence
  Description of Artificial Sequence: Synthetic oligonucleotide
  Sense strand starting at position 581 of SEQ ID NO: 317880
ccucuagacuuagucuaua

SEQ ID NO: 519536 - RNA, 19 nt, Artificial Sequence
  Description of Artificial Sequence: Synthetic oligonucleotide
  Antisense strand to SEQ ID NO: 519535
uauagacuaagucuagagg

SEQ ID NO: 519537 - RNA, 19 nt, Artificial Sequence
  Description of Artificial Sequence: Synthetic oligonucleotide
  Sense strand starting at position 584 of SEQ ID NO: 317880
cuagacuuagucuauacuu

SEQ ID NO: 519538 - RNA, 19 nt, Artificial Sequence
  Description of Artificial Sequence: Synthetic oligonucleotide
  Antisense strand to SEQ ID NO: 519537
aaguauagacuaagucuag

SEQ ID NO: 519539 - RNA, 19 nt, Artificial Sequence
  Description of Artificial Sequence: Synthetic oligonucleotide
  Sense strand starting at position 621 of SEQ ID NO: 317880
accagagacugccucauau

SEQ ID NO: 519540 - RNA, 19 nt, Artificial Sequence
  Description of Artificial Sequence: Synthetic oligonucleotide
  Antisense strand to SEQ ID NO: 519539
auaugaggcagucucuggu

SEQ ID NO: 519541 - RNA, 19 nt, Artificial Sequence
  Description of Artificial Sequence: Synthetic oligonucleotide
  Sense strand starting at position 677 of SEQ ID NO: 317880
auuaucagcuccuugauga

SEQ ID NO: 519542 - RNA, 19 nt, Artificial Sequence
  Description of Artificial Sequence: Synthetic oligonucleotide
  Antisense strand to SEQ ID NO: 519541
ucaucaaggagcugauaau

SEQ ID NO: 519543 - RNA, 19 nt, Artificial Sequence
  Description of Artificial Sequence: Synthetic oligonucleotide
  Sense strand starting at position 678 of SEQ ID NO: 317880
uuaucagcuccuugaugau

SEQ ID NO: 519544 - RNA, 19 nt, Artificial Sequence
  Description of Artificial Sequence: Synthetic oligonucleotide
  Antisense strand to SEQ ID NO: 519543
aucaucaaggagcugauaa

SEQ ID NO: 519545 - RNA, 19 nt, Artificial Sequence
  Description of Artificial Sequence: Synthetic oligonucleotide
  Sense strand starting at position 688 of SEQ ID NO: 317880
cuugaugauauggguugau

SEQ ID NO: 519546 - RNA, 19 nt, Artificial Sequence
  Description of Artificial Sequence: Synthetic oligonucleotide
  Antisense strand to SEQ ID NO: 519545
aucaacccauaucaucaag

SEQ ID NO: 519547 - RNA, 19 nt, Artificial Sequence
  Description of Artificial Sequence: Synthetic oligonucleotide
  Sense strand starting at position 766 of SEQ ID NO: 317880
gucaauaaauguuuacucu

SEQ ID NO: 519548 - RNA, 19 nt, Artificial Sequence
  Description of Artificial Sequence: Synthetic oligonucleotide
  Antisense strand to SEQ ID NO: 519547
agaguaaacauuuauugac

SEQ ID NO: 519549 - RNA, 19 nt, Artificial Sequence
  Description of Artificial Sequence: Synthetic oligonucleotide
  Sense strand starting at position 939 of SEQ ID NO: 317880
acacacagccuguaggauu

SEQ ID NO: 519550 - RNA, 19 nt, Artificial Sequence
  Description of Artificial Sequence: Synthetic oligonucleotide
  Antisense strand to SEQ ID NO: 519549
aauccuacaggcugugugu

SEQ ID NO: 519551 - RNA, 19 nt, Artificial Sequence
  Description of Artificial Sequence: Synthetic oligonucleotide
  Sense strand starting at position 1141 of SEQ ID NO: 317880
cugccagauccucauggau

SEQ ID NO: 519552 - RNA, 19 nt, Artificial Sequence
  Description of Artificial Sequence: Synthetic oligonucleotide
  Antisense strand to SEQ ID NO: 519551
auccaugaggaucuggcag

SEQ ID NO: 519553 - RNA, 19 nt, Artificial Sequence
  Description of Artificial Sequence: Synthetic oligonucleotide
  Sense strand starting at position 1213 of SEQ ID NO: 317880
ggcauaguccggcuguguu

SEQ ID NO: 519554 - RNA, 19 nt, Artificial Sequence
  Description of Artificial Sequence: Synthetic oligonucleotide
  Antisense strand to SEQ ID NO: 519553
aacacagccggacuaugcc

SEQ ID NO: 519555 - RNA, 19 nt, Artificial Sequence
  Description of Artificial Sequence: Synthetic oligonucleotide
  Sense strand starting at position 1342 of SEQ ID NO: 317880
aggagcugucuugaauagu

SEQ ID NO: 519556 - RNA, 19 nt, Artificial Sequence
  Description of Artificial Sequence: Synthetic oligonucleotide
  Antisense strand to SEQ ID NO: 519555
acuauucaagacagcuccu

SEQ ID NO: 519557 - RNA, 19 nt, Artificial Sequence
  Description of Artificial Sequence: Synthetic oligonucleotide
  Sense strand starting at position 1397 of SEQ ID NO: 317880
uuuaaagugugacuacauu

SEQ ID NO: 519558 - RNA, 19 nt, Artificial Sequence
  Description of Artificial Sequence: Synthetic oligonucleotide
  Antisense strand to SEQ ID NO: 519557
aauguagucacacuuuaaa

SEQ ID NO: 519559 - RNA, 19 nt, Artificial Sequence
  Description of Artificial Sequence: Synthetic oligonucleotide
  Sense strand starting at position 1594 of SEQ ID NO: 317880
gugugugcuccacaaauga

SEQ ID NO: 519560 - RNA, 19 nt, Artificial Sequence
  Description of Artificial Sequence: Synthetic oligonucleotide
  Antisense strand to SEQ ID NO: 519559
ucauuuguggagcacacac

SEQ ID NO: 519561 - RNA, 19 nt, Artificial Sequence
  Description of Artificial Sequence: Synthetic oligonucleotide
  Sense strand starting at position 1757 of SEQ ID NO: 317880
cguuuaaauccugacacuc

SEQ ID NO: 519562 - RNA, 19 nt, Artificial Sequence
  Description of Artificial Sequence: Synthetic oligonucleotide
  Antisense strand to SEQ ID NO: 519561
gagugucaggauuuaaacg

SEQ ID NO: 519563 - RNA, 19 nt, Artificial Sequence
  Description of Artificial Sequence: Synthetic oligonucleotide
  Sense strand starting at position 1773 of SEQ ID NO: 317880
cucggaaacucucuucuaa

SEQ ID NO: 519564 - RNA, 19 nt, Artificial Sequence
  Description of Artificial Sequence: Synthetic oligonucleotide
  Antisense strand to SEQ ID NO: 519563
uuagaagagaguuuccgag

SEQ ID NO: 519565 - RNA, 19 nt, Artificial Sequence
  Description of Artificial Sequence: Synthetic oligonucleotide
  Sense strand starting at position 1775 of SEQ ID NO: 317880
cggaaacucucuucuaaca

SEQ ID NO: 519566 - RNA, 19 nt, Artificial Sequence
  Description of Artificial Sequence: Synthetic oligonucleotide
  Antisense strand to SEQ ID NO: 519565
uguuagaagagaguuuccg

SEQ ID NO: 519567 - RNA, 19 nt, Artificial Sequence
  Description of Artificial Sequence: Synthetic oligonucleotide
  Sense strand starting at position 1999 of SEQ ID NO: 317880
gugauuggcgcgucaacga

SEQ ID NO: 519568 - RNA, 19 nt, Artificial Sequence
  Description of Artificial Sequence: Synthetic oligonucleotide
  Antisense strand to SEQ ID NO: 519567
ucguugacgcgccaaucac

SEQ ID NO: 519569 - RNA, 19 nt, Artificial Sequence
  Description of Artificial Sequence: Synthetic oligonucleotide
  Sense strand starting at position 2032 of SEQ ID NO: 317880
uagaccaaucgucagcaaa

SEQ ID NO: 519570 - RNA, 19 nt, Artificial Sequence
  Description of Artificial Sequence: Synthetic oligonucleotide
  Antisense strand to SEQ ID NO: 519569
uuugcugacgauuggucua

SEQ ID NO: 519571 - RNA, 19 nt, Artificial Sequence
  Description of Artificial Sequence: Synthetic oligonucleotide
  Sense strand starting at position 2600 of SEQ ID NO: 317880
guucuuaaccugcaguuaa

SEQ ID NO: 519572 - RNA, 19 nt, Artificial Sequence
  Description of Artificial Sequence: Synthetic oligonucleotide
  Antisense strand to SEQ ID NO: 519571
uuaacugcagguuaagaac

SEQ ID NO: 519573 - RNA, 19 nt, Artificial Sequence
  Description of Artificial Sequence: Synthetic oligonucleotide
  Sense strand starting at position 2613 of SEQ ID NO: 317880
aguuaacucuggcuuccaa

SEQ ID NO: 519574 - RNA, 19 nt, Artificial Sequence
  Description of Artificial Sequence: Synthetic oligonucleotide
  Antisense strand to SEQ ID NO: 519573
uuggaagccagaguuaacu

SEQ ID NO: 519575 - RNA, 19 nt, Artificial Sequence
  Description of Artificial Sequence: Synthetic oligonucleotide
  Sense strand starting at position 2626 of SEQ ID NO: 317880
uuccaaguaucuccuggaa

SEQ ID NO: 519576 - RNA, 19 nt, Artificial Sequence
  Description of Artificial Sequence: Synthetic oligonucleotide
  Antisense strand to SEQ ID NO: 519575
uuccaggagauacuuggaa

SEQ ID NO: 519577 - RNA, 19 nt, Artificial Sequence
  Description of Artificial Sequence: Synthetic oligonucleotide
  Sense strand starting at position 2674 of SEQ ID NO: 317880
gaggcuuuaugcuuggaac

SEQ ID NO: 519578 - RNA, 19 nt, Artificial Sequence
  Description of Artificial Sequence: Synthetic oligonucleotide
  Antisense strand to SEQ ID NO: 519577
guuccaagcauaaagccuc

SEQ ID NO: 519579 - RNA, 19 nt, Artificial Sequence
  Description of Artificial Sequence: Synthetic oligonucleotide
  Sense strand starting at position 2694 of SEQ ID NO: 317880
ugggcucugaucugaaaug

SEQ ID NO: 519580 - RNA, 19 nt, Artificial Sequence
  Description of Artificial Sequence: Synthetic oligonucleotide
  Antisense strand to SEQ ID NO: 519579
cauuucagaucagagccca

SEQ ID NO: 519581 - RNA, 19 nt, Artificial Sequence
  Description of Artificial Sequence: Synthetic oligonucleotide
  Sense strand starting at position 2716 of SEQ ID NO: 317880
acaguaaucguaggacuca

SEQ ID NO: 519582 - RNA, 19 nt, Artificial Sequence
  Description of Artificial Sequence: Synthetic oligonucleotide
  Antisense strand to SEQ ID NO: 519581
ugaguccuacgauuacugu

SEQ ID NO: 519583 - RNA, 19 nt, Artificial Sequence
  Description of Artificial Sequence: Synthetic oligonucleotide
  Sense strand starting at position 2738 of SEQ ID NO: 317880
ggcucuuaggaguauuauu

SEQ ID NO: 519584 - RNA, 19 nt, Artificial Sequence
  Description of Artificial Sequence: Synthetic oligonucleotide
  Antisense strand to SEQ ID NO: 519583
aauaauacuccuaagagcc

SEQ ID NO: 519585 - RNA, 19 nt, Artificial Sequence
  Description of Artificial Sequence: Synthetic oligonucleotide
  Sense strand starting at position 3148 of SEQ ID NO: 317880
auguuuauggccgugcuga

SEQ ID NO: 519586 - RNA, 19 nt, Artificial Sequence
  Description of Artificial Sequence: Synthetic oligonucleotide
  Antisense strand to SEQ ID NO: 519585
ucagcacggccauaaacau

SEQ ID NO: 519587 - RNA, 19 nt, Artificial Sequence
  Description of Artificial Sequence: Synthetic oligonucleotide
  Sense strand starting at position 3150 of SEQ ID NO: 317880
guuuauggccgugcugauu

SEQ ID NO: 519588 - RNA, 19 nt, Artificial Sequence
  Description of Artificial Sequence: Synthetic oligonucleotide
  Antisense strand to SEQ ID NO: 519587
aaucagcacggccauaaac

SEQ ID NO: 519589 - RNA, 19 nt, Artificial Sequence
  Description of Artificial Sequence: Synthetic oligonucleotide
  Sense strand starting at position 3177 of SEQ ID NO: 317880
ccaaauuggugucuuaauc

SEQ ID NO: 519590 - RNA, 19 nt, Artificial Sequence
  Description of Artificial Sequence: Synthetic oligonucleotide
  Antisense strand to SEQ ID NO: 519589
gauuaagacaccaauuugg

SEQ ID NO: 519591 - RNA, 19 nt, Artificial Sequence
  Description of Artificial Sequence: Synthetic oligonucleotide
  Sense strand starting at position 3340 of SEQ ID NO: 317880
aagauagguuucucaggac

SEQ ID NO: 519592 - RNA, 19 nt, Artificial Sequence
  Description of Artificial Sequence: Synthetic oligonucleotide
  Antisense strand to SEQ ID NO: 519591
guccugagaaaccuaucuu

SEQ ID NO: 519593 - RNA, 19 nt, Artificial Sequence
  Description of Artificial Sequence: Synthetic oligonucleotide
  Sense strand starting at position 3349 of SEQ ID NO: 317880
uucucaggaccuggauaua

SEQ ID NO: 519594 - RNA, 19 nt, Artificial Sequence
  Description of Artificial Sequence: Synthetic oligonucleotide
  Antisense strand to SEQ ID NO: 519593
uauauccagguccugagaa

SEQ ID NO: 519595 - RNA, 19 nt, Artificial Sequence
  Description of Artificial Sequence: Synthetic oligonucleotide
  Sense strand starting at position 3360 of SEQ ID NO: 317880
uggauauagugucuaugac

SEQ ID NO: 519596 - RNA, 19 nt, Artificial Sequence
  Description of Artificial Sequence: Synthetic oligonucleotide
  Antisense strand to SEQ ID NO: 519595
gucauagacacuauaucca

SEQ ID NO: 519597 - RNA, 19 nt, Artificial Sequence
  Description of Artificial Sequence: Synthetic oligonucleotide
  Sense strand starting at position 3361 of SEQ ID NO: 317880
ggauauagugucuaugacc

SEQ ID NO: 519598 - RNA, 19 nt, Artificial Sequence
  Description of Artificial Sequence: Synthetic oligonucleotide
  Antisense strand to SEQ ID NO: 519597
ggucauagacacuauaucc

SEQ ID NO: 519599 - RNA, 19 nt, Artificial Sequence
  Description of Artificial Sequence: Synthetic oligonucleotide
  Sense strand starting at position 3369 of SEQ ID NO: 317880
ugucuaugaccuugagaga

SEQ ID NO: 519600 - RNA, 19 nt, Artificial Sequence
  Description of Artificial Sequence: Synthetic oligonucleotide
  Antisense strand to SEQ ID NO: 519599
ucucucaaggucauagaca

SEQ ID NO: 519601 - RNA, 19 nt, Artificial Sequence
  Description of Artificial Sequence: Synthetic oligonucleotide
  Sense strand starting at position 3389 of SEQ ID NO: 317880
ugagaaagccuagguuaga

SEQ ID NO: 519602 - RNA, 19 nt, Artificial Sequence
  Description of Artificial Sequence: Synthetic oligonucleotide
  Antisense strand to SEQ ID NO: 519601
ucuaaccuaggcuuucuca

SEQ ID NO: 519603 - RNA, 19 nt, Artificial Sequence
  Description of Artificial Sequence: Synthetic oligonucleotide
  Sense strand starting at position 3495 of SEQ ID NO: 317880
ccauucuaaguguaccaaa

SEQ ID NO: 519604 - RNA, 19 nt, Artificial Sequence
  Description of Artificial Sequence: Synthetic oligonucleotide
  Antisense strand to SEQ ID NO: 519603
uuugguacacuuagaaugg

SEQ ID NO: 519605 - RNA, 19 nt, Artificial Sequence
  Description of Artificial Sequence: Synthetic oligonucleotide
  Sense strand starting at position 3912 of SEQ ID NO: 317880
caaaguaaugcuugagauu

SEQ ID NO: 519606 - RNA, 19 nt, Artificial Sequence
  Description of Artificial Sequence: Synthetic oligonucleotide
  Antisense strand to SEQ ID NO: 519605
aaucucaagcauuacuuug

SEQ ID NO: 519607 - RNA, 19 nt, Artificial Sequence
  Description of Artificial Sequence: Synthetic oligonucleotide
  Sense strand starting at position 3923 of SEQ ID NO: 317880
uugagauuaucaucugcac

SEQ ID NO: 519608 - RNA, 19 nt, Artificial Sequence
  Description of Artificial Sequence: Synthetic oligonucleotide
  Antisense strand to SEQ ID NO: 519607
gugcagaugauaaucucaa

SEQ ID NO: 519609 - RNA, 19 nt, Artificial Sequence
  Description of Artificial Sequence: Synthetic oligonucleotide
  Sense strand starting at position 253 of SEQ ID NO: 317881
auaagcaaaguguagaauu

SEQ ID NO: 519610 - RNA, 19 nt, Artificial Sequence
  Description of Artificial Sequence: Synthetic oligonucleotide
  Antisense strand to SEQ ID NO: 519609
aauucuacacuuugcuuau

SEQ ID NO: 519611 - RNA, 19 nt, Artificial Sequence
  Description of Artificial Sequence: Synthetic oligonucleotide
  Sense strand starting at position 255 of SEQ ID NO: 317881
aagcaaaguguagaauuau

SEQ ID NO: 519612 - RNA, 19 nt, Artificial Sequence
  Description of Artificial Sequence: Synthetic oligonucleotide
  Antisense strand to SEQ ID NO: 519611
auaauucuacacuuugcuu

SEQ ID NO: 519613 - RNA, 19 nt, Artificial Sequence
  Description of Artificial Sequence: Synthetic oligonucleotide
  Sense strand starting at position 264 of SEQ ID NO: 317881
guagaauuauagucuaccu

SEQ ID NO: 519614 - RNA, 19 nt, Artificial Sequence
  Description of Artificial Sequence: Synthetic oligonucleotide
  Antisense strand to SEQ ID NO: 519613
agguagacuauaauucuac

SEQ ID NO: 519615 - RNA, 19 nt, Artificial Sequence
  Description of Artificial Sequence: Synthetic oligonucleotide
  Sense strand starting at position 555 of SEQ ID NO: 317881
gccuuugauuuauauuuga

SEQ ID NO: 519616 - RNA, 19 nt, Artificial Sequence
  Description of Artificial Sequence: Synthetic oligonucleotide
  Antisense strand to SEQ ID NO: 519615
ucaaauauaaaucaaaggc

SEQ ID NO: 519617 - RNA, 19 nt, Artificial Sequence
  Description of Artificial Sequence: Synthetic oligonucleotide
  Sense strand starting at position 639 of SEQ ID NO: 317881
ucagacgacuuguuuaaau

SEQ ID NO: 519618 - RNA, 19 nt, Artificial Sequence
  Description of Artificial Sequence: Synthetic oligonucleotide
  Antisense strand to SEQ ID NO: 519617
auuuaaacaagucgucuga

SEQ ID NO: 519619 - RNA, 19 nt, Artificial Sequence
  Description of Artificial Sequence: Synthetic oligonucleotide
  Sense strand starting at position 641 of SEQ ID NO: 317881
agacgacuuguuuaaauua

SEQ ID NO: 519620 - RNA, 19 nt, Artificial Sequence
  Description of Artificial Sequence: Synthetic oligonucleotide
  Antisense strand to SEQ ID NO: 519619
uaauuuaaacaagucgucu

SEQ ID NO: 519621 - RNA, 19 nt, Artificial Sequence
  Description of Artificial Sequence: Synthetic oligonucleotide
  Sense strand starting at position 971 of SEQ ID NO: 317881
ucaugacaccauugagcua

SEQ ID NO: 519622 - RNA, 19 nt, Artificial Sequence
  Description of Artificial Sequence: Synthetic oligonucleotide
  Antisense strand to SEQ ID NO: 519621
uagcucaauggugucauga

SEQ ID NO: 519623 - RNA, 19 nt, Artificial Sequence
  Description of Artificial Sequence: Synthetic oligonucleotide
  Sense strand starting at position 1033 of SEQ ID NO: 317881
cccaguuuguaauuacaua

SEQ ID NO: 519624 - RNA, 19 nt, Artificial Sequence
  Description of Artificial Sequence: Synthetic oligonucleotide
  Antisense strand to SEQ ID NO: 519623
uauguaauuacaaacuggg

SEQ ID NO: 519625 - RNA, 19 nt, Artificial Sequence
  Description of Artificial Sequence: Synthetic oligonucleotide
  Sense strand starting at position 1059 of SEQ ID NO: 317881
gcuuguuugcugguuuauu

SEQ ID NO: 519626 - RNA, 19 nt, Artificial Sequence
  Description of Artificial Sequence: Synthetic oligonucleotide
  Antisense strand to SEQ ID NO: 519625
aauaaaccagcaaacaagc

SEQ ID NO: 519627 - RNA, 19 nt, Artificial Sequence
  Description of Artificial Sequence: Synthetic oligonucleotide
  Sense strand starting at position 1078 of SEQ ID NO: 317881
auccguauccaguaagaga

SEQ ID NO: 519628 - RNA, 19 nt, Artificial Sequence
  Description of Artificial Sequence: Synthetic oligonucleotide
  Antisense strand to SEQ ID NO: 519627
ucucuuacuggauacggau

SEQ ID NO: 519629 - RNA, 19 nt, Artificial Sequence
  Description of Artificial Sequence: Synthetic oligonucleotide
  Sense strand starting at position 1126 of SEQ ID NO: 317881
auugucagugauuaccaaa

SEQ ID NO: 519630 - RNA, 19 nt, Artificial Sequence
  Description of Artificial Sequence: Synthetic oligonucleotide
  Antisense strand to SEQ ID NO: 519629
uuugguaaucacugacaau

SEQ ID NO: 519631 - RNA, 19 nt, Artificial Sequence
  Description of Artificial Sequence: Synthetic oligonucleotide
  Sense strand starting at position 1182 of SEQ ID NO: 317881
ugguguuccgaagaaaggu

SEQ ID NO: 519632 - RNA, 19 nt, Artificial Sequence
  Description of Artificial Sequence: Synthetic oligonucleotide
  Antisense strand to SEQ ID NO: 519631
accuuucuucggaacacca

SEQ ID NO: 519633 - RNA, 19 nt, Artificial Sequence
  Description of Artificial Sequence: Synthetic oligonucleotide
  Sense strand starting at position 1190 of SEQ ID NO: 317881
cgaagaaaggucugagcua

SEQ ID NO: 519634 - RNA, 19 nt, Artificial Sequence
  Description of Artificial Sequence: Synthetic oligonucleotide
  Antisense strand to SEQ ID NO: 519633
uagcucagaccuuucuucg

SEQ ID NO: 519635 - RNA, 19 nt, Artificial Sequence
  Description of Artificial Sequence: Synthetic oligonucleotide
  Sense strand starting at position 1205 of SEQ ID NO: 317881
gcuagacacacugggauau

SEQ ID NO: 519636 - RNA, 19 nt, Artificial Sequence
  Description of Artificial Sequence: Synthetic oligonucleotide
  Antisense strand to SEQ ID NO: 519635
auaucccagugugucuagc

SEQ ID NO: 519637 - RNA, 19 nt, Artificial Sequence
  Description of Artificial Sequence: Synthetic oligonucleotide
  Sense strand starting at position 1272 of SEQ ID NO: 317881
guauguaggguuugaagag

SEQ ID NO: 519638 - RNA, 19 nt, Artificial Sequence
  Description of Artificial Sequence: Synthetic oligonucleotide
  Antisense strand to SEQ ID NO: 519637
cucuucaaacccuacauac

SEQ ID NO: 519639 - RNA, 19 nt, Artificial Sequence
  Description of Artificial Sequence: Synthetic oligonucleotide
  Sense strand starting at position 1392 of SEQ ID NO: 317881
gugauauaacuaugccacu

SEQ ID NO: 519640 - RNA, 19 nt, Artificial Sequence
  Description of Artificial Sequence: Synthetic oligonucleotide
  Antisense strand to SEQ ID NO: 519639
aguggcauaguuauaucac

SEQ ID NO: 519641 - RNA, 19 nt, Artificial Sequence
  Description of Artificial Sequence: Synthetic oligonucleotide
  Sense strand starting at position 1408 of SEQ ID NO: 317881
acuuaaauaugacugugua

SEQ ID NO: 519642 - RNA, 19 nt, Artificial Sequence
  Description of Artificial Sequence: Synthetic oligonucleotide
  Antisense strand to SEQ ID NO: 519641
uacacagucauauuuaagu

SEQ ID NO: 519643 - RNA, 19 nt, Artificial Sequence
  Description of Artificial Sequence: Synthetic oligonucleotide
  Sense strand starting at position 1409 of SEQ ID NO: 317881
cuuaaauaugacuguguaa

SEQ ID NO: 519644 - RNA, 19 nt, Artificial Sequence
  Description of Artificial Sequence: Synthetic oligonucleotide
  Antisense strand to SEQ ID NO: 519643
uuacacagucauauuuaag

SEQ ID NO: 519645 - RNA, 19 nt, Artificial Sequence
  Description of Artificial Sequence: Synthetic oligonucleotide
  Sense strand starting at position 1433 of SEQ ID NO: 317881
uuacaaguauuacugucau

SEQ ID NO: 519646 - RNA, 19 nt, Artificial Sequence
  Description of Artificial Sequence: Synthetic oligonucleotide
  Antisense strand to SEQ ID NO: 519645
augacaguaauacuuguaa

SEQ ID NO: 519647 - RNA, 19 nt, Artificial Sequence
  Description of Artificial Sequence: Synthetic oligonucleotide
  Sense strand starting at position 1528 of SEQ ID NO: 317881
agcauauugcaggaaguaa

SEQ ID NO: 519648 - RNA, 19 nt, Artificial Sequence
  Description of Artificial Sequence: Synthetic oligonucleotide
  Antisense strand to SEQ ID NO: 519647
uuacuuccugcaauaugcu

SEQ ID NO: 519649 - RNA, 19 nt, Artificial Sequence
  Description of Artificial Sequence: Synthetic oligonucleotide
  Sense strand starting at position 1572 of SEQ ID NO: 317881
aagggcuucuuacuaggua

SEQ ID NO: 519650 - RNA, 19 nt, Artificial Sequence
  Description of Artificial Sequence: Synthetic oligonucleotide
  Antisense strand to SEQ ID NO: 519649
uaccuaguaagaagcccuu

SEQ ID NO: 519651 - RNA, 19 nt, Artificial Sequence
  Description of Artificial Sequence: Synthetic oligonucleotide
  Sense strand starting at position 1597 of SEQ ID NO: 317881
ccuggcauuuccgagauuu

SEQ ID NO: 519652 - RNA, 19 nt, Artificial Sequence
  Description of Artificial Sequence: Synthetic oligonucleotide
  Antisense strand to SEQ ID NO: 519651
aaaucucggaaaugccagg

SEQ ID NO: 519653 - RNA, 19 nt, Artificial Sequence
  Description of Artificial Sequence: Synthetic oligonucleotide
  Sense strand starting at position 1608 of SEQ ID NO: 317881
cgagauuuccaacgugcac

SEQ ID NO: 519654 - RNA, 19 nt, Artificial Sequence
  Description of Artificial Sequence: Synthetic oligonucleotide
  Antisense strand to SEQ ID NO: 519653
gugcacguuggaaaucucg

SEQ ID NO: 519655 - RNA, 19 nt, Artificial Sequence
  Description of Artificial Sequence: Synthetic oligonucleotide
  Sense strand starting at position 1882 of SEQ ID NO: 317881
ugucguucggcgucugaga

SEQ ID NO: 519656 - RNA, 19 nt, Artificial Sequence
  Description of Artificial Sequence: Synthetic oligonucleotide
  Antisense strand to SEQ ID NO: 519655
ucucagacgccgaacgaca

SEQ ID NO: 519657 - RNA, 19 nt, Artificial Sequence
  Description of Artificial Sequence: Synthetic oligonucleotide
  Sense strand starting at position 1935 of SEQ ID NO: 317881
uggaguguucgugccucuu

SEQ ID NO: 519658 - RNA, 19 nt, Artificial Sequence
  Description of Artificial Sequence: Synthetic oligonucleotide
  Antisense strand to SEQ ID NO: 519657
aagaggcacgaacacucca

SEQ ID NO: 519659 - RNA, 19 nt, Artificial Sequence
  Description of Artificial Sequence: Synthetic oligonucleotide
  Sense strand starting at position 2224 of SEQ ID NO: 317881
gcgucauugggagagguaa

SEQ ID NO: 519660 - RNA, 19 nt, Artificial Sequence
  Description of Artificial Sequence: Synthetic oligonucleotide
  Antisense strand to SEQ ID NO: 519659
uuaccucucccaaugacgc

SEQ ID NO: 519661 - RNA, 19 nt, Artificial Sequence
  Description of Artificial Sequence: Synthetic oligonucleotide
  Sense strand starting at position 2275 of SEQ ID NO: 317881
gcccgaauuuaacuccuuu

SEQ ID NO: 519662 - RNA, 19 nt, Artificial Sequence
  Description of Artificial Sequence: Synthetic oligonucleotide
  Antisense strand to SEQ ID NO: 519661
aaaggaguuaaauucgggc

SEQ ID NO: 519663 - RNA, 19 nt, Artificial Sequence
  Description of Artificial Sequence: Synthetic oligonucleotide
  Sense strand starting at position 2429 of SEQ ID NO: 317881
gguuauauccacugggaac

SEQ ID NO: 519664 - RNA, 19 nt, Artificial Sequence
  Description of Artificial Sequence: Synthetic oligonucleotide
  Antisense strand to SEQ ID NO: 519663
guucccaguggauauaacc

SEQ ID NO: 519665 - RNA, 19 nt, Artificial Sequence
  Description of Artificial Sequence: Synthetic oligonucleotide
  Sense strand starting at position 2431 of SEQ ID NO: 317881
uuauauccacugggaacua

SEQ ID NO: 519666 - RNA, 19 nt, Artificial Sequence
  Description of Artificial Sequence: Synthetic oligonucleotide
  Antisense strand to SEQ ID NO: 519665
uaguucccaguggauauaa

SEQ ID NO: 519667 - RNA, 19 nt, Artificial Sequence
  Description of Artificial Sequence: Synthetic oligonucleotide
  Sense strand starting at position 2509 of SEQ ID NO: 317881
agacaucaagcaugcuauu

SEQ ID NO: 519668 - RNA, 19 nt, Artificial Sequence
  Description of Artificial Sequence: Synthetic oligonucleotide
  Antisense strand to SEQ ID NO: 519667
aauagcaugcuugaugucu

SEQ ID NO: 519669 - RNA, 19 nt, Artificial Sequence
  Description of Artificial Sequence: Synthetic oligonucleotide
  Sense strand starting at position 2639 of SEQ ID NO: 317881
gcccuagaaagguaacguu

SEQ ID NO: 519670 - RNA, 19 nt, Artificial Sequence
  Description of Artificial Sequence: Synthetic oligonucleotide
  Antisense strand to SEQ ID NO: 519669
aacguuaccuuucuagggc

SEQ ID NO: 519671 - RNA, 19 nt, Artificial Sequence
  Description of Artificial Sequence: Synthetic oligonucleotide
  Sense strand starting at position 2651 of SEQ ID NO: 317881
uaacguugcccagguauuu

SEQ ID NO: 519672 - RNA, 19 nt, Artificial Sequence
  Description of Artificial Sequence: Synthetic oligonucleotide
  Antisense strand to SEQ ID NO: 519671
aaauaccugggcaacguua

SEQ ID NO: 519673 - RNA, 19 nt, Artificial Sequence
  Description of Artificial Sequence: Synthetic oligonucleotide
  Sense strand starting at position 2889 of SEQ ID NO: 317881
uugucuuaacucuauaguu

SEQ ID NO: 519674 - RNA, 19 nt, Artificial Sequence
  Description of Artificial Sequence: Synthetic oligonucleotide
  Antisense strand to SEQ ID NO: 519673
aacuauagaguuaagacaa

SEQ ID NO: 519675 - RNA, 19 nt, Artificial Sequence
  Description of Artificial Sequence: Synthetic oligonucleotide
  Sense strand starting at position 2911 of SEQ ID NO: 317881
auagauuaaaugugaggca

SEQ ID NO: 519676 - RNA, 19 nt, Artificial Sequence
  Description of Artificial Sequence: Synthetic oligonucleotide
  Antisense strand to SEQ ID NO: 519675
ugccucacauuuaaucuau

SEQ ID NO: 519677 - RNA, 19 nt, Artificial Sequence
  Description of Artificial Sequence: Synthetic oligonucleotide
  Sense strand starting at position 2916 of SEQ ID NO: 317881
uuaaaugugaggcaaagua

SEQ ID NO: 519678 - RNA, 19 nt, Artificial Sequence
  Description of Artificial Sequence: Synthetic oligonucleotide
  Antisense strand to SEQ ID NO: 519677
uacuuugccucacauuuaa

SEQ ID NO: 519679 - RNA, 19 nt, Artificial Sequence
  Description of Artificial Sequence: Synthetic oligonucleotide
  Sense strand starting at position 3098 of SEQ ID NO: 317881
guccuaugugagggauaga

SEQ ID NO: 519680 - RNA, 19 nt, Artificial Sequence
  Description of Artificial Sequence: Synthetic oligonucleotide
  Antisense strand to SEQ ID NO: 519679
ucuaucccucacauaggac

SEQ ID NO: 519681 - RNA, 19 nt, Artificial Sequence
  Description of Artificial Sequence: Synthetic oligonucleotide
  Sense strand starting at position 3304 of SEQ ID NO: 317881
gugacuuaucuuuaaacga

SEQ ID NO: 519682 - RNA, 19 nt, Artificial Sequence
  Description of Artificial Sequence: Synthetic oligonucleotide
  Antisense strand to SEQ ID NO: 519681
ucguuuaaagauaagucac

SEQ ID NO: 519683 - RNA, 19 nt, Artificial Sequence
  Description of Artificial Sequence: Synthetic oligonucleotide
  Sense strand starting at position 3349 of SEQ ID NO: 317881
agaggugaaaugugcucaa

SEQ ID NO: 519684 - RNA, 19 nt, Artificial Sequence
  Description of Artificial Sequence: Synthetic oligonucleotide
  Antisense strand to SEQ ID NO: 519683
uugagcacauuucaccucu

SEQ ID NO: 519685 - RNA, 19 nt, Artificial Sequence
  Description of Artificial Sequence: Synthetic oligonucleotide
  Sense strand starting at position 3370 of SEQ ID NO: 317881
ccucuaaggucccuugaga

SEQ ID NO: 519686 - RNA, 19 nt, Artificial Sequence
  Description of Artificial Sequence: Synthetic oligonucleotide
  Antisense strand to SEQ ID NO: 519685
ucucaagggaccuuagagg

SEQ ID NO: 519687 - RNA, 19 nt, Artificial Sequence
  Description of Artificial Sequence: Synthetic oligonucleotide
  Sense strand starting at position 3449 of SEQ ID NO: 317881
aaggaaugcgagcagucau

SEQ ID NO: 519688 - RNA, 19 nt, Artificial Sequence
  Description of Artificial Sequence: Synthetic oligonucleotide
  Antisense strand to SEQ ID NO: 519687
augacugcucgcauuccuu

SEQ ID NO: 519689 - RNA, 19 nt, Artificial Sequence
  Description of Artificial Sequence: Synthetic oligonucleotide
  Sense strand starting at position 16 of SEQ ID NO: 317882
augugugucuugucuagaa

SEQ ID NO: 519690 - RNA, 19 nt, Artificial Sequence
  Description of Artificial Sequence: Synthetic oligonucleotide
  Antisense strand to SEQ ID NO: 519689
uucuagacaagacacacau

SEQ ID NO: 519691 - RNA, 19 nt, Artificial Sequence
  Description of Artificial Sequence: Synthetic oligonucleotide
  Sense strand starting at position 18 of SEQ ID NO: 317882
gugugucuugucuagaaau

SEQ ID NO: 519692 - RNA, 19 nt, Artificial Sequence
  Description of Artificial Sequence: Synthetic oligonucleotide
  Antisense strand to SEQ ID NO: 519691
auuucuagacaagacacac

SEQ ID NO: 519693 - RNA, 19 nt, Artificial Sequence
  Description of Artificial Sequence: Synthetic oligonucleotide
  Sense strand starting at position 20 of SEQ ID NO: 317882
gugucuugucuagaaaugg

SEQ ID NO: 519694 - RNA, 19 nt, Artificial Sequence
  Description of Artificial Sequence: Synthetic oligonucleotide
  Antisense strand to SEQ ID NO: 519693
ccauuucuagacaagacac

SEQ ID NO: 519695 - RNA, 19 nt, Artificial Sequence
  Description of Artificial Sequence: Synthetic oligonucleotide
  Sense strand starting at position 52 of SEQ ID NO: 317882
augccaucacauggauacu

SEQ ID NO: 519696 - RNA, 19 nt, Artificial Sequence
  Description of Artificial Sequence: Synthetic oligonucleotide
  Antisense strand to SEQ ID NO: 519695
aguauccaugugauggcau

SEQ ID NO: 519697 - RNA, 19 nt, Artificial Sequence
  Description of Artificial Sequence: Synthetic oligonucleotide
  Sense strand starting at position 135 of SEQ ID NO: 317882
uuccacuuagcagauagau

SEQ ID NO: 519698 - RNA, 19 nt, Artificial Sequence
  Description of Artificial Sequence: Synthetic oligonucleotide
  Antisense strand to SEQ ID NO: 519697
aucuaucugcuaaguggaa

SEQ ID NO: 519699 - RNA, 19 nt, Artificial Sequence
  Description of Artificial Sequence: Synthetic oligonucleotide
  Sense strand starting at position 144 of SEQ ID NO: 317882
gcagauagaucucagacca

SEQ ID NO: 519700 - RNA, 19 nt, Artificial Sequence
  Description of Artificial Sequence: Synthetic oligonucleotide
  Antisense strand to SEQ ID NO: 519699
uggucugagaucuaucugc

SEQ ID NO: 519701 - RNA, 19 nt, Artificial Sequence
  Description of Artificial Sequence: Synthetic oligonucleotide
  Sense strand starting at position 198 of SEQ ID NO: 317882
uguaaagugggacaucgaa

SEQ ID NO: 519702 - RNA, 19 nt, Artificial Sequence
  Description of Artificial Sequence: Synthetic oligonucleotide
  Antisense strand to SEQ ID NO: 519701
uucgaugucccacuuuaca

SEQ ID NO: 519703 - RNA, 19 nt, Artificial Sequence
  Description of Artificial Sequence: Synthetic oligonucleotide
  Sense strand starting at position 236 of SEQ ID NO: 317882
gaauguugcccacaccaga

SEQ ID NO: 519704 - RNA, 19 nt, Artificial Sequence
  Description of Artificial Sequence: Synthetic oligonucleotide
  Antisense strand to SEQ ID NO: 519703
ucuggugugggcaacauuc

SEQ ID NO: 519705 - RNA, 19 nt, Artificial Sequence
  Description of Artificial Sequence: Synthetic oligonucleotide
  Sense strand starting at position 247 of SEQ ID NO: 317882
acaccagacugauacugaa

SEQ ID NO: 519706 - RNA, 19 nt, Artificial Sequence
  Description of Artificial Sequence: Synthetic oligonucleotide
  Antisense strand to SEQ ID NO: 519705
uucaguaucagucuggugu

SEQ ID NO: 519707 - RNA, 19 nt, Artificial Sequence
  Description of Artificial Sequence: Synthetic oligonucleotide
  Sense strand starting at position 381 of SEQ ID NO: 317882
agucaauggccucguugaa

SEQ ID NO: 519708 - RNA, 19 nt, Artificial Sequence
  Description of Artificial Sequence: Synthetic oligonucleotide
  Antisense strand to SEQ ID NO: 519707
uucaacgaggccauugacu

SEQ ID NO: 519709 - RNA, 19 nt, Artificial Sequence
  Description of Artificial Sequence: Synthetic oligonucleotide
  Sense strand starting at position 476 of SEQ ID NO: 317882
ggacaauuggcugagacgu

SEQ ID NO: 519710 - RNA, 19 nt, Artificial Sequence
  Description of Artificial Sequence: Synthetic oligonucleotide
  Antisense strand to SEQ ID NO: 519709
acgucucagccaauugucc

SEQ ID NO: 519711 - RNA, 19 nt, Artificial Sequence
  Description of Artificial Sequence: Synthetic oligonucleotide
  Sense strand starting at position 484 of SEQ ID NO: 317882
ggcugagacguugaucaag

SEQ ID NO: 519712 - RNA, 19 nt, Artificial Sequence
  Description of Artificial Sequence: Synthetic oligonucleotide
  Antisense strand to SEQ ID NO: 519711
cuugaucaacgucucagcc

SEQ ID NO: 519713 - RNA, 19 nt, Artificial Sequence
  Description of Artificial Sequence: Synthetic oligonucleotide
  Sense strand starting at position 492 of SEQ ID NO: 317882
cguugaucaaggcagugau

SEQ ID NO: 519714 - RNA, 19 nt, Artificial Sequence
  Description of Artificial Sequence: Synthetic oligonucleotide
  Antisense strand to SEQ ID NO: 519713
aucacugccuugaucaacg

SEQ ID NO: 519715 - RNA, 19 nt, Artificial Sequence
  Description of Artificial Sequence: Synthetic oligonucleotide
  Sense strand starting at position 707 of SEQ ID NO: 317882
aguucuguugcuggaggau

SEQ ID NO: 519716 - RNA, 19 nt, Artificial Sequence
  Description of Artificial Sequence: Synthetic oligonucleotide
  Antisense strand to SEQ ID NO: 519715
auccuccagcaacagaacu

SEQ ID NO: 519717 - RNA, 19 nt, Artificial Sequence
  Description of Artificial Sequence: Synthetic oligonucleotide
  Sense strand starting at position 710 of SEQ ID NO: 317882
ucuguugcuggaggauaaa

SEQ ID NO: 519718 - RNA, 19 nt, Artificial Sequence
  Description of Artificial Sequence: Synthetic oligonucleotide
  Antisense strand to SEQ ID NO: 519717
uuuauccuccagcaacaga

SEQ ID NO: 519719 - RNA, 19 nt, Artificial Sequence
  Description of Artificial Sequence: Synthetic oligonucleotide
  Sense strand starting at position 777 of SEQ ID NO: 317882
uuccguagagccuacaauu

SEQ ID NO: 519720 - RNA, 19 nt, Artificial Sequence
  Description of Artificial Sequence: Synthetic oligonucleotide
  Antisense strand to SEQ ID NO: 519719
aauuguaggcucuacggaa

SEQ ID NO: 519721 - RNA, 19 nt, Artificial Sequence
  Description of Artificial Sequence: Synthetic oligonucleotide
  Sense strand starting at position 815 of SEQ ID NO: 317882
accacuuaacuguggaaua

SEQ ID NO: 519722 - RNA, 19 nt, Artificial Sequence
  Description of Artificial Sequence: Synthetic oligonucleotide
  Antisense strand to SEQ ID NO: 519721
uauuccacaguuaaguggu

SEQ ID NO: 519723 - RNA, 19 nt, Artificial Sequence
  Description of Artificial Sequence: Synthetic oligonucleotide
  Sense strand starting at position 872 of SEQ ID NO: 317882
gcaggucacuuucuauauu

SEQ ID NO: 519724 - RNA, 19 nt, Artificial Sequence
  Description of Artificial Sequence: Synthetic oligonucleotide
  Antisense strand to SEQ ID NO: 519723
aauauagaaagugaccugc

SEQ ID NO: 519725 - RNA, 19 nt, Artificial Sequence
  Description of Artificial Sequence: Synthetic oligonucleotide
  Sense strand starting at position 927 of SEQ ID NO: 317882
uuacuucuucccuguggca

SEQ ID NO: 519726 - RNA, 19 nt, Artificial Sequence
  Description of Artificial Sequence: Synthetic oligonucleotide
  Antisense strand to SEQ ID NO: 519725
ugccacagggaagaaguaa

SEQ ID NO: 519727 - RNA, 19 nt, Artificial Sequence
  Description of Artificial Sequence: Synthetic oligonucleotide
  Sense strand starting at position 953 of SEQ ID NO: 317882
cuacuaaccugaucguaga

SEQ ID NO: 519728 - RNA, 19 nt, Artificial Sequence
  Description of Artificial Sequence: Synthetic oligonucleotide
  Antisense strand to SEQ ID NO: 519727
ucuacgaucagguuaguag

SEQ ID NO: 519729 - RNA, 19 nt, Artificial Sequence
  Description of Artificial Sequence: Synthetic oligonucleotide
  Sense strand starting at position 994 of SEQ ID NO: 317882
cccagauuccgcgcuguca

SEQ ID NO: 519730 - RNA, 19 nt, Artificial Sequence
  Description of Artificial Sequence: Synthetic oligonucleotide
  Antisense strand to SEQ ID NO: 519729
ugacagcgcggaaucuggg

SEQ ID NO: 519731 - RNA, 19 nt, Artificial Sequence
  Description of Artificial Sequence: Synthetic oligonucleotide
  Sense strand starting at position 1097 of SEQ ID NO: 317882
ucguauccuccugggaaua

SEQ ID NO: 519732 - RNA, 19 nt, Artificial Sequence
  Description of Artificial Sequence: Synthetic oligonucleotide
  Antisense strand to SEQ ID NO: 519731
uauucccaggaggauacga

SEQ ID NO: 519733 - RNA, 19 nt, Artificial Sequence
  Description of Artificial Sequence: Synthetic oligonucleotide
  Sense strand starting at position 1191 of SEQ ID NO: 317882
ggaaguuuacaucggaaag

SEQ ID NO: 519734 - RNA, 19 nt, Artificial Sequence
  Description of Artificial Sequence: Synthetic oligonucleotide
  Antisense strand to SEQ ID NO: 519733
cuuuccgauguaaacuucc

SEQ ID NO: 519735 - RNA, 19 nt, Artificial Sequence
  Description of Artificial Sequence: Synthetic oligonucleotide
  Sense strand starting at position 1192 of SEQ ID NO: 317882
gaaguuuacaucggaaagg

SEQ ID NO: 519736 - RNA, 19 nt, Artificial Sequence
  Description of Artificial Sequence: Synthetic oligonucleotide
  Antisense strand to SEQ ID NO: 519735
ccuuuccgauguaaacuuc

SEQ ID NO: 519737 - RNA, 19 nt, Artificial Sequence
  Description of Artificial Sequence: Synthetic oligonucleotide
  Sense strand starting at position 1216 of SEQ ID NO: 317882
gcaagucuuuguuuccaga

SEQ ID NO: 519738 - RNA, 19 nt, Artificial Sequence
  Description of Artificial Sequence: Synthetic oligonucleotide
  Antisense strand to SEQ ID NO: 519737
ucuggaaacaaagacuugc

SEQ ID NO: 519739 - RNA, 19 nt, Artificial Sequence
  Description of Artificial Sequence: Synthetic oligonucleotide
  Sense strand starting at position 1248 of SEQ ID NO: 317882
aaugacaaguuccagagau

SEQ ID NO: 519740 - RNA, 19 nt, Artificial Sequence
  Description of Artificial Sequence: Synthetic oligonucleotide
  Antisense strand to SEQ ID NO: 519739
aucucuggaacuugucauu

SEQ ID NO: 519741 - RNA, 19 nt, Artificial Sequence
  Description of Artificial Sequence: Synthetic oligonucleotide
  Sense strand starting at position 1379 of SEQ ID NO: 317882
ggcguaccuuugaggaaga

SEQ ID NO: 519742 - RNA, 19 nt, Artificial Sequence
  Description of Artificial Sequence: Synthetic oligonucleotide
  Antisense strand to SEQ ID NO: 519741
ucuuccucaaagguacgcc

SEQ ID NO: 519743 - RNA, 19 nt, Artificial Sequence
  Description of Artificial Sequence: Synthetic oligonucleotide
  Sense strand starting at position 2077 of SEQ ID NO: 317882
gguguuuguuugaauggug

SEQ ID NO: 519744 - RNA, 19 nt, Artificial Sequence
  Description of Artificial Sequence: Synthetic oligonucleotide
  Antisense strand to SEQ ID NO: 519743
caccauucaaacaaacacc

SEQ ID NO: 519745 - RNA, 19 nt, Artificial Sequence
  Description of Artificial Sequence: Synthetic oligonucleotide
  Sense strand starting at position 2080 of SEQ ID NO: 317882
guuuguuugaauggugauc

SEQ ID NO: 519746 - RNA, 19 nt, Artificial Sequence
  Description of Artificial Sequence: Synthetic oligonucleotide
  Antisense strand to SEQ ID NO: 519745
gaucaccauucaaacaaac

SEQ ID NO: 519747 - RNA, 19 nt, Artificial Sequence
  Description of Artificial Sequence: Synthetic oligonucleotide
  Sense strand starting at position 2538 of SEQ ID NO: 317882
gcgacugacuugcccagaa

SEQ ID NO: 519748 - RNA, 19 nt, Artificial Sequence
  Description of Artificial Sequence: Synthetic oligonucleotide
  Antisense strand to SEQ ID NO: 519747
uucugggcaagucagucgc

SEQ ID NO: 519749 - RNA, 19 nt, Artificial Sequence
  Description of Artificial Sequence: Synthetic oligonucleotide
  Sense strand starting at position 2613 of SEQ ID NO: 317882
augaacaacucugccgaua

SEQ ID NO: 519750 - RNA, 19 nt, Artificial Sequence
  Description of Artificial Sequence: Synthetic oligonucleotide
  Antisense strand to SEQ ID NO: 519749
uaucggcagaguuguucau

SEQ ID NO: 519751 - RNA, 19 nt, Artificial Sequence
  Description of Artificial Sequence: Synthetic oligonucleotide
  Sense strand starting at position 2685 of SEQ ID NO: 317882
gggcaaugcuuuccuguuu

SEQ ID NO: 519752 - RNA, 19 nt, Artificial Sequence
  Description of Artificial Sequence: Synthetic oligonucleotide
  Antisense strand to SEQ ID NO: 519751
aaacaggaaagcauugccc

SEQ ID NO: 519753 - RNA, 19 nt, Artificial Sequence
  Description of Artificial Sequence: Synthetic oligonucleotide
  Sense strand starting at position 2714 of SEQ ID NO: 317882
ucuuuaagguggcuuuaaa

SEQ ID NO: 519754 - RNA, 19 nt, Artificial Sequence
  Description of Artificial Sequence: Synthetic oligonucleotide
  Antisense strand to SEQ ID NO: 519753
uuuaaagccaccuuaaaga

SEQ ID NO: 519755 - RNA, 19 nt, Artificial Sequence
  Description of Artificial Sequence: Synthetic oligonucleotide
  Sense strand starting at position 2777 of SEQ ID NO: 317882
gggaaauaaugcuauuccu

SEQ ID NO: 519756 - RNA, 19 nt, Artificial Sequence
  Description of Artificial Sequence: Synthetic oligonucleotide
  Antisense strand to SEQ ID NO: 519755
aggaauagcauuauuuccc

SEQ ID NO: 519757 - RNA, 19 nt, Artificial Sequence
  Description of Artificial Sequence: Synthetic oligonucleotide
  Sense strand starting at position 3118 of SEQ ID NO: 317882
ccguuauaggccgaaagca

SEQ ID NO: 519758 - RNA, 19 nt, Artificial Sequence
  Description of Artificial Sequence: Synthetic oligonucleotide
  Antisense strand to SEQ ID NO: 519757
ugcuuucggccuauaacgg

SEQ ID NO: 519759 - RNA, 19 nt, Artificial Sequence
  Description of Artificial Sequence: Synthetic oligonucleotide
  Sense strand starting at position 3464 of SEQ ID NO: 317882
cgcaaauguucugccugga

SEQ ID NO: 519760 - RNA, 19 nt, Artificial Sequence
  Description of Artificial Sequence: Synthetic oligonucleotide
  Antisense strand to SEQ ID NO: 519759
uccaggcagaacauuugcg

SEQ ID NO: 519761 - RNA, 19 nt, Artificial Sequence
  Description of Artificial Sequence: Synthetic oligonucleotide
  Sense strand starting at position 3467 of SEQ ID NO: 317882
aaauguucugccuggauuc

SEQ ID NO: 519762 - RNA, 19 nt, Artificial Sequence
  Description of Artificial Sequence: Synthetic oligonucleotide
  Antisense strand to SEQ ID NO: 519761
gaauccaggcagaacauuu

SEQ ID NO: 519763 - RNA, 19 nt, Artificial Sequence
  Description of Artificial Sequence: Synthetic oligonucleotide
  Sense strand starting at position 3474 of SEQ ID NO: 317882
cugccuggauucuucuaga

SEQ ID NO: 519764 - RNA, 19 nt, Artificial Sequence
  Description of Artificial Sequence: Synthetic oligonucleotide
  Antisense strand to SEQ ID NO: 519763
ucuagaagaauccaggcag

SEQ ID NO: 519765 - RNA, 19 nt, Artificial Sequence
  Description of Artificial Sequence: Synthetic oligonucleotide
  Sense strand starting at position 3674 of SEQ ID NO: 317882
cguugaaucauagaauguu

SEQ ID NO: 519766 - RNA, 19 nt, Artificial Sequence
  Description of Artificial Sequence: Synthetic oligonucleotide
  Antisense strand to SEQ ID NO: 519765
aacauucuaugauucaacg

SEQ ID NO: 519767 - RNA, 19 nt, Artificial Sequence
  Description of Artificial Sequence: Synthetic oligonucleotide
  Sense strand starting at position 3719 of SEQ ID NO: 317882
cgacuugauuugucccauu

SEQ ID NO: 519768 - RNA, 19 nt, Artificial Sequence
  Description of Artificial Sequence: Synthetic oligonucleotide
  Antisense strand to SEQ ID NO: 519767
aaugggacaaaucaagucg

SEQ ID NO: 519769 - RNA, 19 nt, Artificial Sequence
  Description of Artificial Sequence: Synthetic oligonucleotide
  Sense strand starting at position 9 of SEQ ID NO: 317883
cgcagaaauccucacacuc

SEQ ID NO: 519770 - RNA, 19 nt, Artificial Sequence
  Description of Artificial Sequence: Synthetic oligonucleotide
  Antisense strand to SEQ ID NO: 519769
gagugugaggauuucugcg

SEQ ID NO: 519771 - RNA, 19 nt, Artificial Sequence
  Description of Artificial Sequence: Synthetic oligonucleotide
  Sense strand starting at position 318 of SEQ ID NO: 317883
ugauguaauuagucaucuu

SEQ ID NO: 519772 - RNA, 19 nt, Artificial Sequence
  Description of Artificial Sequence: Synthetic oligonucleotide
  Antisense strand to SEQ ID NO: 519771
aagaugacuaauuacauca

SEQ ID NO: 519773 - RNA, 19 nt, Artificial Sequence
  Description of Artificial Sequence: Synthetic oligonucleotide
  Sense strand starting at position 321 of SEQ ID NO: 317883
uguaauuagucaucuuccu

SEQ ID NO: 519774 - RNA, 19 nt, Artificial Sequence
  Description of Artificial Sequence: Synthetic oligonucleotide
  Antisense strand to SEQ ID NO: 519773
aggaagaugacuaauuaca

SEQ ID NO: 519775 - RNA, 19 nt, Artificial Sequence
  Description of Artificial Sequence: Synthetic oligonucleotide
  Sense strand starting at position 475 of SEQ ID NO: 317883
gggugugcccaggaaaguu

SEQ ID NO: 519776 - RNA, 19 nt, Artificial Sequence
  Description of Artificial Sequence: Synthetic oligonucleotide
  Antisense strand to SEQ ID NO: 519775
aacuuuccugggcacaccc

SEQ ID NO: 519777 - RNA, 19 nt, Artificial Sequence
  Description of Artificial Sequence: Synthetic oligonucleotide
  Sense strand starting at position 484 of SEQ ID NO: 317883
caggaaaguucccucaggu

SEQ ID NO: 519778 - RNA, 19 nt, Artificial Sequence
  Description of Artificial Sequence: Synthetic oligonucleotide
  Antisense strand to SEQ ID NO: 519777
accugagggaacuuuccug

SEQ ID NO: 519779 - RNA, 19 nt, Artificial Sequence
  Description of Artificial Sequence: Synthetic oligonucleotide
  Sense strand starting at position 621 of SEQ ID NO: 317883
agaauuaaaguugggaguu

SEQ ID NO: 519780 - RNA, 19 nt, Artificial Sequence
  Description of Artificial Sequence: Synthetic oligonucleotide
  Antisense strand to SEQ ID NO: 519779
aacucccaacuuuaauucu

SEQ ID NO: 519781 - RNA, 19 nt, Artificial Sequence
  Description of Artificial Sequence: Synthetic oligonucleotide
  Sense strand starting at position 627 of SEQ ID NO: 317883
aaaguugggaguugcuauu

SEQ ID NO: 519782 - RNA, 19 nt, Artificial Sequence
  Description of Artificial Sequence: Synthetic oligonucleotide
  Antisense strand to SEQ ID NO: 519781
aauagcaacucccaacuuu

SEQ ID NO: 519783 - RNA, 19 nt, Artificial Sequence
  Description of Artificial Sequence: Synthetic oligonucleotide
  Sense strand starting at position 641 of SEQ ID NO: 317883
cuauucuaccgguagacua

SEQ ID NO: 519784 - RNA, 19 nt, Artificial Sequence
  Description of Artificial Sequence: Synthetic oligonucleotide
  Antisense strand to SEQ ID NO: 519783
uagucuaccgguagaauag

SEQ ID NO: 519785 - RNA, 19 nt, Artificial Sequence
  Description of Artificial Sequence: Synthetic oligonucleotide
  Sense strand starting at position 1261 of SEQ ID NO: 317883
ccaacaugcuguguugaga

SEQ ID NO: 519786 - RNA, 19 nt, Artificial Sequence
  Description of Artificial Sequence: Synthetic oligonucleotide
  Antisense strand to SEQ ID NO: 519785
ucucaacacagcauguugg

SEQ ID NO: 519787 - RNA, 19 nt, Artificial Sequence
  Description of Artificial Sequence: Synthetic oligonucleotide
  Sense strand starting at position 1279 of SEQ ID NO: 317883
acgccucuucuggguuaaa

SEQ ID NO: 519788 - RNA, 19 nt, Artificial Sequence
  Description of Artificial Sequence: Synthetic oligonucleotide
  Antisense strand to SEQ ID NO: 519787
uuuaacccagaagaggcgu

SEQ ID NO: 519789 - RNA, 19 nt, Artificial Sequence
  Description of Artificial Sequence: Synthetic oligonucleotide
  Sense strand starting at position 1671 of SEQ ID NO: 317883
guuggaugcuuuccugaau

SEQ ID NO: 519790 - RNA, 19 nt, Artificial Sequence
  Description of Artificial Sequence: Synthetic oligonucleotide
  Antisense strand to SEQ ID NO: 519789
auucaggaaagcauccaac

SEQ ID NO: 519791 - RNA, 19 nt, Artificial Sequence
  Description of Artificial Sequence: Synthetic oligonucleotide
  Sense strand starting at position 1967 of SEQ ID NO: 317883
agauguaugcuuggcuguu

SEQ ID NO: 519792 - RNA, 19 nt, Artificial Sequence
  Description of Artificial Sequence: Synthetic oligonucleotide
  Antisense strand to SEQ ID NO: 519791
aacagccaagcauacaucu

SEQ ID NO: 519793 - RNA, 19 nt, Artificial Sequence
  Description of Artificial Sequence: Synthetic oligonucleotide
  Sense strand starting at position 1988 of SEQ ID NO: 317883
ggguuguuugguugguuga

SEQ ID NO: 519794 - RNA, 19 nt, Artificial Sequence
  Description of Artificial Sequence: Synthetic oligonucleotide
  Antisense strand to SEQ ID NO: 519793
ucaaccaaccaaacaaccc

SEQ ID NO: 519795 - RNA, 19 nt, Artificial Sequence
  Description of Artificial Sequence: Synthetic oligonucleotide
  Sense strand starting at position 2181 of SEQ ID NO: 317883
auggcaauuuaagaaacaa

SEQ ID NO: 519796 - RNA, 19 nt, Artificial Sequence
  Description of Artificial Sequence: Synthetic oligonucleotide
  Antisense strand to SEQ ID NO: 519795
uuguuucuuaaauugccau

SEQ ID NO: 519797 - RNA, 19 nt, Artificial Sequence
  Description of Artificial Sequence: Synthetic oligonucleotide
  Sense strand starting at position 2316 of SEQ ID NO: 317883
cuuuccuuugcguguagau

SEQ ID NO: 519798 - RNA, 19 nt, Artificial Sequence
  Description of Artificial Sequence: Synthetic oligonucleotide
  Antisense strand to SEQ ID NO: 519797
aucuacacgcaaaggaaag

SEQ ID NO: 519799 - RNA, 19 nt, Artificial Sequence
  Description of Artificial Sequence: Synthetic oligonucleotide
  Sense strand starting at position 2318 of SEQ ID NO: 317883
uuccuuugcguguagauga

SEQ ID NO: 519800 - RNA, 19 nt, Artificial Sequence
  Description of Artificial Sequence: Synthetic oligonucleotide
  Antisense strand to SEQ ID NO: 519799
ucaucuacacgcaaaggaa

SEQ ID NO: 519801 - RNA, 19 nt, Artificial Sequence
  Description of Artificial Sequence: Synthetic oligonucleotide
  Sense strand starting at position 2344 of SEQ ID NO: 317883
gcugguugccguagacaga

SEQ ID NO: 519802 - RNA, 19 nt, Artificial Sequence
  Description of Artificial Sequence: Synthetic oligonucleotide
  Antisense strand to SEQ ID NO: 519801
ucugucuacggcaaccagc

SEQ ID NO: 519803 - RNA, 19 nt, Artificial Sequence
  Description of Artificial Sequence: Synthetic oligonucleotide
  Sense strand starting at position 2345 of SEQ ID NO: 317883
cugguugccguagacagau

SEQ ID NO: 519804 - RNA, 19 nt, Artificial Sequence
  Description of Artificial Sequence: Synthetic oligonucleotide
  Antisense strand to SEQ ID NO: 519803
aucugucuacggcaaccag

SEQ ID NO: 519805 - RNA, 19 nt, Artificial Sequence
  Description of Artificial Sequence: Synthetic oligonucleotide
  Sense strand starting at position 2500 of SEQ ID NO: 317883
agaagugauuugcaggcuu

SEQ ID NO: 519806 - RNA, 19 nt, Artificial Sequence
  Description of Artificial Sequence: Synthetic oligonucleotide
  Antisense strand to SEQ ID NO: 519805
aagccugcaaaucacuucu

SEQ ID NO: 519807 - RNA, 19 nt, Artificial Sequence
  Description of Artificial Sequence: Synthetic oligonucleotide
  Sense strand starting at position 2502 of SEQ ID NO: 317883
aagugauuugcaggcuuuc

SEQ ID NO: 519808 - RNA, 19 nt, Artificial Sequence
  Description of Artificial Sequence: Synthetic oligonucleotide
  Antisense strand to SEQ ID NO: 519807
gaaagccugcaaaucacuu

SEQ ID NO: 519809 - RNA, 19 nt, Artificial Sequence
  Description of Artificial Sequence: Synthetic oligonucleotide
  Sense strand starting at position 2511 of SEQ ID NO: 317883
gcaggcuuucccuauggaa

SEQ ID NO: 519810 - RNA, 19 nt, Artificial Sequence
  Description of Artificial Sequence: Synthetic oligonucleotide
  Antisense strand to SEQ ID NO: 519809
uuccauagggaaagccugc

SEQ ID NO: 519811 - RNA, 19 nt, Artificial Sequence
  Description of Artificial Sequence: Synthetic oligonucleotide
  Sense strand starting at position 2513 of SEQ ID NO: 317883
aggcuuucccuauggaauc

SEQ ID NO: 519812 - RNA, 19 nt, Artificial Sequence
  Description of Artificial Sequence: Synthetic oligonucleotide
  Antisense strand to SEQ ID NO: 519811
gauuccauagggaaagccu

SEQ ID NO: 519813 - RNA, 19 nt, Artificial Sequence
  Description of Artificial Sequence: Synthetic oligonucleotide
  Sense strand starting at position 3324 of SEQ ID NO: 317883
ucgggcaguccucgagaua

SEQ ID NO: 519814 - RNA, 19 nt, Artificial Sequence
  Description of Artificial Sequence: Synthetic oligonucleotide
  Antisense strand to SEQ ID NO: 519813
uaucucgaggacugcccga

SEQ ID NO: 519815 - RNA, 19 nt, Artificial Sequence
  Description of Artificial Sequence: Synthetic oligonucleotide
  Sense strand starting at position 3325 of SEQ ID NO: 317883
cgggcaguccucgagauau

SEQ ID NO: 519816 - RNA, 19 nt, Artificial Sequence
  Description of Artificial Sequence: Synthetic oligonucleotide
  Antisense strand to SEQ ID NO: 519815
auaucucgaggacugcccg

SEQ ID NO: 519817 - RNA, 19 nt, Artificial Sequence
  Description of Artificial Sequence: Synthetic oligonucleotide
  Sense strand starting at position 3327 of SEQ ID NO: 317883
ggcaguccucgagauaugu

SEQ ID NO: 519818 - RNA, 19 nt, Artificial Sequence
  Description of Artificial Sequence: Synthetic oligonucleotide
  Antisense strand to SEQ ID NO: 519817
acauaucucgaggacugcc

SEQ ID NO: 519819 - RNA, 19 nt, Artificial Sequence
  Description of Artificial Sequence: Synthetic oligonucleotide
  Sense strand starting at position 3329 of SEQ ID NO: 317883
caguccucgagauauguga

SEQ ID NO: 519820 - RNA, 19 nt, Artificial Sequence
  Description of Artificial Sequence: Synthetic oligonucleotide
  Antisense strand to SEQ ID NO: 519819
ucacauaucucgaggacug

SEQ ID NO: 519821 - RNA, 19 nt, Artificial Sequence
  Description of Artificial Sequence: Synthetic oligonucleotide
  Sense strand starting at position 3331 of SEQ ID NO: 317883
guccucgagauaugugaau

SEQ ID NO: 519822 - RNA, 19 nt, Artificial Sequence
  Description of Artificial Sequence: Synthetic oligonucleotide
  Antisense strand to SEQ ID NO: 519821
auucacauaucucgaggac

SEQ ID NO: 519823 - RNA, 19 nt, Artificial Sequence
  Description of Artificial Sequence: Synthetic oligonucleotide
  Sense strand starting at position 3337 of SEQ ID NO: 317883
gagauaugugaauggugga

SEQ ID NO: 519824 - RNA, 19 nt, Artificial Sequence
  Description of Artificial Sequence: Synthetic oligonucleotide
  Antisense strand to SEQ ID NO: 519823
uccaccauucacauaucuc

SEQ ID NO: 519825 - RNA, 19 nt, Artificial Sequence
  Description of Artificial Sequence: Synthetic oligonucleotide
  Sense strand starting at position 3352 of SEQ ID NO: 317883
uggaaugaaugcucucacu

SEQ ID NO: 519826 - RNA, 19 nt, Artificial Sequence
  Description of Artificial Sequence: Synthetic oligonucleotide
  Antisense strand to SEQ ID NO: 519825
agugagagcauucauucca

SEQ ID NO: 519827 - RNA, 19 nt, Artificial Sequence
  Description of Artificial Sequence: Synthetic oligonucleotide
  Sense strand starting at position 3485 of SEQ ID NO: 317883
uguuaaccguccuugauua

SEQ ID NO: 519828 - RNA, 19 nt, Artificial Sequence
  Description of Artificial Sequence: Synthetic oligonucleotide
  Antisense strand to SEQ ID NO: 519827
uaaucaaggacgguuaaca

SEQ ID NO: 519829 - RNA, 19 nt, Artificial Sequence
  Description of Artificial Sequence: Synthetic oligonucleotide
  Sense strand starting at position 3493 of SEQ ID NO: 317883
guccuugauuagcugguua

SEQ ID NO: 519830 - RNA, 19 nt, Artificial Sequence
  Description of Artificial Sequence: Synthetic oligonucleotide
  Antisense strand to SEQ ID NO: 519829
uaaccagcuaaucaaggac

SEQ ID NO: 519831 - RNA, 19 nt, Artificial Sequence
  Description of Artificial Sequence: Synthetic oligonucleotide
  Sense strand starting at position 3495 of SEQ ID NO: 317883
ccuugauuagcugguuauu

SEQ ID NO: 519832 - RNA, 19 nt, Artificial Sequence
  Description of Artificial Sequence: Synthetic oligonucleotide
  Antisense strand to SEQ ID NO: 519831
aauaaccagcuaaucaagg

SEQ ID NO: 519833 - RNA, 19 nt, Artificial Sequence
  Description of Artificial Sequence: Synthetic oligonucleotide
  Sense strand starting at position 3508 of SEQ ID NO: 317883
guuauuugguguaggguuu

SEQ ID NO: 519834 - RNA, 19 nt, Artificial Sequence
  Description of Artificial Sequence: Synthetic oligonucleotide
  Antisense strand to SEQ ID NO: 519833
aaacccuacaccaaauaac

SEQ ID NO: 519835 - RNA, 19 nt, Artificial Sequence
  Description of Artificial Sequence: Synthetic oligonucleotide
  Sense strand starting at position 3587 of SEQ ID NO: 317883
cugucucugccauaugaaa

SEQ ID NO: 519836 - RNA, 19 nt, Artificial Sequence
  Description of Artificial Sequence: Synthetic oligonucleotide
  Antisense strand to SEQ ID NO: 519835
uuucauauggcagagacag

SEQ ID NO: 519837 - RNA, 19 nt, Artificial Sequence
  Description of Artificial Sequence: Synthetic oligonucleotide
  Sense strand starting at position 3795 of SEQ ID NO: 317883
guaucuuuguggcuggcaa

SEQ ID NO: 519838 - RNA, 19 nt, Artificial Sequence
  Description of Artificial Sequence: Synthetic oligonucleotide
  Antisense strand to SEQ ID NO: 519837
uugccagccacaaagauac

SEQ ID NO: 519839 - RNA, 19 nt, Artificial Sequence
  Description of Artificial Sequence: Synthetic oligonucleotide
  Sense strand starting at position 3796 of SEQ ID NO: 317883
uaucuuuguggcuggcaaa

SEQ ID NO: 519840 - RNA, 19 nt, Artificial Sequence
  Description of Artificial Sequence: Synthetic oligonucleotide
  Antisense strand to SEQ ID NO: 519839
uuugccagccacaaagaua

SEQ ID NO: 519841 - RNA, 19 nt, Artificial Sequence
  Description of Artificial Sequence: Synthetic oligonucleotide
  Sense strand starting at position 3825 of SEQ ID NO: 317883
agaaguuucuggguaaugu

SEQ ID NO: 519842 - RNA, 19 nt, Artificial Sequence
  Description of Artificial Sequence: Synthetic oligonucleotide
  Antisense strand to SEQ ID NO: 519841
acauuacccagaaacuucu

SEQ ID NO: 519843 - RNA, 19 nt, Artificial Sequence
  Description of Artificial Sequence: Synthetic oligonucleotide
  Sense strand starting at position 3826 of SEQ ID NO: 317883
gaaguuucuggguaaugua

SEQ ID NO: 519844 - RNA, 19 nt, Artificial Sequence
  Description of Artificial Sequence: Synthetic oligonucleotide
  Antisense strand to SEQ ID NO: 519843
uacauuacccagaaacuuc

SEQ ID NO: 519845 - RNA, 19 nt, Artificial Sequence
  Description of Artificial Sequence: Synthetic oligonucleotide
  Sense strand starting at position 3863 of SEQ ID NO: 317883
gguuguaaccucuaauaag

SEQ ID NO: 519846 - RNA, 19 nt, Artificial Sequence
  Description of Artificial Sequence: Synthetic oligonucleotide
  Antisense strand to SEQ ID NO: 519845
cuuauuagagguuacaacc

SEQ ID NO: 519847 - RNA, 19 nt, Artificial Sequence
  Description of Artificial Sequence: Synthetic oligonucleotide
  Sense strand starting at position 3957 of SEQ ID NO: 317883
gggaaauuaucugccagaa

SEQ ID NO: 519848 - RNA, 19 nt, Artificial Sequence
  Description of Artificial Sequence: Synthetic oligonucleotide
  Antisense strand to SEQ ID NO: 519847
uucuggcagauaauuuccc

SEQ ID NO: 519849 - RNA, 19 nt, Artificial Sequence
  Description of Artificial Sequence: Synthetic oligonucleotide
  Sense strand starting at position 460 of SEQ ID NO: 317884
aguuguugugaaggaagga

SEQ ID NO: 519850 - RNA, 19 nt, Artificial Sequence
  Description of Artificial Sequence: Synthetic oligonucleotide
  Antisense strand to SEQ ID NO: 519849
uccuuccuucacaacaacu

SEQ ID NO: 519851 - RNA, 19 nt, Artificial Sequence
  Description of Artificial Sequence: Synthetic oligonucleotide
  Sense strand starting at position 506 of SEQ ID NO: 317884
gccugacaugcucaaugaa

SEQ ID NO: 519852 - RNA, 19 nt, Artificial Sequence
  Description of Artificial Sequence: Synthetic oligonucleotide
  Antisense strand to SEQ ID NO: 519851
uucauugagcaugucaggc

SEQ ID NO: 519853 - RNA, 19 nt, Artificial Sequence
  Description of Artificial Sequence: Synthetic oligonucleotide
  Sense strand starting at position 610 of SEQ ID NO: 317884
ccuuuaugggccugaaugu

SEQ ID NO: 519854 - RNA, 19 nt, Artificial Sequence
  Description of Artificial Sequence: Synthetic oligonucleotide
  Antisense strand to SEQ ID NO: 519853
acauucaggcccauaaagg

SEQ ID NO: 519855 - RNA, 19 nt, Artificial Sequence
  Description of Artificial Sequence: Synthetic oligonucleotide
  Sense strand starting at position 620 of SEQ ID NO: 317884
ccugaaugugcucaggauu

SEQ ID NO: 519856 - RNA, 19 nt, Artificial Sequence
  Description of Artificial Sequence: Synthetic oligonucleotide
  Antisense strand to SEQ ID NO: 519855
aauccugagcacauucagg

SEQ ID NO: 519857 - RNA, 19 nt, Artificial Sequence
  Description of Artificial Sequence: Synthetic oligonucleotide
  Sense strand starting at position 623 of SEQ ID NO: 317884
gaaugugcucaggauuccu

SEQ ID NO: 519858 - RNA, 19 nt, Artificial Sequence
  Description of Artificial Sequence: Synthetic oligonucleotide
  Antisense strand to SEQ ID NO: 519857
aggaauccugagcacauuc

SEQ ID NO: 519859 - RNA, 19 nt, Artificial Sequence
  Description of Artificial Sequence: Synthetic oligonucleotide
  Sense strand starting at position 665 of SEQ ID NO: 317884
aggaaaugcucugcacacu

SEQ ID NO: 519860 - RNA, 19 nt, Artificial Sequence
  Description of Artificial Sequence: Synthetic oligonucleotide
  Antisense strand to SEQ ID NO: 519859
agugugcagagcauuuccu

SEQ ID NO: 519861 - RNA, 19 nt, Artificial Sequence
  Description of Artificial Sequence: Synthetic oligonucleotide
  Sense strand starting at position 666 of SEQ ID NO: 317884
ggaaaugcucugcacacuu

SEQ ID NO: 519862 - RNA, 19 nt, Artificial Sequence
  Description of Artificial Sequence: Synthetic oligonucleotide
  Antisense strand to SEQ ID NO: 519861
aagugugcagagcauuucc

SEQ ID NO: 519863 - RNA, 19 nt, Artificial Sequence
  Description of Artificial Sequence: Synthetic oligonucleotide
  Sense strand starting at position 760 of SEQ ID NO: 317884
uggcacuugccugggagaa

SEQ ID NO: 519864 - RNA, 19 nt, Artificial Sequence
  Description of Artificial Sequence: Synthetic oligonucleotide
  Antisense strand to SEQ ID NO: 519863
uucucccaggcaagugcca

SEQ ID NO: 519865 - RNA, 19 nt, Artificial Sequence
  Description of Artificial Sequence: Synthetic oligonucleotide
  Sense strand starting at position 761 of SEQ ID NO: 317884
ggcacuugccugggagaaa

SEQ ID NO: 519866 - RNA, 19 nt, Artificial Sequence
  Description of Artificial Sequence: Synthetic oligonucleotide
  Antisense strand to SEQ ID NO: 519865
uuucucccaggcaagugcc

SEQ ID NO: 519867 - RNA, 19 nt, Artificial Sequence
  Description of Artificial Sequence: Synthetic oligonucleotide
  Sense strand starting at position 965 of SEQ ID NO: 317884
cugacaucuccggaagcca

SEQ ID NO: 519868 - RNA, 19 nt, Artificial Sequence
  Description of Artificial Sequence: Synthetic oligonucleotide
  Antisense strand to SEQ ID NO: 519867
uggcuuccggagaugucag

SEQ ID NO: 519869 - RNA, 19 nt, Artificial Sequence
  Description of Artificial Sequence: Synthetic oligonucleotide
  Sense strand starting at position 1223 of SEQ ID NO: 317884
caacucauuggcuggcaga

SEQ ID NO: 519870 - RNA, 19 nt, Artificial Sequence
  Description of Artificial Sequence: Synthetic oligonucleotide
  Antisense strand to SEQ ID NO: 519869
ucugccagccaaugaguug

SEQ ID NO: 519871 - RNA, 19 nt, Artificial Sequence
  Description of Artificial Sequence: Synthetic oligonucleotide
  Sense strand starting at position 1244 of SEQ ID NO: 317884
cugucagagaggugccauu

SEQ ID NO: 519872 - RNA, 19 nt, Artificial Sequence
  Description of Artificial Sequence: Synthetic oligonucleotide
  Antisense strand to SEQ ID NO: 519871
aauggcaccucucugacag

SEQ ID NO: 519873 - RNA, 19 nt, Artificial Sequence
  Description of Artificial Sequence: Synthetic oligonucleotide
  Sense strand starting at position 1309 of SEQ ID NO: 317884
ugagaauguuaagcacauc

SEQ ID NO: 519874 - RNA, 19 nt, Artificial Sequence
  Description of Artificial Sequence: Synthetic oligonucleotide
  Antisense strand to SEQ ID NO: 519873
gaugugcuuaacauucuca

SEQ ID NO: 519875 - RNA, 19 nt, Artificial Sequence
  Description of Artificial Sequence: Synthetic oligonucleotide
  Sense strand starting at position 1321 of SEQ ID NO: 317884
gcacauccuccuuggugaa

SEQ ID NO: 519876 - RNA, 19 nt, Artificial Sequence
  Description of Artificial Sequence: Synthetic oligonucleotide
  Antisense strand to SEQ ID NO: 519875
uucaccaaggaggaugugc

SEQ ID NO: 519877 - RNA, 19 nt, Artificial Sequence
  Description of Artificial Sequence: Synthetic oligonucleotide
  Sense strand starting at position 1323 of SEQ ID NO: 317884
acauccuccuuggugaaua

SEQ ID NO: 519878 - RNA, 19 nt, Artificial Sequence
  Description of Artificial Sequence: Synthetic oligonucleotide
  Antisense strand to SEQ ID NO: 519877
uauucaccaaggaggaugu

SEQ ID NO: 519879 - RNA, 19 nt, Artificial Sequence
  Description of Artificial Sequence: Synthetic oligonucleotide
  Sense strand starting at position 1398 of SEQ ID NO: 317884
uaggaauuccuagguugcu

SEQ ID NO: 519880 - RNA, 19 nt, Artificial Sequence
  Description of Artificial Sequence: Synthetic oligonucleotide
  Antisense strand to SEQ ID NO: 519879
agcaaccuaggaauuccua

SEQ ID NO: 519881 - RNA, 19 nt, Artificial Sequence
  Description of Artificial Sequence: Synthetic oligonucleotide
  Sense strand starting at position 1399 of SEQ ID NO: 317884
aggaauuccuagguugcua

SEQ ID NO: 519882 - RNA, 19 nt, Artificial Sequence
  Description of Artificial Sequence: Synthetic oligonucleotide
  Antisense strand to SEQ ID NO: 519881
uagcaaccuaggaauuccu

SEQ ID NO: 519883 - RNA, 19 nt, Artificial Sequence
  Description of Artificial Sequence: Synthetic oligonucleotide
  Sense strand starting at position 1411 of SEQ ID NO: 317884
guugcuacuccucauguga

SEQ ID NO: 519884 - RNA, 19 nt, Artificial Sequence
  Description of Artificial Sequence: Synthetic oligonucleotide
  Antisense strand to SEQ ID NO: 519883
ucacaugaggaguagcaac

SEQ ID NO: 519885 - RNA, 19 nt, Artificial Sequence
  Description of Artificial Sequence: Synthetic oligonucleotide
  Sense strand starting at position 1455 of SEQ ID NO: 317884
gcccauggugcagaggauu

SEQ ID NO: 519886 - RNA, 19 nt, Artificial Sequence
  Description of Artificial Sequence: Synthetic oligonucleotide
  Antisense strand to SEQ ID NO: 519885
aauccucugcaccaugggc

SEQ ID NO: 519887 - RNA, 19 nt, Artificial Sequence
  Description of Artificial Sequence: Synthetic oligonucleotide
  Sense strand starting at position 1467 of SEQ ID NO: 317884
gaggauuuguguuagaaca

SEQ ID NO: 519888 - RNA, 19 nt, Artificial Sequence
  Description of Artificial Sequence: Synthetic oligonucleotide
  Antisense strand to SEQ ID NO: 519887
uguucuaacacaaauccuc

SEQ ID NO: 519889 - RNA, 19 nt, Artificial Sequence
  Description of Artificial Sequence: Synthetic oligonucleotide
  Sense strand starting at position 1577 of SEQ ID NO: 317884
ugggucuugcacuaacaca

SEQ ID NO: 519890 - RNA, 19 nt, Artificial Sequence
  Description of Artificial Sequence: Synthetic oligonucleotide
  Antisense strand to SEQ ID NO: 519889
uguguuagugcaagaccca

SEQ ID NO: 519891 - RNA, 19 nt, Artificial Sequence
  Description of Artificial Sequence: Synthetic oligonucleotide
  Sense strand starting at position 1648 of SEQ ID NO: 317884
aggacaauuucccacaaga

SEQ ID NO: 519892 - RNA, 19 nt, Artificial Sequence
  Description of Artificial Sequence: Synthetic oligonucleotide
  Antisense strand to SEQ ID NO: 519891
ucuugugggaaauuguccu

SEQ ID NO: 519893 - RNA, 19 nt, Artificial Sequence
  Description of Artificial Sequence: Synthetic oligonucleotide
  Sense strand starting at position 1733 of SEQ ID NO: 317884
auggaaaggcucuggaauu

SEQ ID NO: 519894 - RNA, 19 nt, Artificial Sequence
  Description of Artificial Sequence: Synthetic oligonucleotide
  Antisense strand to SEQ ID NO: 519893
aauuccagagccuuuccau

SEQ ID NO: 519895 - RNA, 19 nt, Artificial Sequence
  Description of Artificial Sequence: Synthetic oligonucleotide
  Sense strand starting at position 1776 of SEQ ID NO: 317884
gaaagcaugugucuccuga

SEQ ID NO: 519896 - RNA, 19 nt, Artificial Sequence
  Description of Artificial Sequence: Synthetic oligonucleotide
  Antisense strand to SEQ ID NO: 519895
ucaggagacacaugcuuuc

SEQ ID NO: 519897 - RNA, 19 nt, Artificial Sequence
  Description of Artificial Sequence: Synthetic oligonucleotide
  Sense strand starting at position 1778 of SEQ ID NO: 317884
aagcaugugucuccugaga

SEQ ID NO: 519898 - RNA, 19 nt, Artificial Sequence
  Description of Artificial Sequence: Synthetic oligonucleotide
  Antisense strand to SEQ ID NO: 519897
ucucaggagacacaugcuu

SEQ ID NO: 519899 - RNA, 19 nt, Artificial Sequence
  Description of Artificial Sequence: Synthetic oligonucleotide
  Sense strand starting at position 1962 of SEQ ID NO: 317884
aguggaggcucuguccaua

SEQ ID NO: 519900 - RNA, 19 nt, Artificial Sequence
  Description of Artificial Sequence: Synthetic oligonucleotide
  Antisense strand to SEQ ID NO: 519899
uauggacagagccuccacu

SEQ ID NO: 519901 - RNA, 19 nt, Artificial Sequence
  Description of Artificial Sequence: Synthetic oligonucleotide
  Sense strand starting at position 2304 of SEQ ID NO: 317884
gguucuccuuucccaugau

SEQ ID NO: 519902 - RNA, 19 nt, Artificial Sequence
  Description of Artificial Sequence: Synthetic oligonucleotide
  Antisense strand to SEQ ID NO: 519901
aucaugggaaaggagaacc

SEQ ID NO: 519903 - RNA, 19 nt, Artificial Sequence
  Description of Artificial Sequence: Synthetic oligonucleotide
  Sense strand starting at position 2396 of SEQ ID NO: 317884
cagggaucccaaugcagau

SEQ ID NO: 519904 - RNA, 19 nt, Artificial Sequence
  Description of Artificial Sequence: Synthetic oligonucleotide
  Antisense strand to SEQ ID NO: 519903
aucugcauugggaucccug

SEQ ID NO: 519905 - RNA, 19 nt, Artificial Sequence
  Description of Artificial Sequence: Synthetic oligonucleotide
  Sense strand starting at position 2438 of SEQ ID NO: 317884
aggcccuauacgcaugauu

SEQ ID NO: 519906 - RNA, 19 nt, Artificial Sequence
  Description of Artificial Sequence: Synthetic oligonucleotide
  Antisense strand to SEQ ID NO: 519905
aaucaugcguauagggccu

SEQ ID NO: 519907 - RNA, 19 nt, Artificial Sequence
  Description of Artificial Sequence: Synthetic oligonucleotide
  Sense strand starting at position 2441 of SEQ ID NO: 317884
cccuauacgcaugauuauu

SEQ ID NO: 519908 - RNA, 19 nt, Artificial Sequence
  Description of Artificial Sequence: Synthetic oligonucleotide
  Antisense strand to SEQ ID NO: 519907
aauaaucaugcguauaggg

SEQ ID NO: 519909 - RNA, 19 nt, Artificial Sequence
  Description of Artificial Sequence: Synthetic oligonucleotide
  Sense strand starting at position 2443 of SEQ ID NO: 317884
cuauacgcaugauuauuau

SEQ ID NO: 519910 - RNA, 19 nt, Artificial Sequence
  Description of Artificial Sequence: Synthetic oligonucleotide
  Antisense strand to SEQ ID NO: 519909
auaauaaucaugcguauag

SEQ ID NO: 519911 - RNA, 19 nt, Artificial Sequence
  Description of Artificial Sequence: Synthetic oligonucleotide
  Sense strand starting at position 2826 of SEQ ID NO: 317884
cuauauugcucagucugga

SEQ ID NO: 519912 - RNA, 19 nt, Artificial Sequence
  Description of Artificial Sequence: Synthetic oligonucleotide
  Antisense strand to SEQ ID NO: 519911
uccagacugagcaauauag

SEQ ID NO: 519913 - RNA, 19 nt, Artificial Sequence
  Description of Artificial Sequence: Synthetic oligonucleotide
  Sense strand starting at position 3090 of SEQ ID NO: 317884
ucaauauuccuaggaccug

SEQ ID NO: 519914 - RNA, 19 nt, Artificial Sequence
  Description of Artificial Sequence: Synthetic oligonucleotide
  Antisense strand to SEQ ID NO: 519913
cagguccuaggaauauuga

SEQ ID NO: 519915 - RNA, 19 nt, Artificial Sequence
  Description of Artificial Sequence: Synthetic oligonucleotide
  Sense strand starting at position 3128 of SEQ ID NO: 317884
gcagguccucagcacauau

SEQ ID NO: 519916 - RNA, 19 nt, Artificial Sequence
  Description of Artificial Sequence: Synthetic oligonucleotide
  Antisense strand to SEQ ID NO: 519915
auaugugcugaggaccugc

SEQ ID NO: 519917 - RNA, 19 nt, Artificial Sequence
  Description of Artificial Sequence: Synthetic oligonucleotide
  Sense strand starting at position 3417 of SEQ ID NO: 317884
cuaugaucagagugagacu

SEQ ID NO: 519918 - RNA, 19 nt, Artificial Sequence
  Description of Artificial Sequence: Synthetic oligonucleotide
  Antisense strand to SEQ ID NO: 519917
agucucacucugaucauag

SEQ ID NO: 519919 - RNA, 19 nt, Artificial Sequence
  Description of Artificial Sequence: Synthetic oligonucleotide
  Sense strand starting at position 3478 of SEQ ID NO: 317884
agaggaaugucagaaacaa

SEQ ID NO: 519920 - RNA, 19 nt, Artificial Sequence
  Description of Artificial Sequence: Synthetic oligonucleotide
  Antisense strand to SEQ ID NO: 519919
uuguuucugacauuccucu

SEQ ID NO: 519921 - RNA, 19 nt, Artificial Sequence
  Description of Artificial Sequence: Synthetic oligonucleotide
  Sense strand starting at position 3553 of SEQ ID NO: 317884
gccuuccagucuuugacaa

SEQ ID NO: 519922 - RNA, 19 nt, Artificial Sequence
  Description of Artificial Sequence: Synthetic oligonucleotide
  Antisense strand to SEQ ID NO: 519921
uugucaaagacuggaaggc

SEQ ID NO: 519923 - RNA, 19 nt, Artificial Sequence
  Description of Artificial Sequence: Synthetic oligonucleotide
  Sense strand starting at position 3560 of SEQ ID NO: 317884
agucuuugacaauaugcau

SEQ ID NO: 519924 - RNA, 19 nt, Artificial Sequence
  Description of Artificial Sequence: Synthetic oligonucleotide
  Antisense strand to SEQ ID NO: 519923
augcauauugucaaagacu

SEQ ID NO: 519925 - RNA, 19 nt, Artificial Sequence
  Description of Artificial Sequence: Synthetic oligonucleotide
  Sense strand starting at position 3675 of SEQ ID NO: 317884
acuggaaugcaguguaaga

SEQ ID NO: 519926 - RNA, 19 nt, Artificial Sequence
  Description of Artificial Sequence: Synthetic oligonucleotide
  Antisense strand to SEQ ID NO: 519925
ucuuacacugcauuccagu

SEQ ID NO: 519927 - RNA, 19 nt, Artificial Sequence
  Description of Artificial Sequence: Synthetic oligonucleotide
  Sense strand starting at position 3955 of SEQ ID NO: 317884
uugaaacagucacaagaaa

SEQ ID NO: 519928 - RNA, 19 nt, Artificial Sequence
  Description of Artificial Sequence: Synthetic oligonucleotide
  Antisense strand to SEQ ID NO: 519927
uuucuugugacuguuucaa

SEQ ID NO: 519929 - RNA, 19 nt, Artificial Sequence
  Description of Artificial Sequence: Synthetic oligonucleotide
  Sense strand starting at position 103 of SEQ ID NO: 317885
cgaacagucgcccaagagu

SEQ ID NO: 519930 - RNA, 19 nt, Artificial Sequence
  Description of Artificial Sequence: Synthetic oligonucleotide
  Antisense strand to SEQ ID NO: 519929
acucuugggcgacuguucg

SEQ ID NO: 519931 - RNA, 19 nt, Artificial Sequence
  Description of Artificial Sequence: Synthetic oligonucleotide
  Sense strand starting at position 111 of SEQ ID NO: 317885
cgcccaagaguccacaauu

SEQ ID NO: 519932 - RNA, 19 nt, Artificial Sequence
  Description of Artificial Sequence: Synthetic oligonucleotide
  Antisense strand to SEQ ID NO: 519931
aauuguggacucuugggcg

SEQ ID NO: 519933 - RNA, 19 nt, Artificial Sequence
  Description of Artificial Sequence: Synthetic oligonucleotide
  Sense strand starting at position 518 of SEQ ID NO: 317885
cuggaagucgccuaaacua

SEQ ID NO: 519934 - RNA, 19 nt, Artificial Sequence
  Description of Artificial Sequence: Synthetic oligonucleotide
  Antisense strand to SEQ ID NO: 519933
uaguuuaggcgacuuccag

SEQ ID NO: 519935 - RNA, 19 nt, Artificial Sequence
  Description of Artificial Sequence: Synthetic oligonucleotide
  Sense strand starting at position 733 of SEQ ID NO: 317885
aagaguuaacacugguacu

SEQ ID NO: 519936 - RNA, 19 nt, Artificial Sequence
  Description of Artificial Sequence: Synthetic oligonucleotide
  Antisense strand to SEQ ID NO: 519935
aguaccaguguuaacucuu

SEQ ID NO: 519937 - RNA, 19 nt, Artificial Sequence
  Description of Artificial Sequence: Synthetic oligonucleotide
  Sense strand starting at position 864 of SEQ ID NO: 317885
gcugaagugaccugugaga

SEQ ID NO: 519938 - RNA, 19 nt, Artificial Sequence
  Description of Artificial Sequence: Synthetic oligonucleotide
  Antisense strand to SEQ ID NO: 519937
ucucacaggucacuucagc

SEQ ID NO: 519939 - RNA, 19 nt, Artificial Sequence
  Description of Artificial Sequence: Synthetic oligonucleotide
  Sense strand starting at position 1632 of SEQ ID NO: 317885
uuuccucagcgcuuuguua

SEQ ID NO: 519940 - RNA, 19 nt, Artificial Sequence
  Description of Artificial Sequence: Synthetic oligonucleotide
  Antisense strand to SEQ ID NO: 519939
uaacaaagcgcugaggaaa

SEQ ID NO: 519941 - RNA, 19 nt, Artificial Sequence
  Description of Artificial Sequence: Synthetic oligonucleotide
  Sense strand starting at position 1633 of SEQ ID NO: 317885
uuccucagcgcuuuguuaa

SEQ ID NO: 519942 - RNA, 19 nt, Artificial Sequence
  Description of Artificial Sequence: Synthetic oligonucleotide
  Antisense strand to SEQ ID NO: 519941
uuaacaaagcgcugaggaa

SEQ ID NO: 519943 - RNA, 19 nt, Artificial Sequence
  Description of Artificial Sequence: Synthetic oligonucleotide
  Sense strand starting at position 1668 of SEQ ID NO: 317885
ggcgagaguggugacuaaa

SEQ ID NO: 519944 - RNA, 19 nt, Artificial Sequence
  Description of Artificial Sequence: Synthetic oligonucleotide
  Antisense strand to SEQ ID NO: 519943
uuuagucaccacucucgcc

SEQ ID NO: 519945 - RNA, 19 nt, Artificial Sequence
  Description of Artificial Sequence: Synthetic oligonucleotide
  Sense strand starting at position 1919 of SEQ ID NO: 317885
gggcuucugacuuggagaa

SEQ ID NO: 519946 - RNA, 19 nt, Artificial Sequence
  Description of Artificial Sequence: Synthetic oligonucleotide
  Antisense strand to SEQ ID NO: 519945
uucuccaagucagaagccc

SEQ ID NO: 519947 - RNA, 19 nt, Artificial Sequence
  Description of Artificial Sequence: Synthetic oligonucleotide
  Sense strand starting at position 1920 of SEQ ID NO: 317885
ggcuucugacuuggagaac

SEQ ID NO: 519948 - RNA, 19 nt, Artificial Sequence
  Description of Artificial Sequence: Synthetic oligonucleotide
  Antisense strand to SEQ ID NO: 519947
guucuccaagucagaagcc

SEQ ID NO: 519949 - RNA, 19 nt, Artificial Sequence
  Description of Artificial Sequence: Synthetic oligonucleotide
  Sense strand starting at position 2326 of SEQ ID NO: 317885
gccugagagucccuuggau

SEQ ID NO: 519950 - RNA, 19 nt, Artificial Sequence
  Description of Artificial Sequence: Synthetic oligonucleotide
  Antisense strand to SEQ ID NO: 519949
auccaagggacucucaggc

SEQ ID NO: 519951 - RNA, 19 nt, Artificial Sequence
  Description of Artificial Sequence: Synthetic oligonucleotide
  Sense strand starting at position 2328 of SEQ ID NO: 317885
cugagagucccuuggauuc

SEQ ID NO: 519952 - RNA, 19 nt, Artificial Sequence
  Description of Artificial Sequence: Synthetic oligonucleotide
  Antisense strand to SEQ ID NO: 519951
gaauccaagggacucucag

SEQ ID NO: 519953 - RNA, 19 nt, Artificial Sequence
  Description of Artificial Sequence: Synthetic oligonucleotide
  Sense strand starting at position 2646 of SEQ ID NO: 317885
gugaguaggagacaugcau

SEQ ID NO: 519954 - RNA, 19 nt, Artificial Sequence
  Description of Artificial Sequence: Synthetic oligonucleotide
  Antisense strand to SEQ ID NO: 519953
augcaugucuccuacucac

SEQ ID NO: 519955 - RNA, 19 nt, Artificial Sequence
  Description of Artificial Sequence: Synthetic oligonucleotide
  Sense strand starting at position 2814 of SEQ ID NO: 317885
aguggaagugauugaacca

SEQ ID NO: 519956 - RNA, 19 nt, Artificial Sequence
  Description of Artificial Sequence: Synthetic oligonucleotide
  Antisense strand to SEQ ID NO: 519955
ugguucaaucacuuccacu

SEQ ID NO: 519957 - RNA, 19 nt, Artificial Sequence
  Description of Artificial Sequence: Synthetic oligonucleotide
  Sense strand starting at position 2878 of SEQ ID NO: 317885
cgguuagaaugauugcuua

SEQ ID NO: 519958 - RNA, 19 nt, Artificial Sequence
  Description of Artificial Sequence: Synthetic oligonucleotide
  Antisense strand to SEQ ID NO: 519957
uaagcaaucauucuaaccg

SEQ ID NO: 519959 - RNA, 19 nt, Artificial Sequence
  Description of Artificial Sequence: Synthetic oligonucleotide
  Sense strand starting at position 2881 of SEQ ID NO: 317885
uuagaaugauugcuuauug

SEQ ID NO: 519960 - RNA, 19 nt, Artificial Sequence
  Description of Artificial Sequence: Synthetic oligonucleotide
  Antisense strand to SEQ ID NO: 519959
caauaagcaaucauucuaa

SEQ ID NO: 519961 - RNA, 19 nt, Artificial Sequence
  Description of Artificial Sequence: Synthetic oligonucleotide
  Sense strand starting at position 2882 of SEQ ID NO: 317885
uagaaugauugcuuauugu

SEQ ID NO: 519962 - RNA, 19 nt, Artificial Sequence
  Description of Artificial Sequence: Synthetic oligonucleotide
  Antisense strand to SEQ ID NO: 519961
acaauaagcaaucauucua

SEQ ID NO: 519963 - RNA, 19 nt, Artificial Sequence
  Description of Artificial Sequence: Synthetic oligonucleotide
  Sense strand starting at position 2890 of SEQ ID NO: 317885
uugcuuauuguacauggau

SEQ ID NO: 519964 - RNA, 19 nt, Artificial Sequence
  Description of Artificial Sequence: Synthetic oligonucleotide
  Antisense strand to SEQ ID NO: 519963
auccauguacaauaagcaa

SEQ ID NO: 519965 - RNA, 19 nt, Artificial Sequence
  Description of Artificial Sequence: Synthetic oligonucleotide
  Sense strand starting at position 3089 of SEQ ID NO: 317885
agaguugaaaggugaaucu

SEQ ID NO: 519966 - RNA, 19 nt, Artificial Sequence
  Description of Artificial Sequence: Synthetic oligonucleotide
  Antisense strand to SEQ ID NO: 519965
agauucaccuuucaacucu

SEQ ID NO: 519967 - RNA, 19 nt, Artificial Sequence
  Description of Artificial Sequence: Synthetic oligonucleotide
  Sense strand starting at position 3098 of SEQ ID NO: 317885
aggugaaucuacuaagaaa

SEQ ID NO: 519968 - RNA, 19 nt, Artificial Sequence
  Description of Artificial Sequence: Synthetic oligonucleotide
  Antisense strand to SEQ ID NO: 519967
uuucuuaguagauucaccu

SEQ ID NO: 519969 - RNA, 19 nt, Artificial Sequence
  Description of Artificial Sequence: Synthetic oligonucleotide
  Sense strand starting at position 3117 of SEQ ID NO: 317885
agaauaacagagugcaauu

SEQ ID NO: 519970 - RNA, 19 nt, Artificial Sequence
  Description of Artificial Sequence: Synthetic oligonucleotide
  Antisense strand to SEQ ID NO: 519969
aauugcacucuguuauucu

SEQ ID NO: 519971 - RNA, 19 nt, Artificial Sequence
  Description of Artificial Sequence: Synthetic oligonucleotide
  Sense strand starting at position 3129 of SEQ ID NO: 317885
ugcaauuagccauggaacu

SEQ ID NO: 519972 - RNA, 19 nt, Artificial Sequence
  Description of Artificial Sequence: Synthetic oligonucleotide
  Antisense strand to SEQ ID NO: 519971
aguuccauggcuaauugca

SEQ ID NO: 519973 - RNA, 19 nt, Artificial Sequence
  Description of Artificial Sequence: Synthetic oligonucleotide
  Sense strand starting at position 3130 of SEQ ID NO: 317885
gcaauuagccauggaacua

SEQ ID NO: 519974 - RNA, 19 nt, Artificial Sequence
  Description of Artificial Sequence: Synthetic oligonucleotide
  Antisense strand to SEQ ID NO: 519973
uaguuccauggcuaauugc

SEQ ID NO: 519975 - RNA, 19 nt, Artificial Sequence
  Description of Artificial Sequence: Synthetic oligonucleotide
  Sense strand starting at position 3172 of SEQ ID NO: 317885
ggaugaguccuuuaaaggu

SEQ ID NO: 519976 - RNA, 19 nt, Artificial Sequence
  Description of Artificial Sequence: Synthetic oligonucleotide
  Antisense strand to SEQ ID NO: 519975
accuuuaaaggacucaucc

SEQ ID NO: 519977 - RNA, 19 nt, Artificial Sequence
  Description of Artificial Sequence: Synthetic oligonucleotide
  Sense strand starting at position 3176 of SEQ ID NO: 317885
gaguccuuuaaaggugaga

SEQ ID NO: 519978 - RNA, 19 nt, Artificial Sequence
  Description of Artificial Sequence: Synthetic oligonucleotide
  Antisense strand to SEQ ID NO: 519977
ucucaccuuuaaaggacuc

SEQ ID NO: 519979 - RNA, 19 nt, Artificial Sequence
  Description of Artificial Sequence: Synthetic oligonucleotide
  Sense strand starting at position 3178 of SEQ ID NO: 317885
guccuuuaaaggugagaug

SEQ ID NO: 519980 - RNA, 19 nt, Artificial Sequence
  Description of Artificial Sequence: Synthetic oligonucleotide
  Antisense strand to SEQ ID NO: 519979
caucucaccuuuaaaggac

SEQ ID NO: 519981 - RNA, 19 nt, Artificial Sequence
  Description of Artificial Sequence: Synthetic oligonucleotide
  Sense strand starting at position 3190 of SEQ ID NO: 317885
ugagaugaguccuuuaaac

SEQ ID NO: 519982 - RNA, 19 nt, Artificial Sequence
  Description of Artificial Sequence: Synthetic oligonucleotide
  Antisense strand to SEQ ID NO: 519981
guuuaaaggacucaucuca

SEQ ID NO: 519983 - RNA, 19 nt, Artificial Sequence
  Description of Artificial Sequence: Synthetic oligonucleotide
  Sense strand starting at position 3246 of SEQ ID NO: 317885
ugaagaaugcgaggugaau

SEQ ID NO: 519984 - RNA, 19 nt, Artificial Sequence
  Description of Artificial Sequence: Synthetic oligonucleotide
  Antisense strand to SEQ ID NO: 519983
auucaccucgcauucuuca

SEQ ID NO: 519985 - RNA, 19 nt, Artificial Sequence
  Description of Artificial Sequence: Synthetic oligonucleotide
  Sense strand starting at position 3258 of SEQ ID NO: 317885
ggugaauggaaccguaaug

SEQ ID NO: 519986 - RNA, 19 nt, Artificial Sequence
  Description of Artificial Sequence: Synthetic oligonucleotide
  Antisense strand to SEQ ID NO: 519985
cauuacgguuccauucacc

SEQ ID NO: 519987 - RNA, 19 nt, Artificial Sequence
  Description of Artificial Sequence: Synthetic oligonucleotide
  Sense strand starting at position 3292 of SEQ ID NO: 317885
gaggguuuaagguauugua

SEQ ID NO: 519988 - RNA, 19 nt, Artificial Sequence
  Description of Artificial Sequence: Synthetic oligonucleotide
  Antisense strand to SEQ ID NO: 519987
uacaauaccuuaaacccuc

SEQ ID NO: 519989 - RNA, 19 nt, Artificial Sequence
  Description of Artificial Sequence: Synthetic oligonucleotide
  Sense strand starting at position 3302 of SEQ ID NO: 317885
gguauuguauaacugacaa

SEQ ID NO: 519990 - RNA, 19 nt, Artificial Sequence
  Description of Artificial Sequence: Synthetic oligonucleotide
  Antisense strand to SEQ ID NO: 519989
uugucaguuauacaauacc

SEQ ID NO: 519991 - RNA, 19 nt, Artificial Sequence
  Description of Artificial Sequence: Synthetic oligonucleotide
  Sense strand starting at position 3508 of SEQ ID NO: 317885
gacaguauuguccagaguu

SEQ ID NO: 519992 - RNA, 19 nt, Artificial Sequence
  Description of Artificial Sequence: Synthetic oligonucleotide
  Antisense strand to SEQ ID NO: 519991
aacucuggacaauacuguc

SEQ ID NO: 519993 - RNA, 19 nt, Artificial Sequence
  Description of Artificial Sequence: Synthetic oligonucleotide
  Sense strand starting at position 3510 of SEQ ID NO: 317885
caguauuguccagaguugu

SEQ ID NO: 519994 - RNA, 19 nt, Artificial Sequence
  Description of Artificial Sequence: Synthetic oligonucleotide
  Antisense strand to SEQ ID NO: 519993
acaacucuggacaauacug

SEQ ID NO: 519995 - RNA, 19 nt, Artificial Sequence
  Description of Artificial Sequence: Synthetic oligonucleotide
  Sense strand starting at position 3523 of SEQ ID NO: 317885
aguuguagcaaagauguuu

SEQ ID NO: 519996 - RNA, 19 nt, Artificial Sequence
  Description of Artificial Sequence: Synthetic oligonucleotide
  Antisense strand to SEQ ID NO: 519995
aaacaucuuugcuacaacu

SEQ ID NO: 519997 - RNA, 19 nt, Artificial Sequence
  Description of Artificial Sequence: Synthetic oligonucleotide
  Sense strand starting at position 3723 of SEQ ID NO: 317885
aaaccagucucucugggau

SEQ ID NO: 519998 - RNA, 19 nt, Artificial Sequence
  Description of Artificial Sequence: Synthetic oligonucleotide
  Antisense strand to SEQ ID NO: 519997
aucccagagagacugguuu

SEQ ID NO: 519999 - RNA, 19 nt, Artificial Sequence
  Description of Artificial Sequence: Synthetic oligonucleotide
  Sense strand starting at position 3729 of SEQ ID NO: 317885
gucucucugggaugugaua

SEQ ID NO: 520000 - RNA, 19 nt, Artificial Sequence
  Description of Artificial Sequence: Synthetic oligonucleotide
  Antisense strand to SEQ ID NO: 519999
uaucacaucccagagagac

SEQ ID NO: 520001 - RNA, 19 nt, Artificial Sequence
  Description of Artificial Sequence: Synthetic oligonucleotide
  Sense strand starting at position 3731 of SEQ ID NO: 317885
cucucugggaugugauauu

SEQ ID NO: 520002 - RNA, 19 nt, Artificial Sequence
  Description of Artificial Sequence: Synthetic oligonucleotide
  Antisense strand to SEQ ID NO: 520001
aauaucacaucccagagag

SEQ ID NO: 520003 - RNA, 19 nt, Artificial Sequence
  Description of Artificial Sequence: Synthetic oligonucleotide
  Sense strand starting at position 3796 of SEQ ID NO: 317885
guuauucccuguuuauuuc

SEQ ID NO: 520004 - RNA, 19 nt, Artificial Sequence
  Description of Artificial Sequence: Synthetic oligonucleotide
  Antisense strand to SEQ ID NO: 520003
gaaauaaacagggaauaac

SEQ ID NO: 520005 - RNA, 19 nt, Artificial Sequence
  Description of Artificial Sequence: Synthetic oligonucleotide
  Sense strand starting at position 3822 of SEQ ID NO: 317885
uugauaguauuugaccuua

SEQ ID NO: 520006 - RNA, 19 nt, Artificial Sequence
  Description of Artificial Sequence: Synthetic oligonucleotide
  Antisense strand to SEQ ID NO: 520005
uaaggucaaauacuaucaa

SEQ ID NO: 520007 - RNA, 19 nt, Artificial Sequence
  Description of Artificial Sequence: Synthetic oligonucleotide
  Sense strand starting at position 3833 of SEQ ID NO: 317885
ugaccuuaaugagcauauu

SEQ ID NO: 520008 - RNA, 19 nt, Artificial Sequence
  Description of Artificial Sequence: Synthetic oligonucleotide
  Antisense strand to SEQ ID NO: 520007
aauaugcucauuaagguca

SEQ ID NO: 520009 - RNA, 19 nt, Artificial Sequence
  Description of Artificial Sequence: Synthetic oligonucleotide
  Sense strand starting at position 9 of SEQ ID NO: 317886
augugcaacuuaguaauua

SEQ ID NO: 520010 - RNA, 19 nt, Artificial Sequence
  Description of Artificial Sequence: Synthetic oligonucleotide
  Antisense strand to SEQ ID NO: 520009
uaauuacuaaguugcacau

SEQ ID NO: 520011 - RNA, 19 nt, Artificial Sequence
  Description of Artificial Sequence: Synthetic oligonucleotide
  Sense strand starting at position 550 of SEQ ID NO: 317886
gagguuaccagggagcuua

SEQ ID NO: 520012 - RNA, 19 nt, Artificial Sequence
  Description of Artificial Sequence: Synthetic oligonucleotide
  Antisense strand to SEQ ID NO: 520011
uaagcucccugguaaccuc

SEQ ID NO: 520013 - RNA, 19 nt, Artificial Sequence
  Description of Artificial Sequence: Synthetic oligonucleotide
  Sense strand starting at position 703 of SEQ ID NO: 317886
ggcaaugcacuguacauaa

SEQ ID NO: 520014 - RNA, 19 nt, Artificial Sequence
  Description of Artificial Sequence: Synthetic oligonucleotide
  Antisense strand to SEQ ID NO: 520013
uuauguacagugcauugcc

SEQ ID NO: 520015 - RNA, 19 nt, Artificial Sequence
  Description of Artificial Sequence: Synthetic oligonucleotide
  Sense strand starting at position 714 of SEQ ID NO: 317886
guacauaaaucucuaugua

SEQ ID NO: 520016 - RNA, 19 nt, Artificial Sequence
  Description of Artificial Sequence: Synthetic oligonucleotide
  Antisense strand to SEQ ID NO: 520015
uacauagagauuuauguac

SEQ ID NO: 520017 - RNA, 19 nt, Artificial Sequence
  Description of Artificial Sequence: Synthetic oligonucleotide
  Sense strand starting at position 736 of SEQ ID NO: 317886
agagaaagaagguguucuu

SEQ ID NO: 520018 - RNA, 19 nt, Artificial Sequence
  Description of Artificial Sequence: Synthetic oligonucleotide
  Antisense strand to SEQ ID NO: 520017
aagaacaccuucuuucucu

SEQ ID NO: 520019 - RNA, 19 nt, Artificial Sequence
  Description of Artificial Sequence: Synthetic oligonucleotide
  Sense strand starting at position 810 of SEQ ID NO: 317886
cuuacucacggaugacauu

SEQ ID NO: 520020 - RNA, 19 nt, Artificial Sequence
  Description of Artificial Sequence: Synthetic oligonucleotide
  Antisense strand to SEQ ID NO: 520019
aaugucauccgugaguaag

SEQ ID NO: 520021 - RNA, 19 nt, Artificial Sequence
  Description of Artificial Sequence: Synthetic oligonucleotide
  Sense strand starting at position 897 of SEQ ID NO: 317886
ucaaguguuuaauuggacu

SEQ ID NO: 520022 - RNA, 19 nt, Artificial Sequence
  Description of Artificial Sequence: Synthetic oligonucleotide
  Antisense strand to SEQ ID NO: 520021
aguccaauuaaacacuuga

SEQ ID NO: 520023 - RNA, 19 nt, Artificial Sequence
  Description of Artificial Sequence: Synthetic oligonucleotide
  Sense strand starting at position 912 of SEQ ID NO: 317886
gacuucuauuaguuuguga

SEQ ID NO: 520024 - RNA, 19 nt, Artificial Sequence
  Description of Artificial Sequence: Synthetic oligonucleotide
  Antisense strand to SEQ ID NO: 520023
ucacaaacuaauagaaguc

SEQ ID NO: 520025 - RNA, 19 nt, Artificial Sequence
  Description of Artificial Sequence: Synthetic oligonucleotide
  Sense strand starting at position 914 of SEQ ID NO: 317886
cuucuauuaguuugugaac

SEQ ID NO: 520026 - RNA, 19 nt, Artificial Sequence
  Description of Artificial Sequence: Synthetic oligonucleotide
  Antisense strand to SEQ ID NO: 520025
guucacaaacuaauagaag

SEQ ID NO: 520027 - RNA, 19 nt, Artificial Sequence
  Description of Artificial Sequence: Synthetic oligonucleotide
  Sense strand starting at position 915 of SEQ ID NO: 317886
uucuauuaguuugugaacu

SEQ ID NO: 520028 - RNA, 19 nt, Artificial Sequence
  Description of Artificial Sequence: Synthetic oligonucleotide
  Antisense strand to SEQ ID NO: 520027
aguucacaaacuaauagaa

SEQ ID NO: 520029 - RNA, 19 nt, Artificial Sequence
  Description of Artificial Sequence: Synthetic oligonucleotide
  Sense strand starting at position 925 of SEQ ID NO: 317886
uugugaacucaacaagcau

SEQ ID NO: 520030 - RNA, 19 nt, Artificial Sequence
  Description of Artificial Sequence: Synthetic oligonucleotide
  Antisense strand to SEQ ID NO: 520029
augcuuguugaguucacaa

SEQ ID NO: 520031 - RNA, 19 nt, Artificial Sequence
  Description of Artificial Sequence: Synthetic oligonucleotide
  Sense strand starting at position 944 of SEQ ID NO: 317886
ggcugagaucugcagcuuu

SEQ ID NO: 520032 - RNA, 19 nt, Artificial Sequence
  Description of Artificial Sequence: Synthetic oligonucleotide
  Antisense strand to SEQ ID NO: 520031
aaagcugcagaucucagcc

SEQ ID NO: 520033 - RNA, 19 nt, Artificial Sequence
  Description of Artificial Sequence: Synthetic oligonucleotide
  Sense strand starting at position 1175 of SEQ ID NO: 317886
cuuauuaaguccuuacgau

SEQ ID NO: 520034 - RNA, 19 nt, Artificial Sequence
  Description of Artificial Sequence: Synthetic oligonucleotide
  Antisense strand to SEQ ID NO: 520033
aucguaaggacuuaauaag

SEQ ID NO: 520035 - RNA, 19 nt, Artificial Sequence
  Description of Artificial Sequence: Synthetic oligonucleotide
  Sense strand starting at position 1176 of SEQ ID NO: 317886
uuauuaaguccuuacgaug

SEQ ID NO: 520036 - RNA, 19 nt, Artificial Sequence
  Description of Artificial Sequence: Synthetic oligonucleotide
  Antisense strand to SEQ ID NO: 520035
caucguaaggacuuaauaa

SEQ ID NO: 520037 - RNA, 19 nt, Artificial Sequence
  Description of Artificial Sequence: Synthetic oligonucleotide
  Sense strand starting at position 1181 of SEQ ID NO: 317886
aaguccuuacgauguguca

SEQ ID NO: 520038 - RNA, 19 nt, Artificial Sequence
  Description of Artificial Sequence: Synthetic oligonucleotide
  Antisense strand to SEQ ID NO: 520037
ugacacaucguaaggacuu

SEQ ID NO: 520039 - RNA, 19 nt, Artificial Sequence
  Description of Artificial Sequence: Synthetic oligonucleotide
  Sense strand starting at position 1316 of SEQ ID NO: 317886
gaugacguguuauccacau

SEQ ID NO: 520040 - RNA, 19 nt, Artificial Sequence
  Description of Artificial Sequence: Synthetic oligonucleotide
  Antisense strand to SEQ ID NO: 520039
auguggauaacacgucauc

SEQ ID NO: 520041 - RNA, 19 nt, Artificial Sequence
  Description of Artificial Sequence: Synthetic oligonucleotide
  Sense strand starting at position 1320 of SEQ ID NO: 317886
acguguuauccacaucacc

SEQ ID NO: 520042 - RNA, 19 nt, Artificial Sequence
  Description of Artificial Sequence: Synthetic oligonucleotide
  Antisense strand to SEQ ID NO: 520041
ggugauguggauaacacgu

SEQ ID NO: 520043 - RNA, 19 nt, Artificial Sequence
  Description of Artificial Sequence: Synthetic oligonucleotide
  Sense strand starting at position 1412 of SEQ ID NO: 317886
ugucaauucugaguuggca

SEQ ID NO: 520044 - RNA, 19 nt, Artificial Sequence
  Description of Artificial Sequence: Synthetic oligonucleotide
  Antisense strand to SEQ ID NO: 520043
ugccaacucagaauugaca

SEQ ID NO: 520045 - RNA, 19 nt, Artificial Sequence
  Description of Artificial Sequence: Synthetic oligonucleotide
  Sense strand starting at position 1416 of SEQ ID NO: 317886
aauucugaguuggcaacuu

SEQ ID NO: 520046 - RNA, 19 nt, Artificial Sequence
  Description of Artificial Sequence: Synthetic oligonucleotide
  Antisense strand to SEQ ID NO: 520045
aaguugccaacucagaauu

SEQ ID NO: 520047 - RNA, 19 nt, Artificial Sequence
  Description of Artificial Sequence: Synthetic oligonucleotide
  Sense strand starting at position 1577 of SEQ ID NO: 317886
ucuggucaucucuaccgaa

SEQ ID NO: 520048 - RNA, 19 nt, Artificial Sequence
  Description of Artificial Sequence: Synthetic oligonucleotide
  Antisense strand to SEQ ID NO: 520047
uucgguagagaugaccaga

SEQ ID NO: 520049 - RNA, 19 nt, Artificial Sequence
  Description of Artificial Sequence: Synthetic oligonucleotide
  Sense strand starting at position 1840 of SEQ ID NO: 317886
aggagacaugucugaaagu

SEQ ID NO: 520050 - RNA, 19 nt, Artificial Sequence
  Description of Artificial Sequence: Synthetic oligonucleotide
  Antisense strand to SEQ ID NO: 520049
acuuucagacaugucuccu

SEQ ID NO: 520051 - RNA, 19 nt, Artificial Sequence
  Description of Artificial Sequence: Synthetic oligonucleotide
  Sense strand starting at position 1999 of SEQ ID NO: 317886
aucuuaguacugugucaac

SEQ ID NO: 520052 - RNA, 19 nt, Artificial Sequence
  Description of Artificial Sequence: Synthetic oligonucleotide
  Antisense strand to SEQ ID NO: 520051
guugacacaguacuaagau

SEQ ID NO: 520053 - RNA, 19 nt, Artificial Sequence
  Description of Artificial Sequence: Synthetic oligonucleotide
  Sense strand starting at position 2056 of SEQ ID NO: 317886
gccucagaaguagaauguu

SEQ ID NO: 520054 - RNA, 19 nt, Artificial Sequence
  Description of Artificial Sequence: Synthetic oligonucleotide
  Antisense strand to SEQ ID NO: 520053
aacauucuacuucugaggc

SEQ ID NO: 520055 - RNA, 19 nt, Artificial Sequence
  Description of Artificial Sequence: Synthetic oligonucleotide
  Sense strand starting at position 2074 of SEQ ID NO: 317886
uggauauagugucugagau

SEQ ID NO: 520056 - RNA, 19 nt, Artificial Sequence
  Description of Artificial Sequence: Synthetic oligonucleotide
  Antisense strand to SEQ ID NO: 520055
aucucagacacuauaucca

SEQ ID NO: 520057 - RNA, 19 nt, Artificial Sequence
  Description of Artificial Sequence: Synthetic oligonucleotide
  Sense strand starting at position 2075 of SEQ ID NO: 317886
ggauauagugucugagauc

SEQ ID NO: 520058 - RNA, 19 nt, Artificial Sequence
  Description of Artificial Sequence: Synthetic oligonucleotide
  Antisense strand to SEQ ID NO: 520057
gaucucagacacuauaucc

SEQ ID NO: 520059 - RNA, 19 nt, Artificial Sequence
  Description of Artificial Sequence: Synthetic oligonucleotide
  Sense strand starting at position 2088 of SEQ ID NO: 317886
gagaucuggcagcagugaa

SEQ ID NO: 520060 - RNA, 19 nt, Artificial Sequence
  Description of Artificial Sequence: Synthetic oligonucleotide
  Antisense strand to SEQ ID NO: 520059
uucacugcugccagaucuc

SEQ ID NO: 520061 - RNA, 19 nt, Artificial Sequence
  Description of Artificial Sequence: Synthetic oligonucleotide
  Sense strand starting at position 2162 of SEQ ID NO: 317886
ccagcuaugcuauagauag

SEQ ID NO: 520062 - RNA, 19 nt, Artificial Sequence
  Description of Artificial Sequence: Synthetic oligonucleotide
  Antisense strand to SEQ ID NO: 520061
cuaucuauagcauagcugg

SEQ ID NO: 520063 - RNA, 19 nt, Artificial Sequence
  Description of Artificial Sequence: Synthetic oligonucleotide
  Sense strand starting at position 2180 of SEQ ID NO: 317886
gauaucugcuguccgaaac

SEQ ID NO: 520064 - RNA, 19 nt, Artificial Sequence
  Description of Artificial Sequence: Synthetic oligonucleotide
  Antisense strand to SEQ ID NO: 520063
guuucggacagcagauauc

SEQ ID NO: 520065 - RNA, 19 nt, Artificial Sequence
  Description of Artificial Sequence: Synthetic oligonucleotide
  Sense strand starting at position 2202 of SEQ ID NO: 317886
uugguaacgugauuauccu

SEQ ID NO: 520066 - RNA, 19 nt, Artificial Sequence
  Description of Artificial Sequence: Synthetic oligonucleotide
  Antisense strand to SEQ ID NO: 520065
aggauaaucacguuaccaa

SEQ ID NO: 520067 - RNA, 19 nt, Artificial Sequence
  Description of Artificial Sequence: Synthetic oligonucleotide
  Sense strand starting at position 2203 of SEQ ID NO: 317886
ugguaacgugauuauccuu

SEQ ID NO: 520068 - RNA, 19 nt, Artificial Sequence
  Description of Artificial Sequence: Synthetic oligonucleotide
  Antisense strand to SEQ ID NO: 520067
aaggauaaucacguuacca

SEQ ID NO: 520069 - RNA, 19 nt, Artificial Sequence
  Description of Artificial Sequence: Synthetic oligonucleotide
  Sense strand starting at position 2206 of SEQ ID NO: 317886
uaacgugauuauccuuaug

SEQ ID NO: 520070 - RNA, 19 nt, Artificial Sequence
  Description of Artificial Sequence: Synthetic oligonucleotide
  Antisense strand to SEQ ID NO: 520069
cauaaggauaaucacguua

SEQ ID NO: 520071 - RNA, 19 nt, Artificial Sequence
  Description of Artificial Sequence: Synthetic oligonucleotide
  Sense strand starting at position 2208 of SEQ ID NO: 317886
acgugauuauccuuauguc

SEQ ID NO: 520072 - RNA, 19 nt, Artificial Sequence
  Description of Artificial Sequence: Synthetic oligonucleotide
  Antisense strand to SEQ ID NO: 520071
gacauaaggauaaucacgu

SEQ ID NO: 520073 - RNA, 19 nt, Artificial Sequence
  Description of Artificial Sequence: Synthetic oligonucleotide
  Sense strand starting at position 2209 of SEQ ID NO: 317886
cgugauuauccuuauguca

SEQ ID NO: 520074 - RNA, 19 nt, Artificial Sequence
  Description of Artificial Sequence: Synthetic oligonucleotide
  Antisense strand to SEQ ID NO: 520073
ugacauaaggauaaucacg

SEQ ID NO: 520075 - RNA, 19 nt, Artificial Sequence
  Description of Artificial Sequence: Synthetic oligonucleotide
  Sense strand starting at position 2277 of SEQ ID NO: 317886
augagagaaugugcuacau

SEQ ID NO: 520076 - RNA, 19 nt, Artificial Sequence
  Description of Artificial Sequence: Synthetic oligonucleotide
  Antisense strand to SEQ ID NO: 520075
auguagcacauucucucau

SEQ ID NO: 520077 - RNA, 19 nt, Artificial Sequence
  Description of Artificial Sequence: Synthetic oligonucleotide
  Sense strand starting at position 3500 of SEQ ID NO: 317886
ccuugaaucccaggcucaa

SEQ ID NO: 520078 - RNA, 19 nt, Artificial Sequence
  Description of Artificial Sequence: Synthetic oligonucleotide
  Antisense strand to SEQ ID NO: 520077
uugagccugggauucaagg

SEQ ID NO: 520079 - RNA, 19 nt, Artificial Sequence
  Description of Artificial Sequence: Synthetic oligonucleotide
  Sense strand starting at position 3539 of SEQ ID NO: 317886
uccucauagcugggacuau

SEQ ID NO: 520080 - RNA, 19 nt, Artificial Sequence
  Description of Artificial Sequence: Synthetic oligonucleotide
  Antisense strand to SEQ ID NO: 520079
auagucccagcuaugagga

SEQ ID NO: 520081 - RNA, 19 nt, Artificial Sequence
  Description of Artificial Sequence: Synthetic oligonucleotide
  Sense strand starting at position 3551 of SEQ ID NO: 317886
ggacuaugcccaugugcua

SEQ ID NO: 520082 - RNA, 19 nt, Artificial Sequence
  Description of Artificial Sequence: Synthetic oligonucleotide
  Antisense strand to SEQ ID NO: 520081
uagcacaugggcauagucc

SEQ ID NO: 520083 - RNA, 19 nt, Artificial Sequence
  Description of Artificial Sequence: Synthetic oligonucleotide
  Sense strand starting at position 3563 of SEQ ID NO: 317886
ugugcuaccacguuguauu

SEQ ID NO: 520084 - RNA, 19 nt, Artificial Sequence
  Description of Artificial Sequence: Synthetic oligonucleotide
  Antisense strand to SEQ ID NO: 520083
aauacaacgugguagcaca

SEQ ID NO: 520085 - RNA, 19 nt, Artificial Sequence
  Description of Artificial Sequence: Synthetic oligonucleotide
  Sense strand starting at position 3564 of SEQ ID NO: 317886
gugcuaccacguuguauuu

SEQ ID NO: 520086 - RNA, 19 nt, Artificial Sequence
  Description of Artificial Sequence: Synthetic oligonucleotide
  Antisense strand to SEQ ID NO: 520085
aaauacaacgugguagcac

SEQ ID NO: 520087 - RNA, 19 nt, Artificial Sequence
  Description of Artificial Sequence: Synthetic oligonucleotide
  Sense strand starting at position 3832 of SEQ ID NO: 317886
cuauuaagacuaugugauu

SEQ ID NO: 520088 - RNA, 19 nt, Artificial Sequence
  Description of Artificial Sequence: Synthetic oligonucleotide
  Antisense strand to SEQ ID NO: 520087
aaucacauagucuuaauag

SEQ ID NO: 520089 - RNA, 19 nt, Artificial Sequence
  Description of Artificial Sequence: Synthetic oligonucleotide
  Sense strand starting at position 115 of SEQ ID NO: 317887
cggcuaccugaguaagacu

SEQ ID NO: 520090 - RNA, 19 nt, Artificial Sequence
  Description of Artificial Sequence: Synthetic oligonucleotide
  Antisense strand to SEQ ID NO: 520089
agucuuacucagguagccg

SEQ ID NO: 520091 - RNA, 19 nt, Artificial Sequence
  Description of Artificial Sequence: Synthetic oligonucleotide
  Sense strand starting at position 124 of SEQ ID NO: 317887
gaguaagacuaucuuggac

SEQ ID NO: 520092 - RNA, 19 nt, Artificial Sequence
  Description of Artificial Sequence: Synthetic oligonucleotide
  Antisense strand to SEQ ID NO: 520091
guccaagauagucuuacuc

SEQ ID NO: 520093 - RNA, 19 nt, Artificial Sequence
  Description of Artificial Sequence: Synthetic oligonucleotide
  Sense strand starting at position 126 of SEQ ID NO: 317887
guaagacuaucuuggacua

SEQ ID NO: 520094 - RNA, 19 nt, Artificial Sequence
  Description of Artificial Sequence: Synthetic oligonucleotide
  Antisense strand to SEQ ID NO: 520093
uaguccaagauagucuuac

SEQ ID NO: 520095 - RNA, 19 nt, Artificial Sequence
  Description of Artificial Sequence: Synthetic oligonucleotide
  Sense strand starting at position 196 of SEQ ID NO: 317887
gggaaaucuucccaucuuc

SEQ ID NO: 520096 - RNA, 19 nt, Artificial Sequence
  Description of Artificial Sequence: Synthetic oligonucleotide
  Antisense strand to SEQ ID NO: 520095
gaagaugggaagauuuccc

SEQ ID NO: 520097 - RNA, 19 nt, Artificial Sequence
  Description of Artificial Sequence: Synthetic oligonucleotide
  Sense strand starting at position 439 of SEQ ID NO: 317887
uuuagaugcaaucgguacu

SEQ ID NO: 520098 - RNA, 19 nt, Artificial Sequence
  Description of Artificial Sequence: Synthetic oligonucleotide
  Antisense strand to SEQ ID NO: 520097
aguaccgauugcaucuaaa

SEQ ID NO: 520099 - RNA, 19 nt, Artificial Sequence
  Description of Artificial Sequence: Synthetic oligonucleotide
  Sense strand starting at position 440 of SEQ ID NO: 317887
uuagaugcaaucgguacua

SEQ ID NO: 520100 - RNA, 19 nt, Artificial Sequence
  Description of Artificial Sequence: Synthetic oligonucleotide
  Antisense strand to SEQ ID NO: 520099
uaguaccgauugcaucuaa

SEQ ID NO: 520101 - RNA, 19 nt, Artificial Sequence
  Description of Artificial Sequence: Synthetic oligonucleotide
  Sense strand starting at position 442 of SEQ ID NO: 317887
agaugcaaucgguacuauu

SEQ ID NO: 520102 - RNA, 19 nt, Artificial Sequence
  Description of Artificial Sequence: Synthetic oligonucleotide
  Antisense strand to SEQ ID NO: 520101
aauaguaccgauugcaucu

SEQ ID NO: 520103 - RNA, 19 nt, Artificial Sequence
  Description of Artificial Sequence: Synthetic oligonucleotide
  Sense strand starting at position 445 of SEQ ID NO: 317887
ugcaaucgguacuauuaau

SEQ ID NO: 520104 - RNA, 19 nt, Artificial Sequence
  Description of Artificial Sequence: Synthetic oligonucleotide
  Antisense strand to SEQ ID NO: 520103
auuaauaguaccgauugca

SEQ ID NO: 520105 - RNA, 19 nt, Artificial Sequence
  Description of Artificial Sequence: Synthetic oligonucleotide
  Sense strand starting at position 509 of SEQ ID NO: 317887
uagccucugucccagagaa

SEQ ID NO: 520106 - RNA, 19 nt, Artificial Sequence
  Description of Artificial Sequence: Synthetic oligonucleotide
  Antisense strand to SEQ ID NO: 520105
uucucugggacagaggcua

SEQ ID NO: 520107 - RNA, 19 nt, Artificial Sequence
  Description of Artificial Sequence: Synthetic oligonucleotide
  Sense strand starting at position 511 of SEQ ID NO: 317887
gccucugucccagagaaag

SEQ ID NO: 520108 - RNA, 19 nt, Artificial Sequence
  Description of Artificial Sequence: Synthetic oligonucleotide
  Antisense strand to SEQ ID NO: 520107
cuuucucugggacagaggc

SEQ ID NO: 520109 - RNA, 19 nt, Artificial Sequence
  Description of Artificial Sequence: Synthetic oligonucleotide
  Sense strand starting at position 579 of SEQ ID NO: 317887
gcaauaaagguucggaacu

SEQ ID NO: 520110 - RNA, 19 nt, Artificial Sequence
  Description of Artificial Sequence: Synthetic oligonucleotide
  Antisense strand to SEQ ID NO: 520109
aguuccgaaccuuuauugc

SEQ ID NO: 520111 - RNA, 19 nt, Artificial Sequence
  Description of Artificial Sequence: Synthetic oligonucleotide
  Sense strand starting at position 768 of SEQ ID NO: 317887
acaaaucgguuccagguaa

SEQ ID NO: 520112 - RNA, 19 nt, Artificial Sequence
  Description of Artificial Sequence: Synthetic oligonucleotide
  Antisense strand to SEQ ID NO: 520111
uuaccuggaaccgauuugu

SEQ ID NO: 520113 - RNA, 19 nt, Artificial Sequence
  Description of Artificial Sequence: Synthetic oligonucleotide
  Sense strand starting at position 862 of SEQ ID NO: 317887
gcagcuuguucugcacaca

SEQ ID NO: 520114 - RNA, 19 nt, Artificial Sequence
  Description of Artificial Sequence: Synthetic oligonucleotide
  Antisense strand to SEQ ID NO: 520113
ugugugcagaacaagcugc

SEQ ID NO: 520115 - RNA, 19 nt, Artificial Sequence
  Description of Artificial Sequence: Synthetic oligonucleotide
  Sense strand starting at position 865 of SEQ ID NO: 317887
gcuuguucugcacacauga

SEQ ID NO: 520116 - RNA, 19 nt, Artificial Sequence
  Description of Artificial Sequence: Synthetic oligonucleotide
  Antisense strand to SEQ ID NO: 520115
ucaugugugcagaacaagc

SEQ ID NO: 520117 - RNA, 19 nt, Artificial Sequence
  Description of Artificial Sequence: Synthetic oligonucleotide
  Sense strand starting at position 882 of SEQ ID NO: 317887
gacguaacccggcauuaga

SEQ ID NO: 520118 - RNA, 19 nt, Artificial Sequence
  Description of Artificial Sequence: Synthetic oligonucleotide
  Antisense strand to SEQ ID NO: 520117
ucuaaugccggguuacguc

SEQ ID NO: 520119 - RNA, 19 nt, Artificial Sequence
  Description of Artificial Sequence: Synthetic oligonucleotide
  Sense strand starting at position 890 of SEQ ID NO: 317887
ccggcauuagaucaaacuu

SEQ ID NO: 520120 - RNA, 19 nt, Artificial Sequence
  Description of Artificial Sequence: Synthetic oligonucleotide
  Antisense strand to SEQ ID NO: 520119
aaguuugaucuaaugccgg

SEQ ID NO: 520121 - RNA, 19 nt, Artificial Sequence
  Description of Artificial Sequence: Synthetic oligonucleotide
  Sense strand starting at position 1005 of SEQ ID NO: 317887
gccgaaugauuuccucgca

SEQ ID NO: 520122 - RNA, 19 nt, Artificial Sequence
  Description of Artificial Sequence: Synthetic oligonucleotide
  Antisense strand to SEQ ID NO: 520121
ugcgaggaaaucauucggc

SEQ ID NO: 520123 - RNA, 19 nt, Artificial Sequence
  Description of Artificial Sequence: Synthetic oligonucleotide
  Sense strand starting at position 1008 of SEQ ID NO: 317887
gaaugauuuccucgcaguu

SEQ ID NO: 520124 - RNA, 19 nt, Artificial Sequence
  Description of Artificial Sequence: Synthetic oligonucleotide
  Antisense strand to SEQ ID NO: 520123
aacugcgaggaaaucauuc

SEQ ID NO: 520125 - RNA, 19 nt, Artificial Sequence
  Description of Artificial Sequence: Synthetic oligonucleotide
  Sense strand starting at position 1010 of SEQ ID NO: 317887
augauuuccucgcaguuga

SEQ ID NO: 520126 - RNA, 19 nt, Artificial Sequence
  Description of Artificial Sequence: Synthetic oligonucleotide
  Antisense strand to SEQ ID NO: 520125
ucaacugcgaggaaaucau

SEQ ID NO: 520127 - RNA, 19 nt, Artificial Sequence
  Description of Artificial Sequence: Synthetic oligonucleotide
  Sense strand starting at position 1347 of SEQ ID NO: 317887
cgcagaagcaguuggucua

SEQ ID NO: 520128 - RNA, 19 nt, Artificial Sequence
  Description of Artificial Sequence: Synthetic oligonucleotide
  Antisense strand to SEQ ID NO: 520127
uagaccaacugcuucugcg

SEQ ID NO: 520129 - RNA, 19 nt, Artificial Sequence
  Description of Artificial Sequence: Synthetic oligonucleotide
  Sense strand starting at position 1577 of SEQ ID NO: 317887
gccuguuaucggcuuaccu

SEQ ID NO: 520130 - RNA, 19 nt, Artificial Sequence
  Description of Artificial Sequence: Synthetic oligonucleotide
  Antisense strand to SEQ ID NO: 520129
agguaagccgauaacaggc

SEQ ID NO: 520131 - RNA, 19 nt, Artificial Sequence
  Description of Artificial Sequence: Synthetic oligonucleotide
  Sense strand starting at position 1697 of SEQ ID NO: 317887
ucaacaucuccacgugcaa

SEQ ID NO: 520132 - RNA, 19 nt, Artificial Sequence
  Description of Artificial Sequence: Synthetic oligonucleotide
  Antisense strand to SEQ ID NO: 520131
uugcacguggagauguuga

SEQ ID NO: 520133 - RNA, 19 nt, Artificial Sequence
  Description of Artificial Sequence: Synthetic oligonucleotide
  Sense strand starting at position 1842 of SEQ ID NO: 317887
aaugaaagugggcgagaaa

SEQ ID NO: 520134 - RNA, 19 nt, Artificial Sequence
  Description of Artificial Sequence: Synthetic oligonucleotide
  Antisense strand to SEQ ID NO: 520133
uuucucgcccacuuucauu

SEQ ID NO: 520135 - RNA, 19 nt, Artificial Sequence
  Description of Artificial Sequence: Synthetic oligonucleotide
  Sense strand starting at position 2278 of SEQ ID NO: 317887
cacgcuucgcuccaaguua

SEQ ID NO: 520136 - RNA, 19 nt, Artificial Sequence
  Description of Artificial Sequence: Synthetic oligonucleotide
  Antisense strand to SEQ ID NO: 520135
uaacuuggagcgaagcgug

SEQ ID NO: 520137 - RNA, 19 nt, Artificial Sequence
  Description of Artificial Sequence: Synthetic oligonucleotide
  Sense strand starting at position 2421 of SEQ ID NO: 317887
ccagaaaucucagaggagu

SEQ ID NO: 520138 - RNA, 19 nt, Artificial Sequence
  Description of Artificial Sequence: Synthetic oligonucleotide
  Antisense strand to SEQ ID NO: 520137
acuccucugagauuucugg

SEQ ID NO: 520139 - RNA, 19 nt, Artificial Sequence
  Description of Artificial Sequence: Synthetic oligonucleotide
  Sense strand starting at position 2510 of SEQ ID NO: 317887
guguccuggaacugguuaa

SEQ ID NO: 520140 - RNA, 19 nt, Artificial Sequence
  Description of Artificial Sequence: Synthetic oligonucleotide
  Antisense strand to SEQ ID NO: 520139
uuaaccaguuccaggacac

SEQ ID NO: 520141 - RNA, 19 nt, Artificial Sequence
  Description of Artificial Sequence: Synthetic oligonucleotide
  Sense strand starting at position 2676 of SEQ ID NO: 317887
ggauuucucgcgcgugcuu

SEQ ID NO: 520142 - RNA, 19 nt, Artificial Sequence
  Description of Artificial Sequence: Synthetic oligonucleotide
  Antisense strand to SEQ ID NO: 520141
aagcacgcgcgagaaaucc

SEQ ID NO: 520143 - RNA, 19 nt, Artificial Sequence
  Description of Artificial Sequence: Synthetic oligonucleotide
  Sense strand starting at position 2979 of SEQ ID NO: 317887
ccuagcaacuuguagagau

SEQ ID NO: 520144 - RNA, 19 nt, Artificial Sequence
  Description of Artificial Sequence: Synthetic oligonucleotide
  Antisense strand to SEQ ID NO: 520143
aucucuacaaguugcuagg

SEQ ID NO: 520145 - RNA, 19 nt, Artificial Sequence
  Description of Artificial Sequence: Synthetic oligonucleotide
  Sense strand starting at position 2983 of SEQ ID NO: 317887
gcaacuuguagagaugcau

SEQ ID NO: 520146 - RNA, 19 nt, Artificial Sequence
  Description of Artificial Sequence: Synthetic oligonucleotide
  Antisense strand to SEQ ID NO: 520145
augcaucucuacaaguugc

SEQ ID NO: 520147 - RNA, 19 nt, Artificial Sequence
  Description of Artificial Sequence: Synthetic oligonucleotide
  Sense strand starting at position 2996 of SEQ ID NO: 317887
augcaucaaucaguuugaa

SEQ ID NO: 520148 - RNA, 19 nt, Artificial Sequence
  Description of Artificial Sequence: Synthetic oligonucleotide
  Antisense strand to SEQ ID NO: 520147
uucaaacugauugaugcau

SEQ ID NO: 520149 - RNA, 19 nt, Artificial Sequence
  Description of Artificial Sequence: Synthetic oligonucleotide
  Sense strand starting at position 3361 of SEQ ID NO: 317887
guuaaugacuugcguggaa

SEQ ID NO: 520150 - RNA, 19 nt, Artificial Sequence
  Description of Artificial Sequence: Synthetic oligonucleotide
  Antisense strand to SEQ ID NO: 520149
uuccacgcaagucauuaac

SEQ ID NO: 520151 - RNA, 19 nt, Artificial Sequence
  Description of Artificial Sequence: Synthetic oligonucleotide
  Sense strand starting at position 3363 of SEQ ID NO: 317887
uaaugacuugcguggaaag

SEQ ID NO: 520152 - RNA, 19 nt, Artificial Sequence
  Description of Artificial Sequence: Synthetic oligonucleotide
  Antisense strand to SEQ ID NO: 520151
cuuuccacgcaagucauua

SEQ ID NO: 520153 - RNA, 19 nt, Artificial Sequence
  Description of Artificial Sequence: Synthetic oligonucleotide
  Sense strand starting at position 3521 of SEQ ID NO: 317887
ggugugagcuccggacgaa

SEQ ID NO: 520154 - RNA, 19 nt, Artificial Sequence
  Description of Artificial Sequence: Synthetic oligonucleotide
  Antisense strand to SEQ ID NO: 520153
uucguccggagcucacacc

SEQ ID NO: 520155 - RNA, 19 nt, Artificial Sequence
  Description of Artificial Sequence: Synthetic oligonucleotide
  Sense strand starting at position 3643 of SEQ ID NO: 317887
caagcaguuuacuugggaa

SEQ ID NO: 520156 - RNA, 19 nt, Artificial Sequence
  Description of Artificial Sequence: Synthetic oligonucleotide
  Antisense strand to SEQ ID NO: 520155
uucccaaguaaacugcuug

SEQ ID NO: 520157 - RNA, 19 nt, Artificial Sequence
  Description of Artificial Sequence: Synthetic oligonucleotide
  Sense strand starting at position 3711 of SEQ ID NO: 317887
ccuacuguuugcuuacaga

SEQ ID NO: 520158 - RNA, 19 nt, Artificial Sequence
  Description of Artificial Sequence: Synthetic oligonucleotide
  Antisense strand to SEQ ID NO: 520157
ucuguaagcaaacaguagg

SEQ ID NO: 520159 - RNA, 19 nt, Artificial Sequence
  Description of Artificial Sequence: Synthetic oligonucleotide
  Sense strand starting at position 3764 of SEQ ID NO: 317887
auugguuugcuccacgaga

SEQ ID NO: 520160 - RNA, 19 nt, Artificial Sequence
  Description of Artificial Sequence: Synthetic oligonucleotide
  Antisense strand to SEQ ID NO: 520159
ucucguggagcaaaccaau

SEQ ID NO: 520161 - RNA, 19 nt, Artificial Sequence
  Description of Artificial Sequence: Synthetic oligonucleotide
  Sense strand starting at position 3766 of SEQ ID NO: 317887
ugguuugcuccacgagaaa

SEQ ID NO: 520162 - RNA, 19 nt, Artificial Sequence
  Description of Artificial Sequence: Synthetic oligonucleotide
  Antisense strand to SEQ ID NO: 520161
uuucucguggagcaaacca

SEQ ID NO: 520163 - RNA, 19 nt, Artificial Sequence
  Description of Artificial Sequence: Synthetic oligonucleotide
  Sense strand starting at position 3931 of SEQ ID NO: 317887
cugaauuccgucugggcua

SEQ ID NO: 520164 - RNA, 19 nt, Artificial Sequence
  Description of Artificial Sequence: Synthetic oligonucleotide
  Antisense strand to SEQ ID NO: 520163
uagcccagacggaauucag

SEQ ID NO: 520165 - RNA, 19 nt, Artificial Sequence
  Description of Artificial Sequence: Synthetic oligonucleotide
  Sense strand starting at position 3932 of SEQ ID NO: 317887
ugaauuccgucugggcuaa

SEQ ID NO: 520166 - RNA, 19 nt, Artificial Sequence
  Description of Artificial Sequence: Synthetic oligonucleotide
  Antisense strand to SEQ ID NO: 520165
uuagcccagacggaauuca

SEQ ID NO: 520167 - RNA, 19 nt, Artificial Sequence
  Description of Artificial Sequence: Synthetic oligonucleotide
  Sense strand starting at position 3977 of SEQ ID NO: 317887
ggaguagggucuuucgauu

SEQ ID NO: 520168 - RNA, 19 nt, Artificial Sequence
  Description of Artificial Sequence: Synthetic oligonucleotide
  Antisense strand to SEQ ID NO: 520167
aaucgaaagacccuacucc

SEQ ID NO: 520169 - RNA, 19 nt, Artificial Sequence
  Description of Artificial Sequence: Synthetic oligonucleotide
  Sense strand starting at position 90 of SEQ ID NO: 317888
agauauaacuaugcuuugu

SEQ ID NO: 520170 - RNA, 19 nt, Artificial Sequence
  Description of Artificial Sequence: Synthetic oligonucleotide
  Antisense strand to SEQ ID NO: 520169
acaaagcauaguuauaucu

SEQ ID NO: 520171 - RNA, 19 nt, Artificial Sequence
  Description of Artificial Sequence: Synthetic oligonucleotide
  Sense strand starting at position 157 of SEQ ID NO: 317888
aaaugcaauugaucgugau

SEQ ID NO: 520172 - RNA, 19 nt, Artificial Sequence
  Description of Artificial Sequence: Synthetic oligonucleotide
  Antisense strand to SEQ ID NO: 520171
aucacgaucaauugcauuu

SEQ ID NO: 520173 - RNA, 19 nt, Artificial Sequence
  Description of Artificial Sequence: Synthetic oligonucleotide
  Sense strand starting at position 158 of SEQ ID NO: 317888
aaugcaauugaucgugaug

SEQ ID NO: 520174 - RNA, 19 nt, Artificial Sequence
  Description of Artificial Sequence: Synthetic oligonucleotide
  Antisense strand to SEQ ID NO: 520173
caucacgaucaauugcauu

SEQ ID NO: 520175 - RNA, 19 nt, Artificial Sequence
  Description of Artificial Sequence: Synthetic oligonucleotide
  Sense strand starting at position 214 of SEQ ID NO: 317888
cacugaaauccuugaaggu

SEQ ID NO: 520176 - RNA, 19 nt, Artificial Sequence
  Description of Artificial Sequence: Synthetic oligonucleotide
  Antisense strand to SEQ ID NO: 520175
accuucaaggauuucagug

SEQ ID NO: 520177 - RNA, 19 nt, Artificial Sequence
  Description of Artificial Sequence: Synthetic oligonucleotide
  Sense strand starting at position 218 of SEQ ID NO: 317888
gaaauccuugaagguauau

SEQ ID NO: 520178 - RNA, 19 nt, Artificial Sequence
  Description of Artificial Sequence: Synthetic oligonucleotide
  Antisense strand to SEQ ID NO: 520177
auauaccuucaaggauuuc

SEQ ID NO: 520179 - RNA, 19 nt, Artificial Sequence
  Description of Artificial Sequence: Synthetic oligonucleotide
  Sense strand starting at position 237 of SEQ ID NO: 317888
guaugugugcgugcaggaa

SEQ ID NO: 520180 - RNA, 19 nt, Artificial Sequence
  Description of Artificial Sequence: Synthetic oligonucleotide
  Antisense strand to SEQ ID NO: 520179
uuccugcacgcacacauac

SEQ ID NO: 520181 - RNA, 19 nt, Artificial Sequence
  Description of Artificial Sequence: Synthetic oligonucleotide
  Sense strand starting at position 271 of SEQ ID NO: 317888
gugauauuaccuuggacug

SEQ ID NO: 520182 - RNA, 19 nt, Artificial Sequence
  Description of Artificial Sequence: Synthetic oligonucleotide
  Antisense strand to SEQ ID NO: 520181
caguccaagguaauaucac

SEQ ID NO: 520183 - RNA, 19 nt, Artificial Sequence
  Description of Artificial Sequence: Synthetic oligonucleotide
  Sense strand starting at position 272 of SEQ ID NO: 317888
ugauauuaccuuggacuga

SEQ ID NO: 520184 - RNA, 19 nt, Artificial Sequence
  Description of Artificial Sequence: Synthetic oligonucleotide
  Antisense strand to SEQ ID NO: 520183
ucaguccaagguaauauca

SEQ ID NO: 520185 - RNA, 19 nt, Artificial Sequence
  Description of Artificial Sequence: Synthetic oligonucleotide
  Sense strand starting at position 326 of SEQ ID NO: 317888
aauggaguggcucauaauu

SEQ ID NO: 520186 - RNA, 19 nt, Artificial Sequence
  Description of Artificial Sequence: Synthetic oligonucleotide
  Antisense strand to SEQ ID NO: 520185
aauuaugagccacuccauu

SEQ ID NO: 520187 - RNA, 19 nt, Artificial Sequence
  Description of Artificial Sequence: Synthetic oligonucleotide
  Sense strand starting at position 328 of SEQ ID NO: 317888
uggaguggcucauaauuua

SEQ ID NO: 520188 - RNA, 19 nt, Artificial Sequence
  Description of Artificial Sequence: Synthetic oligonucleotide
  Antisense strand to SEQ ID NO: 520187
uaaauuaugagccacucca

SEQ ID NO: 520189 - RNA, 19 nt, Artificial Sequence
  Description of Artificial Sequence: Synthetic oligonucleotide
  Sense strand starting at position 390 of SEQ ID NO: 317888
guaacaagugcugguaaua

SEQ ID NO: 520190 - RNA, 19 nt, Artificial Sequence
  Description of Artificial Sequence: Synthetic oligonucleotide
  Antisense strand to SEQ ID NO: 520189
uauuaccagcacuuguuac

SEQ ID NO: 520191 - RNA, 19 nt, Artificial Sequence
  Description of Artificial Sequence: Synthetic oligonucleotide
  Sense strand starting at position 573 of SEQ ID NO: 317888
uacagaaacguuugugaag

SEQ ID NO: 520192 - RNA, 19 nt, Artificial Sequence
  Description of Artificial Sequence: Synthetic oligonucleotide
  Antisense strand to SEQ ID NO: 520191
cuucacaaacguuucugua

SEQ ID NO: 520193 - RNA, 19 nt, Artificial Sequence
  Description of Artificial Sequence: Synthetic oligonucleotide
  Sense strand starting at position 574 of SEQ ID NO: 317888
acagaaacguuugugaaga

SEQ ID NO: 520194 - RNA, 19 nt, Artificial Sequence
  Description of Artificial Sequence: Synthetic oligonucleotide
  Antisense strand to SEQ ID NO: 520193
ucuucacaaacguuucugu

SEQ ID NO: 520195 - RNA, 19 nt, Artificial Sequence
  Description of Artificial Sequence: Synthetic oligonucleotide
  Sense strand starting at position 694 of SEQ ID NO: 317888
cuuacaaaguaaguuaaga

SEQ ID NO: 520196 - RNA, 19 nt, Artificial Sequence
  Description of Artificial Sequence: Synthetic oligonucleotide
  Antisense strand to SEQ ID NO: 520195
ucuuaacuuacuuuguaag

SEQ ID NO: 520197 - RNA, 19 nt, Artificial Sequence
  Description of Artificial Sequence: Synthetic oligonucleotide
  Sense strand starting at position 765 of SEQ ID NO: 317888
aucguuauuugggaaacaa

SEQ ID NO: 520198 - RNA, 19 nt, Artificial Sequence
  Description of Artificial Sequence: Synthetic oligonucleotide
  Antisense strand to SEQ ID NO: 520197
uuguuucccaaauaacgau

SEQ ID NO: 520199 - RNA, 19 nt, Artificial Sequence
  Description of Artificial Sequence: Synthetic oligonucleotide
  Sense strand starting at position 877 of SEQ ID NO: 317888
ccuauaugcagcuagagga

SEQ ID NO: 520200 - RNA, 19 nt, Artificial Sequence
  Description of Artificial Sequence: Synthetic oligonucleotide
  Antisense strand to SEQ ID NO: 520199
uccucuagcugcauauagg

SEQ ID NO: 520201 - RNA, 19 nt, Artificial Sequence
  Description of Artificial Sequence: Synthetic oligonucleotide
  Sense strand starting at position 890 of SEQ ID NO: 317888
agaggaaacacacguuauu

SEQ ID NO: 520202 - RNA, 19 nt, Artificial Sequence
  Description of Artificial Sequence: Synthetic oligonucleotide
  Antisense strand to SEQ ID NO: 520201
aauaacguguguuuccucu

SEQ ID NO: 520203 - RNA, 19 nt, Artificial Sequence
  Description of Artificial Sequence: Synthetic oligonucleotide
  Sense strand starting at position 957 of SEQ ID NO: 317888
acguacauuucuuuguuua

SEQ ID NO: 520204 - RNA, 19 nt, Artificial Sequence
  Description of Artificial Sequence: Synthetic oligonucleotide
  Antisense strand to SEQ ID NO: 520203
uaaacaaagaaauguacgu

SEQ ID NO: 520205 - RNA, 19 nt, Artificial Sequence
  Description of Artificial Sequence: Synthetic oligonucleotide
  Sense strand starting at position 958 of SEQ ID NO: 317888
cguacauuucuuuguuuaa

SEQ ID NO: 520206 - RNA, 19 nt, Artificial Sequence
  Description of Artificial Sequence: Synthetic oligonucleotide
  Antisense strand to SEQ ID NO: 520205
uuaaacaaagaaauguacg

SEQ ID NO: 520207 - RNA, 19 nt, Artificial Sequence
  Description of Artificial Sequence: Synthetic oligonucleotide
  Sense strand starting at position 1242 of SEQ ID NO: 317888
ugccauccucuguaauuga

SEQ ID NO: 520208 - RNA, 19 nt, Artificial Sequence
  Description of Artificial Sequence: Synthetic oligonucleotide
  Antisense strand to SEQ ID NO: 520207
ucaauuacagaggauggca

SEQ ID NO: 520209 - RNA, 19 nt, Artificial Sequence
  Description of Artificial Sequence: Synthetic oligonucleotide
  Sense strand starting at position 2178 of SEQ ID NO: 317888
cgguccucacccugaaauc

SEQ ID NO: 520210 - RNA, 19 nt, Artificial Sequence
  Description of Artificial Sequence: Synthetic oligonucleotide
  Antisense strand to SEQ ID NO: 520209
gauuucagggugaggaccg

SEQ ID NO: 520211 - RNA, 19 nt, Artificial Sequence
  Description of Artificial Sequence: Synthetic oligonucleotide
  Sense strand starting at position 2179 of SEQ ID NO: 317888
gguccucacccugaaaucu

SEQ ID NO: 520212 - RNA, 19 nt, Artificial Sequence
  Description of Artificial Sequence: Synthetic oligonucleotide
  Antisense strand to SEQ ID NO: 520211
agauuucagggugaggacc

SEQ ID NO: 520213 - RNA, 19 nt, Artificial Sequence
  Description of Artificial Sequence: Synthetic oligonucleotide
  Sense strand starting at position 2324 of SEQ ID NO: 317888
gggucugugauuugcaagu

SEQ ID NO: 520214 - RNA, 19 nt, Artificial Sequence
  Description of Artificial Sequence: Synthetic oligonucleotide
  Antisense strand to SEQ ID NO: 520213
acuugcaaaucacagaccc

SEQ ID NO: 520215 - RNA, 19 nt, Artificial Sequence
  Description of Artificial Sequence: Synthetic oligonucleotide
  Sense strand starting at position 2386 of SEQ ID NO: 317888
aggcgcuaagaagauaaau

SEQ ID NO: 520216 - RNA, 19 nt, Artificial Sequence
  Description of Artificial Sequence: Synthetic oligonucleotide
  Antisense strand to SEQ ID NO: 520215
auuuaucuucuuagcgccu

SEQ ID NO: 520217 - RNA, 19 nt, Artificial Sequence
  Description of Artificial Sequence: Synthetic oligonucleotide
  Sense strand starting at position 2698 of SEQ ID NO: 317888
uugucuccugaauggagaa

SEQ ID NO: 520218 - RNA, 19 nt, Artificial Sequence
  Description of Artificial Sequence: Synthetic oligonucleotide
  Antisense strand to SEQ ID NO: 520217
uucuccauucaggagacaa

SEQ ID NO: 520219 - RNA, 19 nt, Artificial Sequence
  Description of Artificial Sequence: Synthetic oligonucleotide
  Sense strand starting at position 2699 of SEQ ID NO: 317888
ugucuccugaauggagaaa

SEQ ID NO: 520220 - RNA, 19 nt, Artificial Sequence
  Description of Artificial Sequence: Synthetic oligonucleotide
  Antisense strand to SEQ ID NO: 520219
uuucuccauucaggagaca

SEQ ID NO: 520221 - RNA, 19 nt, Artificial Sequence
  Description of Artificial Sequence: Synthetic oligonucleotide
  Sense strand starting at position 3193 of SEQ ID NO: 317888
gcuggagaguuuguaauga

SEQ ID NO: 520222 - RNA, 19 nt, Artificial Sequence
  Description of Artificial Sequence: Synthetic oligonucleotide
  Antisense strand to SEQ ID NO: 520221
ucauuacaaacucuccagc

SEQ ID NO: 520223 - RNA, 19 nt, Artificial Sequence
  Description of Artificial Sequence: Synthetic oligonucleotide
  Sense strand starting at position 3198 of SEQ ID NO: 317888
agaguuuguaaugagcuca

SEQ ID NO: 520224 - RNA, 19 nt, Artificial Sequence
  Description of Artificial Sequence: Synthetic oligonucleotide
  Antisense strand to SEQ ID NO: 520223
ugagcucauuacaaacucu

SEQ ID NO: 520225 - RNA, 19 nt, Artificial Sequence
  Description of Artificial Sequence: Synthetic oligonucleotide
  Sense strand starting at position 3203 of SEQ ID NO: 317888
uuguaaugagcucaaucuu

SEQ ID NO: 520226 - RNA, 19 nt, Artificial Sequence
  Description of Artificial Sequence: Synthetic oligonucleotide
  Antisense strand to SEQ ID NO: 520225
aagauugagcucauuacaa

SEQ ID NO: 520227 - RNA, 19 nt, Artificial Sequence
  Description of Artificial Sequence: Synthetic oligonucleotide
  Sense strand starting at position 3247 of SEQ ID NO: 317888
cccuuauguguuggcauuu

SEQ ID NO: 520228 - RNA, 19 nt, Artificial Sequence
  Description of Artificial Sequence: Synthetic oligonucleotide
  Antisense strand to SEQ ID NO: 520227
aaaugccaacacauaaggg

SEQ ID NO: 520229 - RNA, 19 nt, Artificial Sequence
  Description of Artificial Sequence: Synthetic oligonucleotide
  Sense strand starting at position 3343 of SEQ ID NO: 317888
accagagcuuguccucuua

SEQ ID NO: 520230 - RNA, 19 nt, Artificial Sequence
  Description of Artificial Sequence: Synthetic oligonucleotide
  Antisense strand to SEQ ID NO: 520229
uaagaggacaagcucuggu

SEQ ID NO: 520231 - RNA, 19 nt, Artificial Sequence
  Description of Artificial Sequence: Synthetic oligonucleotide
  Sense strand starting at position 3455 of SEQ ID NO: 317888
caaggcugcuagucucaaa

SEQ ID NO: 520232 - RNA, 19 nt, Artificial Sequence
  Description of Artificial Sequence: Synthetic oligonucleotide
  Antisense strand to SEQ ID NO: 520231
uuugagacuagcagccuug

SEQ ID NO: 520233 - RNA, 19 nt, Artificial Sequence
  Description of Artificial Sequence: Synthetic oligonucleotide
  Sense strand starting at position 3584 of SEQ ID NO: 317888
gaacuccaccugugugaga

SEQ ID NO: 520234 - RNA, 19 nt, Artificial Sequence
  Description of Artificial Sequence: Synthetic oligonucleotide
  Antisense strand to SEQ ID NO: 520233
ucucacacagguggaguuc

SEQ ID NO: 520235 - RNA, 19 nt, Artificial Sequence
  Description of Artificial Sequence: Synthetic oligonucleotide
  Sense strand starting at position 3625 of SEQ ID NO: 317888
gaaguuguuagaggccuuu

SEQ ID NO: 520236 - RNA, 19 nt, Artificial Sequence
  Description of Artificial Sequence: Synthetic oligonucleotide
  Antisense strand to SEQ ID NO: 520235
aaaggccucuaacaacuuc

SEQ ID NO: 520237 - RNA, 19 nt, Artificial Sequence
  Description of Artificial Sequence: Synthetic oligonucleotide
  Sense strand starting at position 3635 of SEQ ID NO: 317888
gaggccuuucuuuaugcga

SEQ ID NO: 520238 - RNA, 19 nt, Artificial Sequence
  Description of Artificial Sequence: Synthetic oligonucleotide
  Antisense strand to SEQ ID NO: 520237
ucgcauaaagaaaggccuc

SEQ ID NO: 520239 - RNA, 19 nt, Artificial Sequence
  Description of Artificial Sequence: Synthetic oligonucleotide
  Sense strand starting at position 3744 of SEQ ID NO: 317888
aaaugauucucugugaugc

SEQ ID NO: 520240 - RNA, 19 nt, Artificial Sequence
  Description of Artificial Sequence: Synthetic oligonucleotide
  Antisense strand to SEQ ID NO: 520239
gcaucacagagaaucauuu

SEQ ID NO: 520241 - RNA, 19 nt, Artificial Sequence
  Description of Artificial Sequence: Synthetic oligonucleotide
  Sense strand starting at position 3745 of SEQ ID NO: 317888
aaugauucucugugaugcu

SEQ ID NO: 520242 - RNA, 19 nt, Artificial Sequence
  Description of Artificial Sequence: Synthetic oligonucleotide
  Antisense strand to SEQ ID NO: 520241
agcaucacagagaaucauu

SEQ ID NO: 520243 - RNA, 19 nt, Artificial Sequence
  Description of Artificial Sequence: Synthetic oligonucleotide
  Sense strand starting at position 3787 of SEQ ID NO: 317888
uugauauuauggcuaccau

SEQ ID NO: 520244 - RNA, 19 nt, Artificial Sequence
  Description of Artificial Sequence: Synthetic oligonucleotide
  Antisense strand to SEQ ID NO: 520243
augguagccauaauaucaa

SEQ ID NO: 520245 - RNA, 19 nt, Artificial Sequence
  Description of Artificial Sequence: Synthetic oligonucleotide
  Sense strand starting at position 3788 of SEQ ID NO: 317888
ugauauuauggcuaccauu

SEQ ID NO: 520246 - RNA, 19 nt, Artificial Sequence
  Description of Artificial Sequence: Synthetic oligonucleotide
  Antisense strand to SEQ ID NO: 520245
aaugguagccauaauauca

SEQ ID NO: 520247 - RNA, 19 nt, Artificial Sequence
  Description of Artificial Sequence: Synthetic oligonucleotide
  Sense strand starting at position 3826 of SEQ ID NO: 317888
accagaccuucuuugaagu

SEQ ID NO: 520248 - RNA, 19 nt, Artificial Sequence
  Description of Artificial Sequence: Synthetic oligonucleotide
  Antisense strand to SEQ ID NO: 520247
acuucaaagaaggucuggu

SEQ ID NO: 520249 - RNA, 19 nt, Artificial Sequence
  Description of Artificial Sequence: Synthetic oligonucleotide
  Sense strand starting at position 89 of SEQ ID NO: 317889
gaaugcaucuaguuugaug

SEQ ID NO: 520250 - RNA, 19 nt, Artificial Sequence
  Description of Artificial Sequence: Synthetic oligonucleotide
  Antisense strand to SEQ ID NO: 520249
caucaaacuagaugcauuc

SEQ ID NO: 520251 - RNA, 19 nt, Artificial Sequence
  Description of Artificial Sequence: Synthetic oligonucleotide
  Sense strand starting at position 232 of SEQ ID NO: 317889
augugaaugaggugugauu

SEQ ID NO: 520252 - RNA, 19 nt, Artificial Sequence
  Description of Artificial Sequence: Synthetic oligonucleotide
  Antisense strand to SEQ ID NO: 520251
aaucacaccucauucacau

SEQ ID NO: 520253 - RNA, 19 nt, Artificial Sequence
  Description of Artificial Sequence: Synthetic oligonucleotide
  Sense strand starting at position 234 of SEQ ID NO: 317889
gugaaugaggugugauuca

SEQ ID NO: 520254 - RNA, 19 nt, Artificial Sequence
  Description of Artificial Sequence: Synthetic oligonucleotide
  Antisense strand to SEQ ID NO: 520253
ugaaucacaccucauucac

SEQ ID NO: 520255 - RNA, 19 nt, Artificial Sequence
  Description of Artificial Sequence: Synthetic oligonucleotide
  Sense strand starting at position 257 of SEQ ID NO: 317889
ggccuuugagaguauucca

SEQ ID NO: 520256 - RNA, 19 nt, Artificial Sequence
  Description of Artificial Sequence: Synthetic oligonucleotide
  Antisense strand to SEQ ID NO: 520255
uggaauacucucaaaggcc

SEQ ID NO: 520257 - RNA, 19 nt, Artificial Sequence
  Description of Artificial Sequence: Synthetic oligonucleotide
  Sense strand starting at position 260 of SEQ ID NO: 317889
cuuugagaguauuccauca

SEQ ID NO: 520258 - RNA, 19 nt, Artificial Sequence
  Description of Artificial Sequence: Synthetic oligonucleotide
  Antisense strand to SEQ ID NO: 520257
ugauggaauacucucaaag

SEQ ID NO: 520259 - RNA, 19 nt, Artificial Sequence
  Description of Artificial Sequence: Synthetic oligonucleotide
  Sense strand starting at position 531 of SEQ ID NO: 317889
ccucucagacgucaauaca

SEQ ID NO: 520260 - RNA, 19 nt, Artificial Sequence
  Description of Artificial Sequence: Synthetic oligonucleotide
  Antisense strand to SEQ ID NO: 520259
uguauugacgucugagagg

SEQ ID NO: 520261 - RNA, 19 nt, Artificial Sequence
  Description of Artificial Sequence: Synthetic oligonucleotide
  Sense strand starting at position 592 of SEQ ID NO: 317889
aacugucauccgcagaauc

SEQ ID NO: 520262 - RNA, 19 nt, Artificial Sequence
  Description of Artificial Sequence: Synthetic oligonucleotide
  Antisense strand to SEQ ID NO: 520261
gauucugcggaugacaguu

SEQ ID NO: 520263 - RNA, 19 nt, Artificial Sequence
  Description of Artificial Sequence: Synthetic oligonucleotide
  Sense strand starting at position 594 of SEQ ID NO: 317889
cugucauccgcagaaucca

SEQ ID NO: 520264 - RNA, 19 nt, Artificial Sequence
  Description of Artificial Sequence: Synthetic oligonucleotide
  Antisense strand to SEQ ID NO: 520263
uggauucugcggaugacag

SEQ ID NO: 520265 - RNA, 19 nt, Artificial Sequence
  Description of Artificial Sequence: Synthetic oligonucleotide
  Sense strand starting at position 602 of SEQ ID NO: 317889
cgcagaauccacugaucca

SEQ ID NO: 520266 - RNA, 19 nt, Artificial Sequence
  Description of Artificial Sequence: Synthetic oligonucleotide
  Antisense strand to SEQ ID NO: 520265
uggaucaguggauucugcg

SEQ ID NO: 520267 - RNA, 19 nt, Artificial Sequence
  Description of Artificial Sequence: Synthetic oligonucleotide
  Sense strand starting at position 617 of SEQ ID NO: 317889
uccacagcgcucugauuua

SEQ ID NO: 520268 - RNA, 19 nt, Artificial Sequence
  Description of Artificial Sequence: Synthetic oligonucleotide
  Antisense strand to SEQ ID NO: 520267
uaaaucagagcgcugugga

SEQ ID NO: 520269 - RNA, 19 nt, Artificial Sequence
  Description of Artificial Sequence: Synthetic oligonucleotide
  Sense strand starting at position 633 of SEQ ID NO: 317889
uuagguugcacaugggaaa

SEQ ID NO: 520270 - RNA, 19 nt, Artificial Sequence
  Description of Artificial Sequence: Synthetic oligonucleotide
  Antisense strand to SEQ ID NO: 520269
uuucccaugugcaaccuaa

SEQ ID NO: 520271 - RNA, 19 nt, Artificial Sequence
  Description of Artificial Sequence: Synthetic oligonucleotide
  Sense strand starting at position 830 of SEQ ID NO: 317889
ugccacucauuaguuauua

SEQ ID NO: 520272 - RNA, 19 nt, Artificial Sequence
  Description of Artificial Sequence: Synthetic oligonucleotide
  Antisense strand to SEQ ID NO: 520271
uaauaacuaaugaguggca

SEQ ID NO: 520273 - RNA, 19 nt, Artificial Sequence
  Description of Artificial Sequence: Synthetic oligonucleotide
  Sense strand starting at position 834 of SEQ ID NO: 317889
acucauuaguuauuagaca

SEQ ID NO: 520274 - RNA, 19 nt, Artificial Sequence
  Description of Artificial Sequence: Synthetic oligonucleotide
  Antisense strand to SEQ ID NO: 520273
ugucuaauaacuaaugagu

SEQ ID NO: 520275 - RNA, 19 nt, Artificial Sequence
  Description of Artificial Sequence: Synthetic oligonucleotide
  Sense strand starting at position 1030 of SEQ ID NO: 317889
auaaacugauggcuuguaa

SEQ ID NO: 520276 - RNA, 19 nt, Artificial Sequence
  Description of Artificial Sequence: Synthetic oligonucleotide
  Antisense strand to SEQ ID NO: 520275
uuacaagccaucaguuuau

SEQ ID NO: 520277 - RNA, 19 nt, Artificial Sequence
  Description of Artificial Sequence: Synthetic oligonucleotide
  Sense strand starting at position 1398 of SEQ ID NO: 317889
cgugcuguugaccagaaau

SEQ ID NO: 520278 - RNA, 19 nt, Artificial Sequence
  Description of Artificial Sequence: Synthetic oligonucleotide
  Antisense strand to SEQ ID NO: 520277
auuucuggucaacagcacg

SEQ ID NO: 520279 - RNA, 19 nt, Artificial Sequence
  Description of Artificial Sequence: Synthetic oligonucleotide
  Sense strand starting at position 1400 of SEQ ID NO: 317889
ugcuguugaccagaaauca

SEQ ID NO: 520280 - RNA, 19 nt, Artificial Sequence
  Description of Artificial Sequence: Synthetic oligonucleotide
  Antisense strand to SEQ ID NO: 520279
ugauuucuggucaacagca

SEQ ID NO: 520281 - RNA, 19 nt, Artificial Sequence
  Description of Artificial Sequence: Synthetic oligonucleotide
  Sense strand starting at position 2183 of SEQ ID NO: 317889
guugcuaagaucuauggca

SEQ ID NO: 520282 - RNA, 19 nt, Artificial Sequence
  Description of Artificial Sequence: Synthetic oligonucleotide
  Antisense strand to SEQ ID NO: 520281
ugccauagaucuuagcaac

SEQ ID NO: 520283 - RNA, 19 nt, Artificial Sequence
  Description of Artificial Sequence: Synthetic oligonucleotide
  Sense strand starting at position 2686 of SEQ ID NO: 317889
cuaggcuucuuggucaaga

SEQ ID NO: 520284 - RNA, 19 nt, Artificial Sequence
  Description of Artificial Sequence: Synthetic oligonucleotide
  Antisense strand to SEQ ID NO: 520283
ucuugaccaagaagccuag

SEQ ID NO: 520285 - RNA, 19 nt, Artificial Sequence
  Description of Artificial Sequence: Synthetic oligonucleotide
  Sense strand starting at position 2687 of SEQ ID NO: 317889
uaggcuucuuggucaagaa

SEQ ID NO: 520286 - RNA, 19 nt, Artificial Sequence
  Description of Artificial Sequence: Synthetic oligonucleotide
  Antisense strand to SEQ ID NO: 520285
uucuugaccaagaagccua

SEQ ID NO: 520287 - RNA, 19 nt, Artificial Sequence
  Description of Artificial Sequence: Synthetic oligonucleotide
  Sense strand starting at position 2688 of SEQ ID NO: 317889
aggcuucuuggucaagaau

SEQ ID NO: 520288 - RNA, 19 nt, Artificial Sequence
  Description of Artificial Sequence: Synthetic oligonucleotide
  Antisense strand to SEQ ID NO: 520287
auucuugaccaagaagccu

SEQ ID NO: 520289 - RNA, 19 nt, Artificial Sequence
  Description of Artificial Sequence: Synthetic oligonucleotide
  Sense strand starting at position 2784 of SEQ ID NO: 317889
cuccucuucuuaucaggua

SEQ ID NO: 520290 - RNA, 19 nt, Artificial Sequence
  Description of Artificial Sequence: Synthetic oligonucleotide
  Antisense strand to SEQ ID NO: 520289
uaccugauaagaagaggag

SEQ ID NO: 520291 - RNA, 19 nt, Artificial Sequence
  Description of Artificial Sequence: Synthetic oligonucleotide
  Sense strand starting at position 2799 of SEQ ID NO: 317889
gguacuauugggugcuuaa

SEQ ID NO: 520292 - RNA, 19 nt, Artificial Sequence
  Description of Artificial Sequence: Synthetic oligonucleotide
  Antisense strand to SEQ ID NO: 520291
uuaagcacccaauaguacc

SEQ ID NO: 520293 - RNA, 19 nt, Artificial Sequence
  Description of Artificial Sequence: Synthetic oligonucleotide
  Sense strand starting at position 2802 of SEQ ID NO: 317889
acuauugggugcuuaacau

SEQ ID NO: 520294 - RNA, 19 nt, Artificial Sequence
  Description of Artificial Sequence: Synthetic oligonucleotide
  Antisense strand to SEQ ID NO: 520293
auguuaagcacccaauagu

SEQ ID NO: 520295 - RNA, 19 nt, Artificial Sequence
  Description of Artificial Sequence: Synthetic oligonucleotide
  Sense strand starting at position 2808 of SEQ ID NO: 317889
gggugcuuaacaugauaua

SEQ ID NO: 520296 - RNA, 19 nt, Artificial Sequence
  Description of Artificial Sequence: Synthetic oligonucleotide
  Antisense strand to SEQ ID NO: 520295
uauaucauguuaagcaccc

SEQ ID NO: 520297 - RNA, 19 nt, Artificial Sequence
  Description of Artificial Sequence: Synthetic oligonucleotide
  Sense strand starting at position 2809 of SEQ ID NO: 317889
ggugcuuaacaugauauau

SEQ ID NO: 520298 - RNA, 19 nt, Artificial Sequence
  Description of Artificial Sequence: Synthetic oligonucleotide
  Antisense strand to SEQ ID NO: 520297
auauaucauguuaagcacc

SEQ ID NO: 520299 - RNA, 19 nt, Artificial Sequence
  Description of Artificial Sequence: Synthetic oligonucleotide
  Sense strand starting at position 2842 of SEQ ID NO: 317889
auaaucuuacaagguaagu

SEQ ID NO: 520300 - RNA, 19 nt, Artificial Sequence
  Description of Artificial Sequence: Synthetic oligonucleotide
  Antisense strand to SEQ ID NO: 520299
acuuaccuuguaagauuau

SEQ ID NO: 520301 - RNA, 19 nt, Artificial Sequence
  Description of Artificial Sequence: Synthetic oligonucleotide
  Sense strand starting at position 2890 of SEQ ID NO: 317889
cugaguuaagaguaguuaa

SEQ ID NO: 520302 - RNA, 19 nt, Artificial Sequence
  Description of Artificial Sequence: Synthetic oligonucleotide
  Antisense strand to SEQ ID NO: 520301
uuaacuacucuuaacucag

SEQ ID NO: 520303 - RNA, 19 nt, Artificial Sequence
  Description of Artificial Sequence: Synthetic oligonucleotide
  Sense strand starting at position 2893 of SEQ ID NO: 317889
aguuaagaguaguuaagua

SEQ ID NO: 520304 - RNA, 19 nt, Artificial Sequence
  Description of Artificial Sequence: Synthetic oligonucleotide
  Antisense strand to SEQ ID NO: 520303
uacuuaacuacucuuaacu

SEQ ID NO: 520305 - RNA, 19 nt, Artificial Sequence
  Description of Artificial Sequence: Synthetic oligonucleotide
  Sense strand starting at position 2932 of SEQ ID NO: 317889
uuuauaacuggcugagcua

SEQ ID NO: 520306 - RNA, 19 nt, Artificial Sequence
  Description of Artificial Sequence: Synthetic oligonucleotide
  Antisense strand to SEQ ID NO: 520305
uagcucagccaguuauaaa

SEQ ID NO: 520307 - RNA, 19 nt, Artificial Sequence
  Description of Artificial Sequence: Synthetic oligonucleotide
  Sense strand starting at position 2933 of SEQ ID NO: 317889
uuauaacuggcugagcuaa

SEQ ID NO: 520308 - RNA, 19 nt, Artificial Sequence
  Description of Artificial Sequence: Synthetic oligonucleotide
  Antisense strand to SEQ ID NO: 520307
uuagcucagccaguuauaa

SEQ ID NO: 520309 - RNA, 19 nt, Artificial Sequence
  Description of Artificial Sequence: Synthetic oligonucleotide
  Sense strand starting at position 3049 of SEQ ID NO: 317889
accauauguugaucauucu

SEQ ID NO: 520310 - RNA, 19 nt, Artificial Sequence
  Description of Artificial Sequence: Synthetic oligonucleotide
  Antisense strand to SEQ ID NO: 520309
agaaugaucaacauauggu

SEQ ID NO: 520311 - RNA, 19 nt, Artificial Sequence
  Description of Artificial Sequence: Synthetic oligonucleotide
  Sense strand starting at position 3050 of SEQ ID NO: 317889
ccauauguugaucauucuu

SEQ ID NO: 520312 - RNA, 19 nt, Artificial Sequence
  Description of Artificial Sequence: Synthetic oligonucleotide
  Antisense strand to SEQ ID NO: 520311
aagaaugaucaacauaugg

SEQ ID NO: 520313 - RNA, 19 nt, Artificial Sequence
  Description of Artificial Sequence: Synthetic oligonucleotide
  Sense strand starting at position 3086 of SEQ ID NO: 317889
ucauacaucgcuuaaguua

SEQ ID NO: 520314 - RNA, 19 nt, Artificial Sequence
  Description of Artificial Sequence: Synthetic oligonucleotide
  Antisense strand to SEQ ID NO: 520313
uaacuuaagcgauguauga

SEQ ID NO: 520315 - RNA, 19 nt, Artificial Sequence
  Description of Artificial Sequence: Synthetic oligonucleotide
  Sense strand starting at position 3592 of SEQ ID NO: 317889
ccaagacuuguaggacauu

SEQ ID NO: 520316 - RNA, 19 nt, Artificial Sequence
  Description of Artificial Sequence: Synthetic oligonucleotide
  Antisense strand to SEQ ID NO: 520315
aauguccuacaagucuugg

SEQ ID NO: 520317 - RNA, 19 nt, Artificial Sequence
  Description of Artificial Sequence: Synthetic oligonucleotide
  Sense strand starting at position 3644 of SEQ ID NO: 317889
auggauauaugccuccaau

SEQ ID NO: 520318 - RNA, 19 nt, Artificial Sequence
  Description of Artificial Sequence: Synthetic oligonucleotide
  Antisense strand to SEQ ID NO: 520317
auuggaggcauauauccau

SEQ ID NO: 520319 - RNA, 19 nt, Artificial Sequence
  Description of Artificial Sequence: Synthetic oligonucleotide
  Sense strand starting at position 3671 of SEQ ID NO: 317889
augcccauugcuugauaaa

SEQ ID NO: 520320 - RNA, 19 nt, Artificial Sequence
  Description of Artificial Sequence: Synthetic oligonucleotide
  Antisense strand to SEQ ID NO: 520319
uuuaucaagcaaugggcau

SEQ ID NO: 520321 - RNA, 19 nt, Artificial Sequence
  Description of Artificial Sequence: Synthetic oligonucleotide
  Sense strand starting at position 3672 of SEQ ID NO: 317889
ugcccauugcuugauaaag

SEQ ID NO: 520322 - RNA, 19 nt, Artificial Sequence
  Description of Artificial Sequence: Synthetic oligonucleotide
  Antisense strand to SEQ ID NO: 520321
cuuuaucaagcaaugggca

SEQ ID NO: 520323 - RNA, 19 nt, Artificial Sequence
  Description of Artificial Sequence: Synthetic oligonucleotide
  Sense strand starting at position 3689 of SEQ ID NO: 317889
agucaacacacguguaaga

SEQ ID NO: 520324 - RNA, 19 nt, Artificial Sequence
  Description of Artificial Sequence: Synthetic oligonucleotide
  Antisense strand to SEQ ID NO: 520323
ucuuacacguguguugacu

SEQ ID NO: 520325 - RNA, 19 nt, Artificial Sequence
  Description of Artificial Sequence: Synthetic oligonucleotide
  Sense strand starting at position 3702 of SEQ ID NO: 317889
guaagaugguauguagauc

SEQ ID NO: 520326 - RNA, 19 nt, Artificial Sequence
  Description of Artificial Sequence: Synthetic oligonucleotide
  Antisense strand to SEQ ID NO: 520325
gaucuacauaccaucuuac

SEQ ID NO: 520327 - RNA, 19 nt, Artificial Sequence
  Description of Artificial Sequence: Synthetic oligonucleotide
  Sense strand starting at position 3845 of SEQ ID NO: 317889
ucauguacucaacaaaggu

SEQ ID NO: 520328 - RNA, 19 nt, Artificial Sequence
  Description of Artificial Sequence: Synthetic oligonucleotide
  Antisense strand to SEQ ID NO: 520327
accuuuguugaguacauga

SEQ ID NO: 520329 - RNA, 19 nt, Artificial Sequence
  Description of Artificial Sequence: Synthetic oligonucleotide
  Sense strand starting at position 62 of SEQ ID NO: 317890
aaggguugguuauucucau

SEQ ID NO: 520330 - RNA, 19 nt, Artificial Sequence
  Description of Artificial Sequence: Synthetic oligonucleotide
  Antisense strand to SEQ ID NO: 520329
augagaauaaccaacccuu

SEQ ID NO: 520331 - RNA, 19 nt, Artificial Sequence
  Description of Artificial Sequence: Synthetic oligonucleotide
  Sense strand starting at position 63 of SEQ ID NO: 317890
aggguugguuauucucauu

SEQ ID NO: 520332 - RNA, 19 nt, Artificial Sequence
  Description of Artificial Sequence: Synthetic oligonucleotide
  Antisense strand to SEQ ID NO: 520331
aaugagaauaaccaacccu

SEQ ID NO: 520333 - RNA, 19 nt, Artificial Sequence
  Description of Artificial Sequence: Synthetic oligonucleotide
  Sense strand starting at position 147 of SEQ ID NO: 317890
agcacuaggccuugaaacu

SEQ ID NO: 520334 - RNA, 19 nt, Artificial Sequence
  Description of Artificial Sequence: Synthetic oligonucleotide
  Antisense strand to SEQ ID NO: 520333
aguuucaaggccuagugcu

SEQ ID NO: 520335 - RNA, 19 nt, Artificial Sequence
  Description of Artificial Sequence: Synthetic oligonucleotide
  Sense strand starting at position 381 of SEQ ID NO: 317890
ucuuuccucuuuggaaaga

SEQ ID NO: 520336 - RNA, 19 nt, Artificial Sequence
  Description of Artificial Sequence: Synthetic oligonucleotide
  Antisense strand to SEQ ID NO: 520335
ucuuuccaaagaggaaaga

SEQ ID NO: 520337 - RNA, 19 nt, Artificial Sequence
  Description of Artificial Sequence: Synthetic oligonucleotide
  Sense strand starting at position 382 of SEQ ID NO: 317890
cuuuccucuuuggaaagau

SEQ ID NO: 520338 - RNA, 19 nt, Artificial Sequence
  Description of Artificial Sequence: Synthetic oligonucleotide
  Antisense strand to SEQ ID NO: 520337
aucuuuccaaagaggaaag

SEQ ID NO: 520339 - RNA, 19 nt, Artificial Sequence
  Description of Artificial Sequence: Synthetic oligonucleotide
  Sense strand starting at position 402 of SEQ ID NO: 317890
cagaaauggugguuuaaag

SEQ ID NO: 520340 - RNA, 19 nt, Artificial Sequence
  Description of Artificial Sequence: Synthetic oligonucleotide
  Antisense strand to SEQ ID NO: 520339
cuuuaaaccaccauuucug

SEQ ID NO: 520341 - RNA, 19 nt, Artificial Sequence
  Description of Artificial Sequence: Synthetic oligonucleotide
  Sense strand starting at position 511 of SEQ ID NO: 317890
aauacaugguuggugcaaa

SEQ ID NO: 520342 - RNA, 19 nt, Artificial Sequence
  Description of Artificial Sequence: Synthetic oligonucleotide
  Antisense strand to SEQ ID NO: 520341
uuugcaccaaccauguauu

SEQ ID NO: 520343 - RNA, 19 nt, Artificial Sequence
  Description of Artificial Sequence: Synthetic oligonucleotide
  Sense strand starting at position 799 of SEQ ID NO: 317890
aagaaauugcucugugguu

SEQ ID NO: 520344 - RNA, 19 nt, Artificial Sequence
  Description of Artificial Sequence: Synthetic oligonucleotide
  Antisense strand to SEQ ID NO: 520343
aaccacagagcaauuucuu

SEQ ID NO: 520345 - RNA, 19 nt, Artificial Sequence
  Description of Artificial Sequence: Synthetic oligonucleotide
  Sense strand starting at position 800 of SEQ ID NO: 317890
agaaauugcucugugguuc

SEQ ID NO: 520346 - RNA, 19 nt, Artificial Sequence
  Description of Artificial Sequence: Synthetic oligonucleotide
  Antisense strand to SEQ ID NO: 520345
gaaccacagagcaauuucu

SEQ ID NO: 520347 - RNA, 19 nt, Artificial Sequence
  Description of Artificial Sequence: Synthetic oligonucleotide
  Sense strand starting at position 801 of SEQ ID NO: 317890
gaaauugcucugugguucu

SEQ ID NO: 520348 - RNA, 19 nt, Artificial Sequence
  Description of Artificial Sequence: Synthetic oligonucleotide
  Antisense strand to SEQ ID NO: 520347
agaaccacagagcaauuuc

SEQ ID NO: 520349 - RNA, 19 nt, Artificial Sequence
  Description of Artificial Sequence: Synthetic oligonucleotide
  Sense strand starting at position 883 of SEQ ID NO: 317890
aggcucuugucacuuaguu

SEQ ID NO: 520350 - RNA, 19 nt, Artificial Sequence
  Description of Artificial Sequence: Synthetic oligonucleotide
  Antisense strand to SEQ ID NO: 520349
aacuaagugacaagagccu

SEQ ID NO: 520351 - RNA, 19 nt, Artificial Sequence
  Description of Artificial Sequence: Synthetic oligonucleotide
  Sense strand starting at position 1041 of SEQ ID NO: 317890
uggcaugaaugagaaagaa

SEQ ID NO: 520352 - RNA, 19 nt, Artificial Sequence
  Description of Artificial Sequence: Synthetic oligonucleotide
  Antisense strand to SEQ ID NO: 520351
uucuuucucauucaugcca

SEQ ID NO: 520353 - RNA, 19 nt, Artificial Sequence
  Description of Artificial Sequence: Synthetic oligonucleotide
  Sense strand starting at position 1366 of SEQ ID NO: 317890
gaggccuucccggagcuaa

SEQ ID NO: 520354 - RNA, 19 nt, Artificial Sequence
  Description of Artificial Sequence: Synthetic oligonucleotide
  Antisense strand to SEQ ID NO: 520353
uuagcuccgggaaggccuc

SEQ ID NO: 520355 - RNA, 19 nt, Artificial Sequence
  Description of Artificial Sequence: Synthetic oligonucleotide
  Sense strand starting at position 1744 of SEQ ID NO: 317890
cgcaguuucucacaggacu

SEQ ID NO: 520356 - RNA, 19 nt, Artificial Sequence
  Description of Artificial Sequence: Synthetic oligonucleotide
  Antisense strand to SEQ ID NO: 520355
aguccugugagaaacugcg

SEQ ID NO: 520357 - RNA, 19 nt, Artificial Sequence
  Description of Artificial Sequence: Synthetic oligonucleotide
  Sense strand starting at position 1766 of SEQ ID NO: 317890
uguacuuacuauugaggca

SEQ ID NO: 520358 - RNA, 19 nt, Artificial Sequence
  Description of Artificial Sequence: Synthetic oligonucleotide
  Antisense strand to SEQ ID NO: 520357
ugccucaauaguaaguaca

SEQ ID NO: 520359 - RNA, 19 nt, Artificial Sequence
  Description of Artificial Sequence: Synthetic oligonucleotide
  Sense strand starting at position 1771 of SEQ ID NO: 317890
uuacuauugaggcaguagu

SEQ ID NO: 520360 - RNA, 19 nt, Artificial Sequence
  Description of Artificial Sequence: Synthetic oligonucleotide
  Antisense strand to SEQ ID NO: 520359
acuacugccucaauaguaa

SEQ ID NO: 520361 - RNA, 19 nt, Artificial Sequence
  Description of Artificial Sequence: Synthetic oligonucleotide
  Sense strand starting at position 2026 of SEQ ID NO: 317890
cucuucucggcuuauugaa

SEQ ID NO: 520362 - RNA, 19 nt, Artificial Sequence
  Description of Artificial Sequence: Synthetic oligonucleotide
  Antisense strand to SEQ ID NO: 520361
uucaauaagccgagaagag

SEQ ID NO: 520363 - RNA, 19 nt, Artificial Sequence
  Description of Artificial Sequence: Synthetic oligonucleotide
  Sense strand starting at position 2066 of SEQ ID NO: 317890
agaagauguuuagaaucag

SEQ ID NO: 520364 - RNA, 19 nt, Artificial Sequence
  Description of Artificial Sequence: Synthetic oligonucleotide
  Antisense strand to SEQ ID NO: 520363
cugauucuaaacaucuucu

SEQ ID NO: 520365 - RNA, 19 nt, Artificial Sequence
  Description of Artificial Sequence: Synthetic oligonucleotide
  Sense strand starting at position 2078 of SEQ ID NO: 317890
gaaucagcugucugacacu

SEQ ID NO: 520366 - RNA, 19 nt, Artificial Sequence
  Description of Artificial Sequence: Synthetic oligonucleotide
  Antisense strand to SEQ ID NO: 520365
agugucagacagcugauuc

SEQ ID NO: 520367 - RNA, 19 nt, Artificial Sequence
  Description of Artificial Sequence: Synthetic oligonucleotide
  Sense strand starting at position 2156 of SEQ ID NO: 317890
cuccuugcucaagaguuac

SEQ ID NO: 520368 - RNA, 19 nt, Artificial Sequence
  Description of Artificial Sequence: Synthetic oligonucleotide
  Antisense strand to SEQ ID NO: 520367
guaacucuugagcaaggag

SEQ ID NO: 520369 - RNA, 19 nt, Artificial Sequence
  Description of Artificial Sequence: Synthetic oligonucleotide
  Sense strand starting at position 2167 of SEQ ID NO: 317890
agaguuacuuaccuuguca

SEQ ID NO: 520370 - RNA, 19 nt, Artificial Sequence
  Description of Artificial Sequence: Synthetic oligonucleotide
  Antisense strand to SEQ ID NO: 520369
ugacaagguaaguaacucu

SEQ ID NO: 520371 - RNA, 19 nt, Artificial Sequence
  Description of Artificial Sequence: Synthetic oligonucleotide
  Sense strand starting at position 2169 of SEQ ID NO: 317890
aguuacuuaccuugucaau

SEQ ID NO: 520372 - RNA, 19 nt, Artificial Sequence
  Description of Artificial Sequence: Synthetic oligonucleotide
  Antisense strand to SEQ ID NO: 520371
auugacaagguaaguaacu

SEQ ID NO: 520373 - RNA, 19 nt, Artificial Sequence
  Description of Artificial Sequence: Synthetic oligonucleotide
  Sense strand starting at position 2444 of SEQ ID NO: 317890
ucaucagagcuugaaguga

SEQ ID NO: 520374 - RNA, 19 nt, Artificial Sequence
  Description of Artificial Sequence: Synthetic oligonucleotide
  Antisense strand to SEQ ID NO: 520373
ucacuucaagcucugauga

SEQ ID NO: 520375 - RNA, 19 nt, Artificial Sequence
  Description of Artificial Sequence: Synthetic oligonucleotide
  Sense strand starting at position 2480 of SEQ ID NO: 317890
gcucuuuguaguugguuua

SEQ ID NO: 520376 - RNA, 19 nt, Artificial Sequence
  Description of Artificial Sequence: Synthetic oligonucleotide
  Antisense strand to SEQ ID NO: 520375
uaaaccaacuacaaagagc

SEQ ID NO: 520377 - RNA, 19 nt, Artificial Sequence
  Description of Artificial Sequence: Synthetic oligonucleotide
  Sense strand starting at position 2481 of SEQ ID NO: 317890
cucuuuguaguugguuuaa

SEQ ID NO: 520378 - RNA, 19 nt, Artificial Sequence
  Description of Artificial Sequence: Synthetic oligonucleotide
  Antisense strand to SEQ ID NO: 520377
uuaaaccaacuacaaagag

SEQ ID NO: 520379 - RNA, 19 nt, Artificial Sequence
  Description of Artificial Sequence: Synthetic oligonucleotide
  Sense strand starting at position 2483 of SEQ ID NO: 317890
cuuuguaguugguuuaaau

SEQ ID NO: 520380 - RNA, 19 nt, Artificial Sequence
  Description of Artificial Sequence: Synthetic oligonucleotide
  Antisense strand to SEQ ID NO: 520379
auuuaaaccaacuacaaag

SEQ ID NO: 520381 - RNA, 19 nt, Artificial Sequence
  Description of Artificial Sequence: Synthetic oligonucleotide
  Sense strand starting at position 2492 of SEQ ID NO: 317890
ugguuuaaauguuguaaac

SEQ ID NO: 520382 - RNA, 19 nt, Artificial Sequence
  Description of Artificial Sequence: Synthetic oligonucleotide
  Antisense strand to SEQ ID NO: 520381
guuuacaacauuuaaacca

SEQ ID NO: 520383 - RNA, 19 nt, Artificial Sequence
  Description of Artificial Sequence: Synthetic oligonucleotide
  Sense strand starting at position 2805 of SEQ ID NO: 317890
gcgccuggccaacaugauu

SEQ ID NO: 520384 - RNA, 19 nt, Artificial Sequence
  Description of Artificial Sequence: Synthetic oligonucleotide
  Antisense strand to SEQ ID NO: 520383
aaucauguuggccaggcgc

SEQ ID NO: 520385 - RNA, 19 nt, Artificial Sequence
  Description of Artificial Sequence: Synthetic oligonucleotide
  Sense strand starting at position 2810 of SEQ ID NO: 317890
uggccaacaugauuauauu

SEQ ID NO: 520386 - RNA, 19 nt, Artificial Sequence
  Description of Artificial Sequence: Synthetic oligonucleotide
  Antisense strand to SEQ ID NO: 520385
aauauaaucauguuggcca

SEQ ID NO: 520387 - RNA, 19 nt, Artificial Sequence
  Description of Artificial Sequence: Synthetic oligonucleotide
  Sense strand starting at position 3070 of SEQ ID NO: 317890
ccuauagugcuguggaaca

SEQ ID NO: 520388 - RNA, 19 nt, Artificial Sequence
  Description of Artificial Sequence: Synthetic oligonucleotide
  Antisense strand to SEQ ID NO: 520387
uguuccacagcacuauagg

SEQ ID NO: 520389 - RNA, 19 nt, Artificial Sequence
  Description of Artificial Sequence: Synthetic oligonucleotide
  Sense strand starting at position 3209 of SEQ ID NO: 317890
uggcaauggccucacugau

SEQ ID NO: 520390 - RNA, 19 nt, Artificial Sequence
  Description of Artificial Sequence: Synthetic oligonucleotide
  Antisense strand to SEQ ID NO: 520389
aucagugaggccauugcca

SEQ ID NO: 520391 - RNA, 19 nt, Artificial Sequence
  Description of Artificial Sequence: Synthetic oligonucleotide
  Sense strand starting at position 3216 of SEQ ID NO: 317890
ggccucacugauuaguuga

SEQ ID NO: 520392 - RNA, 19 nt, Artificial Sequence
  Description of Artificial Sequence: Synthetic oligonucleotide
  Antisense strand to SEQ ID NO: 520391
ucaacuaaucagugaggcc

SEQ ID NO: 520393 - RNA, 19 nt, Artificial Sequence
  Description of Artificial Sequence: Synthetic oligonucleotide
  Sense strand starting at position 3218 of SEQ ID NO: 317890
ccucacugauuaguugaaa

SEQ ID NO: 520394 - RNA, 19 nt, Artificial Sequence
  Description of Artificial Sequence: Synthetic oligonucleotide
  Antisense strand to SEQ ID NO: 520393
uuucaacuaaucagugagg

SEQ ID NO: 520395 - RNA, 19 nt, Artificial Sequence
  Description of Artificial Sequence: Synthetic oligonucleotide
  Sense strand starting at position 3219 of SEQ ID NO: 317890
cucacugauuaguugaaau

SEQ ID NO: 520396 - RNA, 19 nt, Artificial Sequence
  Description of Artificial Sequence: Synthetic oligonucleotide
  Antisense strand to SEQ ID NO: 520395
auuucaacuaaucagugag

SEQ ID NO: 520397 - RNA, 19 nt, Artificial Sequence
  Description of Artificial Sequence: Synthetic oligonucleotide
  Sense strand starting at position 3221 of SEQ ID NO: 317890
cacugauuaguugaaaugu

SEQ ID NO: 520398 - RNA, 19 nt, Artificial Sequence
  Description of Artificial Sequence: Synthetic oligonucleotide
  Antisense strand to SEQ ID NO: 520397
acauuucaacuaaucagug

SEQ ID NO: 520399 - RNA, 19 nt, Artificial Sequence
  Description of Artificial Sequence: Synthetic oligonucleotide
  Sense strand starting at position 3398 of SEQ ID NO: 317890
uaaagaguuggucaggugu

SEQ ID NO: 520400 - RNA, 19 nt, Artificial Sequence
  Description of Artificial Sequence: Synthetic oligonucleotide
  Antisense strand to SEQ ID NO: 520399
acaccugaccaacucuuua

SEQ ID NO: 520401 - RNA, 19 nt, Artificial Sequence
  Description of Artificial Sequence: Synthetic oligonucleotide
  Sense strand starting at position 3555 of SEQ ID NO: 317890
agggcaugccuguaaucuc

SEQ ID NO: 520402 - RNA, 19 nt, Artificial Sequence
  Description of Artificial Sequence: Synthetic oligonucleotide
  Antisense strand to SEQ ID NO: 520401
gagauuacaggcaugcccu

SEQ ID NO: 520403 - RNA, 19 nt, Artificial Sequence
  Description of Artificial Sequence: Synthetic oligonucleotide
  Sense strand starting at position 3814 of SEQ ID NO: 317890
agcagcauccuugauggau

SEQ ID NO: 520404 - RNA, 19 nt, Artificial Sequence
  Description of Artificial Sequence: Synthetic oligonucleotide
  Antisense strand to SEQ ID NO: 520403
auccaucaaggaugcugcu

SEQ ID NO: 520405 - RNA, 19 nt, Artificial Sequence
  Description of Artificial Sequence: Synthetic oligonucleotide
  Sense strand starting at position 3906 of SEQ ID NO: 317890
ggaccauucuacuagguac

SEQ ID NO: 520406 - RNA, 19 nt, Artificial Sequence
  Description of Artificial Sequence: Synthetic oligonucleotide
  Antisense strand to SEQ ID NO: 520405
guaccuaguagaauggucc

SEQ ID NO: 520407 - RNA, 19 nt, Artificial Sequence
  Description of Artificial Sequence: Synthetic oligonucleotide
  Sense strand starting at position 3909 of SEQ ID NO: 317890
ccauucuacuagguacaga

SEQ ID NO: 520408 - RNA, 19 nt, Artificial Sequence
  Description of Artificial Sequence: Synthetic oligonucleotide
  Antisense strand to SEQ ID NO: 520407
ucuguaccuaguagaaugg

SEQ ID NO: 520409 - RNA, 19 nt, Artificial Sequence
  Description of Artificial Sequence: Synthetic oligonucleotide
  Sense strand starting at position 759 of SEQ ID NO: 317891
gaggccugguuacuggaaa

SEQ ID NO: 520410 - RNA, 19 nt, Artificial Sequence
  Description of Artificial Sequence: Synthetic oligonucleotide
  Antisense strand to SEQ ID NO: 520409
uuuccaguaaccaggccuc

SEQ ID NO: 520411 - RNA, 19 nt, Artificial Sequence
  Description of Artificial Sequence: Synthetic oligonucleotide
  Sense strand starting at position 834 of SEQ ID NO: 317891
accauugacucccgaggua

SEQ ID NO: 520412 - RNA, 19 nt, Artificial Sequence
  Description of Artificial Sequence: Synthetic oligonucleotide
  Antisense strand to SEQ ID NO: 520411
uaccucgggagucaauggu

SEQ ID NO: 520413 - RNA, 19 nt, Artificial Sequence
  Description of Artificial Sequence: Synthetic oligonucleotide
  Sense strand starting at position 843 of SEQ ID NO: 317891
ucccgagguaguuaauaau

SEQ ID NO: 520414 - RNA, 19 nt, Artificial Sequence
  Description of Artificial Sequence: Synthetic oligonucleotide
  Antisense strand to SEQ ID NO: 520413
auuauuaacuaccucggga

SEQ ID NO: 520415 - RNA, 19 nt, Artificial Sequence
  Description of Artificial Sequence: Synthetic oligonucleotide
  Sense strand starting at position 846 of SEQ ID NO: 317891
cgagguaguuaauaauuga

SEQ ID NO: 520416 - RNA, 19 nt, Artificial Sequence
  Description of Artificial Sequence: Synthetic oligonucleotide
  Antisense strand to SEQ ID NO: 520415
ucaauuauuaacuaccucg

SEQ ID NO: 520417 - RNA, 19 nt, Artificial Sequence
  Description of Artificial Sequence: Synthetic oligonucleotide
  Sense strand starting at position 849 of SEQ ID NO: 317891
gguaguuaauaauugauag

SEQ ID NO: 520418 - RNA, 19 nt, Artificial Sequence
  Description of Artificial Sequence: Synthetic oligonucleotide
  Antisense strand to SEQ ID NO: 520417
cuaucaauuauuaacuacc

SEQ ID NO: 520419 - RNA, 19 nt, Artificial Sequence
  Description of Artificial Sequence: Synthetic oligonucleotide
  Sense strand starting at position 1327 of SEQ ID NO: 317891
cggcucucauucuaagauc

SEQ ID NO: 520420 - RNA, 19 nt, Artificial Sequence
  Description of Artificial Sequence: Synthetic oligonucleotide
  Antisense strand to SEQ ID NO: 520419
gaucuuagaaugagagccg

SEQ ID NO: 520421 - RNA, 19 nt, Artificial Sequence
  Description of Artificial Sequence: Synthetic oligonucleotide
  Sense strand starting at position 1348 of SEQ ID NO: 317891
ggagcacuccugcggugaa

SEQ ID NO: 520422 - RNA, 19 nt, Artificial Sequence
  Description of Artificial Sequence: Synthetic oligonucleotide
  Antisense strand to SEQ ID NO: 520421
uucaccgcaggagugcucc

SEQ ID NO: 520423 - RNA, 19 nt, Artificial Sequence
  Description of Artificial Sequence: Synthetic oligonucleotide
  Sense strand starting at position 2076 of SEQ ID NO: 317891
ugacguacauggccauaua

SEQ ID NO: 520424 - RNA, 19 nt, Artificial Sequence
  Description of Artificial Sequence: Synthetic oligonucleotide
  Antisense strand to SEQ ID NO: 520423
uauauggccauguacguca

SEQ ID NO: 520425 - RNA, 19 nt, Artificial Sequence
  Description of Artificial Sequence: Synthetic oligonucleotide
  Sense strand starting at position 2077 of SEQ ID NO: 317891
gacguacauggccauauau

SEQ ID NO: 520426 - RNA, 19 nt, Artificial Sequence
  Description of Artificial Sequence: Synthetic oligonucleotide
  Antisense strand to SEQ ID NO: 520425
auauauggccauguacguc

SEQ ID NO: 520427 - RNA, 19 nt, Artificial Sequence
  Description of Artificial Sequence: Synthetic oligonucleotide
  Sense strand starting at position 2577 of SEQ ID NO: 317891
ggcuccuaggcgugaacua

SEQ ID NO: 520428 - RNA, 19 nt, Artificial Sequence
  Description of Artificial Sequence: Synthetic oligonucleotide
  Antisense strand to SEQ ID NO: 520427
uaguucacgccuaggagcc

SEQ ID NO: 520429 - RNA, 19 nt, Artificial Sequence
  Description of Artificial Sequence: Synthetic oligonucleotide
  Sense strand starting at position 2644 of SEQ ID NO: 317891
ggguucuaucgcugucauc

SEQ ID NO: 520430 - RNA, 19 nt, Artificial Sequence
  Description of Artificial Sequence: Synthetic oligonucleotide
  Antisense strand to SEQ ID NO: 520429
gaugacagcgauagaaccc

SEQ ID NO: 520431 - RNA, 19 nt, Artificial Sequence
  Description of Artificial Sequence: Synthetic oligonucleotide
  Sense strand starting at position 2802 of SEQ ID NO: 317891
uccgggugucgcugggaaa

SEQ ID NO: 520432 - RNA, 19 nt, Artificial Sequence
  Description of Artificial Sequence: Synthetic oligonucleotide
  Antisense strand to SEQ ID NO: 520431
uuucccagcgacacccgga

SEQ ID NO: 520433 - RNA, 19 nt, Artificial Sequence
  Description of Artificial Sequence: Synthetic oligonucleotide
  Sense strand starting at position 2803 of SEQ ID NO: 317891
ccgggugucgcugggaaau

SEQ ID NO: 520434 - RNA, 19 nt, Artificial Sequence
  Description of Artificial Sequence: Synthetic oligonucleotide
  Antisense strand to SEQ ID NO: 520433
auuucccagcgacacccgg

SEQ ID NO: 520435 - RNA, 19 nt, Artificial Sequence
  Description of Artificial Sequence: Synthetic oligonucleotide
  Sense strand starting at position 2804 of SEQ ID NO: 317891
cgggugucgcugggaaauu

SEQ ID NO: 520436 - RNA, 19 nt, Artificial Sequence
  Description of Artificial Sequence: Synthetic oligonucleotide
  Antisense strand to SEQ ID NO: 520435
aauuucccagcgacacccg

SEQ ID NO: 520437 - RNA, 19 nt, Artificial Sequence
  Description of Artificial Sequence: Synthetic oligonucleotide
  Sense strand starting at position 2841 of SEQ ID NO: 317891
ccacuugguucuugggaca

SEQ ID NO: 520438 - RNA, 19 nt, Artificial Sequence
  Description of Artificial Sequence: Synthetic oligonucleotide
  Antisense strand to SEQ ID NO: 520437
ugucccaagaaccaagugg

SEQ ID NO: 520439 - RNA, 19 nt, Artificial Sequence
  Description of Artificial Sequence: Synthetic oligonucleotide
  Sense strand starting at position 3020 of SEQ ID NO: 317891
ccaagagaggccugauucu

SEQ ID NO: 520440 - RNA, 19 nt, Artificial Sequence
  Description of Artificial Sequence: Synthetic oligonucleotide
  Antisense strand to SEQ ID NO: 520439
agaaucaggccucucuugg

SEQ ID NO: 520441 - RNA, 19 nt, Artificial Sequence
  Description of Artificial Sequence: Synthetic oligonucleotide
  Sense strand starting at position 3029 of SEQ ID NO: 317891
gccugauucuuguucucac

SEQ ID NO: 520442 - RNA, 19 nt, Artificial Sequence
  Description of Artificial Sequence: Synthetic oligonucleotide
  Antisense strand to SEQ ID NO: 520441
gugagaacaagaaucaggc

SEQ ID NO: 520443 - RNA, 19 nt, Artificial Sequence
  Description of Artificial Sequence: Synthetic oligonucleotide
  Sense strand starting at position 3036 of SEQ ID NO: 317891
ucuuguucucaccaggaga

SEQ ID NO: 520444 - RNA, 19 nt, Artificial Sequence
  Description of Artificial Sequence: Synthetic oligonucleotide
  Antisense strand to SEQ ID NO: 520443
ucuccuggugagaacaaga

SEQ ID NO: 520445 - RNA, 19 nt, Artificial Sequence
  Description of Artificial Sequence: Synthetic oligonucleotide
  Sense strand starting at position 3038 of SEQ ID NO: 317891
uuguucucaccaggagaua

SEQ ID NO: 520446 - RNA, 19 nt, Artificial Sequence
  Description of Artificial Sequence: Synthetic oligonucleotide
  Antisense strand to SEQ ID NO: 520445
uaucuccuggugagaacaa

SEQ ID NO: 520447 - RNA, 19 nt, Artificial Sequence
  Description of Artificial Sequence: Synthetic oligonucleotide
  Sense strand starting at position 3049 of SEQ ID NO: 317891
aggagauaaugguccuugu

SEQ ID NO: 520448 - RNA, 19 nt, Artificial Sequence
  Description of Artificial Sequence: Synthetic oligonucleotide
  Antisense strand to SEQ ID NO: 520447
acaaggaccauuaucuccu

SEQ ID NO: 520449 - RNA, 19 nt, Artificial Sequence
  Description of Artificial Sequence: Synthetic oligonucleotide
  Sense strand starting at position 3052 of SEQ ID NO: 317891
agauaaugguccuuguggu

SEQ ID NO: 520450 - RNA, 19 nt, Artificial Sequence
  Description of Artificial Sequence: Synthetic oligonucleotide
  Antisense strand to SEQ ID NO: 520449
accacaaggaccauuaucu

SEQ ID NO: 520451 - RNA, 19 nt, Artificial Sequence
  Description of Artificial Sequence: Synthetic oligonucleotide
  Sense strand starting at position 3501 of SEQ ID NO: 317891
gaacgauucccgcaggucu

SEQ ID NO: 520452 - RNA, 19 nt, Artificial Sequence
  Description of Artificial Sequence: Synthetic oligonucleotide
  Antisense strand to SEQ ID NO: 520451
agaccugcgggaaucguuc

SEQ ID NO: 520453 - RNA, 19 nt, Artificial Sequence
  Description of Artificial Sequence: Synthetic oligonucleotide
  Sense strand starting at position 3797 of SEQ ID NO: 317891
ggguguaacuuucuuggac

SEQ ID NO: 520454 - RNA, 19 nt, Artificial Sequence
  Description of Artificial Sequence: Synthetic oligonucleotide
  Antisense strand to SEQ ID NO: 520453
guccaagaaaguuacaccc

SEQ ID NO: 520455 - RNA, 19 nt, Artificial Sequence
  Description of Artificial Sequence: Synthetic oligonucleotide
  Sense strand starting at position 3798 of SEQ ID NO: 317891
gguguaacuuucuuggacu

SEQ ID NO: 520456 - RNA, 19 nt, Artificial Sequence
  Description of Artificial Sequence: Synthetic oligonucleotide
  Antisense strand to SEQ ID NO: 520455
aguccaagaaaguuacacc

SEQ ID NO: 520457 - RNA, 19 nt, Artificial Sequence
  Description of Artificial Sequence: Synthetic oligonucleotide
  Sense strand starting at position 3799 of SEQ ID NO: 317891
guguaacuuucuuggacuu

SEQ ID NO: 520458 - RNA, 19 nt, Artificial Sequence
  Description of Artificial Sequence: Synthetic oligonucleotide
  Antisense strand to SEQ ID NO: 520457
aaguccaagaaaguuacac

SEQ ID NO: 520459 - RNA, 19 nt, Artificial Sequence
  Description of Artificial Sequence: Synthetic oligonucleotide
  Sense strand starting at position 3800 of SEQ ID NO: 317891
uguaacuuucuuggacuua

SEQ ID NO: 520460 - RNA, 19 nt, Artificial Sequence
  Description of Artificial Sequence: Synthetic oligonucleotide
  Antisense strand to SEQ ID NO: 520459
uaaguccaagaaaguuaca

SEQ ID NO: 520461 - RNA, 19 nt, Artificial Sequence
  Description of Artificial Sequence: Synthetic oligonucleotide
  Sense strand starting at position 3801 of SEQ ID NO: 317891
guaacuuucuuggacuuaa

SEQ ID NO: 520462 - RNA, 19 nt, Artificial Sequence
  Description of Artificial Sequence: Synthetic oligonucleotide
  Antisense strand to SEQ ID NO: 520461
uuaaguccaagaaaguuac

SEQ ID NO: 520463 - RNA, 19 nt, Artificial Sequence
  Description of Artificial Sequence: Synthetic oligonucleotide
  Sense strand starting at position 3945 of SEQ ID NO: 317891
ugucuaccgaguuguccau

SEQ ID NO: 520464 - RNA, 19 nt, Artificial Sequence
  Description of Artificial Sequence: Synthetic oligonucleotide
  Antisense strand to SEQ ID NO: 520463
auggacaacucgguagaca

SEQ ID NO: 520465 - RNA, 19 nt, Artificial Sequence
  Description of Artificial Sequence: Synthetic oligonucleotide
  Sense strand starting at position 29 of SEQ ID NO: 317892
ggcaauggaaugugaaacu

SEQ ID NO: 520466 - RNA, 19 nt, Artificial Sequence
  Description of Artificial Sequence: Synthetic oligonucleotide
  Antisense strand to SEQ ID NO: 520465
aguuucacauuccauugcc

SEQ ID NO: 520467 - RNA, 19 nt, Artificial Sequence
  Description of Artificial Sequence: Synthetic oligonucleotide
  Sense strand starting at position 430 of SEQ ID NO: 317892
agaauuguauaucuagcca

SEQ ID NO: 520468 - RNA, 19 nt, Artificial Sequence
  Description of Artificial Sequence: Synthetic oligonucleotide
  Antisense strand to SEQ ID NO: 520467
uggcuagauauacaauucu

SEQ ID NO: 520469 - RNA, 19 nt, Artificial Sequence
  Description of Artificial Sequence: Synthetic oligonucleotide
  Sense strand starting at position 446 of SEQ ID NO: 317892
ccauaaauauguguauguu

SEQ ID NO: 520470 - RNA, 19 nt, Artificial Sequence
  Description of Artificial Sequence: Synthetic oligonucleotide
  Antisense strand to SEQ ID NO: 520469
aacauacacauauuuaugg

SEQ ID NO: 520471 - RNA, 19 nt, Artificial Sequence
  Description of Artificial Sequence: Synthetic oligonucleotide
  Sense strand starting at position 467 of SEQ ID NO: 317892
uauauaaggugucugugua

SEQ ID NO: 520472 - RNA, 19 nt, Artificial Sequence
  Description of Artificial Sequence: Synthetic oligonucleotide
  Antisense strand to SEQ ID NO: 520471
uacacagacaccuuauaua

SEQ ID NO: 520473 - RNA, 19 nt, Artificial Sequence
  Description of Artificial Sequence: Synthetic oligonucleotide
  Sense strand starting at position 474 of SEQ ID NO: 317892
ggugucuguguauaaugua

SEQ ID NO: 520474 - RNA, 19 nt, Artificial Sequence
  Description of Artificial Sequence: Synthetic oligonucleotide
  Antisense strand to SEQ ID NO: 520473
uacauuauacacagacacc

SEQ ID NO: 520475 - RNA, 19 nt, Artificial Sequence
  Description of Artificial Sequence: Synthetic oligonucleotide
  Sense strand starting at position 497 of SEQ ID NO: 317892
guaugugauaaguauguau

SEQ ID NO: 520476 - RNA, 19 nt, Artificial Sequence
  Description of Artificial Sequence: Synthetic oligonucleotide
  Antisense strand to SEQ ID NO: 520475
auacauacuuaucacauac

SEQ ID NO: 520477 - RNA, 19 nt, Artificial Sequence
  Description of Artificial Sequence: Synthetic oligonucleotide
  Sense strand starting at position 500 of SEQ ID NO: 317892
ugugauaaguauguauaug

SEQ ID NO: 520478 - RNA, 19 nt, Artificial Sequence
  Description of Artificial Sequence: Synthetic oligonucleotide
  Antisense strand to SEQ ID NO: 520477
cauauacauacuuaucaca

SEQ ID NO: 520479 - RNA, 19 nt, Artificial Sequence
  Description of Artificial Sequence: Synthetic oligonucleotide
  Sense strand starting at position 501 of SEQ ID NO: 317892
gugauaaguauguauaugu

SEQ ID NO: 520480 - RNA, 19 nt, Artificial Sequence
  Description of Artificial Sequence: Synthetic oligonucleotide
  Antisense strand to SEQ ID NO: 520479
acauauacauacuuaucac

SEQ ID NO: 520481 - RNA, 19 nt, Artificial Sequence
  Description of Artificial Sequence: Synthetic oligonucleotide
  Sense strand starting at position 745 of SEQ ID NO: 317892
uagccaguccuguacagau

SEQ ID NO: 520482 - RNA, 19 nt, Artificial Sequence
  Description of Artificial Sequence: Synthetic oligonucleotide
  Antisense strand to SEQ ID NO: 520481
aucuguacaggacuggcua

SEQ ID NO: 520483 - RNA, 19 nt, Artificial Sequence
  Description of Artificial Sequence: Synthetic oligonucleotide
  Sense strand starting at position 747 of SEQ ID NO: 317892
gccaguccuguacagauga

SEQ ID NO: 520484 - RNA, 19 nt, Artificial Sequence
  Description of Artificial Sequence: Synthetic oligonucleotide
  Antisense strand to SEQ ID NO: 520483
ucaucuguacaggacuggc

SEQ ID NO: 520485 - RNA, 19 nt, Artificial Sequence
  Description of Artificial Sequence: Synthetic oligonucleotide
  Sense strand starting at position 752 of SEQ ID NO: 317892
uccuguacagaugaucauu

SEQ ID NO: 520486 - RNA, 19 nt, Artificial Sequence
  Description of Artificial Sequence: Synthetic oligonucleotide
  Antisense strand to SEQ ID NO: 520485
aaugaucaucuguacagga

SEQ ID NO: 520487 - RNA, 19 nt, Artificial Sequence
  Description of Artificial Sequence: Synthetic oligonucleotide
  Sense strand starting at position 882 of SEQ ID NO: 317892
gggagcuguuggcuccaaa

SEQ ID NO: 520488 - RNA, 19 nt, Artificial Sequence
  Description of Artificial Sequence: Synthetic oligonucleotide
  Antisense strand to SEQ ID NO: 520487
uuuggagccaacagcuccc

SEQ ID NO: 520489 - RNA, 19 nt, Artificial Sequence
  Description of Artificial Sequence: Synthetic oligonucleotide
  Sense strand starting at position 906 of SEQ ID NO: 317892
augcauuuaugcuugguaa

SEQ ID NO: 520490 - RNA, 19 nt, Artificial Sequence
  Description of Artificial Sequence: Synthetic oligonucleotide
  Antisense strand to SEQ ID NO: 520489
uuaccaagcauaaaugcau

SEQ ID NO: 520491 - RNA, 19 nt, Artificial Sequence
  Description of Artificial Sequence: Synthetic oligonucleotide
  Sense strand starting at position 907 of SEQ ID NO: 317892
ugcauuuaugcuugguaaa

SEQ ID NO: 520492 - RNA, 19 nt, Artificial Sequence
  Description of Artificial Sequence: Synthetic oligonucleotide
  Antisense strand to SEQ ID NO: 520491
uuuaccaagcauaaaugca

SEQ ID NO: 520493 - RNA, 19 nt, Artificial Sequence
  Description of Artificial Sequence: Synthetic oligonucleotide
  Sense strand starting at position 908 of SEQ ID NO: 317892
gcauuuaugcuugguaaac

SEQ ID NO: 520494 - RNA, 19 nt, Artificial Sequence
  Description of Artificial Sequence: Synthetic oligonucleotide
  Antisense strand to SEQ ID NO: 520493
guuuaccaagcauaaaugc

SEQ ID NO: 520495 - RNA, 19 nt, Artificial Sequence
  Description of Artificial Sequence: Synthetic oligonucleotide
  Sense strand starting at position 910 of SEQ ID NO: 317892
auuuaugcuugguaaacau

SEQ ID NO: 520496 - RNA, 19 nt, Artificial Sequence
  Description of Artificial Sequence: Synthetic oligonucleotide
  Antisense strand to SEQ ID NO: 520495
auguuuaccaagcauaaau

SEQ ID NO: 520497 - RNA, 19 nt, Artificial Sequence
  Description of Artificial Sequence: Synthetic oligonucleotide
  Sense strand starting at position 917 of SEQ ID NO: 317892
cuugguaaacauugccaga

SEQ ID NO: 520498 - RNA, 19 nt, Artificial Sequence
  Description of Artificial Sequence: Synthetic oligonucleotide
  Antisense strand to SEQ ID NO: 520497
ucuggcaauguuuaccaag

SEQ ID NO: 520499 - RNA, 19 nt, Artificial Sequence
  Description of Artificial Sequence: Synthetic oligonucleotide
  Sense strand starting at position 919 of SEQ ID NO: 317892
ugguaaacauugccagauu

SEQ ID NO: 520500 - RNA, 19 nt, Artificial Sequence
  Description of Artificial Sequence: Synthetic oligonucleotide
  Antisense strand to SEQ ID NO: 520499
aaucuggcaauguuuacca

SEQ ID NO: 520501 - RNA, 19 nt, Artificial Sequence
  Description of Artificial Sequence: Synthetic oligonucleotide
  Sense strand starting at position 1086 of SEQ ID NO: 317892
cugcauuucuggccacagu

SEQ ID NO: 520502 - RNA, 19 nt, Artificial Sequence
  Description of Artificial Sequence: Synthetic oligonucleotide
  Antisense strand to SEQ ID NO: 520501
acuguggccagaaaugcag

SEQ ID NO: 520503 - RNA, 19 nt, Artificial Sequence
  Description of Artificial Sequence: Synthetic oligonucleotide
  Sense strand starting at position 1148 of SEQ ID NO: 317892
ccuagccugcucgaugaaa

SEQ ID NO: 520504 - RNA, 19 nt, Artificial Sequence
  Description of Artificial Sequence: Synthetic oligonucleotide
  Antisense strand to SEQ ID NO: 520503
uuucaucgagcaggcuagg

SEQ ID NO: 520505 - RNA, 19 nt, Artificial Sequence
  Description of Artificial Sequence: Synthetic oligonucleotide
  Sense strand starting at position 1150 of SEQ ID NO: 317892
uagccugcucgaugaaaua

SEQ ID NO: 520506 - RNA, 19 nt, Artificial Sequence
  Description of Artificial Sequence: Synthetic oligonucleotide
  Antisense strand to SEQ ID NO: 520505
uauuucaucgagcaggcua

SEQ ID NO: 520507 - RNA, 19 nt, Artificial Sequence
  Description of Artificial Sequence: Synthetic oligonucleotide
  Sense strand starting at position 1245 of SEQ ID NO: 317892
gucccuuuccucugggaua

SEQ ID NO: 520508 - RNA, 19 nt, Artificial Sequence
  Description of Artificial Sequence: Synthetic oligonucleotide
  Antisense strand to SEQ ID NO: 520507
uaucccagaggaaagggac

SEQ ID NO: 520509 - RNA, 19 nt, Artificial Sequence
  Description of Artificial Sequence: Synthetic oligonucleotide
  Sense strand starting at position 1247 of SEQ ID NO: 317892
cccuuuccucugggauacu

SEQ ID NO: 520510 - RNA, 19 nt, Artificial Sequence
  Description of Artificial Sequence: Synthetic oligonucleotide
  Antisense strand to SEQ ID NO: 520509
aguaucccagaggaaaggg

SEQ ID NO: 520511 - RNA, 19 nt, Artificial Sequence
  Description of Artificial Sequence: Synthetic oligonucleotide
  Sense strand starting at position 1266 of SEQ ID NO: 317892
acagcuucuugggcauaau

SEQ ID NO: 520512 - RNA, 19 nt, Artificial Sequence
  Description of Artificial Sequence: Synthetic oligonucleotide
  Antisense strand to SEQ ID NO: 520511
auuaugcccaagaagcugu

SEQ ID NO: 520513 - RNA, 19 nt, Artificial Sequence
  Description of Artificial Sequence: Synthetic oligonucleotide
  Sense strand starting at position 1269 of SEQ ID NO: 317892
gcuucuugggcauaauucu

SEQ ID NO: 520514 - RNA, 19 nt, Artificial Sequence
  Description of Artificial Sequence: Synthetic oligonucleotide
  Antisense strand to SEQ ID NO: 520513
agaauuaugcccaagaagc

SEQ ID NO: 520515 - RNA, 19 nt, Artificial Sequence
  Description of Artificial Sequence: Synthetic oligonucleotide
  Sense strand starting at position 1319 of SEQ ID NO: 317892
ccuggcauucugugaucau

SEQ ID NO: 520516 - RNA, 19 nt, Artificial Sequence
  Description of Artificial Sequence: Synthetic oligonucleotide
  Antisense strand to SEQ ID NO: 520515
augaucacagaaugccagg

SEQ ID NO: 520517 - RNA, 19 nt, Artificial Sequence
  Description of Artificial Sequence: Synthetic oligonucleotide
  Sense strand starting at position 1454 of SEQ ID NO: 317892
acuugcacucucuauggau

SEQ ID NO: 520518 - RNA, 19 nt, Artificial Sequence
  Description of Artificial Sequence: Synthetic oligonucleotide
  Antisense strand to SEQ ID NO: 520517
auccauagagagugcaagu

SEQ ID NO: 520519 - RNA, 19 nt, Artificial Sequence
  Description of Artificial Sequence: Synthetic oligonucleotide
  Sense strand starting at position 1469 of SEQ ID NO: 317892
ggaucuuguccucacccau

SEQ ID NO: 520520 - RNA, 19 nt, Artificial Sequence
  Description of Artificial Sequence: Synthetic oligonucleotide
  Antisense strand to SEQ ID NO: 520519
augggugaggacaagaucc

SEQ ID NO: 520521 - RNA, 19 nt, Artificial Sequence
  Description of Artificial Sequence: Synthetic oligonucleotide
  Sense strand starting at position 1507 of SEQ ID NO: 317892
ucuggagucucugcuacaa

SEQ ID NO: 520522 - RNA, 19 nt, Artificial Sequence
  Description of Artificial Sequence: Synthetic oligonucleotide
  Antisense strand to SEQ ID NO: 520521
uuguagcagagacuccaga

SEQ ID NO: 520523 - RNA, 19 nt, Artificial Sequence
  Description of Artificial Sequence: Synthetic oligonucleotide
  Sense strand starting at position 2534 of SEQ ID NO: 317892
ggaguaugugaguaugcuc

SEQ ID NO: 520524 - RNA, 19 nt, Artificial Sequence
  Description of Artificial Sequence: Synthetic oligonucleotide
  Antisense strand to SEQ ID NO: 520523
gagcauacucacauacucc

SEQ ID NO: 520525 - RNA, 19 nt, Artificial Sequence
  Description of Artificial Sequence: Synthetic oligonucleotide
  Sense strand starting at position 3028 of SEQ ID NO: 317892
gauggacguguucaugaag

SEQ ID NO: 520526 - RNA, 19 nt, Artificial Sequence
  Description of Artificial Sequence: Synthetic oligonucleotide
  Antisense strand to SEQ ID NO: 520525
cuucaugaacacguccauc

SEQ ID NO: 520527 - RNA, 19 nt, Artificial Sequence
  Description of Artificial Sequence: Synthetic oligonucleotide
  Sense strand starting at position 3232 of SEQ ID NO: 317892
ggguucugggcaggagaau

SEQ ID NO: 520528 - RNA, 19 nt, Artificial Sequence
  Description of Artificial Sequence: Synthetic oligonucleotide
  Antisense strand to SEQ ID NO: 520527
auucuccugcccagaaccc

SEQ ID NO: 520529 - RNA, 19 nt, Artificial Sequence
  Description of Artificial Sequence: Synthetic oligonucleotide
  Sense strand starting at position 3243 of SEQ ID NO: 317892
aggagaauaugagucagca

SEQ ID NO: 520530 - RNA, 19 nt, Artificial Sequence
  Description of Artificial Sequence: Synthetic oligonucleotide
  Antisense strand to SEQ ID NO: 520529
ugcugacucauauucuccu

SEQ ID NO: 520531 - RNA, 19 nt, Artificial Sequence
  Description of Artificial Sequence: Synthetic oligonucleotide
  Sense strand starting at position 3247 of SEQ ID NO: 317892
gaauaugagucagcagaug

SEQ ID NO: 520532 - RNA, 19 nt, Artificial Sequence
  Description of Artificial Sequence: Synthetic oligonucleotide
  Antisense strand to SEQ ID NO: 520531
caucugcugacucauauuc

SEQ ID NO: 520533 - RNA, 19 nt, Artificial Sequence
  Description of Artificial Sequence: Synthetic oligonucleotide
  Sense strand starting at position 3314 of SEQ ID NO: 317892
cugggucuguauccggaaa

SEQ ID NO: 520534 - RNA, 19 nt, Artificial Sequence
  Description of Artificial Sequence: Synthetic oligonucleotide
  Antisense strand to SEQ ID NO: 520533
uuuccggauacagacccag

SEQ ID NO: 520535 - RNA, 19 nt, Artificial Sequence
  Description of Artificial Sequence: Synthetic oligonucleotide
  Sense strand starting at position 3315 of SEQ ID NO: 317892
ugggucuguauccggaaau

SEQ ID NO: 520536 - RNA, 19 nt, Artificial Sequence
  Description of Artificial Sequence: Synthetic oligonucleotide
  Antisense strand to SEQ ID NO: 520535
auuuccggauacagaccca

SEQ ID NO: 520537 - RNA, 19 nt, Artificial Sequence
  Description of Artificial Sequence: Synthetic oligonucleotide
  Sense strand starting at position 3384 of SEQ ID NO: 317892
ggaccagugcagugaugaa

SEQ ID NO: 520538 - RNA, 19 nt, Artificial Sequence
  Description of Artificial Sequence: Synthetic oligonucleotide
  Antisense strand to SEQ ID NO: 520537
uucaucacugcacuggucc

SEQ ID NO: 520539 - RNA, 19 nt, Artificial Sequence
  Description of Artificial Sequence: Synthetic oligonucleotide
  Sense strand starting at position 3473 of SEQ ID NO: 317892
augccaaguacuggguaaa

SEQ ID NO: 520540 - RNA, 19 nt, Artificial Sequence
  Description of Artificial Sequence: Synthetic oligonucleotide
  Antisense strand to SEQ ID NO: 520539
uuuacccaguacuuggcau

SEQ ID NO: 520541 - RNA, 19 nt, Artificial Sequence
  Description of Artificial Sequence: Synthetic oligonucleotide
  Sense strand starting at position 3925 of SEQ ID NO: 317892
aaagaaugguuccugaucu

SEQ ID NO: 520542 - RNA, 19 nt, Artificial Sequence
  Description of Artificial Sequence: Synthetic oligonucleotide
  Antisense strand to SEQ ID NO: 520541
agaucaggaaccauucuuu

SEQ ID NO: 520543 - RNA, 19 nt, Artificial Sequence
  Description of Artificial Sequence: Synthetic oligonucleotide
  Sense strand starting at position 3938 of SEQ ID NO: 317892
ugaucuccugauggugaua

SEQ ID NO: 520544 - RNA, 19 nt, Artificial Sequence
  Description of Artificial Sequence: Synthetic oligonucleotide
  Antisense strand to SEQ ID NO: 520543
uaucaccaucaggagauca

SEQ ID NO: 520545 - RNA, 19 nt, Artificial Sequence
  Description of Artificial Sequence: Synthetic oligonucleotide
  Sense strand starting at position 33 of SEQ ID NO: 317893
ucagcuguguggcugagau

SEQ ID NO: 520546 - RNA, 19 nt, Artificial Sequence
  Description of Artificial Sequence: Synthetic oligonucleotide
  Antisense strand to SEQ ID NO: 520545
aucucagccacacagcuga

SEQ ID NO: 520547 - RNA, 19 nt, Artificial Sequence
  Description of Artificial Sequence: Synthetic oligonucleotide
  Sense strand starting at position 35 of SEQ ID NO: 317893
agcuguguggcugagauga

SEQ ID NO: 520548 - RNA, 19 nt, Artificial Sequence
  Description of Artificial Sequence: Synthetic oligonucleotide
  Antisense strand to SEQ ID NO: 520547
ucaucucagccacacagcu

SEQ ID NO: 520549 - RNA, 19 nt, Artificial Sequence
  Description of Artificial Sequence: Synthetic oligonucleotide
  Sense strand starting at position 86 of SEQ ID NO: 317893
aggcauuucuuugaauguu

SEQ ID NO: 520550 - RNA, 19 nt, Artificial Sequence
  Description of Artificial Sequence: Synthetic oligonucleotide
  Antisense strand to SEQ ID NO: 520549
aacauucaaagaaaugccu

SEQ ID NO: 520551 - RNA, 19 nt, Artificial Sequence
  Description of Artificial Sequence: Synthetic oligonucleotide
  Sense strand starting at position 559 of SEQ ID NO: 317893
cugggacaauucuuaauuc

SEQ ID NO: 520552 - RNA, 19 nt, Artificial Sequence
  Description of Artificial Sequence: Synthetic oligonucleotide
  Antisense strand to SEQ ID NO: 520551
gaauuaagaauugucccag

SEQ ID NO: 520553 - RNA, 19 nt, Artificial Sequence
  Description of Artificial Sequence: Synthetic oligonucleotide
  Sense strand starting at position 860 of SEQ ID NO: 317893
gugucaaauuucccugugu

SEQ ID NO: 520554 - RNA, 19 nt, Artificial Sequence
  Description of Artificial Sequence: Synthetic oligonucleotide
  Antisense strand to SEQ ID NO: 520553
acacagggaaauuugacac

SEQ ID NO: 520555 - RNA, 19 nt, Artificial Sequence
  Description of Artificial Sequence: Synthetic oligonucleotide
  Sense strand starting at position 861 of SEQ ID NO: 317893
ugucaaauuucccugugua

SEQ ID NO: 520556 - RNA, 19 nt, Artificial Sequence
  Description of Artificial Sequence: Synthetic oligonucleotide
  Antisense strand to SEQ ID NO: 520555
uacacagggaaauuugaca

SEQ ID NO: 520557 - RNA, 19 nt, Artificial Sequence
  Description of Artificial Sequence: Synthetic oligonucleotide
  Sense strand starting at position 862 of SEQ ID NO: 317893
gucaaauuucccuguguau

SEQ ID NO: 520558 - RNA, 19 nt, Artificial Sequence
  Description of Artificial Sequence: Synthetic oligonucleotide
  Antisense strand to SEQ ID NO: 520557
auacacagggaaauuugac

SEQ ID NO: 520559 - RNA, 19 nt, Artificial Sequence
  Description of Artificial Sequence: Synthetic oligonucleotide
  Sense strand starting at position 907 of SEQ ID NO: 317893
cuagguucucagcagacaa

SEQ ID NO: 520560 - RNA, 19 nt, Artificial Sequence
  Description of Artificial Sequence: Synthetic oligonucleotide
  Antisense strand to SEQ ID NO: 520559
uugucugcugagaaccuag

SEQ ID NO: 520561 - RNA, 19 nt, Artificial Sequence
  Description of Artificial Sequence: Synthetic oligonucleotide
  Sense strand starting at position 957 of SEQ ID NO: 317893
aaccaagauguggguauaa

SEQ ID NO: 520562 - RNA, 19 nt, Artificial Sequence
  Description of Artificial Sequence: Synthetic oligonucleotide
  Antisense strand to SEQ ID NO: 520561
uuauacccacaucuugguu

SEQ ID NO: 520563 - RNA, 19 nt, Artificial Sequence
  Description of Artificial Sequence: Synthetic oligonucleotide
  Sense strand starting at position 984 of SEQ ID NO: 317893
gggcaucccagcugguaua

SEQ ID NO: 520564 - RNA, 19 nt, Artificial Sequence
  Description of Artificial Sequence: Synthetic oligonucleotide
  Antisense strand to SEQ ID NO: 520563
uauaccagcugggaugccc

SEQ ID NO: 520565 - RNA, 19 nt, Artificial Sequence
  Description of Artificial Sequence: Synthetic oligonucleotide
  Sense strand starting at position 1113 of SEQ ID NO: 317893
uggucucaccagugaaggu

SEQ ID NO: 520566 - RNA, 19 nt, Artificial Sequence
  Description of Artificial Sequence: Synthetic oligonucleotide
  Antisense strand to SEQ ID NO: 520565
accuucacuggugagacca

SEQ ID NO: 520567 - RNA, 19 nt, Artificial Sequence
  Description of Artificial Sequence: Synthetic oligonucleotide
  Sense strand starting at position 1168 of SEQ ID NO: 317893
ugaaauagcaguugugaag

SEQ ID NO: 520568 - RNA, 19 nt, Artificial Sequence
  Description of Artificial Sequence: Synthetic oligonucleotide
  Antisense strand to SEQ ID NO: 520567
cuucacaacugcuauuuca

SEQ ID NO: 520569 - RNA, 19 nt, Artificial Sequence
  Description of Artificial Sequence: Synthetic oligonucleotide
  Sense strand starting at position 1226 of SEQ ID NO: 317893
ggaggagaaacguacuguu

SEQ ID NO: 520570 - RNA, 19 nt, Artificial Sequence
  Description of Artificial Sequence: Synthetic oligonucleotide
  Antisense strand to SEQ ID NO: 520569
aacaguacguuucuccucc

SEQ ID NO: 520571 - RNA, 19 nt, Artificial Sequence
  Description of Artificial Sequence: Synthetic oligonucleotide
  Sense strand starting at position 1301 of SEQ ID NO: 317893
cccgcauaauguccucaaa

SEQ ID NO: 520572 - RNA, 19 nt, Artificial Sequence
  Description of Artificial Sequence: Synthetic oligonucleotide
  Antisense strand to SEQ ID NO: 520571
uuugaggacauuaugcggg

SEQ ID NO: 520573 - RNA, 19 nt, Artificial Sequence
  Description of Artificial Sequence: Synthetic oligonucleotide
  Sense strand starting at position 1303 of SEQ ID NO: 317893
cgcauaauguccucaaagg

SEQ ID NO: 520574 - RNA, 19 nt, Artificial Sequence
  Description of Artificial Sequence: Synthetic oligonucleotide
  Antisense strand to SEQ ID NO: 520573
ccuuugaggacauuaugcg

SEQ ID NO: 520575 - RNA, 19 nt, Artificial Sequence
  Description of Artificial Sequence: Synthetic oligonucleotide
  Sense strand starting at position 1558 of SEQ ID NO: 317893
ggguaaggagcguguguaa

SEQ ID NO: 520576 - RNA, 19 nt, Artificial Sequence
  Description of Artificial Sequence: Synthetic oligonucleotide
  Antisense strand to SEQ ID NO: 520575
uuacacacgcuccuuaccc

SEQ ID NO: 520577 - RNA, 19 nt, Artificial Sequence
  Description of Artificial Sequence: Synthetic oligonucleotide
  Sense strand starting at position 1570 of SEQ ID NO: 317893
uguguaaggcuccaagaac

SEQ ID NO: 520578 - RNA, 19 nt, Artificial Sequence
  Description of Artificial Sequence: Synthetic oligonucleotide
  Antisense strand to SEQ ID NO: 520577
guucuuggagccuuacaca

SEQ ID NO: 520579 - RNA, 19 nt, Artificial Sequence
  Description of Artificial Sequence: Synthetic oligonucleotide
  Sense strand starting at position 1642 of SEQ ID NO: 317893
cuuguugcaucacuuagaa

SEQ ID NO: 520580 - RNA, 19 nt, Artificial Sequence
  Description of Artificial Sequence: Synthetic oligonucleotide
  Antisense strand to SEQ ID NO: 520579
uucuaagugaugcaacaag

SEQ ID NO: 520581 - RNA, 19 nt, Artificial Sequence
  Description of Artificial Sequence: Synthetic oligonucleotide
  Sense strand starting at position 2133 of SEQ ID NO: 317893
uggaaaugcguccaaaguc

SEQ ID NO: 520582 - RNA, 19 nt, Artificial Sequence
  Description of Artificial Sequence: Synthetic oligonucleotide
  Antisense strand to SEQ ID NO: 520581
gacuuuggacgcauuucca

SEQ ID NO: 520583 - RNA, 19 nt, Artificial Sequence
  Description of Artificial Sequence: Synthetic oligonucleotide
  Sense strand starting at position 2320 of SEQ ID NO: 317893
auaguaaagcacuaugauu

SEQ ID NO: 520584 - RNA, 19 nt, Artificial Sequence
  Description of Artificial Sequence: Synthetic oligonucleotide
  Antisense strand to SEQ ID NO: 520583
aaucauagugcuuuacuau

SEQ ID NO: 520585 - RNA, 19 nt, Artificial Sequence
  Description of Artificial Sequence: Synthetic oligonucleotide
  Sense strand starting at position 2328 of SEQ ID NO: 317893
gcacuaugauuagccaaag

SEQ ID NO: 520586 - RNA, 19 nt, Artificial Sequence
  Description of Artificial Sequence: Synthetic oligonucleotide
  Antisense strand to SEQ ID NO: 520585
cuuuggcuaaucauagugc

SEQ ID NO: 520587 - RNA, 19 nt, Artificial Sequence
  Description of Artificial Sequence: Synthetic oligonucleotide
  Sense strand starting at position 2774 of SEQ ID NO: 317893
cuggucaucuuucugaaga

SEQ ID NO: 520588 - RNA, 19 nt, Artificial Sequence
  Description of Artificial Sequence: Synthetic oligonucleotide
  Antisense strand to SEQ ID NO: 520587
ucuucagaaagaugaccag

SEQ ID NO: 520589 - RNA, 19 nt, Artificial Sequence
  Description of Artificial Sequence: Synthetic oligonucleotide
  Sense strand starting at position 2790 of SEQ ID NO: 317893
agaagugguaccuggacua

SEQ ID NO: 520590 - RNA, 19 nt, Artificial Sequence
  Description of Artificial Sequence: Synthetic oligonucleotide
  Antisense strand to SEQ ID NO: 520589
uaguccagguaccacuucu

SEQ ID NO: 520591 - RNA, 19 nt, Artificial Sequence
  Description of Artificial Sequence: Synthetic oligonucleotide
  Sense strand starting at position 2872 of SEQ ID NO: 317893
uugaucucuuugccaguua

SEQ ID NO: 520592 - RNA, 19 nt, Artificial Sequence
  Description of Artificial Sequence: Synthetic oligonucleotide
  Antisense strand to SEQ ID NO: 520591
uaacuggcaaagagaucaa

SEQ ID NO: 520593 - RNA, 19 nt, Artificial Sequence
  Description of Artificial Sequence: Synthetic oligonucleotide
  Sense strand starting at position 2919 of SEQ ID NO: 317893
agggcuuggucuuuagaag

SEQ ID NO: 520594 - RNA, 19 nt, Artificial Sequence
  Description of Artificial Sequence: Synthetic oligonucleotide
  Antisense strand to SEQ ID NO: 520593
cuucuaaagaccaagcccu

SEQ ID NO: 520595 - RNA, 19 nt, Artificial Sequence
  Description of Artificial Sequence: Synthetic oligonucleotide
  Sense strand starting at position 2939 of SEQ ID NO: 317893
aaagaaaggucagagaguu

SEQ ID NO: 520596 - RNA, 19 nt, Artificial Sequence
  Description of Artificial Sequence: Synthetic oligonucleotide
  Antisense strand to SEQ ID NO: 520595
aacucucugaccuuucuuu

SEQ ID NO: 520597 - RNA, 19 nt, Artificial Sequence
  Description of Artificial Sequence: Synthetic oligonucleotide
  Sense strand starting at position 2949 of SEQ ID NO: 317893
cagagaguuuggccuugga

SEQ ID NO: 520598 - RNA, 19 nt, Artificial Sequence
  Description of Artificial Sequence: Synthetic oligonucleotide
  Antisense strand to SEQ ID NO: 520597
uccaaggccaaacucucug

SEQ ID NO: 520599 - RNA, 19 nt, Artificial Sequence
  Description of Artificial Sequence: Synthetic oligonucleotide
  Sense strand starting at position 2952 of SEQ ID NO: 317893
agaguuuggccuuggaguu

SEQ ID NO: 520600 - RNA, 19 nt, Artificial Sequence
  Description of Artificial Sequence: Synthetic oligonucleotide
  Antisense strand to SEQ ID NO: 520599
aacuccaaggccaaacucu

SEQ ID NO: 520601 - RNA, 19 nt, Artificial Sequence
  Description of Artificial Sequence: Synthetic oligonucleotide
  Sense strand starting at position 2953 of SEQ ID NO: 317893
gaguuuggccuuggaguuu

SEQ ID NO: 520602 - RNA, 19 nt, Artificial Sequence
  Description of Artificial Sequence: Synthetic oligonucleotide
  Antisense strand to SEQ ID NO: 520601
aaacuccaaggccaaacuc

SEQ ID NO: 520603 - RNA, 19 nt, Artificial Sequence
  Description of Artificial Sequence: Synthetic oligonucleotide
  Sense strand starting at position 2995 of SEQ ID NO: 317893
uagacacagugauaugaca

SEQ ID NO: 520604 - RNA, 19 nt, Artificial Sequence
  Description of Artificial Sequence: Synthetic oligonucleotide
  Antisense strand to SEQ ID NO: 520603
ugucauaucacugugucua

SEQ ID NO: 520605 - RNA, 19 nt, Artificial Sequence
  Description of Artificial Sequence: Synthetic oligonucleotide
  Sense strand starting at position 3030 of SEQ ID NO: 317893
ugggauuggugaagaugua

SEQ ID NO: 520606 - RNA, 19 nt, Artificial Sequence
  Description of Artificial Sequence: Synthetic oligonucleotide
  Antisense strand to SEQ ID NO: 520605
uacaucuucaccaauccca

SEQ ID NO: 520607 - RNA, 19 nt, Artificial Sequence
  Description of Artificial Sequence: Synthetic oligonucleotide
  Sense strand starting at position 3042 of SEQ ID NO: 317893
agauguauauaugcuggaa

SEQ ID NO: 520608 - RNA, 19 nt, Artificial Sequence
  Description of Artificial Sequence: Synthetic oligonucleotide
  Antisense strand to SEQ ID NO: 520607
uuccagcauauauacaucu

SEQ ID NO: 520609 - RNA, 19 nt, Artificial Sequence
  Description of Artificial Sequence: Synthetic oligonucleotide
  Sense strand starting at position 3045 of SEQ ID NO: 317893
uguauauaugcuggaaauc

SEQ ID NO: 520610 - RNA, 19 nt, Artificial Sequence
  Description of Artificial Sequence: Synthetic oligonucleotide
  Antisense strand to SEQ ID NO: 520609
gauuuccagcauauauaca

SEQ ID NO: 520611 - RNA, 19 nt, Artificial Sequence
  Description of Artificial Sequence: Synthetic oligonucleotide
  Sense strand starting at position 3046 of SEQ ID NO: 317893
guauauaugcuggaaaucu

SEQ ID NO: 520612 - RNA, 19 nt, Artificial Sequence
  Description of Artificial Sequence: Synthetic oligonucleotide
  Antisense strand to SEQ ID NO: 520611
agauuuccagcauauauac

SEQ ID NO: 520613 - RNA, 19 nt, Artificial Sequence
  Description of Artificial Sequence: Synthetic oligonucleotide
  Sense strand starting at position 3201 of SEQ ID NO: 317893
gauuucuccuuaggucuga

SEQ ID NO: 520614 - RNA, 19 nt, Artificial Sequence
  Description of Artificial Sequence: Synthetic oligonucleotide
  Antisense strand to SEQ ID NO: 520613
ucagaccuaaggagaaauc

SEQ ID NO: 520615 - RNA, 19 nt, Artificial Sequence
  Description of Artificial Sequence: Synthetic oligonucleotide
  Sense strand starting at position 3562 of SEQ ID NO: 317893
gcauauaaaucaucuggag

SEQ ID NO: 520616 - RNA, 19 nt, Artificial Sequence
  Description of Artificial Sequence: Synthetic oligonucleotide
  Antisense strand to SEQ ID NO: 520615
cuccagaugauuuauaugc

SEQ ID NO: 520617 - RNA, 19 nt, Artificial Sequence
  Description of Artificial Sequence: Synthetic oligonucleotide
  Sense strand starting at position 3606 of SEQ ID NO: 317893
acaguauuggucuggguga

SEQ ID NO: 520618 - RNA, 19 nt, Artificial Sequence
  Description of Artificial Sequence: Synthetic oligonucleotide
  Antisense strand to SEQ ID NO: 520617
ucacccagaccaauacugu

SEQ ID NO: 520619 - RNA, 19 nt, Artificial Sequence
  Description of Artificial Sequence: Synthetic oligonucleotide
  Sense strand starting at position 3608 of SEQ ID NO: 317893
aguauuggucugggugaga

SEQ ID NO: 520620 - RNA, 19 nt, Artificial Sequence
  Description of Artificial Sequence: Synthetic oligonucleotide
  Antisense strand to SEQ ID NO: 520619
ucucacccagaccaauacu

SEQ ID NO: 520621 - RNA, 19 nt, Artificial Sequence
  Description of Artificial Sequence: Synthetic oligonucleotide
  Sense strand starting at position 3878 of SEQ ID NO: 317893
acaggcauccuccgaaaca

SEQ ID NO: 520622 - RNA, 19 nt, Artificial Sequence
  Description of Artificial Sequence: Synthetic oligonucleotide
  Antisense strand to SEQ ID NO: 520621
uguuucggaggaugccugu

SEQ ID NO: 520623 - RNA, 19 nt, Artificial Sequence
  Description of Artificial Sequence: Synthetic oligonucleotide
  Sense strand starting at position 3978 of SEQ ID NO: 317893
gcccaaauggcaugaucuu

SEQ ID NO: 520624 - RNA, 19 nt, Artificial Sequence
  Description of Artificial Sequence: Synthetic oligonucleotide
  Antisense strand to SEQ ID NO: 520623
aagaucaugccauuugggc

SEQ ID NO: 520625 - RNA, 19 nt, Artificial Sequence
  Description of Artificial Sequence: Synthetic oligonucleotide
  Sense strand starting at position 58 of SEQ ID NO: 317894
gcugaauaacuaugugaau

SEQ ID NO: 520626 - RNA, 19 nt, Artificial Sequence
  Description of Artificial Sequence: Synthetic oligonucleotide
  Antisense strand to SEQ ID NO: 520625
auucacauaguuauucagc

SEQ ID NO: 520627 - RNA, 19 nt, Artificial Sequence
  Description of Artificial Sequence: Synthetic oligonucleotide
  Sense strand starting at position 59 of SEQ ID NO: 317894
cugaauaacuaugugaauc

SEQ ID NO: 520628 - RNA, 19 nt, Artificial Sequence
  Description of Artificial Sequence: Synthetic oligonucleotide
  Antisense strand to SEQ ID NO: 520627
gauucacauaguuauucag

SEQ ID NO: 520629 - RNA, 19 nt, Artificial Sequence
  Description of Artificial Sequence: Synthetic oligonucleotide
  Sense strand starting at position 277 of SEQ ID NO: 317894
aguacugcauguccauaaa

SEQ ID NO: 520630 - RNA, 19 nt, Artificial Sequence
  Description of Artificial Sequence: Synthetic oligonucleotide
  Antisense strand to SEQ ID NO: 520629
uuuauggacaugcaguacu

SEQ ID NO: 520631 - RNA, 19 nt, Artificial Sequence
  Description of Artificial Sequence: Synthetic oligonucleotide
  Sense strand starting at position 875 of SEQ ID NO: 317894
agucccuaucucuaugagu

SEQ ID NO: 520632 - RNA, 19 nt, Artificial Sequence
  Description of Artificial Sequence: Synthetic oligonucleotide
  Antisense strand to SEQ ID NO: 520631
acucauagagauagggacu

SEQ ID NO: 520633 - RNA, 19 nt, Artificial Sequence
  Description of Artificial Sequence: Synthetic oligonucleotide
  Sense strand starting at position 877 of SEQ ID NO: 317894
ucccuaucucuaugaguac

SEQ ID NO: 520634 - RNA, 19 nt, Artificial Sequence
  Description of Artificial Sequence: Synthetic oligonucleotide
  Antisense strand to SEQ ID NO: 520633
guacucauagagauaggga

SEQ ID NO: 520635 - RNA, 19 nt, Artificial Sequence
  Description of Artificial Sequence: Synthetic oligonucleotide
  Sense strand starting at position 1086 of SEQ ID NO: 317894
ccgcgagucgucccugguu

SEQ ID NO: 520636 - RNA, 19 nt, Artificial Sequence
  Description of Artificial Sequence: Synthetic oligonucleotide
  Antisense strand to SEQ ID NO: 520635
aaccagggacgacucgcgg

SEQ ID NO: 520637 - RNA, 19 nt, Artificial Sequence
  Description of Artificial Sequence: Synthetic oligonucleotide
  Sense strand starting at position 1919 of SEQ ID NO: 317894
ggcccaaagucacuagagu

SEQ ID NO: 520638 - RNA, 19 nt, Artificial Sequence
  Description of Artificial Sequence: Synthetic oligonucleotide
  Antisense strand to SEQ ID NO: 520637
acucuagugacuuugggcc

SEQ ID NO: 520639 - RNA, 19 nt, Artificial Sequence
  Description of Artificial Sequence: Synthetic oligonucleotide
  Sense strand starting at position 1920 of SEQ ID NO: 317894
gcccaaagucacuagaguu

SEQ ID NO: 520640 - RNA, 19 nt, Artificial Sequence
  Description of Artificial Sequence: Synthetic oligonucleotide
  Antisense strand to SEQ ID NO: 520639
aacucuagugacuuugggc

SEQ ID NO: 520641 - RNA, 19 nt, Artificial Sequence
  Description of Artificial Sequence: Synthetic oligonucleotide
  Sense strand starting at position 2348 of SEQ ID NO: 317894
aguacuguaguugagcaaa

SEQ ID NO: 520642 - RNA, 19 nt, Artificial Sequence
  Description of Artificial Sequence: Synthetic oligonucleotide
  Antisense strand to SEQ ID NO: 520641
uuugcucaacuacaguacu

SEQ ID NO: 520643 - RNA, 19 nt, Artificial Sequence
  Description of Artificial Sequence: Synthetic oligonucleotide
  Sense strand starting at position 2375 of SEQ ID NO: 317894
ggaggaaacugcucacucu

SEQ ID NO: 520644 - RNA, 19 nt, Artificial Sequence
  Description of Artificial Sequence: Synthetic oligonucleotide
  Antisense strand to SEQ ID NO: 520643
agagugagcaguuuccucc

SEQ ID NO: 520645 - RNA, 19 nt, Artificial Sequence
  Description of Artificial Sequence: Synthetic oligonucleotide
  Sense strand starting at position 2378 of SEQ ID NO: 317894
ggaaacugcucacucuaaa

SEQ ID NO: 520646 - RNA, 19 nt, Artificial Sequence
  Description of Artificial Sequence: Synthetic oligonucleotide
  Antisense strand to SEQ ID NO: 520645
uuuagagugagcaguuucc

SEQ ID NO: 520647 - RNA, 19 nt, Artificial Sequence
  Description of Artificial Sequence: Synthetic oligonucleotide
  Sense strand starting at position 2456 of SEQ ID NO: 317894
cuugaaauuagugagucga

SEQ ID NO: 520648 - RNA, 19 nt, Artificial Sequence
  Description of Artificial Sequence: Synthetic oligonucleotide
  Antisense strand to SEQ ID NO: 520647
ucgacucacuaauuucaag

SEQ ID NO: 520649 - RNA, 19 nt, Artificial Sequence
  Description of Artificial Sequence: Synthetic oligonucleotide
  Sense strand starting at position 2458 of SEQ ID NO: 317894
ugaaauuagugagucgacu

SEQ ID NO: 520650 - RNA, 19 nt, Artificial Sequence
  Description of Artificial Sequence: Synthetic oligonucleotide
  Antisense strand to SEQ ID NO: 520649
agucgacucacuaauuuca

SEQ ID NO: 520651 - RNA, 19 nt, Artificial Sequence
  Description of Artificial Sequence: Synthetic oligonucleotide
  Sense strand starting at position 2471 of SEQ ID NO: 317894
ucgacucuuagauguagga

SEQ ID NO: 520652 - RNA, 19 nt, Artificial Sequence
  Description of Artificial Sequence: Synthetic oligonucleotide
  Antisense strand to SEQ ID NO: 520651
uccuacaucuaagagucga

SEQ ID NO: 520653 - RNA, 19 nt, Artificial Sequence
  Description of Artificial Sequence: Synthetic oligonucleotide
  Sense strand starting at position 2473 of SEQ ID NO: 317894
gacucuuagauguaggagu

SEQ ID NO: 520654 - RNA, 19 nt, Artificial Sequence
  Description of Artificial Sequence: Synthetic oligonucleotide
  Antisense strand to SEQ ID NO: 520653
acuccuacaucuaagaguc

SEQ ID NO: 520655 - RNA, 19 nt, Artificial Sequence
  Description of Artificial Sequence: Synthetic oligonucleotide
  Sense strand starting at position 2553 of SEQ ID NO: 317894
uauggugggcaugguauaa

SEQ ID NO: 520656 - RNA, 19 nt, Artificial Sequence
  Description of Artificial Sequence: Synthetic oligonucleotide
  Antisense strand to SEQ ID NO: 520655
uuauaccaugcccaccaua

SEQ ID NO: 520657 - RNA, 19 nt, Artificial Sequence
  Description of Artificial Sequence: Synthetic oligonucleotide
  Sense strand starting at position 2557 of SEQ ID NO: 317894
gugggcaugguauaauaga

SEQ ID NO: 520658 - RNA, 19 nt, Artificial Sequence
  Description of Artificial Sequence: Synthetic oligonucleotide
  Antisense strand to SEQ ID NO: 520657
ucuauuauaccaugcccac

SEQ ID NO: 520659 - RNA, 19 nt, Artificial Sequence
  Description of Artificial Sequence: Synthetic oligonucleotide
  Sense strand starting at position 2601 of SEQ ID NO: 317894
cgccaugcccuguugugau

SEQ ID NO: 520660 - RNA, 19 nt, Artificial Sequence
  Description of Artificial Sequence: Synthetic oligonucleotide
  Antisense strand to SEQ ID NO: 520659
aucacaacagggcauggcg

SEQ ID NO: 520661 - RNA, 19 nt, Artificial Sequence
  Description of Artificial Sequence: Synthetic oligonucleotide
  Sense strand starting at position 2611 of SEQ ID NO: 317894
uguugugauucucugggau

SEQ ID NO: 520662 - RNA, 19 nt, Artificial Sequence
  Description of Artificial Sequence: Synthetic oligonucleotide
  Antisense strand to SEQ ID NO: 520661
aucccagagaaucacaaca

SEQ ID NO: 520663 - RNA, 19 nt, Artificial Sequence
  Description of Artificial Sequence: Synthetic oligonucleotide
  Sense strand starting at position 2614 of SEQ ID NO: 317894
ugugauucucugggaucac

SEQ ID NO: 520664 - RNA, 19 nt, Artificial Sequence
  Description of Artificial Sequence: Synthetic oligonucleotide
  Antisense strand to SEQ ID NO: 520663
gugaucccagagaaucaca

SEQ ID NO: 520665 - RNA, 19 nt, Artificial Sequence
  Description of Artificial Sequence: Synthetic oligonucleotide
  Sense strand starting at position 2759 of SEQ ID NO: 317894
uugauagggcugugugaaa

SEQ ID NO: 520666 - RNA, 19 nt, Artificial Sequence
  Description of Artificial Sequence: Synthetic oligonucleotide
  Antisense strand to SEQ ID NO: 520665
uuucacacagcccuaucaa

SEQ ID NO: 520667 - RNA, 19 nt, Artificial Sequence
  Description of Artificial Sequence: Synthetic oligonucleotide
  Sense strand starting at position 2965 of SEQ ID NO: 317894
guuccugucagaggaugga

SEQ ID NO: 520668 - RNA, 19 nt, Artificial Sequence
  Description of Artificial Sequence: Synthetic oligonucleotide
  Antisense strand to SEQ ID NO: 520667
uccauccucugacaggaac

SEQ ID NO: 520669 - RNA, 19 nt, Artificial Sequence
  Description of Artificial Sequence: Synthetic oligonucleotide
  Sense strand starting at position 2968 of SEQ ID NO: 317894
ccugucagaggauggauua

SEQ ID NO: 520670 - RNA, 19 nt, Artificial Sequence
  Description of Artificial Sequence: Synthetic oligonucleotide
  Antisense strand to SEQ ID NO: 520669
uaauccauccucugacagg

SEQ ID NO: 520671 - RNA, 19 nt, Artificial Sequence
  Description of Artificial Sequence: Synthetic oligonucleotide
  Sense strand starting at position 2980 of SEQ ID NO: 317894
uggauuaauugguugauca

SEQ ID NO: 520672 - RNA, 19 nt, Artificial Sequence
  Description of Artificial Sequence: Synthetic oligonucleotide
  Antisense strand to SEQ ID NO: 520671
ugaucaaccaauuaaucca

SEQ ID NO: 520673 - RNA, 19 nt, Artificial Sequence
  Description of Artificial Sequence: Synthetic oligonucleotide
  Sense strand starting at position 2981 of SEQ ID NO: 317894
ggauuaauugguugaucag

SEQ ID NO: 520674 - RNA, 19 nt, Artificial Sequence
  Description of Artificial Sequence: Synthetic oligonucleotide
  Antisense strand to SEQ ID NO: 520673
cugaucaaccaauuaaucc

SEQ ID NO: 520675 - RNA, 19 nt, Artificial Sequence
  Description of Artificial Sequence: Synthetic oligonucleotide
  Sense strand starting at position 2984 of SEQ ID NO: 317894
uuaauugguugaucagaaa

SEQ ID NO: 520676 - RNA, 19 nt, Artificial Sequence
  Description of Artificial Sequence: Synthetic oligonucleotide
  Antisense strand to SEQ ID NO: 520675
uuucugaucaaccaauuaa

SEQ ID NO: 520677 - RNA, 19 nt, Artificial Sequence
  Description of Artificial Sequence: Synthetic oligonucleotide
  Sense strand starting at position 3270 of SEQ ID NO: 317894
caaacauaguagguguaua

SEQ ID NO: 520678 - RNA, 19 nt, Artificial Sequence
  Description of Artificial Sequence: Synthetic oligonucleotide
  Antisense strand to SEQ ID NO: 520677
uauacaccuacuauguuug

SEQ ID NO: 520679 - RNA, 19 nt, Artificial Sequence
  Description of Artificial Sequence: Synthetic oligonucleotide
  Sense strand starting at position 3280 of SEQ ID NO: 317894
agguguauaaugugaauua

SEQ ID NO: 520680 - RNA, 19 nt, Artificial Sequence
  Description of Artificial Sequence: Synthetic oligonucleotide
  Antisense strand to SEQ ID NO: 520679
uaauucacauuauacaccu

SEQ ID NO: 520681 - RNA, 19 nt, Artificial Sequence
  Description of Artificial Sequence: Synthetic oligonucleotide
  Sense strand starting at position 3336 of SEQ ID NO: 317894
guguuacuccaucacagga

SEQ ID NO: 520682 - RNA, 19 nt, Artificial Sequence
  Description of Artificial Sequence: Synthetic oligonucleotide
  Antisense strand to SEQ ID NO: 520681
uccugugauggaguaacac

SEQ ID NO: 520683 - RNA, 19 nt, Artificial Sequence
  Description of Artificial Sequence: Synthetic oligonucleotide
  Sense strand starting at position 3390 of SEQ ID NO: 317894
aagauuggcuagcuguuaa

SEQ ID NO: 520684 - RNA, 19 nt, Artificial Sequence
  Description of Artificial Sequence: Synthetic oligonucleotide
  Antisense strand to SEQ ID NO: 520683
uuaacagcuagccaaucuu

SEQ ID NO: 520685 - RNA, 19 nt, Artificial Sequence
  Description of Artificial Sequence: Synthetic oligonucleotide
  Sense strand starting at position 3402 of SEQ ID NO: 317894
cuguuaagacgugauuaac

SEQ ID NO: 520686 - RNA, 19 nt, Artificial Sequence
  Description of Artificial Sequence: Synthetic oligonucleotide
  Antisense strand to SEQ ID NO: 520685
guuaaucacgucuuaacag

SEQ ID NO: 520687 - RNA, 19 nt, Artificial Sequence
  Description of Artificial Sequence: Synthetic oligonucleotide
  Sense strand starting at position 3410 of SEQ ID NO: 317894
acgugauuaacgcuugcua

SEQ ID NO: 520688 - RNA, 19 nt, Artificial Sequence
  Description of Artificial Sequence: Synthetic oligonucleotide
  Antisense strand to SEQ ID NO: 520687
uagcaagcguuaaucacgu

SEQ ID NO: 520689 - RNA, 19 nt, Artificial Sequence
  Description of Artificial Sequence: Synthetic oligonucleotide
  Sense strand starting at position 3411 of SEQ ID NO: 317894
cgugauuaacgcuugcuaa

SEQ ID NO: 520690 - RNA, 19 nt, Artificial Sequence
  Description of Artificial Sequence: Synthetic oligonucleotide
  Antisense strand to SEQ ID NO: 520689
uuagcaagcguuaaucacg

SEQ ID NO: 520691 - RNA, 19 nt, Artificial Sequence
  Description of Artificial Sequence: Synthetic oligonucleotide
  Sense strand starting at position 3438 of SEQ ID NO: 317894
acuuuagugauacaguguu

SEQ ID NO: 520692 - RNA, 19 nt, Artificial Sequence
  Description of Artificial Sequence: Synthetic oligonucleotide
  Antisense strand to SEQ ID NO: 520691
aacacuguaucacuaaagu

SEQ ID NO: 520693 - RNA, 19 nt, Artificial Sequence
  Description of Artificial Sequence: Synthetic oligonucleotide
  Sense strand starting at position 3706 of SEQ ID NO: 317894
uuaauuauuugggagguga

SEQ ID NO: 520694 - RNA, 19 nt, Artificial Sequence
  Description of Artificial Sequence: Synthetic oligonucleotide
  Antisense strand to SEQ ID NO: 520693
ucaccucccaaauaauuaa

SEQ ID NO: 520695 - RNA, 19 nt, Artificial Sequence
  Description of Artificial Sequence: Synthetic oligonucleotide
  Sense strand starting at position 3733 of SEQ ID NO: 317894
ggagguuugaccggaacaa

SEQ ID NO: 520696 - RNA, 19 nt, Artificial Sequence
  Description of Artificial Sequence: Synthetic oligonucleotide
  Antisense strand to SEQ ID NO: 520695
uuguuccggucaaaccucc

SEQ ID NO: 520697 - RNA, 19 nt, Artificial Sequence
  Description of Artificial Sequence: Synthetic oligonucleotide
  Sense strand starting at position 3778 of SEQ ID NO: 317894
cggugaauguggguaaauc

SEQ ID NO: 520698 - RNA, 19 nt, Artificial Sequence
  Description of Artificial Sequence: Synthetic oligonucleotide
  Antisense strand to SEQ ID NO: 520697
gauuuacccacauucaccg

SEQ ID NO: 520699 - RNA, 19 nt, Artificial Sequence
  Description of Artificial Sequence: Synthetic oligonucleotide
  Sense strand starting at position 3821 of SEQ ID NO: 317894
ggccuacucuuacucagaa

SEQ ID NO: 520700 - RNA, 19 nt, Artificial Sequence
  Description of Artificial Sequence: Synthetic oligonucleotide
  Antisense strand to SEQ ID NO: 520699
uucugaguaagaguaggcc

SEQ ID NO: 520701 - RNA, 19 nt, Artificial Sequence
  Description of Artificial Sequence: Synthetic oligonucleotide
  Sense strand starting at position 3833 of SEQ ID NO: 317894
cucagaauuucugaugaca

SEQ ID NO: 520702 - RNA, 19 nt, Artificial Sequence
  Description of Artificial Sequence: Synthetic oligonucleotide
  Antisense strand to SEQ ID NO: 520701
ugucaucagaaauucugag

SEQ ID NO: 520703 - RNA, 19 nt, Artificial Sequence
  Description of Artificial Sequence: Synthetic oligonucleotide
  Sense strand starting at position 3897 of SEQ ID NO: 317894
ucaaauaucugaccuguag

SEQ ID NO: 520704 - RNA, 19 nt, Artificial Sequence
  Description of Artificial Sequence: Synthetic oligonucleotide
  Antisense strand to SEQ ID NO: 520703
cuacaggucagauauuuga

SEQ ID NO: 520705 - RNA, 19 nt, Artificial Sequence
  Description of Artificial Sequence: Synthetic oligonucleotide
  Sense strand starting at position 87 of SEQ ID NO: 317895
guccaagcggaauauuaua

SEQ ID NO: 520706 - RNA, 19 nt, Artificial Sequence
  Description of Artificial Sequence: Synthetic oligonucleotide
  Antisense strand to SEQ ID NO: 520705
uauaauauuccgcuuggac

SEQ ID NO: 520707 - RNA, 19 nt, Artificial Sequence
  Description of Artificial Sequence: Synthetic oligonucleotide
  Sense strand starting at position 102 of SEQ ID NO: 317895
uauaaugugcacugacaga

SEQ ID NO: 520708 - RNA, 19 nt, Artificial Sequence
  Description of Artificial Sequence: Synthetic oligonucleotide
  Antisense strand to SEQ ID NO: 520707
ucugucagugcacauuaua

SEQ ID NO: 520709 - RNA, 19 nt, Artificial Sequence
  Description of Artificial Sequence: Synthetic oligonucleotide
  Sense strand starting at position 154 of SEQ ID NO: 317895
acagaaucuuaagccagau

SEQ ID NO: 520710 - RNA, 19 nt, Artificial Sequence
  Description of Artificial Sequence: Synthetic oligonucleotide
  Antisense strand to SEQ ID NO: 520709
aucuggcuuaagauucugu

SEQ ID NO: 520711 - RNA, 19 nt, Artificial Sequence
  Description of Artificial Sequence: Synthetic oligonucleotide
  Sense strand starting at position 321 of SEQ ID NO: 317895
gucaacgaugccugaaaca

SEQ ID NO: 520712 - RNA, 19 nt, Artificial Sequence
  Description of Artificial Sequence: Synthetic oligonucleotide
  Antisense strand to SEQ ID NO: 520711
uguuucaggcaucguugac

SEQ ID NO: 520713 - RNA, 19 nt, Artificial Sequence
  Description of Artificial Sequence: Synthetic oligonucleotide
  Sense strand starting at position 389 of SEQ ID NO: 317895
aguguaggacagugguuaa

SEQ ID NO: 520714 - RNA, 19 nt, Artificial Sequence
  Description of Artificial Sequence: Synthetic oligonucleotide
  Antisense strand to SEQ ID NO: 520713
uuaaccacuguccuacacu

SEQ ID NO: 520715 - RNA, 19 nt, Artificial Sequence
  Description of Artificial Sequence: Synthetic oligonucleotide
  Sense strand starting at position 602 of SEQ ID NO: 317895
gcaccuaagcacugauaaa

SEQ ID NO: 520716 - RNA, 19 nt, Artificial Sequence
  Description of Artificial Sequence: Synthetic oligonucleotide
  Antisense strand to SEQ ID NO: 520715
uuuaucagugcuuaggugc

SEQ ID NO: 520717 - RNA, 19 nt, Artificial Sequence
  Description of Artificial Sequence: Synthetic oligonucleotide
  Sense strand starting at position 647 of SEQ ID NO: 317895
uuuauuuaguucucgguga

SEQ ID NO: 520718 - RNA, 19 nt, Artificial Sequence
  Description of Artificial Sequence: Synthetic oligonucleotide
  Antisense strand to SEQ ID NO: 520717
ucaccgagaacuaaauaaa

SEQ ID NO: 520719 - RNA, 19 nt, Artificial Sequence
  Description of Artificial Sequence: Synthetic oligonucleotide
  Sense strand starting at position 674 of SEQ ID NO: 317895
agaccaauuucugaucagu

SEQ ID NO: 520720 - RNA, 19 nt, Artificial Sequence
  Description of Artificial Sequence: Synthetic oligonucleotide
  Antisense strand to SEQ ID NO: 520719
acugaucagaaauuggucu

SEQ ID NO: 520721 - RNA, 19 nt, Artificial Sequence
  Description of Artificial Sequence: Synthetic oligonucleotide
  Sense strand starting at position 783 of SEQ ID NO: 317895
ggagcacguaagcaauaaa

SEQ ID NO: 520722 - RNA, 19 nt, Artificial Sequence
  Description of Artificial Sequence: Synthetic oligonucleotide
  Antisense strand to SEQ ID NO: 520721
uuuauugcuuacgugcucc

SEQ ID NO: 520723 - RNA, 19 nt, Artificial Sequence
  Description of Artificial Sequence: Synthetic oligonucleotide
  Sense strand starting at position 819 of SEQ ID NO: 317895
aggguaauccgagagcaca

SEQ ID NO: 520724 - RNA, 19 nt, Artificial Sequence
  Description of Artificial Sequence: Synthetic oligonucleotide
  Antisense strand to SEQ ID NO: 520723
ugugcucucggauuacccu

SEQ ID NO: 520725 - RNA, 19 nt, Artificial Sequence
  Description of Artificial Sequence: Synthetic oligonucleotide
  Sense strand starting at position 838 of SEQ ID NO: 317895
ggguuaagugaacaugcuu

SEQ ID NO: 520726 - RNA, 19 nt, Artificial Sequence
  Description of Artificial Sequence: Synthetic oligonucleotide
  Antisense strand to SEQ ID NO: 520725
aagcauguucacuuaaccc

SEQ ID NO: 520727 - RNA, 19 nt, Artificial Sequence
  Description of Artificial Sequence: Synthetic oligonucleotide
  Sense strand starting at position 1029 of SEQ ID NO: 317895
ccgggugaaguuugaaaca

SEQ ID NO: 520728 - RNA, 19 nt, Artificial Sequence
  Description of Artificial Sequence: Synthetic oligonucleotide
  Antisense strand to SEQ ID NO: 520727
uguuucaaacuucacccgg

SEQ ID NO: 520729 - RNA, 19 nt, Artificial Sequence
  Description of Artificial Sequence: Synthetic oligonucleotide
  Sense strand starting at position 2250 of SEQ ID NO: 317895
ugaccuuucuuuccgagag

SEQ ID NO: 520730 - RNA, 19 nt, Artificial Sequence
  Description of Artificial Sequence: Synthetic oligonucleotide
  Antisense strand to SEQ ID NO: 520729
cucucggaaagaaagguca

SEQ ID NO: 520731 - RNA, 19 nt, Artificial Sequence
  Description of Artificial Sequence: Synthetic oligonucleotide
  Sense strand starting at position 2254 of SEQ ID NO: 317895
cuuucuuuccgagagcaga

SEQ ID NO: 520732 - RNA, 19 nt, Artificial Sequence
  Description of Artificial Sequence: Synthetic oligonucleotide
  Antisense strand to SEQ ID NO: 520731
ucugcucucggaaagaaag

SEQ ID NO: 520733 - RNA, 19 nt, Artificial Sequence
  Description of Artificial Sequence: Synthetic oligonucleotide
  Sense strand starting at position 2289 of SEQ ID NO: 317895
acaucuccaggcugacaua

SEQ ID NO: 520734 - RNA, 19 nt, Artificial Sequence
  Description of Artificial Sequence: Synthetic oligonucleotide
  Antisense strand to SEQ ID NO: 520733
uaugucagccuggagaugu

SEQ ID NO: 520735 - RNA, 19 nt, Artificial Sequence
  Description of Artificial Sequence: Synthetic oligonucleotide
  Sense strand starting at position 2302 of SEQ ID NO: 317895
gacauagcagaguggaaau

SEQ ID NO: 520736 - RNA, 19 nt, Artificial Sequence
  Description of Artificial Sequence: Synthetic oligonucleotide
  Antisense strand to SEQ ID NO: 520735
auuuccacucugcuauguc

SEQ ID NO: 520737 - RNA, 19 nt, Artificial Sequence
  Description of Artificial Sequence: Synthetic oligonucleotide
  Sense strand starting at position 2330 of SEQ ID NO: 317895
gcgugacucauuugggaau

SEQ ID NO: 520738 - RNA, 19 nt, Artificial Sequence
  Description of Artificial Sequence: Synthetic oligonucleotide
  Antisense strand to SEQ ID NO: 520737
auucccaaaugagucacgc

SEQ ID NO: 520739 - RNA, 19 nt, Artificial Sequence
  Description of Artificial Sequence: Synthetic oligonucleotide
  Sense strand starting at position 2408 of SEQ ID NO: 317895
gggacuccuugcuucugaa

SEQ ID NO: 520740 - RNA, 19 nt, Artificial Sequence
  Description of Artificial Sequence: Synthetic oligonucleotide
  Antisense strand to SEQ ID NO: 520739
uucagaagcaaggaguccc

SEQ ID NO: 520741 - RNA, 19 nt, Artificial Sequence
  Description of Artificial Sequence: Synthetic oligonucleotide
  Sense strand starting at position 2416 of SEQ ID NO: 317895
uugcuucugaaaggguauu

SEQ ID NO: 520742 - RNA, 19 nt, Artificial Sequence
  Description of Artificial Sequence: Synthetic oligonucleotide
  Antisense strand to SEQ ID NO: 520741
aauacccuuucagaagcaa

SEQ ID NO: 520743 - RNA, 19 nt, Artificial Sequence
  Description of Artificial Sequence: Synthetic oligonucleotide
  Sense strand starting at position 2427 of SEQ ID NO: 317895
aggguauugggaggguuaa

SEQ ID NO: 520744 - RNA, 19 nt, Artificial Sequence
  Description of Artificial Sequence: Synthetic oligonucleotide
  Antisense strand to SEQ ID NO: 520743
uuaacccucccaauacccu

SEQ ID NO: 520745 - RNA, 19 nt, Artificial Sequence
  Description of Artificial Sequence: Synthetic oligonucleotide
  Sense strand starting at position 2428 of SEQ ID NO: 317895
ggguauugggaggguuaau

SEQ ID NO: 520746 - RNA, 19 nt, Artificial Sequence
  Description of Artificial Sequence: Synthetic oligonucleotide
  Antisense strand to SEQ ID NO: 520745
auuaacccucccaauaccc

SEQ ID NO: 520747 - RNA, 19 nt, Artificial Sequence
  Description of Artificial Sequence: Synthetic oligonucleotide
  Sense strand starting at position 2617 of SEQ ID NO: 317895
cuaacuuuguuucugguaa

SEQ ID NO: 520748 - RNA, 19 nt, Artificial Sequence
  Description of Artificial Sequence: Synthetic oligonucleotide
  Antisense strand to SEQ ID NO: 520747
uuaccagaaacaaaguuag

SEQ ID NO: 520749 - RNA, 19 nt, Artificial Sequence
  Description of Artificial Sequence: Synthetic oligonucleotide
  Sense strand starting at position 2685 of SEQ ID NO: 317895
uacuguuggauuggaaagu

SEQ ID NO: 520750 - RNA, 19 nt, Artificial Sequence
  Description of Artificial Sequence: Synthetic oligonucleotide
  Antisense strand to SEQ ID NO: 520749
acuuuccaauccaacagua

SEQ ID NO: 520751 - RNA, 19 nt, Artificial Sequence
  Description of Artificial Sequence: Synthetic oligonucleotide
  Sense strand starting at position 2735 of SEQ ID NO: 317895
cugcgcuugguuuauuuau

SEQ ID NO: 520752 - RNA, 19 nt, Artificial Sequence
  Description of Artificial Sequence: Synthetic oligonucleotide
  Antisense strand to SEQ ID NO: 520751
auaaauaaaccaagcgcag

SEQ ID NO: 520753 - RNA, 19 nt, Artificial Sequence
  Description of Artificial Sequence: Synthetic oligonucleotide
  Sense strand starting at position 2780 of SEQ ID NO: 317895
ugguaaugauccuccuaau

SEQ ID NO: 520754 - RNA, 19 nt, Artificial Sequence
  Description of Artificial Sequence: Synthetic oligonucleotide
  Antisense strand to SEQ ID NO: 520753
auuaggaggaucauuacca

SEQ ID NO: 520755 - RNA, 19 nt, Artificial Sequence
  Description of Artificial Sequence: Synthetic oligonucleotide
  Sense strand starting at position 2802 of SEQ ID NO: 317895
ugguaugauuuggaucauc

SEQ ID NO: 520756 - RNA, 19 nt, Artificial Sequence
  Description of Artificial Sequence: Synthetic oligonucleotide
  Antisense strand to SEQ ID NO: 520755
gaugauccaaaucauacca

SEQ ID NO: 520757 - RNA, 19 nt, Artificial Sequence
  Description of Artificial Sequence: Synthetic oligonucleotide
  Sense strand starting at position 2887 of SEQ ID NO: 317895
uguugaacuguccagaaac

SEQ ID NO: 520758 - RNA, 19 nt, Artificial Sequence
  Description of Artificial Sequence: Synthetic oligonucleotide
  Antisense strand to SEQ ID NO: 520757
guuucuggacaguucaaca

SEQ ID NO: 520759 - RNA, 19 nt, Artificial Sequence
  Description of Artificial Sequence: Synthetic oligonucleotide
  Sense strand starting at position 2980 of SEQ ID NO: 317895
gcgaguucucagcauggaa

SEQ ID NO: 520760 - RNA, 19 nt, Artificial Sequence
  Description of Artificial Sequence: Synthetic oligonucleotide
  Antisense strand to SEQ ID NO: 520759
uuccaugcugagaacucgc

SEQ ID NO: 520761 - RNA, 19 nt, Artificial Sequence
  Description of Artificial Sequence: Synthetic oligonucleotide
  Sense strand starting at position 2982 of SEQ ID NO: 317895
gaguucucagcauggaauc

SEQ ID NO: 520762 - RNA, 19 nt, Artificial Sequence
  Description of Artificial Sequence: Synthetic oligonucleotide
  Antisense strand to SEQ ID NO: 520761
gauuccaugcugagaacuc

SEQ ID NO: 520763 - RNA, 19 nt, Artificial Sequence
  Description of Artificial Sequence: Synthetic oligonucleotide
  Sense strand starting at position 2983 of SEQ ID NO: 317895
aguucucagcauggaauca

SEQ ID NO: 520764 - RNA, 19 nt, Artificial Sequence
  Description of Artificial Sequence: Synthetic oligonucleotide
  Antisense strand to SEQ ID NO: 520763
ugauuccaugcugagaacu

SEQ ID NO: 520765 - RNA, 19 nt, Artificial Sequence
  Description of Artificial Sequence: Synthetic oligonucleotide
  Sense strand starting at position 3106 of SEQ ID NO: 317895
uugccuucggcagcuuaau

SEQ ID NO: 520766 - RNA, 19 nt, Artificial Sequence
  Description of Artificial Sequence: Synthetic oligonucleotide
  Antisense strand to SEQ ID NO: 520765
auuaagcugccgaaggcaa

SEQ ID NO: 520767 - RNA, 19 nt, Artificial Sequence
  Description of Artificial Sequence: Synthetic oligonucleotide
  Sense strand starting at position 3168 of SEQ ID NO: 317895
uucgaaaguguccauugaa

SEQ ID NO: 520768 - RNA, 19 nt, Artificial Sequence
  Description of Artificial Sequence: Synthetic oligonucleotide
  Antisense strand to SEQ ID NO: 520767
uucaauggacacuuucgaa

SEQ ID NO: 520769 - RNA, 19 nt, Artificial Sequence
  Description of Artificial Sequence: Synthetic oligonucleotide
  Sense strand starting at position 3171 of SEQ ID NO: 317895
gaaaguguccauugaaaga

SEQ ID NO: 520770 - RNA, 19 nt, Artificial Sequence
  Description of Artificial Sequence: Synthetic oligonucleotide
  Antisense strand to SEQ ID NO: 520769
ucuuucaauggacacuuuc

SEQ ID NO: 520771 - RNA, 19 nt, Artificial Sequence
  Description of Artificial Sequence: Synthetic oligonucleotide
  Sense strand starting at position 3342 of SEQ ID NO: 317895
gggagacaauugccuaaug

SEQ ID NO: 520772 - RNA, 19 nt, Artificial Sequence
  Description of Artificial Sequence: Synthetic oligonucleotide
  Antisense strand to SEQ ID NO: 520771
cauuaggcaauugucuccc

SEQ ID NO: 520773 - RNA, 19 nt, Artificial Sequence
  Description of Artificial Sequence: Synthetic oligonucleotide
  Sense strand starting at position 3343 of SEQ ID NO: 317895
ggagacaauugccuaauga

SEQ ID NO: 520774 - RNA, 19 nt, Artificial Sequence
  Description of Artificial Sequence: Synthetic oligonucleotide
  Antisense strand to SEQ ID NO: 520773
ucauuaggcaauugucucc

SEQ ID NO: 520775 - RNA, 19 nt, Artificial Sequence
  Description of Artificial Sequence: Synthetic oligonucleotide
  Sense strand starting at position 3366 of SEQ ID NO: 317895
agccuuugagucuaucaca

SEQ ID NO: 520776 - RNA, 19 nt, Artificial Sequence
  Description of Artificial Sequence: Synthetic oligonucleotide
  Antisense strand to SEQ ID NO: 520775
ugugauagacucaaaggcu

SEQ ID NO: 520777 - RNA, 19 nt, Artificial Sequence
  Description of Artificial Sequence: Synthetic oligonucleotide
  Sense strand starting at position 3509 of SEQ ID NO: 317895
cccguucucagggacuaua

SEQ ID NO: 520778 - RNA, 19 nt, Artificial Sequence
  Description of Artificial Sequence: Synthetic oligonucleotide
  Antisense strand to SEQ ID NO: 520777
uauagucccugagaacggg

SEQ ID NO: 520779 - RNA, 19 nt, Artificial Sequence
  Description of Artificial Sequence: Synthetic oligonucleotide
  Sense strand starting at position 3670 of SEQ ID NO: 317895
gagaccagacugugcaaua

SEQ ID NO: 520780 - RNA, 19 nt, Artificial Sequence
  Description of Artificial Sequence: Synthetic oligonucleotide
  Antisense strand to SEQ ID NO: 520779
uauugcacagucuggucuc

SEQ ID NO: 520781 - RNA, 19 nt, Artificial Sequence
  Description of Artificial Sequence: Synthetic oligonucleotide
  Sense strand starting at position 3912 of SEQ ID NO: 317895
auguucaggguuugauaag

SEQ ID NO: 520782 - RNA, 19 nt, Artificial Sequence
  Description of Artificial Sequence: Synthetic oligonucleotide
  Antisense strand to SEQ ID NO: 520781
cuuaucaaacccugaacau

SEQ ID NO: 520783 - RNA, 19 nt, Artificial Sequence
  Description of Artificial Sequence: Synthetic oligonucleotide
  Sense strand starting at position 3918 of SEQ ID NO: 317895
aggguuugauaagugcuau

SEQ ID NO: 520784 - RNA, 19 nt, Artificial Sequence
  Description of Artificial Sequence: Synthetic oligonucleotide
  Antisense strand to SEQ ID NO: 520783
auagcacuuaucaaacccu

SEQ ID NO: 520785 - RNA, 19 nt, Artificial Sequence
  Description of Artificial Sequence: Synthetic oligonucleotide
  Sense strand starting at position 196 of SEQ ID NO: 317896
ggauuacaggccuggacaa

SEQ ID NO: 520786 - RNA, 19 nt, Artificial Sequence
  Description of Artificial Sequence: Synthetic oligonucleotide
  Antisense strand to SEQ ID NO: 520785
uuguccaggccuguaaucc

SEQ ID NO: 520787 - RNA, 19 nt, Artificial Sequence
  Description of Artificial Sequence: Synthetic oligonucleotide
  Sense strand starting at position 197 of SEQ ID NO: 317896
gauuacaggccuggacaau

SEQ ID NO: 520788 - RNA, 19 nt, Artificial Sequence
  Description of Artificial Sequence: Synthetic oligonucleotide
  Antisense strand to SEQ ID NO: 520787
auuguccaggccuguaauc

SEQ ID NO: 520789 - RNA, 19 nt, Artificial Sequence
  Description of Artificial Sequence: Synthetic oligonucleotide
  Sense strand starting at position 252 of SEQ ID NO: 317896
caaggaaaucugcgaagga

SEQ ID NO: 520790 - RNA, 19 nt, Artificial Sequence
  Description of Artificial Sequence: Synthetic oligonucleotide
  Antisense strand to SEQ ID NO: 520789
uccuucgcagauuuccuug

SEQ ID NO: 520791 - RNA, 19 nt, Artificial Sequence
  Description of Artificial Sequence: Synthetic oligonucleotide
  Sense strand starting at position 283 of SEQ ID NO: 317896
cuguccaaguuguuaacaa

SEQ ID NO: 520792 - RNA, 19 nt, Artificial Sequence
  Description of Artificial Sequence: Synthetic oligonucleotide
  Antisense strand to SEQ ID NO: 520791
uuguuaacaacuuggacag

SEQ ID NO: 520793 - RNA, 19 nt, Artificial Sequence
  Description of Artificial Sequence: Synthetic oligonucleotide
  Sense strand starting at position 291 of SEQ ID NO: 317896
guuguuaacaacuagacgu

SEQ ID NO: 520794 - RNA, 19 nt, Artificial Sequence
  Description of Artificial Sequence: Synthetic oligonucleotide
  Antisense strand to SEQ ID NO: 520793
acgucuaguuguuaacaac

SEQ ID NO: 520795 - RNA, 19 nt, Artificial Sequence
  Description of Artificial Sequence: Synthetic oligonucleotide
  Sense strand starting at position 440 of SEQ ID NO: 317896
gcagaauaaugucccaauu

SEQ ID NO: 520796 - RNA, 19 nt, Artificial Sequence
  Description of Artificial Sequence: Synthetic oligonucleotide
  Antisense strand to SEQ ID NO: 520795
aauugggacauuauucugc

SEQ ID NO: 520797 - RNA, 19 nt, Artificial Sequence
  Description of Artificial Sequence: Synthetic oligonucleotide
  Sense strand starting at position 462 of SEQ ID NO: 317896
guuacugguggccaauauu

SEQ ID NO: 520798 - RNA, 19 nt, Artificial Sequence
  Description of Artificial Sequence: Synthetic oligonucleotide
  Antisense strand to SEQ ID NO: 520797
aauauuggccaccaguaac

SEQ ID NO: 520799 - RNA, 19 nt, Artificial Sequence
  Description of Artificial Sequence: Synthetic oligonucleotide
  Sense strand starting at position 609 of SEQ ID NO: 317896
gcaacuuucguguuggcuu

SEQ ID NO: 520800 - RNA, 19 nt, Artificial Sequence
  Description of Artificial Sequence: Synthetic oligonucleotide
  Antisense strand to SEQ ID NO: 520799
aagccaacacgaaaguugc

SEQ ID NO: 520801 - RNA, 19 nt, Artificial Sequence
  Description of Artificial Sequence: Synthetic oligonucleotide
  Sense strand starting at position 614 of SEQ ID NO: 317896
uuucguguuggcuuuguua

SEQ ID NO: 520802 - RNA, 19 nt, Artificial Sequence
  Description of Artificial Sequence: Synthetic oligonucleotide
  Antisense strand to SEQ ID NO: 520801
uaacaaagccaacacgaaa

SEQ ID NO: 520803 - RNA, 19 nt, Artificial Sequence
  Description of Artificial Sequence: Synthetic oligonucleotide
  Sense strand starting at position 653 of SEQ ID NO: 317896
cugucaaagugucuuaaac

SEQ ID NO: 520804 - RNA, 19 nt, Artificial Sequence
  Description of Artificial Sequence: Synthetic oligonucleotide
  Antisense strand to SEQ ID NO: 520803
guuuaagacacuuugacag

SEQ ID NO: 520805 - RNA, 19 nt, Artificial Sequence
  Description of Artificial Sequence: Synthetic oligonucleotide
  Sense strand starting at position 776 of SEQ ID NO: 317896
cuguaaguuguggaucuuu

SEQ ID NO: 520806 - RNA, 19 nt, Artificial Sequence
  Description of Artificial Sequence: Synthetic oligonucleotide
  Antisense strand to SEQ ID NO: 520805
aaagauccacaacuuacag

SEQ ID NO: 520807 - RNA, 19 nt, Artificial Sequence
  Description of Artificial Sequence: Synthetic oligonucleotide
  Sense strand starting at position 798 of SEQ ID NO: 317896
uggcuaguugguuaugaug

SEQ ID NO: 520808 - RNA, 19 nt, Artificial Sequence
  Description of Artificial Sequence: Synthetic oligonucleotide
  Antisense strand to SEQ ID NO: 520807
caucauaaccaacuagcca

SEQ ID NO: 520809 - RNA, 19 nt, Artificial Sequence
  Description of Artificial Sequence: Synthetic oligonucleotide
  Sense strand starting at position 1211 of SEQ ID NO: 317896
agccuuacucucgaaucaa

SEQ ID NO: 520810 - RNA, 19 nt, Artificial Sequence
  Description of Artificial Sequence: Synthetic oligonucleotide
  Antisense strand to SEQ ID NO: 520809
uugauucgagaguaaggcu

SEQ ID NO: 520811 - RNA, 19 nt, Artificial Sequence
  Description of Artificial Sequence: Synthetic oligonucleotide
  Sense strand starting at position 1274 of SEQ ID NO: 317896
gccauauuugcccaagcca

SEQ ID NO: 520812 - RNA, 19 nt, Artificial Sequence
  Description of Artificial Sequence: Synthetic oligonucleotide
  Antisense strand to SEQ ID NO: 520811
uggcuugggcaaauauggc

SEQ ID NO: 520813 - RNA, 19 nt, Artificial Sequence
  Description of Artificial Sequence: Synthetic oligonucleotide
  Sense strand starting at position 1390 of SEQ ID NO: 317896
ggcgcuguucguucaagac

SEQ ID NO: 520814 - RNA, 19 nt, Artificial Sequence
  Description of Artificial Sequence: Synthetic oligonucleotide
  Antisense strand to SEQ ID NO: 520813
gucuugaacgaacagcgcc

SEQ ID NO: 520815 - RNA, 19 nt, Artificial Sequence
  Description of Artificial Sequence: Synthetic oligonucleotide
  Sense strand starting at position 2080 of SEQ ID NO: 317896
gcaggugaugucuagccaa

SEQ ID NO: 520816 - RNA, 19 nt, Artificial Sequence
  Description of Artificial Sequence: Synthetic oligonucleotide
  Antisense strand to SEQ ID NO: 520815
uuggcuagacaucaccugc

SEQ ID NO: 520817 - RNA, 19 nt, Artificial Sequence
  Description of Artificial Sequence: Synthetic oligonucleotide
  Sense strand starting at position 2114 of SEQ ID NO: 317896
ucgaaacucugccuacaga

SEQ ID NO: 520818 - RNA, 19 nt, Artificial Sequence
  Description of Artificial Sequence: Synthetic oligonucleotide
  Antisense strand to SEQ ID NO: 520817
ucuguaggcagaguuucga

SEQ ID NO: 520819 - RNA, 19 nt, Artificial Sequence
  Description of Artificial Sequence: Synthetic oligonucleotide
  Sense strand starting at position 2170 of SEQ ID NO: 317896
uuugcuuugaugggacaga

SEQ ID NO: 520820 - RNA, 19 nt, Artificial Sequence
  Description of Artificial Sequence: Synthetic oligonucleotide
  Antisense strand to SEQ ID NO: 520819
ucugucccaucaaagcaaa

SEQ ID NO: 520821 - RNA, 19 nt, Artificial Sequence
  Description of Artificial Sequence: Synthetic oligonucleotide
  Sense strand starting at position 2343 of SEQ ID NO: 317896
cuagucucugaaggcuuaa

SEQ ID NO: 520822 - RNA, 19 nt, Artificial Sequence
  Description of Artificial Sequence: Synthetic oligonucleotide
  Antisense strand to SEQ ID NO: 520821
uuaagccuucagagacuag

SEQ ID NO: 520823 - RNA, 19 nt, Artificial Sequence
  Description of Artificial Sequence: Synthetic oligonucleotide
  Sense strand starting at position 2400 of SEQ ID NO: 317896
cccauaccgugucugauuu

SEQ ID NO: 520824 - RNA, 19 nt, Artificial Sequence
  Description of Artificial Sequence: Synthetic oligonucleotide
  Antisense strand to SEQ ID NO: 520823
aaaucagacacgguauggg

SEQ ID NO: 520825 - RNA, 19 nt, Artificial Sequence
  Description of Artificial Sequence: Synthetic oligonucleotide
  Sense strand starting at position 2463 of SEQ ID NO: 317896
ccuagagcucaagaagcaa

SEQ ID NO: 520826 - RNA, 19 nt, Artificial Sequence
  Description of Artificial Sequence: Synthetic oligonucleotide
  Antisense strand to SEQ ID NO: 520825
uugcuucuugagcucuagg

SEQ ID NO: 520827 - RNA, 19 nt, Artificial Sequence
  Description of Artificial Sequence: Synthetic oligonucleotide
  Sense strand starting at position 2493 of SEQ ID NO: 317896
aguagauacuauguaaacu

SEQ ID NO: 520828 - RNA, 19 nt, Artificial Sequence
  Description of Artificial Sequence: Synthetic oligonucleotide
  Antisense strand to SEQ ID NO: 520827
aguuuacauaguaucuacu

SEQ ID NO: 520829 - RNA, 19 nt, Artificial Sequence
  Description of Artificial Sequence: Synthetic oligonucleotide
  Sense strand starting at position 2501 of SEQ ID NO: 317896
cuauguaaacugcacaaga

SEQ ID NO: 520830 - RNA, 19 nt, Artificial Sequence
  Description of Artificial Sequence: Synthetic oligonucleotide
  Antisense strand to SEQ ID NO: 520829
ucuugugcaguuuacauag

SEQ ID NO: 520831 - RNA, 19 nt, Artificial Sequence
  Description of Artificial Sequence: Synthetic oligonucleotide
  Sense strand starting at position 2531 of SEQ ID NO: 317896
guuaaauccgaacacucuu

SEQ ID NO: 520832 - RNA, 19 nt, Artificial Sequence
  Description of Artificial Sequence: Synthetic oligonucleotide
  Antisense strand to SEQ ID NO: 520831
aagaguguucggauuuaac

SEQ ID NO: 520833 - RNA, 19 nt, Artificial Sequence
  Description of Artificial Sequence: Synthetic oligonucleotide
  Sense strand starting at position 2537 of SEQ ID NO: 317896
uccgaacacucuuuaagau

SEQ ID NO: 520834 - RNA, 19 nt, Artificial Sequence
  Description of Artificial Sequence: Synthetic oligonucleotide
  Antisense strand to SEQ ID NO: 520833
aucuuaaagaguguucgga

SEQ ID NO: 520835 - RNA, 19 nt, Artificial Sequence
  Description of Artificial Sequence: Synthetic oligonucleotide
  Sense strand starting at position 2571 of SEQ ID NO: 317896
aaggcuguagcuuggaaua

SEQ ID NO: 520836 - RNA, 19 nt, Artificial Sequence
  Description of Artificial Sequence: Synthetic oligonucleotide
  Antisense strand to SEQ ID NO: 520835
uauuccaagcuacagccuu

SEQ ID NO: 520837 - RNA, 19 nt, Artificial Sequence
  Description of Artificial Sequence: Synthetic oligonucleotide
  Sense strand starting at position 2682 of SEQ ID NO: 317896
uucucuccaggauguuaua

SEQ ID NO: 520838 - RNA, 19 nt, Artificial Sequence
  Description of Artificial Sequence: Synthetic oligonucleotide
  Antisense strand to SEQ ID NO: 520837
uauaacauccuggagagaa

SEQ ID NO: 520839 - RNA, 19 nt, Artificial Sequence
  Description of Artificial Sequence: Synthetic oligonucleotide
  Sense strand starting at position 2873 of SEQ ID NO: 317896
guuuauuccaggcaggaau

SEQ ID NO: 520840 - RNA, 19 nt, Artificial Sequence
  Description of Artificial Sequence: Synthetic oligonucleotide
  Antisense strand to SEQ ID NO: 520839
auuccugccuggaauaaac

SEQ ID NO: 520841 - RNA, 19 nt, Artificial Sequence
  Description of Artificial Sequence: Synthetic oligonucleotide
  Sense strand starting at position 2901 of SEQ ID NO: 317896
guaauugguacguauuacu

SEQ ID NO: 520842 - RNA, 19 nt, Artificial Sequence
  Description of Artificial Sequence: Synthetic oligonucleotide
  Antisense strand to SEQ ID NO: 520841
aguaauacguaccaauuac

SEQ ID NO: 520843 - RNA, 19 nt, Artificial Sequence
  Description of Artificial Sequence: Synthetic oligonucleotide
  Sense strand starting at position 2984 of SEQ ID NO: 317896
ucaaauuggcagugagaua

SEQ ID NO: 520844 - RNA, 19 nt, Artificial Sequence
  Description of Artificial Sequence: Synthetic oligonucleotide
  Antisense strand to SEQ ID NO: 520843
uaucucacugccaauuuga

SEQ ID NO: 520845 - RNA, 19 nt, Artificial Sequence
  Description of Artificial Sequence: Synthetic oligonucleotide
  Sense strand starting at position 3137 of SEQ ID NO: 317896
gacaacuguuuaucuguga

SEQ ID NO: 520846 - RNA, 19 nt, Artificial Sequence
  Description of Artificial Sequence: Synthetic oligonucleotide
  Antisense strand to SEQ ID NO: 520845
ucacagauaaacaguuguc

SEQ ID NO: 520847 - RNA, 19 nt, Artificial Sequence
  Description of Artificial Sequence: Synthetic oligonucleotide
  Sense strand starting at position 3138 of SEQ ID NO: 317896
acaacuguuuaucugugaa

SEQ ID NO: 520848 - RNA, 19 nt, Artificial Sequence
  Description of Artificial Sequence: Synthetic oligonucleotide
  Antisense strand to SEQ ID NO: 520847
uucacagauaaacaguugu

SEQ ID NO: 520849 - RNA, 19 nt, Artificial Sequence
  Description of Artificial Sequence: Synthetic oligonucleotide
  Sense strand starting at position 3140 of SEQ ID NO: 317896
aacuguuuaucugugaaug

SEQ ID NO: 520850 - RNA, 19 nt, Artificial Sequence
  Description of Artificial Sequence: Synthetic oligonucleotide
  Antisense strand to SEQ ID NO: 520849
cauucacagauaaacaguu

SEQ ID NO: 520851 - RNA, 19 nt, Artificial Sequence
  Description of Artificial Sequence: Synthetic oligonucleotide
  Sense strand starting at position 3141 of SEQ ID NO: 317896
acuguuuaucugugaauga

SEQ ID NO: 520852 - RNA, 19 nt, Artificial Sequence
  Description of Artificial Sequence: Synthetic oligonucleotide
  Antisense strand to SEQ ID NO: 520851
ucauucacagauaaacagu

SEQ ID NO: 520853 - RNA, 19 nt, Artificial Sequence
  Description of Artificial Sequence: Synthetic oligonucleotide
  Sense strand starting at position 3145 of SEQ ID NO: 317896
uuuaucugugaaugacaaa

SEQ ID NO: 520854 - RNA, 19 nt, Artificial Sequence
  Description of Artificial Sequence: Synthetic oligonucleotide
  Antisense strand to SEQ ID NO: 520853
uuugucauucacagauaaa

SEQ ID NO: 520855 - RNA, 19 nt, Artificial Sequence
  Description of Artificial Sequence: Synthetic oligonucleotide
  Sense strand starting at position 3280 of SEQ ID NO: 317896
auugacugggcuugcuaaa

SEQ ID NO: 520856 - RNA, 19 nt, Artificial Sequence
  Description of Artificial Sequence: Synthetic oligonucleotide
  Antisense strand to SEQ ID NO: 520855
uuuagcaagcccagucaau

SEQ ID NO: 520857 - RNA, 19 nt, Artificial Sequence
  Description of Artificial Sequence: Synthetic oligonucleotide
  Sense strand starting at position 3383 of SEQ ID NO: 317896
cccuauaauuagguagagu

SEQ ID NO: 520858 - RNA, 19 nt, Artificial Sequence
  Description of Artificial Sequence: Synthetic oligonucleotide
  Antisense strand to SEQ ID NO: 520857
acucuaccuaauuauaggg

SEQ ID NO: 520859 - RNA, 19 nt, Artificial Sequence
  Description of Artificial Sequence: Synthetic oligonucleotide
  Sense strand starting at position 3510 of SEQ ID NO: 317896
ucaguugaaucagccuauu

SEQ ID NO: 520860 - RNA, 19 nt, Artificial Sequence
  Description of Artificial Sequence: Synthetic oligonucleotide
  Antisense strand to SEQ ID NO: 520859
aauaggcugauucaacuga

SEQ ID NO: 520861 - RNA, 19 nt, Artificial Sequence
  Description of Artificial Sequence: Synthetic oligonucleotide
  Sense strand starting at position 3944 of SEQ ID NO: 317896
uuaaguaauugcccaagua

SEQ ID NO: 520862 - RNA, 19 nt, Artificial Sequence
  Description of Artificial Sequence: Synthetic oligonucleotide
  Antisense strand to SEQ ID NO: 520861
uacuugggcaauuacuuaa

SEQ ID NO: 520863 - RNA, 19 nt, Artificial Sequence
  Description of Artificial Sequence: Synthetic oligonucleotide
  Sense strand starting at position 3956 of SEQ ID NO: 317896
ccaaguaauugcuuaagua

SEQ ID NO: 520864 - RNA, 19 nt, Artificial Sequence
  Description of Artificial Sequence: Synthetic oligonucleotide
  Antisense strand to SEQ ID NO: 520863
uacuuaagcaauuacuugg

SEQ ID NO: 520865 - RNA, 19 nt, Artificial Sequence
  Description of Artificial Sequence: Synthetic oligonucleotide
  Sense strand starting at position 156 of SEQ ID NO: 317897
uuacauuaccgguaacaau

SEQ ID NO: 520866 - RNA, 19 nt, Artificial Sequence
  Description of Artificial Sequence: Synthetic oligonucleotide
  Antisense strand to SEQ ID NO: 520865
auuguuaccgguaauguaa

SEQ ID NO: 520867 - RNA, 19 nt, Artificial Sequence
  Description of Artificial Sequence: Synthetic oligonucleotide
  Sense strand starting at position 206 of SEQ ID NO: 317897
agcuucuugccagagucuu

SEQ ID NO: 520868 - RNA, 19 nt, Artificial Sequence
  Description of Artificial Sequence: Synthetic oligonucleotide
  Antisense strand to SEQ ID NO: 520867
aagacucuggcaagaagcu

SEQ ID NO: 520869 - RNA, 19 nt, Artificial Sequence
  Description of Artificial Sequence: Synthetic oligonucleotide
  Sense strand starting at position 236 of SEQ ID NO: 317897
uugcaacgcuauuuaacaa

SEQ ID NO: 520870 - RNA, 19 nt, Artificial Sequence
  Description of Artificial Sequence: Synthetic oligonucleotide
  Antisense strand to SEQ ID NO: 520869
uuguuaaauagcguugcaa

SEQ ID NO: 520871 - RNA, 19 nt, Artificial Sequence
  Description of Artificial Sequence: Synthetic oligonucleotide
  Sense strand starting at position 409 of SEQ ID NO: 317897
acauuuccgccgcagugaa

SEQ ID NO: 520872 - RNA, 19 nt, Artificial Sequence
  Description of Artificial Sequence: Synthetic oligonucleotide
  Antisense strand to SEQ ID NO: 520871
uucacugcggcggaaaugu

SEQ ID NO: 520873 - RNA, 19 nt, Artificial Sequence
  Description of Artificial Sequence: Synthetic oligonucleotide
  Sense strand starting at position 1203 of SEQ ID NO: 317897
gcuagaaagcgccuugugu

SEQ ID NO: 520874 - RNA, 19 nt, Artificial Sequence
  Description of Artificial Sequence: Synthetic oligonucleotide
  Antisense strand to SEQ ID NO: 520873
acacaaggcgcuuucuagc

SEQ ID NO: 520875 - RNA, 19 nt, Artificial Sequence
  Description of Artificial Sequence: Synthetic oligonucleotide
  Sense strand starting at position 2320 of SEQ ID NO: 317897
caacuagaggcuugucuuu

SEQ ID NO: 520876 - RNA, 19 nt, Artificial Sequence
  Description of Artificial Sequence: Synthetic oligonucleotide
  Antisense strand to SEQ ID NO: 520875
aaagacaagccucuaguug

SEQ ID NO: 520877 - RNA, 19 nt, Artificial Sequence
  Description of Artificial Sequence: Synthetic oligonucleotide
  Sense strand starting at position 2331 of SEQ ID NO: 317897
uugucuuuccacugggagu

SEQ ID NO: 520878 - RNA, 19 nt, Artificial Sequence
  Description of Artificial Sequence: Synthetic oligonucleotide
  Antisense strand to SEQ ID NO: 520877
acucccaguggaaagacaa

SEQ ID NO: 520879 - RNA, 19 nt, Artificial Sequence
  Description of Artificial Sequence: Synthetic oligonucleotide
  Sense strand starting at position 2332 of SEQ ID NO: 317897
ugucuuuccacugggaguu

SEQ ID NO: 520880 - RNA, 19 nt, Artificial Sequence
  Description of Artificial Sequence: Synthetic oligonucleotide
  Antisense strand to SEQ ID NO: 520879
aacucccaguggaaagaca

SEQ ID NO: 520881 - RNA, 19 nt, Artificial Sequence
  Description of Artificial Sequence: Synthetic oligonucleotide
  Sense strand starting at position 2333 of SEQ ID NO: 317897
gucuuuccacugggaguua

SEQ ID NO: 520882 - RNA, 19 nt, Artificial Sequence
  Description of Artificial Sequence: Synthetic oligonucleotide
  Antisense strand to SEQ ID NO: 520881
uaacucccaguggaaagac

SEQ ID NO: 520883 - RNA, 19 nt, Artificial Sequence
  Description of Artificial Sequence: Synthetic oligonucleotide
  Sense strand starting at position 2377 of SEQ ID NO: 317897
uggagcuaagucuauaaau

SEQ ID NO: 520884 - RNA, 19 nt, Artificial Sequence
  Description of Artificial Sequence: Synthetic oligonucleotide
  Antisense strand to SEQ ID NO: 520883
auuuauagacuuagcucca

SEQ ID NO: 520885 - RNA, 19 nt, Artificial Sequence
  Description of Artificial Sequence: Synthetic oligonucleotide
  Sense strand starting at position 2448 of SEQ ID NO: 317897
ggcccagggagaugugaau

SEQ ID NO: 520886 - RNA, 19 nt, Artificial Sequence
  Description of Artificial Sequence: Synthetic oligonucleotide
  Antisense strand to SEQ ID NO: 520885
auucacaucucccugggcc

SEQ ID NO: 520887 - RNA, 19 nt, Artificial Sequence
  Description of Artificial Sequence: Synthetic oligonucleotide
  Sense strand starting at position 2461 of SEQ ID NO: 317897
gugaauugccuggcucgua

SEQ ID NO: 520888 - RNA, 19 nt, Artificial Sequence
  Description of Artificial Sequence: Synthetic oligonucleotide
  Antisense strand to SEQ ID NO: 520887
uacgagccaggcaauucac

SEQ ID NO: 520889 - RNA, 19 nt, Artificial Sequence
  Description of Artificial Sequence: Synthetic oligonucleotide
  Sense strand starting at position 2473 of SEQ ID NO: 317897
gcucguagucacuuagcaa

SEQ ID NO: 520890 - RNA, 19 nt, Artificial Sequence
  Description of Artificial Sequence: Synthetic oligonucleotide
  Antisense strand to SEQ ID NO: 520889
uugcuaagugacuacgagc

SEQ ID NO: 520891 - RNA, 19 nt, Artificial Sequence
  Description of Artificial Sequence: Synthetic oligonucleotide
  Sense strand starting at position 2730 of SEQ ID NO: 317897
ccugguauuugcgccgaga

SEQ ID NO: 520892 - RNA, 19 nt, Artificial Sequence
  Description of Artificial Sequence: Synthetic oligonucleotide
  Antisense strand to SEQ ID NO: 520891
ucucggcgcaaauaccagg

SEQ ID NO: 520893 - RNA, 19 nt, Artificial Sequence
  Description of Artificial Sequence: Synthetic oligonucleotide
  Sense strand starting at position 2732 of SEQ ID NO: 317897
ugguauuugcgccgagaaa

SEQ ID NO: 520894 - RNA, 19 nt, Artificial Sequence
  Description of Artificial Sequence: Synthetic oligonucleotide
  Antisense strand to SEQ ID NO: 520893
uuucucggcgcaaauacca

SEQ ID NO: 520895 - RNA, 19 nt, Artificial Sequence
  Description of Artificial Sequence: Synthetic oligonucleotide
  Sense strand starting at position 2733 of SEQ ID NO: 317897
gguauuugcgccgagaaau

SEQ ID NO: 520896 - RNA, 19 nt, Artificial Sequence
  Description of Artificial Sequence: Synthetic oligonucleotide
  Antisense strand to SEQ ID NO: 520895
auuucucggcgcaaauacc

SEQ ID NO: 520897 - RNA, 19 nt, Artificial Sequence
  Description of Artificial Sequence: Synthetic oligonucleotide
  Sense strand starting at position 2743 of SEQ ID NO: 317897
ccgagaaauuucgcuccuu

SEQ ID NO: 520898 - RNA, 19 nt, Artificial Sequence
  Description of Artificial Sequence: Synthetic oligonucleotide
  Antisense strand to SEQ ID NO: 520897
aaggagcgaaauuucucgg

SEQ ID NO: 520899 - RNA, 19 nt, Artificial Sequence
  Description of Artificial Sequence: Synthetic oligonucleotide
  Sense strand starting at position 2744 of SEQ ID NO: 317897
cgagaaauuucgcuccuug

SEQ ID NO: 520900 - RNA, 19 nt, Artificial Sequence
  Description of Artificial Sequence: Synthetic oligonucleotide
  Antisense strand to SEQ ID NO: 520899
caaggagcgaaauuucucg

SEQ ID NO: 520901 - RNA, 19 nt, Artificial Sequence
  Description of Artificial Sequence: Synthetic oligonucleotide
  Sense strand starting at position 2995 of SEQ ID NO: 317897
gauggaaacucuguagacu

SEQ ID NO: 520902 - RNA, 19 nt, Artificial Sequence
  Description of Artificial Sequence: Synthetic oligonucleotide
  Antisense strand to SEQ ID NO: 520901
agucuacagaguuuccauc

SEQ ID NO: 520903 - RNA, 19 nt, Artificial Sequence
  Description of Artificial Sequence: Synthetic oligonucleotide
  Sense strand starting at position 3013 of SEQ ID NO: 317897
uccagagauaggugcugaa

SEQ ID NO: 520904 - RNA, 19 nt, Artificial Sequence
  Description of Artificial Sequence: Synthetic oligonucleotide
  Antisense strand to SEQ ID NO: 520903
uucagcaccuaucucugga

SEQ ID NO: 520905 - RNA, 19 nt, Artificial Sequence
  Description of Artificial Sequence: Synthetic oligonucleotide
  Sense strand starting at position 3041 of SEQ ID NO: 317897
ggcggaaauguguaacuau

SEQ ID NO: 520906 - RNA, 19 nt, Artificial Sequence
  Description of Artificial Sequence: Synthetic oligonucleotide
  Antisense strand to SEQ ID NO: 520905
auaguuacacauuuccgcc

SEQ ID NO: 520907 - RNA, 19 nt, Artificial Sequence
  Description of Artificial Sequence: Synthetic oligonucleotide
  Sense strand starting at position 3052 of SEQ ID NO: 317897
guaacuauugcacauaugu

SEQ ID NO: 520908 - RNA, 19 nt, Artificial Sequence
  Description of Artificial Sequence: Synthetic oligonucleotide
  Antisense strand to SEQ ID NO: 520907
acauaugugcaauaguuac

SEQ ID NO: 520909 - RNA, 19 nt, Artificial Sequence
  Description of Artificial Sequence: Synthetic oligonucleotide
  Sense strand starting at position 3210 of SEQ ID NO: 317897
agaugaccuugccuagaaa

SEQ ID NO: 520910 - RNA, 19 nt, Artificial Sequence
  Description of Artificial Sequence: Synthetic oligonucleotide
  Antisense strand to SEQ ID NO: 520909
uuucuaggcaaggucaucu

SEQ ID NO: 520911 - RNA, 19 nt, Artificial Sequence
  Description of Artificial Sequence: Synthetic oligonucleotide
  Sense strand starting at position 3291 of SEQ ID NO: 317897
gggacagguauguaucuuu

SEQ ID NO: 520912 - RNA, 19 nt, Artificial Sequence
  Description of Artificial Sequence: Synthetic oligonucleotide
  Antisense strand to SEQ ID NO: 520911
aaagauacauaccuguccc

SEQ ID NO: 520913 - RNA, 19 nt, Artificial Sequence
  Description of Artificial Sequence: Synthetic oligonucleotide
  Sense strand starting at position 3315 of SEQ ID NO: 317897
cuagaaauugcgggauguc

SEQ ID NO: 520914 - RNA, 19 nt, Artificial Sequence
  Description of Artificial Sequence: Synthetic oligonucleotide
  Antisense strand to SEQ ID NO: 520913
gacaucccgcaauuucuag

SEQ ID NO: 520915 - RNA, 19 nt, Artificial Sequence
  Description of Artificial Sequence: Synthetic oligonucleotide
  Sense strand starting at position 3318 of SEQ ID NO: 317897
gaaauugcgggauguccuu

SEQ ID NO: 520916 - RNA, 19 nt, Artificial Sequence
  Description of Artificial Sequence: Synthetic oligonucleotide
  Antisense strand to SEQ ID NO: 520915
aaggacaucccgcaauuuc

SEQ ID NO: 520917 - RNA, 19 nt, Artificial Sequence
  Description of Artificial Sequence: Synthetic oligonucleotide
  Sense strand starting at position 3324 of SEQ ID NO: 317897
gcgggauguccuuaaccaa

SEQ ID NO: 520918 - RNA, 19 nt, Artificial Sequence
  Description of Artificial Sequence: Synthetic oligonucleotide
  Antisense strand to SEQ ID NO: 520917
uugguuaaggacaucccgc

SEQ ID NO: 520919 - RNA, 19 nt, Artificial Sequence
  Description of Artificial Sequence: Synthetic oligonucleotide
  Sense strand starting at position 3331 of SEQ ID NO: 317897
guccuuaaccaagggaaca

SEQ ID NO: 520920 - RNA, 19 nt, Artificial Sequence
  Description of Artificial Sequence: Synthetic oligonucleotide
  Antisense strand to SEQ ID NO: 520919
uguucccuugguuaaggac

SEQ ID NO: 520921 - RNA, 19 nt, Artificial Sequence
  Description of Artificial Sequence: Synthetic oligonucleotide
  Sense strand starting at position 3357 of SEQ ID NO: 317897
ucagaucccuuugcaaaga

SEQ ID NO: 520922 - RNA, 19 nt, Artificial Sequence
  Description of Artificial Sequence: Synthetic oligonucleotide
  Antisense strand to SEQ ID NO: 520921
ucuuugcaaagggaucuga

SEQ ID NO: 520923 - RNA, 19 nt, Artificial Sequence
  Description of Artificial Sequence: Synthetic oligonucleotide
  Sense strand starting at position 3368 of SEQ ID NO: 317897
ugcaaagaacuuugcuaag

SEQ ID NO: 520924 - RNA, 19 nt, Artificial Sequence
  Description of Artificial Sequence: Synthetic oligonucleotide
  Antisense strand to SEQ ID NO: 520923
cuuagcaaaguucuuugca

SEQ ID NO: 520925 - RNA, 19 nt, Artificial Sequence
  Description of Artificial Sequence: Synthetic oligonucleotide
  Sense strand starting at position 3406 of SEQ ID NO: 317897
aaagaaauccgcuggccau

SEQ ID NO: 520926 - RNA, 19 nt, Artificial Sequence
  Description of Artificial Sequence: Synthetic oligonucleotide
  Antisense strand to SEQ ID NO: 520925
auggccagcggauuucuuu

SEQ ID NO: 520927 - RNA, 19 nt, Artificial Sequence
  Description of Artificial Sequence: Synthetic oligonucleotide
  Sense strand starting at position 3407 of SEQ ID NO: 317897
aagaaauccgcuggccauu

SEQ ID NO: 520928 - RNA, 19 nt, Artificial Sequence
  Description of Artificial Sequence: Synthetic oligonucleotide
  Antisense strand to SEQ ID NO: 520927
aauggccagcggauuucuu

SEQ ID NO: 520929 - RNA, 19 nt, Artificial Sequence
  Description of Artificial Sequence: Synthetic oligonucleotide
  Sense strand starting at position 3444 of SEQ ID NO: 317897
gccacuuuccuguaucuuu

SEQ ID NO: 520930 - RNA, 19 nt, Artificial Sequence
  Description of Artificial Sequence: Synthetic oligonucleotide
  Antisense strand to SEQ ID NO: 520929
aaagauacaggaaaguggc

SEQ ID NO: 520931 - RNA, 19 nt, Artificial Sequence
  Description of Artificial Sequence: Synthetic oligonucleotide
  Sense strand starting at position 3677 of SEQ ID NO: 317897
uuggaaaucaugggugcua

SEQ ID NO: 520932 - RNA, 19 nt, Artificial Sequence
  Description of Artificial Sequence: Synthetic oligonucleotide
  Antisense strand to SEQ ID NO: 520931
uagcacccaugauuuccaa

SEQ ID NO: 520933 - RNA, 19 nt, Artificial Sequence
  Description of Artificial Sequence: Synthetic oligonucleotide
  Sense strand starting at position 3679 of SEQ ID NO: 317897
ggaaaucaugggugcuacu

SEQ ID NO: 520934 - RNA, 19 nt, Artificial Sequence
  Description of Artificial Sequence: Synthetic oligonucleotide
  Antisense strand to SEQ ID NO: 520933
aguagcacccaugauuucc

SEQ ID NO: 520935 - RNA, 19 nt, Artificial Sequence
  Description of Artificial Sequence: Synthetic oligonucleotide
  Sense strand starting at position 3720 of SEQ ID NO: 317897
ucugguuugcuugagccaa

SEQ ID NO: 520936 - RNA, 19 nt, Artificial Sequence
  Description of Artificial Sequence: Synthetic oligonucleotide
  Antisense strand to SEQ ID NO: 520935
uuggcucaagcaaaccaga

SEQ ID NO: 520937 - RNA, 19 nt, Artificial Sequence
  Description of Artificial Sequence: Synthetic oligonucleotide
  Sense strand starting at position 3734 of SEQ ID NO: 317897
gccaaucuaugacuaguuu

SEQ ID NO: 520938 - RNA, 19 nt, Artificial Sequence
  Description of Artificial Sequence: Synthetic oligonucleotide
  Antisense strand to SEQ ID NO: 520937
aaacuagucauagauuggc

SEQ ID NO: 520939 - RNA, 19 nt, Artificial Sequence
  Description of Artificial Sequence: Synthetic oligonucleotide
  Sense strand starting at position 3775 of SEQ ID NO: 317897
augcuuaucucagcugaaa

SEQ ID NO: 520940 - RNA, 19 nt, Artificial Sequence
  Description of Artificial Sequence: Synthetic oligonucleotide
  Antisense strand to SEQ ID NO: 520939
uuucagcugagauaagcau

SEQ ID NO: 520941 - RNA, 19 nt, Artificial Sequence
  Description of Artificial Sequence: Synthetic oligonucleotide
  Sense strand starting at position 3837 of SEQ ID NO: 317897
gguguaaucccacagcauc

SEQ ID NO: 520942 - RNA, 19 nt, Artificial Sequence
  Description of Artificial Sequence: Synthetic oligonucleotide
  Antisense strand to SEQ ID NO: 520941
gaugcugugggauuacacc

SEQ ID NO: 520943 - RNA, 19 nt, Artificial Sequence
  Description of Artificial Sequence: Synthetic oligonucleotide
  Sense strand starting at position 3932 of SEQ ID NO: 317897
ggaagaaacuucuaaacag

SEQ ID NO: 520944 - RNA, 19 nt, Artificial Sequence
  Description of Artificial Sequence: Synthetic oligonucleotide
  Antisense strand to SEQ ID NO: 520943
cuguuuagaaguuucuucc

SEQ ID NO: 520945 - RNA, 19 nt, Artificial Sequence
  Description of Artificial Sequence: Synthetic oligonucleotide
  Sense strand starting at position 23 of SEQ ID NO: 317898
gcucacauuccagaugacu

SEQ ID NO: 520946 - RNA, 19 nt, Artificial Sequence
  Description of Artificial Sequence: Synthetic oligonucleotide
  Antisense strand to SEQ ID NO: 520945
agucaucuggaaugugagc

SEQ ID NO: 520947 - RNA, 19 nt, Artificial Sequence
  Description of Artificial Sequence: Synthetic oligonucleotide
  Sense strand starting at position 81 of SEQ ID NO: 317898
uuucuuuacugucuuagua

SEQ ID NO: 520948 - RNA, 19 nt, Artificial Sequence
  Description of Artificial Sequence: Synthetic oligonucleotide
  Antisense strand to SEQ ID NO: 520947
uacuaagacaguaaagaaa

SEQ ID NO: 520949 - RNA, 19 nt, Artificial Sequence
  Description of Artificial Sequence: Synthetic oligonucleotide
  Sense strand starting at position 89 of SEQ ID NO: 317898
cugucuuaguaucugauca

SEQ ID NO: 520950 - RNA, 19 nt, Artificial Sequence
  Description of Artificial Sequence: Synthetic oligonucleotide
  Antisense strand to SEQ ID NO: 520949
ugaucagauacuaagacag

SEQ ID NO: 520951 - RNA, 19 nt, Artificial Sequence
  Description of Artificial Sequence: Synthetic oligonucleotide
  Sense strand starting at position 93 of SEQ ID NO: 317898
cuuaguaucugaucaucag

SEQ ID NO: 520952 - RNA, 19 nt, Artificial Sequence
  Description of Artificial Sequence: Synthetic oligonucleotide
  Antisense strand to SEQ ID NO: 520951
cugaugaucagauacuaag

SEQ ID NO: 520953 - RNA, 19 nt, Artificial Sequence
  Description of Artificial Sequence: Synthetic oligonucleotide
  Sense strand starting at position 94 of SEQ ID NO: 317898
uuaguaucugaucaucagu

SEQ ID NO: 520954 - RNA, 19 nt, Artificial Sequence
  Description of Artificial Sequence: Synthetic oligonucleotide
  Antisense strand to SEQ ID NO: 520953
acugaugaucagauacuaa

SEQ ID NO: 520955 - RNA, 19 nt, Artificial Sequence
  Description of Artificial Sequence: Synthetic oligonucleotide
  Sense strand starting at position 96 of SEQ ID NO: 317898
aguaucugaucaucaguua

SEQ ID NO: 520956 - RNA, 19 nt, Artificial Sequence
  Description of Artificial Sequence: Synthetic oligonucleotide
  Antisense strand to SEQ ID NO: 520955
uaacugaugaucagauacu

SEQ ID NO: 520957 - RNA, 19 nt, Artificial Sequence
  Description of Artificial Sequence: Synthetic oligonucleotide
  Sense strand starting at position 127 of SEQ ID NO: 317898
uguuucuaucucgacacaa

SEQ ID NO: 520958 - RNA, 19 nt, Artificial Sequence
  Description of Artificial Sequence: Synthetic oligonucleotide
  Antisense strand to SEQ ID NO: 520957
uugugucgagauagaaaca

SEQ ID NO: 520959 - RNA, 19 nt, Artificial Sequence
  Description of Artificial Sequence: Synthetic oligonucleotide
  Sense strand starting at position 227 of SEQ ID NO: 317898
aucaucuuguaaguuacaa

SEQ ID NO: 520960 - RNA, 19 nt, Artificial Sequence
  Description of Artificial Sequence: Synthetic oligonucleotide
  Antisense strand to SEQ ID NO: 520959
uuguaacuuacaagaugau

SEQ ID NO: 520961 - RNA, 19 nt, Artificial Sequence
  Description of Artificial Sequence: Synthetic oligonucleotide
  Sense strand starting at position 257 of SEQ ID NO: 317898
uuucauugggcgggugaga

SEQ ID NO: 520962 - RNA, 19 nt, Artificial Sequence
  Description of Artificial Sequence: Synthetic oligonucleotide
  Antisense strand to SEQ ID NO: 520961
ucucacccgcccaaugaaa

SEQ ID NO: 520963 - RNA, 19 nt, Artificial Sequence
  Description of Artificial Sequence: Synthetic oligonucleotide
  Sense strand starting at position 568 of SEQ ID NO: 317898
caggaauaguuauccuagu

SEQ ID NO: 520964 - RNA, 19 nt, Artificial Sequence
  Description of Artificial Sequence: Synthetic oligonucleotide
  Antisense strand to SEQ ID NO: 520963
acuaggauaacuauuccug

SEQ ID NO: 520965 - RNA, 19 nt, Artificial Sequence
  Description of Artificial Sequence: Synthetic oligonucleotide
  Sense strand starting at position 569 of SEQ ID NO: 317898
aggaauaguuauccuagug

SEQ ID NO: 520966 - RNA, 19 nt, Artificial Sequence
  Description of Artificial Sequence: Synthetic oligonucleotide
  Antisense strand to SEQ ID NO: 520965
cacuaggauaacuauuccu

SEQ ID NO: 520967 - RNA, 19 nt, Artificial Sequence
  Description of Artificial Sequence: Synthetic oligonucleotide
  Sense strand starting at position 577 of SEQ ID NO: 317898
uuauccuagugugcauaaa

SEQ ID NO: 520968 - RNA, 19 nt, Artificial Sequence
  Description of Artificial Sequence: Synthetic oligonucleotide
  Antisense strand to SEQ ID NO: 520967
uuuaugcacacuaggauaa

SEQ ID NO: 520969 - RNA, 19 nt, Artificial Sequence
  Description of Artificial Sequence: Synthetic oligonucleotide
  Sense strand starting at position 649 of SEQ ID NO: 317898
auuaacuucugagaugaag

SEQ ID NO: 520970 - RNA, 19 nt, Artificial Sequence
  Description of Artificial Sequence: Synthetic oligonucleotide
  Antisense strand to SEQ ID NO: 520969
cuucaucucagaaguuaau

SEQ ID NO: 520971 - RNA, 19 nt, Artificial Sequence
  Description of Artificial Sequence: Synthetic oligonucleotide
  Sense strand starting at position 844 of SEQ ID NO: 317898
uuagaucuccuuuagguag

SEQ ID NO: 520972 - RNA, 19 nt, Artificial Sequence
  Description of Artificial Sequence: Synthetic oligonucleotide
  Antisense strand to SEQ ID NO: 520971
cuaccuaaaggagaucuaa

SEQ ID NO: 520973 - RNA, 19 nt, Artificial Sequence
  Description of Artificial Sequence: Synthetic oligonucleotide
  Sense strand starting at position 847 of SEQ ID NO: 317898
gaucuccuuuagguaguua

SEQ ID NO: 520974 - RNA, 19 nt, Artificial Sequence
  Description of Artificial Sequence: Synthetic oligonucleotide
  Antisense strand to SEQ ID NO: 520973
uaacuaccuaaaggagauc

SEQ ID NO: 520975 - RNA, 19 nt, Artificial Sequence
  Description of Artificial Sequence: Synthetic oligonucleotide
  Sense strand starting at position 906 of SEQ ID NO: 317898
ucagguugucacuacaaac

SEQ ID NO: 520976 - RNA, 19 nt, Artificial Sequence
  Description of Artificial Sequence: Synthetic oligonucleotide
  Antisense strand to SEQ ID NO: 520975
guuuguagugacaaccuga

SEQ ID NO: 520977 - RNA, 19 nt, Artificial Sequence
  Description of Artificial Sequence: Synthetic oligonucleotide
  Sense strand starting at position 986 of SEQ ID NO: 317898
uugggcucucuagguuaau

SEQ ID NO: 520978 - RNA, 19 nt, Artificial Sequence
  Description of Artificial Sequence: Synthetic oligonucleotide
  Antisense strand to SEQ ID NO: 520977
auuaaccuagagagcccaa

SEQ ID NO: 520979 - RNA, 19 nt, Artificial Sequence
  Description of Artificial Sequence: Synthetic oligonucleotide
  Sense strand starting at position 989 of SEQ ID NO: 317898
ggcucucuagguuaaugua

SEQ ID NO: 520980 - RNA, 19 nt, Artificial Sequence
  Description of Artificial Sequence: Synthetic oligonucleotide
  Antisense strand to SEQ ID NO: 520979
uacauuaaccuagagagcc

SEQ ID NO: 520981 - RNA, 19 nt, Artificial Sequence
  Description of Artificial Sequence: Synthetic oligonucleotide
  Sense strand starting at position 998 of SEQ ID NO: 317898
gguuaauguagugauugca

SEQ ID NO: 520982 - RNA, 19 nt, Artificial Sequence
  Description of Artificial Sequence: Synthetic oligonucleotide
  Antisense strand to SEQ ID NO: 520981
ugcaaucacuacauuaacc

SEQ ID NO: 520983 - RNA, 19 nt, Artificial Sequence
  Description of Artificial Sequence: Synthetic oligonucleotide
  Sense strand starting at position 1001 of SEQ ID NO: 317898
uaauguagugauugcauuu

SEQ ID NO: 520984 - RNA, 19 nt, Artificial Sequence
  Description of Artificial Sequence: Synthetic oligonucleotide
  Antisense strand to SEQ ID NO: 520983
aaaugcaaucacuacauua

SEQ ID NO: 520985 - RNA, 19 nt, Artificial Sequence
  Description of Artificial Sequence: Synthetic oligonucleotide
  Sense strand starting at position 1054 of SEQ ID NO: 317898
ggucgcuuugagagauguu

SEQ ID NO: 520986 - RNA, 19 nt, Artificial Sequence
  Description of Artificial Sequence: Synthetic oligonucleotide
  Antisense strand to SEQ ID NO: 520985
aacaucucucaaagcgacc

SEQ ID NO: 520987 - RNA, 19 nt, Artificial Sequence
  Description of Artificial Sequence: Synthetic oligonucleotide
  Sense strand starting at position 1055 of SEQ ID NO: 317898
gucgcuuugagagauguuu

SEQ ID NO: 520988 - RNA, 19 nt, Artificial Sequence
  Description of Artificial Sequence: Synthetic oligonucleotide
  Antisense strand to SEQ ID NO: 520987
aaacaucucucaaagcgac

SEQ ID NO: 520989 - RNA, 19 nt, Artificial Sequence
  Description of Artificial Sequence: Synthetic oligonucleotide
  Sense strand starting at position 1057 of SEQ ID NO: 317898
cgcuuugagagauguuuac

SEQ ID NO: 520990 - RNA, 19 nt, Artificial Sequence
  Description of Artificial Sequence: Synthetic oligonucleotide
  Antisense strand to SEQ ID NO: 520989
guaaacaucucucaaagcg

SEQ ID NO: 520991 - RNA, 19 nt, Artificial Sequence
  Description of Artificial Sequence: Synthetic oligonucleotide
  Sense strand starting at position 1063 of SEQ ID NO: 317898
gagagauguuuacuuaaau

SEQ ID NO: 520992 - RNA, 19 nt, Artificial Sequence
  Description of Artificial Sequence: Synthetic oligonucleotide
  Antisense strand to SEQ ID NO: 520991
auuuaaguaaacaucucuc

SEQ ID NO: 520993 - RNA, 19 nt, Artificial Sequence
  Description of Artificial Sequence: Synthetic oligonucleotide
  Sense strand starting at position 1064 of SEQ ID NO: 317898
agagauguuuacuuaaaug

SEQ ID NO: 520994 - RNA, 19 nt, Artificial Sequence
  Description of Artificial Sequence: Synthetic oligonucleotide
  Antisense strand to SEQ ID NO: 520993
cauuuaaguaaacaucucu

SEQ ID NO: 520995 - RNA, 19 nt, Artificial Sequence
  Description of Artificial Sequence: Synthetic oligonucleotide
  Sense strand starting at position 1188 of SEQ ID NO: 317898
cguuucaacgagugaacua

SEQ ID NO: 520996 - RNA, 19 nt, Artificial Sequence
  Description of Artificial Sequence: Synthetic oligonucleotide
  Antisense strand to SEQ ID NO: 520995
uaguucacucguugaaacg

SEQ ID NO: 520997 - RNA, 19 nt, Artificial Sequence
  Description of Artificial Sequence: Synthetic oligonucleotide
  Sense strand starting at position 1389 of SEQ ID NO: 317898
gccggugugcugaguaaac

SEQ ID NO: 520998 - RNA, 19 nt, Artificial Sequence
  Description of Artificial Sequence: Synthetic oligonucleotide
  Antisense strand to SEQ ID NO: 520997
guuuacucagcacaccggc

SEQ ID NO: 520999 - RNA, 19 nt, Artificial Sequence
  Description of Artificial Sequence: Synthetic oligonucleotide
  Sense strand starting at position 1391 of SEQ ID NO: 317898
cggugugcugaguaaacuu

SEQ ID NO: 521000 - RNA, 19 nt, Artificial Sequence
  Description of Artificial Sequence: Synthetic oligonucleotide
  Antisense strand to SEQ ID NO: 520999
aaguuuacucagcacaccg

SEQ ID NO: 521001 - RNA, 19 nt, Artificial Sequence
  Description of Artificial Sequence: Synthetic oligonucleotide
  Sense strand starting at position 1423 of SEQ ID NO: 317898
ucaacuuugcuuuaugaag

SEQ ID NO: 521002 - RNA, 19 nt, Artificial Sequence
  Description of Artificial Sequence: Synthetic oligonucleotide
  Antisense strand to SEQ ID NO: 521001
cuucauaaagcaaaguuga

SEQ ID NO: 521003 - RNA, 19 nt, Artificial Sequence
  Description of Artificial Sequence: Synthetic oligonucleotide
  Sense strand starting at position 2269 of SEQ ID NO: 317898
gucagauccgccgaguaug

SEQ ID NO: 521004 - RNA, 19 nt, Artificial Sequence
  Description of Artificial Sequence: Synthetic oligonucleotide
  Antisense strand to SEQ ID NO: 521003
cauacucggcggaucugac

SEQ ID NO: 521005 - RNA, 19 nt, Artificial Sequence
  Description of Artificial Sequence: Synthetic oligonucleotide
  Sense strand starting at position 3670 of SEQ ID NO: 317898
cugugaaauugacucaggu

SEQ ID NO: 521006 - RNA, 19 nt, Artificial Sequence
  Description of Artificial Sequence: Synthetic oligonucleotide
  Antisense strand to SEQ ID NO: 521005
accugagucaauuucacag

SEQ ID NO: 521007 - RNA, 19 nt, Artificial Sequence
  Description of Artificial Sequence: Synthetic oligonucleotide
  Sense strand starting at position 3672 of SEQ ID NO: 317898
gugaaauugacucagguuu

SEQ ID NO: 521008 - RNA, 19 nt, Artificial Sequence
  Description of Artificial Sequence: Synthetic oligonucleotide
  Antisense strand to SEQ ID NO: 521007
aaaccugagucaauuucac

SEQ ID NO: 521009 - RNA, 19 nt, Artificial Sequence
  Description of Artificial Sequence: Synthetic oligonucleotide
  Sense strand starting at position 3699 of SEQ ID NO: 317898
ugaucaaauuucgugucca

SEQ ID NO: 521010 - RNA, 19 nt, Artificial Sequence
  Description of Artificial Sequence: Synthetic oligonucleotide
  Antisense strand to SEQ ID NO: 521009
uggacacgaaauuugauca

SEQ ID NO: 521011 - RNA, 19 nt, Artificial Sequence
  Description of Artificial Sequence: Synthetic oligonucleotide
  Sense strand starting at position 3703 of SEQ ID NO: 317898
caaauuucguguccagcuu

SEQ ID NO: 521012 - RNA, 19 nt, Artificial Sequence
  Description of Artificial Sequence: Synthetic oligonucleotide
  Antisense strand to SEQ ID NO: 521011
aagcuggacacgaaauuug

SEQ ID NO: 521013 - RNA, 19 nt, Artificial Sequence
  Description of Artificial Sequence: Synthetic oligonucleotide
  Sense strand starting at position 3778 of SEQ ID NO: 317898
uuuagcauuucugcuugua

SEQ ID NO: 521014 - RNA, 19 nt, Artificial Sequence
  Description of Artificial Sequence: Synthetic oligonucleotide
  Antisense strand to SEQ ID NO: 521013
uacaagcagaaaugcuaaa

SEQ ID NO: 521015 - RNA, 19 nt, Artificial Sequence
  Description of Artificial Sequence: Synthetic oligonucleotide
  Sense strand starting at position 3780 of SEQ ID NO: 317898
uagcauuucugcuuguaga

SEQ ID NO: 521016 - RNA, 19 nt, Artificial Sequence
  Description of Artificial Sequence: Synthetic oligonucleotide
  Antisense strand to SEQ ID NO: 521015
ucuacaagcagaaaugcua

SEQ ID NO: 521017 - RNA, 19 nt, Artificial Sequence
  Description of Artificial Sequence: Synthetic oligonucleotide
  Sense strand starting at position 3781 of SEQ ID NO: 317898
agcauuucugcuuguagag

SEQ ID NO: 521018 - RNA, 19 nt, Artificial Sequence
  Description of Artificial Sequence: Synthetic oligonucleotide
  Antisense strand to SEQ ID NO: 521017
cucuacaagcagaaaugcu

SEQ ID NO: 521019 - RNA, 19 nt, Artificial Sequence
  Description of Artificial Sequence: Synthetic oligonucleotide
  Sense strand starting at position 3821 of SEQ ID NO: 317898
guauuccugacaggaguua

SEQ ID NO: 521020 - RNA, 19 nt, Artificial Sequence
  Description of Artificial Sequence: Synthetic oligonucleotide
  Antisense strand to SEQ ID NO: 521019
uaacuccugucaggaauac

SEQ ID NO: 521021 - RNA, 19 nt, Artificial Sequence
  Description of Artificial Sequence: Synthetic oligonucleotide
  Sense strand starting at position 3833 of SEQ ID NO: 317898
ggaguuaccaaaugugauu

SEQ ID NO: 521022 - RNA, 19 nt, Artificial Sequence
  Description of Artificial Sequence: Synthetic oligonucleotide
  Antisense strand to SEQ ID NO: 521021
aaucacauuugguaacucc

SEQ ID NO: 521023 - RNA, 19 nt, Artificial Sequence
  Description of Artificial Sequence: Synthetic oligonucleotide
  Sense strand starting at position 3846 of SEQ ID NO: 317898
gugauugaaagauggcuua

SEQ ID NO: 521024 - RNA, 19 nt, Artificial Sequence
  Description of Artificial Sequence: Synthetic oligonucleotide
  Antisense strand to SEQ ID NO: 521023
uaagccaucuuucaaucac

SEQ ID NO: 521025 - RNA, 19 nt, Artificial Sequence
  Description of Artificial Sequence: Synthetic oligonucleotide
  Sense strand starting at position 3 of SEQ ID NO: 317899
aauaguaaguguuccaguu

SEQ ID NO: 521026 - RNA, 19 nt, Artificial Sequence
  Description of Artificial Sequence: Synthetic oligonucleotide
  Antisense strand to SEQ ID NO: 521025
aacuggaacacuuacuauu

SEQ ID NO: 521027 - RNA, 19 nt, Artificial Sequence
  Description of Artificial Sequence: Synthetic oligonucleotide
  Sense strand starting at position 10 of SEQ ID NO: 317899
aguguuccaguuugaaaca

SEQ ID NO: 521028 - RNA, 19 nt, Artificial Sequence
  Description of Artificial Sequence: Synthetic oligonucleotide
  Antisense strand to SEQ ID NO: 521027
uguuucaaacuggaacacu

SEQ ID NO: 521029 - RNA, 19 nt, Artificial Sequence
  Description of Artificial Sequence: Synthetic oligonucleotide
  Sense strand starting at position 123 of SEQ ID NO: 317899
acaguagucuacucaauau

SEQ ID NO: 521030 - RNA, 19 nt, Artificial Sequence
  Description of Artificial Sequence: Synthetic oligonucleotide
  Antisense strand to SEQ ID NO: 521029
auauugaguagacuacugu

SEQ ID NO: 521031 - RNA, 19 nt, Artificial Sequence
  Description of Artificial Sequence: Synthetic oligonucleotide
  Sense strand starting at position 146 of SEQ ID NO: 317899
agcucuucccaagagaagu

SEQ ID NO: 521032 - RNA, 19 nt, Artificial Sequence
  Description of Artificial Sequence: Synthetic oligonucleotide
  Antisense strand to SEQ ID NO: 521031
acuucucuugggaagagcu

SEQ ID NO: 521033 - RNA, 19 nt, Artificial Sequence
  Description of Artificial Sequence: Synthetic oligonucleotide
  Sense strand starting at position 163 of SEQ ID NO: 317899
guacaauucucuuugaagu

SEQ ID NO: 521034 - RNA, 19 nt, Artificial Sequence
  Description of Artificial Sequence: Synthetic oligonucleotide
  Antisense strand to SEQ ID NO: 521033
acuucaaagagaauuguac

SEQ ID NO: 521035 - RNA, 19 nt, Artificial Sequence
  Description of Artificial Sequence: Synthetic oligonucleotide
  Sense strand starting at position 338 of SEQ ID NO: 317899
ucauguaacuuugcuaagu

SEQ ID NO: 521036 - RNA, 19 nt, Artificial Sequence
  Description of Artificial Sequence: Synthetic oligonucleotide
  Antisense strand to SEQ ID NO: 521035
acuuagcaaaguuacauga

SEQ ID NO: 521037 - RNA, 19 nt, Artificial Sequence
  Description of Artificial Sequence: Synthetic oligonucleotide
  Sense strand starting at position 357 of SEQ ID NO: 317899
ucacacaacuuguuggaau

SEQ ID NO: 521038 - RNA, 19 nt, Artificial Sequence
  Description of Artificial Sequence: Synthetic oligonucleotide
  Antisense strand to SEQ ID NO: 521037
auuccaacaaguuguguga

SEQ ID NO: 521039 - RNA, 19 nt, Artificial Sequence
  Description of Artificial Sequence: Synthetic oligonucleotide
  Sense strand starting at position 379 of SEQ ID NO: 317899
auccacaucugugugagua

SEQ ID NO: 521040 - RNA, 19 nt, Artificial Sequence
  Description of Artificial Sequence: Synthetic oligonucleotide
  Antisense strand to SEQ ID NO: 521039
uacucacacagauguggau

SEQ ID NO: 521041 - RNA, 19 nt, Artificial Sequence
  Description of Artificial Sequence: Synthetic oligonucleotide
  Sense strand starting at position 380 of SEQ ID NO: 317899
uccacaucugugugaguau

SEQ ID NO: 521042 - RNA, 19 nt, Artificial Sequence
  Description of Artificial Sequence: Synthetic oligonucleotide
  Antisense strand to SEQ ID NO: 521041
auacucacacagaugugga

SEQ ID NO: 521043 - RNA, 19 nt, Artificial Sequence
  Description of Artificial Sequence: Synthetic oligonucleotide
  Sense strand starting at position 383 of SEQ ID NO: 317899
acaucugugugaguauaaa

SEQ ID NO: 521044 - RNA, 19 nt, Artificial Sequence
  Description of Artificial Sequence: Synthetic oligonucleotide
  Antisense strand to SEQ ID NO: 521043
uuuauacucacacagaugu

SEQ ID NO: 521045 - RNA, 19 nt, Artificial Sequence
  Description of Artificial Sequence: Synthetic oligonucleotide
  Sense strand starting at position 573 of SEQ ID NO: 317899
ucaagaaguaauugagguu

SEQ ID NO: 521046 - RNA, 19 nt, Artificial Sequence
  Description of Artificial Sequence: Synthetic oligonucleotide
  Antisense strand to SEQ ID NO: 521045
aaccucaauuacuucuuga

SEQ ID NO: 521047 - RNA, 19 nt, Artificial Sequence
  Description of Artificial Sequence: Synthetic oligonucleotide
  Sense strand starting at position 582 of SEQ ID NO: 317899
aauugagguucuuccagaa

SEQ ID NO: 521048 - RNA, 19 nt, Artificial Sequence
  Description of Artificial Sequence: Synthetic oligonucleotide
  Antisense strand to SEQ ID NO: 521047
uucuggaagaaccucaauu

SEQ ID NO: 521049 - RNA, 19 nt, Artificial Sequence
  Description of Artificial Sequence: Synthetic oligonucleotide
  Sense strand starting at position 621 of SEQ ID NO: 317899
acaagcacuguugguaaau

SEQ ID NO: 521050 - RNA, 19 nt, Artificial Sequence
  Description of Artificial Sequence: Synthetic oligonucleotide
  Antisense strand to SEQ ID NO: 521049
auuuaccaacagugcuugu

SEQ ID NO: 521051 - RNA, 19 nt, Artificial Sequence
  Description of Artificial Sequence: Synthetic oligonucleotide
  Sense strand starting at position 622 of SEQ ID NO: 317899
caagcacuguugguaaaua

SEQ ID NO: 521052 - RNA, 19 nt, Artificial Sequence
  Description of Artificial Sequence: Synthetic oligonucleotide
  Antisense strand to SEQ ID NO: 521051
uauuuaccaacagugcuug

SEQ ID NO: 521053 - RNA, 19 nt, Artificial Sequence
  Description of Artificial Sequence: Synthetic oligonucleotide
  Sense strand starting at position 675 of SEQ ID NO: 317899
guacuagaauguuucuauu

SEQ ID NO: 521054 - RNA, 19 nt, Artificial Sequence
  Description of Artificial Sequence: Synthetic oligonucleotide
  Antisense strand to SEQ ID NO: 521053
aauagaaacauucuaguac

SEQ ID NO: 521055 - RNA, 19 nt, Artificial Sequence
  Description of Artificial Sequence: Synthetic oligonucleotide
  Sense strand starting at position 833 of SEQ ID NO: 317899
gagcgaauccucugggugu

SEQ ID NO: 521056 - RNA, 19 nt, Artificial Sequence
  Description of Artificial Sequence: Synthetic oligonucleotide
  Antisense strand to SEQ ID NO: 521055
acacccagaggauucgcuc

SEQ ID NO: 521057 - RNA, 19 nt, Artificial Sequence
  Description of Artificial Sequence: Synthetic oligonucleotide
  Sense strand starting at position 836 of SEQ ID NO: 317899
cgaauccucuggguguuua

SEQ ID NO: 521058 - RNA, 19 nt, Artificial Sequence
  Description of Artificial Sequence: Synthetic oligonucleotide
  Antisense strand to SEQ ID NO: 521057
uaaacacccagaggauucg

SEQ ID NO: 521059 - RNA, 19 nt, Artificial Sequence
  Description of Artificial Sequence: Synthetic oligonucleotide
  Sense strand starting at position 837 of SEQ ID NO: 317899
gaauccucuggguguuuaa

SEQ ID NO: 521060 - RNA, 19 nt, Artificial Sequence
  Description of Artificial Sequence: Synthetic oligonucleotide
  Antisense strand to SEQ ID NO: 521059
uuaaacacccagaggauuc

SEQ ID NO: 521061 - RNA, 19 nt, Artificial Sequence
  Description of Artificial Sequence: Synthetic oligonucleotide
  Sense strand starting at position 846 of SEQ ID NO: 317899
ggguguuuaauaggaaaca

SEQ ID NO: 521062 - RNA, 19 nt, Artificial Sequence
  Description of Artificial Sequence: Synthetic oligonucleotide
  Antisense strand to SEQ ID NO: 521061
uguuuccuauuaaacaccc

SEQ ID NO: 521063 - RNA, 19 nt, Artificial Sequence
  Description of Artificial Sequence: Synthetic oligonucleotide
  Sense strand starting at position 943 of SEQ ID NO: 317899
uggaauuaacuuuguagga

SEQ ID NO: 521064 - RNA, 19 nt, Artificial Sequence
  Description of Artificial Sequence: Synthetic oligonucleotide
  Antisense strand to SEQ ID NO: 521063
uccuacaaaguuaauucca

SEQ ID NO: 521065 - RNA, 19 nt, Artificial Sequence
  Description of Artificial Sequence: Synthetic oligonucleotide
  Sense strand starting at position 944 of SEQ ID NO: 317899
ggaauuaacuuuguaggac

SEQ ID NO: 521066 - RNA, 19 nt, Artificial Sequence
  Description of Artificial Sequence: Synthetic oligonucleotide
  Antisense strand to SEQ ID NO: 521065
guccuacaaaguuaauucc

SEQ ID NO: 521067 - RNA, 19 nt, Artificial Sequence
  Description of Artificial Sequence: Synthetic oligonucleotide
  Sense strand starting at position 1005 of SEQ ID NO: 317899
cgucaacagaggugcuuua

SEQ ID NO: 521068 - RNA, 19 nt, Artificial Sequence
  Description of Artificial Sequence: Synthetic oligonucleotide
  Antisense strand to SEQ ID NO: 521067
uaaagcaccucuguugacg

SEQ ID NO: 521069 - RNA, 19 nt, Artificial Sequence
  Description of Artificial Sequence: Synthetic oligonucleotide
  Sense strand starting at position 2340 of SEQ ID NO: 317899
gggcuucgguagagaauga

SEQ ID NO: 521070 - RNA, 19 nt, Artificial Sequence
  Description of Artificial Sequence: Synthetic oligonucleotide
  Antisense strand to SEQ ID NO: 521069
ucauucucuaccgaagccc

SEQ ID NO: 521071 - RNA, 19 nt, Artificial Sequence
  Description of Artificial Sequence: Synthetic oligonucleotide
  Sense strand starting at position 2623 of SEQ ID NO: 317899
gcuacaaguuuauuaccga

SEQ ID NO: 521072 - RNA, 19 nt, Artificial Sequence
  Description of Artificial Sequence: Synthetic oligonucleotide
  Antisense strand to SEQ ID NO: 521071
ucgguaauaaacuuguagc

SEQ ID NO: 521073 - RNA, 19 nt, Artificial Sequence
  Description of Artificial Sequence: Synthetic oligonucleotide
  Sense strand starting at position 2729 of SEQ ID NO: 317899
gcaaguaauuaagaaacua

SEQ ID NO: 521074 - RNA, 19 nt, Artificial Sequence
  Description of Artificial Sequence: Synthetic oligonucleotide
  Antisense strand to SEQ ID NO: 521073
uaguuucuuaauuacuugc

SEQ ID NO: 521075 - RNA, 19 nt, Artificial Sequence
  Description of Artificial Sequence: Synthetic oligonucleotide
  Sense strand starting at position 3165 of SEQ ID NO: 317899
aaacgucucugauaauuug

SEQ ID NO: 521076 - RNA, 19 nt, Artificial Sequence
  Description of Artificial Sequence: Synthetic oligonucleotide
  Antisense strand to SEQ ID NO: 521075
caaauuaucagagacguuu

SEQ ID NO: 521077 - RNA, 19 nt, Artificial Sequence
  Description of Artificial Sequence: Synthetic oligonucleotide
  Sense strand starting at position 3364 of SEQ ID NO: 317899
ugccuauuaucucuaguca

SEQ ID NO: 521078 - RNA, 19 nt, Artificial Sequence
  Description of Artificial Sequence: Synthetic oligonucleotide
  Antisense strand to SEQ ID NO: 521077
ugacuagagauaauaggca

SEQ ID NO: 521079 - RNA, 19 nt, Artificial Sequence
  Description of Artificial Sequence: Synthetic oligonucleotide
  Sense strand starting at position 3372 of SEQ ID NO: 317899
aucucuagucaaggacauu

SEQ ID NO: 521080 - RNA, 19 nt, Artificial Sequence
  Description of Artificial Sequence: Synthetic oligonucleotide
  Antisense strand to SEQ ID NO: 521079
aauguccuugacuagagau

SEQ ID NO: 521081 - RNA, 19 nt, Artificial Sequence
  Description of Artificial Sequence: Synthetic oligonucleotide
  Sense strand starting at position 3433 of SEQ ID NO: 317899
ggugggauccagggaaguu

SEQ ID NO: 521082 - RNA, 19 nt, Artificial Sequence
  Description of Artificial Sequence: Synthetic oligonucleotide
  Antisense strand to SEQ ID NO: 521081
aacuucccuggaucccacc

SEQ ID NO: 521083 - RNA, 19 nt, Artificial Sequence
  Description of Artificial Sequence: Synthetic oligonucleotide
  Sense strand starting at position 3492 of SEQ ID NO: 317899
cugguaauuucugcauguu

SEQ ID NO: 521084 - RNA, 19 nt, Artificial Sequence
  Description of Artificial Sequence: Synthetic oligonucleotide
  Antisense strand to SEQ ID NO: 521083
aacaugcagaaauuaccag

SEQ ID NO: 521085 - RNA, 19 nt, Artificial Sequence
  Description of Artificial Sequence: Synthetic oligonucleotide
  Sense strand starting at position 3596 of SEQ ID NO: 317899
gagaccucuuuguccagua

SEQ ID NO: 521086 - RNA, 19 nt, Artificial Sequence
  Description of Artificial Sequence: Synthetic oligonucleotide
  Antisense strand to SEQ ID NO: 521085
uacuggacaaagaggucuc

SEQ ID NO: 521087 - RNA, 19 nt, Artificial Sequence
  Description of Artificial Sequence: Synthetic oligonucleotide
  Sense strand starting at position 3597 of SEQ ID NO: 317899
agaccucuuuguccaguaa

SEQ ID NO: 521088 - RNA, 19 nt, Artificial Sequence
  Description of Artificial Sequence: Synthetic oligonucleotide
  Antisense strand to SEQ ID NO: 521087
uuacuggacaaagaggucu

SEQ ID NO: 521089 - RNA, 19 nt, Artificial Sequence
  Description of Artificial Sequence: Synthetic oligonucleotide
  Sense strand starting at position 3601 of SEQ ID NO: 317899
cucuuuguccaguaaaugu

SEQ ID NO: 521090 - RNA, 19 nt, Artificial Sequence
  Description of Artificial Sequence: Synthetic oligonucleotide
  Antisense strand to SEQ ID NO: 521089
acauuuacuggacaaagag

SEQ ID NO: 521091 - RNA, 19 nt, Artificial Sequence
  Description of Artificial Sequence: Synthetic oligonucleotide
  Sense strand starting at position 3618 of SEQ ID NO: 317899
guaugcauuucuuugcuuu

SEQ ID NO: 521092 - RNA, 19 nt, Artificial Sequence
  Description of Artificial Sequence: Synthetic oligonucleotide
  Antisense strand to SEQ ID NO: 521091
aaagcaaagaaaugcauac

SEQ ID NO: 521093 - RNA, 19 nt, Artificial Sequence
  Description of Artificial Sequence: Synthetic oligonucleotide
  Sense strand starting at position 3814 of SEQ ID NO: 317899
gggcaaugcccugaaugga

SEQ ID NO: 521094 - RNA, 19 nt, Artificial Sequence
  Description of Artificial Sequence: Synthetic oligonucleotide
  Antisense strand to SEQ ID NO: 521093
uccauucagggcauugccc

SEQ ID NO: 521095 - RNA, 19 nt, Artificial Sequence
  Description of Artificial Sequence: Synthetic oligonucleotide
  Sense strand starting at position 3943 of SEQ ID NO: 317899
ggccgugauuucgucuuua

SEQ ID NO: 521096 - RNA, 19 nt, Artificial Sequence
  Description of Artificial Sequence: Synthetic oligonucleotide
  Antisense strand to SEQ ID NO: 521095
uaaagacgaaaucacggcc

SEQ ID NO: 521097 - RNA, 19 nt, Artificial Sequence
  Description of Artificial Sequence: Synthetic oligonucleotide
  Sense strand starting at position 3947 of SEQ ID NO: 317899
gugauuucgucuuuagagu

SEQ ID NO: 521098 - RNA, 19 nt, Artificial Sequence
  Description of Artificial Sequence: Synthetic oligonucleotide
  Antisense strand to SEQ ID NO: 521097
acucuaaagacgaaaucac

SEQ ID NO: 521099 - RNA, 19 nt, Artificial Sequence
  Description of Artificial Sequence: Synthetic oligonucleotide
  Sense strand starting at position 3954 of SEQ ID NO: 317899
cgucuuuagaguugaagug

SEQ ID NO: 521100 - RNA, 19 nt, Artificial Sequence
  Description of Artificial Sequence: Synthetic oligonucleotide
  Antisense strand to SEQ ID NO: 521099
cacuucaacucuaaagacg

SEQ ID NO: 521101 - RNA, 19 nt, Artificial Sequence
  Description of Artificial Sequence: Synthetic oligonucleotide
  Sense strand starting at position 3974 of SEQ ID NO: 317899
acuacaaagagcgauaagu

SEQ ID NO: 521102 - RNA, 19 nt, Artificial Sequence
  Description of Artificial Sequence: Synthetic oligonucleotide
  Antisense strand to SEQ ID NO: 521101
acuuaucgcucuuuguagu

SEQ ID NO: 521103 - RNA, 19 nt, Artificial Sequence
  Description of Artificial Sequence: Synthetic oligonucleotide
  Sense strand starting at position 3976 of SEQ ID NO: 317899
uacaaagagcgauaaguca

SEQ ID NO: 521104 - RNA, 19 nt, Artificial Sequence
  Description of Artificial Sequence: Synthetic oligonucleotide
  Antisense strand to SEQ ID NO: 521103
ugacuuaucgcucuuugua

SEQ ID NO: 521105 - RNA, 19 nt, Artificial Sequence
  Description of Artificial Sequence: Synthetic oligonucleotide
  Sense strand starting at position 138 of SEQ ID NO: 317900
ccacaaaugugucuggaua

SEQ ID NO: 521106 - RNA, 19 nt, Artificial Sequence
  Description of Artificial Sequence: Synthetic oligonucleotide
  Antisense strand to SEQ ID NO: 521105
uauccagacacauuugugg

SEQ ID NO: 521107 - RNA, 19 nt, Artificial Sequence
  Description of Artificial Sequence: Synthetic oligonucleotide
  Sense strand starting at position 139 of SEQ ID NO: 317900
cacaaaugugucuggauaa

SEQ ID NO: 521108 - RNA, 19 nt, Artificial Sequence
  Description of Artificial Sequence: Synthetic oligonucleotide
  Antisense strand to SEQ ID NO: 521107
uuauccagacacauuugug

SEQ ID NO: 521109 - RNA, 19 nt, Artificial Sequence
  Description of Artificial Sequence: Synthetic oligonucleotide
  Sense strand starting at position 191 of SEQ ID NO: 317900
cccguuauggugaguuguu

SEQ ID NO: 521110 - RNA, 19 nt, Artificial Sequence
  Description of Artificial Sequence: Synthetic oligonucleotide
  Antisense strand to SEQ ID NO: 521109
aacaacucaccauaacggg

SEQ ID NO: 521111 - RNA, 19 nt, Artificial Sequence
  Description of Artificial Sequence: Synthetic oligonucleotide
  Sense strand starting at position 346 of SEQ ID NO: 317900
ugaacaugaucuuugcaua

SEQ ID NO: 521112 - RNA, 19 nt, Artificial Sequence
  Description of Artificial Sequence: Synthetic oligonucleotide
  Antisense strand to SEQ ID NO: 521111
uaugcaaagaucauguuca

SEQ ID NO: 521113 - RNA, 19 nt, Artificial Sequence
  Description of Artificial Sequence: Synthetic oligonucleotide
  Sense strand starting at position 357 of SEQ ID NO: 317900
uuugcauaugccuaaagga

SEQ ID NO: 521114 - RNA, 19 nt, Artificial Sequence
  Description of Artificial Sequence: Synthetic oligonucleotide
  Antisense strand to SEQ ID NO: 521113
uccuuuaggcauaugcaaa

SEQ ID NO: 521115 - RNA, 19 nt, Artificial Sequence
  Description of Artificial Sequence: Synthetic oligonucleotide
  Sense strand starting at position 460 of SEQ ID NO: 317900
uugccuuagcuauaaugaa

SEQ ID NO: 521116 - RNA, 19 nt, Artificial Sequence
  Description of Artificial Sequence: Synthetic oligonucleotide
  Antisense strand to SEQ ID NO: 521115
uucauuauagcuaaggcaa

SEQ ID NO: 521117 - RNA, 19 nt, Artificial Sequence
  Description of Artificial Sequence: Synthetic oligonucleotide
  Sense strand starting at position 526 of SEQ ID NO: 317900
uaguuucuagaagguuaau

SEQ ID NO: 521118 - RNA, 19 nt, Artificial Sequence
  Description of Artificial Sequence: Synthetic oligonucleotide
  Antisense strand to SEQ ID NO: 521117
auuaaccuucuagaaacua

SEQ ID NO: 521119 - RNA, 19 nt, Artificial Sequence
  Description of Artificial Sequence: Synthetic oligonucleotide
  Sense strand starting at position 564 of SEQ ID NO: 317900
uuaaaugagcuaugauaca

SEQ ID NO: 521120 - RNA, 19 nt, Artificial Sequence
  Description of Artificial Sequence: Synthetic oligonucleotide
  Antisense strand to SEQ ID NO: 521119
uguaucauagcucauuuaa

SEQ ID NO: 521121 - RNA, 19 nt, Artificial Sequence
  Description of Artificial Sequence: Synthetic oligonucleotide
  Sense strand starting at position 601 of SEQ ID NO: 317900
acgaauaacuuucucaaug

SEQ ID NO: 521122 - RNA, 19 nt, Artificial Sequence
  Description of Artificial Sequence: Synthetic oligonucleotide
  Antisense strand to SEQ ID NO: 521121
cauugagaaaguuauucgu

SEQ ID NO: 521123 - RNA, 19 nt, Artificial Sequence
  Description of Artificial Sequence: Synthetic oligonucleotide
  Sense strand starting at position 602 of SEQ ID NO: 317900
cgaauaacuuucucaauga

SEQ ID NO: 521124 - RNA, 19 nt, Artificial Sequence
  Description of Artificial Sequence: Synthetic oligonucleotide
  Antisense strand to SEQ ID NO: 521123
ucauugagaaaguuauucg

SEQ ID NO: 521125 - RNA, 19 nt, Artificial Sequence
  Description of Artificial Sequence: Synthetic oligonucleotide
  Sense strand starting at position 615 of SEQ ID NO: 317900
caaugaaguucuguaaagu

SEQ ID NO: 521126 - RNA, 19 nt, Artificial Sequence
  Description of Artificial Sequence: Synthetic oligonucleotide
  Antisense strand to SEQ ID NO: 521125
acuuuacagaacuucauug

SEQ ID NO: 521127 - RNA, 19 nt, Artificial Sequence
  Description of Artificial Sequence: Synthetic oligonucleotide
  Sense strand starting at position 616 of SEQ ID NO: 317900
aaugaaguucuguaaagua

SEQ ID NO: 521128 - RNA, 19 nt, Artificial Sequence
  Description of Artificial Sequence: Synthetic oligonucleotide
  Antisense strand to SEQ ID NO: 521127
uacuuuacagaacuucauu

SEQ ID NO: 521129 - RNA, 19 nt, Artificial Sequence
  Description of Artificial Sequence: Synthetic oligonucleotide
  Sense strand starting at position 701 of SEQ ID NO: 317900
cagaguuuggcuuaaguga

SEQ ID NO: 521130 - RNA, 19 nt, Artificial Sequence
  Description of Artificial Sequence: Synthetic oligonucleotide
  Antisense strand to SEQ ID NO: 521129
ucacuuaagccaaacucug

SEQ ID NO: 521131 - RNA, 19 nt, Artificial Sequence
  Description of Artificial Sequence: Synthetic oligonucleotide
  Sense strand starting at position 758 of SEQ ID NO: 317900
auuagauugugauuaugga

SEQ ID NO: 521132 - RNA, 19 nt, Artificial Sequence
  Description of Artificial Sequence: Synthetic oligonucleotide
  Antisense strand to SEQ ID NO: 521131
uccauaaucacaaucuaau

SEQ ID NO: 521133 - RNA, 19 nt, Artificial Sequence
  Description of Artificial Sequence: Synthetic oligonucleotide
  Sense strand starting at position 843 of SEQ ID NO: 317900
agagacaguucuccuuauc

SEQ ID NO: 521134 - RNA, 19 nt, Artificial Sequence
  Description of Artificial Sequence: Synthetic oligonucleotide
  Antisense strand to SEQ ID NO: 521133
gauaaggagaacugucucu

SEQ ID NO: 521135 - RNA, 19 nt, Artificial Sequence
  Description of Artificial Sequence: Synthetic oligonucleotide
  Sense strand starting at position 866 of SEQ ID NO: 317900
uuaaacuuauggguuugaa

SEQ ID NO: 521136 - RNA, 19 nt, Artificial Sequence
  Description of Artificial Sequence: Synthetic oligonucleotide
  Antisense strand to SEQ ID NO: 521135
uucaaacccauaaguuuaa

SEQ ID NO: 521137 - RNA, 19 nt, Artificial Sequence
  Description of Artificial Sequence: Synthetic oligonucleotide
  Sense strand starting at position 869 of SEQ ID NO: 317900
aacuuauggguuugaacua

SEQ ID NO: 521138 - RNA, 19 nt, Artificial Sequence
  Description of Artificial Sequence: Synthetic oligonucleotide
  Antisense strand to SEQ ID NO: 521137
uaguucaaacccauaaguu

SEQ ID NO: 521139 - RNA, 19 nt, Artificial Sequence
  Description of Artificial Sequence: Synthetic oligonucleotide
  Sense strand starting at position 882 of SEQ ID NO: 317900
gaacuaaguggugggaagu

SEQ ID NO: 521140 - RNA, 19 nt, Artificial Sequence
  Description of Artificial Sequence: Synthetic oligonucleotide
  Antisense strand to SEQ ID NO: 521139
acuucccaccacuuaguuc

SEQ ID NO: 521141 - RNA, 19 nt, Artificial Sequence
  Description of Artificial Sequence: Synthetic oligonucleotide
  Sense strand starting at position 952 of SEQ ID NO: 317900
uacccuggugcuuaggaau

SEQ ID NO: 521142 - RNA, 19 nt, Artificial Sequence
  Description of Artificial Sequence: Synthetic oligonucleotide
  Antisense strand to SEQ ID NO: 521141
auuccuaagcaccagggua

SEQ ID NO: 521143 - RNA, 19 nt, Artificial Sequence
  Description of Artificial Sequence: Synthetic oligonucleotide
  Sense strand starting at position 977 of SEQ ID NO: 317900
uuuaucuguccuuaagaag

SEQ ID NO: 521144 - RNA, 19 nt, Artificial Sequence
  Description of Artificial Sequence: Synthetic oligonucleotide
  Antisense strand to SEQ ID NO: 521143
cuucuuaaggacagauaaa

SEQ ID NO: 521145 - RNA, 19 nt, Artificial Sequence
  Description of Artificial Sequence: Synthetic oligonucleotide
  Sense strand starting at position 991 of SEQ ID NO: 317900
agaagcugucuggaccaua

SEQ ID NO: 521146 - RNA, 19 nt, Artificial Sequence
  Description of Artificial Sequence: Synthetic oligonucleotide
  Antisense strand to SEQ ID NO: 521145
uaugguccagacagcuucu

SEQ ID NO: 521147 - RNA, 19 nt, Artificial Sequence
  Description of Artificial Sequence: Synthetic oligonucleotide
  Sense strand starting at position 1117 of SEQ ID NO: 317900
gcaacagguuaggcauaaa

SEQ ID NO: 521148 - RNA, 19 nt, Artificial Sequence
  Description of Artificial Sequence: Synthetic oligonucleotide
  Antisense strand to SEQ ID NO: 521147
uuuaugccuaaccuguugc

SEQ ID NO: 521149 - RNA, 19 nt, Artificial Sequence
  Description of Artificial Sequence: Synthetic oligonucleotide
  Sense strand starting at position 1692 of SEQ ID NO: 317900
auauguguucucguguuau

SEQ ID NO: 521150 - RNA, 19 nt, Artificial Sequence
  Description of Artificial Sequence: Synthetic oligonucleotide
  Antisense strand to SEQ ID NO: 521149
auaacacgagaacacauau

SEQ ID NO: 521151 - RNA, 19 nt, Artificial Sequence
  Description of Artificial Sequence: Synthetic oligonucleotide
  Sense strand starting at position 1695 of SEQ ID NO: 317900
uguguucucguguuauaau

SEQ ID NO: 521152 - RNA, 19 nt, Artificial Sequence
  Description of Artificial Sequence: Synthetic oligonucleotide
  Antisense strand to SEQ ID NO: 521151
auuauaacacgagaacaca

SEQ ID NO: 521153 - RNA, 19 nt, Artificial Sequence
  Description of Artificial Sequence: Synthetic oligonucleotide
  Sense strand starting at position 1733 of SEQ ID NO: 317900
cuguuaugguauuuguuua

SEQ ID NO: 521154 - RNA, 19 nt, Artificial Sequence
  Description of Artificial Sequence: Synthetic oligonucleotide
  Antisense strand to SEQ ID NO: 521153
uaaacaaauaccauaacag

SEQ ID NO: 521155 - RNA, 19 nt, Artificial Sequence
  Description of Artificial Sequence: Synthetic oligonucleotide
  Sense strand starting at position 2047 of SEQ ID NO: 317900
ugacuaucggauugagaac

SEQ ID NO: 521156 - RNA, 19 nt, Artificial Sequence
  Description of Artificial Sequence: Synthetic oligonucleotide
  Antisense strand to SEQ ID NO: 521155
guucucaauccgauaguca

SEQ ID NO: 521157 - RNA, 19 nt, Artificial Sequence
  Description of Artificial Sequence: Synthetic oligonucleotide
  Sense strand starting at position 2056 of SEQ ID NO: 317900
gauugagaaccucaguguu

SEQ ID NO: 521158 - RNA, 19 nt, Artificial Sequence
  Description of Artificial Sequence: Synthetic oligonucleotide
  Antisense strand to SEQ ID NO: 521157
aacacugagguucucaauc

SEQ ID NO: 521159 - RNA, 19 nt, Artificial Sequence
  Description of Artificial Sequence: Synthetic oligonucleotide
  Sense strand starting at position 2343 of SEQ ID NO: 317900
aauaacuggugaguggaua

SEQ ID NO: 521160 - RNA, 19 nt, Artificial Sequence
  Description of Artificial Sequence: Synthetic oligonucleotide
  Antisense strand to SEQ ID NO: 521159
uauccacucaccaguuauu

SEQ ID NO: 521161 - RNA, 19 nt, Artificial Sequence
  Description of Artificial Sequence: Synthetic oligonucleotide
  Sense strand starting at position 2504 of SEQ ID NO: 317900
uuagcuuaugcucaucaga

SEQ ID NO: 521162 - RNA, 19 nt, Artificial Sequence
  Description of Artificial Sequence: Synthetic oligonucleotide
  Antisense strand to SEQ ID NO: 521161
ucugaugagcauaagcuaa

SEQ ID NO: 521163 - RNA, 19 nt, Artificial Sequence
  Description of Artificial Sequence: Synthetic oligonucleotide
  Sense strand starting at position 2597 of SEQ ID NO: 317900
uuugaacaucggugaagaa

SEQ ID NO: 521164 - RNA, 19 nt, Artificial Sequence
  Description of Artificial Sequence: Synthetic oligonucleotide
  Antisense strand to SEQ ID NO: 521163
uucuucaccgauguucaaa

SEQ ID NO: 521165 - RNA, 19 nt, Artificial Sequence
  Description of Artificial Sequence: Synthetic oligonucleotide
  Sense strand starting at position 2636 of SEQ ID NO: 317900
gccuuuacagucuagagaa

SEQ ID NO: 521166 - RNA, 19 nt, Artificial Sequence
  Description of Artificial Sequence: Synthetic oligonucleotide
  Antisense strand to SEQ ID NO: 521165
uucucuagacuguaaaggc

SEQ ID NO: 521167 - RNA, 19 nt, Artificial Sequence
  Description of Artificial Sequence: Synthetic oligonucleotide
  Sense strand starting at position 2715 of SEQ ID NO: 317900
aaagguguccuugggacua

SEQ ID NO: 521168 - RNA, 19 nt, Artificial Sequence
  Description of Artificial Sequence: Synthetic oligonucleotide
  Antisense strand to SEQ ID NO: 521167
uagucccaaggacaccuuu

SEQ ID NO: 521169 - RNA, 19 nt, Artificial Sequence
  Description of Artificial Sequence: Synthetic oligonucleotide
  Sense strand starting at position 2740 of SEQ ID NO: 317900
cgagcaagaccugaauuau

SEQ ID NO: 521170 - RNA, 19 nt, Artificial Sequence
  Description of Artificial Sequence: Synthetic oligonucleotide
  Antisense strand to SEQ ID NO: 521169
auaauucaggucuugcucg

SEQ ID NO: 521171 - RNA, 19 nt, Artificial Sequence
  Description of Artificial Sequence: Synthetic oligonucleotide
  Sense strand starting at position 2785 of SEQ ID NO: 317900
acagauguagcugaguuau

SEQ ID NO: 521172 - RNA, 19 nt, Artificial Sequence
  Description of Artificial Sequence: Synthetic oligonucleotide
  Antisense strand to SEQ ID NO: 521171
auaacucagcuacaucugu

SEQ ID NO: 521173 - RNA, 19 nt, Artificial Sequence
  Description of Artificial Sequence: Synthetic oligonucleotide
  Sense strand starting at position 2873 of SEQ ID NO: 317900
ugucuaccucugcagaacu

SEQ ID NO: 521174 - RNA, 19 nt, Artificial Sequence
  Description of Artificial Sequence: Synthetic oligonucleotide
  Antisense strand to SEQ ID NO: 521173
aguucugcagagguagaca

SEQ ID NO: 521175 - RNA, 19 nt, Artificial Sequence
  Description of Artificial Sequence: Synthetic oligonucleotide
  Sense strand starting at position 2881 of SEQ ID NO: 317900
ucugcagaacuuugagaau

SEQ ID NO: 521176 - RNA, 19 nt, Artificial Sequence
  Description of Artificial Sequence: Synthetic oligonucleotide
  Antisense strand to SEQ ID NO: 521175
auucucaaaguucugcaga

SEQ ID NO: 521177 - RNA, 19 nt, Artificial Sequence
  Description of Artificial Sequence: Synthetic oligonucleotide
  Sense strand starting at position 2893 of SEQ ID NO: 317900
ugagaaucuuuggcugauu

SEQ ID NO: 521178 - RNA, 19 nt, Artificial Sequence
  Description of Artificial Sequence: Synthetic oligonucleotide
  Antisense strand to SEQ ID NO: 521177
aaucagccaaagauucuca

SEQ ID NO: 521179 - RNA, 19 nt, Artificial Sequence
  Description of Artificial Sequence: Synthetic oligonucleotide
  Sense strand starting at position 2998 of SEQ ID NO: 317900
ucaguuaaauuagcaagaa

SEQ ID NO: 521180 - RNA, 19 nt, Artificial Sequence
  Description of Artificial Sequence: Synthetic oligonucleotide
  Antisense strand to SEQ ID NO: 521179
uucuugcuaauuuaacuga

SEQ ID NO: 521181 - RNA, 19 nt, Artificial Sequence
  Description of Artificial Sequence: Synthetic oligonucleotide
  Sense strand starting at position 3803 of SEQ ID NO: 317900
cgagauauagccuaaacuu

SEQ ID NO: 521182 - RNA, 19 nt, Artificial Sequence
  Description of Artificial Sequence: Synthetic oligonucleotide
  Antisense strand to SEQ ID NO: 521181
aaguuuaggcuauaucucg

SEQ ID NO: 521183 - RNA, 19 nt, Artificial Sequence
  Description of Artificial Sequence: Synthetic oligonucleotide
  Sense strand starting at position 3877 of SEQ ID NO: 317900
acuguuguacuaggaacaa

SEQ ID NO: 521184 - RNA, 19 nt, Artificial Sequence
  Description of Artificial Sequence: Synthetic oligonucleotide
  Antisense strand to SEQ ID NO: 521183
uuguuccuaguacaacagu

SEQ ID NO: 521185 - RNA, 19 nt, Artificial Sequence
  Description of Artificial Sequence: Synthetic oligonucleotide
  Sense strand starting at position 26 of SEQ ID NO: 317901
gcaauauuaaugcagguga

SEQ ID NO: 521186 - RNA, 19 nt, Artificial Sequence
  Description of Artificial Sequence: Synthetic oligonucleotide
  Antisense strand to SEQ ID NO: 521185
ucaccugcauuaauauugc

SEQ ID NO: 521187 - RNA, 19 nt, Artificial Sequence
  Description of Artificial Sequence: Synthetic oligonucleotide
  Sense strand starting at position 28 of SEQ ID NO: 317901
aauauuaaugcaggugaca

SEQ ID NO: 521188 - RNA, 19 nt, Artificial Sequence
  Description of Artificial Sequence: Synthetic oligonucleotide
  Antisense strand to SEQ ID NO: 521187
ugucaccugcauuaauauu

SEQ ID NO: 521189 - RNA, 19 nt, Artificial Sequence
  Description of Artificial Sequence: Synthetic oligonucleotide
  Sense strand starting at position 47 of SEQ ID NO: 317901
gguauuguuaaaggaacaa

SEQ ID NO: 521190 - RNA, 19 nt, Artificial Sequence
  Description of Artificial Sequence: Synthetic oligonucleotide
  Antisense strand to SEQ ID NO: 521189
uuguuccuuuaacaauacc

SEQ ID NO: 521191 - RNA, 19 nt, Artificial Sequence
  Description of Artificial Sequence: Synthetic oligonucleotide
  Sense strand starting at position 150 of SEQ ID NO: 317901
gucugauaaguacacucau

SEQ ID NO: 521192 - RNA, 19 nt, Artificial Sequence
  Description of Artificial Sequence: Synthetic oligonucleotide
  Antisense strand to SEQ ID NO: 521191
augaguguacuuaucagac

SEQ ID NO: 521193 - RNA, 19 nt, Artificial Sequence
  Description of Artificial Sequence: Synthetic oligonucleotide
  Sense strand starting at position 165 of SEQ ID NO: 317901
ucauaauuggucuauuagc

SEQ ID NO: 521194 - RNA, 19 nt, Artificial Sequence
  Description of Artificial Sequence: Synthetic oligonucleotide
  Antisense strand to SEQ ID NO: 521193
gcuaauagaccaauuauga

SEQ ID NO: 521195 - RNA, 19 nt, Artificial Sequence
  Description of Artificial Sequence: Synthetic oligonucleotide
  Sense strand starting at position 170 of SEQ ID NO: 317901
auuggucuauuagcuugaa

SEQ ID NO: 521196 - RNA, 19 nt, Artificial Sequence
  Description of Artificial Sequence: Synthetic oligonucleotide
  Antisense strand to SEQ ID NO: 521195
uucaagcuaauagaccaau

SEQ ID NO: 521197 - RNA, 19 nt, Artificial Sequence
  Description of Artificial Sequence: Synthetic oligonucleotide
  Sense strand starting at position 208 of SEQ ID NO: 317901
aauggaguggcuuauuaug

SEQ ID NO: 521198 - RNA, 19 nt, Artificial Sequence
  Description of Artificial Sequence: Synthetic oligonucleotide
  Antisense strand to SEQ ID NO: 521197
cauaauaagccacuccauu

SEQ ID NO: 521199 - RNA, 19 nt, Artificial Sequence
  Description of Artificial Sequence: Synthetic oligonucleotide
  Sense strand starting at position 243 of SEQ ID NO: 317901
gaaucagagugcccagauu

SEQ ID NO: 521200 - RNA, 19 nt, Artificial Sequence
  Description of Artificial Sequence: Synthetic oligonucleotide
  Antisense strand to SEQ ID NO: 521199
aaucugggcacucugauuc

SEQ ID NO: 521201 - RNA, 19 nt, Artificial Sequence
  Description of Artificial Sequence: Synthetic oligonucleotide
  Sense strand starting at position 290 of SEQ ID NO: 317901
cgugaucaugggcaaaguu

SEQ ID NO: 521202 - RNA, 19 nt, Artificial Sequence
  Description of Artificial Sequence: Synthetic oligonucleotide
  Antisense strand to SEQ ID NO: 521201
aacuuugcccaugaucacg

SEQ ID NO: 521203 - RNA, 19 nt, Artificial Sequence
  Description of Artificial Sequence: Synthetic oligonucleotide
  Sense strand starting at position 364 of SEQ ID NO: 317901
uuccucaugcugggaugau

SEQ ID NO: 521204 - RNA, 19 nt, Artificial Sequence
  Description of Artificial Sequence: Synthetic oligonucleotide
  Antisense strand to SEQ ID NO: 521203
aucaucccagcaugaggaa

SEQ ID NO: 521205 - RNA, 19 nt, Artificial Sequence
  Description of Artificial Sequence: Synthetic oligonucleotide
  Sense strand starting at position 436 of SEQ ID NO: 317901
ggaaguaaguaauuagugu

SEQ ID NO: 521206 - RNA, 19 nt, Artificial Sequence
  Description of Artificial Sequence: Synthetic oligonucleotide
  Antisense strand to SEQ ID NO: 521205
acacuaauuacuuacuucc

SEQ ID NO: 521207 - RNA, 19 nt, Artificial Sequence
  Description of Artificial Sequence: Synthetic oligonucleotide
  Sense strand starting at position 444 of SEQ ID NO: 317901
guaauuaguguuggauaug

SEQ ID NO: 521208 - RNA, 19 nt, Artificial Sequence
  Description of Artificial Sequence: Synthetic oligonucleotide
  Antisense strand to SEQ ID NO: 521207
cauauccaacacuaauuac

SEQ ID NO: 521209 - RNA, 19 nt, Artificial Sequence
  Description of Artificial Sequence: Synthetic oligonucleotide
  Sense strand starting at position 545 of SEQ ID NO: 317901
agauguacuugauugauaa

SEQ ID NO: 521210 - RNA, 19 nt, Artificial Sequence
  Description of Artificial Sequence: Synthetic oligonucleotide
  Antisense strand to SEQ ID NO: 521209
uuaucaaucaaguacaucu

SEQ ID NO: 521211 - RNA, 19 nt, Artificial Sequence
  Description of Artificial Sequence: Synthetic oligonucleotide
  Sense strand starting at position 546 of SEQ ID NO: 317901
gauguacuugauugauaag

SEQ ID NO: 521212 - RNA, 19 nt, Artificial Sequence
  Description of Artificial Sequence: Synthetic oligonucleotide
  Antisense strand to SEQ ID NO: 521211
cuuaucaaucaaguacauc

SEQ ID NO: 521213 - RNA, 19 nt, Artificial Sequence
  Description of Artificial Sequence: Synthetic oligonucleotide
  Sense strand starting at position 604 of SEQ ID NO: 317901
agaacuaguaaggguugua

SEQ ID NO: 521214 - RNA, 19 nt, Artificial Sequence
  Description of Artificial Sequence: Synthetic oligonucleotide
  Antisense strand to SEQ ID NO: 521213
uacaacccuuacuaguucu

SEQ ID NO: 521215 - RNA, 19 nt, Artificial Sequence
  Description of Artificial Sequence: Synthetic oligonucleotide
  Sense strand starting at position 607 of SEQ ID NO: 317901
acuaguaaggguuguaaag

SEQ ID NO: 521216 - RNA, 19 nt, Artificial Sequence
  Description of Artificial Sequence: Synthetic oligonucleotide
  Antisense strand to SEQ ID NO: 521215
cuuuacaacccuuacuagu

SEQ ID NO: 521217 - RNA, 19 nt, Artificial Sequence
  Description of Artificial Sequence: Synthetic oligonucleotide
  Sense strand starting at position 1093 of SEQ ID NO: 317901
ucuauuauacugcacugua

SEQ ID NO: 521218 - RNA, 19 nt, Artificial Sequence
  Description of Artificial Sequence: Synthetic oligonucleotide
  Antisense strand to SEQ ID NO: 521217
uacagugcaguauaauaga

SEQ ID NO: 521219 - RNA, 19 nt, Artificial Sequence
  Description of Artificial Sequence: Synthetic oligonucleotide
  Sense strand starting at position 1118 of SEQ ID NO: 317901
auagcaaugcagugaacaa

SEQ ID NO: 521220 - RNA, 19 nt, Artificial Sequence
  Description of Artificial Sequence: Synthetic oligonucleotide
  Antisense strand to SEQ ID NO: 521219
uuguucacugcauugcuau

SEQ ID NO: 521221 - RNA, 19 nt, Artificial Sequence
  Description of Artificial Sequence: Synthetic oligonucleotide
  Sense strand starting at position 1153 of SEQ ID NO: 317901
agaggcaagaauugucaca

SEQ ID NO: 521222 - RNA, 19 nt, Artificial Sequence
  Description of Artificial Sequence: Synthetic oligonucleotide
  Antisense strand to SEQ ID NO: 521221
ugugacaauucuugccucu

SEQ ID NO: 521223 - RNA, 19 nt, Artificial Sequence
  Description of Artificial Sequence: Synthetic oligonucleotide
  Sense strand starting at position 1155 of SEQ ID NO: 317901
aggcaagaauugucacaaa

SEQ ID NO: 521224 - RNA, 19 nt, Artificial Sequence
  Description of Artificial Sequence: Synthetic oligonucleotide
  Antisense strand to SEQ ID NO: 521223
uuugugacaauucuugccu

SEQ ID NO: 521225 - RNA, 19 nt, Artificial Sequence
  Description of Artificial Sequence: Synthetic oligonucleotide
  Sense strand starting at position 1292 of SEQ ID NO: 317901
cccagaaccuugccuuaga

SEQ ID NO: 521226 - RNA, 19 nt, Artificial Sequence
  Description of Artificial Sequence: Synthetic oligonucleotide
  Antisense strand to SEQ ID NO: 521225
ucuaaggcaagguucuggg

SEQ ID NO: 521227 - RNA, 19 nt, Artificial Sequence
  Description of Artificial Sequence: Synthetic oligonucleotide
  Sense strand starting at position 1293 of SEQ ID NO: 317901
ccagaaccuugccuuagau

SEQ ID NO: 521228 - RNA, 19 nt, Artificial Sequence
  Description of Artificial Sequence: Synthetic oligonucleotide
  Antisense strand to SEQ ID NO: 521227
aucuaaggcaagguucugg

SEQ ID NO: 521229 - RNA, 19 nt, Artificial Sequence
  Description of Artificial Sequence: Synthetic oligonucleotide
  Sense strand starting at position 1295 of SEQ ID NO: 317901
agaaccuugccuuagauua

SEQ ID NO: 521230 - RNA, 19 nt, Artificial Sequence
  Description of Artificial Sequence: Synthetic oligonucleotide
  Antisense strand to SEQ ID NO: 521229
uaaucuaaggcaagguucu

SEQ ID NO: 521231 - RNA, 19 nt, Artificial Sequence
  Description of Artificial Sequence: Synthetic oligonucleotide
  Sense strand starting at position 1402 of SEQ ID NO: 317901
uugauacguuaccuuaaau

SEQ ID NO: 521232 - RNA, 19 nt, Artificial Sequence
  Description of Artificial Sequence: Synthetic oligonucleotide
  Antisense strand to SEQ ID NO: 521231
auuuaagguaacguaucaa

SEQ ID NO: 521233 - RNA, 19 nt, Artificial Sequence
  Description of Artificial Sequence: Synthetic oligonucleotide
  Sense strand starting at position 2043 of SEQ ID NO: 317901
agaugaaaccucuggccuu

SEQ ID NO: 521234 - RNA, 19 nt, Artificial Sequence
  Description of Artificial Sequence: Synthetic oligonucleotide
  Antisense strand to SEQ ID NO: 521233
aaggccagagguuucaucu

SEQ ID NO: 521235 - RNA, 19 nt, Artificial Sequence
  Description of Artificial Sequence: Synthetic oligonucleotide
  Sense strand starting at position 2191 of SEQ ID NO: 317901
acaguacauggaugucuaa

SEQ ID NO: 521236 - RNA, 19 nt, Artificial Sequence
  Description of Artificial Sequence: Synthetic oligonucleotide
  Antisense strand to SEQ ID NO: 521235
uuagacauccauguacugu

SEQ ID NO: 521237 - RNA, 19 nt, Artificial Sequence
  Description of Artificial Sequence: Synthetic oligonucleotide
  Sense strand starting at position 2297 of SEQ ID NO: 317901
uuccauuaucuaggauuga

SEQ ID NO: 521238 - RNA, 19 nt, Artificial Sequence
  Description of Artificial Sequence: Synthetic oligonucleotide
  Antisense strand to SEQ ID NO: 521237
ucaauccuagauaauggaa

SEQ ID NO: 521239 - RNA, 19 nt, Artificial Sequence
  Description of Artificial Sequence: Synthetic oligonucleotide
  Sense strand starting at position 2833 of SEQ ID NO: 317901
guacgaugccaccagauua

SEQ ID NO: 521240 - RNA, 19 nt, Artificial Sequence
  Description of Artificial Sequence: Synthetic oligonucleotide
  Antisense strand to SEQ ID NO: 521239
uaaucugguggcaucguac

SEQ ID NO: 521241 - RNA, 19 nt, Artificial Sequence
  Description of Artificial Sequence: Synthetic oligonucleotide
  Sense strand starting at position 3159 of SEQ ID NO: 317901
acauguugccaugauuaga

SEQ ID NO: 521242 - RNA, 19 nt, Artificial Sequence
  Description of Artificial Sequence: Synthetic oligonucleotide
  Antisense strand to SEQ ID NO: 521241
ucuaaucauggcaacaugu

SEQ ID NO: 521243 - RNA, 19 nt, Artificial Sequence
  Description of Artificial Sequence: Synthetic oligonucleotide
  Sense strand starting at position 3172 of SEQ ID NO: 317901
auuagauccuaguuaaguc

SEQ ID NO: 521244 - RNA, 19 nt, Artificial Sequence
  Description of Artificial Sequence: Synthetic oligonucleotide
  Antisense strand to SEQ ID NO: 521243
gacuuaacuaggaucuaau

SEQ ID NO: 521245 - RNA, 19 nt, Artificial Sequence
  Description of Artificial Sequence: Synthetic oligonucleotide
  Sense strand starting at position 3437 of SEQ ID NO: 317901
ggcuuaucuacggacucua

SEQ ID NO: 521246 - RNA, 19 nt, Artificial Sequence
  Description of Artificial Sequence: Synthetic oligonucleotide
  Antisense strand to SEQ ID NO: 521245
uagaguccguagauaagcc

SEQ ID NO: 521247 - RNA, 19 nt, Artificial Sequence
  Description of Artificial Sequence: Synthetic oligonucleotide
  Sense strand starting at position 3512 of SEQ ID NO: 317901
ugauauuccuugucacaag

SEQ ID NO: 521248 - RNA, 19 nt, Artificial Sequence
  Description of Artificial Sequence: Synthetic oligonucleotide
  Antisense strand to SEQ ID NO: 521247
cuugugacaaggaauauca

SEQ ID NO: 521249 - RNA, 19 nt, Artificial Sequence
  Description of Artificial Sequence: Synthetic oligonucleotide
  Sense strand starting at position 3633 of SEQ ID NO: 317901
auggaauugagcugcagaa

SEQ ID NO: 521250 - RNA, 19 nt, Artificial Sequence
  Description of Artificial Sequence: Synthetic oligonucleotide
  Antisense strand to SEQ ID NO: 521249
uucugcagcucaauuccau

SEQ ID NO: 521251 - RNA, 19 nt, Artificial Sequence
  Description of Artificial Sequence: Synthetic oligonucleotide
  Sense strand starting at position 3635 of SEQ ID NO: 317901
ggaauugagcugcagaauc

SEQ ID NO: 521252 - RNA, 19 nt, Artificial Sequence
  Description of Artificial Sequence: Synthetic oligonucleotide
  Antisense strand to SEQ ID NO: 521251
gauucugcagcucaauucc

SEQ ID NO: 521253 - RNA, 19 nt, Artificial Sequence
  Description of Artificial Sequence: Synthetic oligonucleotide
  Sense strand starting at position 3862 of SEQ ID NO: 317901
ugggauaagcuuugggaag

SEQ ID NO: 521254 - RNA, 19 nt, Artificial Sequence
  Description of Artificial Sequence: Synthetic oligonucleotide
  Antisense strand to SEQ ID NO: 521253
cuucccaaagcuuauccca

SEQ ID NO: 521255 - RNA, 19 nt, Artificial Sequence
  Description of Artificial Sequence: Synthetic oligonucleotide
  Sense strand starting at position 3873 of SEQ ID NO: 317901
uugggaaguuuauugcuua

SEQ ID NO: 521256 - RNA, 19 nt, Artificial Sequence
  Description of Artificial Sequence: Synthetic oligonucleotide
  Antisense strand to SEQ ID NO: 521255
uaagcaauaaacuucccaa

SEQ ID NO: 521257 - RNA, 19 nt, Artificial Sequence
  Description of Artificial Sequence: Synthetic oligonucleotide
  Sense strand starting at position 3877 of SEQ ID NO: 317901
gaaguuuauugcuuaggga

SEQ ID NO: 521258 - RNA, 19 nt, Artificial Sequence
  Description of Artificial Sequence: Synthetic oligonucleotide
  Antisense strand to SEQ ID NO: 521257
ucccuaagcaauaaacuuc

SEQ ID NO: 521259 - RNA, 19 nt, Artificial Sequence
  Description of Artificial Sequence: Synthetic oligonucleotide
  Sense strand starting at position 3878 of SEQ ID NO: 317901
aaguuuauugcuuagggaa

SEQ ID NO: 521260 - RNA, 19 nt, Artificial Sequence
  Description of Artificial Sequence: Synthetic oligonucleotide
  Antisense strand to SEQ ID NO: 521259
uucccuaagcaauaaacuu

SEQ ID NO: 521261 - RNA, 19 nt, Artificial Sequence
  Description of Artificial Sequence: Synthetic oligonucleotide
  Sense strand starting at position 3918 of SEQ ID NO: 317901
ucauccuggucucugaauu

SEQ ID NO: 521262 - RNA, 19 nt, Artificial Sequence
  Description of Artificial Sequence: Synthetic oligonucleotide
  Antisense strand to SEQ ID NO: 521261
aauucagagaccaggauga

SEQ ID NO: 521263 - RNA, 19 nt, Artificial Sequence
  Description of Artificial Sequence: Synthetic oligonucleotide
  Sense strand starting at position 3934 of SEQ ID NO: 317901
auugucucuuacucagaga

SEQ ID NO: 521264 - RNA, 19 nt, Artificial Sequence
  Description of Artificial Sequence: Synthetic oligonucleotide
  Antisense strand to SEQ ID NO: 521263
ucucugaguaagagacaau

SEQ ID NO: 521265 - RNA, 19 nt, Artificial Sequence
  Description of Artificial Sequence: Synthetic oligonucleotide
  Sense strand starting at position 39 of SEQ ID NO: 317902
agcgauaauucucuguaag

SEQ ID NO: 521266 - RNA, 19 nt, Artificial Sequence
  Description of Artificial Sequence: Synthetic oligonucleotide
  Antisense strand to SEQ ID NO: 521265
cuuacagagaauuaucgcu

SEQ ID NO: 521267 - RNA, 19 nt, Artificial Sequence
  Description of Artificial Sequence: Synthetic oligonucleotide
  Sense strand starting at position 40 of SEQ ID NO: 317902
gcgauaauucucuguaagg

SEQ ID NO: 521268 - RNA, 19 nt, Artificial Sequence
  Description of Artificial Sequence: Synthetic oligonucleotide
  Antisense strand to SEQ ID NO: 521267
ccuuacagagaauuaucgc

SEQ ID NO: 521269 - RNA, 19 nt, Artificial Sequence
  Description of Artificial Sequence: Synthetic oligonucleotide
  Sense strand starting at position 41 of SEQ ID NO: 317902
cgauaauucucuguaaggg

SEQ ID NO: 521270 - RNA, 19 nt, Artificial Sequence
  Description of Artificial Sequence: Synthetic oligonucleotide
  Antisense strand to SEQ ID NO: 521269
cccuuacagagaauuaucg

SEQ ID NO: 521271 - RNA, 19 nt, Artificial Sequence
  Description of Artificial Sequence: Synthetic oligonucleotide
  Sense strand starting at position 51 of SEQ ID NO: 317902
cuguaagggacuugcucua

SEQ ID NO: 521272 - RNA, 19 nt, Artificial Sequence
  Description of Artificial Sequence: Synthetic oligonucleotide
  Antisense strand to SEQ ID NO: 521271
uagagcaagucccuuacag

SEQ ID NO: 521273 - RNA, 19 nt, Artificial Sequence
  Description of Artificial Sequence: Synthetic oligonucleotide
  Sense strand starting at position 181 of SEQ ID NO: 317902
gccuaaugauacguuccaa

SEQ ID NO: 521274 - RNA, 19 nt, Artificial Sequence
  Description of Artificial Sequence: Synthetic oligonucleotide
  Antisense strand to SEQ ID NO: 521273
uuggaacguaucauuaggc

SEQ ID NO: 521275 - RNA, 19 nt, Artificial Sequence
  Description of Artificial Sequence: Synthetic oligonucleotide
  Sense strand starting at position 237 of SEQ ID NO: 317902
ugauaaagcuaguuugacu

SEQ ID NO: 521276 - RNA, 19 nt, Artificial Sequence
  Description of Artificial Sequence: Synthetic oligonucleotide
  Antisense strand to SEQ ID NO: 521275
agucaaacuagcuuuauca

SEQ ID NO: 521277 - RNA, 19 nt, Artificial Sequence
  Description of Artificial Sequence: Synthetic oligonucleotide
  Sense strand starting at position 369 of SEQ ID NO: 317902
aaggacugccuuuggagau

SEQ ID NO: 521278 - RNA, 19 nt, Artificial Sequence
  Description of Artificial Sequence: Synthetic oligonucleotide
  Antisense strand to SEQ ID NO: 521277
aucuccaaaggcaguccuu

SEQ ID NO: 521279 - RNA, 19 nt, Artificial Sequence
  Description of Artificial Sequence: Synthetic oligonucleotide
  Sense strand starting at position 502 of SEQ ID NO: 317902
cggucauuacgugagacag

SEQ ID NO: 521280 - RNA, 19 nt, Artificial Sequence
  Description of Artificial Sequence: Synthetic oligonucleotide
  Antisense strand to SEQ ID NO: 521279
cugucucacguaaugaccg

SEQ ID NO: 521281 - RNA, 19 nt, Artificial Sequence
  Description of Artificial Sequence: Synthetic oligonucleotide
  Sense strand starting at position 739 of SEQ ID NO: 317902
auagcucugacugguggaa

SEQ ID NO: 521282 - RNA, 19 nt, Artificial Sequence
  Description of Artificial Sequence: Synthetic oligonucleotide
  Antisense strand to SEQ ID NO: 521281
uuccaccagucagagcuau

SEQ ID NO: 521283 - RNA, 19 nt, Artificial Sequence
  Description of Artificial Sequence: Synthetic oligonucleotide
  Sense strand starting at position 954 of SEQ ID NO: 317902
uguucugaacuguacagaa

SEQ ID NO: 521284 - RNA, 19 nt, Artificial Sequence
  Description of Artificial Sequence: Synthetic oligonucleotide
  Antisense strand to SEQ ID NO: 521283
uucuguacaguucagaaca

SEQ ID NO: 521285 - RNA, 19 nt, Artificial Sequence
  Description of Artificial Sequence: Synthetic oligonucleotide
  Sense strand starting at position 956 of SEQ ID NO: 317902
uucugaacuguacagaagu

SEQ ID NO: 521286 - RNA, 19 nt, Artificial Sequence
  Description of Artificial Sequence: Synthetic oligonucleotide
  Antisense strand to SEQ ID NO: 521285
acuucuguacaguucagaa

SEQ ID NO: 521287 - RNA, 19 nt, Artificial Sequence
  Description of Artificial Sequence: Synthetic oligonucleotide
  Sense strand starting at position 1051 of SEQ ID NO: 317902
cguaauggaucaguuacaa

SEQ ID NO: 521288 - RNA, 19 nt, Artificial Sequence
  Description of Artificial Sequence: Synthetic oligonucleotide
  Antisense strand to SEQ ID NO: 521287
uuguaacugauccauuacg

SEQ ID NO: 521289 - RNA, 19 nt, Artificial Sequence
  Description of Artificial Sequence: Synthetic oligonucleotide
  Sense strand starting at position 1055 of SEQ ID NO: 317902
auggaucaguuacaagaaa

SEQ ID NO: 521290 - RNA, 19 nt, Artificial Sequence
  Description of Artificial Sequence: Synthetic oligonucleotide
  Antisense strand to SEQ ID NO: 521289
uuucuuguaacugauccau

SEQ ID NO: 521291 - RNA, 19 nt, Artificial Sequence
  Description of Artificial Sequence: Synthetic oligonucleotide
  Sense strand starting at position 1116 of SEQ ID NO: 317902
cggcgcuaaacgucugaaa

SEQ ID NO: 521292 - RNA, 19 nt, Artificial Sequence
  Description of Artificial Sequence: Synthetic oligonucleotide
  Antisense strand to SEQ ID NO: 521291
uuucagacguuuagcgccg

SEQ ID NO: 521293 - RNA, 19 nt, Artificial Sequence
  Description of Artificial Sequence: Synthetic oligonucleotide
  Sense strand starting at position 1224 of SEQ ID NO: 317902
uaaauauacugaucagggu

SEQ ID NO: 521294 - RNA, 19 nt, Artificial Sequence
  Description of Artificial Sequence: Synthetic oligonucleotide
  Antisense strand to SEQ ID NO: 521293
acccugaucaguauauuua

SEQ ID NO: 521295 - RNA, 19 nt, Artificial Sequence
  Description of Artificial Sequence: Synthetic oligonucleotide
  Sense strand starting at position 1228 of SEQ ID NO: 317902
uauacugaucaggguugga

SEQ ID NO: 521296 - RNA, 19 nt, Artificial Sequence
  Description of Artificial Sequence: Synthetic oligonucleotide
  Antisense strand to SEQ ID NO: 521295
uccaacccugaucaguaua

SEQ ID NO: 521297 - RNA, 19 nt, Artificial Sequence
  Description of Artificial Sequence: Synthetic oligonucleotide
  Sense strand starting at position 1293 of SEQ ID NO: 317902
gccaauauaaucgguauga

SEQ ID NO: 521298 - RNA, 19 nt, Artificial Sequence
  Description of Artificial Sequence: Synthetic oligonucleotide
  Antisense strand to SEQ ID NO: 521297
ucauaccgauuauauuggc

SEQ ID NO: 521299 - RNA, 19 nt, Artificial Sequence
  Description of Artificial Sequence: Synthetic oligonucleotide
  Sense strand starting at position 1294 of SEQ ID NO: 317902
ccaauauaaucgguaugag

SEQ ID NO: 521300 - RNA, 19 nt, Artificial Sequence
  Description of Artificial Sequence: Synthetic oligonucleotide
  Antisense strand to SEQ ID NO: 521299
cucauaccgauuauauugg

SEQ ID NO: 521301 - RNA, 19 nt, Artificial Sequence
  Description of Artificial Sequence: Synthetic oligonucleotide
  Sense strand starting at position 1295 of SEQ ID NO: 317902
caauauaaucgguaugagu

SEQ ID NO: 521302 - RNA, 19 nt, Artificial Sequence
  Description of Artificial Sequence: Synthetic oligonucleotide
  Antisense strand to SEQ ID NO: 521301
acucauaccgauuauauug

SEQ ID NO: 521303 - RNA, 19 nt, Artificial Sequence
  Description of Artificial Sequence: Synthetic oligonucleotide
  Sense strand starting at position 1297 of SEQ ID NO: 317902
auauaaucgguaugaguau

SEQ ID NO: 521304 - RNA, 19 nt, Artificial Sequence
  Description of Artificial Sequence: Synthetic oligonucleotide
  Antisense strand to SEQ ID NO: 521303
auacucauaccgauuauau

SEQ ID NO: 521305 - RNA, 19 nt, Artificial Sequence
  Description of Artificial Sequence: Synthetic oligonucleotide
  Sense strand starting at position 1303 of SEQ ID NO: 317902
ucgguaugaguauaaacaa

SEQ ID NO: 521306 - RNA, 19 nt, Artificial Sequence
  Description of Artificial Sequence: Synthetic oligonucleotide
  Antisense strand to SEQ ID NO: 521305
uuguuuauacucauaccga

SEQ ID NO: 521307 - RNA, 19 nt, Artificial Sequence
  Description of Artificial Sequence: Synthetic oligonucleotide
  Sense strand starting at position 1323 of SEQ ID NO: 317902
cgcggcagccaucucaaua

SEQ ID NO: 521308 - RNA, 19 nt, Artificial Sequence
  Description of Artificial Sequence: Synthetic oligonucleotide
  Antisense strand to SEQ ID NO: 521307
uauugagauggcugccgcg

SEQ ID NO: 521309 - RNA, 19 nt, Artificial Sequence
  Description of Artificial Sequence: Synthetic oligonucleotide
  Sense strand starting at position 1472 of SEQ ID NO: 317902
cguucuucggauuacuaaa

SEQ ID NO: 521310 - RNA, 19 nt, Artificial Sequence
  Description of Artificial Sequence: Synthetic oligonucleotide
  Antisense strand to SEQ ID NO: 521309
uuuaguaauccgaagaacg

SEQ ID NO: 521311 - RNA, 19 nt, Artificial Sequence
  Description of Artificial Sequence: Synthetic oligonucleotide
  Sense strand starting at position 1616 of SEQ ID NO: 317902
accgcuucgauaugagaaa

SEQ ID NO: 521312 - RNA, 19 nt, Artificial Sequence
  Description of Artificial Sequence: Synthetic oligonucleotide
  Antisense strand to SEQ ID NO: 521311
uuucucauaucgaagcggu

SEQ ID NO: 521313 - RNA, 19 nt, Artificial Sequence
  Description of Artificial Sequence: Synthetic oligonucleotide
  Sense strand starting at position 1705 of SEQ ID NO: 317902
ucccaugaacuuugugacu

SEQ ID NO: 521314 - RNA, 19 nt, Artificial Sequence
  Description of Artificial Sequence: Synthetic oligonucleotide
  Antisense strand to SEQ ID NO: 521313
agucacaaaguucauggga

SEQ ID NO: 521315 - RNA, 19 nt, Artificial Sequence
  Description of Artificial Sequence: Synthetic oligonucleotide
  Sense strand starting at position 1710 of SEQ ID NO: 317902
ugaacuuugugacucagag

SEQ ID NO: 521316 - RNA, 19 nt, Artificial Sequence
  Description of Artificial Sequence: Synthetic oligonucleotide
  Antisense strand to SEQ ID NO: 521315
cucugagucacaaaguuca

SEQ ID NO: 521317 - RNA, 19 nt, Artificial Sequence
  Description of Artificial Sequence: Synthetic oligonucleotide
  Sense strand starting at position 2297 of SEQ ID NO: 317902
caggguuauugucucgaua

SEQ ID NO: 521318 - RNA, 19 nt, Artificial Sequence
  Description of Artificial Sequence: Synthetic oligonucleotide
  Antisense strand to SEQ ID NO: 521317
uaucgagacaauaacccug

SEQ ID NO: 521319 - RNA, 19 nt, Artificial Sequence
  Description of Artificial Sequence: Synthetic oligonucleotide
  Sense strand starting at position 3208 of SEQ ID NO: 317902
uucuuuguacgacaguaau

SEQ ID NO: 521320 - RNA, 19 nt, Artificial Sequence
  Description of Artificial Sequence: Synthetic oligonucleotide
  Antisense strand to SEQ ID NO: 521319
auuacugucguacaaagaa

SEQ ID NO: 521321 - RNA, 19 nt, Artificial Sequence
  Description of Artificial Sequence: Synthetic oligonucleotide
  Sense strand starting at position 3218 of SEQ ID NO: 317902
gacaguaaucggugcacag

SEQ ID NO: 521322 - RNA, 19 nt, Artificial Sequence
  Description of Artificial Sequence: Synthetic oligonucleotide
  Antisense strand to SEQ ID NO: 521321
cugugcaccgauuacuguc

SEQ ID NO: 521323 - RNA, 19 nt, Artificial Sequence
  Description of Artificial Sequence: Synthetic oligonucleotide
  Sense strand starting at position 3471 of SEQ ID NO: 317902
gcgaaauggccucaagauc

SEQ ID NO: 521324 - RNA, 19 nt, Artificial Sequence
  Description of Artificial Sequence: Synthetic oligonucleotide
  Antisense strand to SEQ ID NO: 521323
gaucuugaggccauuucgc

SEQ ID NO: 521325 - RNA, 19 nt, Artificial Sequence
  Description of Artificial Sequence: Synthetic oligonucleotide
  Sense strand starting at position 3558 of SEQ ID NO: 317902
gguggugcagucguugaau

SEQ ID NO: 521326 - RNA, 19 nt, Artificial Sequence
  Description of Artificial Sequence: Synthetic oligonucleotide
  Antisense strand to SEQ ID NO: 521325
auucaacgacugcaccacc

SEQ ID NO: 521327 - RNA, 19 nt, Artificial Sequence
  Description of Artificial Sequence: Synthetic oligonucleotide
  Sense strand starting at position 3602 of SEQ ID NO: 317902
ggcaggguucgcguuuauu

SEQ ID NO: 521328 - RNA, 19 nt, Artificial Sequence
  Description of Artificial Sequence: Synthetic oligonucleotide
  Antisense strand to SEQ ID NO: 521327
aauaaacgcgaacccugcc

SEQ ID NO: 521329 - RNA, 19 nt, Artificial Sequence
  Description of Artificial Sequence: Synthetic oligonucleotide
  Sense strand starting at position 3603 of SEQ ID NO: 317902
gcaggguucgcguuuauug

SEQ ID NO: 521330 - RNA, 19 nt, Artificial Sequence
  Description of Artificial Sequence: Synthetic oligonucleotide
  Antisense strand to SEQ ID NO: 521329
caauaaacgcgaacccugc

SEQ ID NO: 521331 - RNA, 19 nt, Artificial Sequence
  Description of Artificial Sequence: Synthetic oligonucleotide
  Sense strand starting at position 3612 of SEQ ID NO: 317902
gcguuuauugcggagagag

SEQ ID NO: 521332 - RNA, 19 nt, Artificial Sequence
  Description of Artificial Sequence: Synthetic oligonucleotide
  Antisense strand to SEQ ID NO: 521331
cucucuccgcaauaaacgc

SEQ ID NO: 521333 - RNA, 19 nt, Artificial Sequence
  Description of Artificial Sequence: Synthetic oligonucleotide
  Sense strand starting at position 3805 of SEQ ID NO: 317902
aacuguguacagugaugau

SEQ ID NO: 521334 - RNA, 19 nt, Artificial Sequence
  Description of Artificial Sequence: Synthetic oligonucleotide
  Antisense strand to SEQ ID NO: 521333
aucaucacuguacacaguu

SEQ ID NO: 521335 - RNA, 19 nt, Artificial Sequence
  Description of Artificial Sequence: Synthetic oligonucleotide
  Sense strand starting at position 3809 of SEQ ID NO: 317902
guguacagugaugauaauu

SEQ ID NO: 521336 - RNA, 19 nt, Artificial Sequence
  Description of Artificial Sequence: Synthetic oligonucleotide
  Antisense strand to SEQ ID NO: 521335
aauuaucaucacuguacac

SEQ ID NO: 521337 - RNA, 19 nt, Artificial Sequence
  Description of Artificial Sequence: Synthetic oligonucleotide
  Sense strand starting at position 3855 of SEQ ID NO: 317902
ucaguucuuccgucuguau

SEQ ID NO: 521338 - RNA, 19 nt, Artificial Sequence
  Description of Artificial Sequence: Synthetic oligonucleotide
  Antisense strand to SEQ ID NO: 521337
auacagacggaagaacuga

SEQ ID NO: 521339 - RNA, 19 nt, Artificial Sequence
  Description of Artificial Sequence: Synthetic oligonucleotide
  Sense strand starting at position 3856 of SEQ ID NO: 317902
caguucuuccgucuguauu

SEQ ID NO: 521340 - RNA, 19 nt, Artificial Sequence
  Description of Artificial Sequence: Synthetic oligonucleotide
  Antisense strand to SEQ ID NO: 521339
aauacagacggaagaacug

SEQ ID NO: 521341 - RNA, 19 nt, Artificial Sequence
  Description of Artificial Sequence: Synthetic oligonucleotide
  Sense strand starting at position 3866 of SEQ ID NO: 317902
gucuguauucuagagauaa

SEQ ID NO: 521342 - RNA, 19 nt, Artificial Sequence
  Description of Artificial Sequence: Synthetic oligonucleotide
  Antisense strand to SEQ ID NO: 521341
uuaucucuagaauacagac

SEQ ID NO: 521343 - RNA, 19 nt, Artificial Sequence
  Description of Artificial Sequence: Synthetic oligonucleotide
  Sense strand starting at position 3950 of SEQ ID NO: 317902
uggcuugccaauggaaaga

SEQ ID NO: 521344 - RNA, 19 nt, Artificial Sequence
  Description of Artificial Sequence: Synthetic oligonucleotide
  Antisense strand to SEQ ID NO: 521343
ucuuuccauuggcaagcca

SEQ ID NO: 521345 - RNA, 19 nt, Artificial Sequence
  Description of Artificial Sequence: Synthetic oligonucleotide
  Sense strand starting at position 232 of SEQ ID NO: 317903
gucuuaaacguauaagcaa

SEQ ID NO: 521346 - RNA, 19 nt, Artificial Sequence
  Description of Artificial Sequence: Synthetic oligonucleotide
  Antisense strand to SEQ ID NO: 521345
uugcuuauacguuuaagac

SEQ ID NO: 521347 - RNA, 19 nt, Artificial Sequence
  Description of Artificial Sequence: Synthetic oligonucleotide
  Sense strand starting at position 292 of SEQ ID NO: 317903
guuuauuaaccgugagaaa

SEQ ID NO: 521348 - RNA, 19 nt, Artificial Sequence
  Description of Artificial Sequence: Synthetic oligonucleotide
  Antisense strand to SEQ ID NO: 521347
uuucucacgguuaauaaac

SEQ ID NO: 521349 - RNA, 19 nt, Artificial Sequence
  Description of Artificial Sequence: Synthetic oligonucleotide
  Sense strand starting at position 293 of SEQ ID NO: 317903
uuuauuaaccgugagaaau

SEQ ID NO: 521350 - RNA, 19 nt, Artificial Sequence
  Description of Artificial Sequence: Synthetic oligonucleotide
  Antisense strand to SEQ ID NO: 521349
auuucucacgguuaauaaa

SEQ ID NO: 521351 - RNA, 19 nt, Artificial Sequence
  Description of Artificial Sequence: Synthetic oligonucleotide
  Sense strand starting at position 467 of SEQ ID NO: 317903
cauggagguuuguuauuaa

SEQ ID NO: 521352 - RNA, 19 nt, Artificial Sequence
  Description of Artificial Sequence: Synthetic oligonucleotide
  Antisense strand to SEQ ID NO: 521351
uuaauaacaaaccuccaug

SEQ ID NO: 521353 - RNA, 19 nt, Artificial Sequence
  Description of Artificial Sequence: Synthetic oligonucleotide
  Sense strand starting at position 470 of SEQ ID NO: 317903
ggagguuuguuauuaauau

SEQ ID NO: 521354 - RNA, 19 nt, Artificial Sequence
  Description of Artificial Sequence: Synthetic oligonucleotide
  Antisense strand to SEQ ID NO: 521353
auauuaauaacaaaccucc

SEQ ID NO: 521355 - RNA, 19 nt, Artificial Sequence
  Description of Artificial Sequence: Synthetic oligonucleotide
  Sense strand starting at position 489 of SEQ ID NO: 317903
uucugugcccuugagauaa

SEQ ID NO: 521356 - RNA, 19 nt, Artificial Sequence
  Description of Artificial Sequence: Synthetic oligonucleotide
  Antisense strand to SEQ ID NO: 521355
uuaucucaagggcacagaa

SEQ ID NO: 521357 - RNA, 19 nt, Artificial Sequence
  Description of Artificial Sequence: Synthetic oligonucleotide
  Sense strand starting at position 705 of SEQ ID NO: 317903
ugaggaaaucagugaaggu

SEQ ID NO: 521358 - RNA, 19 nt, Artificial Sequence
  Description of Artificial Sequence: Synthetic oligonucleotide
  Antisense strand to SEQ ID NO: 521357
accuucacugauuuccuca

SEQ ID NO: 521359 - RNA, 19 nt, Artificial Sequence
  Description of Artificial Sequence: Synthetic oligonucleotide
  Sense strand starting at position 771 of SEQ ID NO: 317903
ugaugugucagaggaagug

SEQ ID NO: 521360 - RNA, 19 nt, Artificial Sequence
  Description of Artificial Sequence: Synthetic oligonucleotide
  Antisense strand to SEQ ID NO: 521359
cacuuccucugacacauca

SEQ ID NO: 521361 - RNA, 19 nt, Artificial Sequence
  Description of Artificial Sequence: Synthetic oligonucleotide
  Sense strand starting at position 1000 of SEQ ID NO: 317903
ccucucucagaguauauua

SEQ ID NO: 521362 - RNA, 19 nt, Artificial Sequence
  Description of Artificial Sequence: Synthetic oligonucleotide
  Antisense strand to SEQ ID NO: 521361
uaauauacucugagagagg

SEQ ID NO: 521363 - RNA, 19 nt, Artificial Sequence
  Description of Artificial Sequence: Synthetic oligonucleotide
  Sense strand starting at position 1042 of SEQ ID NO: 317903
ggcauagaucugggaauca

SEQ ID NO: 521364 - RNA, 19 nt, Artificial Sequence
  Description of Artificial Sequence: Synthetic oligonucleotide
  Antisense strand to SEQ ID NO: 521363
ugauucccagaucuaugcc

SEQ ID NO: 521365 - RNA, 19 nt, Artificial Sequence
  Description of Artificial Sequence: Synthetic oligonucleotide
  Sense strand starting at position 1207 of SEQ ID NO: 317903
ggacaaguguaaucacaac

SEQ ID NO: 521366 - RNA, 19 nt, Artificial Sequence
  Description of Artificial Sequence: Synthetic oligonucleotide
  Antisense strand to SEQ ID NO: 521365
guugugauuacacuugucc

SEQ ID NO: 521367 - RNA, 19 nt, Artificial Sequence
  Description of Artificial Sequence: Synthetic oligonucleotide
  Sense strand starting at position 1213 of SEQ ID NO: 317903
guguaaucacaacaguuac

SEQ ID NO: 521368 - RNA, 19 nt, Artificial Sequence
  Description of Artificial Sequence: Synthetic oligonucleotide
  Antisense strand to SEQ ID NO: 521367
guaacuguugugauuacac

SEQ ID NO: 521369 - RNA, 19 nt, Artificial Sequence
  Description of Artificial Sequence: Synthetic oligonucleotide
  Sense strand starting at position 1681 of SEQ ID NO: 317903
aguuguuaccaguaaauaa

SEQ ID NO: 521370 - RNA, 19 nt, Artificial Sequence
  Description of Artificial Sequence: Synthetic oligonucleotide
  Antisense strand to SEQ ID NO: 521369
uuauuuacugguaacaacu

SEQ ID NO: 521371 - RNA, 19 nt, Artificial Sequence
  Description of Artificial Sequence: Synthetic oligonucleotide
  Sense strand starting at position 1725 of SEQ ID NO: 317903
acagcauuagagggcaaau

SEQ ID NO: 521372 - RNA, 19 nt, Artificial Sequence
  Description of Artificial Sequence: Synthetic oligonucleotide
  Antisense strand to SEQ ID NO: 521371
auuugcccucuaaugcugu

SEQ ID NO: 521373 - RNA, 19 nt, Artificial Sequence
  Description of Artificial Sequence: Synthetic oligonucleotide
  Sense strand starting at position 1795 of SEQ ID NO: 317903
uacagucauugguccagau

SEQ ID NO: 521374 - RNA, 19 nt, Artificial Sequence
  Description of Artificial Sequence: Synthetic oligonucleotide
  Antisense strand to SEQ ID NO: 521373
aucuggaccaaugacugua

SEQ ID NO: 521375 - RNA, 19 nt, Artificial Sequence
  Description of Artificial Sequence: Synthetic oligonucleotide
  Sense strand starting at position 1797 of SEQ ID NO: 317903
cagucauugguccagauuc

SEQ ID NO: 521376 - RNA, 19 nt, Artificial Sequence
  Description of Artificial Sequence: Synthetic oligonucleotide
  Antisense strand to SEQ ID NO: 521375
gaaucuggaccaaugacug

SEQ ID NO: 521377 - RNA, 19 nt, Artificial Sequence
  Description of Artificial Sequence: Synthetic oligonucleotide
  Sense strand starting at position 1799 of SEQ ID NO: 317903
gucauugguccagauucua

SEQ ID NO: 521378 - RNA, 19 nt, Artificial Sequence
  Description of Artificial Sequence: Synthetic oligonucleotide
  Antisense strand to SEQ ID NO: 521377
uagaaucuggaccaaugac

SEQ ID NO: 521379 - RNA, 19 nt, Artificial Sequence
  Description of Artificial Sequence: Synthetic oligonucleotide
  Sense strand starting at position 2013 of SEQ ID NO: 317903
uggucagucggugauauau

SEQ ID NO: 521380 - RNA, 19 nt, Artificial Sequence
  Description of Artificial Sequence: Synthetic oligonucleotide
  Antisense strand to SEQ ID NO: 521379
auauaucaccgacugacca

SEQ ID NO: 521381 - RNA, 19 nt, Artificial Sequence
  Description of Artificial Sequence: Synthetic oligonucleotide
  Sense strand starting at position 2025 of SEQ ID NO: 317903
gauauauccggccaauggu

SEQ ID NO: 521382 - RNA, 19 nt, Artificial Sequence
  Description of Artificial Sequence: Synthetic oligonucleotide
  Antisense strand to SEQ ID NO: 521381
accauuggccggauauauc

SEQ ID NO: 521383 - RNA, 19 nt, Artificial Sequence
  Description of Artificial Sequence: Synthetic oligonucleotide
  Sense strand starting at position 2344 of SEQ ID NO: 317903
uugcgaggucaguaaagga

SEQ ID NO: 521384 - RNA, 19 nt, Artificial Sequence
  Description of Artificial Sequence: Synthetic oligonucleotide
  Antisense strand to SEQ ID NO: 521383
uccuuuacugaccucgcaa

SEQ ID NO: 521385 - RNA, 19 nt, Artificial Sequence
  Description of Artificial Sequence: Synthetic oligonucleotide
  Sense strand starting at position 2408 of SEQ ID NO: 317903
uagggugucaccggagaga

SEQ ID NO: 521386 - RNA, 19 nt, Artificial Sequence
  Description of Artificial Sequence: Synthetic oligonucleotide
  Antisense strand to SEQ ID NO: 521385
ucucuccggugacacccua

SEQ ID NO: 521387 - RNA, 19 nt, Artificial Sequence
  Description of Artificial Sequence: Synthetic oligonucleotide
  Sense strand starting at position 2411 of SEQ ID NO: 317903
ggugucaccggagagaauu

SEQ ID NO: 521388 - RNA, 19 nt, Artificial Sequence
  Description of Artificial Sequence: Synthetic oligonucleotide
  Antisense strand to SEQ ID NO: 521387
aauucucuccggugacacc

SEQ ID NO: 521389 - RNA, 19 nt, Artificial Sequence
  Description of Artificial Sequence: Synthetic oligonucleotide
  Sense strand starting at position 2733 of SEQ ID NO: 317903
ccuugugacccagagcuga

SEQ ID NO: 521390 - RNA, 19 nt, Artificial Sequence
  Description of Artificial Sequence: Synthetic oligonucleotide
  Antisense strand to SEQ ID NO: 521389
ucagcucugggucacaagg

SEQ ID NO: 521391 - RNA, 19 nt, Artificial Sequence
  Description of Artificial Sequence: Synthetic oligonucleotide
  Sense strand starting at position 2756 of SEQ ID NO: 317903
uguaauugaagaggaguau

SEQ ID NO: 521392 - RNA, 19 nt, Artificial Sequence
  Description of Artificial Sequence: Synthetic oligonucleotide
  Antisense strand to SEQ ID NO: 521391
auacuccucuucaauuaca

SEQ ID NO: 521393 - RNA, 19 nt, Artificial Sequence
  Description of Artificial Sequence: Synthetic oligonucleotide
  Sense strand starting at position 2863 of SEQ ID NO: 317903
uaccaagacuugucagaag

SEQ ID NO: 521394 - RNA, 19 nt, Artificial Sequence
  Description of Artificial Sequence: Synthetic oligonucleotide
  Antisense strand to SEQ ID NO: 521393
cuucugacaagucuuggua

SEQ ID NO: 521395 - RNA, 19 nt, Artificial Sequence
  Description of Artificial Sequence: Synthetic oligonucleotide
  Sense strand starting at position 2911 of SEQ ID NO: 317903
uuccuuucucgggaguuga

SEQ ID NO: 521396 - RNA, 19 nt, Artificial Sequence
  Description of Artificial Sequence: Synthetic oligonucleotide
  Antisense strand to SEQ ID NO: 521395
ucaacucccgagaaaggaa

SEQ ID NO: 521397 - RNA, 19 nt, Artificial Sequence
  Description of Artificial Sequence: Synthetic oligonucleotide
  Sense strand starting at position 2967 of SEQ ID NO: 317903
ggcaauaaucaugguguua

SEQ ID NO: 521398 - RNA, 19 nt, Artificial Sequence
  Description of Artificial Sequence: Synthetic oligonucleotide
  Antisense strand to SEQ ID NO: 521397
uaacaccaugauuauugcc

SEQ ID NO: 521399 - RNA, 19 nt, Artificial Sequence
  Description of Artificial Sequence: Synthetic oligonucleotide
  Sense strand starting at position 3051 of SEQ ID NO: 317903
uugaaaucacacuguguag

SEQ ID NO: 521400 - RNA, 19 nt, Artificial Sequence
  Description of Artificial Sequence: Synthetic oligonucleotide
  Antisense strand to SEQ ID NO: 521399
cuacacagugugauuucaa

SEQ ID NO: 521401 - RNA, 19 nt, Artificial Sequence
  Description of Artificial Sequence: Synthetic oligonucleotide
  Sense strand starting at position 3145 of SEQ ID NO: 317903
guuagaaucucagcuuuga

SEQ ID NO: 521402 - RNA, 19 nt, Artificial Sequence
  Description of Artificial Sequence: Synthetic oligonucleotide
  Antisense strand to SEQ ID NO: 521401
ucaaagcugagauucuaac

SEQ ID NO: 521403 - RNA, 19 nt, Artificial Sequence
  Description of Artificial Sequence: Synthetic oligonucleotide
  Sense strand starting at position 3165 of SEQ ID NO: 317903
accugauagcucgggaauc

SEQ ID NO: 521404 - RNA, 19 nt, Artificial Sequence
  Description of Artificial Sequence: Synthetic oligonucleotide
  Antisense strand to SEQ ID NO: 521403
gauucccgagcuaucaggu

SEQ ID NO: 521405 - RNA, 19 nt, Artificial Sequence
  Description of Artificial Sequence: Synthetic oligonucleotide
  Sense strand starting at position 3242 of SEQ ID NO: 317903
auauaagaucagcaauguu

SEQ ID NO: 521406 - RNA, 19 nt, Artificial Sequence
  Description of Artificial Sequence: Synthetic oligonucleotide
  Antisense strand to SEQ ID NO: 521405
aacauugcugaucuuauau

SEQ ID NO: 521407 - RNA, 19 nt, Artificial Sequence
  Description of Artificial Sequence: Synthetic oligonucleotide
  Sense strand starting at position 3389 of SEQ ID NO: 317903
agacuuguuucccuaauga

SEQ ID NO: 521408 - RNA, 19 nt, Artificial Sequence
  Description of Artificial Sequence: Synthetic oligonucleotide
  Antisense strand to SEQ ID NO: 521407
ucauuagggaaacaagucu

SEQ ID NO: 521409 - RNA, 19 nt, Artificial Sequence
  Description of Artificial Sequence: Synthetic oligonucleotide
  Sense strand starting at position 3412 of SEQ ID NO: 317903
cucugucaggcagggaaua

SEQ ID NO: 521410 - RNA, 19 nt, Artificial Sequence
  Description of Artificial Sequence: Synthetic oligonucleotide
  Antisense strand to SEQ ID NO: 521409
uauucccugccugacagag

SEQ ID NO: 521411 - RNA, 19 nt, Artificial Sequence
  Description of Artificial Sequence: Synthetic oligonucleotide
  Sense strand starting at position 3422 of SEQ ID NO: 317903
cagggaauaugucucacaa

SEQ ID NO: 521412 - RNA, 19 nt, Artificial Sequence
  Description of Artificial Sequence: Synthetic oligonucleotide
  Antisense strand to SEQ ID NO: 521411
uugugagacauauucccug

SEQ ID NO: 521413 - RNA, 19 nt, Artificial Sequence
  Description of Artificial Sequence: Synthetic oligonucleotide
  Sense strand starting at position 3461 of SEQ ID NO: 317903
agaacauagcaugguguua

SEQ ID NO: 521414 - RNA, 19 nt, Artificial Sequence
  Description of Artificial Sequence: Synthetic oligonucleotide
  Antisense strand to SEQ ID NO: 521413
uaacaccaugcuauguucu

SEQ ID NO: 521415 - RNA, 19 nt, Artificial Sequence
  Description of Artificial Sequence: Synthetic oligonucleotide
  Sense strand starting at position 3650 of SEQ ID NO: 317903
agaguaaccucacuggauu

SEQ ID NO: 521416 - RNA, 19 nt, Artificial Sequence
  Description of Artificial Sequence: Synthetic oligonucleotide
  Antisense strand to SEQ ID NO: 521415
aauccagugagguuacucu

SEQ ID NO: 521417 - RNA, 19 nt, Artificial Sequence
  Description of Artificial Sequence: Synthetic oligonucleotide
  Sense strand starting at position 3651 of SEQ ID NO: 317903
gaguaaccucacuggauuc

SEQ ID NO: 521418 - RNA, 19 nt, Artificial Sequence
  Description of Artificial Sequence: Synthetic oligonucleotide
  Antisense strand to SEQ ID NO: 521417
gaauccagugagguuacuc

SEQ ID NO: 521419 - RNA, 19 nt, Artificial Sequence
  Description of Artificial Sequence: Synthetic oligonucleotide
  Sense strand starting at position 3704 of SEQ ID NO: 317903
ccuccaacuccuuaguagu

SEQ ID NO: 521420 - RNA, 19 nt, Artificial Sequence
  Description of Artificial Sequence: Synthetic oligonucleotide
  Antisense strand to SEQ ID NO: 521419
acuacuaaggaguuggagg

SEQ ID NO: 521421 - RNA, 19 nt, Artificial Sequence
  Description of Artificial Sequence: Synthetic oligonucleotide
  Sense strand starting at position 3846 of SEQ ID NO: 317903
agcauaauguagcugagau

SEQ ID NO: 521422 - RNA, 19 nt, Artificial Sequence
  Description of Artificial Sequence: Synthetic oligonucleotide
  Antisense strand to SEQ ID NO: 521421
aucucagcuacauuaugcu

SEQ ID NO: 521423 - RNA, 19 nt, Artificial Sequence
  Description of Artificial Sequence: Synthetic oligonucleotide
  Sense strand starting at position 3954 of SEQ ID NO: 317903
acauuaggauguuuccagu

SEQ ID NO: 521424 - RNA, 19 nt, Artificial Sequence
  Description of Artificial Sequence: Synthetic oligonucleotide
  Antisense strand to SEQ ID NO: 521423
acuggaaacauccuaaugu

SEQ ID NO: 521425 - RNA, 19 nt, Artificial Sequence
  Description of Artificial Sequence: Synthetic oligonucleotide
  Sense strand starting at position 1 of SEQ ID NO: 317904
gguugggagccauguguga

SEQ ID NO: 521426 - RNA, 19 nt, Artificial Sequence
  Description of Artificial Sequence: Synthetic oligonucleotide
  Antisense strand to SEQ ID NO: 521425
ucacacauggcucccaacc

SEQ ID NO: 521427 - RNA, 19 nt, Artificial Sequence
  Description of Artificial Sequence: Synthetic oligonucleotide
  Sense strand starting at position 8 of SEQ ID NO: 317904
agccaugugugaccugaga

SEQ ID NO: 521428 - RNA, 19 nt, Artificial Sequence
  Description of Artificial Sequence: Synthetic oligonucleotide
  Antisense strand to SEQ ID NO: 521427
ucucaggucacacauggcu

SEQ ID NO: 521429 - RNA, 19 nt, Artificial Sequence
  Description of Artificial Sequence: Synthetic oligonucleotide
  Sense strand starting at position 275 of SEQ ID NO: 317904
aauugaugugccgaccaca

SEQ ID NO: 521430 - RNA, 19 nt, Artificial Sequence
  Description of Artificial Sequence: Synthetic oligonucleotide
  Antisense strand to SEQ ID NO: 521429
uguggucggcacaucaauu

SEQ ID NO: 521431 - RNA, 19 nt, Artificial Sequence
  Description of Artificial Sequence: Synthetic oligonucleotide
  Sense strand starting at position 294 of SEQ ID NO: 317904
gcucuuauggcccagacuu

SEQ ID NO: 521432 - RNA, 19 nt, Artificial Sequence
  Description of Artificial Sequence: Synthetic oligonucleotide
  Antisense strand to SEQ ID NO: 521431
aagucugggccauaagagc

SEQ ID NO: 521433 - RNA, 19 nt, Artificial Sequence
  Description of Artificial Sequence: Synthetic oligonucleotide
  Sense strand starting at position 296 of SEQ ID NO: 317904
ucuuauggcccagacuuaa

SEQ ID NO: 521434 - RNA, 19 nt, Artificial Sequence
  Description of Artificial Sequence: Synthetic oligonucleotide
  Antisense strand to SEQ ID NO: 521433
uuaagucugggccauaaga

SEQ ID NO: 521435 - RNA, 19 nt, Artificial Sequence
  Description of Artificial Sequence: Synthetic oligonucleotide
  Sense strand starting at position 319 of SEQ ID NO: 317904
ugcuauuaggacugaccuu

SEQ ID NO: 521436 - RNA, 19 nt, Artificial Sequence
  Description of Artificial Sequence: Synthetic oligonucleotide
  Antisense strand to SEQ ID NO: 521435
aaggucaguccuaauagca

SEQ ID NO: 521437 - RNA, 19 nt, Artificial Sequence
  Description of Artificial Sequence: Synthetic oligonucleotide
  Sense strand starting at position 409 of SEQ ID NO: 317904
gcaagaagccggcaaacau

SEQ ID NO: 521438 - RNA, 19 nt, Artificial Sequence
  Description of Artificial Sequence: Synthetic oligonucleotide
  Antisense strand to SEQ ID NO: 521437
auguuugccggcuucuugc

SEQ ID NO: 521439 - RNA, 19 nt, Artificial Sequence
  Description of Artificial Sequence: Synthetic oligonucleotide
  Sense strand starting at position 557 of SEQ ID NO: 317904
gggccuuucucucugggua

SEQ ID NO: 521440 - RNA, 19 nt, Artificial Sequence
  Description of Artificial Sequence: Synthetic oligonucleotide
  Antisense strand to SEQ ID NO: 521439
uacccagagagaaaggccc

SEQ ID NO: 521441 - RNA, 19 nt, Artificial Sequence
  Description of Artificial Sequence: Synthetic oligonucleotide
  Sense strand starting at position 572 of SEQ ID NO: 317904
gguagacugucacuuuaca

SEQ ID NO: 521442 - RNA, 19 nt, Artificial Sequence
  Description of Artificial Sequence: Synthetic oligonucleotide
  Antisense strand to SEQ ID NO: 521441
uguaaagugacagucuacc

SEQ ID NO: 521443 - RNA, 19 nt, Artificial Sequence
  Description of Artificial Sequence: Synthetic oligonucleotide
  Sense strand starting at position 896 of SEQ ID NO: 317904
cuagaauauaccgagcugu

SEQ ID NO: 521444 - RNA, 19 nt, Artificial Sequence
  Description of Artificial Sequence: Synthetic oligonucleotide
  Antisense strand to SEQ ID NO: 521443
acagcucgguauauucuag

SEQ ID NO: 521445 - RNA, 19 nt, Artificial Sequence
  Description of Artificial Sequence: Synthetic oligonucleotide
  Sense strand starting at position 906 of SEQ ID NO: 317904
ccgagcuguucaguagaaa

SEQ ID NO: 521446 - RNA, 19 nt, Artificial Sequence
  Description of Artificial Sequence: Synthetic oligonucleotide
  Antisense strand to SEQ ID NO: 521445
uuucuacugaacagcucgg

SEQ ID NO: 521447 - RNA, 19 nt, Artificial Sequence
  Description of Artificial Sequence: Synthetic oligonucleotide
  Sense strand starting at position 907 of SEQ ID NO: 317904
cgagcuguucaguagaaag

SEQ ID NO: 521448 - RNA, 19 nt, Artificial Sequence
  Description of Artificial Sequence: Synthetic oligonucleotide
  Antisense strand to SEQ ID NO: 521447
cuuucuacugaacagcucg

SEQ ID NO: 521449 - RNA, 19 nt, Artificial Sequence
  Description of Artificial Sequence: Synthetic oligonucleotide
  Sense strand starting at position 933 of SEQ ID NO: 317904
ccaggauucuaauccagcu

SEQ ID NO: 521450 - RNA, 19 nt, Artificial Sequence
  Description of Artificial Sequence: Synthetic oligonucleotide
  Antisense strand to SEQ ID NO: 521449
agcuggauuagaauccugg

SEQ ID NO: 521451 - RNA, 19 nt, Artificial Sequence
  Description of Artificial Sequence: Synthetic oligonucleotide
  Sense strand starting at position 1134 of SEQ ID NO: 317904
cauuguggugacugcagaa

SEQ ID NO: 521452 - RNA, 19 nt, Artificial Sequence
  Description of Artificial Sequence: Synthetic oligonucleotide
  Antisense strand to SEQ ID NO: 521451
uucugcagucaccacaaug

SEQ ID NO: 521453 - RNA, 19 nt, Artificial Sequence
  Description of Artificial Sequence: Synthetic oligonucleotide
  Sense strand starting at position 1300 of SEQ ID NO: 317904
ggagccucaggcuauagaa

SEQ ID NO: 521454 - RNA, 19 nt, Artificial Sequence
  Description of Artificial Sequence: Synthetic oligonucleotide
  Antisense strand to SEQ ID NO: 521453
uucuauagccugaggcucc

SEQ ID NO: 521455 - RNA, 19 nt, Artificial Sequence
  Description of Artificial Sequence: Synthetic oligonucleotide
  Sense strand starting at position 1488 of SEQ ID NO: 317904
gaggaaauguuuccuagug

SEQ ID NO: 521456 - RNA, 19 nt, Artificial Sequence
  Description of Artificial Sequence: Synthetic oligonucleotide
  Antisense strand to SEQ ID NO: 521455
cacuaggaaacauuuccuc

SEQ ID NO: 521457 - RNA, 19 nt, Artificial Sequence
  Description of Artificial Sequence: Synthetic oligonucleotide
  Sense strand starting at position 1489 of SEQ ID NO: 317904
aggaaauguuuccuagugu

SEQ ID NO: 521458 - RNA, 19 nt, Artificial Sequence
  Description of Artificial Sequence: Synthetic oligonucleotide
  Antisense strand to SEQ ID NO: 521457
acacuaggaaacauuuccu

SEQ ID NO: 521459 - RNA, 19 nt, Artificial Sequence
  Description of Artificial Sequence: Synthetic oligonucleotide
  Sense strand starting at position 2154 of SEQ ID NO: 317904
uuuggaugcccucggacaa

SEQ ID NO: 521460 - RNA, 19 nt, Artificial Sequence
  Description of Artificial Sequence: Synthetic oligonucleotide
  Antisense strand to SEQ ID NO: 521459
uuguccgagggcauccaaa

SEQ ID NO: 521461 - RNA, 19 nt, Artificial Sequence
  Description of Artificial Sequence: Synthetic oligonucleotide
  Sense strand starting at position 2155 of SEQ ID NO: 317904
uuggaugcccucggacaaa

SEQ ID NO: 521462 - RNA, 19 nt, Artificial Sequence
  Description of Artificial Sequence: Synthetic oligonucleotide
  Antisense strand to SEQ ID NO: 521461
uuuguccgagggcauccaa

SEQ ID NO: 521463 - RNA, 19 nt, Artificial Sequence
  Description of Artificial Sequence: Synthetic oligonucleotide
  Sense strand starting at position 2167 of SEQ ID NO: 317904
ggacaaauucucugcuucu

SEQ ID NO: 521464 - RNA, 19 nt, Artificial Sequence
  Description of Artificial Sequence: Synthetic oligonucleotide
  Antisense strand to SEQ ID NO: 521463
agaagcagagaauuugucc

SEQ ID NO: 521465 - RNA, 19 nt, Artificial Sequence
  Description of Artificial Sequence: Synthetic oligonucleotide
  Sense strand starting at position 2220 of SEQ ID NO: 317904
acugaacugugauugaguu

SEQ ID NO: 521466 - RNA, 19 nt, Artificial Sequence
  Description of Artificial Sequence: Synthetic oligonucleotide
  Antisense strand to SEQ ID NO: 521465
aacucaaucacaguucagu

SEQ ID NO: 521467 - RNA, 19 nt, Artificial Sequence
  Description of Artificial Sequence: Synthetic oligonucleotide
  Sense strand starting at position 2369 of SEQ ID NO: 317904
ugccgugucucucugggaa

SEQ ID NO: 521468 - RNA, 19 nt, Artificial Sequence
  Description of Artificial Sequence: Synthetic oligonucleotide
  Antisense strand to SEQ ID NO: 521467
uucccagagagacacggca

SEQ ID NO: 521469 - RNA, 19 nt, Artificial Sequence
  Description of Artificial Sequence: Synthetic oligonucleotide
  Sense strand starting at position 2433 of SEQ ID NO: 317904
ugcauaucugcacaaagag

SEQ ID NO: 521470 - RNA, 19 nt, Artificial Sequence
  Description of Artificial Sequence: Synthetic oligonucleotide
  Antisense strand to SEQ ID NO: 521469
cucuuugugcagauaugca

SEQ ID NO: 521471 - RNA, 19 nt, Artificial Sequence
  Description of Artificial Sequence: Synthetic oligonucleotide
  Sense strand starting at position 2670 of SEQ ID NO: 317904
ugcacugugacuuggccaa

SEQ ID NO: 521472 - RNA, 19 nt, Artificial Sequence
  Description of Artificial Sequence: Synthetic oligonucleotide
  Antisense strand to SEQ ID NO: 521471
uuggccaagucacagugca

SEQ ID NO: 521473 - RNA, 19 nt, Artificial Sequence
  Description of Artificial Sequence: Synthetic oligonucleotide
  Sense strand starting at position 2758 of SEQ ID NO: 317904
ccgugacugcuggauuaga

SEQ ID NO: 521474 - RNA, 19 nt, Artificial Sequence
  Description of Artificial Sequence: Synthetic oligonucleotide
  Antisense strand to SEQ ID NO: 521473
ucuaauccagcagucacgg

SEQ ID NO: 521475 - RNA, 19 nt, Artificial Sequence
  Description of Artificial Sequence: Synthetic oligonucleotide
  Sense strand starting at position 2783 of SEQ ID NO: 317904
gguaguugaggucacacaa

SEQ ID NO: 521476 - RNA, 19 nt, Artificial Sequence
  Description of Artificial Sequence: Synthetic oligonucleotide
  Antisense strand to SEQ ID NO: 521475
uugugugaccucaacuacc

SEQ ID NO: 521477 - RNA, 19 nt, Artificial Sequence
  Description of Artificial Sequence: Synthetic oligonucleotide
  Sense strand starting at position 2814 of SEQ ID NO: 317904
ggaaacucacucugaacuu

SEQ ID NO: 521478 - RNA, 19 nt, Artificial Sequence
  Description of Artificial Sequence: Synthetic oligonucleotide
  Antisense strand to SEQ ID NO: 521477
aaguucagagugaguuucc

SEQ ID NO: 521479 - RNA, 19 nt, Artificial Sequence
  Description of Artificial Sequence: Synthetic oligonucleotide
  Sense strand starting at position 2979 of SEQ ID NO: 317904
cugguuccuccgggaggau

SEQ ID NO: 521480 - RNA, 19 nt, Artificial Sequence
  Description of Artificial Sequence: Synthetic oligonucleotide
  Antisense strand to SEQ ID NO: 521479
auccucccggaggaaccag

SEQ ID NO: 521481 - RNA, 19 nt, Artificial Sequence
  Description of Artificial Sequence: Synthetic oligonucleotide
  Sense strand starting at position 2980 of SEQ ID NO: 317904
ugguuccuccgggaggauu

SEQ ID NO: 521482 - RNA, 19 nt, Artificial Sequence
  Description of Artificial Sequence: Synthetic oligonucleotide
  Antisense strand to SEQ ID NO: 521481
aauccucccggaggaacca

SEQ ID NO: 521483 - RNA, 19 nt, Artificial Sequence
  Description of Artificial Sequence: Synthetic oligonucleotide
  Sense strand starting at position 3133 of SEQ ID NO: 317904
cagugucaguggucugaca

SEQ ID NO: 521484 - RNA, 19 nt, Artificial Sequence
  Description of Artificial Sequence: Synthetic oligonucleotide
  Antisense strand to SEQ ID NO: 521483
ugucagaccacugacacug

SEQ ID NO: 521485 - RNA, 19 nt, Artificial Sequence
  Description of Artificial Sequence: Synthetic oligonucleotide
  Sense strand starting at position 3135 of SEQ ID NO: 317904
gugucaguggucugacacu

SEQ ID NO: 521486 - RNA, 19 nt, Artificial Sequence
  Description of Artificial Sequence: Synthetic oligonucleotide
  Antisense strand to SEQ ID NO: 521485
agugucagaccacugacac

SEQ ID NO: 521487 - RNA, 19 nt, Artificial Sequence
  Description of Artificial Sequence: Synthetic oligonucleotide
  Sense strand starting at position 3284 of SEQ ID NO: 317904
auggaucuuugaccucgaa

SEQ ID NO: 521488 - RNA, 19 nt, Artificial Sequence
  Description of Artificial Sequence: Synthetic oligonucleotide
  Antisense strand to SEQ ID NO: 521487
uucgaggucaaagauccau

SEQ ID NO: 521489 - RNA, 19 nt, Artificial Sequence
  Description of Artificial Sequence: Synthetic oligonucleotide
  Sense strand starting at position 3382 of SEQ ID NO: 317904
cugaaucaagugugcauuu

SEQ ID NO: 521490 - RNA, 19 nt, Artificial Sequence
  Description of Artificial Sequence: Synthetic oligonucleotide
  Antisense strand to SEQ ID NO: 521489
aaaugcacacuugauucag

SEQ ID NO: 521491 - RNA, 19 nt, Artificial Sequence
  Description of Artificial Sequence: Synthetic oligonucleotide
  Sense strand starting at position 3391 of SEQ ID NO: 317904
gugugcauuugggaugaua

SEQ ID NO: 521492 - RNA, 19 nt, Artificial Sequence
  Description of Artificial Sequence: Synthetic oligonucleotide
  Antisense strand to SEQ ID NO: 521491
uaucaucccaaaugcacac

SEQ ID NO: 521493 - RNA, 19 nt, Artificial Sequence
  Description of Artificial Sequence: Synthetic oligonucleotide
  Sense strand starting at position 3399 of SEQ ID NO: 317904
uugggaugauauccaaggu

SEQ ID NO: 521494 - RNA, 19 nt, Artificial Sequence
  Description of Artificial Sequence: Synthetic oligonucleotide
  Antisense strand to SEQ ID NO: 521493
accuuggauaucaucccaa

SEQ ID NO: 521495 - RNA, 19 nt, Artificial Sequence
  Description of Artificial Sequence: Synthetic oligonucleotide
  Sense strand starting at position 3444 of SEQ ID NO: 317904
gcaagacaggguugacuau

SEQ ID NO: 521496 - RNA, 19 nt, Artificial Sequence
  Description of Artificial Sequence: Synthetic oligonucleotide
  Antisense strand to SEQ ID NO: 521495
auagucaacccugucuugc

SEQ ID NO: 521497 - RNA, 19 nt, Artificial Sequence
  Description of Artificial Sequence: Synthetic oligonucleotide
  Sense strand starting at position 3453 of SEQ ID NO: 317904
gguugacuaucauugcucu

SEQ ID NO: 521498 - RNA, 19 nt, Artificial Sequence
  Description of Artificial Sequence: Synthetic oligonucleotide
  Antisense strand to SEQ ID NO: 521497
agagcaaugauagucaacc

SEQ ID NO: 521499 - RNA, 19 nt, Artificial Sequence
  Description of Artificial Sequence: Synthetic oligonucleotide
  Sense strand starting at position 3454 of SEQ ID NO: 317904
guugacuaucauugcucuu

SEQ ID NO: 521500 - RNA, 19 nt, Artificial Sequence
  Description of Artificial Sequence: Synthetic oligonucleotide
  Antisense strand to SEQ ID NO: 521499
aagagcaaugauagucaac

SEQ ID NO: 521501 - RNA, 19 nt, Artificial Sequence
  Description of Artificial Sequence: Synthetic oligonucleotide
  Sense strand starting at position 3514 of SEQ ID NO: 317904
gggugcucacagugaaagu

SEQ ID NO: 521502 - RNA, 19 nt, Artificial Sequence
  Description of Artificial Sequence: Synthetic oligonucleotide
  Antisense strand to SEQ ID NO: 521501
acuuucacugugagcaccc

SEQ ID NO: 521503 - RNA, 19 nt, Artificial Sequence
  Description of Artificial Sequence: Synthetic oligonucleotide
  Sense strand starting at position 3515 of SEQ ID NO: 317904
ggugcucacagugaaaguu

SEQ ID NO: 521504 - RNA, 19 nt, Artificial Sequence
  Description of Artificial Sequence: Synthetic oligonucleotide
  Antisense strand to SEQ ID NO: 521503
aacuuucacugugagcacc

SEQ ID NO: 521505 - RNA, 19 nt, Artificial Sequence
  Description of Artificial Sequence: Synthetic oligonucleotide
  Sense strand starting at position 137 of SEQ ID NO: 317905
agaauacuacagugcuaaa

SEQ ID NO: 521506 - RNA, 19 nt, Artificial Sequence
  Description of Artificial Sequence: Synthetic oligonucleotide
  Antisense strand to SEQ ID NO: 521505
uuuagcacuguaguauucu

SEQ ID NO: 521507 - RNA, 19 nt, Artificial Sequence
  Description of Artificial Sequence: Synthetic oligonucleotide
  Sense strand starting at position 267 of SEQ ID NO: 317905
gcuauaucauaaguaugau

SEQ ID NO: 521508 - RNA, 19 nt, Artificial Sequence
  Description of Artificial Sequence: Synthetic oligonucleotide
  Antisense strand to SEQ ID NO: 521507
aucauacuuaugauauagc

SEQ ID NO: 521509 - RNA, 19 nt, Artificial Sequence
  Description of Artificial Sequence: Synthetic oligonucleotide
  Sense strand starting at position 273 of SEQ ID NO: 317905
ucauaaguaugauuguguu

SEQ ID NO: 521510 - RNA, 19 nt, Artificial Sequence
  Description of Artificial Sequence: Synthetic oligonucleotide
  Antisense strand to SEQ ID NO: 521509
aacacaaucauacuuauga

SEQ ID NO: 521511 - RNA, 19 nt, Artificial Sequence
  Description of Artificial Sequence: Synthetic oligonucleotide
  Sense strand starting at position 385 of SEQ ID NO: 317905
aagaaacaugcauaugugu

SEQ ID NO: 521512 - RNA, 19 nt, Artificial Sequence
  Description of Artificial Sequence: Synthetic oligonucleotide
  Antisense strand to SEQ ID NO: 521511
acacauaugcauguuucuu

SEQ ID NO: 521513 - RNA, 19 nt, Artificial Sequence
  Description of Artificial Sequence: Synthetic oligonucleotide
  Sense strand starting at position 681 of SEQ ID NO: 317905
uuugaaagcuuccugguau

SEQ ID NO: 521514 - RNA, 19 nt, Artificial Sequence
  Description of Artificial Sequence: Synthetic oligonucleotide
  Antisense strand to SEQ ID NO: 521513
auaccaggaagcuuucaaa

SEQ ID NO: 521515 - RNA, 19 nt, Artificial Sequence
  Description of Artificial Sequence: Synthetic oligonucleotide
  Sense strand starting at position 725 of SEQ ID NO: 317905
gcauguguugcuucuuaau

SEQ ID NO: 521516 - RNA, 19 nt, Artificial Sequence
  Description of Artificial Sequence: Synthetic oligonucleotide
  Antisense strand to SEQ ID NO: 521515
auuaagaagcaacacaugc

SEQ ID NO: 521517 - RNA, 19 nt, Artificial Sequence
  Description of Artificial Sequence: Synthetic oligonucleotide
  Sense strand starting at position 769 of SEQ ID NO: 317905
agauaucuauacguagagu

SEQ ID NO: 521518 - RNA, 19 nt, Artificial Sequence
  Description of Artificial Sequence: Synthetic oligonucleotide
  Antisense strand to SEQ ID NO: 521517
acucuacguauagauaucu

SEQ ID NO: 521519 - RNA, 19 nt, Artificial Sequence
  Description of Artificial Sequence: Synthetic oligonucleotide
  Sense strand starting at position 772 of SEQ ID NO: 317905
uaucuauacguagaguauu

SEQ ID NO: 521520 - RNA, 19 nt, Artificial Sequence
  Description of Artificial Sequence: Synthetic oligonucleotide
  Antisense strand to SEQ ID NO: 521519
aauacucuacguauagaua

SEQ ID NO: 521521 - RNA, 19 nt, Artificial Sequence
  Description of Artificial Sequence: Synthetic oligonucleotide
  Sense strand starting at position 921 of SEQ ID NO: 317905
uuucuuuaaguguacaagu

SEQ ID NO: 521522 - RNA, 19 nt, Artificial Sequence
  Description of Artificial Sequence: Synthetic oligonucleotide
  Antisense strand to SEQ ID NO: 521521
acuuguacacuuaaagaaa

SEQ ID NO: 521523 - RNA, 19 nt, Artificial Sequence
  Description of Artificial Sequence: Synthetic oligonucleotide
  Sense strand starting at position 1082 of SEQ ID NO: 317905
cucuuugaagagugaguua

SEQ ID NO: 521524 - RNA, 19 nt, Artificial Sequence
  Description of Artificial Sequence: Synthetic oligonucleotide
  Antisense strand to SEQ ID NO: 521523
uaacucacucuucaaagag

SEQ ID NO: 521525 - RNA, 19 nt, Artificial Sequence
  Description of Artificial Sequence: Synthetic oligonucleotide
  Sense strand starting at position 1138 of SEQ ID NO: 317905
gugcauuuguguuuaucag

SEQ ID NO: 521526 - RNA, 19 nt, Artificial Sequence
  Description of Artificial Sequence: Synthetic oligonucleotide
  Antisense strand to SEQ ID NO: 521525
cugauaaacacaaaugcac

SEQ ID NO: 521527 - RNA, 19 nt, Artificial Sequence
  Description of Artificial Sequence: Synthetic oligonucleotide
  Sense strand starting at position 1153 of SEQ ID NO: 317905
ucagaaauauuugaucuug

SEQ ID NO: 521528 - RNA, 19 nt, Artificial Sequence
  Description of Artificial Sequence: Synthetic oligonucleotide
  Antisense strand to SEQ ID NO: 521527
caagaucaaauauuucuga

SEQ ID NO: 521529 - RNA, 19 nt, Artificial Sequence
  Description of Artificial Sequence: Synthetic oligonucleotide
  Sense strand starting at position 1158 of SEQ ID NO: 317905
aauauuugaucuugagagu

SEQ ID NO: 521530 - RNA, 19 nt, Artificial Sequence
  Description of Artificial Sequence: Synthetic oligonucleotide
  Antisense strand to SEQ ID NO: 521529
acucucaagaucaaauauu

SEQ ID NO: 521531 - RNA, 19 nt, Artificial Sequence
  Description of Artificial Sequence: Synthetic oligonucleotide
  Sense strand starting at position 1488 of SEQ ID NO: 317905
ugacaauaccuguguggug

SEQ ID NO: 521532 - RNA, 19 nt, Artificial Sequence
  Description of Artificial Sequence: Synthetic oligonucleotide
  Antisense strand to SEQ ID NO: 521531
caccacacagguauuguca

SEQ ID NO: 521533 - RNA, 19 nt, Artificial Sequence
  Description of Artificial Sequence: Synthetic oligonucleotide
  Sense strand starting at position 1497 of SEQ ID NO: 317905
cuguguggugccuugucaa

SEQ ID NO: 521534 - RNA, 19 nt, Artificial Sequence
  Description of Artificial Sequence: Synthetic oligonucleotide
  Antisense strand to SEQ ID NO: 521533
uugacaaggcaccacacag

SEQ ID NO: 521535 - RNA, 19 nt, Artificial Sequence
  Description of Artificial Sequence: Synthetic oligonucleotide
  Sense strand starting at position 1504 of SEQ ID NO: 317905
gugccuugucaagaaucca

SEQ ID NO: 521536 - RNA, 19 nt, Artificial Sequence
  Description of Artificial Sequence: Synthetic oligonucleotide
  Antisense strand to SEQ ID NO: 521535
uggauucuugacaaggcac

SEQ ID NO: 521537 - RNA, 19 nt, Artificial Sequence
  Description of Artificial Sequence: Synthetic oligonucleotide
  Sense strand starting at position 2053 of SEQ ID NO: 317905
gcaugcuuucccgucauca

SEQ ID NO: 521538 - RNA, 19 nt, Artificial Sequence
  Description of Artificial Sequence: Synthetic oligonucleotide
  Antisense strand to SEQ ID NO: 521537
ugaugacgggaaagcaugc

SEQ ID NO: 521539 - RNA, 19 nt, Artificial Sequence
  Description of Artificial Sequence: Synthetic oligonucleotide
  Sense strand starting at position 2057 of SEQ ID NO: 317905
gcuuucccgucaucaauuu

SEQ ID NO: 521540 - RNA, 19 nt, Artificial Sequence
  Description of Artificial Sequence: Synthetic oligonucleotide
  Antisense strand to SEQ ID NO: 521539
aaauugaugacgggaaagc

SEQ ID NO: 521541 - RNA, 19 nt, Artificial Sequence
  Description of Artificial Sequence: Synthetic oligonucleotide
  Sense strand starting at position 2136 of SEQ ID NO: 317905
caggaugaaggcuggauua

SEQ ID NO: 521542 - RNA, 19 nt, Artificial Sequence
  Description of Artificial Sequence: Synthetic oligonucleotide
  Antisense strand to SEQ ID NO: 521541
uaauccagccuucauccug

SEQ ID NO: 521543 - RNA, 19 nt, Artificial Sequence
  Description of Artificial Sequence: Synthetic oligonucleotide
  Sense strand starting at position 2159 of SEQ ID NO: 317905
gcugcugccauccaggaau

SEQ ID NO: 521544 - RNA, 19 nt, Artificial Sequence
  Description of Artificial Sequence: Synthetic oligonucleotide
  Antisense strand to SEQ ID NO: 521543
auuccuggauggcagcagc

SEQ ID NO: 521545 - RNA, 19 nt, Artificial Sequence
  Description of Artificial Sequence: Synthetic oligonucleotide
  Sense strand starting at position 2162 of SEQ ID NO: 317905
gcugccauccaggaauuga

SEQ ID NO: 521546 - RNA, 19 nt, Artificial Sequence
  Description of Artificial Sequence: Synthetic oligonucleotide
  Antisense strand to SEQ ID NO: 521545
ucaauuccuggauggcagc

SEQ ID NO: 521547 - RNA, 19 nt, Artificial Sequence
  Description of Artificial Sequence: Synthetic oligonucleotide
  Sense strand starting at position 2267 of SEQ ID NO: 317905
caaggacgucugugaagga

SEQ ID NO: 521548 - RNA, 19 nt, Artificial Sequence
  Description of Artificial Sequence: Synthetic oligonucleotide
  Antisense strand to SEQ ID NO: 521547
uccuucacagacguccuug

SEQ ID NO: 521549 - RNA, 19 nt, Artificial Sequence
  Description of Artificial Sequence: Synthetic oligonucleotide
  Sense strand starting at position 2274 of SEQ ID NO: 317905
gucugugaaggagggauaa

SEQ ID NO: 521550 - RNA, 19 nt, Artificial Sequence
  Description of Artificial Sequence: Synthetic oligonucleotide
  Antisense strand to SEQ ID NO: 521549
uuaucccuccuucacagac

SEQ ID NO: 521551 - RNA, 19 nt, Artificial Sequence
  Description of Artificial Sequence: Synthetic oligonucleotide
  Sense strand starting at position 2338 of SEQ ID NO: 317905
ggcauaucacuugaggugu

SEQ ID NO: 521552 - RNA, 19 nt, Artificial Sequence
  Description of Artificial Sequence: Synthetic oligonucleotide
  Antisense strand to SEQ ID NO: 521551
acaccucaagugauaugcc

SEQ ID NO: 521553 - RNA, 19 nt, Artificial Sequence
  Description of Artificial Sequence: Synthetic oligonucleotide
  Sense strand starting at position 2637 of SEQ ID NO: 317905
gccuauuguggauauagcu

SEQ ID NO: 521554 - RNA, 19 nt, Artificial Sequence
  Description of Artificial Sequence: Synthetic oligonucleotide
  Antisense strand to SEQ ID NO: 521553
agcuauauccacaauaggc

SEQ ID NO: 521555 - RNA, 19 nt, Artificial Sequence
  Description of Artificial Sequence: Synthetic oligonucleotide
  Sense strand starting at position 2654 of SEQ ID NO: 317905
cugugcuuccaguacaaug

SEQ ID NO: 521556 - RNA, 19 nt, Artificial Sequence
  Description of Artificial Sequence: Synthetic oligonucleotide
  Antisense strand to SEQ ID NO: 521555
cauuguacuggaagcacag

SEQ ID NO: 521557 - RNA, 19 nt, Artificial Sequence
  Description of Artificial Sequence: Synthetic oligonucleotide
  Sense strand starting at position 2744 of SEQ ID NO: 317905
cugcuucuggguuacucaa

SEQ ID NO: 521558 - RNA, 19 nt, Artificial Sequence
  Description of Artificial Sequence: Synthetic oligonucleotide
  Antisense strand to SEQ ID NO: 521557
uugaguaacccagaagcag

SEQ ID NO: 521559 - RNA, 19 nt, Artificial Sequence
  Description of Artificial Sequence: Synthetic oligonucleotide
  Sense strand starting at position 3102 of SEQ ID NO: 317905
gggucuuauuaaguaaggu

SEQ ID NO: 521560 - RNA, 19 nt, Artificial Sequence
  Description of Artificial Sequence: Synthetic oligonucleotide
  Antisense strand to SEQ ID NO: 521559
accuuacuuaauaagaccc

SEQ ID NO: 521561 - RNA, 19 nt, Artificial Sequence
  Description of Artificial Sequence: Synthetic oligonucleotide
  Sense strand starting at position 3103 of SEQ ID NO: 317905
ggucuuauuaaguaagguu

SEQ ID NO: 521562 - RNA, 19 nt, Artificial Sequence
  Description of Artificial Sequence: Synthetic oligonucleotide
  Antisense strand to SEQ ID NO: 521561
aaccuuacuuaauaagacc

SEQ ID NO: 521563 - RNA, 19 nt, Artificial Sequence
  Description of Artificial Sequence: Synthetic oligonucleotide
  Sense strand starting at position 3227 of SEQ ID NO: 317905
cccaguaaaguggguaauu

SEQ ID NO: 521564 - RNA, 19 nt, Artificial Sequence
  Description of Artificial Sequence: Synthetic oligonucleotide
  Antisense strand to SEQ ID NO: 521563
aauuacccacuuuacuggg

SEQ ID NO: 521565 - RNA, 19 nt, Artificial Sequence
  Description of Artificial Sequence: Synthetic oligonucleotide
  Sense strand starting at position 3229 of SEQ ID NO: 317905
caguaaaguggguaauucu

SEQ ID NO: 521566 - RNA, 19 nt, Artificial Sequence
  Description of Artificial Sequence: Synthetic oligonucleotide
  Antisense strand to SEQ ID NO: 521565
agaauuacccacuuuacug

SEQ ID NO: 521567 - RNA, 19 nt, Artificial Sequence
  Description of Artificial Sequence: Synthetic oligonucleotide
  Sense strand starting at position 3310 of SEQ ID NO: 317905
uugagaauugaugguguua

SEQ ID NO: 521568 - RNA, 19 nt, Artificial Sequence
  Description of Artificial Sequence: Synthetic oligonucleotide
  Antisense strand to SEQ ID NO: 521567
uaacaccaucaauucucaa

SEQ ID NO: 521569 - RNA, 19 nt, Artificial Sequence
  Description of Artificial Sequence: Synthetic oligonucleotide
  Sense strand starting at position 3384 of SEQ ID NO: 317905
uuggauguaacuugaagau

SEQ ID NO: 521570 - RNA, 19 nt, Artificial Sequence
  Description of Artificial Sequence: Synthetic oligonucleotide
  Antisense strand to SEQ ID NO: 521569
aucuucaaguuacauccaa

SEQ ID NO: 521571 - RNA, 19 nt, Artificial Sequence
  Description of Artificial Sequence: Synthetic oligonucleotide
  Sense strand starting at position 3736 of SEQ ID NO: 317905
gccuaaggucccuauauug

SEQ ID NO: 521572 - RNA, 19 nt, Artificial Sequence
  Description of Artificial Sequence: Synthetic oligonucleotide
  Antisense strand to SEQ ID NO: 521571
caauauagggaccuuaggc

SEQ ID NO: 521573 - RNA, 19 nt, Artificial Sequence
  Description of Artificial Sequence: Synthetic oligonucleotide
  Sense strand starting at position 3897 of SEQ ID NO: 317905
ccacuuucugaggaguagu

SEQ ID NO: 521574 - RNA, 19 nt, Artificial Sequence
  Description of Artificial Sequence: Synthetic oligonucleotide
  Antisense strand to SEQ ID NO: 521573
acuacuccucagaaagugg

SEQ ID NO: 521575 - RNA, 19 nt, Artificial Sequence
  Description of Artificial Sequence: Synthetic oligonucleotide
  Sense strand starting at position 3900 of SEQ ID NO: 317905
cuuucugaggaguaguuaa

SEQ ID NO: 521576 - RNA, 19 nt, Artificial Sequence
  Description of Artificial Sequence: Synthetic oligonucleotide
  Antisense strand to SEQ ID NO: 521575
uuaacuacuccucagaaag

SEQ ID NO: 521577 - RNA, 19 nt, Artificial Sequence
  Description of Artificial Sequence: Synthetic oligonucleotide
  Sense strand starting at position 3907 of SEQ ID NO: 317905
aggaguaguuaacuggaau

SEQ ID NO: 521578 - RNA, 19 nt, Artificial Sequence
  Description of Artificial Sequence: Synthetic oligonucleotide
  Antisense strand to SEQ ID NO: 521577
auuccaguuaacuacuccu

SEQ ID NO: 521579 - RNA, 19 nt, Artificial Sequence
  Description of Artificial Sequence: Synthetic oligonucleotide
  Sense strand starting at position 3908 of SEQ ID NO: 317905
ggaguaguuaacuggaaua

SEQ ID NO: 521580 - RNA, 19 nt, Artificial Sequence
  Description of Artificial Sequence: Synthetic oligonucleotide
  Antisense strand to SEQ ID NO: 521579
uauuccaguuaacuacucc

SEQ ID NO: 521581 - RNA, 19 nt, Artificial Sequence
  Description of Artificial Sequence: Synthetic oligonucleotide
  Sense strand starting at position 3910 of SEQ ID NO: 317905
aguaguuaacuggaauagu

SEQ ID NO: 521582 - RNA, 19 nt, Artificial Sequence
  Description of Artificial Sequence: Synthetic oligonucleotide
  Antisense strand to SEQ ID NO: 521581
acuauuccaguuaacuacu

SEQ ID NO: 521583 - RNA, 19 nt, Artificial Sequence
  Description of Artificial Sequence: Synthetic oligonucleotide
  Sense strand starting at position 3919 of SEQ ID NO: 317905
cuggaauagugguuaauaa

SEQ ID NO: 521584 - RNA, 19 nt, Artificial Sequence
  Description of Artificial Sequence: Synthetic oligonucleotide
  Antisense strand to SEQ ID NO: 521583
uuauuaaccacuauuccag

SEQ ID NO: 521585 - RNA, 19 nt, Artificial Sequence
  Description of Artificial Sequence: Synthetic oligonucleotide
  Sense strand starting at position 89 of SEQ ID NO: 317906
acuaacguuucuccaguaa

SEQ ID NO: 521586 - RNA, 19 nt, Artificial Sequence
  Description of Artificial Sequence: Synthetic oligonucleotide
  Antisense strand to SEQ ID NO: 521585
uuacuggagaaacguuagu

SEQ ID NO: 521587 - RNA, 19 nt, Artificial Sequence
  Description of Artificial Sequence: Synthetic oligonucleotide
  Sense strand starting at position 326 of SEQ ID NO: 317906
ugacaauccugggcuggaa

SEQ ID NO: 521588 - RNA, 19 nt, Artificial Sequence
  Description of Artificial Sequence: Synthetic oligonucleotide
  Antisense strand to SEQ ID NO: 521587
uuccagcccaggauuguca

SEQ ID NO: 521589 - RNA, 19 nt, Artificial Sequence
  Description of Artificial Sequence: Synthetic oligonucleotide
  Sense strand starting at position 354 of SEQ ID NO: 317906
ucaaauucuugugcugaaa

SEQ ID NO: 521590 - RNA, 19 nt, Artificial Sequence
  Description of Artificial Sequence: Synthetic oligonucleotide
  Antisense strand to SEQ ID NO: 521589
uuucagcacaagaauuuga

SEQ ID NO: 521591 - RNA, 19 nt, Artificial Sequence
  Description of Artificial Sequence: Synthetic oligonucleotide
  Sense strand starting at position 411 of SEQ ID NO: 317906
uucuaagaaugcucagaca

SEQ ID NO: 521592 - RNA, 19 nt, Artificial Sequence
  Description of Artificial Sequence: Synthetic oligonucleotide
  Antisense strand to SEQ ID NO: 521591
ugucugagcauucuuagaa

SEQ ID NO: 521593 - RNA, 19 nt, Artificial Sequence
  Description of Artificial Sequence: Synthetic oligonucleotide
  Sense strand starting at position 474 of SEQ ID NO: 317906
gggcacuuccuguaaguaa

SEQ ID NO: 521594 - RNA, 19 nt, Artificial Sequence
  Description of Artificial Sequence: Synthetic oligonucleotide
  Antisense strand to SEQ ID NO: 521593
uuacuuacaggaagugccc

SEQ ID NO: 521595 - RNA, 19 nt, Artificial Sequence
  Description of Artificial Sequence: Synthetic oligonucleotide
  Sense strand starting at position 494 of SEQ ID NO: 317906
aaguuucuaugacugggaa

SEQ ID NO: 521596 - RNA, 19 nt, Artificial Sequence
  Description of Artificial Sequence: Synthetic oligonucleotide
  Antisense strand to SEQ ID NO: 521595
uucccagucauagaaacuu

SEQ ID NO: 521597 - RNA, 19 nt, Artificial Sequence
  Description of Artificial Sequence: Synthetic oligonucleotide
  Sense strand starting at position 495 of SEQ ID NO: 317906
aguuucuaugacugggaaa

SEQ ID NO: 521598 - RNA, 19 nt, Artificial Sequence
  Description of Artificial Sequence: Synthetic oligonucleotide
  Antisense strand to SEQ ID NO: 521597
uuucccagucauagaaacu

SEQ ID NO: 521599 - RNA, 19 nt, Artificial Sequence
  Description of Artificial Sequence: Synthetic oligonucleotide
  Sense strand starting at position 496 of SEQ ID NO: 317906
guuucuaugacugggaaag

SEQ ID NO: 521600 - RNA, 19 nt, Artificial Sequence
  Description of Artificial Sequence: Synthetic oligonucleotide
  Antisense strand to SEQ ID NO: 521599
cuuucccagucauagaaac

SEQ ID NO: 521601 - RNA, 19 nt, Artificial Sequence
  Description of Artificial Sequence: Synthetic oligonucleotide
  Sense strand starting at position 782 of SEQ ID NO: 317906
gggacucuguaguuaugau

SEQ ID NO: 521602 - RNA, 19 nt, Artificial Sequence
  Description of Artificial Sequence: Synthetic oligonucleotide
  Antisense strand to SEQ ID NO: 521601
aucauaacuacagaguccc

SEQ ID NO: 521603 - RNA, 19 nt, Artificial Sequence
  Description of Artificial Sequence: Synthetic oligonucleotide
  Sense strand starting at position 783 of SEQ ID NO: 317906
ggacucuguaguuaugauu

SEQ ID NO: 521604 - RNA, 19 nt, Artificial Sequence
  Description of Artificial Sequence: Synthetic oligonucleotide
  Antisense strand to SEQ ID NO: 521603
aaucauaacuacagagucc

SEQ ID NO: 521605 - RNA, 19 nt, Artificial Sequence
  Description of Artificial Sequence: Synthetic oligonucleotide
  Sense strand starting at position 1113 of SEQ ID NO: 317906
ugaggccuggcugagaaau

SEQ ID NO: 521606 - RNA, 19 nt, Artificial Sequence
  Description of Artificial Sequence: Synthetic oligonucleotide
  Antisense strand to SEQ ID NO: 521605
auuucucagccaggccuca

SEQ ID NO: 521607 - RNA, 19 nt, Artificial Sequence
  Description of Artificial Sequence: Synthetic oligonucleotide
  Sense strand starting at position 1561 of SEQ ID NO: 317906
gcuucuugaucuuccagau

SEQ ID NO: 521608 - RNA, 19 nt, Artificial Sequence
  Description of Artificial Sequence: Synthetic oligonucleotide
  Antisense strand to SEQ ID NO: 521607
aucuggaagaucaagaagc

SEQ ID NO: 521609 - RNA, 19 nt, Artificial Sequence
  Description of Artificial Sequence: Synthetic oligonucleotide
  Sense strand starting at position 2180 of SEQ ID NO: 317906
uggcucucgcgaguuuacu

SEQ ID NO: 521610 - RNA, 19 nt, Artificial Sequence
  Description of Artificial Sequence: Synthetic oligonucleotide
  Antisense strand to SEQ ID NO: 521609
aguaaacucgcgagagcca

SEQ ID NO: 521611 - RNA, 19 nt, Artificial Sequence
  Description of Artificial Sequence: Synthetic oligonucleotide
  Sense strand starting at position 2182 of SEQ ID NO: 317906
gcucucgcgaguuuacuga

SEQ ID NO: 521612 - RNA, 19 nt, Artificial Sequence
  Description of Artificial Sequence: Synthetic oligonucleotide
  Antisense strand to SEQ ID NO: 521611
ucaguaaacucgcgagagc

SEQ ID NO: 521613 - RNA, 19 nt, Artificial Sequence
  Description of Artificial Sequence: Synthetic oligonucleotide
  Sense strand starting at position 2267 of SEQ ID NO: 317906
guccauucuccuugaauag

SEQ ID NO: 521614 - RNA, 19 nt, Artificial Sequence
  Description of Artificial Sequence: Synthetic oligonucleotide
  Antisense strand to SEQ ID NO: 521613
cuauucaaggagaauggac

SEQ ID NO: 521615 - RNA, 19 nt, Artificial Sequence
  Description of Artificial Sequence: Synthetic oligonucleotide
  Sense strand starting at position 2276 of SEQ ID NO: 317906
ccuugaauaggguggacau

SEQ ID NO: 521616 - RNA, 19 nt, Artificial Sequence
  Description of Artificial Sequence: Synthetic oligonucleotide
  Antisense strand to SEQ ID NO: 521615
auguccacccuauucaagg

SEQ ID NO: 521617 - RNA, 19 nt, Artificial Sequence
  Description of Artificial Sequence: Synthetic oligonucleotide
  Sense strand starting at position 2341 of SEQ ID NO: 317906
uuugaacggugcuugagaa

SEQ ID NO: 521618 - RNA, 19 nt, Artificial Sequence
  Description of Artificial Sequence: Synthetic oligonucleotide
  Antisense strand to SEQ ID NO: 521617
uucucaagcaccguucaaa

SEQ ID NO: 521619 - RNA, 19 nt, Artificial Sequence
  Description of Artificial Sequence: Synthetic oligonucleotide
  Sense strand starting at position 2622 of SEQ ID NO: 317906
ugagguaucuggucccaug

SEQ ID NO: 521620 - RNA, 19 nt, Artificial Sequence
  Description of Artificial Sequence: Synthetic oligonucleotide
  Antisense strand to SEQ ID NO: 521619
caugggaccagauaccuca

SEQ ID NO: 521621 - RNA, 19 nt, Artificial Sequence
  Description of Artificial Sequence: Synthetic oligonucleotide
  Sense strand starting at position 2650 of SEQ ID NO: 317906
gccugagccguugagaaug

SEQ ID NO: 521622 - RNA, 19 nt, Artificial Sequence
  Description of Artificial Sequence: Synthetic oligonucleotide
  Antisense strand to SEQ ID NO: 521621
cauucucaacggcucaggc

SEQ ID NO: 521623 - RNA, 19 nt, Artificial Sequence
  Description of Artificial Sequence: Synthetic oligonucleotide
  Sense strand starting at position 2699 of SEQ ID NO: 317906
uccacauacgguuagaacu

SEQ ID NO: 521624 - RNA, 19 nt, Artificial Sequence
  Description of Artificial Sequence: Synthetic oligonucleotide
  Antisense strand to SEQ ID NO: 521623
aguucuaaccguaugugga

SEQ ID NO: 521625 - RNA, 19 nt, Artificial Sequence
  Description of Artificial Sequence: Synthetic oligonucleotide
  Sense strand starting at position 2707 of SEQ ID NO: 317906
cgguuagaacuuuaucuuu

SEQ ID NO: 521626 - RNA, 19 nt, Artificial Sequence
  Description of Artificial Sequence: Synthetic oligonucleotide
  Antisense strand to SEQ ID NO: 521625
aaagauaaaguucuaaccg

SEQ ID NO: 521627 - RNA, 19 nt, Artificial Sequence
  Description of Artificial Sequence: Synthetic oligonucleotide
  Sense strand starting at position 2949 of SEQ ID NO: 317906
gggugcucugagaguguau

SEQ ID NO: 521628 - RNA, 19 nt, Artificial Sequence
  Description of Artificial Sequence: Synthetic oligonucleotide
  Antisense strand to SEQ ID NO: 521627
auacacucucagagcaccc

SEQ ID NO: 521629 - RNA, 19 nt, Artificial Sequence
  Description of Artificial Sequence: Synthetic oligonucleotide
  Sense strand starting at position 3003 of SEQ ID NO: 317906
ugauuaagaguuugucagg

SEQ ID NO: 521630 - RNA, 19 nt, Artificial Sequence
  Description of Artificial Sequence: Synthetic oligonucleotide
  Antisense strand to SEQ ID NO: 521629
ccugacaaacucuuaauca

SEQ ID NO: 521631 - RNA, 19 nt, Artificial Sequence
  Description of Artificial Sequence: Synthetic oligonucleotide
  Sense strand starting at position 3004 of SEQ ID NO: 317906
gauuaagaguuugucagga

SEQ ID NO: 521632 - RNA, 19 nt, Artificial Sequence
  Description of Artificial Sequence: Synthetic oligonucleotide
  Antisense strand to SEQ ID NO: 521631
uccugacaaacucuuaauc

SEQ ID NO: 521633 - RNA, 19 nt, Artificial Sequence
  Description of Artificial Sequence: Synthetic oligonucleotide
  Sense strand starting at position 3084 of SEQ ID NO: 317906
gggagagugguuugaggga

SEQ ID NO: 521634 - RNA, 19 nt, Artificial Sequence
  Description of Artificial Sequence: Synthetic oligonucleotide
  Antisense strand to SEQ ID NO: 521633
ucccucaaaccacucuccc

SEQ ID NO: 521635 - RNA, 19 nt, Artificial Sequence
  Description of Artificial Sequence: Synthetic oligonucleotide
  Sense strand starting at position 3144 of SEQ ID NO: 317906
ucagaaguuugguuucuuu

SEQ ID NO: 521636 - RNA, 19 nt, Artificial Sequence
  Description of Artificial Sequence: Synthetic oligonucleotide
  Antisense strand to SEQ ID NO: 521635
aaagaaaccaaacuucuga

SEQ ID NO: 521637 - RNA, 19 nt, Artificial Sequence
  Description of Artificial Sequence: Synthetic oligonucleotide
  Sense strand starting at position 3278 of SEQ ID NO: 317906
uuacauuaggguggugaca

SEQ ID NO: 521638 - RNA, 19 nt, Artificial Sequence
  Description of Artificial Sequence: Synthetic oligonucleotide
  Antisense strand to SEQ ID NO: 521637
ugucaccacccuaauguaa

SEQ ID NO: 521639 - RNA, 19 nt, Artificial Sequence
  Description of Artificial Sequence: Synthetic oligonucleotide
  Sense strand starting at position 3298 of SEQ ID NO: 317906
ugcagauagaagugaauga

SEQ ID NO: 521640 - RNA, 19 nt, Artificial Sequence
  Description of Artificial Sequence: Synthetic oligonucleotide
  Antisense strand to SEQ ID NO: 521639
ucauucacuucuaucugca

SEQ ID NO: 521641 - RNA, 19 nt, Artificial Sequence
  Description of Artificial Sequence: Synthetic oligonucleotide
  Sense strand starting at position 3512 of SEQ ID NO: 317906
aacccuugagccgaggaau

SEQ ID NO: 521642 - RNA, 19 nt, Artificial Sequence
  Description of Artificial Sequence: Synthetic oligonucleotide
  Antisense strand to SEQ ID NO: 521641
auuccucggcucaaggguu

SEQ ID NO: 521643 - RNA, 19 nt, Artificial Sequence
  Description of Artificial Sequence: Synthetic oligonucleotide
  Sense strand starting at position 3652 of SEQ ID NO: 317906
caagaaugguucccagagu

SEQ ID NO: 521644 - RNA, 19 nt, Artificial Sequence
  Description of Artificial Sequence: Synthetic oligonucleotide
  Antisense strand to SEQ ID NO: 521643
acucugggaaccauucuug

SEQ ID NO: 521645 - RNA, 19 nt, Artificial Sequence
  Description of Artificial Sequence: Synthetic oligonucleotide
  Sense strand starting at position 3738 of SEQ ID NO: 317906
ucaucuugggccuguuaag

SEQ ID NO: 521646 - RNA, 19 nt, Artificial Sequence
  Description of Artificial Sequence: Synthetic oligonucleotide
  Antisense strand to SEQ ID NO: 521645
cuuaacaggcccaagauga

SEQ ID NO: 521647 - RNA, 19 nt, Artificial Sequence
  Description of Artificial Sequence: Synthetic oligonucleotide
  Sense strand starting at position 3753 of SEQ ID NO: 317906
uaaguuugagauugcuuau

SEQ ID NO: 521648 - RNA, 19 nt, Artificial Sequence
  Description of Artificial Sequence: Synthetic oligonucleotide
  Antisense strand to SEQ ID NO: 521647
auaagcaaucucaaacuua

SEQ ID NO: 521649 - RNA, 19 nt, Artificial Sequence
  Description of Artificial Sequence: Synthetic oligonucleotide
  Sense strand starting at position 3756 of SEQ ID NO: 317906
guuugagauugcuuaugag

SEQ ID NO: 521650 - RNA, 19 nt, Artificial Sequence
  Description of Artificial Sequence: Synthetic oligonucleotide
  Antisense strand to SEQ ID NO: 521649
cucauaagcaaucucaaac

SEQ ID NO: 521651 - RNA, 19 nt, Artificial Sequence
  Description of Artificial Sequence: Synthetic oligonucleotide
  Sense strand starting at position 3766 of SEQ ID NO: 317906
gcuuaugagacauguaagu

SEQ ID NO: 521652 - RNA, 19 nt, Artificial Sequence
  Description of Artificial Sequence: Synthetic oligonucleotide
  Antisense strand to SEQ ID NO: 521651
acuuacaugucucauaagc

SEQ ID NO: 521653 - RNA, 19 nt, Artificial Sequence
  Description of Artificial Sequence: Synthetic oligonucleotide
  Sense strand starting at position 3791 of SEQ ID NO: 317906
guccgucaugcgcuuucau

SEQ ID NO: 521654 - RNA, 19 nt, Artificial Sequence
  Description of Artificial Sequence: Synthetic oligonucleotide
  Antisense strand to SEQ ID NO: 521653
augaaagcgcaugacggac

SEQ ID NO: 521655 - RNA, 19 nt, Artificial Sequence
  Description of Artificial Sequence: Synthetic oligonucleotide
  Sense strand starting at position 3840 of SEQ ID NO: 317906
guuauaaacuguguccaca

SEQ ID NO: 521656 - RNA, 19 nt, Artificial Sequence
  Description of Artificial Sequence: Synthetic oligonucleotide
  Antisense strand to SEQ ID NO: 521655
uguggacacaguuuauaac

SEQ ID NO: 521657 - RNA, 19 nt, Artificial Sequence
  Description of Artificial Sequence: Synthetic oligonucleotide
  Sense strand starting at position 3850 of SEQ ID NO: 317906
guguccacacuuugaagau

SEQ ID NO: 521658 - RNA, 19 nt, Artificial Sequence
  Description of Artificial Sequence: Synthetic oligonucleotide
  Antisense strand to SEQ ID NO: 521657
aucuucaaaguguggacac

SEQ ID NO: 521659 - RNA, 19 nt, Artificial Sequence
  Description of Artificial Sequence: Synthetic oligonucleotide
  Sense strand starting at position 3921 of SEQ ID NO: 317906
aagggaucugcucagaguc

SEQ ID NO: 521660 - RNA, 19 nt, Artificial Sequence
  Description of Artificial Sequence: Synthetic oligonucleotide
  Antisense strand to SEQ ID NO: 521659
gacucugagcagaucccuu

SEQ ID NO: 521661 - RNA, 19 nt, Artificial Sequence
  Description of Artificial Sequence: Synthetic oligonucleotide
  Sense strand starting at position 3971 of SEQ ID NO: 317906
uuuggaguccaguguauua

SEQ ID NO: 521662 - RNA, 19 nt, Artificial Sequence
  Description of Artificial Sequence: Synthetic oligonucleotide
  Antisense strand to SEQ ID NO: 521661
uaauacacuggacuccaaa

SEQ ID NO: 521663 - RNA, 19 nt, Artificial Sequence
  Description of Artificial Sequence: Synthetic oligonucleotide
  Sense strand starting at position 3973 of SEQ ID NO: 317906
uggaguccaguguauuaua

SEQ ID NO: 521664 - RNA, 19 nt, Artificial Sequence
  Description of Artificial Sequence: Synthetic oligonucleotide
  Antisense strand to SEQ ID NO: 521663
uauaauacacuggacucca

SEQ ID NO: 521665 - RNA, 19 nt, Artificial Sequence
  Description of Artificial Sequence: Synthetic oligonucleotide
  Sense strand starting at position 30 of SEQ ID NO: 317907
ucuacacacguguaacaua

SEQ ID NO: 521666 - RNA, 19 nt, Artificial Sequence
  Description of Artificial Sequence: Synthetic oligonucleotide
  Antisense strand to SEQ ID NO: 521665
uauguuacacguguguaga

SEQ ID NO: 521667 - RNA, 19 nt, Artificial Sequence
  Description of Artificial Sequence: Synthetic oligonucleotide
  Sense strand starting at position 57 of SEQ ID NO: 317907
ucuguuauagcucagacua

SEQ ID NO: 521668 - RNA, 19 nt, Artificial Sequence
  Description of Artificial Sequence: Synthetic oligonucleotide
  Antisense strand to SEQ ID NO: 521667
uagucugagcuauaacaga

SEQ ID NO: 521669 - RNA, 19 nt, Artificial Sequence
  Description of Artificial Sequence: Synthetic oligonucleotide
  Sense strand starting at position 127 of SEQ ID NO: 317907
auagcacauugguuuaagu

SEQ ID NO: 521670 - RNA, 19 nt, Artificial Sequence
  Description of Artificial Sequence: Synthetic oligonucleotide
  Antisense strand to SEQ ID NO: 521669
acuuaaaccaaugugcuau

SEQ ID NO: 521671 - RNA, 19 nt, Artificial Sequence
  Description of Artificial Sequence: Synthetic oligonucleotide
  Sense strand starting at position 143 of SEQ ID NO: 317907
aguucugaacucugcuaca

SEQ ID NO: 521672 - RNA, 19 nt, Artificial Sequence
  Description of Artificial Sequence: Synthetic oligonucleotide
  Antisense strand to SEQ ID NO: 521671
uguagcagaguucagaacu

SEQ ID NO: 521673 - RNA, 19 nt, Artificial Sequence
  Description of Artificial Sequence: Synthetic oligonucleotide
  Sense strand starting at position 168 of SEQ ID NO: 317907
cugugacaucuuggacaaa

SEQ ID NO: 521674 - RNA, 19 nt, Artificial Sequence
  Description of Artificial Sequence: Synthetic oligonucleotide
  Antisense strand to SEQ ID NO: 521673
uuuguccaagaugucacag

SEQ ID NO: 521675 - RNA, 19 nt, Artificial Sequence
  Description of Artificial Sequence: Synthetic oligonucleotide
  Sense strand starting at position 202 of SEQ ID NO: 317907
aggugccuugucuaccaaa

SEQ ID NO: 521676 - RNA, 19 nt, Artificial Sequence
  Description of Artificial Sequence: Synthetic oligonucleotide
  Antisense strand to SEQ ID NO: 521675
uuugguagacaaggcaccu

SEQ ID NO: 521677 - RNA, 19 nt, Artificial Sequence
  Description of Artificial Sequence: Synthetic oligonucleotide
  Sense strand starting at position 213 of SEQ ID NO: 317907
cuaccaaaugguggcaaua

SEQ ID NO: 521678 - RNA, 19 nt, Artificial Sequence
  Description of Artificial Sequence: Synthetic oligonucleotide
  Antisense strand to SEQ ID NO: 521677
uauugccaccauuugguag

SEQ ID NO: 521679 - RNA, 19 nt, Artificial Sequence
  Description of Artificial Sequence: Synthetic oligonucleotide
  Sense strand starting at position 263 of SEQ ID NO: 317907
uguagcacagucuauaaua

SEQ ID NO: 521680 - RNA, 19 nt, Artificial Sequence
  Description of Artificial Sequence: Synthetic oligonucleotide
  Antisense strand to SEQ ID NO: 521679
uauuauagacugugcuaca

SEQ ID NO: 521681 - RNA, 19 nt, Artificial Sequence
  Description of Artificial Sequence: Synthetic oligonucleotide
  Sense strand starting at position 376 of SEQ ID NO: 317907
acauuaaauuugggucaua

SEQ ID NO: 521682 - RNA, 19 nt, Artificial Sequence
  Description of Artificial Sequence: Synthetic oligonucleotide
  Antisense strand to SEQ ID NO: 521681
uaugacccaaauuuaaugu

SEQ ID NO: 521683 - RNA, 19 nt, Artificial Sequence
  Description of Artificial Sequence: Synthetic oligonucleotide
  Sense strand starting at position 481 of SEQ ID NO: 317907
ccaugauuccuaugccuag

SEQ ID NO: 521684 - RNA, 19 nt, Artificial Sequence
  Description of Artificial Sequence: Synthetic oligonucleotide
  Antisense strand to SEQ ID NO: 521683
cuaggcauaggaaucaugg

SEQ ID NO: 521685 - RNA, 19 nt, Artificial Sequence
  Description of Artificial Sequence: Synthetic oligonucleotide
  Sense strand starting at position 484 of SEQ ID NO: 317907
ugauuccuaugccuagaau

SEQ ID NO: 521686 - RNA, 19 nt, Artificial Sequence
  Description of Artificial Sequence: Synthetic oligonucleotide
  Antisense strand to SEQ ID NO: 521685
auucuaggcauaggaauca

SEQ ID NO: 521687 - RNA, 19 nt, Artificial Sequence
  Description of Artificial Sequence: Synthetic oligonucleotide
  Sense strand starting at position 498 of SEQ ID NO: 317907
agaauucuacacugcuaag

SEQ ID NO: 521688 - RNA, 19 nt, Artificial Sequence
  Description of Artificial Sequence: Synthetic oligonucleotide
  Antisense strand to SEQ ID NO: 521687
cuuagcaguguagaauucu

SEQ ID NO: 521689 - RNA, 19 nt, Artificial Sequence
  Description of Artificial Sequence: Synthetic oligonucleotide
  Sense strand starting at position 769 of SEQ ID NO: 317907
ucuagagucugacuuuaac

SEQ ID NO: 521690 - RNA, 19 nt, Artificial Sequence
  Description of Artificial Sequence: Synthetic oligonucleotide
  Antisense strand to SEQ ID NO: 521689
guuaaagucagacucuaga

SEQ ID NO: 521691 - RNA, 19 nt, Artificial Sequence
  Description of Artificial Sequence: Synthetic oligonucleotide
  Sense strand starting at position 838 of SEQ ID NO: 317907
ggaaucuucugacucccuu

SEQ ID NO: 521692 - RNA, 19 nt, Artificial Sequence
  Description of Artificial Sequence: Synthetic oligonucleotide
  Antisense strand to SEQ ID NO: 521691
aagggagucagaagauucc

SEQ ID NO: 521693 - RNA, 19 nt, Artificial Sequence
  Description of Artificial Sequence: Synthetic oligonucleotide
  Sense strand starting at position 990 of SEQ ID NO: 317907
gcuuaaucaugucugaaau

SEQ ID NO: 521694 - RNA, 19 nt, Artificial Sequence
  Description of Artificial Sequence: Synthetic oligonucleotide
  Antisense strand to SEQ ID NO: 521693
auuucagacaugauuaagc

SEQ ID NO: 521695 - RNA, 19 nt, Artificial Sequence
  Description of Artificial Sequence: Synthetic oligonucleotide
  Sense strand starting at position 1136 of SEQ ID NO: 317907
guuucuaguggcuagguaa

SEQ ID NO: 521696 - RNA, 19 nt, Artificial Sequence
  Description of Artificial Sequence: Synthetic oligonucleotide
  Antisense strand to SEQ ID NO: 521695
uuaccuagccacuagaaac

SEQ ID NO: 521697 - RNA, 19 nt, Artificial Sequence
  Description of Artificial Sequence: Synthetic oligonucleotide
  Sense strand starting at position 1147 of SEQ ID NO: 317907
cuagguaacauggguagaa

SEQ ID NO: 521698 - RNA, 19 nt, Artificial Sequence
  Description of Artificial Sequence: Synthetic oligonucleotide
  Antisense strand to SEQ ID NO: 521697
uucuacccauguuaccuag

SEQ ID NO: 521699 - RNA, 19 nt, Artificial Sequence
  Description of Artificial Sequence: Synthetic oligonucleotide
  Sense strand starting at position 1259 of SEQ ID NO: 317907
ggcaaauuauagucaugau

SEQ ID NO: 521700 - RNA, 19 nt, Artificial Sequence
  Description of Artificial Sequence: Synthetic oligonucleotide
  Antisense strand to SEQ ID NO: 521699
aucaugacuauaauuugcc

SEQ ID NO: 521701 - RNA, 19 nt, Artificial Sequence
  Description of Artificial Sequence: Synthetic oligonucleotide
  Sense strand starting at position 1505 of SEQ ID NO: 317907
ugggucgugaccuauguua

SEQ ID NO: 521702 - RNA, 19 nt, Artificial Sequence
  Description of Artificial Sequence: Synthetic oligonucleotide
  Antisense strand to SEQ ID NO: 521701
uaacauaggucacgaccca

SEQ ID NO: 521703 - RNA, 19 nt, Artificial Sequence
  Description of Artificial Sequence: Synthetic oligonucleotide
  Sense strand starting at position 1521 of SEQ ID NO: 317907
uuacccuuucuguacagua

SEQ ID NO: 521704 - RNA, 19 nt, Artificial Sequence
  Description of Artificial Sequence: Synthetic oligonucleotide
  Antisense strand to SEQ ID NO: 521703
uacuguacagaaaggguaa

SEQ ID NO: 521705 - RNA, 19 nt, Artificial Sequence
  Description of Artificial Sequence: Synthetic oligonucleotide
  Sense strand starting at position 1531 of SEQ ID NO: 317907
uguacaguauucucacauu

SEQ ID NO: 521706 - RNA, 19 nt, Artificial Sequence
  Description of Artificial Sequence: Synthetic oligonucleotide
  Antisense strand to SEQ ID NO: 521705
aaugugagaauacuguaca

SEQ ID NO: 521707 - RNA, 19 nt, Artificial Sequence
  Description of Artificial Sequence: Synthetic oligonucleotide
  Sense strand starting at position 1550 of SEQ ID NO: 317907
uugggaauaacuggucacu

SEQ ID NO: 521708 - RNA, 19 nt, Artificial Sequence
  Description of Artificial Sequence: Synthetic oligonucleotide
  Antisense strand to SEQ ID NO: 521707
agugaccaguuauucccaa

SEQ ID NO: 521709 - RNA, 19 nt, Artificial Sequence
  Description of Artificial Sequence: Synthetic oligonucleotide
  Sense strand starting at position 1552 of SEQ ID NO: 317907
gggaauaacuggucacucu

SEQ ID NO: 521710 - RNA, 19 nt, Artificial Sequence
  Description of Artificial Sequence: Synthetic oligonucleotide
  Antisense strand to SEQ ID NO: 521709
agagugaccaguuauuccc

SEQ ID NO: 521711 - RNA, 19 nt, Artificial Sequence
  Description of Artificial Sequence: Synthetic oligonucleotide
  Sense strand starting at position 1678 of SEQ ID NO: 317907
acuaacguuucuccaguaa

SEQ ID NO: 521712 - RNA, 19 nt, Artificial Sequence
  Description of Artificial Sequence: Synthetic oligonucleotide
  Antisense strand to SEQ ID NO: 521711
uuacuggagaaacguuagu

SEQ ID NO: 521713 - RNA, 19 nt, Artificial Sequence
  Description of Artificial Sequence: Synthetic oligonucleotide
  Sense strand starting at position 1915 of SEQ ID NO: 317907
ugacaauccugggcuggaa

SEQ ID NO: 521714 - RNA, 19 nt, Artificial Sequence
  Description of Artificial Sequence: Synthetic oligonucleotide
  Antisense strand to SEQ ID NO: 521713
uuccagcccaggauuguca

SEQ ID NO: 521715 - RNA, 19 nt, Artificial Sequence
  Description of Artificial Sequence: Synthetic oligonucleotide
  Sense strand starting at position 1943 of SEQ ID NO: 317907
ucaaauucuugugcugaaa

SEQ ID NO: 521716 - RNA, 19 nt, Artificial Sequence
  Description of Artificial Sequence: Synthetic oligonucleotide
  Antisense strand to SEQ ID NO: 521715
uuucagcacaagaauuuga

SEQ ID NO: 521717 - RNA, 19 nt, Artificial Sequence
  Description of Artificial Sequence: Synthetic oligonucleotide
  Sense strand starting at position 2000 of SEQ ID NO: 317907
uucuaagaaugcucagaca

SEQ ID NO: 521718 - RNA, 19 nt, Artificial Sequence
  Description of Artificial Sequence: Synthetic oligonucleotide
  Antisense strand to SEQ ID NO: 521717
ugucugagcauucuuagaa

SEQ ID NO: 521719 - RNA, 19 nt, Artificial Sequence
  Description of Artificial Sequence: Synthetic oligonucleotide
  Sense strand starting at position 2063 of SEQ ID NO: 317907
gggcacuuccuguaaguaa

SEQ ID NO: 521720 - RNA, 19 nt, Artificial Sequence
  Description of Artificial Sequence: Synthetic oligonucleotide
  Antisense strand to SEQ ID NO: 521719
uuacuuacaggaagugccc

SEQ ID NO: 521721 - RNA, 19 nt, Artificial Sequence
  Description of Artificial Sequence: Synthetic oligonucleotide
  Sense strand starting at position 2083 of SEQ ID NO: 317907
aaguuucuaugacugggaa

SEQ ID NO: 521722 - RNA, 19 nt, Artificial Sequence
  Description of Artificial Sequence: Synthetic oligonucleotide
  Antisense strand to SEQ ID NO: 521721
uucccagucauagaaacuu

SEQ ID NO: 521723 - RNA, 19 nt, Artificial Sequence
  Description of Artificial Sequence: Synthetic oligonucleotide
  Sense strand starting at position 2084 of SEQ ID NO: 317907
aguuucuaugacugggaaa

SEQ ID NO: 521724 - RNA, 19 nt, Artificial Sequence
  Description of Artificial Sequence: Synthetic oligonucleotide
  Antisense strand to SEQ ID NO: 521723
uuucccagucauagaaacu

SEQ ID NO: 521725 - RNA, 19 nt, Artificial Sequence
  Description of Artificial Sequence: Synthetic oligonucleotide
  Sense strand starting at position 2085 of SEQ ID NO: 317907
guuucuaugacugggaaag

SEQ ID NO: 521726 - RNA, 19 nt, Artificial Sequence
  Description of Artificial Sequence: Synthetic oligonucleotide
  Antisense strand to SEQ ID NO: 521725
cuuucccagucauagaaac

SEQ ID NO: 521727 - RNA, 19 nt, Artificial Sequence
  Description of Artificial Sequence: Synthetic oligonucleotide
  Sense strand starting at position 2371 of SEQ ID NO: 317907
gggacucuguaguuaugau

SEQ ID NO: 521728 - RNA, 19 nt, Artificial Sequence
  Description of Artificial Sequence: Synthetic oligonucleotide
  Antisense strand to SEQ ID NO: 521727
aucauaacuacagaguccc

SEQ ID NO: 521729 - RNA, 19 nt, Artificial Sequence
  Description of Artificial Sequence: Synthetic oligonucleotide
  Sense strand starting at position 2372 of SEQ ID NO: 317907
ggacucuguaguuaugauu

SEQ ID NO: 521730 - RNA, 19 nt, Artificial Sequence
  Description of Artificial Sequence: Synthetic oligonucleotide
  Antisense strand to SEQ ID NO: 521729
aaucauaacuacagagucc

SEQ ID NO: 521731 - RNA, 19 nt, Artificial Sequence
  Description of Artificial Sequence: Synthetic oligonucleotide
  Sense strand starting at position 2702 of SEQ ID NO: 317907
ugaggccuggcugagaaau

SEQ ID NO: 521732 - RNA, 19 nt, Artificial Sequence
  Description of Artificial Sequence: Synthetic oligonucleotide
  Antisense strand to SEQ ID NO: 521731
auuucucagccaggccuca

SEQ ID NO: 521733 - RNA, 19 nt, Artificial Sequence
  Description of Artificial Sequence: Synthetic oligonucleotide
  Sense strand starting at position 3150 of SEQ ID NO: 317907
gcuucuugaucuuccagau

SEQ ID NO: 521734 - RNA, 19 nt, Artificial Sequence
  Description of Artificial Sequence: Synthetic oligonucleotide
  Antisense strand to SEQ ID NO: 521733
aucuggaagaucaagaagc

SEQ ID NO: 521735 - RNA, 19 nt, Artificial Sequence
  Description of Artificial Sequence: Synthetic oligonucleotide
  Sense strand starting at position 3769 of SEQ ID NO: 317907
uggcucucgcgaguuuacu

SEQ ID NO: 521736 - RNA, 19 nt, Artificial Sequence
  Description of Artificial Sequence: Synthetic oligonucleotide
  Antisense strand to SEQ ID NO: 521735
aguaaacucgcgagagcca

SEQ ID NO: 521737 - RNA, 19 nt, Artificial Sequence
  Description of Artificial Sequence: Synthetic oligonucleotide
  Sense strand starting at position 3771 of SEQ ID NO: 317907
gcucucgcgaguuuacuga

SEQ ID NO: 521738 - RNA, 19 nt, Artificial Sequence
  Description of Artificial Sequence: Synthetic oligonucleotide
  Antisense strand to SEQ ID NO: 521737
ucaguaaacucgcgagagc

SEQ ID NO: 521739 - RNA, 19 nt, Artificial Sequence
  Description of Artificial Sequence: Synthetic oligonucleotide
  Sense strand starting at position 3856 of SEQ ID NO: 317907
guccauucuccuugaauag

SEQ ID NO: 521740 - RNA, 19 nt, Artificial Sequence
  Description of Artificial Sequence: Synthetic oligonucleotide
  Antisense strand to SEQ ID NO: 521739
cuauucaaggagaauggac

SEQ ID NO: 521741 - RNA, 19 nt, Artificial Sequence
  Description of Artificial Sequence: Synthetic oligonucleotide
  Sense strand starting at position 3865 of SEQ ID NO: 317907
ccuugaauaggguggacau

SEQ ID NO: 521742 - RNA, 19 nt, Artificial Sequence
  Description of Artificial Sequence: Synthetic oligonucleotide
  Antisense strand to SEQ ID NO: 521741
auguccacccuauucaagg

SEQ ID NO: 521743 - RNA, 19 nt, Artificial Sequence
  Description of Artificial Sequence: Synthetic oligonucleotide
  Sense strand starting at position 3930 of SEQ ID NO: 317907
uuugaacggugcuugagaa

SEQ ID NO: 521744 - RNA, 19 nt, Artificial Sequence
  Description of Artificial Sequence: Synthetic oligonucleotide
  Antisense strand to SEQ ID NO: 521743
uucucaagcaccguucaaa

SEQ ID NO: 521745 - RNA, 19 nt, Artificial Sequence
  Description of Artificial Sequence: Synthetic oligonucleotide
  Sense strand starting at position 60 of SEQ ID NO: 317908
cuuggugagcaucagucaa

SEQ ID NO: 521746 - RNA, 19 nt, Artificial Sequence
  Description of Artificial Sequence: Synthetic oligonucleotide
  Antisense strand to SEQ ID NO: 521745
uugacugaugcucaccaag

SEQ ID NO: 521747 - RNA, 19 nt, Artificial Sequence
  Description of Artificial Sequence: Synthetic oligonucleotide
  Sense strand starting at position 62 of SEQ ID NO: 317908
uggugagcaucagucaaug

SEQ ID NO: 521748 - RNA, 19 nt, Artificial Sequence
  Description of Artificial Sequence: Synthetic oligonucleotide
  Antisense strand to SEQ ID NO: 521747
cauugacugaugcucacca

SEQ ID NO: 521749 - RNA, 19 nt, Artificial Sequence
  Description of Artificial Sequence: Synthetic oligonucleotide
  Sense strand starting at position 342 of SEQ ID NO: 317908
ucccaucaucuaugggcaa

SEQ ID NO: 521750 - RNA, 19 nt, Artificial Sequence
  Description of Artificial Sequence: Synthetic oligonucleotide
  Antisense strand to SEQ ID NO: 521749
uugcccauagaugauggga

SEQ ID NO: 521751 - RNA, 19 nt, Artificial Sequence
  Description of Artificial Sequence: Synthetic oligonucleotide
  Sense strand starting at position 353 of SEQ ID NO: 317908
augggcaacuccucuuaaa

SEQ ID NO: 521752 - RNA, 19 nt, Artificial Sequence
  Description of Artificial Sequence: Synthetic oligonucleotide
  Antisense strand to SEQ ID NO: 521751
uuuaagaggaguugcccau

SEQ ID NO: 521753 - RNA, 19 nt, Artificial Sequence
  Description of Artificial Sequence: Synthetic oligonucleotide
  Sense strand starting at position 413 of SEQ ID NO: 317908
agggacaacuucccguaaa

SEQ ID NO: 521754 - RNA, 19 nt, Artificial Sequence
  Description of Artificial Sequence: Synthetic oligonucleotide
  Antisense strand to SEQ ID NO: 521753
uuuacgggaaguugucccu

SEQ ID NO: 521755 - RNA, 19 nt, Artificial Sequence
  Description of Artificial Sequence: Synthetic oligonucleotide
  Sense strand starting at position 414 of SEQ ID NO: 317908
gggacaacuucccguaaau

SEQ ID NO: 521756 - RNA, 19 nt, Artificial Sequence
  Description of Artificial Sequence: Synthetic oligonucleotide
  Antisense strand to SEQ ID NO: 521755
auuuacgggaaguuguccc

SEQ ID NO: 521757 - RNA, 19 nt, Artificial Sequence
  Description of Artificial Sequence: Synthetic oligonucleotide
  Sense strand starting at position 553 of SEQ ID NO: 317908
gggcuuguuuccuuccagu

SEQ ID NO: 521758 - RNA, 19 nt, Artificial Sequence
  Description of Artificial Sequence: Synthetic oligonucleotide
  Antisense strand to SEQ ID NO: 521757
acuggaaggaaacaagccc

SEQ ID NO: 521759 - RNA, 19 nt, Artificial Sequence
  Description of Artificial Sequence: Synthetic oligonucleotide
  Sense strand starting at position 555 of SEQ ID NO: 317908
gcuuguuuccuuccaguuu

SEQ ID NO: 521760 - RNA, 19 nt, Artificial Sequence
  Description of Artificial Sequence: Synthetic oligonucleotide
  Antisense strand to SEQ ID NO: 521759
aaacuggaaggaaacaagc

SEQ ID NO: 521761 - RNA, 19 nt, Artificial Sequence
  Description of Artificial Sequence: Synthetic oligonucleotide
  Sense strand starting at position 609 of SEQ ID NO: 317908
cugcuuauaugacuuugua

SEQ ID NO: 521762 - RNA, 19 nt, Artificial Sequence
  Description of Artificial Sequence: Synthetic oligonucleotide
  Antisense strand to SEQ ID NO: 521761
uacaaagucauauaagcag

SEQ ID NO: 521763 - RNA, 19 nt, Artificial Sequence
  Description of Artificial Sequence: Synthetic oligonucleotide
  Sense strand starting at position 612 of SEQ ID NO: 317908
cuuauaugacuuuguaggu

SEQ ID NO: 521764 - RNA, 19 nt, Artificial Sequence
  Description of Artificial Sequence: Synthetic oligonucleotide
  Antisense strand to SEQ ID NO: 521763
accuacaaagucauauaag

SEQ ID NO: 521765 - RNA, 19 nt, Artificial Sequence
  Description of Artificial Sequence: Synthetic oligonucleotide
  Sense strand starting at position 657 of SEQ ID NO: 317908
uggacauuaucaucagcau

SEQ ID NO: 521766 - RNA, 19 nt, Artificial Sequence
  Description of Artificial Sequence: Synthetic oligonucleotide
  Antisense strand to SEQ ID NO: 521765
augcugaugauaaugucca

SEQ ID NO: 521767 - RNA, 19 nt, Artificial Sequence
  Description of Artificial Sequence: Synthetic oligonucleotide
  Sense strand starting at position 658 of SEQ ID NO: 317908
ggacauuaucaucagcauu

SEQ ID NO: 521768 - RNA, 19 nt, Artificial Sequence
  Description of Artificial Sequence: Synthetic oligonucleotide
  Antisense strand to SEQ ID NO: 521767
aaugcugaugauaaugucc

SEQ ID NO: 521769 - RNA, 19 nt, Artificial Sequence
  Description of Artificial Sequence: Synthetic oligonucleotide
  Sense strand starting at position 683 of SEQ ID NO: 317908
gacauuaaagccuguauga

SEQ ID NO: 521770 - RNA, 19 nt, Artificial Sequence
  Description of Artificial Sequence: Synthetic oligonucleotide
  Antisense strand to SEQ ID NO: 521769
ucauacaggcuuuaauguc

SEQ ID NO: 521771 - RNA, 19 nt, Artificial Sequence
  Description of Artificial Sequence: Synthetic oligonucleotide
  Sense strand starting at position 705 of SEQ ID NO: 317908
ugauuauagggcuggauaa

SEQ ID NO: 521772 - RNA, 19 nt, Artificial Sequence
  Description of Artificial Sequence: Synthetic oligonucleotide
  Antisense strand to SEQ ID NO: 521771
uuauccagcccuauaauca

SEQ ID NO: 521773 - RNA, 19 nt, Artificial Sequence
  Description of Artificial Sequence: Synthetic oligonucleotide
  Sense strand starting at position 706 of SEQ ID NO: 317908
gauuauagggcuggauaau

SEQ ID NO: 521774 - RNA, 19 nt, Artificial Sequence
  Description of Artificial Sequence: Synthetic oligonucleotide
  Antisense strand to SEQ ID NO: 521773
auuauccagcccuauaauc

SEQ ID NO: 521775 - RNA, 19 nt, Artificial Sequence
  Description of Artificial Sequence: Synthetic oligonucleotide
  Sense strand starting at position 783 of SEQ ID NO: 317908
caucuuaaggcuggaguga

SEQ ID NO: 521776 - RNA, 19 nt, Artificial Sequence
  Description of Artificial Sequence: Synthetic oligonucleotide
  Antisense strand to SEQ ID NO: 521775
ucacuccagccuuaagaug

SEQ ID NO: 521777 - RNA, 19 nt, Artificial Sequence
  Description of Artificial Sequence: Synthetic oligonucleotide
  Sense strand starting at position 862 of SEQ ID NO: 317908
ucgccuuggagucagaaua

SEQ ID NO: 521778 - RNA, 19 nt, Artificial Sequence
  Description of Artificial Sequence: Synthetic oligonucleotide
  Antisense strand to SEQ ID NO: 521777
uauucugacuccaaggcga

SEQ ID NO: 521779 - RNA, 19 nt, Artificial Sequence
  Description of Artificial Sequence: Synthetic oligonucleotide
  Sense strand starting at position 876 of SEQ ID NO: 317908
gaauaaagcuacucaugug

SEQ ID NO: 521780 - RNA, 19 nt, Artificial Sequence
  Description of Artificial Sequence: Synthetic oligonucleotide
  Antisense strand to SEQ ID NO: 521779
cacaugaguagcuuuauuc

SEQ ID NO: 521781 - RNA, 19 nt, Artificial Sequence
  Description of Artificial Sequence: Synthetic oligonucleotide
  Sense strand starting at position 879 of SEQ ID NO: 317908
uaaagcuacucauguggaa

SEQ ID NO: 521782 - RNA, 19 nt, Artificial Sequence
  Description of Artificial Sequence: Synthetic oligonucleotide
  Antisense strand to SEQ ID NO: 521781
uuccacaugaguagcuuua

SEQ ID NO: 521783 - RNA, 19 nt, Artificial Sequence
  Description of Artificial Sequence: Synthetic oligonucleotide
  Sense strand starting at position 1482 of SEQ ID NO: 317908
acacuugcaccuuggagaa

SEQ ID NO: 521784 - RNA, 19 nt, Artificial Sequence
  Description of Artificial Sequence: Synthetic oligonucleotide
  Antisense strand to SEQ ID NO: 521783
uucuccaaggugcaagugu

SEQ ID NO: 521785 - RNA, 19 nt, Artificial Sequence
  Description of Artificial Sequence: Synthetic oligonucleotide
  Sense strand starting at position 2483 of SEQ ID NO: 317908
ccgggcauucaguaaacga

SEQ ID NO: 521786 - RNA, 19 nt, Artificial Sequence
  Description of Artificial Sequence: Synthetic oligonucleotide
  Antisense strand to SEQ ID NO: 521785
ucguuuacugaaugcccgg

SEQ ID NO: 521787 - RNA, 19 nt, Artificial Sequence
  Description of Artificial Sequence: Synthetic oligonucleotide
  Sense strand starting at position 2513 of SEQ ID NO: 317908
cggagaagguugggaauca

SEQ ID NO: 521788 - RNA, 19 nt, Artificial Sequence
  Description of Artificial Sequence: Synthetic oligonucleotide
  Antisense strand to SEQ ID NO: 521787
ugauucccaaccuucuccg

SEQ ID NO: 521789 - RNA, 19 nt, Artificial Sequence
  Description of Artificial Sequence: Synthetic oligonucleotide
  Sense strand starting at position 2514 of SEQ ID NO: 317908
ggagaagguugggaaucaa

SEQ ID NO: 521790 - RNA, 19 nt, Artificial Sequence
  Description of Artificial Sequence: Synthetic oligonucleotide
  Antisense strand to SEQ ID NO: 521789
uugauucccaaccuucucc

SEQ ID NO: 521791 - RNA, 19 nt, Artificial Sequence
  Description of Artificial Sequence: Synthetic oligonucleotide
  Sense strand starting at position 2526 of SEQ ID NO: 317908
gaaucaaacgucugucaua

SEQ ID NO: 521792 - RNA, 19 nt, Artificial Sequence
  Description of Artificial Sequence: Synthetic oligonucleotide
  Antisense strand to SEQ ID NO: 521791
uaugacagacguuugauuc

SEQ ID NO: 521793 - RNA, 19 nt, Artificial Sequence
  Description of Artificial Sequence: Synthetic oligonucleotide
  Sense strand starting at position 2625 of SEQ ID NO: 317908
gcacccucgugggaacaau

SEQ ID NO: 521794 - RNA, 19 nt, Artificial Sequence
  Description of Artificial Sequence: Synthetic oligonucleotide
  Antisense strand to SEQ ID NO: 521793
auuguucccacgagggugc

SEQ ID NO: 521795 - RNA, 19 nt, Artificial Sequence
  Description of Artificial Sequence: Synthetic oligonucleotide
  Sense strand starting at position 2637 of SEQ ID NO: 317908
gaacaaugccagugggaug

SEQ ID NO: 521796 - RNA, 19 nt, Artificial Sequence
  Description of Artificial Sequence: Synthetic oligonucleotide
  Antisense strand to SEQ ID NO: 521795
caucccacuggcauuguuc

SEQ ID NO: 521797 - RNA, 19 nt, Artificial Sequence
  Description of Artificial Sequence: Synthetic oligonucleotide
  Sense strand starting at position 2696 of SEQ ID NO: 317908
cagcgcaggucuuggagaa

SEQ ID NO: 521798 - RNA, 19 nt, Artificial Sequence
  Description of Artificial Sequence: Synthetic oligonucleotide
  Antisense strand to SEQ ID NO: 521797
uucuccaagaccugcgcug

SEQ ID NO: 521799 - RNA, 19 nt, Artificial Sequence
  Description of Artificial Sequence: Synthetic oligonucleotide
  Sense strand starting at position 2697 of SEQ ID NO: 317908
agcgcaggucuuggagaau

SEQ ID NO: 521800 - RNA, 19 nt, Artificial Sequence
  Description of Artificial Sequence: Synthetic oligonucleotide
  Antisense strand to SEQ ID NO: 521799
auucuccaagaccugcgcu

SEQ ID NO: 521801 - RNA, 19 nt, Artificial Sequence
  Description of Artificial Sequence: Synthetic oligonucleotide
  Sense strand starting at position 2703 of SEQ ID NO: 317908
ggucuuggagaaugaaugu

SEQ ID NO: 521802 - RNA, 19 nt, Artificial Sequence
  Description of Artificial Sequence: Synthetic oligonucleotide
  Antisense strand to SEQ ID NO: 521801
acauucauucuccaagacc

SEQ ID NO: 521803 - RNA, 19 nt, Artificial Sequence
  Description of Artificial Sequence: Synthetic oligonucleotide
  Sense strand starting at position 2757 of SEQ ID NO: 317908
agucgcuuccuggaggaga

SEQ ID NO: 521804 - RNA, 19 nt, Artificial Sequence
  Description of Artificial Sequence: Synthetic oligonucleotide
  Antisense strand to SEQ ID NO: 521803
ucuccuccaggaagcgacu

SEQ ID NO: 521805 - RNA, 19 nt, Artificial Sequence
  Description of Artificial Sequence: Synthetic oligonucleotide
  Sense strand starting at position 2792 of SEQ ID NO: 317908
uuggcuucgccuggaggaa

SEQ ID NO: 521806 - RNA, 19 nt, Artificial Sequence
  Description of Artificial Sequence: Synthetic oligonucleotide
  Antisense strand to SEQ ID NO: 521805
uuccuccaggcgaagccaa

SEQ ID NO: 521807 - RNA, 19 nt, Artificial Sequence
  Description of Artificial Sequence: Synthetic oligonucleotide
  Sense strand starting at position 2807 of SEQ ID NO: 317908
ggaagaagcacgugcuaaa

SEQ ID NO: 521808 - RNA, 19 nt, Artificial Sequence
  Description of Artificial Sequence: Synthetic oligonucleotide
  Antisense strand to SEQ ID NO: 521807
uuuagcacgugcuucuucc

SEQ ID NO: 521809 - RNA, 19 nt, Artificial Sequence
  Description of Artificial Sequence: Synthetic oligonucleotide
  Sense strand starting at position 2837 of SEQ ID NO: 317908
caggguuugucuguuugau

SEQ ID NO: 521810 - RNA, 19 nt, Artificial Sequence
  Description of Artificial Sequence: Synthetic oligonucleotide
  Antisense strand to SEQ ID NO: 521809
aucaaacagacaaacccug

SEQ ID NO: 521811 - RNA, 19 nt, Artificial Sequence
  Description of Artificial Sequence: Synthetic oligonucleotide
  Sense strand starting at position 2839 of SEQ ID NO: 317908
ggguuugucuguuugauaa

SEQ ID NO: 521812 - RNA, 19 nt, Artificial Sequence
  Description of Artificial Sequence: Synthetic oligonucleotide
  Antisense strand to SEQ ID NO: 521811
uuaucaaacagacaaaccc

SEQ ID NO: 521813 - RNA, 19 nt, Artificial Sequence
  Description of Artificial Sequence: Synthetic oligonucleotide
  Sense strand starting at position 2859 of SEQ ID NO: 317908
agaugcuggcuuugacaca

SEQ ID NO: 521814 - RNA, 19 nt, Artificial Sequence
  Description of Artificial Sequence: Synthetic oligonucleotide
  Antisense strand to SEQ ID NO: 521813
ugugucaaagccagcaucu

SEQ ID NO: 521815 - RNA, 19 nt, Artificial Sequence
  Description of Artificial Sequence: Synthetic oligonucleotide
  Sense strand starting at position 3157 of SEQ ID NO: 317908
gcaacaaguugagcaauga

SEQ ID NO: 521816 - RNA, 19 nt, Artificial Sequence
  Description of Artificial Sequence: Synthetic oligonucleotide
  Antisense strand to SEQ ID NO: 521815
ucauugcucaacuuguugc

SEQ ID NO: 521817 - RNA, 19 nt, Artificial Sequence
  Description of Artificial Sequence: Synthetic oligonucleotide
  Sense strand starting at position 3201 of SEQ ID NO: 317908
guuagaaauuaugacugua

SEQ ID NO: 521818 - RNA, 19 nt, Artificial Sequence
  Description of Artificial Sequence: Synthetic oligonucleotide
  Antisense strand to SEQ ID NO: 521817
uacagucauaauuucuaac

SEQ ID NO: 521819 - RNA, 19 nt, Artificial Sequence
  Description of Artificial Sequence: Synthetic oligonucleotide
  Sense strand starting at position 3330 of SEQ ID NO: 317908
aucagugucugguagugaa

SEQ ID NO: 521820 - RNA, 19 nt, Artificial Sequence
  Description of Artificial Sequence: Synthetic oligonucleotide
  Antisense strand to SEQ ID NO: 521819
uucacuaccagacacugau

SEQ ID NO: 521821 - RNA, 19 nt, Artificial Sequence
  Description of Artificial Sequence: Synthetic oligonucleotide
  Sense strand starting at position 3333 of SEQ ID NO: 317908
agugucugguagugaauuu

SEQ ID NO: 521822 - RNA, 19 nt, Artificial Sequence
  Description of Artificial Sequence: Synthetic oligonucleotide
  Antisense strand to SEQ ID NO: 521821
aaauucacuaccagacacu

SEQ ID NO: 521823 - RNA, 19 nt, Artificial Sequence
  Description of Artificial Sequence: Synthetic oligonucleotide
  Sense strand starting at position 3340 of SEQ ID NO: 317908
gguagugaauuuggaugga

SEQ ID NO: 521824 - RNA, 19 nt, Artificial Sequence
  Description of Artificial Sequence: Synthetic oligonucleotide
  Antisense strand to SEQ ID NO: 521823
uccauccaaauucacuacc

SEQ ID NO: 521825 - RNA, 19 nt, Artificial Sequence
  Description of Artificial Sequence: Synthetic oligonucleotide
  Sense strand starting at position 73 of SEQ ID NO: 317909
gaaguugugugccuguaau

SEQ ID NO: 521826 - RNA, 19 nt, Artificial Sequence
  Description of Artificial Sequence: Synthetic oligonucleotide
  Antisense strand to SEQ ID NO: 521825
auuacaggcacacaacuuc

SEQ ID NO: 521827 - RNA, 19 nt, Artificial Sequence
  Description of Artificial Sequence: Synthetic oligonucleotide
  Sense strand starting at position 464 of SEQ ID NO: 317909
ugccacacucuagguaaau

SEQ ID NO: 521828 - RNA, 19 nt, Artificial Sequence
  Description of Artificial Sequence: Synthetic oligonucleotide
  Antisense strand to SEQ ID NO: 521827
auuuaccuagaguguggca

SEQ ID NO: 521829 - RNA, 19 nt, Artificial Sequence
  Description of Artificial Sequence: Synthetic oligonucleotide
  Sense strand starting at position 465 of SEQ ID NO: 317909
gccacacucuagguaaauu

SEQ ID NO: 521830 - RNA, 19 nt, Artificial Sequence
  Description of Artificial Sequence: Synthetic oligonucleotide
  Antisense strand to SEQ ID NO: 521829
aauuuaccuagaguguggc

SEQ ID NO: 521831 - RNA, 19 nt, Artificial Sequence
  Description of Artificial Sequence: Synthetic oligonucleotide
  Sense strand starting at position 537 of SEQ ID NO: 317909
uggugugaucuucguucac

SEQ ID NO: 521832 - RNA, 19 nt, Artificial Sequence
  Description of Artificial Sequence: Synthetic oligonucleotide
  Antisense strand to SEQ ID NO: 521831
gugaacgaagaucacacca

SEQ ID NO: 521833 - RNA, 19 nt, Artificial Sequence
  Description of Artificial Sequence: Synthetic oligonucleotide
  Sense strand starting at position 539 of SEQ ID NO: 317909
gugugaucuucguucacug

SEQ ID NO: 521834 - RNA, 19 nt, Artificial Sequence
  Description of Artificial Sequence: Synthetic oligonucleotide
  Antisense strand to SEQ ID NO: 521833
cagugaacgaagaucacac

SEQ ID NO: 521835 - RNA, 19 nt, Artificial Sequence
  Description of Artificial Sequence: Synthetic oligonucleotide
  Sense strand starting at position 785 of SEQ ID NO: 317909
aauuuagugucuggaagaa

SEQ ID NO: 521836 - RNA, 19 nt, Artificial Sequence
  Description of Artificial Sequence: Synthetic oligonucleotide
  Antisense strand to SEQ ID NO: 521835
uucuuccagacacuaaauu

SEQ ID NO: 521837 - RNA, 19 nt, Artificial Sequence
  Description of Artificial Sequence: Synthetic oligonucleotide
  Sense strand starting at position 944 of SEQ ID NO: 317909
ggguuucccuucucaacaa

SEQ ID NO: 521838 - RNA, 19 nt, Artificial Sequence
  Description of Artificial Sequence: Synthetic oligonucleotide
  Antisense strand to SEQ ID NO: 521837
uuguugagaagggaaaccc

SEQ ID NO: 521839 - RNA, 19 nt, Artificial Sequence
  Description of Artificial Sequence: Synthetic oligonucleotide
  Sense strand starting at position 963 of SEQ ID NO: 317909
cccuaagagguuuacuguu

SEQ ID NO: 521840 - RNA, 19 nt, Artificial Sequence
  Description of Artificial Sequence: Synthetic oligonucleotide
  Antisense strand to SEQ ID NO: 521839
aacaguaaaccucuuaggg

SEQ ID NO: 521841 - RNA, 19 nt, Artificial Sequence
  Description of Artificial Sequence: Synthetic oligonucleotide
  Sense strand starting at position 965 of SEQ ID NO: 317909
cuaagagguuuacuguuau

SEQ ID NO: 521842 - RNA, 19 nt, Artificial Sequence
  Description of Artificial Sequence: Synthetic oligonucleotide
  Antisense strand to SEQ ID NO: 521841
auaacaguaaaccucuuag

SEQ ID NO: 521843 - RNA, 19 nt, Artificial Sequence
  Description of Artificial Sequence: Synthetic oligonucleotide
  Sense strand starting at position 969 of SEQ ID NO: 317909
gagguuuacuguuaucaac

SEQ ID NO: 521844 - RNA, 19 nt, Artificial Sequence
  Description of Artificial Sequence: Synthetic oligonucleotide
  Antisense strand to SEQ ID NO: 521843
guugauaacaguaaaccuc

SEQ ID NO: 521845 - RNA, 19 nt, Artificial Sequence
  Description of Artificial Sequence: Synthetic oligonucleotide
  Sense strand starting at position 971 of SEQ ID NO: 317909
gguuuacuguuaucaaccu

SEQ ID NO: 521846 - RNA, 19 nt, Artificial Sequence
  Description of Artificial Sequence: Synthetic oligonucleotide
  Antisense strand to SEQ ID NO: 521845
agguugauaacaguaaacc

SEQ ID NO: 521847 - RNA, 19 nt, Artificial Sequence
  Description of Artificial Sequence: Synthetic oligonucleotide
  Sense strand starting at position 1007 of SEQ ID NO: 317909
aauugaagcuuggagaacu

SEQ ID NO: 521848 - RNA, 19 nt, Artificial Sequence
  Description of Artificial Sequence: Synthetic oligonucleotide
  Antisense strand to SEQ ID NO: 521847
aguucuccaagcuucaauu

SEQ ID NO: 521849 - RNA, 19 nt, Artificial Sequence
  Description of Artificial Sequence: Synthetic oligonucleotide
  Sense strand starting at position 1047 of SEQ ID NO: 317909
cccagcucauaagugauaa

SEQ ID NO: 521850 - RNA, 19 nt, Artificial Sequence
  Description of Artificial Sequence: Synthetic oligonucleotide
  Antisense strand to SEQ ID NO: 521849
uuaucacuuaugagcuggg

SEQ ID NO: 521851 - RNA, 19 nt, Artificial Sequence
  Description of Artificial Sequence: Synthetic oligonucleotide
  Sense strand starting at position 1051 of SEQ ID NO: 317909
gcucauaagugauaaagcu

SEQ ID NO: 521852 - RNA, 19 nt, Artificial Sequence
  Description of Artificial Sequence: Synthetic oligonucleotide
  Antisense strand to SEQ ID NO: 521851
agcuuuaucacuuaugagc

SEQ ID NO: 521853 - RNA, 19 nt, Artificial Sequence
  Description of Artificial Sequence: Synthetic oligonucleotide
  Sense strand starting at position 1059 of SEQ ID NO: 317909
gugauaaagcugggcuuca

SEQ ID NO: 521854 - RNA, 19 nt, Artificial Sequence
  Description of Artificial Sequence: Synthetic oligonucleotide
  Antisense strand to SEQ ID NO: 521853
ugaagcccagcuuuaucac

SEQ ID NO: 521855 - RNA, 19 nt, Artificial Sequence
  Description of Artificial Sequence: Synthetic oligonucleotide
  Sense strand starting at position 1096 of SEQ ID NO: 317909
agacaagcucuugauccuu

SEQ ID NO: 521856 - RNA, 19 nt, Artificial Sequence
  Description of Artificial Sequence: Synthetic oligonucleotide
  Antisense strand to SEQ ID NO: 521855
aaggaucaagagcuugucu

SEQ ID NO: 521857 - RNA, 19 nt, Artificial Sequence
  Description of Artificial Sequence: Synthetic oligonucleotide
  Sense strand starting at position 1138 of SEQ ID NO: 317909
cucuguguggcaugaauga

SEQ ID NO: 521858 - RNA, 19 nt, Artificial Sequence
  Description of Artificial Sequence: Synthetic oligonucleotide
  Antisense strand to SEQ ID NO: 521857
ucauucaugccacacagag

SEQ ID NO: 521859 - RNA, 19 nt, Artificial Sequence
  Description of Artificial Sequence: Synthetic oligonucleotide
  Sense strand starting at position 1151 of SEQ ID NO: 317909
gaaugaugcccaugagacg

SEQ ID NO: 521860 - RNA, 19 nt, Artificial Sequence
  Description of Artificial Sequence: Synthetic oligonucleotide
  Antisense strand to SEQ ID NO: 521859
cgucucaugggcaucauuc

SEQ ID NO: 521861 - RNA, 19 nt, Artificial Sequence
  Description of Artificial Sequence: Synthetic oligonucleotide
  Sense strand starting at position 1387 of SEQ ID NO: 317909
acuagacugcccugagacu

SEQ ID NO: 521862 - RNA, 19 nt, Artificial Sequence
  Description of Artificial Sequence: Synthetic oligonucleotide
  Antisense strand to SEQ ID NO: 521861
agucucagggcagucuagu

SEQ ID NO: 521863 - RNA, 19 nt, Artificial Sequence
  Description of Artificial Sequence: Synthetic oligonucleotide
  Sense strand starting at position 1826 of SEQ ID NO: 317909
auggcucauggcugugaua

SEQ ID NO: 521864 - RNA, 19 nt, Artificial Sequence
  Description of Artificial Sequence: Synthetic oligonucleotide
  Antisense strand to SEQ ID NO: 521863
uaucacagccaugagccau

SEQ ID NO: 521865 - RNA, 19 nt, Artificial Sequence
  Description of Artificial Sequence: Synthetic oligonucleotide
  Sense strand starting at position 1828 of SEQ ID NO: 317909
ggcucauggcugugauagc

SEQ ID NO: 521866 - RNA, 19 nt, Artificial Sequence
  Description of Artificial Sequence: Synthetic oligonucleotide
  Antisense strand to SEQ ID NO: 521865
gcuaucacagccaugagcc

SEQ ID NO: 521867 - RNA, 19 nt, Artificial Sequence
  Description of Artificial Sequence: Synthetic oligonucleotide
  Sense strand starting at position 1853 of SEQ ID NO: 317909
ccagaacaauccugggaca

SEQ ID NO: 521868 - RNA, 19 nt, Artificial Sequence
  Description of Artificial Sequence: Synthetic oligonucleotide
  Antisense strand to SEQ ID NO: 521867
ugucccaggauuguucugg

SEQ ID NO: 521869 - RNA, 19 nt, Artificial Sequence
  Description of Artificial Sequence: Synthetic oligonucleotide
  Sense strand starting at position 2005 of SEQ ID NO: 317909
ggccaaaggucuuggaaau

SEQ ID NO: 521870 - RNA, 19 nt, Artificial Sequence
  Description of Artificial Sequence: Synthetic oligonucleotide
  Antisense strand to SEQ ID NO: 521869
auuuccaagaccuuuggcc

SEQ ID NO: 521871 - RNA, 19 nt, Artificial Sequence
  Description of Artificial Sequence: Synthetic oligonucleotide
  Sense strand starting at position 2006 of SEQ ID NO: 317909
gccaaaggucuuggaaaua

SEQ ID NO: 521872 - RNA, 19 nt, Artificial Sequence
  Description of Artificial Sequence: Synthetic oligonucleotide
  Antisense strand to SEQ ID NO: 521871
uauuuccaagaccuuuggc

SEQ ID NO: 521873 - RNA, 19 nt, Artificial Sequence
  Description of Artificial Sequence: Synthetic oligonucleotide
  Sense strand starting at position 2021 of SEQ ID NO: 317909
aauagagauuggucaagcu

SEQ ID NO: 521874 - RNA, 19 nt, Artificial Sequence
  Description of Artificial Sequence: Synthetic oligonucleotide
  Antisense strand to SEQ ID NO: 521873
agcuugaccaaucucuauu

SEQ ID NO: 521875 - RNA, 19 nt, Artificial Sequence
  Description of Artificial Sequence: Synthetic oligonucleotide
  Sense strand starting at position 2108 of SEQ ID NO: 317909
ccuugagggccggaaaguu

SEQ ID NO: 521876 - RNA, 19 nt, Artificial Sequence
  Description of Artificial Sequence: Synthetic oligonucleotide
  Antisense strand to SEQ ID NO: 521875
aacuuuccggcccucaagg

SEQ ID NO: 521877 - RNA, 19 nt, Artificial Sequence
  Description of Artificial Sequence: Synthetic oligonucleotide
  Sense strand starting at position 2305 of SEQ ID NO: 317909
auugucauguaacaaacua

SEQ ID NO: 521878 - RNA, 19 nt, Artificial Sequence
  Description of Artificial Sequence: Synthetic oligonucleotide
  Antisense strand to SEQ ID NO: 521877
uaguuuguuacaugacaau

SEQ ID NO: 521879 - RNA, 19 nt, Artificial Sequence
  Description of Artificial Sequence: Synthetic oligonucleotide
  Sense strand starting at position 3046 of SEQ ID NO: 317909
ucaaacaauuugggacuua

SEQ ID NO: 521880 - RNA, 19 nt, Artificial Sequence
  Description of Artificial Sequence: Synthetic oligonucleotide
  Antisense strand to SEQ ID NO: 521879
uaagucccaaauuguuuga

SEQ ID NO: 521881 - RNA, 19 nt, Artificial Sequence
  Description of Artificial Sequence: Synthetic oligonucleotide
  Sense strand starting at position 3158 of SEQ ID NO: 317909
gggccaucuuagcauucua

SEQ ID NO: 521882 - RNA, 19 nt, Artificial Sequence
  Description of Artificial Sequence: Synthetic oligonucleotide
  Antisense strand to SEQ ID NO: 521881
uagaaugcuaagauggccc

SEQ ID NO: 521883 - RNA, 19 nt, Artificial Sequence
  Description of Artificial Sequence: Synthetic oligonucleotide
  Sense strand starting at position 3301 of SEQ ID NO: 317909
uguccugguucgguaauga

SEQ ID NO: 521884 - RNA, 19 nt, Artificial Sequence
  Description of Artificial Sequence: Synthetic oligonucleotide
  Antisense strand to SEQ ID NO: 521883
ucauuaccgaaccaggaca

SEQ ID NO: 521885 - RNA, 19 nt, Artificial Sequence
  Description of Artificial Sequence: Synthetic oligonucleotide
  Sense strand starting at position 3402 of SEQ ID NO: 317909
gggcuagagauguggccua

SEQ ID NO: 521886 - RNA, 19 nt, Artificial Sequence
  Description of Artificial Sequence: Synthetic oligonucleotide
  Antisense strand to SEQ ID NO: 521885
uaggccacaucucuagccc

SEQ ID NO: 521887 - RNA, 19 nt, Artificial Sequence
  Description of Artificial Sequence: Synthetic oligonucleotide
  Sense strand starting at position 3575 of SEQ ID NO: 317909
gcaugugggucugaacaca

SEQ ID NO: 521888 - RNA, 19 nt, Artificial Sequence
  Description of Artificial Sequence: Synthetic oligonucleotide
  Antisense strand to SEQ ID NO: 521887
uguguucagacccacaugc

SEQ ID NO: 521889 - RNA, 19 nt, Artificial Sequence
  Description of Artificial Sequence: Synthetic oligonucleotide
  Sense strand starting at position 3583 of SEQ ID NO: 317909
gucugaacacauugaugau

SEQ ID NO: 521890 - RNA, 19 nt, Artificial Sequence
  Description of Artificial Sequence: Synthetic oligonucleotide
  Antisense strand to SEQ ID NO: 521889
aucaucaauguguucagac

SEQ ID NO: 521891 - RNA, 19 nt, Artificial Sequence
  Description of Artificial Sequence: Synthetic oligonucleotide
  Sense strand starting at position 3683 of SEQ ID NO: 317909
auggaaagaugcuguggua

SEQ ID NO: 521892 - RNA, 19 nt, Artificial Sequence
  Description of Artificial Sequence: Synthetic oligonucleotide
  Antisense strand to SEQ ID NO: 521891
uaccacagcaucuuuccau

SEQ ID NO: 521893 - RNA, 19 nt, Artificial Sequence
  Description of Artificial Sequence: Synthetic oligonucleotide
  Sense strand starting at position 3760 of SEQ ID NO: 317909
ggugucuucccacauugag

SEQ ID NO: 521894 - RNA, 19 nt, Artificial Sequence
  Description of Artificial Sequence: Synthetic oligonucleotide
  Antisense strand to SEQ ID NO: 521893
cucaaugugggaagacacc

SEQ ID NO: 521895 - RNA, 19 nt, Artificial Sequence
  Description of Artificial Sequence: Synthetic oligonucleotide
  Sense strand starting at position 3763 of SEQ ID NO: 317909
gucuucccacauugaguua

SEQ ID NO: 521896 - RNA, 19 nt, Artificial Sequence
  Description of Artificial Sequence: Synthetic oligonucleotide
  Antisense strand to SEQ ID NO: 521895
uaacucaaugugggaagac

SEQ ID NO: 521897 - RNA, 19 nt, Artificial Sequence
  Description of Artificial Sequence: Synthetic oligonucleotide
  Sense strand starting at position 3783 of SEQ ID NO: 317909
ggcuguucuguguguccau

SEQ ID NO: 521898 - RNA, 19 nt, Artificial Sequence
  Description of Artificial Sequence: Synthetic oligonucleotide
  Antisense strand to SEQ ID NO: 521897
auggacacacagaacagcc

SEQ ID NO: 521899 - RNA, 19 nt, Artificial Sequence
  Description of Artificial Sequence: Synthetic oligonucleotide
  Sense strand starting at position 3790 of SEQ ID NO: 317909
cuguguguccaucagaaua

SEQ ID NO: 521900 - RNA, 19 nt, Artificial Sequence
  Description of Artificial Sequence: Synthetic oligonucleotide
  Antisense strand to SEQ ID NO: 521899
uauucugauggacacacag

SEQ ID NO: 521901 - RNA, 19 nt, Artificial Sequence
  Description of Artificial Sequence: Synthetic oligonucleotide
  Sense strand starting at position 3792 of SEQ ID NO: 317909
guguguccaucagaauaug

SEQ ID NO: 521902 - RNA, 19 nt, Artificial Sequence
  Description of Artificial Sequence: Synthetic oligonucleotide
  Antisense strand to SEQ ID NO: 521901
cauauucugauggacacac

SEQ ID NO: 521903 - RNA, 19 nt, Artificial Sequence
  Description of Artificial Sequence: Synthetic oligonucleotide
  Sense strand starting at position 3800 of SEQ ID NO: 317909
aucagaauaugacagaagu

SEQ ID NO: 521904 - RNA, 19 nt, Artificial Sequence
  Description of Artificial Sequence: Synthetic oligonucleotide
  Antisense strand to SEQ ID NO: 521903
acuucugucauauucugau

SEQ ID NO: 521905 - RNA, 19 nt, Artificial Sequence
  Description of Artificial Sequence: Synthetic oligonucleotide
  Sense strand starting at position 43 of SEQ ID NO: 317910
uccagaauccaguguugau

SEQ ID NO: 521906 - RNA, 19 nt, Artificial Sequence
  Description of Artificial Sequence: Synthetic oligonucleotide
  Antisense strand to SEQ ID NO: 521905
aucaacacuggauucugga

SEQ ID NO: 521907 - RNA, 19 nt, Artificial Sequence
  Description of Artificial Sequence: Synthetic oligonucleotide
  Sense strand starting at position 57 of SEQ ID NO: 317910
uugauaaacuagccaaguu

SEQ ID NO: 521908 - RNA, 19 nt, Artificial Sequence
  Description of Artificial Sequence: Synthetic oligonucleotide
  Antisense strand to SEQ ID NO: 521907
aacuuggcuaguuuaucaa

SEQ ID NO: 521909 - RNA, 19 nt, Artificial Sequence
  Description of Artificial Sequence: Synthetic oligonucleotide
  Sense strand starting at position 99 of SEQ ID NO: 317910
accagcacuguccauauua

SEQ ID NO: 521910 - RNA, 19 nt, Artificial Sequence
  Description of Artificial Sequence: Synthetic oligonucleotide
  Antisense strand to SEQ ID NO: 521909
uaauauggacagugcuggu

SEQ ID NO: 521911 - RNA, 19 nt, Artificial Sequence
  Description of Artificial Sequence: Synthetic oligonucleotide
  Sense strand starting at position 125 of SEQ ID NO: 317910
ccacuccugccaugaggau

SEQ ID NO: 521912 - RNA, 19 nt, Artificial Sequence
  Description of Artificial Sequence: Synthetic oligonucleotide
  Antisense strand to SEQ ID NO: 521911
auccucauggcaggagugg

SEQ ID NO: 521913 - RNA, 19 nt, Artificial Sequence
  Description of Artificial Sequence: Synthetic oligonucleotide
  Sense strand starting at position 131 of SEQ ID NO: 317910
cugccaugaggauguaaga

SEQ ID NO: 521914 - RNA, 19 nt, Artificial Sequence
  Description of Artificial Sequence: Synthetic oligonucleotide
  Antisense strand to SEQ ID NO: 521913
ucuuacauccucauggcag

SEQ ID NO: 521915 - RNA, 19 nt, Artificial Sequence
  Description of Artificial Sequence: Synthetic oligonucleotide
  Sense strand starting at position 142 of SEQ ID NO: 317910
auguaagaagcuuggcaga

SEQ ID NO: 521916 - RNA, 19 nt, Artificial Sequence
  Description of Artificial Sequence: Synthetic oligonucleotide
  Antisense strand to SEQ ID NO: 521915
ucugccaagcuucuuacau

SEQ ID NO: 521917 - RNA, 19 nt, Artificial Sequence
  Description of Artificial Sequence: Synthetic oligonucleotide
  Sense strand starting at position 144 of SEQ ID NO: 317910
guaagaagcuuggcagaaa

SEQ ID NO: 521918 - RNA, 19 nt, Artificial Sequence
  Description of Artificial Sequence: Synthetic oligonucleotide
  Antisense strand to SEQ ID NO: 521917
uuucugccaagcuucuuac

SEQ ID NO: 521919 - RNA, 19 nt, Artificial Sequence
  Description of Artificial Sequence: Synthetic oligonucleotide
  Sense strand starting at position 221 of SEQ ID NO: 317910
ugagaaagggugcagcauu

SEQ ID NO: 521920 - RNA, 19 nt, Artificial Sequence
  Description of Artificial Sequence: Synthetic oligonucleotide
  Antisense strand to SEQ ID NO: 521919
aaugcugcacccuuucuca

SEQ ID NO: 521921 - RNA, 19 nt, Artificial Sequence
  Description of Artificial Sequence: Synthetic oligonucleotide
  Sense strand starting at position 229 of SEQ ID NO: 317910
ggugcagcauuucuauaag

SEQ ID NO: 521922 - RNA, 19 nt, Artificial Sequence
  Description of Artificial Sequence: Synthetic oligonucleotide
  Antisense strand to SEQ ID NO: 521921
cuuauagaaaugcugcacc

SEQ ID NO: 521923 - RNA, 19 nt, Artificial Sequence
  Description of Artificial Sequence: Synthetic oligonucleotide
  Sense strand starting at position 232 of SEQ ID NO: 317910
gcagcauuucuauaagcuc

SEQ ID NO: 521924 - RNA, 19 nt, Artificial Sequence
  Description of Artificial Sequence: Synthetic oligonucleotide
  Antisense strand to SEQ ID NO: 521923
gagcuuauagaaaugcugc

SEQ ID NO: 521925 - RNA, 19 nt, Artificial Sequence
  Description of Artificial Sequence: Synthetic oligonucleotide
  Sense strand starting at position 330 of SEQ ID NO: 317910
uacauaaugguaugugaaa

SEQ ID NO: 521926 - RNA, 19 nt, Artificial Sequence
  Description of Artificial Sequence: Synthetic oligonucleotide
  Antisense strand to SEQ ID NO: 521925
uuucacauaccauuaugua

SEQ ID NO: 521927 - RNA, 19 nt, Artificial Sequence
  Description of Artificial Sequence: Synthetic oligonucleotide
  Sense strand starting at position 331 of SEQ ID NO: 317910
acauaaugguaugugaaau

SEQ ID NO: 521928 - RNA, 19 nt, Artificial Sequence
  Description of Artificial Sequence: Synthetic oligonucleotide
  Antisense strand to SEQ ID NO: 521927
auuucacauaccauuaugu

SEQ ID NO: 521929 - RNA, 19 nt, Artificial Sequence
  Description of Artificial Sequence: Synthetic oligonucleotide
  Sense strand starting at position 406 of SEQ ID NO: 317910
ggcaacaaugcucacuuau

SEQ ID NO: 521930 - RNA, 19 nt, Artificial Sequence
  Description of Artificial Sequence: Synthetic oligonucleotide
  Antisense strand to SEQ ID NO: 521929
auaagugagcauuguugcc

SEQ ID NO: 521931 - RNA, 19 nt, Artificial Sequence
  Description of Artificial Sequence: Synthetic oligonucleotide
  Sense strand starting at position 549 of SEQ ID NO: 317910
ccucuuaaucuugaugugu

SEQ ID NO: 521932 - RNA, 19 nt, Artificial Sequence
  Description of Artificial Sequence: Synthetic oligonucleotide
  Antisense strand to SEQ ID NO: 521931
acacaucaagauuaagagg

SEQ ID NO: 521933 - RNA, 19 nt, Artificial Sequence
  Description of Artificial Sequence: Synthetic oligonucleotide
  Sense strand starting at position 557 of SEQ ID NO: 317910
ucuugaugugucuacacuu

SEQ ID NO: 521934 - RNA, 19 nt, Artificial Sequence
  Description of Artificial Sequence: Synthetic oligonucleotide
  Antisense strand to SEQ ID NO: 521933
aaguguagacacaucaaga

SEQ ID NO: 521935 - RNA, 19 nt, Artificial Sequence
  Description of Artificial Sequence: Synthetic oligonucleotide
  Sense strand starting at position 893 of SEQ ID NO: 317910
cuugcaguggaucagaaau

SEQ ID NO: 521936 - RNA, 19 nt, Artificial Sequence
  Description of Artificial Sequence: Synthetic oligonucleotide
  Antisense strand to SEQ ID NO: 521935
auuucugauccacugcaag

SEQ ID NO: 521937 - RNA, 19 nt, Artificial Sequence
  Description of Artificial Sequence: Synthetic oligonucleotide
  Sense strand starting at position 904 of SEQ ID NO: 317910
ucagaaaucucguuaagaa

SEQ ID NO: 521938 - RNA, 19 nt, Artificial Sequence
  Description of Artificial Sequence: Synthetic oligonucleotide
  Antisense strand to SEQ ID NO: 521937
uucuuaacgagauuucuga

SEQ ID NO: 521939 - RNA, 19 nt, Artificial Sequence
  Description of Artificial Sequence: Synthetic oligonucleotide
  Sense strand starting at position 1060 of SEQ ID NO: 317910
ugcuauugucaccauauau

SEQ ID NO: 521940 - RNA, 19 nt, Artificial Sequence
  Description of Artificial Sequence: Synthetic oligonucleotide
  Antisense strand to SEQ ID NO: 521939
auauauggugacaauagca

SEQ ID NO: 521941 - RNA, 19 nt, Artificial Sequence
  Description of Artificial Sequence: Synthetic oligonucleotide
  Sense strand starting at position 1243 of SEQ ID NO: 317910
agcgguucgccacuuuaua

SEQ ID NO: 521942 - RNA, 19 nt, Artificial Sequence
  Description of Artificial Sequence: Synthetic oligonucleotide
  Antisense strand to SEQ ID NO: 521941
uauaaaguggcgaaccgcu

SEQ ID NO: 521943 - RNA, 19 nt, Artificial Sequence
  Description of Artificial Sequence: Synthetic oligonucleotide
  Sense strand starting at position 1244 of SEQ ID NO: 317910
gcgguucgccacuuuauau

SEQ ID NO: 521944 - RNA, 19 nt, Artificial Sequence
  Description of Artificial Sequence: Synthetic oligonucleotide
  Antisense strand to SEQ ID NO: 521943
auauaaaguggcgaaccgc

SEQ ID NO: 521945 - RNA, 19 nt, Artificial Sequence
  Description of Artificial Sequence: Synthetic oligonucleotide
  Sense strand starting at position 1269 of SEQ ID NO: 317910
gaucgaaacguuuauuggu

SEQ ID NO: 521946 - RNA, 19 nt, Artificial Sequence
  Description of Artificial Sequence: Synthetic oligonucleotide
  Antisense strand to SEQ ID NO: 521945
accaauaaacguuucgauc

SEQ ID NO: 521947 - RNA, 19 nt, Artificial Sequence
  Description of Artificial Sequence: Synthetic oligonucleotide
  Sense strand starting at position 1489 of SEQ ID NO: 317910
accuaaacgugacuggaaa

SEQ ID NO: 521948 - RNA, 19 nt, Artificial Sequence
  Description of Artificial Sequence: Synthetic oligonucleotide
  Antisense strand to SEQ ID NO: 521947
uuuccagucacguuuaggu

SEQ ID NO: 521949 - RNA, 19 nt, Artificial Sequence
  Description of Artificial Sequence: Synthetic oligonucleotide
  Sense strand starting at position 1537 of SEQ ID NO: 317910
uuggcuuucggaggaaacu

SEQ ID NO: 521950 - RNA, 19 nt, Artificial Sequence
  Description of Artificial Sequence: Synthetic oligonucleotide
  Antisense strand to SEQ ID NO: 521949
aguuuccuccgaaagccaa

SEQ ID NO: 521951 - RNA, 19 nt, Artificial Sequence
  Description of Artificial Sequence: Synthetic oligonucleotide
  Sense strand starting at position 2534 of SEQ ID NO: 317910
ucuuuauuucgcgaaguua

SEQ ID NO: 521952 - RNA, 19 nt, Artificial Sequence
  Description of Artificial Sequence: Synthetic oligonucleotide
  Antisense strand to SEQ ID NO: 521951
uaacuucgcgaaauaaaga

SEQ ID NO: 521953 - RNA, 19 nt, Artificial Sequence
  Description of Artificial Sequence: Synthetic oligonucleotide
  Sense strand starting at position 2755 of SEQ ID NO: 317910
agagaaauggccugguaac

SEQ ID NO: 521954 - RNA, 19 nt, Artificial Sequence
  Description of Artificial Sequence: Synthetic oligonucleotide
  Antisense strand to SEQ ID NO: 521953
guuaccaggccauuucucu

SEQ ID NO: 521955 - RNA, 19 nt, Artificial Sequence
  Description of Artificial Sequence: Synthetic oligonucleotide
  Sense strand starting at position 2756 of SEQ ID NO: 317910
gagaaauggccugguaacu

SEQ ID NO: 521956 - RNA, 19 nt, Artificial Sequence
  Description of Artificial Sequence: Synthetic oligonucleotide
  Antisense strand to SEQ ID NO: 521955
aguuaccaggccauuucuc

SEQ ID NO: 521957 - RNA, 19 nt, Artificial Sequence
  Description of Artificial Sequence: Synthetic oligonucleotide
  Sense strand starting at position 2788 of SEQ ID NO: 317910
ucacacguucuugaacgau

SEQ ID NO: 521958 - RNA, 19 nt, Artificial Sequence
  Description of Artificial Sequence: Synthetic oligonucleotide
  Antisense strand to SEQ ID NO: 521957
aucguucaagaacguguga

SEQ ID NO: 521959 - RNA, 19 nt, Artificial Sequence
  Description of Artificial Sequence: Synthetic oligonucleotide
  Sense strand starting at position 2792 of SEQ ID NO: 317910
acguucuugaacgauauua

SEQ ID NO: 521960 - RNA, 19 nt, Artificial Sequence
  Description of Artificial Sequence: Synthetic oligonucleotide
  Antisense strand to SEQ ID NO: 521959
uaauaucguucaagaacgu

SEQ ID NO: 521961 - RNA, 19 nt, Artificial Sequence
  Description of Artificial Sequence: Synthetic oligonucleotide
  Sense strand starting at position 2794 of SEQ ID NO: 317910
guucuugaacgauauuaca

SEQ ID NO: 521962 - RNA, 19 nt, Artificial Sequence
  Description of Artificial Sequence: Synthetic oligonucleotide
  Antisense strand to SEQ ID NO: 521961
uguaauaucguucaagaac

SEQ ID NO: 521963 - RNA, 19 nt, Artificial Sequence
  Description of Artificial Sequence: Synthetic oligonucleotide
  Sense strand starting at position 3067 of SEQ ID NO: 317910
auuaaaggaguuuggcuaa

SEQ ID NO: 521964 - RNA, 19 nt, Artificial Sequence
  Description of Artificial Sequence: Synthetic oligonucleotide
  Antisense strand to SEQ ID NO: 521963
uuagccaaacuccuuuaau

SEQ ID NO: 521965 - RNA, 19 nt, Artificial Sequence
  Description of Artificial Sequence: Synthetic oligonucleotide
  Sense strand starting at position 3070 of SEQ ID NO: 317910
aaaggaguuuggcuaaauu

SEQ ID NO: 521966 - RNA, 19 nt, Artificial Sequence
  Description of Artificial Sequence: Synthetic oligonucleotide
  Antisense strand to SEQ ID NO: 521965
aauuuagccaaacuccuuu

SEQ ID NO: 521967 - RNA, 19 nt, Artificial Sequence
  Description of Artificial Sequence: Synthetic oligonucleotide
  Sense strand starting at position 3384 of SEQ ID NO: 317910
gugaauuucgcacgaagag

SEQ ID NO: 521968 - RNA, 19 nt, Artificial Sequence
  Description of Artificial Sequence: Synthetic oligonucleotide
  Antisense strand to SEQ ID NO: 521967
cucuucgugcgaaauucac

SEQ ID NO: 521969 - RNA, 19 nt, Artificial Sequence
  Description of Artificial Sequence: Synthetic oligonucleotide
  Sense strand starting at position 3427 of SEQ ID NO: 317910
acacuuacauccguggaga

SEQ ID NO: 521970 - RNA, 19 nt, Artificial Sequence
  Description of Artificial Sequence: Synthetic oligonucleotide
  Antisense strand to SEQ ID NO: 521969
ucuccacggauguaagugu

SEQ ID NO: 521971 - RNA, 19 nt, Artificial Sequence
  Description of Artificial Sequence: Synthetic oligonucleotide
  Sense strand starting at position 3428 of SEQ ID NO: 317910
cacuuacauccguggagaa

SEQ ID NO: 521972 - RNA, 19 nt, Artificial Sequence
  Description of Artificial Sequence: Synthetic oligonucleotide
  Antisense strand to SEQ ID NO: 521971
uucuccacggauguaagug

SEQ ID NO: 521973 - RNA, 19 nt, Artificial Sequence
  Description of Artificial Sequence: Synthetic oligonucleotide
  Sense strand starting at position 3429 of SEQ ID NO: 317910
acuuacauccguggagaaa

SEQ ID NO: 521974 - RNA, 19 nt, Artificial Sequence
  Description of Artificial Sequence: Synthetic oligonucleotide
  Antisense strand to SEQ ID NO: 521973
uuucuccacggauguaagu

SEQ ID NO: 521975 - RNA, 19 nt, Artificial Sequence
  Description of Artificial Sequence: Synthetic oligonucleotide
  Sense strand starting at position 3508 of SEQ ID NO: 317910
ccuuguuguacacagaagu

SEQ ID NO: 521976 - RNA, 19 nt, Artificial Sequence
  Description of Artificial Sequence: Synthetic oligonucleotide
  Antisense strand to SEQ ID NO: 521975
acuucuguguacaacaagg

SEQ ID NO: 521977 - RNA, 19 nt, Artificial Sequence
  Description of Artificial Sequence: Synthetic oligonucleotide
  Sense strand starting at position 3539 of SEQ ID NO: 317910
ugcggaaguacccaguuaa

SEQ ID NO: 521978 - RNA, 19 nt, Artificial Sequence
  Description of Artificial Sequence: Synthetic oligonucleotide
  Antisense strand to SEQ ID NO: 521977
uuaacuggguacuuccgca

SEQ ID NO: 521979 - RNA, 19 nt, Artificial Sequence
  Description of Artificial Sequence: Synthetic oligonucleotide
  Sense strand starting at position 3585 of SEQ ID NO: 317910
ucaguuauccucuggaaac

SEQ ID NO: 521980 - RNA, 19 nt, Artificial Sequence
  Description of Artificial Sequence: Synthetic oligonucleotide
  Antisense strand to SEQ ID NO: 521979
guuuccagaggauaacuga

SEQ ID NO: 521981 - RNA, 19 nt, Artificial Sequence
  Description of Artificial Sequence: Synthetic oligonucleotide
  Sense strand starting at position 3674 of SEQ ID NO: 317910
uuccuaagacgucauugau

SEQ ID NO: 521982 - RNA, 19 nt, Artificial Sequence
  Description of Artificial Sequence: Synthetic oligonucleotide
  Antisense strand to SEQ ID NO: 521981
aucaaugacgucuuaggaa

SEQ ID NO: 521983 - RNA, 19 nt, Artificial Sequence
  Description of Artificial Sequence: Synthetic oligonucleotide
  Sense strand starting at position 3739 of SEQ ID NO: 317910
gugacauaccaaugauugu

SEQ ID NO: 521984 - RNA, 19 nt, Artificial Sequence
  Description of Artificial Sequence: Synthetic oligonucleotide
  Antisense strand to SEQ ID NO: 521983
acaaucauugguaugucac

SEQ ID NO: 521985 - RNA, 19 nt, Artificial Sequence
  Description of Artificial Sequence: Synthetic oligonucleotide
  Sense strand starting at position 103 of SEQ ID NO: 317911
ucacuaacccuuugggaaa

SEQ ID NO: 521986 - RNA, 19 nt, Artificial Sequence
  Description of Artificial Sequence: Synthetic oligonucleotide
  Antisense strand to SEQ ID NO: 521985
uuucccaaaggguuaguga

SEQ ID NO: 521987 - RNA, 19 nt, Artificial Sequence
  Description of Artificial Sequence: Synthetic oligonucleotide
  Sense strand starting at position 122 of SEQ ID NO: 317911
guuacuuugcaagggaaua

SEQ ID NO: 521988 - RNA, 19 nt, Artificial Sequence
  Description of Artificial Sequence: Synthetic oligonucleotide
  Antisense strand to SEQ ID NO: 521987
uauucccuugcaaaguaac

SEQ ID NO: 521989 - RNA, 19 nt, Artificial Sequence
  Description of Artificial Sequence: Synthetic oligonucleotide
  Sense strand starting at position 177 of SEQ ID NO: 317911
auauuaaguggcuauaguu

SEQ ID NO: 521990 - RNA, 19 nt, Artificial Sequence
  Description of Artificial Sequence: Synthetic oligonucleotide
  Antisense strand to SEQ ID NO: 521989
aacuauagccacuuaauau

SEQ ID NO: 521991 - RNA, 19 nt, Artificial Sequence
  Description of Artificial Sequence: Synthetic oligonucleotide
  Sense strand starting at position 193 of SEQ ID NO: 317911
guuaacaaguaaccugauu

SEQ ID NO: 521992 - RNA, 19 nt, Artificial Sequence
  Description of Artificial Sequence: Synthetic oligonucleotide
  Antisense strand to SEQ ID NO: 521991
aaucagguuacuuguuaac

SEQ ID NO: 521993 - RNA, 19 nt, Artificial Sequence
  Description of Artificial Sequence: Synthetic oligonucleotide
  Sense strand starting at position 235 of SEQ ID NO: 317911
cgccuuauaauccagggau

SEQ ID NO: 521994 - RNA, 19 nt, Artificial Sequence
  Description of Artificial Sequence: Synthetic oligonucleotide
  Antisense strand to SEQ ID NO: 521993
aucccuggauuauaaggcg

SEQ ID NO: 521995 - RNA, 19 nt, Artificial Sequence
  Description of Artificial Sequence: Synthetic oligonucleotide
  Sense strand starting at position 237 of SEQ ID NO: 317911
ccuuauaauccagggaucu

SEQ ID NO: 521996 - RNA, 19 nt, Artificial Sequence
  Description of Artificial Sequence: Synthetic oligonucleotide
  Antisense strand to SEQ ID NO: 521995
agaucccuggauuauaagg

SEQ ID NO: 521997 - RNA, 19 nt, Artificial Sequence
  Description of Artificial Sequence: Synthetic oligonucleotide
  Sense strand starting at position 238 of SEQ ID NO: 317911
cuuauaauccagggaucuc

SEQ ID NO: 521998 - RNA, 19 nt, Artificial Sequence
  Description of Artificial Sequence: Synthetic oligonucleotide
  Antisense strand to SEQ ID NO: 521997
gagaucccuggauuauaag

SEQ ID NO: 521999 - RNA, 19 nt, Artificial Sequence
  Description of Artificial Sequence: Synthetic oligonucleotide
  Sense strand starting at position 302 of SEQ ID NO: 317911
gcaugcuuccuacagggau

SEQ ID NO: 522000 - RNA, 19 nt, Artificial Sequence
  Description of Artificial Sequence: Synthetic oligonucleotide
  Antisense strand to SEQ ID NO: 521999
aucccuguaggaagcaugc

SEQ ID NO: 522001 - RNA, 19 nt, Artificial Sequence
  Description of Artificial Sequence: Synthetic oligonucleotide
  Sense strand starting at position 335 of SEQ ID NO: 317911
gauguugaaucagcuauac

SEQ ID NO: 522002 - RNA, 19 nt, Artificial Sequence
  Description of Artificial Sequence: Synthetic oligonucleotide
  Antisense strand to SEQ ID NO: 522001
guauagcugauucaacauc

SEQ ID NO: 522003 - RNA, 19 nt, Artificial Sequence
  Description of Artificial Sequence: Synthetic oligonucleotide
  Sense strand starting at position 434 of SEQ ID NO: 317911
agagguguccauuacaguu

SEQ ID NO: 522004 - RNA, 19 nt, Artificial Sequence
  Description of Artificial Sequence: Synthetic oligonucleotide
  Antisense strand to SEQ ID NO: 522003
aacuguaauggacaccucu

SEQ ID NO: 522005 - RNA, 19 nt, Artificial Sequence
  Description of Artificial Sequence: Synthetic oligonucleotide
  Sense strand starting at position 466 of SEQ ID NO: 317911
ggaacuaaaugccuuuauu

SEQ ID NO: 522006 - RNA, 19 nt, Artificial Sequence
  Description of Artificial Sequence: Synthetic oligonucleotide
  Antisense strand to SEQ ID NO: 522005
aauaaaggcauuuaguucc

SEQ ID NO: 522007 - RNA, 19 nt, Artificial Sequence
  Description of Artificial Sequence: Synthetic oligonucleotide
  Sense strand starting at position 483 of SEQ ID NO: 317911
uucugaugcugauuaagaa

SEQ ID NO: 522008 - RNA, 19 nt, Artificial Sequence
  Description of Artificial Sequence: Synthetic oligonucleotide
  Antisense strand to SEQ ID NO: 522007
uucuuaaucagcaucagaa

SEQ ID NO: 522009 - RNA, 19 nt, Artificial Sequence
  Description of Artificial Sequence: Synthetic oligonucleotide
  Sense strand starting at position 623 of SEQ ID NO: 317911
uuacuucgucuuuaugaag

SEQ ID NO: 522010 - RNA, 19 nt, Artificial Sequence
  Description of Artificial Sequence: Synthetic oligonucleotide
  Antisense strand to SEQ ID NO: 522009
cuucauaaagacgaaguaa

SEQ ID NO: 522011 - RNA, 19 nt, Artificial Sequence
  Description of Artificial Sequence: Synthetic oligonucleotide
  Sense strand starting at position 982 of SEQ ID NO: 317911
agggucaacuggucaaaua

SEQ ID NO: 522012 - RNA, 19 nt, Artificial Sequence
  Description of Artificial Sequence: Synthetic oligonucleotide
  Antisense strand to SEQ ID NO: 522011
uauuugaccaguugacccu

SEQ ID NO: 522013 - RNA, 19 nt, Artificial Sequence
  Description of Artificial Sequence: Synthetic oligonucleotide
  Sense strand starting at position 1267 of SEQ ID NO: 317911
ugcgcaaucagcucgcuaa

SEQ ID NO: 522014 - RNA, 19 nt, Artificial Sequence
  Description of Artificial Sequence: Synthetic oligonucleotide
  Antisense strand to SEQ ID NO: 522013
uuagcgagcugauugcgca

SEQ ID NO: 522015 - RNA, 19 nt, Artificial Sequence
  Description of Artificial Sequence: Synthetic oligonucleotide
  Sense strand starting at position 1310 of SEQ ID NO: 317911
ggaggaagucuccggaguu

SEQ ID NO: 522016 - RNA, 19 nt, Artificial Sequence
  Description of Artificial Sequence: Synthetic oligonucleotide
  Antisense strand to SEQ ID NO: 522015
aacuccggagacuuccucc

SEQ ID NO: 522017 - RNA, 19 nt, Artificial Sequence
  Description of Artificial Sequence: Synthetic oligonucleotide
  Sense strand starting at position 1344 of SEQ ID NO: 317911
augacuuaguguuuacaaa

SEQ ID NO: 522018 - RNA, 19 nt, Artificial Sequence
  Description of Artificial Sequence: Synthetic oligonucleotide
  Antisense strand to SEQ ID NO: 522017
uuuguaaacacuaagucau

SEQ ID NO: 522019 - RNA, 19 nt, Artificial Sequence
  Description of Artificial Sequence: Synthetic oligonucleotide
  Sense strand starting at position 1345 of SEQ ID NO: 317911
ugacuuaguguuuacaaag

SEQ ID NO: 522020 - RNA, 19 nt, Artificial Sequence
  Description of Artificial Sequence: Synthetic oligonucleotide
  Antisense strand to SEQ ID NO: 522019
cuuuguaaacacuaaguca

SEQ ID NO: 522021 - RNA, 19 nt, Artificial Sequence
  Description of Artificial Sequence: Synthetic oligonucleotide
  Sense strand starting at position 1616 of SEQ ID NO: 317911
gggauucguagagaugggu

SEQ ID NO: 522022 - RNA, 19 nt, Artificial Sequence
  Description of Artificial Sequence: Synthetic oligonucleotide
  Antisense strand to SEQ ID NO: 522021
acccaucucuacgaauccc

SEQ ID NO: 522023 - RNA, 19 nt, Artificial Sequence
  Description of Artificial Sequence: Synthetic oligonucleotide
  Sense strand starting at position 1732 of SEQ ID NO: 317911
ccagguuucucaccuugga

SEQ ID NO: 522024 - RNA, 19 nt, Artificial Sequence
  Description of Artificial Sequence: Synthetic oligonucleotide
  Antisense strand to SEQ ID NO: 522023
uccaaggugagaaaccugg

SEQ ID NO: 522025 - RNA, 19 nt, Artificial Sequence
  Description of Artificial Sequence: Synthetic oligonucleotide
  Sense strand starting at position 2225 of SEQ ID NO: 317911
gcgaacuaccuuuaaucuu

SEQ ID NO: 522026 - RNA, 19 nt, Artificial Sequence
  Description of Artificial Sequence: Synthetic oligonucleotide
  Antisense strand to SEQ ID NO: 522025
aagauuaaagguaguucgc

SEQ ID NO: 522027 - RNA, 19 nt, Artificial Sequence
  Description of Artificial Sequence: Synthetic oligonucleotide
  Sense strand starting at position 2283 of SEQ ID NO: 317911
cuuuccugacugugggaaa

SEQ ID NO: 522028 - RNA, 19 nt, Artificial Sequence
  Description of Artificial Sequence: Synthetic oligonucleotide
  Antisense strand to SEQ ID NO: 522027
uuucccacagucaggaaag

SEQ ID NO: 522029 - RNA, 19 nt, Artificial Sequence
  Description of Artificial Sequence: Synthetic oligonucleotide
  Sense strand starting at position 2498 of SEQ ID NO: 317911
gugccaaagcuuuagagaa

SEQ ID NO: 522030 - RNA, 19 nt, Artificial Sequence
  Description of Artificial Sequence: Synthetic oligonucleotide
  Antisense strand to SEQ ID NO: 522029
uucucuaaagcuuuggcac

SEQ ID NO: 522031 - RNA, 19 nt, Artificial Sequence
  Description of Artificial Sequence: Synthetic oligonucleotide
  Sense strand starting at position 2508 of SEQ ID NO: 317911
uuuagagaauuaucuugcu

SEQ ID NO: 522032 - RNA, 19 nt, Artificial Sequence
  Description of Artificial Sequence: Synthetic oligonucleotide
  Antisense strand to SEQ ID NO: 522031
agcaagauaauucucuaaa

SEQ ID NO: 522033 - RNA, 19 nt, Artificial Sequence
  Description of Artificial Sequence: Synthetic oligonucleotide
  Sense strand starting at position 2554 of SEQ ID NO: 317911
guaugauuauucuucccau

SEQ ID NO: 522034 - RNA, 19 nt, Artificial Sequence
  Description of Artificial Sequence: Synthetic oligonucleotide
  Antisense strand to SEQ ID NO: 522033
augggaagaauaaucauac

SEQ ID NO: 522035 - RNA, 19 nt, Artificial Sequence
  Description of Artificial Sequence: Synthetic oligonucleotide
  Sense strand starting at position 2581 of SEQ ID NO: 317911
cgaggaaagugagcuuaga

SEQ ID NO: 522036 - RNA, 19 nt, Artificial Sequence
  Description of Artificial Sequence: Synthetic oligonucleotide
  Antisense strand to SEQ ID NO: 522035
ucuaagcucacuuuccucg

SEQ ID NO: 522037 - RNA, 19 nt, Artificial Sequence
  Description of Artificial Sequence: Synthetic oligonucleotide
  Sense strand starting at position 2605 of SEQ ID NO: 317911
cagauaaauuggccagagu

SEQ ID NO: 522038 - RNA, 19 nt, Artificial Sequence
  Description of Artificial Sequence: Synthetic oligonucleotide
  Antisense strand to SEQ ID NO: 522037
acucuggccaauuuaucug

SEQ ID NO: 522039 - RNA, 19 nt, Artificial Sequence
  Description of Artificial Sequence: Synthetic oligonucleotide
  Sense strand starting at position 2608 of SEQ ID NO: 317911
auaaauuggccagaguuac

SEQ ID NO: 522040 - RNA, 19 nt, Artificial Sequence
  Description of Artificial Sequence: Synthetic oligonucleotide
  Antisense strand to SEQ ID NO: 522039
guaacucuggccaauuuau

SEQ ID NO: 522041 - RNA, 19 nt, Artificial Sequence
  Description of Artificial Sequence: Synthetic oligonucleotide
  Sense strand starting at position 2811 of SEQ ID NO: 317911
ggaugagugcaugaggguu

SEQ ID NO: 522042 - RNA, 19 nt, Artificial Sequence
  Description of Artificial Sequence: Synthetic oligonucleotide
  Antisense strand to SEQ ID NO: 522041
aacccucaugcacucaucc

SEQ ID NO: 522043 - RNA, 19 nt, Artificial Sequence
  Description of Artificial Sequence: Synthetic oligonucleotide
  Sense strand starting at position 2823 of SEQ ID NO: 317911
gaggguuggcaucauauug

SEQ ID NO: 522044 - RNA, 19 nt, Artificial Sequence
  Description of Artificial Sequence: Synthetic oligonucleotide
  Antisense strand to SEQ ID NO: 522043
caauaugaugccaacccuc

SEQ ID NO: 522045 - RNA, 19 nt, Artificial Sequence
  Description of Artificial Sequence: Synthetic oligonucleotide
  Sense strand starting at position 3259 of SEQ ID NO: 317911
aaaggauucgcuuguagaa

SEQ ID NO: 522046 - RNA, 19 nt, Artificial Sequence
  Description of Artificial Sequence: Synthetic oligonucleotide
  Antisense strand to SEQ ID NO: 522045
uucuacaagcgaauccuuu

SEQ ID NO: 522047 - RNA, 19 nt, Artificial Sequence
  Description of Artificial Sequence: Synthetic oligonucleotide
  Sense strand starting at position 3266 of SEQ ID NO: 317911
ucgcuuguagaagaggauu

SEQ ID NO: 522048 - RNA, 19 nt, Artificial Sequence
  Description of Artificial Sequence: Synthetic oligonucleotide
  Antisense strand to SEQ ID NO: 522047
aauccucuucuacaagcga

SEQ ID NO: 522049 - RNA, 19 nt, Artificial Sequence
  Description of Artificial Sequence: Synthetic oligonucleotide
  Sense strand starting at position 3296 of SEQ ID NO: 317911
ugaguugcuccagagagca

SEQ ID NO: 522050 - RNA, 19 nt, Artificial Sequence
  Description of Artificial Sequence: Synthetic oligonucleotide
  Antisense strand to SEQ ID NO: 522049
ugcucucuggagcaacuca

SEQ ID NO: 522051 - RNA, 19 nt, Artificial Sequence
  Description of Artificial Sequence: Synthetic oligonucleotide
  Sense strand starting at position 3298 of SEQ ID NO: 317911
aguugcuccagagagcaaa

SEQ ID NO: 522052 - RNA, 19 nt, Artificial Sequence
  Description of Artificial Sequence: Synthetic oligonucleotide
  Antisense strand to SEQ ID NO: 522051
uuugcucucuggagcaacu

SEQ ID NO: 522053 - RNA, 19 nt, Artificial Sequence
  Description of Artificial Sequence: Synthetic oligonucleotide
  Sense strand starting at position 3614 of SEQ ID NO: 317911
gguuuaaagguuuauaggu

SEQ ID NO: 522054 - RNA, 19 nt, Artificial Sequence
  Description of Artificial Sequence: Synthetic oligonucleotide
  Antisense strand to SEQ ID NO: 522053
accuauaaaccuuuaaacc

SEQ ID NO: 522055 - RNA, 19 nt, Artificial Sequence
  Description of Artificial Sequence: Synthetic oligonucleotide
  Sense strand starting at position 3656 of SEQ ID NO: 317911
acuagugacuggguuugau

SEQ ID NO: 522056 - RNA, 19 nt, Artificial Sequence
  Description of Artificial Sequence: Synthetic oligonucleotide
  Antisense strand to SEQ ID NO: 522055
aucaaacccagucacuagu

SEQ ID NO: 522057 - RNA, 19 nt, Artificial Sequence
  Description of Artificial Sequence: Synthetic oligonucleotide
  Sense strand starting at position 3659 of SEQ ID NO: 317911
agugacuggguuugauaca

SEQ ID NO: 522058 - RNA, 19 nt, Artificial Sequence
  Description of Artificial Sequence: Synthetic oligonucleotide
  Antisense strand to SEQ ID NO: 522057
uguaucaaacccagucacu

SEQ ID NO: 522059 - RNA, 19 nt, Artificial Sequence
  Description of Artificial Sequence: Synthetic oligonucleotide
  Sense strand starting at position 3664 of SEQ ID NO: 317911
cuggguuugauacauggua

SEQ ID NO: 522060 - RNA, 19 nt, Artificial Sequence
  Description of Artificial Sequence: Synthetic oligonucleotide
  Antisense strand to SEQ ID NO: 522059
uaccauguaucaaacccag

SEQ ID NO: 522061 - RNA, 19 nt, Artificial Sequence
  Description of Artificial Sequence: Synthetic oligonucleotide
  Sense strand starting at position 3666 of SEQ ID NO: 317911
ggguuugauacaugguaga

SEQ ID NO: 522062 - RNA, 19 nt, Artificial Sequence
  Description of Artificial Sequence: Synthetic oligonucleotide
  Antisense strand to SEQ ID NO: 522061
ucuaccauguaucaaaccc

SEQ ID NO: 522063 - RNA, 19 nt, Artificial Sequence
  Description of Artificial Sequence: Synthetic oligonucleotide
  Sense strand starting at position 3712 of SEQ ID NO: 317911
ccuuucucugaggagucuu

SEQ ID NO: 522064 - RNA, 19 nt, Artificial Sequence
  Description of Artificial Sequence: Synthetic oligonucleotide
  Antisense strand to SEQ ID NO: 522063
aagacuccucagagaaagg

SEQ ID NO: 522065 - RNA, 19 nt, Artificial Sequence
  Description of Artificial Sequence: Synthetic oligonucleotide
  Sense strand starting at position 105 of SEQ ID NO: 317912
agagaauggugccugaaga

SEQ ID NO: 522066 - RNA, 19 nt, Artificial Sequence
  Description of Artificial Sequence: Synthetic oligonucleotide
  Antisense strand to SEQ ID NO: 522065
ucuucaggcaccauucucu

SEQ ID NO: 522067 - RNA, 19 nt, Artificial Sequence
  Description of Artificial Sequence: Synthetic oligonucleotide
  Sense strand starting at position 106 of SEQ ID NO: 317912
gagaauggugccugaagag

SEQ ID NO: 522068 - RNA, 19 nt, Artificial Sequence
  Description of Artificial Sequence: Synthetic oligonucleotide
  Antisense strand to SEQ ID NO: 522067
cucuucaggcaccauucuc

SEQ ID NO: 522069 - RNA, 19 nt, Artificial Sequence
  Description of Artificial Sequence: Synthetic oligonucleotide
  Sense strand starting at position 190 of SEQ ID NO: 317912
gaaaguuucugggauuuag

SEQ ID NO: 522070 - RNA, 19 nt, Artificial Sequence
  Description of Artificial Sequence: Synthetic oligonucleotide
  Antisense strand to SEQ ID NO: 522069
cuaaaucccagaaacuuuc

SEQ ID NO: 522071 - RNA, 19 nt, Artificial Sequence
  Description of Artificial Sequence: Synthetic oligonucleotide
  Sense strand starting at position 399 of SEQ ID NO: 317912
gcuuccauugggcauaaua

SEQ ID NO: 522072 - RNA, 19 nt, Artificial Sequence
  Description of Artificial Sequence: Synthetic oligonucleotide
  Antisense strand to SEQ ID NO: 522071
uauuaugcccaauggaagc

SEQ ID NO: 522073 - RNA, 19 nt, Artificial Sequence
  Description of Artificial Sequence: Synthetic oligonucleotide
  Sense strand starting at position 401 of SEQ ID NO: 317912
uuccauugggcauaauauu

SEQ ID NO: 522074 - RNA, 19 nt, Artificial Sequence
  Description of Artificial Sequence: Synthetic oligonucleotide
  Antisense strand to SEQ ID NO: 522073
aauauuaugcccaauggaa

SEQ ID NO: 522075 - RNA, 19 nt, Artificial Sequence
  Description of Artificial Sequence: Synthetic oligonucleotide
  Sense strand starting at position 1054 of SEQ ID NO: 317912
uaacaauguugacuggagu

SEQ ID NO: 522076 - RNA, 19 nt, Artificial Sequence
  Description of Artificial Sequence: Synthetic oligonucleotide
  Antisense strand to SEQ ID NO: 522075
acuccagucaacauuguua

SEQ ID NO: 522077 - RNA, 19 nt, Artificial Sequence
  Description of Artificial Sequence: Synthetic oligonucleotide
  Sense strand starting at position 1150 of SEQ ID NO: 317912
uaacauugugauggguaaa

SEQ ID NO: 522078 - RNA, 19 nt, Artificial Sequence
  Description of Artificial Sequence: Synthetic oligonucleotide
  Antisense strand to SEQ ID NO: 522077
uuuacccaucacaauguua

SEQ ID NO: 522079 - RNA, 19 nt, Artificial Sequence
  Description of Artificial Sequence: Synthetic oligonucleotide
  Sense strand starting at position 1153 of SEQ ID NO: 317912
cauugugauggguaaagug

SEQ ID NO: 522080 - RNA, 19 nt, Artificial Sequence
  Description of Artificial Sequence: Synthetic oligonucleotide
  Antisense strand to SEQ ID NO: 522079
cacuuuacccaucacaaug

SEQ ID NO: 522081 - RNA, 19 nt, Artificial Sequence
  Description of Artificial Sequence: Synthetic oligonucleotide
  Sense strand starting at position 1194 of SEQ ID NO: 317912
aauaguauuugggagaccu

SEQ ID NO: 522082 - RNA, 19 nt, Artificial Sequence
  Description of Artificial Sequence: Synthetic oligonucleotide
  Antisense strand to SEQ ID NO: 522081
aggucucccaaauacuauu

SEQ ID NO: 522083 - RNA, 19 nt, Artificial Sequence
  Description of Artificial Sequence: Synthetic oligonucleotide
  Sense strand starting at position 1288 of SEQ ID NO: 317912
cggaaauacugacuuauua

SEQ ID NO: 522084 - RNA, 19 nt, Artificial Sequence
  Description of Artificial Sequence: Synthetic oligonucleotide
  Antisense strand to SEQ ID NO: 522083
uaauaagucaguauuuccg

SEQ ID NO: 522085 - RNA, 19 nt, Artificial Sequence
  Description of Artificial Sequence: Synthetic oligonucleotide
  Sense strand starting at position 1371 of SEQ ID NO: 317912
augucucaccaagagguuu

SEQ ID NO: 522086 - RNA, 19 nt, Artificial Sequence
  Description of Artificial Sequence: Synthetic oligonucleotide
  Antisense strand to SEQ ID NO: 522085
aaaccucuuggugagacau

SEQ ID NO: 522087 - RNA, 19 nt, Artificial Sequence
  Description of Artificial Sequence: Synthetic oligonucleotide
  Sense strand starting at position 1492 of SEQ ID NO: 317912
gacuuaaucguagacaucu

SEQ ID NO: 522088 - RNA, 19 nt, Artificial Sequence
  Description of Artificial Sequence: Synthetic oligonucleotide
  Antisense strand to SEQ ID NO: 522087
agaugucuacgauuaaguc

SEQ ID NO: 522089 - RNA, 19 nt, Artificial Sequence
  Description of Artificial Sequence: Synthetic oligonucleotide
  Sense strand starting at position 1549 of SEQ ID NO: 317912
gggaacacuuagucuauga

SEQ ID NO: 522090 - RNA, 19 nt, Artificial Sequence
  Description of Artificial Sequence: Synthetic oligonucleotide
  Antisense strand to SEQ ID NO: 522089
ucauagacuaaguguuccc

SEQ ID NO: 522091 - RNA, 19 nt, Artificial Sequence
  Description of Artificial Sequence: Synthetic oligonucleotide
  Sense strand starting at position 1559 of SEQ ID NO: 317912
agucuaugaccagguuuga

SEQ ID NO: 522092 - RNA, 19 nt, Artificial Sequence
  Description of Artificial Sequence: Synthetic oligonucleotide
  Antisense strand to SEQ ID NO: 522091
ucaaaccuggucauagacu

SEQ ID NO: 522093 - RNA, 19 nt, Artificial Sequence
  Description of Artificial Sequence: Synthetic oligonucleotide
  Sense strand starting at position 1572 of SEQ ID NO: 317912
guuugaauagagugaauga

SEQ ID NO: 522094 - RNA, 19 nt, Artificial Sequence
  Description of Artificial Sequence: Synthetic oligonucleotide
  Antisense strand to SEQ ID NO: 522093
ucauucacucuauucaaac

SEQ ID NO: 522095 - RNA, 19 nt, Artificial Sequence
  Description of Artificial Sequence: Synthetic oligonucleotide
  Sense strand starting at position 1661 of SEQ ID NO: 317912
uugugugagaugcaaagaa

SEQ ID NO: 522096 - RNA, 19 nt, Artificial Sequence
  Description of Artificial Sequence: Synthetic oligonucleotide
  Antisense strand to SEQ ID NO: 522095
uucuuugcaucucacacaa

SEQ ID NO: 522097 - RNA, 19 nt, Artificial Sequence
  Description of Artificial Sequence: Synthetic oligonucleotide
  Sense strand starting at position 1837 of SEQ ID NO: 317912
ucucuuaaacguuaugaaa

SEQ ID NO: 522098 - RNA, 19 nt, Artificial Sequence
  Description of Artificial Sequence: Synthetic oligonucleotide
  Antisense strand to SEQ ID NO: 522097
uuucauaacguuuaagaga

SEQ ID NO: 522099 - RNA, 19 nt, Artificial Sequence
  Description of Artificial Sequence: Synthetic oligonucleotide
  Sense strand starting at position 2047 of SEQ ID NO: 317912
uuacguuaucccuggagaa

SEQ ID NO: 522100 - RNA, 19 nt, Artificial Sequence
  Description of Artificial Sequence: Synthetic oligonucleotide
  Antisense strand to SEQ ID NO: 522099
uucuccagggauaacguaa

SEQ ID NO: 522101 - RNA, 19 nt, Artificial Sequence
  Description of Artificial Sequence: Synthetic oligonucleotide
  Sense strand starting at position 2048 of SEQ ID NO: 317912
uacguuaucccuggagaaa

SEQ ID NO: 522102 - RNA, 19 nt, Artificial Sequence
  Description of Artificial Sequence: Synthetic oligonucleotide
  Antisense strand to SEQ ID NO: 522101
uuucuccagggauaacgua

SEQ ID NO: 522103 - RNA, 19 nt, Artificial Sequence
  Description of Artificial Sequence: Synthetic oligonucleotide
  Sense strand starting at position 2385 of SEQ ID NO: 317912
caaauugagcggugaauca

SEQ ID NO: 522104 - RNA, 19 nt, Artificial Sequence
  Description of Artificial Sequence: Synthetic oligonucleotide
  Antisense strand to SEQ ID NO: 522103
ugauucaccgcucaauuug

SEQ ID NO: 522105 - RNA, 19 nt, Artificial Sequence
  Description of Artificial Sequence: Synthetic oligonucleotide
  Sense strand starting at position 2661 of SEQ ID NO: 317912
ccuuuauuccaugaguguu

SEQ ID NO: 522106 - RNA, 19 nt, Artificial Sequence
  Description of Artificial Sequence: Synthetic oligonucleotide
  Antisense strand to SEQ ID NO: 522105
aacacucauggaauaaagg

SEQ ID NO: 522107 - RNA, 19 nt, Artificial Sequence
  Description of Artificial Sequence: Synthetic oligonucleotide
  Sense strand starting at position 2671 of SEQ ID NO: 317912
augaguguuggugaauaag

SEQ ID NO: 522108 - RNA, 19 nt, Artificial Sequence
  Description of Artificial Sequence: Synthetic oligonucleotide
  Antisense strand to SEQ ID NO: 522107
cuuauucaccaacacucau

SEQ ID NO: 522109 - RNA, 19 nt, Artificial Sequence
  Description of Artificial Sequence: Synthetic oligonucleotide
  Sense strand starting at position 2824 of SEQ ID NO: 317912
uguuauauucuguagagua

SEQ ID NO: 522110 - RNA, 19 nt, Artificial Sequence
  Description of Artificial Sequence: Synthetic oligonucleotide
  Antisense strand to SEQ ID NO: 522109
uacucuacagaauauaaca

SEQ ID NO: 522111 - RNA, 19 nt, Artificial Sequence
  Description of Artificial Sequence: Synthetic oligonucleotide
  Sense strand starting at position 2826 of SEQ ID NO: 317912
uuauauucuguagaguaug

SEQ ID NO: 522112 - RNA, 19 nt, Artificial Sequence
  Description of Artificial Sequence: Synthetic oligonucleotide
  Antisense strand to SEQ ID NO: 522111
cauacucuacagaauauaa

SEQ ID NO: 522113 - RNA, 19 nt, Artificial Sequence
  Description of Artificial Sequence: Synthetic oligonucleotide
  Sense strand starting at position 2829 of SEQ ID NO: 317912
uauucuguagaguaugacu

SEQ ID NO: 522114 - RNA, 19 nt, Artificial Sequence
  Description of Artificial Sequence: Synthetic oligonucleotide
  Antisense strand to SEQ ID NO: 522113
agucauacucuacagaaua

SEQ ID NO: 522115 - RNA, 19 nt, Artificial Sequence
  Description of Artificial Sequence: Synthetic oligonucleotide
  Sense strand starting at position 2831 of SEQ ID NO: 317912
uucuguagaguaugacuua

SEQ ID NO: 522116 - RNA, 19 nt, Artificial Sequence
  Description of Artificial Sequence: Synthetic oligonucleotide
  Antisense strand to SEQ ID NO: 522115
uaagucauacucuacagaa

SEQ ID NO: 522117 - RNA, 19 nt, Artificial Sequence
  Description of Artificial Sequence: Synthetic oligonucleotide
  Sense strand starting at position 2981 of SEQ ID NO: 317912
acuuaaaggcuagggauau

SEQ ID NO: 522118 - RNA, 19 nt, Artificial Sequence
  Description of Artificial Sequence: Synthetic oligonucleotide
  Antisense strand to SEQ ID NO: 522117
auaucccuagccuuuaagu

SEQ ID NO: 522119 - RNA, 19 nt, Artificial Sequence
  Description of Artificial Sequence: Synthetic oligonucleotide
  Sense strand starting at position 3007 of SEQ ID NO: 317912
agaaauugaucugcggaaa

SEQ ID NO: 522120 - RNA, 19 nt, Artificial Sequence
  Description of Artificial Sequence: Synthetic oligonucleotide
  Antisense strand to SEQ ID NO: 522119
uuuccgcagaucaauuucu

SEQ ID NO: 522121 - RNA, 19 nt, Artificial Sequence
  Description of Artificial Sequence: Synthetic oligonucleotide
  Sense strand starting at position 3008 of SEQ ID NO: 317912
gaaauugaucugcggaaac

SEQ ID NO: 522122 - RNA, 19 nt, Artificial Sequence
  Description of Artificial Sequence: Synthetic oligonucleotide
  Antisense strand to SEQ ID NO: 522121
guuuccgcagaucaauuuc

SEQ ID NO: 522123 - RNA, 19 nt, Artificial Sequence
  Description of Artificial Sequence: Synthetic oligonucleotide
  Sense strand starting at position 3010 of SEQ ID NO: 317912
aauugaucugcggaaaccu

SEQ ID NO: 522124 - RNA, 19 nt, Artificial Sequence
  Description of Artificial Sequence: Synthetic oligonucleotide
  Antisense strand to SEQ ID NO: 522123
agguuuccgcagaucaauu

SEQ ID NO: 522125 - RNA, 19 nt, Artificial Sequence
  Description of Artificial Sequence: Synthetic oligonucleotide
  Sense strand starting at position 3066 of SEQ ID NO: 317912
uacaaaggucaguguuuaa

SEQ ID NO: 522126 - RNA, 19 nt, Artificial Sequence
  Description of Artificial Sequence: Synthetic oligonucleotide
  Antisense strand to SEQ ID NO: 522125
uuaaacacugaccuuugua

SEQ ID NO: 522127 - RNA, 19 nt, Artificial Sequence
  Description of Artificial Sequence: Synthetic oligonucleotide
  Sense strand starting at position 3069 of SEQ ID NO: 317912
aaaggucaguguuuaauac

SEQ ID NO: 522128 - RNA, 19 nt, Artificial Sequence
  Description of Artificial Sequence: Synthetic oligonucleotide
  Antisense strand to SEQ ID NO: 522127
guauuaaacacugaccuuu

SEQ ID NO: 522129 - RNA, 19 nt, Artificial Sequence
  Description of Artificial Sequence: Synthetic oligonucleotide
  Sense strand starting at position 3070 of SEQ ID NO: 317912
aaggucaguguuuaauacu

SEQ ID NO: 522130 - RNA, 19 nt, Artificial Sequence
  Description of Artificial Sequence: Synthetic oligonucleotide
  Antisense strand to SEQ ID NO: 522129
aguauuaaacacugaccuu

SEQ ID NO: 522131 - RNA, 19 nt, Artificial Sequence
  Description of Artificial Sequence: Synthetic oligonucleotide
  Sense strand starting at position 3215 of SEQ ID NO: 317912
ucaggaauuuaugacuuga

SEQ ID NO: 522132 - RNA, 19 nt, Artificial Sequence
  Description of Artificial Sequence: Synthetic oligonucleotide
  Antisense strand to SEQ ID NO: 522131
ucaagucauaaauuccuga

SEQ ID NO: 522133 - RNA, 19 nt, Artificial Sequence
  Description of Artificial Sequence: Synthetic oligonucleotide
  Sense strand starting at position 3245 of SEQ ID NO: 317912
ccuaguuucuggucauuua

SEQ ID NO: 522134 - RNA, 19 nt, Artificial Sequence
  Description of Artificial Sequence: Synthetic oligonucleotide
  Antisense strand to SEQ ID NO: 522133
uaaaugaccagaaacuagg

SEQ ID NO: 522135 - RNA, 19 nt, Artificial Sequence
  Description of Artificial Sequence: Synthetic oligonucleotide
  Sense strand starting at position 3345 of SEQ ID NO: 317912
cagucuucuggugaacaac

SEQ ID NO: 522136 - RNA, 19 nt, Artificial Sequence
  Description of Artificial Sequence: Synthetic oligonucleotide
  Antisense strand to SEQ ID NO: 522135
guuguucaccagaagacug

SEQ ID NO: 522137 - RNA, 19 nt, Artificial Sequence
  Description of Artificial Sequence: Synthetic oligonucleotide
  Sense strand starting at position 3746 of SEQ ID NO: 317912
uuaaaccguugacuuaaau

SEQ ID NO: 522138 - RNA, 19 nt, Artificial Sequence
  Description of Artificial Sequence: Synthetic oligonucleotide
  Antisense strand to SEQ ID NO: 522137
auuuaagucaacgguuuaa

SEQ ID NO: 522139 - RNA, 19 nt, Artificial Sequence
  Description of Artificial Sequence: Synthetic oligonucleotide
  Sense strand starting at position 3790 of SEQ ID NO: 317912
caguuuggccuauaagacu

SEQ ID NO: 522140 - RNA, 19 nt, Artificial Sequence
  Description of Artificial Sequence: Synthetic oligonucleotide
  Antisense strand to SEQ ID NO: 522139
agucuuauaggccaaacug

SEQ ID NO: 522141 - RNA, 19 nt, Artificial Sequence
  Description of Artificial Sequence: Synthetic oligonucleotide
  Sense strand starting at position 3842 of SEQ ID NO: 317912
ccuucucaucuggguagaa

SEQ ID NO: 522142 - RNA, 19 nt, Artificial Sequence
  Description of Artificial Sequence: Synthetic oligonucleotide
  Antisense strand to SEQ ID NO: 522141
uucuacccagaugagaagg

SEQ ID NO: 522143 - RNA, 19 nt, Artificial Sequence
  Description of Artificial Sequence: Synthetic oligonucleotide
  Sense strand starting at position 3843 of SEQ ID NO: 317912
cuucucaucuggguagaaa

SEQ ID NO: 522144 - RNA, 19 nt, Artificial Sequence
  Description of Artificial Sequence: Synthetic oligonucleotide
  Antisense strand to SEQ ID NO: 522143
uuucuacccagaugagaag

SEQ ID NO: 522145 - RNA, 19 nt, Artificial Sequence
  Description of Artificial Sequence: Synthetic oligonucleotide
  Sense strand starting at position 84 of SEQ ID NO: 317913
agagaauggugccugaaga

SEQ ID NO: 522146 - RNA, 19 nt, Artificial Sequence
  Description of Artificial Sequence: Synthetic oligonucleotide
  Antisense strand to SEQ ID NO: 522145
ucuucaggcaccauucucu

SEQ ID NO: 522147 - RNA, 19 nt, Artificial Sequence
  Description of Artificial Sequence: Synthetic oligonucleotide
  Sense strand starting at position 85 of SEQ ID NO: 317913
gagaauggugccugaagag

SEQ ID NO: 522148 - RNA, 19 nt, Artificial Sequence
  Description of Artificial Sequence: Synthetic oligonucleotide
  Antisense strand to SEQ ID NO: 522147
cucuucaggcaccauucuc

SEQ ID NO: 522149 - RNA, 19 nt, Artificial Sequence
  Description of Artificial Sequence: Synthetic oligonucleotide
  Sense strand starting at position 169 of SEQ ID NO: 317913
gaaaguuucugggauuuag

SEQ ID NO: 522150 - RNA, 19 nt, Artificial Sequence
  Description of Artificial Sequence: Synthetic oligonucleotide
  Antisense strand to SEQ ID NO: 522149
cuaaaucccagaaacuuuc

SEQ ID NO: 522151 - RNA, 19 nt, Artificial Sequence
  Description of Artificial Sequence: Synthetic oligonucleotide
  Sense strand starting at position 378 of SEQ ID NO: 317913
gcuuccauugggcauaaua

SEQ ID NO: 522152 - RNA, 19 nt, Artificial Sequence
  Description of Artificial Sequence: Synthetic oligonucleotide
  Antisense strand to SEQ ID NO: 522151
uauuaugcccaauggaagc

SEQ ID NO: 522153 - RNA, 19 nt, Artificial Sequence
  Description of Artificial Sequence: Synthetic oligonucleotide
  Sense strand starting at position 380 of SEQ ID NO: 317913
uuccauugggcauaauauu

SEQ ID NO: 522154 - RNA, 19 nt, Artificial Sequence
  Description of Artificial Sequence: Synthetic oligonucleotide
  Antisense strand to SEQ ID NO: 522153
aauauuaugcccaauggaa

SEQ ID NO: 522155 - RNA, 19 nt, Artificial Sequence
  Description of Artificial Sequence: Synthetic oligonucleotide
  Sense strand starting at position 1033 of SEQ ID NO: 317913
uaacaauguugacuggagu

SEQ ID NO: 522156 - RNA, 19 nt, Artificial Sequence
  Description of Artificial Sequence: Synthetic oligonucleotide
  Antisense strand to SEQ ID NO: 522155
acuccagucaacauuguua

SEQ ID NO: 522157 - RNA, 19 nt, Artificial Sequence
  Description of Artificial Sequence: Synthetic oligonucleotide
  Sense strand starting at position 1129 of SEQ ID NO: 317913
uaacauugugauggguaaa

SEQ ID NO: 522158 - RNA, 19 nt, Artificial Sequence
  Description of Artificial Sequence: Synthetic oligonucleotide
  Antisense strand to SEQ ID NO: 522157
uuuacccaucacaauguua

SEQ ID NO: 522159 - RNA, 19 nt, Artificial Sequence
  Description of Artificial Sequence: Synthetic oligonucleotide
  Sense strand starting at position 1132 of SEQ ID NO: 317913
cauugugauggguaaagug

SEQ ID NO: 522160 - RNA, 19 nt, Artificial Sequence
  Description of Artificial Sequence: Synthetic oligonucleotide
  Antisense strand to SEQ ID NO: 522159
cacuuuacccaucacaaug

SEQ ID NO: 522161 - RNA, 19 nt, Artificial Sequence
  Description of Artificial Sequence: Synthetic oligonucleotide
  Sense strand starting at position 1173 of SEQ ID NO: 317913
aauaguauuugggagaccu

SEQ ID NO: 522162 - RNA, 19 nt, Artificial Sequence
  Description of Artificial Sequence: Synthetic oligonucleotide
  Antisense strand to SEQ ID NO: 522161
aggucucccaaauacuauu

SEQ ID NO: 522163 - RNA, 19 nt, Artificial Sequence
  Description of Artificial Sequence: Synthetic oligonucleotide
  Sense strand starting at position 1267 of SEQ ID NO: 317913
cggaaauacugacuuauua

SEQ ID NO: 522164 - RNA, 19 nt, Artificial Sequence
  Description of Artificial Sequence: Synthetic oligonucleotide
  Antisense strand to SEQ ID NO: 522163
uaauaagucaguauuuccg

SEQ ID NO: 522165 - RNA, 19 nt, Artificial Sequence
  Description of Artificial Sequence: Synthetic oligonucleotide
  Sense strand starting at position 1350 of SEQ ID NO: 317913
augucucaccaagagguuu

SEQ ID NO: 522166 - RNA, 19 nt, Artificial Sequence
  Description of Artificial Sequence: Synthetic oligonucleotide
  Antisense strand to SEQ ID NO: 522165
aaaccucuuggugagacau

SEQ ID NO: 522167 - RNA, 19 nt, Artificial Sequence
  Description of Artificial Sequence: Synthetic oligonucleotide
  Sense strand starting at position 1471 of SEQ ID NO: 317913
gacuuaaucguagacaucu

SEQ ID NO: 522168 - RNA, 19 nt, Artificial Sequence
  Description of Artificial Sequence: Synthetic oligonucleotide
  Antisense strand to SEQ ID NO: 522167
agaugucuacgauuaaguc

SEQ ID NO: 522169 - RNA, 19 nt, Artificial Sequence
  Description of Artificial Sequence: Synthetic oligonucleotide
  Sense strand starting at position 1528 of SEQ ID NO: 317913
gggaacacuuagucuauga

SEQ ID NO: 522170 - RNA, 19 nt, Artificial Sequence
  Description of Artificial Sequence: Synthetic oligonucleotide
  Antisense strand to SEQ ID NO: 522169
ucauagacuaaguguuccc

SEQ ID NO: 522171 - RNA, 19 nt, Artificial Sequence
  Description of Artificial Sequence: Synthetic oligonucleotide
  Sense strand starting at position 1538 of SEQ ID NO: 317913
agucuaugaccagguuuga

SEQ ID NO: 522172 - RNA, 19 nt, Artificial Sequence
  Description of Artificial Sequence: Synthetic oligonucleotide
  Antisense strand to SEQ ID NO: 522171
ucaaaccuggucauagacu

SEQ ID NO: 522173 - RNA, 19 nt, Artificial Sequence
  Description of Artificial Sequence: Synthetic oligonucleotide
  Sense strand starting at position 1551 of SEQ ID NO: 317913
guuugaauagagugaauga

SEQ ID NO: 522174 - RNA, 19 nt, Artificial Sequence
  Description of Artificial Sequence: Synthetic oligonucleotide
  Antisense strand to SEQ ID NO: 522173
ucauucacucuauucaaac

SEQ ID NO: 522175 - RNA, 19 nt, Artificial Sequence
  Description of Artificial Sequence: Synthetic oligonucleotide
  Sense strand starting at position 1640 of SEQ ID NO: 317913
uugugugagaugcaaagaa

SEQ ID NO: 522176 - RNA, 19 nt, Artificial Sequence
  Description of Artificial Sequence: Synthetic oligonucleotide
  Antisense strand to SEQ ID NO: 522175
uucuuugcaucucacacaa

SEQ ID NO: 522177 - RNA, 19 nt, Artificial Sequence
  Description of Artificial Sequence: Synthetic oligonucleotide
  Sense strand starting at position 1816 of SEQ ID NO: 317913
ucucuuaaacguuaugaaa

SEQ ID NO: 522178 - RNA, 19 nt, Artificial Sequence
  Description of Artificial Sequence: Synthetic oligonucleotide
  Antisense strand to SEQ ID NO: 522177
uuucauaacguuuaagaga

SEQ ID NO: 522179 - RNA, 19 nt, Artificial Sequence
  Description of Artificial Sequence: Synthetic oligonucleotide
  Sense strand starting at position 2026 of SEQ ID NO: 317913
uuacguuaucccuggagaa

SEQ ID NO: 522180 - RNA, 19 nt, Artificial Sequence
  Description of Artificial Sequence: Synthetic oligonucleotide
  Antisense strand to SEQ ID NO: 522179
uucuccagggauaacguaa

SEQ ID NO: 522181 - RNA, 19 nt, Artificial Sequence
  Description of Artificial Sequence: Synthetic oligonucleotide
  Sense strand starting at position 2027 of SEQ ID NO: 317913
uacguuaucccuggagaaa

SEQ ID NO: 522182 - RNA, 19 nt, Artificial Sequence
  Description of Artificial Sequence: Synthetic oligonucleotide
  Antisense strand to SEQ ID NO: 522181
uuucuccagggauaacgua

SEQ ID NO: 522183 - RNA, 19 nt, Artificial Sequence
  Description of Artificial Sequence: Synthetic oligonucleotide
  Sense strand starting at position 2364 of SEQ ID NO: 317913
caaauugagcggugaauca

SEQ ID NO: 522184 - RNA, 19 nt, Artificial Sequence
  Description of Artificial Sequence: Synthetic oligonucleotide
  Antisense strand to SEQ ID NO: 522183
ugauucaccgcucaauuug

SEQ ID NO: 522185 - RNA, 19 nt, Artificial Sequence
  Description of Artificial Sequence: Synthetic oligonucleotide
  Sense strand starting at position 2640 of SEQ ID NO: 317913
ccuuuauuccaugaguguu

SEQ ID NO: 522186 - RNA, 19 nt, Artificial Sequence
  Description of Artificial Sequence: Synthetic oligonucleotide
  Antisense strand to SEQ ID NO: 522185
aacacucauggaauaaagg

SEQ ID NO: 522187 - RNA, 19 nt, Artificial Sequence
  Description of Artificial Sequence: Synthetic oligonucleotide
  Sense strand starting at position 2650 of SEQ ID NO: 317913
augaguguuggugaauaag

SEQ ID NO: 522188 - RNA, 19 nt, Artificial Sequence
  Description of Artificial Sequence: Synthetic oligonucleotide
  Antisense strand to SEQ ID NO: 522187
cuuauucaccaacacucau

SEQ ID NO: 522189 - RNA, 19 nt, Artificial Sequence
  Description of Artificial Sequence: Synthetic oligonucleotide
  Sense strand starting at position 2803 of SEQ ID NO: 317913
uguuauauucuguagagua

SEQ ID NO: 522190 - RNA, 19 nt, Artificial Sequence
  Description of Artificial Sequence: Synthetic oligonucleotide
  Antisense strand to SEQ ID NO: 522189
uacucuacagaauauaaca

SEQ ID NO: 522191 - RNA, 19 nt, Artificial Sequence
  Description of Artificial Sequence: Synthetic oligonucleotide
  Sense strand starting at position 2805 of SEQ ID NO: 317913
uuauauucuguagaguaug

SEQ ID NO: 522192 - RNA, 19 nt, Artificial Sequence
  Description of Artificial Sequence: Synthetic oligonucleotide
  Antisense strand to SEQ ID NO: 522191
cauacucuacagaauauaa

SEQ ID NO: 522193 - RNA, 19 nt, Artificial Sequence
  Description of Artificial Sequence: Synthetic oligonucleotide
  Sense strand starting at position 2808 of SEQ ID NO: 317913
uauucuguagaguaugacu

SEQ ID NO: 522194 - RNA, 19 nt, Artificial Sequence
  Description of Artificial Sequence: Synthetic oligonucleotide
  Antisense strand to SEQ ID NO: 522193
agucauacucuacagaaua

SEQ ID NO: 522195 - RNA, 19 nt, Artificial Sequence
  Description of Artificial Sequence: Synthetic oligonucleotide
  Sense strand starting at position 2810 of SEQ ID NO: 317913
uucuguagaguaugacuua

SEQ ID NO: 522196 - RNA, 19 nt, Artificial Sequence
  Description of Artificial Sequence: Synthetic oligonucleotide
  Antisense strand to SEQ ID NO: 522195
uaagucauacucuacagaa

SEQ ID NO: 522197 - RNA, 19 nt, Artificial Sequence
  Description of Artificial Sequence: Synthetic oligonucleotide
  Sense strand starting at position 2960 of SEQ ID NO: 317913
acuuaaaggcuagggauau

SEQ ID NO: 522198 - RNA, 19 nt, Artificial Sequence
  Description of Artificial Sequence: Synthetic oligonucleotide
  Antisense strand to SEQ ID NO: 522197
auaucccuagccuuuaagu

SEQ ID NO: 522199 - RNA, 19 nt, Artificial Sequence
  Description of Artificial Sequence: Synthetic oligonucleotide
  Sense strand starting at position 2986 of SEQ ID NO: 317913
agaaauugaucugcggaaa

SEQ ID NO: 522200 - RNA, 19 nt, Artificial Sequence
  Description of Artificial Sequence: Synthetic oligonucleotide
  Antisense strand to SEQ ID NO: 522199
uuuccgcagaucaauuucu

SEQ ID NO: 522201 - RNA, 19 nt, Artificial Sequence
  Description of Artificial Sequence: Synthetic oligonucleotide
  Sense strand starting at position 2987 of SEQ ID NO: 317913
gaaauugaucugcggaaac

SEQ ID NO: 522202 - RNA, 19 nt, Artificial Sequence
  Description of Artificial Sequence: Synthetic oligonucleotide
  Antisense strand to SEQ ID NO: 522201
guuuccgcagaucaauuuc

SEQ ID NO: 522203 - RNA, 19 nt, Artificial Sequence
  Description of Artificial Sequence: Synthetic oligonucleotide
  Sense strand starting at position 2989 of SEQ ID NO: 317913
aauugaucugcggaaaccu

SEQ ID NO: 522204 - RNA, 19 nt, Artificial Sequence
  Description of Artificial Sequence: Synthetic oligonucleotide
  Antisense strand to SEQ ID NO: 522203
agguuuccgcagaucaauu

SEQ ID NO: 522205 - RNA, 19 nt, Artificial Sequence
  Description of Artificial Sequence: Synthetic oligonucleotide
  Sense strand starting at position 3045 of SEQ ID NO: 317913
uacaaaggucaguguuuaa

SEQ ID NO: 522206 - RNA, 19 nt, Artificial Sequence
  Description of Artificial Sequence: Synthetic oligonucleotide
  Antisense strand to SEQ ID NO: 522205
uuaaacacugaccuuugua

SEQ ID NO: 522207 - RNA, 19 nt, Artificial Sequence
  Description of Artificial Sequence: Synthetic oligonucleotide
  Sense strand starting at position 3048 of SEQ ID NO: 317913
aaaggucaguguuuaauac

SEQ ID NO: 522208 - RNA, 19 nt, Artificial Sequence
  Description of Artificial Sequence: Synthetic oligonucleotide
  Antisense strand to SEQ ID NO: 522207
guauuaaacacugaccuuu

SEQ ID NO: 522209 - RNA, 19 nt, Artificial Sequence
  Description of Artificial Sequence: Synthetic oligonucleotide
  Sense strand starting at position 3049 of SEQ ID NO: 317913
aaggucaguguuuaauacu

SEQ ID NO: 522210 - RNA, 19 nt, Artificial Sequence
  Description of Artificial Sequence: Synthetic oligonucleotide
  Antisense strand to SEQ ID NO: 522209
aguauuaaacacugaccuu

SEQ ID NO: 522211 - RNA, 19 nt, Artificial Sequence
  Description of Artificial Sequence: Synthetic oligonucleotide
  Sense strand starting at position 3194 of SEQ ID NO: 317913
ucaggaauuuaugacuuga

SEQ ID NO: 522212 - RNA, 19 nt, Artificial Sequence
  Description of Artificial Sequence: Synthetic oligonucleotide
  Antisense strand to SEQ ID NO: 522211
ucaagucauaaauuccuga

SEQ ID NO: 522213 - RNA, 19 nt, Artificial Sequence
  Description of Artificial Sequence: Synthetic oligonucleotide
  Sense strand starting at position 3224 of SEQ ID NO: 317913
ccuaguuucuggucauuua

SEQ ID NO: 522214 - RNA, 19 nt, Artificial Sequence
  Description of Artificial Sequence: Synthetic oligonucleotide
  Antisense strand to SEQ ID NO: 522213
uaaaugaccagaaacuagg

SEQ ID NO: 522215 - RNA, 19 nt, Artificial Sequence
  Description of Artificial Sequence: Synthetic oligonucleotide
  Sense strand starting at position 3324 of SEQ ID NO: 317913
cagucuucuggugaacaac

SEQ ID NO: 522216 - RNA, 19 nt, Artificial Sequence
  Description of Artificial Sequence: Synthetic oligonucleotide
  Antisense strand to SEQ ID NO: 522215
guuguucaccagaagacug

SEQ ID NO: 522217 - RNA, 19 nt, Artificial Sequence
  Description of Artificial Sequence: Synthetic oligonucleotide
  Sense strand starting at position 3725 of SEQ ID NO: 317913
uuaaaccguugacuuaaau

SEQ ID NO: 522218 - RNA, 19 nt, Artificial Sequence
  Description of Artificial Sequence: Synthetic oligonucleotide
  Antisense strand to SEQ ID NO: 522217
auuuaagucaacgguuuaa

SEQ ID NO: 522219 - RNA, 19 nt, Artificial Sequence
  Description of Artificial Sequence: Synthetic oligonucleotide
  Sense strand starting at position 3769 of SEQ ID NO: 317913
caguuuggccuauaagacu

SEQ ID NO: 522220 - RNA, 19 nt, Artificial Sequence
  Description of Artificial Sequence: Synthetic oligonucleotide
  Antisense strand to SEQ ID NO: 522219
agucuuauaggccaaacug

SEQ ID NO: 522221 - RNA, 19 nt, Artificial Sequence
  Description of Artificial Sequence: Synthetic oligonucleotide
  Sense strand starting at position 3821 of SEQ ID NO: 317913
ccuucucaucuggguagaa

SEQ ID NO: 522222 - RNA, 19 nt, Artificial Sequence
  Description of Artificial Sequence: Synthetic oligonucleotide
  Antisense strand to SEQ ID NO: 522221
uucuacccagaugagaagg

SEQ ID NO: 522223 - RNA, 19 nt, Artificial Sequence
  Description of Artificial Sequence: Synthetic oligonucleotide
  Sense strand starting at position 3822 of SEQ ID NO: 317913
cuucucaucuggguagaaa

SEQ ID NO: 522224 - RNA, 19 nt, Artificial Sequence
  Description of Artificial Sequence: Synthetic oligonucleotide
  Antisense strand to SEQ ID NO: 522223
uuucuacccagaugagaag

SEQ ID NO: 522225 - RNA, 19 nt, Artificial Sequence
  Description of Artificial Sequence: Synthetic oligonucleotide
  Sense strand starting at position 7 of SEQ ID NO: 317914
uguauaaaugcacgcaaau

SEQ ID NO: 522226 - RNA, 19 nt, Artificial Sequence
  Description of Artificial Sequence: Synthetic oligonucleotide
  Antisense strand to SEQ ID NO: 522225
auuugcgugcauuuauaca

SEQ ID NO: 522227 - RNA, 19 nt, Artificial Sequence
  Description of Artificial Sequence: Synthetic oligonucleotide
  Sense strand starting at position 54 of SEQ ID NO: 317914
gacccucuuguaggguuaa

SEQ ID NO: 522228 - RNA, 19 nt, Artificial Sequence
  Description of Artificial Sequence: Synthetic oligonucleotide
  Antisense strand to SEQ ID NO: 522227
uuaacccuacaagaggguc

SEQ ID NO: 522229 - RNA, 19 nt, Artificial Sequence
  Description of Artificial Sequence: Synthetic oligonucleotide
  Sense strand starting at position 96 of SEQ ID NO: 317914
gucagaggauugccagaca

SEQ ID NO: 522230 - RNA, 19 nt, Artificial Sequence
  Description of Artificial Sequence: Synthetic oligonucleotide
  Antisense strand to SEQ ID NO: 522229
ugucuggcaauccucugac

SEQ ID NO: 522231 - RNA, 19 nt, Artificial Sequence
  Description of Artificial Sequence: Synthetic oligonucleotide
  Sense strand starting at position 119 of SEQ ID NO: 317914
cgaagccuccaugaagauu

SEQ ID NO: 522232 - RNA, 19 nt, Artificial Sequence
  Description of Artificial Sequence: Synthetic oligonucleotide
  Antisense strand to SEQ ID NO: 522231
aaucuucauggaggcuucg

SEQ ID NO: 522233 - RNA, 19 nt, Artificial Sequence
  Description of Artificial Sequence: Synthetic oligonucleotide
  Sense strand starting at position 128 of SEQ ID NO: 317914
caugaagauugugccaguu

SEQ ID NO: 522234 - RNA, 19 nt, Artificial Sequence
  Description of Artificial Sequence: Synthetic oligonucleotide
  Antisense strand to SEQ ID NO: 522233
aacuggcacaaucuucaug

SEQ ID NO: 522235 - RNA, 19 nt, Artificial Sequence
  Description of Artificial Sequence: Synthetic oligonucleotide
  Sense strand starting at position 195 of SEQ ID NO: 317914
gggcuagguuugaaggauu

SEQ ID NO: 522236 - RNA, 19 nt, Artificial Sequence
  Description of Artificial Sequence: Synthetic oligonucleotide
  Antisense strand to SEQ ID NO: 522235
aauccuucaaaccuagccc

SEQ ID NO: 522237 - RNA, 19 nt, Artificial Sequence
  Description of Artificial Sequence: Synthetic oligonucleotide
  Sense strand starting at position 699 of SEQ ID NO: 317914
gaacuagggccugagaguu

SEQ ID NO: 522238 - RNA, 19 nt, Artificial Sequence
  Description of Artificial Sequence: Synthetic oligonucleotide
  Antisense strand to SEQ ID NO: 522237
aacucucaggcccuaguuc

SEQ ID NO: 522239 - RNA, 19 nt, Artificial Sequence
  Description of Artificial Sequence: Synthetic oligonucleotide
  Sense strand starting at position 779 of SEQ ID NO: 317914
guaggccacuuucuuaaga

SEQ ID NO: 522240 - RNA, 19 nt, Artificial Sequence
  Description of Artificial Sequence: Synthetic oligonucleotide
  Antisense strand to SEQ ID NO: 522239
ucuuaagaaaguggccuac

SEQ ID NO: 522241 - RNA, 19 nt, Artificial Sequence
  Description of Artificial Sequence: Synthetic oligonucleotide
  Sense strand starting at position 839 of SEQ ID NO: 317914
uguguucucccauaauccu

SEQ ID NO: 522242 - RNA, 19 nt, Artificial Sequence
  Description of Artificial Sequence: Synthetic oligonucleotide
  Antisense strand to SEQ ID NO: 522241
aggauuaugggagaacaca

SEQ ID NO: 522243 - RNA, 19 nt, Artificial Sequence
  Description of Artificial Sequence: Synthetic oligonucleotide
  Sense strand starting at position 921 of SEQ ID NO: 317914
gcuauuaagcagcagagau

SEQ ID NO: 522244 - RNA, 19 nt, Artificial Sequence
  Description of Artificial Sequence: Synthetic oligonucleotide
  Antisense strand to SEQ ID NO: 522243
aucucugcugcuuaauagc

SEQ ID NO: 522245 - RNA, 19 nt, Artificial Sequence
  Description of Artificial Sequence: Synthetic oligonucleotide
  Sense strand starting at position 992 of SEQ ID NO: 317914
cccuuagugagauaaggca

SEQ ID NO: 522246 - RNA, 19 nt, Artificial Sequence
  Description of Artificial Sequence: Synthetic oligonucleotide
  Antisense strand to SEQ ID NO: 522245
ugccuuaucucacuaaggg

SEQ ID NO: 522247 - RNA, 19 nt, Artificial Sequence
  Description of Artificial Sequence: Synthetic oligonucleotide
  Sense strand starting at position 1240 of SEQ ID NO: 317914
cugugaacucccuagugag

SEQ ID NO: 522248 - RNA, 19 nt, Artificial Sequence
  Description of Artificial Sequence: Synthetic oligonucleotide
  Antisense strand to SEQ ID NO: 522247
cucacuagggaguucacag

SEQ ID NO: 522249 - RNA, 19 nt, Artificial Sequence
  Description of Artificial Sequence: Synthetic oligonucleotide
  Sense strand starting at position 1754 of SEQ ID NO: 317914
ccaugacaagucuguuauu

SEQ ID NO: 522250 - RNA, 19 nt, Artificial Sequence
  Description of Artificial Sequence: Synthetic oligonucleotide
  Antisense strand to SEQ ID NO: 522249
aauaacagacuugucaugg

SEQ ID NO: 522251 - RNA, 19 nt, Artificial Sequence
  Description of Artificial Sequence: Synthetic oligonucleotide
  Sense strand starting at position 1759 of SEQ ID NO: 317914
acaagucuguuauuagcau

SEQ ID NO: 522252 - RNA, 19 nt, Artificial Sequence
  Description of Artificial Sequence: Synthetic oligonucleotide
  Antisense strand to SEQ ID NO: 522251
augcuaauaacagacuugu

SEQ ID NO: 522253 - RNA, 19 nt, Artificial Sequence
  Description of Artificial Sequence: Synthetic oligonucleotide
  Sense strand starting at position 1766 of SEQ ID NO: 317914
uguuauuagcaucacagag

SEQ ID NO: 522254 - RNA, 19 nt, Artificial Sequence
  Description of Artificial Sequence: Synthetic oligonucleotide
  Antisense strand to SEQ ID NO: 522253
cucugugaugcuaauaaca

SEQ ID NO: 522255 - RNA, 19 nt, Artificial Sequence
  Description of Artificial Sequence: Synthetic oligonucleotide
  Sense strand starting at position 1984 of SEQ ID NO: 317914
ggugcaaagucugcaauga

SEQ ID NO: 522256 - RNA, 19 nt, Artificial Sequence
  Description of Artificial Sequence: Synthetic oligonucleotide
  Antisense strand to SEQ ID NO: 522255
ucauugcagacuuugcacc

SEQ ID NO: 522257 - RNA, 19 nt, Artificial Sequence
  Description of Artificial Sequence: Synthetic oligonucleotide
  Sense strand starting at position 2102 of SEQ ID NO: 317914
acacaugggcccuggagau

SEQ ID NO: 522258 - RNA, 19 nt, Artificial Sequence
  Description of Artificial Sequence: Synthetic oligonucleotide
  Antisense strand to SEQ ID NO: 522257
aucuccagggcccaugugu

SEQ ID NO: 522259 - RNA, 19 nt, Artificial Sequence
  Description of Artificial Sequence: Synthetic oligonucleotide
  Sense strand starting at position 2207 of SEQ ID NO: 317914
aguauuugaagaggucguu

SEQ ID NO: 522260 - RNA, 19 nt, Artificial Sequence
  Description of Artificial Sequence: Synthetic oligonucleotide
  Antisense strand to SEQ ID NO: 522259
aacgaccucuucaaauacu

SEQ ID NO: 522261 - RNA, 19 nt, Artificial Sequence
  Description of Artificial Sequence: Synthetic oligonucleotide
  Sense strand starting at position 2400 of SEQ ID NO: 317914
gaguuugguggugagugaa

SEQ ID NO: 522262 - RNA, 19 nt, Artificial Sequence
  Description of Artificial Sequence: Synthetic oligonucleotide
  Antisense strand to SEQ ID NO: 522261
uucacucaccaccaaacuc

SEQ ID NO: 522263 - RNA, 19 nt, Artificial Sequence
  Description of Artificial Sequence: Synthetic oligonucleotide
  Sense strand starting at position 2403 of SEQ ID NO: 317914
uuugguggugagugaaaga

SEQ ID NO: 522264 - RNA, 19 nt, Artificial Sequence
  Description of Artificial Sequence: Synthetic oligonucleotide
  Antisense strand to SEQ ID NO: 522263
ucuuucacucaccaccaaa

SEQ ID NO: 522265 - RNA, 19 nt, Artificial Sequence
  Description of Artificial Sequence: Synthetic oligonucleotide
  Sense strand starting at position 2459 of SEQ ID NO: 317914
gggcaucuggcuuggauuu

SEQ ID NO: 522266 - RNA, 19 nt, Artificial Sequence
  Description of Artificial Sequence: Synthetic oligonucleotide
  Antisense strand to SEQ ID NO: 522265
aaauccaagccagaugccc

SEQ ID NO: 522267 - RNA, 19 nt, Artificial Sequence
  Description of Artificial Sequence: Synthetic oligonucleotide
  Sense strand starting at position 2490 of SEQ ID NO: 317914
ggaccauuacagggcuuua

SEQ ID NO: 522268 - RNA, 19 nt, Artificial Sequence
  Description of Artificial Sequence: Synthetic oligonucleotide
  Antisense strand to SEQ ID NO: 522267
uaaagcccuguaauggucc

SEQ ID NO: 522269 - RNA, 19 nt, Artificial Sequence
  Description of Artificial Sequence: Synthetic oligonucleotide
  Sense strand starting at position 2788 of SEQ ID NO: 317914
cccuucuggccugaaucau

SEQ ID NO: 522270 - RNA, 19 nt, Artificial Sequence
  Description of Artificial Sequence: Synthetic oligonucleotide
  Antisense strand to SEQ ID NO: 522269
augauucaggccagaaggg

SEQ ID NO: 522271 - RNA, 19 nt, Artificial Sequence
  Description of Artificial Sequence: Synthetic oligonucleotide
  Sense strand starting at position 2799 of SEQ ID NO: 317914
ugaaucaucucccucaggu

SEQ ID NO: 522272 - RNA, 19 nt, Artificial Sequence
  Description of Artificial Sequence: Synthetic oligonucleotide
  Antisense strand to SEQ ID NO: 522271
accugagggagaugauuca

SEQ ID NO: 522273 - RNA, 19 nt, Artificial Sequence
  Description of Artificial Sequence: Synthetic oligonucleotide
  Sense strand starting at position 2844 of SEQ ID NO: 317914
cagacuauguagccagaua

SEQ ID NO: 522274 - RNA, 19 nt, Artificial Sequence
  Description of Artificial Sequence: Synthetic oligonucleotide
  Antisense strand to SEQ ID NO: 522273
uaucuggcuacauagucug

SEQ ID NO: 522275 - RNA, 19 nt, Artificial Sequence
  Description of Artificial Sequence: Synthetic oligonucleotide
  Sense strand starting at position 2890 of SEQ ID NO: 317914
ugggucugugcagaaacua

SEQ ID NO: 522276 - RNA, 19 nt, Artificial Sequence
  Description of Artificial Sequence: Synthetic oligonucleotide
  Antisense strand to SEQ ID NO: 522275
uaguuucugcacagaccca

SEQ ID NO: 522277 - RNA, 19 nt, Artificial Sequence
  Description of Artificial Sequence: Synthetic oligonucleotide
  Sense strand starting at position 3311 of SEQ ID NO: 317914
cuuugucuuccugggacau

SEQ ID NO: 522278 - RNA, 19 nt, Artificial Sequence
  Description of Artificial Sequence: Synthetic oligonucleotide
  Antisense strand to SEQ ID NO: 522277
augucccaggaagacaaag

SEQ ID NO: 522279 - RNA, 19 nt, Artificial Sequence
  Description of Artificial Sequence: Synthetic oligonucleotide
  Sense strand starting at position 3312 of SEQ ID NO: 317914
uuugucuuccugggacauu

SEQ ID NO: 522280 - RNA, 19 nt, Artificial Sequence
  Description of Artificial Sequence: Synthetic oligonucleotide
  Antisense strand to SEQ ID NO: 522279
aaugucccaggaagacaaa

SEQ ID NO: 522281 - RNA, 19 nt, Artificial Sequence
  Description of Artificial Sequence: Synthetic oligonucleotide
  Sense strand starting at position 3313 of SEQ ID NO: 317914
uugucuuccugggacauuu

SEQ ID NO: 522282 - RNA, 19 nt, Artificial Sequence
  Description of Artificial Sequence: Synthetic oligonucleotide
  Antisense strand to SEQ ID NO: 522281
aaaugucccaggaagacaa

SEQ ID NO: 522283 - RNA, 19 nt, Artificial Sequence
  Description of Artificial Sequence: Synthetic oligonucleotide
  Sense strand starting at position 3344 of SEQ ID NO: 317914
aaacauuguugguugucau

SEQ ID NO: 522284 - RNA, 19 nt, Artificial Sequence
  Description of Artificial Sequence: Synthetic oligonucleotide
  Antisense strand to SEQ ID NO: 522283
augacaaccaacaauguuu

SEQ ID NO: 522285 - RNA, 19 nt, Artificial Sequence
  Description of Artificial Sequence: Synthetic oligonucleotide
  Sense strand starting at position 3345 of SEQ ID NO: 317914
aacauuguugguugucaua

SEQ ID NO: 522286 - RNA, 19 nt, Artificial Sequence
  Description of Artificial Sequence: Synthetic oligonucleotide
  Antisense strand to SEQ ID NO: 522285
uaugacaaccaacaauguu

SEQ ID NO: 522287 - RNA, 19 nt, Artificial Sequence
  Description of Artificial Sequence: Synthetic oligonucleotide
  Sense strand starting at position 3354 of SEQ ID NO: 317914
gguugucauaacugaggag

SEQ ID NO: 522288 - RNA, 19 nt, Artificial Sequence
  Description of Artificial Sequence: Synthetic oligonucleotide
  Antisense strand to SEQ ID NO: 522287
cuccucaguuaugacaacc

SEQ ID NO: 522289 - RNA, 19 nt, Artificial Sequence
  Description of Artificial Sequence: Synthetic oligonucleotide
  Sense strand starting at position 3432 of SEQ ID NO: 317914
aaagaaugaucggcgccaa

SEQ ID NO: 522290 - RNA, 19 nt, Artificial Sequence
  Description of Artificial Sequence: Synthetic oligonucleotide
  Antisense strand to SEQ ID NO: 522289
uuggcgccgaucauucuuu

SEQ ID NO: 522291 - RNA, 19 nt, Artificial Sequence
  Description of Artificial Sequence: Synthetic oligonucleotide
  Sense strand starting at position 3536 of SEQ ID NO: 317914
ccacacugucccugcauua

SEQ ID NO: 522292 - RNA, 19 nt, Artificial Sequence
  Description of Artificial Sequence: Synthetic oligonucleotide
  Antisense strand to SEQ ID NO: 522291
uaaugcagggacagugugg

SEQ ID NO: 522293 - RNA, 19 nt, Artificial Sequence
  Description of Artificial Sequence: Synthetic oligonucleotide
  Sense strand starting at position 3577 of SEQ ID NO: 317914
cacugugagguacauagua

SEQ ID NO: 522294 - RNA, 19 nt, Artificial Sequence
  Description of Artificial Sequence: Synthetic oligonucleotide
  Antisense strand to SEQ ID NO: 522293
uacuauguaccucacagug

SEQ ID NO: 522295 - RNA, 19 nt, Artificial Sequence
  Description of Artificial Sequence: Synthetic oligonucleotide
  Sense strand starting at position 3625 of SEQ ID NO: 317914
gaggcagagcugggauuaa

SEQ ID NO: 522296 - RNA, 19 nt, Artificial Sequence
  Description of Artificial Sequence: Synthetic oligonucleotide
  Antisense strand to SEQ ID NO: 522295
uuaaucccagcucugccuc

SEQ ID NO: 522297 - RNA, 19 nt, Artificial Sequence
  Description of Artificial Sequence: Synthetic oligonucleotide
  Sense strand starting at position 3708 of SEQ ID NO: 317914
uguuauuagcaaugggaca

SEQ ID NO: 522298 - RNA, 19 nt, Artificial Sequence
  Description of Artificial Sequence: Synthetic oligonucleotide
  Antisense strand to SEQ ID NO: 522297
ugucccauugcuaauaaca

SEQ ID NO: 522299 - RNA, 19 nt, Artificial Sequence
  Description of Artificial Sequence: Synthetic oligonucleotide
  Sense strand starting at position 3750 of SEQ ID NO: 317914
ucagaaguccaauguaagu

SEQ ID NO: 522300 - RNA, 19 nt, Artificial Sequence
  Description of Artificial Sequence: Synthetic oligonucleotide
  Antisense strand to SEQ ID NO: 522299
acuuacauuggacuucuga

SEQ ID NO: 522301 - RNA, 19 nt, Artificial Sequence
  Description of Artificial Sequence: Synthetic oligonucleotide
  Sense strand starting at position 3761 of SEQ ID NO: 317914
auguaaguccacuguguaa

SEQ ID NO: 522302 - RNA, 19 nt, Artificial Sequence
  Description of Artificial Sequence: Synthetic oligonucleotide
  Antisense strand to SEQ ID NO: 522301
uuacacaguggacuuacau

SEQ ID NO: 522303 - RNA, 19 nt, Artificial Sequence
  Description of Artificial Sequence: Synthetic oligonucleotide
  Sense strand starting at position 3763 of SEQ ID NO: 317914
guaaguccacuguguaaga

SEQ ID NO: 522304 - RNA, 19 nt, Artificial Sequence
  Description of Artificial Sequence: Synthetic oligonucleotide
  Antisense strand to SEQ ID NO: 522303
ucuuacacaguggacuuac

SEQ ID NO: 522305 - RNA, 19 nt, Artificial Sequence
  Description of Artificial Sequence: Synthetic oligonucleotide
  Sense strand starting at position 142 of SEQ ID NO: 317915
uuucuugaccugugagaau

SEQ ID NO: 522306 - RNA, 19 nt, Artificial Sequence
  Description of Artificial Sequence: Synthetic oligonucleotide
  Antisense strand to SEQ ID NO: 522305
auucucacaggucaagaaa

SEQ ID NO: 522307 - RNA, 19 nt, Artificial Sequence
  Description of Artificial Sequence: Synthetic oligonucleotide
  Sense strand starting at position 159 of SEQ ID NO: 317915
auccaaaugucagcugcaa

SEQ ID NO: 522308 - RNA, 19 nt, Artificial Sequence
  Description of Artificial Sequence: Synthetic oligonucleotide
  Antisense strand to SEQ ID NO: 522307
uugcagcugacauuuggau

SEQ ID NO: 522309 - RNA, 19 nt, Artificial Sequence
  Description of Artificial Sequence: Synthetic oligonucleotide
  Sense strand starting at position 331 of SEQ ID NO: 317915
gcauaaaguguguacucua

SEQ ID NO: 522310 - RNA, 19 nt, Artificial Sequence
  Description of Artificial Sequence: Synthetic oligonucleotide
  Antisense strand to SEQ ID NO: 522309
uagaguacacacuuuaugc

SEQ ID NO: 522311 - RNA, 19 nt, Artificial Sequence
  Description of Artificial Sequence: Synthetic oligonucleotide
  Sense strand starting at position 334 of SEQ ID NO: 317915
uaaaguguguacucuagau

SEQ ID NO: 522312 - RNA, 19 nt, Artificial Sequence
  Description of Artificial Sequence: Synthetic oligonucleotide
  Antisense strand to SEQ ID NO: 522311
aucuagaguacacacuuua

SEQ ID NO: 522313 - RNA, 19 nt, Artificial Sequence
  Description of Artificial Sequence: Synthetic oligonucleotide
  Sense strand starting at position 336 of SEQ ID NO: 317915
aaguguguacucuagaugu

SEQ ID NO: 522314 - RNA, 19 nt, Artificial Sequence
  Description of Artificial Sequence: Synthetic oligonucleotide
  Antisense strand to SEQ ID NO: 522313
acaucuagaguacacacuu

SEQ ID NO: 522315 - RNA, 19 nt, Artificial Sequence
  Description of Artificial Sequence: Synthetic oligonucleotide
  Sense strand starting at position 338 of SEQ ID NO: 317915
guguguacucuagauguaa

SEQ ID NO: 522316 - RNA, 19 nt, Artificial Sequence
  Description of Artificial Sequence: Synthetic oligonucleotide
  Antisense strand to SEQ ID NO: 522315
uuacaucuagaguacacac

SEQ ID NO: 522317 - RNA, 19 nt, Artificial Sequence
  Description of Artificial Sequence: Synthetic oligonucleotide
  Sense strand starting at position 1052 of SEQ ID NO: 317915
uuccuagagcucugaagca

SEQ ID NO: 522318 - RNA, 19 nt, Artificial Sequence
  Description of Artificial Sequence: Synthetic oligonucleotide
  Antisense strand to SEQ ID NO: 522317
ugcuucagagcucuaggaa

SEQ ID NO: 522319 - RNA, 19 nt, Artificial Sequence
  Description of Artificial Sequence: Synthetic oligonucleotide
  Sense strand starting at position 1068 of SEQ ID NO: 317915
gcagcauuugaucgcgugu

SEQ ID NO: 522320 - RNA, 19 nt, Artificial Sequence
  Description of Artificial Sequence: Synthetic oligonucleotide
  Antisense strand to SEQ ID NO: 522319
acacgcgaucaaaugcugc

SEQ ID NO: 522321 - RNA, 19 nt, Artificial Sequence
  Description of Artificial Sequence: Synthetic oligonucleotide
  Sense strand starting at position 1079 of SEQ ID NO: 317915
ucgcguguggcugaggaaa

SEQ ID NO: 522322 - RNA, 19 nt, Artificial Sequence
  Description of Artificial Sequence: Synthetic oligonucleotide
  Antisense strand to SEQ ID NO: 522321
uuuccucagccacacgcga

SEQ ID NO: 522323 - RNA, 19 nt, Artificial Sequence
  Description of Artificial Sequence: Synthetic oligonucleotide
  Sense strand starting at position 1099 of SEQ ID NO: 317915
ucgagcuuguagcugauaa

SEQ ID NO: 522324 - RNA, 19 nt, Artificial Sequence
  Description of Artificial Sequence: Synthetic oligonucleotide
  Antisense strand to SEQ ID NO: 522323
uuaucagcuacaagcucga

SEQ ID NO: 522325 - RNA, 19 nt, Artificial Sequence
  Description of Artificial Sequence: Synthetic oligonucleotide
  Sense strand starting at position 1100 of SEQ ID NO: 317915
cgagcuuguagcugauaag

SEQ ID NO: 522326 - RNA, 19 nt, Artificial Sequence
  Description of Artificial Sequence: Synthetic oligonucleotide
  Antisense strand to SEQ ID NO: 522325
cuuaucagcuacaagcucg

SEQ ID NO: 522327 - RNA, 19 nt, Artificial Sequence
  Description of Artificial Sequence: Synthetic oligonucleotide
  Sense strand starting at position 1103 of SEQ ID NO: 317915
gcuuguagcugauaaggaa

SEQ ID NO: 522328 - RNA, 19 nt, Artificial Sequence
  Description of Artificial Sequence: Synthetic oligonucleotide
  Antisense strand to SEQ ID NO: 522327
uuccuuaucagcuacaagc

SEQ ID NO: 522329 - RNA, 19 nt, Artificial Sequence
  Description of Artificial Sequence: Synthetic oligonucleotide
  Sense strand starting at position 1267 of SEQ ID NO: 317915
ucaggagauucccucucuu

SEQ ID NO: 522330 - RNA, 19 nt, Artificial Sequence
  Description of Artificial Sequence: Synthetic oligonucleotide
  Antisense strand to SEQ ID NO: 522329
aagagagggaaucuccuga

SEQ ID NO: 522331 - RNA, 19 nt, Artificial Sequence
  Description of Artificial Sequence: Synthetic oligonucleotide
  Sense strand starting at position 1280 of SEQ ID NO: 317915
ucucuuguagccuggagaa

SEQ ID NO: 522332 - RNA, 19 nt, Artificial Sequence
  Description of Artificial Sequence: Synthetic oligonucleotide
  Antisense strand to SEQ ID NO: 522331
uucuccaggcuacaagaga

SEQ ID NO: 522333 - RNA, 19 nt, Artificial Sequence
  Description of Artificial Sequence: Synthetic oligonucleotide
  Sense strand starting at position 1282 of SEQ ID NO: 317915
ucuuguagccuggagaaau

SEQ ID NO: 522334 - RNA, 19 nt, Artificial Sequence
  Description of Artificial Sequence: Synthetic oligonucleotide
  Antisense strand to SEQ ID NO: 522333
auuucuccaggcuacaaga

SEQ ID NO: 522335 - RNA, 19 nt, Artificial Sequence
  Description of Artificial Sequence: Synthetic oligonucleotide
  Sense strand starting at position 1778 of SEQ ID NO: 317915
ccugaucugacucgaguuu

SEQ ID NO: 522336 - RNA, 19 nt, Artificial Sequence
  Description of Artificial Sequence: Synthetic oligonucleotide
  Antisense strand to SEQ ID NO: 522335
aaacucgagucagaucagg

SEQ ID NO: 522337 - RNA, 19 nt, Artificial Sequence
  Description of Artificial Sequence: Synthetic oligonucleotide
  Sense strand starting at position 1857 of SEQ ID NO: 317915
uugguuccucaaggauaac

SEQ ID NO: 522338 - RNA, 19 nt, Artificial Sequence
  Description of Artificial Sequence: Synthetic oligonucleotide
  Antisense strand to SEQ ID NO: 522337
guuauccuugaggaaccaa

SEQ ID NO: 522339 - RNA, 19 nt, Artificial Sequence
  Description of Artificial Sequence: Synthetic oligonucleotide
  Sense strand starting at position 2000 of SEQ ID NO: 317915
gcuguuguuguuggaaaca

SEQ ID NO: 522340 - RNA, 19 nt, Artificial Sequence
  Description of Artificial Sequence: Synthetic oligonucleotide
  Antisense strand to SEQ ID NO: 522339
uguuuccaacaacaacagc

SEQ ID NO: 522341 - RNA, 19 nt, Artificial Sequence
  Description of Artificial Sequence: Synthetic oligonucleotide
  Sense strand starting at position 2465 of SEQ ID NO: 317915
gaguguugagcuuacaggu

SEQ ID NO: 522342 - RNA, 19 nt, Artificial Sequence
  Description of Artificial Sequence: Synthetic oligonucleotide
  Antisense strand to SEQ ID NO: 522341
accuguaagcucaacacuc

SEQ ID NO: 522343 - RNA, 19 nt, Artificial Sequence
  Description of Artificial Sequence: Synthetic oligonucleotide
  Sense strand starting at position 2706 of SEQ ID NO: 317915
gggugccaucacuaucagu

SEQ ID NO: 522344 - RNA, 19 nt, Artificial Sequence
  Description of Artificial Sequence: Synthetic oligonucleotide
  Antisense strand to SEQ ID NO: 522343
acugauagugauggcaccc

SEQ ID NO: 522345 - RNA, 19 nt, Artificial Sequence
  Description of Artificial Sequence: Synthetic oligonucleotide
  Sense strand starting at position 2719 of SEQ ID NO: 317915
aucaguaauucucgcaaga

SEQ ID NO: 522346 - RNA, 19 nt, Artificial Sequence
  Description of Artificial Sequence: Synthetic oligonucleotide
  Antisense strand to SEQ ID NO: 522345
ucuugcgagaauuacugau

SEQ ID NO: 522347 - RNA, 19 nt, Artificial Sequence
  Description of Artificial Sequence: Synthetic oligonucleotide
  Sense strand starting at position 2721 of SEQ ID NO: 317915
caguaauucucgcaagagc

SEQ ID NO: 522348 - RNA, 19 nt, Artificial Sequence
  Description of Artificial Sequence: Synthetic oligonucleotide
  Antisense strand to SEQ ID NO: 522347
gcucuugcgagaauuacug

SEQ ID NO: 522349 - RNA, 19 nt, Artificial Sequence
  Description of Artificial Sequence: Synthetic oligonucleotide
  Sense strand starting at position 2831 of SEQ ID NO: 317915
auucuauacuugucccgau

SEQ ID NO: 522350 - RNA, 19 nt, Artificial Sequence
  Description of Artificial Sequence: Synthetic oligonucleotide
  Antisense strand to SEQ ID NO: 522349
aucgggacaaguauagaau

SEQ ID NO: 522351 - RNA, 19 nt, Artificial Sequence
  Description of Artificial Sequence: Synthetic oligonucleotide
  Sense strand starting at position 2832 of SEQ ID NO: 317915
uucuauacuugucccgauu

SEQ ID NO: 522352 - RNA, 19 nt, Artificial Sequence
  Description of Artificial Sequence: Synthetic oligonucleotide
  Antisense strand to SEQ ID NO: 522351
aaucgggacaaguauagaa

SEQ ID NO: 522353 - RNA, 19 nt, Artificial Sequence
  Description of Artificial Sequence: Synthetic oligonucleotide
  Sense strand starting at position 2845 of SEQ ID NO: 317915
ccgauuggcuagucauuua

SEQ ID NO: 522354 - RNA, 19 nt, Artificial Sequence
  Description of Artificial Sequence: Synthetic oligonucleotide
  Antisense strand to SEQ ID NO: 522353
uaaaugacuagccaaucgg

SEQ ID NO: 522355 - RNA, 19 nt, Artificial Sequence
  Description of Artificial Sequence: Synthetic oligonucleotide
  Sense strand starting at position 2852 of SEQ ID NO: 317915
gcuagucauuuagaacuuu

SEQ ID NO: 522356 - RNA, 19 nt, Artificial Sequence
  Description of Artificial Sequence: Synthetic oligonucleotide
  Antisense strand to SEQ ID NO: 522355
aaaguucuaaaugacuagc

SEQ ID NO: 522357 - RNA, 19 nt, Artificial Sequence
  Description of Artificial Sequence: Synthetic oligonucleotide
  Sense strand starting at position 2860 of SEQ ID NO: 317915
uuuagaacuuuccgaaaga

SEQ ID NO: 522358 - RNA, 19 nt, Artificial Sequence
  Description of Artificial Sequence: Synthetic oligonucleotide
  Antisense strand to SEQ ID NO: 522357
ucuuucggaaaguucuaaa

SEQ ID NO: 522359 - RNA, 19 nt, Artificial Sequence
  Description of Artificial Sequence: Synthetic oligonucleotide
  Sense strand starting at position 2861 of SEQ ID NO: 317915
uuagaacuuuccgaaagag

SEQ ID NO: 522360 - RNA, 19 nt, Artificial Sequence
  Description of Artificial Sequence: Synthetic oligonucleotide
  Antisense strand to SEQ ID NO: 522359
cucuuucggaaaguucuaa

SEQ ID NO: 522361 - RNA, 19 nt, Artificial Sequence
  Description of Artificial Sequence: Synthetic oligonucleotide
  Sense strand starting at position 3067 of SEQ ID NO: 317915
uauuauggcuagcagauuu

SEQ ID NO: 522362 - RNA, 19 nt, Artificial Sequence
  Description of Artificial Sequence: Synthetic oligonucleotide
  Antisense strand to SEQ ID NO: 522361
aaaucugcuagccauaaua

SEQ ID NO: 522363 - RNA, 19 nt, Artificial Sequence
  Description of Artificial Sequence: Synthetic oligonucleotide
  Sense strand starting at position 3075 of SEQ ID NO: 317915
cuagcagauuucuaagaau

SEQ ID NO: 522364 - RNA, 19 nt, Artificial Sequence
  Description of Artificial Sequence: Synthetic oligonucleotide
  Antisense strand to SEQ ID NO: 522363
auucuuagaaaucugcuag

SEQ ID NO: 522365 - RNA, 19 nt, Artificial Sequence
  Description of Artificial Sequence: Synthetic oligonucleotide
  Sense strand starting at position 3078 of SEQ ID NO: 317915
gcagauuucuaagaauguu

SEQ ID NO: 522366 - RNA, 19 nt, Artificial Sequence
  Description of Artificial Sequence: Synthetic oligonucleotide
  Antisense strand to SEQ ID NO: 522365
aacauucuuagaaaucugc

SEQ ID NO: 522367 - RNA, 19 nt, Artificial Sequence
  Description of Artificial Sequence: Synthetic oligonucleotide
  Sense strand starting at position 3084 of SEQ ID NO: 317915
uucuaagaauguuagcaca

SEQ ID NO: 522368 - RNA, 19 nt, Artificial Sequence
  Description of Artificial Sequence: Synthetic oligonucleotide
  Antisense strand to SEQ ID NO: 522367
ugugcuaacauucuuagaa

SEQ ID NO: 522369 - RNA, 19 nt, Artificial Sequence
  Description of Artificial Sequence: Synthetic oligonucleotide
  Sense strand starting at position 3296 of SEQ ID NO: 317915
guuucuuagucccuguaau

SEQ ID NO: 522370 - RNA, 19 nt, Artificial Sequence
  Description of Artificial Sequence: Synthetic oligonucleotide
  Antisense strand to SEQ ID NO: 522369
auuacagggacuaagaaac

SEQ ID NO: 522371 - RNA, 19 nt, Artificial Sequence
  Description of Artificial Sequence: Synthetic oligonucleotide
  Sense strand starting at position 3297 of SEQ ID NO: 317915
uuucuuagucccuguaauc

SEQ ID NO: 522372 - RNA, 19 nt, Artificial Sequence
  Description of Artificial Sequence: Synthetic oligonucleotide
  Antisense strand to SEQ ID NO: 522371
gauuacagggacuaagaaa

SEQ ID NO: 522373 - RNA, 19 nt, Artificial Sequence
  Description of Artificial Sequence: Synthetic oligonucleotide
  Sense strand starting at position 3696 of SEQ ID NO: 317915
cuccucuacuuggcaagaa

SEQ ID NO: 522374 - RNA, 19 nt, Artificial Sequence
  Description of Artificial Sequence: Synthetic oligonucleotide
  Antisense strand to SEQ ID NO: 522373
uucuugccaaguagaggag

SEQ ID NO: 522375 - RNA, 19 nt, Artificial Sequence
  Description of Artificial Sequence: Synthetic oligonucleotide
  Sense strand starting at position 3697 of SEQ ID NO: 317915
uccucuacuuggcaagaaa

SEQ ID NO: 522376 - RNA, 19 nt, Artificial Sequence
  Description of Artificial Sequence: Synthetic oligonucleotide
  Antisense strand to SEQ ID NO: 522375
uuucuugccaaguagagga

SEQ ID NO: 522377 - RNA, 19 nt, Artificial Sequence
  Description of Artificial Sequence: Synthetic oligonucleotide
  Sense strand starting at position 3770 of SEQ ID NO: 317915
cgcucuucuccugagugau

SEQ ID NO: 522378 - RNA, 19 nt, Artificial Sequence
  Description of Artificial Sequence: Synthetic oligonucleotide
  Antisense strand to SEQ ID NO: 522377
aucacucaggagaagagcg

SEQ ID NO: 522379 - RNA, 19 nt, Artificial Sequence
  Description of Artificial Sequence: Synthetic oligonucleotide
  Sense strand starting at position 3772 of SEQ ID NO: 317915
cucuucuccugagugauuc

SEQ ID NO: 522380 - RNA, 19 nt, Artificial Sequence
  Description of Artificial Sequence: Synthetic oligonucleotide
  Antisense strand to SEQ ID NO: 522379
gaaucacucaggagaagag

SEQ ID NO: 522381 - RNA, 19 nt, Artificial Sequence
  Description of Artificial Sequence: Synthetic oligonucleotide
  Sense strand starting at position 3780 of SEQ ID NO: 317915
cugagugauuccuucccau

SEQ ID NO: 522382 - RNA, 19 nt, Artificial Sequence
  Description of Artificial Sequence: Synthetic oligonucleotide
  Antisense strand to SEQ ID NO: 522381
augggaaggaaucacucag

SEQ ID NO: 522383 - RNA, 19 nt, Artificial Sequence
  Description of Artificial Sequence: Synthetic oligonucleotide
  Sense strand starting at position 3792 of SEQ ID NO: 317915
uucccaugcugagacauuu

SEQ ID NO: 522384 - RNA, 19 nt, Artificial Sequence
  Description of Artificial Sequence: Synthetic oligonucleotide
  Antisense strand to SEQ ID NO: 522383
aaaugucucagcaugggaa

SEQ ID NO: 522385 - RNA, 19 nt, Artificial Sequence
  Description of Artificial Sequence: Synthetic oligonucleotide
  Sense strand starting at position 32 of SEQ ID NO: 317916
agagaaagacugugucuuc

SEQ ID NO: 522386 - RNA, 19 nt, Artificial Sequence
  Description of Artificial Sequence: Synthetic oligonucleotide
  Antisense strand to SEQ ID NO: 522385
gaagacacagucuuucucu

SEQ ID NO: 522387 - RNA, 19 nt, Artificial Sequence
  Description of Artificial Sequence: Synthetic oligonucleotide
  Sense strand starting at position 33 of SEQ ID NO: 317916
gagaaagacugugucuucu

SEQ ID NO: 522388 - RNA, 19 nt, Artificial Sequence
  Description of Artificial Sequence: Synthetic oligonucleotide
  Antisense strand to SEQ ID NO: 522387
agaagacacagucuuucuc

SEQ ID NO: 522389 - RNA, 19 nt, Artificial Sequence
  Description of Artificial Sequence: Synthetic oligonucleotide
  Sense strand starting at position 35 of SEQ ID NO: 317916
gaaagacugugucuucuaa

SEQ ID NO: 522390 - RNA, 19 nt, Artificial Sequence
  Description of Artificial Sequence: Synthetic oligonucleotide
  Antisense strand to SEQ ID NO: 522389
uuagaagacacagucuuuc

SEQ ID NO: 522391 - RNA, 19 nt, Artificial Sequence
  Description of Artificial Sequence: Synthetic oligonucleotide
  Sense strand starting at position 117 of SEQ ID NO: 317916
acugaaauuuaaugaccga

SEQ ID NO: 522392 - RNA, 19 nt, Artificial Sequence
  Description of Artificial Sequence: Synthetic oligonucleotide
  Antisense strand to SEQ ID NO: 522391
ucggucauuaaauuucagu

SEQ ID NO: 522393 - RNA, 19 nt, Artificial Sequence
  Description of Artificial Sequence: Synthetic oligonucleotide
  Sense strand starting at position 174 of SEQ ID NO: 317916
acaacacgaggcuguuaua

SEQ ID NO: 522394 - RNA, 19 nt, Artificial Sequence
  Description of Artificial Sequence: Synthetic oligonucleotide
  Antisense strand to SEQ ID NO: 522393
uauaacagccucguguugu

SEQ ID NO: 522395 - RNA, 19 nt, Artificial Sequence
  Description of Artificial Sequence: Synthetic oligonucleotide
  Sense strand starting at position 184 of SEQ ID NO: 317916
gcuguuauaggugaagcca

SEQ ID NO: 522396 - RNA, 19 nt, Artificial Sequence
  Description of Artificial Sequence: Synthetic oligonucleotide
  Antisense strand to SEQ ID NO: 522395
uggcuucaccuauaacagc

SEQ ID NO: 522397 - RNA, 19 nt, Artificial Sequence
  Description of Artificial Sequence: Synthetic oligonucleotide
  Sense strand starting at position 356 of SEQ ID NO: 317916
ugagcuguccucugaaccu

SEQ ID NO: 522398 - RNA, 19 nt, Artificial Sequence
  Description of Artificial Sequence: Synthetic oligonucleotide
  Antisense strand to SEQ ID NO: 522397
agguucagaggacagcuca

SEQ ID NO: 522399 - RNA, 19 nt, Artificial Sequence
  Description of Artificial Sequence: Synthetic oligonucleotide
  Sense strand starting at position 380 of SEQ ID NO: 317916
guuacacugccugagacuu

SEQ ID NO: 522400 - RNA, 19 nt, Artificial Sequence
  Description of Artificial Sequence: Synthetic oligonucleotide
  Antisense strand to SEQ ID NO: 522399
aagucucaggcaguguaac

SEQ ID NO: 522401 - RNA, 19 nt, Artificial Sequence
  Description of Artificial Sequence: Synthetic oligonucleotide
  Sense strand starting at position 421 of SEQ ID NO: 317916
uuuccacaagauugucaga

SEQ ID NO: 522402 - RNA, 19 nt, Artificial Sequence
  Description of Artificial Sequence: Synthetic oligonucleotide
  Antisense strand to SEQ ID NO: 522401
ucugacaaucuuguggaaa

SEQ ID NO: 522403 - RNA, 19 nt, Artificial Sequence
  Description of Artificial Sequence: Synthetic oligonucleotide
  Sense strand starting at position 423 of SEQ ID NO: 317916
uccacaagauugucagauc

SEQ ID NO: 522404 - RNA, 19 nt, Artificial Sequence
  Description of Artificial Sequence: Synthetic oligonucleotide
  Antisense strand to SEQ ID NO: 522403
gaucugacaaucuugugga

SEQ ID NO: 522405 - RNA, 19 nt, Artificial Sequence
  Description of Artificial Sequence: Synthetic oligonucleotide
  Sense strand starting at position 479 of SEQ ID NO: 317916
caagucaagcagugagaga

SEQ ID NO: 522406 - RNA, 19 nt, Artificial Sequence
  Description of Artificial Sequence: Synthetic oligonucleotide
  Antisense strand to SEQ ID NO: 522405
ucucucacugcuugacuug

SEQ ID NO: 522407 - RNA, 19 nt, Artificial Sequence
  Description of Artificial Sequence: Synthetic oligonucleotide
  Sense strand starting at position 500 of SEQ ID NO: 317916
gaaugaaaucacuggucuc

SEQ ID NO: 522408 - RNA, 19 nt, Artificial Sequence
  Description of Artificial Sequence: Synthetic oligonucleotide
  Antisense strand to SEQ ID NO: 522407
gagaccagugauuucauuc

SEQ ID NO: 522409 - RNA, 19 nt, Artificial Sequence
  Description of Artificial Sequence: Synthetic oligonucleotide
  Sense strand starting at position 558 of SEQ ID NO: 317916
gcugaaugacugugugaag

SEQ ID NO: 522410 - RNA, 19 nt, Artificial Sequence
  Description of Artificial Sequence: Synthetic oligonucleotide
  Antisense strand to SEQ ID NO: 522409
cuucacacagucauucagc

SEQ ID NO: 522411 - RNA, 19 nt, Artificial Sequence
  Description of Artificial Sequence: Synthetic oligonucleotide
  Sense strand starting at position 559 of SEQ ID NO: 317916
cugaaugacugugugaaga

SEQ ID NO: 522412 - RNA, 19 nt, Artificial Sequence
  Description of Artificial Sequence: Synthetic oligonucleotide
  Antisense strand to SEQ ID NO: 522411
ucuucacacagucauucag

SEQ ID NO: 522413 - RNA, 19 nt, Artificial Sequence
  Description of Artificial Sequence: Synthetic oligonucleotide
  Sense strand starting at position 575 of SEQ ID NO: 317916
agaagugacuugucaaacc

SEQ ID NO: 522414 - RNA, 19 nt, Artificial Sequence
  Description of Artificial Sequence: Synthetic oligonucleotide
  Antisense strand to SEQ ID NO: 522413
gguuugacaagucacuucu

SEQ ID NO: 522415 - RNA, 19 nt, Artificial Sequence
  Description of Artificial Sequence: Synthetic oligonucleotide
  Sense strand starting at position 585 of SEQ ID NO: 317916
ugucaaaccuggucuccau

SEQ ID NO: 522416 - RNA, 19 nt, Artificial Sequence
  Description of Artificial Sequence: Synthetic oligonucleotide
  Antisense strand to SEQ ID NO: 522415
auggagaccagguuugaca

SEQ ID NO: 522417 - RNA, 19 nt, Artificial Sequence
  Description of Artificial Sequence: Synthetic oligonucleotide
  Sense strand starting at position 725 of SEQ ID NO: 317916
cugagauagccuugcauau

SEQ ID NO: 522418 - RNA, 19 nt, Artificial Sequence
  Description of Artificial Sequence: Synthetic oligonucleotide
  Antisense strand to SEQ ID NO: 522417
auaugcaaggcuaucucag

SEQ ID NO: 522419 - RNA, 19 nt, Artificial Sequence
  Description of Artificial Sequence: Synthetic oligonucleotide
  Sense strand starting at position 1231 of SEQ ID NO: 317916
aaagucaaagagugucuau

SEQ ID NO: 522420 - RNA, 19 nt, Artificial Sequence
  Description of Artificial Sequence: Synthetic oligonucleotide
  Antisense strand to SEQ ID NO: 522419
auagacacucuuugacuuu

SEQ ID NO: 522421 - RNA, 19 nt, Artificial Sequence
  Description of Artificial Sequence: Synthetic oligonucleotide
  Sense strand starting at position 1609 of SEQ ID NO: 317916
aaaguuaaagagugucuua

SEQ ID NO: 522422 - RNA, 19 nt, Artificial Sequence
  Description of Artificial Sequence: Synthetic oligonucleotide
  Antisense strand to SEQ ID NO: 522421
uaagacacucuuuaacuuu

SEQ ID NO: 522423 - RNA, 19 nt, Artificial Sequence
  Description of Artificial Sequence: Synthetic oligonucleotide
  Sense strand starting at position 1616 of SEQ ID NO: 317916
aagagugucuuaguucuua

SEQ ID NO: 522424 - RNA, 19 nt, Artificial Sequence
  Description of Artificial Sequence: Synthetic oligonucleotide
  Antisense strand to SEQ ID NO: 522423
uaagaacuaagacacucuu

SEQ ID NO: 522425 - RNA, 19 nt, Artificial Sequence
  Description of Artificial Sequence: Synthetic oligonucleotide
  Sense strand starting at position 1627 of SEQ ID NO: 317916
aguucuuauuauccucaga

SEQ ID NO: 522426 - RNA, 19 nt, Artificial Sequence
  Description of Artificial Sequence: Synthetic oligonucleotide
  Antisense strand to SEQ ID NO: 522425
ucugaggauaauaagaacu

SEQ ID NO: 522427 - RNA, 19 nt, Artificial Sequence
  Description of Artificial Sequence: Synthetic oligonucleotide
  Sense strand starting at position 1651 of SEQ ID NO: 317916
ggagaaagcaguugcucaa

SEQ ID NO: 522428 - RNA, 19 nt, Artificial Sequence
  Description of Artificial Sequence: Synthetic oligonucleotide
  Antisense strand to SEQ ID NO: 522427
uugagcaacugcuuucucc

SEQ ID NO: 522429 - RNA, 19 nt, Artificial Sequence
  Description of Artificial Sequence: Synthetic oligonucleotide
  Sense strand starting at position 1666 of SEQ ID NO: 317916
ucaacaaaugugugaauga

SEQ ID NO: 522430 - RNA, 19 nt, Artificial Sequence
  Description of Artificial Sequence: Synthetic oligonucleotide
  Antisense strand to SEQ ID NO: 522429
ucauucacacauuuguuga

SEQ ID NO: 522431 - RNA, 19 nt, Artificial Sequence
  Description of Artificial Sequence: Synthetic oligonucleotide
  Sense strand starting at position 1751 of SEQ ID NO: 317916
cagagcuggcugugacaaa

SEQ ID NO: 522432 - RNA, 19 nt, Artificial Sequence
  Description of Artificial Sequence: Synthetic oligonucleotide
  Antisense strand to SEQ ID NO: 522431
uuugucacagccagcucug

SEQ ID NO: 522433 - RNA, 19 nt, Artificial Sequence
  Description of Artificial Sequence: Synthetic oligonucleotide
  Sense strand starting at position 2330 of SEQ ID NO: 317916
uuugguuuaguccagagac

SEQ ID NO: 522434 - RNA, 19 nt, Artificial Sequence
  Description of Artificial Sequence: Synthetic oligonucleotide
  Antisense strand to SEQ ID NO: 522433
gucucuggacuaaaccaaa

SEQ ID NO: 522435 - RNA, 19 nt, Artificial Sequence
  Description of Artificial Sequence: Synthetic oligonucleotide
  Sense strand starting at position 2365 of SEQ ID NO: 317916
agaguucuuguguaagcag

SEQ ID NO: 522436 - RNA, 19 nt, Artificial Sequence
  Description of Artificial Sequence: Synthetic oligonucleotide
  Antisense strand to SEQ ID NO: 522435
cugcuuacacaagaacucu

SEQ ID NO: 522437 - RNA, 19 nt, Artificial Sequence
  Description of Artificial Sequence: Synthetic oligonucleotide
  Sense strand starting at position 2515 of SEQ ID NO: 317916
ggacuuggauguguagaga

SEQ ID NO: 522438 - RNA, 19 nt, Artificial Sequence
  Description of Artificial Sequence: Synthetic oligonucleotide
  Antisense strand to SEQ ID NO: 522437
ucucuacacauccaagucc

SEQ ID NO: 522439 - RNA, 19 nt, Artificial Sequence
  Description of Artificial Sequence: Synthetic oligonucleotide
  Sense strand starting at position 2633 of SEQ ID NO: 317916
augaguuuagcuggagcaa

SEQ ID NO: 522440 - RNA, 19 nt, Artificial Sequence
  Description of Artificial Sequence: Synthetic oligonucleotide
  Antisense strand to SEQ ID NO: 522439
uugcuccagcuaaacucau

SEQ ID NO: 522441 - RNA, 19 nt, Artificial Sequence
  Description of Artificial Sequence: Synthetic oligonucleotide
  Sense strand starting at position 2634 of SEQ ID NO: 317916
ugaguuuagcuggagcaaa

SEQ ID NO: 522442 - RNA, 19 nt, Artificial Sequence
  Description of Artificial Sequence: Synthetic oligonucleotide
  Antisense strand to SEQ ID NO: 522441
uuugcuccagcuaaacuca

SEQ ID NO: 522443 - RNA, 19 nt, Artificial Sequence
  Description of Artificial Sequence: Synthetic oligonucleotide
  Sense strand starting at position 2676 of SEQ ID NO: 317916
cuccuaagggugcagauaa

SEQ ID NO: 522444 - RNA, 19 nt, Artificial Sequence
  Description of Artificial Sequence: Synthetic oligonucleotide
  Antisense strand to SEQ ID NO: 522443
uuaucugcacccuuaggag

SEQ ID NO: 522445 - RNA, 19 nt, Artificial Sequence
  Description of Artificial Sequence: Synthetic oligonucleotide
  Sense strand starting at position 2792 of SEQ ID NO: 317916
cuggaugcuggaugaguuu

SEQ ID NO: 522446 - RNA, 19 nt, Artificial Sequence
  Description of Artificial Sequence: Synthetic oligonucleotide
  Antisense strand to SEQ ID NO: 522445
aaacucauccagcauccag

SEQ ID NO: 522447 - RNA, 19 nt, Artificial Sequence
  Description of Artificial Sequence: Synthetic oligonucleotide
  Sense strand starting at position 2906 of SEQ ID NO: 317916
gacucuaucuccuccguga

SEQ ID NO: 522448 - RNA, 19 nt, Artificial Sequence
  Description of Artificial Sequence: Synthetic oligonucleotide
  Antisense strand to SEQ ID NO: 522447
ucacggaggagauagaguc

SEQ ID NO: 522449 - RNA, 19 nt, Artificial Sequence
  Description of Artificial Sequence: Synthetic oligonucleotide
  Sense strand starting at position 2946 of SEQ ID NO: 317916
gugagaauguccucugcau

SEQ ID NO: 522450 - RNA, 19 nt, Artificial Sequence
  Description of Artificial Sequence: Synthetic oligonucleotide
  Antisense strand to SEQ ID NO: 522449
augcagaggacauucucac

SEQ ID NO: 522451 - RNA, 19 nt, Artificial Sequence
  Description of Artificial Sequence: Synthetic oligonucleotide
  Sense strand starting at position 3003 of SEQ ID NO: 317916
aaaggcucucgugauuauu

SEQ ID NO: 522452 - RNA, 19 nt, Artificial Sequence
  Description of Artificial Sequence: Synthetic oligonucleotide
  Antisense strand to SEQ ID NO: 522451
aauaaucacgagagccuuu

SEQ ID NO: 522453 - RNA, 19 nt, Artificial Sequence
  Description of Artificial Sequence: Synthetic oligonucleotide
  Sense strand starting at position 3006 of SEQ ID NO: 317916
ggcucucgugauuauuaug

SEQ ID NO: 522454 - RNA, 19 nt, Artificial Sequence
  Description of Artificial Sequence: Synthetic oligonucleotide
  Antisense strand to SEQ ID NO: 522453
cauaauaaucacgagagcc

SEQ ID NO: 522455 - RNA, 19 nt, Artificial Sequence
  Description of Artificial Sequence: Synthetic oligonucleotide
  Sense strand starting at position 3372 of SEQ ID NO: 317916
aggcuugcucuccaugaau

SEQ ID NO: 522456 - RNA, 19 nt, Artificial Sequence
  Description of Artificial Sequence: Synthetic oligonucleotide
  Antisense strand to SEQ ID NO: 522455
auucauggagagcaagccu

SEQ ID NO: 522457 - RNA, 19 nt, Artificial Sequence
  Description of Artificial Sequence: Synthetic oligonucleotide
  Sense strand starting at position 3454 of SEQ ID NO: 317916
cggucucugaacugaugaa

SEQ ID NO: 522458 - RNA, 19 nt, Artificial Sequence
  Description of Artificial Sequence: Synthetic oligonucleotide
  Antisense strand to SEQ ID NO: 522457
uucaucaguucagagaccg

SEQ ID NO: 522459 - RNA, 19 nt, Artificial Sequence
  Description of Artificial Sequence: Synthetic oligonucleotide
  Sense strand starting at position 3534 of SEQ ID NO: 317916
ccaggacucuuacuuuagu

SEQ ID NO: 522460 - RNA, 19 nt, Artificial Sequence
  Description of Artificial Sequence: Synthetic oligonucleotide
  Antisense strand to SEQ ID NO: 522459
acuaaaguaagaguccugg

SEQ ID NO: 522461 - RNA, 19 nt, Artificial Sequence
  Description of Artificial Sequence: Synthetic oligonucleotide
  Sense strand starting at position 3537 of SEQ ID NO: 317916
ggacucuuacuuuagucua

SEQ ID NO: 522462 - RNA, 19 nt, Artificial Sequence
  Description of Artificial Sequence: Synthetic oligonucleotide
  Antisense strand to SEQ ID NO: 522461
uagacuaaaguaagagucc

SEQ ID NO: 522463 - RNA, 19 nt, Artificial Sequence
  Description of Artificial Sequence: Synthetic oligonucleotide
  Sense strand starting at position 3683 of SEQ ID NO: 317916
guggccugugauaguaguu

SEQ ID NO: 522464 - RNA, 19 nt, Artificial Sequence
  Description of Artificial Sequence: Synthetic oligonucleotide
  Antisense strand to SEQ ID NO: 522463
aacuacuaucacaggccac

SEQ ID NO: 522465 - RNA, 19 nt, Artificial Sequence
  Description of Artificial Sequence: Synthetic oligonucleotide
  Sense strand starting at position 2 of SEQ ID NO: 317917
ucugaaauugguggucuac

SEQ ID NO: 522466 - RNA, 19 nt, Artificial Sequence
  Description of Artificial Sequence: Synthetic oligonucleotide
  Antisense strand to SEQ ID NO: 522465
guagaccaccaauuucaga

SEQ ID NO: 522467 - RNA, 19 nt, Artificial Sequence
  Description of Artificial Sequence: Synthetic oligonucleotide
  Sense strand starting at position 4 of SEQ ID NO: 317917
ugaaauugguggucuaccu

SEQ ID NO: 522468 - RNA, 19 nt, Artificial Sequence
  Description of Artificial Sequence: Synthetic oligonucleotide
  Antisense strand to SEQ ID NO: 522467
agguagaccaccaauuuca

SEQ ID NO: 522469 - RNA, 19 nt, Artificial Sequence
  Description of Artificial Sequence: Synthetic oligonucleotide
  Sense strand starting at position 361 of SEQ ID NO: 317917
uggacauagcuuuaaaucu

SEQ ID NO: 522470 - RNA, 19 nt, Artificial Sequence
  Description of Artificial Sequence: Synthetic oligonucleotide
  Antisense strand to SEQ ID NO: 522469
agauuuaaagcuaugucca

SEQ ID NO: 522471 - RNA, 19 nt, Artificial Sequence
  Description of Artificial Sequence: Synthetic oligonucleotide
  Sense strand starting at position 484 of SEQ ID NO: 317917
gcuguauuaaaugagguua

SEQ ID NO: 522472 - RNA, 19 nt, Artificial Sequence
  Description of Artificial Sequence: Synthetic oligonucleotide
  Antisense strand to SEQ ID NO: 522471
uaaccucauuuaauacagc

SEQ ID NO: 522473 - RNA, 19 nt, Artificial Sequence
  Description of Artificial Sequence: Synthetic oligonucleotide
  Sense strand starting at position 506 of SEQ ID NO: 317917
augcuaaguguuuacaaag

SEQ ID NO: 522474 - RNA, 19 nt, Artificial Sequence
  Description of Artificial Sequence: Synthetic oligonucleotide
  Antisense strand to SEQ ID NO: 522473
cuuuguaaacacuuagcau

SEQ ID NO: 522475 - RNA, 19 nt, Artificial Sequence
  Description of Artificial Sequence: Synthetic oligonucleotide
  Sense strand starting at position 534 of SEQ ID NO: 317917
cugaaauaguaagugggau

SEQ ID NO: 522476 - RNA, 19 nt, Artificial Sequence
  Description of Artificial Sequence: Synthetic oligonucleotide
  Antisense strand to SEQ ID NO: 522475
aucccacuuacuauuucag

SEQ ID NO: 522477 - RNA, 19 nt, Artificial Sequence
  Description of Artificial Sequence: Synthetic oligonucleotide
  Sense strand starting at position 535 of SEQ ID NO: 317917
ugaaauaguaagugggauu

SEQ ID NO: 522478 - RNA, 19 nt, Artificial Sequence
  Description of Artificial Sequence: Synthetic oligonucleotide
  Antisense strand to SEQ ID NO: 522477
aaucccacuuacuauuuca

SEQ ID NO: 522479 - RNA, 19 nt, Artificial Sequence
  Description of Artificial Sequence: Synthetic oligonucleotide
  Sense strand starting at position 546 of SEQ ID NO: 317917
gugggauucuaccuagcag

SEQ ID NO: 522480 - RNA, 19 nt, Artificial Sequence
  Description of Artificial Sequence: Synthetic oligonucleotide
  Antisense strand to SEQ ID NO: 522479
cugcuagguagaaucccac

SEQ ID NO: 522481 - RNA, 19 nt, Artificial Sequence
  Description of Artificial Sequence: Synthetic oligonucleotide
  Sense strand starting at position 650 of SEQ ID NO: 317917
ggucuauccuaagucaaau

SEQ ID NO: 522482 - RNA, 19 nt, Artificial Sequence
  Description of Artificial Sequence: Synthetic oligonucleotide
  Antisense strand to SEQ ID NO: 522481
auuugacuuaggauagacc

SEQ ID NO: 522483 - RNA, 19 nt, Artificial Sequence
  Description of Artificial Sequence: Synthetic oligonucleotide
  Sense strand starting at position 1137 of SEQ ID NO: 317917
agugguauccuccaaccau

SEQ ID NO: 522484 - RNA, 19 nt, Artificial Sequence
  Description of Artificial Sequence: Synthetic oligonucleotide
  Antisense strand to SEQ ID NO: 522483
augguuggaggauaccacu

SEQ ID NO: 522485 - RNA, 19 nt, Artificial Sequence
  Description of Artificial Sequence: Synthetic oligonucleotide
  Sense strand starting at position 1182 of SEQ ID NO: 317917
uggcaaauguucuuaauac

SEQ ID NO: 522486 - RNA, 19 nt, Artificial Sequence
  Description of Artificial Sequence: Synthetic oligonucleotide
  Antisense strand to SEQ ID NO: 522485
guauuaagaacauuugcca

SEQ ID NO: 522487 - RNA, 19 nt, Artificial Sequence
  Description of Artificial Sequence: Synthetic oligonucleotide
  Sense strand starting at position 1442 of SEQ ID NO: 317917
ccaguuugugggaguguau

SEQ ID NO: 522488 - RNA, 19 nt, Artificial Sequence
  Description of Artificial Sequence: Synthetic oligonucleotide
  Antisense strand to SEQ ID NO: 522487
auacacucccacaaacugg

SEQ ID NO: 522489 - RNA, 19 nt, Artificial Sequence
  Description of Artificial Sequence: Synthetic oligonucleotide
  Sense strand starting at position 1449 of SEQ ID NO: 317917
gugggaguguauguggaaa

SEQ ID NO: 522490 - RNA, 19 nt, Artificial Sequence
  Description of Artificial Sequence: Synthetic oligonucleotide
  Antisense strand to SEQ ID NO: 522489
uuuccacauacacucccac

SEQ ID NO: 522491 - RNA, 19 nt, Artificial Sequence
  Description of Artificial Sequence: Synthetic oligonucleotide
  Sense strand starting at position 1866 of SEQ ID NO: 317917
caccgaguacucgcugcua

SEQ ID NO: 522492 - RNA, 19 nt, Artificial Sequence
  Description of Artificial Sequence: Synthetic oligonucleotide
  Antisense strand to SEQ ID NO: 522491
uagcagcgaguacucggug

SEQ ID NO: 522493 - RNA, 19 nt, Artificial Sequence
  Description of Artificial Sequence: Synthetic oligonucleotide
  Sense strand starting at position 2137 of SEQ ID NO: 317917
cgaacacuuccggaaauug

SEQ ID NO: 522494 - RNA, 19 nt, Artificial Sequence
  Description of Artificial Sequence: Synthetic oligonucleotide
  Antisense strand to SEQ ID NO: 522493
caauuuccggaaguguucg

SEQ ID NO: 522495 - RNA, 19 nt, Artificial Sequence
  Description of Artificial Sequence: Synthetic oligonucleotide
  Sense strand starting at position 2159 of SEQ ID NO: 317917
agggacugucgguacaagu

SEQ ID NO: 522496 - RNA, 19 nt, Artificial Sequence
  Description of Artificial Sequence: Synthetic oligonucleotide
  Antisense strand to SEQ ID NO: 522495
acuuguaccgacagucccu

SEQ ID NO: 522497 - RNA, 19 nt, Artificial Sequence
  Description of Artificial Sequence: Synthetic oligonucleotide
  Sense strand starting at position 2196 of SEQ ID NO: 317917
gacgaaaggaucugcuaag

SEQ ID NO: 522498 - RNA, 19 nt, Artificial Sequence
  Description of Artificial Sequence: Synthetic oligonucleotide
  Antisense strand to SEQ ID NO: 522497
cuuagcagauccuuucguc

SEQ ID NO: 522499 - RNA, 19 nt, Artificial Sequence
  Description of Artificial Sequence: Synthetic oligonucleotide
  Sense strand starting at position 2197 of SEQ ID NO: 317917
acgaaaggaucugcuaaga

SEQ ID NO: 522500 - RNA, 19 nt, Artificial Sequence
  Description of Artificial Sequence: Synthetic oligonucleotide
  Antisense strand to SEQ ID NO: 522499
ucuuagcagauccuuucgu

SEQ ID NO: 522501 - RNA, 19 nt, Artificial Sequence
  Description of Artificial Sequence: Synthetic oligonucleotide
  Sense strand starting at position 2210 of SEQ ID NO: 317917
cuaagauuaggcgacgaaa

SEQ ID NO: 522502 - RNA, 19 nt, Artificial Sequence
  Description of Artificial Sequence: Synthetic oligonucleotide
  Antisense strand to SEQ ID NO: 522501
uuucgucgccuaaucuuag

SEQ ID NO: 522503 - RNA, 19 nt, Artificial Sequence
  Description of Artificial Sequence: Synthetic oligonucleotide
  Sense strand starting at position 2307 of SEQ ID NO: 317917
auggcauucggcugauuuc

SEQ ID NO: 522504 - RNA, 19 nt, Artificial Sequence
  Description of Artificial Sequence: Synthetic oligonucleotide
  Antisense strand to SEQ ID NO: 522503
gaaaucagccgaaugccau

SEQ ID NO: 522505 - RNA, 19 nt, Artificial Sequence
  Description of Artificial Sequence: Synthetic oligonucleotide
  Sense strand starting at position 2320 of SEQ ID NO: 317917
gauuucggcugcucucuaa

SEQ ID NO: 522506 - RNA, 19 nt, Artificial Sequence
  Description of Artificial Sequence: Synthetic oligonucleotide
  Antisense strand to SEQ ID NO: 522505
uuagagagcagccgaaauc

SEQ ID NO: 522507 - RNA, 19 nt, Artificial Sequence
  Description of Artificial Sequence: Synthetic oligonucleotide
  Sense strand starting at position 2355 of SEQ ID NO: 317917
ucagauacucuuggagguu

SEQ ID NO: 522508 - RNA, 19 nt, Artificial Sequence
  Description of Artificial Sequence: Synthetic oligonucleotide
  Antisense strand to SEQ ID NO: 522507
aaccuccaagaguaucuga

SEQ ID NO: 522509 - RNA, 19 nt, Artificial Sequence
  Description of Artificial Sequence: Synthetic oligonucleotide
  Sense strand starting at position 2382 of SEQ ID NO: 317917
gacgcagccguuccgaaau

SEQ ID NO: 522510 - RNA, 19 nt, Artificial Sequence
  Description of Artificial Sequence: Synthetic oligonucleotide
  Antisense strand to SEQ ID NO: 522509
auuucggaacggcugcguc

SEQ ID NO: 522511 - RNA, 19 nt, Artificial Sequence
  Description of Artificial Sequence: Synthetic oligonucleotide
  Sense strand starting at position 2563 of SEQ ID NO: 317917
gggucacuugcaggaagau

SEQ ID NO: 522512 - RNA, 19 nt, Artificial Sequence
  Description of Artificial Sequence: Synthetic oligonucleotide
  Antisense strand to SEQ ID NO: 522511
aucuuccugcaagugaccc

SEQ ID NO: 522513 - RNA, 19 nt, Artificial Sequence
  Description of Artificial Sequence: Synthetic oligonucleotide
  Sense strand starting at position 2819 of SEQ ID NO: 317917
cuggacauccuugggcaaa

SEQ ID NO: 522514 - RNA, 19 nt, Artificial Sequence
  Description of Artificial Sequence: Synthetic oligonucleotide
  Antisense strand to SEQ ID NO: 522513
uuugcccaaggauguccag

SEQ ID NO: 522515 - RNA, 19 nt, Artificial Sequence
  Description of Artificial Sequence: Synthetic oligonucleotide
  Sense strand starting at position 3182 of SEQ ID NO: 317917
ggguugauccggugagaca

SEQ ID NO: 522516 - RNA, 19 nt, Artificial Sequence
  Description of Artificial Sequence: Synthetic oligonucleotide
  Antisense strand to SEQ ID NO: 522515
ugucucaccggaucaaccc

SEQ ID NO: 522517 - RNA, 19 nt, Artificial Sequence
  Description of Artificial Sequence: Synthetic oligonucleotide
  Sense strand starting at position 3183 of SEQ ID NO: 317917
gguugauccggugagacag

SEQ ID NO: 522518 - RNA, 19 nt, Artificial Sequence
  Description of Artificial Sequence: Synthetic oligonucleotide
  Antisense strand to SEQ ID NO: 522517
cugucucaccggaucaacc

SEQ ID NO: 522519 - RNA, 19 nt, Artificial Sequence
  Description of Artificial Sequence: Synthetic oligonucleotide
  Sense strand starting at position 3213 of SEQ ID NO: 317917
agagcugguucugugaaga

SEQ ID NO: 522520 - RNA, 19 nt, Artificial Sequence
  Description of Artificial Sequence: Synthetic oligonucleotide
  Antisense strand to SEQ ID NO: 522519
ucuucacagaaccagcucu

SEQ ID NO: 522521 - RNA, 19 nt, Artificial Sequence
  Description of Artificial Sequence: Synthetic oligonucleotide
  Sense strand starting at position 3218 of SEQ ID NO: 317917
ugguucugugaagaguaca

SEQ ID NO: 522522 - RNA, 19 nt, Artificial Sequence
  Description of Artificial Sequence: Synthetic oligonucleotide
  Antisense strand to SEQ ID NO: 522521
uguacucuucacagaacca

SEQ ID NO: 522523 - RNA, 19 nt, Artificial Sequence
  Description of Artificial Sequence: Synthetic oligonucleotide
  Sense strand starting at position 3408 of SEQ ID NO: 317917
ugaaaucuuuccguuuaaa

SEQ ID NO: 522524 - RNA, 19 nt, Artificial Sequence
  Description of Artificial Sequence: Synthetic oligonucleotide
  Antisense strand to SEQ ID NO: 522523
uuuaaacggaaagauuuca

SEQ ID NO: 522525 - RNA, 19 nt, Artificial Sequence
  Description of Artificial Sequence: Synthetic oligonucleotide
  Sense strand starting at position 3789 of SEQ ID NO: 317917
gcugcuacucuauagagaa

SEQ ID NO: 522526 - RNA, 19 nt, Artificial Sequence
  Description of Artificial Sequence: Synthetic oligonucleotide
  Antisense strand to SEQ ID NO: 522525
uucucuauagaguagcagc

SEQ ID NO: 522527 - RNA, 19 nt, Artificial Sequence
  Description of Artificial Sequence: Synthetic oligonucleotide
  Sense strand starting at position 3831 of SEQ ID NO: 317917
aaaggaaacucaguguugu

SEQ ID NO: 522528 - RNA, 19 nt, Artificial Sequence
  Description of Artificial Sequence: Synthetic oligonucleotide
  Antisense strand to SEQ ID NO: 522527
acaacacugaguuuccuuu

SEQ ID NO: 522529 - RNA, 19 nt, Artificial Sequence
  Description of Artificial Sequence: Synthetic oligonucleotide
  Sense strand starting at position 3832 of SEQ ID NO: 317917
aaggaaacucaguguuguu

SEQ ID NO: 522530 - RNA, 19 nt, Artificial Sequence
  Description of Artificial Sequence: Synthetic oligonucleotide
  Antisense strand to SEQ ID NO: 522529
aacaacacugaguuuccuu

SEQ ID NO: 522531 - RNA, 19 nt, Artificial Sequence
  Description of Artificial Sequence: Synthetic oligonucleotide
  Sense strand starting at position 3883 of SEQ ID NO: 317917
cuaaaugaggguuggcaaa

SEQ ID NO: 522532 - RNA, 19 nt, Artificial Sequence
  Description of Artificial Sequence: Synthetic oligonucleotide
  Antisense strand to SEQ ID NO: 522531
uuugccaacccucauuuag

SEQ ID NO: 522533 - RNA, 19 nt, Artificial Sequence
  Description of Artificial Sequence: Synthetic oligonucleotide
  Sense strand starting at position 3885 of SEQ ID NO: 317917
aaaugaggguuggcaaagu

SEQ ID NO: 522534 - RNA, 19 nt, Artificial Sequence
  Description of Artificial Sequence: Synthetic oligonucleotide
  Antisense strand to SEQ ID NO: 522533
acuuugccaacccucauuu

SEQ ID NO: 522535 - RNA, 19 nt, Artificial Sequence
  Description of Artificial Sequence: Synthetic oligonucleotide
  Sense strand starting at position 3902 of SEQ ID NO: 317917
gucagauguccucaggaau

SEQ ID NO: 522536 - RNA, 19 nt, Artificial Sequence
  Description of Artificial Sequence: Synthetic oligonucleotide
  Antisense strand to SEQ ID NO: 522535
auuccugaggacaucugac

SEQ ID NO: 522537 - RNA, 19 nt, Artificial Sequence
  Description of Artificial Sequence: Synthetic oligonucleotide
  Sense strand starting at position 3913 of SEQ ID NO: 317917
ucaggaauuguguaauucu

SEQ ID NO: 522538 - RNA, 19 nt, Artificial Sequence
  Description of Artificial Sequence: Synthetic oligonucleotide
  Antisense strand to SEQ ID NO: 522537
agaauuacacaauuccuga

SEQ ID NO: 522539 - RNA, 19 nt, Artificial Sequence
  Description of Artificial Sequence: Synthetic oligonucleotide
  Sense strand starting at position 3916 of SEQ ID NO: 317917
ggaauuguguaauucucac

SEQ ID NO: 522540 - RNA, 19 nt, Artificial Sequence
  Description of Artificial Sequence: Synthetic oligonucleotide
  Antisense strand to SEQ ID NO: 522539
gugagaauuacacaauucc

SEQ ID NO: 522541 - RNA, 19 nt, Artificial Sequence
  Description of Artificial Sequence: Synthetic oligonucleotide
  Sense strand starting at position 3922 of SEQ ID NO: 317917
guguaauucucacuuaaga

SEQ ID NO: 522542 - RNA, 19 nt, Artificial Sequence
  Description of Artificial Sequence: Synthetic oligonucleotide
  Antisense strand to SEQ ID NO: 522541
ucuuaagugagaauuacac

SEQ ID NO: 522543 - RNA, 19 nt, Artificial Sequence
  Description of Artificial Sequence: Synthetic oligonucleotide
  Sense strand starting at position 3939 of SEQ ID NO: 317917
gauauauacuugccagcag

SEQ ID NO: 522544 - RNA, 19 nt, Artificial Sequence
  Description of Artificial Sequence: Synthetic oligonucleotide
  Antisense strand to SEQ ID NO: 522543
cugcuggcaaguauauauc

SEQ ID NO: 522545 - RNA, 19 nt, Artificial Sequence
  Description of Artificial Sequence: Synthetic oligonucleotide
  Sense strand starting at position 42 of SEQ ID NO: 317918
aagggaaacuaugcuugua

SEQ ID NO: 522546 - RNA, 19 nt, Artificial Sequence
  Description of Artificial Sequence: Synthetic oligonucleotide
  Antisense strand to SEQ ID NO: 522545
uacaagcauaguuucccuu

SEQ ID NO: 522547 - RNA, 19 nt, Artificial Sequence
  Description of Artificial Sequence: Synthetic oligonucleotide
  Sense strand starting at position 44 of SEQ ID NO: 317918
gggaaacuaugcuuguaag

SEQ ID NO: 522548 - RNA, 19 nt, Artificial Sequence
  Description of Artificial Sequence: Synthetic oligonucleotide
  Antisense strand to SEQ ID NO: 522547
cuuacaagcauaguuuccc

SEQ ID NO: 522549 - RNA, 19 nt, Artificial Sequence
  Description of Artificial Sequence: Synthetic oligonucleotide
  Sense strand starting at position 45 of SEQ ID NO: 317918
ggaaacuaugcuuguaagu

SEQ ID NO: 522550 - RNA, 19 nt, Artificial Sequence
  Description of Artificial Sequence: Synthetic oligonucleotide
  Antisense strand to SEQ ID NO: 522549
acuuacaagcauaguuucc

SEQ ID NO: 522551 - RNA, 19 nt, Artificial Sequence
  Description of Artificial Sequence: Synthetic oligonucleotide
  Sense strand starting at position 54 of SEQ ID NO: 317918
gcuuguaagucaucagaag

SEQ ID NO: 522552 - RNA, 19 nt, Artificial Sequence
  Description of Artificial Sequence: Synthetic oligonucleotide
  Antisense strand to SEQ ID NO: 522551
cuucugaugacuuacaagc

SEQ ID NO: 522553 - RNA, 19 nt, Artificial Sequence
  Description of Artificial Sequence: Synthetic oligonucleotide
  Sense strand starting at position 55 of SEQ ID NO: 317918
cuuguaagucaucagaagu

SEQ ID NO: 522554 - RNA, 19 nt, Artificial Sequence
  Description of Artificial Sequence: Synthetic oligonucleotide
  Antisense strand to SEQ ID NO: 522553
acuucugaugacuuacaag

SEQ ID NO: 522555 - RNA, 19 nt, Artificial Sequence
  Description of Artificial Sequence: Synthetic oligonucleotide
  Sense strand starting at position 62 of SEQ ID NO: 317918
gucaucagaaguuauguuu

SEQ ID NO: 522556 - RNA, 19 nt, Artificial Sequence
  Description of Artificial Sequence: Synthetic oligonucleotide
  Antisense strand to SEQ ID NO: 522555
aaacauaacuucugaugac

SEQ ID NO: 522557 - RNA, 19 nt, Artificial Sequence
  Description of Artificial Sequence: Synthetic oligonucleotide
  Sense strand starting at position 196 of SEQ ID NO: 317918
gcuggcaugcauugaauuu

SEQ ID NO: 522558 - RNA, 19 nt, Artificial Sequence
  Description of Artificial Sequence: Synthetic oligonucleotide
  Antisense strand to SEQ ID NO: 522557
aaauucaaugcaugccagc

SEQ ID NO: 522559 - RNA, 19 nt, Artificial Sequence
  Description of Artificial Sequence: Synthetic oligonucleotide
  Sense strand starting at position 244 of SEQ ID NO: 317918
ugauguuaagccuggagaa

SEQ ID NO: 522560 - RNA, 19 nt, Artificial Sequence
  Description of Artificial Sequence: Synthetic oligonucleotide
  Antisense strand to SEQ ID NO: 522559
uucuccaggcuuaacauca

SEQ ID NO: 522561 - RNA, 19 nt, Artificial Sequence
  Description of Artificial Sequence: Synthetic oligonucleotide
  Sense strand starting at position 245 of SEQ ID NO: 317918
gauguuaagccuggagaag

SEQ ID NO: 522562 - RNA, 19 nt, Artificial Sequence
  Description of Artificial Sequence: Synthetic oligonucleotide
  Antisense strand to SEQ ID NO: 522561
cuucuccaggcuuaacauc

SEQ ID NO: 522563 - RNA, 19 nt, Artificial Sequence
  Description of Artificial Sequence: Synthetic oligonucleotide
  Sense strand starting at position 397 of SEQ ID NO: 317918
auaggaaauauguggcuaa

SEQ ID NO: 522564 - RNA, 19 nt, Artificial Sequence
  Description of Artificial Sequence: Synthetic oligonucleotide
  Antisense strand to SEQ ID NO: 522563
uuagccacauauuuccuau

SEQ ID NO: 522565 - RNA, 19 nt, Artificial Sequence
  Description of Artificial Sequence: Synthetic oligonucleotide
  Sense strand starting at position 558 of SEQ ID NO: 317918
gaggacacaucagaaugau

SEQ ID NO: 522566 - RNA, 19 nt, Artificial Sequence
  Description of Artificial Sequence: Synthetic oligonucleotide
  Antisense strand to SEQ ID NO: 522565
aucauucugauguguccuc

SEQ ID NO: 522567 - RNA, 19 nt, Artificial Sequence
  Description of Artificial Sequence: Synthetic oligonucleotide
  Sense strand starting at position 567 of SEQ ID NO: 317918
ucagaaugauguccucuga

SEQ ID NO: 522568 - RNA, 19 nt, Artificial Sequence
  Description of Artificial Sequence: Synthetic oligonucleotide
  Antisense strand to SEQ ID NO: 522567
ucagaggacaucauucuga

SEQ ID NO: 522569 - RNA, 19 nt, Artificial Sequence
  Description of Artificial Sequence: Synthetic oligonucleotide
  Sense strand starting at position 724 of SEQ ID NO: 317918
caaacuguguguuugggaa

SEQ ID NO: 522570 - RNA, 19 nt, Artificial Sequence
  Description of Artificial Sequence: Synthetic oligonucleotide
  Antisense strand to SEQ ID NO: 522569
uucccaaacacacaguuug

SEQ ID NO: 522571 - RNA, 19 nt, Artificial Sequence
  Description of Artificial Sequence: Synthetic oligonucleotide
  Sense strand starting at position 763 of SEQ ID NO: 317918
acuagugggcuccagacaa

SEQ ID NO: 522572 - RNA, 19 nt, Artificial Sequence
  Description of Artificial Sequence: Synthetic oligonucleotide
  Antisense strand to SEQ ID NO: 522571
uugucuggagcccacuagu

SEQ ID NO: 522573 - RNA, 19 nt, Artificial Sequence
  Description of Artificial Sequence: Synthetic oligonucleotide
  Sense strand starting at position 767 of SEQ ID NO: 317918
gugggcuccagacaaauau

SEQ ID NO: 522574 - RNA, 19 nt, Artificial Sequence
  Description of Artificial Sequence: Synthetic oligonucleotide
  Antisense strand to SEQ ID NO: 522573
auauuugucuggagcccac

SEQ ID NO: 522575 - RNA, 19 nt, Artificial Sequence
  Description of Artificial Sequence: Synthetic oligonucleotide
  Sense strand starting at position 1299 of SEQ ID NO: 317918
guauucuguguuguuagca

SEQ ID NO: 522576 - RNA, 19 nt, Artificial Sequence
  Description of Artificial Sequence: Synthetic oligonucleotide
  Antisense strand to SEQ ID NO: 522575
ugcuaacaacacagaauac

SEQ ID NO: 522577 - RNA, 19 nt, Artificial Sequence
  Description of Artificial Sequence: Synthetic oligonucleotide
  Sense strand starting at position 1525 of SEQ ID NO: 317918
ggcuuucuuccaggaaccu

SEQ ID NO: 522578 - RNA, 19 nt, Artificial Sequence
  Description of Artificial Sequence: Synthetic oligonucleotide
  Antisense strand to SEQ ID NO: 522577
agguuccuggaagaaagcc

SEQ ID NO: 522579 - RNA, 19 nt, Artificial Sequence
  Description of Artificial Sequence: Synthetic oligonucleotide
  Sense strand starting at position 2489 of SEQ ID NO: 317918
ggguuacacuuacugagaa

SEQ ID NO: 522580 - RNA, 19 nt, Artificial Sequence
  Description of Artificial Sequence: Synthetic oligonucleotide
  Antisense strand to SEQ ID NO: 522579
uucucaguaaguguaaccc

SEQ ID NO: 522581 - RNA, 19 nt, Artificial Sequence
  Description of Artificial Sequence: Synthetic oligonucleotide
  Sense strand starting at position 2533 of SEQ ID NO: 317918
auaugugcauuauugacaa

SEQ ID NO: 522582 - RNA, 19 nt, Artificial Sequence
  Description of Artificial Sequence: Synthetic oligonucleotide
  Antisense strand to SEQ ID NO: 522581
uugucaauaaugcacauau

SEQ ID NO: 522583 - RNA, 19 nt, Artificial Sequence
  Description of Artificial Sequence: Synthetic oligonucleotide
  Sense strand starting at position 2598 of SEQ ID NO: 317918
aguaguuuacaguagaaua

SEQ ID NO: 522584 - RNA, 19 nt, Artificial Sequence
  Description of Artificial Sequence: Synthetic oligonucleotide
  Antisense strand to SEQ ID NO: 522583
uauucuacuguaaacuacu

SEQ ID NO: 522585 - RNA, 19 nt, Artificial Sequence
  Description of Artificial Sequence: Synthetic oligonucleotide
  Sense strand starting at position 2660 of SEQ ID NO: 317918
cgcacucugccggucagau

SEQ ID NO: 522586 - RNA, 19 nt, Artificial Sequence
  Description of Artificial Sequence: Synthetic oligonucleotide
  Antisense strand to SEQ ID NO: 522585
aucugaccggcagagugcg

SEQ ID NO: 522587 - RNA, 19 nt, Artificial Sequence
  Description of Artificial Sequence: Synthetic oligonucleotide
  Sense strand starting at position 2763 of SEQ ID NO: 317918
aacugacugcaugggaaau

SEQ ID NO: 522588 - RNA, 19 nt, Artificial Sequence
  Description of Artificial Sequence: Synthetic oligonucleotide
  Antisense strand to SEQ ID NO: 522587
auuucccaugcagucaguu

SEQ ID NO: 522589 - RNA, 19 nt, Artificial Sequence
  Description of Artificial Sequence: Synthetic oligonucleotide
  Sense strand starting at position 2869 of SEQ ID NO: 317918
gggcaauguccacaaguaa

SEQ ID NO: 522590 - RNA, 19 nt, Artificial Sequence
  Description of Artificial Sequence: Synthetic oligonucleotide
  Antisense strand to SEQ ID NO: 522589
uuacuuguggacauugccc

SEQ ID NO: 522591 - RNA, 19 nt, Artificial Sequence
  Description of Artificial Sequence: Synthetic oligonucleotide
  Sense strand starting at position 2933 of SEQ ID NO: 317918
uggccacuccagugagauu

SEQ ID NO: 522592 - RNA, 19 nt, Artificial Sequence
  Description of Artificial Sequence: Synthetic oligonucleotide
  Antisense strand to SEQ ID NO: 522591
aaucucacuggaguggcca

SEQ ID NO: 522593 - RNA, 19 nt, Artificial Sequence
  Description of Artificial Sequence: Synthetic oligonucleotide
  Sense strand starting at position 3224 of SEQ ID NO: 317918
ucuacugcauguuuagaaa

SEQ ID NO: 522594 - RNA, 19 nt, Artificial Sequence
  Description of Artificial Sequence: Synthetic oligonucleotide
  Antisense strand to SEQ ID NO: 522593
uuucuaaacaugcaguaga

SEQ ID NO: 522595 - RNA, 19 nt, Artificial Sequence
  Description of Artificial Sequence: Synthetic oligonucleotide
  Sense strand starting at position 3270 of SEQ ID NO: 317918
uugacauugauggguaguu

SEQ ID NO: 522596 - RNA, 19 nt, Artificial Sequence
  Description of Artificial Sequence: Synthetic oligonucleotide
  Antisense strand to SEQ ID NO: 522595
aacuacccaucaaugucaa

SEQ ID NO: 522597 - RNA, 19 nt, Artificial Sequence
  Description of Artificial Sequence: Synthetic oligonucleotide
  Sense strand starting at position 3271 of SEQ ID NO: 317918
ugacauugauggguaguuu

SEQ ID NO: 522598 - RNA, 19 nt, Artificial Sequence
  Description of Artificial Sequence: Synthetic oligonucleotide
  Antisense strand to SEQ ID NO: 522597
aaacuacccaucaauguca

SEQ ID NO: 522599 - RNA, 19 nt, Artificial Sequence
  Description of Artificial Sequence: Synthetic oligonucleotide
  Sense strand starting at position 3305 of SEQ ID NO: 317918
caucgcuugcguguauaga

SEQ ID NO: 522600 - RNA, 19 nt, Artificial Sequence
  Description of Artificial Sequence: Synthetic oligonucleotide
  Antisense strand to SEQ ID NO: 522599
ucuauacacgcaagcgaug

SEQ ID NO: 522601 - RNA, 19 nt, Artificial Sequence
  Description of Artificial Sequence: Synthetic oligonucleotide
  Sense strand starting at position 3384 of SEQ ID NO: 317918
ggguaugagcagugacaag

SEQ ID NO: 522602 - RNA, 19 nt, Artificial Sequence
  Description of Artificial Sequence: Synthetic oligonucleotide
  Antisense strand to SEQ ID NO: 522601
cuugucacugcucauaccc

SEQ ID NO: 522603 - RNA, 19 nt, Artificial Sequence
  Description of Artificial Sequence: Synthetic oligonucleotide
  Sense strand starting at position 3401 of SEQ ID NO: 317918
aguacaaauugucuauucu

SEQ ID NO: 522604 - RNA, 19 nt, Artificial Sequence
  Description of Artificial Sequence: Synthetic oligonucleotide
  Antisense strand to SEQ ID NO: 522603
agaauagacaauuuguacu

SEQ ID NO: 522605 - RNA, 19 nt, Artificial Sequence
  Description of Artificial Sequence: Synthetic oligonucleotide
  Sense strand starting at position 3402 of SEQ ID NO: 317918
guacaaauugucuauucua

SEQ ID NO: 522606 - RNA, 19 nt, Artificial Sequence
  Description of Artificial Sequence: Synthetic oligonucleotide
  Antisense strand to SEQ ID NO: 522605
uagaauagacaauuuguac

SEQ ID NO: 522607 - RNA, 19 nt, Artificial Sequence
  Description of Artificial Sequence: Synthetic oligonucleotide
  Sense strand starting at position 3444 of SEQ ID NO: 317918
uuucuugcgguauaauaaa

SEQ ID NO: 522608 - RNA, 19 nt, Artificial Sequence
  Description of Artificial Sequence: Synthetic oligonucleotide
  Antisense strand to SEQ ID NO: 522607
uuuauuauaccgcaagaaa

SEQ ID NO: 522609 - RNA, 19 nt, Artificial Sequence
  Description of Artificial Sequence: Synthetic oligonucleotide
  Sense strand starting at position 3653 of SEQ ID NO: 317918
gugguacuuagugaccaaa

SEQ ID NO: 522610 - RNA, 19 nt, Artificial Sequence
  Description of Artificial Sequence: Synthetic oligonucleotide
  Antisense strand to SEQ ID NO: 522609
uuuggucacuaaguaccac

SEQ ID NO: 522611 - RNA, 19 nt, Artificial Sequence
  Description of Artificial Sequence: Synthetic oligonucleotide
  Sense strand starting at position 3656 of SEQ ID NO: 317918
guacuuagugaccaaaccu

SEQ ID NO: 522612 - RNA, 19 nt, Artificial Sequence
  Description of Artificial Sequence: Synthetic oligonucleotide
  Antisense strand to SEQ ID NO: 522611
agguuuggucacuaaguac

SEQ ID NO: 522613 - RNA, 19 nt, Artificial Sequence
  Description of Artificial Sequence: Synthetic oligonucleotide
  Sense strand starting at position 3870 of SEQ ID NO: 317918
acguauauacauggagauu

SEQ ID NO: 522614 - RNA, 19 nt, Artificial Sequence
  Description of Artificial Sequence: Synthetic oligonucleotide
  Antisense strand to SEQ ID NO: 522613
aaucuccauguauauacgu

SEQ ID NO: 522615 - RNA, 19 nt, Artificial Sequence
  Description of Artificial Sequence: Synthetic oligonucleotide
  Sense strand starting at position 3903 of SEQ ID NO: 317918
uggugauuacaugagugau

SEQ ID NO: 522616 - RNA, 19 nt, Artificial Sequence
  Description of Artificial Sequence: Synthetic oligonucleotide
  Antisense strand to SEQ ID NO: 522615
aucacucauguaaucacca

SEQ ID NO: 522617 - RNA, 19 nt, Artificial Sequence
  Description of Artificial Sequence: Synthetic oligonucleotide
  Sense strand starting at position 3905 of SEQ ID NO: 317918
gugauuacaugagugauua

SEQ ID NO: 522618 - RNA, 19 nt, Artificial Sequence
  Description of Artificial Sequence: Synthetic oligonucleotide
  Antisense strand to SEQ ID NO: 522617
uaaucacucauguaaucac

SEQ ID NO: 522619 - RNA, 19 nt, Artificial Sequence
  Description of Artificial Sequence: Synthetic oligonucleotide
  Sense strand starting at position 3906 of SEQ ID NO: 317918
ugauuacaugagugauuac

SEQ ID NO: 522620 - RNA, 19 nt, Artificial Sequence
  Description of Artificial Sequence: Synthetic oligonucleotide
  Antisense strand to SEQ ID NO: 522619
guaaucacucauguaauca

SEQ ID NO: 522621 - RNA, 19 nt, Artificial Sequence
  Description of Artificial Sequence: Synthetic oligonucleotide
  Sense strand starting at position 3909 of SEQ ID NO: 317918
uuacaugagugauuacaug

SEQ ID NO: 522622 - RNA, 19 nt, Artificial Sequence
  Description of Artificial Sequence: Synthetic oligonucleotide
  Antisense strand to SEQ ID NO: 522621
cauguaaucacucauguaa

SEQ ID NO: 522623 - RNA, 19 nt, Artificial Sequence
  Description of Artificial Sequence: Synthetic oligonucleotide
  Sense strand starting at position 3918 of SEQ ID NO: 317918
ugauuacaugucugcacaa

SEQ ID NO: 522624 - RNA, 19 nt, Artificial Sequence
  Description of Artificial Sequence: Synthetic oligonucleotide
  Antisense strand to SEQ ID NO: 522623
uugugcagacauguaauca

SEQ ID NO: 522625 - RNA, 19 nt, Artificial Sequence
  Description of Artificial Sequence: Synthetic oligonucleotide
  Sense strand starting at position 105 of SEQ ID NO: 317919
ugauuaaccucuguaggca

SEQ ID NO: 522626 - RNA, 19 nt, Artificial Sequence
  Description of Artificial Sequence: Synthetic oligonucleotide
  Antisense strand to SEQ ID NO: 522625
ugccuacagagguuaauca

SEQ ID NO: 522627 - RNA, 19 nt, Artificial Sequence
  Description of Artificial Sequence: Synthetic oligonucleotide
  Sense strand starting at position 106 of SEQ ID NO: 317919
gauuaaccucuguaggcau

SEQ ID NO: 522628 - RNA, 19 nt, Artificial Sequence
  Description of Artificial Sequence: Synthetic oligonucleotide
  Antisense strand to SEQ ID NO: 522627
augccuacagagguuaauc

SEQ ID NO: 522629 - RNA, 19 nt, Artificial Sequence
  Description of Artificial Sequence: Synthetic oligonucleotide
  Sense strand starting at position 945 of SEQ ID NO: 317919
acugguuaucucuauucuu

SEQ ID NO: 522630 - RNA, 19 nt, Artificial Sequence
  Description of Artificial Sequence: Synthetic oligonucleotide
  Antisense strand to SEQ ID NO: 522629
aagaauagagauaaccagu

SEQ ID NO: 522631 - RNA, 19 nt, Artificial Sequence
  Description of Artificial Sequence: Synthetic oligonucleotide
  Sense strand starting at position 970 of SEQ ID NO: 317919
gugccagauauuugagcua

SEQ ID NO: 522632 - RNA, 19 nt, Artificial Sequence
  Description of Artificial Sequence: Synthetic oligonucleotide
  Antisense strand to SEQ ID NO: 522631
uagcucaaauaucuggcac

SEQ ID NO: 522633 - RNA, 19 nt, Artificial Sequence
  Description of Artificial Sequence: Synthetic oligonucleotide
  Sense strand starting at position 1009 of SEQ ID NO: 317919
uggugaugguuguuuauau

SEQ ID NO: 522634 - RNA, 19 nt, Artificial Sequence
  Description of Artificial Sequence: Synthetic oligonucleotide
  Antisense strand to SEQ ID NO: 522633
auauaaacaaccaucacca

SEQ ID NO: 522635 - RNA, 19 nt, Artificial Sequence
  Description of Artificial Sequence: Synthetic oligonucleotide
  Sense strand starting at position 1030 of SEQ ID NO: 317919
ucauuacuaucguuauuag

SEQ ID NO: 522636 - RNA, 19 nt, Artificial Sequence
  Description of Artificial Sequence: Synthetic oligonucleotide
  Antisense strand to SEQ ID NO: 522635
cuaauaacgauaguaauga

SEQ ID NO: 522637 - RNA, 19 nt, Artificial Sequence
  Description of Artificial Sequence: Synthetic oligonucleotide
  Sense strand starting at position 1039 of SEQ ID NO: 317919
ucguuauuagaaugacugu

SEQ ID NO: 522638 - RNA, 19 nt, Artificial Sequence
  Description of Artificial Sequence: Synthetic oligonucleotide
  Antisense strand to SEQ ID NO: 522637
acagucauucuaauaacga

SEQ ID NO: 522639 - RNA, 19 nt, Artificial Sequence
  Description of Artificial Sequence: Synthetic oligonucleotide
  Sense strand starting at position 1040 of SEQ ID NO: 317919
cguuauuagaaugacugua

SEQ ID NO: 522640 - RNA, 19 nt, Artificial Sequence
  Description of Artificial Sequence: Synthetic oligonucleotide
  Antisense strand to SEQ ID NO: 522639
uacagucauucuaauaacg

SEQ ID NO: 522641 - RNA, 19 nt, Artificial Sequence
  Description of Artificial Sequence: Synthetic oligonucleotide
  Sense strand starting at position 1174 of SEQ ID NO: 317919
uguguaguaagcguguaga

SEQ ID NO: 522642 - RNA, 19 nt, Artificial Sequence
  Description of Artificial Sequence: Synthetic oligonucleotide
  Antisense strand to SEQ ID NO: 522641
ucuacacgcuuacuacaca

SEQ ID NO: 522643 - RNA, 19 nt, Artificial Sequence
  Description of Artificial Sequence: Synthetic oligonucleotide
  Sense strand starting at position 1233 of SEQ ID NO: 317919
ggagaaagauuccaauaac

SEQ ID NO: 522644 - RNA, 19 nt, Artificial Sequence
  Description of Artificial Sequence: Synthetic oligonucleotide
  Antisense strand to SEQ ID NO: 522643
guuauuggaaucuuucucc

SEQ ID NO: 522645 - RNA, 19 nt, Artificial Sequence
  Description of Artificial Sequence: Synthetic oligonucleotide
  Sense strand starting at position 1486 of SEQ ID NO: 317919
aguucugggucccuauaaa

SEQ ID NO: 522646 - RNA, 19 nt, Artificial Sequence
  Description of Artificial Sequence: Synthetic oligonucleotide
  Antisense strand to SEQ ID NO: 522645
uuuauagggacccagaacu

SEQ ID NO: 522647 - RNA, 19 nt, Artificial Sequence
  Description of Artificial Sequence: Synthetic oligonucleotide
  Sense strand starting at position 1601 of SEQ ID NO: 317919
guauccuaucguuauuaau

SEQ ID NO: 522648 - RNA, 19 nt, Artificial Sequence
  Description of Artificial Sequence: Synthetic oligonucleotide
  Antisense strand to SEQ ID NO: 522647
auuaauaacgauaggauac

SEQ ID NO: 522649 - RNA, 19 nt, Artificial Sequence
  Description of Artificial Sequence: Synthetic oligonucleotide
  Sense strand starting at position 1619 of SEQ ID NO: 317919
uacggcugucucuagauga

SEQ ID NO: 522650 - RNA, 19 nt, Artificial Sequence
  Description of Artificial Sequence: Synthetic oligonucleotide
  Antisense strand to SEQ ID NO: 522649
ucaucuagagacagccgua

SEQ ID NO: 522651 - RNA, 19 nt, Artificial Sequence
  Description of Artificial Sequence: Synthetic oligonucleotide
  Sense strand starting at position 1624 of SEQ ID NO: 317919
cugucucuagaugagcaaa

SEQ ID NO: 522652 - RNA, 19 nt, Artificial Sequence
  Description of Artificial Sequence: Synthetic oligonucleotide
  Antisense strand to SEQ ID NO: 522651
uuugcucaucuagagacag

SEQ ID NO: 522653 - RNA, 19 nt, Artificial Sequence
  Description of Artificial Sequence: Synthetic oligonucleotide
  Sense strand starting at position 1684 of SEQ ID NO: 317919
aaacgagagauucgacgua

SEQ ID NO: 522654 - RNA, 19 nt, Artificial Sequence
  Description of Artificial Sequence: Synthetic oligonucleotide
  Antisense strand to SEQ ID NO: 522653
uacgucgaaucucucguuu

SEQ ID NO: 522655 - RNA, 19 nt, Artificial Sequence
  Description of Artificial Sequence: Synthetic oligonucleotide
  Sense strand starting at position 1689 of SEQ ID NO: 317919
agagauucgacguaaacgu

SEQ ID NO: 522656 - RNA, 19 nt, Artificial Sequence
  Description of Artificial Sequence: Synthetic oligonucleotide
  Antisense strand to SEQ ID NO: 522655
acguuuacgucgaaucucu

SEQ ID NO: 522657 - RNA, 19 nt, Artificial Sequence
  Description of Artificial Sequence: Synthetic oligonucleotide
  Sense strand starting at position 1731 of SEQ ID NO: 317919
cgcugacaacgacaagaau

SEQ ID NO: 522658 - RNA, 19 nt, Artificial Sequence
  Description of Artificial Sequence: Synthetic oligonucleotide
  Antisense strand to SEQ ID NO: 522657
auucuugucguugucagcg

SEQ ID NO: 522659 - RNA, 19 nt, Artificial Sequence
  Description of Artificial Sequence: Synthetic oligonucleotide
  Sense strand starting at position 2370 of SEQ ID NO: 317919
uaguaagugcuguaaagaa

SEQ ID NO: 522660 - RNA, 19 nt, Artificial Sequence
  Description of Artificial Sequence: Synthetic oligonucleotide
  Antisense strand to SEQ ID NO: 522659
uucuuuacagcacuuacua

SEQ ID NO: 522661 - RNA, 19 nt, Artificial Sequence
  Description of Artificial Sequence: Synthetic oligonucleotide
  Sense strand starting at position 2398 of SEQ ID NO: 317919
ggauaaugugauggaacga

SEQ ID NO: 522662 - RNA, 19 nt, Artificial Sequence
  Description of Artificial Sequence: Synthetic oligonucleotide
  Antisense strand to SEQ ID NO: 522661
ucguuccaucacauuaucc

SEQ ID NO: 522663 - RNA, 19 nt, Artificial Sequence
  Description of Artificial Sequence: Synthetic oligonucleotide
  Sense strand starting at position 2423 of SEQ ID NO: 317919
agaguaauaagccguauga

SEQ ID NO: 522664 - RNA, 19 nt, Artificial Sequence
  Description of Artificial Sequence: Synthetic oligonucleotide
  Antisense strand to SEQ ID NO: 522663
ucauacggcuuauuacucu

SEQ ID NO: 522665 - RNA, 19 nt, Artificial Sequence
  Description of Artificial Sequence: Synthetic oligonucleotide
  Sense strand starting at position 2425 of SEQ ID NO: 317919
aguaauaagccguaugaaa

SEQ ID NO: 522666 - RNA, 19 nt, Artificial Sequence
  Description of Artificial Sequence: Synthetic oligonucleotide
  Antisense strand to SEQ ID NO: 522665
uuucauacggcuuauuacu

SEQ ID NO: 522667 - RNA, 19 nt, Artificial Sequence
  Description of Artificial Sequence: Synthetic oligonucleotide
  Sense strand starting at position 2488 of SEQ ID NO: 317919
ggccauauagugggaacaa

SEQ ID NO: 522668 - RNA, 19 nt, Artificial Sequence
  Description of Artificial Sequence: Synthetic oligonucleotide
  Antisense strand to SEQ ID NO: 522667
uuguucccacuauauggcc

SEQ ID NO: 522669 - RNA, 19 nt, Artificial Sequence
  Description of Artificial Sequence: Synthetic oligonucleotide
  Sense strand starting at position 2500 of SEQ ID NO: 317919
ggaacaaacuuagcaaagu

SEQ ID NO: 522670 - RNA, 19 nt, Artificial Sequence
  Description of Artificial Sequence: Synthetic oligonucleotide
  Antisense strand to SEQ ID NO: 522669
acuuugcuaaguuuguucc

SEQ ID NO: 522671 - RNA, 19 nt, Artificial Sequence
  Description of Artificial Sequence: Synthetic oligonucleotide
  Sense strand starting at position 2612 of SEQ ID NO: 317919
gcuuaugagcaaggauaaa

SEQ ID NO: 522672 - RNA, 19 nt, Artificial Sequence
  Description of Artificial Sequence: Synthetic oligonucleotide
  Antisense strand to SEQ ID NO: 522671
uuuauccuugcucauaagc

SEQ ID NO: 522673 - RNA, 19 nt, Artificial Sequence
  Description of Artificial Sequence: Synthetic oligonucleotide
  Sense strand starting at position 2665 of SEQ ID NO: 317919
cauugaagguuucuaagca

SEQ ID NO: 522674 - RNA, 19 nt, Artificial Sequence
  Description of Artificial Sequence: Synthetic oligonucleotide
  Antisense strand to SEQ ID NO: 522673
ugcuuagaaaccuucaaug

SEQ ID NO: 522675 - RNA, 19 nt, Artificial Sequence
  Description of Artificial Sequence: Synthetic oligonucleotide
  Sense strand starting at position 2669 of SEQ ID NO: 317919
gaagguuucuaagcagaug

SEQ ID NO: 522676 - RNA, 19 nt, Artificial Sequence
  Description of Artificial Sequence: Synthetic oligonucleotide
  Antisense strand to SEQ ID NO: 522675
caucugcuuagaaaccuuc

SEQ ID NO: 522677 - RNA, 19 nt, Artificial Sequence
  Description of Artificial Sequence: Synthetic oligonucleotide
  Sense strand starting at position 2726 of SEQ ID NO: 317919
gggaccucaucagaaagau

SEQ ID NO: 522678 - RNA, 19 nt, Artificial Sequence
  Description of Artificial Sequence: Synthetic oligonucleotide
  Antisense strand to SEQ ID NO: 522677
aucuuucugaugagguccc

SEQ ID NO: 522679 - RNA, 19 nt, Artificial Sequence
  Description of Artificial Sequence: Synthetic oligonucleotide
  Sense strand starting at position 2903 of SEQ ID NO: 317919
uuuaaugcccucggaauua

SEQ ID NO: 522680 - RNA, 19 nt, Artificial Sequence
  Description of Artificial Sequence: Synthetic oligonucleotide
  Antisense strand to SEQ ID NO: 522679
uaauuccgagggcauuaaa

SEQ ID NO: 522681 - RNA, 19 nt, Artificial Sequence
  Description of Artificial Sequence: Synthetic oligonucleotide
  Sense strand starting at position 2913 of SEQ ID NO: 317919
ucggaauuaucaucuuaau

SEQ ID NO: 522682 - RNA, 19 nt, Artificial Sequence
  Description of Artificial Sequence: Synthetic oligonucleotide
  Antisense strand to SEQ ID NO: 522681
auuaagaugauaauuccga

SEQ ID NO: 522683 - RNA, 19 nt, Artificial Sequence
  Description of Artificial Sequence: Synthetic oligonucleotide
  Sense strand starting at position 3137 of SEQ ID NO: 317919
ggcuaaaguauggaaucuu

SEQ ID NO: 522684 - RNA, 19 nt, Artificial Sequence
  Description of Artificial Sequence: Synthetic oligonucleotide
  Antisense strand to SEQ ID NO: 522683
aagauuccauacuuuagcc

SEQ ID NO: 522685 - RNA, 19 nt, Artificial Sequence
  Description of Artificial Sequence: Synthetic oligonucleotide
  Sense strand starting at position 3173 of SEQ ID NO: 317919
uuaaaugcugcugauaauu

SEQ ID NO: 522686 - RNA, 19 nt, Artificial Sequence
  Description of Artificial Sequence: Synthetic oligonucleotide
  Antisense strand to SEQ ID NO: 522685
aauuaucagcagcauuuaa

SEQ ID NO: 522687 - RNA, 19 nt, Artificial Sequence
  Description of Artificial Sequence: Synthetic oligonucleotide
  Sense strand starting at position 3535 of SEQ ID NO: 317919
ugccauauugugugagaau

SEQ ID NO: 522688 - RNA, 19 nt, Artificial Sequence
  Description of Artificial Sequence: Synthetic oligonucleotide
  Antisense strand to SEQ ID NO: 522687
auucucacacaauauggca

SEQ ID NO: 522689 - RNA, 19 nt, Artificial Sequence
  Description of Artificial Sequence: Synthetic oligonucleotide
  Sense strand starting at position 3651 of SEQ ID NO: 317919
acugaauuacggugauugu

SEQ ID NO: 522690 - RNA, 19 nt, Artificial Sequence
  Description of Artificial Sequence: Synthetic oligonucleotide
  Antisense strand to SEQ ID NO: 522689
acaaucaccguaauucagu

SEQ ID NO: 522691 - RNA, 19 nt, Artificial Sequence
  Description of Artificial Sequence: Synthetic oligonucleotide
  Sense strand starting at position 3654 of SEQ ID NO: 317919
gaauuacggugauugucau

SEQ ID NO: 522692 - RNA, 19 nt, Artificial Sequence
  Description of Artificial Sequence: Synthetic oligonucleotide
  Antisense strand to SEQ ID NO: 522691
augacaaucaccguaauuc

SEQ ID NO: 522693 - RNA, 19 nt, Artificial Sequence
  Description of Artificial Sequence: Synthetic oligonucleotide
  Sense strand starting at position 3690 of SEQ ID NO: 317919
gaguuugauuuguaaauca

SEQ ID NO: 522694 - RNA, 19 nt, Artificial Sequence
  Description of Artificial Sequence: Synthetic oligonucleotide
  Antisense strand to SEQ ID NO: 522693
ugauuuacaaaucaaacuc

SEQ ID NO: 522695 - RNA, 19 nt, Artificial Sequence
  Description of Artificial Sequence: Synthetic oligonucleotide
  Sense strand starting at position 3863 of SEQ ID NO: 317919
gucaaaugauucucuagag

SEQ ID NO: 522696 - RNA, 19 nt, Artificial Sequence
  Description of Artificial Sequence: Synthetic oligonucleotide
  Antisense strand to SEQ ID NO: 522695
cucuagagaaucauuugac

SEQ ID NO: 522697 - RNA, 19 nt, Artificial Sequence
  Description of Artificial Sequence: Synthetic oligonucleotide
  Sense strand starting at position 3864 of SEQ ID NO: 317919
ucaaaugauucucuagagu

SEQ ID NO: 522698 - RNA, 19 nt, Artificial Sequence
  Description of Artificial Sequence: Synthetic oligonucleotide
  Antisense strand to SEQ ID NO: 522697
acucuagagaaucauuuga

SEQ ID NO: 522699 - RNA, 19 nt, Artificial Sequence
  Description of Artificial Sequence: Synthetic oligonucleotide
  Sense strand starting at position 3867 of SEQ ID NO: 317919
aaugauucucuagaguguu

SEQ ID NO: 522700 - RNA, 19 nt, Artificial Sequence
  Description of Artificial Sequence: Synthetic oligonucleotide
  Antisense strand to SEQ ID NO: 522699
aacacucuagagaaucauu

SEQ ID NO: 522701 - RNA, 19 nt, Artificial Sequence
  Description of Artificial Sequence: Synthetic oligonucleotide
  Sense strand starting at position 3879 of SEQ ID NO: 317919
gaguguucugccuacuaaa

SEQ ID NO: 522702 - RNA, 19 nt, Artificial Sequence
  Description of Artificial Sequence: Synthetic oligonucleotide
  Antisense strand to SEQ ID NO: 522701
uuuaguaggcagaacacuc

SEQ ID NO: 522703 - RNA, 19 nt, Artificial Sequence
  Description of Artificial Sequence: Synthetic oligonucleotide
  Sense strand starting at position 3901 of SEQ ID NO: 317919
caagauaggugucuuucuu

SEQ ID NO: 522704 - RNA, 19 nt, Artificial Sequence
  Description of Artificial Sequence: Synthetic oligonucleotide
  Antisense strand to SEQ ID NO: 522703
aagaaagacaccuaucuug

SEQ ID NO: 522705 - RNA, 19 nt, Artificial Sequence
  Description of Artificial Sequence: Synthetic oligonucleotide
  Sense strand starting at position 467 of SEQ ID NO: 317920
auguccuucuuauuugagu

SEQ ID NO: 522706 - RNA, 19 nt, Artificial Sequence
  Description of Artificial Sequence: Synthetic oligonucleotide
  Antisense strand to SEQ ID NO: 522705
acucaaauaagaaggacau

SEQ ID NO: 522707 - RNA, 19 nt, Artificial Sequence
  Description of Artificial Sequence: Synthetic oligonucleotide
  Sense strand starting at position 476 of SEQ ID NO: 317920
uuauuugagugcucgcauu

SEQ ID NO: 522708 - RNA, 19 nt, Artificial Sequence
  Description of Artificial Sequence: Synthetic oligonucleotide
  Antisense strand to SEQ ID NO: 522707
aaugcgagcacucaaauaa

SEQ ID NO: 522709 - RNA, 19 nt, Artificial Sequence
  Description of Artificial Sequence: Synthetic oligonucleotide
  Sense strand starting at position 651 of SEQ ID NO: 317920
ugcucaaguuaaccuagaa

SEQ ID NO: 522710 - RNA, 19 nt, Artificial Sequence
  Description of Artificial Sequence: Synthetic oligonucleotide
  Antisense strand to SEQ ID NO: 522709
uucuagguuaacuugagca

SEQ ID NO: 522711 - RNA, 19 nt, Artificial Sequence
  Description of Artificial Sequence: Synthetic oligonucleotide
  Sense strand starting at position 727 of SEQ ID NO: 317920
aucucuguccuguaacaag

SEQ ID NO: 522712 - RNA, 19 nt, Artificial Sequence
  Description of Artificial Sequence: Synthetic oligonucleotide
  Antisense strand to SEQ ID NO: 522711
cuuguuacaggacagagau

SEQ ID NO: 522713 - RNA, 19 nt, Artificial Sequence
  Description of Artificial Sequence: Synthetic oligonucleotide
  Sense strand starting at position 752 of SEQ ID NO: 317920
guuaccggagucugauuau

SEQ ID NO: 522714 - RNA, 19 nt, Artificial Sequence
  Description of Artificial Sequence: Synthetic oligonucleotide
  Antisense strand to SEQ ID NO: 522713
auaaucagacuccgguaac

SEQ ID NO: 522715 - RNA, 19 nt, Artificial Sequence
  Description of Artificial Sequence: Synthetic oligonucleotide
  Sense strand starting at position 755 of SEQ ID NO: 317920
accggagucugauuauucu

SEQ ID NO: 522716 - RNA, 19 nt, Artificial Sequence
  Description of Artificial Sequence: Synthetic oligonucleotide
  Antisense strand to SEQ ID NO: 522715
agaauaaucagacuccggu

SEQ ID NO: 522717 - RNA, 19 nt, Artificial Sequence
  Description of Artificial Sequence: Synthetic oligonucleotide
  Sense strand starting at position 758 of SEQ ID NO: 317920
ggagucugauuauucugca

SEQ ID NO: 522718 - RNA, 19 nt, Artificial Sequence
  Description of Artificial Sequence: Synthetic oligonucleotide
  Antisense strand to SEQ ID NO: 522717
ugcagaauaaucagacucc

SEQ ID NO: 522719 - RNA, 19 nt, Artificial Sequence
  Description of Artificial Sequence: Synthetic oligonucleotide
  Sense strand starting at position 762 of SEQ ID NO: 317920
ucugauuauucugcacugu

SEQ ID NO: 522720 - RNA, 19 nt, Artificial Sequence
  Description of Artificial Sequence: Synthetic oligonucleotide
  Antisense strand to SEQ ID NO: 522719
acagugcagaauaaucaga

SEQ ID NO: 522721 - RNA, 19 nt, Artificial Sequence
  Description of Artificial Sequence: Synthetic oligonucleotide
  Sense strand starting at position 782 of SEQ ID NO: 317920
uaggucauguuuguuauga

SEQ ID NO: 522722 - RNA, 19 nt, Artificial Sequence
  Description of Artificial Sequence: Synthetic oligonucleotide
  Antisense strand to SEQ ID NO: 522721
ucauaacaaacaugaccua

SEQ ID NO: 522723 - RNA, 19 nt, Artificial Sequence
  Description of Artificial Sequence: Synthetic oligonucleotide
  Sense strand starting at position 783 of SEQ ID NO: 317920
aggucauguuuguuaugag

SEQ ID NO: 522724 - RNA, 19 nt, Artificial Sequence
  Description of Artificial Sequence: Synthetic oligonucleotide
  Antisense strand to SEQ ID NO: 522723
cucauaacaaacaugaccu

SEQ ID NO: 522725 - RNA, 19 nt, Artificial Sequence
  Description of Artificial Sequence: Synthetic oligonucleotide
  Sense strand starting at position 790 of SEQ ID NO: 317920
guuuguuaugaggacacuu

SEQ ID NO: 522726 - RNA, 19 nt, Artificial Sequence
  Description of Artificial Sequence: Synthetic oligonucleotide
  Antisense strand to SEQ ID NO: 522725
aaguguccucauaacaaac

SEQ ID NO: 522727 - RNA, 19 nt, Artificial Sequence
  Description of Artificial Sequence: Synthetic oligonucleotide
  Sense strand starting at position 1427 of SEQ ID NO: 317920
cggugagugucuaccuguu

SEQ ID NO: 522728 - RNA, 19 nt, Artificial Sequence
  Description of Artificial Sequence: Synthetic oligonucleotide
  Antisense strand to SEQ ID NO: 522727
aacagguagacacucaccg

SEQ ID NO: 522729 - RNA, 19 nt, Artificial Sequence
  Description of Artificial Sequence: Synthetic oligonucleotide
  Sense strand starting at position 1434 of SEQ ID NO: 317920
ugucuaccuguucgagaca

SEQ ID NO: 522730 - RNA, 19 nt, Artificial Sequence
  Description of Artificial Sequence: Synthetic oligonucleotide
  Antisense strand to SEQ ID NO: 522729
ugucucgaacagguagaca

SEQ ID NO: 522731 - RNA, 19 nt, Artificial Sequence
  Description of Artificial Sequence: Synthetic oligonucleotide
  Sense strand starting at position 1437 of SEQ ID NO: 317920
cuaccuguucgagacaggu

SEQ ID NO: 522732 - RNA, 19 nt, Artificial Sequence
  Description of Artificial Sequence: Synthetic oligonucleotide
  Antisense strand to SEQ ID NO: 522731
accugucucgaacagguag

SEQ ID NO: 522733 - RNA, 19 nt, Artificial Sequence
  Description of Artificial Sequence: Synthetic oligonucleotide
  Sense strand starting at position 2485 of SEQ ID NO: 317920
aaauaacgugcugguauaa

SEQ ID NO: 522734 - RNA, 19 nt, Artificial Sequence
  Description of Artificial Sequence: Synthetic oligonucleotide
  Antisense strand to SEQ ID NO: 522733
uuauaccagcacguuauuu

SEQ ID NO: 522735 - RNA, 19 nt, Artificial Sequence
  Description of Artificial Sequence: Synthetic oligonucleotide
  Sense strand starting at position 2497 of SEQ ID NO: 317920
gguauaaauguuggauuga

SEQ ID NO: 522736 - RNA, 19 nt, Artificial Sequence
  Description of Artificial Sequence: Synthetic oligonucleotide
  Antisense strand to SEQ ID NO: 522735
ucaauccaacauuuauacc

SEQ ID NO: 522737 - RNA, 19 nt, Artificial Sequence
  Description of Artificial Sequence: Synthetic oligonucleotide
  Sense strand starting at position 2556 of SEQ ID NO: 317920
ucguuugacacgggaggaa

SEQ ID NO: 522738 - RNA, 19 nt, Artificial Sequence
  Description of Artificial Sequence: Synthetic oligonucleotide
  Antisense strand to SEQ ID NO: 522737
uuccucccgugucaaacga

SEQ ID NO: 522739 - RNA, 19 nt, Artificial Sequence
  Description of Artificial Sequence: Synthetic oligonucleotide
  Sense strand starting at position 2760 of SEQ ID NO: 317920
ggugaucuggcucagaagu

SEQ ID NO: 522740 - RNA, 19 nt, Artificial Sequence
  Description of Artificial Sequence: Synthetic oligonucleotide
  Antisense strand to SEQ ID NO: 522739
acuucugagccagaucacc

SEQ ID NO: 522741 - RNA, 19 nt, Artificial Sequence
  Description of Artificial Sequence: Synthetic oligonucleotide
  Sense strand starting at position 2851 of SEQ ID NO: 317920
gccugcuuugaagacagua

SEQ ID NO: 522742 - RNA, 19 nt, Artificial Sequence
  Description of Artificial Sequence: Synthetic oligonucleotide
  Antisense strand to SEQ ID NO: 522741
uacugucuucaaagcaggc

SEQ ID NO: 522743 - RNA, 19 nt, Artificial Sequence
  Description of Artificial Sequence: Synthetic oligonucleotide
  Sense strand starting at position 3193 of SEQ ID NO: 317920
uuaaauucccugcgucaag

SEQ ID NO: 522744 - RNA, 19 nt, Artificial Sequence
  Description of Artificial Sequence: Synthetic oligonucleotide
  Antisense strand to SEQ ID NO: 522743
cuugacgcagggaauuuaa

SEQ ID NO: 522745 - RNA, 19 nt, Artificial Sequence
  Description of Artificial Sequence: Synthetic oligonucleotide
  Sense strand starting at position 3223 of SEQ ID NO: 317920
gggaauguucuguaacgcu

SEQ ID NO: 522746 - RNA, 19 nt, Artificial Sequence
  Description of Artificial Sequence: Synthetic oligonucleotide
  Antisense strand to SEQ ID NO: 522745
agcguuacagaacauuccc

SEQ ID NO: 522747 - RNA, 19 nt, Artificial Sequence
  Description of Artificial Sequence: Synthetic oligonucleotide
  Sense strand starting at position 3255 of SEQ ID NO: 317920
auuguaaaccucuguguau

SEQ ID NO: 522748 - RNA, 19 nt, Artificial Sequence
  Description of Artificial Sequence: Synthetic oligonucleotide
  Antisense strand to SEQ ID NO: 522747
auacacagagguuuacaau

SEQ ID NO: 522749 - RNA, 19 nt, Artificial Sequence
  Description of Artificial Sequence: Synthetic oligonucleotide
  Sense strand starting at position 3257 of SEQ ID NO: 317920
uguaaaccucuguguauac

SEQ ID NO: 522750 - RNA, 19 nt, Artificial Sequence
  Description of Artificial Sequence: Synthetic oligonucleotide
  Antisense strand to SEQ ID NO: 522749
guauacacagagguuuaca

SEQ ID NO: 522751 - RNA, 19 nt, Artificial Sequence
  Description of Artificial Sequence: Synthetic oligonucleotide
  Sense strand starting at position 3258 of SEQ ID NO: 317920
guaaaccucuguguauaca

SEQ ID NO: 522752 - RNA, 19 nt, Artificial Sequence
  Description of Artificial Sequence: Synthetic oligonucleotide
  Antisense strand to SEQ ID NO: 522751
uguauacacagagguuuac

SEQ ID NO: 522753 - RNA, 19 nt, Artificial Sequence
  Description of Artificial Sequence: Synthetic oligonucleotide
  Sense strand starting at position 3267 of SEQ ID NO: 317920
uguguauacacacguggaa

SEQ ID NO: 522754 - RNA, 19 nt, Artificial Sequence
  Description of Artificial Sequence: Synthetic oligonucleotide
  Antisense strand to SEQ ID NO: 522753
uuccacguguguauacaca

SEQ ID NO: 522755 - RNA, 19 nt, Artificial Sequence
  Description of Artificial Sequence: Synthetic oligonucleotide
  Sense strand starting at position 3276 of SEQ ID NO: 317920
acacguggaauccauugau

SEQ ID NO: 522756 - RNA, 19 nt, Artificial Sequence
  Description of Artificial Sequence: Synthetic oligonucleotide
  Antisense strand to SEQ ID NO: 522755
aucaauggauuccacgugu

SEQ ID NO: 522757 - RNA, 19 nt, Artificial Sequence
  Description of Artificial Sequence: Synthetic oligonucleotide
  Sense strand starting at position 3279 of SEQ ID NO: 317920
cguggaauccauugaucug

SEQ ID NO: 522758 - RNA, 19 nt, Artificial Sequence
  Description of Artificial Sequence: Synthetic oligonucleotide
  Antisense strand to SEQ ID NO: 522757
cagaucaauggauuccacg

SEQ ID NO: 522759 - RNA, 19 nt, Artificial Sequence
  Description of Artificial Sequence: Synthetic oligonucleotide
  Sense strand starting at position 3280 of SEQ ID NO: 317920
guggaauccauugaucugu

SEQ ID NO: 522760 - RNA, 19 nt, Artificial Sequence
  Description of Artificial Sequence: Synthetic oligonucleotide
  Antisense strand to SEQ ID NO: 522759
acagaucaauggauuccac

SEQ ID NO: 522761 - RNA, 19 nt, Artificial Sequence
  Description of Artificial Sequence: Synthetic oligonucleotide
  Sense strand starting at position 3285 of SEQ ID NO: 317920
auccauugaucuguacauu

SEQ ID NO: 522762 - RNA, 19 nt, Artificial Sequence
  Description of Artificial Sequence: Synthetic oligonucleotide
  Antisense strand to SEQ ID NO: 522761
aauguacagaucaauggau

SEQ ID NO: 522763 - RNA, 19 nt, Artificial Sequence
  Description of Artificial Sequence: Synthetic oligonucleotide
  Sense strand starting at position 3286 of SEQ ID NO: 317920
uccauugaucuguacauuc

SEQ ID NO: 522764 - RNA, 19 nt, Artificial Sequence
  Description of Artificial Sequence: Synthetic oligonucleotide
  Antisense strand to SEQ ID NO: 522763
gaauguacagaucaaugga

SEQ ID NO: 522765 - RNA, 19 nt, Artificial Sequence
  Description of Artificial Sequence: Synthetic oligonucleotide
  Sense strand starting at position 3349 of SEQ ID NO: 317920
ggaguuauauucccagagc

SEQ ID NO: 522766 - RNA, 19 nt, Artificial Sequence
  Description of Artificial Sequence: Synthetic oligonucleotide
  Antisense strand to SEQ ID NO: 522765
gcucugggaauauaacucc

SEQ ID NO: 522767 - RNA, 19 nt, Artificial Sequence
  Description of Artificial Sequence: Synthetic oligonucleotide
  Sense strand starting at position 3352 of SEQ ID NO: 317920
guuauauucccagagccca

SEQ ID NO: 522768 - RNA, 19 nt, Artificial Sequence
  Description of Artificial Sequence: Synthetic oligonucleotide
  Antisense strand to SEQ ID NO: 522767
ugggcucugggaauauaac

SEQ ID NO: 522769 - RNA, 19 nt, Artificial Sequence
  Description of Artificial Sequence: Synthetic oligonucleotide
  Sense strand starting at position 3481 of SEQ ID NO: 317920
ugauaucugccacagcgaa

SEQ ID NO: 522770 - RNA, 19 nt, Artificial Sequence
  Description of Artificial Sequence: Synthetic oligonucleotide
  Antisense strand to SEQ ID NO: 522769
uucgcuguggcagauauca

SEQ ID NO: 522771 - RNA, 19 nt, Artificial Sequence
  Description of Artificial Sequence: Synthetic oligonucleotide
  Sense strand starting at position 3496 of SEQ ID NO: 317920
cgaagaagccuucgcuaag

SEQ ID NO: 522772 - RNA, 19 nt, Artificial Sequence
  Description of Artificial Sequence: Synthetic oligonucleotide
  Antisense strand to SEQ ID NO: 522771
cuuagcgaaggcuucuucg

SEQ ID NO: 522773 - RNA, 19 nt, Artificial Sequence
  Description of Artificial Sequence: Synthetic oligonucleotide
  Sense strand starting at position 3497 of SEQ ID NO: 317920
gaagaagccuucgcuaagu

SEQ ID NO: 522774 - RNA, 19 nt, Artificial Sequence
  Description of Artificial Sequence: Synthetic oligonucleotide
  Antisense strand to SEQ ID NO: 522773
acuuagcgaaggcuucuuc

SEQ ID NO: 522775 - RNA, 19 nt, Artificial Sequence
  Description of Artificial Sequence: Synthetic oligonucleotide
  Sense strand starting at position 3657 of SEQ ID NO: 317920
auaacugcuguugggaauu

SEQ ID NO: 522776 - RNA, 19 nt, Artificial Sequence
  Description of Artificial Sequence: Synthetic oligonucleotide
  Antisense strand to SEQ ID NO: 522775
aauucccaacagcaguuau

SEQ ID NO: 522777 - RNA, 19 nt, Artificial Sequence
  Description of Artificial Sequence: Synthetic oligonucleotide
  Sense strand starting at position 3710 of SEQ ID NO: 317920
acgcacaguuccuuaagua

SEQ ID NO: 522778 - RNA, 19 nt, Artificial Sequence
  Description of Artificial Sequence: Synthetic oligonucleotide
  Antisense strand to SEQ ID NO: 522777
uacuuaaggaacugugcgu

SEQ ID NO: 522779 - RNA, 19 nt, Artificial Sequence
  Description of Artificial Sequence: Synthetic oligonucleotide
  Sense strand starting at position 3711 of SEQ ID NO: 317920
cgcacaguuccuuaaguaa

SEQ ID NO: 522780 - RNA, 19 nt, Artificial Sequence
  Description of Artificial Sequence: Synthetic oligonucleotide
  Antisense strand to SEQ ID NO: 522779
uuacuuaaggaacugugcg

SEQ ID NO: 522781 - RNA, 19 nt, Artificial Sequence
  Description of Artificial Sequence: Synthetic oligonucleotide
  Sense strand starting at position 3753 of SEQ ID NO: 317920
uugaauggucucuaguaac

SEQ ID NO: 522782 - RNA, 19 nt, Artificial Sequence
  Description of Artificial Sequence: Synthetic oligonucleotide
  Antisense strand to SEQ ID NO: 522781
guuacuagagaccauucaa

SEQ ID NO: 522783 - RNA, 19 nt, Artificial Sequence
  Description of Artificial Sequence: Synthetic oligonucleotide
  Sense strand starting at position 3957 of SEQ ID NO: 317920
ggcaguagcggagaaguuu

SEQ ID NO: 522784 - RNA, 19 nt, Artificial Sequence
  Description of Artificial Sequence: Synthetic oligonucleotide
  Antisense strand to SEQ ID NO: 522783
aaacuucuccgcuacugcc

SEQ ID NO: 522785 - RNA, 19 nt, Artificial Sequence
  Description of Artificial Sequence: Synthetic oligonucleotide
  Sense strand starting at position 28 of SEQ ID NO: 317921
cuuguuaaccaguaaagca

SEQ ID NO: 522786 - RNA, 19 nt, Artificial Sequence
  Description of Artificial Sequence: Synthetic oligonucleotide
  Antisense strand to SEQ ID NO: 522785
ugcuuuacugguuaacaag

SEQ ID NO: 522787 - RNA, 19 nt, Artificial Sequence
  Description of Artificial Sequence: Synthetic oligonucleotide
  Sense strand starting at position 38 of SEQ ID NO: 317921
aguaaagcauucuuagaaa

SEQ ID NO: 522788 - RNA, 19 nt, Artificial Sequence
  Description of Artificial Sequence: Synthetic oligonucleotide
  Antisense strand to SEQ ID NO: 522787
uuucuaagaaugcuuuacu

SEQ ID NO: 522789 - RNA, 19 nt, Artificial Sequence
  Description of Artificial Sequence: Synthetic oligonucleotide
  Sense strand starting at position 223 of SEQ ID NO: 317921
auauguacugcacauauca

SEQ ID NO: 522790 - RNA, 19 nt, Artificial Sequence
  Description of Artificial Sequence: Synthetic oligonucleotide
  Antisense strand to SEQ ID NO: 522789
ugauaugugcaguacauau

SEQ ID NO: 522791 - RNA, 19 nt, Artificial Sequence
  Description of Artificial Sequence: Synthetic oligonucleotide
  Sense strand starting at position 524 of SEQ ID NO: 317921
uugguuuacugugucauuu

SEQ ID NO: 522792 - RNA, 19 nt, Artificial Sequence
  Description of Artificial Sequence: Synthetic oligonucleotide
  Antisense strand to SEQ ID NO: 522791
aaaugacacaguaaaccaa

SEQ ID NO: 522793 - RNA, 19 nt, Artificial Sequence
  Description of Artificial Sequence: Synthetic oligonucleotide
  Sense strand starting at position 700 of SEQ ID NO: 317921
ccauauacccauggcugaa

SEQ ID NO: 522794 - RNA, 19 nt, Artificial Sequence
  Description of Artificial Sequence: Synthetic oligonucleotide
  Antisense strand to SEQ ID NO: 522793
uucagccauggguauaugg

SEQ ID NO: 522795 - RNA, 19 nt, Artificial Sequence
  Description of Artificial Sequence: Synthetic oligonucleotide
  Sense strand starting at position 772 of SEQ ID NO: 317921
ccuagagaguuaccaguuu

SEQ ID NO: 522796 - RNA, 19 nt, Artificial Sequence
  Description of Artificial Sequence: Synthetic oligonucleotide
  Antisense strand to SEQ ID NO: 522795
aaacugguaacucucuagg

SEQ ID NO: 522797 - RNA, 19 nt, Artificial Sequence
  Description of Artificial Sequence: Synthetic oligonucleotide
  Sense strand starting at position 791 of SEQ ID NO: 317921
ccacuuucuuuggcaagaa

SEQ ID NO: 522798 - RNA, 19 nt, Artificial Sequence
  Description of Artificial Sequence: Synthetic oligonucleotide
  Antisense strand to SEQ ID NO: 522797
uucuugccaaagaaagugg

SEQ ID NO: 522799 - RNA, 19 nt, Artificial Sequence
  Description of Artificial Sequence: Synthetic oligonucleotide
  Sense strand starting at position 960 of SEQ ID NO: 317921
gggcacaauuaugcucaua

SEQ ID NO: 522800 - RNA, 19 nt, Artificial Sequence
  Description of Artificial Sequence: Synthetic oligonucleotide
  Antisense strand to SEQ ID NO: 522799
uaugagcauaauugugccc

SEQ ID NO: 522801 - RNA, 19 nt, Artificial Sequence
  Description of Artificial Sequence: Synthetic oligonucleotide
  Sense strand starting at position 971 of SEQ ID NO: 317921
ugcucauaugagcaggaau

SEQ ID NO: 522802 - RNA, 19 nt, Artificial Sequence
  Description of Artificial Sequence: Synthetic oligonucleotide
  Antisense strand to SEQ ID NO: 522801
auuccugcucauaugagca

SEQ ID NO: 522803 - RNA, 19 nt, Artificial Sequence
  Description of Artificial Sequence: Synthetic oligonucleotide
  Sense strand starting at position 973 of SEQ ID NO: 317921
cucauaugagcaggaauua

SEQ ID NO: 522804 - RNA, 19 nt, Artificial Sequence
  Description of Artificial Sequence: Synthetic oligonucleotide
  Antisense strand to SEQ ID NO: 522803
uaauuccugcucauaugag

SEQ ID NO: 522805 - RNA, 19 nt, Artificial Sequence
  Description of Artificial Sequence: Synthetic oligonucleotide
  Sense strand starting at position 984 of SEQ ID NO: 317921
aggaauuaauugucugcuu

SEQ ID NO: 522806 - RNA, 19 nt, Artificial Sequence
  Description of Artificial Sequence: Synthetic oligonucleotide
  Antisense strand to SEQ ID NO: 522805
aagcagacaauuaauuccu

SEQ ID NO: 522807 - RNA, 19 nt, Artificial Sequence
  Description of Artificial Sequence: Synthetic oligonucleotide
  Sense strand starting at position 1149 of SEQ ID NO: 317921
aaugguauauugguccaau

SEQ ID NO: 522808 - RNA, 19 nt, Artificial Sequence
  Description of Artificial Sequence: Synthetic oligonucleotide
  Antisense strand to SEQ ID NO: 522807
auuggaccaauauaccauu

SEQ ID NO: 522809 - RNA, 19 nt, Artificial Sequence
  Description of Artificial Sequence: Synthetic oligonucleotide
  Sense strand starting at position 1150 of SEQ ID NO: 317921
augguauauugguccaaug

SEQ ID NO: 522810 - RNA, 19 nt, Artificial Sequence
  Description of Artificial Sequence: Synthetic oligonucleotide
  Antisense strand to SEQ ID NO: 522809
cauuggaccaauauaccau

SEQ ID NO: 522811 - RNA, 19 nt, Artificial Sequence
  Description of Artificial Sequence: Synthetic oligonucleotide
  Sense strand starting at position 1152 of SEQ ID NO: 317921
gguauauugguccaauguu

SEQ ID NO: 522812 - RNA, 19 nt, Artificial Sequence
  Description of Artificial Sequence: Synthetic oligonucleotide
  Antisense strand to SEQ ID NO: 522811
aacauuggaccaauauacc

SEQ ID NO: 522813 - RNA, 19 nt, Artificial Sequence
  Description of Artificial Sequence: Synthetic oligonucleotide
  Sense strand starting at position 1166 of SEQ ID NO: 317921
auguuuaaacuguggaaau

SEQ ID NO: 522814 - RNA, 19 nt, Artificial Sequence
  Description of Artificial Sequence: Synthetic oligonucleotide
  Antisense strand to SEQ ID NO: 522813
auuuccacaguuuaaacau

SEQ ID NO: 522815 - RNA, 19 nt, Artificial Sequence
  Description of Artificial Sequence: Synthetic oligonucleotide
  Sense strand starting at position 1298 of SEQ ID NO: 317921
acauuaugugcugggaaac

SEQ ID NO: 522816 - RNA, 19 nt, Artificial Sequence
  Description of Artificial Sequence: Synthetic oligonucleotide
  Antisense strand to SEQ ID NO: 522815
guuucccagcacauaaugu

SEQ ID NO: 522817 - RNA, 19 nt, Artificial Sequence
  Description of Artificial Sequence: Synthetic oligonucleotide
  Sense strand starting at position 1299 of SEQ ID NO: 317921
cauuaugugcugggaaaca

SEQ ID NO: 522818 - RNA, 19 nt, Artificial Sequence
  Description of Artificial Sequence: Synthetic oligonucleotide
  Antisense strand to SEQ ID NO: 522817
uguuucccagcacauaaug

SEQ ID NO: 522819 - RNA, 19 nt, Artificial Sequence
  Description of Artificial Sequence: Synthetic oligonucleotide
  Sense strand starting at position 1398 of SEQ ID NO: 317921
uuauuugccucucuugagu

SEQ ID NO: 522820 - RNA, 19 nt, Artificial Sequence
  Description of Artificial Sequence: Synthetic oligonucleotide
  Antisense strand to SEQ ID NO: 522819
acucaagagaggcaaauaa

SEQ ID NO: 522821 - RNA, 19 nt, Artificial Sequence
  Description of Artificial Sequence: Synthetic oligonucleotide
  Sense strand starting at position 1436 of SEQ ID NO: 317921
uuauguuuccuggaauuaa

SEQ ID NO: 522822 - RNA, 19 nt, Artificial Sequence
  Description of Artificial Sequence: Synthetic oligonucleotide
  Antisense strand to SEQ ID NO: 522821
uuaauuccaggaaacauaa

SEQ ID NO: 522823 - RNA, 19 nt, Artificial Sequence
  Description of Artificial Sequence: Synthetic oligonucleotide
  Sense strand starting at position 1519 of SEQ ID NO: 317921
aaagauaacuagccaguga

SEQ ID NO: 522824 - RNA, 19 nt, Artificial Sequence
  Description of Artificial Sequence: Synthetic oligonucleotide
  Antisense strand to SEQ ID NO: 522823
ucacuggcuaguuaucuuu

SEQ ID NO: 522825 - RNA, 19 nt, Artificial Sequence
  Description of Artificial Sequence: Synthetic oligonucleotide
  Sense strand starting at position 1523 of SEQ ID NO: 317921
auaacuagccagugaaaca

SEQ ID NO: 522826 - RNA, 19 nt, Artificial Sequence
  Description of Artificial Sequence: Synthetic oligonucleotide
  Antisense strand to SEQ ID NO: 522825
uguuucacuggcuaguuau

SEQ ID NO: 522827 - RNA, 19 nt, Artificial Sequence
  Description of Artificial Sequence: Synthetic oligonucleotide
  Sense strand starting at position 1548 of SEQ ID NO: 317921
agaauaaguacguacguau

SEQ ID NO: 522828 - RNA, 19 nt, Artificial Sequence
  Description of Artificial Sequence: Synthetic oligonucleotide
  Antisense strand to SEQ ID NO: 522827
auacguacguacuuauucu

SEQ ID NO: 522829 - RNA, 19 nt, Artificial Sequence
  Description of Artificial Sequence: Synthetic oligonucleotide
  Sense strand starting at position 1609 of SEQ ID NO: 317921
aggcauuucugcccuuuaa

SEQ ID NO: 522830 - RNA, 19 nt, Artificial Sequence
  Description of Artificial Sequence: Synthetic oligonucleotide
  Antisense strand to SEQ ID NO: 522829
uuaaagggcagaaaugccu

SEQ ID NO: 522831 - RNA, 19 nt, Artificial Sequence
  Description of Artificial Sequence: Synthetic oligonucleotide
  Sense strand starting at position 1669 of SEQ ID NO: 317921
ggcuaauguggccaaacaa

SEQ ID NO: 522832 - RNA, 19 nt, Artificial Sequence
  Description of Artificial Sequence: Synthetic oligonucleotide
  Antisense strand to SEQ ID NO: 522831
uuguuuggccacauuagcc

SEQ ID NO: 522833 - RNA, 19 nt, Artificial Sequence
  Description of Artificial Sequence: Synthetic oligonucleotide
  Sense strand starting at position 1785 of SEQ ID NO: 317921
gaaaguugguguuuacaaa

SEQ ID NO: 522834 - RNA, 19 nt, Artificial Sequence
  Description of Artificial Sequence: Synthetic oligonucleotide
  Antisense strand to SEQ ID NO: 522833
uuuguaaacaccaacuuuc

SEQ ID NO: 522835 - RNA, 19 nt, Artificial Sequence
  Description of Artificial Sequence: Synthetic oligonucleotide
  Sense strand starting at position 1949 of SEQ ID NO: 317921
ucuccaguccugugagaag

SEQ ID NO: 522836 - RNA, 19 nt, Artificial Sequence
  Description of Artificial Sequence: Synthetic oligonucleotide
  Antisense strand to SEQ ID NO: 522835
cuucucacaggacuggaga

SEQ ID NO: 522837 - RNA, 19 nt, Artificial Sequence
  Description of Artificial Sequence: Synthetic oligonucleotide
  Sense strand starting at position 2289 of SEQ ID NO: 317921
gagggauauugcuuugcaa

SEQ ID NO: 522838 - RNA, 19 nt, Artificial Sequence
  Description of Artificial Sequence: Synthetic oligonucleotide
  Antisense strand to SEQ ID NO: 522837
uugcaaagcaauaucccuc

SEQ ID NO: 522839 - RNA, 19 nt, Artificial Sequence
  Description of Artificial Sequence: Synthetic oligonucleotide
  Sense strand starting at position 2291 of SEQ ID NO: 317921
gggauauugcuuugcaaga

SEQ ID NO: 522840 - RNA, 19 nt, Artificial Sequence
  Description of Artificial Sequence: Synthetic oligonucleotide
  Antisense strand to SEQ ID NO: 522839
ucuugcaaagcaauauccc

SEQ ID NO: 522841 - RNA, 19 nt, Artificial Sequence
  Description of Artificial Sequence: Synthetic oligonucleotide
  Sense strand starting at position 2292 of SEQ ID NO: 317921
ggauauugcuuugcaagaa

SEQ ID NO: 522842 - RNA, 19 nt, Artificial Sequence
  Description of Artificial Sequence: Synthetic oligonucleotide
  Antisense strand to SEQ ID NO: 522841
uucuugcaaagcaauaucc

SEQ ID NO: 522843 - RNA, 19 nt, Artificial Sequence
  Description of Artificial Sequence: Synthetic oligonucleotide
  Sense strand starting at position 2446 of SEQ ID NO: 317921
gaaggauugugggucugga

SEQ ID NO: 522844 - RNA, 19 nt, Artificial Sequence
  Description of Artificial Sequence: Synthetic oligonucleotide
  Antisense strand to SEQ ID NO: 522843
uccagacccacaauccuuc

SEQ ID NO: 522845 - RNA, 19 nt, Artificial Sequence
  Description of Artificial Sequence: Synthetic oligonucleotide
  Sense strand starting at position 2477 of SEQ ID NO: 317921
uuggcuugucacugaagag

SEQ ID NO: 522846 - RNA, 19 nt, Artificial Sequence
  Description of Artificial Sequence: Synthetic oligonucleotide
  Antisense strand to SEQ ID NO: 522845
cucuucagugacaagccaa

SEQ ID NO: 522847 - RNA, 19 nt, Artificial Sequence
  Description of Artificial Sequence: Synthetic oligonucleotide
  Sense strand starting at position 2478 of SEQ ID NO: 317921
uggcuugucacugaagaga

SEQ ID NO: 522848 - RNA, 19 nt, Artificial Sequence
  Description of Artificial Sequence: Synthetic oligonucleotide
  Antisense strand to SEQ ID NO: 522847
ucucuucagugacaagcca

SEQ ID NO: 522849 - RNA, 19 nt, Artificial Sequence
  Description of Artificial Sequence: Synthetic oligonucleotide
  Sense strand starting at position 2601 of SEQ ID NO: 317921
uccugaaagcuuuggacaa

SEQ ID NO: 522850 - RNA, 19 nt, Artificial Sequence
  Description of Artificial Sequence: Synthetic oligonucleotide
  Antisense strand to SEQ ID NO: 522849
uuguccaaagcuuucagga

SEQ ID NO: 522851 - RNA, 19 nt, Artificial Sequence
  Description of Artificial Sequence: Synthetic oligonucleotide
  Sense strand starting at position 2652 of SEQ ID NO: 317921
gaauguuagggauggcaga

SEQ ID NO: 522852 - RNA, 19 nt, Artificial Sequence
  Description of Artificial Sequence: Synthetic oligonucleotide
  Antisense strand to SEQ ID NO: 522851
ucugccaucccuaacauuc

SEQ ID NO: 522853 - RNA, 19 nt, Artificial Sequence
  Description of Artificial Sequence: Synthetic oligonucleotide
  Sense strand starting at position 2653 of SEQ ID NO: 317921
aauguuagggauggcagaa

SEQ ID NO: 522854 - RNA, 19 nt, Artificial Sequence
  Description of Artificial Sequence: Synthetic oligonucleotide
  Antisense strand to SEQ ID NO: 522853
uucugccaucccuaacauu

SEQ ID NO: 522855 - RNA, 19 nt, Artificial Sequence
  Description of Artificial Sequence: Synthetic oligonucleotide
  Sense strand starting at position 2673 of SEQ ID NO: 317921
guaagaucugcuuauuaag

SEQ ID NO: 522856 - RNA, 19 nt, Artificial Sequence
  Description of Artificial Sequence: Synthetic oligonucleotide
  Antisense strand to SEQ ID NO: 522855
cuuaauaagcagaucuuac

SEQ ID NO: 522857 - RNA, 19 nt, Artificial Sequence
  Description of Artificial Sequence: Synthetic oligonucleotide
  Sense strand starting at position 3047 of SEQ ID NO: 317921
guguauucuguuguuaugu

SEQ ID NO: 522858 - RNA, 19 nt, Artificial Sequence
  Description of Artificial Sequence: Synthetic oligonucleotide
  Antisense strand to SEQ ID NO: 522857
acauaacaacagaauacac

SEQ ID NO: 522859 - RNA, 19 nt, Artificial Sequence
  Description of Artificial Sequence: Synthetic oligonucleotide
  Sense strand starting at position 3107 of SEQ ID NO: 317921
uuaccauuuguauguguga

SEQ ID NO: 522860 - RNA, 19 nt, Artificial Sequence
  Description of Artificial Sequence: Synthetic oligonucleotide
  Antisense strand to SEQ ID NO: 522859
ucacacauacaaaugguaa

SEQ ID NO: 522861 - RNA, 19 nt, Artificial Sequence
  Description of Artificial Sequence: Synthetic oligonucleotide
  Sense strand starting at position 3297 of SEQ ID NO: 317921
gggugugguuacucagaca

SEQ ID NO: 522862 - RNA, 19 nt, Artificial Sequence
  Description of Artificial Sequence: Synthetic oligonucleotide
  Antisense strand to SEQ ID NO: 522861
ugucugaguaaccacaccc

SEQ ID NO: 522863 - RNA, 19 nt, Artificial Sequence
  Description of Artificial Sequence: Synthetic oligonucleotide
  Sense strand starting at position 3965 of SEQ ID NO: 317921
auaacuguuguugaucuua

SEQ ID NO: 522864 - RNA, 19 nt, Artificial Sequence
  Description of Artificial Sequence: Synthetic oligonucleotide
  Antisense strand to SEQ ID NO: 522863
uaagaucaacaacaguuau

SEQ ID NO: 522865 - RNA, 19 nt, Artificial Sequence
  Description of Artificial Sequence: Synthetic oligonucleotide
  Sense strand starting at position 660 of SEQ ID NO: 317922
augcacaguaccugugaga

SEQ ID NO: 522866 - RNA, 19 nt, Artificial Sequence
  Description of Artificial Sequence: Synthetic oligonucleotide
  Antisense strand to SEQ ID NO: 522865
ucucacagguacugugcau

SEQ ID NO: 522867 - RNA, 19 nt, Artificial Sequence
  Description of Artificial Sequence: Synthetic oligonucleotide
  Sense strand starting at position 783 of SEQ ID NO: 317922
augucugucucucuaaaca

SEQ ID NO: 522868 - RNA, 19 nt, Artificial Sequence
  Description of Artificial Sequence: Synthetic oligonucleotide
  Antisense strand to SEQ ID NO: 522867
uguuuagagagacagacau

SEQ ID NO: 522869 - RNA, 19 nt, Artificial Sequence
  Description of Artificial Sequence: Synthetic oligonucleotide
  Sense strand starting at position 819 of SEQ ID NO: 317922
guuaauagucugcauuacu

SEQ ID NO: 522870 - RNA, 19 nt, Artificial Sequence
  Description of Artificial Sequence: Synthetic oligonucleotide
  Antisense strand to SEQ ID NO: 522869
aguaaugcagacuauuaac

SEQ ID NO: 522871 - RNA, 19 nt, Artificial Sequence
  Description of Artificial Sequence: Synthetic oligonucleotide
  Sense strand starting at position 904 of SEQ ID NO: 317922
cacugauuagaaggcgaaa

SEQ ID NO: 522872 - RNA, 19 nt, Artificial Sequence
  Description of Artificial Sequence: Synthetic oligonucleotide
  Antisense strand to SEQ ID NO: 522871
uuucgccuucuaaucagug

SEQ ID NO: 522873 - RNA, 19 nt, Artificial Sequence
  Description of Artificial Sequence: Synthetic oligonucleotide
  Sense strand starting at position 1166 of SEQ ID NO: 317922
uauauucucugagcgauuu

SEQ ID NO: 522874 - RNA, 19 nt, Artificial Sequence
  Description of Artificial Sequence: Synthetic oligonucleotide
  Antisense strand to SEQ ID NO: 522873
aaaucgcucagagaauaua

SEQ ID NO: 522875 - RNA, 19 nt, Artificial Sequence
  Description of Artificial Sequence: Synthetic oligonucleotide
  Sense strand starting at position 1229 of SEQ ID NO: 317922
cgcaguugagcccagaaua

SEQ ID NO: 522876 - RNA, 19 nt, Artificial Sequence
  Description of Artificial Sequence: Synthetic oligonucleotide
  Antisense strand to SEQ ID NO: 522875
uauucugggcucaacugcg

SEQ ID NO: 522877 - RNA, 19 nt, Artificial Sequence
  Description of Artificial Sequence: Synthetic oligonucleotide
  Sense strand starting at position 2369 of SEQ ID NO: 317922
uucccauucccagagaugu

SEQ ID NO: 522878 - RNA, 19 nt, Artificial Sequence
  Description of Artificial Sequence: Synthetic oligonucleotide
  Antisense strand to SEQ ID NO: 522877
acaucucugggaaugggaa

SEQ ID NO: 522879 - RNA, 19 nt, Artificial Sequence
  Description of Artificial Sequence: Synthetic oligonucleotide
  Sense strand starting at position 2375 of SEQ ID NO: 317922
uucccagagaugugaguua

SEQ ID NO: 522880 - RNA, 19 nt, Artificial Sequence
  Description of Artificial Sequence: Synthetic oligonucleotide
  Antisense strand to SEQ ID NO: 522879
uaacucacaucucugggaa

SEQ ID NO: 522881 - RNA, 19 nt, Artificial Sequence
  Description of Artificial Sequence: Synthetic oligonucleotide
  Sense strand starting at position 2540 of SEQ ID NO: 317922
gggagcuucguauacuaaa

SEQ ID NO: 522882 - RNA, 19 nt, Artificial Sequence
  Description of Artificial Sequence: Synthetic oligonucleotide
  Antisense strand to SEQ ID NO: 522881
uuuaguauacgaagcuccc

SEQ ID NO: 522883 - RNA, 19 nt, Artificial Sequence
  Description of Artificial Sequence: Synthetic oligonucleotide
  Sense strand starting at position 2655 of SEQ ID NO: 317922
cucacaaggguaugaauau

SEQ ID NO: 522884 - RNA, 19 nt, Artificial Sequence
  Description of Artificial Sequence: Synthetic oligonucleotide
  Antisense strand to SEQ ID NO: 522883
auauucauacccuugugag

SEQ ID NO: 522885 - RNA, 19 nt, Artificial Sequence
  Description of Artificial Sequence: Synthetic oligonucleotide
  Sense strand starting at position 2701 of SEQ ID NO: 317922
uguuaagggcuuugagauc

SEQ ID NO: 522886 - RNA, 19 nt, Artificial Sequence
  Description of Artificial Sequence: Synthetic oligonucleotide
  Antisense strand to SEQ ID NO: 522885
gaucucaaagcccuuaaca

SEQ ID NO: 522887 - RNA, 19 nt, Artificial Sequence
  Description of Artificial Sequence: Synthetic oligonucleotide
  Sense strand starting at position 2800 of SEQ ID NO: 317922
cuaccugagcuggaaguua

SEQ ID NO: 522888 - RNA, 19 nt, Artificial Sequence
  Description of Artificial Sequence: Synthetic oligonucleotide
  Antisense strand to SEQ ID NO: 522887
uaacuuccagcucagguag

SEQ ID NO: 522889 - RNA, 19 nt, Artificial Sequence
  Description of Artificial Sequence: Synthetic oligonucleotide
  Sense strand starting at position 2811 of SEQ ID NO: 317922
ggaaguuaguaacuuggaa

SEQ ID NO: 522890 - RNA, 19 nt, Artificial Sequence
  Description of Artificial Sequence: Synthetic oligonucleotide
  Antisense strand to SEQ ID NO: 522889
uuccaaguuacuaacuucc

SEQ ID NO: 522891 - RNA, 19 nt, Artificial Sequence
  Description of Artificial Sequence: Synthetic oligonucleotide
  Sense strand starting at position 2849 of SEQ ID NO: 317922
cauagaacuugggacaaga

SEQ ID NO: 522892 - RNA, 19 nt, Artificial Sequence
  Description of Artificial Sequence: Synthetic oligonucleotide
  Antisense strand to SEQ ID NO: 522891
ucuugucccaaguucuaug

SEQ ID NO: 522893 - RNA, 19 nt, Artificial Sequence
  Description of Artificial Sequence: Synthetic oligonucleotide
  Sense strand starting at position 2948 of SEQ ID NO: 317922
gagaguaaaccauguguaa

SEQ ID NO: 522894 - RNA, 19 nt, Artificial Sequence
  Description of Artificial Sequence: Synthetic oligonucleotide
  Antisense strand to SEQ ID NO: 522893
uuacacaugguuuacucuc

SEQ ID NO: 522895 - RNA, 19 nt, Artificial Sequence
  Description of Artificial Sequence: Synthetic oligonucleotide
  Sense strand starting at position 2952 of SEQ ID NO: 317922
guaaaccauguguaaccua

SEQ ID NO: 522896 - RNA, 19 nt, Artificial Sequence
  Description of Artificial Sequence: Synthetic oligonucleotide
  Antisense strand to SEQ ID NO: 522895
uagguuacacaugguuuac

SEQ ID NO: 522897 - RNA, 19 nt, Artificial Sequence
  Description of Artificial Sequence: Synthetic oligonucleotide
  Sense strand starting at position 2957 of SEQ ID NO: 317922
ccauguguaaccuaagugu

SEQ ID NO: 522898 - RNA, 19 nt, Artificial Sequence
  Description of Artificial Sequence: Synthetic oligonucleotide
  Antisense strand to SEQ ID NO: 522897
acacuuagguuacacaugg

SEQ ID NO: 522899 - RNA, 19 nt, Artificial Sequence
  Description of Artificial Sequence: Synthetic oligonucleotide
  Sense strand starting at position 3033 of SEQ ID NO: 317922
ccagaagaaucugaauaag

SEQ ID NO: 522900 - RNA, 19 nt, Artificial Sequence
  Description of Artificial Sequence: Synthetic oligonucleotide
  Antisense strand to SEQ ID NO: 522899
cuuauucagauucuucugg

SEQ ID NO: 522901 - RNA, 19 nt, Artificial Sequence
  Description of Artificial Sequence: Synthetic oligonucleotide
  Sense strand starting at position 3042 of SEQ ID NO: 317922
ucugaauaagaauguucua

SEQ ID NO: 522902 - RNA, 19 nt, Artificial Sequence
  Description of Artificial Sequence: Synthetic oligonucleotide
  Antisense strand to SEQ ID NO: 522901
uagaacauucuuauucaga

SEQ ID NO: 522903 - RNA, 19 nt, Artificial Sequence
  Description of Artificial Sequence: Synthetic oligonucleotide
  Sense strand starting at position 3049 of SEQ ID NO: 317922
aagaauguucuaugaggcu

SEQ ID NO: 522904 - RNA, 19 nt, Artificial Sequence
  Description of Artificial Sequence: Synthetic oligonucleotide
  Antisense strand to SEQ ID NO: 522903
agccucauagaacauucuu

SEQ ID NO: 522905 - RNA, 19 nt, Artificial Sequence
  Description of Artificial Sequence: Synthetic oligonucleotide
  Sense strand starting at position 3073 of SEQ ID NO: 317922
gaacucuguccaggaacga
